United States Patent Application Publication US 2015/0052636 A1 - sequence listing, part 5

SEQ ID NO: 14143 - DNA, 894 bp, Brachypodium distachyon
  Intron number 4 from transcript Bradi2g25570.1 (locus Brad i2g25570) derived from phytozome v7.0 (chr-ID Bd2; pos 236 62948 to 23663841)
cttgccgacaaggtataacaagagatttcggattttactcggatacgatagctttttgttgttggtagtagaatgctcatgcttatcatgtgctttctgaggggtgtttcttgtgattaggagtacaggttcaaaacaacccaaattagcatcagtgcaattgcatgaagttagagttaacctggccttctgttaaagcgcttttctaggaatggtccaaataatttgtttttagtgtgggcaacatccgtaatccttgtatttttgctgtacgcttttgcaactaaattgagtctctatttgatcgcatgcccttctcttggctttaatcgatctccttctctcacttcttctgagctgaattggcttcttatttctaatggaatgaaataaatattcatgctttctgacacaggatcccctaggagggttaggtacataagatatgggtagcttctcaatgcaataaaataaagcaacgtcgtgtctatttttctctcatgtgcatgctgatcattcttgtgtatgtctatgccagcagcttgctggtgtgctgttttattatggaacagtggccaatttgccatgacctatgagaaattcatgctaccaaaagaatacaaactttacaggatttttttttactcaataatcagtaatacaacatatttattgttgaacacttgaatggagttaaggctatgcaggaggaagtaacattgtgagttgactaaataatgtaattaaatacctcatgatttctgatttgaggtcaaaggggccaacacctaaattttggccatctgatagaaagatgtcattcagtatcatataaataaatatagatgatatataattctaacacatagtttcattatcaggctttccctgggc

SEQ ID NO: 14144 - DNA, 480 bp, Brachypodium distachyon
  Intron number 3 from transcript Bradi2g34020.1 (locus Brad i2g34020) derived from phytozome v7.0 (chr-ID Bd2; pos 341 13356 to 34113835 reverse strand)
aggtatcactatttttgattagttgtttatttatttcacattcttttgtgcctttgccgtttatatgtgtactttcataactggaatatctgtttagtttcctaattttatgatttatggacttcttctaagagaagaaaagctattagagcatgtaacatgacctgcaagtagcttgatcaagaaaggtatgcaaaatggcagatcaggacattgtgatatacaaaccacagaatactactccctccgtcccatactaagtgactttctattacatgtatctagacactttctaggcatagatacatggcaaatttgagtcacttaatatgggacggggggagtacaagttaatcattcagaagaaaatacattcagtccataaatttcatcaaattaatgagctcatcagcaaggataggaaccgattcagccatctaatttacttattttttatgcaggaattctctcctggatcta

SEQ ID NO: 14145 - DNA, 674 bp, Brachypodium distachyon
  Intron number 1 from transcript Bradi2g10380.1 (locus Brad i2g10380) derived from phytozome v7.0 (chr-ID Bd2; pos 863 4011 to 8634684 reverse strand)
tccttgctctgtcagaggctggaatcctctatcaggtaagctgcgtccccttagcctaactctaatatacagtagacctaacttattcagacttgtggttctgatcttctagatcatatcactactcttactgtctctcatacagatcactgatgtatttttttaatcttaaaccgtttgagctcttcaatagaacagtagtttgtactgtagtgtataccctttttcgaacatacagccggtattacttcctttttacttgtatggagtgactttcctacaaccatgtgttcacaacttataggagaagttgagacatatacataaaggaggaacaagagttgtatacacaatgttataaaaggaacaaaagaggaaggagataagaacctactgtaatatcatgcttattttagaaccactggttagactgtactggtttctttctatcttctaaaaaggtttcaggtcactctatttgcatctcctaattatctgaaacataagatgagatgctgtacaattcagcatgaaatcatctattctatccagttttatcaaagagtaaaatctataacctgaagtgaaatagacttcggaatgcatattagcttcttccgattatgctttcactctaataggtaatagctctacatcatttcagctacagctaa

SEQ ID NO: 14146 - DNA, 752 bp, Brachypodium distachyon
  Intron number 2 from transcript Bradi1g46530.3 (locus Brad i1g46530) derived from phytozome v7.0 (chr-ID Bd1; pos 450 63673 to 45064424)
gctgctgccctggcggtctcctctttcctctcacagtgagtcttctctttctccaggtctaagtctgcatcttcttcaattctcttccctctctgttcagatttcatgaccagcggcagtacccctaccccacatcgagcagagattcggttgggagctcaagcacgagtacagtggcagaaacttatttggttagccttatttgattcatgtggagagaagcacaacggcagcaaatatgactattatgatctctgaacctttggaccatggtgtcatgctatcatctaagtttgcttgagttaagtcacaatgcttgcttggtaggatgtgaaatctttatttgcttaaccttatttgattatgtggagagaacaacatcgataattatcctatgaaaatctttggtttctctttctttaaataactactatatatacaaacgtatccatgtttttgagaaattgccatgtgacagtatccccgtatcgcgtatccgtgattcctagatgataacaaagttcccaatgcagacacatcattccctgagcagtacaagataaagttcatggcaagaattatgggataaaagaaatatttgtgtgcatatttgaaatgaaatttttcgctgtttcgctttgatttcatcccagaatttagcagtgtgcactgtggataatgtttttgtataccagcgtaaatcctcaaatctcttgtaactctaatgcagttgatcggtccaaacaaagcag

SEQ ID NO: 14147 - DNA, 714 bp, Brachypodium distachyon
  Intron number 1 from transcript Bradi1g58330.1 (locus Brad i1g58330) derived from phytozome v7.0 (chr-ID Bd1; pos 571 49133 to 57149846 reverse strand)
atctacgggagaaagccctccttgagctctccaaggtgatccatgtgtgcttgcatttttctgattagcgcatctctcgaggaacaaattgaactttcctaaatcttcgtgtacccccccctccccccacccccacacgcacaccaaaaaaaatccccaattgctagtgtattgcacgaaaccaaagttctcaaactagatattatttatggaacaccttcaattgcttagtatagatttgatggttgtctctaatagttgttctcccatactttggcaagtgcaaaacttttaagttctcatcctatgactatttttattgaatcagttctatgacaaatgtctccattgctacatcatcaaataattttttgtttatttatgcactataataggcatgttcaatgcctaaattgcatactgttatactgaaatagtttttcagggataggaatccattccaaactgaatgaaatttcgcttgtcaagtggtgctgctttgatgatgagatgtgcttttttttatcttttaccaactgatttatcttcagttcttatgtggttgattaattcaggaatggttttgagctaaaacatgataagttgtatatgcactcattggcacgctacatcatcaagagaaaaatttaatgtataatgttgtttatggcaacttcagaagacagagacggttgaggatctggctctgctgtt

SEQ ID NO: 14148 - DNA, 613 bp, Brachypodium distachyon
  Intron number 1 from transcript Bradi1g64810.1 (locus Brad i1g64810) derived from phytozome v7.0 (chr-ID Bd1; pos 639 67878 to 63968490 reverse strand)
gtctgcagatctgatatcccaaggtatcgtctttgaacgtcatgacttgtaccctgcctgatattcttttttttacttgtgcaaaccatcatcttataaaggaaggaaaataggaaaaaaaaagatcaggagagggtaatagaaagaaaatccaaagcagaagttatatttcttcttcggataagagtttttctttgcttgccatcattattcattcatttcccattttgaaaatgatgatatttttctgtaaaaaaaaaggttctctgaatcttaggtttcgttctcctgcatgttgtgttcatttgaggaaacccacaatatgagagcatgaggctgctgcattacgttctgcaaatgtagttctacgagaacttgaggctaaacatccatttgttgcttcctgtttacgacttcctgcgttgtgtcatttagttaatcataataaactttatttctccagtgcaaggattttggaacttgatcaccattcatttattcatcttatattctttgagtggtgcactcctacttgtgttcctcattttctgtaattagacttttcatgtctggctatgcagatttggggagtttatccccattttactacaat

SEQ ID NO: 14149 - DNA, 813 bp, Brachypodium distachyon
  Intron number 2 from transcript Bradi1g54300.5 (locus Brad i1g54300) derived from phytozome v7.0 (chr-ID Bd1; pos 526 91510 to 52692322)
agtacgtatctccatgccaattgcgtgatccagaagtacagatttttgtttttaatatcccgcagggctcgatggtattaaggaataaataaggcggcaagggagttgacccgatgcaagtcatttttacaattccatgcattctttgtgttgttcaaatcgtatctgcagttgtgagcctaaattaaatagaaataaaagatttggctcgcttgttttcggatttccatgtcaataatgtcgttcagagccatagagctgtagctccaatgagttgatctgacagaacaaccgtattccatccttttcctttccggatgacgactgtcatcagtttgcctttgcaatctgcacccagaaaattcttggcatcccttctgataagaatactatccttttgagttaccagttctggacatgttcttgatgtgattgttagcttagatttcacaatcggtggtactattttggttgattaaacgtgcatatcgatttctgccccctttgtgtgctagtacaaggcatccaactggtcatttaagactgtacctaccactgtacctaggaaacgtgtcctgttaaaccggtcctttcgatatacacactattcagagggccatcaaaatattcagtttctccttagcactgacgcactgtagaatctgctgagtgtaatcttgttgattagcatcttcattcctgagagtgtttatgtatgcttattctcttgaataaaaatgtatctcctgccattattttccttgttttacaattaatttggacaaaattatgccacaaggtacgagaaatatc

SEQ ID NO: 14150 - DNA, 634 bp, Brachypodium distachyon
  Intron number 1 from transcript Bradi2g05520.1 (locus Brad i2g05520) derived from phytozome v7.0 (chr-ID Bd2; pos 399 0049 to 3990682 reverse strand)
cgcaggggaggcgtttgttgatatcgataagagaggtcagtttgattgaccgtgttaatttattaaaacccattgctcctgtttggctgtaaattgctccaggataggcagtgatcagcggatcaaccattacttgcaactgagctttgttgagttcagggccctgattgagtttattgctctgaatgctcgactgtgccttgatacgaaatgtactaaaggagggcatgctagttttcagctgcaatatcaaatccataccaattgatgcaacttgaaatatgtttgcttggtctttatttggtatcctagatgttgatatctttatcattcagggagtatgttgtaaacatgatatgcatcagattcctcatgaacggccctgttcgatttttttctcttctagatcctagtaatatggtaattatagtcctgctgaattgtcttattcttaagtgtggacaaacaaataagtatgtgataattattaatttaagattgctcagtaatatggccctgttttgagttgttcttgccttagttccaagtttgagaacattttttctctttttttttaataaatggttacactactcttgtttcttttaccatttccaggtctggagacaaccag

SEQ ID NO: 14151 - DNA, 412 bp, Brachypodium distachyon
  Intron number 1 from transcript Bradi1g78750.1 (locus Brad i1g78750) derived from phytozome v7.0 (chr-ID Bd1; pos 746 53153 to 74653564)
tatttcaggtgtcgagaagaaaagactaacaacaggtgaatttactatatatttgaaattttcaagatggatctatattatccaactataatattgcagagatacttttaatcaaataaacacaaactgtgcaattcattgactaaaattgctaactgcatattggaatggaaggcaaacatcttttcgtttccagtgctaattgattccgtcaatgttttctatactttgttagtatactacaacttcccatcgtgatgagaaagccacctgattgatgaatcaactaagcatgttttttaacaattttcttagaatataatatctaagatacaaaaaataattaattcgatgttgggcacttaatttcctttcttcttcacttgtaaaaattgttttataatcaggagag

SEQ ID NO: 14152 - DNA, 569 bp, Brachypodium distachyon
  Intron number 2 from transcript Bradi1g78750.1 (locus Brad i1g78750) derived from phytozome v7.0 (chr-ID Bd1; pos 746 53827 to 74654395)
ctgagagaaaaggggccgctgactttcttcaagaggtatcaacaaacaactaattactgatgtgcttacgtcaaaacaagcgccaatagcatctaggagttcatcatgtaaggcatgctgctgctagcctgccgtataataagccatggtacctaaatccaatacacataggtcctgcacttcacctaaacattgagacttggccgacaagaagctcaagtttgagcctctatagttcttgtgaaatctaatcatatcaggcagatcccaatctggtatgttgaattttctttgccatgtgcatatcatttggtgaatatataataactcaattaggcattttacgtttctagaacaatgcaaatagaaattctttcgtagagacatgttttgagtttcaacgtctgtgcataggagtttgttaatatgaagtatctgggtagtgggtatagtttgtcttgcagctctttcttattagtataactcttgcttaccatcagaaaggagttcactcttcaaaacttatgtgtacaggttttgtcaaaaaaagatcaacagcaatattggag

SEQ ID NO: 14153 - DNA, 804 bp, Brachypodium distachyon
  Intron number 3 from transcript Bradi1g75270.1 (locus Brad i1g75270) derived from phytozome v7.0 (chr-ID Bd1; pos 722 19297 to 72220100 reverse strand)
ctgacccgtcacatatagaatttgcccaccacaaggtaaatgctgcactgaggttgctccctataccgtactcatttgtttatattggctgctgatcatgcagtatggtcttcaatttgctctattgcattcgttgaattccttagcaatggcttctattgggcgaaagtgcatgcctgtatccgcctctaaattttttaattaacaccggttttgagttacttgttgcaccttgaactatgcatgttttactgtagaatagtttgttgtcttgacctgtacttgtttatgtgaacttttttactctattttgttgattgacacaaccatactagccatctattatttagactctctgtaccaacaaagttcaactcagccagctgatatcctcattacgcagggaagtttgcacatttaagttaggatctcatgctaaattgaagaccgacaagtagatttaatccatcttgattgtctctttagaacacttatgcttcagaatttaactagcttatgtgaaaatttcactatacgtatttggttgacacaaccacatttagccatttgtcttctcttggtataccgacaaggttcagctcatcctgctgtattgccctcatcattcagggaagtagctcaataacatttaagttaggatctcgtgcttaattgaagatggataactgaatttaattcagcttgataatctactttagaatgagatcagcagcattacccatgcttcagagtttaactcctctcacaggtcactggacgaagagatagagccaggcctttgac

SEQ ID NO: 14154 - DNA, 895 bp, Brachypodium distachyon
  Intron number 2 from transcript Bradi2g18260.1 (locus Brad i2g18260) derived from phytozome v7.0 (chr-ID Bd2; pos 161 86404 to 16187298)
ctactaataaggttgcaggaggtaaggaccgagggctcttggaaattcctgtacttgatcagccatccgaaccactagctgttttgctgagaaaagcattctgtttcacttccgtgttgatttcaggtcaacaagcatagtgttaatgttgatgtttttaacttctccaccatgtgtggttaatcctttctttagttagcatcaaattgctgtgctgccaggacaggaaatttgatggtagatcaattgcatttgattgctactactcactgtaatgtgctattcggtcactggtgcctgaagtgctcgcaccacaggtgaataggaatatcttgtggtttgtatggttttggatgttgcagacttgcagttatttttgggcctcacctgttgccctgggttctgccttcttgctcatttcgcacccgtgcactagctctcatcacactatagccatgatttgacagactggagccattggtgttttctttaatttattcctcatgcaaataaatatcaagtctgctgacggcaactttaacctaggcattcttgaagagacctctcagttttctaacatacaatcccacaatacctttgtttagtaaaaaatgggattccgtcccaaacatagtttactatactgtggacaatatgtatctacatataatctggaccaatatcttataaagggtaggagcttgtgtgcgtgtgtgggcgtgagtctggtgtgtccgtgtgtgtaggtttgtgtgagtctgcaatgtcctctctcaagacatagagtaggaaattacttctacttgcctgaatggagcattgtgtgccactcactttgtttctgattgacttggcaacaggtaccacttgcgcaactgtacttacacaagcaatt

SEQ ID NO: 14155 - DNA, 646 bp, Brachypodium distachyon
  Intron number 1 from transcript Bradi2g07520.1 (locus Brad i2g07520) derived from phytozome v7.0 (chr-ID Bd2; pos 584 8416 to 5849061 reverse strand)
aaggtcaacttcgacgagttcccctactacctcaggtaagccgtccgcgtttcccttccgtcgccaaaacttattcatctctcgccttctttctctccatcgctacgtgtgatgacgcgagactcccgattcgtgcaaagcaaaaaacacgcagactgcatcgtgtccggtaactttgcatgaaactgttccgtcaccttgcatcgtgtcagattttttccgatgtccacagcgtaaacaatagggatcctggttcagtcaccggaaataatgactcaaaatgatgatctagcataactcgtttcgaattattattttgcctttcgtgcctttctgaaagaagcggaatggttttttcttcttcttcttcttcttctgaatatgtccatgaatttcccaaagctacttgtactctttctcttcttaatcgaagaaaaaatctcctgccattttcctcaaaaaaaaacaatatgtccatgaaagatggtgacagaatcggttgaatataagacggtgcgaaaacacagccacaaagccctgtttcggttttgtttctcttccggtcctgacccacgcttgtttctttttcttccaccaacgccaatttgcagtgagcaaacgcgtgttgtgctgacgagcgcggcgt

SEQ ID NO: 14156 - DNA, 979 bp, Brachypodium distachyon
  Intron number 3 from transcript Bradi2g28380.2 (locus Brad i2g28380) derived from phytozome v7.0 (chr-ID Bd2; pos 275 93701 to 27594679)
ccaatcactgtcaagtaggccccacctctctctctctctctctctaatatacagaaagaaactgttgcattgtcaattctgcacttaaagctgatagatatactctaggataaggctaatcccatcaagcctagctggggagtatgatgcaacggccttatctccgtagcaagagaacgaaggcatactagacaggtgtcacactgtttttaaagcagcaattaatcacaaaccgattaggatgctaacgaccacttccagggttgatgagatctgaatatctgattttaaatggtcagtcaggtagatcccccggaatcgtcctatcagctttaatttcatcccaggccgcacaaggcaagtataccttccgatctaggctagggaccatacatgatttggattttggagcagctctcatcagtgtgtaacatccaagcaatactactgtaggaaaggaaaagccagcgatgtctctacggaaaagaaaggctagagcaccaagaacgtagaatgcgtgagacactttttgtacaattactgtgccacaaattttttttaagtgtcaacattttctttcttttttgagaaatcgacagtttttttctgtacaattaccacgacaattcctgcaaaggctaatggaacaagcgccttctcgccgattagataactcatataaaaaaagtttggtaggtggttaacaccatttgattttctgttatcccaagcaaagagagaagacagctgcccacgacaatactgacctgtgtaatgagctgtgctttgcgttggcgagaagtctcctgtcctgtcaagagcgtccgtccaaaccacaacaaatcaacaatgtcaaattgtcaatgcacatcccatcccgatccatctgcatctggccgcaaggcaaagtagaatgttgcattcacaaccaccggacgcaccattcatcacctgatcatgtacttctcaagcagcgagg

SEQ ID NO: 14157 - DNA, 772 bp, Brachypodium distachyon
  Intron number 2 from transcript Bradi1g49320.1 (locus Brad i1g49320) derived from phytozome v7.0 (chr-ID Bd1; pos 481 13739 to 48114510 reverse strand)
ctcgagcttcttgccgcagctgccggtctctccctctccctctccctctctctccataagcttgacgacatccttaaactaaagatgttacgccacatgacaccgactctgccgaagaagaagaagttaattatacttatttttctgtcaaatatttaatcacaaacaaatgaaatatgaccacggtaaataagcaaacagtactagtcggttgttaaaagcataaatcactaattagcaaatatatactccctccgatctttaataagtgtctcagttttgatctaaaccacttcaaaactgcaacatttattttggatcggaggaaagttaaacaacatgcacgtacgtaatcgattgattatattaattggtagcaccatatcctccggcgctggcataacatcacgttcaagttattatcttcactcccataaagatctaacttcgtggtcatcagttcacaccacaagactacagactactccttaggtttctaagaaacccattgttttgttaaatcatgtgatgttatagtatgatatacaagttattattttgttaaatgtctgaactttggttctacttataccaagcacaacaacttgtgacctcatgtgtggatgacggaccgcctctagcattcatacgactccatgtatgtagccacccattggctgcaatgtcgtgttctattgtatcataactaacatctaccgtcacgtgtattattttaggtaataacgacaaaaagaagttcgacaaagctttt

SEQ ID NO: 14158 - DNA, 657 bp, Brachypodium distachyon
  Intron number 1 from transcript Bradi2g02560.1 (locus Brad i2g02560) derived from phytozome v7.0 (chr-ID Bd2; pos 170 8108 to 1708764 reverse strand)
tcgccgccgcgctccctggacacgccttcgcctcggtgagtccacaattcagtttcctagcaaaccgattttcccagtcagttgccgtagtttgattgactctgtgtggtgacgagtgcttgattatccgggctgaaaagcctgtgttgttgggcaaacctgagagtccgtatagagtgggctcttttatcagatgttgatggggaaagtctaggccttgatgtagatggcgatcgaggtgattggccgctgctggtgttttacagccgatgtgcatactgaaacaacccattttatcctgaaaggaaatttaaggaactataggaacacaagcctgaagcctgcaacaccagagaaattacacacaaaatcagaatggtcctaacttcaaagcacaaacttggtttcagttctgaaattttgatcattctaggccacacataactgttctgtttatttcttttggaattcagagagggtgaatgcaaggagctgacatgtagtatccaatgctcttttttagctctatattatccaatttttttggcctcttaatgactacgcaagtatttccctgctgtttggatgcaagaattgtctcctgttgtgtgtattaaattgtgctcttcttcaatgaaggccagagcaggagtggag

SEQ ID NO: 14159 - DNA, 660 bp, Brachypodium distachyon
  Intron number 1 from transcript Bradi1g60190.1 (locus Brad i1g60190) derived from phytozome v7.0 (chr-ID Bd1; pos 594 82738 to 59483397 reverse strand)
atccgccgcgtccaggccgaggccgccaccggcaggtatggacctatttgtttggaccactacggagtagtttatttctgacaggatgggttttcttgccagtgaaccaacttgctgccactgtccggggcaagacgaaaaatctacggttaagaagaactggtctcttgctaatggcgtattaaataatgcaatgtctctaattgccaaaagactacataaaaatctgcatttttatgaaatgcttaatgctcactgttaagtcatgacatatggtattagcttaattagtacctttaacactcaaaacacatataataatctttgcacgaaagttgattggggtgtttttcttatagtcggcacgaagaagatagtcactagagaaattttctgccagaataaatgcttcttgagacagaccaagatgaatactgtttcatctcctgaatttcacattcttttctgccggtgtttaacatgtgagtatgcaacttgcagccatatgatcgaaatgagaacaacttgttaacttgcccatttgcttgcacatgtttgggtattcatccccttacgctctcaagttatatatttggtattttgacatttgagtcttgtaatacaggactgtggcactcataaagtccgacaaagacaatc

SEQ ID NO: 14160 - DNA, 596 bp, Brachypodium distachyon
  Intron number 1 from transcript Bradi1g77450.1 (locus Brad i1g77450) derived from phytozome v7.0 (chr-ID Bd1; pos 737 72229 to 73772824 reverse strand)
cgccagaacccgctcctcggcccttcctccgccacgtacgaatactaatccattctcctttcccgtcttccttcctttctttctttgattagtgattactagtactgctagctagatgctccgttcgttaagaatttatcgggggcttaactggtttccttttctgctctgtatatatacgtcttgcaaacagcagagtatcactgtttcatctgttttcctgttgggatcaagaaagcaagcagtgctcaagtagtactagtagggctgttcactcagatgttctgttctctcttgacaacgttattgccctgaaaacaaaccagcccaacaactcgccgattattggttcagttcataattcagatccaccggaaaaaaaaagccatactttctacagatcatcaatgagtcagatatcacctgtaaagacacaagtaggacaccaccaccagcatcagctcaagtactagtagtacaaatgacctggttttggcctgtattaattggggccagtagcggcacaaccgctacttccatatacggtatggtgacctgacggtttttgtacttgtggtatgtgcaggctggagaag

SEQ ID NO: 14161 - DNA, 683 bp, Brachypodium distachyon
  Intron number 1 from transcript Bradi1g46470.3 (locus Brad i1g46470) derived from phytozome v7.0 (chr-ID Bd1; pos 449 94896 to 44995578 reverse strand)
gggttctctgtgatctgtcgacgcggcgcggacaggtttggtggtttcttgagctttcctggtttgttttgtttggtggcagagttgtgaatgctagtgttcattttgtttatttgggagggaggcagcgaggataaatctctttcgttcaaattgctgtttagcaacataaacataataggcctgccgtttgaatcgtgagaattttgggggtggttaaaggctagcttgggggattttttgggacgcattgatttgtgcttggctgccgtaattcctgagtttgagtataatttattgcgcttagcactgtgcatttcatcaagatatgtatatgttcttgctatcatggcctcatggaggacttttgtgttgatgtgatagttttgtaggaaaaaacatgaatgttgctagtactatttcaggtgaaccttttcttagttaataggcataaggctaaggtgaaggtattcccaaagacagcaaaaggttactttataatttttgcaatgttggtccaataatctcgaacttacccacgcagcaacaagcattaaagttgatgaagagtaactcattttttgatctggtttgaacagctgggtgctgttgctttgctgattcattttacttctgctctatttgtagatcactatattatcctcgtcgtacattcacaagct

SEQ ID NO: 14162 - DNA, 757 bp, Brachypodium distachyon
  Intron number 3 from transcript Bradi1g70710.2 (locus Brad i1g70710) derived from phytozome v7.0 (chr-ID Bd1; pos 689 06278 to 68907034)
gcgtggccagcatcccaacttgaagggcatttacagtaagatcttgttttgaccttcagagtgttatcggaagattatataccaactgtatacttgtagtgatgtcacttgctgttagcgagttatatctttgagcttgtattggccaaatccatatagttcgttaatttttcttgcagtctctcaaacctatgcagaaatccttctggagttcaaccgctgtagtttgcgcttgccatacttagttggaattgctgcaccatatcacttttgccatgcttgtcttccatatcttaggtttttgatgaatttaatatgctcaacgtccaaacagtgaatccacatggtttaagcatgacatggttaaactgtgtgcccgttgtatgaataatcttgcaaagggaactgttggcttgttttgtttgaggggtgcacttactctagggcaagtacatccacctaggatgtagagacatccaacatattttgtacatgaacatgttcgttcagtacattctgtggaatgcatttcagagatcttagtaaattctttcacttgtagtgttgcacaaggataattccattgcactaaccaagccaaatcttataagaggttgttctcctcaaacaatacatcaccatccttgttttttttttctgaactcgtgctacatgctactttctttttgagtatttctttatgccacgctattcttgtgcagaaaaccataacgagagagtggtttgtgtcagaaat

SEQ ID NO: 14163 - DNA, 651 bp, Brachypodium distachyon
  Intron number 2 from transcript Bradi2g05330.1 (locus Brad i2g05330) derived from phytozome v7.0 (chr-ID Bd2; pos 388 7333 to 3887983)
tcttccaaggagtcaaggtaatggtatcacactatcacttaccagaaacttcttaactattgatgcatgcattcagatagtgtaattacatataaggtattcatgtttagtctttagatcaaatcttgtgctcaatggtgtttaattgaaggtcttaaaatggtgttcgtactaattttactgtacttctatcaacaaagttcgacttggatcatgtctatcccatgagataatagttgaaaaagtagccttcatcaaactaacctgtagggcatcatccaacttgtttcatgaaggattaaggttgtcctaattgaacttggttgtctttctgtttcttttcttagatcacaacccaaaattaaatgagcctggcatttcatatgttttccactaaatttgtgtctaatgttttgaactgtacatatcggaaatatgttattcactaaatttgtgtctgtaatgtttttaactgtacagatcagaaatatgttattcaactaggacatggcttgaatgcattgcttcatgaacctatttgaatggtttcaaaagttgctgccggaactttatgtcgttactattttgtatcattgatgcatcatgtacactgatacttatggaagtttcaaaagttaccttttcaggctc

SEQ ID NO: 14164 - DNA, 893 bp, Brachypodium distachyon
  Intron number 1 from transcript Bradi2g17240.5 (locus Brad i2g17240) derived from phytozome v7.0 (chr-ID Bd2; pos 153 77154 to 15378046)
aacctcaccagcaacgtcaggtccatcctctacaggtccgcgcgcctctcgctctctctcttcctcccacgcctcgcctctttcccctggtcttgatctgatctggaggtgtgctcagtttcatgttaaggattgatctggatgtatctcgatcttatggatcatggcctaattacgggtcgtagttagatgtttctctgtaagtattggtctgaaagggagagtggagtggatttagtggtttcgctagaactattgatgcgatgttgcagctaatgcgagatttggaaataactagcgatgttactgtgaattggagcttttagtagctgcagccagtcagctaaattgaatcaaaaggatctgctgaaattttcatgctagattgaggtgcgtttattgggttcccagattggagttgtacaatgtacaccgtcaatgactggtgactaacaaagagaattactgaagttatatgctctgcgagcagctattcactaaaatcagagttcctttaggatgagaaatccccttagatcagctaggcacttttgagtggaggggtacagaagtgatgttatccttgattccctatgcttgggcagctgggtagataatattgtagcaatacaccctagttattaatttaatgtgctcgatcggtagtggacttacagaatactgtggttacagacttgactttttcggtgtgatgatacaatatccagtttcctgtttccatcgtgttgataacactgttttttttttactataagcaatttattctagacatttccctgacttgctacttcacccaatatggtttgtcctaaacatgagaatttctttgtgttacagtcggacattcttgtcgatcattggtggagttgttg

SEQ ID NO: 14165 - DNA, 575 bp, Brachypodium distachyon
  Intron number 1 from transcript Bradi2g21150.4 (locus Brad i2g21150) derived from phytozome v7.0 (chr-ID Bd2; pos 185 22363 to 18522937 reverse strand)
caagtgagtatttttgtgctgaagtttgattaaatgtctggttaatattttctttgatcttgtacccgtaatgtttacggaggtaaggctaaataatataaagatttaatgaatgctgaactgaatgaagctacagctctgtcgaatgttccctgatgaatttaggctagtcttgatctgtatttagtgtccttcatttctcttatctgtacctagtgtccttacctagcacggtagctatgttcattgtctaataatgggagagctagttaatgcccttgactaaatggctagctaattagccatgaatgtccatgtgtcgtgtatctctgcaattcctttaaagtatcattagcagcgaatagtgaacagtcagatcctgtttctatcgactaaatgttgtgaaaacctccatgattttttgtgttactgaattgaaatttctatcctctgccctgagaagttatatgtcaatttatggtatatacttttgcatgttcttttcctgcactttttggtttttgacaatggtttattggtcatgggttttattgcagccggagttccattggaga

SEQ ID NO: 14166 - DNA, 685 bp, Brachypodium distachyon
  Intron number 5 from transcript Bradi1g70340.2 (locus Brad i1g70340) derived from phytozome v7.0 (chr-ID Bd1; pos 687 24042 to 68724726)
ggagactgagaagaaggtgaaggccaagcgccaaaaagaacagaaagaggtttttattgattcaaaaacacaatttcatacagcagaacagtgtggttttgattgttattactcctttgttccataatataaggcgtattgggtttccttaagacaacagttgaataagagttactccctccttttcacaaattttggcatgtttggtttcgctaagacaaggctttgaacaagaatgactaaattaatgtgtgttttcatacatgaaatttatatcaatagatttgtcttcaaaagttcttgctaataatttttatcatataaattacatattaatagagttataattggtcaaagccttgccttaaccaaatatgccaacctttgtgaaaaggagggagtactttgttatatgtgttttatatgacattaaattagtaccactgttttcaaaagtacttgctgataaatgtgattctgtatcatataaactacatatcagtagagtaattcttagtagaagccttgtcttaacaaaacctaacacaccatgttctgaaacagagggatcgttatttttgtgcaaaacagaataattatcatgtttcatgatacagaaaagttactaaatggtgtggctgaacatactgagaactttgttgaattgtagattgagttggacaaa

SEQ ID NO: 14167 - DNA, 509 bp, Brachypodium distachyon
  Intron number 2 from transcript Bradi1g72810.1 (locus Brad i1g72810) derived from phytozome v7.0 (chr-ID Bd1; pos 704 71539 to 70472047)
aaaattatctacacattgagtatacatctcccaaggtaatacggccatacatttttatttggaatggcactgttatctatacatgttatagcacctttttaactcgttgtacagtggaaaataataacttgccgaggagattaccaagcacgtaagatcgctgctactgagttcactgggattagttcagagttcgctcaaattggctactatgtaggatccttcacatacatattttttaatgtagctcacaatgtctactatgtagtatctaacagtctcgttctttctattcaggagtttctagataacattttgcactttgtatagcgagttagatgatctgtattttgagctctggcaacgggtctgtctgttaatggttagtactcagaactgtgcgccagtcttccgcacaactaatcagctatttgatggctgcttccttctttgtgcaaacactttacatgcttacaccattgcattattttcccttgaataatgttcag

SEQ ID NO: 14168 - DNA, 460 bp, Brachypodium distachyon
  Intron number 3 from transcript Bradi1g65420.1 (locus Brad i1g65420) derived from phytozome v7.0 (chr-ID Bd1; pos 644 20678 to 64421137 reverse strand)
ctgagactgaatccaggaccaaggtttgaattcttttaactgctttatcttacttctgtattatggtgttctggcacgaaattaggaaattgtaaacctaatggtagaaacttgcgctgcaagactgtaggcaaatactaaatccatttagcgtaaagtatttaatgagtatgaaaagaacatttgtatgagaaaaagtttagttggcctagctaatgataacagccccactctcaggtcggaagctatgtttctgtgaagtgtgacacccagatttggcaaattgtatcaaatgcaaagaactaaatttaagggtccttttcgaagtaggagcagtgcgggttcatgtgtactttcgaaagaattgtcttcccgcaaatctgctgcctatgtttctatttgcacaacatgtgccgcttccttttctgttatgccaattttctctttttcctcaagcaga

SEQ ID NO: 14169 - DNA, 644 bp, Brachypodium distachyon
  Intron number 3 from transcript Bradi2g20200.1 (locus Brad i2g20200) derived from phytozome v7.0 (chr-ID Bd2; pos 177 39668 to 17740311 reverse strand)
ttttgacaattattggaagaggtgcatttggagaggtacctgtcatcttggtctccattgtttatttgtttgcctaacctcattacatgacatgatttattggccttctaaatcttgccggtcaatggtaggttcagacatatcattgttgggcttgatattattgctcatagtagcctttaaactataaatatgatctcttatgtgatttgaaatagagctactccatgctcccatcttctatatctgtcacttgacatagaatttcttgaacattctatatctatatttggtgagtaccataacagatctcttatacatggctcttgctttcttatttttttaacaagagaacatgagaattatatccctgcttagtatagttcacctgtctattacagaccacttccattatttgctactatcttgtttttcttttatctcagttattggcgactttgttttcggctgctagattgaccttaaaaattgtatgcagtgttaacctgttatgaagtacacatgtagaaagtgaccatcaccaattatttgtacttttgaggtcattgtcatgcacatcatgtttaatttgctttaaattgtatgcaggtgcgtctttgtagagagaaaacctctaaaagtgt

SEQ ID NO: 14170 - DNA, 983 bp, Brachypodium distachyon
  Intron number 3 from transcript Bradi1g53040.6 (locus Brad i1g53040) derived from phytozome v7.0 (chr-ID Bd1; pos 514 25693 to 51426675 reverse strand)
ccttcagcaccaaagtatccggaatattaaccagtgtgagttaaaagtcacttttcctgtccccgaaacccaaatatgttgtacactattgttctggttatactagcatattgctgttttgttattaattcgtgggatatgtttttcatttggatttcttccccgcactctctgtatcttggtagttagatgaaggtacgttgctgtaattctttaactcacactagaaaatgccatgataaaacactttccgatgtttcaaccttttcagcatgctggtggagcttacctcttgcgcagccactttgtgtgtttatgtagccatatttttcgggaaacatggtgcgaaaaggcttgctgctaccatttccttatttctaactcttaattcggtcctgttctgctgaattctttttgtttctttaaccaactattatcatacaagatacatgatatatatggtgtggatgtacattaattactacagctttgtactgtaaccacaattcagcatcatggctagttggttactgtcacaagtggcagcatgtgcactctattagttttttcaggttttaatccgttatactgatttgtcgatcatctgtacgagtttgaattagataagtttaagctcagtgacagctcaatgacagaacacaggtttgtagattgttagggtaaattcctgttctgttggaaattcagccagaatccgtagtaccaaaaggtactctaaattctaataactaggtagagaacagtcctctgtaatgttaatgggctccaattgtatgcgtagcacttatcttggaaaatttctactcggttaaaatatctcacatttgtaacaagcagattcacttcttttgcgggaaacaaacatatttatgttagttcagtacctttgtaactatttctctttgataatacaatattttgttgcagtacagtcttgtgaggagaaacttgaggaccacata

SEQ ID NO: 14171 - DNA, 691 bp, Brachypodium distachyon
  Intron number 2 from transcript Bradi1g60120.1 (locus Brad i1g60120) derived from phytozome v7.0 (chr-ID Bd1; pos 593 47331 to 59348021)
ccaggcccaagaagagcgctccagcgggggacaaggtacatacgttgcgatctgaattattcagttcttttttcaattttatatatactctgatactgattcatatactggtaagaacacacttttatagagtactgaactctagatacttgtttcatttttttcttctgaaacttcactctagaagttgtaataaaacaacgagacttattatgaatcgcggcacttgagagagtagtactaattaccgtgatataccgtattaaccatgtgaaccaacttgagacgttttgagtaagtagtcggtactgtagtctagctcatgttcggtttctttttgctactggttaattaattaactcaaaccgaaaccttgggcaaaaaatactgctcaaactgaaaccatgcacgtacacaccttttttttgcttccgtcatcagcagagcctctgtttccttgtcggcacatgcctagctttcctgcaacaccaaaactacaagccactagctggtttacaggggctaaaattggagacagctaagctgagaaagttacagggactccgatttaactagagcagtgccagttgttataacttggtatctgcaagagctagcatgctcaaatctgaaaaccaagttcagttcatttgccagcttgatgaccaggtttggacattttatgcagggg

SEQ ID NO: 14172 - DNA, 1016 bp, Brachypodium distachyon
  Intron number 1 from transcript Bradi2g25040.2 (locus Brad i2g25040) derived from phytozome v7.0 (chr-ID Bd2; pos 228 37311 to 22838326 reverse strand)
cccgcatagcatctagatccgcaccctgtcacttggtaaggacgtaatctagggcgtgatttctgcaaattttctttagaaactttctagatttggtcgtaaatgaaggcttaacttctatatgtcgtggttgcgcgctcctggtgttctcttttgatgtgtttaatcgtaaccatgccaaatcctgtcaagggttggggttttcagtagttgaacgaccattcatgcttgccgctctcttgctgtgtctaagcgtgagttctttgtcagtttctgtttaaatctattgctcaaatgctccaatttcaaggatttagcagtaaccggtatatctggaatgctcacttttggttttgtttgctgctcccttgttgagtaatcaactatggaatccggccgcatgcttgcaggcgtttgaggaaatcactcaagaacttagcttggttatagtaaaataatgcatcttttcctgtcgggttacgtttacttgtttgactagttctagaatatatattgcagaaatttcgtgtaggtgacctgttaacttctgagggtaggtatggtgagacaggtgttaaggatccaatgatgttgttagcagtgatcatgattcatgagttaattcgtggggatgagaaattatcgattccaaaacagtgtggacttttgggggatttatgctgttttcagtgcatgataaatggtgatatggtgtttgagagtttactgaacattagttccattaaatttctatgccaggcaaagatcacattcttccttgttggatagcacttgttcttataatagatgccacagattggattaaaaccaggttggtgggttgggtttagagattttctagtggacctagctccagatatttcactcctcatcttaaaaacagtagatagttcaagtaatcttgtgcttgattgtctaaatgaaacttcaattatggatttctacttatggttatgccttgttttattttacagagtctggaaattacatctata

SEQ ID NO: 14173 - DNA, 890 bp, Brachypodium distachyon
  Intron number 1 from transcript Bradi2g17790.3 (locus Brad i2g17790) derived from phytozome v7.0 (chr-ID Bd2; pos 158 40713 to 15841602)
aggctaccgagtcgcgatctccgccgagcaccgtaagatctggcgtttcggatcgcgttaattgttgttagctgcgtgcgagacgatctcgacctgtgcgcgcgcttaaatcctagggttttttttagttctgttcagtggaattgatctgtttcgcctgatgagatgcggttccccgtattttcgcgcggatctcttggcctgtgtttgatttgatggccactaggattcagtagatactggttctagttggctgagaaatcgtgtcgatgtttgccgtatagatagagatttatgttctcgactaagtaagtgacaaaggggcggggaaaaatttgtggtcttgcaaagtctggtgttgagcctaacttgatcttctgctgagttgttcgtcgctgactaggtaccagttatcttacaggcccatactgattttcttgctggcctgtatttgtatcaagcgagtcacacaccgatttattattattttgtagatatgagcttttcattcaatccttttagatctagtctatggtactactacaagattagatgtcaaaagtgcttagtcccatgcgaagtctaaactagtcaggcacattgacaagttatgtaactatagattgacgggttatggtgtataaaacacatcaaatgctcatagtcaaaatattacctttggcacaagagaaagggaaccgtttcagccttttagacatgaaaatgttttcctagtacagcgggagtggaactgtttcctgttaaattcctgcatttaaaacatgtcgttagctagtactgctgtattggtttactatataccttgtgatgaaactaaacattattcttgctaggatgacccagagttggaagctatcaggcagagaaga

SEQ ID NO: 14174 - DNA, 657 bp, Brachypodium distachyon
  Intron number 2 from transcript Bradi2g12800.1 (locus Brad i2g12800) derived from phytozome v7.0 (chr-ID Bd2; pos 111 70643 to 11171299 reverse strand)
ttctctgacccggtggaactgcaactcctgaaccggtacaacttctagtaacataatttttattctctccttttttacagtccatagatttatgagtcagtctgtttacaagaaaattagtatagaattgttgcttgaaggaaacaatttcacccggtacccatatcttgtgtttttctgcttctatgaaaatgtaaacaaatactctctccgatccatattagttgtcgaaatattagatgtatctagacgttttttatgcatagatacatccatatttgcgcaaatttgagacaattaatatagatcagagggagtatttctgttcaaattaactgtataccatgtacaaattttgattttgatttacggtttcataaacaatattccataactatgatacgcaccgatcaatatttggttacatgcatcttatgcgttgtcatgactcatgactactactcgacacaaaaggattcgtttttgtcaatatttgcttatacgttttgtttctgactagctttttgctaacttctgtttgctttcagtcttctggctccacacattacatgtggtatattttggaagatatcaaaactgtggctgaagggatgcaaggttatcatcctcgacattccgctgttgttcgaggcgaag

SEQ ID NO: 14175 - DNA, 601 bp, Brachypodium distachyon
  Intron number 1 from transcript Bradi2g12800.1 (locus Brad i2g12800) derived from phytozome v7.0 (chr-ID Bd2; pos 111 71409 to 11172009 reverse strand)
agcgaatcctggtcggcctcgatcgagatcccaaggttcgtccctctctctcaatataccttcgttttctcacctgaatactcccattgactgattctgctcataatctttggatccttagaattcaacaactcgagttggatctactaacaattcgttcattgccacatgccaactctggaatacatgactaggagaacattcgcatactaacattagtagcggtagttttagtaccaagttcagcactattcctggatttcttagagctataagtcaaatctggaagaaaatagtggtaaacttgattgatcactgatttttttttgaccaaaaacagcaggagaggctcctactgctgtatatattataaataaataatatttacatatttacaaatgattgatcactgattgatgagacatgcagataacatacatgatttaattgatacatctcttctgaataccactatcaaagagcttgattgatttcaaattatatcattgtatttccaaagcagtatattttgcttgcggccacttacattcatgtttgctgtatcagcattatgctgattatggatccatgcatttacagg

SEQ ID NO: 14176 - DNA, 797 bp, Brachypodium distachyon
  Intron number 1 from transcript Bradi1g50630.1 (locus Brad i1g50630) derived from phytozome v7.0 (chr-ID Bd1; pos 492 02709 to 49203505)
tcgcctactacaagaagcagcccaaggacaacgtatgctactactactactcagagtcacatccagcagtacatcgcgtacagtctcaattttggttgctggagttgcgagccaacctgccgcggcgagagttcctgttgctctcctgctagactttgccattttgtagcgggattttttcctcctcctttgattgggagtggtttgaccaggttagagttgcatgatcacgaaactgagccacgatctgatgggttgaatgtttctcacacgctgatgccaattgggaacggagaagttgggggaatttggtatagtatacggagtaatttgcaattgctttgctgatgccaacagttgaccatttggataattagatacctttgatcgagagtctgggaagtgctaactactgccaccttgctaattaatgggtttactttctcgctgtcaatcatgtaagcaacttgcttgatctgcctggagccctggacctccttttagcattccaataattgaaagtagtgttttattgtaaagttgctgctttcgtagatgtgacaggtgcaagaaatatgtatggctgcaaatcccccattcttttgaaaagttttgattagctgttttcttcgttcgagccttaacgagaggtttccaatgcaataaaaacagaagaatttcatgccagcacactttgtagttggaacatgtgcaacaggagcatggtggctgttgtctttaaccttctgctcgaaattttgtggatgtgcaggtgccactgaaggcgcttgtaatag

SEQ ID NO: 14177 - DNA, 594 bp, Brachypodium distachyon
  Intron number 2 from transcript Bradi2g25680.2 (locus Brad i2g25680) derived from phytozome v7.0 (chr-ID Bd2; pos 237 97473 to 23798066 reverse strand)
attcacgattgtacggccaactagtgaagccgggggtcagttgaccatcaatgaagttaaagttagtagatggagttgtttaaatatactagaatgtgtttaatctgacaatggatggaactatagttagctacatggttggtaaattcagaattttgtaaaggatgcaagagcttcctaacaacagaactgcttgggcaactcaaatttccatctttgtcaccataatgctactgttgttgcctgctgcctgatgtgtcgagtgtcgtgtgtgtgtttgacaccgatttgccaatagcccgttctgttttttttttgtttgcttattatcgtattatgtcatgctacacttaagctttcattatgatggtatgtttctttttctggaatgtactcaatgggggaatcttgtcctattgtccttatttggttaataatggtgcttcagttttttttcttcatcatcagcagttccttaattcattatcttactgtgcttttgccttatatcccaccaaattgctgacgaattcagcattgacgtttcatatgtaaacaggttttgtgggctggctttgataaattagagctcca

SEQ ID NO: 14178 - DNA, 580 bp, Brachypodium distachyon
  Intron number 1 from transcript Bradi2g05840.1 (locus Brad i2g05840) derived from phytozome v7.0 (chr-ID Bd2; pos 434 7457 to 4348036 reverse strand)
ggctcaagaagccggaccgggagctggattgcaaggtgagggcgactcgcaagtggtttgttcattcagttctttccggagattctgttgcctttggcaaagatttggttttctctgagctcgattacattcggcttcactgagtagacgagttttgatattgatttctcgctattggtttagcagcatctagtttttgaggtcattttttccccaaaaaggacgcagaggggaacaccaagattgttccttttttcctcctggaatggcaaaagtctgcagttgaaattgccatctctaatggccacggaaatgtctctttcattctcgtgcacttgtctgaagatccggcaacagtccttgagtgtactttgctgtttctgaagtagggttatgtactactagtagtactttgtttagctcaaaataaatttccttttgctcttcatctctaagtttgtgtcttcttcagcaatcatagccgagttatatagtaccagtcattatatctcgagaagttactcttttttttttgtttcttttctgcttctgcagaacaagctgcaagttccctctgtga

SEQ ID NO: 14179 - DNA, 815 bp, Brachypodium distachyon
  Intron number 3 from transcript Bradi2g25190.1 (locus Brad i2g25190) derived from phytozome v7.0 (chr-ID Bd2; pos 230 94713 to 23095527)
gagccgcgggagccgagcattgccgtaagaaggtgattggaccgtgctattgttcatactattccagattggtttgatttctgttgcgagctgtggttatctgttttctaggtgaaagctagtgtaacaaaagttagttggacttgtgaacatgtccggatagagaccattgtggtttttgagcatgcaagcacttagtactccggggacttgcattagctagcgtgccacaagttggtttggatcgaccaaacagacagcgccactgggacacccttttgttattgctgtggtattttccaatctgaggatttggtgaagcgacgctgttctctcttgctttgtacattttctcactgactattaaatgcaacactagacactttggacaataccatgtcgaagtagtgagcatgacaaccgggtagtgcaaagcacccattggcagacaaggatagtcggtcagtttaatgacgttttttaagattgggtaggtcggctgaccctgttagatagtctaattcatagtgctgtttaacttacaaagagaaatgaatgtgttgttaaattgattgccacgttcgaatgcctctgctccaagtgttttcacagcctgttgattcttagcatgttcctaggctaaaagaatgaacgttataatatctgaattatttctatcttacatatacctctcccacctcttcagtattaaataatgttcagtggtcatcatgcaaattcagtaatcttcagatcttctgatctaattctgtatatgaactcccatattattttaacagggaaaagttccattg

SEQ ID NO: 14180 - DNA, 884 bp, Brachypodium distachyon
  Intron number 3 from transcript Bradi2g09170.1 (locus Brad i2g09170) derived from phytozome v7.0 (chr-ID Bd2; pos 744 0933 to 7441816)
tgctgtggcaccttccaccacgttggcgcttccaggtaaattgtgctgtcgttttttagacaaaagctcctgctgcttttcacaacaatgaaaaaattgaagactctctaaaaatgataatgaagactaaatctcctgtcatttggaaacgatcgattagctagagcgggctttcttgcttgcaagtgattaaccctaatgaaaagaaatagcggagatttaaggaacatgtgcagtggttagaatgctagcaaattcaattgtatattgtgtacagaatgctgaaatcggcacatatggcaattatagcaggatgttttctggcaattgcgctgtgtttatctttttctcatacagacagatatttgttttgtagattttggaggtttcctatattttctttcatttcttggttaatcttttgatatgggtaccataagcacacattttgtcatgtctgataccagcataactacacgagctttccttgttctcttatactgcaacatttgttctctgtaattacacattacataggaggaaatcaaacagaggggagaaagttaggatactgagtactatgtattgttacattggaattcatggaagaagccaaagctggaagttaaattgtagtatagtaatcttatctctgcacattaatccgatggaactgattgatttacttcagggttggttataacatcacttgactagttgagaaaatgtttactggctatgattttccatcttactttgtaagaaagccattttaaacaaatactggctaaactgaatggtgcgaacctcaacatttagtatatttgagctcacagttatctttgtcaggcacacaggacaacaaagattctcgcagggaaggc

SEQ ID NO: 14181 - DNA, 789 bp, Brachypodium distachyon
  Intron number 2 from transcript Bradi2g08090.2 (locus Brad i2g08090) derived from phytozome v7.0 (chr-ID Bd2; pos 647 3140 to 6473928)
cagaagatcgtgtcatagttatttctggacctgcggtaactatcttccttttctcttgataagtttcatggaagatatatgatactcccttcgatcctaaattgttgtcgttattttagtacaaatttgaactgaaacaacgacaataatttaggatcggagtaatatttattaagcaccagtttagcccattccttgttattttgcttgtcagtgccggaaaaggtttccagggtttcaatattttttgcactccacattatttctagggaattgggttcttattggcaattttcatatatttgttctggctcttcaaggttgccatttggtagcactttatgcttgcacagagtaatgtttcatgggtgtacacgcagatgcagtgaccagaaatgtggttgcgaggcaactttacatgaatattggtactaatatccaagataaaaaccaacaaagttgtttttaaggacaatgatatggacgctgaaaatgcattagaaagtcaaatggtgcaagaattttgggctacatttccttggtttaaacatctttcctcatactctgccttagttttaaaacttctttttgacacaagtggcactcattttcttttcagaactgggatttaatagcaaatcaatttgtgatctgcattggagtttgctcctagtatttcagtacttgttaatagcattaaactttgaatagttattatcctctactgctctacctgcaagtagtctttctaatgttttcacttctctaccattctgtagcatcctggtg

SEQ ID NO: 14182 - DNA, 836 bp, Brachypodium distachyon
  Intron number 5 from transcript Bradi1g54400.2 (locus Brad i1g54400) derived from phytozome v7.0 (chr-ID Bd1; pos 527 80351 to 52781186)
aggtacatacttccatcactccatcaggccatgtattcttgtgacaattggcactccttctcttctaatgcgtctgtgaatcactaggcattgtcacttttgtggttggttaggagattatgtgtcttgtcttgttggaatcatataaaaactggagctaatttatgaaattttgtcgtaatggatgtccgtttaaactttaaagtacatgaagctgatgttgacattatctttcatgtttgcaattggttgtagttggtcgttaattttatggagctatatgttaattgctactacctccgttcctaaatataagatgtcctagctttgtcctaattcaaacttcttgaagtttgaccaagtttatagaaaaatctactaacatctatgactccaaattagtttcattaaatctgccattatatatattttcatagtatactcatttgatattgtagatcttagtctttttctataatttggtcaaacttgaagaagattgacttaggacaaagctaggacttcttatgttttggaacggagggagtatattatatttgttttcatagtagttgtgttactgttccgtataaccttttccctggataagcatctttttcaaagttagcatatcacacttggaaagcttaatgacttttccctttggaagtttatagagggtgtatataatgtgtatgaagttttggctttcaattgtttttcaaaatttaggtatcttggcatgccagcgataaatttccacttatacatgccaatctaacttctctgttgtgcgtttagattcttgattacctcgggaagtcttctgacagtga

SEQ ID NO: 14183 - DNA, 818 bp, Brachypodium distachyon
  Intron number 2 from transcript Bradi2g20150.5 (locus Brad i2g20150) derived from phytozome v7.0 (chr-ID Bd2; pos 176 88851 to 17689668)
tgcaagttggtactgtcattcaccattacccatttcctctactagtctgcatgtgcaataacatgcttattttttgtacaaaatattgataggggcaaaatatgtgctaaatttgttagatatgttcatgcggtctgacttattgagttttaatgtggggccttaatttccagtggagttttagcctcctttttctttcttcgttagttcaacttgaactgatcttattttgccctttaaaacacgattacaataatgacgctgatgcctgtagatcaggtaccagtagttaactttcatattgtggaacaaagcattaaaagaagaaatgcttggcagtacatattttcttattaaggtttgtatttaatcttatactccctccgtccaacaaaggatgtctcaactttgactaaatttgaatgcatctatacactaagtcatgtctagatacatccaaattttaacaaatttgagacatcctttgttggacggagggagtatcatttttaatttgatctcaattcattataaggcgaggtcagtttgatacagcctaaagccccaacatgtaatggttgagctattcaaattgaattttggtggaccaaactcaatatgaaggtatctttaaatagcaacactgcaaatctgcaatagaacagtgtgatgctagtaataaacataatttctagcattgcatttgctgtttgaacgttaatttcttcaatggaacatcttgaatgcatttatcatactggaactccaattgttttaatggtatattgataataatttacttttgctagcccaggcct

SEQ ID NO: 14184 - DNA, 865 bp, Brachypodium distachyon
  Intron number 1 from transcript Bradi1g61620.1 (locus Brad i1g61620) derived from phytozome v7.0 (chr-ID Bd1; pos 609 67575 to 60968439)
acttctccagcttcgtcaggcagctcaacacctatgtaagacagccacctagctctttaaatatttaatctcttctatataggcaatgtggatattttccttcttgtgtgcaattgatccggttatagctagttgcaactgtataatttgttcaagcgttttatatcccatatgaggttaatttgtgttgctatattcttgttatattaggagatgtcgttgatgatttctgtggcacaaataataatataaagtgtgtccaaatcatgggtccggaggtagtatatctagcactgtttgttactggcgacacatctcatcctttcgatatcttgtttcctagaacgggacaaacaaaggtgttgcgtttttgggtggctagcgaatatacagagagtggaaaagagaccaacctgtaatgattttgttgcaatcgtgtgcatgggtgtcctttccaacttgccacattctttcttgtttccctggtctgccggccaaatcaaagcatgcatttctcttctagctagcgttttcttttgattttccgaatccttttgcaggtatcatcagactgacaatatatacttatatatttcctttcaatctagctagatggattcatgttcatttgaccaatcaatatacactggaccagtcccaatcattggcggagaaaagattgacattacacacgcacacacaaattaagcatgtagtacatgacaaactcatcatatgccaatggccggcatcatatatgcatgcgctcatttttctgatgaattcttgcttgctttttccttgacatgcatcaccaattatcttggcagggtttcaggaagatagtggctgacaggtgggagtt

SEQ ID NO: 14185 - DNA, 577 bp, Brachypodium distachyon
  Intron number 2 from transcript Bradi2g00910.1 (locus Brad i2g00910) derived from phytozome v7.0 (chr-ID Bd2; pos 578 098 to 578674 reverse strand)
ggcatcgccgagacgtaccacaggtacattatattgatcattacgtggctagctgcacctgcaccaccgacatgccttcttaatttgtttcctgttgcagaatttttcaaatgtggtagatagaacctgcacagaaacacatgtctgatggagtgttgagctttttattacagaagcacacattcctcttcggagattaaagaactggacttgtagggcctgcttgggatggatgtattttgaattgggggctggtatttagttttagaacacccattccaagcaggctcctagtgtttttaatatagttttgtgtttgctaaccacatatatgccgcgtgtagcggattggcttcacatgcatgttgcatagtcatcgtgtagtttgtaattcagtaaatggtatttttattccctctttaatcatatgatccaacatctatacactatttggcacccaaacattgatagtgaaaggtccagtttaatgctgtactggtcgttatgatgcatagaacaaatattttatcttctctatacagggttcgtaaatcacgtagtgaagtgcacctatcaa

SEQ ID NO: 14186 - DNA, 809 bp, Brachypodium distachyon
  Intron number 2 from transcript Bradi2g12250.1 (locus Brad i2g12250) derived from phytozome v7.0 (chr-ID Bd2; pos 105 93833 to 10594641 reverse strand)
gagccgaggaacgtaattggaggtaagactagtttcttttttttttctccttactcgtatttttttcatttgaattggatacagttgtattataagataaaaatgtagatcgattaacttgttataacagaactttatactccgtacttaattggtcagggaggatattgaacattttccatatattttcaagtaatgttattttttctgcaaacttgtaatcactccaatacatggaataactagtcaaatgaactgtagtggtttaattttgatctagatcaaagcttctgtgaacatttttcttttagtttggatttttcataggagcagatgttcagtttggatttatcataggagcagatgtttagtttgaactagctctagttcaaagccgtgccaacctttatggaacggagggagtacttggactataacaatacactacataaccaagttttgacagtgttgactgttgacaagcactataattcttcaaaaaagactcataagaaatcacattcaacggaaagcagctgtgaaacctgccaatttaatcatatatgcaatgctgtattttaatcatacatgtactgctagtaaacacttgtaaaacaaaacagtatctaaagaaaattaaccactggtacctctgtgcagttcgtgtttattagaggtagtgcattcaacgctcactgacatttgttttcctcttttttcgtaactaaatttagttcccttttgcttgtactttactcttttttattttactaaaatgtgacgctgtatatcttgcagccagaagacct

SEQ ID NO: 14187 - DNA, 785 bp, Brachypodium distachyon
  Intron number 1 from transcript Bradi2g18380.1 (locus Brad i2g18380) derived from phytozome v7.0 (chr-ID Bd2; pos 162 77861 to 16278645 reverse strand)
accaaggtaaatttaattatttgctcttgttggatcatgctccaaattgaaacaacgctcccaatttcacaaattaatcagtaatgatcccccataatacttcatcttcttgtagatcgttttcctcatacaatgtacttccatcctccgaccaggttcaatacgccagaacttgaccttcgtgaacctggaaccaaggaagggcgctctgggatttttttttaaataatacgatttttttaatcattttcaaaaataataagtgttttttaaaaatctcaaaaatagtacggcctcggcctgggcgaggccgattgggctcagtcggcctagcccaagccgattaggcccaatcggcctcgcccaggccgactgcaggccgcctgctcagcccgcggggcccccacgaggcagtcggcctggcccaggccgactgagcccagtcagcttagccgtggccgactggccactcggcctcgccgtgccaacaggcctcaagtgggccgggaatctccttttctcttttctctttttctcttttccctttcctttcctcccttcccatcgcgcgagccctcttcttcttcctgctgcctgcaccttctgttcttcttctcctcttcttcttcctcaaaaatgcccccaatttctagccaaaatgagtgagttttgatcccgtttaacccacaaaactgcatccccttgctatttagcacccaataacaccttgatctactcttttcgttgaacattttgagctaattttgtgttgctaagttggggca

SEQ ID NO: 14188 - DNA, 852 bp, Brachypodium distachyon
  Intron number 2 from transcript Bradi1g74070.1 (locus Brad i1g74070) derived from phytozome v7.0 (chr-ID Bd1; pos 713 62383 to 71363234 reverse strand)
aggtgcagtcaactcatcattaaaatccaaaaaaataaatcaatgcatctgatataaggcattattaccatagttttgtgctgcattaataagagaggaggtcaataggattcacaaaattggaaattgagtctctttttgccataaattgattatatattaggaagccataaatcattttttatacaaataagatatgagcatgactgtccctaaatatttagtcaacttctgccactgcttaacagtatcaagtttgtctaaacttatgctaacatgataacttacattttctttaaattacttattactgactagttgtcagctgtgtttcaagctcaaggaaagtgctttatttgatggccatagttcttcagagtcaccagaactgatcaagcaaggacatggcgacataagtatttacaatgaggttgacttttctgttagctctgcaaatgttaatcaatattgttgaatcatattatgtctatatgcctaacaatatcacatctcagtagcatcataagtccttgaacaaggaatacaagcattagtaagatgttgtatttcgcttggaataactcaatgatatctgtgaagtaaatttctaatatgttatgaattgggtatatttctaatcttctgactatcccgctttagtttgctttgttgaactacaaataacttttgctttcgtttcatcaatttttttccatataatatacttgctctgtttcaaaaaggaaaaaataactgtttgatttagtgagagattttttttaataatcacaatgtttgaatttatgggtgaaattatttctcctagtcactgtattgcatttcaacagaacc

SEQ ID NO: 14189 - DNA, 900 bp, Brachypodium distachyon
  Intron number 2 from transcript Bradi2g10510.1 (locus Brad i2g10510) derived from phytozome v7.0 (chr-ID Bd2; pos 871 8196 to 8719095 reverse strand)
aagtgggcaccgcttgcttcgtggatcaccggctggtacgttactaccacaatagatttctctgctccctgcttaggccttagcagtcactccatagtccatacctctgtggatgatgcaacctatccaagttgtggcgatggcagcagaagccattgcccttcgccaaggtctacagcttgcgatgtcgattgtgggtgcattcgactcttagttcacttggaccgcgtacatgttattctattcgcgccaagcagaagggtagccaatcaaggagtttggcagcgaggtgcacaaagatcaagggtgtgtttggttggatgcctgaagtagccatgccaaaatattggtagcatatgtttatctgtttggactctttcttgccaaaattttgattttcaatgttgcccaccctatctctctcccattttcttgacaaaataattggctaagtatggttgagaaatccttggccaaatatttttggtaaggctacatgtggcaccaaacacaacacaaatttgagcattgtctaatagaatcgatgaacctttgtcgttcattgttccctcctatctctccttgtagaaaggctcgacatgatgctctcagcttctggatcgacgacaccccctgtcgttcattgttcattatcttgtgaagtacgtagccttatctgtgagataacattgcactgttaaaaaaccgtaaagagtgaaatttacaccaaattatggatggaagattttcaacgtcccttctcttcaaaagttaagaaaatatacatccaagcacatactactcttatgtgcaactttgggtccaacgatactaattaagcttattcctatgccccatttgacaggttcaacatcgtgggccaggtatttgcgtcaattt

SEQ ID NO: 14190 - DNA, 734 bp, Brachypodium distachyon
  Intron number 1 from transcript Bradi2g39370.2 (locus Brad i2g39370) derived from phytozome v7.0 (chr-ID Bd2; pos 394 31500 to 39432233 reverse strand)
gccaccctcatcatcaagctgcaggtctgtctttgcaaggtcttttttgccatctttgttcccctccctggagattggtctctgctctgtttgcttctctcgtccagtgaaacttttctaggacaattgcctgatgttcagaagaatttgtagttcctggacagtcagccatcgtcgagctctttgaatggttcttgcagatgggtggtcagctctgtttggttcttgcagttttttctgttctcagatttctggctcttggcccttttttcttatgtttgttttggttattggtttcttgagaactttctcttgcataggtttgatcttttgccaacattaacttcaaaaaaaaaatctgagaaattttatgacgggtaccttctgtagtgtgtatctgactatcttctgttccattggaagtgggaacagactcttttcctgtgtgcgggattatatcatatttcatatatttccatacgacattaactccagcagaccatttctgaaaaattctctagtttttgggactataaggtagttggctcacagtagctttaaggtccatgccttttgtgaattttccttttcttattttggacagagcatagaaatgcccagtaagttgaagacatatcttccataatgctgttgaggaaatacattttgcatgaactttctaatttctttagaggcactgattcacatctttctgtaaaaaaaaaatccaggag

SEQ ID NO: 14191 - DNA, 977 bp, Brachypodium distachyon
  Intron number 2 from transcript Bradi2g36930.1 (locus Brad i2g36930) derived from phytozome v7.0 (chr-ID Bd2; pos 373 44686 to 37345662)
agaggagtgcgtacctccaggagcaaatcaaccaggtaatttcggatgaaaagcctcttggccaatccaggatttttcagtggggtgtaacaccgaaatttttccataactagcatgcaaatagcttaatagtaaggtcttacaacatcataaattctataagcttgaaatttgtaaaagttagaacacaaataattcaaagaggaaatggtcttgcatgaatagaaaattactgcaccagactacattatgctttctcattgccataaggtcattcttatgaaaatagcatgctcaataaatcagaaagcagtttcaagagctcatcaccaatgctatttctcaccttatcttcactaaacctattacagaaaatactttgaacactcccatgccactggtaagatcaataccattttgagaagtacaccaagtcataaatgacaaccttttgtgtctcaacaagtttagtagttgtatgcaccgctgccgtggtgcgtctcgcctgccaccttgcattcggccagcagttcgcattgacgtgatcgctcgctgtctgtgccgcccagctaccgctatgacctacttaagcctaggccgatgcaggtgaggcagagtcacacagagaccaaaggaaccaggggaagagtacatggagagggagagagtagctgagtgctggatcgatcgtttcgctcaggagaggcaagacatgtggtgggacatggctggggtggttgtcaggctctttgtgggctagttctttcttgggttttctgttttttttaattgggctgaactgcgtccaaaaattctcaaattggctatgaccccctttggatacgcccttggtgcttcttgcacacttctgtttgttgctactgtattgaaacaaagtacgatcatcttggtttgatttgggtgtggtgttaatgaagtcagccggccgcctcacccgaggaatattcgagggctaa

SEQ ID NO: 14192 - DNA, 982 bp, Brachypodium distachyon
  Intron number 1 from transcript Bradi2g10370.1 (locus Brad i2g10370) derived from phytozome v7.0 (chr-ID Bd2; pos 861 9947 to 8620928 reverse strand)
gtggaactgttgggcgacgggaaggggaaaagaaggtaaccagtaaaccctcgcggacggcctccttccttccgcacctctctctctcggtacagagaaatctagggttcttggttagatggttgcgagggtttagattttgtgttcattggtgcgtttgttttccccccagagggtttctttccctcctcttccggtgctttcctggctggcttccttcgttttcctctggatttttttgtttcggcgaagggcatgcatttgtgtgcatgttgcgcagggagttggatttggggtttgcatacgttttgccctctttcttgccttgtttttccgccctgttttgttgttcttgggggccaacggtttttcctttccttcttcctcttcttgatgagaggttccttctgttttagtgatcttgtcctggtatttcttctacgtcttgacgggcttcgaagtattttagttttttttttgttgttgttgaaaggagttttttttccaatggaagtattgtccttccaaaaagaactttttaggggttagcttgtgtttgggagttgagttttgggtccaatacccttgtaaattacctgtccattgtggagcattcttctcaaaagtagacaagggtaaatgaaactttgtttccaaacagggcttaacggaaacggagaagaggttttgcggtgtttctggagaggttttcgtggggtctcgtttaccatctgccgggaaaaagatttactttttattttatttttttgcaggtacattcccgagtaatttgtgcgatccttgttttcaacttccatgatggaaaaaaataaaatagtgttctttctgtgccttgtcattggatttggttctttttgccatatcttgtcctgtttgaagtttagttatctaataatatatgagtcgtttcacttgtttgtgtgcagattattgctgtggttgggcagcctcggaacagttt

SEQ ID NO: 14193 - DNA, 864 bp, Brachypodium distachyon
  Intron number 2 from transcript Bradi2g08160.1 (locus Brad i2g08160) derived from phytozome v7.0 (chr-ID Bd2; pos 653 1211 to 6532074 reverse strand)
tgtgtgcgtggccgacgtgcagttcaaaggcagaggtgcgtcatatgctttggttgctgcttgtttgtagctgttattgtgtctttgctctgatgattttgctattttggcgatcaatgtctgactgacactttcggtggattaattatgctctcttcttcattgtttgtttcattgaagttgatgtgtgttttatgggatcaatggataaacaaagaacaaaacaagctctgctatgtcggcgaacaaaacaagaaagagtgaatttggatttgtaaatggtcaattgatgtaattgataatcatctgtgaaagtacaccttgggtgaacaaaacaagcttatttcagatgcaaattcatgtactccctccgactcatattacttgtctcatatttgcccaaatatggatgtatctatgtttaaaaagcgtctggttacatgtaatatttcgacaagtaattccggacggagggagtagttttttttaattgtgtcgtagctttgatcgatgctgctgttgtgtgatccatgggacgtaatggcttgaaaggttataatttttgttgagaaaataatgatccatgccatctatgtgatgaaaacgctataaaaaggataatgtcggagaaaatagtagtttcagaaatcgatgtgtttcagcattcaagtcatatgtaattcttctcatggtagtgttgcaattttgaattttcaccaaactttaaatgtttttgtacgctaaattcaatcttgaggttgttaagaatttgagtgttctacctttttgtttaatcattgactcaatttgctttatgttaaaatgcaatattgtttccaacaacttgtgcaggacgatcaaaaa

SEQ ID NO: 14194 - DNA, 800 bp, Brachypodium distachyon
  Intron number 2 from transcript Bradi2g09500.2 (locus Brad i2g09500) derived from phytozome v7.0 (chr-ID Bd2; pos 777 5029 to 7775828)
ggaagttgttggaccaagatcaagtaggatcagtatttaaatcaccgaactagctagctagtgatacgatgcatgtgtatatatatatatctttggcttatgatatgatgcatattaatttctgtcattttatcctgcccttctagccatcaagatttttcttaacttctgacgcaaatgcaacaaaaaaaaacttttaagagaaacttaggcatgtattgagttatagtatatatgtacttatgtgtttccaagtatgggacacattaatttttttaaggaacaataagtatgggacaaatagtttctttaatttcctctgcctttattccatctcatgtgcatctggagagctcatgggaatagtacaacgttaatcttcatactcgtattttgtttgacgagttagcacaattaaaccattcgagagctgttagaatcacaatagttcgaatcaagccagttcgtcaaactggtttgattcaaatggttcaattgtgctaactcgccaaatggccatactgcaacatacttgtaaaggaagcaacaaactacgtaaaatacaagaacgatcaaaacatttcatagcatcatgaacatcatcaattcttccatgcatgcaggcaggaatgtatcacacatgaattgttttccttaaggtatcacacatgtattgttagtaaatgagtaccatatgtattgtcttgttaactagctaattttgcattgctcattacgtgcatacatgcgtgcatatggcaggagacgtccgaatcatccacggagcagctgcagcagga

SEQ ID NO: 14195 - DNA, 923 bp, Brachypodium distachyon
  Intron number 2 from transcript Bradi2g01440.1 (locus Brad i2g01440) derived from phytozome v7.0 (chr-ID Bd2; pos 925 176 to 926098 reverse strand)
gaggtgggtcgtctccggcaaggacgagtacacaggtatctctctcagcctagtccgctagtttggcctggttcgatcgttgcaacttgcaagagatccgtggtttgtactttgtagtgggtgtcatgtcatgtcccggttgccgatctgtttctagattgaatcataggggcggttaggagcgagggctctggccacgtagctctgcaagttcgttataatggatagataaatgttcatacaattaacacaattaacattgcacaccacaaaatagagcagcgacacactgcctgtgctgcttcatccctcagtcgtatctcagaacatcacctgtcgcattgatctgtaaacagtagagaaaatgaccaccggtgtgttaggttaagtgacacggcatctgcagttacgataatcgtgactgatgacgcagatctgctatgcattctgaggcgatattggttgttttagaattcaacgcggtaaccacagaagagagtgtgttttggaggttaaggtcactaaagtgaccataggcgatcgtcctcatcggtgtgtgatgatgtgactattggttgtcatgcggtatttgtagtgcactttgatgctgtgattatttcatttattgaaattaacatttgaccacggtatgaattggcattttgcataatccttatatacgcctgcgatggtacattgacttaatttaaatgaagactattatggtatgttctaattaacgctgatagcagttcggtcatgatcgcatctatctagtctagatgataaaagcacaactagagttagatttcacttacctgttgtgtctcgtcagctctgtgcgctgtgaatattaattgttcttcccattgctactctacagctcacttgccgtaatgatgatgtatttggtatgcaggtgt

SEQ ID NO: 14196 - DNA, 607 bp, Brachypodium distachyon
  Intron number 2 from transcript Bradi2g01770.1 (locus Brad i2g01770) derived from phytozome v7.0 (chr-ID Bd2; pos 124 4497 to 1245103 reverse strand)
tctgctatctgcccctcagacctccgatataccaggtaacatttacctgtccctcgtgagctcgggtaaaataaaactgtgattaatcaaccattggatatgatcctactagctagcaaacagtttcttttggcagaatggaacgacagaataccaatggtttctatcattttgttcttgtagagtattaggacaccaacattttgatcgagattgaaactgttagcaacattctacaccgttttacagtactcagctgttccctagtaggatagtgatgaccaaggcgggcagtatttgacaaaaaattccaaagatgtacccctcatagacctatctaagagcatggagtttggcatggctccctttgtagtttgcacaagatccacctgtgtatcgatcacataataaccttaaaacttcaaatttgccgactagcatggactcgaactaccccccttatgggaagaatggtctcagaatattgtatggtgctactttgtcatgttctgtattatacttcaacttgtttttctgttaaaagttattctggcatgatgactttattaatccttcctgttacacagtgtaccgtagggcattttgt

SEQ ID NO: 14197 - DNA, 649 bp, Brachypodium distachyon
  Intron number 1 from transcript Bradi2g23930.1 (locus Brad i2g23930) derived from phytozome v7.0 (chr-ID Bd2; pos 216 82364 to 21683012)
cccccgcccatctcgtcgggaaggagaaggaggaggtacgtgcgcgtcgacccaccaccttcttcgctcgcacccctgcatcggttgcggcctgcgacgagttcgtttgtaattattgccatcgagcatagatcgcctttgtttggttgttcgtgatgtgatgtacccccggcatcagttcgggtgtcgtgcagcggcggctggcgagtttcacgcgctcgccggatctgagtctgctccatggtttctgcacgtattgctgtgctactgtccatagcgatattcactaggacaagcttttgtacaagggtgcccacttgctaagtttctagggacttttataatctgaactggtatatttgggacttctagggagttctaatttgaactggtatgcattcgacgagtgatttcatgttggtccacaaggaaaatcggatggggttacttgtggatgttccatatgagaaatgggtcagtcactcagtcttaagctttgcagatacggagtaggatagttgatcatcatatacagaatatagtttgcaagccagtgataatcgcacagcagaatgaatttttgatacttgtatctgcacttccatactatattttgacttaatttcgtgctttcttcagaatcagcaag

SEQ ID NO: 14198 - DNA, 825 bp, Brachypodium distachyon
  Intron number 3 from transcript Bradi2g19750.11 (locus Bra di2g19750) derived from phytozome v7.0 (chr-ID Bd2; pos 17 396792 to 17397616 reverse strand)
aggtacaattcgaggataggctcttcactctacaggtacggttttctctgctctggtctttgctccgtgagtagttcagttcgttcatgtgagcatcagtgcgaaactgcgaattggcatgatcttccttagttactggactggttccctctgatgttaaagtagaagagaaaaaggttttctgttgattgttcggttttgcttgccaagattatcgtgcttggacaatggacctagcataacaggttttgttgatcttattgtgttttaagtagatggtttgctggagtttaatttctgtgagcatcatatagtgtaccctcttatagtgtagtcatttgaatgaaaataaacacactgtataattttgcatcagaacacctccaagaaaggcatagttctttcaagaatttactaaggcataaagctgtactccttatgttggcatgatgtagttcagaactagccttcggctttttacagcttatcattgttattagttattgttactcccccccccccccccccccccccccccacacacacacaatccctgctctttacttaacctaagcaattaacccctacaaattagtaaatgtacatttttcacggtaattcgtagtattttaaatttcaaaccattccatatcagctccttttgtttcatcgattcctgttaaagctcaaatgcgaatgggtacatcagaaatctattttgttgagcttctctggtatctctgattctgtactctttttttcccgttattgctctattgtttctgtactacttatatatgatgcttagcccttctttttttagat

SEQ ID NO: 14199 - DNA, 290 bp, Brachypodium distachyon
  Intron number 1 from transcript Bradi2g34460.2 (locus Brad i2g34460) derived from phytozome v7.0 (chr-ID Bd2; pos 345 41824 to 34542113)
cagcactgcatatttttaatctttcctttgcacaggcaagccactcaaatgaaacacagtcctgagcttgttttattatcaactttatatttgagcattctggcgttctatttccattttaatccttgattcattgcatgaattcgagaaaactgatcttttggttttccatagtaaactctgttatatatttgtattagaggcattattttatatctgtagttgccatgttcttcaagatgccactcttgtacgtatctcccttctaacttgcttttcttttatgaagc

SEQ ID NO: 14200 - DNA, 617 bp, Brachypodium distachyon
  Intron number 1 from transcript Bradi1g47690.1 (locus Brad i1g47690) derived from phytozome v7.0 (chr-ID Bd1; pos 463 95744 to 46396360 reverse strand)
acagctctgacggagcacacagcacaaggatctaggtacgtgtatgaaacttcgtttctgttatttttcttccttgttcaggttgctcataacgcgcaaggagaaaaaaaagaagcaagttgttagcactttttaaatttcattgttaaactaacatgttctgcttatatttcttcgttgctcgatcttaaccatgcttcaaaattcagctaaaacttgcataattacccaggaaaaaatagcatctgattgatctagcaaagttctgtactttgatcttccattccctcttcacaagggttttctaaatctcaatggtttcatatgcacacatacctgtaatttccagcacgcatctgttgattcgtttgtgcacataagttaatgcaaccccagcttctttctttaactcggttgatatcttgctatttgttttacaattttcagcacaaaaaaaattccctgttactagctgaagatcaactacctccgaaatgaaacctagccttattccattctatcattgtttctcccttaaagtaaacccaaaccatttattattagagattaagttgaacggctcatgaattgtcctctacttgttttgtcagtggaag

SEQ ID NO: 14201 - DNA, 848 bp, Brachypodium distachyon
  Intron number 1 from transcript Bradi2g07700.3 (locus Brad i2g07700) derived from phytozome v7.0 (chr-ID Bd2; pos 604 7810 to 6048657)
ctctagaccctggaaacagagaggtactaaaattcaagtagcgtgcttgttaattctatttttttctttgcgagggagcatgccttgtaatgtaatctgcacaaaactatggacttcttatctttatagagctgcaaccaacagttgaacatattattctaatttgttgttgaaggatttacaaaaaatctttgagattgttttattttgggaaatatgtcccgaccactgttaatttcaaatatgaccttgctgtaatcacatggaacttatggtactttaacaaatgttttttactagcataggttctgtaaacattactcaatatacatgatatccaatctgagttgtccaggacaccaggacaccagggcctcaagctcaaggccaactatcttatatatgaccagtaaccagtctagcacgtcttggatccaacatccatccacttgaaataccatgtgcctgttatctttgttaccattaaagtgcatttggtaaggtaggaaagcatgaaaaaagtagattgcgcagtatacctgagtcctgactacctttagctattgagtaaagaaaatacatgcatctgtgttcccaaaatcagcatcagtgaataaagaaaatatatccatgtagattggaataagagctagaaatagaaagtgcatttctaattactaattcgaattcgggtgttcttgctgtgttcatgtcatgcataataatacgatgctcaacaacattggcagccttttcctaaattcctaaattgttaaagtttgttaaatatgtttataaatgctctgcacacagggactaaggcaagaggtaattgtggagcttgttga

SEQ ID NO: 14202 - DNA, 853 bp, Brachypodium distachyon
  Intron number 1 from transcript Bradi2g19700.1 (locus Brad i2g19700) derived from phytozome v7.0 (chr-ID Bd2; pos 173 49085 to 17349937)
tcatctacaacgagcccgaggagcgcctcctcgaggtccttgctctctgcttcagtagctcccttctcttctctctcttctccctagctagctattaccttcccctttctccacgtgagcgttttaaccgatgatgcttggaatcaaaaccataagatatgtggtgaccgtttctaggcaactatgcttatttccatgcccaatgattctacaacaaaaaaggaaagtggacatggtgatatattagtgtcccagttaaatgcatgcgagtgctcactgctcagtaatttatggtgtatcttcttgagttcaagcgttcaaactgctgcttagccttttctgatggatcttgagcctatagtctggagttggagggaaaatccatgtgcatcaatcaaatggcctagaacgggggaaacctgaatctgaactatgctttcagctgaattctctgaacatttggtaataccgatcatatagggtttctcaagtgttaccaatacgtttaggaaaataatctcagttagatggtgatcaatcaaaatgcggggtgggcaggtataaggtattggtcgtattctagaaaaggtataaggtattggtcattcggtgtctacctaacctatgttactattcacttatttcatatctggacagaacacttaacctatcatgtctctgtctacaaaatatcttatcgcattttccaaccatatgatctcatggaaataggacgtctgttaattacttggcgtccctgctagcttgcacagttgttcttgctacttatctctttgataatttgttttagttttgcttctgaccctttgactgcagaaactgagtttggtga

SEQ ID NO: 14203 - DNA, 980 bp, Brachypodium distachyon
  Intron number 1 from transcript Bradi2g08510.1 (locus Brad i2g08510) derived from phytozome v7.0 (chr-ID Bd2; pos 688 0134 to 6881113 reverse strand)
agctggagggaccttatccgctctacctctacctggttcgcaaccgtcctctcctcccctccctctttcttcaaccttgtttctcgggacaccagagcacatggttcgtggtcacaatactatttgcacgggccctacggtattaggggttagggatcctaactttgaattgcttagattgggagatttttttataaaccaggaatctgagaaaatgttgattctgaatttctgattctacatggtgttcaaatctagcgaactcaggatgagacgacgcttagattctcaaacatttgcaggcctcgtactttcgattaatggcgctctttcccctgtaaaattatctacatctctgcattcgtcgcaaaagaagagagtgaaacatctactagtcatgcccagggcacctatttatcctattcttgccttgcccactgtggaagctggcctagagtactactgcctagaaatggctatacctgaattagcttttcgtgttgtccaaatgagtctgctgaatggcgaaagctgtcaattcacttgactatggctggacagtcttcttcagttgttctggtctgaagagttggcatagccaattagctaccaacaggggcaaccagaaactaatccgatacaatcctggttctatgcatgtgaaattaaactcatctcatctacttcctctgatcctaaattcttgactcaaatttgcacaaatatggatgtatctattcttaaaaagcgtctagatacatgtaatattttgacaacaatttaggatcggagggagtaagaaatacgagtgctatgatcccccattctatttgcattctcagtcacttcaactattgctggaggtcatgccttttgttgatagtgaaattagtggtgtgtatagtactgagttactgacgaacaaacattatcatgattctgcaggacggatcccagctacagaagaattgcaatttcgt

SEQ ID NO: 14204 - DNA, 779 bp, Brachypodium distachyon
  Intron number 3 from transcript Bradi2g23480.1 (locus Brad i2g23480) derived from phytozome v7.0 (chr-ID Bd2; pos 210 30215 to 21030993 reverse strand)
tggtggagggtaccagcccccagggagtcctttaggtaactattcggcctgttaactatcagcgtgttctgcagtatggtagtttgttcgatatattagaatggatctagctctggatgcacaatgccatctcagtgggcctagttgtatgttagtctgagtgggttgccctgtggatatgttattttctttttttggtcatatttggatgttgaaaccatgtgtagggttcaagatttctagttcaaattgggctgggacattgaggagaacgttttatatgcttagctgagtagcagtgctatatcttagccttacgtgggaaattttgaaaggagtgcataggttcccatgattttgatccccattgtgatattaatgtattagcctgttaaagatgaatttgcaaaactattaaatttcattcatggcgtgctttgtgagttgagagctaagagcagcctgtgtttgtgtgaatcatgagtattgtaaggctaaaaagagagtatcatagctgttgcatggagcgcataatgataatcttctgcatttcatgaatgctagctgttagcctacgaacgcagcatttttagactttcagaaaaaaattatgatcttctcaaagcaagcactggcatgtgtgttgtttgtcacttggaaatttgatccctgccaatgtgaaaatcataggattttctcaacattgcattttaacttggtaccggtgtctcttttgcatgcattagtacatcttgaattctctcgttactttcttgcag

SEQ ID NO: 14205 - DNA, 637 bp, Brachypodium distachyon
  Intron number 1 from transcript Bradi1g56220.1 (locus Brad i1g56220) derived from phytozome v7.0 (chr-ID Bd1; pos 548 66946 to 54867582)
cgggcgccggaggaggtgccgcgcgggcaagaggagtcagcgtcaacggcacagcaggagttcagcctttacactcctatcctatggagttccgcgcgcaggacgaggaggccggccacaggggaagggaagaggaggaggccgcggggggtttgaggcggcggcggccgcaggggaagggaggaggaggccgcattggaggatggctggggccagaaaaaaagaaaaaaaacggttcggggaggggggctgaaagattctcctgcggtggaattgcagcctcaacacttaatcactaaacgcgcacggttagcaagtaatctgtgtttagtgagtttgattgtgaggctattagtagtgtgtgttcgtttagtgggtggacattggaaagaacatgttggtgcctttataagtagtagagattctttgcttcagcgtctcctgttttaatgaagtggatttgtcagtattaggcacctgcagtaattcactttgtctcgtgtgtgacgttcagttcagctagatttttctggagcgttggatctagatccaacggtaggatgtaaaatcacacgtgtataatatggggcatgcaatgggtatatgcagggaggtgtggcaggggtactgcgacgtg

SEQ ID NO: 14206 - DNA, 478 bp, Brachypodium distachyon
  Intron number 4 from transcript Bradi2g21020.1 (locus Brad i2g21020) derived from phytozome v7.0 (chr-ID Bd2; pos 183 97280 to 18397757)
ctccacagtggctttcagctcagttacttgccgtgggtttttcttttcccaatcaaaacatatgttcattaccagtaccagtatttctattttctttacccagattctagtgctgcttagttgggactcttaccatgaagtaatttaaaactccctaaatgtgctatatgaatgaccagtgcttgtgctgtttttcaccaaaggaagtgctacttagtaacacgataggtgtaaaatgtctggtcatacatgacaataaatacacacaatgactgttttgagttctttggatttgaaagatgttcttggagctcagaaaaaaacaatgtgaacttagaccttgtaatttaaaatcagaactgcatttattttggtaatacttctgcaaggttctagatatttatatagtatgtcactataaatgaaaaatatatgattcatcatcaactcagcacctcagtttcctttttttaggtcg

SEQ ID NO: 14207 - DNA, 1034 bp, Brachypodium distachyon
  Intron number 2 from transcript Bradi2g32190.1 (locus Brad i2g32190) derived from phytozome v7.0 (chr-ID Bd2; pos 321 88725 to 32189758 reverse strand)
tggagatttatttgcttacccctcagggccttcaggtcagagacatttgcctcccctagaatatgtcaatcgcttgtattgcatcattatgtgctatttagggttatatgatggctactcttgttcagataaatacaagaatccaagcaggccctaatatgttttgagttaaccagttgtagtttcttctggacctattagttccttggatgcaactataaagtatttcctttggttgccagcttatggttgatgtacctctgtatggaacaattgcaacacttgagctcttccgttctcgtgtgagttcaatttctgttcctttggttgaaaggcactccttgccctctagcagtatttctgtagtataatcataactcgtaagctattttctttttcattcccagagtgaaactcaagattttcttttcatctgtatggaaagatacagatgcattgttcttcactgggacggaagaaattcagagcttattacaaggtttagaccttcattcatcacgttctgtacatatacagcaatgatcaggactgatgcttatcttaagtccatccatcagtcgattattgttaatagctatgtacccggtatgttatatctgttcctgcaaccgcttggtttggtggttctaagacttattttataggcaggtagtgacctgaagatcaatctagtccaaccagtacctttaccttttgatagaactcaactggaatctgtcttagtagtatgcattcattccccaagcccctaaccatattaatatatttgacacctttcaaatgagtagcctagtaaggttttgcttagttttaaggatcttctgatggacatggcaaatgtttttctatgttagttgtctgtcttatgatattatgcatattgatatccaaatcccttatgttgccactcaccattagagcaaaatttaccttgcaagtttgtggaatcttttctcagcttttgtaaatcttaataaggaaataaccactttgaatatgcagatctggtgggg

SEQ ID NO: 14208 - DNA, 937 bp, Brachypodium distachyon
  Intron number 1 from transcript Bradi1g63480.1 (locus Brad i1g63480) derived from phytozome v7.0 (chr-ID Bd1; pos 626 25364 to 62626300)
caggggatcaccgtgtggggagcttgacgacggcgcctggcctggctttcgcccctctcctgtgtctcatgtatgtatcattaatctaggcattgtagcgtgattctttgcttggcagtttaagctttctatccttgtttggatctgcttgcacagcctcgaagaagattttgcgtgagaagaaccgcggccatgtactaattaatttcttcatttgtttttgtataacaattaattgcgtgctctatttttcgaactgtatcaagacctcgagtctttttccagaaaattaaaatgaagaccttgagtccttgaccagcttcccctaaaaaaaactattcgttctctttcgtgcggctttcgtgctcctacctaacatcgcaactgcctttgcgcgttgacgtattgtgttgtgtatttcatcacttgaaaaaaaaaatcggtaaacaatgaagcatatatagaatacactacatcactgctcattatgtttgtgtgcagagtctggagcattccctctttctgaaaaaacaaacatcactgctcattaggtttattctctactaaaaaaatgataaaaacatttggtgtttcttctgaaaaatcagcacatattattccagtgaaacacatgcatgaaatagagggttcacatgggactctgcctccatatactccatatattagtactatacagtgttaagcacatgaaggttgttagaccaaccaaatgattttttttttgtgctgaggacctaccacttcttgaaagcaactcacatccacatggtctgcactagaaccgagttataaatatacttcatacatataatcattaccccttttgctttcagttaagtttatggcaagctatcaagcaatattttcctttggctctgcagattctgaagcactggaagaaggggagacgagcaat

SEQ ID NO: 14209 - DNA, 614 bp, Brachypodium distachyon
  Intron number 1 from transcript Bradi2g03150.1 (locus Brad i2g03150) derived from phytozome v7.0 (chr-ID Bd2; pos 226 9789 to 2270402 reverse strand)
gcgacggtaattaaattaattaagctcccgggagacatccttttaatttcgcagcggtttgttctagtttaattaattctcggtacgatcctctcgtatggctccgtacggttgtggaaatcgcacgcccatttttggagggttttgaatgcttcatcatagattgggatttttttggggagaggggttcaaattttcagttctccagcgggagacctggcctaatttgaaaggcatgcggccgctgatttcgatcctaaccaacgatcacccaacagattagggtttaatctgtcgagaatggattaggcaatgcagcgcatgcactttagtcaacacagtttgcaggagcacccgatgttgcctcctgaccagattcaaatgctcctccagctgctctacattagatggattttataaattgtattgattatcccttgctgctgcaatttgcatactgttcttgttattcgtgcagttccatcgtgagtaggattgatgggtgcttctttatctgtgagattgtcttttttttaaaacggatatatgtgagattcactggatttgggtggtggtgcaaatcgaatcttcaaatgcaggggaggtttctgagg

SEQ ID NO: 14210 - DNA, 776 bp, Brachypodium distachyon
  Intron number 2 from transcript Bradi1g55030.1 (locus Brad i1g55030) derived from phytozome v7.0 (chr-ID Bd1; pos 534 07219 to 53407994 reverse strand)
aggtatatctgtcagctactcaagtgaaatttcctgacaattgcaatagcaagtagtactgctgctatcggcaatcattttaagagtttcagtagcgcctgcatggtgacttttgtacaatatgtttaaccacctaccccttaaatcttcaaaaattatatgacaattaaggtgtgcttatgtgttgagcaaatcaattttctttgctttaaattataggaacatatttgcagcaaaccacttgtttgtacagttgtaagataatgaattatgtttttggcttgtcatgatgcattcacagattttaccctggttgtcaagttattcgagttagcatgcatatatctatattttgatgtattcctacatgaagtaactgataatcatatacattgttcaaagagttattagcatattatacattgaatttcttatggaagcgtattcaacaggaatataagttagctctgatggagtttactgccccataacaaacactgtagcctctggatattataagatacatcacattagtcctacactaacagatattcccaaacaacaacgcagggaatgcgaaaaacacctcatgcagcaaaagtgtatgcatgtgctgctggttctttcttaggaatatattcctaattttgtctagctcagcattctagttctgtaacattcctgtcctgacacagcaaagattattgtgaaatttctttactcaaccattcttctttccaggtttcgaagattcttgcttattgcgactcgagacg

SEQ ID NO: 14211 - DNA, 506 bp, Brachypodium distachyon
  Intron number 1 from transcript Bradi1g54200.1 (locus Brad i1g54200) derived from phytozome v7.0 (chr-ID Bd1; pos 525 89946 to 52590451)
cgacggcctcgtcctcttcgccccctccaccccgcgtaattaatcaactactccatcccttctcccccttagatctctagcctcattcagttgttttgatgttgtggttcgtgagctgaacctgacccgatctgtcgtattggagtgattttggtggtagattcggtggatagatcggagctctgggtgctgggttggtcggttgtgtgatcctatccgcgctcttgtagtagttccatagtgaaatcctgtgatatttgtggacttgtggtaaaattcagctttatggacttcggatgcagaagtttgggcttacagaacaaggttcatttcacatttatgtatagcactttaactctggtggagaaaaagagatcctgagataccagttgtttccagtttcgcagtgtttttgtggaatgattgagtaactttgattcatccatgtcggtttttaatgttaagtcttcgtttaattgcaggtttcggcggatcagtggaccaga

SEQ ID NO: 14212 - DNA, 745 bp, Brachypodium distachyon
  Intron number 4 from transcript Bradi2g07940.2 (locus Brad i2g07940) derived from phytozome v7.0 (chr-ID Bd2; pos 629 9016 to 6299760 reverse strand)
atttggccaagattggtaagtaaatgaaaacattcatatgcaaagttaagatttttcctacatattgcgaaatattattttagtaacaaaaataggacaatttaaacttgcaaaaagaattagctgtcatttatcatgcatattcttttgtacacaaatatagataaaacttctagcaatcttatccaagtcacccttggttctctaaaaaaaactcaataatttcttttcttagcgtgtatatcttaactttacctttatccctaatttgttttaacaaagtaacctttattcccattttacctaattaaactgtagaggaatcttccacgaacaaaaagagaaataaatggaaccttctcatatacacaaatgtttcttcagacagaagctcacatgcatacaccgttacttttagctgcatcgcgacgcagacaaatatcgtactactcgctccgtccaacaaaaaatgtctcaagttcgtcaaaaattggatgtatctagacatgacttagtgtatagatgcattcaaatttagtcaaagttgaaacattctttgttggacggagaaagtagaataatttgccattcttgccacagacgataccctcatattaaaaagaattttgtgtgttccagaagagaaaaaaagggtcacactctttcagttattaactaataatatgtattcatcttggtttgatgtgcagaattcccaggagccaagctggtgagcgacgcagtg

SEQ ID NO: 14213 - DNA, 675 bp, Brachypodium distachyon
  Intron number 2 from transcript Bradi1g62440.2 (locus Brad i1g62440) derived from phytozome v7.0 (chr-ID Bd1; pos 616 67908 to 61668582)
ccaggccggactgaggttagcaataacatacttagttgtttggatatcaatatataaaatttcttatagcaagcatttgatggaattaagtcaaacgcatgtcgctctaagagtcttgggttaagctagattcagttaaagtgccacatactgtagtttattgtactgacagaaaaccttccaatttgcaacttcaagtctatccatgcatcaatccatcagaggaattacaaaagcttttttttttttgcttttcccctcttgggggatgccttgtctagagttttagtgaaaacaagttctacttttaaatgcttctgtatcatgtttgtggcataacattcttaagtaaccaagtcatgtcagcatagaaggttatgaaattagttacacctgatgtggaatcattcatatgcgtcgaaatctttttttttcaccacatgttttctgtgtttaagccttcattcctcatttcgttttgcatttgaggctagcctttcttctgcaactgtgtttaatatgacctgccacactgtttacaattaatgttggtcagactttagacctaccaatccaatgaatagctattgttcttaccttcccgtgtatcatataatttgactatgtttgccccttttaggtggaacaactgcacaaaatttttaagttgtgcgg

SEQ ID NO: 14214 - DNA, 900 bp, Brachypodium distachyon
  Intron number 1 from transcript Bradi1g69710.1 (locus Brad i1g69710) derived from phytozome v7.0 (chr-ID Bd1; pos 681 91569 to 68192468)
ttcggctacgacgtcggcatctcaggtatatatatatataactgcatacatgcatatatagttgcttgttttctgattaagatcgtcgtctccatgtgcacacatgggcggaataatcaagtgaaatctcctctcacatgtcctgtgacgacgatccatacgtcgtattatttctcgtatgtgtacgttcatgttcatgcgtcgtagtccttttggagccagcttggtgggaggatgttaaccgagtggatatgtgatgctgaaagaagcattcatttaggttttgactgcaagttcgtcttccgatgacggagcagataaccccgaaattaatgcaattaatccccgtcattaactaccactcaccagccagcttatcattaccattttttgttaatccactgtgaatactatcctcgtttggaaaaaaagtgtgaatactatcaagttttttcttggtgttcatgctcgatttctttgtggagattgcaaaccgagcctgcctctcggttattcatatatgcagctggactctgatcctgtgagctagcatccccagcattattttactgttaaataatatctggaaattattttagtcttgagcttgccacctacagtacctcgacaggctgttaagtcaacccatttgtacaactgccggatcacgacacgttgccttttgatttaagccaattaattaatgaattgattctcactaaattaagaaaatcttatccgtttcattcaaatcgtccaaattttcttgggttgttcagagcgtccagctcaattacaggcggcgtatgtaattgaggcaaactgtatcgaatcaatattactacctatgaaaaatctttctaaaaaaatgtaatctttttctcaggtggcgtgacatcc

SEQ ID NO: 14215 - DNA, 523 bp, Brachypodium distachyon
  Intron number 2 from transcript Bradi1g51040.1 (locus Brad i1g51040) derived from phytozome v7.0 (chr-ID Bd1; pos 494 75030 to 49475552 reverse strand)
actggactcgcaagcaggtatgcaggattttgctccaattcgtgttgcttttagtgttgctttcagttaaaaggtttattatgttctggtgtcatgttacattttttttttgataacggttagtagttccgagccgagggatttactagttagagacaggtgtcggttgtttaaatttgggaagaaaatgctggtactgcgatccctaatttgctttgctgaagatactttttgttggaagttaatattgctgtaacttgtaatgaagctgaacctattactgccttttatagctgactccaggcttggatagttgatggtctgcaagttaatacttcgaagttggaggaatgtgttataactctatttgtttagtttctttgtaaatgatttctggaagctcaaatgttgtatttttgcacttacccaaagataggattagcgcttggtgttcatacgatgatgtttaaaacaacttgtttgatgtaatgtgatgcaggtgttctcgttatctgtgtgggag

SEQ ID NO: 14216 - DNA, 684 bp, Brachypodium distachyon
  Intron number 1 from transcript Bradi2g25710.1 (locus Brad i2g25710) derived from phytozome v7.0 (chr-ID Bd2; pos 238 87764 to 23888447)
gagaggatcaaggtgaggagatgtttcttgaactcgaattgaaacaaaattggaggttttgcttgtaatcatactaaacaagatcctcaactgtagcgagttgacacttcaaaacgatcaaagacaagaaagtataaacaagatccttaactatatgtacttgctaaattcattttgctgtctagccgtaagtgtttcatcactcgtcagtagctgggatgtggtttggttggacttcggtctattattggtttggttggactccggtccttttattgtacagaactatgcacatttattgctaactttggttttaacttctctctatgcctctatgaatagctgggatgtggtttatctgaactgtttaactatcaaacatttgttactaaagtccattagtcgaaccttttgcatggctagttttttgtttcacaaaattgctgcttgcataaaccaataactgtccacgcaaataaataaataatacaaatatcaagatataactattggaatagtccatgacgtttcttctttctattaacatattgacatattgatgtgacaaacagatgtgctctacataatgcggttcaaataatattatcagcaacggagtaccactcaacctcattctgggattttgtagggttggataccagaaatatcagctatcacctcttc

SEQ ID NO: 14217 - DNA, 520 bp, Brachypodium distachyon
  Intron number 2 from transcript Bradi1g78510.1 (locus Brad i1g78510) derived from phytozome v7.0 (chr-ID Bd1; pos 744 73156 to 74473675)
tgctcctcttcgcctgccgcaactgcgagcaccaggtacctgccctaattccccatcccgatatgcaatgccgcgggggttaattgtgcctccttcccctgccccccaaatcctagggttttgggtccctattcatgggctcgcaagtgttgttagaagccgaattggggctcaatcacacacgcataccacgtttcccaaatgctcggttgcgtgatcccggttcccacaagcaaacgctttttagttgattcaggcagagaccataaacgtgtgccacatttgtttatattttttttcctctgtgagaatggataatcacttactaattgtttgattctcctctagctgcgcaatattttccacaaccatgttagtgactgttgctgtacaaacttaatccagacaccctctcataaaaatgtgtaaaaaacttggaaggaaaaacatgtagaagaagggtcaccaatttttgcttccttgattcaggaggtgtccgacaatacctgtgtctatcgca

SEQ ID NO: 14218 - DNA, 986 bp, Brachypodium distachyon
  Intron number 2 from transcript Bradi2g19320.4 (locus Brad i2g19320) derived from phytozome v7.0 (chr-ID Bd2; pos 170 25885 to 17026870 reverse strand)
agtcgaaagctaataatagcagtccgcctagccaggtaagtttactttccttcttttatctatcatcatcatttgtttttgattataattattcttagtattccaattagctaagagttacaaatttatgtatttttatgtggcacttggaagaggaagataggctcagcatgctgcctgatgatattttgctgtcgatcctgagcagaatcgactttactacggctgtaaccacaagtgcgctttctactcggtggagggagttggcttggttgttgcctgagctcaacattgatgttatggatttcctacctgttccacgcccgaatcctatcgaagcaaatcatatggatgaagctatgtcatctctaaccaaagcaatcaggagtttattgacaaaacctcgcgctatctcatggctggaccttaagctcttcttgaatagcgctagtttctcgtgctagataggcctgctgttaagcgaagcggtcgatggtggcttattgaaagatttgcacctcgattttcttgatgagacagatcctccagagtgtgcccatttaaatatgcggcagctagctcgagacattcatggctttttcactacctaccctagtatgctccattgcgtgacggagctttctctatgcaatgtacgctttgacgtggtggacacataaactatctcctgtttgactgctgcaagcaattgaagcaactaaccctctatcactggttagatggttggcgcactgtctggacgatagatgcgccaaactcaaaacttagtgttctagtactcctgacatgtcgctttgagagactttactttgtctgccttccaaaactggagaagcttgtattggatacttgggaacctcactctgtacccttgtcttttggttttgtcccatctcttggggaagtagaacttacatgtggtgcaacacttgatcagatactacttaaattaagcgatcctctac

SEQ ID NO: 14219 - DNA, 895 bp, Brachypodium distachyon
  Intron number 1 from transcript Bradi2g19130.1 (locus Brad i2g19130) derived from phytozome v7.0 (chr-ID Bd2; pos 168 83725 to 16884619)
caggtccctccctccctctaacccattcgttcattctcatcagaatctccttcagttaattgatggtcctttgattgattataacaggacctgtttataatttgtatctcaggattattattattttttgcgggaaatctgtatcttaggattacttgggtctctttcaccctggcctacttagtgttgggaaggatcgggggtgtcttctgcttacttatgtattctgaaggatcaggggaagacacaacttttttaccgtaccggagtactggaccctagaattttgatatcaatcgaatttcattaccatatcaatttcatatcacttgagtattattatattgaaagattatctcattcctatgccactaaaattttcctcaacacattattatttcagtactatattattattatttcatcgctatttcattttcacatgtgcgagtgcatgccacgcatcaacgtactgtgggtaggactgggtccggtaggaactgaagctggtaaaaaagactttctagatcagtggaggctttatttttctacttagaaaaagatccggggaggattttgtttattttttgtggatgtttgctatactagttagagtgctagactgcataaattattgtaaagcctgcatcttttgtttctccattatgggactggaagcaattatcatccgacacatgcataaactttgttttgtttctatcgcgtacgtgtttaattttacttgtttccatatctgcaaactgcattgacacttgtttccgtcagccaaagtatattttcaatctgaagtagtgcactatcctgatgagagacgtgcatccttattttttatcatgcaggtctctgccttcctagctgggttgtttcattcagg

SEQ ID NO: 14220 - DNA, 853 bp, Brachypodium distachyon
  Intron number 1 from transcript Bradi1g47430.1 (locus Brad i1g47430) derived from phytozome v7.0 (chr-ID Bd1; pos 459 54331 to 45955183)
gatcgagtccgagcgcccccgcgtcgcgtacctctgtacgttccgctacgaaaccatggccttctctgttttgggcaattttgggcgcttcttttggtaccgtttggcgcatttggtgtctcgaacgaaataagcaactcgttatgatttatttggcgtttggtggaaatcgcacagcctgtgcagcgtgcatttgggaggttttatgtttagaagctccagaattgttttgctgggatttctcgggcgcgccggccgtcagttagcttttttggggttgcttaattgctttggtacttacgagtttaagggggacatgtcggagatttctccgcgtatgttctggtttttccgcgttaggtttttcggatttggtatgtttttccttttctgggaagctggttttggaagtagcgtgtcccttgtatggatgagatgttccgtgttcctatcagatgagatcactcttgtgttttgagagcgccagattcgatttagtggatggcgtttccaacatttccgtcaattgttttgcttatgatcaattttgcgttgggacatgctccgtactagtttggtttgattcattttaggatacgatagcctggcgcgatcagtttgcttgcaataatatgtactcgtatctcgttcccgtatagctctagtgggtttttcggtttctgtatgtgatttctccggtgtgttttagttgtgccgcgctaggtattttctctggtgtattttctcctttcacgggagctgattttcgtagcacaaatgggttcttcggtttctagccccctttacgttctcacgctgctgctgtgtttctgtgtgagcttaggtcgcttct

SEQ ID NO: 14221 - DNA, 751 bp, Brachypodium distachyon
  Intron number 2 from transcript Bradi2g08650.1 (locus Brad i2g08650) derived from phytozome v7.0 (chr-ID Bd2; pos 702 3285 to 7024035)
ataagcacactgttagtaccttattgcattgtttttttattccggcagagaggttatagatgataattgttttatctttaacgagttcaattttctgtcaatcataggtgtttgggacagttgctgaaggttttgacacactgacaaagataaatgaaaagcatatgttttttttgttttttgcgagtaaaatgaagcatatgttgacgacaaaggaagaccatttaaggacatgaggttcaatattgttttacacctatggtaaactgcctaattaggacatatttgccaaaaaaattgatgctatttagtttgatgcccttgagaggccaaaattcctcactctgccttcagccaaatttgcccaaaacatgagcagccaatttggtctacaaattaggtttggttcttatgcgctacatttgggcaaacaccaaaaacgcctatttagtttccagcacaaatttacttgtttctttctgctgaactcttccttaaatcttaataggcaggattaatcatacatatatcttggtgatgatcctcctcagcttgctgaacttattcctggtaatgctccgctaggaaagccacgatgatgtagtttgagtaatggtgtcgtgttcatttctgtaagatgacaagcttttcagtcttctagcctttaggagaggtcaatgtgtgacatatgatgtcctttcaatgtggatatggcatattgttttgtcctgttattgcaggttgcagaaga

SEQ ID NO: 14222 - DNA, 613 bp, Brachypodium distachyon
  Intron number 1 from transcript Bradi1g65960.1 (locus Brad i1g65960) derived from phytozome v7.0 (chr-ID Bd1; pos 648 56939 to 64857551)
cccctgctgctcctggtgctgggccttcacattcggtacattttcccataaaactttgctcgacacggtaattcttcttttctaatgcttataaacattcgagttggtggttcatctttggagacgttagataattattacttgattgtcagagacttcttattttcatcaatttattacctgtgcatgcacaaaatccactctcatattcttatactccctccgtccaacaaaggatgtctcaattttgaccaaatttgaatgcatctatatactaagtcatgtctaaatacatccaaattttaacaaacttgagacatcttttgttggacggagggagcagatgattttgccgatccgtagcaatgcacgggcacttcactggacagtataaagacatgtgaaatcctaaggtaccataagtacaaaaacagaagttgtttttgtatttaatagaagctgagttatttggaggcttgtggtttttctttgaactttacgtgtttaattaacttctgttatactgagttggtacctacttattgttaagtgatgaagcctgactatgatatattgaaaacagagtctgctaacagtgcaaagtgatattctg

SEQ ID NO: 14223 - DNA, 835 bp, Brachypodium distachyon
  Intron number 2 from transcript Bradi2g09120.1 (locus Brad i2g09120) derived from phytozome v7.0 (chr-ID Bd2; pos 742 0546 to 7421380 reverse strand)
aagccagcgaggcggatcaccgggttgaagttagtgtatgtgcctatccctttgatgtacttgcacctttttatattaagttacccttttaactatagctgtttggttttctcttgtatggctacaagcacatctatgtccttttctgccaacatataatgggatggaaaccatgttgtatttgcatcttttgatttgataattgtatactgtagcttggatggtgcctgcagttcagtaacaaactatctgaaataattttgtaggtcttggtttgatttgcgataatgttgtcccatgaatggaatctgcaattccttaaaaaaaaaggaatccgcaacatggtcatttgtttggttatttctaagtacagaagaaagtaattgcgctgaactgcttgtggagtttagttatgggaattaacctttccagttcaaatattctgaatttctgattgcaaagctcaaatacaaaatggtgtttatttttgtataaatgttagtttcatcagtcttgtacataataaaaataaatgagctccttgagtaggtaccaaaagccattttctttcattcttactcaagatgttcagtcaaaatattttctagcatggcgacatatccttcatgacaagcaatttaagtgcaactcgtcgaaccatgagttatgatgaaccgtggcacataaattgatcatatgtagtgttttacttgattcctgttgtccatcttcattcctctgttgctatttttttttttgatgtttctattttttatgtgctggtagtttatttctagacaatgtgttaaactacaggctaccaaaaagattgctg

SEQ ID NO: 14224 - DNA, 914 bp, Brachypodium distachyon
  Intron number 2 from transcript Bradi2g23530.1 (locus Brad i2g23530) derived from phytozome v7.0 (chr-ID Bd2; pos 210 76543 to 21077456 reverse strand)
gaagaagtgagtcatctcctaaccttgcaaattgcttttttaatttgttgtttttagcaagcaagcatctcgctagctctttcgtttttccatatgccgtaattatcttcttcctggcggcgaagaatctaacgaacaactcatggtcacatcatcatggatgctgccgtgaatctttgtttatatactgtgcttgcacagcttatttcttgtgctctcgatttgatggtggttgcgatgtttggatcacgatatctgctgatcttctggatatatttcttttctttattatatgcctcacttattttttgcactgttgatcaacagttcttctctcttaactttctttaaaactaacaacttgatctggagtctatatatgatcaaagagctgcacacgatagttcatgaacatgaaattagacagataaaattccacggcaccgatgctcttcttttgtttcatgggaaatttcaagttgacgttggtactttgtaagattcctagagtttgtcctcttccaatatggtggtatacccccatcgttgtaaagctgcgagattctgtccgtatagtcccattcccagatagcttcttgttttttcataaacaaaaatatagtccgccattttagtttagttcgggaaagttgtttcatataattatagctaggtccttaattaggaattgacacatgatctgctaacgtctagaagagttttttttgtgtgtgttttggaaaaacaagtttttaaaccaggattaattctacgagtttattcgctgcagcaactaactggcgcacaatcattgttttgttgatcacttcataaaattaatttacattatttgtttttaacaactgaacaaccttgtaggtttgcaagcgatacaagcaatactaccagcagct

SEQ ID NO: 14225 - DNA, 717 bp, Brachypodium distachyon
  Intron number 2 from transcript Bradi1g69900.1 (locus Brad i1g69900) derived from phytozome v7.0 (chr-ID Bd1; pos 683 50256 to 68350972 reverse strand)
gggccgttccaggtctcactctcttgatctcttctcccaaaaattattttcttcctgttgattttagggtgatatatgctttattatctcctagctttttctctttctgaggagatatggtacttggctacttgttatgaagagagaagaaggggtggaggaacgctgcaggaaaaagaaaaaagttgcactaatgaaagaaatggaacgcaaccagaaataaatcgctgcacagagcgtgtgcgattttctcatgaaatatggtcatcgccttgccttttttccagtttgcgtcagtgttccttttctttgctatgtttgtttgctctctctctctctcctctttattgaactactcaaaagtactgtttgcaaggcaagattaaacaacactggactagaaaagatttcttttgctcatctgtgtcctgggaaagctctcatcgctgcaaaagccagttgatgttttttaagctatggcagcatgcagaagctagcagcagctctctgctgtggcattcatgcatggttccccaactcatatttgggaattagctaggagatgcgcattcattactagttttgaattttattgacgaagaagatctgagaatggcttctaggaaattaatatattgattttatcatggtggcgttgtgagatttaattttggccttgattcttatgtgtccacttgatttattcttggtataggg

SEQ ID NO: 14226 - DNA, 868 bp, Brachypodium distachyon
  Intron number 3 from transcript Bradi1g46310.1 (locus Brad i1g46310) derived from phytozome v7.0 (chr-ID Bd1; pos 448 35113 to 44835980 reverse strand)
atactgaaggtatgtttttttcttgtgttatctatgtcactggagtagtaccgaactaacgaccttattgggttatgacccaaaagataaatacattaatgcaaatggaggagacctgaaaaaggtttaatgcaaaagtatatcattttggcagttggcacttggaagtgcttctgtatttatttgcagtaacacgtgtcgcgtgctttacctcttctcgtacacaaaatgttcatacttccaatggtgcattaattgcgcaccgtagccttggatggtttcatggggttgagtcaattgccatatattaatattagtaggtgcttctgtcaacatccaccaaaataattcttgctagttacatttgattgttacaaataattattgaatttgattctcacctgctcgcaccatcattagttacttgcatagagttacagaaataaaattttgtcgccaagcgacagattgtaatttttttttagagcgatagggggcctaaccccctgtttccattttttgggtgcactaacatacttgcttgtagctgaggcaagaccttggcattccgctgccccaagtatcaatagttgcaaacacaaacatgctgaataatgtgcacttgtgaattatgactgccactatgaatacatatgcacaacaatttaactgaagaatgtggagcataaaattgctggcttgcatttttcttacagccttataaaatggttaatacatactgccatcattttatatttgtcctttagcagtatcctttatctgaggtggaccataatatagcttgaaagaatcaagtctaatggagatcatttgcaggctacaggtggtggagcatataaatttggtg

SEQ ID NO: 14227 - DNA, 599 bp, Brachypodium distachyon
  Intron number 2 from transcript Bradi1g46310.1 (locus Brad i1g46310) derived from phytozome v7.0 (chr-ID Bd1; pos 448 35984 to 44836582 reverse strand)
gttcgtccgggccgaggggctcctcggctgcagtacgtatccctctggttggggcgctgaattggctgatttctctccggctcttggtttcgtggtcttcatatctgaaactgtcaatggtgaatactgaagaattcggtggcctgagaaataagcaggatatgatggtaagagagtacagctgtgtcgcagccgttaatttctcaggaattcaaaagtttgtggtgtactgtagctgatgatcacctctaggaactacaggcctacagcttcctttttttttttccgccagggaggacaacaaaccctaaatgttttgggtgccgactcgttaattatagcttcctttaactattgaaacggatgactctagaaattacaaattagctgttgagaacagctaatttcatttgcaagctttctattctatgacagcaatgtttacctgcgtgacagattgctattttagttaccatgtcagaatttcagcttttttctggtgttggatgactagtcatgtgatggagtattatttttattgtgtgttaaactgtaacattttcatgtcagggacaaagacagggtcaagcaaagaaaat

SEQ ID NO: 14228 - DNA, 863 bp, Brachypodium distachyon
  Intron number 1 from transcript Bradi1g55970.1 (locus Brad i1g55970) derived from phytozome v7.0 (chr-ID Bd1; pos 546 33983 to 54634845)
ccaaggtgaaggttctctccgccgtcgcccccaaggtgaagctcacttgtgccttctttgattctctgttggctgcaccttgtgcgtgagagagaggaaggaaagggagagagctgctgctgctgcagttagaaatagtgttttgccataaagagcccttaggccaatatcttctatatatatcaacagatacattgtacatatggcaagtacatggttagctacaattacgcacacaatcaggcgtcaatcctaaccaaattaatctaccgatttgtttctttaacagctgctacgtggttcttgttccagagtatttctttcatagcatttctttcagagcaatgctcttttcatatgcaaatatcccggatcattttctttcatagcaggtgttgccttggattacagggtttttgttaaccttgaaggtcctttgataattatatcaggtccaggttgcttagaaaaagaatgatccgagacaaagaagtaaatgatttgatagttttcgctaggagtctatttacaagcatctaactcattctagtctgacaaaaatgacttgcaacggtttcacaaagaaaaatgaacaagctcactgaagaatctgcacatatgaacatcctgatacatacagtacagtaaaaacgactgaaacaaaatgattgtcgtgctcatgccaacaatactgaatagtttgctgatgcacagcacgtaatgaactagaagtactacttgcacaagttaatttcacaagctgtgttttacttcagaccgatttaatttctccctccttgtttgttgttaatttaaatttcagaacagtctacaagttcagcaccagtggcgacgacgggtac

SEQ ID NO: 14229 - DNA, 836 bp, Brachypodium distachyon
  Intron number 1 from transcript Bradi2g20350.1 (locus Brad i2g20350) derived from phytozome v7.0 (chr-ID Bd2; pos 178 74552 to 17875387)
acgagtcgaatcgacattattacgtatgtttgtgaaaataatatttctcacaatatcttaaatattttatttaatgtataaatactttctttctaaaataaaccatgtgggctcgtaagatggtgagatgacgactcgaatcgacattagcatgtatgtctgagaaaataatacggtatcttaaatgttttatttaatgtaaaaataatactttctttctaaaagaaaccatgtggcaccgcaagacagtgagatgatgagtcgaaacgacattaatacttatgtctgaaaaatgtaagtaccacattgacgccaatttcatctaattgtatctacagtcgcaacggtactggatatagtgatgtgtcacaaagtagaagacgacaagtagcgtatctcggagtaggcttttttttttaccgaatctcggagtagtttcttctatcatcaattttcaaatgcgttctttttccacatctttgatatagccagttgcatctccaagcataacgataccggctacaatgacgtatcccaaagcaaaaaaatgacaaataacgtaaccggagtcagctcttccaatcttcaaacgtcttccttatttctcgccgaaaaaacgtaaagccccgcaaaaccctcatgaaaaaagggcaaaaacgcatatccagagtcagctcttcaatcttcaaacgtcttccttatttcgtgccgaaaaacgtaaagctctgcaaaaccctcataaaaaaagaaggtaaaaacgcataacgcaccggatttaaattgcaaatcgctccaaaccagatctccaccaaacctcatcctccaaatcgcaccag

SEQ ID NO: 14230 - DNA, 897 bp, Brachypodium distachyon
  Intron number 1 from transcript Bradi1g46670.2 (locus Brad i1g46670) derived from phytozome v7.0 (chr-ID Bd1; pos 452 16372 to 45217268)
tccatttggctcctctcctcaccattggccattgggtatgtcccgtgcttctgatgtcaacctgttctttccatccgtgcgctcatcttgggttgggatttcgcttggatttgagctaatctggccggagatctgggcgttgcggctccgagtaggcagccaccttattgatcgctgccttgctccgcccttttttcttggtgttttcttgctcttcttgtgcttctttggcgggtcgtccggcgtcagctcaaccttctccgggtttcgctgacatgttcctgggtctatggctttctctgatcggaatcccttctagattgcttgcctagagaggtttctggcaacttcccgtggtgtttataaggggctcttcttttttccctaattttttacctggcccagttacaaatttttggcactgccgcaaaaaagaagatgaagctttcaaatttattcagtgagaatgtgtttggtttttgactgccattttgtgggttcgttgacatgaataatctaaaaatcagtaaaacccattggctcaagttgatgcctttttacccctttggaagcatcatcagaaaaagactagtttagtgtggaatcagtacttgatttggttcggtgcaagattagtgcttgctttttcgtcccatctcgttgctatcttcgatctgtaaggctacatatcttggtaaatgtttttttacctgagatcaatcacaaagctttattaattccagtaattttgtgtgtgatgggattaatgttgctttagcatgatatactgattgtcacttgatttctggttagtgtgcaagtagatgatcttatttttcacggctgagtgctaacctttttattactaccttgctctgcagttttgtagtctgagcc

SEQ ID NO: 14231 - DNA, 502 bp, Brachypodium distachyon
  Intron number 2 from transcript Bradi2g13070.1 (locus Brad i2g13070) derived from phytozome v7.0 (chr-ID Bd2; pos 114 75175 to 11475676 reverse strand)
ctcttcggtaaatctaaactccctgccgtgtacggatttgattcaagtttctagtgaaatacctcgctctgttttttcttcgaaaatgaggataagccccgcctatgcatggactcatgaatacctcgatttgtatgatagtgaaacattacatgaaaattattttctgaaaaacaaggtgcagtgtcaaagcaaaaggccaggtttctactcgtacatattttctattaggaaaacaagatcacacgtttgctcattacatgctatcggtaaagaatgcatcaaacaaacctttcacatacaggatttatggtatgacttgtgattttcataacatgttctgattgtccaaattcttcattttcttgcaaaagaataattacttgaattttgtaccaaaactctgttttggtgtctcgtcatgcttacctgttacgtgctcgtcggatttgtttttgtttctgcagagtcccgtgctattggaaagtacatacttcgcaaa

SEQ ID NO: 14232 - DNA, 991 bp, Brachypodium distachyon
  Intron number 2 from transcript Bradi2g10840.1 (locus Brad i2g10840) derived from phytozome v7.0 (chr-ID Bd2; pos 906 1041 to 9062031 reverse strand)
attgatcacgaacgcgcaggtcagatctcctctcccacctagatcttgattctctcccttccgtcgctcctagtggcaaaaggttttctcccgtcgagtgacggcggaggtaaaggtgcgatttttcggagttttcgtgggaatttcctgtggtaaggccaagctatctttctctcccttgggggatttcagtgaccttagcctgggacattggatgtggtgcttgtcgggccatcagcaagttccgggcatgaactggatagggccacatccacagtagaatgttgctgctcactgctactgtcgaattttgctaaaaaaggacggtgctcttggttttgctgatttctttcgacattcctatttagctcaggccagtgtaaactgaaacctatcgttcgctgacatcacgtgcaagcgagtgctacctacagtactttgtttccaaaccaaatgataatgcacttgtgatagtgggtgtagactgctgtttgacatgtttgttgtcagagttaaagagtattgcatctaaattcaatggtctgctgtctatgtctcctaaattctgtgccacacgtttaatgttctctggaaaaaggtgaaaaaaacttagaccaaatgggaacacaaaatccattcttctccttattttgagttacctacagctatatccattttgaccggaaagaactcatataacacttgttagatagtggtcgcggactaatcaacgttacgactgatcattagcttttcggttttttttcgagatactgtatttactatgccatccatatgctgtgtactaattgctttagtcattagttgtttaagaaatatattgtattactgttcttggtatccttttagttcgtaaattgttcaaaagtttcacgtagtgcaagttcaatatttttctaatggcttgaactgttttactttgcaatgttagttctactctattcttatatagtttattattgcagaggaa

SEQ ID NO: 14233 - DNA, 450 bp, Brachypodium distachyon
  Intron number 1 from transcript Bradi1g56600.1 (locus Brad i1g56600) derived from phytozome v7.0 (chr-ID Bd1; pos 551 78382 to 55178831)
caagggtatgcaccacctttatgtagctgtttcttatcatctcctttttattgagcacttttctttgcctaattacagctatcaaacttctgtcttaatgggcactctacatacaatatgccttggtaggagaaagcttgtagtccaaaataataattctactccctccgtccaacaaaagatgtctcaagtttgtcaaaatttggatgtatctagacatgatttactgtatagatgcattcaaatttagtcaaagttgagacatcctttgttggacggagggagtagaaaggattttctttgaaaggcattgagaaacataatctcaacacgttggtgtgatgtgaagagtaactactagaatgtatatcttcttttaatatttgattctattattaagtaccatactgtttttttttgtaaactgtcactaaaactcaactttgcagg

SEQ ID NO: 14234 - DNA, 969 bp, Brachypodium distachyon
  Intron number 1 from transcript Bradi1g48880.1 (locus Brad i1g48880) derived from phytozome v7.0 (chr-ID Bd1; pos 475 45005 to 47545973 reverse strand)
acgtggctccccgcggatcggcaaggtctccttcggttagtccttggtatcacagcttgccggttcatggtctcgagatatagctgtagcttaggtgttgaactattgatgcggttggttgcctaacaaggtttcattcttcagacctatactagttgctgatgggaatcgagtgggcaatttccatttgcccatttctatgctgttgaattgagttatgatttatttgaatcttcatccgttggctatgtacttctggttaaatttttcatcgatatggtaatatcaccccatgtacaatatatacaggctattcatttgtttctcgaattgcaccttgagttcgtttctgaggtacctgttcgctcgtaccaaacttgctaattcctctgcaaaggtggtttcatacattgaattcctgctgagttcacgaaacactcgtggttttagtggaatagtgctactattctggaacaatggattgatctttctgatatcggaattgttactttatctcactagcactgataactctgtagcgtatgattctattaatagaaatcggagggaaaacccctctttctaaaaaaaaaactcactagtgctgataagtgatgattcattttttatgttgagttccaaatgcaatgtgcatgaaattgggcattctatttaatggatatgtactggacatttgtacatttgcaagtacaagttgccttctagtgataaacctgtcccagctctgttgtaacttgtaagcatggacaaatctattatcattttgctgtctgctggtccttttctctcttggaaaatttcaatcatgcttgatgataaccatgacaggaggtttttattttggtttgtatctggtggtgatgttgcctaaatgctcgtaaaatggttgcctttttggttcactgtgatgcaggttggaggaagctactggtctggcattcagatttg

SEQ ID NO: 14235 - DNA, 821 bp, Brachypodium distachyon
  Intron number 2 from transcript Bradi1g63510.2 (locus Brad i1g63510) derived from phytozome v7.0 (chr-ID Bd1; pos 626 58753 to 62659573 reverse strand)
cacaggggtaataataccactgctattcttcattatctgtgaactatgctctctgtatcaatgttatatatctcttgccaaacaactcctactaactagtggagtgctcccttaaatatctgcgactactactagtactccattcgtttctaaatgtaagaagttttagctttatcctaagtcaaacttcttaaagtttgaccaaatttatttaaaaaattaccaatatctacaactgtaaattagttctattaagctcttcatgatatgtatgttcatagtatgcttgtttgatattctagatgacctagtacgtagtaattaaacaaaaatcagagtttacataaaggatattttttgaatacacaacttgttgtgcaggtagggtttgttgatttagatattgaacacttatatcccagatttctcaacagtaggaccaaacggatgggcatgcggcctagcagcacaaactacctagataagatgaatagtatatacacaatgtttcacttaaaaaatgtatttacacaatgtgctgaatttgtttgaaggacaagcatgcctgcgccttcagtgaggcaacatgctaccatgataagtagggtcggcggagtctccaggattttcctaagtgtgtaaagggtggttgctcacgtgtgtgcatgtgtgatagtgtgattgtgcatgcgtcttttagtcccgaataaaaaacatcatggtacggtagtgcatgcatttcaaggttttaaacaaatggcgcctacttgagccaagctactgatcctttggtcacaatgtgcagtgcaaaattggtagat

SEQ ID NO: 14236 - DNA, 1052 bp, Brachypodium distachyon
  Intron number 1 from transcript Bradi2g12390.2 (locus Brad i2g12390) derived from phytozome v7.0 (chr-ID Bd2; pos 107 32081 to 10733132)
ctcgcgctcgcggaggcaaacatcaactgggagaggtagctttcctgactcgaacaatctttcctgttttgatttgtgccacgaggatgcctgcggctttgcgttttgttagtcaagcagattttgccatgaccagagagagctagtttcagtttatatacagcaccttgcctctggtcattgctaaatggctaaatctgtttgatgcgctgttttagtttagtttgggaaatggggtactcattgtggtggggggattggttaaaggaagtcgattcaggagcgcattagccatttttttaggctgtattcgtttttcagttttgaaatttctgtgcggggctgtgggagtagtcacgaggatcacgcggttagcgctgtcagtttggacggggaacagaaatgaagacgttcgccgcaacttttgttgtagggaactccaactcggctacctcttccacgagcttcctcgtctacttttctcaacaaaaatatcttgtttggcaaataggaatcgacatacttcattcaattgaacctctagtgtaaagcccaagtccatcgaattgaatgtgtagacaaaattaatctgttaaacaacgcaaaatttggctgttactatgctttttctctctgtataaaggattactgcaacaactcaattctcaaacattccttcagaagcaattgtcgagtggcttaaacgggagaagtgctttttggagagctagttgcaccaaaagctgaagcagaagcccaaacaaacagggcctaaaggcttaagcttggggtccccatccagtctcttcttctgcattagtatgtcatatcgggcattgctgggttgggtatagttacttaccgatgggcatttggtatagtgggttgtgaactatgatacgtaaaccataactttgcactcaggacattctgtgtaaattgttcattttggatcatgtacaggatacaacaccatcttgtcagtaagcattcttgtgattgaaattactgacttttggtattgcactgaaggttggacaagacaaagtttc

SEQ ID NO: 14237 - DNA, 923 bp, Brachypodium distachyon
  Intron number 1 from transcript Bradi2g23070.1 (locus Brad i2g23070) derived from phytozome v7.0 (chr-ID Bd2; pos 206 27990 to 20628912 reverse strand)
actgtctcggcgttttaggtccgcctcgtctctctgctgtctgcactctgcacatatcctctctctctctctcttcgtagtgatggctaatacttgactgtctctgtcacatggtttgatctggacttgttcaactgtttcccgttacttagtgagttgtcctatcctccaaaatttatttaattgtcctgcggactagttagattgggtctgaagactaaattaatacattctcgacatgatactaaaataataggggaatgatgtatgattctcctgaataattgatatagtcacgatcccgtttaaatttgattatgagtttattattatggagtgtgcttctgtgtaggctgactctttttgtataatggatgttgaaagttaaattcttactggggaaaccaacagatagatggtaagtagtattgcacagcctgtaaaacctggaagggaaccactatttcttgatttttcttaatgtccagtttatctgcacgtcaatcccctgtagaaattagccttccttcttgtaactggtaaaataagctaaaattttatcttcttgttttagccttgttctcccaagcaagtgttgtagatagctgggaataggcatttctagaacataatctgatttgcaaatcgaggtggaaatcatcatctcagggttcaaagtcttcatttatgtattagcaaaagtaaaattttggttgctaaaaaataatttggaaaattggaatatgtattgttcgtatgcatgagtaaccaaattgtgcccttctgattttattatctgcatatggtgctagtcttatatttgctccacaaataagttttctgtcatgtacaactctgcagaaaatttatctgacaccttaattcacaaattcttattctacctacagctcaaggccctggag

SEQ ID NO: 14238 - DNA, 606 bp, Brachypodium distachyon
  Intron number 3 from transcript Bradi2g16350.1 (locus Brad i2g16350) derived from phytozome v7.0 (chr-ID Bd2; pos 144 20466 to 14421071 reverse strand)
agtgttattgtcaaggtacattttcttccttgatgttttcactccattagtctgtggtgcttcatttgtttatttcagtaaaaacaaaagaaaccacaatgtgagcaaaggtaaaagcgcagcagtatctacattgtaaataattgatgcctatgcagaactaaaatacagttgataattggatgaaaagtagatgtaatatgttgcttgctctctgggaggttggggcccttcagtacttaaattaaatgaacacatatcctgtaaaatagcactatggttgtgtccttatgtaatgttgtatatgatacttcagattacatggcattaaataccagtaccatataccttttcctgtaaaaaagctgtgatatcatatgcaattattattttattggtactgttggaaccagtcattgttaccttgccacattgttctttccacccactaaaagtaaacacccccatcaaaatgttcaccggcatcgacacaatatgatgccttttttctccgtgggaggtttcatcacaattttgatatcaaagttaatgtttctattttccttaataggacacgggaaagcttgttggaacagttgctcaggt

SEQ ID NO: 14239 - DNA, 988 bp, Brachypodium distachyon
  Intron number 2 from transcript Bradi2g07390.1 (locus Brad i2g07390) derived from phytozome v7.0 (chr-ID Bd2; pos 574 3802 to 5744789)
tacaggcacaagctgctggagtagtctacaatccggtaagcatgccacttctacacatagtggtttcagtactctttcaaaattcagtgtatgaagcttccgtgtgacaattactagaccccttccatatttaccccacaccctgtaggagtgcagaggaaacttaagaagtttttattgtcctatatgtgttgaacgggtcgatgagattggagacaccacattaccaagagaaaaagaaatatttctatacattcattaatcagcaaaagttaactgagaaatacagaagaatcaaagccaagtgttagatcatttttgtcccctgtaatatatatggacaacgcactgctctcctggtgtatactttgtgtttcaccacataagagaaaacaggataacaggaaacaggttgcagttcttcaagaattgtctgtggacagacttcctaaacctgggggaggtgatccttaacgaaccgggcttgagatcaagagatttggagctaccagctgctcctccctgctttgcctttgtgcatgagttagttttccttatttttcagtaggttactttagtgctcttttggttttttgcttttattcttttgggttttttcttttgccctgggtcacggttgccagtttgtggcatgttaactcgccttcttggcattcttcttctaatacagaatgcatgccttagatgtgtgttcaagaaaaaaagaactgtcatgtttagttgtgtctcaatcatttaaaaattgtgtgtacataattattataataaataaagcatctgcggtacccaattcattcatcatttatgagctaatgataaaatattaacaagtggaaatttttctgtcctgtggattgcttatatttttcttgtctgaaaagcgcttatggtagttattttggttaattgattacataaaaatattgtctgcttgtttatttgtttctctgaaatacgttgctcagat

SEQ ID NO: 14240 - DNA, 1033 bp, Brachypodium distachyon
  Intron number 3 from transcript Bradi2g31740.1 (locus Brad i2g31740) derived from phytozome v7.0 (chr-ID Bd2; pos 316 77717 to 31678749)
ctcaagcacgcacacactggaggaactctggacctgttagtttctttttatcctatgcccttaaattgtgtgattttctctgcattattaatttctttggtactgtagttgaaaactcttttacatcttatattccagccttcctcgtagttccattcccggaagtatttgatgtgtataatgttttaaatgtgacattcttagagttccatggaagacacagttatttccttgtatattaaatttgcttcttccaagattcatatatcattatttttacgatgcactgcaatcggcaatctggctcatattgacatatgctcataaagtaatttaggatttaccgtgattggcaatctggcacatactggcatacactcatatcataaagtatcgtttcataaatttggattttgagtttggcattgaatgtccatccagcctgattccacctaaacgtcaaagcgacacaaggtgtagctgtttgggcataataacaattttcatcgccgaggctcaaaatctggatttcagtgtttctgattaatttatcaagccttgtctaattgagttgtctgagtttagagttcagtttgtatggttgaaatttgtttccttactggctatggtagcagaattttggagttcgtttgctcaggatataggaaaaaaacaattgagtgtatttttgaaatatccgagtaggtttcaggactaacagacaaactatatgctatctatggaacctcctgccttttgtttttttcagaattctatatataaaccttctcttttgtgttcgaacaatatataatctctcattcttctccaagagacatcatgccattttctatatctttcaaaaaaaattatatcattctccaggaattaaccttggtttccaacctgatagacgtggttttggagttgcaatgccatctgatttgcattatgtctgtaataataatattagtacatgcaataatttgtgcgttgttatttgatttgcagattgccattttgaattccttgg

SEQ ID NO: 14241 - DNA, 465 bp, Brachypodium distachyon
  Intron number 2 from transcript Bradi1g55400.1 (locus Brad i1g55400) derived from phytozome v7.0 (chr-ID Bd1; pos 538 39239 to 53839703 reverse strand)
gcccgctcagcctcgtctcctatcctgccgggaaggtacgtacgtatgtactactcccgtagtataaaatgttctaactttacccaattcaaaatttagaaaaaatattatcaatatatcatggcgaatttgagaaaactaatttagttttatagatactaatactactcatgttcctaaatatgaaacattcactttatccaagtcaaaattcagaggaaaaatatacggactacctcggctactgaatatatcaatttaagaaaactactttagctagtcttgtagatattggtagattcctctataaatttggtcaaacttttatcaaatttgccttaggacaaagataaagcaccttatatttagatagaaacggaagagatacttatattgtacgaactggcccgtgtggctgcacccctaacatttaacggtgaacatgttggatcatccattgattag

SEQ ID NO: 14242 - DNA, 626 bp, Brachypodium distachyon
  Intron number 4 from transcript Bradi1g68820.1 (locus Brad i1g68820) derived from phytozome v7.0 (chr-ID Bd1; pos 673 04820 to 67305445)
ggactgctctgatctcgtgcacgattctcattattgtaagtgctacagataactcatgcctattaaaatttaaataactagaaaaagtaccactctctttctccccttctcttattttttgaagcaagcactgtcaaaggagatcctagttacactgaaagagtgaaaatttcatttttagtacatgatatcttgatgttccaaaggatgaacaatgcgggtgccaccggtttctagaatgatgtgttcaaatgaatgtatgtgtcggcacatcttataaatatgatttgtgaattcaacacaacttttccccgagcatgcttctaaatgcacattatttcgtactattagagggacataaaaaattgagcaatgctacagctcctgaaaaagcatagtaacaaaggtggtgccaacaaaagaaaagaaaagagcagctataaaaactaaaaggcctaagataacagcaaccaacctacagtcctaaccaaaaagagaataagagatcaaagatatttcttcaccttttttcttcttcttgtatgtgcaattaacagtcaacacttgagctcagtttccttcacatgtttgtttactttggtttttccattctgttgatctaggga

SEQ ID NO: 14243 - DNA, 810 bp, Brachypodium distachyon
  Intron number 1 from transcript Bradi2g02890.1 (locus Brad i2g02890) derived from phytozome v7.0 (chr-ID Bd2; pos 211 5468 to 2116277 reverse strand)
gggaggccgaggcgtacctcgccaccgacggggaggtgagtcagtgattgagagatgacgcacgggggacgggacggggacgcgccgtgctttagttatgcggccgctttgtatgtacggtcgggtttggagatggcaatgtcgtcgttgagcttgatggatttggcgcatggtgctagaatgcaagaatccttgtcttgccggaattagagagggggtttgtcttttgtcgttggggatacgggttctgctgaatcttcgtttcgaattctggtgatatatcttgcgtggaatggatgatagataggttcttagtggtaactgttcatggaaatgaacctggagctgcccatttctaagggggggatttttaattgttttgaatgcatatataatgtgttaagcaagcatgccgtggtagtgattctttgcatacaggttgggtggacaatcatccgttccttttgcactgtgatttagcttggtttagtgttgattcgcatatgtaatgtaatcaattaagcatgccggcgtataaggtgcacaactatctgtttatatatcacggtttagcatgatcttgtattgtgctaaaaaccaagtctgaatatctagactgttttttctctctcagcagctgctgtgtgttggctgatcatctaatgatcttgttgagtatggatttacatgagtgcagaggatggttcagttttgtagggtttggtaattcaaatttagactgtttagctggatttaattttcattcttttcacaggaacctgctccggacaactttccctttgaaatcgt

SEQ ID NO: 14244 - DNA, 638 bp, Brachypodium distachyon
  Intron number 2 from transcript Bradi2g09340.1 (locus Brad i2g09340) derived from phytozome v7.0 (chr-ID Bd2; pos 762 5211 to 7625848 reverse strand)
gccgctacaaccacccccgcgatcgcgccgccgcggtgagctaccggttctcttctctcggttctagttccccccctccgtcatgctctgcttcgctagttcacttcagtgtacttggggacttgtttgttacgactcgccagtccctggctgataatgactgacgggttgaattacagctggttggtgcggaggggagcttcaggcttaagccttttcgctgtgaattggattgattctggttctggcttaggagcctgtcatgacctcatgacctgtacatgattgtgtagtcgttggttgctgtcgttgattatctgattgtatataaaggcttattgtcttagtcttatggttgatgttgataattcaaagttccactttttgctcacggtgccacttgcttatgatgtaggcctggtcagagtcctaagctcccacttctattaggaaagtcttttttcttttctttttgccttcagctcaagtagatggccttgttcacgtgtctgcagtgagcacttctacaagttatgatctatgcatagtatagcagctatgatttcgtgacaccaggtcgagttcaaggaggttgaattgaaggtgtaaacatgttttgtgctctgttttgtagttca

SEQ ID NO: 14245 - DNA, 1046 bp, Brachypodium distachyon
  Intron number 1 from transcript Bradi2g19810.1 (locus Brad i2g19810) derived from phytozome v7.0 (chr-ID Bd2; pos 174 43964 to 17445009 reverse strand)
cgggcagcgcaccttctcctccgaggaggagctcggtacgtaccgccgccaccacgcaatgctggcttcctacccgctgttggtgggcgattttgttcgatttccggttagggtttagtgacggggttgattagcgcgagttggttgcttaatgtgagacgatcggcggaggcgttgtgctcggggactaggggcgcggcacgaggaagctctcatactttggttattgttgtttcgtttgaaccaaatatgaagctgttggcataaaagggtcgtgcttttggggggtaccggggtagggggtctcggatcggatgatctagtgttaatgatttcccgatcatgtgttccttcggccactttgcttgtctcctggcctattttgaggggttacttgggtacgcttcgaaaatatagggggggccattagcccattaatcagctcgattggtgttaagggtttactgttctgcgtgtgcctttcatggttatcgttttgtcttccggattatgatttttttggctatctgcagagctgtgtctgtatgcttggttttctgctttgattcgaaacgctgcccttatttaggagtacttgttgtggattgtctcaaccagatttgttgtgcaatgtggatacatttgtccatttgtttataatatatacgttgatgtggtcatgatgcaacttctgaacgtttaatctttatcctggaagatggttctgtgtaattggagaatagtagatgcaaattgtcagcactttgccaaatttgaaattaatagcgaaatttggacgttatggtagtatttagttgctgcacaagaatgttttatgacacaggtagatgtttgctgcctctacttcctaaaataacgaatcaccatctgtcaaaacagtttttatcctcagtaaaaaaaaataacggacgctccttccaatattttgagcctgttaaattggtcctttacttacattttctcatagttttcttgtgaaactgaatgcagctgctggtacttcagcagaacgcccaaacaccttt

SEQ ID NO: 14246 - DNA, 972 bp, Brachypodium distachyon
  Intron number 2 from transcript Bradi2g17630.1 (locus Brad i2g17630) derived from phytozome v7.0 (chr-ID Bd2; pos 156 88389 to 15689360 reverse strand)
gttgggaaaggtaatctacaacaaagtttgtttgtttacaacaagcgcagctgtacaatactgttccatcaattgtataattgaaatggttatacttttgagtgagttatattaatacaactactagctgaaagataaatgtcggcctgctcaacataggcctagctcagttttgagttatgttttggtcgttctacccgtgctattgtgtctggtagcttcttttttgggcggctaattacgcttgagaataatgcacaaggggtaacctggtttaacaattggtatccaattgctttgtatccctaatgcactttcctcaaacagaacaactaagagcccgttggcaaccaagaattcatttcatttggtagaaatgaaatgaaatccaatttttgacaggatttcatttggttgaatttgaattccgggttcaaaaatcatgtttgtctaccacgtggaattgtagagtgagagacaattctagagaaatgatggcttttagaaaggaattgaggttagttatagtgtaattccatggaatttgagattggattcctatggccaattccgtgccacccaaacaagttggtttctggaattcaaaatgaattccagaattctatgcccaaatgattggtgccacctgttgcctttgggcattatcatagctggaatagttgggtgcggactgtaaacccatcatttgtatatgcatcctgtctcttgagaaaaaaagtttcctcaatcaccttcatgcactaagtgtaaccacccaatatcttcagttaatgttttgttatatgtatctacatgtcaatctctctgtcactcttaattcaatacatgagcacacgagtttttaatttacattttttcttcgctcgaacgtaaaaacctcgtataaatatttaagtttgtgcaaaggcattgttgccctcattgccttgtattttataggccttattggtg

SEQ ID NO: 14247 - DNA, 654 bp, Brachypodium distachyon
  Intron number 1 from transcript Bradi2g18280.1 (locus Brad i2g18280) derived from phytozome v7.0 (chr-ID Bd2; pos 161 99593 to 16200246 reverse strand)
tcgtcgccgccgccttcaccgagcagctctacaaggtcaggcgctccggctcgacaccacaaacccctcttccccttcctggctgcgcgggcgtcgcgcggaaggtgctcgacgaaatgcttggcgggcgcgcagtgccgttcctgttaaattatctagctcctgacgacgttatttgcgttttttagtggccgccagattacattggtcatcgcttctacatgatgacattaatgctaaattgtgacgagaatgaaaactgtttttgattcgatgatgttctgtccaatatattggcttacaaagggtcgtctcgtccagagggatgcgagcaacagccgcgtctgctcgggagagacacgcacgtgcaaggcgtgcaggttcaatggtttgcacaaacgcaaccgttcggggtaattacagggatgattaacattaatctaattaatcttaacaattaacaaatgcttgtttcccgcaactatacgaatcgtcaaaaccgaaagatcacgatcaagttggttatgaattgatgctccattgaagaggctggatttgtagattttaacttatctttagatttcgtctgattgtgaactgcgattacattctggaacaggagaagtattgggaggaccacccgggcgaggccgt

SEQ ID NO: 14248 - DNA, 1004 bp, Brachypodium distachyon
  Intron number 1 from transcript Bradi2g04200.1 (locus Brad i2g04200) derived from phytozome v7.0 (chr-ID Bd2; pos 293 3797 to 2934800)
ctgatcctctgggtcatttggaagcgacggaacaggtgtgtcttcgatggcgtgcgtccctcaaatcagcagcttgccgccctcctccttgatcgcctcaagctctgggtgcaccgcttccctccctgccactccgcctgccctgtaatcccttggtgcacgtctgtgtgtgagatgttgcgttaggtgcccccctccttaacccctctctaactgtcatcgtttcgttggcaattgtaattttcgttgctgtattcccccgtatctgctttaatataaacgtttcgagtttcaggtgccccccaccgttgatggctaaaaaaaaaactaaagcgctcatgcgtgtccttcgttctttaactaaacgggacgcctccgtacgtggcgtgtatcttgtccacgtactacgtacgtgtccgtcggtcgtcagagactacagtcggtgttttgattgcagagcgttgggttcagttggcaggcattgaatcgaaccatcaaccatccatggatcaaaatctggaatgggacctggatcttgatcctggaagctgaatgctacgagtacctgtatcttctctctttttgcttcgggcgcgcggggcagcttcctcttccacgagaccacgtacgatgctctcccgtcaagaagaatgtcacgatcttagtgttaaagatggacccttttttgactcgtgctcgctcgctccaaacgactggctgccaagatttcgtgggcagcttagtggtgagcagctagcaagaagttgacacaggactcttaactagagaggcgaattccggccttcaaaaattaatgaagacaacctcgtgccgtgttcaccaaccgtcatgtctcgacgacgtgtcattgttggtgggaggaacgagggatataataaatcaagacaagagtactcttgagagaaccatcagcgccagagtgcaagcaaccactggatcaaaattcagaagttcacaaccattgtcgaccgtgttgcttacga

SEQ ID NO: 14249 - DNA, 686 bp, Brachypodium distachyon
  Intron number 2 from transcript Bradi1g55680.1 (locus Brad i1g55680) derived from phytozome v7.0 (chr-ID Bd1; pos 541 76575 to 54177260)
agattattccaaggggacatgttacaggatgatttgtgaaaaaaggggcctaatctgcgtaggaagcttgcttatatgtgttccagaaatgttcaagtacctcagctgaagaagtttgacaacatcttcaaatgatgataccttgatccacggcaattgcttatgtctagcgcacacacacagagctttctaccttgaaagagaagttaatctctggttatgccccgaaacagccgctcgatggttctgtcatcttcatttcccaccagggagtctgtcacagactcacggggccttgaattgctgcgtacagagtgcagaagttctcttcaacggccttgcgaatgagaaaatcaatcatggactcgagtcgacacaatgctgcctatgtccacaggctgcgctcgccctcgttctgcagttgatttcggaatcggaattcgctccccaattggtttcggatggagtaactgttggcgatccggaggattatattgaaagccacgcgaaaatcaaatccaaaagaagccttgtttgttggggttggccgggtatagatgggacagattgagaccaagacgacgaccatggaggaagaagacggggaggacatcatcagccttctccccgactgcgtgctgggccacatcgtgtccctcctcccggtgaaggacgccgcctccacc

SEQ ID NO: 14250 - DNA, 881 bp, Brachypodium distachyon
  Intron number 2 from transcript Bradi1g71380.2 (locus Brad i1g71380) derived from phytozome v7.0 (chr-ID Bd1; pos 693 90815 to 69391695)
tatttaaaccggtaaattttggctctccctttgcaactgttcttagatttgttcgccttctatttatggagtgattgattgatttgagagacactaatcttgctagtgaatacttggtgtgagtacttggtcagctaagttgtgcaggaacacaagagtaaggcgtttttatctgtatagacaagttattgcactgttatggttacgggaaggaagagtacaactgaaccaatacccttttttggcagtagttttctttgattctctagataaattgaattgcttgataaagaagattcctgtgagctgtctctgccacataccttagctgaaagggttcagcattgacttatcctaccaaatatatctaatcatgtcaagcaagcttcaatgttctcctgtaattattcttgcttgttgtaacaaatccattttagattcattcaacccccttgaacttttcaaaatatatcaggcatagaatttgtttcatgctgatccacgccctcagtttccatgtgtcttttggcaaatgagagttagaaaagtaatacagtactccctccgatccatattaattgtcgaaatattacatgtatctagacgctttttagacatagatacaaccatattttgggcaaatttgagacaactaatatggatcggagggagtagtatttttaggatgcagaagccctatgtattttaccattgagataaccgttgccattctgatagttttactgcattaagtgttagattccaaactcggttaccataagtggcaatttatcctcctatagacacatgtctctacatattaatgcattctggcctagaacacttatcttagaacttgtgttttctctctggttttgcag

SEQ ID NO: 14251 - DNA, 804 bp, Brachypodium distachyon
  Intron number 2 from transcript Bradi2g23000.1 (locus Brad i2g23000) derived from phytozome v7.0 (chr-ID Bd2; pos 205 70209 to 20571012)
ctgtaaattcctcctctattttcttcttctttgtagttgttagcacttgatatgcttatggctctgtttatcacaagagtaagttattgggatgtgtaaacttaaagtacatcttaattgattacttattttgattgtcatggttaaatttgtttgatgtctatcgaaatgcattggttcatcatttttgaaccaggataacaaaagaaggccagaagtcttatgtttacaactccacagtagatgcaggtggtatcttattgtacttgcataatcaccatccattttgtttttttcttttgtttagagatctctccctttttcgctctgcaattattccatgagaaatgtcaaccgttgcaaggatgaagccctaggttaaaaaccaatgcctactcgagcatcaacaccctaggtggcagcaaaaaaatagttttcttttgctaagtacatctaagcagtaagcgcttacatcatacatgccctaaggccataacagagttgatgttctatacagcatgtattggtggatatatatgctcaatcaaattggatgtttaatgttccaatgactgcacatgctgctattcacgagcaaatgactgatttgaattatgtgttaaagtcgcttcagttactggcatcccatcgatgcctgtgtttcgtttaaatttctttgttgattgttctacatcatttgaatggttaaaatgtttgatcttctgtaatatcagttgcccttgtttctttcctttgtgtttattttcagatcagaagcaaagctatttctggtggaacccttct

SEQ ID NO: 14252 - DNA, 729 bp, Brachypodium distachyon
  Intron number 1 from transcript Bradi1g56980.1 (locus Brad i1g56980) derived from phytozome v7.0 (chr-ID Bd1; pos 556 62821 to 55663549)
cagcagcaggtttcctctcttccccacctgacctcacccgatccgtccgcaaccccgccgccgcggattctgatccctgcgtccggccttgccgttttgatctgggctgattctactgagcacacgcacacacccgcccgttttggtgtatttatccgtagatcgggaggagatcccgctcaattcgtccgcctctctctttctttttgggatgttgtttagagcgaatcgtgtcggggttcacgtaatctaggttgcctgtctagttgaatcggtattgtatcactgctcaagtcaatattggtgtcactccttaagttcgttgtggaaaaaaaattgtagcttgtgtggtctccaggtcgggctgggtttaatctgacatggtctggttgcttgatcggtgactccaatggaatgctaggtacagctgttataaacaactgcgggcttgtgtaaactatctgcagtacgagggctgttgctcggtcttttgctgcagagtttatgttccagtgcttaaactatatgcattagggtcactatttttggatagacacatttctgttcttctgctggtggtgtctgattatgctaacttgtcatcatttcatgcctcgcacagcttggttcatgctattttcggtgttcaggcggcattttcttttgtttctcaaaatgttgtttgctactgaggttgcaactgacaatgtgctattttgatatttgtag

SEQ ID NO: 14253 - DNA, 979 bp, Brachypodium distachyon
  Intron number 1 from transcript Bradi1g68620.1 (locus Brad i1g68620) derived from phytozome v7.0 (chr-ID Bd1; pos 671 68781 to 67169759 reverse strand)
tcttcctccactccaatcgctagcctaagaacagggtcagattcttgtggaaagcaagtagtacatgaatgaattgttagatcttttgtttgcttcttcgtttctagacaagatctgttgagcatccgtattcataatttccttcccttgacccgtgcttgtctagttaatccattcctgaaatttgacagtggacgggaattgctagctctaacagtcagcatttgtgtaccaatgcttgcgcacgtacatatgcttttgtaaatttctatcaatttagaggtgttttgtccggatgcttgatgtacgtatgtattagatatgcgaggaccttttatttggaagtgttatagatgaatgtttggaccagattagatgcaagaaaattttgtgcaaatgtatgtacagatgcatgtatggatttgattttatgtgcattgagcaattgtatcagataataatatacatcggtactagttaaacatgaaaaattgatgtgcaagggtatcgtagacttttcctactcaaatcagaaaataagctaaatttttagaagccgaaaagaaggagacaatacagtttctagagcttcctgtggcagcagcttcccacagaaattcagctgaagctggtttctggagaaaccgcagttgaaaagaagggggcctatatcagcagaactcttttatgcaataattttgttctggactatatctcaatttagctttaagtttgaacttttaccttgactggagcattgaactatgtgtcttttcatatacaccgtgtgaatgatggttcttgttcatgtacttttagatgctatatatttgttgatattggtgcgaaaagttagtatgaatcaatagtaactacattattttgttttttaagtgataaaaatatctggatgctcatctgcgctgtgcaaattgttcatgcagggttaagataagcaacagtgatctgtcccacttgg

SEQ ID NO: 14254 - DNA, 776 bp, Brachypodium distachyon
  Intron number 2 from transcript Bradi1g59030.2 (locus Brad i1g59030) derived from phytozome v7.0 (chr-ID Bd1; pos 581 27833 to 58128608)
cctacgtcctcaaaggtatggtccttttactgacctccctcttgtgcctgccctcccccctcctgctgcagtagtggatttgcctttcctggtctctgttttgggatgggatatgaactaccacctgctagatgtatgatggacaatttacagttgtttttggtacgcactgccgcccgttgtgtttgagtagtgcgacctgattgcatatgtgttttcagacacctcgtgaatcagagagcagagagtagagtactttcatgagcatgatcccctgtttgtgcattgcttgaggtgaaagcttctggttatgttctctaaacgaagaaactttctgctcagcggaggagaacacgaatgtcttgctaaaccttggacaacatttatgtacaactcccttgcatttttttccggtaaaaataaaaataatgtacagttacaaggattcaatttttttttttggtcatgtgagcagtgtatgctattttttctttctgatcctttttcctctttatccctgtgtcctatctccttttacctcctctgcattcacctcgaagagcctgagccctgaggtacaccaattgatccaaagaacacctgaacgaaaaaagttctctcatccacaggaaggcttccctagatcgtatgcggtgtcatattccttttgtatttatgcatgttgttttgaaagtgagtgatacaagtaacatttactgtatcgttgttatttttaatcaggcaaggcactgtgcgcattagggaagaaagaggaa

SEQ ID NO: 14255 - DNA, 512 bp, Brachypodium distachyon
  Intron number 1 from transcript Bradi2g17870.1 (locus Brad i2g17870) derived from phytozome v7.0 (chr-ID Bd2; pos 159 16570 to 15917081)
gcgtacgtggtttagtgatgtggctcaccatgcagtttttgtttacagaggttcatcatgcagttttgtactgaagacaatcaagctttttagtcctagaaagacgaatcgtttcttattttttatagaagaaaaaatcttttattttttctgcattatgcttaaaaaataaagtatttatttcgggaataaacttataggcttcaacgcccttctcggatgaaatgttttcttggttccctcaaccctcaaatttgtttttgtgcttttagatagagacagcaattttgtttatccaaagctatgttttttggtctagttagaccactttacctgtgagataattttgtaatcacttcacctgtgagaaaattttgtgcttttctatgtataattatattataatgttacaaatctgcggcgtcgctcacctaataggtggtggctctattgtattgactttctaacagtcgaattattcatgtgcaggttactgaacaacataattcaag

SEQ ID NO: 14256 - DNA, 964 bp, Brachypodium distachyon
  Intron number 1 from transcript Bradi2g25030.2 (locus Brad i2g25030) derived from phytozome v7.0 (chr-ID Bd2; pos 228 28041 to 22829004 reverse strand)
ccacactgttgataagggcgccggccacaagcaaggtaagagaccgcccctctgccgattgctccgacgcctaagcttgtacagccccgttgtgcggcatggggatctgtgtggttcgtccccagattcgttcgttctgtttgtctgtgtctgttggcggtagagcggtggtttcagatcgagagctgtacagatctgttcgtgcccttcttgctgtgagaaaatggtgcgtagatctggtgcggttggtcatggagtagtcgactgggccgtggatttgttgctttgctgatgctcgcgttcctttagaagtaggtgtagatgtatccttcgcaacttctgttgcttcctgttatactatgcatcggtatgtccttggaaatgttacgctactgatttacttgttgctctaatagatcatggtctaatatatcagggcatgcctctgtgcgattgtttgtagcattgaagtgcctagtcactatgattagttcgatgagatttatgctaatgagctatctctgcttgagactaatctcccggtattacctgtgcttgtggttattttattgacgattctcttataggatgacagagattttcttaatttaggattgatctgaagacgtatgtacatttggttcttgctgatgtgtggcattcgccgatagaacgggattagttttgttacttctggttatcatttgatttcctgttttcaagattgttatgtcaaatcagctaatctgcactgacaagattgagcatagcttctcctgtcaatgcagatttgctgatttgttaggttcatgcccggctaggacgcaacttcgtgagatctatttgctgcctgcatatgtctatggatacatagaatgtgccagaacattggtgtagttgttagtaagcattgtgtttttactttgcaggcccgaacttgaacggtctgtttgggaggcaatcg

SEQ ID NO: 14257 - DNA, 897 bp, Brachypodium distachyon
  Intron number 1 from transcript Bradi2g04620.2 (locus Brad i2g04620) derived from phytozome v7.0 (chr-ID Bd2; pos 321 7442 to 3218338 reverse strand)
ctggcgctgccctgcactttggcttcttctcgcaagtaagctcctcgtgttcttttcaccctctgctaggatctcttcttggatcttgctcttttaaccctctgctatgatctctgcttggatttggttgaccggctcccaagagattgtttctatttaagatctctgcttggatttgggtgactgggtcccaagagatgtgtgtttctatttaaggatgaattgtgtatggctggtttggttaaagttctaagaaatagatgaattgtgtatggctcgtttgattcaatctctaggattacatccttgtaggcttatgttttcattcatgtgtacagcagttgttgatttacgcatggtcaaccctaagtagtaagtcccctgccttgcaaaatgcaaattgatttgaagtctagtcataatcttgcctctgttaattgacgagatggtcaaaatgacatttggtttaattcaaaaggcctgaagtaaactattaagcataacattaccaaaattattgaagttattagcgaaatgcacttgctacggaattaaaaatctgcatattagtatattacatgctttagtttttcttatgtgcttatattttcaattttttactaaataaggattacctcaaatattttttagagaagcaattatcttggaagtattacttcaaaccaatcaactataataacatattgtgatacatatatatgtaccacattgaatgggtggcaatcaaatgattgcctaaatgcctaacaagttaatataatgagaatgtaattcacaattttaagatgttttcttcatggaagatattcaagtgcaatttaattattgttaccgttctcaggttcgatctaaatattgcacatccaaaattactaa

SEQ ID NO: 14258 - DNA, 991 bp, Brachypodium distachyon
  Intron number 1 from transcript Bradi2g17510.1 (locus Brad i2g17510) derived from phytozome v7.0 (chr-ID Bd2; pos 155 99001 to 15599991 reverse strand)
ccgtctacaggcaccactgcgacgccgaggacgcggtacggttaatggcgcaccccgagagcttcttcttcgcattgttttagtgaacttgcggcggataattgtggcgtggtttgtgggaatgcggaactatttccttgtagggggtttaggactgtggaattaggcaataggttacgatgatttgggttggattcgggtttgaagtgaggtggaacactgccacgatctgaaagtggattcagttcgcttgtatagtgatagtggtctcgaataatcaagtgggtagtctgcgacacacttacgatgttcaatttctcgctgcattctacattatcctttttatgtctgcacttgaattgcttacctaatggatatgtccagcatcttaaactgttgcaaaggcctaggcagatcttaaattgaattgacagagacctttggctgagtgtatgatttactggattgcatcttttccgtgttaatcgtactagtgtaggttatgtgaatttcctactcaatggagtagggtacatttgttgtaattttattcccactgtcaactgtaagtctggaaccaatcaaggttgcaactcatcagagaggaaaatttttgaaccttactcccaccgtaaatgaaaatgaactttgctgtcatttacttcccttggtatgagatttttagtgagtagtgcagcactactcactaatattctctttgcatttattatttgcaaaataaaaggtctgtgtttataaatgcccttccttatgggaagggttgtgcctgtgatacgttgattattcaaaacatgagcatcatggcctagtattagacttccaacattatttgatatatttgtggtatgttctaaaccaactctaagcatatcgttattcacaacgtagatctgtaacaagcatttagatataatatttgccttgggtgattgcaggttatctttccagcactcgatattcgagtcaagaa

SEQ ID NO: 14259 - DNA, 896 bp, Brachypodium distachyon
  Intron number 1 from transcript Bradi1g52150.1 (locus Brad i1g52150) derived from phytozome v7.0 (chr-ID Bd1; pos 505 36670 to 50537565)
gcagcacaagagcatcttcttcgatccaaccaaaggtgacaggcaatcttctcctccatctcctcccttgcactgtgtttcagagatcagatgaacatgtcctgcttaattaatttctttgccatgccatggggaaaagattagtatatgggggttcttagattgaaatcgaagtgcccttttcctcttgcttaatcaagagatttacgaccttaatttcctgatggatgggtgctgctgtattttctttggggaactactccaactcctgtttcctaaatcctaagtactcatcatcttccttctctgtctatctctgtccaccaataattgatcgatactacctactgtagctctattgatgggaatgggagaaatcacaagcaagatgcaacctaactctctcatcttgtccgaagatctctgtgtttctgaaaatgttaggaatttaattaagtagtactgcaggtgtttctgctcccttagtttagtttacctgtgctgggcctgggatgcagtgggttagtattaaatattattgcattcaggattctggagctttcttttctagaaaaacacatgctagatacagggtaggccacagatagcaacatcctctgccaactcttgctatgattgggtcatagtacagatccctttcatgtagtcctcactcaaaattgctgtccacaaactccaggatatagatgatgactgacagtgacttggaggctccttcatctgcaaagttactcaggcacatgatttgagttaggaactagctagaacacttttgctttctttggttgcacaccaactgatctctcttaatttctggtagctttcatatcatatagaaaaataaaactagctttctattgctttactgaaggatt

SEQ ID NO: 14260 - DNA, 909 bp, Brachypodium distachyon
  Intron number 1 from transcript Bradi1g61890.2 (locus Brad i1g61890) derived from phytozome v7.0 (chr-ID Bd1; pos 611 83285 to 61184193)
gaccagctcgtgaatttcatcatccgcccgccaaggtgagctcctttgttggcttccgacccccccgtcccgttgccctgattctgttggtgctggtttggatctgggccgcgtgggctcgaggttcctaggttctgttcgctggattcgcgtggccgatttgcttgcttcacccggtcgcgtaattctggaagattcgttgttggtttctggattacgccagttatacagatgggatttgcagttcggttcgtgaaagtcagcttacaattgtgggtcgggaagtttatctgaatgcttgggtttctaatcgagttcagcttacaattggttatctgagctcctgtcctaaagaaaacggttagctgagctcggcggtttctgtttcttctgattgaagaccagtcttatgaagtaatggtctgcttatcgttttttggctggtttcctaaatccagtcacaaacttaatctgtacttaccataacgagtgaacgaaagaagaaggtgcgaggctgacattctcgccattgaactggttggcacgatgcttgtttccatgtcaaatcttaagttacaaacgaaccttcccgactcaaaatgttgtgaggctgcgtgcacgaaattatgactggcatttgttcaatctcaccatttttactttcttaagtagtgattctgttccacctcagcaagctactctattccctcaaattgtacgttaaaagaagagatctcataaaagaatgtgaaattccgggagttcccgttaccaagagcagacaagtaactatttgttagatgaacataagctgctatgctccctgggtaactcttgaactctatggccgtgactctgttaacctatttgatattttattgcattgcagagctgactacagtccagacg

SEQ ID NO: 14261 - DNA, 805 bp, Brachypodium distachyon
  Intron number 1 from transcript Bradi1g60520.1 (locus Brad i1g60520) derived from phytozome v7.0 (chr-ID Bd1; pos 598 87170 to 59887974 reverse strand)
caggcagcgacgacaccatctcggtattcgcggtaatgcctcagtatctatgatccaatttctttctttgcagtagcattaatgtacttgccatgttggtttcattgagtttagtttgctgcttttcttttgcgataatgccagtgagacatatcaaccaaaagtcttttacgcagttcaattggcataataagtagagctcgcagcttcacagtgatgcctctgcactccatgaatcatgtggttgcttcatctttcataagttaaaatgtgttagtgtaaacatgtaaaaagaaagcctcatctaccgacctttttctaatcttttgtccatgaaactctgtgcttgctgtagctgtagtgtgtattttgtcttttgcattgaggagcatgattgataggccttattttgcggagtgattgcataaaggcacatggggacatatgtcagctaatgccttgctggccttaatgttttttaattctggtcatttcggtggtcaaaagactactgagtttgggaatattcaatcataaattcctgtctgtgttagatcttttgggcttccggcagttggcaatgtgaatcacccctagtaattatatcaactcaaacaagaccttttgccataagtaatgcaatgtgaatggtaaacccaatccacaactgaatattcttgtgataattcagtgctaaacaatgagttaagactattttgctacttttaaatttctgacacaccaacttaagtggtggttagtctgactggaactattattctggcttctctccttcagattttcg

SEQ ID NO: 14262 - DNA, 386 bp, Brachypodium distachyon
  Intron number 1 from transcript Bradi2g11290.2 (locus Brad i2g11290) derived from phytozome v7.0 (chr-ID Bd2; pos 954 7582 to 9547967)
agggagatcgcataagagcacaacacctcccagtaaaggaggggcgactgatttagtgacctcatgtatggtaccccttcccctttcattagcatccctttgattggtttgtctgtgatagttttacaacgttgccttactgtttgtgacaccacattttgaccgctttcagtcatagaaaagatacgtagaactaagaggaggggtgatgatttcacaagaagatcgcataagagtataagaggttgcaatggtagtggaaagacaactgagtcaatggccttattacgtatgcgtgttcttcctctttccttgtgttttctcacagccttatttgagaaatcatggtttatgtcgttagatttttctttaactaggtgacttgc

SEQ ID NO: 14263 - DNA, 558 bp, Brachypodium distachyon
  Intron number 2 from transcript Bradi2g22140.1 (locus Brad i2g22140) derived from phytozome v7.0 (chr-ID Bd2; pos 196 32368 to 19632925 reverse strand)
ttacagaattgtatgattacttgatcagtacttctatctaatttattcatcatttgtgcacttctgtttcaatataagcgttagttgtcatatttttcaatgagttctatactgaataaaaaacaacagtcaatattgttaacaaaagccttttcagtatatactttttgtgaacccataagccattcaagaaagaaataattgatgccatacaagtatctcatggccataacaaatattttacttaaaattcaaacaagaactacctttaagggctgtttggaagagtgttatttcttggaaaagttttggtatataagaaaaattaaaatacagaaaaatattcctcttccaaacaagctcttactgctaagtggtaactgtgcatctcacttgatattggttatttgtcccaccatggttctgtagttttgattgttacaggtgacatactaactacgtaactagaaccccagtcatgcataagatcttgttcctgatagcatatatttatgctatgcagacagttgtttaagaggaacctctctggaactttgg

SEQ ID NO: 14264 - DNA, 934 bp, Brachypodium distachyon
  Intron number 1 from transcript Bradi2g27380.3 (locus Brad i2g27380) derived from phytozome v7.0 (chr-ID Bd2; pos 262 55417 to 26256350)
aggaggcgcgaagtagggtcgccggcggcgcgcaggtgagagtttccccgtcctcctcgtctccccctgtcctgccgacgtccgtgctcctcgccagctcgcccctgcccgtgtgcctcgcccctaacctcgtccgtgctccgccgccgtctgagctcccgctctcgtcccatccccggcgcagagctccgccgctgctcgagcatatcggcccgatccctcctccgtacgtgctcctcgctctccccattccgtgccattctccgccgccgcctgacggcctgagccccttggctgaaccccgccgcccgttcgcctcgcctgagcatcctgaccggatcccgccgctgcccctaacctcctctcgtcccatccctcacgcagagctccgcccccacctgagcacctcggccggatcccgccgccgtttgaactcctctcgacccatcccctttcagatgctaggttaccgtgctggtcgtctctgtcatgcgtgggggagcatccgagcatggaaggcaatcccgacacaacaccactactttgatctactaatattaatatggttgtttgattgagatgacaatttgttctatgtgtttgttgtacaaccggattgaactcggactgtaacgtgcaaataactttgcagttcacaactccaccacatgcctgagggctaatcctgaacgagttcagaacttcagataagaaatgcatgttgcattctcattggttgtattttttttcccttgaaacttgaattgtgctcggctaaaataagtttaaagttggtacctaggattcagattattctagtcattgttatgaatagtaactgtaaaggacaagttgctactcaggtaatttttttgaactgtagtccatttgtattacaggaaaacaatctgaattaaatcaaggatttgtgtga

SEQ ID NO: 14265 - DNA, 950 bp, Brachypodium distachyon
  Intron number 3 from transcript Bradi1g78830.1 (locus Brad i1g78830) derived from phytozome v7.0 (chr-ID Bd1; pos 748 17386 to 74818335 reverse strand)
gtgctgctggattccttgctgcgcccgtctgcagcttcgtttcttcctccctcaccaagcttctactttttgggaccaaagagatggagtgcttcagcaatgagcaagaggacgcccttctcctcctcgcctccctccaggaactccagttttgcggtttcgacaagcttcagcacctccctgcagggctgcacaagcttaccaacctcaagaacttagagatcgactcgtgtccagccgtccggtcgctgcccaaggatggcctccccaaatcactgcaagagctaaatgtccactactgcggcaatcaggagctaaaaaaacagtgcaagggattatcagagaccaacccaaatatcagagtccgtcactactaatccaaggtaacaacttccaaccaggagctaaagcagcgctgatccaaggtaacaacagataatttcttgtttgttcccaccactactcttgcttttcctttcctgcataacgatctgaccagtgtttgcctccatctgctatgcaggcctcggctttggagtccccgtgtacattcttctagccttgtagagctcaaccttttccactcatgcagacttgccacatgaatgagggtcatgtggctttcttctgccttcatgtacataaatctggtaagcacatctagaatggaattttactcctgctgtgacttatcagttataacttccagttatgctcctgctatatcagatttctgttttcttcacaagggaaatgaaagaagttctcctaataaagcttcaattaatacttgtttttccaacccccttgtcttcttactcacaagttgagaaaatcaataattaccagtcaattccttttgagggtttcagtcactaatttcctggacggaaatcatgaaatctgccatgtattcaccatttcttttgattctctgtgcaggtgttctt

SEQ ID NO: 14266 - DNA, 526 bp, Brachypodium distachyon
  Intron number 4 from transcript Bradi2g00370.2 (locus Brad i2g00370) derived from phytozome v7.0 (chr-ID Bd2; pos 793 74 to 79899 reverse strand)
aggagctacagcaggagccgcagcaggagctacaggtatatagagcattcctagttttcaaaaattgacaatatggggtcttctgctgatttgtccgtcataatttatctgtcatgaatcatgatgctgtgacggtctgtggggtctaagcacagtgctggtagcaattcatacattttttcaaactaaaaccttccatttttttcaaaagatgtggtaattctgttctctaggtattgttttctatcacatcaggtagtttcacctattgcttttctgtgggcacagttttaactgaatttgttttgaactaaaactagttgatttttttgcaatagttcatagaatctcatgaaaaccggatatatgtttttttatgcctctttcaaacgtacaaaattagattaaaatgtttgatctttgttgcaattgagctacgttttcctagaatgatgtgcacaatttgtatcaaacactgacagtattccccttgctttacatagccgctcactttctccaaggaggg

SEQ ID NO: 14267 - DNA, 774 bp, Brachypodium distachyon
  Intron number 2 from transcript Bradi2g26230.1 (locus Brad i2g26230) derived from phytozome v7.0 (chr-ID Bd2; pos 246 13431 to 24614204 reverse strand)
gcctcgtggaggtgttcccggaggttcgtggttgagtgactcccattgggattggttcaagtgttgaattgctgacgagcgtttagttgtttatttctttgtcgggaatatatgtactgccgattagtttgacagttacgtttgaatgttttactgatctgtccaagaaatcgtggtctgctgagcttagttatatcccgcaaatttgtctaagaaccaaagccattggtaagaacaatacagtaatattttatactcaaaggaaagattaacgttcttaccttcatgaacacccaagttacaactttgtcaacgcacatcatgtttttaatttattcacgaaacatgatttgaagattatttggcgatggcttctcaatatcttgactacgacctgtggaccagtacacattaagggaaaactaccgtgaaacacgtgtctgtcttgtttatgatctgctatgatatcaggattggagattagttaagctgtaatcgatcagactttgtattttcgtgatcctgctctttgctttcttgaatgtaattgctttttttactttaataattcaagtgaatttaatctccctattctttttctgtgtgtttcttgttgttttagttggctcaatttctcttctaatctaagtatattaaactgcagattttttattgctagaaattcaaaacagatgcttaataacttctgctactacacctcaacttttgcgctatgcaggttaacttttcaacactgatagaagtcgccatttc

SEQ ID NO: 14268 - DNA, 766 bp, Brachypodium distachyon
  Intron number 2 from transcript Bradi2g23150.1 (locus Brad i2g23150) derived from phytozome v7.0 (chr-ID Bd2; pos 207 04876 to 20705641)
cgtgaagacccagaaagcaaattctggggcagaaggtaacttgtattcttcttcttttttctatttttgaagaacgtagaaggcgattcgtacaaatatgtaatgatcaatcttagttctagtagtccaatgtggagtacacaatgctgtatttctcaaatggtaaattaacatgtttgatatcttacactgatgtgtcacatagacagaattctctattttccttttccatatgctcttatacaggggtgtcgtttgggaacgctgtttataaccttcatatagaaacactctatattaaccaacatagggttccttttgcacttgtctgttaatcttttcatatatgttaattagaaaaaaaatgattgtttagtaaacctgcaacaacgtgcaaggtgggtgcggggtaattgatgtatcccctccacagttcaaacttaatttagaagtgatactcaaacctcggttggcggatttgtaaccttgtgcatcttatttgcttcaccagaattttggaagttgctagtcgaacttgtcaaagcgttctgtttatctaccaagtttttgcaaaagggtttctgatgcaaattagatagcaaacatgttcccaaggccagaagttactatgattttctacctaaacatgagatgtggggctgtttggagctttttttttattttatctgtatgcaattttttatttcacacttgttcaggtcattcagtttccttgttgttttccccctttacagctgagattgta

SEQ ID NO: 14269 - DNA, 431 bp, Brachypodium distachyon
  Intron number 2 from transcript Bradi1g65880.1 (locus Brad i1g65880) derived from phytozome v7.0 (chr-ID Bd1; pos 647 81830 to 64782260 reverse strand)
gccggaagagggccgaccttcttgcggctaagcaggttaattcgattcctggttcctaactctgcaactctgttctaattctcggtgaatgtggaacacaggaaataaggtcaattgctcaaaatgatgcattatgtttctttgcaattaacacaatgaatcttcccatttcaaatgatatggataacgataacatcttccgaatgtgtgctgactgttgagatatttcttctttcataatggtcattccacagtccgcacattatcacaaggcatttctaatttagttgaaatgaaattcaaagagatgcattcaatttcattagtctttgtagcttctgcgtacccagacacccagtgtatagcttttgataaactattattttccatgtacctgatcttaatttttgggcttaccacccatgtccagg

SEQ ID NO: 14270 - DNA, 611 bp, Brachypodium distachyon
  Intron number 2 from transcript Bradi2g04110.2 (locus Brad i2g04110) derived from phytozome v7.0 (chr-ID Bd2; pos 288 3072 to 2883682)
ttgggtaagtcctgaacccattacaagaatggatgcttctgttggttgatctttgtttgttctgtcagaatttctgttcatgttgccatggtgttcctgatgataatgctgagtagatcaatgaagtgcagcagtggtatgcaacctagtgcagaggattgggataagtcatgctaaaaactacaaaatctagcttttttttgactgaatactgccttaatctggttatcttttgattccataactggttccacatctagttttctgctttgatctaagttgcgaaggcgcatagtagtatgaactgtgttgctgatgtctttgttgtaagaattgtgtacttctgctgcctatcaaatgtcaggagctagtggtaggttactgaattttttgctttcatttaggggctctgcaatctcatcttagtaactcactacataaaactgtgttccagatatgagaaattatgctcaccatatcttcagcttagcaaccctctccctttgtagacattttaagttccacggtgtcgacctcatgaattatgatcaatctgttctctcgtatctatttcagctcgggaaagcctgccccttgtaagcaaaggggca

SEQ ID NO: 14271 - DNA, 564 bp, Brachypodium distachyon
  Intron number 3 from transcript Bradi1g53960.2 (locus Brad i1g53960) derived from phytozome v7.0 (chr-ID Bd1; pos 523 47168 to 52347731 reverse strand)
cctcgtgacccagttccaggactccacagacgaaggtaaatctgttctctatttgattcatctctaatgcggggtatatcatcaaatctcccttctgaggctcgtgttagagccaagtttctgtgtgtattagatcaggtgtattattttagggggaactgaaagtagcagctgatctcaattggatttgtggtagaaatagtagtcagcagattttgctgcctgcaaggtgaatttgctgcttactgcggtttaaggaaacaatgtatcggactcaaaggaaaacgacttagtgaggttcctaagggtagcaaggaaaggatgttgaaaataacagagggaagtaaggttgacgcatatgctgcctagtgatgttttcggttttacataagcacatatcaggttttggaagtatcataggtaataggtttctaaaatagcatgaagatagctgcattttgtcagtgagacaccacggcttcagtgttcttttgttctcaccaaattcatcatttcctttttgtttcagagtccaaagagaggatagttgcaaacttggcaaat

SEQ ID NO: 14272 - DNA, 972 bp, Brachypodium distachyon
  Intron number 2 from transcript Bradi2g02180.2 (locus Brad i2g02180) derived from phytozome v7.0 (chr-ID Bd2; pos 148 7652 to 1488623 reverse strand)
cgcgcgtcacgtgtaaaacgactcgcctcactcattgttcggagatttgtttttttggactgtttgaaccatgccccgaaaattggagcttcatcgttaagtacttaactgaaatgctactccctccgatccataataagtgtcggggatctactattatgccgtaatatccgtatgttgtagttcacggataccatattcctacagcagcaaagcattactgagctgtgtaatcttgacatcaactgcagtgagatacttagatttaagtaaccaggccatgaacctagaaatgcagagctcataactgtgacacctaatctagtaggggttgccgttgaagaagttatccctgtattaattcctgtaattctgggcacaaaaacctgcaagtagatatgtggtgtagctatggcgatgagacacaatacgagaaggattgtgtgaatatgatggccaggttgaaattgtagatgctgggttgaatgatgatatgatcaaaacagggatcggtttagtagaataagatctaataaggaactaactttagacgtgcagggtaagatttcagaaacattaatgaaaatttgaagcatggtaattttatggctcaatggctgcatcacccatgtaggtgacctttcatggtcatatactttcaaaacccagtatctgaagatacagaaaaccagtttatatgagaagagaagactatcttagtttggccaccgcagttactgctgtgattgtagcaagctcaaacgccattttactctacagatactgtatagtagcagctgacttgatgtttgtgttgtattaatacattgcagcctactatgttttgagctaataatcctagaataccatcaaatctagtagtattatggcaacatcttgaaactttggttgccatatgatgtttgatgttttccaggtacattcagcagactctctgttgaaattagtctc

SEQ ID NO: 14273 - DNA, 991 bp, Brachypodium distachyon
  Intron number 2 from transcript Bradi1g77920.1 (locus Brad i1g77920) derived from phytozome v7.0 (chr-ID Bd1; pos 740 48202 to 74049192)
cctcctcctcctccctcttcttccccaaacgccaggtactctacctcacattcacaacaccttccccttttttgttttattttattttgttttgttttcccttcgcgtggattacaacctgaacccagggaggagagacggcgatggggttgcgcctgatttcttccaagtggccaactcgcgtccggcgctcaaaactccgcctaattcccgttcccctaccaagtctcctgtgaatgaattaatggatggatgaacagtacgggtcattattatgaacaattcttaggacagaaatttcagcctgaattgcgtggtaggattacttggcaataataataatgtcccaccagtggaagcgagtcaaagtccagccagtgagatcgaggtaggcgggttggtttggccgaaatcaacacgaaccgaccaaccgactaacagtcgcagtcgcactattgactattgagagtgacgcacttgcatatttgacgcctagtggcaatcaactgagcatttgcttttttttttctctgaaccttccaaagggatttgtaagtgggaacatccagagagaacaaaggcgacgcggaaagaaaatgccttcttgcttgcttgtgtacagatggatcacatgactccactcactcactacccccgaatgacctgaccttttcatgttctcaagacacttgtcgacacatgtcgtgaacttggcgtggttgcagaaacactagtgaacaccaaatcatggcacccaccgacgagcaaatacagatacgcataaatttcgttgatactatatgctatgcattcttagcacttccccaggttggcatttcaaatttaatgattgacacaccatgtgattgatccctttccattcacacgatgctgactattgagcctggattctatcggtggacttctttgctggtacacttcgtgtgctttatcaatatggaaatatgatttttatttcagggattggact

SEQ ID NO: 14274 - DNA, 960 bp, Brachypodium distachyon
  Intron number 5 from transcript Bradi1g63690.2 (locus Brad i1g63690) derived from phytozome v7.0 (chr-ID Bd1; pos 629 18358 to 62919317 reverse strand)
agcaactagaggtacaaaagcagcataatataatttataattaactatgatagtcactttgacatctcctttcaataaatatatgatttatagctgactattgcatttcgtgaggtactaatacaacaaactgaagttcatgtctgactatcccattaatgtagaaaattcaatttaaaaatatggatgatgtaagaatagagtaccatgaaccagcacaaacttaaactatgcttaaccaacatttgatatttttataagtaaaatttcgaggctatgctctggttgtgtttgctttgtacggattatttacaactaagtcgggtaataccttcatgtttatcctgtatggctgtacgatttcttgtttactgatagctgcaccttacccactgcttaaaaatgatgcgcactatgacaacacataggttctatgcgacaaaagaaggctgaaagaccaaaagtcctgcaaccatattgtctagatagatagacatggtgtatgtgaatctttgtttgccactactcaaaagctgtaactactatcgttacatcttaagttaaaaatgtcaaatacttcactgggcaacttgagttccagactttcagttagtagccatacattgaagaacatcaagatatggttcttggtatgtagagtaatgaagaaacatgagaaagtttagaaaaagtccaattaactgtaagtcctcaaggttactctttctgtatctcctgttgtgaaaatattcgagccaaggctcctctgagctgcttgttacatggttttcatacacaaataatacatggctcagatagaagttcaccattactgtaattttctcagagaaaagagataaatggtgtgatgctcaaatactcgtggtctgctatcttacgttaatgagctgatgccattcaacaggtacagagacatctgcaactccgaattgaagcaca

SEQ ID NO: 14275 - DNA, 974 bp, Brachypodium distachyon
  Intron number 2 from transcript Bradi1g73780.1 (locus Brad i1g73780) derived from phytozome v7.0 (chr-ID Bd1; pos 711 86068 to 71187041 reverse strand)
gccttgaaacctgttccagtgattgtccgttgcaggtacatttagaactgaagatatgcgtgtcagtgcttctaatttgttatgatcttgctaacgttgtaactactcatcgttgtataaaaaataaatataccatttccttatgcctgattctgattggcggattgctttactattcacctaaacaactattagtcactttagatgttagactttagatgctacgcttgtagtggtaccatcaccattttgaatgtagggaaaaatatctttatgccactgtgattttcaagagttagttctgacatcagagtttttgtagtactgttgtatttgctgtcagaaaaatacatggcgttgatgtttgatgccactttcaatgcaacggtggaaaaagaccaaaatacccttgttccaaactgagacaagtctaatcaacaaaacaaatggatcttgttattttttccactattgattactgaaggtggcatagaacatcaaagctacatgtacagtggtattgatacacaaattttgcttgtggaatggacatttcacacactcttagggacatacatgcaatgctaccaataactgtagattgtgtgcaccttccgaaattcataggttcagacagtaggccatgatcttggcatctcacaggctctaaacaacatttttggttgcgggtatggcatgtcagctcttcccatatgattcaggaaatgtctgcctcttctctattttcagccttttatccttgaatatttttgctgtttgtttcatgcaattctcttcacgccattattctggagcaactttccagattgctgaatcctgtgaacactagtaatgagcatcatagaatgataccagctacaggcccctgtcatgatatgttgctaactgtgtgactggatgtgattttgttgttttcaggtgctgcggtcgagtgaagctgccccacttctact

SEQ ID NO: 14276 - DNA, 666 bp, Brachypodium distachyon
  Intron number 1 from transcript Bradi1g73780.1 (locus Brad i1g73780) derived from phytozome v7.0 (chr-ID Bd1; pos 711 87053 to 71187718 reverse strand)
gccgtccccaagaagaaggtctcaccgcttatcttcccttctattccgtggttatccttttcatttgcatacgagtgcaccagttttggtgatctcttctatttgatttaaccaagcaccgagagggtgcactctaggtgttcgttcaattgcctggtggatagaaactagacagcaccgccgaaatagtatgccaatggaacatagccgataggtatatggtgcagaccacctgtagatagtgggttgcgtttaagctagattcagttcaagcataaggtccgatacaggggtgtgtttgtctgaacagctggttgaaaacacgagattatccaacacattttggcagtaatgtacatgcaaagtgctagaatttctaggtgtaataaatgaattattcctacaataataataacatttgtaacactaaactcacatcctcaacactatatattgtaaggatccatcatattcaggtctgctatctatgtgttcttcagaggatctgcaccatctcattgccctcagacagatgcttcagctgtgaatttctgctttttttgttcttgggtttctgcttttttatattgtagttataaagataatgatggttgcacctcatacttgtgcattttcagatctcaaagtataagaggggtttgagaa

SEQ ID NO: 14277 - DNA, 381 bp, Brachypodium distachyon
  Intron number 1 from transcript Bradi1g75320.1 (locus Brad i1g75320) derived from phytozome v7.0 (chr-ID Bd1; pos 722 43081 to 72243461)
acaaggtaaaaaatccacacatggaactctttctcacttgtttttcttttaattcactagattctcgtatttcacatgtatgttactatacatacatgaagcttacatatgccacaacaattattttctttcgtagaaagctactattttggtaccaaccggaggtgccaaaaatcaggatggagaaagaaagaacattactctttcaacaaccaaacctatctggttcccacgaagagccaacattctggatgaagacaacaccatttctcatgtactctctctctctctctctctaaatttggatgcaattatgtttgcccactgcaattaatttctctgtttggtccctaatttgatttatgtcttgttgtcactagt

SEQ ID NO: 14278 - DNA, 530 bp, Brachypodium distachyon
  Intron number 3 from transcript Bradi1g65630.2 (locus Brad i1g65630) derived from phytozome v7.0 (chr-ID Bd1; pos 646 01486 to 64602015 reverse strand)
aggctcgccgaatcttccagcaggtgtttcttttatgctcatttgtttacttccagaaacacactttttttgggcacaacaataggtgctcaataatagactttgctgccctgtctagtttgatcgatcaaaatgtatggacatgctgtccatgttcctcatgtggttactgtgcaagtgtgcatttgataatctgctcagttttgcatttgttatctagttttgacttcctgaaattaccacactgagttgcaagcttaccacggtaattgccttttgtcttttaggtgtcttcttcttgatgcctcaattgtcttaatataaaatttgtgtcttcttgatgccttgattatcttagtatcactacttgaaacaaattatgtttttaacatagagagaaaatttcatctgttctgaagccaaacatgtcatttgaaaataatgcatattcaaggtttttgtctgactagttttggctaacaatttcttgaacagattatatctggtgttgaatactgccacagaaatat

SEQ ID NO: 14279 - DNA, 927 bp, Brachypodium distachyon
  Intron number 1 from transcript Bradi2g22860.1 (locus Brad i2g22860) derived from phytozome v7.0 (chr-ID Bd2; pos 203 62892 to 20363818 reverse strand)
agcgattctcattctgacccggaaaagcagagcaggtggccacagcagcagcagcatcggaggagaaccgacctacaactgaagttttatcgcccaccttcttcagcactttttttttgctccatccgagtgttcttaaataaattattgaacttgtacagagggatagagaagttatgtaaatattcatatgctaatatatgtgtcgaaaattattgtttatgagattacttcatttggtgcaaatcaaacaacctagcaaactctagaacacaagagagaagtagagaacaaacatgcactccctccgatccataataactcttgctgatttagtatgattcaatattaaaattgcactaatcaaagaggcattgtgcccccattgtaataaaacaaaactactatatgtgtttgggcataaatcatacacgtcagaattcaagtcaagatttctatatgggtgctttatatatatagactaggagttcatgacaataaccatgactatctttggcaggagcgagaaaattcaaattttccaatacatagcaaagagagaaataaaggtttaaacaaaatctatataaagataaaaattaaaggggaataattatgcgcatgtaataaaccaaccgatctttatctgtgcctaaacataaacatcaacataagctatttttagctcttcattaaacatatgccatcaaccgatgtcattggcattaaaatcaggtgttaggataaggcatcagtcatgtttagaatggaattaaagctagacaacaggataaacatcgactccacattaactaatatcttagaataatcatgtcaatgttcacatacttctgctataaatggaaaccatggagatactatacatgcatcaatttcatcctgaacgtcacacttcaggtcatttat

SEQ ID NO: 14280 - DNA, 918 bp, Brachypodium distachyon
  Intron number 1 from transcript Bradi2g06260.1 (locus Brad i2g06260) derived from phytozome v7.0 (chr-ID Bd2; pos 470 1323 to 4702240 reverse strand)
ccgtctgcatctttggccgcccattggttgctcaggtatgcgcattttattatccaggatggctgattttcagaaactttgctcgcctagcacagtctagatcgatccgccccctgttcgtgtgcctcgggttttcgatgccattatctagtactgagcaaatctgtgcgaggtctgcggttgcttttagaggtttctctttggattggttcaggttttattttatcttcttcttacatgttttagatagatgtttctttttcctcttcgttgagtcggaaatttcaaggcactggtgggtgttgattttgaccagttcgcctggaagatgttttttttttctggttgtcgtttagagaagtcacgatccagccatgtttttgatactcgtcgtcgtagataggagagatctctctttgcgcgtgtttgattttattcagaggattccccgcaagaatcgctcatattttggcgtctcgttttgatgaatccttgtgttcacatggagagatctacgtgcggcctgtcaatttgtcaagagacaggtgtagtccaattactgttcagattaatgtttgctctggtcgcaatcgcatctcttacatttgcagtttctgtaatgcttcagtgcttacaattgtcaaaacgcgtgtatttgccctgttccatgcctgccttcctccaattccacgagagaaaaagtcaagtctttattacttaataattttgtctactattcgagtctagtaatgttatatacagtacttgctttggttctgctctccgaacgagacattttttatgagcaataattgccaatacaatactacccgtcgcgcacctagttatgtttacaatttcccttccttttggttgatttcaggatccttgagaaggctaagtagctgctggctcttc

SEQ ID NO: 14281 - DNA, 545 bp, Brachypodium distachyon
  Intron number 2 from transcript Bradi2g17220.1 (locus Brad i2g17220) derived from phytozome v7.0 (chr-ID Bd2; pos 153 56972 to 15357516 reverse strand)
gctcggcgacctggtttacaggcaggccactgtcggtgagtccttaattccacgatttcttggaccaagttccttgcgatggggtgaaaatcatgcgcgtgtagttagaattgttaggatttctctggatgaacatagatctgttccagctgcttggcacacccggtaggattacatcataggaaggatagggttgggatctgaattcgtgcctgcttaagaagccagtcagtggcggtttatatgcttcagcttctagaatttctattggtgaacgtggattcgtttaagttgcttcacaaggtaggatcacaacttgagaagaacatggttgttatatggatttcatacttgcttaagacgacaaccagcaacagtttatatgctttagatgctctatgaatcagaactaagttatttgaattatgtttctaaccagtgctcgggtaattcatgcagtccatgtgtttgtgatactttttttgttaatgatttatctcttgctttgttgacttattgctgttcctgttctctgtgtagctggg

SEQ ID NO: 14282 - DNA, 1061 bp, Brachypodium distachyon
  Intron number 2 from transcript Bradi1g61370.1 (locus Brad i1g61370) derived from phytozome v7.0 (chr-ID Bd1; pos 607 57329 to 60758389 reverse strand)
gcgccgacgaccttccggatcctaagggtaggaggagaccccatctggcgcaagattccgtggaaatggccaaaattttcattagaaaaaaaacactattcaaaacagccatcccacaacgtcatgagcagtaaaaaagtcacgaatccactctcagaaaatggtttgcaaacatggcaaagtgctccctccgttacataatttttgtcgaaatattatatgtatctagacatttttaaaaaataaatacatatatttttagcagatttaagataagaattatgaggtcttgtcacaactcaaaatgtgtatcgccgcaaagcaagaccaagggaactcgatcgttggatcagcacggcctcgcaatgtttagggcgttgaagagagcaaaatgggaaaccgaagactcttcgttgtatgccctgtgcccgctaatattataatctgacaatactctgacacagcgtgaccctgtggcgaggtacaaccttcgtacctcctcctgttcggtgattaaggacgtgggatagtaatcacgctagggcttgatttggctacaatcccgtggtctggatccaacgtttgcatgggggtggtgcagcggaaccacggttctgaaaaacattttcgggcgtctcatggaacggatcggtttggtcatgccggacaggcatgactgtcacggatcttcttctcgatggacaccaaggtggaggtggtagagtcaggatgcctgtgggcatctaatacccgttcccttatccaggcgagcatttttttacccgtcggaccgtggggagggtgtgggcaatacccatctccagagacagtacgcagttccctttaatttctccaaatcgatcgatgcaactgcctcctgggcgagcttttctccgtccttgtgcgcggccgacctccgcgctcctccgcccttgtgtgccgccggccgccgtgctcctccggccttgcgcgccgccgccgccatctgccctgcgacttgcccttcccccttctatccttgcgcagagctcggcccctcggttcttcgtcaagcggtgccg

SEQ ID NO: 14283 - DNA, 1015 bp, Brachypodium distachyon
  Intron number 1 from transcript Bradi1g51630.1 (locus Brad i1g51630) derived from phytozome v7.0 (chr-ID Bd1; pos 500 62735 to 50063749 reverse strand)
gggaacctccaaggtgaacctctttccctggctcctggaagattgctttttaccttggtttgtttggccggtgtgtgcattttcttgtggagtttctgttgctcttagcattaggttagaagttcaggctcctaggtttgctcggacttgcacatccggagagaacacaagtgcagagttctcttcagcagcaagtgtcagtcatggcgagatctttctcagattttttgcttgcttgattttttgatttgcaaaccaaaatggcatatattctttttctaagataagaaaatggcttatctttgaaccaatgtgctctgacagagttacagttcgttcttcgtttcggttcgatttttgctagccgaaggatgcttccaattttcgccggtccgaggcgggatttttgcttgaaaccggcacttcatttattagtccctgtccacaattttaagaaaagtcggtgggcttttgttcatgctcatttattagtaccatccaaactgtactaactgagattttgtgaggagcaggggctctcattaatgcgaaaatctcagaagcacatgtcacaacggttaatgttttcaaatggcacgctcacctgcttttgttcttattgttcaaatgggcagtttgtttacttctgttactccaaccattcattttgtatgtccctattcgtagtctccttttgcagcagtgtggcagccacgtgatccatcttatttgatctaccttgtttgactccgcctgcattggtaaaagaaactagcatggtggtttcttggagttgaaaaatgaggttttcactttgtttggagccacttgtcttggtatagattcccttttgtggtaacttcaggtagatcttgatgcagaggcaatggggatttctctcagtatgtccactgtttgtgttctttgtctggatgaacacagaatgtacaagacttaccctttgctgtcctgttttgcagtgttgcagctgggttacaaccagttgacaggcagc

SEQ ID NO: 14284 - DNA, 686 bp, Brachypodium distachyon
  Intron number 5 from transcript Bradi2g15530.1 (locus Brad i2g15530) derived from phytozome v7.0 (chr-ID Bd2; pos 138 10058 to 13810743 reverse strand)
gaggtgagatatctcaagcatatttttttctctgtcacgcactcacgctagcatgagcatagaacagctgcaacttctatctttgaatccctgcatactgctgcttttcctttcatggttgcctttgatgattatctatggattttctgaaagtagattgttgccgactgttccgtgttgcattattcatgattttgtttatccgtcagtttagtgtaagttacatttgtttgtgctggtaagatgtcatgcagaaatctgaactacctttaccttacctggaagtggccttgctccataacctgggttcaattgcagccatcctttgtaggcatgcaccatagatgtttcttccttctatcgaactacaaaaagtaaggcatggaaaattaattcattcattaatgcgtgttggatattataaccatgcttctttgggtacaccatgttatgggatttatgctatctggctcatcttattatgtttctctcattgagattgtagggcaaaatgacaacttaattcagtctttttttctatcaaacttaattcagtctgaatagtttgtaatttctgaatttagtgttgtgagtacgagaaaaaaaatgtaatgctggatcaaattttgatattgaaccagaagttagctctaaattgtcatattggacttaacacttgacaggtg

SEQ ID NO: 14285 - DNA, 919 bp, Brachypodium distachyon
  Intron number 1 from transcript Bradi1g63990.1 (locus Brad i1g63990) derived from phytozome v7.0 (chr-ID Bd1; pos 631 84529 to 63185447)
tccggcattggtgagctcccacggcctccgaaaaggtttccactcgctctgcttattttgttctgttgcgcttcctcccttttgggaggttaattttgcggcgccaatgttgcgatgcttttagaatcgagctctggttggttagtttatgtttaggaaggggattatgaatggtttgcttcaatggtacccatgggcgcacttgcgttacttgtatagcacgatcttactgtgtaaggtttgtttttgtttgcttcacaagtgaagtaccttatgtggcacgttttctcgctattcgcggaagggatcccttgcggaaatgcccactctctgttcctttgcctttataagcctgtccttgcatttattacttcgtccaaagtgcacaccttgtgacatgctctgcaaatctgatatatttacatgatcatcaaaacaatagtgcagtaatataactgtatgaccttactagcttagttctgccatgtgaaatatttgaaagctgttgttctgaattcagaggtttttgtcacaaagttgatcttggtggagagacaaaatgatgtgtttttggcgaaaattgtggttcagtaccttgcgttgcatagctttgatggatcaggagagaatgacagttctatgttgcttgtacgcgacgaagtgcagctcctggaagtaaaccgcaaacaaaacgcccatgtcgcattctgttggttccaacttacatttcctcctcttccttttgcttcagtttcactcatacactactgctccgaactcgttgctgtttcttattctcgttgttttgctgtctatgttaacttaggcaaaggaacgtttctggctttgcagtatgtgtatttgtgctgatagaacttgcaatgagttagtgctttcgtttcagctgtgacaggttgca

SEQ ID NO: 14286 - DNA, 683 bp, Brachypodium distachyon
  Intron number 1 from transcript Bradi2g35000.2 (locus Brad i2g35000) derived from phytozome v7.0 (chr-ID Bd2; pos 350 77357 to 35078039)
ggacacaaatatcaactgctcattcctgttaggaggtaaaccatcatcatagctccttcatctcaatttattatgcaactctgtttttcatttctatgtgataatgtgataatcagcgacttcattttgtttcataccttgtttcctttttcaaggatccttcattcagagtacaaacaaaaaaatggtaataataattatgcattgacatatatgactcggtttttgtactgcacgttaatttgtacagtatgttggagttaaccttgttgtgtaagtgattagatcatgtttagatttgatttatttttagttattttagtggtttaaatgcattagaaaaaaaatgcttgtgtcaagtgtggtcgaattaattatttgagaggcacattgacaaagaagtagacgcagttagttaaccagtgcgcatgccatgtgtgttctctgtgtccagtgtgagtctagttcctgggactgggaaagttgatgagaataccaaccaaatgctgaactagctcaacaatcaacatactgaagggtccataaaaatactactttctcaatttctggatataatcttaacactgccactgctaaggcaaccttgctttgcaagctatggataattatgtaacttcttttcgcattttgttctcatgcaggaacactatccattttcaagg

SEQ ID NO: 14287 - DNA, 756 bp, Brachypodium distachyon
  Intron number 2 from transcript Bradi2g25120.2 (locus Brad i2g25120) derived from phytozome v7.0 (chr-ID Bd2; pos 230 27258 to 23028013 reverse strand)
agaagttgagaagttctaccagctctgcgaccccggtgagtccgctcgatctcttccggtgtaggatttgggggtgccaaagctaccggtgttgctatgtctgggtcgtcggtttctccgctgggaatttcggagctaaatttggtgaaaattgtgggtctggctctctgccgcggtggtagcttcgccgctttcatcaatgcaatgatgaactggggcttggttaggggttggaagtactgagcgggggcgaatttggatccttagtttcttatgttgcgtggaattggaatcttcgaattataatagttttgtggtttttgcttggtcgttatattttgaggattcgacagttattccaggttgggggagtttggggaaaataaatcatttcttgtgtgctgggaaataatgactcagttgtgtgttgtctctttgttggtttgctagctttctacctttttcctccataaatgcagtctagctcattgcttgtatgttatgattagttctgtgccttggaattaggaagtttttttgtcccatttccacgtactttggattagaagcttgacgtttcttcatttgagttatctattaatgtaaccattgtaacctcttttctctttctttacataacattgtcttcttggtccttgcactgaactgcacaaattttgtaactagtactcagaaatttttcctatgcatcactaattctgtttatttgaacagaaaaggagaacttgtgccttt

SEQ ID NO: 14288 - DNA, 460 bp, Brachypodium distachyon
  Intron number 3 from transcript Bradi2g21810.1 (locus Brad i2g21810) derived from phytozome v7.0 (chr-ID Bd2; pos 191 70776 to 19171235)
tggaggccggaccccggcgcgagcggcgggtcaaggtgcgctgttctttgcggtttggggttttctctcgcacgcgtttaggccgctttctagggttaaccgtctgcggtttgggaattattattttttcgctatctatacggttcccgttctgtattgccgaaatttcgtgggacgctactcaaggagtaatttttatgcttctccctgtgttgttctttgcccctagaggcggatcggccgctttgctctacttggtgtgattttctagtttatcctgtagcaacttctcgcaaaaaatgtttgttctgtaagctgtagcaacatactaaccaaggtgacatggaactctcagttttgggagttgctctattccggtttgttgtcattttgatttgtgatcgacgctattgtgcattttggagaagcagcggcacccgcacaacagaagccgaagaag

SEQ ID NO: 14289 - DNA, 764 bp, Brachypodium distachyon
  Intron number 1 from transcript Bradi2g29960.4 (locus Brad i2g29960) derived from phytozome v7.0 (chr-ID Bd2; pos 295 08988 to 29509751)
gcgccgttggagatcccggcgcttcagccaggaaggtgagaatgttttgcggaatccttttgtcatagggtttccttttaatgttcttggcgggggggggggggggggggttctatgggatgcagcccaagggtgggtgatccctttcggttgtttggagtcagatgtagtggggtttggtggtcgaattgattgtatttggccggattgtgatttgggggtctgggattcaggtaggggtggtattgctaacagtcggcgttcctttgttcagaattggcggcaagcggctaattggggaactggtgtcatggatctcctattgaattagataccgtagtgactgatcctttgaaatcaaattaaaatctggaaattgggttataatactatgatcggttggggaaacagtatagttcagatcacttaagtcaggattttgggagaggcatggtgtgttgtaacttcagtcaattccatctccatagaaacttgtgtacatgggatcaatttcttttttgtattaggagcaacgtctatgtcgttgagcggaaaatcagtctgtactctgtacaagaacattccctgtgtagttcacagggactaacttgtttcgttgttgttggtcttaacttgttaccttctattgtcaaattgtgtgttgtcagtttacttagtttatccagtctctgatacgtgttgtgtatgtttgtctttcttttcggtaactagaacacttggagcagaggcaaatacccggagtc

SEQ ID NO: 14290 - DNA, 749 bp, Brachypodium distachyon
  Intron number 2 from transcript Bradi2g29960.4 (locus Brad i2g29960) derived from phytozome v7.0 (chr-ID Bd2; pos 295 09755 to 29510503)
tttccgtcgaatcaataggtatggctactttgatcactcttgtaaacataccgtgaagtatgactgcgatgggtccctcatgttcggcactggaaaagatggcacatataactgtttgtgtttcagcaggaagctgtactcttccctgtaatgagtgcgaactctcggcccagcaaacccccaaaggagttgcgccagtggcgtctattctgcggtgtgtttaaccgttccgtgtctggctgctctatctattatagagcacatagctatgactgagtctaactgttctttggctgattttgcttggtcattccaatacttgatttcttagtagttattatgggcctgcggtcttcctgttagttaaaggtatcagttgcatggaggtcgtctaagtcaaactgagtttttgtgcctttgaacagtcctgcgctagatcagtacatgatcaattatgtcctgtcttcttttgtcagtcttctgatgatctttagtttaaaagcttggtctcctggtctgttcagttcgtaaaatatgtttgttgaagagctgatgaatagcaagcaactggtaacagttcttttatttagctgaacatttctgtggagatgttttggttgaaggggatttaattgtattccttctgcttggcggtttgaacctcgtgcctcagtcgggtgaatgatatactaacttgtgctccttcttcatcaggaaaaagcgaccccgtagatcacgcgacgggccta

SEQ ID NO: 14291 - DNA, 794 bp, Brachypodium distachyon
  Intron number 1 from transcript Bradi1g73710.1 (locus Brad i1g73710) derived from phytozome v7.0 (chr-ID Bd1; pos 711 50673 to 71151466 reverse strand)
tgccggcggactcctccggaagcgtcgtcgataaggttggtgtttacatgcaattctcagatgtgtttttcttgtatactcctatatcggttggggttggggagttgggattgaagcgaggatgagcgggagagagctctgggccctgtgatctggtgattcttctcgtcatggggcaactagttagaatcgtgtttgaagtgagatcctgggagtttgattggtttattgagagcgtggaaagagctcattttttttttcaaggccgtgtttggatttgatcacggtagagagtcatatgaaaagaagctagtactagggtgtttagcttccattagcgagatgattctccaaagtgtctccgcttttcgctttgcctttgctgttctctgatagcagtttcctagcacaggatttagtttgaacttcttggaccctttctattttttttacttaacccgctggactcacccactacaaattacagcaccctagcttcttttcataagctacagttctgaacatgtaaagtatacagttcactatcagttgcatcgagctccagtattattagagtagaagttagatagagcagaattgaaacaagcaaactttgtcaaactttacactgaggggtggggaaagcatgtggagtcacggggtcaattaacccgaatatacaccctgtgggcatgaacttacagttcacaacaacataattcacaacttagactcagcaagatttctgcatctttacaggaccaacagcacagtggcagcagcacggctgaacc

SEQ ID NO: 14292 - DNA, 750 bp, Brachypodium distachyon
  Intron number 1 from transcript Bradi1g73830.1 (locus Brad i1g73830) derived from phytozome v7.0 (chr-ID Bd1; pos 712 11015 to 71211764 reverse strand)
gagtcgctcgactccctcgcctacgacggtaaaagatcttcagatattaggcttttttctcatgtatcggatgcttatcggatcgattcgcttagggttttagattgtatgaggggttcaaaatttagctttagcggctttaatgaccggtgattattaatagcaaatgatcgaggtttggtagtgtttaggttagcacccctagtgtatgacgatatgcggagtccaaactctcaagcgtccaaagatgtgtgatctttgtgtgtacgggataattgcgtgttgaaatgaactgaagatcagcatagactacgtgaagcttttgcgctcagcctattgtattttgggatgtttaatttgcggtaggccaagatatgatcatgtgtatgctgctattgtgcgattagtaactgttcaagtcccatccgtctcctcaggttttatcatggattgtgcaatgctgtattgtctttgcatcaagtgctgaaggcatgtgtgctatggtctgtgcttatgctgcccccactaagactgcaaactggagttagtggtgtctggactcttaagggctgatgcactgatgctcatgaaccatgccatatgattgaggcctttaaaaatgacttttgttataatgatttctatggatgtgtgtgatgaagaaacacagatttgtttttgaatgcagaagttctaagtgtagtaaccgtgtcctatttttcatgatggttcagttctggagacaaatcc

SEQ ID NO: 14293 - DNA, 1039 bp, Brachypodium distachyon
  Intron number 3 from transcript Bradi1g71060.1 (locus Brad i1g71060) derived from phytozome v7.0 (chr-ID Bd1; pos 691 73954 to 69174992 reverse strand)
aaggcaagacctatttttccgttgctgtcgattcagtacgtatattgatagaaactttgtttttctgtggaaccccccccccccccccccccccacacacacacacatcccatcttaaagttggtttattcggcagcagcaaatgctgctcattatagggatttcgacaaagcgaatttattcatcactaaacccgaagtcagtagaagtactattatgaaaataattcagacctcgggctcgagggcgcagtttccccataaaaaaaaagcatgcgtcatataacaattgcactaaatatagtaaagagatctaaataacccttagatccagctaagatttcgattcccagtaagggtttagggtttagtgaaatgaaactttagtgtttggggtttcgattcccagtaaccctcctaaaatgaaacttggtgttgatgtgctaactgtaactctcgcatactttttgtgtcccatattactagatatatgttcttgtgttatattttaattttctcgtttcttgatgtttatgagactgcctccattacactgggaattcaagaagtttgtgccaaaaatgaacactacagcttagtcttgtagtttactggtttctgtattgaagtacagtacatctggaactgtcaatcaaaccattgtctcactttacgccccaactgaataacatcagcatgttactcacaggtattctacaatttgtattttacaattactagcaaaatacccgtacattgctccaccactccggataagtaaattagattaccctaacatatctatgtcttgttagtgtctcataccatggctttcaaagctttgcaaatggttccacatgtaaggaaatatagaaaaaagatggtagacagaccaccgccgccaattggcattatttattatgtaaagcaaacccatctttgcattctttgtaactgaaagttgtcacatttgcacaatattattttatttcttttcatatttaacagaaaaatccttactgatatttcagattagctct

SEQ ID NO: 14294 - DNA, 778 bp, Brachypodium distachyon
  Intron number 1 from transcript Bradi2g39360.2 (locus Brad i2g39360) derived from phytozome v7.0 (chr-ID Bd2; pos 394 22942 to 39423719)
ggccaggggagctgagctgagctgcggcggcggaggtgagcgaattgaattgagcctttactttgtcggatcgtagggcggccggctctatgcaggctgccgtcggaaaagatctttccctttttttttttttgcccccacaacttttttcgagaacaagaaaaagaagatgctttttttgagtggggaaagttccttgttgatgctggtggtgggttattaggtggaattggctggatttggagctggagttttgggatatcagatggggacttggcttactccggccgtttggatatttttagcatcgtactgctactattaataaacaaaaggtttactagtttctatgttgggaatttgagtcttcttcttcttcttcttctcctgctgctgctgctaccttctgcttctgtaagactcccaagccaaatcttaattaatccgcttactttttttttgaagtaggaggaatccccaggcgtagaagcatgttcctgcaaggggggatttaatttatttgttggacgttcattctgtactagaatattgtagttttgttgcttttgaggttgcgttgcaaactggggataagtaacagtcagcgtcttctgtgttattagaatatttcctggttgatcattagttcggcatgcgtgggttaagcaaatatttgatattagtatattccaagacttgtagtcctctgacggaacctctcgccatggatttaccactgttttcccccaggatttcattttgacgcgactccagcaat

SEQ ID NO: 14295 - DNA, 683 bp, Brachypodium distachyon
  Intron number 1 from transcript Bradi2g11670.1 (locus Brad i2g11670) derived from phytozome v7.0 (chr-ID Bd2; pos 100 21252 to 10021934)
ggaacaagtctggtaaacagggcctgcaggtacataggcttagggccaggcagtggaggcctgcccttgagaccatcgacgaggcgtagattagtcaaggatttggtgcgctctttgttcataaaataggaaatttgattatttcattttattcttccatgtgtgtggattttttaagcaaaagcttaaatctcagtcaagatcttagtaccattttcactccatcgtctgccacgttttgcccttccaacggtcaagcacgccaacttatctctaattaaaagacaaatgacttatctaacgtattctttttcatgtcattacttggctctctgtgctacaatcttccaccaacttgtatcctccttgccctgctacagcaccgttccccgagacaaaatgcaaagtgaaatcttaaaaatctcaaaattcatataactaatgtagttaaagtatactttattatataattttattatgagttatatcatacgatatttagaaatatattagatattattgtaaattgtaaacatagcattcaaggctgaaccaataaactaacttcatgttttaccaaaatgaaccaaaatcgtcaaatatgtcttcgtgattaatcgtcttcaagacatcgtgatggaatcctaggtgaaacctagcgcctcctcagatatccccctcgc

SEQ ID NO: 14296 - DNA, 740 bp, Brachypodium distachyon
  Intron number 3 from transcript Bradi2g34450.1 (locus Brad i2g34450) derived from phytozome v7.0 (chr-ID Bd2; pos 345 35328 to 34536067)
ggaaaattgtaagcaaaccagcaaatttcttcaagggattacagttatcagttgcttacagcacaataatcagagtgttttgtttttcattgggaaaaacaacacatcagtttatattgtacatgcagtgctaatgaggtaacaggtttgagaaggctataactacttaccagcgcacccttaaccactactttgatttttgtgtgaaaaatcaggttgagaaattgaggatatacagaaccagatggtataaccacttgtcaagtacaattgtacatgacaagtgaatatctgttataagcacttaagataatcgatttacatgcatgtccagtggctccatgatttaaattttatgcgggacgtactatatagttttctctgttttaaaatcatggataggtcaaatatttagcatttttcaccaaagcagcaatattcccctgtttctaccaatgagtcaggctgaaccccaagaatatactggagttttttcaaaaaagaaaaatgttccttgatgagccccatggaatacacacgttatgttcctaacagatagagcatgtcatgcacacactggcccaatctttatactgaccattttgtgttgtcctgaaaagtagtggcaagatatgtgaaccaccagctaatgattctcaatgcaatttgtagagttgcatatgtactcattcatttctgttgtaggttgtggcgaatttcagtgcttcttggtgtggccc

SEQ ID NO: 14297 - DNA, 924 bp, Brachypodium distachyon
  Intron number 2 from transcript Bradi1g55980.2 (locus Brad i1g55980) derived from phytozome v7.0 (chr-ID Bd1; pos 546 83395 to 54684318 reverse strand)
aacaagcggtaagcggcagatccctttcacgctcagaccgtttccgtatgagtgaaattcccacggagttcgctgttgtctctgtaaacctgattgtcctttgcgttgggccatcagaggtctggttcagggtataattggttttatggtttgagggtgcggtctgtctgtttgttgatactagcggcggatagagctcactttggcatgcatttttagttgaggggcattcatatcggagttttggagtgaactaaatttccttgaagtgagcttacttggacaaattaggtgttattagcatttttccattgttttggctggactgttgcgggatgctttgttatgcacgatgcctgcagcgctgctgttgaatatcagctcttgtgaccttgatcaactaaatatctgaacccctgtataatttggtacgacatgttggacatcttggaataattattgagaagagtgaatgattgtagtatcagtattatatggtaaaaattgtataagattatattgccaatttttttctcactctcaatgtttgatttcccagaaatttcttgtagccatgacctcaatccctgcttacgctgaagcacctatttctaatattattttattaagtctagtatttgttgtctcaagtaacttgtttccatggaatatatacctctgaaaaagtcatctgcccattcagaaatgcgtcaatttaggctttttgcaacatgctaatttgatatgtttgattgtttactaattctgggattggcaaatggccagctgttgctatatgatttttactaatctctgtatgcaaacactttcaatgttgcgatgccaatgccatctgctagtaaagatcttgacaatcgtttttgtgtagggctggtgagcttactactgaagagcttgaccgcc

SEQ ID NO: 14298 - DNA, 792 bp, Brachypodium distachyon
  Intron number 1 from transcript Bradi2g31110.2 (locus Brad i2g31110) derived from phytozome v7.0 (chr-ID Bd2; pos 308 74669 to 30875460)
acatcgcaggtaccggtctcgtggatactacatacttgtagatctggccattttttttctaccatatgcatctgttcctgttcaagaactgttcttggtgacctgttttgttcaggagcagtagtgcagtctggtttgattgatgagatgtaatttgtgttctgtttctctgtatgagttgtgtttagagttttctcttctgaacttcgatgcgtcagtcatgattgaattctagagcaatattagctcagtggatctgtgcagtagtgagatgcgaatttgtggagggcatgtgttcgttgctggttcccagtggtctatgcgaaaacattagtcgagcaaattcgcatggattagagctatggggttaaaagtggtgtgccactttgatgccccagccgatttgcatcagttctagcatgtcttagcattgtgtggttcaaaattgttgtgcaatttggatggttcgactattgtcatctgttcccaagtaataatcgtttgtgttgatgtgcttggtttgtggaaaaagatcaaatgtccccccaatagatcatcttcattgtataaattgcagtgcaaaatctgggtacatctgacccgatcaatttggttcttggcctattgggaatacatttttgtactcctgttctgtttgggtacccccgctgcgcaattaattgggagcacatccaatcatgtttgtacgttttgcagttaagtaaaatgttaattcagaaatttcgactattctttcttaggacctctgctcatcaaggagttgtgaggaag

SEQ ID NO: 14299 - DNA, 929 bp, Brachypodium distachyon
  Intron number 1 from transcript Bradi1g58270.1 (locus Brad i1g58270) derived from phytozome v7.0 (chr-ID Bd1; pos 571 09583 to 57110511)
gcggcagggggagaaagagcggtggagagagggaggttggggtcgccccgtgagtcgcaggagcggctcgcggggcgctagggtttttgttcttcccgcctgtatatcgaaagtctgagtattatccattccagatttcataagcactccatttctaatcaggcaagtaaaatacaagggttggtcacgtgatcatggacccatgacacacaattatagaaaatgtccaaactgaaaattgactaacaaatccttgtcactccctgtctgctactcccagcttccctgtatttaaaccagccatcagctaagagagatttgaaagtaaactaaaagaaagaaagagagtgagtgagtgttgtcacaaacatgtctgactctgtcatggcgtctctggctctgaaaccatcttcgtctccattgctggaacgatcgaagctccaagcgcgcgaccatcggtgaggccgccgttgttcatagtggccaagaaggcgaagaaggtccagacttcccaaccctacggtcggtgcatgctataaaattcagagttggaaactgtaaaaattaggcttggaagaacttgacttgaacgtcaatttaccttgtcataaattttggtactccctccgtccaacaaagtatgtctcaactttgacaaaatttgaatgcatctacacactaaggcatgtataggtacatccaaattttgacaaacttaagacatcttttgttgaacggagagactatgtcaacttgtagggccttctggagaggtggtgttcaaggaaggcgttgatgcatctgggagggtagccaaggtcagtgataagctcaaacatgcacactggacaaaagtattgttgctgttcattgcttaacgacattccaatttaatcaggggaagggtgtttaccagttctccaacaagt

SEQ ID NO: 14300 - DNA, 664 bp, Brachypodium distachyon
  Intron number 3 from transcript Bradi2g17570.1 (locus Brad i2g17570) derived from phytozome v7.0 (chr-ID Bd2; pos 156 41519 to 15642182)
gaggtcttcaccatccttttgcttctaaaagcgaggtattgcattgaaggcctgcttgtttaagctagtgtcaaaataatctctagcatcttagaaagtaattgctgatgcaatgtcagctttctattattcctacagaaacatccaatgaccgatacacatatattaattaaatttgttctgtgttgtttttgttttgctcctttttctgaacagtaccttgatagagaggttgctttaactcacggttgtcggtaattcagtatgctgtagtcagtgattcagtgcacgggagtccatatgcaacgctttttttcccgatgtaagggcacatgtaccacttttagaagggtagaattgttgtctttacagctgttagctatctactgaacttggcattgaggtggctaatcttgatactcttcaagtggagaagaatcgttgagtcatactttagtaatttcccagtaaacataatacatattggtgaaacaattgttagtaccaaatatttctgttcaatccagtttgttttgctttttttttctctcttggagactcattgtcaattacctaggcaccacaactgatttcttatggtattcattgttcttcatgaatgttattaggtatcctgcccacataacccttctgcgtgggaatc

SEQ ID NO: 14301 - DNA, 539 bp, Brachypodium distachyon
  Intron number 3 from transcript Bradi1g78770.1 (locus Brad i1g78770) derived from phytozome v7.0 (chr-ID Bd1; pos 746 93352 to 74693890 reverse strand)
ggtgacaacggggtaaatactgcatgcgcttatctcaaaatgttgtacactgatctcttcgttcatgctccaattaattattagtatgagttagaatgactaatctattaataatacataaatttatatgtaatcaaaagtaaaggtgaaatttatgttggcaagtgatgcatttatagagctgcaaatgataattcttttaattaaaatgatataagatcttgtttgattcgtcttgataagtacaaaaaaatctgattcctatataattttacgaaaatattaatgatttaaaatatatatgaaccatttacagcgtgaattttatttagggacaagcgaatatgttcgtattcgcatctcaattcatttgaattatactcatacaaatcaataaactaaatccaattgaatttacttagtatattttttcaactgaaaaaacatggcgtatatcttaaactctactagtgtatgttcttatatatatttttatgtatgcaggtgtacaccgaaatccgtgacgaagggcccttccc

SEQ ID NO: 14302 - DNA, 600 bp, Brachypodium distachyon
  Intron number 1 from transcript Bradi1g78770.1 (locus Brad i1g78770) derived from phytozome v7.0 (chr-ID Bd1; pos 746 94129 to 74694728 reverse strand)
gacgcacaaaagttcgtcgacaacctcaaggaaaggtttgtatatggtcatctccccttctctcttctccttgcgctctccacccctgtcccaggcctctctccccctctcctctgccggctttgctactatgaacttattagttattactactatgcacgcactattcgcccatattatgcgtttctggtccggcatcgctccgctaccgtaccatatccgtttctgtgtccgaatccgcatctgtaccatttctgaatctgataaaaaatacggaataggatatggtatgagtactatcccactgaatccgatctggtttcaccctaacacctctcctttggtcaatgattaaatgagcagggtatctttaaagaagaaggtttgtatttggtttgtctggttcttgttgcaatacaaaaatttagactagctagtgaaaacgttggctttttgatcggtgcaccaaaaaatagatttcgtatgaacttttttatttgacgattaacgttactttagttattgccaactgaattcaagacagcgcaaatactaatattttggctacactactaggtacggttatcaaatatctacaaa

SEQ ID NO: 14303 - DNA, 751 bp, Brachypodium distachyon
  Intron number 1 from transcript Bradi1g75510.1 (locus Brad i1g75510) derived from phytozome v7.0 (chr-ID Bd1; pos 723 91640 to 72392390 reverse strand)
gggttcctcgaggacttccaggccagtgagtgctcttcctccgcttctaaccctcgcctctagggcaaaaacgttgcgggcttcctggcgaacccgcctgcacatcgagcttcgtgctgtgattgatctttatgcgtgaattggtacaaggtttccggatatattgctaattagatatccatgtctgtctggatgaaagtgacatgtcaagtgaactgctctgtgactaagccgtgtattccttgctataagcatcgccggtgcatgatttttgtgcgtgcctccttgaacaattactttgtgttgtactgtatgttaaaagagactctaaacacttagttcacttgttgatactagtatacaatgccatggtgatcatgcagatgataaatatcaagttgctagttttggccaagatacctcaggcttgcatgagtggcccaaccttttgttctatgcgacctttcacctttgtactagtcatgttccatttccacttatcgatctggaactatcgaactagaagttacagttggaatgttcacagaggctagagattgttttgcaatcaaaattataaggttctagccttatatgcttcattaaatgatgaaatcagtatcgccgtttcctgattcaacctatcttttcagatgataacttcattattgagatgagtttttgttcatcaatgcatgcataaatataatatccttcttgatcgctgttaggtgttgaagcattgccagct

SEQ ID NO: 14304 - DNA, 602 bp, Brachypodium distachyon
  Intron number 2 from transcript Bradi1g72120.2 (locus Brad i1g72120) derived from phytozome v7.0 (chr-ID Bd1; pos 699 35904 to 69936505 reverse strand)
agctggagaattcctctcttcgggtaggttaatgccaattgtaatttgaagttatctaggtgttattggttctaatctggctgttctattttcaatttagcgaagctaggttttacctgttgtttgagttaagttgtttctctctccatgaaccaaatattggggaatggtgcaaataagtggcattttaattactaacaccgtgaagctagtgttgcccttttcgttaaaaaaagagctagtgttgaccttttcttgtataatgaattgtgtttcctcttctgttcacaacctaatactgggtaattgggaaaataagttgtcagttcatgatatgttatctgtccgtgattcacagttcaggtaccttgcctaattcacgtttggaacattattttgttaccagcggagttatcttaccacagtttgtcatttcctattggttggatcttcagttacactgagttatgcgaatcggcactgtatattttatcttaagctttgctttgaaaattttgcttgtcttgcttacttcctttggctctgttgaatgaatgctatcagcagctctcagcagcagcaacctgagccgaatttccagg

SEQ ID NO: 14305 - DNA, 664 bp, Brachypodium distachyon
  Intron number 1 from transcript Bradi2g37720.1 (locus Brad i2g37720) derived from phytozome v7.0 (chr-ID Bd2; pos 380 96601 to 38097264 reverse strand)
gatccattggcaccaaagtactaaccaactatcgatcacacattaatttctcgccttaacttaacttccttgcaacatatgcgtacgtgcggagctggcgtgcttatcgtgcccagagtggcccaccgacagtgactcaacatgtgggtgaaaagagtagttagtactactacactgatctgtctcttgcttgtcagcactcagcatgcatgcattgctttgacactaataaacgcaaaaatggaatttctttacttctactgttactaggagtatatatatgggagcatttagtaacctttgattatatggaattaattgagcgtagcatttttttctcttcgtgtgatgctggtcgagagtataattagtaaatcatccaaaaaagggttactaattaaactaccgccgcgctatgttattaggtctcaaaagcaaaacatataaaaaaatactctcatttttcagacacatataagtatgcaaaatttcattgagaacggaaaagtacaatgagtcgaagcgagaaacaaagggtttacatggtgggtacatgaaagatgaaacctgtcccaaagtctactactgccatgaaggagcacgggtacatgtacatgtctatcattcttaatctttgcaggtgcttacatattcctcttcctcc

SEQ ID NO: 14306 - DNA, 527 bp, Brachypodium distachyon
  Intron number 3 from transcript Bradi1g76480.1 (locus Brad i1g76480) derived from phytozome v7.0 (chr-ID Bd1; pos 730 65581 to 73066107)
cggaggttcttcgtgttcaccaacgagcaccacaggtgtgcctgaattctacctcggttctcccagtgcttgttttgattagttagctgcgagtatcgggtgcattttctatgtttctatttgaagcaaaacaaattcaactttctagtctatgggatggtgcagataaaacaccaagtaggtatagaagtataattaagttactagcatttcaaaattgacgaaataaattcaaggaataaggtaacggcgcttatatttagtgaattctctaaatgagggcaagttgattttatctttcctaaaactgtgttcaattggtgttctgtacagacggcatacatgtatggcaagtcccctcgactttagcagcatgtacatgattatatatgcatttatttatgtgcaacagattttatccctgtgtcactttagatgtgtaagatgctcatatcaacttatatcttctaacaaaggttagcattacgaatttactgaaaaaaaacagggatacttacgtgaaagag

SEQ ID NO: 14307 - DNA, 733 bp, Brachypodium distachyon
  Intron number 1 from transcript Bradi2g38490.2 (locus Brad i2g38490) derived from phytozome v7.0 (chr-ID Bd2; pos 387 81488 to 38782220 reverse strand)
tctctgccttctccaagctcggaagctccttctgtgtaagctctatgtctcctcaagttccttccatgtatgctctgtgttctcaccaagtctcctttcctgttctctcctctctctgtctcctctctccctgtctcctgttctgtctctttctccctctgtgagggagaaaataacaagaacttttcttactttttaacaatatatactgttagcggatagcgttttcttataggaacgagtcttgctttctggctgactgcacccaagaaaaaaaatagatctaacctgagagtcagtagttgatgttcttggacactttctttattttcttttatttttgaagcaaatgcttattttgttctaatgagagataacacacaaggatcgcaatctctacccacgaaaagtgccagaggtctgaaacagtcttccttgggagactgcagtcattgtccaactggtctgaaactagttaaggaaacgtcaaaaagtcttccctggaaaacttctatttttctcggcaaataattaaggaactgccaggtcctgttttttctctcctatttttcaactatgcagttcagaaagctcatctcaccctgggttgggctattgtattgattattaattcagtggactaagagagtgtggtattcttttttctgggaaaccagtgtaatattcttttcttgatggcagtagttgctagcattgatttctctgatagagg

SEQ ID NO: 14308 - DNA, 1050 bp, Brachypodium distachyon
  Intron number 2 from transcript Bradi2g30370.1 (locus Brad i2g30370) derived from phytozome v7.0 (chr-ID Bd2; pos 299 58368 to 29959417)
aggttctcatcgaagaaggcatcggcagtgttgtggtatgcttttccccctctaacacttgtcaactgctccaacgtggaagtgtgtactccgcggtgcattgcactttctcaaccagcaatttacgagtgattggtctactcatggaacacttttttttaatgaaaactcgactatccggaaacaggttattgtggccagatagttgtcttgtagttctagacctaaatgaattttgacccaacgagttgtatcattccctctttttctttgaacaagatgcactgtttctggcagtcggttatcttaaacaaatccattgtaagaaaaagttatcttatagagctggagtagcacttataggaattcaacgatttgctgcagagattattgcagccaagatctctaatccagggtatattactcacacaagtcacagattaaacgaggatatatgatcatgaatttgggagcactataatttcgtattatttacatttagactgattagttattacagcactctacaaacaaaaagactttttttttacttacaaagttgaggagaagcaaagccctttgcagcgattctgtccttaaggcttaaggcacgctcactaaagcacagcaaaaatatatcacatgactgatgaatttctttttaccacaatggacatcgatgttctctgactattctatttttgtaagcacatgttccatctttggctcaagcatctggaaggagtcttgtattactaatggaaatcatcgtttgtgttgaaacatgaaaaccattttattctgtacaccagatcaacatggaaaccccaaatggttggaatcttagaaattacattgatttgttgatcaaattctatttgaaaaaacaaatgatattgaagggaatttgatttggagttctatatatcttctatccatgccattttgtctctgaacgctgtgtaaatgtactgatatttttgttgcggatcttttgcgcgctgctgcactgcagttaaccaaggagacaacagtgcaagctaccggagt

SEQ ID NO: 14309 - DNA, 731 bp, Brachypodium distachyon
  Intron number 1 from transcript Bradi2g39430.1 (locus Brad i2g39430) derived from phytozome v7.0 (chr-ID Bd2; pos 394 92846 to 39493576)
gagttttggtacaattttgagctacctaattcttatcgtgttctaatttacaaagtgcatttttattgcttattcatgtcttcgtcttttcctttcaacaaactcacaattattattttagtacttaatatgtaattcttatcaactctttgagtacggaatctatatctaacatgataccgtaagccaaacatctctacctgtatgtgtagattcacatgatgtcccatattgaggatgaaataaatagttgaaacaatttttagtgctcgatcaattggctcctaccgtcaaaaagttgttgctcctgcaacaattaggggtcgaaataaatagttgacaaaaaaaatgagcattctacggcacatatcgcactaacagccaactgggaaatttgttttccaagtagttatagagttaattttgagatgcatttgttttggaggtcaatgtagcatgtagattcactaattgcttgggtcggccggttgctcataattatttatagacgtcatttgttcccttgccttgcaaattaattagaagagactggttgaaagtaattaagctcctcgagttataaacaccaacatggtcaagctgccaagttgaattgatgtttgtcggagcccagtcaatcattttgattatgtagccactattacttgctcgtagtaattaattttcttatgccaggctgaatcaagaccgctggccttatctagatcttg

SEQ ID NO: 14310 - DNA, 441 bp, Brachypodium distachyon
  Intron number 3 from transcript Bradi2g38540.1 (locus Brad i2g38540) derived from phytozome v7.0 (chr-ID Bd2; pos 388 22180 to 38822620 reverse strand)
cagaacctagaaaagtctaccctggtaatttggttctcaactctcacctaccatatatgattttgatttccttttttcctaaattagtcacctcaaataacaccaacaaacatacctttttcagacgttgaataggggacacactatgattagttgatccttttatttcacacaatattttatcttttcttggatttattcagccctcccctgttttaacgttgtaaccaccactcaacagtactatgtattgaccttacacactactcatgtctctagctactgcagaacttagaacatttcgggatggtttggttaataaaattggtgctatttgtatattcagtagacccatatatcattttagtttttttcttccaattcaaactctcatacttaaacctcctgttttgtttgatacaccatgtcgcagctccagct

SEQ ID NO: 14311 - DNA, 548 bp, Brachypodium distachyon
  Intron number 1 from transcript Bradi2g34260.1 (locus Brad i2g34260) derived from phytozome v7.0 (chr-ID Bd2; pos 343 20435 to 34320982)
ggtacgtactcatccttgcactcgcgtttctttgattatttgattaattttgcccccgcccgaatatgcaagattatgatggtctgcgatcgcggcctgatttgtattgaattgtgaaaaattgaaaccacaagtttaaggattgctagtactactttttcttcgtgatcacagggttatagatgaaaatttacatggtgttaactgaatttcctcaaattaaatatactccctccattccttgcactaaaacagcgacaagtatttaggaacggagggagtacatgccagagtataatgttgggtattattgcatatttatttatgtagatatgttgaacaccacaatttaaccgcttttttaactgttcttaagcatgggagaaataacatcttttgtgtatttggtatccatatcttttctgtacacattattcaatcctgagttcagcatcagattttcatactattggtagtataatgttttaacagagctgtttaatttacttgcagccatagcgacagttgtgaccgtggcggagattctg

SEQ ID NO: 14312 - DNA, 326 bp, Brachypodium distachyon
  Intron number 2 from transcript Bradi2g25880.1 (locus Brad i2g25880) derived from phytozome v7.0 (chr-ID Bd2; pos 241 09177 to 24109502 reverse strand)
ttgaagtggtatgcacagatctctatttaaggttgattttgctttgtttcttttggaatagtgaatgtttgttttctatccatacaaatgttgccttcgagaaggatgacaccagcgcaaccaagaataaatgaagtggtaattttttctcttcatgcctctttgaatatgaatcccttttttttgtcacttcagttcacatgttttcagtttatgcgcacttgaaaaaataaatattatttcatccttttttcgatcaactgtaacctgggttgtgttatattactgtagggaggaagtgaagtgattttactatctactgagag

SEQ ID NO: 14313 - DNA, 620 bp, Brachypodium distachyon
  Intron number 1 from transcript Bradi1g68860.2 (locus Brad i1g68860) derived from phytozome v7.0 (chr-ID Bd1; pos 673 34656 to 67335275)
gggaccgtgagcccctccttccttccctggtaaatctttttttttttttcctattctccttcttctgaaattccattgtacggattatcctggtttgttctagctcgcagagtttaattttgccttctatgtagctggcaattatgctattcttttttcttgaaatagaaaagtgcgctaaatcctccggtccaaattgaaatcggagactgcaagatgaggattggacgctatctcctgagtgcttgcttcagtgatgtggaaggtttgacttttgtttcttagaaaaatgggagcgagacagcgagctccggctccattcaatcagtgaaaccacaaccgcaacagcaggttttagcgctcgaggttcactatgggcaactgcccggaacatgtggagattttgactcgcccacaataacctttccagtgcgtagttttaatctctaggcctcgtttggagttcaggattctcacagtaatttcgtacgaaattgctgcataacccttgtatttatacatcttaggaaaatttcagggatgcaacttggtgtgatggtgttgttttagtgtcgttaagtgcttaaggctgagtctgagtgctgctttttcttagcagg

SEQ ID NO: 14314 - DNA, 439 bp, Brachypodium distachyon
  Intron number 2 from transcript Bradi1g68860.2 (locus Brad i1g68860) derived from phytozome v7.0 (chr-ID Bd1; pos 673 35361 to 67335799)
cttcttcatcctgggtataatagatgtatctcctttgaagtttggcatactactgtttactgaagaatctcattaatgcctcataacaaataatacttgttcccctcccctcaaaataatacttgtagtaaggagctattttcattagtaagcacatcctcgatatattttttgatgaacgattgaacatttaacctattttgggttccagaaaaagaaacatttaacctattttgggtgctgtctgttagttataatcgtatgacagcttcttcgtatttaaataagcaactctcagatcctagtatatggcaagaaactgtttaaatagcctaaagagtattggtcataatggtacaaaagaaaattggggaattttgcacaatttatttattcagcaatgaggaaagtttcaatgatgctagtcttgtgacaggaa

SEQ ID NO: 14315 - DNA, 679 bp, Brachypodium distachyon
  Intron number 4 from transcript Bradi2g14110.2 (locus Brad i2g14110) derived from phytozome v7.0 (chr-ID Bd2; pos 127 61277 to 12761955)
gtactcgcacaccatctggaagactggagtaagaggtgacttgtgatgatcccttaaacacacatatctatatattgttatatcctctttatgggttatgctcttaagctgcgtcctaaatgacaatgaatggactttcttttgggggggaaaagacagctccatttgatacttgtctgatagagttaccatttagtgatcaatgaatcttctccgtatcagattgacttataggcatgcagtcgtaatccttattatttgtccccattgctcaacgagacaatatttattggtacttttatctggagccatattttcctgctagtccgtttcatcagaaatcttttctcttggactacatacatgtactgtcggttcaagatcttatgagacaccatgattgctttcgctctacaatatgaacccaattattttaaagcagttttatgttatgtgtagtctgcaagtctcagagaagatattgtcttcatcgcagtttgttgagcatataatgttttgctgtggttcaccaagttcaactaacatgcaatgatccattgagatgaatatgatagttgtgttgcacatgaatatatatcccttcactgcataagtgcatattgttttatgtagataatctgtgtccttgttttgatttgcagtggaaaatcagaaggtg

SEQ ID NO: 14316 - DNA, 730 bp, Brachypodium distachyon
  Intron number 2 from transcript Bradi2g24280.2 (locus Brad i2g24280) derived from phytozome v7.0 (chr-ID Bd2; pos 221 15145 to 22115874 reverse strand)
tgccaacctacagttcttcctcttgtttcttgcctgtgagttctctttgcttcgtccgtcctctgggactggctagtagtcagtagtacgttactgccgggagtcagcacagagatgatagggttcttctatctggagcaacatttatttgattatgatttccttcttgcttttcctttttaagatttcgttaggaacatatgcggtcccctcccagtgctggtgcttcccgttttgttgagctatatatatgctttggtagtttggtgccattttatttggattctttgtctttgtgtaaaatggaacataactaaattcagtctatagtggtgattttcgattaggatagtcttattagaatatggaccaataattggctaatagcctccagcagtatcacttttttttaaatctaatgcatgtttcactaatgtattacacaaatgggagcccattatgtactcggttcggtgtagtcgcaagtctttctagctctttaccacaagaatcaaggtgcggcaaaatgaccactcaaccttatttcacacctcatatcttgtcactaataaaaaacattgaagatactaagtgaacttaaaaaaaatactaactgaacggtgttgataggaatataggaccagacctttcgatctgcccgccttctgattggttacatggattcctgtttgcagattcaggagtgtatctagctgaaaagataaacatc

SEQ ID NO: 14317 - DNA, 976 bp, Brachypodium distachyon
  Intron number 2 from transcript Bradi2g03370.1 (locus Brad i2g03370) derived from phytozome v7.0 (chr-ID Bd2; pos 246 1124 to 2462099)
accgcgctcgaggtgctgccatatctcttggatactactagcttttagtgctaattatcttcctacgatgttatttctttagcattagcatttcttaacggttgccttctctgaatttgcaaccaagcacaatcaaatttgttttagtttacagtcatatttaatgagtaacttggtagatgatacttcgaccaaacttctgttatgtgtgaccttgctgttttctgtttcacaatttttcaccaaaggaaaatccagctgttagtaacacaatttatttctctagtcatatactcatattcgttatgttttcttagaaaaaaatgtgtttcttttgggacatgatagttatgtttgattacttcattttcattccatctaagaagtggtctttatgacaaacaagaaaagtttggcatgcttaaattcactgtcaagtgcagcattttctatgtgctctcccataggaaatgctggtgtgtatcacatttccggaaagtttgttgccaattacaaggaatggtaagatttgagaagatatccagcagtgagagagagcgacgcagaacttgcagtcctttttaacacggctcttttgtattttcccagttgttttatgctctgttaattagctaagcttttgactcctagttgttcattggcctagtagttgccagaaatcgggtttggctactgtctttttccttaatctttatataaagcaatcagttaaaaacaagcagaacaggcatgaaagaaacttaatacatctggagaggagtagatcttttgtttggatcattataaacaagggaatgttttgtcattttgcttccttttttctgaatacattcttctggtattttatttttatgatactactcaacgtttttttggcctcttattagaagttactatgacatcctctcaagaaaataaagaactatgtaatttatatcttgcttctggtaaacag

SEQ ID NO: 14318 - DNA, 843 bp, Brachypodium distachyon
  Intron number 1 from transcript Bradi2g08700.4 (locus Brad i2g08700) derived from phytozome v7.0 (chr-ID Bd2; pos 706 0515 to 7061357)
gacggtgaggatcccgatccccactcctcgatcgaatattcgtatacgcgcctgatttatctcgtgctatgctgcgatccacgagagctttcccggggtctggatttgcggtgccgtgttcgttcggcggactgtatgtctgagttttgctcaggaattgtttgtggccgtattagggtagtctggtggatgggtgaattaggctgcctctacttggatttgggtcatgtgcggtcgaactggaacgtaatttatagtgttactggattatattttcacttcattttcccttggcccacttgtgttgagaaatgtggtttttctctttccggtgaagatgttcggtgctggaatgtagacgtcgtttcatgatgttctggtgatgaatgttcgtctatttcattagttttctcctcgctattctatgtatgcagtatgcgccaggtggaaattaggtgtattgaagagagcagaggtgttctgagtagaaagtgtgctaaaaattagctagaagtccctttattaggtgactgaaacaatatgctgcttgaaagtatgattaaccacacgtgaagatgaaaaagaaactatcaagtcctcttccatggcacacatcatacactattacactatatgcccagatacccaattcagaacttatctatataaaaagtttgcttggaggcttgaagttgttttctgaaaaagcttcatggttagacttatgtatctttgtgtttcacatttgaattttttttacaagtcaaacatccttttttctatgtcaaaagacagactcaaataactcactgtcatagactgtatgcttattttgcataggtg

SEQ ID NO: 14319 - DNA, 235 bp, Brachypodium distachyon
  Intron number 2 from transcript Bradi2g08700.4 (locus Brad i2g08700) derived from phytozome v7.0 (chr-ID Bd2; pos 706 1386 to 7061620)
gatcaaagctaaggttaggttcttgcatttctattcatacctaatttcatggaatacttacctcagtgttatgttcaacatctcttctgtcatcaagttatgctaattttatttccgttttacactctttggactttggagtttcttaatgccgtgtcttcattaacagatattttcaaatatgtgttttgatcgtgcagcttatcttccctttcctggacttggacataaaata

SEQ ID NO: 14320 - DNA, 974 bp, Brachypodium distachyon
  Intron number 3 from transcript Bradi1g46840.1 (locus Brad i1g46840) derived from phytozome v7.0 (chr-ID Bd1; pos 453 67070 to 45368043)
tacccaagcagcatctaaggttagcatcaacctaatcactcgcgtttatgcagctgttcgatgtataattttgatttttttgtcttcatgacattgcattactaattttattctatattttgcgtaacattttgtcctcggccttgagattcataaggttgaatgcgtcttaggacttggtacttcatgtgtagacttgatattgagtaatgtcaattgaggatcataatttgttatgtcacatgatatgctgctaatacatatggattctgtgagcctcggttgtctgcatcttaggaagtactgtcagtgtgtgtcaatctgttttgttctatggccatttgatctgtgttgtcaattgctcctgtcagtcagaaatgtatggcgttctagacattgacgtgctctcccgcataaatccttatgttttttatatcggaaaacgtcgctgaatgttattttcaaaatctcatagtagtagtaatagtatttacatcttaccaatctgaatgttatactcagtgcagaatgcagggagtattagtttttgaagttggagagttctactcggtactttctaggaagtcatgtaattcactaatggatgcagtatttctcagtgcagaatggattaacaattacaaattgtttgtagacaagaatgagtcagcatgttctgatgattgaatagtatcaaaatcaaatgtttggaacataatacatagtgcatttggcagtaccagttataggacactgtttatgtaagatcattctttattttcatcagcatacattcggctctattttggtgtagcaatacaacaaataagaaatatgatcctgtattaaattattattggcactgtatgaacgtaagttgctatctgtattactcacgcatccttactatagctttactaacattggttatctctgctttgttgcatgcaggttttattgaactagggccagta

SEQ ID NO: 14321 - DNA, 995 bp, Brachypodium distachyon
  Intron number 1 from transcript Bradi1g75140.1 (locus Brad i1g75140) derived from phytozome v7.0 (chr-ID Bd1; pos 721 14618 to 72115612 reverse strand)
ctccttgtccgaggacttccacccctcccgccaacgtacgtgcgcatgttaattacgccttcttgtctactccatttcttctactgcttttgcagtgccccttttgatccaagatgcgtgctgtatttttctcgtccaaactagtccttcaaagaaaaagaaaaaaaactactgtatgttgttcgtcaactctgcctggtcaacgcgtgcaatctttgtagtgctatctactgtaagttagtgtaccactgctggaaaaagagccaccgtgtgatgtaagtatttcgttaattacatggtttggtttctggtcttagattagctttcttcgtggtttgtagcatgtctgcagaaaaatgtcgcattctcctcttgagctttagtttaatcagacgtctgtgacatcctcgttcagtttgtacttttatggtttttatatctgtttctactccatttgtccccatttgatcatggtcagaaccaacccatcttggtaattaaaaaaaaagagttactgtactgtaaacaaacaccgtcagaaggtattaattcgttatctgtttggtggagaatatcaagggttcatattactgataataatgccccagtgacacatcctggaatctgtactgtcagattcactcgatagtactcccctgttctagctttgtcctagtttgaccaagtttatagaaaaagctaccaaaagatctacaaatctgaattaggtttattaaatccttcatgatatatcttcatagactcatagtatacttatttgatattttgataccgtagatattagtatatttttctataaatttggtctaagtttaacttgtgacaaaactagaacaccttaatttagaaacggaggcagtataaaataactctttgctgcaagaatcatcattatgttttctggcaagttcagatatgacacttcttctaaatttacagtctcgcagtccataagctctcaaggttctagcagt

SEQ ID NO: 14322 - DNA, 738 bp, Brachypodium distachyon
  Intron number 1 from transcript Bradi1g51250.1 (locus Brad i1g51250) derived from phytozome v7.0 (chr-ID Bd1; pos 496 98922 to 49699659)
gtgcccactccaagtcagttgttcagttcctcccttctctctgttgcctgtattgtttactgaatgttgattgtgaactgtctgaattttctgttcttcatgtctgaactatgaagaagataacaaagagggagaaaacaaaatggagcttgttagtcgtctgtagggaaaatgaaacttcttctgaaatgtgaagtggctgccagcctctgtgatgagttggttttagaaatatgaattgagaggacatatggtttatggtttagaagttttgattggagggagtggccatttgatatatcaaagagattagttaaaccttaaaaaaaatactagttcaaggaaccaaacggggagcttaaatgaaacagagatgaaggaattccaagtttgcttcttcgatttcaagaatggagcttgtccgattccataatgtattgtacgattaaaaaaaaaagcagcgccatctatgaacaattttatggttgtagtgtcacaccaacctagtacctactatgggaactttggccttttgtggtacaacattattaggttgcatgaatatgaattatggagctctttggttgtcctggccgtgggcaatttataattaagagtgtaccttctcctattacacatttaaatttaaattcacttgaaatgcttgtaatgccaacctgtttttcttctcatcttctctcagtgggtaattttatcccaatatcgcaagtgcgggag

SEQ ID NO: 14323 - DNA, 579 bp, Brachypodium distachyon
  Intron number 2 from transcript Bradi2g03320.1 (locus Brad i2g03320) derived from phytozome v7.0 (chr-ID Bd2; pos 244 1251 to 2441829)
gaggtcttgtttgttccatcctttgtttctcctgcactttcagctgttcttactgctgcattttgactttactactccctccgatccttgaactaaaaccaagacaagaatttaggaccggaggggtatttactaagaacttttgttacagtagagtaataaaaaggcaaaaaaaattagtgcaaatatgcagtatgcagtaaattttactactccgtactagcttcttcttaaaagtactttggacgtactttttcttcaagtagtatagtttgtacatgttcaaggaggattactgctgtgaaattgacttaaggtagacacaaaatatatgtgtgatggggaccagattgctttgtgaactgacagaaatattagtagcaagacataggagtatatggaaataccgcaatgattcaacttcattgttatgtttgtgctagaattttgtgccaaatttatcgttgtatcctagttctagattagagttttctttatttattttatgcatcaagtttgagaggtactgaacatcttgtgtttgcctggtgatggtgttgctggtggcgcagattcttc

SEQ ID NO: 14324 - DNA, 598 bp, Brachypodium distachyon
  Intron number 1 from transcript Bradi1g65980.1 (locus Brad i1g65980) derived from phytozome v7.0 (chr-ID Bd1; pos 648 73240 to 64873837)
cttccacttcggtaagtgtgtgggtttgatgtttccctgctctttgaatcttattcaattcattagtttcttcgtgtagcatcgtattctggctgcacttataattcctgccttttagggtcatcaatgctggtcaatttctttaacctttagatgtaaaagatcacatgatataccttaaaactactgtatttctgaagagtgaaagttgatcacatacaaaacaggatcagcaaaaggagttcatcatccaaagtagccatgtctaggttattcagcaccagccatcttccttctgcacatcataggttttctctaatattgaaaaatgagcattttatagatttctcatttctcctctttacagtcaaaataaacttcaaggttttgcaagaaatttgtctatttgtatggttcaagagatttatcaatttgcacctttagggctcgttcgttttcacgattttccccgtggactgagggggattaatctccctcaatcccggccaatccccctggatttttggggaaatggttgaaacgaacagggacttatgtgggtactgattgcaacttggtaatttttcattttaggtac

SEQ ID NO: 14325 - DNA, 343 bp, Brachypodium distachyon
  Intron number 3 from transcript Bradi2g17090.1 (locus Brad i2g17090) derived from phytozome v7.0 (chr-ID Bd2; pos 152 45242 to 15245584)
catcttcctaggaagagattcacagatttcggtaaatcctctaattttctttttttttcagccatttgattatgagatcatagtcaaatgcttgattgaagagatatcatgatgatgttgaactacatcattgaatgtggagggggactaaaatgtaatttgggcttgtgaggctcatcaaaacatttgatatcatggtttacaattattcattctgttgcactaagtcgtagcttattgcaagctaacacatgcaatggcagaatggtctgttatgtgctaagttgttttttatctgttttctccagccctcgtgagaaaggagatagccgacgaaactgat

SEQ ID NO: 14326 - DNA, 260 bp, Brachypodium distachyon
  Intron number 3 from transcript Bradi2g08890.2 (locus Brad i2g08890) derived from phytozome v7.0 (chr-ID Bd2; pos 720 8179 to 7208438)
gtcaaccgaaacaggtactacttgatgttccatttgattgggattagcagtcttttgttcttatgtgtttgtctgcaagcaggatgaaataattagaaagccaacacataattctggcatgccaaatgtcctaaatgcctgccttattgccaatctcttcaaacgcaacaatttttgaactagttaattgtactttacaattgatgtggcgtattttcattataataacatgtgcgtgttggatgcagactgtgagctac

SEQ ID NO: 14327 - DNA, 586 bp, Brachypodium distachyon
  Intron number 1 from transcript Bradi1g51710.1 (locus Brad i1g51710) derived from phytozome v7.0 (chr-ID Bd1; pos 501 82115 to 50182700 reverse strand)
tcctccccttcgttgacctctacggtgagtcttgtctcaggagccaggcctcccgtttctgatccacaacctgtagattatgcctgcagatggagactggatgtgtttgactcttgatagttgaatttttcggtgtccataaacagcttaggagtgagtacagtctgtctgaactgctgctgactgaacccagacaccaacaaggaacataagggggcgtcctgtagagatgatatagtggtatttcagcatttaagcatgaagaatatacattttagagatacctgaagctgtgcataaacataaactataagtaatatactgaaccatggtattggtaacagactcccgaggaaataatatagtccgtcagaaaattgaaaacaaaaacggaaagtggaagcataaaccaagttttgacttctactgatagactgagctccgtttcaaattcactacggaatgtctcgtacagtcctttaacacatattacttgtatctatatctacacctatggtctgaacattcagtctcacctcggtgtttttcagggcgaaggtttcacattgggagtattcgaggtgtg

SEQ ID NO: 14328 - DNA, 625 bp, Brachypodium distachyon
  Intron number 1 from transcript Bradi1g63310.1 (locus Brad i1g63310) derived from phytozome v7.0 (chr-ID Bd1; pos 624 87555 to 62488179 reverse strand)
gagaagaaagaggagcaaacggaggtgaagcgttctcctatcccttttgctccggcatctgtttcgacggatttgtactccgtatttgatttgggcgttgaatagattgcccaaatgatgggacgggtagagcttcctgcgtggttcggtcatgaatccgagacgatgggagctatttgccgtcgattggtgtgcttcggttgaacttctcatatcgggaagagcggattaagctgctaagtacggttgatgtgtagccagttctaacatttgcgctgtttcgttatgctcggcagggattttaaaaccacagtataattttttagtattctgattcgtttcatgcacgagaaagttatgaggtttaaagccgtgtagggtgcgtgcggaagcatgattcacattagagcttgtacaacacaagtgtttaagtgggtgcttagagatgttcttttttcttaatcagagtcagagtgcttacggattgggaagatgtgccttgattttgtttcatagatctgtgttgtcgtgcttccttttcttatgttttcgagtccgtgcttgttgatagtgtttgtattgttttgcagataacaccctttgatccaactaagaaaaagaagaa

SEQ ID NO: 14329 - DNA, 804 bp, Brachypodium distachyon
  Intron number 1 from transcript Bradi2g03110.1 (locus Brad i2g03110) derived from phytozome v7.0 (chr-ID Bd2; pos 223 5781 to 2236584 reverse strand)
agggagaaccccctcgttgggccctcttccgccacgtaagccgccccctgaaatgtttggatctttggggtcattctcttgttctagatgcctgcattgtgtggaatgatttagatttgagccaacgccctttgctttcgacctaaattcatggctgtaggtatggcctttgagtaatttagctgttagtttgaaattttgtacaaaatctaggcgctccttgatttggcaggagacaaatagccttgccttcttactttcttagtgattttaaactgatatgactaccttgtctatagttcagatgctgtttctttggtcaagaaggttcaaacttcatacttcatatttgatcagtgttgcctgcttgcttttcattttaaaagaagttcttatgatgtcacttgtttgaatttcatcaaagttgcacctatccatacatctgtggttgttgtggacactgaaacttttttattctagactagaagtaggcattttgaagttttaagcataactcataagttggagcatttgcgccgtggcaaggttgaataatcagttgttctagttagaagtgtcaagcgaggtggatatgggaagactcggcataacttcatttttttagcatccgttagatgcaccagtgttgaatgatcttcacattttcccttggtctgttccaacattgtcgcttcttttcttgtaatgtatgaaaagaagtccgcaatattttcttttcacccttgtgagtattgtctgataagaggtaactaacatgtgtaccaattcgttagattgttgaaa

SEQ ID NO: 14330 - DNA, 974 bp, Brachypodium distachyon
  Intron number 1 from transcript Bradi1g70920.2 (locus Brad i1g70920) derived from phytozome v7.0 (chr-ID Bd1; pos 690 46848 to 69047821 reverse strand)
aagcgaaccaaccaggtacgtgctgcatcgcctgttttcgcgtcgatttttttttcctacctgttgtttgttcctcgattgttaatttggctggtgaacagaagaggctagaactgcaagggagaaaaatgttgttgcgcgagatgaatttgcccctttgaatctcccgtttgttccgtagtcgtgcttgacaatgtcagcttttcccctaacttttgcgggcgtacaaaaaaaaagcgcaggttgcacatgcgtagttggcagaggcgtagagcaagtagatacagcgtgtcaaattgtgatgtagaaactcttatcgggatatcaggccttcattgcaatctgattacatagaagcaactgctgggatatcaaagtaaacatctaattgttacatatctgtttagagtgaatatgtctttaccgctatatgaaatagtataattgttagcgtttgtttagagtgggtgtgacattatgttatgtgagtagtgcacgcatgtaagattcaaaattaacatgtatagtgatttacgccaaaaataaacttgccgtatttgaatttgaattattttccatttaccagagcaaattatccaaaggaacacagcagaggctaataggctagagccttcgtcaacttctggcacttgtaaaaaatgcagtatcattatggagtactttattcaagaagaatctttaggcgtttatttttgtcattctctgatggtctgtccacagctgtggtctttttaaataaacttgtcctccaataaacatgttgaagcaattttcagctctatcttgtttcaaaggccgcacttgtcaactatcattttttctggaaattaaaactgcatgttgaagcaattttcagctctgtgaaatctgagaacaattgctattcttgagacttatgtcacactatacctacttcaggagaagcttcgtgttgctgtgcttgtttcaaaggc

SEQ ID NO: 14331 - DNA, 730 bp, Brachypodium distachyon
  Intron number 2 from transcript Bradi2g11580.1 (locus Brad i2g11580) derived from phytozome v7.0 (chr-ID Bd2; pos 986 8033 to 9868762 reverse strand)
tcgccgtcaccatcaggtgccccacctcccctctttttttttctcactgttaatctgggcattagtgtttgttgttggtgcgcgcaacgaggctgtaggagcaggtgaaatttgaacaattttttcactaattcatgtctagtgccttgcaacggggtaaattattcagcaaacattcggatcccgacctggttgccgggatatagaacagagagccgcactcagtcagtaatacaaaacccaaattattcaggcaaataaacaataataccaatcaaacagtagtggtccggctcattctctttcgccaagctctgcgcgcagcatcttgtttctttaggacgtgggtaaagaaaagaacaaacgatcatggacaggatggctgactggtaggtgggtctggcggcctagctgttctgttaggcaagtaccgaccaccttgtcctaattattcccttcatgacatggcagataagatggcctgcattgcacaactgtacaaccgtgtcctgcatactctgcaaaatatgctgtgcaaatgagtcaaacagcccctcgttcctttcgtacagcctgtaacgatgcactgagttgacatgaatggtcgttatggtcaaatgttcaatcctgtcttggctcagcgcctcagcttgtatatgtgaatgccacatgctaacctgatgcttgtggtgcagagaaagcctagaggtccccaggctggactacgagg

SEQ ID NO: 14332 - DNA, 728 bp, Brachypodium distachyon
  Intron number 1 from transcript Bradi2g11580.1 (locus Brad i2g11580) derived from phytozome v7.0 (chr-ID Bd2; pos 986 8780 to 9869507 reverse strand)
tggagtccccctgcgcctgcgccggctctctcaaggtatgtatataaacatggtttgatttcagcatcttcgtttcctcgactgctgttctgcacagtttgtttcttgatggttgatctgcgtgcgtgttcctgtttgtgtcttctgtcttctgcagtatgctcacaggggatgtgtgcagagatggtgcgatgagaaggggagcaccctgtgcgagatttgcctccaggtttcattgcagagcttgctcggcattttaatttgcttctgttttccacgtttcattgcgaaaatttcattccaatctctccccgtatccaaaattttctttgcttgatcactgttttattcaacgagaatccatcttgtccacttaaagatggtaaacacgatcacaggatgattacgccagggatcatcatcgtctctcctcgtccttttacatggggaattgagacctgtagtatacgtgcccgagtagtacttttgtaaagagttgatgtttctttgagattaaaagtgactaaagagattctaccttctctttatgacatcaagcacagtttactgcccaaaatttcactttttggccaaaacgaaagcaatcaacgttgcatacagcgccctgcaagcttgtttccttgaatggtacttttgccttttgtttatcatcatgttttctcttcttgtcagaattacgagcctggctacaccgttccacccaagaa

SEQ ID NO: 14333 - DNA, 955 bp, Brachypodium distachyon
  Intron number 2 from transcript Bradi1g62010.1 (locus Brad i1g62010) derived from phytozome v7.0 (chr-ID Bd1; pos 613 01699 to 61302653)
gctcgggaagaggtggagcagagattatgtatgcatgtctctcttttaatatctgcacagaattgttgcctgctttgctgtgtaaatttagaaaaaagtgaagagtaaatttcacaaaaccacagttttttgggcaatcttctcacgccagcccccacttttgctaatttgtccggaaaaccacagtttttcagtcaccctgtaacaacaagcccataataccgagtttaagccatttgacagtatttcttacagaccgggcccacatgcaagaggtcacgtcggaaaaacccggcccgatacatgtccaatgcgggcttaacgagccatcgggttaggtcggatttgtccgacgtggcctcttacatgtgggtccgggctgtaagaaaaactgtcaaaaatgacctaaactcgttattttgtgggacaaattagtaaaagtgggggctgcgtcagaaacttgccccgaaaaccgtggttctgtgaaatttgctcaaaaagtgaaggtagttattaataaattgctgttactgtctacgattaggttaggtgtggttttgaaatagtccacaccttgacgctacagggcgtgcttactttgatttgctgatgaatttgaggtagcaaagtatgcttgatcaagaatcattcaaaagccaaagcatatctctcaaaaagaatggtcaaatcattctcttgaactctttttgagagacagagttaatatttttatatttttttaactaagcatggagggacagaggtaataataaagcttatattttctttaaaaacactgagcatgggagatggatgggctacaaaactcgttaccatgcaactatcgagcagaaacttattatggtttaattgcaatattgcaaataaaatgaatgctatcacctcttcatggtgtacaggatccagggtaccactgccgttgagcttgcatctg

SEQ ID NO: 14334 - DNA, 960 bp, Brachypodium distachyon
  Intron number 1 from transcript Bradi2g25510.2 (locus Brad i2g25510) derived from phytozome v7.0 (chr-ID Bd2; pos 235 72462 to 23573421 reverse strand)
cgcgattcgccgtcgccgaacacaacaagaaccaggtgcgtcgcgaaccaccccctcacccgttcgagtcccaaattcagtcgatatctgtccccgtcttcggattaaattgtgttgcgctacagcgtgttattacgaattaggtacatctttcctcatgagtggacgaagttgaaagtgcttcccgtaggttcgatcagtgcaagtttgacataatgcaaggtagttgaaccagttatgtgagttttggaaattgtccatttccaaagttcgttgacctaagtggaaaaatatgaaacttcagtaatttactctttgttctgcgttttaaacggccagcagcaacttttgggatctaattgttaaattcgggagggcgttgagtcgttaactaactggaaacatatgcaacttgccaacctactctttatcggtttatcatgtgcttcctccgtttcagattataaaatgctctcgctttgtcctaagtcatttaaagaaaaaattgaccaagaaaaacgtacttttatctttaatatcaaataagtatattgtgatttactaaaactaatttaaagttgtagatgttggtagatttttattaaacttggtcaaactttgagaagtttgacatacgacaaagttagaacataagaacatcttataatttggaacggagggagtaattattttccgccgatgcatctttctgatgataggcacactttattaacttatgataatatccagttgaggcatctccgacattttgtttgggggatcatgagatattcataggacatggtattttcagattttgagcatacattgtttttttggtatttgctcagagtttctgatagggtgcattcttcatcaaatataccatacctgatttcctctggtgttaatcttctttctgcagggctctgcgttggagtttgcacgtgtagtgagtgc

SEQ ID NO: 14335 - DNA, 683 bp, Brachypodium distachyon
  Intron number 1 from transcript Bradi1g77840.2 (locus Brad i1g77840) derived from phytozome v7.0 (chr-ID Bd1; pos 739 96099 to 73996781)
cgacgactccaaggccatcgttgccgtcgtcaaaggtacgttatatgacgacgattgttttgttcattcatgccaatcaatcaaaggcatgcgtggctgtatgatcagttaattctgttaattcccggctcatactcgaagaattttatatagttggtgtattgtgtgtgtaattaactaaacagggggttggtagtttttttttaaaactgtaaacagggggtgggtagctagtactctgactgggtacatacatgatcatggacatatgactctggatatattgattattcatttgtatgttttcgcttgattttatggttttatctgacatggaagagtgtacatgtgtgcttactactccagtttctcttttttgctccacaagttgatgaggtaagagaacattctctgcttcatcttttttttcactctgaagaaattttttaaagacaattttcttttccttccaatactgaatctgaaacagtgaaaaactagcttggctcccctccaacctagagaatttgtattaaatttggttgttgtcctttttagttaatcactccaacaataaaaaaactgcataagaatctaaaagaatctgctgaaattctgacatatccctcttcttattgattcccccagattctgaagctacaagaggttcatctgaaagaggt

SEQ ID NO: 14336 - DNA, 877 bp, Brachypodium distachyon
  Intron number 2 from transcript Bradi1g67960.1 (locus Brad i1g67960) derived from phytozome v7.0 (chr-ID Bd1; pos 665 19996 to 66520872 reverse strand)
ctgctcaggtaatatgctcttctgtgtcaacactacattgttctcaatttgtgttttgctatgtctggactcatgggcagagccaccgtccatccaccccgggcggctgcctgttctcccccaattgaactatcttgaattaaagtaagcataatgattcaattagcatatttttatgggcaaactttagtttagaaggaagggcaaatattttcccaggctccactaatgggctggctctgccactacctggactattttaaatgcttaccaatgagtttatcggtttctgtaaattgtactctgcccgctcggcatgcactatcagatggagctagaaattggagacaggaggggctagaacaaaaggcatcaaaacttcaaaccatcaaagacataggtttgtagtgttgtagtttctatacctacggtttttagggcactaatttaaataaattaaaactataagatgaagtactaactttgtatccatggcgccgtgcacctgtgaagtagctgaccgcgaaactgaaaagttgccgtcaatagatgtttataaggagctgccgcggccaccgcctcttgcgactgcgaaggactgtagtatgttcgtgcgtagcaaactgattgatgattgtaggccagaccttctttgcctctgcccatgtcccggttgggcctgtttttacctctataggcttttgctgttgctaggccttagggggcgaaactgcttacagaagctagaatggctgccgctaatctctaggattaagaaactgtaaatccatttgtatacccacaagacttaatacctgtgtgtctaatgtaatattttttttcctgctcctgctttactctttgggcagatcaaaag

SEQ ID NO: 14337 - DNA, 604 bp, Brachypodium distachyon
  Intron number 1 from transcript Bradi2g38650.1 (locus Brad i2g38650) derived from phytozome v7.0 (chr-ID Bd2; pos 389 34238 to 38934841 reverse strand)
gggctacgtgccgcgacatcaccccatccccgaaggtgattgtttcaggctaaaatctcccatttgcattgaaaattttggagttcgattgttcatttttggcatcttagtatgttgccgttaggatcaaattttggcatcttaggatcaaattttggtgtatccaaaaaaacaaaatgaattagtgagagcttgttgattattatgaccatggattggaaggtggatcagtggtccaatgggcctaatctgtctcgccctcaattctaggaatttagatgcagaggcaaatttatggtggcaagaaataagcagaatttcatttttcttgttctaagtgttaaaggaaagcatccaggttatctcatgaaattgaacacaagaaacaaaatcaggttttcatgagaggcagcacgcctgttagttgcttatattcaataatgttctaaaaaatggtgtaacagtgttacaagagtgacagtagttttacttgcaggcacgttactgtacatgaaaggatgcttatctctttccctttgttcggcctttattaagtttcgaacaatcgaagaaacagtgagcttgtgtctgtctttcagggcca

SEQ ID NO: 14338 - DNA, 740 bp, Brachypodium distachyon
  Intron number 2 from transcript Bradi2g03940.3 (locus Brad i2g03940) derived from phytozome v7.0 (chr-ID Bd2; pos 277 2560 to 2773299)
gcgactgggtttgccctgacgcgaggtgcgtatcgatttctcgttatctcgttctaggatttggcgttggattcgaccgatccagccgtggtcttctgtactaccctgggaatttaggtttgcaggctcgggataggtcaaccctcgtgtaggatgtttgcttgccctgtttaggtggttgaattgttggcttgttcgacctagggtttgcttgtgccacgatgtaaactatacctgttttttagtttgatgtgcacccgtgtaatcttcctgtatatcaatgtttcttcttaaggttgatgtttcatgacatttgactgggagcttaggatgtagttctgtgataagaatttcaaacatcatttcattatcatggcttggtttcattttgtgctaaatgccctatgtttttacatttttaacttacgatacgatgcaatgattttcatgtgtgaaatttacattcaaacagatggtaggattttacacgttgttattgtatatttgccccactgtgcacttggcttattatttattcccctgtatctctaaaatttgatcttacaccagatctccatatatttagttgatgttatgatgttactggaaaattgttaagagtatagagcttcttaaacaccttcagttattctcatactaaggtgattgtcttaagacttacaaaattatgaactcttgttacagctgtggtaacgtgaactttgcaaggaggactgagt

SEQ ID NO: 14339 - DNA, 708 bp, Brachypodium distachyon
  Intron number 2 from transcript Bradi1g61480.1 (locus Brad i1g61480) derived from phytozome v7.0 (chr-ID Bd1; pos 608 60074 to 60860781)
ttctagattctagtggaataaaagatttggaaaaggtaaccccccctattttagttggaagtttttcaaaaagaagataaaaataataataagataactcaacaacctaaggagactaactctgccccgagagagcttcatacattgcttgcgtcataattacaccggttataccactatgacaagaaacacttcttggtgtggtcgtgcagtcgtgggtgcatgattccacccacaagagttcaaactctggtgctcacaattatgctttggtttccccgcaatctttccatcaaaaaatataccactatgccaactatcaaatttaattgaacgttatgtatgattacttgtctatgtatatactagtagaaaggtagataattattggtgggtaatatctacattgtagcataaagttaaaaaaaatcatttatggaaagtcaataagaaacaccaacgctttgcagtgctgcttcaattgacctggagcttcttgaaggtgggtgaatgtaatagccgcaaacgtaagatgaaatagatttttataggaaaacaatgtttttttatttaagaaagttgcaaaattcaagaaagaaataaaacaaaatatattttttgaacggagaaataaaacaaaatataataaataactcaaagaaagaatttttgttaagaaagctgcaagcttaactaaatctcaagaag

SEQ ID NO: 14340 - DNA, 787 bp, Brachypodium distachyon
  Intron number 3 from transcript Bradi2g19750.4 (locus Brad i2g19750) derived from phytozome v7.0 (chr-ID Bd2; pos 174 02370 to 17403156 reverse strand)
aggtacaattcgaggataggctcttcactctacaggtaaggttttttctgctctggtctttgctctgtgagtagctcagttggttcatgcgagcatcagtgcgaattggcgtgatcttccttagttactgaactggttccctctgatttgaaagtacaagagaaagagagttgctgttgattgtttctttgttcatatcatcatacaattgatgttccatgactggttcaatccgtgcctgatatgcggttttgtttgtcaagattattgtgcttggataatggacgcagcataactggttttgttgtgttttaagtagatgagtttacttgagttgtgtgagcatcatatagtgtaccgccttatgtgttttgaataaaaattctacatcagaacacttccaagaaaggctaagttctttcaagttgtacttatgttggcttgctgttgctcagaactagcgttgggccttatgcagcttagttattagttattgtttccccgcaccaaattagcccctacaaattagcctaagtatttaacccctacaaattagcaaatgtacatttttcacgttaatttcaggtattctaaatttcaaactacagcatctccttcgtgtttcatctggttcccgttagatcacaactgagtatggatacatcagaaatctatttgttgagctttttctggtatctgtgatcctgcatttttttttcttccgtcattggtctattgtccctgtactgcttatatatgatgcttagccctatttatttttttagat

SEQ ID NO: 14341 - DNA, 773 bp, Brachypodium distachyon
  Intron number 1 from transcript Bradi2g38710.1 (locus Brad i2g38710) derived from phytozome v7.0 (chr-ID Bd2; pos 389 85719 to 38986491)
ttgaaactgttccacacccaattgaccagctgaccgtaagaggtattaagaagtagatgattatcaaaacgaaaaacagccgggataacctaacaagaattggtcttttctacattactctaatgaaccacctttctgaacaaaccaaatggacactagcaaattaacatgctgtcggtgagtcctcatacttcacaccactgcacgtcctagagcaacgacctcaactcaacacagacacactgcagactggcgccccaacaaagcacgtcgtctgcaggaaccacggcacaacatatcagttatcctctaatatctcaactcgtgtgtaagcctaaaacaatccatatgcataatcaaaagaatttgtacacgattacatgcacataacatagcatcaaacatatcctcccttggaagaactggttgttgtctcaatggccggatttgttttcagctacctctccctcctcccacctagccaaaattatcgtttctaatattgcacttcttaggtccctaacctcatgcactgtaggcttaggcaatgcaaccttcttctggcttgattttggatactaccccagcctctagcagatgcttttccagctctcttctcccaccatacacagcctaatgccttcgtggctgattaatgctggagtggaacatggcttgcggaatagacttaccttggcagctgctgccgagcttcctcttctcttggttttgttgcaggatttccagttgtctgaggcgcccgatatcagagc

SEQ ID NO: 14342 - DNA, 691 bp, Brachypodium distachyon
  Intron number 4 from transcript Bradi2g36410.1 (locus Brad i2g36410) derived from phytozome v7.0 (chr-ID Bd2; pos 367 46647 to 36747337 reverse strand)
gattaattacgccatagtgaaggtcagttctgacatgtttgatcaaaattaatgttctgattgtcgtcttatatttattttcttctgttgtctgtataatggtagtactttatgaaacaaatatacatagaggaatctggtctgctactaatttcactaactgaaatcctcgtgaaccattgtaagtaaaaggcacaatttgtgtcttgagttgtcaacgttttgtagaaaccgtgtctaggaacaatacttgtttggcacggcagtgtatgtctttagtcatgtttcattcgcaaacataaacatattaaccagaacagttacaacaaccaaggattgaatagtcaagagattgaacatggtgaaaaggaagtgaagctgatgcctgatctgttatgtgagtctatatcatttaccagtaagtggcatcatcattcatcagttgaaaacttgaaatcaatcatatgggctgcagcgtccaaatttattttgtcttttcttttgtaattttgatcaatgagtatttgatgagtcaactagtctacattaagaatggtcggaaccaacatggaaataacatttatcatttactttctgaagtatcaagtcatttgatctcctgatgttaacaaaattagccaatttttgttttgtagttatttgctcgatataagtattgcactggcctcat

SEQ ID NO: 14343 - DNA, 729 bp, Brachypodium distachyon
  Intron number 1 from transcript Bradi2g15320.1 (locus Brad i2g15320) derived from phytozome v7.0 (chr-ID Bd2; pos 136 88733 to 13689461)
tgcagcagccgcagcagcaagggcagcggaacaaggtgggtttggctctgctccgctccgctccgacccatccatccctctccttctcgtctgtctcgagattgtgccatgattttgtgttctgttattgtgtcgccgtttgctgctgatttcagttttagtataaattagtggtagtgttttctttgaatcaccgctgctgcattttcaaacttttttggtacttatcttttgactggtttcgatgagatttaagtgctagcgtccttcttgtggacgagctgcttgatctggctcttcctgtgacgaaaaggtcaaatgccgtgttgctgagttaccaacagctcatgcttcacacgcaaaagttgaccgtgtgcgtgccagaaaaacttaaacaacaccgcaagctgttgttgccgcaaagttgtttctttttcttttcttttcttgttgcggtctcttcctctgtgcccaccagcaacccgattccattggcaaaagttaaagctgttggttattgcggccctggtgctttagcttccagatggttggttctgttgcaatgtgcacattctaaatctctgtcgatctgcaatgatttttctaaccccaccaatcattatgccagttcagtttcgcacattaagtgtttcaaggtctctgtagtcggcgatctgtttaatagtagcttgctgattcagtgcgcgtatttcattttgcagagtacag

SEQ ID NO: 14344 - DNA, 887 bp, Brachypodium distachyon
  Intron number 1 from transcript Bradi2g04230.1 (locus Brad i2g04230) derived from phytozome v7.0 (chr-ID Bd2; pos 295 2290 to 2953176 reverse strand)
cctcgcccgcgacctcctacgggtacgtgctatacgtatatacgtatatgcgtattttaattagctttacgttttagggcatcatgttcgcgcattctcgttttcttcttggccgcggggaaatattaatgcgtgcattcgtcactcgtcagacgtgcatgtctggctagctaggtagtacagttttacggcagcgtcatgtgtgtcgatctcagtgtatactcccgtcagaaaaccagccaaaaaaaaaggcagtgtgtataattctggttgacgtagaaaaggcagtacttgtacatggtttctccaccatgattaaagctagctagctacctacctatctgttagctaagaaaatctccccaacgaacaatggactcatcaccaaagatttggtggagaatcacatctgccaccgaccaccgacccattccattttcctttttgcgtgccgtacaagtcgtatttttttattcatagaatgatttgatcgatcgatcgtcaccatggagcaagcatgatgtcacccgtttctaaagtctagcttcgatcaatactaaactaaacatttctaaactacgtatcgattctaaattgttgtcgaaatttacatgtatctagatatttttaaagaatagatacatctatatttgaacaaatttgagttaagaatttaagaggagaaggagcagtaccgtactttttagtctgaaagcagagacagacacagcatgtcccatcttgtttgatagagatcgaaggagaaaagtgaagtcaaaatgtcagattgttttttcaacgtggcaacatacttgatatactaatatatagtaactacgtactcataagcagaaatatttctctgtccaaagagaggagaagataca

SEQ ID NO: 14345 - DNA, 1059 bp, Brachypodium distachyon
  Intron number 1 from transcript Bradi2g36970.1 (locus Brad i2g36970) derived from phytozome v7.0 (chr-ID Bd2; pos 373 65306 to 37366364)
gggatccggcggcggcggcggcggcggagaagaaggtgagagattaaatcccttcctcgccctgctggttggtcttctgtgagtctatgctccctcgagtgatgctggatgtgatttgtgaagtcgcattaaattccgctgtatagttattattgcgccgagttactcttctgtgcggcgatggttattgcgagcccgtagattttgacccggcgggtacccgtggttctatcttcccccctgcctggttttgtttcttcacgggacatctttggaatctggcggcgtttcttgagatggtggtggtttcccttccccctgtttgaattatttcaaatgtgtttgtatcgtactcctacctggaggaaaacctcgattttttttttgctcagcaatctgcgaaagttgagtatttcccgcatgagaatcctcggaaagaaaccgcagaatttttgttgcctctggtgtgagactgaattaaatagtacaggtctctgccggattcttcgccacatttgaaaatttgcagatgcgcaatttcttttttgtcctcgtctcgttggaatctcggcggaagatgcttttgttttatcctataatttttttcctcctcaaggcctggtctcttaacataaaaatattgttttttgacacagcagtagagaaaacaaaacctatactgcggaacaggttgacttgaagaaccaccgccaagaacgtgctaaagttgactaactagatgcgtgatttgatccctcgtttcgacgacatgaacaagtcacttgtactatgaacaacattttcttactttgctttgctttccatcaattgccaatatacaaaaactaggtcgactgctgaaagctacatttctgtcacttgcttgccaagtgtctgacaccacaagatccaaaggaaaaaacggatgcgtttggatcggtaacttaagcggcgcagcgcgttgcatgtagcaagcatcattatcttttctgcccctaaaacttgtcttgttgtttttttgcagtgaaagctaccggttggctcctacttgacctgtga

SEQ ID NO: 14346 - DNA, 570 bp, Brachypodium distachyon
  Intron number 5 from transcript Bradi2g05310.1 (locus Brad i2g05310) derived from phytozome v7.0 (chr-ID Bd2; pos 387 4179 to 3874748 reverse strand)
gagagcgtcctggtctcgctgcctcagctatcgcggttcgtcttcatttcacaataaatcctgaacatgtttgtataatactatagcagtcagtagatagtacacactagtgtaatagataagccatatgtagctttaggaagcaaaaggtgttttcctggagaaagtaactgtttgtgtttgtacaacatcacgcacttggagttttgtgttcaagagtgttttggtttttgattgttttatgacacattaattcgtagttattgtttttgtttttatagtgaaggcttgttctttaaccatgttttctctctcctacattatccgaaggcttatatatgtctggaggagactcattttagcttctgtttgtctctttacatatcattttttagtaatgcaactccaaagctagattgtgacacagtggacatgccagcaacttgacacggtcatttacgttgtctttcacccctgacaaacttgcttgaatgcgacattattcttaatatttcgatttgtttggtacgtgcaggcagtcatcttcacagccgcgactattgttacact

SEQ ID NO: 14347 - DNA, 672 bp, Brachypodium distachyon
  Intron number 1 from transcript Bradi1g46800.1 (locus Brad i1g46800) derived from phytozome v7.0 (chr-ID Bd1; pos 453 42254 to 45342925)
cgttttgcatatccggttgaagagccttcttcatcccaaaagccagtccaatggaaggatggttactttcccttgtataagttgcccgtgttgtgtttagaagttttgcgcatccagcccagccgataagtgaggaccctctccatctcaaatctcccccataagctgcccgtagcccctttcattagcgaggtgggactaaagtcaccgatgacgtctagtatcgtaacatttttttaaatctacttgtcccatctgttcctaatttaatctttgtcgtaagtcaaccttttaaactttgaccaaacttttagaaaaacctatgaacatttacaactgcaaattacttttattaaatccattgtgatttattttcatattctatagttaaatgatattccagatattggtacatttttctattaacttgatcaaagttgaagaaatttgaattaggacaaagataggacttgttatatttaggaacggaggcagtagtaggtaggaaatacaccgctccgaccgtgtagaaatgcaagtattatctctgaccaacaatttcgtcaatacttttgtgttttttttttaaaattgtgaagggcagtactatgttggttattatttcatcaaaattaatggatatttttcctgtgtttgcatcaggtgtggaag

SEQ ID NO: 14348 - DNA, 1059 bp, Brachypodium distachyon
  Intron number 1 from transcript Bradi1g48630.2 (locus Brad i1g48630) derived from phytozome v7.0 (chr-ID Bd1; pos 472 59375 to 47260433)
cgccccggctcccgcttcctcctcctccacatcgagtaagtaaccctctctgacctcactctgtgccctggttgattgattaggttgctattcggaaccgcgtgctttgcaatgaatcgagtaagggcacagtagatcgtttgttcgatctaatcgggtgcggcgtcgtgcgtgttagatcggcgagttctaataaagaggttgccattgggaagttgaaaatgcacaatctagccctaaaacagaggtggttttaccttagttgttcattgaacctctaagttttagcctcctcttttcttctagagctggcccatgggatgcttaaactggtttagcttgtcattccccccaatttaattatttgcatgtggatgcaatttagttagttcgtcagggcctcttgtgcaaatagggggttcattcaggaaattgaaaactatagagaggaatttgttggaccttgaatttgtatagggggaagagaaaggcctgcttgcatgttttcctgtgaaacaaaagtgttggtatagactgccacacgtagatctgagctttgtaaagtaacagcagccttatttcaatgcaattactatgtttttttttactggttgcaattactatgttcctatatgatgaacttataagatgtatgagaaattgaacatgtaagtttctttttatgtggttgcctacatgttctttacactaactgtaaacaacctagctttctgcatgatactcatttcagaaactcaaaaggcataagaaaatggtgtagtaatgacacattgagtctggtaataaaaatgtgtacatgtctggtatggaatttttttatcaaccagaattgacaagatggtaaaaggtcctggcttgatcgatgggtctgtaattattgagcgcggcaaaatggaggaatggtgattcctgataaattgctgtctgtctattttctgttgccaccatgccagactaacaatctcctcattatttactaacatcattcattgttgtgctgcagtgtgcatacaggttgtcataaagccagaatatcgg

SEQ ID NO: 14349 - DNA, 1032 bp, Brachypodium distachyon
  Intron number 1 from transcript Bradi2g27970.1 (locus Brad i2g27970) derived from phytozome v7.0 (chr-ID Bd2; pos 271 30010 to 27131041)
agggcatcaaccaggattgctccgtcgtctgggaggtgagctagctcgctcgctgctgctctgtttcttttcttcaattcattgcttgattctgtgttctagagataaaaaatggacttggctgttgtactcatttctgaccacagaagaaatcaaacagttccctgcacttgcctacttactaaaatatgggtcgttctctcagttgcttacctaatcaattttctgtatttttttcggagaattttgtttttgtttttgtgagttgcgtcagctcgttttgtgttcttcgcctattcggtacagcttgacaaatatgaggccatgattcactggattacgtactgccttcatccactagtccaccagtacaatagacataggttttgttcataaaggttcttggatatggtggttgctttttggcttctaggggtctctcttctctctgccaaaaaatgaatgattaggtgtctctgtttgttggaggtgttcggtttcttggtatctgaatccatgtttcctatttttttttcacaacaaaaaataaagattgcactacttttgaagaagagataatttgccttttccgatttgcaaacaagaccagccagaagagcagcaaggacaacacgatgacctaccagctaaaaaaggccggttggttcgatcagttcgttaccatctatcatgtcgcaccgaaatcttgaagctccaattatcatgaacaagtcaagaaagctggattacacacataatgccaaaccagtggggacagaaagcagtactctccgtattttagtcttgctggtttgcgcactaacaaaaacatctgaggcctttctaaaacacttgaatttcacttcttctttttgacagccacttgaatttcacttcatattcgccacaaaccatatagttactccagtaataagaaaacaacagagactgacagagcctcgaattaaatctctgcttgtttgttctctctcttcagggattcgggtgccaagaggacggtattttctgcgg

SEQ ID NO: 14350 - DNA, 717 bp, Brachypodium distachyon
  Intron number 4 from transcript Bradi1g64060.2 (locus Brad i1g64060) derived from phytozome v7.0 (chr-ID Bd1; pos 632 64022 to 63264738)
gcgaggcagcacggaaaagtcgcctgagaaaaaaggtgttataaccacacatgcatgcacatgtattttactatactagtgtaggtaaatgtgggctgttacttattatattatggaactattaatggacgatggtgcagttaagtgaaaatgtcgtgaatgagctagtgggtgggtggatgtatgatatgtcctgtgtgccagcacttctgataccaccaaatgttccttatttcttgatatgtatcatgtatgtcaaattacaaaaatgaataaataaataatcagaaggtacctttgcttcaaaacaattagttgcttgtttcttggttcatgtctaacctcgatatcttacagtctatgtgctccctccttttcacaaaggttggcgtactttgtttcgttaagacaagactttgaccaatgaaaactctattgatatgtgttttttcatacatgaaatttatataatggatacgtctttaaaagttcttgctcatgatcatggtttcgtatcatataacttacatattaacagagtaaattcttggtcaaaggcttgtcttaacgaaaccaaatacgccaacctttgtgaaatggagggagtataatataccgatgctgtaaattgcatctatcgatttttttttgccttcacttttggttcatttatttgtgaagagccatcctgatacttattcttatttttcaaggcat

SEQ ID NO: 14351 - DNA, 780 bp, Brachypodium distachyon
  Intron number 2 from transcript Bradi1g59110.1 (locus Brad i1g59110) derived from phytozome v7.0 (chr-ID Bd1; pos 582 31490 to 58232269 reverse strand)
gtggccacatcgtcatcaagggccgcccctgcaaggtatgcatcgattcctttttttcccgattggaaatctcgtggctgattgttggttgagcgatcgattcattggttgatgcatctggtaatctgcctgtcgccatggattgattcgtcggtgcatgcccgatacggatttaggacgcgttggagtggaattgttagatctgctagctgcggtgcaatgttttcgatgtagatttgtgtctttagttagatacacatcgcaagaagttggtgaatcgactcaaaaggaaactgtcttgctaaatcctaacaaggcaagatcttgctagaattcgtcgcacgaggcaattgtgttggagataattatgcttctgtatgtgtcctgacttggcttccaattgtttgtgctcctctgtttgtcagttcaataatatagagtgagtacccagtttcaggaaactgactaaaattagaactgcgacatgttgtagaaagttggagatggcatgtgttgtttttcccatgtttagtttgggttacctcgctacccctatgcagtagatgctgatatcgtttcccttgattgtcaaagcgtttccttgtagactctggtgtgattatttgctttgtgcatctgattgtccgattgcgtccattaatccaatgattcggtcttgtcttctgtaagaaaatcacttgtagtccaactcttgttgttctgaggatcactgtatttgttctaggttgttgaggtttccacttccaagactgggaagca

SEQ ID NO: 14352 - DNA, 927 bp, Brachypodium distachyon
  Intron number 2 from transcript Bradi2g10970.1 (locus Brad i2g10970) derived from phytozome v7.0 (chr-ID Bd2; pos 918 6473 to 9187399 reverse strand)
caggaaggaggcggagaactgcgactgtctccaaggtcaatttctctcttgactgtagattgctccttgttaattatctctgtgcgattcctttgatgcttgttagaactggtctgctgtttctagaattcttggatgattgaatcatgtgataagttagcattttgtatgctgtctttatatttccagcagtaactttttgtcatctagtatgggtgctgcactggttgctgacgagcttcaaaattcttagtgttattctggaacgttcatctcgatcttattaaactactagtctgtataatttgtcagaattactcaccttttgtcactggcaggaacatctttcttcactgtttccttcctgttctgtgtctaataaaatagaaatgcatacttgcgctgttgtacactgtcctctacatccatatctaatgcttgctatgattaatttgtatagtcttgatcactgcatatctttcaaatatatagtagtatatgttaaatctgggcttgcgactcaaatcagccatatgttttagttgggtctttttcttgatccaatatagaactctaaagctccttttattttccaacgatttaaagcatgcagtgaggagcttgtttttgcttctcgcaaaaaaaaaggagcttgtttttgcttcgagttttttatagacaaaaggccaaaggcattacaccttcctttaaattaattaagtcccacacggccgaatcttacaagtagctgaggaaacagcaaacaaaggctgcaacagttacaagcaaacaacaaaatattgccattgcagtatacaatatttagtgaaactactttagcatctagattgtgtttgtaccttatgattttttttactgttgctgtaatcaggctttcaagtttgccattcccttggaggaggcact

SEQ ID NO: 14353 - DNA, 788 bp, Brachypodium distachyon
  Intron number 1 from transcript Bradi2g04000.1 (locus Brad i2g04000) derived from phytozome v7.0 (chr-ID Bd2; pos 281 8888 to 2819675)
aagcggggagccggagactgctccgtgcaggagaggtgagcgcgacgggtcttcttcttcttcttcttcttctcaatctctcgctgttgtttcttcttcgcttgtcctcgaatctgcgagcaatggtgaggcggcggcggcggcggcgctgtcggctgcgacatggatggggtgggttgatgcctgttttttcacccccttgtgtttgattgcttgttggctcgttgctgctactgtggaatgctcatgtgaagctagagctgtctcctgtgatttgcgtccggtggcggatttagttgggttgggctacgccgctgtaataactcccgtggatgttcgtcaacggactcgctgggcttctccgtttctggcagggaattatggtccggtgagatttagagcgctgtgtggtagcatctgtgggtgttaaatcgggcgaggtgatgccgtcctggggaattcgatgcggaagttcctcgtggtcatggacccatgggcgatggatggacggcagttgcttatggagaacaactgttggcgcatagcatcattagctatctttttttggatgtctgacactctgactgctgctagtccctgagggatgatctccttattttgtgtgtttgtgcgaagaaaacaagaacaatcctactctggtatcgtttgagatttatacgactgatagcttatggttttaattcctacgtttcaatttttggtgttatgacacgaactgtgttttatggccaggaagaagaaagtgcgcaggagaagcactggccctg

SEQ ID NO: 14354 - DNA, 850 bp, Brachypodium distachyon
  Intron number 1 from transcript Bradi2g17230.2 (locus Brad i2g17230) derived from phytozome v7.0 (chr-ID Bd2; pos 153 62209 to 15363058 reverse strand)
atctccgtgctcctcgtcggcgcctgccttctcatgtaagtctcctcgattcattcctccaatcctcccgtcccgtcctctcggtgttccttccaatcaagtttttcgactttttttccaccttcttcttcgtctgtcgcggcctgcgttcgttgctgtaaaaagatgaaaacaaagggtagggcgtgcgttttgggcggtggcaaaagtacaagagcgtccagggatatcaggtgctgcaacagtgtcagagttgaataaaaaggcagccgtgtacctcttttttggttgttgttgttgaacgaattttctactagttcgaatttaatggggggggggggggggggggggggtttgtgcgaaagaatgattcgagcttttgagtgaatgattgaagcatgatagatggatggatggatgcattggtgagtcagaaagtagaacctacgattctggcgagcagaatcaaaatctcgtgccaaaaaattgactgaaatattccttttgtttttcttcctttggctgcatttaagttcatctagaacacctttactgttgcttgatggaaggatgaccatgacaaattgacaagctcatcaagcttagagctaaaccttggagaaatacctggacttgagtaccctgggtgccaagttatcccaaggatgtgtcacacggccacacgggacgagcgatgttcagtgatttgtgctgaagaaaatgtgtttgtgggggcgttctgcgttttcactttcttgtggtgtcatagcattgcccatctgacccctcccggattcaattctttccgctttcagctgggcaagtggagctctagatccagagggcgctt

SEQ ID NO: 14355 - DNA, 822 bp, Brachypodium distachyon
  Intron number 1 from transcript Bradi2g39840.2 (locus Brad i2g39840) derived from phytozome v7.0 (chr-ID Bd2; pos 398 91564 to 39892385 reverse strand)
ttgttgtgattgctacggcttataaggtaaagtaggtatgttcactcccattaatgagatttctcctcaaatttcttacatgcttttgcattgatgagtagttttgcttgtatactgtgataattgacgccatttattaactttagttgacaaatggatgaggtgttttttagtggacatgcatagatgagtctgaaagaacatttaactttgaattggcatcaattcaaactaaagtgtgtatagaacagcaacttacacaacattgtagctttccataagggtacatgtcaagagatttttttctttggttttagaaataagcaggctgctctctaagcatagttgttgttgtaaaaaagaaactagttaaaaatgaggctgaggcatgacaagctgcccccatttcaacttttgtgccattggggttttgtaccattgggagttaccttgatgttagaggcttgtcacttgtcagttctggctgccataatttactatgacgtgtatcaccttagcaaatttctcctccaccttccagttaccaattaattgccagtaccgctgtgagttaaacttttaccataccagccaagtagtgctaactatttcctacttttcccattacgatttccaacaaaaaagaagacaaagaaaactggaacagaaactggcagtgagttctttctttggttgcaaattgcatttgagagtgtattctagctttgttttatacttatatgcagattttagtcatgtgacacaaataaatgaatggcttgtccaggttttctgttaccgtaaagtatctgcagtggaaca

SEQ ID NO: 14356 - DNA, 951 bp, Brachypodium distachyon
  Intron number 1 from transcript Bradi2g06650.1 (locus Brad i2g06650) derived from phytozome v7.0 (chr-ID Bd2; pos 507 4090 to 5075040 reverse strand)
tcgactccacgtacattgggaatcagcagcacaaggtataatcctataggaatcctttttattcttgtgaggtaggttgagaggcttggatcggtgatgtggtttttcctatgcttaggatttgattatatatttttgcatcatttcttacgcatagattgtatatttttctccattgtgtgttggattgcgttatcggttggtggtttgcgtggtgcggtggttggcgtattttggtgaaaggtttggcatatttcttcttttcagtgtccccttagttttaatgtgacgccagttcaaaatcacgactaatacacttatgtttgtgcaaatccctttgtaggatatgtctttgctgcctagatcgtcggtgtatttgattaatattctgggtttaataccccattcgttttgtttctcttgtgtaaaatatcccaattcatgagagtcgtgagatgttaggtcatgtgttaggttgctaattttcttcatttctgtagatattacatgattctaccaggacctcattctacagaaacttattacgatgttattatcatgtctaggtataaatttatcatatcattttaggtaactgttgtcgagtagtcctttgatccactcttacacctcacggtgattaggtaatccctgaattttaaatctagcatttcggtttaatatccatatgagtcttctgaagacagaaaaaacatagtggaatgtggactttatcgcagtttcaattttagagtgattcattgttttagacaacaaagcatcatactgaacctttttaagggtttgagtaagatgttgttgtttaattatgtgattcttctccagatcagctgctgtaatagttaggattgtatagtctgattctattggagatgtaaaaggaatacaggtgggaataaaatgtcatgaatgtctttcttcttttgccag

SEQ ID NO: 14357 - DNA, 658 bp, Brachypodium distachyon
  Intron number 1 from transcript Bradi2g22820.1 (locus Brad i2g22820) derived from phytozome v7.0 (chr-ID Bd2; pos 203 25174 to 20325831 reverse strand)
acgcctccaccaggagagcttcgccaagtgcatcggtacgtacgcattgcccacttcttcctggctgcggcctggatcatctgctagctggcttgccgattgcctctcaaacaaaaaaggcctggtggctggcttttattccgttggcgtttcagtcgatcaagctgaacgtaaaacggtgacaaatcgactgacatacaatgatacaataggatttttcagattggtctgcattaaccacccacattggttgctctcagattgcaatcgtttatctgagcaatcataaaacatctctcttttttcttgcaatgaatagataaagctttctatttctcgcaaccaaaaaaaaaactcatggataaaagtagatgaatcaaactagttatgcaacttatttaggaatttcagaggatataaacttgatcaattacttttttacggacttcagaatttggcttccaagtgtaagccttcagatgctccttggttcttaccacgcagcaagaatagcaaatttatgagcacgtcactggacatagttacagacgtaccctgtaaaactgacatcacaatagcaatctatctttttgaaactggttcctacaatgcacaaactgaacctctaaagcccagaacggctctgcctcgtaaaggt

SEQ ID NO: 14358 - DNA, 938 bp, Brachypodium distachyon
  Intron number 2 from transcript Bradi2g06720.1 (locus Brad i2g06720) derived from phytozome v7.0 (chr-ID Bd2; pos 515 7349 to 5158286 reverse strand)
tgggttcttcaaggagttccccgtgacacaagcaggtgagctcttccacctcattaacatttgcacactccctccgtcccatattacatgtctcaaattttcttaaacatagatgtatctataactaaaaaacatctagatacatgtaatattttgacatttaatatgggacggaggggtatatattacggagtaataattattcggaatgtccttgtagcgcaatatttctctccatgattcatgataatccctcgaggcgcatagcatacaccattcgttttgttttcatgtttttttttctttttgccctacaagtcaactgcattaacgcatcatgtggtcttttgtaatcagacaagtttgagcctcaaatgtgtttagtaaatgatacaggtttcgtccctcaaaagattgcaaagttctttaaataacatgtcactgccaatgatttcgcacacgtggtagccattcaccatgcaaagtaaccagaaatatctggagcagttaaggaaaaatgtagaaaaatagaaatcctcacaccagaaaatccaccaattttgattttcttgatatgcatattccttagtactacatgtgaattttcttgattttccttgttttaaaggataattatgatctcttttcctggttctcttttctttcttttttgattccagatcccttaaaaagttggagtttccgctaaaagagcgaaatttggtctgttacgtgcgtgaatgaaagcacctccatgccattgaaaaatgtgttgcgacggttccgaataaaaaagatgtcttgcaacgatctaagagtcaaaacaattctgatttacatctcaatttccttctgattttcaatttcagaaagcaaataagcaatactcccaaagtgtgctacttcaacgttgatgatttgtttcagacagactggcc

SEQ ID NO: 14359 - DNA, 1053 bp, Brachypodium distachyon
  Intron number 1 from transcript Bradi2g09350.2 (locus Brad i2g09350) derived from phytozome v7.0 (chr-ID Bd2; pos 763 5233 to 7636285 reverse strand)
gctacaaccacccacgcgatcgcggcggcactgaggtgaggaacccgccgcttccctccttctccctggcctccccttcgcgcgctcccctttctttcctgatctgaccccgcggcttaattgtgtatgcgctccacggttgccttgtgtaaaatgatccagcagctgtaggtagatttgtcatgtcatcgatgtactcacactgtgacccccctcctactggggatcggatcacagaaagttactagtcatttttggtaaatgtagctcttctctagctgaaattgcatctgccgcttgtgcaattgcccgtcgtgtcttgctagcaccgatcaggtggcagcatggcaatttgcattgtgctgggtaggctgaaccttgggtattcctttggaagcacaaggtcatggatgctctcagactaccactcaccgtcaattcaccatgccttctatgccaattttccactttattgcctactagtccatctttactgcctccttgtaagtttactaggtcccactaagttctctgctctacatctagtttcagaattacatcatgccatattaaatatacttgtatgaccatctaacagttctgtacatgctttatgacttgttgaatttgcaaaagttacaactttgctctctgcttactaattagcagttaaaatggaaagttgatcatcataatgatttatgatctctagcaattgcttctattgttgccatgttttcgttaaaggaatttgttttttggtctgtggacctaggttattgttttctttgttttctgtttaggcagtaaaccttcagttaacttagaacataaccaagtgtctcacgagttcatctcctccgattacagtataggaatacatatacctatttttctataggcggcaaatttattaatcactgtccttcaactctttctatattatattttggtgaagggcaagaagcatatttgcatttgttgcaattggtgaaatattgattaatcactattcaattatttcaaaattatagtttggcggaggtgcaaaga

SEQ ID NO: 14360 - DNA, 545 bp, Brachypodium distachyon
  Intron number 3 from transcript Bradi1g67240.1 (locus Brad i1g67240) derived from phytozome v7.0 (chr-ID Bd1; pos 659 18463 to 65919007)
tcgagaaggtgcttaatttttcaatatccattttctgcttgtcatgctgaaagaagttcttatattgctgttgtcaaggagggatactattctacaaccaaacttctttcatattatttggcatttcgttcatcattatcagtgtatgcaattattcatcttctttcaaggaacaaaatagatcgtagtgcatagtactccattgatcatactaaagctgaactaaatcgccaaaacctgccatctgtcattggtacattgctgcatcaagattacattgatcaaactcaaacctgccgttccatgttcagtatgttgcaacttatgagtcaaaatagcatgtacttgttgttcctcattttaactagtcgagattttttgttttcttttttactgttggttcttttggccgtaagaaccgcaccatcttggtgctttcttctaatgcaaaatgacacacatttaggtgcgcgtccgagaaaaaaaacagtgaaaaattttgtattcattttaaattctgtggctctggttgttgcagaaagtat

SEQ ID NO: 14361 - DNA, 692 bp, Brachypodium distachyon
  Intron number 2 from transcript Bradi1g60820.1 (locus Brad i1g60820) derived from phytozome v7.0 (chr-ID Bd1; pos 601 93143 to 60193834 reverse strand)
cctctaagtatggttcttatttgtctattcagtggttttattgcgatggtgtagcttctgaacacggtctgttgatgtacaattgttgactgttggcatatatcatgtgagtgatatatttgatatatagattgtggtgaaatgcaataggtgtttgaattatgtgatctgtgatgccatgagaagtgctttccaattggaattggaccgctgaaaacttgatgtcttgatgtacagttacagtgggaaatgatagaaccagcagctactattgggcaatcttattgggaataacaaaagcttcccataatttagttcatatctgaagcaagttttcaagaaactgctcgagttttagcaaaaggtgccctacgaggttgtattgcttggttgaaaggcctgaaagaaagtgtagttctggggggaattataccttgctggcaccagatcacaaaaaattaatctcaagttacatcattaatattatatgtaataatccatgcactaaatctaaaacaatcaatctctgggtgattttctatcaggcattattcatttgtggttagccatgctccccttttacgcaagctccatcattatgtttgataaaattgttttccctgtttcttccacttaattttcgtatcattgctataggtggttctcttttcctctttgatcgcaaaatattg

SEQ ID NO: 14362 - DNA, 462 bp, Brachypodium distachyon
  Intron number 1 from transcript Bradi1g60820.1 (locus Brad i1g60820) derived from phytozome v7.0 (chr-ID Bd1; pos 601 93937 to 60194398 reverse strand)
cccaaccaacctccaggtaattcgagcctacgggtggcccgcttctgcctccgcggttagggtttgcggtgcgtggtgaaattgtaggttgttatggtgatttgaggtttttgggtgtgttttagatgcctcatgtcaattgaatgtgactagtacgggttttggatgttacggtctgatgaagaatgcatcaaagtttctgtacgatttttttttctgtcctgtttgatttttgttcctgggttttacaaactggtgaccaccttccagaattttgagttagattaggtgcaatttcctgcgtttgtattctgatttttcagtccaattattcaaaacggacaaaaatgctattcaactctaaaaacaagaaacgaggactgcacgcaagttgggcaaaaggtgggagactagtggatgtggtgggctaatctcaattgttaatttgcagatatttcgcag

SEQ ID NO: 14363 - DNA, 518 bp, Brachypodium distachyon
  Intron number 1 from transcript Bradi1g67060.1 (locus Brad i1g67060) derived from phytozome v7.0 (chr-ID Bd1; pos 657 86089 to 65786606 reverse strand)
gcaagctccgggagcacgtcgccaagcagcagcaggtacggattcctcttctgaaattggagcaattcagcctcccgccgatcaccgcgtgccggattaccggaattttggcccggcgtgaacgggcctgctagagttcttggtgcggctattactccccaggtttaatttctgattccgcacaaagctagtttaagggtctgggtggtgaccactagattgagagaacaacagtaactgggagcgagcgaatttttattttttttgcgaagactgggagggagcgaattgcctatgtgctcatagttttctgactgtcaggcactagtctggacctgctcattccttgtgcatttgactgtggctactgacttgttcagataattagcctaatttcacttggtccaatagaatgtcagcaatcaccagatgccatgctttgtgcatctttggttcttgagagaattacgtttgtggatgcaggcggttcgcaagacgttcagcacgcgctataatca

SEQ ID NO: 14364 - DNA, 880 bp, Brachypodium distachyon
  Intron number 1 from transcript Bradi1g64010.1 (locus Brad i1g64010) derived from phytozome v7.0 (chr-ID Bd1; pos 632 10564 to 63211443)
atttagctccagctagctgcttcgtcgaattgaaggtaaggctcggcccctctggctgaatttgcgccccttgtagctctgtccgtggtgttcggatttccgtttcttttggtacggttctgatctgaaagtgtggatttggggggaaagagtttaaagccgcgctgtgtcttgtgtgcattgctagctagctcaggatgtgatttctttttcttccttttttgagaaaacacagcacgcacactcacccttatgagctcaggatgtgataattgggctgtgctgtgaatgattcagtattgttcttagtatttccagctcatcgtttggcattttctcgttgctctcggcaacacatattattgctgctctgaaatgcaaagcagaagattctccatcatacatatctgcacactgttttttggaaaggtttttgtcactttttcgtttctgctttctggtagcatcatagattaccaactggcgattgttcctatgcggccaccctttgtgttcctgccacgtacttctgatgatttatctgcctttctaccgcaggcacatgtgtttaatatgagtatatgaaatgatgcgcatatgtctgtcttggccaccttttatattagtaaagtcaaagcgggttgagtgtttcggagtagtctggtcgttttatattttgaccatcaggtgttttttagtgttcctgagatctttgccttgatccttttggaagagaagataaagaatgtttcatgatagaatatgacaaaacaatacacttcacgtcttcgaatggctaaatgtcaggttaactttcagagcctgattcatttcgcaatctgcaggtcgttgaagaaccatttgaaggttcgtagtaaac

SEQ ID NO: 14365 - DNA, 1043 bp, Brachypodium distachyon
  Intron number 2 from transcript Bradi2g11900.1 (locus Brad i2g11900) derived from phytozome v7.0 (chr-ID Bd2; pos 102 10947 to 10211989 reverse strand)
ccgagtgcgagctgctccgctggttcgtcagcgaggtgagtctcaactctcaagccgcttccttcaacatagaattgtgctatgagggaatcggggcggcatacgacttggttattggtgaactagtttgtttgatcatgttgtggtgcagttgtttgttcctgatcctgcattcctcgtgaaatatttgatgcgttcgaatggattggggtcgacgtttaaccatcgggtccaatacttcgatctgtgcaatgctggcagattttgatcacatgccacactgtactttgcacttgctccgccatatgtcgctgacatgtgggttatggtgtcacctgtcggtgagacaggccggatggggaaaattatgatgctataccttgtacatgttaggcattggttcttgtaacgctcattgcttgagttaccagcagtagaacttgcataatctggttcctcactgatgttttttacatggtacataagactatgacttgaaactgtaacaagacattcagtcatcagtaatctagtactatatattttgcaatatgaatgttggtttctagtacagaagttacttgattacttcctgagtgaataccaacataataagacagccagtcaatgttttgagccggattcacgaatcacaagcctgtgtcattgtaagaagtggtcttctggccctgcatggaatcttgattccgtcccagctgatttactattagcatgctgagtgttctgccctatgaggctatgacacatgaatcattatttgaaactatctctttctcattgggaggctcactgaagtctcattctgatctatgttgctaaccttggtaactaaagttacaaagcccaataaaagccaacgtgattacaaattcaggaataactactgagatattgctgcctatgatctgaggaatgtgctactcaattcaaaatcaatcttgcctcttttgtatttgtttttctttctttcatctctaactggagttttttttacttgctcatttggcagggtgatcaagtag

SEQ ID NO: 14366 - DNA, 674 bp, Brachypodium distachyon
  Intron number 1 from transcript Bradi2g24970.1 (locus Brad i2g24970) derived from phytozome v7.0 (chr-ID Bd2; pos 227 68595 to 22769268)
tcaccgtgactgtgtcacaggattggcaattggaggtaacacagccagtctgctttattaggcatatcctgtcataccataattctttacaatcatgcaaaacattttgagttgggccacaatatgcaaaattctgaaaagaatgccggtctggtctatggagcacccttcaaaatttctactcaaaatttgttacaagaaaacagagtatatagtttgcaggataaaacttttgtttttgtcttgttcctttcgctttattatattgtcatatttttcttttcattttcatatctttggacgtacattgaacttagaatttcatatagaagtagtgttcagaaatgcatttcgcaaatgtttttcctgcacttttcatgatcattatctgcccaaaacgaaatgatttgtgtatttgcacctaactgttgttttgcagttttctctacatatctcacttcatagtttgtcttctttacttcctacagtttcacaatgctttcagacgtgtcgctatggtatttgctttctgtgcatgtagcaattgcagaacttacaatgctagtggatttctcttatgccctttacaagaaatattgttcaagcaatccatgttaacaaatatatgtcatgttacagggggtttcttgtttagctcttcttacgataaaaca

SEQ ID NO: 14367 - DNA, 791 bp, Brachypodium distachyon
  Intron number 1 from transcript Bradi2g22220.1 (locus Brad i2g22220) derived from phytozome v7.0 (chr-ID Bd2; pos 197 25539 to 19726329)
ttggcagcgaaacagagtagtatggtgtgatcaacaacacaagtacctgcgtacatcgatcgatctccaggtcgtgagcgtccaagataaccaattctctcgtcggcatagtttcttcagatctacgggaaagagagagggaggggacggcagaatattgttttggatccatacggatgaggccggccggccccaaaaatcggaacaggccatgcaacggatcgggttgaacaaaaagtatattattttctgacaattaattaataaattttagtataccagctacccgttaaaaagcgggggtaactacactcgggagtaccttgtaattttcctctctctatatatatattaaagccttattatttgagttcgtttaatcttcaatttattgtactagtattttttattcccgataagttgatcatttctaaaacttgaaaacaaaacccctctttcatggaagacaaccaaatattccttacaagaaacacattgcaatttttaagcagcttattagctgtgttccaactctcaactgccaaatgatggcctcttctttccacgtacgccacgtactaaaatactgtttctcaagggtgctgtttctttggttggtgtctcaagacaggaaaactcttgatacccaaaaaagaaagataggaagactttttctcggggtcctacttgttcttcctccgtcttgatgtttcagaaatccatccaaggaattctgtgctgcagaggcattctttgttcatttattcaggtgtcgtagggacattcatatt

SEQ ID NO: 14368 - DNA, 1052 bp, Brachypodium distachyon
  Intron number 2 from transcript Bradi2g05620.2 (locus Brad i2g05620) derived from phytozome v7.0 (chr-ID Bd2; pos 409 8148 to 4099199 reverse strand)
ggccttctctgtcgccaggtgagcgtggggacggatcggatcgggatcggatcgccgcgtgcgggatctgggttgggcggacttctccacggctcgatctgggtccgccgggttccgtttgatctctcctctttgccgtttcagttccgggatcgatttgggggcgggttagctgtacggtttcccacgcgtgatgctttgcttaagctgatactactagtactattttagtttagtccagtttagacttttgacgtgcgtgtgtagaagtcaggatgcgtgtcccgttgctagcttgcgtcagtagaaacaaaccgtgaaacaatctagtaattgcgtaaatggactccagtaggtttctgcgtagctggggggcgtgttcagcaaagcggaactgtccctttcatcttctggtgaacccagggcgatctgagttttgtcgcacccagtatgggttacccggtattgttggagtcgcccagctggtcgcataattttttttatagaatcatcttaacatttttaattcattttctggagagaatagtatcggttttttttagagaatgtaagcggatttgggttgcagctgggcggattttgagtaggtcgcgagtagttggccaaagcaaagaattagttgttttattttaatttcttcttttcttgcagtcttggtcatggaatatagtttctaacctggcccacggcaatatctgtgtgtcttgtgttctccgctacccctgacagcgaaatgtgactgcaagtgcaaaactgcaaattgatacaaaactgacaaccgtatggagtagcagcaaataattgtgctagttaactgaaagtaaagcataagaacggtaacttcagcaaggaaagtcaaatttgaccacgaaaataataatatcaaaaaagcctttgctgctatagaatgtcagatctggttgcaagattgcaatggaccaaataacatttgctccatatgaaacaaatgctaatggacttcttttcttgcaacagcggttacacccttctgagagatccacatcacaaca

SEQ ID NO: 14369 - DNA, 798 bp, Brachypodium distachyon
  Intron number 2 from transcript Bradi2g16410.1 (locus Brad i2g16410) derived from phytozome v7.0 (chr-ID Bd2; pos 144 67507 to 14468304 reverse strand)
ttcaccgtcggcatcggcgggcccgtcggcaccgggtacgccctgctccctccccctaaagtctctgctcccccccttgccatcttggtggcgtggcgatttggtggtggctgtgatggatttagcggcgagaaaggagccgccgtctctgttgcattttgatctgaaatttgtttgtgttgcttcccacgtagcgtttgtcgaaatttcagctacaggaacgatgtaggtgcagttgagcagagctttggtgagaaatgcgtatgcttaatgcttgtatcacacctttagctacttaaaaaagtgtttaagtctgctgtagcattaagggttgaagtgtggtcttcagcagaaaaaaagattggttcctttgtgtttcctggtgtgttactcagtacccattactggtcagggtcatacgtttagggtatttttctgactttgccaataaaaatgcctccttccctgtgcatacaaaattgtgtcgttcctgctgttgggatcatttttcatactccctccttcccagaataagtgacatgaatttgtatatattcttatacaaatacaaatccacgtcacttattttgggaaggagggagtatatgcttagcattttggactagcgaattggtctggccagtttgaaaaaatttgtgcatacacttttcgcatcgacaaaataacctctggtggtgaaacaatggtttctgatttcctatctatccttgctactctgaaataaatagatggggtcatcttctatctgtttttgccttctgcaggaagacagccctg

SEQ ID NO: 14370 - DNA, 785 bp, Brachypodium distachyon
  Intron number 1 from transcript Bradi2g05560.2 (locus Brad i2g05560) derived from phytozome v7.0 (chr-ID Bd2; pos 404 7736 to 4048520)
tctggtgggagcatctatattaaggctgctactatgtgagtgtttctggaatgctttaatacccaccgttcttccttaactgaactgatgcaccagcagttaagctatttaactgataagcttgaagattagtaaatggtttcccgaattggagattgtgatcatgaactggtaggccctgttcactaggaactggtggggttgtatgacagtgtttatattgtgataaccacgggttataatgatgcaggaagttagcaactgcactacatgtttgggcttttggggaactggttggtgaactgaaatttaagatgtaactataataggtgcaggttaccctttgacgatctttcatcgatgatttcacacaaactgtaatgacctaaagaacataacgtatacttaaaattctagtagtgtagtctggttcgaactagtgttgaaagtttgttgtgttgtgcgttaatctagcaaggattcgttgtattggtagtaaacttcacagtaacacaaaatatatataaaaacaggtattctactgcaatcatgatcgaattctatgctagcaaccgccgaccagtggggagacaactcttcgatgtattgctgtgcacctagctagttttattaccggtgtcatttgaattgaagaatttatgctgtcttgccattttagcctgattaatgttgttttacttttgttgtaaatccctcgactctgtatttcagtattgcagtgagcacttgcaggttttgcctctgatattttgttggtgacaggc

SEQ ID NO: 14371 - DNA, 908 bp, Brachypodium distachyon
  Intron number 1 from transcript Bradi2g10140.1 (locus Brad i2g10140) derived from phytozome v7.0 (chr-ID Bd2; pos 833 4954 to 8335861 reverse strand)
ggcctcgcccgattcgccgtcgacgagcacacagcgcgaggggccccccccccccctcaagcgatatgaccaatgtgtttgatcctgtcctgcttgtagttgctattcaaacttaacgagatgtggtaaacctactgctaggtgatatttcactatcatatcaggtttgagtagtgttacgttgacatcagcacatcttggaagccactttaagtcccaagtaatcagcagggactctttacataactctaaatatttggctcaacttggtaagtgtttatatcagttgtacacaacatctctaattccttatcaagtgtcggacactggaggcatgctgctcatataacacgacacacgggatgcttttagaagtaacgttggattacctactggatgctaagttgctacattggcttacacagtctcgggctcttggtatacgtttcaaattgttccaaatgtttgttaggtttctctgagtgcctatatggttgttgaacaactagagaattatgtcaggttgtgacatttaaccatgtgtaagcaaaggagaggtacggatgaagaaatgttatttgagcaaagacatgttcgaagtactgcttgtttcttaagaaaatactctacatcgaccttctgaagtaggatcatatgggcacaccagctcattctcttgctgatctgttatcttttttttttctggttgaatcttgtagaagggaacaagatgagacctgatgggcaataattaacttagaatgttgttgagtattagatgttgcttgtgttatgtatgataatagtagacatgaacctttgttacatgttagatcttgtatgatttagttttctgtaatttggatctggtaccactcgtatttaacctagccctattccaggtgaac

SEQ ID NO: 14372 - DNA, 756 bp, Brachypodium distachyon
  Intron number 2 from transcript Bradi1g76640.1 (locus Brad i1g76640) derived from phytozome v7.0 (chr-ID Bd1; pos 731 49137 to 73149892)
agaatagcttcaacaacagcatctcagatcatcaagtaggtgtgacttccctcttacgtgtgcattgtgttttctttcacaaatctctcttttccccaagtgggaatgagggatgggtgtttgccaaaatgtcactcttctgtactgtgtaagatatataagtgcaaagcgacaggctatagcaagattggttgtttggtggtattgcattgggttgttgcctatgaaaaaggaaaggatatctcccattggaatgaaacagaaaacacacacataaagaatcagttatgtgtgcataaacgcccttgcatacataagtatttggcatacttgcatccaaaatagttcagaggcacttttgttgtttctgtatgggtgtacagcgaatgatactaagtcatcttttgataatatggggctgatatagtatgtaagtttggggttctacttaggcaattctatcggaattgtccccattctcgcataatgtttagcgtggtgtatctctctgccacttgtatactgttgaatcaactatatttccttatcggatttactctcgatatttttattttgacattttgagggaatgaatctgatcataacatactttctgaaataggaagttgtaattcaacatctatttagtttattgattaacttgatctctgtcaaagtagtttgcgagtacatgataaaacttaccttctattttgttcaggctgttctggagactgtagctgttattacacacga

SEQ ID NO: 14373 - DNA, 570 bp, Brachypodium distachyon
  Intron number 1 from transcript Bradi2g13350.1 (locus Brad i2g13350) derived from phytozome v7.0 (chr-ID Bd2; pos 118 14854 to 11815423)
agctcccagaggctatcaaggtggtgatttctggtgcctttcttaatagtagctattcaattcagatttcagaagatagcttaggtagaattcctgattgaatgatactgtcgagattgaactatggttaggaaacattcggcggtgctcagcactttgcctggtattcatagcatggaaactactctttttaacaccgaaggggaagagcacacttcaacatgtttgaattcatataattaaaatattcaactcctagttctcacaatcatgctcgatttgacttaagaaaatatgttttcaagaaatgatgcagttgtctcacttctatgcattttcttcccgtgatcttatgctattgttgactacatggactgagaatgctatcttacattgtgatgaacagttagaacaacaatttaaccttttatttgtatgaatctcgcccgatcctgtaattaatctgacagttagtaatatgttccctgtttgtgtctgtgcacctttattgttcaaccataaatttgtttactcgtttggtttatgcacttttgcaggttgtgttagaaa

SEQ ID NO: 14374 - DNA, 692 bp, Brachypodium distachyon
  Intron number 3 from transcript Bradi1g53220.1 (locus Brad i1g53220) derived from phytozome v7.0 (chr-ID Bd1; pos 515 84242 to 51584933 reverse strand)
cattgcgtacagacattgacagaagccggtaactggtaatgagactgttcggcccagttcctccttttgttatcctatgctcgataaagctgttacaagcttctgttgtaatatgttttgacttatttacaccgtaatattgtattaatattataccatgaaattccagctcatgtgacgatgatgattgtggataagttgtgatgcatgaaagtttgtgccattttatgcgttccatggctgtttatgttaggatttggactaaacccatttgctccatgactatacctatcttaatatattggatcttgtatattattattctctatatccattaattatttcattttcattctctttgcacagtttttgttttgctgaaacataatttgggattccatgtcagccatagtaatgtgtttgtggagtatcttgctatttactattaggattgtcttgatactgttgggtaacatggttctgcaattctttggaaataattgagcatatttatgttcttcctgttgttcactccgatggtcgatggacatcatgttctcccattggtaacagaacactgtttgttaacgttcctttaactttattttattttattttagtgcctaattgactgtcacatctcgtacgattgatttcctttttcttggttccagtggtcattcctcaacagt

SEQ ID NO: 14375 - DNA, 862 bp, Brachypodium distachyon
  Intron number 1 from transcript Bradi2g24790.1 (locus Brad i2g24790) derived from phytozome v7.0 (chr-ID Bd2; pos 225 96693 to 22597554)
cccaatcgtcctgctggcttccctccgtcctcctcgtaagcgtccccgatctctgcatgtcttcgtgcgatcaatctgatttgttgcggtctaggtagatcggatcgattaggcgtgtttcgggatcgaggattcgtgtcgatccgatgtttgatttgggtgcgtacgaataattgtcgtctgatccgtcgaataggccacgggaggcgtcgaattgcgaagcggatcggtctggtctcccatcgatcatgatttcccgctgggtgtgcgcgaattagggtttctgttcgatctatttaggcgacgatctgggggttgtgggttctcggttgtcgatattcaagtggttcgcaatagttcctttgattggtttgtgtagcgttgtcctgggtctgacgttccattctttggggacgatttgggatagtttgggaataaagttagatcgttgaattagtgtggttgagctgatacgtgatatttttctgtgaattttctcgtagcgagttattttagaccgctggattggtgagttagagccgatctgtgatatggttgtgtaggaagtatttgttccaaaggattgcattgttttttcacgaatttcatccgaccctacgaaataacttaacattgtttagatttctttgtagaattttataaaggttggttctatggtaggtttagatgcatcacctgatggtgtgctaattgtatatctgctttttgttgcactattgtgggttcctttagctgtactgcatataggtaagtcgtgtttcagaaactaattgaacaatcttgattcatcccttctgatgatgttttatttttccatgcaggtttttgatcttaatcactc

SEQ ID NO: 14376 - DNA, 811 bp, Brachypodium distachyon
  Intron number 2 from transcript Bradi1g50950.2 (locus Brad i1g50950) derived from phytozome v7.0 (chr-ID Bd1; pos 493 76569 to 49377379 reverse strand)
ctctcattaggtaaatgccgtcctctcttagttattgtttatttagttggtactttttgggttattgtttatgagtctcaagcagcaattaacaaggttttgaggtggacaatattgctggcaattccttctttttgtcttaagtaaatcgacgaaaagaacatagatttgcatgtgaaacagttttcttaatcccaactctgctgaaacgaaataattcttgtttttgatccattatggtataaaaggggagttcagtttcaaccatatttggttaatacacctggatatctttttggaagcttgtttttaaaccacaactggcggatacttttaacagaagttaatgcaatgattttatttgttaagtgacaatttttttttcataagttgatctgcagattacacctgataactgtattttagttatattcgttcacacaaagctgaaatttcatgtttctttaatctcttttggtactccctccgtccaacaaacgatgtctcaactttgactaaatttgaatgcatctatacactaagtcatgtctagatacatccaaattttgataaatttgagacatcttttgttggacggagggagtatttggtttgacatttccattctaaatttctaaatgatattagtcacgcattgacatataggaccgttgtgctgagtctttttggagttaatgttgttccttttttagttggtttaatgttttttttgtaatattctgggccctcaatttttagtgcatatgccattacaggcaattgaatcaggtactgccactggagaatctgc

SEQ ID NO: 14377 - DNA, 786 bp, Brachypodium distachyon
  Intron number 1 from transcript Bradi2g17990.1 (locus Brad i2g17990) derived from phytozome v7.0 (chr-ID Bd2; pos 160 20893 to 16021678)
agttcaccgacgagtcgcaccagtggatcgaccgcgtaatgctccccccctccccccactcccttcctactgctccttctctgtttgttggtttcctggtttgatcctgctgctggactccgctacgcgtatgcttcgttccataatattactactagtatctgcatatttttggctgggttcttctggggtttattagatttgaggctggatcagtgggttccctcattttgggcaagatcgggtcattgattgggtttagtacgttaggttggtggcgacggctgaattactattactaagagggggtgattactgattagctttttagggggtgctaatacaggttattagggcgttgagtgaatcagcaagtacagactcttgcagatcctgtacagttcagttgaatttaatactttccaattggtacctgttcttgtggaaggctgcttatagtttagtgaacgatgctagaactactgatcagaatttgaaaaaaggaaaaaaaaattgggatcgttcttcgacaaagtgggttgcattttaaaaagaacaaagccagttattattaacttctgtaaatagaaatccatttgccttttattatcaatgtatagatacttaagttggatcttggatggttaacaaaactacatgctgttattccatttgtacctcttttttctgtgaattcactttgagaaaatcatagattgtatgcacgataatcatcttattagttcagtttctgctatttcaacttgtttgccttctttcgagcag

SEQ ID NO: 14378 - DNA, 535 bp, Brachypodium distachyon
  Intron number 2 from transcript Bradi1g72330.1 (locus Brad i1g72330) derived from phytozome v7.0 (chr-ID Bd1; pos 700 60343 to 70060877)
cagaggtacctgttcttggttctgctctgttcccttaattttgtaagctttggggaagagatttacatgtgcctgttttttttgtgattttacctgggttttttgttctagttcttgtacgatttcatttagttgtatcttgtatgcatacattctgtaaattattcggcatcaaatttgattccagagcaaggtttgtccaccttttgatgcgtgatatagcaactaatgtgtctttgctcggtgttttactacctagtaggctagtactcctgatactgtaaatatagcctgttgaagaaatggacaagccatttacttcacattgttaactgaggaaactatttacttcgcactcttgtcattgagctgttccagatatgtcaatttataggatgtgctaagaattaaaacacgtgtattgataccatattttcctgtgaaactaaatgttgtcatcagctgaattccgtatttacatttctaacaagtaagatttcttgtgaaccgacaggtagcaccagaaagcgagaga

SEQ ID NO: 14379 - DNA, 722 bp, Brachypodium distachyon
  Intron number 1 from transcript Bradi2g37750.1 (locus Brad i2g37750) derived from phytozome v7.0 (chr-ID Bd2; pos 381 15150 to 38115871 reverse strand)
cgcttggatcgcgttgattcgagctctgtccgtgcgtgagtcctattgctcctgttcctcgatttgtgtttttggctttgattcttgatcttgatttgtccagtgttcttgttttctgccagaaagatctagcttttatggtttcttcggctcctctgcttgccggagttcttggattatttttgttttcagctagttcatgatgattcccgtgaggttttttgtgcgagaaagatctggttttggacggctaaccgagtggctgcagaatataatcctcaataaaatgtgactatatgttgctcttataccatttcagctattttagcatgctgtttcctttcacggcaccggaaagatcttgttttaatttgatttgctaaacagctgccttaatttgctccagtaattatcccatcgcgatgccatcgagatttgtctctgcgtcgcctttgtctcgattcccgttgtctccttctgcatttttctcctagcggccggcaaatttggctcttcttgctgctcctctgatctggccaaatttgtttgaaacttactgtcacattcagttatatttttttaccctgatggttcttaatttgctagcaactgccttttttgttttttacagttccattgttcgatcaatttgcatccgcatttcaaggtgttggtgcttgaatgcagaattgggcactggcaaaaggactagagattggatt

SEQ ID NO: 14380 - DNA, 791 bp, Brachypodium distachyon
  Intron number 1 from transcript Bradi2g28170.2 (locus Brad i2g28170) derived from phytozome v7.0 (chr-ID Bd2; pos 274 70792 to 27471582)
agcccaagcgccagcgccagacctctaccaagggggtaggttccccctttactcgcaatctccaagatccaaacttaaaactataatctagggttcgatctcggtagttactagtatgatttactgttgttacgaacgatcagtctttggagcccaaaattatgagtttcttcttggaaatttatttagttgggcctgaaatgcgttggtattgtggacatgtcagtgtgtatgataatcgttgttgaagttccctgtggacacctgttagatttggttgttagggctatgttacaatgtgatccgtgaatgccgctgtattttgtgcaaattactggcgctattctagttctactttttcttgccgtcgtttagttattatcgctgaaaagtggtatgtgcacactgttgtgtgctaatcagtcccttgagcatttgatttatggtatgagcacggcagcacgagggtccatattgtttacgttatctgattattaccatgcgtgtaccctgtaatttgtcaatatgtatgccatgtcatataagtgtgctgataatttctttgcttgtgttagatcagtgttgtcttcatgcattgcatagctcccaaaccatttgctataatgtaggtattatgacctgcattttgtttctatcggtgtcttgattttgtaatcggggatcttcagtgacctctataggatttttctgtcaaatagtgtttaaacgaccttcagattaggttcctgattctatgtttgtctactgatcaatgcatgctattttcttag

SEQ ID NO: 14381 - DNA, 800 bp, Brachypodium distachyon
  Intron number 1 from transcript Bradi1g56250.2 (locus Brad i1g56250) derived from phytozome v7.0 (chr-ID Bd1; pos 548 89244 to 54890043)
gaagggatttggtatgttggttgcttcattcgattgcaaagcctgccttgcactggctttgcaagacatcttttcttaccaagcaagtttgtgatgctatgatggataaatcataaatggaagccagagagttctggtttatgttgaccagggaattaaggttgagagaggagattggtcatagacacaccaggggtaactgcatgggggattggctaacaataccattgctcttttgctttcgactcttccttaggggactgaaggggtgcaaagatgtgttattgttcattatttgctggtactctattatgaatccagcaactatgttctagtagggtgcagtctgatctggaagatagaatcaaggatagttagctttgatgttagaatcgattgcccgcttaatcctaactactaaggaatgcaatatgctcaccagcatactactcatatgaatggatgctaactgcgataatcagggaattcttgtggactgattggactagcctatgttagcttgtggtgtatttttcaaacttcaaagtaggggctgtcatgttcttttaacttgcaaccttagacatgccgtccttcaattaatgtaaaatagaatggattctgcagcgatccttttcacgatgcccatcgaaaccagtcaagtttccttatagcttcagtatcattaggttttacttatttctgatcctaacaatgcttattttcgtgttgtttatttatctgcataattatctgctaacgagctatcattcttctgtgcctacagcccgttggtagca

SEQ ID NO: 14382 - DNA, 527 bp, Brachypodium distachyon
  Intron number 2 from transcript Bradi2g22440.1 (locus Brad i2g22440) derived from phytozome v7.0 (chr-ID Bd2; pos 199 60757 to 19961283)
gctcaactggtgagattaatttatctgttggatttatgtgcatgcaaagcttaagagaacgacgtgtgtgcaaacgagatagaccgggctactctggctttgattatagagggcccacttaccagtggtacccccgatagttgcagttcaacgacgtctatgcatgcattgttttttctttctctgaggtcatactggcttgatcggtacgattcgtgactttgtcttcacatgcatttatgccaacaacaatcgtacataaagcatatccatatctcacaagccatctctttttatacattgtttgaacgtttctcatgacacctttgatgctgaccttaataatggcccaaaaaagcatgtaccaccgccatacaaattaagcaccatagtcaacgctccccaactctaagcctgagtcaaaaccattcgtttgaccaatcgtacatttggatgtctaaatatgctaacattataactttgctattgtagggaggagactcctataacagggagcagcagcagcc

SEQ ID NO: 14383 - DNA, 693 bp, Brachypodium distachyon
  Intron number 1 from transcript Bradi2g30590.1 (locus Brad i2g30590) derived from phytozome v7.0 (chr-ID Bd2; pos 302 43157 to 30243849 reverse strand)
gcgggaagtgagttcttgatccatttatgcatcgcgcacctcttaattaggttcacaacgcttttcgcttaacttctcacatttttgatatcccaattagaattgtgaaatattgaaaccagattaagctgttcaagttttgcgaaattatttttctttggttgaattgcttgttatagttcagttactattgccatatcagtatcctaatgacatactagtacatggtttttcaactggtaaatggaaactaggaatgctggctgggtgttactatgtcctcataaatttgattagatagtgcaaaatggctcgtcaatccaaattctgaatgaatcattcttctggtctctctcctcccccgccccaatactgcactaatcaagtgaaacaagtcccacctttggtaccggttgtcttttgccgatcgcttgcttactgtttcgactctaatattgtgtatgtcactgtcttatcggagtgttgggagcatctctacactacaattgttatgcgagtactagtatccttttgttttctaaattgacctaattttgctttttatgtactctggcattgtattttatttttttaattggtgatggaggcagtttcatactgcagattatagtggtcataaatattgcatgtcagcaccataacattttgtttctcttagctcattgtcttcat

SEQ ID NO: 14384 - DNA, 874 bp, Brachypodium distachyon
  Intron number 1 from transcript Bradi1g69260.1 (locus Brad i1g69260) derived from phytozome v7.0 (chr-ID Bd1; pos 677 35024 to 67735897 reverse strand)
ttctccatccacaacgagaccctcaacgtctggacgtgcgtaactattcgacacctctccgtcctcccgcttgattgtttccgtcgaattgctttcctgtgttcctgtggatgcgtgcttaggcctcatagactgggagcaaatttaaccctgtgctgacatagaccagcggacggatcccctaggcatgtagttgtgatggcattgcgtatttgtaggttgaaccttgaaacaatgctctctccaaagttatctggtgactggtgatccatctgcggttttgttatctcgtttttgggctgatttgagccaagcatacaatttttccctagctgtgtaaatatagcaaggaaaaaggaagtagattttcttgcttcaaaacaaaatgtatcttacgtgttgatttccaatacgaagtacaataattcgttttttcctcaattcctaatcttcagattttgaagttaagattgattcgaagtaagaaaaaaaagtgtacgcaaattcagcatggagtgtggcacaaccctgaatttcaaagcattccttgtgcacttgcttgttcataccagacaagaggacatgatcatgcgtttaattgaaccatggactcccaatgtgtcttttcttgtctttgttgcttatgtgtcaagtcaaatggaaattgagtgatttgactaccattatgtaagactgaattcggccaacctcttatgtgaaagtatgatatctgggaaattatgactgacaagcctttttttaatcattttactgacttgatttaacagaattattattgattttctaataaagctttttcggaatgtgtgtattttcaggcacttgataggattcttcatcttcctttcattga

SEQ ID NO: 14385 - DNA, 364 bp, Brachypodium distachyon
  Intron number 4 from transcript Bradi2g16100.1 (locus Brad i2g16100) derived from phytozome v7.0 (chr-ID Bd2; pos 142 03058 to 14203421 reverse strand)
ttgaaggatttggtgttggtgtcatatcctatacggttcgtataaataactttttacgtatgcgaatatgtgtatagcattctatggctttatgatttacagtttgagtacttggcaggctgtaataatgttcagaaagaaaaatcaactgagatagtgagatgccaatcttggtgtcatattctatacggttcatctatcattgttacaaagtttttgattgctattttgccaaaatattcttggactagttagattgactcttcttttcgagaaaggttacaaaactaagaaactcttgatatctgaattatgtgatgccataccaggttcccgtatacatagcagagatatctcctcagaa

SEQ ID NO: 14386 - DNA, 913 bp, Brachypodium distachyon
  Intron number 3 from transcript Bradi1g54830.1 (locus Brad i1g54830) derived from phytozome v7.0 (chr-ID Bd1; pos 531 83017 to 53183929)
cagactgacggaacaagagaaacaaaagctctctagtatgctcagcaagtcaccatgcatttttttttctctgtatgctaactaacggtcttatctccttcgcaaaataaataaataacggtcttatcttgattgaaactcatcgaatatagtagaatatggaaaatttctaaacttattttggtattaccttaattgagctaattgaatgtaatcaaattttgactacacataaatgccaagatttaaattttgtttgtatctagttcaaactttcaaggcagaatttttgtttggtacccaccaaacttttgaaaattttgctcgaattttgttgaaaatttgaacctctgttctgattgggcaagctcacccactccctagctcatggccgtccgcagagtagagccatgtaggcctaacatgtgggaccactctgtcatgattcaaacagaattgtactcttaaatattaagtttggttgataattatcgaaattttcaaaatttgggtgacctgcaaattaaatggtcatcaaaattttagggttgtcaaaaaaatttctttgccgaaatcgtgtataggagatccgccttcgaagtggaggcaccatgtagacatgacatttggggacactctgtctgtcagatagaagaaaatcttaaaaaagataaaaccatgtgaaaagttttttaaatagggtaaaacaaagaaatttttggcaaatgaaaaaaaaatgtgtcaccaaaactttcttgtagggaactaaaaagtgaaatacgaatccaatcatgtaactttggtcattcactcatttgtctagttgtagctaaatgcaacgccacccgcaaagaaagaagaaattaaaaagaagaagcagctaaatgcaacgcatggttttcacgtgctaggc

SEQ ID NO: 14387 - DNA, 837 bp, Brachypodium distachyon
  Intron number 2 from transcript Bradi1g70190.1 (locus Brad i1g70190) derived from phytozome v7.0 (chr-ID Bd1; pos 686 00134 to 68600970 reverse strand)
ccgtgtaacaacgatcagtgatcttctgcagccaggtactcagctctttcgctcttaggattctacaattcatttcttcaaaccagcaatgcctcaagggaaccactttctggtaaatgaagcactttctctaaaggaaaaattagtataccatattactgaagcagttttcagaacagtagccagttcagatttgtttttacttaagacatggacagaccggcagacagtaagggtgagcaaacatatatagcctgagcaagttaaactgtttcggatatcctctatcctattccgcggagaaggatagtactggatatccatttctctaaaccttatgtcctccgaagctttcggttgggtggatggtcagagaacatctaaacctttttcaccctgaatattttcttgtggtgttcaataattcatattcaatatttgtcgtgattagggttttgcatttatttttggttattttggatactcccgaaactcgcacgtattggcgaaatttgaatggcattgtgtccaaattctttcagggtttcaaataggttcgatattccaaattttgattacttaactcatctgaaattttgaaagattttgaaaaaaaaaatcatcatttgatcatggtctggaaataaaataacagaaaaatccaaaagaatcctgattgtgatgcctccaatgggtaataattaatgttataagtcacgatcgaaagcgacttgctctaaatgaatttcccgggaaaacgttataagccatgatgttctgttatatccaatgctatacatagttacatacctccacttcttcgccttgttgattact

SEQ ID NO: 14388 - DNA, 928 bp, Brachypodium distachyon
  Intron number 1 from transcript Bradi1g46450.1 (locus Brad i1g46450) derived from phytozome v7.0 (chr-ID Bd1; pos 449 77890 to 44978817)
cctcgtcgctggcgccggcgccgtcggggacgacggttggttcccttccctcgttggctttcctttctttttctggttctatttggtttgtttgctggggagcagagattcgatcaatggggggaaggtttggcttgttcgggattagtattttatttagcgctgcgagtacgcgcttttgggaggcatatggggattctccggtgcttcggctccatttttatattgccgtaagcgaggtctaatgcttaactaatcctgtcattcgagaaaaagaaatacttaactaatccttgtgagtagtgccccccttctcctatcatctcttcccttttttccttatccatggggacacagttctttgatagtactgctatcttgaggagtagcagcatctggccagttcaccaatgttcgaaatgagattttattttcctgttttgttctggtccaccctctctagtatcaccatgttgttcacaggagcaaatgatgctgataccaagaacttaaatcttttgctctttcttcagttatttcgaaggtgcaagcttggtttccccccctctttttattacagtgtgttttctttcaccatggttctttccaatctgatgggcacaatgttgctaaccatcaggattaatgctagtacccctatactgtacttttctttttgtactttctaaatcccatgttcttgaaaccccagtaagttttcttgccttgaagactaagaaagatcattgatgccatcgcgaccggctcccttttgatttttttttgctgctttctgggggattaaaatcaccacttcagagtctactgatcttgaatctatttttctgttgccattttcttgtatttgctaatgtggctgttgtggcatccaggctcgacgctcctggagatcaagaagtccttccgc

SEQ ID NO: 14389 - DNA, 875 bp, Brachypodium distachyon
  Intron number 2 from transcript Bradi1g61600.1 (locus Brad i1g61600) derived from phytozome v7.0 (chr-ID Bd1; pos 609 55234 to 60956108 reverse strand)
ctgcaatcacatactgccctccatttggggatgtaaaacgcatacaattttgagaagagaactgagctcagctggcttgcagcccaggcgtgcatgcagcccacgccggtgtcacacctgggattttatttccttgttgttcttgactctcacgcatgttccggcacgtttgccaataacataggttatagttccagcttgcgcactacgatgtgttgtatgcatgtagcgtgggttagggcctgaattcagataccacgtagacaagagaaccttgaagaagaacacatactcctttcatatcacaattatattatacgaatccacgtcacttattttgggacggagagattacaatttttacgggtttttcaaattgtatttctttttttatcgctatgtgttgcaactcccccaatatgcttgttagagcatctccctccgggccgctaaaggccccccaaacgctaaatgggggcgccggcgctgaaaaacccacccagtccacttcactaaagcagtcggcgtggcacaagaatttagccggcgcccccaatccacttcctacccgtaggagggctagcgggggcgccggctgaagctgaaaagcagcacgggacaccactatcagtgagacaaaccaaatttggggagcgatgtttggggtgcggctgggtgccggctccatcccaaacaaattgttgcgtccgcgtctccccatatggggatgcaccgaatgaaatataggaaaagagtgaagatgctcttagtctcccggacctaccaagaaattcatgggcgggccaggttaaaagagaacacaaaattttgttcttaatcaccatttcactaaaaatcaaaacatatttagtgcc

SEQ ID NO: 14390 - DNA, 555 bp, Brachypodium distachyon
  Intron number 4 from transcript Bradi1g70090.1 (locus Brad i1g70090) derived from phytozome v7.0 (chr-ID Bd1; pos 685 45922 to 68546476 reverse strand)
ttagaattcggtgggttactctctatttacatgcaaaactggatttaactcacatagattttgtttcctttctactagacatgataataccaactttttttaggaagacatgacaatacttacttttaagagatctagaaagttgtgttctctaataggattatgaaagacagatgaccacttccttttcttttctgctagacatggcactaatgcgttcttgaatatgattcaggaatttaaacaacttatgtatagtttgagaaataactcccaagttattcagaaaatcgagtatatagtgtgaaataatctgtgagacatcatttgtatccaatgaatcacactatcactttagatcgagttaactgattaaatctctagtttcttatgtttgcaccaattcatcccaattttcttgtgaactagctactcaagattcaaatatgcagcacaagcctatgtttttcctaatccagtaagatatgactactatactgatttctttttatatatgatggcctgtcagagaattttgcccaagagcttgttgag

SEQ ID NO: 14391 - DNA, 399 bp, Brachypodium distachyon
  Intron number 1 from transcript Bradi2g02490.1 (locus Brad i2g02490) derived from phytozome v7.0 (chr-ID Bd2; pos 165 8131 to 1658529)
cgacagtaagcctgcaaatatatttacactttttttcggaagaaacagagtgctcctgcaaggctgcaatttacatagaagaaacagagtgcctggttaattctatagtttgatacagtccagtgaaagtaacactacatactatgtggagattaaatctacataaacctaaacttatatttgtaaaaaactgtatttcagtgacatacttcttcaattacaataaagtcaaatatgttttccatccactatcctgtaatgtatctttttatatagttgatcaaactattgactattcaaatttggtgcatgtttctttcctttggactttggatgacaattgtacagttggatgaaattgcttctatttaataaatattatgtgatattccaggtagt

SEQ ID NO: 14392 - DNA, 653 bp, Brachypodium distachyon
  Intron number 1 from transcript Bradi1g77200.1 (locus Brad i1g77200) derived from phytozome v7.0 (chr-ID Bd1; pos 735 85100 to 73585752)
cccgttgtcgcgccggcgatccccgcctcctcggtaagctcccgtccgatgatccgtcccgcccctaacccccgaccaatttctccggtagttccatcatgcgccctttgtgtcgaccagtctcagtccaatcgcgatttggtgcagttcgtccgcgcgcgtcctgcgggagatttgattccggttcgtcgtgtgcgattaggttggtcacttagttgggtttatgagatgaaaagacgtcgtgtagtcttctcgcgattgcggcggggacttgtcagcgatggatggtgtttgttggtgttggtagagcatgtaggtatcattatcacgtaatctctgtttagacagggactgagagaaaaagcgtagaagaagtccagtcatggctgcggtcgttcattggttaggggtaatgattagagaggacgacggtccttttctatcttttgcttaggatccagtgggtcccgatcactcctaatccccctttcgcatcagctgcgcaccacaggagttgatctccggggctttgactgttctatgcttctcaatttcgaagagtccattttttcctgaactctaattttattttatatgcttgattattctgggaataatgttgttttggcctccaatttggttgctccatgcag

SEQ ID NO: 14393 - DNA, 358 bp, Brachypodium distachyon
  Intron number 1 from transcript Bradi1g55390.1 (locus Brad i1g55390) derived from phytozome v7.0 (chr-ID Bd1; pos 538 32223 to 53832580 reverse strand)
gcccgctcagcctcgtctcctaccctgtcgccgaggtaccgtttctaaacagaagatgtttgagctttatcctgaattaaaattttgaaagtttgaccgaattcagagaaactatactaatatctacaatatcaagcaagtatggtacgaagatacatcacatgaatttcagaaaacaaatttgaagttggcagatttctctatagatttggtcaaattttaaattttaacaaatttgacttaggacaaaacaaaaacctctgatattaacaaagtgtgggtagatactatactaactggcatgtgtagctacgccctaacatttaacggttagcattttggatcatccattaattag

SEQ ID NO: 14394 - DNA, 552 bp, Brachypodium distachyon
  Intron number 4 from transcript Bradi1g50990.1 (locus Brad i1g50990) derived from phytozome v7.0 (chr-ID Bd1; pos 494 39292 to 49439843)
aggacctcagactagtgcacaaggagcccagacgtgtatgtgcaatttttttcccaatgcatcatttttattactcgaagaagcggtggtgattattcagctgcatacctgtgcattctagttcatatgaaaacttggtttgtgttataaatatgtcctttcagggaaatatatttcccagcctagcaatacagcatattatttgaccagatgtagaaagtaggatagtaggaattaaaaaggtagagctaatagtaatacattagtatgttaatgtctacatattgaacatattggggtaaggtttattcccagactttctcttggtacgatctctccatcccaagtgccaactaactagtgcatggcgtcatgttttgctacacatgtatccttctgaatcactctctcattttgtcatgtaatgaacaaacagctgattctccttgttttctatcatggaatatctgatttgttttttactatttgaatgaacctaactacattacaccctttttacctactgctactttcagagtggtgacaaggcgt

SEQ ID NO: 14395 - DNA, 713 bp, Brachypodium distachyon
  Intron number 2 from transcript Bradi1g69840.1 (locus Brad i1g69840) derived from phytozome v7.0 (chr-ID Bd1; pos 682 76190 to 68276902 reverse strand)
tgaaggaccgcgtggcagtaaagatcatcgaggaggtaatttttgcaattcagtgtaaatttagttttagtttttagaaggggagaactgtaaattagagttcatggtgaggttctgaccaaaatttatgtaatgttggtcactgccacatccttgctggtcatttggtgaagtaaagttcaggtagtgatttcgcagtttcttccttaacgaatacatagttacttgtaagtttgggtttagcatacataccgtttcttctctaaaagatcatgtgatgaaaagtggaagtcaacaacagggtgacatcaatatttttgtttcatatgtttatgaaacatgcaagattactttgctaaatgaacaatcatagtagtagttctggagcaaagcattcataggaaaaaccattcagttctgactattgattagtaaagaaaagggtttttgagttatgcttttatttgtgtgaaatgcaaacaagtaggtaataatactgacttacttcctggcatacttgggtctacattggtttgttcagtggattagtcatgagatattttgctaatatattcagttttccagtttttttgttacggtattctcggtattttttatctgtataagtatctctgctcttttagcgtaacatgacactggaacttttattgacattaggctctgaaatctggggatcttgtctgtggtggtgt

SEQ ID NO: 14396 - DNA, 991 bp, Brachypodium distachyon
  Intron number 1 from transcript Bradi1g62000.1 (locus Brad i1g62000) derived from phytozome v7.0 (chr-ID Bd1; pos 612 90711 to 61291701 reverse strand)
gtcgccgcccccatccaccgatcgatccttcgcaggtaacgccgggtcgcgccctctatcccgccgtcgatcgacggcctaatgtttatttccctctctctcgtcactgcattcggtgattggacgcgattgtgatttcctccgttccccgccactgcgtgtttatggcggtgttacgtttgcgggttggggtgtgaaatgtggcgtttgtttggccgagttacggtacggtttgatttatgcctttatggttgtgggtggtggtcgaaccgaaccccaggaatgggggtgaattgcgagcaagcgatcatcggatttgtgattgttctgttgataataggtgatgatgtatgttgccgttgatatgtctggtcgatcggatcggtggttgcattgatcgaacactggctcgcggtagcccggtttttaaaacaatgactcctgtcggtacatagttcagtgggtggtgaaaccgtgaatagataactaatagctcttatatgatttgggtgtcatgggaggatggtgatattggtgatcttgtaatgatatcagagattgccattttctttgtttgattcctatgtgtgacagacacatggtcgttggtgctgcatatacatgcctggatatatatgttctgatgtgacttttagttttggcaggagcaagaaattaatgcgattccagcctcatgacttgtcatgacgaaattctgttcggctgatgatactccattggctggcgttctcttatttgttgatagttccttgtcccagccgcttacttcttcagttgccttctcctttctagttgtgttgtttgaatctcattattttagtttaacgtctatattcaatccatacccaggaccctaattaaaatataggtttttatgctctaactgcttttctatttcctttctcagtatataagttccaagtgttctgtggcagttttttgtcgtggagccgcctgccactgccactct

SEQ ID NO: 14397 - DNA, 883 bp, Brachypodium distachyon
  Intron number 2 from transcript Bradi1g57930.1 (locus Brad i1g57930) derived from phytozome v7.0 (chr-ID Bd1; pos 567 20379 to 56721261 reverse strand)
tcttccccacgcgctcgcacaccgtcgcggcgcaggtatgattgtcgtgtctgtttatgcagtttctgttagaaatgaaattcgctgcaccaagttcagaattgtgagttgtgagatagaaacagtttttttttatgtgtgtggtttggtgataacttatgtgggttggttacttttgggatagggtgttctgggtgctgaggaattaccatttgtttcttgtatgtcctatggcacgctttctgtagtatgttagttgggtgagtagaagaatgaaagtcggttaggtggtgctgaactgctagcctgaatactaggttggatccttggaatttgcaaggaggcaggcatggggcatctgttcttcaattgagctcttcccaaggaaggaaacatgatttctgggttgcataattgaagttgggtgcataaagttctgtatagagtaaacagaactacttgtaattacgcctgattgatacttggcttacaaatctgcaacttttctatagatcttttgttaatcttttgaagtaggtataatatttcctacaatgaatttttcatgttacagaagatattctatttgctgtgcttgcttcacttgtaatgttaccctgttaagaaatatgcatactgatgtggtaccatgatatcagtttgtatcatagctaaagattttatgaactagtgtgacatcgagccactttcttaacttttagtgttgcattgtcaatgtaggtgtaaggtcacattcaggcatggtgtcttttgttctattaatcggcttgctagatttttctgttagttatgttaaagtgtgtaaggttttattgtcttttgatgtgtgttaacgtgcaacaacgcatgcagggaggcataa

SEQ ID NO: 14398 - DNA, 834 bp, Brachypodium distachyon
  Intron number 1 from transcript Bradi2g00710.1 (locus Brad i2g00710) derived from phytozome v7.0 (chr-ID Bd2; pos 417 259 to 418092)
ccgtcgagggcgccgaggccaccatccgcaagcaggtcaggattaaggtcctccccctcccccactccctctagcaattggtcaggattaaggtccctctagcaattcccgcgtgcctgttccgtcaagccgttccgtcagctttccgcttgtcttccacggacgctatacaaggccggaaggaccagtctcgcggctcgtcaagctttgcccgtgtgttggatttggtttatttgtgatacgggaaggtgggtggggaaatagccaggggctggattatggaatggatggatcatggacggacggacggacaaaacgagattgtcatcgtaatccactgcacttgcgatgccaaaaacacaacctgaataacttactcgcctagtacaaggtagaagatggccgaactggcgacgcggggttcatgtctttgttctctcccgtcgtatcaaacgagcttcccaatttactagtactactgtactaccagtatcgtactatgctactactatcctgtgttgtctgccactctataacccctcaccactacggtgttcttggcaatgagtggcacgccgtaaaagaaaagcaattctctaataatgatctagtagactatgccttgctacacaattttactttaatttttctcgtgtgacctccctctctttgctgttaagaaaccttctgtgttagcactttttttagggaaatgtttagcactttatgcatttgacgaggatgtggtttggtcaatgtgaaaagctgattttggttttttgtacgcacttgattttagttggaagagaataaccgcctaaaggaggagctgat

SEQ ID NO: 14399 - DNA, 634 bp, Brachypodium distachyon
  Intron number 6 from transcript Bradi1g68700.1 (locus Brad i1g68700) derived from phytozome v7.0 (chr-ID Bd1; pos 672 28060 to 67228693)
ttcatatacctggaggagcttctcattcagttcaggttctctgaattgtttacttcatttgcgaatcgctgactgatactccagctttaacactgctattaggagcaagcgttaagtgtgagccttaagaattattatatacttgtgaattactagttagtgatgaacatgtattggcttgtaaatctgaagttttatcccacatcattttgtattggctaatgaactgagaaagcacacaataaacagttgcagtaattagtcactacacagcaccattggcagtttgacttagcttttgcttcattcaattttctcactgcccatgggcagttgacttagatcccattcaactttatcactccccttgggaagttgacttagccctttgtaagttcgtacttagggcacacacactgtgacaccatcatcaattttatcaaccttaaaaattgttagtactactatcatcatttggttgatgtgttgaagatattagagcataaatatatgctagtgctatgatccttctgctctcagagttctcggaatatgtgaaacataactatagaatttctgctcattttctttcttcactgccagggaaatatcaaagctaggtgatcttttaaat

SEQ ID NO: 14400 - DNA, 838 bp, Brachypodium distachyon
  Intron number 2 from transcript Bradi2g15730.1 (locus Brad i2g15730) derived from phytozome v7.0 (chr-ID Bd2; pos 139 29786 to 13930623)
gcgggactggtgagttcctcggctcttatgtgtcatatggatttgattgaggatgccgtgatctgtttgattagtgtactcggtcgagatctgatcggttatggacttgatagttctatgtggcctccgaaatcttggggtatgttatgtctcttgattgcatcaagatatctggggttgctcgtgagatgttagggtttggttattgattggcaggtggtagtttttttttatacgcatgcaaatcgattagatcatggatttcatctagcacagcgccaccgaattatatttgctattgaagttactaaaaaagctgtgatatgtaattaccatcaaaatagataccatgaaatttttataaccagatggaatttggaatttgtgatgtttagagcgattgccctgataagcattttagaattagtttaagcttgtcttcatttaagtaggactaaattcttgtggattgatcattccctcaaggaatatgcttgaaatgtttgagatatgatgtgtggttcaaataaacaacctagcttgaagtagaagttgtgcattcgagtgtattgcttaaatgacagttctcgcacttacaactcttttttaaatcaaatcattacatttgagagaatagtgtctgctggttttgcattccacatgtcgttaataattgaatcaacatatgttacagcagtactcatctttgttactacatgtagttttgtttgctctccgtggtttccatttgtgatcctatcattcacaacttgctttgacatttgctgcttttttgtttgcaggtaaaaccacattcgtgaagaggcatctcaccgga

SEQ ID NO: 14401 - DNA, 951 bp, Brachypodium distachyon
  Intron number 1 from transcript Bradi2g04300.1 (locus Brad i2g04300) derived from phytozome v7.0 (chr-ID Bd2; pos 303 8199 to 3039149 reverse strand)
cacccactgccgcctcgtccacgtacaacctcaaggtacctttttttcggtcgctggatctcttacccctcctgttagatctctcgatcgaacctacccgcgattcgtgaaactgcctgaacgcaaataaccagttacttcgtgttgcaaaattcacaaaggcgcctagcttggaagatataactggtactgttgtgatggataattgctgggcaacatgcaccgtaagtggatctgctgggtaaaagggttgggaaagtttatggttttctcggatttaggtactgctagttactactactaaattttgtcacgtggtagtttattgtattgatgtgctgcaaatttgactatgttatgcggttggcatcaaggaaagagcacatcccaaagacccaaaagatatgcttaattgactttatccatttctcgaccataacgcatgccacaggtagatgcctgtttatttggagaaacaattaatggtactaaactcgtgtagaattgtacattaagtttttccgcaggctcttagcttgtcgccacatttgtgctatgaattgctcaccaattattgaacttatctatactcctactgtctattggttacatgaggtaatattgcctatgactgatttgaatatggcacatcaggtatcctaatatacacgtttaccccgctcaaatttacaagttcatttgtgctcttcaaaaatttagtactccatactttgaatttgtaactcttaattagttagtgatatataacctttcatgtttacatctaactattcatgtaacaaaaatagatttttggttttaggactccattggttctgttgattgcacggaatgaactgctcactatgcatagttcatcctttatcatatatgaataccgtacttaccattttttctctgatgggaagagtgctggtatattggagaatc

SEQ ID NO: 14402 - DNA, 703 bp, Brachypodium distachyon
  Intron number 2 from transcript Bradi2g07120.1 (locus Brad i2g07120) derived from phytozome v7.0 (chr-ID Bd2; pos 546 3240 to 5463942)
ctggtacgctgcttaagttccctcctatgattcctcttccgtacgttgcttggggtagttccgtagttgctagtggtctgcaggtgaataattagccatgtaggtgacgctgatgctattttcagcaaatggatcatatgcattaagtgatcaagaaaatatcgttctcggcaacaggtgattctatcccaaatatcaaattgaaaaaactcagttaacagttgacattaaggcttagcaagattagtttgaagtattggttcattagagtaaatgcttctttcagcaataagaacttaagttggccaaagcagtgatctcgttattagatctgctatctgcaagaagctgatgcttatttattctgtcagtgctagagaattgatgtcttgtttcctcttagttgcatcttaggtcttcaatgtcatgccaatacgaattttgttctggtttaatcctggataaacgagacaactattagttgacctgatttcattagagtgcagagattatatcaattggaactagggagttaggactatatgctctagtttataatactcctacaacttactggtaattgcaagctgtttaactagctgcagcaaacatgcccggctgtaaattctcatgtaatacattacttacgttttgatttttttgtgcagtcgcttcttgtttttgccagacctatcaaatttgc

SEQ ID NO: 14403 - DNA, 611 bp, Brachypodium distachyon
  Intron number 3 from transcript Bradi1g62150.2 (locus Brad i1g62150) derived from phytozome v7.0 (chr-ID Bd1; pos 614 52210 to 61452820)
cttacggtatctctcaccaacaccaacatgttggttaacaatttctattgagcatttttttttactgattttacttctacaaagatacaaaatagaacgagaatagctaggaggaattagatatcataccagcgaaataaggactcaaatatgaggttgagagaactaccaacttagcagtgattaattttcttctgcagtgatacaaccttcttattaacctttctgtaacttcctgcagaaggggggattttcttcttagtcaaatacggttacaactccttttttgttgccaactatttttggtgcaatataagatcgtgttgcatacctgttggaccaacacatactatccatgtagatatcaacctgcatccatttctagtaacgatctgcctatcttgcagcagattaaatacattccaaatgatctctttatctgctatattttttggggaggggattatcttgttatatttcctaacatcgaaccgcaatccaaaatgccgtccttcatcatgtttttttttcctttttccactaaactaagtaaactaatacaatttctccatctaggttttcagctgctttggcgagtacttctgcctgca

SEQ ID NO: 14404 - DNA, 590 bp, Brachypodium distachyon
  Intron number 1 from transcript Bradi1g77170.1 (locus Brad i1g77170) derived from phytozome v7.0 (chr-ID Bd1; pos 735 45375 to 73545964)
ggccgcagcaggccgctctccttgcaggttatacacacaaatactctgtctcttccagcttattaatgttcttgcatgctcctctgtgctttgcatgctctgttttgctccgtgatatattcgtttcgagataatgcatgatgctgtccatgcgaatcaaagaggattcttttttttggtctgtttcggatgggtatatgcaagtacaggaacctggttgcttatgcgactgcgactggacatatatgcatcatattgttcgtttcagattattctctgcccactactgtcatttcattacctgtaaaaaaaacgtgaaccacctttgctaattgtaaatttgtaagcttacatgtgtagtcgcgatcgaataaccaagcagtaatcaacaagttgcgccgcacgccttgggcggcctagaaagaacccaagaaacacaaaagaacctcccatcatcactattattacaacagttgtcgcctcttgcaacaacctccgtttaatttctgaatttacccgacatccaacgcagtatttcgaggtttaactttgaacgcgtgtttgcacagacggtggagctgaaggtgcgg

SEQ ID NO: 14405 - DNA, 905 bp, Brachypodium distachyon
  Intron number 1 from transcript Bradi1g57260.1 (locus Brad i1g57260) derived from phytozome v7.0 (chr-ID Bd1; pos 559 87063 to 55987967 reverse strand)
tcccaacgacacattgtttgcttcattgcagaccagtaagtagtgttcttttgtccaaataatttctctgttgcatgatgttttcctattgagatttgatgacttgggatcgatgcatccgagtttggatgtgactgtaatgttgacaaatcattagcccatgaaaatttgcctgttgctggacaacttcatatttggcaatatcgttgcacaagggcatgaggtgcatcggtgcaaaatatgattttggttgccacaagcagtggcaggtgacatataatacctcactagcttgtgctatagagctgatcactgatgcaattttatctgctaatgggacatgggaccagcgtacataatacggagtacgtctgtttgattccacaggcatatctattttctgtaatattattgattccaaaattaatttctttaactatttatttctttttatactataagctccagcggtccagcctatgagcactgcattccatcattccaaacaattgtgcatatgtttattgattatatatgcttatgaactatcagttccattttagtagtacaattggagtgccatcattctgttgcacttaagcattagctggccggtgttataagctgctaggtacaattgtgcacctctggttggttcaatctgtttttgtttaccgtgagtccgtaacagatgtcaaaaacacacagtaccatgcataaccttcacatgtgcgccgaagaatatgtccaaaatggcattaccatccacccccccaccctatacgctgccccagtgccatgaatctaaactcagttcatgttcggagttaagatttaattgtgtatgttgtgtctttaaaaaaatatgtgtgaccttccagtgaatccctatagaatataggggt

SEQ ID NO: 14406 - DNA, 738 bp, Brachypodium distachyon
  Intron number 4 from transcript Bradi1g75250.1 (locus Brad i1g75250) derived from phytozome v7.0 (chr-ID Bd1; pos 722 05492 to 72206229 reverse strand)
ttgctaggggtcaactcgctacccagatcctgacggtttgtcttcaaactaattaatcctaacagcctgttttgacctggtccttttttgttttcatatctgactttacgttcatccatctatttcgtgcataatcaagcttttcctggacatgcaaatacattttctctgaaacagaacatgtgaatacttttcctcttaagatcctgtaccatcctgaagttcttttatgttttgatggtgaattatcatgaagttgatgttgttggcttgttgcaatggatttggtagattaggcattgacttgtttaattgttttaacaggaaaacatgtttatatcacaatagttgtatttgtggtcaactggaatagcttttaccatcagccaaatagggttgcctgatattatttgctttcattcaatatccggattatataatggttcaattccatagctttgcataccttattttcagtacaaatgaagtactttactgatgaaataactgattttaactttgtttgccctcatatattgtgtaactctagctgtcaccggttaaagcacttgatgtggctgcactggcccatgacatctttatttgtttaaactctctgtggtctcttttgtgagttctttggtgatttatagctctatttatttccagtcatcaacattcactttacctttgatttttgtaggtgctgtgctacttgggtccacttttcccaaaaaa

SEQ ID NO: 14407 - DNA, 747 bp, Brachypodium distachyon
  Intron number 2 from transcript Bradi2g07740.1 (locus Brad i2g07740) derived from phytozome v7.0 (chr-ID Bd2; pos 609 0467 to 6091213)
acgacatctcctacttctcgcccgccaagcacaaagtgcgctctctctacctactcctttttgaaataaaatatctgaaagtagattaatgttcattggcactgttgaggcggcgattaggttgcgtactgtgttccgttcattaaaataagtccgctcatatgaaattggattgtccaggagtaggcgagcctgatatttcctgtaaagctacctttttttttcaggaagagcatttgattaattattccttgtgaacatgtgcattgcaaagtcgtcggagtagagtacccatccgtagatgcttttcttgagacctttcaaccacttcttatttgagaatagttaggcaagaaactgcaaatgtggtttcttcgccagggctgcatacttttgtttcctcctctgctattgcagcataggctcccattttccaaaatataacaggcaacagttatgttaccctagatggaagatccccaaacagattaaggccatggcattttcggtcatggcacactgaggtttaaaagcattcttaacatgacccaatttaagcatttcaccgtttcagaatccagatccttttcgttaattgcacaatttgagctgtttgcaatcctcagatcccacaagttgcggttctcgtcttctgaatttgtatgcatttttcatactcgcgcgtgcaagtttttttttaaaggatgaagtgaatgttgctgaaattttttgtaggaggaagtggag

SEQ ID NO: 14408 - DNA, 1043 bp, Brachypodium distachyon
  Intron number 3 from transcript Bradi1g75460.1 (locus Brad i1g75460) derived from phytozome v7.0 (chr-ID Bd1; pos 723 44506 to 72345548)
atctgggcctgatactcgaaagcctcgtggtatccttttcacatttttctgtttccattttggcgtgcttccctttattactttgctgaatgctgaccagagacatggttgtatatcttgccagctagaagaagttactggttctgtttgccttagttagttggttgttgcttcatgtacttgcttgctgttactggcatccggtatgttcccttgacggcactttaggtatcgtgggatgattccacatgttcgggtgtatcacactgcatgctacacaagtcaattttgcaggttgctctgaaatgctctgacttagatacaatcggctctctggggccatttcttactctcggtgcaaaggtacctcttacatttccaaatggagttctccttcacttcacttgccaactgtagtggcatgtctgctatcttccttaatcagtgcattctgtaccaggccagctcatggtgtggaaaacatctcggatggtttgtcgaatctattgatgactctgaagtcgttcaagaggaagagcacagcagtttatgcctagaggttgtggaactacatctttcagtttgattaagctctttgcttagaattggataaccgggttaacagaaaatcttctgcatggctaatgcttctcccacctccagatatcttatggtctaaactctaaagtacccaagttctaaaccataaatgctgtcttatgtgttattttgcctgttgtcactgcactgggatctatagagagcttcttgcataaattatggacatcagtacatcacattcaattgtgtgatgacatgaacttagatgtagcacatagagaacagtcatacaaattgtttcaagacagaccctttatgtccattcacaggcaaaatttgatgtataatactcccatgttttttttgggtactattacaccccgtttaattcatgtggtagtggtctctctacataactattataaacgttcaacttcttgactgcagataatttcactgatcttaaaaatctctatcaagct

SEQ ID NO: 14409 - DNA, 941 bp, Brachypodium distachyon
  Intron number 1 from transcript Bradi2g21860.2 (locus Brad i2g21860) derived from phytozome v7.0 (chr-ID Bd2; pos 192 12849 to 19213789 reverse strand)
cgccttcctcctcctccgcgccaagaaacccaagggtacgccacgcacgcacgcaacccgtgcacttgccgtgcgtgttcaagctctctctggttccgtctcgtctttgtacagtgattagtaggatgctctgctcacggctagcggagtgtatctctttagaaaatgtcgcgggttgatggcatcttggtttgggccttggagcttctgcgacatgtcccgcgagattgtgtcttttggggggtaggatgaactgaatgtttgaattgtgagtgacaattaggcaaacaaagataggatcaactcatatgatttcaggtggatattgtttcatatgtatagaggatattcatataccaatatactataataagaatcaattaagattaagatatggatcatagaaagaccactttttctcaatcctaaattaataaaataaagaaacttggtcatcctaggttgttagttacagataacttaatgcctttgaactcccagggccatcgaagttaaaaattcaccagcgactacatgttaactcatcattcaaagtttttttttttgggtaaagaagtaggttttaacctactgcaaggagttttattattatattaaccaaaagaaagttaactgtacctagagaagatgtgcaaaaagcaaaaggtgaaagaaaaggaacactacctaaagctatctttccagttcttgaagcctgaatatctctctatcttagccctgtgaaagacaagattgagcatccaaagttgcagtatgattagacctcagttcacatgcttttgcagattctagagcatttttaaactgtttctgtcctctggatagataattttctgtacttcaagcaagattactccttttgaagcttctggataaattataaataggtgtgctattatttgttcccttaggctgcttgg

SEQ ID NO: 14410 - DNA, 744 bp, Brachypodium distachyon
  Intron number 2 from transcript Bradi1g76350.1 (locus Brad i1g76350) derived from phytozome v7.0 (chr-ID Bd1; pos 729 68260 to 72969003 reverse strand)
gcaggtgagagttcattcagtctgcctgcttcattacttgctccccggattcacttgctcgctccatcgcatgcatgcttgctttgcttgagttgattcagtcgtaataacgtaacgtgacagagggtaccactcgatacatctccgttgattttttttccgttggtcaactcgcatttgattgatttcgatcgacccagtcgtagtacggtagtacacatctgttaattgggtatgtttgtttataaattgattgaagctcgtcataaaattactccatttccggttcaatcttagctagccagtcgttttcttggcgtacgtactagtcaaaccttggcgcaatctcttttttttcgggataaggcaggagcactgccgttgcattaagaagaggaaataacaagtaaacttgcactaaaacaacgacaagtatttagaaacaaaaggaatacgagaaataaacaaacagtttcagaaaaacaaaataaactcagagctacgacacacgtagtctgactatacaggaccaaggctatctcgaccaaggctatctccttatagcaatgtcatctcctgaatctatctctaatcagcccaaccaccgcggggaagaaatagcaccttcaaaaattctccgatctggtgtaatcttaatagtaacatgtaaatttcttgtttgtgtttgttgcattgcgatcaagtgcagtcggaggtggacttcctgggcaggctgtcgcaccc

SEQ ID NO: 14411 - DNA, 1005 bp, Brachypodium distachyon
  Intron number 1 from transcript Bradi1g51940.2 (locus Brad i1g51940) derived from phytozome v7.0 (chr-ID Bd1; pos 503 86925 to 50387929)
gatatcagcgccggaaatcgtctctggggtttctggtatactatctgatccctttcagtaacatttgaaaagttctaagctttgtcgatgtatgggcaaattacatgtcatgtttcatgttggcaatgcaacaagtgtggcaatacttaaggcatgataactatgcaaatgctacacctgtttttttttctgggtccaacttgagacataccaaagtctgcaactattgtgtgtaaaaggctaaaagcccatccttggttgacgaattgaattttgtgttaactgacaaactctgaagatgttattattagtattcagcatgtgcaataagctcctggatgtgctccactggggaattaaaattgatgaagcataattaggtggtgccgaggtcaatattgtgtcggaatgatctttatttgatcagataactgaagttatgctgcattttttttcctgctttgcatggttgagcttagttgctcaagtgaagcaaacaagcttgcttatgcattgccaatatttggacttaattttctctaaagcctgcatagtgttctctatttctctgttcattagagcattataattattggggcggtgcaaggtttaggtgaatagccaagaactttttttgatggatccatctttcacctgcgcacctatggattaaggattaatttagggataaattgtcagacgtgctttgatgctctcttggatagtgtaagcaacattttgaagcataccagtagggtatcatttgcaaccacccactaccccgctactaacaaagcaaaactatactgcttcatggtctgtaaaatttagatttaaggaatacatagaagcactattctaagctgtctcttattgtcttcaatgtttttatatccatttctgttactagataaattttatgtgtcagagcaatgcggaagttcatatcataatccttgtgctcttgcaggagcttctgaggaaaacatcagaatcttgtttcaa

SEQ ID NO: 14412 - DNA, 757 bp, Brachypodium distachyon
  Intron number 1 from transcript Bradi2g23500.1 (locus Brad i2g23500) derived from phytozome v7.0 (chr-ID Bd2; pos 210 39924 to 21040680 reverse strand)
aagtggaccagccgcctcaagtgcaacctctactagtacgatctgcctccctcttctactaacccttttaccgttccgttgcgcacccctcgcccctgcttggcggcgcatccacgatttgcttgcaactcggccggccttcccaaattctgagcagatttggtagggacttgtgctggtgtggcgaggtttttgactagctccgcagggatctgcgcgtattttgagataattggtctatggatagggccattcaggcgtttccccgaatggaatgcagtaggatatatgttgacaaacctctcaggatcttcagaatgtttatcaatagtgctaagatctctgaggaagaactgtgtgaggatacatgtgcatgtgaattgtatgtggtgaatattagtccttagagtatgtggaggagtagcaagtaacttggatcccatctaatttctctacttacattgaagacatcaatattggatagttcttgctggaatccatgagtatttgagattgctagtcttccttttttttttctcttaaacatatcgaattcagattctagatgcggattggtgtaaatctgtggtagtgattttgataactagtatgcatcccaaagtagttttagttaatgaagttcgaaaatatggaagtttttatttaagaaatgtggttttattatattcttgtactaaagtttgtttccgacctttatttggtttgcagctacaggacaaactacttcatcttgatc

SEQ ID NO: 14413 - DNA, 339 bp, Brachypodium distachyon
  Intron number 1 from transcript Bradi2g06460.2 (locus Brad i2g06460) derived from phytozome v7.0 (chr-ID Bd2; pos 494 1431 to 4941769)
ctcctttcccggatcattttctgctctcctcaaaggtgagtgtcaaacattttcagtaattaacttttatcttcgagaggaatattttagtgcccttatttgccatgtgttcattgctgatattttcagtccatttttgccatttaaagtccagttgttcatgccccaaccttgcaacagtttctgaaaccatatttattaccaaggaaaaattcaaagaaaagaaaagagagagagtataaacaattgctgaactatatccacaatgcacacatcaaaccttgacgaacttggtacgtactagcattttcaggtggtgttctcccccgtgctccacgg

SEQ ID NO: 14414 - DNA, 753 bp, Brachypodium distachyon
  Intron number 3 from transcript Bradi2g17180.2 (locus Brad i2g17180) derived from phytozome v7.0 (chr-ID Bd2; pos 153 09207 to 15309959 reverse strand)
taccccagcagcatctaaggcatctaaggtagaatgctgtactgattagtaattctaaacgtttatgcctgtattccagtgattgtgctgagctttaaggttcagaactgtgtgtaatagaatctagatcatgggcacctagggatcaccgcctaatttgtatctgattgataaaacgatgcaagcttcactcttcagctatgtgcattcaagggcctcaatccatttgggggaagctcttttggtagcttcgaaaaacctgcaggttctctgcggggtgctcggaagttggggccctagataaaatgcattggtctcatagtacgaggatgtgctttggtctatgagtttctcattggccatcttctcacagccttgcctccaatgaccactatatttgtagaagtaaaaatacacatgtagtgagtggaagatttgtttgctgtactgtcgctcttggatttgagagtctagagtttatcttgtacgtgaaattgatgtatgtacatggttgccccaccagtgtttccagggcatagttaggtgaatatttggaaatcattttctatggtgctaaggttttcataaatctagaattaaagccaaggaaatcttaaacatgaattgtttgattttttttgtttgatcctttcacacgttaaagggccccattgccttttgagggaaagtctttttgctagctttgaaatacctgcaggttctctgcggggtgctcggaagttggggccctag

SEQ ID NO: 14415 - DNA, 1018 bp, Brachypodium distachyon
  Intron number 1 from transcript Bradi1g73120.1 (locus Brad i1g73120) derived from phytozome v7.0 (chr-ID Bd1; pos 707 27932 to 70728949 reverse strand)
ttggcccttccctcttctactactaccagaaaccggtaacaaaactcgtatctcttctgttccttcgacctggtgactgtgattttgggtttgtttatgatttcccataggagacgataaaattttttaaccaagagacgttgaatccaatcgcgtgatgtgtgaaaccagtccttttagtaggagaataaataactgatgcagtggaggatgtttcaacttcatcatgtaaagattctgtttgatgcagataatgaaacatcaagggtccatgtgtcagtgaaacatcaaagtggcagataagaaaatggggcgtactcatttctatgtcgatcatcatgattgtaaattctgtattcagcgaaaatgagccggttaaaacattttgcaaaacagtgtgcgattttaggtgtagaaatgtgcaactgagcaaccccaaagaacaggggcaaaccatcaagatccccggtcaaaattaatatgaaaaacaatgcacaagatgtctgaagatatgccagtatataaatagtactccctccgatcataaattgttgtcgaaatattacatatatctagacgctttttaagaatagatacatccatatttgggcaaatttgagccaagaatttaggatcagagggagtagtactgtagtagtatataatactctgtggaagacgggatgttttgccacgaaatattgaagtagtatccttgatcgcgtggagtgtgaaagcaattcttgatcatactaagagaatagattttgcagtagatgagcatgtttcacaacttcatcaatcattatgtaggattcggttcggggtgttggtactccatttctcctgctcacaagtggttacaagacccatgtgtctgtgaaaccaccacagaatagtggcaaatcctaaaacatatgaaaaataatgtacaaggtgtctgaagatatgccagtatatgatgccctcataatccccattgtatttgtattggcagctcaacatcgtggaagggaag

SEQ ID NO: 14416 - DNA, 768 bp, Brachypodium distachyon
  Intron number 2 from transcript Bradi1g76830.1 (locus Brad i1g76830) derived from phytozome v7.0 (chr-ID Bd1; pos 732 81907 to 73282674 reverse strand)
tcgtcttcttccccgtcgcctaccccatcagcaaggtgcgcgtctctccatgctcaatttctgcaagaatatcagagggatccccgggcatcatcactagtgggctctgcaaaagagtagaatacacaacactcactaactgtttctttaattaatttgccctgcccaagcaaagaatggaaaggggcttgatttgcttgccccgtgccgtgctcatctagtcatctaaactagtacactggtcaacctctctctctaaaaaaaactagtgcactggtcaaaataaactgactatagattggtttgcatctgattaaggaatatttcttgcatttattaaacataaaaaacgtctctgcccaaggagcaagtaattgcaaccgtgaagcaatgttcaatcttggtaatgtcaaattaaattagtggaaatgcctgcatattcttaggtttgactgttgccgatgaaagcaactccggttacttggtagttttatcatttccctgcaaagtgtttgttatatgaatcggtaagtctgcaaaatcctattttggccaaagtgtctgttacttggtagattttggagttcttacttcggttcttccaaattaaatgactggtgttttgatacatgttcgaaaaaatagaacttatcgagggttggaggatgcataaatgtatcccccttctataaccaatttagtatcttgcttgatttatgttcttttctttcagttgctggactggctactcggaaagggccatttcgc

SEQ ID NO: 14417 - DNA, 1007 bp, Brachypodium distachyon
  Intron number 3 from transcript Bradi2g07970.1 (locus Brad i2g07970) derived from phytozome v7.0 (chr-ID Bd2; pos 632 8877 to 6329883 reverse strand)
caggcaagtccatcgaccctctttggcaaggtagcttttcagttttcacgccctgtgtaaaatcctaaaacgttctgttcgttccatttgaaaatgtctattgtactttcaattgtttgcaagtactcagtatagtaaaccctgacatcaatctagcagactcttgactaataaatactccctctgatccataataagtgtcgctgcttatggagggagtagatttttctttcttagtgcaccaaacaagcacgctcgatgcagccacttagggagttgtacttccattatctaaaaaccttgctgacaccttggagttcatggggtctggagcactggtttaaggaagcagttagtttagtgcttggtgtaaatgagggctgaatttcaggcatatatttcactttgaggaaattgcaactatttcttttaatttatatatttgactttatggagttgacactagattgattacttcgaaatggcatccaactttcacaaaatttaacaggacaattagctggcactcattaggagtgagagcagagataaaaaaaacttggcgggaaccagtaggtttgtaccagccacaaagatgtgatttcatactaatactagtttcagtgcttacaccaagcaaacacaatacttcgaggagaaagctaatgaaacgaaaaaaatggaatagcgaactggaattgatgagaccggcaatctgctggttaccaggcactagtcaggtagtcctactctggtaaatccttcgaaggtgttttcttatccttgacagttgtgagggtgttgcagtgcagatgtacaattccacataggcatcatcacggtgcacctcaactagatgggtactctaggctgcaatacatgggataccatcctgtgtcgttgttttaaactctagcccgcgtaaatatttggtgctaacattcttcgttaattaatagtcctggatttcaggtgctgttccacactccactgtaaacggtcttttg

SEQ ID NO: 14418 - DNA, 830 bp, Brachypodium distachyon
  Intron number 2 from transcript Bradi1g56710.1 (locus Brad i1g56710) derived from phytozome v7.0 (chr-ID Bd1; pos 553 47242 to 55348071)
tggctgctgccaccggtatacaggtaagagacaatacaaccatttctttgattattctttaatacatttaatgttatcttctattttttttcatgaatacaatccatacattatatgtatggatttaacatcttacatgaaaagtggaatctatattcacttatggacattaaaaaaaacgtgagctagtattctgagttaggattctcttaagggattttcataaaatgcatttaagtggatgtttttacctcatctgtttatttaaggtctagtggatcgtattgaaagttttcgtgtttgcactgaatagaggttttcacctaatatatcgccttcaattacactagtttttgtaaaataattatgattatcatgttgagaaagttactacaaaatactttcaataaattgtgagatgtggatcttatatattcattcatcgtaacctctaagttacagtgaagaccatgtaaaatcttgacttttaagtaattttaatttttttattcatgtacattacttcattttgtttatttagtatggaatttagtgctacatttttggtatagatactggttaaacctagtttttttaatataaatatttttgatgtttcataatgtattcatgtcttttaattgtgtctacacactcatagactaataacctaatataatatatacacatacacacataccaatttgaattactcacaatgaataatctatcttcaatatgtaaaaagctaatcggaattgtatattgtatcttattgttatttcacttttgcagagaaacaactccttgtttagctacttcattctggc

SEQ ID NO: 14419 - DNA, 1025 bp, Brachypodium distachyon
  Intron number 1 from transcript Bradi2g10880.5 (locus Brad i2g10880) derived from phytozome v7.0 (chr-ID Bd2; pos 909 9395 to 9100419 reverse strand)
aacaacaagaacaaccaccaacagcagagaaaaaggtttgggccactgatttgtttcctgttcttgatttgttcatctggcaattgctctatacttcgctcctcctgtcaggtttcgttcacaaggcagggtatttattttggagttctttttcttttctccaagtagctacctagcctcacgttcttcagttcttggatgcgtgaccaagagaaaattttgaaacctggaggaaaagaaactttgtaatgaaacgagaggttctttgcttcttgtagaagttctgtacgtagttgttgcagttcttgtcggtttcgtctctgtttctgatcctcctgctggaccgttcgcgcgcgcgtcctcttttgcctggccctgcaagcctttgtttggtgaattgctgatgccaaacgctgcaagttaattatggtttggggttttgattttttgctttcttcggctcagggtatcatgagatctgagcatcagagcgcttgcgtgtactgcttttctttttcttttcttgcaaatcgcctcaccttcgcaagttgatgactgcggtggtgtttgatacgctctgttaagttgtgataattccgtttcattcttgctgtgatttacttttcaaagccaaaaaaatgaagaataaaattttgtcacgttgcttcctagtacatgattgaatttcttaatcggttagagttgtgatatgtgtagcagcaggtactgtaagctcagccgcatgattggtctcctctttgcccaaaggaacacatacacggttttttgtccgtagcttaaatgaatcggccttttatgcttagcctacatgaattggccttctttgcttagattgatgctcagtatctgcaaactgattaaccctcagttacaactttgcttaaaagaaatcctgaatctatgaatcagagcttcagtaaatacccatcaatgcaaaaaaaataaaaaattgtgtgtggcatttagtttggttgatgttctaatagtgtctttactttttccag

SEQ ID NO: 14420 - DNA, 547 bp, Brachypodium distachyon
  Intron number 1 from transcript Bradi2g02840.1 (locus Brad i2g02840) derived from phytozome v7.0 (chr-ID Bd2; pos 203 5275 to 2035821)
cggggctgcaggaagggaggagaggggagggtcgagtgagttgttgtaccaaattaggccaaatcaactttgtttgaaccatgagttactagaccaagtgtgtaattagttgcttttcggcactcaactattcaggtaaaagttgcatccctcatcccaaattttggactacaagtcgctacactagctaaccttttttccagatttgcttgtagtttgttttttcttagctttttatgaagttctcactagaaattgcattagattgtcaattttatgaagcagcttcttttagtcattgagattcagttgattcagttaaagtaaaatttgcgtttttgtttaatttttttgagtaaaagttgcatcatattcagggtcgacaacgtgttgcaggtttggagtttttgctccccccacactccctcaagttgcttttctgtaaattccttaactaatcatttttgctaatttgtgtttgcactgtctatttgtttcgaggtgcccgaaaatactgatatccaatgcaggcatcccagaggcatag

SEQ ID NO: 14421 - DNA, 920 bp, Brachypodium distachyon
  Intron number 2 from transcript Bradi2g37580.1 (locus Brad i2g37580) derived from phytozome v7.0 (chr-ID Bd2; pos 379 32899 to 37933818 reverse strand)
gcaagagagataactgccaaatcatccacgaggaggttcgtattctttcgtcgaccgtgacaactattttgtcatacctccatcaacactttgtagctgaaaatgcaatgtatatattcatggcattttgttaacgtcgtcggaaggcattgagttactcttgattatacctactgtattcgtatgtgctaatttcatattgatatagatatagtacaaatttgggagagtccatgcatggtagtggtagaagttccatacgtagaataggtggtcccaaactgattatgataaacttttgatacctgattgcaattagctttatgaagaagaaacaagtgtagtaacgaggcaccaagcttttgtgtttcgtcgagaaaataatttgctagttaatatttccgattgtgatgggaaaataacatgccaatgatgaatcaacatcgtatgaataagtaggccaatttaagtgggaaacacacttttaatcggcaagaatatctagattctagaagcttatggcacataggcgaccaacctgctggagtgttggccatccataatatttttttctaaaatggcttaagttgttgatgtcataatctgttcccaaatcttctatttgttgatgcacaaatttgaattgggtatatttttagtgcgttttgaatctcaactgagtgtacatttcccggtattagagaaatcccacgaaagaatgtccgcaacttttagcgtgctgtctactgttctgtttgcgaataattgaccctttgcaaattctacggttctgtttgcgaataattgacccttggcaaattctacttccacaatgcatgtgttccttattaccaacataactcggttgtacctcttcgcaaatgcattgcttacttaattattttttccatgcagagtcc

SEQ ID NO: 14422 - DNA, 994 bp, Brachypodium distachyon
  Intron number 1 from transcript Bradi1g72740.1 (locus Brad i1g72740) derived from phytozome v7.0 (chr-ID Bd1; pos 704 25972 to 70426965 reverse strand)
gctggtatgtgtgcactgctaacttctctattcgtcaatcattaccaaaagctaattgcttgcagtagtagcgtccagttcattcattactacagctagcactagtatactcgagttgtgtcatgcatatacgttagtattaatcggactatctccaagccttgactctgtaattagttttatatgttcttgctaaactagttagtacctgtcgaagagagaaattttatggaactgaacggctaagtaatgaatgaattgtgtgtactttattcgatgaaacttgcttgttccaagttagttgagctactctctggatgatcacatcagagttagctactggtagtaaattttatcatgttatataggctttcaatttaagttgaaagctatttctgcatgaatatgtatatgctaccgtgaccgtcgataggtcagtaaggtgcttgcaagttttctgtaatgcgcctgtttaaaaaaaaattgagaccgggatgttaatcatgaggtgaaaaaaaacacaactatacaaggaataaaactgttcctttcactgtagttgattagtatcgtggacttgtatagcattttcagtctcgtgcatacctacctctatggtatctattttcaattttctgtggatttcgtaatattccaaaccactagtcttttcttacaagtagaagtttccttggtgttgacatattctctcgacaaaatgaactactactgatctttcgggagagttttagttgcacttgcacatatgtggatgcttgatagcatgcataggacaattcaatgaaacagtctttgcttgcttagctaaaaaagaaaggaaggctttgttttttatctgtcagctgatcaatcaaaactaaacttgtgtgtaattaagatatttaatcacatctgacgactgatcacctgcacaaaaatgtgtaaatgccacgatgcagaccgaagtcatcttcctggggcaattgagaaatcc

SEQ ID NO: 14423 - DNA, 818 bp, Brachypodium distachyon
  Intron number 2 from transcript Bradi2g04560.1 (locus Brad i2g04560) derived from phytozome v7.0 (chr-ID Bd2; pos 317 4244 to 3175061 reverse strand)
ggtgcgtctcccttatactctgagttgttggttgggagattgtttttttttttagtatcgccgcctgatattatctccagccggtatgctgtattgctgtgttcacagtttttaggataagatgtctgcctgttatgaacgaatttgatccagaaactatttggtcataagcgaatgtgcacgatcaaagaatgcccggcttatattgtgtagttaactgcttgatccaagactttatgaactgctggatccccaaactatgtagtcatttgcttaaaccctaacatgtacgctatactgtgatgttgccagtttttgaaaaggtatagcctctttgatcgaagatgtactctagcatttcccccctatgatatttccctaaaacattatgggatatgctgccagtttgcataactgcacaatttatattcagctgtgtaaagttaatcggattatctactaggtgacctcttgtatcttgcccctgaataatctccatatgtaacaatggggatgtccacaatacttcctgaaatcatgtgccctttgacttagtatgaaaaaagtgtactccctccggccgaaatctgcgacaagttattccggccggagggagtaccatttattttattaattaatactgattacatatgtttgctgttactgttgaaggccatctggactaatggcacagctgcatctagttagggttcatgggttgatgttttctttctagatagatctgtgccttttaagtcagtactaaccaagatctgtttgcagcgattgcaacggttgtgaccgtggcagagattctg

SEQ ID NO: 14424 - DNA, 940 bp, Brachypodium distachyon
  Intron number 1 from transcript Bradi1g52570.2 (locus Brad i1g52570) derived from phytozome v7.0 (chr-ID Bd1; pos 508 80627 to 50881566)
ggggagggcacgccgccgctgggttcgctcgccgcaacgctgctactggtacacacacttgcgcgccctagacgccgcggccatcacataccgtgtcggccatggcggcgccgcccgctcccggcacaccgacaccaccaccgcccaggaggaggatggctgccgttgcaccctgctcgcgcccgtggatgccatggcggtcagacatcgcgagctactgctgctcctatgatggcgcaggaaggtcactggccgacctctttctcctcatctagttcaggccggctccgatgaagcttcgaatcgccggagaaatcggcaatccatgggagacttgggaagagatgcaggaggatcgggaaaaaggatgagtcgagggagggatggggttggagaggggagagatattcagggggcttatcataaagtggttgtaattctcatcttatcagcaagcaggccctgttagttcagatacgtgccacgtcggacgaacacgtatactgctgtcatatagaaccgtaattcattgtattttttagttcgatgactcacatgagcattttgagagaacgaggactaggtgcattttactcttttcaataacatataactattacatttcttcttgtattttttccacatggttttagaggagtctctaaaataaattgcttggatgaataaagctgatcaaggaagagtaatgagaaccaagagtaaagttttagcaaccgtcattctttggtcgggagagacacctctctctctctctcccccaaaatgcatcccatccttgggcatcccattaattatacgtacaaattcatccgttgcttcatttgtttttatcatttgtcttccatttcactacttttactgctaacaataaattcaatgatttccagaaatcacggtgaagaaggttgtttctacaaat

SEQ ID NO: 14425 - DNA, 842 bp, Brachypodium distachyon
  Intron number 1 from transcript Bradi1g60450.2 (locus Brad i1g60450) derived from phytozome v7.0 (chr-ID Bd1; pos 598 19706 to 59820547 reverse strand)
acctctcctgttcgtggccatccgcccatttgccggtcagtaacaaacgccgttgattctgtctggattggggtggcttttgattggttagggttttagcttggcgcagaaatgttttgttttccgatttgttccattaactcatattacctcggtctacgaggactttcttttttgacagaaaaagcaatctttcattatctcatataattgtgacatcttgcactaagaggggtagaaccgtagaaggaaacttgagggatcctctaaccatacactttctgagtctgcctagcattccgagctaaactatcggcgattgtgtttgcctctctagacagcgttcgaaagttgcttttaacgaattcgcgagcaagtgccggcactcttccaggaccgctgcagctggtccaaacgatcttcctggataaaagatcgctaattacagcgagcattcagttagtttggtcggttttgaacattttttagaccaaattatataattcggttctaaaatgagaaactgaacttaattgaccaaataatataccggtcggttctccgggtttactcagtttcacttacatagaacataacaaactcaaatctgtgaagaactcaatgacaaattcattttgttagttcgcatgcctgaattggtgcaatagcacaatttgttcaggtagagtaacaaatcaagtgataatccggcaatgacactttcatttctaatactttccaactgtactgcttattatcagacatcagtccaaagattttcatggatatttctagcaattaaaatcttattttcttttctggttctcttggacaggataacc

SEQ ID NO: 14426 - DNA, 862 bp, Brachypodium distachyon
  Intron number 1 from transcript Bradi2g10440.1 (locus Brad i2g10440) derived from phytozome v7.0 (chr-ID Bd2; pos 867 1597 to 8672458)
caggatcacgctgcaggaggagaggccgcggcgaggtgctgttgactgtatcagggtcgaggggtgggttggggtgtagttgaggggactgtatcgggtgggaaggaagcggcccacctgataagcatttgatttggacacggatcccctgcacctaccggcccatgtgttccgaaccccctggacgatggaacatgtctgcccatctagatggaccggcacatctgcacgacatgtttggcccagtataaacgctcgatataataccgccacatgggccattctgaccgaaatacatcatgtccaccacttttctgggctaaatagggccgccctcgatagagaaccaaacggtccagatggagtgtgtcgagaagctcgggtgccattcgtctgtgtccccaaactaaagtgatacaagagtgagttcctgttgatatgacacaagagtgcaacaacacggaaaaccaagtgaaatttgagaaatctgcatacaactctttattatgttaatcggcaccacataggttctagtaatatactatccacatgaccacattgcagttgttgtgtgtttgtcgtattatattttcttagagtgacactagagactagagtaaaacccttgtaaaatctgacgcagaagtgaaattgtagtgaaaccaaagtgagtagtgaaaccaaagtgagtgaaacatgctgaaatgctccctcttttcacaaaaggttggcatatttagtttgattaatacaaaagtttgaccaatgactagtgcaaagaacgtaattttccttaattaattttttctaaaaaatattgattttggttgtggatgcacaggttacacaggccttgcagccg

SEQ ID NO: 14427 - DNA, 882 bp, Brachypodium distachyon
  Intron number 3 from transcript Bradi2g26790.2 (locus Brad i2g26790) derived from phytozome v7.0 (chr-ID Bd2; pos 255 13292 to 25514173 reverse strand)
gctattgaggtgtgtgctccatatcctggcactttttcttctttacacaatatagcatatttgactcaacattcaacaaaagctaacaatttacagtgcatggtggatgctttgatatgatattacactttctgcaggatatgtgacatccacaatacttaagcttgttacacactaatttaccaacacatgatatgcatagaaataactgatatttctaaaacttgctgttgacattcaacctatcaaaaaatccagaaactggtataataactaaacatacaaattataaagctggttgatgatactcgatcttggtatctttttagtaagtcaaaacaatataatcattttacattacatatgacagttcatgtcctgataatattagtggaactgtgtgacctgctatattctgatctaagagttgtactctattaaaatgaatttggatttctccagcttgagtaaggtgctccgttctgcgaggtggttatacttaaaatatgtctcagtcctcctattctcctctttaaaatggttcatatcgtagaagctacagcatacatttgttaatgaagtggttcccatgtttgaatagctttttatgacacaaaatcttatgttgaacaacaatacattaagtactgtcacacatttgaagcactttaagtaagtattgcacattgtagctaaagtattcttactgttatccatgagcctgtcctagactgaaatgttcatattaaagtaacttcccagagttatttatcactgaaatagcagatgtcctgattgactactagttttaacttctgttctttttctttcttgggtgtgctcgtatgatttttggcatccagtttctctctcgcgtggctg

SEQ ID NO: 14428 - DNA, 757 bp, Brachypodium distachyon
  Intron number 4 from transcript Bradi1g49160.1 (locus Brad i1g49160) derived from phytozome v7.0 (chr-ID Bd1; pos 479 08193 to 47908949 reverse strand)
ccgatttttcttttgctattcgcttttacatttaggtgagtgttcaaattggatactgttgtagtatggcttccgcataccaatgctgataagttagttctggctttgatgttaattccagtcacattgattatagtttgttcagcttgcttgttagttttatagttagttatccatataagcagatcagggcatctacaaccactatttaacattaacttgcaacatgattggttggtggtgttatatgttgttcccacttttgaagccataaaaaaagtgtaaagtgagttaatcatatgtaaatcagtaaaatagccatgaacaacctaagaagtactacctgaatccataactccttttttctttaacttgacttttaaaattacagtaatctttttaaagtgccggttagcacacttcaaaatgtctctgcatttcttttctaactaaagaaaatatttcatgtgttcgcaacctacttggaatttacaggacctgtagaacagtaactttgttttatcatgtactccctcagttccataattcttgtctcaaatttgcccaaaaatgaatgtatgtattcataaaaagtatctagatacatgtaatatttcgacaagaattatggaacggagtgatagtatgcatttttgtcttgtgcaacctagtgtgttattgccacttctgcaacatggatatgcttctaaaagctgtttcctgctttacaaggttggagagtcccagcatcaagctt

SEQ ID NO: 14429 - DNA, 742 bp, Brachypodium distachyon
  Intron number 1 from transcript Bradi1g51300.1 (locus Brad i1g51300) derived from phytozome v7.0 (chr-ID Bd1; pos 497 46943 to 49747684)
cgtcgtcctcgccgccgactcccggaccagcaccggtacgaaccacccacccgatccgcgcccgtccctcgtcgctgcggctgttcagtttactttaggttattaggtttggatatatcgcgtcgcgtgtctcgtctgatttcgctcgtagatcgtggggaaaaccagggatgtagcagtccctgtgtctagccgagggttgccatgcttatgctatatgggttctgcgtttcgtagtacgatattttgtggtggtgttttagttgcgagaccaggggaaatcttctgtgtttgcagtcgtgagagtaatattgctaggcagctggggattaatagggttaggaggaccagtgtttgattctgcaaatggcatggtaaaagggaccagatcgaactgttctcttgcatacatgtgaaatcacggattgccttgttttgttgccatggaattagaggcaaatgaactcagattcgctatgatagttatcattggggcagtgaataaacagaacatgtgcttccttctgtgtcttgtggatttggaccttttatgtcattgacataatatgttcctgccgagttactggataacgtgcctccatagggtgttactgttctggagtctcctagtttgcaaagtctcgtgccttctgtttcagttaaatataagcaatactgttttgtgttgttctgttgatttttttccttaatatcccctgctccctgttcttaattcgtagga

SEQ ID NO: 14430 - DNA, 840 bp, Brachypodium distachyon
  Intron number 1 from transcript Bradi1g57680.2 (locus Brad i1g57680) derived from phytozome v7.0 (chr-ID Bd1; pos 564 40557 to 56441396 reverse strand)
acttctttgcgcgaacaggcacggctctttctccccctccctccatcccctcttcttctcctgcagcaaatgtccaacggttttgcttgtggctagctccgccatctcggaccccacggttttgaggctacgaccggagtaaatccttcctccccacgtatgggcttcactccgattgcggatcaattccccggtttgccccggccggcttgggatgcttttgcttatgggggttctaagtcagccctaaaccctcgatcaccttgctggcgctgatcgcttgcatgttgattaacccctgatttattttcagaaatgaaaattcgcagtctacctgatagatttcaactttgggcatgattcacacacagaatgttctagatttgctttgaatcttgctagggtacaattgttcagtgctaggatgattggaactggagtgctttatgctgtcctattttgtgtctctgtgagagtgtatgcttatgttgttcaatgccatgatgctagtatgatgcacgcatgtagtagtcaacagaaggactgtacaattgcaactatgtttctggagtcatgaattggctatgaacaagtggctatccatgtcatttgttcttgctagtatccaagggaattgatagttgatacttggtgaccgactgaccattcatcatgctcctttttacttttttcacggctcttcttcagagcattttactcctgtgcaacttccttgctggaaacccatatgcatcatgcatgctttgtcagattccattgcatttaaaagtgtttgcgattgcagcccgagaaaaggtgaagaacgctaagctggagttc

SEQ ID NO: 14431 - DNA, 861 bp, Brachypodium distachyon
  Intron number 1 from transcript Bradi1g51660.1 (locus Brad i1g51660) derived from phytozome v7.0 (chr-ID Bd1; pos 500 85092 to 50085952 reverse strand)
ccaaccgaatcctcctgctctccgccttgtccgaggtgagcaaccggaaaaaggctccccccccggcctcccccccctctgtctcaattcggatgtagacacggaattgttggttccttgtcatgctacaagatcatgggaattcccagtgaaaagggtctaaccataagtaagatgtacttaaaaaagacgtttggtagccaattcctatgctactcctttatctactaagtgaattgttatgatatatgaggttggaaggtacaagcataaccaggtgatcctacttcgttggcgagtccaatttaaggactccagtttgtttcatgattgcaattcgtatgtaaaagcagagtgtttatttaggacgactatgtatagttcaaatggtactttatggggcatgtggaacttctgtaaaagaatgtaccagcctttaaagggttatgttgtactggtaattaacattatgtattcataaagatacatatttgaattcagaattatgcaagctcagggttcaatcacattgctgctaaatggtttgatctcaaaagagactttttaggtgaacatttttgacttgttatttttttgcatacaacattagtttttcttttgcacaagctataaaggtatgaaatgtaggatcttctagggtttattcagtttacattattggtgaaagttgtagtcaagcatcccctgttctttcttttttacaataagaaacttgtgctgctttactttgctgccatctctagttgatcctttttttttgcaaaaaatctctagttgatccttacctggcttttactccgattagggaacaacagtggtggataacctgttgaacagtga

SEQ ID NO: 14432 - DNA, 792 bp, Brachypodium distachyon
  Intron number 1 from transcript Bradi1g56100.1 (locus Brad i1g56100) derived from phytozome v7.0 (chr-ID Bd1; pos 548 06349 to 54807140 reverse strand)
aatctacaccaatccccgagagggtattacttctctttgatattttatttctatgaactgccattgacaatcaacatagttttctattggtttcctagttgattttacacataaatgcattaattttagcctttacctaccatatgttatccattgtgttgattttgtgttagatatgtctcctagggcacaggcaaatggaattttaccttttgttaatttttgaaactaaaactaggattgtcttgatgtatctttaaagcatgaaagagatgaaaacgtatgtcaattcttccatccattctacatggaccacacccattttttcatgcgctacctatgatgccatcacatagcagactcatccatcaatataggcattgggcaagtttgacattgccaacatggccttcaggtctatagaaaggctacccagagcatatggcttggcctgcattaaccgtcagtatggagggccaaagcatccccactaaacaggtccatcacttagatccaatccaacacacaacccagtgattgtaatggggaaaaaatgccacctcctaaaatcctcgttagttcgaatacagctgtacatgacctggaagtagataagactgcagattcttgtgcgttttttgcatacaatgacagctgaagtccattacctcaccttgtcacaatttcatatgactggaaaattcttctgtactgtgatgatatatcttatctgtcggagttctcagttgtgctacttggaagcacctaacacagtgacatttctgcaggttc

SEQ ID NO: 14433 - DNA, 995 bp, Brachypodium distachyon
  Intron number 1 from transcript Bradi2g15620.1 (locus Brad i2g15620) derived from phytozome v7.0 (chr-ID Bd2; pos 138 79575 to 13880569 reverse strand)
gatccgggcaagaaggtgcgttcttgtcttgtctcctcttctcctttccttcctccctccaactccgtggtctctgtttggatacttgcggatttcttcctttaatctggccgtttacggcgcccatgtttggatcccatctcccggcttgagcggtggttcaattcaatggcggttcccatcgacctttccgtggaactctgtgcccgcgcgtacgagtttatgctttgctttctttccagttattattgtggatctgcttggttggatttgcccggatttggtaatggtgatgctggatgcggcatccaaaggcttgcagaaaaaaaaaattcttggatcatcgataatgtcagtattagtttgtacgaactgccacacatcaacgcgtccgtgaaccaacctaataaagcgcggcatttaggaaacattatcacgggacccttgcctttggctgttcctgtctcatctgaaactgggtcaatgctcaataccaacaggacacgggctacaggagattatgcttttgcttttcaattattacatttttgttgccttttttatgatcccatgctacaggcatttgccaccatgtggttgatatgagaaaaataatgtttgctgcaccaatgttcaatcacttcctaatttagtccaaacccaacaggggcaacaaactgtttgtgtaattttccagttgtgtgcaagtcttctgattctgagttccaacctttttatcttattatctgtatcctgagttccaatctttattccatcagtgtcatatcttttcatgtgaggccatcagtatcctaattttctttggcgaggccatcagtatcatcaactgaaatgtgacctacctttttttatttcaatatatttcaccagtggtaaatctttatgttaacatcatatagcgttcgcaactaatggtacgaacatgcatttgattcttccttttcagacctcggaatccgagttcttcacggagt

SEQ ID NO: 14434 - DNA, 858 bp, Brachypodium distachyon
  Intron number 1 from transcript Bradi2g09180.1 (locus Brad i2g09180) derived from phytozome v7.0 (chr-ID Bd2; pos 745 6536 to 7457393 reverse strand)
cggtaaaccctctcttcgcttttgctttcgtttattcctcgatgggttgcatttgggtgactcgattccctatttggcttggatgctatttggggttttgggggaggtttaggccttttgtttgttagcggaaactgagcatttcgttggcctgcatttcggcaaacttctatgtttggttcctggctagctgctgctgctgctgctgctgtgttttttcatctgctgttttgatggtgtttttggtccatagtgggtggtggcattgggggttttggagtggggtttctgccagattgggaaaaccaaacctgcaaggattttccaatttcagttgaaaacttgaaggatctctgcctagggctcttccttgttttctatttcaaagggcttattccttttaggggaattggtggatcacggaggaatgggtttcgggagaatggcggtccttgaaatttcctctttccattattttgatttcttctgacgctagtgtggatctgccttctgcgatcgggattttactgtcaattgttttggagttcagatttatcatacggagtaattgatttccgcgttgttggagacttagcgctacaagtagctatttatttttctcaaagtttcctttgcaatttttatgtcgttgctttcatttgccttgttttagacttctaggattgcatcctcaactggcatggtggaatggtgtagaatcactagggttcacttgatgtcaagtttctgaaattgttgttagtcttaactctgcataacgagcctctaggatgcaattttagtcctagattaacatagtattgatcaaacttttgtttcatggcaggaaagagctct

SEQ ID NO: 14435 - DNA, 860 bp, Brachypodium distachyon
  Intron number 2 from transcript Bradi1g71410.1 (locus Brad i1g71410) derived from phytozome v7.0 (chr-ID Bd1; pos 694 07413 to 69408272 reverse strand)
tgtacccgattgacaccatcaaaaccaggcttcaggtgagtcagttctgcactggcgcactatgtgaacttcggtcgtactccctccgtccaacaaaatacgtctcaagtttgtcaaaatttagatgtatacatgacttagtgtatagatgcatttaaatttagtcaaagttgagacatcctttgttggacggaggaagtacatgaattttgtaatagctagaactcgcttgtggtctcgattttgccctcttgtaatggtgagtcagttagactccataacctgcttcgaatcaaggctttatcttacgagacactgattgtgcgtgcccagagttacctggttactaggttagagatgccagtgtctgacagtgccacacaatcaagatccctgtagtaattatctgcactggaggccatgtctaaatctgacacaaatctaagtctcctatagcctattgcatgtatggcaaggcactgtatacatggcattttgaatgaaaaatataacaaatacccttcatttggatgaatggctcgagtgactgcgcttcttattcttaagaagagggggaacactggaaagacaatgagcaattgctcttcactagagagcaaggacttgtgtccaatgcaaaaggattgagtgaatgagaacactggttgtgcttggggattgcagtatgcttatcaagcgtgcctacattttccaccaattcctaatcctaagtatgcttgtatcacctttttcttaattttattaaggcttgcaggcaatatagaagaccagaatgtatattttgtctgatttgttttttttttcaatctgcaggctgttcaagctggaagtcaaattca

SEQ ID NO: 14436 - DNA, 938 bp, Brachypodium distachyon
  Intron number 1 from transcript Bradi2g06230.2 (locus Brad i2g06230) derived from phytozome v7.0 (chr-ID Bd2; pos 467 7860 to 4678797)
cgcgccgcgccgagtcgttcgagaagctggacaaggtcacactctcttcgtttctccgctgcttgtttcgcatttttctcttagcgttagtttctgttaaggaataactggacagtaagaattagtaaagttgtgctgtaaaaatagacgaggtaccatggcgaggcatttcagtttgctctaccttttcttcctagctctggtggatgctgggaaattgaagggaattgcaaattgtgctgtcatggggggaattcaccttttcgagtgctaattggtaactggggacggctggtaacagtaaaattctgttatgagtgggggacgcctttatgttagatgcgaaaatgcagtgcccctttcctttaatcctttcttttggattttttttgctagtttagtggaccatggaacatggaatgttaggcattactggcaaactctgtaatgaatggggcaaagttttcttcttgggggcttgtttggataggccccaatctcttcagatcaacatggatttgtgtccagtttcccttcacatcccaagtaattaggacaattgttacagaagataaaaggaatggtcaattaatatattctactaataatgggatcaaacttttcaaggtatgttgaatttcattagtcggtagaataaagtggaggtattatgtttaccatgctgtgagatacattaggttggcactttgagcttgaaaggccagcaacatagaaacagcccaagtatttggttgaatgcaataactttgctttttgtggaagttacactttatactgtaactcgtgtacgtagaccatccctgatctaagtttaaagtattcacacataaatatcacctggtttaagttgattcaaatgccgtgttgtattcaatcattgttcttttgtatacagattggtcagggaacgtacagta

SEQ ID NO: 14437 - DNA, 895 bp, Brachypodium distachyon
  Intron number 1 from transcript Bradi1g53410.1 (locus Brad i1g53410) derived from phytozome v7.0 (chr-ID Bd1; pos 517 60031 to 51760925)
ccacgccttccgtgcccgtgcagtatcttcccaaggttaggattctaagaatctgttccttggtaaagtagttacgtgcttggctttgctgttacgggttgcagtgtgagcgtgtaaaagtggcggcagctgttaacgatgagcagatgtagcagaataagagcatgcattgttggattttaagtcgtgggtggcgaagattagtttcattttgattcgatgatggttattatgactagggaaggtttgtgaaccgtgattatggaaaagtatacctaccttgtttcaagttaaactagcaaaaatgttccagcaaagtctgacataatgtgcaataaaagattaattgctgatacctggtaaggttactcatttgtagaagatatatgctaaggtctttgtcctgctagtgctagtgaaatcctcaatcagtgcttctttcaaattatgttgttcttgatagtttgttttatttatctttcttagctttaggcaatggcttgtgctacaggaaagtgttgactagggatgatattttcgggcggatatgctttaaactgcagcgtaattgaaatgccaaagtatcaagatttgttttatttattatatgtgcaattttttttctaaatctaaatttggacgagttctgggttgcgattcagccaaccttagtctcgaggggtggcggatgggtaaacaccttgttctaaaaaaagaaatctgtgctaggcattgttctgttgtttggatcactaatatggtttcaggaaagtttgagttggtattgtaaggaaagaagtgcttcctatgagaattatgaaagaacattatgctttgtggttcttattttgtactgttttagtttggttgtactgacagattaggtattatccag

SEQ ID NO: 14438 - DNA, 974 bp, Brachypodium distachyon
  Intron number 1 from transcript Bradi2g16530.1 (locus Brad i2g16530) derived from phytozome v7.0 (chr-ID Bd2; pos 145 46806 to 14547779 reverse strand)
cgattgacacgcatctgctcatcatttacatacaggtttgcaataagtgttcattcagtaacagttccagagctttttagttgtggtgaggatatctgatagaaactgctgaatgttgcttgatggagagtcaatgcgttgggttggttaattgaaatcgttgtgagttagatcgagttgatgagcggatctctgcaataagttacagaacatccttgcaatgtgtggaggcttgttggatttacttaactatgtagtaatactccgtaaatgttattgctggagttgacacaaagagaatatcatgttaaataagatgtttttcgacgttttgtgttgtttttcgctgatttgtgtcgtgaacatgttggatttttcatgtccacgattgttcttatataatgtattgtgtacttggcaagaggaattaagttctagacttttgtgttactattaactaagcatcttaatgctcagctcatttgttggaatcaaactccttgttagagtaacataagctctgtgtcaacgccttttctggttgctatatgaaccgattgaagctggaaatgctcttcttcctaactagggtaagggatacttaaacgtgacttaattgagcctacacatgcctccagtatgcaactcatcaacttgagtacattgagaggattatgccatgtcttctgttgtttaagcaaatccattgtggtttatgaaatattggtagagagcaatggttgaaatgctttatggtaaactgaaagagtggtaaagcaccattagttcttggaagcaaccatgcttaaagcagcttgacttaaatatcattgttttgtcctgtgcatgtaccttgaataccttgaaacaatgtggaatgcacccttggatgaggctaatcagattacttctttttttactgtttggttttgggtctagggaggactgaattcagaagggggacagttctccat

SEQ ID NO: 14439 - DNA, 929 bp, Brachypodium distachyon
  Intron number 1 from transcript Bradi1g63010.2 (locus Brad i1g63010) derived from phytozome v7.0 (chr-ID Bd1; pos 621 92641 to 62193569 reverse strand)
gccaactcccgtgagaacctcattcctttccccaacctcgtcttatctatgtttcgtgtgtctcgttgcgtcgccatatgcgtgtacttcagatctgatgctcctgtgctgatctgcgacctcttcctacgacgattctggagatttaccttgtattattagattagtgcaagtagttctgttatctcatccgagactggtgaacgctgattaagtcgtggtgtggttgtttgcgcagtaccgtgtttcttgacgtttcgcaacattagactgatgctagttattatggttgagaatttgcagcacgtcgtggatggttgcaactgggagataattttgtatataaaggggtgatatctgcagtgccgatgtgtgctgtttccttactcctgagtattctataattctcacatggtattgcttcttgtattggaataatttggggatactgtgcgggttggtggtcacttagttcaggtgacgtggatgaagtgcgaattgcattggaaaaattgctgaaagctaataacctttatctgtataatatatgatttcttccacagttacaaccccatttgtgtatctatggactagtgttggatcgtcattctcttgttctgatgttgttcccatcaatttgattgtgttggtaattaattgcggtccccaaactagttgtgttatgcgtttgagtgctgtagtttctgtgcaatatgatccatatcctcaataatttgaagtgtgaactgttttgtgtgtgagcaagacagcaagagggttatctaatgtttgttctgttttgtgtgtgagcaagacagcaagagggttatctaatgtttgttctgttttgtgtgtgagcaagacagcaagagggttatctaatgtttgttttccttgagcaggccagaacatccgtaagttggttaagg

SEQ ID NO: 14440 - DNA, 580 bp, Brachypodium distachyon
  Intron number 2 from transcript Bradi2g17890.3 (locus Brad i2g17890) derived from phytozome v7.0 (chr-ID Bd2; pos 159 35008 to 15935587)
ttgcacaagtgcttggatttgtggaggaagttgaagtacgatctttattgtcaattcatttttctactgcttttgattacactaacgcattctcttatatatgttacctcattcatttcaattgaacaactacaaaattatgtttagattgtgattgcttagcaattattacgtttgaatgaattgctaaattgtgatttagaagaatcattacgtgaggcctaggtgccaaaatgtgtgtaagattatatagagaaaatgtgtgttggtcaccttatcgaactctgcatgttttccaaactattcctatccagtgtgtaggaactaaatttggtgtaaatattcagtttttctacttggtgatctattttcctggcttaatcctcttttgagcacggcatgaactaatgtcttgttatggtattaattctataataatgttcttgcctatgttttgtgtgatacttatttgatattgattctaataaaatatgttgttttatttaacataagtctgtaaaacgattacagtcttaatgattatattttgtgtaggtgcgtccctcgtccccaccctgga

SEQ ID NO: 14441 - DNA, 1016 bp, Brachypodium distachyon
  Intron number 1 from transcript Bradi2g17260.2 (locus Brad i2g17260) derived from phytozome v7.0 (chr-ID Bd2; pos 153 83939 to 15384954 reverse strand)
cctccctcgcctccgtctccggattcagcctcctcgtacgttccgttttttcctatggacgtctcgatcggttgatttcatgcatgcggcctctggttttccggcttaaaatttgatatgctaccacttcctgcatcgatcgccccgtctaatgatgcgttaatttcctgcttcattacttgccaccttcagcagcgtgtcaatgtagctactgcagaatttctgttgttttgggggttggacttggagtcggtagatttaacttggttagtgtctccagtgtataaaacatataggtgtcaggactcaggagtctggacagatagtgagacatctagagattttcttagcatagaccatcgagtaccttcgatgggaccttcaacacaacagtaccaccacctttgtgtaaactccttcgaaaaaaagctgtggaatctgaccgcaaaaaaagtatgtttccttataacatcagtacatcacgacgaatttgattgtctgctgcagccatatgtcacattgtcactagtggtaatatcagtgcattatttttcgcaaaaagtaatcagtattattacaaagcgcatggtttggttaaaacgaacttctttggtgaaagagttgtgtgggaaggtagaaggtttgccattattaagtccctagcatatgatccttaaagaggaatcaactagaaagtagtcctttctcattatagttcaacaaataggatatactagctccaccaaacagttatgaactcacagtgttttgtcaagtgtaattttgtttttttaatccaccattattactattactcagtgcataacaattgcagcatcactgccatatgtgggcttaaggttgcatgttacatactgctgttcacatgaatggagcatctagcatgcatatagttttatgtctatctttctgcaatttaagtgaagctgtttcctttgacttgcacatcttctccactagtaatttgaacattcaactttgcaaaacagattgga

SEQ ID NO: 14442 - DNA, 987 bp, Brachypodium distachyon
  Intron number 2 from transcript Bradi2g12660.2 (locus Brad i2g12660) derived from phytozome v7.0 (chr-ID Bd2; pos 110 07680 to 11008666 reverse strand)
gcagatactttggtggtatgatctttattctgaattcatggatggtttctaatctagaggtgaatcatgttttggttaacaatgtgatgcattcatgcatctattttcttaacccgcattttactggctatgtatgtcagaaatggtaaacattaatacctgtttgattaaaagtagccccagaataagaatacctgtccaacaatctgtaaatcaatctacagctgaaccaagcaggtttgtggaagaaaaaaacatggatgtctctctttttttatccaacaatttggatgcactgatgtagtctcttatttgtaattttccccacgtcgctagaattctgaatacattttttcaatgtgtaatagtgagtctgaataatgaggtactccctccgatccatattaattgtctcaaatttgcccaaatatgaatgtatctatctttaaaaagcgtctagatacatgtaatatttcgacaagtaattctggctggagggagtacaaattgtccaatgctgctcggatattgatattggtagcataatatgtatcgatatatgtcattctgttgaaggatgcaaatgtcaatattttggcaagttaaagaaatgttgtttcgcgcagacaataaaaaacattgtttccagtccatctgtgatgaatctctagtgaatgttttttttttcttcgtatgctcatcctatagtatatgatgtccatatgattctctgtgatattcttataaaaggctgagaagatagaatccaatcaagtaaatatcaccttgcgacatttatattttggtcaagtctgaggttactgaactcacatgtgcctctttagttcttaatcttacatttagttacaacatcttgtccttcagctttcgtaatgactaactttctatcccattaaagtccagtgatttatttggatattaaatcttgcaggtatctgctgatcaaaggtcaagattgctcaggac

SEQ ID NO: 14443 - DNA, 316 bp, Brachypodium distachyon
  Intron number 1 from transcript Bradi2g12660.2 (locus Brad i2g12660) derived from phytozome v7.0 (chr-ID Bd2; pos 110 08832 to 11009147 reverse strand)
gcgctgaggcactggtaacccttcttctttataaccaattaaataatatgttatcaatccaaacaaattttccaaggaattcgattgatttatggtataccaaggggttgtgttttttaacccatcaccgaaataattaaattttgcaggattaggttatagtgtaaatcaaacgaacactatgttctttatcgtttttaaattaggacatcgcgcaaacaaattgctctcatctaggatgagttaactgtatggatcgataagagttttatgttgagaatgcctcgacgtggttttccttttgtagataaggaag

SEQ ID NO: 14444 - DNA, 860 bp, Brachypodium distachyon
  Intron number 1 from transcript Bradi2g08020.1 (locus Brad i2g08020) derived from phytozome v7.0 (chr-ID Bd2; pos 643 0361 to 6431220 reverse strand)
tacccgccgatccaccaggtgcgtgggaggtgttcttgattaggccctggcgctcggtgcgctgtatctgcgtgtgctgggacatcgggactcagggtcaggaccattcttgggctcgaatggggatctgggtttgggaatcgggcgggttaaaggaatttcgtaccatgattcttctgtcgattcgagtcccttctgatcttgaatttcctacggcgaattactacaccttctactagtttagaattttggggatcttgactccattgctcatatgggatcatttgggcgacttgttctgccgtaaaccaaaaaaaagtttttgtgttgacttagcaatttacagatagttgtttattccttgtattgttgttctttttcttcaaaatccaactgcttatttcgtttggtggatccataatatagtggtgtagagtacattaagcagatatataccagagttgatgcagttatataaaaaagatcgactatagttttagtcataggcactagaattgtgtagcaaatactcctctattttcaaacatgaacagatgtaattttagtatctagtcgtgcaattgcgttgggaattcggctagtaaatttaaaagggaattattgaatgccgtattgatatcttgatccgtctgcaagataaacactaaaatttataatcaattcgggtcatatacttggttatcaaaataaacatggagatatgtatgctaatagccgatctatagatctttttgtgtgttgaatgaatctagttgtgtgcaattgaagaaccacgtgcattatgcagtgctgcttttggataaggctcttatctctttgattgcatttacagtgccaaa

SEQ ID NO: 14445 - DNA, 622 bp, Brachypodium distachyon
  Intron number 3 from transcript Bradi1g48530.1 (locus Brad i1g48530) derived from phytozome v7.0 (chr-ID Bd1; pos 471 39312 to 47139933)
accctggctgtcgcgagtgctctgctggacgccgagtgagtatgtttaagctcttaatgttttgtcaatgccgttctcaagttcttttttgcaactgtttcttctgtgttgatgttggtagaaatctccactccttaaatgtgcaatagtgctgttgtttttcaactcatcattttgtgcactagttttaacactcagtgatctcagtgaagtatatgttctccagaatgacgttttaattaagtttttgttgttatttaccaatagatacaagatcttagtagacagtaaactaccataaaagcttagtagtgctgtgaagggcttagaaaataaaaaaaatactgattctatttattttacttcacgcttaacacgtaattttgatcaatatttccagcttaatacatttgcattcttggtatccacatatctgtgtgtgtgacactatcgttacaatggcatgcaatgaagtcatatcgtgaagaataatttaaatgcatgtccaccatgtactagaaaatagaaatcaatatgtattgcctaccgtttagtatccttatgatttatgtttaaaatttctgttcattggtaattcaaagtattatatggaatgacaggc

SEQ ID NO: 14446 - DNA, 855 bp, Brachypodium distachyon
  Intron number 1 from transcript Bradi2g17790.1 (locus Brad i2g17790) derived from phytozome v7.0 (chr-ID Bd2; pos 158 40713 to 15841567)
aggctaccgagtcgcgatctccgccgagcaccgtaagatctggcgtttcggatcgcgttaattgttgttagctgcgtgcgagacgatctcgacctgtgcgcgcgcttaaatcctagggttttttttagttctgttcagtggaattgatctgtttcgcctgatgagatgcggttccccgtattttcgcgcggatctcttggcctgtgtttgatttgatggccactaggattcagtagatactggttctagttggctgagaaatcgtgtcgatgtttgccgtatagatagagatttatgttctcgactaagtaagtgacaaaggggcggggaaaaatttgtggtcttgcaaagtctggtgttgagcctaacttgatcttctgctgagttgttcgtcgctgactaggtaccagttatcttacaggcccatactgattttcttgctggcctgtatttgtatcaagcgagtcacacaccgatttattattattttgtagatatgagcttttcattcaatccttttagatctagtctatggtactactacaagattagatgtcaaaagtgcttagtcccatgcgaagtctaaactagtcaggcacattgacaagttatgtaactatagattgacgggttatggtgtataaaacacatcaaatgctcatagtcaaaatattacctttggcacaagagaaagggaaccgtttcagccttttagacatgaaaatgttttcctagtacagcgggagtggaactgtttcctgttaaattcctgcatttaaaacatgtcgttagctagtactgctgtattggtttactatataccttgtgatgaaactaaacattattcttgctagg

SEQ ID NO: 14447 - DNA, 1024 bp, Brachypodium distachyon
  Intron number 2 from transcript Bradi2g23830.1 (locus Brad i2g23830) derived from phytozome v7.0 (chr-ID Bd2; pos 215 83890 to 21584913 reverse strand)
accgccgttgccgccgacgggctcccctggacgctgtgagccggatccggttcgccgccgtgctcgacatctcactctctacctcctcctgttctccctttctcgtccctcgtcgagcagcggcggcccggttcgtgtagctgcgtctagtccgggggcagcgggagcgcgagccagagagaggggaaggcagagtataccttggcgggaggtgttttcgttggagtccttactagggggatggggagccccgagctgccggccgagtttggaggatcccggaagggatttgaggagcggctgaatttggggagtcgtagtaggatcgggaagctgatggatcctttttcttttttgctcaaaactactccctacattccaaaaaacacctcatatagatttgtgcacttggaacaaagcagctctcgatttctaatgcctgaccactcatattggattagtactaaatagatgtgaactgttattggacgtgtgtgggagccaagagaaaaacgaggtatattatggaacaaaccagaaaatctatgtgagttgttttgtggaacgctgggagtttgggtcattgggtagggcagctgctggagttgctctagtttatagtgaaggcctgaatctaagatggtagaggcactcatgtttactactacctcagttcctaaatacttgtcgctgttttagtgcaacaagtatttaggaacagcgacaagtatttaggaacagagggagtattttttttatacctacttaattggcatggatctgtatacatgacagctttcatccgaatcctttgattattgaaagagattctttatcatagttccatcggttccagtcctttgattcatttatcttctttgtccctcagaccccatagtaagagaaatgattaatttttagtgtttttataccgtttgcgtacatgtacctccttgtgtagcatatatgttcggtttatctgactcgttcttgcttttttaggtgttatactctagtttcaacg

SEQ ID NO: 14448 - DNA, 525 bp, Brachypodium distachyon
  Intron number 4 from transcript Bradi1g62770.1 (locus Brad i1g62770) derived from phytozome v7.0 (chr-ID Bd1; pos 619 92830 to 61993354 reverse strand)
tttaggtaggtatttgttttccagttggttcatcctatgtgaaactgtctcttttcaatagttggaagtcattcatacactgttgtgatttttaagtggttagttatcttaatcattacttgtttaatgtatatctcttcttctgataatagtatacaggttcaaaaaagaatatctggtaatacaaatcacaaagagaaattcagttgaaaatttgaatatcatttgagttgatattgttttttatgcttttctgacagacttacatatcgtgaagtttcattagaatgttgatgaagcaccttatcctgcctgttgctttcatttggttagtgcatagggcctgttaaattggagtgagggttaatatgccaaaaatctagttttttagcctgcaatgccctcagctttccttatttttttattgttaatttcatgcgagtttttccttatttattttcctatattgtttatgtcattggaattttcatcgtttcaggtggggaggaaagtaccatcagattc

SEQ ID NO: 14449 - DNA, 560 bp, Brachypodium distachyon
  Intron number 2 from transcript Bradi1g60750.2 (locus Brad i1g60750) derived from phytozome v7.0 (chr-ID Bd1; pos 601 36768 to 60137327 reverse strand)
ctcgatttcactgaaaacagcgagcagggcgacaggtgaaaagatcttccatgaccctttttagactttctattgccctttctattggggagaatcgtaggaattttatcatcataataatcaaccaagtcgtttgattctgcttacaagatatgcaattatagtcatcctattgaatgctactgaccatcctatttgatgggaatgcacacctattcacttttcctctaggagccgaacattataggatggaccatgtttttgttttctcaaatcatcgtcgggtggtagtttcctgtgtcaacgtcatgtcaatagctgatatcgttgtactccgctgactcagctgaggaatcaccaacataatgtacattagtttactgtgtaacaacaaaatcaaatattgctatgcagcaacagtagctctaatattaagaaactataattagtatttatttgatggtctgatggttttttttcttggcgaattatgagattgtccatggtctaattattgccagggtgctatgttaggtaccgagaattggcacacagggttg

SEQ ID NO: 14450 - DNA, 645 bp, Brachypodium distachyon
  Intron number 3 from transcript Bradi1g49660.1 (locus Brad i1g49660) derived from phytozome v7.0 (chr-ID Bd1; pos 483 47134 to 48347778)
atttcagaaattgtagattttgaggtactcctagtgaagaatatgtcttctctgctactacgcaatcttctttaatatcccattctaggaaacagagggcacatacttatatgctactttactgcctgttgtgtcattgcctgcttaacaagatagatcatcatattcattgcatcacccgttcaacttatagttctgtgtaattcaatctcaagtgctctgcaaactagattgcttagaactcagttaggccacagttttttttggcataacttttgggcatatattaactttctctcctcagcttgtctcatgaaatacagcaatgtatatccccagcatatttagtttgtatgacatactttagggctctaatttcaaactacatgctttgtctccacttatctactctgtatttctatatagagggtggctttctactttccaaatggacggactagctgaggggaaacatgggttgttttagtgtcaagggagttgatttatataatagtgcattataacttgcctattgtattaatgggggcaatctcagtgtctttccttttgtatgtttgagcttgagctgctttaatatttttcggtgtaacaaactagattgtatgtttctctaggtcctcggtg

SEQ ID NO: 14451 - DNA, 444 bp, Brachypodium distachyon
  Intron number 1 from transcript Bradi1g53020.1 (locus Brad i1g53020) derived from phytozome v7.0 (chr-ID Bd1; pos 514 09654 to 51410097)
tcctcagcggcctcctctccgtcgaccgcctcaaggtcggtcactcgctcgccacctcatttccttccatgcccggtcggatccatgttggattggagacctcgatcgcgtctacaactgcccaattcttgttctttcatggatccaattcaattccttcggagtacagtatatatttgagtcggttggcgcaagcggcactgccacggaaatgtttcaatcgtttcttgtaacatcttcgtggagcagcgtggtgccgttggttaattctcctttgatttatttagttttgccctaatcataccacgtgcttgtcaatgtcgtgatttttgtgcgatctgattaaattgttctgaatattgcattaattttaacggggaaaaagttttcaggtaatgtttaaaaaatgccttaattttgtgtgtcatcgatcaggtgctgcac

SEQ ID NO: 14452 - DNA, 684 bp, Brachypodium distachyon
  Intron number 3 from transcript Bradi2g36000.1 (locus Brad i2g36000) derived from phytozome v7.0 (chr-ID Bd2; pos 363 54059 to 36354742)
ctgggtgagctcattaagtacttcaagtggctgtcttccttcatgctaaaaaagtagttgtcccccaccatgggagtgtgtgcttactgtcctttctttttctgcgcaagaaaatacattgatgtgttatagctgcttaaagttcttttatcttttgaacaacgtgcagtgcaatgcaagacaactcgctctgaaaaatgaaaatatatgttggaatatgattttcttcaaatgatgcagggaaatgtagtgaatgtatcggatcgggtgaacaaaattgaagttttacctacagtgaaaccactaattttcgcttcaccataagtgcttctctcaaagtgcccaaacaattgttcttccttgtttttacggtttaaatttcagggtttctattagggaatggagggtagtgctaaatgggggcaagatattcagtcattttgtctagttttctttgacatccttactttcatttcttttgtatcactaagactcagtatctatgtatgtttgcgaagctgcacaaatatcttcagtacttgctacaaagtttcactccagagtcaaagtattagtctgaaattatgtttcataagattgaagtttttaactgaagtgtatcatggcgaatatgtccacaatctatcaggtttcaagtaaagaaaaagcaattcttccgcaact

SEQ ID NO: 14453 - DNA, 721 bp, Brachypodium distachyon
  Intron number 2 from transcript Bradi1g51000.2 (locus Brad i1g51000) derived from phytozome v7.0 (chr-ID Bd1; pos 494 43344 to 49444064)
ggctccgcatcgtgcacaactccgaggaaggcgaggtgaactagtcctcaaccacaaccccggcgccctaaatgatcatttattttatttgttttgtgtcttttctgtcacccgttttggtatgggtctttgtgatctgggagtggaatcggtgtttttgttgatgggatgaacatagttagcaattggggtgtgtggttggttggattaacaggtaccgcgcacgagcagtattctggatttggacatgagtgaatttgagttgacatgggtctgggtgatgtttagtcataaggagtcagttgttttttttttcatgaaattctgcaatagaatttgtaacgtttctagtggctcccttttcaggataataatttggggaaaactacatgtagcatttctgttccctcttttcttatggtggaatgcatagtgtgatttttcatgtgggatgtcattgaccgttgccacgaaaaaaaatatcagcctaagcagtttgttactgaaatcatccataatataagtagtggttatattatcctgaacgggaaggctcacttgcagagtggaagactgctgtttgacgccactttttttggcaaggattgtttagtattacaatttatcttaactttttatactctaattcatctaatttgtttcttgccttctttctccctgcatactcgacttctccaggctcctcctatagtgccgttgg

SEQ ID NO: 14454 - DNA, 713 bp, Brachypodium distachyon
  Intron number 1 from transcript Bradi1g54480.1 (locus Brad i1g54480) derived from phytozome v7.0 (chr-ID Bd1; pos 528 45263 to 52845975 reverse strand)
cctacgtcgatttcacgtacacgcccatcctctcctcttctccgttgtcgtgtcgattggatccaattgcactcatgcgcgtggttgtggttctaagtgtctgttttgtttgccaagttcgatttcgttttttcttgtcctaaactttggcgttaattaccccagataaagttatgtttgttacaagccatgggacaaactgtggtgtattaaatctgtacccattggaaattagtagcaggtggcttgattgttgtatcaaatctgactaggtttcatgttgtatgccagcattcctgtatggatcgtcatttttgttccttattattgtttgcttcatcgctcattaaatggtaaagtatgcatgctgcacgagtttagcatggtcactctaagtgatgcttttccctgttgaactatatcgtgatcatcttaacatgtgtatttttctaatgcaatgctttattgtatcaactatagtacttttaatcttctgctgcagcatattccattttttgtaatattttgttgtaccgttattctatttgatgcaaaagactaaatgtttactgtgattagctgccataaatagattattcttcgacatgtaagatcatgatttggaagttatgtttaattaccatgttttctggtgttccttgagatctttatgggatattgagtgtttgttttctggcctttgttcagtttgg

SEQ ID NO: 14455 - DNA, 860 bp, Brachypodium distachyon
  Intron number 2 from transcript Bradi2g12300.1 (locus Brad i2g12300) derived from phytozome v7.0 (chr-ID Bd2; pos 106 35857 to 10636716)
ccattcatatcatctgtcaaggtgcttgttaatcttttttcttagcacatttatttcattttagcatgccttgcttgctttgaggcgaattgttttttgtaatttcataggagtgaacatcatactattgcatcggtaaggatggtcaacaatactttatactgcgagtcatgaatatataaacaaagaacaagcaatcattgcgtagagtaaaatgaataaataaagaagaaagaagaaatctttgattcccaaaacgaaagcaagcaggtgtatctcatgatttttcagtccagttgtttactgacccacttttgggctgtatacgacgttgccgttgtataagaatgcacactttgccacagtatgacggtgcgacatacaagcatagttttcacttttaagattaatctacattctgaatttctgctatagattttgtaatgtacactccacccttttttctgagagttaatttgatatatgccactgaaattcttgcgtatttaaaaatgctactgtgattctcatctttcgaaaaaaaaaagtcactctaaatctgcagattctttgaaaataccactgaaatgggttgaaaaatgccttgtgcagcttctcttcgtgatactattagatttctatagttccttttgtgttgcttctcttcctaaatggccatattactcactagcatcactgtagctaatgtatgtgtgaataattcatatggttcttctgtgctgtttcttcttagcctggttgtccataaactaagctttgtctttcagtttcagcacacatagttatgcatatgataatttacaggtccttgaagataaaccagatctttcacgttggac

SEQ ID NO: 14456 - DNA, 521 bp, Brachypodium distachyon
  Intron number 1 from transcript Bradi1g49070.2 (locus Brad i1g49070) derived from phytozome v7.0 (chr-ID Bd1; pos 478 17771 to 47818291 reverse strand)
ggtttgcttattggtcaggttaggaggacaaagtttcggtctttcttccgtcagtcctggcggccctgggagatttccgtctgttcttggcttgtattttagatagatgttgcgcctcttgttctgtttgagttgacctgccattcttgttcattttccgggtggcttctgaatgcagcttttttggtgagattttgcaaaaaatgaaattattcgattctcacgcttgttgttgcccgtgcatgtttccagtaactagttcagaaacattgggtttggttatttactgtctatgcatttggattttagctcaagatatagccaaaccgaatttcagaacaacacaataaactttgttcactagtggtaatttttttatcaagccatgttgcaccatcttgtgctgtgaattttttgtgttccaccgacaaaacaaaccaggcatgggtggctgattgatttccttttattttccatgtgatctaggcaaagagatttgaagacaaactgatctcctgagg

SEQ ID NO: 14457 - DNA, 622 bp, Brachypodium distachyon
  Intron number 1 from transcript Bradi2g09690.1 (locus Brad i2g09690) derived from phytozome v7.0 (chr-ID Bd2; pos 796 0794 to 7961415)
actgctttgtcaaggtctctgcttcctctttactgcagtatcccttacttgtttctacaatgatataatgatgcttgctgaacatagttcctgtaatttagtacagaaacatacatgctttaatgttagtgtatgaataatacaatcagctaaacaatttattagttaagttcagcagtttgaatccttaacgtgcaaagtgttcagttataacttaagcttttgctataaatttgtccttgcatttgaaaccgtgtccggaggaccagaaaagaatctctagtttttaggctaactttttagtatttaccaatgataagataagatagcctacctacacagctacattgcccatgatgagcactaccttatgtcttcttgacatgatcgagtctgtacgatgaatgcttttccccaacaaaaacagatggtgattactcaaatcaaatgcacaataattggaggtctatgcaatggtcgtccttcacttaatgcatgtaccaatgtacctgatcaatcgacactattttgttgcatgtgcccaatctatgtactacccacatgcctgatttatccaccaacattttctgacatcttttcttcttgtgagtataggggtgtg

SEQ ID NO: 14458 - DNA, 983 bp, Brachypodium distachyon
  Intron number 1 from transcript Bradi2g27210.1 (locus Brad i2g27210) derived from phytozome v7.0 (chr-ID Bd2; pos 260 13510 to 26014492)
ctctggccacaatctccccccagctcgatctgcaggtacaagacccagcccaactcccgatccagcatccagcacgtgctgtgctctttctcccttttctgttattttccctttacaccaaaaagctccatccttttagccaatgacaagtaggcccagtttactctatgctgaccagatctggaccagccaaaggtccactggtaaaagtaagaaaattagttattttcgaattaatctcgctggtattttcagaaataggcagaaaggcctatagatcttgtaaaatgcatagaaaattcatacggtatcagaaaaatgtgattcaagttgggaaagttttgtttttgaaatctctatccagtggtgttatgtgtgttgtgttttcacactgttaagattgcatattttgataaaatggcattcaagtaatgtttaccatattttaaataatgcactaaacctatactttatatttcaattaatttggggacttatacccctgtttaaataatgatagatgctaaaaatgacatcatatttttgtatatcttgtgttattttgagaagcccaaatcttttatcaaagttgtttttccgtttaaagggaaaattcataacttgagttaggaaactccgtttcgagtgaatcaaatttcaaaatgcatattttaacattacctacattctgatgtgttgtatcattatgtgcttttgagaaaaataaagccttgtgcataataatctatgttccaatcaaacataaagtgcttatttaattaagtttgcttaatcatgtgctcttgtacgtttttcctttcatgtccctacttgtgcatcatgcatcattcacatggcatcatattgcattatttatctatgtacttggatgatgtgtggtgaactcatttgccttctattggatctttttgcatcttcttgcaataggtgacgaagagggtgtgcttagtgagaacgattcg

SEQ ID NO: 14459 - DNA, 908 bp, Brachypodium distachyon
  Intron number 1 from transcript Bradi2g17240.4 (locus Brad i2g17240) derived from phytozome v7.0 (chr-ID Bd2; pos 153 77139 to 15378046)
atcatccaggcggagaacctcaccagcaacgtcaggtccatcctctacaggtccgcgcgcctctcgctctctctcttcctcccacgcctcgcctctttcccctggtcttgatctgatctggaggtgtgctcagtttcatgttaaggattgatctggatgtatctcgatcttatggatcatggcctaattacgggtcgtagttagatgtttctctgtaagtattggtctgaaagggagagtggagtggatttagtggtttcgctagaactattgatgcgatgttgcagctaatgcgagatttggaaataactagcgatgttactgtgaattggagcttttagtagctgcagccagtcagctaaattgaatcaaaaggatctgctgaaattttcatgctagattgaggtgcgtttattgggttcccagattggagttgtacaatgtacaccgtcaatgactggtgactaacaaagagaattactgaagttatatgctctgcgagcagctattcactaaaatcagagttcctttaggatgagaaatccccttagatcagctaggcacttttgagtggaggggtacagaagtgatgttatccttgattccctatgcttgggcagctgggtagataatattgtagcaatacaccctagttattaatttaatgtgctcgatcggtagtggacttacagaatactgtggttacagacttgactttttcggtgtgatgatacaatatccagtttcctgtttccatcgtgttgataacactgttttttttttactataagcaatttattctagacatttccctgacttgctacttcacccaatatggtttgtcctaaacatgagaatttctttgtgttacagtcggacattcttgtcgatcattggtggagttgttg

SEQ ID NO: 14460 - DNA, 561 bp, Brachypodium distachyon
  Intron number 3 from transcript Bradi2g37770.1 (locus Brad i2g37770) derived from phytozome v7.0 (chr-ID Bd2; pos 381 28497 to 38129057)
agcaccagcttgtctgtattcttcgtcgttgctgagtaagtttcattaagctctgtggccaacagtttcatgtggactagaagagatagtatctaatattttgttgtatgttcaccactgcctcaccaccgacttgatgaactatctctttttcttgtattgggcttttaatatatagtagaaatatatatttgaatcaaaatccatctgttcaaatttagctacgaattgtcttgcctttgatgggcctaggattcttttgacggtgtacagttccatagaacaatgctgagcagtgccaacactctagctcttcagtaaactgaattatcctctaggagattgcttggtgcttgatgttgcagcgcttaattttgcctgtgatgattgggaatgtttaagatgcatgctgttacattccccctattagctcaactgttttgacttcttggatcattacagtcctgtctcacaaatttaagctcttagtcattgttttgtatcattcattttattatctgttcttgtgaattcaggctagtgtcagctctggcttttgcg

SEQ ID NO: 14461 - DNA, 920 bp, Brachypodium distachyon
  Intron number 3 from transcript Bradi2g19340.1 (locus Brad i2g19340) derived from phytozome v7.0 (chr-ID Bd2; pos 170 45800 to 17046719)
gaacaatatttgtcgagctctggattttatccgtaagtaccttacagccaaatgacatcagccatgatcagtgtgcttggaggataatgaagtgaattaattagtgccttgctactacttgatcggttggaaagatagcttattaaataacatttttgtgtctcaatcattcttaattattgagttttttgactaatgcatttccttttgactttcttgctatcttgtgttttgctgcctgatgataaaccccacaaggaaattcattttattggactagcttgtaaccagtcaaacaacaatgttggcccacactacaaataacatcggactattcaagttttcttgtagctgctgtacatggtatgcaccaattgcactagcaagttagaaacattcatcacattgctaaggcttgcgaaataacgacgttgtattttaaaaaaaattgcatgtaagttaagcagccagagttaatatatgcctgttatattttccagaaaatgtgttgcaaggtggtaccacgtatgtacattgtaaggctggaagaggacggagcactactgtagttttgtgctatctcgtatgacaaagtgcatcctttgttatgtcttagatatcttgtttttcttctacatatggaagcttataatccgtgtaacttgcagattaaatacaggaacatgactcctctttcggctttggatcatgtacggtctgtaaggcctcgagttcttttaacagcagcacaggaggagtcatgcaacctgaccacttatgcaattttacctaaataataataattgttctaaattctagtctctgtctaaattaaaatcatacaagtcttgatattatttctctctcgttgcatctttgccacaggctgttggaagctttcgcttgctccgagtctgaac

SEQ ID NO: 14462 - DNA, 507 bp, Brachypodium distachyon
  Intron number 1 from transcript Bradi2g38160.1 (locus Brad i2g38160) derived from phytozome v7.0 (chr-ID Bd2; pos 385 12739 to 38513245 reverse strand)
gccgttgatcgcgtgaatctcgtgcggggcaaggggtaatgtaagggccgcgccaggtttgttgtttggttgcgttccgcttctgcttatccttccatttttcttctttctttccggatggaaaggaattaattaacaattaataatcgaaatatcggtgctatttgtttttgacaggaaaaagattaatagaaaaaagagtacgtattataattggtttttctttttggaaagatttgttttgtttccggcctctctctcggggcaggaggaggaggggtggggtggggcacacgcggacgcgaagggggttgcgaatcaaatggggttaaggcccggctgcgtccgctttatcggctcacgttgtcacagcctccgtttccttcctctcccctccttctctcttcttctttctctccctacccccacctctctgccctctctccgcctccaccttctacccggcaagcaggtccctctccgcagatcagcaacccccgcccgcct

SEQ ID NO: 14463 - DNA, 742 bp, Brachypodium distachyon
  Intron number 1 from transcript Bradi2g01830.1 (locus Brad i2g01830) derived from phytozome v7.0 (chr-ID Bd2; pos 126 7585 to 1268326)
gcaagggcaagtccctggtccgcgcgttcatgtaagggaaccacgcatactcaccttctaatatcggtaacgttgagggatttggggattgggtatgcgaaatttgttctcatgatctggcattaaggatacatcgaacgaatggtttcggtctagattttatctcaatgtatctggggggtgatttatgatcgagatagtgggttaacgtcctctccattattatttttgcgtggaagctgtagattagaaagatatgtgttatatatacttaacgatcaattcgctgagaagtatgtgatgatccacctttcccccatctgtaatgattatggtcagaaggtgggtaacacaaattgttggtgtaatctgttactaagaagtcaatttatggatgtattctgtgagaattttttcctttagataatcagggtgatttgtgatggtattagggatatgctccctcccattttgattggttagaagatgatgattagaaaaaaaaatacatgccattggcattgggtttcacttaagacgaattttctaatttgtgatcatagtgatttttgttagcatcggaactggacatacacgccgtgcttacatggaaagcagttgtcactcagaagttcattgtatcatgaatctcttatgtgtttcctcacttctggtatattgtcttatgctaaatcctctgaaatgtataggtgggactctggcagcaccgtcggtgactttg

SEQ ID NO: 14464 - DNA, 779 bp, Brachypodium distachyon
  Intron number 3 from transcript Bradi1g77350.2 (locus Brad i1g77350) derived from phytozome v7.0 (chr-ID Bd1; pos 737 33702 to 73734480 reverse strand)
acacgaagtcaatccgtgttcctctgccgtacaaggtgagtaaagacccagatgcaagaacatgtataagttgcgtggtgcataaatagtacaagatatcgtaatgcacggacatgactgaaagtctgaaaatgcactaacatgcatacactctatacttactctatgcaccttacttcaggttggatcgttaccaactggtggttcttttatcatcatggagtttattcaatttggtcgttctaggggagaccaggtaaccttgtcccgaaacccctttcattcaaagaaaaaggtaactttgtaccttatgttacaaacttttgttttaatttatttatcattaacagactgtttcttgtcagtcagctctgggaaggaagctcgctgaaatgcataaagctgctaaatctgataagggctatggtttctacgttgaaaatactattggaaggtactgtaaagttttttatattcgaagattttacacacatctgattaatttgaccttgaattctacctccagttacgtggcatgcaaataatgtctttttggaagaggctttcgccttgctttttgtagaaagcctgcaatactttgttgctcgtgcaactcatgttttcccaggaaatactttgttggtctttctgatccaccaatatttgtagtgtagcactccacaaattaacacttggactgctgactggattgagttttactcaaagcatagactgggctaccagttggagttgatatcacaacgattcggtgattcagc

SEQ ID NO: 14465 - DNA, 734 bp, Brachypodium distachyon
  Intron number 1 from transcript Bradi1g48750.1 (locus Brad i1g48750) derived from phytozome v7.0 (chr-ID Bd1; pos 474 20850 to 47421583)
gcagagaaactcaggcgctacctgcaggacaaaaggtacacctctgaccactttttgtaacttgacagaagtcccattttttagtttaaaaataattcaaaaaatcatgcaaaaattacatgtgtggaaagttaaccttgtaagtttttgttgtggcctatggacctgcttccctctctgacgttttgggtccggtcggtagtttttcctactagtgtggcgtctgtttgccggtgctccggacctggtcttctcaataggttgcttgctcagtgtcaagccattttgtatcactttccttcagtaagccatgatttgttagtttcggcccagtttccttataaactggtccagctctttctatctgaaagaattgcagtagcaccttactctttgaggaaggatcttcaaaagaaggcaaagaagttgagcggcgtttggtgggattttatcgttcttgctagtgtcgtctgtctgcaggtgctaaaaccttgggtatgtttaattggtgtccaaaactaagttggctggccaatgttttagtcatggtcaagattttagcccttgtttggatagttactaagctttcctgttctagataaatactatgttccaattgtccttcaatttcatgtctggtgctccatcccctgattattggatgtttttgttttcgatcctacttgtgacttggatgttgtgaattttatcttgtaggtacattgtgattctcg

SEQ ID NO: 14466 - DNA, 816 bp, Brachypodium distachyon
  Intron number 1 from transcript Bradi1g46360.1 (locus Brad i1g46360) derived from phytozome v7.0 (chr-ID Bd1; pos 448 90635 to 44891450 reverse strand)
ccccaacgagacggcgcagaagcttctcaaccaaggtcttcatttaccccccgcccctccccgatctgttcgcttcgatctcgtgccacgcgctgaaagctagggtttttgggcgtgcgtgtcgttccacccgcattgggtagggcaccgccgtcgttaacgtagttcgcaggagcgcaagcagaattgtgactggcgtctagggttttcgagcttaagcagtcaagcgatctgttctctttcactggcgccgctagtgatttcacgtttgatttgagctgcctagattgactttagtaggtgtatatctgtgtatattggtaagttggtgtggactgtttatcccgtcggattagtgacgagagctttgtaattcctgttcctgatgattttcgtaaatcaaccatgtgagctttctgatatgctattgacccttgttggagtagtatatgccatggtcgtgtatgagcaagtagtgttaaatttaaccatttagtggttagtgttttgatttgtcaatggagggaagactagtctgtaatgatgcacctaatgatctttgtagggttgttcgcttcataaacttagtacaatgatatttttccgagttcttttaggaagcaggccttatatatgtttgtaaaccgacctaatattgctaattcgttaccataatactttttgataacacttaagatacatctgacatgtgacattcaacctattactagttggtttgacttatgttgttgtataaaatcaattctatttgttgaagtcactcttctaaagttcaaatctttgcagatccatttc

SEQ ID NO: 14467 - DNA, 551 bp, Brachypodium distachyon
  Intron number 1 from transcript Bradi2g11190.1 (locus Brad i2g11190) derived from phytozome v7.0 (chr-ID Bd2; pos 941 8074 to 9418624 reverse strand)
tctctctgggaaagctcgctctcctcgcaaggaaggtatggctgttgactagtccatgagcctaggtagcagcttaatcgcttgccgctactcaagagctcagatgcttgagctattagttatctattttagagttcttccttttcttttcgtttttgatttggggacgggggtgttcctctttttctggcgctgcagcgctcacagcaaccataccgtgctagtagttcatgattctatatctcccgtgtgttttcctttgatatactatactctagctgtttgattttgggactccgctgttaccacataggtggataggagaattagaatacatccgaaccatatagttagggttttacccgatttcgatcgaattctgtgttaacgtgtgcgatttcttgtcatgagataccgctgcacgtttcttgttctaagatttcgtgaatctttcatcgaggtaacttttcttatttttgtgagattcgtcgagttagctatgccatcggattcgtaattggggattattttcctcaggtagttctggggcc

SEQ ID NO: 14468 - DNA, 752 bp, Brachypodium distachyon
  Intron number 2 from transcript Bradi2g01950.1 (locus Brad i2g01950) derived from phytozome v7.0 (chr-ID Bd2; pos 131 6252 to 1317003)
agttccgcgcgctcttcggctttgccggtacagaggtgcgtgcgtcttcaatcaacctccaaatgtacaccattgtcgttcttgtcacctaccgatgccgagctgtttgctcccctgctgttgacttgcagccactttcgaaagaaataaatctgcctttttagcacaagtgcttgcttaacacagtggtcgagagaccggtgcctttttcttaggattaaaaaaaataccaattgattgcccacatttatgctaaaacgaagcttgcgcatatcttgtttcgtctgattaaggatatccaccagaaataatatttggagtaaaaactctttgatatcagtaagcaagtgattggatgtttcttcgcctgcctaaataggtatcgtagcaagtttttctaaatcgggtcattaagctgtataattgtataccctttaattttacgtttgccttaaaattacttttgttgatgttattctaattgctcatttttcagtctgctcctgttgctgttattttctacttgggtgaagttttgtgttgttgccttgtcggagagtggcatctgtaggttatatgcttaatgagatcaggagcagatcacactacttgcataatcactataaaaaaatatagaaacatccacagtttattgatagaaattttcttttctgggacatgacttctagactcgattgcccctttacttgtaaagtaacatgctgtttataccatggtgaaggagctcaagg

SEQ ID NO: 14469 - DNA, 756 bp, Brachypodium distachyon
  Intron number 1 from transcript Bradi2g37470.2 (locus Brad i2g37470) derived from phytozome v7.0 (chr-ID Bd2; pos 377 82848 to 37783603 reverse strand)
ctctgactccgccaaggtcgcctacgtcctccagggtatgcccatcccgccctacccccttttcggttttcacgatcgcccctctcatgggttgtctgtttcgttctgaaattgcgatcggaagtgttcgtgttcgctcgatcgatgcttgcttaatttgtctccgcgggatctgaattttggttactcagattagtcgagtttagatcgcagctagtagttgtagcagtagattgggattgaacagagttttgtcgctcttcactgaataatctgtcggctgcgtcagtttcagaggcatatttattcagttatgattttcgtcagatttgatgtctgcatcagatcgatcccacttattagtctaatgagttgttctgactactaataatttgaatgaatatttgtataagaggtcgtgatcgttcgtctctttatttttatttttatttttattttaccaaatcatcacgcagtcctcgtggtccagcctgtagttcgaccaaatctacctctgatatcacgacttgctcatgtcttcttgcaaattatagctacatttgatcttacaaattccggcgcagcagagaattgcaatggttgattatagttacatttgatcttacaaattccggcgcagcagagaattgcaatggttgaaccttctttcgagtaattccgtactaactactgatttgatttcgatcctttttgttgccaggcaagggcacctgtggcatcgtgctgccggaggcg

SEQ ID NO: 14470 - DNA, 983 bp, Brachypodium distachyon
  Intron number 1 from transcript Bradi1g47510.1 (locus Brad i1g47510) derived from phytozome v7.0 (chr-ID Bd1; pos 460 54620 to 46055602)
atttccaccgagtcgccccccgcactgatctggaggtaaagctgtgaactttgtttgctttgacgcgaaagttataactttggttgaatggttcgattgcagcagtacacatgtgaattataggcagaattcttttgatgatttgatgtcagctgtacgcatgcgatttgatgattttgtatggtcagatacatggtcctatattagatttaaatcgtgccgtcccaaaccctcctcccccaaatcctcaatctgctgtattggcctttgaatccccaagttttcacctcagtccttgtatcccctaaattcccctgtttctccaattcactgccgcccatgttcaccgctgctgttgcacaattcgtgttatgggctggagattaagctggaatatcaagctaataagttcgatcagcaccatcagtgcaagccccaatccatcccgatacacaattttctaagccgagcagtgcatttttcaagcaattgtagaaatcctctagaactctgctcttggaatttaccacatgaaatcgtcaggttactcacgtggtcttaacttgcatgcagcaattttaattcgagtcactagtattttcatgaaggattcgtatactgtagctcgttatccttgtaaatgaaggggaatgcgtcgatacactgtgattattaaaacccttttctttgttatagtatcatctgcatcttataaagttgaattactgtgctcccatgaaagacaggcagttcaaagctgtatggacatgtggctatttcccctttgttgtaattattctaccagactagcactcttcctttgtatgtcaagttgaccggtgtcctttaatgttccatgtcaatataaagtttgaactcttcacagcccttacttttatgtatgcatatgatgtcatgtttgcaagggtgacattatatatcccactttgccaggtttattagaagaaaagagggaatcatac

SEQ ID NO: 14471 - DNA, 794 bp, Brachypodium distachyon
  Intron number 3 from transcript Bradi1g61820.2 (locus Brad i1g61820) derived from phytozome v7.0 (chr-ID Bd1; pos 611 38513 to 61139306)
tcagcccttcaacgcactccgatccgtcgggaaaggtagtatcttgacgcaaagcgattctcaatatggtttgctagttcagctgaagggactgctgactctgctactttaggaccgtttagtcgggcacttctgatttatgttctttacctcgttattgggggttatagtgtttgtatgggttaatgctatgattatttatactaaagttgtactaaatcagcgacacttgttatggatcggagggagtatattttattgccccctgatgcatcagatggtaaacctttaggcagtttctatggtaaaacaggggtgttaactcatgttactgtgacctcaataaagaattagcatctcgttacatgttgacaagaagtaatttattttcatttgttctggtaacatgaagataccttcaccgagtgatgagtagtgcttcattaagaatttgaacaacataaagtaccgaattatcaatgaaacgagacaacagttgtggtttctcttgatatgataaatgggaaataacagtatggttctgtaataactaatggctccatgctctttgattataccgggtagaggaaatacatgcttctatggtctgttaccatgttcttagttttttgtaatgagcttttataggcgtcacgtaccaaaatagagatagtattattgtccatgtaattcaggattgtgttttccaatttctgtacactgagtttttcattttgtaattctgtacttctgttgcagtttttgaaccattcaaggaccccagggtggataca

SEQ ID NO: 14472 - DNA, 742 bp, Brachypodium distachyon
  Intron number 3 from transcript Bradi1g70450.1 (locus Brad i1g70450) derived from phytozome v7.0 (chr-ID Bd1; pos 687 75298 to 68776039)
agacggagagaattgctgaggtgaaatttgaatttgtgccttcccatacaatctatgattattctctttttgtgcaacttgctgtatgtatagggcaatttttcttgaacgtagcctttattttctttcattgtttgttcacatgtgcaatagatattttttccgttatcaaagttgcctgagtatttgttgtggcactgatagtcatttgttcccttgttttgaattagcaagtttagaccaatagtcaatctaataaaatgtggtttatgttacacataattgatgccattaaattcgtcggcaaaagcactctctcaagattgtgattttgtaaccattaagaaaatattgtgcaagaaatttacagtcaaagcttgtatttggacaataaaaagtacgctttacatttcgaaactgatagaatattttgattccatattttccccttttcggtattgtatctcagtatatgaatgctagtaatttcataattcttgttccctgcagttttatttatggttttagtagtgtccttgaaccctatgtttgtgctaccgtggtcttttcagtctttgcatttttctgtgttttagtgaagtgcactaaatagaaatataatcctgttaagtaataaacaaatggatttctactgaagaacaaaaatggaatatttgtatgataaaaaccgtatactgatggtgtgtctgtatttattcctgctcagagcaatattttgaaa

SEQ ID NO: 14473 - DNA, 950 bp, Brachypodium distachyon
  Intron number 2 from transcript Bradi2g23790.2 (locus Brad i2g23790) derived from phytozome v7.0 (chr-ID Bd2; pos 215 39864 to 21540813)
actatcaaggtatgaagattttatttgactcagcttcttttttaaggtatcacattttatgtaaagttaaattagatgattcactttaaacagagacccattttatcaaggtatcacattttaaggtctgtgggttaacttctgatgtggattatagagacggatggttgttctgttcatgcctgtaatttaatgttatcctatatgcttcccatattcaaaagttgactcagcaaataataaatgaccacaaatacacacatcattactaaaattgtgcagacgtctggaaaatataattgttcatacctatccagtgttattttgtcctaccattacaaggaccgaagctctgcagatttgcagttgagatttggttcactacgaatgtgtataagcacagttatgtgtttttatttcgtcaggatagtgatactaggatatgaacctttgtcgatattgacatcaagttttgttttcctccatctaattaatccctgattgtccatacttgtgatgtgatgatgcataacataatgatgcattcatgttttaccctcagtgcgctcaaaaaagacaaataggtcctaaccgtgatatataaaaacaacagcatgtaatataatatctgatcacttaaaaagggagtgtactcttatttttataaatagcaattggcaacaggggagacaatttatcccatgaaacaagctatccacaacaaggatgcatttgctaaattatggatttgattataggctatatagaagcaagactgaaagctgatttagttagtctagtaaaaatttatttgtttgtattcttccatgtaatattcactctaaattttctcaatcgaatatttttcttgacatggttttcaccatgatagtaaaatgtttcttgtttttacagctctccttgatcgtgggtggaggaggtctggcagt

SEQ ID NO: 14474 - DNA, 723 bp, Brachypodium distachyon
  Intron number 1 from transcript Bradi1g67070.1 (locus Brad i1g67070) derived from phytozome v7.0 (chr-ID Bd1; pos 657 91990 to 65792712 reverse strand)
gagaagaacggtcaaagtgtaagtgatagtttgagcctccattgagatgtgcgtgtttcattttgggctgcatagtgatcagattaagcccaaccatggcatctccatttcttcaaaaaaccatgaaatctcctagaggctacacatggtagaatctagttcaatgaacctgatatccaaaggccagtagcatccagatgtgccacgtctcaagaatgggtcaagttcattcaacggacaatactctcgaagttattcataaattatatagagtgaattttacgaggtttgttttgttcttaaaatctttgggcttttgttattttgcgttattccctttgcttatggtaaaatatggtctcatttctagatgtgcatctattgtcgaactgaaaaccagtttgttttcttggagctaatgaccatgacatgcaatttgtatcatttcagttcaaacgtgtaatttttagctgattattatttgaatgaaaaaaataccctgaaaagcaaggttcagtcgtaattgcttgatatttaaagatattgatggtgttgattaaaataatcactagccaacctttcttcaaggtacatctgctttttgcactgcaagttacatttgtttaatagttcggctgctcaggtttagttatatttcatacttctacagttacagttcatcttgtttcgatatgtataactaaaatgacatgcttgtgcagg

SEQ ID NO: 14475 - DNA, 818 bp, Brachypodium distachyon
  Intron number 3 from transcript Bradi1g45970.1 (locus Brad i1g45970) derived from phytozome v7.0 (chr-ID Bd1; pos 442 46045 to 44246862 reverse strand)
tttgggagagaacaccaacactactgaacaacaaggtagcatagccttgttttgtcgacagtttgacacattgcaattgttagctgctttcagaattccgcacttccatttttagtactccctccgatccatactaactttgtactaaatcctcgacacttattatggatcggagggagtactagattggaattttgagcttatctatgatctcaagtcatatgttcacatttttcacctccttattgaaaaaatatgtttacattggcactttgttggctggtcttaaggaccatctcttgagagaattaacacatttttgtgtgtcaagatataacacataatggtgcttccttcagtactttcacatggcaccaacttacttcaatggcagcatttggacttggaacagtgcagcttccttttcatgcaggaacttcttaagagatgatctacaaattaatccttgttgagaaataatgacatgatggtcccatgaggtctcagcagttcacaaaagttaggcatcatctgatgttgtttcacattgttaaatggatgttttttcattgccttgcacagtttgtatattctcacatatatataggcatgacagttggtagaattgatactcgagtgtaaatgatgtttcttctttggatgattaagttgtggaaatgtgactcctatttatcaattgcaagactgttgagcagatggatccaagaggtgatttattcctccgaaattgaactacttacctttttccataatttacgccagaagctatatattcctggcgcattgagaagctgaaa

SEQ ID NO: 14476 - DNA, 957 bp, Brachypodium distachyon
  Intron number 1 from transcript Bradi2g09360.1 (locus Brad i2g09360) derived from phytozome v7.0 (chr-ID Bd2; pos 764 6263 to 7647219)
ggagtgcagcagagtcgctcatcaagacgcctcaggtgaggatgcctgcgctagtctttttttaacccctttgtgcaattgtgcttacctaatcagggtagaaatgttcgtttcttggcgttgttatcggtttcttcggttcttgacatgtagttccttccgcttgtagtatgatcttgtggaatgaaagaaattagtcgactcccgttagctcatgctccccaattttgtttgtgtttagttgatgattccgagatggaggtaaacaggttttgatgtttagaagaggagatatgttatagttaaccggcaggaattttcaattcaaagtcaacctttagttctttagggggcattgcaattgctcgagaagttagaaatttgctcgaaggaaaattgtagacttcattcaaatttgagacaacctatttgtaatgagttgacagtctgcaccacattgtataaatctggccacttgtacaattccgatttgcgccattatttttcagcagatctgagatgatgaacctactctttatgctcatgtgacatgatggtgtgtgtggcaaataaaatgtggtgcaaatcggtattatagatccaaaatatggtgcgaagtggtcaaattcggaaactgtgttgcaaatatcaactcatgacaaataggttgtccaaattaaagttaactcaaaattaaaagcttgtttgggaatagtgtgcagagtcttattaagagaaaagaatgaaacatgatcagtgatacggaaccaaaatgaacaaaatggctagtagtagaacgaagactgagtgtgtgataattctgttctttctgtcttcccagcttcctttttctgtgtcagaagcattatagcatcattaacagtggatgcgtatttctttcttttaaatttctcattgacagtggaattttcggagtcgtcagaaagttgcccactg

SEQ ID NO: 14477 - DNA, 447 bp, Brachypodium distachyon
  Intron number 1 from transcript Bradi2g20450.1 (locus Brad i2g20450) derived from phytozome v7.0 (chr-ID Bd2; pos 179 48448 to 17948894 reverse strand)
cgagtctttgatcctatttgcacagcggaaatgtacactattttgtttgctcatgaacttgtgtgtgtgtgcatacttgtgtgtttgttttcatgaacatatgtttgtgaacaacagagaaatgagattgtgagcatgcataaaaatcttcagaaattacttggatatggaattacagcgacatttcaaacatctgagtttttctctactttcatttttccattgaacagttgtagacccctaaaatttcttctgacactgaacagaattcacatcagattgatactttttttcttccatgctaagagtatggtgtgacatcattttgatttgactggcaatgaaatgtaaagcattattttcttgatggatttatagtttctattattcaaatttccatgaccatactctaacaaaatcttggtggccatgtctaatagagcggca

SEQ ID NO: 14478 - DNA, 826 bp, Brachypodium distachyon
  Intron number 3 from transcript Bradi1g47630.2 (locus Brad i1g47630) derived from phytozome v7.0 (chr-ID Bd1; pos 462 86162 to 46286987)
tttgacggagtccttagccccttcaccctgctgttgtatgtccaatgccacctttccctctcgttctattattcgttagtccttacaatgatagctagtggataccctgcgtggtgctgtgggcctcagagtgcaacacatatgcccataggtggaaggaaaatgaagcaaagtaaacattataagagtattgaaactcatgctatgattgacttaagagagaatgcaaatgtgttctgtatggtatacacatttgtttatcttcatgagcaatttctcgtgtgactcaaaaaaatgtcatttaatcaattttaacaaatgaattgtcacacggtacttagtttgagatgtgagcagaagaatacatgcttttgaaagtgagacacaacggtggtggcatagtattacccagctttttagttacattcgtatatttatgcggcacacaaagaatgatggagcattttcttttgagtcgtgcagttgctaggagcttgttgagttgatgatcatgtggacaatttgcatattgagcttgcatacattaactgaatatattggcggggaccaacttgatgatgtggacactttgcatgttgagctttgtgggaatcaacttgacgatgtttttactttgcatttgagtttgcgaacattaaatgatttttagtggggattaactttatagagattatagatgtggactattcagtgttttcgaaaaatatgcacgacttatcgcataaaataaaatatttgtctacttattaaatctgtttgttcttcttcagcttgcctgagcaggctcggtgtgataccattgggg

SEQ ID NO: 14479 - DNA, 942 bp, Brachypodium distachyon
  Intron number 2 from transcript Bradi1g49470.1 (locus Brad i1g49470) derived from phytozome v7.0 (chr-ID Bd1; pos 482 03609 to 48204550 reverse strand)
tggccgaccaacctcgtccaggtctccctcttcaggtaccttactgcgttttcttccttcctttatttctttcttccgccggcaagcaataatccatttttcaacttctaatgacattattacgtagttgcttagtttaactaattaactagctaaatatttcatactgttttatcgatgatgaatagagagttgaccgattgatgatgaatagagtccccacatgatttagaaaagataaacatttcatgacgtgcaagctagtgctttaattttgcaagcaatgtgtgtatatataaacaatccgtgcatgttactagctagtagttggttatgtatgcattcctcaactaattgcaagtagctaggagtagtaaagaccagtagctcgttagttagctgtgatgtgtgatgacacgtcagagtggcctagcatggaagagtaggaacattggtttagttagttagagtgttagtttgggatttctaactgagaaaatgaaatgatgacaagaaacgaaattacgaaaaggagtactgttgatagtgatgggatcatccgaccagccaatcagccatgctcgtggcgacagcttcagctttcagcttgtgaaacacgcatgccagattacatgccacgcgagatttttgtccatgccagattattataaaagaatacaagtatatgagattaccattgacttgatagtttagatatatattattactatggagctcgtgcatgaatgacccagaaatcatgactactgtcaaattaaaagatactaaatcatgataaacgtaagaaacgatgattcaaacagtggggaaaaaagggaaggagttgaataacctttggcttatctaaaaataaacaacgaacttgcacatttgaattttattttagctaaaaggagttgaaaattctgaccagggcgcttc

SEQ ID NO: 14480 - DNA, 666 bp, Brachypodium distachyon
  Intron number 1 from transcript Bradi1g48140.1 (locus Brad i1g48140) derived from phytozome v7.0 (chr-ID Bd1; pos 467 43584 to 46744249)
agtcctgcctcggcgacaacccctacgtccgcgtacgcatcgtgcatccccccaaaccctaaccctatcttgctgactcgtgtgcttggttgttggtctgttggcgttggcgcgattttgtgtgcgccgtggtgatccgcttggtgccactgctgttttataccttgggggagtagatcggaggcaaagctaggtttctgttttgatggcgtgctctgcaatatgtgtcccgttttatactccctccgtcccatattaagtgtcgaaatattacatgtatctagacgctttttaggtgtagatacatccatatttgaacaaatttgagacacttaaaatgggacggagggagtaaattttaaccagaagcttgtagagatcgatagctctgtgctgtattgaactactctgttccatgtgtgtcttggtaatttgtcgccacagttatcagtaatttttccaaaaagaatatttaagtaattcagtatgataagtgaatttgatgtaagcaagctctagcttgcataacaggaagaaattatcaatcagataacgcatggtgtaggggtacctctattgttccctgttttgcggtgtgcttcagttcttcatggagacactagatttactagctttattatttttcttggcagttaagagcagaat

SEQ ID NO: 14481 - DNA, 906 bp, Brachypodium distachyon
  Intron number 3 from transcript Bradi2g37980.2 (locus Brad i2g37980) derived from phytozome v7.0 (chr-ID Bd2; pos 383 27536 to 38328441)
caatcaagatccagaccgccttccgtggttacctggtaatgtgacatcagctcttgaagttagctactttatgccatttggaactatgcaatgcatgcccgtttcttgaaatgtttagagaactcaatcgcgacagttaaactagttcactgttgctttcattcataactatgtatgctgtaaaaatactttaaaggcgatcgcacgagtgtctatttctgctggcctctgatccggtgtttgtcatttttgaggttggaagaacaattctcatattatttatgattatctctccataccaaaaagattatgcaagcaaatatctgtcggtaggcatcatcaaaaatttctcttatcctgttctgaggttttggtattggcaggctggcagctcaccaactcgcaactggtagttgaacagttgctgttaattcaaagtgagaactgtagtatagtagctatttacaattcatgcatttcacaagtttgtgtggtaaatgagcttttatggttgaagaagtaagtattcttgccaagtggaattctctccctactccttagggcctacagatcaatcttgccaaatattttaaaacattccatctctggcagttggtggcagccacctttcgctttcattattaattctggttatttatcatttttccgatgctgatggctttgtctgtctggcttagtggttagcatgggcttcaattcaatttgtagaggggttagcatattccatttggaaaacacgatactgatttatattgaaattttttgagttactgaataagaattttacttcaacaattcaactgcacatgtgttgagagcctgagagttttctgtcaatattataatgcaggcaaggagggcattacgagccttgcgaggccttgt

SEQ ID NO: 14482 - DNA, 752 bp, Brachypodium distachyon
  Intron number 1 from transcript Bradi1g67980.1 (locus Brad i1g67980) derived from phytozome v7.0 (chr-ID Bd1; pos 665 40703 to 66541454)
ccttcatcgacggggttcgtctgatctgcgctcaggtaagagattttccctcgtggcatgcttgtgctagcttttggttttatgatcgttcgctttgcggcagcttaattttgaagcgaagtttttgcttgccatctgacgcatacgtacctatatatttgtgtgtctgtctttgcgcatcaatcaatacacttctgcccatcgatcgaactgttttctgctaatttcccctcttaatttcattctatgtttttttttcacatcacgggcttaagattctacctgcagttttatcatagtaataaaatttaaacactttgaacagaaagatggatcggttaacacactagcatcgcatgcgatccatttttcttgtttaactcttggatggaatgtcgagttaatggaactaaattcgtgagagatgaatttgtcacatgaacaatacacatgcatgcacgattagctagcaaaaagataagtagggccccttatttgcactttgccacctatagcaagtctcgtatcctcatcttctgatctaccaaactttacaattaagattacgtgcctgcatggtcgcctccgcaccatcctaatgcatgtatcttgaactggttagtagccattgttaattacatatgactcgtggaacatgatgcactgatcatttctgatgctactcctaagtcctaactcgtaatcgtcttgattcaatctgtccatgcaggcacgaaagctaagagcaagca

SEQ ID NO: 14483 - DNA, 471 bp, Brachypodium distachyon
  Intron number 3 from transcript Bradi2g35800.1 (locus Brad i2g35800) derived from phytozome v7.0 (chr-ID Bd2; pos 362 25519 to 36225989 reverse strand)
gggagaaagaatttcggagggcgctggtaatattgcctagaaactcttgttgattaaaatgtactcccttcattaaaaaatatataggacaaatgcattttcctaaatcaaacttttgaaagttttaccaagcttatagcaaaaggtatcaacatctatgataccaaatcaatacaccatggaagcatatttcaatttcatgatggatatagatgttgattttttttcttctataaacttgatcaaactttaagaagtttgacttaggacaaaattgattttccttttttttaatgctgggagtttttcggaacttgattgcattagagaaataaacggaggaacttatgtctcttttccatcaaggcatccaagtgacagttaagtgcttaatgctgtaatcttaatttcttatgtccctttttcaccacgacagagtgcctacaaacaagcaatccaatatagcaagag

SEQ ID NO: 14484 - DNA, 887 bp, Brachypodium distachyon
  Intron number 4 from transcript Bradi1g68510.2 (locus Brad i1g68510) derived from phytozome v7.0 (chr-ID Bd1; pos 670 78794 to 67079680 reverse strand)
ttacactccgtgtccagagcaaaaataaggatcaggtacaccaccttccaccaagatattcctgtgatttttaacaggctgtattgaactgaattaggattttctaaggagattaacatacatgtgatactgtaaatttaattgtgtatgagcctctcattttggtgaccaaatagaattgagtaatggcactttatgttgaaaatctggatgcaactggcatcttggaaatcttatttattaccaacggctttgttgtttgatgacatagcaccagtatccccatagtttgaagccattattcattatgtagttatgtttctcctgcggtagctggggaagggttgcagcgagcgaggatcacaatcttcatcttaatccaatgaggatgagcatttcacttgtagctgatctccctctttacttgcagccattcaccctccccgcctgtggctgatttcgctttgttttattacttcctttcaagttttgtggtgatggacaactcaaacccagatcatgagatgcagaaacacaccaccatgtctcgaaatcttattcagtcttttgtttctattttgctggaaccatgtttgtctgcaaggcacatgcctcaatatcttagcaccctatgtggtcagcagcttgaggcattttgccatgatgcatgttgtcctggcaattgccaagaatacaaatttggttttctaactttgtgtggtaacatgtactttattgtctcattgatttacaccatcacatggccagcataattgtgaaagatgtatgaactagaaaatgtgtggtactttgccattagcctcaaggttccacacttctgctgcaatacaggtcagacattattactatcgccttgttagacgcat

SEQ ID NO: 14485 - DNA, 797 bp, Brachypodium distachyon
  Intron number 2 from transcript Bradi2g09500.1 (locus Brad i2g09500) derived from phytozome v7.0 (chr-ID Bd2; pos 777 5029 to 7775825)
ggaagttgttggaccaagatcaagtaggatcagtatttaaatcaccgaactagctagctagtgatacgatgcatgtgtatatatatatatctttggcttatgatatgatgcatattaatttctgtcattttatcctgcccttctagccatcaagatttttcttaacttctgacgcaaatgcaacaaaaaaaaacttttaagagaaacttaggcatgtattgagttatagtatatatgtacttatgtgtttccaagtatgggacacattaatttttttaaggaacaataagtatgggacaaatagtttctttaatttcctctgcctttattccatctcatgtgcatctggagagctcatgggaatagtacaacgttaatcttcatactcgtattttgtttgacgagttagcacaattaaaccattcgagagctgttagaatcacaatagttcgaatcaagccagttcgtcaaactggtttgattcaaatggttcaattgtgctaactcgccaaatggccatactgcaacatacttgtaaaggaagcaacaaactacgtaaaatacaagaacgatcaaaacatttcatagcatcatgaacatcatcaattcttccatgcatgcaggcaggaatgtatcacacatgaattgttttccttaaggtatcacacatgtattgttagtaaatgagtaccatatgtattgtcttgttaactagctaattttgcattgctcattacgtgcatacatgcgtgcatatggcaggagacgtccgaatcatccacggagcagctgcagca

SEQ ID NO: 14486 - DNA, 969 bp, Brachypodium distachyon
  Intron number 1 from transcript Bradi2g35080.1 (locus Brad i2g35080) derived from phytozome v7.0 (chr-ID Bd2; pos 352 04616 to 35205584)
caaagaaaagagagaagctgagatatcttgttcaagtaatttctcagcctcaagctattttcttcaagtaattggctaacaaactgcagtactgtatcggtttcaatttgggttgggtcaaggcagggtttgtgccatggaccgcaattggcaataatttctcagcctatgaaatctcattctatgttcaagtaatttgactttgatttgggtgttcaatcgatggctcaaagttggattcagggctaaaattgtggtatttagtttcatgacccgtcggagcttttgacctttagggactggtaatcttttctgctggtgtatttgttgagatgtcaagttagtgctgctcttttgatgacattagtttatgcttcctgtttgtaatggacttggattttaatgattgaagctcggaaattttgcctggtaggagcagacggacaaagaacaatgatcatcgccagcatgaactagggactagagttattgcgtatcaattgcttgtttatgttgctaatcttgcagaagcctgctgttctgttgcatgtcctgttgatcttgactgcactttccatagcttagcccaactagagcctgtcatatgcaaattttgctgatggatgtacagtttgggccactccatgctattctacaccctccgatccataatatatgtctcagatttagtactcccttagacccatattacttgtcgcagatttagtgcaactttgtactaaatctgcgacaagtaatatgggtcggagggagtagaaagtcagtacaaacttgtactaaatctgagatacttattatggatcggagggagtaacatattagctacagtttggagttgctgtctcttcatggtttttgtagaagtatttatcaaatcaagttaagtaaaaagcttgatgttatgttttcacaggtgggattgtggtggcgcttgtttcaagagttcca

SEQ ID NO: 14487 - DNA, 850 bp, Brachypodium distachyon
  Intron number 2 from transcript Bradi2g35080.1 (locus Brad i2g35080) derived from phytozome v7.0 (chr-ID Bd2; pos 352 06490 to 35207339)
aactggagcttgttgaagtcgttgctgatcaggtaattatcgatttcatttctgtctgttcctctatacttgtaaccaataacttatcgcttacttctagttcatggagtttagaatccaagatttgaagagaaatcattaattgaagctgcaacaattttgagctattaagtcattttattctggtttgaattgaagtgtaaaacttaattgttcttggaagttgtattgtgctagtatgacttattgtcctatctatcttcctttttcctctatgatattgcttgcgagtaatcattttatgtcctgagaagctctgtaaaagccatttagcacttgtatgaatccttgatctaatcattatatcctgacaagctctataaaagccattcggcacttatatgcatccttgatttaatcactacaagtaattctgctgtcaccagtaatattttcttttttctttattatataaataattcatgcatttccagctaattgctatcacgaaagatgtatgctacattcctatagcctttttctgagtttaactatttgtgtcttccttcctgggcatgactgatttttttcatctgattttattgtgactgtggtataatcttgagttgttcttcagtttttcctcaattcacttgaattacgacaatcatgttcttgagtagcattttctgtcaccagggggcctacaatgccactatttttcttcagatggataatttgccatgcaatttgtttttacaaagtacattccactacttttgttagttattataaagataataaccacattggctcatttttctcatttaggtggctgttgcactgtctc

SEQ ID NO: 14488 - DNA, 847 bp, Brachypodium distachyon
  Intron number 1 from transcript Bradi2g03430.1 (locus Brad i2g03430) derived from phytozome v7.0 (chr-ID Bd2; pos 250 3107 to 2503953 reverse strand)
gaaccaacccctaatactgtaagcacccttttcaattcaattgactttcattttcatgctgttcattccatctcttcttctacttttcactctctctttttcaaatataaaatgatgcgtccttcttgcaataaataggtataaatagctagaaaacaaaccttccaaattttcaaagggaaaaaatcaagtgcaagtgttgttggcagcgtttgatttgcatgagtcctaggatttggagttttcttggtgcttgtttgccatatacctcctggtttgtccccgtgcgtacgtgcaatattgcattgggaattgtagcacagcaaaatgacaaatttagagacaggaatggaagaaacaaattaatgtttgaatatataattaactggactcttgtttgcagtgaccagttgagtccagatgagcttgagctactcctgcagtcagcacaagcccagctccaccataaccatagccatagccatcttcctgctgctgcttctccattaacagcagcagtagctcctcatcagctcagctcactgctgatgatgcaagagctagggttccaatggagcagcgccgtcacagagacgacggcagacacaagcagcagcagccagcagcatcaagatgcagtactcaaagacgatgatcaggaggaggcgcccaagctagcatctgttggatcccttattaatagctgccggcatagatcttcgccgatgaccgttgattacaacgacatcgtcgttgaccacggtggtggcggcgccgtcgtgctcccgagcttcaatgtctcgctgatgcagaagccgtgcccggtggtcggcggagaggcgtttga

SEQ ID NO: 14489 - DNA, 634 bp, Brachypodium distachyon
  Intron number 2 from transcript Bradi2g33480.1 (locus Brad i2g33480) derived from phytozome v7.0 (chr-ID Bd2; pos 336 14285 to 33614918 reverse strand)
gagggctcaaggaggagctaaggatcctcaagaatgtaagaatctggttgcgcataatcctaattgatgatttttcatacttgtgaagttgtaaccgcacttaagaaggatgggctaataggtcaatggagaattattttataggttatgattgaaactccatattttttattcttagaattatttgatttatttttatttgtggtccttcaaccttttctgagggatctataattgttggtaaaggtcctaatagacacttggcaagtcaaaatatggactggtgggaagaggataaactgatgaagtagtgagggtttcagagttaggctacatatttctttctaaccccctttcccttaagtgttaagttatctaaattgtcattacagatgcatcttaaaattgtaatgaaaggatgaccttctgtttcctctgaacacgttactggtagtttgtccaacactattttcgtaacaaaacagaacctattttcaaatacggagtagttctttgtttgtactcgatgttcagttatttggaagcgacaggtcccatattcacatgtctacttttgtttctgttcactatttgtgtaggaggacaccaaggcaaaaatcatcaacggaaactc

SEQ ID NO: 14490 - DNA, 780 bp, Brachypodium distachyon
  Intron number 1 from transcript Bradi1g57770.1 (locus Brad i1g57770) derived from phytozome v7.0 (chr-ID Bd1; pos 564 99701 to 56500480)
ggagaagcatctcctgcgaggttggtatgtagatctgcactgttagtttgttagtattatatattatacccttgcatgtgtgtcttccctccatcgtctatcaactcgcactgctcacaatttcaagctgcaaaggtaaaaccctctacaggccttccatttttttttcttacctagctacctctgtgtttccaagggctggaggcttgcccttctgctataatttagaaaatagtcgataattttttaaggctgtgtgcatcaggtcatatagaggccagagggatgccctccttttcagaaaaaaagaagaaatagtccttaattttataaatgccccctttcactatccaacaaaaaaactcgcaactttttagttctcctaatattctgaaatagttttttttttgttttcttatatttttcggactagttaattttataaatgcctcctttcactatgtttatgtattttttttttacctttactgattgtcctttagtaattcctttttcatcttctgaattttgcctgatgtttttgtgctgagaaaccactactaaatcattaatcatacccttttgagtaggatcaaagttttctggggcttagttgagggacagaaaaaggcattaccttcaaagaaaaagcttttggagtatttctttgttacctttgtagatgtgaaaagctagcttgtgtgctaaccagcatcatagaaaaactgtgtaaactaacatataatgaatttgataatgatgatgtcaggctctcagctc

SEQ ID NO: 14491 - DNA, 1044 bp, Brachypodium distachyon
  Intron number 1 from transcript Bradi2g11150.1 (locus Brad i2g11150) derived from phytozome v7.0 (chr-ID Bd2; pos 936 4843 to 9365886)
gatccaagtgcttctagttcgtctttccaacccatgtaagaggggatctctcaggacacctatgtgcatctcatgccaatcgattatcgatccatgtcttatgagttttcatttactttattgttgtaagggtcccatgatctcatccagttttagatccaagtcatgtagtgtcgtgtaacgatgtcatgctcgtttgttctccgtaatcagaattgtttcaagttgaactttaatgttggtgtgatgtttgttctagttataatttccatctgtatccctttgctttgcttagatcaatgaaatatgttgttgtcttgttaaatatatgtaacggttttaatttgttgctggtgcatttgtaaaatccaacacatctctggcacatgggagagacatatgaatgttaatcttagtgatattatggggcatgacatgcatgcttggaattatgggggactccatgagagaatcatgcgacaaaagtccacaagcatgaatggcctcaaagggaaaggcaccttcttgttaggttatatgctgctccatgtctcaacaatgcaaatggtatttttcatcgcaggtcctaaagatatgttcccgcaaaaagaggaagatgtgtttttgttaaaatgttatatactccaagccatttgattggtcacgatattggtaaaagaagctagatatcatttcttttctggatttgtttatttactttaactttgcaacaaagcggctgtgtgcattatttcgatgcagacgctgggagccctcccctttgaaaaaaggtatttcttttttaggaactgctatttcacggggaggggggggggtgagaattaattaactatttctcaattgacccgcaagaccatcggatttcacgcagagatctgtgttgttttttcttttctttttttttaattccttgcaagcggcggctcacaaatctatatatgtggatttttctagttactggaatgcaactcccctgttatttattcaggatctttaaggatcaactccaagttcctttctcat

SEQ ID NO: 14492 - DNA, 527 bp, Brachypodium distachyon
  Intron number 2 from transcript Bradi2g31580.2 (locus Brad i2g31580) derived from phytozome v7.0 (chr-ID Bd2; pos 313 90296 to 31390822)
gttctccagaaggccatctccgaggagtacctcaggtgagatttggatgttttttttgcgaggtgtagattgtaaagaaattacgggtgtggaattagaattttggggtttatgtctggatttggatacgaagtggtgacagctcagttactcggattttacacgaaaactagtgcagaatttgggttaccggctaggtccgagtccgaggtgtggggaggtgagcttatcgggacttgtcggttagatttgagatataactgcctggttgaatttttcggacaatgagttgctttatctgttcattctagtaaatttaataaggagtagttttcaactgttgaactttattgtacaaatcttcctcttcatatgtgagacagttcgtggggaagcgagtatatgcgctgcccgtttacatatttgattaatattttcagttagtatacactggtttctttgtctgtacaaggaggattgctcacatggcacattttgttgcattaggtttgagccctaccttcgga

SEQ ID NO: 14493 - DNA, 599 bp, Brachypodium distachyon
  Intron number 1 from transcript Bradi1g72120.1 (locus Brad i1g72120) derived from phytozome v7.0 (chr-ID Bd1; pos 699 35907 to 69936505 reverse strand)
agctggagaattcctctcttcgggtaggttaatgccaattgtaatttgaagttatctaggtgttattggttctaatctggctgttctattttcaatttagcgaagctaggttttacctgttgtttgagttaagttgtttctctctccatgaaccaaatattggggaatggtgcaaataagtggcattttaattactaacaccgtgaagctagtgttgcccttttcgttaaaaaaagagctagtgttgaccttttcttgtataatgaattgtgtttcctcttctgttcacaacctaatactgggtaattgggaaaataagttgtcagttcatgatatgttatctgtccgtgattcacagttcaggtaccttgcctaattcacgtttggaacattattttgttaccagcggagttatcttaccacagtttgtcatttcctattggttggatcttcagttacactgagttatgcgaatcggcactgtatattttatcttaagctttgctttgaaaattttgcttgtcttgcttacttcctttggctctgttgaatgaatgctatcagcagctctcagcagcagcaacctgagccgaatttcc

SEQ ID NO: 14494 - DNA, 755 bp, Brachypodium distachyon
  Intron number 4 from transcript Bradi2g24150.2 (locus Brad i2g24150) derived from phytozome v7.0 (chr-ID Bd2; pos 219 96543 to 21997297)
gacggaattctgaccaggtatgcctgtcctatcacacagccaacttttaaagatttcttttttaagatgttcaatatcattaattaactatgaaatctgcacatggattattcattatatcctgtcagttgttatcttgtagattccaatttggcaatcagttatatgatactacaactcacacttagttgtggtagcagttgaacattgacttaagaaaaatgggtttttagatctcctatgttcaggttgtggaccaaagattgaaataatgacatgctttcttaagttatcaaacactacctttgacctgtttgtgacctcaactgcatccaggaactctcctttttgttttcttggtttattcaatgggctatctaattccctcagttggatcaaatggttcggtgtgttgccatatttccaaaagtcgcctaaaagtttgagatatgatagtgtaaatttgaattactattttaccatagaaatgtataaagatgccactagatggtaggtacacaagattgtatatcgaaattggacggacggttagctatatttaatatattcccatcatttcttttcagatggctgagttaaattgcatactatattgtactggctcttatttttccaactagatataccctattcctctctatttattcttttctttctcccgttcttctgtctcggtgctcgtttgctgctggccctcaggactcagaacccaaccgaatcctcttagctactat

SEQ ID NO: 14495 - DNA, 788 bp, Brachypodium distachyon
  Intron number 4 from transcript Bradi1g55410.1 (locus Brad i1g55410) derived from phytozome v7.0 (chr-ID Bd1; pos 538 53868 to 53854655 reverse strand)
tcagtatcggtcgctctggaagtctggatctctttgtagcatagtttgaagaactgaaccagtgatcgaactggtggaaatctcggttcaggattttaccgatcgaaccatcggttgatcggttcaatgtccggttttttaagatataaaatactccctccgatcctaaattgttgtcgaaatattacatgtatctagatacttttaagaatagatacatccatatttgaacaaatttgatttaagaatttagaatcagagggagtaatatatttatttatagatgctgcagtaaacagtagataaaaatatatgctgctaaattcaaacttggttcgacgtattaacaattgaaaaagaaaaaaatatggcaaacaaatagacctactactaatagtacaaaatctgagatatttattatggatccgggtgagagaatatgtaattttccaggcgtacaaattttattcaaacaccagtacatacacttattatgggtggagtgagagagtgggtaatttcccaggcgtactggagtaattttatcaggcacaatactcttttttttttagaaacccaggcgtcctccttttttttcggaggggagcccagacgtcctcctgtatagtggagtctggccatcgaacgcttagaaactcagttgggtcgaaacttatatgggcctgagcgcttgcagtcgcagccttgtgtctagcttcgcaggcctatcttaaattcttgtcttgattttagtaccacgacaagattttaggatcggaggtcgcagc

SEQ ID NO: 14496 - DNA, 627 bp, Brachypodium distachyon
  Intron number 1 from transcript Bradi1g61560.1 (locus Brad i1g61560) derived from phytozome v7.0 (chr-ID Bd1; pos 609 15219 to 60915845 reverse strand)
cgtggacggcggtgatccacctcgacgacgtagctgtaagtactgcaggcgtttttgcttcttcagtcagtcgtactcgtacgttactgcacagtggcgttttgcgctggaaaacagctagcagtgcactttacagtaaaaccgaaattcttattgcaattggggtaacctccaaggtctctctagtcaagcctttaattttttagcaaggtcatgacagggtggtacagtttttttctttttttaagtttcgtgacggggtactcctgcttagttgcgcacacgtacgcacgctagttttgtagcactagtatactatgcgagaccctatactaataagtatgtttttttcctagcaaatgaacttcgcaatggtaaaaaaatttcaaaaaagattttttgaacgcaatgtgtccagtatacgtaaataagtgtatggtaccacaccagctaagagtaaaaaaaaaacggaaatcattaattaacttttagcagaactcaaattacagaagcatgcataatatgcattcatgtgctatttcattccaaccagctaaataatctcattgatccaacgatgtcatccgtgcagtcatctttcctgccgggcacaggcggcggcatcag

SEQ ID NO: 14497 - DNA, 1019 bp, Brachypodium distachyon
  Intron number 1 from transcript Bradi2g07660.1 (locus Brad i2g07660) derived from phytozome v7.0 (chr-ID Bd2; pos 599 9488 to 6000506 reverse strand)
agaaagaggagccgcaggccgcccaagagttcaaggtactactccccttcgttctggtttactcgagggtgccgccggggatggcagccgaagaactcgagggtttctggcccttttttgttttgttcggtaatccttcatgggcattggggttgtttggttggggagggtcaggccgagaagaatgtgaggggaggagttgaagaaatgttttgcttggaccccttttcgttcgtagctagttggggtatttctgtacagttgagaaaagtgtgcaggggaattctctgtgtttggagttaggatgttagattattttgagaccatctagggtttacgatttgtccgatttttatagttaaggagattaaggagatcaatattctctaactgccatcctctcaccatctccatttgcttttccttttcctttttgcctttctgtgggtacaaagtagggcactgcttgtgaattctctgtttttgacataacccctgtgaaattcgagcaccgatgaatcaaggaaaggccaggtcgttggtcagtgcacatatactccgtggccaaatagagaaaagtcgctccgtagctttcttccgtaactaatttttcaactgcttgtcgttggctatttattagtcagcagtcgctatttctcgcaaaaagacataaacttggaaaatatcataagtagtatatcatgtaacgtcccaattttttaatgtgttttttcattcttctaagctgtactaattcacaggttcctctctggctctctgttcctatccaggctcttgaatccagacaagacatgtacccattttcttgaaggaaataagtttttaaactggcatctctttcacgcataaatgataaggaaccaagataatgcaagttgtcttctttctaatttttaccagaagatcatgcttgctcacttgaatttttttagtatatattgtctgactattcctgtgtgctcattcgtctctgttctgtttatttcagaaaacagaat

SEQ ID NO: 14498 - DNA, 1018 bp, Brachypodium distachyon
  Intron number 1 from transcript Bradi2g09570.2 (locus Brad i2g09570) derived from phytozome v7.0 (chr-ID Bd2; pos 787 0782 to 7871799 reverse strand)
tgggaggcctctgttgcaatcttcttttcattcgagtaagctatgctctatcaaattcttctttactctaaaattggccgcaatgcagcatctgtattggaccacttcacctttcaaacagtacccattagattgaatgaattcaattaaaacaccgatacttggatattaaatatgaaatatattctttgttctagacacctattagttggaaaggtggaatttggtgaaaatgtgtgcactgttccatgaaatgaaaaggttctgtttcgtggaaattgacatttgcgtgacattctttgaaagttaaaagtagacgtcattcaataactcacatcaaagtgtggatgatatacttgtatttctagttatgtatgcttgaagttgcattgataggatgccttactatcaaaaacttaccggaaatagaatttcttaggttgctacatattccatctatttatcataatcatatatatagtggcatttatacaatgccttagtatgaataacttaaccgaatagggtttattttgtgtacgttcttttgtaccgggtctaacacttttctagctaagtcatcagttaatcatttcagttggtgcatccactaaggcatgtatagttccgtctagtatgcttaccacctcgttcatttgtatgttacggttgttaaatttcaggatctgagtccagggacttgttaaattatgtatataaatctgtgtacattcttttgtaagcagcacaataatcgaaggtggtgcaaatctagatctgaatcgtttaactataaactgcatgagtaccagcagtagaatttatttattaactattgcttctaaagcatgggtcatgcctttttaggcaagtcaccatatcaactagtttttttatttacttgatgtcatactgctattgttaatgttatgaatatctgcatataattcttcatgtgttatttcaagatactgagattcttcgtagctcaaacatgtgtaaattatatttcaggtat

SEQ ID NO: 14499 - DNA, 768 bp, Brachypodium distachyon
  Intron number 1 from transcript Bradi2g39230.1 (locus Brad i2g39230) derived from phytozome v7.0 (chr-ID Bd2; pos 393 51091 to 39351858)
gattctgttgtctatctgcggatataccgaacagggtacgttgcaatagctttgttattaactctttgcacctgtttgtcccagtcgtttattgttcattggtttttattagccaatcattcatttggaacaatgtgaatttgtcgattagatgataagcattttgtatgaaaaggtaaaatatgccgttgatagtgtttattatcctagtaatggttttatatatgtgccaccatgaactctttcacttgtaacatacctatttagttcactatattccataaactgtgaagagagtgaaattgatctcttttctccaattaaatgtttgattctgtgaatctttggtggcagtgaaccttttgatcattcataatcttttaaggggataaaccgagagtatgaatctcaaatgctttgtgcatgcatgttaaatggaactgtgtttcataggtagccaaaatttactgcctccgcttgtgttgttcctgaaacttcaagtctttgggttgcattatccttttgagttttactttctttcttttagctgtatgaagcacacaagtttctactatgcaatatgttttcttcccttttttttttaatttcaatgtatctggaatgtcaaatgggcctaggtatatagttgttttaatccatttgagcttgccatcctttatgttcctgtcgtctgatgcctttatgctgataaaattttaaataatcatttcaggctgaagatatttgttccaattacaattcttgctt

SEQ ID NO: 14500 - DNA, 800 bp, Brachypodium distachyon
  Intron number 2 from transcript Bradi2g04820.1 (locus Brad i2g04820) derived from phytozome v7.0 (chr-ID Bd2; pos 343 1349 to 3432148)
ggaagcagacaagaggtgagtttcatctctctgcttgctcccgtcttccagtgtatctccgtgggcagattgcttttgccggggaaacatatcgctgcttaatttcttcttttcacttcttcaggcattcctccttttcgttttgatatgcttgagaaatgcggcgttctacgtgtttcttgaaatttcctcgttcctatatcctgtccgcttgatgattttcgttcgcaggttgtttccttcgccgttttagcattgtagattacatcgttctttttttgtgattttttttttggtgatggcgctgcccctcctctacccttttagcatttgagattagattatcggtttcagaacagatgcttttagattattccttaaaaaacaagtgctttttatgtctgttgagtttcttgatttttctgattccctgttctgcacatttatttcttctcttgcaaaagtcgtcaccttttaccttctttctatgtttcttttcgcccttttctttccccggtgtagttttgtttcttgtgtatgttaccttcgttccttgcaatgccgctgcgaactcgctccattttctgagaatttaatgcttctgtactatagtaatccaatgctctcctgtcctgttgtttgtcagtgcctgcactgaaaagcttccttgtgggttttctttatggaataattttttcataggaggatgcgtttaagttctttcgtgccttcatcctaccttgatgacctgtatcatggaactaatgtttgctatgtgtatcgcgggtgaagcagcttgg

SEQ ID NO: 14501 - DNA, 756 bp, Brachypodium distachyon
  Intron number 1 from transcript Bradi1g54650.1 (locus Brad i1g54650) derived from phytozome v7.0 (chr-ID Bd1; pos 529 90345 to 52991100)
cgagggcttcgcgtcccgtcccgccgaagagactggtgagttgccgagctcgaccttcagatttgttttgcttaatttggtttggtggaattcgtgtcgatgttatttgatttcatttagtcatctcgtgttcttcctcaattttagaatcggcttttccctctattttttcttctagaatcgtctcaaggagatggattgaacattgaagttggtaggagcgaatggtttggtttgttagtttggaaaatggaagtcatcagctcagtggtctaattgcgtggagtagatagcctagattggtggtatttggccaaaaaatgtgcaaactttgacgagaaacttctagagaggtttccgtttcttttgcgtccttgagaatgtttctgatggtgattgtgtttgatttgtcaaactagcgaaatattaaaagagtcacgttaacctgcaaccgcgtttgagcgatacatgtcgagtttgactttgacgtggcggtgggtactttgaactttgctttctcattttctttgccaattagtaaggcaagaacactaataattgattgcttagttttgcatctgttgtctaatttgttccattaggtggaacgaatctagttgagcgactatttttctttctgcaactaatccattttcaggcaattcaccgaaaagattatttaaaaccagaatatcatgtaccggcattgctttgcaaaattgacattctaattgacattgtttggtcttccagttg

SEQ ID NO: 14502 - DNA, 509 bp, Brachypodium distachyon
  Intron number 3 from transcript Bradi2g10020.1 (locus Brad i2g10020) derived from phytozome v7.0 (chr-ID Bd2; pos 820 6863 to 8207371 reverse strand)
atctttgtatctttcctctcagctctcacctacaggtttggcttccgcgactaactctgcccaaagttgcaaccccgaaacatgccacacttctactgaatcttctcccggcggtatctctgcatttgtttcttggaatctttctttgcaacacccaccatgtattttattcacatttggctagtgtaaagttgaatcaaatagacagtcctgctctatcacagcagatggttgtttggcgtgagttcgattagtggccatgtgaaacttggttctttctgcttgtctgtggatggctactttcgtggttagtcggatggcttttccatttgtttacttgagatgattttttttgtcactttaacgcacatcagatcttttactaatataatttcagatattttactaatatgatttcagatatttacggtcatgtcctatatgaattaatcatgaaatttttgttatttgcaggtttgccgttacattccttgttccccttcttgtat

SEQ ID NO: 14503 - DNA, 905 bp, Brachypodium distachyon
  Intron number 2 from transcript Bradi2g24340.1 (locus Brad i2g24340) derived from phytozome v7.0 (chr-ID Bd2; pos 221 54896 to 22155800)
gcaccatcgttgcctcctccgtcctctacatcgcggtcagtttagctaattaactccacacaacgcctctgtttactctactccatctccagttctccatgccattagatgggatcatgacagctttactgatctttctttgtcatattagctgcccacgtgctaatgctaccttcgtgcgacttaagatttgagaaaatatcgcacgaatggcgcatggaacttgtggtagtatagaactctgaactaggattgatcagtctccagagtccagacgcagttagttgagattctaagagagatgatattttcgttgatactgatgtttggatcacaagtagctctcgtgagttaatgatcgatagcgatcgaacaagcgagcccagccacccaagcgaactacacttttcaatttgggactacgtgtctgccacaattaacatttcactagagaaattgttcacgcatactacttaccatattgtttttccttttgcaccgagatctctttttggttacaatttacaacaaaacaaaaggatggcagcacccacgagtacacatatcaaattaacgaccaatcacatggattgactgaagaaattttccatggaaatccaatagttgcaaattttggttttggactgaagaaaatttagataaattgctatactcttaaattttgaaagatcgctggattgctgtttaaaagagacaattaataggagtagcaatgttgtcactagtagtagcatcgactggaagttgggctccattttgagtaaaggaattctatagaaatttggagcaattgtatcggcgattgcaacttctgtacaaaaaaaaatacggagtacatgtttctattcttctcatccgaggtgataaatcggcagggactgggc

SEQ ID NO: 14504 - DNA, 822 bp, Brachypodium distachyon
  Intron number 1 from transcript Bradi1g58810.1 (locus Brad i1g58810) derived from phytozome v7.0 (chr-ID Bd1; pos 578 89225 to 57890046 reverse strand)
agaggccgtccttgcaaatacccaggtactacatatatgctaattgattaatacatcgttctccatttcaacgtaccacgatttcagaattgagtggcattgtcctgattgaatgtggtcgccgaccacaacatgctcgtaggaaattgtgatcttttaccacgcaaatttaatttcgtcttgatctgtgacctgttgctctgtcaggggaataacatgtgtatcaagctgcaacattttgcttgaattggacaatttttcttttcgttatgccatcgtaatgtagatgaacctctgcacaatttagaatgcaacagaagatgtccagggttccaatgatctgcatgtagaagtagctaatagtttgaatcctgctatgattgtttggctgctgctgctcgcgttaattataggttatggaaattgagggacaggagcttagaattccaaacattctctgaactggtttgttcatgaacatttagagtagccatacaatataaactctagggtcggactgtttctggtgttctcagcattttcggtcaaggatttagcccagtcatacactacgacacctggtggaagaacaataatcatggggtgatcagaacgacttggtccttttcctctctctttttttttactgatctgcgctatttccatataatatattaagatgaataatttctacttttcaaagaggctgctaatggccttcaagtgcagctgtatccaaacctgcattctccttgtgtgatttcgattcttaatcttgttcttacagggtgacgggtcagattgtgcaaaagtttcctgagc

SEQ ID NO: 14505 - DNA, 1034 bp, Brachypodium distachyon
  Intron number 1 from transcript Bradi2g35020.1 (locus Brad i2g35020) derived from phytozome v7.0 (chr-ID Bd2; pos 351 72295 to 35173328)
gaccgcgccgcgctcgtcgagttctacgccccctggttcgtggcccccaccctcactcttcctcctgcatctctctctccccccctctgatccgccacggcggcgtatgtatgtgtgtagtttctacctatgtccggatcgttctgatcggctgtgtttggatcgccgctggatccgcggaaatggtagcgctcgctcttgggcaatccagcagcctggtagattctttgggggtttacttggtcagtgggctgtttggactgggagaaatttagatctttagctgaaacagcgatctgcctggttcccggcagctacagtgcgtttgaatcccctattggggtttttgcttccatttgagattccaatgttcggctctcagatttgttcctattatcagatttattccttatatgtagaaagtagagtatcaaatccccgtggtctggtgatcttagatttagatctgcattgccttagcacgagtgaagcatccagcttaagggtgatatattagaatgtttgaatgctttatccactttgtatgttaggataactttagtttggtactatttggatggggtcttttggttgaattggttggtgcatcaaacaaaatatggtatcaaagccaagtactcttgaacccatgaccacccttccttatcagattagaattatggttcatatcatttttaaaaacttgcacttataattcaatgggttggtgcatcaaactcaacaacgataattaaaagcttacactaagccatcatctgatgaaagctgcagaacagatcgagcaaccctagtaaacattaacaatttttttgcggtgatcaccatattggaacctattctcattgattagagaaatcatgtatacttttgttcttcgtctcgtctttacaaccttgcctaacaactctatttttccttcttggatgcccttattcttacactttttttcattctttgatatctttgttttttgtttcttaggtgtggccactgcaagaagctcgctcctgaat

SEQ ID NO: 14506 - DNA, 1034 bp, Brachypodium distachyon
  Intron number 4 from transcript Bradi2g14650.1 (locus Brad i2g14650) derived from phytozome v7.0 (chr-ID Bd2; pos 131 76025 to 13177058)
gtgcaaggtatcacttctcctaaactttgcctactcagatgatagattaaacatcaatcccacccatctggttttgatcctagtgtatcgatctaaccgcctacgtgttctcttaactgaatattagacttcctaaccaaatttggaagaaaaaaagataaacaagatacatgcatggtactgctccatgcaacatgaatgctattttttttttccgaaaacgggcatttaacatgcatgctatatgcctgtatgttgtgtaaatgtataacctgccataaaccacgcacatgtcaaacaaccaaagaggattgtgattagataatcgcaatgtaacactttattcccttgcatcttttagcttgaaattaatgattgacatggcctccttttttgcatgcgtatattcctagtattgctttactcagaaactaaatgatttctttgtcctacttcacacctaactatcttctcaaggacatctgtaatgctctcacttttcattgagtaagtggagagcaatgtcaaatatttctttgatgtgtgcaaatgatatataaaatatttcccaagtgtaggttcatgcaagatcccaaatttcctatcaccctgtctgggcaaagcacgtaaataaagaatgacataatttatgataggtttatgatttggcaatagattagagtatcttggtcttgtcatccacttatatagagttcttaactgctaccatttgcttctggagccaagcatctaaaaaattaagcctgaaagtatgctttttagttaaaaagaaaaggctacctaaaaggaaataggcatctttctaataagtaggaatataaaaagaccccagccaaggactaatttaggcagcacgtgcagttcatataatctgttgcaagctggaatggaatatctttacctgttgctgctgcaatcctattcctgaatcttgatgcagtgaactaaatgtattttgtccattctgcaatttttcagctggtcccagctcctggattcccttcccttgccca

SEQ ID NO: 14507 - DNA, 846 bp, Brachypodium distachyon
  Intron number 1 from transcript Bradi2g27190.1 (locus Brad i2g27190) derived from phytozome v7.0 (chr-ID Bd2; pos 260 04481 to 26005326 reverse strand)
tccgcgcccatctggaagagcagaagatcgaggaggtggtgatctaacccttcataccctgcccttgattcatctgtctgtttggaccaggcttagccgatccgcgctgccggatcgcgcatgtgtgctgttctaggatgcgttttctctctttccggggctctgcgcaggccagttttggtagatcttgcaggccttaggcttttggctaggttggtgatgcttggtattaggtgctaatccgtagtaaactgcctttactgccgacttttagataggacgaccgaaactcttgggctgcaaatggttggatctcctgtacttctaccttttactgcggatatcaaggatatatctatgcccttgtgtaattgcaggcaacatcatgttcactaatattattatagcctttgcagcatatatgaactagaaatttatatagagagattactgttttagactatcatcacctacaatgtgatttggagcactgaaaccagctggctccagtttttgcaacacagtgtgtccggttacgaagtaggcctgagtgtagactgacagtaaagttgaggttgttgctagtgagaagcagtgcttttgctttgcagggaaaattaagaatatgctttgccccatttccattagaaatatatctcttaatatcctgactaactttagagtaacccgcagatcttttgatcattgtgcttcttggtcaattacgaatttgctttcagatgttcttggcgcacatatagtgtttctgttcatatttagtttctctttttaccattgcctgtcaggtaatcttaactggtagaaatcctttgtactttcagggag

SEQ ID NO: 14508 - DNA, 854 bp, Brachypodium distachyon
  Intron number 3 from transcript Bradi1g54330.1 (locus Brad i1g54330) derived from phytozome v7.0 (chr-ID Bd1; pos 527 07939 to 52708792)
tcttaccatctggttgccgaattggtattgacccggtgagcttttgttttgctttgtgttgcatgagaatttacataagttgtcactgaacttaccttacaaaataaatacttttgttagtatgctttatatcgtgctcattgatgatgctatgcagcagttgtttgtttgattttagaggcttcttcgtgctgtttttggagctaaaattcttacttggccatttcattagaaagtgatacatggatgtcataagggaactatgaattgctggaactgccatatcatatcctgaatttaatcttatttgcttcatagcacactgccatgtaacagtaatcttaagatttatgatctggtcttcttctttcattgtaattttttgtagtcatgatacctcaggttctggatttacaagccatccgtctttcgttgtattattttttgtattcatgataccttcaggttctggatttacatgtctttgtaatatgtaacaggtaccattaaagaagtcataagttaacttctgaaacagaaatttacggtagtatttagttaattacatatctacaaagtcttcttctttcctcttactcgttaaaatttacattcttctgcggatttgtgtggccttcttacttagttactcacaaaagacactatgctgaaaaatgggctaggtattaggctttttcatgttatattctttttgttattattccccattggttacgtcatacattgctggttctttcaattgtttttttttgtttctttagcctaatctttaatcctttgtttgcttgaaggatgcagtttcttttctcatttgacgctgctgaggaattgaa

SEQ ID NO: 14509 - DNA, 840 bp, Brachypodium distachyon
  Intron number 3 from transcript Bradi2g36700.1 (locus Brad i2g36700) derived from phytozome v7.0 (chr-ID Bd2; pos 370 27959 to 37028798)
gtattacttggaatatattgactatacagaagaaggtaagcatattgttaacctggctctatttttttatgcattttctttcttttgcatattgatttactttttatggtttgaagagagattgtggaggaaccgcacacactaaatcattttataactcctctcagaaagaaactctcgcaagcaccccttttttcattgtggtacacagaacttgtatgtcgaaccttggatgtatagtccatgtatacaccaggccctgaagccagctggtatatttttctgaaagtggaaatgctaattagacatgttttccatatctaagtgggaatccccaaaacttcaacaaaacatgtactgtgttgtatgattctctttaatttgagtgtttgtcaatccagaaacatgcccatgggttaaacttttcaatgtagctcttccaacccagcaggaaatcatacaacataaaatctgcatcatgtgtgtcttacaaatcatatggaactgcttccaacagttgatggatcatctatggctgtctattcatatcccacctcatactattgtcgcaccaaaatttaatccagtgtcctacgaagcatgtggtttcttgctcaaatcttgtcttgtctggaagaagtggcagtgcagtcggtgattgtaacctcgtaggataaattctgtagagaggcttagggctttttgccgtgatttattttaccctcatacagtcatactgttgacaatatagcagcatatcttgctcatcacaactatgaacgttgattttatgtacgcctgatgttgttactccccaaatcattcctttgcagccaagga

SEQ ID NO: 14510 - DNA, 919 bp, Brachypodium distachyon
  Intron number 1 from transcript Bradi1g62020.1 (locus Brad i1g62020) derived from phytozome v7.0 (chr-ID Bd1; pos 613 19191 to 61320109)
tccgatcccgccgccacctccacctgcgcccactggtgcgtgcccctgttcacgcaatcccgcttcgtgcgactcggttacccgttcctgttccttggagtgcacgcgcgcgcgcgtgtcggtcaggcggattgcccgctcctgtggtctcgacgttttggatctgagcttgggaagatccggttttgacccaggatagtttgattgacctctagagtcaccgacccaggttgtttgttatttatcacacgatcaaaagaactttctcggtctgcctaagggatttgcgtaattgctactaataagccggcaggattggtgaacatcgttacttctgaataattgttattagtgcagattaatgaaaaatgtttgcacgaagcattattgttcatgtcctagtacatcttgtgccaccaatgcccgggcatacttgctatttatttccatgggaagcttggaagacgaaacacttcatttatgctcggtcttttttacttagggagggagtggatggagtaggcctgcaaaactgatgcttagtcaaagtaatccaatgttagttgggaaaacaagttaaatgggattggattgtgatttgtgatcattgatggcaggagattgttgatgcatttctttatattagaccgtagctgcatttgatgtcatttgcaccctttggcatcatattctaaccacgtatacaatggatgaacataatgttagttggtagaactatgtgatcagcagcttttcattctcaaacttttcttactactactctcagtccagttctacgcaattaatggcttctttacgctggtagttctcttgagataacaagttggttacaagttttagtttttcattttgcttttctttagtcagcgagaaataccatcgtcaaacatcgacttgc

SEQ ID NO: 14511 - DNA, 577 bp, Brachypodium distachyon
  Intron number 1 from transcript Bradi2g21960.1 (locus Brad i2g21960) derived from phytozome v7.0 (chr-ID Bd2; pos 194 24540 to 19425116)
caacgcgcaacggtccgtacgttcaacattccgttttttcgaaattaatgaatagaaagggagagacaaaactccgaattttaagatcaagcccaactgatgcaataggagtgccccaccccgtttttagatcaatcatgcaataggaatgtcctagtaggcaagtctatattagccagcgttactgggacgccccaatacgattttttttgctgcatatggcaccccaaatacgtgtcggatacctagtatcatttgcaatgtccaaactgtttttccggatcggaatcggactcccgaatccgtgcggatgcttgcacttgtgcccatgttcaagtaacactggtattagccgaagcattttcttccaatggccttgtgtcattttattttatttggcttccagtgcagtctgttggaatttgaaaatgctagttatgatttattcaaagagctattttttcaaaataatactatgcctttgctcaattaatctagttatgctcaattatgacgaagctaacctagcggagtcactttgatgcttgtaggtaccaagtctgctacagatagcagc

SEQ ID NO: 14512 - DNA, 722 bp, Brachypodium distachyon
  Intron number 2 from transcript Bradi2g05570.1 (locus Brad i2g05570) derived from phytozome v7.0 (chr-ID Bd2; pos 405 9536 to 4060257)
gctctgttcgcgtttgggactccaactctggcaaggtagctgggctatccgctctgggcattttcctcagctctttatgcacggttcaagttggggttgcttctgcgttggttcctgtatcacatcgtgttggttgatttgttctgcctgcctgatcagttggggagttctttgattgctttgtgatggtcagtgtgtctatcagtctatggcttcaaatcgtctcttgaccgttgttgttgttgttgatgtgtgctgcctgcgtgatcagatggtcagagttcctctggttgcttctggttcaaattggtctgccttgcctgcggttatctagatgttggactgattttcctcagagatcttcgccagtttgtggtgatcgtgtcccctggatcagtttctggagggtggaggccatcaggctggttggctggcaagcaataagaggctctctgtcattacagtgctcgtgtcattggcaaatgaccatgcattcttgtacataggaagaataaaaataagaaaaaagaatgtagatagaagggaaaaagagagcgataaagagagatgaccttaaaaaagagaagattcaagaaaaaacaggagaaacatagagaaaagattgttgtctagcagagcggaaaaaaaaagaactgagaagaaaatctaatctgttatcatattgccctctttgttcttaatgtttatgcaatagtgcgttg

SEQ ID NO: 14513 - DNA, 951 bp, Brachypodium distachyon
  Intron number 1 from transcript Bradi2g06410.1 (locus Brad i2g06410) derived from phytozome v7.0 (chr-ID Bd2; pos 488 5891 to 4886841 reverse strand)
atcaccaggtcgtcgccaagtgagtcccgcttctcgtattgcttgtaactttccatgtcagttacagtagattagatgggatacttcatatggaaatgaggtcatggatgatatgaattgcccttgaaaatttcagatttggtgaattaagtggctgtgtttgaagggtgtcagttaatctgttgtcaccagctgttcgtttgttgcattcaggaggaatttctggaaaatgactattgaaagtatgattgaaatggtggatgatttcactatattgttggtttcattggcttggggggtgttttaggaagaaagaaaataccctggagaagtagcagggtgtgctttgtagtttgcttgcattggaatggaatgctctggggtttctggacatgagttttatctcgtggattgcagcataacttccgttgtttcaaaccttgaattttataagtgttgatctgcaggcaaaggcataacaacctgactgtatcaatgagtcacattcttttgctctggagagattaaaattgacatctgtaacatctaaactgggacgcatggctccacgagcacatcctttcaagtttcaagtgaccgtatcaatcagagatagttcaaaaaccaaattggaagtcagatctctttgtattctatattttgtgctatggctgcttgctttgcacggataatgatggtttgggcttttggggtattgcatctctgcaaacaatattgatcatttgatcttgtttcccatgtttgctactctgtcgttttatctctgcataatctgaaaactgaaaaggcaccctgatacaagccaagttttgattgttcatatcaataagtctgcatagttctttgtttctttataaatggaaataacatgacagaactattgcttgccactcgattatctgttgttgaaccttttgcctatcatggcag

SEQ ID NO: 14514 - DNA, 572 bp, Brachypodium distachyon
  Intron number 2 from transcript Bradi1g50170.1 (locus Brad i1g50170) derived from phytozome v7.0 (chr-ID Bd1; pos 488 38081 to 48838652)
ctgaagatccctgctggcatccttagcccatacaggtatattacttcttctttttgaacttaattcataaatgtatatgaatatgagttgcatttgcatatctgttttcatgttctgattcatgtgcgcacactggactttcttggtccatcaatcacatgggaactgtactttttcatgatacatttgatttgattaatgttaaaaatgcttctaaagtcaaattttggttcaacctggatctgtagatttgtcccagttgttgtgatccagtccctattcaataataaacttgcaggttaggtgagttgttagatcggtcctacttcttctgatctcactctaactccaaaacaaacatgatggtatcatattcatatgacaaaagtacttgttcaccaacttttctctattatgtattatatatgcactcttaatatttagatgacatcctttgcttttagcacaagaggcacttgcattcgcgcaaatcccacattctcctctgagtttgtcctgttcattaacttggtttccttgatgcttcctgcaggcttcttgttcttatccga

SEQ ID NO: 14515 - DNA, 521 bp, Brachypodium distachyon
  Intron number 2 from transcript Bradi1g56280.1 (locus Brad i1g56280) derived from phytozome v7.0 (chr-ID Bd1; pos 549 20786 to 54921306)
gagaaactgtaagtgatcgaaatatactacatatcaaaatatctgtttatggattggcacataggacatccaaattctgaggtgcatgttacaggctactcaatccacttgatgtcgcgccaaagttttgttgttgtcgcgctaaaatggggttttaatcttctcagagttctttctcagggggcaatatttgaatgattcagttgttctagtataagcatgcgtttgtatattcctacatcagctcaaataggagttcttgatttttccacagtttaggctgccacgatttagtcactgttcttatttgttgattacttgattgtgcatgcattgcaactagataaacctgctttgtttcaattgtcctatgcataccaacatttcatccttcaaataaaataaaataaatcaagacagaggttttatttgcttcatcactgttctccagcaacatgaaggccttgtatacctaactggaatttttattttattggcagattatctattgttctgtttgc

SEQ ID NO: 14516 - DNA, 540 bp, Brachypodium distachyon
  Intron number 1 from transcript Bradi2g36320.1 (locus Brad i2g36320) derived from phytozome v7.0 (chr-ID Bd2; pos 366 83323 to 36683862)
gtgccggtgagtttgtcaatatgatgtggtcactcatcggtggtgttcattaattgcacatttttttgatcatgcttgattgctacttatttcattgcacatattttgggtgttgttatgtaaaactagacaacgttgttggtgaaattcatttgcaaatgctaaatttggtaccgtgcgttgggcagcacagatccaataaagccgtcctgaatttacgagatatgatctttccaacgcggtagtttttagttataccttatactccctccgtctcaaaataagtgatttattttgggacggaggtagcatgatttccaaggacaggatttttacggggacgtgctagggaccatctaaaaaagctactatcaccgtcgccctacattttggaagaaaaataatcacctggatggctagcatagtagattattttcgatgtgggaaatgggcggagtatctatcggtcgttcatcgatttgtttgtacggtgcgtgttgtgtaggcttccggattcgcgcagcgccatttcccttccct

SEQ ID NO: 14517 - DNA, 945 bp, Brachypodium distachyon
  Intron number 2 from transcript Bradi2g26020.1 (locus Brad i2g26020) derived from phytozome v7.0 (chr-ID Bd2; pos 242 61995 to 24262939 reverse strand)
gttttccttgcagggtttgaagcgccgaacctgaggtaattatttttggtgctgttactgttacgattcgataagaaagcaatcactgcagtactgcatgagtatatatggatcgattttcttttcgtcttgatttagtggatcaaacacagctcgtgaattttactctccccgttccataattcttgtctcaaattgtctaaaaatagtgtatctattcctaagaagcgtctagatacatgtaatatttcgacaagaattatggaacggagggagtatatcggtacaggtatagatttttctcttatgattgaaatatgccctcttttgagaactttagtttataaaaatgaccggagtgctgcttttcaattacaaaaatcagagtatgattacaaactgctttgttttggggcataaaccataaatcctgcatgcggcagcacgtgactactccccaaacaaaacaatacaagagatgtctttgtatagttatgctttgcattctcttcctttttaccttttctagttttatttagctttgtatgtacttgggctatcttagagtcttcttgttaacaaaagcgacacgctcggcatgttcgagaaaaaaaaattaattcaagagctaccattaagtgtaggctatggtggagtggactgccagggatgtgttctcacccactcatgatggcggcatagtctcagaattggcgcttgactgctttgatcgtttttgtctgacacctttagatttatttttaatcttgacatggtttggtttggctgtgcatcttatattatgcaaaggccagggtttgttctagtgatgtatggagttgctatgacatcaagtataataaagttccatttttaatttttttatgatgtaattttttatctcatgaaggaaaatagccgaaaaagttgcttcgtctggaaact

SEQ ID NO: 14518 - DNA, 473 bp, Brachypodium distachyon
  Intron number 1 from transcript Bradi2g07980.1 (locus Brad i2g07980) derived from phytozome v7.0 (chr-ID Bd2; pos 635 6063 to 6356535)
gcgatcgatcaatcccttaaggcccgtccatctccttaagttcttttttgattcctgcacttattgattcatgccttgatttatctagttcagaatcgagggttttatttcttctcctctcttgaatcttccattaatggagcattttatgctgcaacttcgtgatatctcgatggttccttttgttttatttcaccatcttctgatggttttaaaggcaatttttgaacatagaaacaggtgttccttttttcgagcaaaaaaaatgtttcttgaaattaagtcccctcgctgttctttttgatcatccggctagggcagattttgttttatcgtcgatcgattttctattgcctatcgctagatgagattgattttttcttgcatatggtagcagaaattaagctcgtttctctgctttggttggtcacttttcagacgaagagggggaggccagcaggagcaggttcccc

SEQ ID NO: 14519 - DNA, 631 bp, Brachypodium distachyon
  Intron number 2 from transcript Bradi2g07980.1 (locus Brad i2g07980) derived from phytozome v7.0 (chr-ID Bd2; pos 635 6631 to 6357261)
ttgtgccgattgtgaaattggtgaggtcctacagcagtacagcttcagctcaactgctcaacgcagattattatgaggtcactgcagtaggcacttatgccagccattgcattagcttttctttttgtgtctgaagcttgatcacacttctggtgtggaattgtatctgataaactaaaacggagccgggaaatcaccagcctatgttgttcttccagtgcacctccgatactcaatgaccttatgcattttccatgttatttattagtttatatatatatatatatatatatatatatatatatatatatatatatatatatatatattccttttgcttatgtgctcggtccgtgcgtggtgactacagtagtcccttatatcagtcatattattagctttcaatttttccccaagtttgatcagatttatcatgtgggacttgtaaactaaaattatatatgaaaatatttccttatgtttttctttcagtgcatcattaacatggtagacaccagcccaaccaataatcatgaccagcacaacacagtctatatcatcagattatctgtttcattttggccttttcaacttgaaatttttgtgacaaaaaatatttgatggttgcagg

SEQ ID NO: 14520 - DNA, 732 bp, Brachypodium distachyon
  Intron number 1 from transcript Bradi2g11830.1 (locus Brad i2g11830) derived from phytozome v7.0 (chr-ID Bd2; pos 101 49948 to 10150679)
aggagcaggaggcgccgccgatccctccccccaaggtgagctcgcttctcctctgtgtcctgcccgtgccgcgtgatctgagactgatctgttgtggtctgggttgttcttcgtgtgcgatttggtggggttggtgggttaaacaccctaaacccaaatgcgcctggtatgttttgcacttgatcccgatttggggccattactcgcttggttagtctatgttggccccttctgatcctatctgtatgcttattgtgagttcgattctgggagaactcatacggcggttttcatttagtctccgtcttacttatagcttttgattcctctgctaagttggactttagcaggagaagtgccaaaagctggcaaaaaaattaatgcaagattgggagaaccaacttaattttactgttcctcccaggcgagaatgtaaggataattgcaggagttattctcatgttagtgttaggtctgcatgcttgcactgctctgcttgttagtagtcgagaatctagagatgctggcaccaattccatttggtccatttatggaaaaaaccggatctgttatgcttctcatctgtccttttatctcaattctatcatcaaatgcaatatgctgccaacatgttttacctatttatttgctctcaagaaaaaaaagttaaatgttagaaacttaacatttcttgcaggaaaaccaggaggaaagagatttcaagatatcctc

SEQ ID NO: 14521 - DNA, 1046 bp, Brachypodium distachyon
  Intron number 1 from transcript Bradi2g08280.1 (locus Brad i2g08280) derived from phytozome v7.0 (chr-ID Bd2; pos 667 1347 to 6672392)
cagcagaggatatcactgatttcaggttcgtcttgagcaccttctgaacttgcaatgtcaaagaatttagaatatttctgtcttctgaactttcaatgtcatatgctcaaacctaatcatcttgcgtactaaagcagctaatgtggggtcatggtcttggtctaaattatattgtagagcactgatgttattcagcaaatagaagatgtttgtctgaaagaaattaaggggcatttttgtttaaccttattgatagaaaatgcatagatttcagagaactacagttatgtgtatccatcgatccttcccatgtactgagtcgtttggagtagtatgtattgtgtcaatatatatttccatccatcctaatcgatgcttccattgctttgttctgctgctgttgttcatagtgtcaaagtccatgtgtgctgctcttgttcaccttctgaactctgaactcagaagctacacttcttttttctgtgggatgtcgatgctgaaatatgttcagcttctgaacactgaactcagaagctacacttttttttttgtaggcatgtcgatgctgaaatatgttcagaataatattgtgtattctttcagtactccaactaattaagggggggtcttcttggagttttggtgttgttgtactgcactgctttcttatcatgtgttaggagtacatgaattcctcctggtaatttttaggagtaattctctgaaaaatacaatgataaagatgcgtatgctttaagtaagtggttcatgtctgctgatttagtgctactgtttatttttcagcattcaagttgacactgctattactgcatttttcagtataacactggcttcagtctcatttctatgaaaatgttttgtttatgttcaggtgcatgagctgttgcaaatataaaatgaacatgatgcccatatgtgtgatttaaggcaagtgttgttggagtatttaatcttgccaaagcaactgaacaaggtatgtggacaattcagatcaagcagtcccaaatccattttcagatcaggta

SEQ ID NO: 14522 - DNA, 1021 bp, Brachypodium distachyon
  Intron number 1 from transcript Bradi1g70830.1 (locus Brad i1g70830) derived from phytozome v7.0 (chr-ID Bd1; pos 689 79864 to 68980884 reverse strand)
ggagtgaagtcaggtgattgatcacttctcttcctctgtttccttcaccttgttttgtgcattttttattttatttttctgccttatgattaacataccacgatcttgctgtttattacttttatgttaggacatgatcccaactgttaccggggttgtctcagttttctttagttctacatttctgaaagtgctgttctttatagtcattggaccaaggggtccctaaaatgctaggagaaaccaggttaaggaactatggtttgccagagggtccaaactgtcgaaaactactactctttcttttatattatcttatggtcatatgttatgggcaatatagattgtcatccatgatatgtgcattgtttgtccgtggcattcacacaagtacctttaatatgaacttaacctcttcatatttaatatcgtttacttatgccttggttagaccgaacttataaagatttggtgagttgctgtaaatatatagctgcttgatttaaaatacagcttaaaagaaaccatagtcttggagtcttgaacacacatagtacacaactacataaatggttgaagggatgagggagctgagaacttgaaagtgatatatgtgcagagtagttctttttcgtttagtttttttttcaatgtgctaaactaaacctggatgctgcttttgagttaaagtttccttatatgtttatgagacgaagtgtatactgttatttcttggtgcaatggaatacatccctttcaaaactatgtgtagatgaatagttttcaattttctatccatttgtgtattaccgatctcatgattggccatatttgtaaatattctcaatgctagatagatagacaaatccatttgttgcagaaaaaatgaaatatgaacttaaggttatcttgtctgtccaatatatcaaaccattttagttgcttgttcttttctattctctgatgagaattgtctgttcttgcagtattgtggaaagtgaactggtgagcgatatcactg

SEQ ID NO: 14523 - DNA, 637 bp, Brachypodium distachyon
  Intron number 2 from transcript Bradi1g55760.1 (locus Brad i1g55760) derived from phytozome v7.0 (chr-ID Bd1; pos 542 66985 to 54267621)
ccggccaccaaggtataattaatattaacaatggttaatacatcctccttggctgtccaatgattagtaattgcgttgcatcccctttttttcggttaggatttatttttctgcatttatttttgggattagcagttcctgcagccccaaatggcatatcctttcccttttaccttccaagaaagtccattgctcgtgagtttaccctactgtgttagcggtagttataacctccttatccaaatcctcttggtctaagcacctggtagtgattcaaaggtagatgggcaaagtaattgacatgtcacgatcgacattttttttttctacaatagatactgctacgtttcagactttcagttccagtttccagatttgattcagagatgcacaagccattaaaagggcccaaccaacaagcaagcttttgccacagacatccctgctatttttgtttgatgtctctatgtttctattctttatcccatttttctccggtctaagttcctgatttcattttatgtttaggcagttcatcaaaggatcactagctagtaggcagttcttttctctttcatttgttgctgcattttgtgtggttttgtgctgaacttgccgtgtgatccaggaaggaatc

SEQ ID NO: 14524 - DNA, 970 bp, Brachypodium distachyon
  Intron number 1 from transcript Bradi1g71380.3 (locus Brad i1g71380) derived from phytozome v7.0 (chr-ID Bd1; pos 693 89806 to 69390775)
cgcgtcgctcgcttctagccgtggcaggtctcgaggtccgtctctcactttctcgccctttccgtctctcctccaatcctctccatggaaactgggaaacctacttggcgcgggcgtgtggcctgtgggtgctcccgggtcgcatccgcactgtacgtgttcgtcgaaatgcgtggcagtttattttgaaatctcacaccacctcaccgccacggcacggcacggcaatagtgttcgcaacgtcctttttcatgaatttaaagtactgtactcgcctttgaacaagtgcaccgtccgttttcaagaattaaagtactgtactcgcctttgaattattgtactgcaccggccatttgtgattgcccgcttgatgtcacacgtgtgcaaagtgcaaccatgcgtggaaaccgttcaatggctgaatttcaaaaatataaaacgagaggaataataaactttccgaatgcagagagagagaggtcatgtgaagcctctagcaaacagacaagaaagatcaaaagaagaaatgaagaatcagtatctgtgattgtgatctgacagcacacatattttataacttttgtgtgactataatctttcgcccagcccggccacaaattcggtttctcagatttgatagcgtactcttggttcttgattcttcagctgcttcctcctcatctctctcagctagcctagctgcgaccgtcatcatgggcaccaaggccatgtcagatttctttcctttgcttctatggttatcttaacatttccttgcagcagcatctgcaaagatgttagctttgatcacatgctaccaaatccttcattcacaaagagtgaaacggagagaaatagtttaactttttttttgcatagttgttgtatgctctgctcgatgtcctcttcttccttgtttcttgaaaaatattaagctcgtggttcttgtgcagggaagcatttgtgtcca

SEQ ID NO: 14525 - DNA, 956 bp, Brachypodium distachyon
  Intron number 2 from transcript Bradi2g17270.1 (locus Brad i2g17270) derived from phytozome v7.0 (chr-ID Bd2; pos 153 91017 to 15391972 reverse strand)
acctgcccaagctgcagcgcctcgcgctgaagaaggttcgctggtccctacactctgtgcccctctctgagttttgtggcggcgtatactggatctgccatcgctctccgcgtttactagtagctactgccttggaagacgactgcctaaacttaggatgtgtggttgtcaaatgttagtggtcagctgtagctagtctctacagcagtgaggtgatttctgcttcatttcgtggaatttaggatttgctggactgctatgtttggtatagtttgttgggggggagaaagggatttcgattaatggactgttgtgagccatatagggatttccataggattggtaggatactgtttgcatgtttgttatacggatgcaatctaacaatatgtaggagatatcaaaggtcttgtaggttgcaatgtactttcatttgtttgttggtatttgatgatgtctaggcttatgtgcagaccatatcaagtctcgctatcatctttgggtgctcgccatttttaaatgcatatctagtttttcaagttagattgatatcaagcaattcaatctgttgctgctgttgtcctctagtctgtgctcatcccttttctttcaacttgtcatgctaatactatttacttcctgtgcatatcaccggcatatttgaatatgaaatcatgatgcccttctacatttgagaactgagcatgacgtagccggttttatgttctacttttggtttctcttagctatgcctctacacggttcaatttgtgatatgcataatttgggttgctcagaaccatgccagttagatatttcttttgggtgaagaagccattttagaattttatgctctgtttttttgtaaaaaatttgagaataaagagtctggtgacttttattttttattttttgtgacaggtcaaagggctcacaagagaggaacttgcgacccg

SEQ ID NO: 14526 - DNA, 627 bp, Brachypodium distachyon
  Intron number 1 from transcript Bradi1g71440.1 (locus Brad i1g71440) derived from phytozome v7.0 (chr-ID Bd1; pos 694 27137 to 69427763)
actgctccaggctaacgtcaaactttgtgaagatctctttcaggcacagccctagggaagcaaattcggtagcgcagctagcagatttagcaaaatccaatcatgttctggttccattttcctcccccgagcatagctactctgttaattaaagatgtaactctggttataaatgaataaagaggttctatgtggtcaaaaaaaaaactcctggagacatgctctggcggattgttcgatggccaaatgtgtttgggccctacttgaggagggacttaccgagcatgttattcaaaatgatattcctgatgcaaaactttggttgtttatgatgatggaatctattgtctccgtgtgactttgctattattttgactaccttgtgggcagtatgatgggcaagacggaggctgttcacgaagagaagtttcaaagtccttttatccacttttgcttttattcagagcttcgtggaagatctttctattgcggttgatgagaacaacgtcgatcgagctattccaggagggagaagtggaacctgtcggcaagctactcattgatggattgctcctcccttgagcgcatgcaaaatcaatgtggatgtcgattttgctagatcaggca

SEQ ID NO: 14527 - DNA, 693 bp, Brachypodium distachyon
  Intron number 3 from transcript Bradi2g20890.1 (locus Brad i2g20890) derived from phytozome v7.0 (chr-ID Bd2; pos 183 10819 to 18311511)
gggtgtttgaggtgtgtgattatttgattttctgataatcacaggtttctgtatgaacttcttaaaagttgtttgtttgtcatgcgtaaatgcttgtatcaatagataaaaatttatgcagcttagagaccaaaataaataccaggctttcactgtgttcttccattttagatggattatttaagctgtctagcccttctctttgtttttatgcttatgcctacatatgtactttcttgaaacaacatttaaaataggaaatgtatttctgatggtctagatactttagcatatgtaaccaagaatcatgaattccaggcaatctcactttctgatggctctgttacattgcactctttaatgggccactatagttagtgtcagtgcaggttggtagtatgtactagtattctatgcttccttgttaagttacaatccttcatttttgttgctgccctactgtttctactaagttggaacctgcagtccaggatttagaaccctactagccaaacatgcatttgtattgctgccgatgccacctaagaattgtatcttgttctttaagttccattttcgaaatgcacatttgcctcaattgaaatctagcaggttgtggacttgtctttcagtgttctaaccagattttgcttttcaggctgctagttttggaggatctaacattgatcccac

SEQ ID NO: 14528 - DNA, 1004 bp, Brachypodium distachyon
  Intron number 1 from transcript Bradi2g24750.1 (locus Brad i2g24750) derived from phytozome v7.0 (chr-ID Bd2; pos 225 62469 to 22563472 reverse strand)
gggcattggtggactcccaccaaattgtttaatacgtaaggtttcttgctttgttatgctatacgaaagttttcttgttttcattactgtaattatcttttgctttctcatatctcattggatgcattttatgtgtgtattttgtttttgattgaattagtagaattgggcaccaaaaattgtatgggaatagtagcacattctccattttgatggtatcaactatttaaagtatttgtaagcttctaaggctccatttagttttgctgtagagtgtagatttgcatatctggtggagttagttttagataactgggtgcttggcttcctgttcttttcttggtcaaattgcaaacacgtatgtatgcatcacagatcatatgagatgaaatgtgagatgacaaacattagatatcagaatgtatctacatttaatttgatttgcgtagcagattaatggaatatttttaaacttatttttgacagcaacttcaattaagtacagcaagcacaaaacgacaaccacaagctagagcctaagtcagtttctcgggtcaatttgttgttcatgttcacactaagcttgtggttgtctcgttgtcctaccaatcttcctattcatcacatgcatgggtgtgagcaggagctttcacgatagcgttgctagtccatgtggataggtgatgactttgcagatggttatttgctggatgttatgtggcttccattcaacatgattttctttttcaaattcgatgtgtgttaactaccatgtgagaatgttgggttctagcatcaactcataacaaatgacctaagttactatttcgttgttctagcatgaacttgttgaccattggcgcatcctttttcttttatatgttatgtatccataattatttacatatatgagttaaatccaacttaaaaaaataatcctagcatgatctgacttgttcttcccaataggggttgctattttcaggcgggccgtgctcttaaac

SEQ ID NO: 14529 - DNA, 651 bp, Brachypodium distachyon
  Intron number 2 from transcript Bradi2g00370.1 (locus Brad i2g00370) derived from phytozome v7.0 (chr-ID Bd2; pos 805 99 to 81249 reverse strand)
ggaggtgagcaagttggccctaaacatttcaaatttcgtcaagcaggactaattcattctgccaaagctgcctttgcctaccaaaggtctagtttcttatatcgcctttggattttgaagggttagatatggcaacggttcaaattagtcagtgctattataagagtcaaataggtttgtgctttgcttgttttgtctaataacatggtagagcagaagttcggaggcgcctctccaatttcttgcacccaatggcactgccatccaccctgttactttgaggcactaccattccatacaagaaaaccagcaccttgtgctccctcaacattcttcttccccattgtttttcttacaaatcaaataatatccacaagcccttcatgttttaacttggatgatcttgttgaaggttttgggggcatacccaacctcggtgtccatggtgagagggtgcccttggtggaattggtggctattctcgcaaagtttctagctgactttggcgaatcttttgataaaaactgtgtcctgttttattggaaatcacaatcatgactggtgtttagttcgttctgactggtgatacatttctctacttgcatcttgatggtgttactgtttctggaaaccatttgcgcagagtgcgat

SEQ ID NO: 14530 - DNA, 606 bp, Brachypodium distachyon
  Intron number 1 from transcript Bradi1g61700.2 (locus Brad i1g61700) derived from phytozome v7.0 (chr-ID Bd1; pos 610 60504 to 61061109)
ggagcggattcatcgtcatcatcatcgggcttcaggtaaaagaggaattaaatgaactatctagcgcttgatcgatgaggttcttatttctgtcgtcattgctcgaggattgtgtccggttcttggcacgaagattcagctgttcttcccatccgtcccgcctagcccggctagctgcctgctgctgctgttgctgctgttgttgctgctgctgctgctattgttgcggtcaagctgagcagcttggacttggagatgacgttcctgtatagattgttccttgcgcaagcaaaccagaaatgatttgttctttccaatatgtatagtgaggtcctttacaatcataattgccgtgctctttgaattttcactgaatcatatataggttttcttttctgaatattttgagcagaacatgttcttctgaacctgtaatggaataggacaaataaagcattcttgtatttgctagaaataagaacttttgaaactgcaatgttttttatctcgataagtcaaactacaattgtctctgtaggttgctgaatacctaacttgctaattctgcaaatgaaccacaatgcagtggggttagccgtgttttcg

SEQ ID NO: 14531 - DNA, 603 bp, Brachypodium distachyon
  Intron number 2 from transcript Bradi2g18960.1 (locus Brad i2g18960) derived from phytozome v7.0 (chr-ID Bd2; pos 167 25158 to 16725760)
ctgaggggttgcagccagagaggtactcactatcgccccttcttctgctcgtggttatctgattttgtatgttgcttattactgcggtttcattgctttcggcatagtgttcctagggtttaggttcagttgccaatcaatttcaggctgttgcttcattggcgtttagaactttagagcttccagttgctgtatgttagttgcatcatgttctaaagttcacgttgctgaccgaaaatagtttatgttagggtttaataattctttttaaacatctgtttgtagaattaagttcatctgtattatttttgcatgtcgtatgggcagcttcattttttatttgttatgtcaggaggcattcgattttgggttgaatgggtctatgtgaattcaaatttcaagtggcccactgactctgtaatcaatgatgtatataactctcatatggaattgtttttctttgttcgaatttcgagctgtcattgtggttatgcacttacattatcgcaattcataagtagttgtcatatattagagattgatgggtcatatattttctttctaatttccaaggttgtttgcggtaaaaacgcacgaggagtc

SEQ ID NO: 14532 - DNA, 677 bp, Brachypodium distachyon
  Intron number 1 from transcript Bradi1g60540.1 (locus Brad i1g60540) derived from phytozome v7.0 (chr-ID Bd1; pos 598 95827 to 59896503)
cgagcggatcatagccgggtccacggacgttgcatgtgagtgagctttgttttctccattccttgctaactgtagaggccaaaggttgcattgccccttactattgaattcggcatattagaggcctacagttgatgtgtcattagtgttgcaaattttgaattggaggtgtttggggttacaagctgtgatgatagcaatgccatttaatttatagtgctgagttgaggtgtcctctgaaaaatgtgaagtctcgacatgatactttaatgctgaagtgcgttcaccggcaagttgtgtaagatacagttctggcgaagcagtgagacctgttctggatatgtagtgatttgtcctccgactgaatactttttgaaagatgcatatctttgggctggttgaaatatactggtaaagaagtatgttgaagacagaccatattttagtgcactgacacaacttatctccaggaagatctcaacaccagcatgaattactaatcacgcttcatttagaaattacaaggttaattttatatcgcccttaataaacatttagtgcctaccagagagctcacaacctacaaaggttctaatgtacaccaaagttactcgttgcatcagtacaacagaaactgcagctgatactcgcctattattaatttaatgttgattcag

SEQ ID NO: 14533 - DNA, 790 bp, Brachypodium distachyon
  Intron number 1 from transcript Bradi2g12270.1 (locus Brad i2g12270) derived from phytozome v7.0 (chr-ID Bd2; pos 106 04136 to 10604925)
gtcctagtggagaggtatgtttctgctttgtaggtctgttttttttacttatacaatttccagaaatctagtacaatagagatttgagattgaatccattacacactcgtgaactaatagtgttggatgttcaattcaattaatgcatactattccaatggtgttgtcatttataataatatgctaaactttcttaaaagaatagatacttcacttactaattaattggaaaattcagcttaaaactactacctccttccataattcttgtctcaaatttgccaaaaaaggatgtatctattcctaaaaagcatctagatacatataatattttgacaagaattatggaactgagagagtagcttggaagaaaaattacaattaattaaaaaaagagttacacgactaacttgatatcccgttattccagaaatctatgtaagttatctgaatttgtttgaaaaaagggagtgttatttgcttcaattgattttaatatttaaaatgttacattgaatgatacttaactaataaagttaaatacagacgcacttgctgatgaaaatctgcaaaaaaaaaaacatatattacttaattaatagggttaaagtcctcgtagactttaattaggttcatattgcttatactatcggtcccccatatagctcctagcatgatatatatggtttctgcatatacttcacatagttccatttttatatatttttgttctcaatcatttcataacaaataatatattttttgtagctggcggtcatcaaaacagtag

SEQ ID NO: 14534 - DNA, 1012 bp, Brachypodium distachyon
  Intron number 2 from transcript Bradi2g05450.1 (locus Brad i2g05450) derived from phytozome v7.0 (chr-ID Bd2; pos 394 1538 to 3942549 reverse strand)
agttcttgactccagtctgcgagactcttcttcaggttcgattttgtttctgtgttaatcatctactctttgttggtggcagataatggcaatataacagtagcagagttaccagggtacacgttaactcgtagtgctttgattttcctcctcattttgaaactaaatttttgtctaattggatgctgttgggttggaggctttaggtgatgtttgcgtcctagaagaatgtataattcaatgctgagttcagtagttcatgctctacttagaaggtgaggtactgtggtggtacagactagaatgtatttggagatactttataaaaaatatttttcctgggaatgcttatcgttggagccaaccattttaagactcattaagcatgtaacttaaaacttagatatataggattcatggaatttcttttccctggttatcttattgggggaatttgggcatatgtcaaggttgtacttttgtggttggatttgtccatttcttaatacagatagtactatctacaataggcatggtttattctctatcggattgtaggttgacaagtttctgtgctatttggcttgtgtattaccaacactttgcatccagtaatacaaagtggcaagttgctaactaatacgtcttttctaagacatgaaatttatatcaatagatccgtcttcaaatgttcttgctgataattgtggtttcctatcatataacttccatattaataaagttattattggtcaaagtcttgtcttaacgaaaccaaaggcgccaacctttgtgaaaaggaagtagcattctattaggaggttactgatgctgtaatgatgttgttttggaagacatcatcactggtgtgacatgcaatacaacattgggcccttcccattctgggcgctttttttcttcatgcagcaaagtagtgcatcctgtgtttctcttattgaacttaattactgagcgcatgcagctgggcctgctcggcgtgagaaacaatcaa

SEQ ID NO: 14535 - DNA, 738 bp, Brachypodium distachyon
  Intron number 2 from transcript Bradi2g14740.1 (locus Brad i2g14740) derived from phytozome v7.0 (chr-ID Bd2; pos 132 54504 to 13255241)
caagaggtattgcttgcttgcttccctgtttcatgctttatatctttacatacgatcatcattctgttggcgggcagtaccgttagtttatttgattcaaatcctctagattgtttagcttgtgttgttatattttcaatatatgattggtgcaatagagctgagcatacaattgcatatttgcttgactatatgggtgttatgccaaatgtagacttgtttgagtcaatgctgcattcaggatcgtaacctgacggacttctatgtttagtctgttaacttgatggttacctcatgtggttatgaagatgtgtttggtttgttacttaaatgattgacattctttgtcttcttaaaatcttgtaatgtgcagttcattaaacatactccttttagcgatgcaatttaatgggtgctgatcttattatgtgaggactactatttgtatttgtttctatggatagtttgtagaaaaagggaatgatgctgctcagattcaagcgactggtagctttttgcacaccataatagatccagggcttctattttgcatacctgcatccagttcttattggcatatatagattccttttcttattttgattagatagccattttggctgtgcacttctgttattagaatctacaatttattttacctttatagtacatgaaattttaaggttttgtatgtcactttgaacgatatgtcttttggattgtgactgatttgcagtg

SEQ ID NO: 14536 - DNA, 896 bp, Brachypodium distachyon
  Intron number 1 from transcript Bradi1g59930.1 (locus Brad i1g59930) derived from phytozome v7.0 (chr-ID Bd1; pos 589 48914 to 58949809)
tcgtcttcctcctcgtgcgagcgcctccaccgcaggtatctatctccccttcaattctcccgttcccgaccgtttctcctcccatcaccccacgaacagatcccgcccttttgcttcccgttgcatctccttaatcttccccaattcgtaactgaggcaaaaatcgggcggccgccctaccttgccctaccgggtcctccgcccttgcagttttctgttcttccggtttggacactgatagtctggtagctgaggctggagtcattagtaattcgaatgttattagtttgattcctgttgtcacgagtttatttaggtagcaataatagcatatgggttaggcctgtttccttctggatgaaatggctttgttactatttaactgcacctaccattttgatattttatactctagctgccctaatggtgtctattgtggagttgtctcacgagatgactataccgtagatatatgcaacatgtactgcactataattttttattttttattggtttagtttgttcttctgttcttataaattgatgtttagcttgtggttgacacaaaatttcaaataagccttctaaacttcttggccattcatatttttgggacttgtttatgaatagtattgcggagttgtactgtaattggttagatgctgttttgatggttttacagtttttctctctctaatctttagagctgatttaaattttggtcctctttatttccatgtcatgggcagagttttgtgctgcatagtttcttgaagctgcatgttgatgttcaccaaccatccctcttctaattctttttattgctgctacctttcttatctactcatctaataattcttttaggtaacctattattgtctaatttcctttcagca

SEQ ID NO: 14537 - DNA, 883 bp, Brachypodium distachyon
  Intron number 2 from transcript Bradi2g09790.1 (locus Brad i2g09790) derived from phytozome v7.0 (chr-ID Bd2; pos 802 5964 to 8026846 reverse strand)
gtgagagcaccaagaggggaattgggttcctcgaggtaacaatgccgcatcctctcttgctgcgttctgtttagtgtggcaaactcacgactgaatacagatgttgtgaatttttgatttgtttaatgcgagcctttacaagttttatggttatgtgggagattcagaaatgtagctttcagatacatcactgtaactcagacaacattctttgcatcaactcgatagtcatgagtaaactgattggaattaaccaaaataaaaaatatggtttgctgtactacaaagaaataggcaatccagaacttgagataaaggctctggtagaaataaattaagatcaaaaggcgtactgtggcatcacacatggatgtttcataatcactaagttatgtttcgctctatgtggcaagagctcgagttcttccatcctttaatcatttgcctgtgtctatttcttttggggtttagcacggatcatttcctttgttgaatagctttcatccatgtcactctttagccctgcactggagatgccagtcctagttaatattgtgagtgctacctactgacagaaacaaatatgacatcagatattaacagatttcagatgatgctttgattagttgaatacagtcaaccatggtagtgtctggttttcatttccagtttaacaagtttccatgttatgtgaggttaacttccctttttagacggaaatacaaatattaaccatttcttgtggatgaatgaacttgaaatttccagtgagaacagataggagagggcgatagctttgtatcactgcattttctgtagtagatacttgtactcacatatataggtaatcatgtaatcttatacatctccaattatttaggct

SEQ ID NO: 14538 - DNA, 964 bp, Brachypodium distachyon
  Intron number 1 from transcript Bradi2g14200.1 (locus Brad i2g14200) derived from phytozome v7.0 (chr-ID Bd2; pos 128 29923 to 12830886)
cgcaccaccgaggggttcctcgatccatccatcaggttcgtcgctcgctccctcgccctcctcgattgatttgatttctactccacatagctacctaccacaagctcatgtccactgctctactctgcatctccgctacggatgccaccactcgtttttttagttcttctcctcctctttgattccagccatggctcgcacgcactactcgactctacgtaatcaccgtcttcgattccatcctgctccgcaaactagacctagcttcttcctccattactcaacctaggttccctttacaatcacctcaattcgttacaccatccctccatgctaatatctagtatggccaggccagaggaattgtttgtttgttcgtttagcactcaccctcagccctcagggatgtcatgtcatgtcaggttaggtgctaacttcaacaacgacaagtacatgaagcttcttagcatatgattgctgccaagataaataaaattgctttgcgttaactcttgcatgccaaaatgccaactcctaattacctcctgacagacacagagatactgtatgctcaaagacttgccgggggtcaatagagagacacagacaagggccatcttttaagtgcctctaaatgatgtgcacagatattgtatacgtccaacatattgtacatccttccttcagagccccgctctagccacgcttctcacgaaactgtaagaaatgaacaagtcaacttggtttctggtggcgtttattccaatcgagtaattttaggctgccgcttcttggtagtctgtttctgccactttttttggaatcttaatactagtccatgaggcctccctttgcgcgctgagtatcaaataccagtgactagtctaatgcagtaaagcacttaaactactctgcttattttttttcttaattttacattctatacttactgttaaaacagact

SEQ ID NO: 14539 - DNA, 992 bp, Brachypodium distachyon
  Intron number 2 from transcript Bradi2g10270.1 (locus Brad i2g10270) derived from phytozome v7.0 (chr-ID Bd2; pos 845 1416 to 8452407 reverse strand)
gacgtctccaacctcaaccggcagttcctcttcaggtccttctccacacccagtattattatatccccgtgtgattagacggattaccttcttatgagtcgcgggaggaaaagaaaatagggtttatgcattgtagtggagtctattcacatgcaaaacgctaggcttgtgcttgttcagtgtgtggtaacatatttctcgcttgcacggagagtgcataatgtatgcgttgaagagatgatataatagaagaacgacatcagactgcttagtcctttaaaatgcaatggggctggttagacttgcaaagtttataaacgtttccaagttttgggttaccaaaagtaggagcaacatagaggggttttagctcaacaattacctttttcctatgtgatggcaacaatacatatgtattcccctcaggaaaatactgtataggcacgggatattagataactacaagaaggctaatccaagttttccgaacaatatgaatcaattggcaaaaaaaggaagtgatcatcatctccacttcaaattctaagcgaggataaatttggcctagttatgctccatatggcattgcggtggactatgagaaccttgtttggtcgaaccccttttagatatgttgtgtttggttggctactcttttcttattcaagttggaaacaaatatattacacacaaccatgaacatgtaagaataaacattggagggcaatcatcggatagtacgatctgtttaacttcagtttgattaccaaaatcagtaataggttttcgcaatttcgttttgacagtagctttcgacatataagcacaggacaaaacaacaacagcataccaagccgtactctttgagtatggcctaagcctcacttttttacggcagcaaccatttatctgtttagattttgcatgtttgtttttatgtttttctataacttatcacctcaatgagcatttcttctattacagggttcaag

SEQ ID NO: 14540 - DNA, 1048 bp, Brachypodium distachyon
  Intron number 3 from transcript Bradi2g18510.1 (locus Brad i2g18510) derived from phytozome v7.0 (chr-ID Bd2; pos 164 51586 to 16452633)
tcacgatcaataggtgtgcatacttgttcctgtaccagatttatgttgtactagcacatttgctagtttttagatcaaacgaattgtacggcatgcaccataataaggacatacacatgatgctagttatagcaacatcagagcgtgatataaaattacttgatccggtgcatagaagtgatattctgcggttgctctgttttgagatggaaatagtagtgctgtcggtattaattctcgttgtatgctaccatgctaagatccgtcatgtatggaagatgaagtcccaagtttttgggtgtcacttgtttgtcgtagttctggtcatttatgaaagcatatgaaaatcagacagcacattgtctcctatttcgtctctctgcaaaaaaaaatcatgtctattttatgaggtcagatatttccttttgccggcttatttattaggttatctgttcttttatataacgaatgaaatgttttactttaaaatatcgacaatttgagttacggtgtgtttttatccaacatataaagtatgtaggacttaactcttcttgcaatcttgttacggtgatgactgtctggatattgccactaatcctgctgttggacttgaataatgagcttaaatgtacctctgtgatagaatcgagtttgaagatgtgattaagaaaagaagataccttgtatgctgatgtgattaagaaaagatgtcacctgccaagtagaaaaggcatcttttatccgagcaataaaggtaccttagttcatgcaagtggcacttgcagcttggaccatggctaatactgggtcttagttgtatctgttcacatctcttgtgccattcagatgagatacagtgcaaacatttggacaacattgttcctccaatttcaactgaaaatttagttgaaccaatgatagttcagctgatttctttgtgcattggatagcatttgtccaaatttgttgcatcctcacataacttaaacgggaaattgctgatgttgcaggtgaccgatatttgaagccatttgtcatatcaaaa

SEQ ID NO: 14541 - DNA, 725 bp, Brachypodium distachyon
  Intron number 2 from transcript Bradi1g47910.1 (locus Brad i1g47910) derived from phytozome v7.0 (chr-ID Bd1; pos 465 57942 to 46558666 reverse strand)
gcacgccgctctaccagacggccacgttcaagcaggtaattagggttacaaacagatggtggcaactgctaataatgtaaaactatattccatcaatgttttctcaatgaactttggttgcgtttaggagcatattgttgtttcatcctacttctgatgacatttcatagtaggtggtggtgtcaccaagtgtgatcagttgacattttaggggtttagctccccatttctattgtttggcattgagtactcaggtacatgtgggaatttttgtggatagcgattgttcgtgtgttgacgatttgtaagacggatctcagtcctttggaaatctcaagacttctagtaggctagaaattgctgtgcagcctgtgctaaaatattggacaccatgccaggttacaaaaattgaagtttggcaaaccaagttactatctagttgtaataaccaatcacatattagttatcttcattgttgctaattatgtttttgtcccttaaaacaacactataaaacaacactatgatgttgttacatttataggaacctagtattttgatattggtaagaaattctcttgggatatttgttgttcagtatgacagtgaagagctacagcatacaccttgtagtttcaggattgctcatggtttgttgacttttctttctttgtttcctagtagcttactccaaaacatcatttttcagccttcggcaactgtta

SEQ ID NO: 14542 - DNA, 916 bp, Brachypodium distachyon
  Intron number 1 from transcript Bradi1g60680.1 (locus Brad i1g60680) derived from phytozome v7.0 (chr-ID Bd1; pos 600 77287 to 60078202 reverse strand)
tgtcgtcggacgggcagatcaggccgaatcggaaggtacgcgcgttgcaaactcttctgccttcctttcctgtgcagtgtgtctcttacaaattttctcggtgcgttttaccgaattgaatgagcacgcataaagtgaatgccagcaagttcgattggtttcatttcatctcaacttgatgagagtgcttcaaagttcaaacttcagtgtctctaaacctctgctctacatgtttacatatttagatggccaaagcacatttcaatttcggcatgatcacgatacagccgtctgttttctttacctttttcttttgagattagataaagacgtctgctgtgtcgctgcaacaaacttactattccctccgttacatattaagtgctgaaatattacatatatctagacgtattttagtatatcgatacgttcatatttagacaaatttgagtaacttaatataagacagagggagtactttgttcacctaaataaaactctacttttctttttaaagattttatttttattttttttaattcgtagttcagtatttcttggtccgtttcctcatggtaacaatgggctgggtgcctctacttttcttttctgagatttttttttatgtttttttaatttgtagtcaactatttcttggtgcgtttcctcatcataacaatggactgggtgcgtgggccactttggatatacgatagtattagagcccgcgtagggcaagcgttcactgctgtcatgacacacttgaagcgtataagtgaattgtctaacttttttatattagatcgctattttgattgcgtaaattcattgtctcctattactgctgcatttccctatcaaaaaagagtacaactgcatttccctcatcctgtgcatgcgatgcgagcagactctg

SEQ ID NO: 14543 - DNA, 904 bp, Brachypodium distachyon
  Intron number 1 from transcript Bradi2g07800.1 (locus Brad i2g07800) derived from phytozome v7.0 (chr-ID Bd2; pos 614 7788 to 6148691)
cagaggcggcgagctgctcaagcgcacaagacaaggtatggtgcattggtgctctgctctgccgagtaccctgtgcgtattctaaataaattccattctaaaccatacaccaagtcggagataaaccccgacttctcagttccccaaatcagaaccctattcttattaatccccttcaatcccgaccttcggaaatcaaatttcgttttggaagagcaggattgctgacaagataaacaaatctcagtatttttatcgaaaaccccattaaactagacgataacttagattgtgataattttagtagaaagttagaaaaaaaattagatgcatttattttcttcaatgccacgcacacgaaggcgtccatacgggatacagctacgcgcgcacgcaagcagacgggtatatgtgtcatttcacacctgctcggaaaatgaaaaatagagttaaaataggaaaaggtaaagcatcaaagtgtccaagtaaaacaagataaatggtcaaagaccggctattatagaacagataattaattgctcaattaacacgagacgtgatcaaattgccgcatgcatatgcaaaattgtaaataatattacataactcctagtaataagctgaactgaattagtcaacaaattccaaagtttaactgatatgtcagcaatctcattttcccagaacggtttttgattccccaaggatgagattagacaagattaacaagaacatgtgctgatttcagggattaaaaagtcaagatccatttcagacttatctattagatcaagtaggtcaaggtttaatatgattactcttcttcgaaacgtgggggatttcattctgttcgcgcacgcgcattgcaggtatactacactggaagcttgtcacggtgtacata

SEQ ID NO: 14544 - DNA, 571 bp, Brachypodium distachyon
  Intron number 3 from transcript Bradi2g37520.1 (locus Brad i2g37520) derived from phytozome v7.0 (chr-ID Bd2; pos 378 20854 to 37821424)
agaactcatcgctctacagcggtaccaagttccgggtatgtgtgcctgtgttacctctggctatatttttgggtgccatttccttctctactgatgcatggatatactgttaagtattgatagacagtttattttaacctcaactcaaataatgtttttctttttccatatgttaattagtttaggagtatgctctatgcaaaattggtatactgacagtaaacctgtgtaatgtgcgagttttcatggggcctacattcagcatagatgcacatgagtctactaaaaacgttccagatgattgatactcagtagtcagtactagtcactaactattagaactgcaggtgatacaatgcaatcttttttccccactttccctggaattacctgactctgaactttcctgccattgctatatattttttgtcttagcgttccatttacagcaaaactcgtgccatttgaagttttggagttgtgctgtttgtggtggatctttcgttatccactttactgtattctctgagttctagaactcatattcttggccaccatgacaaatttcagt

SEQ ID NO: 14545 - DNA, 607 bp, Brachypodium distachyon
  Intron number 2 from transcript Bradi1g54700.1 (locus Brad i1g54700) derived from phytozome v7.0 (chr-ID Bd1; pos 530 28600 to 53029206)
ccgttgctaaaggtcagctctttagttcattttattttttttggatccgtctctcttctagtaaccttggggagtgcactgctcactccgtgtgggagtgctagagggatcatctttggtacacgatcaacacagaagatgctattgtgcctgcaagaagtacaagttgctaatttcttttattgtgcttgcttggtagcttttaatgtgcttttaatgttgcctgctgttctagaagcttggtgctgatctttagtttgtcttgcattaactgtttgagcaaatgctacaatagcagcatctcttcacttcggctgatgctatttcatgacaggaatacacttcattgatttgttagtgtatacctgtatttgattgtgcggtttaataaccgttcctactacatgtttgtagaatgcatattattcagttagcatttctaggattgaagcattgagctagcagagcacatatttttttgttttgttattctgcattagttcatgttctatgctcaagctgtctaacacactagattatgtaaaactctgccttcagttttcatgatttttcatcacttttgcagtcaattcccccaataacccgc

SEQ ID NO: 14546 - DNA, 1044 bp, Brachypodium distachyon
  Intron number 2 from transcript Bradi1g63090.1 (locus Brad i1g63090) derived from phytozome v7.0 (chr-ID Bd1; pos 622 93856 to 62294899 reverse strand)
aggcaggctgggaggtacatgaaggcaggttcacttttaattttaccacatgatctacaactctgcttattttttactcaagcattgtacattttgcacacaaatgtgcaattggagagctaggatcggaaatcgattgagaaatgcagttagaggaagacaatctaaaattctaaattgcttgcagttgctatggtttcagcaaaacatcaggttggaataaattataactgtaccaagataatacatggcagtatactagaggactaaatcgtactagcagggtacgaggggcgtggactagttaaggtaactagaagaactatacttccaaaactctctgcatagatgcagaaataatgtccactcctagtgtatcctatttccaaaagccacccaggccttgtttggcactaattttttttgtagtgttttctagggtattatccactccaaattggaaaacactagaaacccccaatggttgtttggtagggagggattagagggaattatcccttgttttcccccacaaaacacctcatttttgtataaattaaaaacacttctcataacactagtgttttggggtggaagggttttttgagagtattggcgaacatccaatcccctcaaatatattaacacaccagtgactaaaaaaatacactagtgccaaacaaggcctcagagttcttctaaaaacaagcctctcaggggcaactttatctataggtatgtgcttatgtccataaaaagcaaaggcagatcattggatgacaaaatataggttcctctagctggttacttgtttgtttcccttgatttgttcaaagtaaacacgacatgtttgttacatggtgtacaccattctgcattgaagcagtgatctatggctttcctgttcgaatcatgacgtgtgactcttatttgaggctatttttcttctaagccaagcgacgagggcccttcttcatctaacttgttggctttgtgatttttgtaacagagctatcaaaatctctgtgagcgttatcctttgtt

SEQ ID NO: 14547 - DNA, 954 bp, Brachypodium distachyon
  Intron number 4 from transcript Bradi2g03820.1 (locus Brad i2g03820) derived from phytozome v7.0 (chr-ID Bd2; pos 270 5606 to 2706559)
tgcagaactgcaaagataatcttgcatcgagccaggtgtgtagttagtcactgctcttttctgttttcattttgttagttgaacataatattcttgatcttagaatatgtaccgtgttagcgatatcaagtgactgttgtgcttcattctggtatgaatatttacagtaaatcaccatttggtctataatcaagtttactgtaattggtaagcaattatttgcaggtaagtcttatcaattgtagaagaaagagccaattttaggtgcaagttttgctgctgctattttattatgcctgtgccgtaggaatatattgatcaaccttttaaaaaaaaggaatatattgatccttgttccatgtggaataaggatgttcaatctgttagttatgactatttttgcaaaacgtctaggttcctgttaggactatgaatgatttactattttatgttatttgtagccccaaataacattagcatattgttttactgttttcaatgtttttccttcaatgtatcattgctggacaaacctgacggtctcacaaaatctactgtttcagaatagccatgaattgttttttcaatcagtaatgcaactttgaacttttgactacttaatcaaataaaaaatgcataaagtaataaaacttaagatacctgaaatatatctaaaagcttagacatcggagcgacagaaaggcatgtcacagctaaaaatacacccactgaacagatagtttctcttcagaaatcaagtagaatgattaaatgtgtgtcacttaaatgtggagatgtagttttaatagccatgttgcagttttgttacaccaatactgttttgcactccattccagtgttacatctacttagttaaatgtatatgatccaaaatattgtcagcagtgatgtttgaaaggctgcatttatatgcatcacaggtggaactggaaa

SEQ ID NO: 14548 - DNA, 975 bp, Brachypodium distachyon
  Intron number 2 from transcript Bradi2g23630.1 (locus Brad i2g23630) derived from phytozome v7.0 (chr-ID Bd2; pos 212 00830 to 21201804)
gcgtcgacaaggaaggtccgtgactctccaggacctaatttatcggtttaggattctgtgcaaacatttggtttttatttctaaacgttagtcagaacgggtttgtcaaataacgaaaccataatttgtttatttatttaggactccgttttggtttccatgctcatgtagaaaattattgcttacatgggttgcttgatctgtagcctgtagttctaaattataatttgtggtgcctgattgttctgtgtgtgcgtattaattctatgcccgctagtgtgcagactatagcatggttctacacttgtttcatttatcatattccgttgtccgcagttcctcactaatgatgtttccatttatagcatttctactgttctgaatatttgccattctgtggtttatctcttcgttaatgctaaaacgcattgatagcctgtgtaacatttttttaatgatacctttatatggacttggctatgctcaattatgatatctcaggtgatatctgacataagcatggctgatataaatacttggaatcagcactattcttcttatttcgtgggtgaagtatatcacatttgtgcaatattgtcttgtgcaacctgtcattcacctcatatactattcatgagtctactttttctgaatcttcaaaagctaatttgaagtttcgtgttctcagaaaacgtaatgcactgttatggtacttccttgtcttttctttggggataagatatgctttgatgggaaaaagatcttactctttactcccaccgtcccatgttaagtgatgaaatattacatgtatctagacactctttgtgtatagatacatccatatttgaccaaagttgagtcacttgggacggagggagtagttagtaaacccaaaagttttttgaatcaataagtttcattgctgtgtgcttcacaggtagaacacctctgaagtttgcaatacgttgtaat

SEQ ID NO: 14549 - DNA, 562 bp, Brachypodium distachyon
  Intron number 1 from transcript Bradi2g34690.1 (locus Brad i2g34690) derived from phytozome v7.0 (chr-ID Bd2; pos 347 79210 to 34779771)
gaaggtgagcaatttgggtctgaatctgtgcccttttatgctgttttgagttgttcctgaaatgaacttgtacccttcgatttagcatgttttcttgtggaatctggaatcatttaatttgctctacgcaatgtcatattcgtccggattatgggtcttcttgggttcctcggcattgattgatgtggcccagagattaggctgccattgtattacttatttattgataggccatttttagtttaccattcaaaagaggtgtcttgtagctacatcaactcttcataattatcctttctggccgtgacttgggtaatcttgttgaaggtattgaggggctattacccaaccttggtgtccatggtgggagggtacctttggtggaaattggtgtctgtactccggaacttatagaagattttggccattctttggggaaaaaacttctgcctattttatataatgatgtttagtttaactgacgagtgataactggtgatgcatttttgttaccatcttgatggttttgctgtttctgtctaccgttttcgcagggtgcgaa

SEQ ID NO: 14550 - DNA, 722 bp, Brachypodium distachyon
  Intron number 3 from transcript Bradi2g04540.1 (locus Brad i2g04540) derived from phytozome v7.0 (chr-ID Bd2; pos 316 6430 to 3167151 reverse strand)
gtgttgaaaggtaacgaaatcgactctcggctgagttttagtgaactcttggttaagaagtagcatcatttttatatgtgccctacacttgtaaaaattaacacacacaaaaattgtcttgatggctcacagaaagaacaggaatagaaatgcaacaaaattttaaagcattttgtaacatgtgaggaattttgttcctccaaaggagctaaggtattctcttcacagaaaattgggtttgcagcggatccatatccaccagcattgcatgtgcatcacagaatacgttgacattcatgagaagcatatatgcggcgctgatcgttctgcctcgatcggcatgctaattttgggggatgcaaaatgcaatcataagaatgcagccagatcgactaggccggttttttacagacgcatttcaaccacgggtagataatctccatatataacaatggggatatccacaatgcttccttagccatttgacttagttagatgtaggaaaacagaagtatgcgtcatggaaccctttcaccggtctataggagtatcatttttttattaagtaagactgattacatatgtttaccgttgttgccggctgccatctggaataatgccacacctgcatctagttagggttcatgtgttgatgttttgtttctagatatatatgtaccttttaagtcagaactaaccaagatttgtttgcatccattgca

SEQ ID NO: 14551 - DNA, 956 bp, Brachypodium distachyon
  Intron number 1 from transcript Bradi1g75410.1 (locus Brad i1g75410) derived from phytozome v7.0 (chr-ID Bd1; pos 723 13417 to 72314372 reverse strand)
cgacgccgccgactacccgctcgtcaccccggacggtgattcctctctgcacgcctgtttggatgatatatatagctctctgtgtgtgcggcgtttaagtgttatagatagatctagaatctcggtagaatgtgaactgtgaatcaatcaatctagttgcgttttagttccgagagaccgttaaatgttgtgtgtgattagtgtttaatgtagatggagatctgtctcgatgaataagcttggatgaactaataaagtaaagtgcagggagtagaatccgattgccatggtagaatttttttaattacttttgtagcttcctgagaacaaaatactactgctagtagtactcaagtcatccacaaacaactcgccaccatgtctgtttatacatggagcatgtgcaacttggtcctagactgaattcactctttagttcattgaaagaagtagcatcttccaagttgggaaatgcaaatggaaataaattattttggtaacatgactattttccatattgctactgttttctctcttttctgccctcaaatagtactctttgggtggtttgaatttttctgggtggagtaggcacaggaggcatggaaatggtgatctggttactcaagagaatcgttttctaactaaaactaatgtgttgcattagacgaggacagggaactggttttgttggatctgaagaagcgaagtaaagctttttaaatcaccgcctcatgttcaggcttgtagagttttcactgtacttcatgtattgtgtttgataattgaagttaacacagtgtaactatctatattttttataatagagtctttcgtacaaagttgcttggctataaaattgtataataatgctagtaggagaagcttagtacacactctatcaaatgtaactcttcttagctgacttgactccaaattgctggcagatcttctgc

SEQ ID NO: 14552 - DNA, 693 bp, Brachypodium distachyon; identical to SEQ ID NO: 14527
  Intron number 3 from transcript Bradi2g20890.2 (locus Brad i2g20890) derived from phytozome v7.0 (chr-ID Bd2; pos 183 10819 to 18311511)

SEQ ID NO: 14553 - DNA, 652 bp, Brachypodium distachyon
  Intron number 2 from transcript Bradi2g09640.1 (locus Brad i2g09640) derived from phytozome v7.0 (chr-ID Bd2; pos 791 8152 to 7918803)
tgcaggcacggttatagttgtacccgtgttctaagatccaatagcataataagtgtttctggggtgtagagaaggtagagagtatgctgcgatatgttatatttaaagaatataaaccattagaagatgtagccatgtgagttatgtgatgccaatgcaatatttgaactttgttcataggtacttgctttagtaggtttgagcaactaatcatagcgcacccactttcactgagaaagaaatggtcattatataattatttcccgagttaagaatgcaaaggtatagaaacaagataaagagaaacatagtcttcttatgtatgtgggtgaatactgagcagcagccaacagccccatagttccaacaccaatcatctgtcagttccaacaatatccgtcatcactcatctgcttatagttatatgtgccttttcttttagctgtactgttctaaatgcttgtcgtatgtaatatttctatttcgaattaaatattggcagcatacattttatgcttctgtccattgctatttgattatgttcatatatacattgctctcagttgatatctaatgcttttgtcttggtcattatctgaataattcatctctctcagggttacattagctttggccgctttatcagttctca

SEQ ID NO: 14554 - DNA, 528 bp, Brachypodium distachyon
  Intron number 4 from transcript Bradi2g15810.2 (locus Brad i2g15810) derived from phytozome v7.0 (chr-ID Bd2; pos 139 91750 to 13992277)
gcgacaacaacataaccacggggaagatctaccaggtgatccggaataaacagtctctgtcttgatgcacataagactccaggataacttgctatctactatagtgaaaatttgtggttcacactttaccttgagttctacagactgggaatatccggttaatgtttcttataacagtacaggattattgccataatatttcatggaacccacaaatattttcttatgtcactttaccagcatttgtggcttatgtttcaccttgactatcatctgggcggcctaggactagaactgccgttaaattcaaatgttgctgttggcaattatgaagtcttcgaaatttaggaccacaggagaatatgctataccttgaatttgataccccctcccctccttattacactaagaatttttaaacaaaattaaattaaattcacttgtgtccgtttcaccatctcatagctatatttcctttttgctcgaactacaggctgttattgacagagaacgaagaggtgactatct

SEQ ID NO: 14555 - DNA, 460 bp, Brachypodium distachyon
  Intron number 2 from transcript Bradi2g20510.3 (locus Brad i2g20510) derived from phytozome v7.0 (chr-ID Bd2; pos 180 07001 to 18007460 reverse strand)
ggcggggagcttttctggggatcctgacgataaaggtgcccatctccatctggttccttcttctgatatcttattgagcatattctgaagtaactttggtataaaacgatgggctcagtgttggagacagagtgctgtttgacttgctttaatcatgaggcgaatgctcaatgctgagaaaaaaacagtacttagggaaacccccaaatcagacgtcgcataacttgactgtgttgcctaaaaaaggattcagagtttcagactgtactggttccgcatggtccctgtgttcatttgaccaccgcttttaaaactgaagtgctgtccatgtatgtattgtgtttcaacatgaaaattcagacaatgggacccttatttgattactatccagtggttttctatatgattcatgtggccgttttgtgttttccaattatttcagggatacagacaaccttgg

SEQ ID NO: 14556 - DNA, 915 bp, Brachypodium distachyon
  Intron number 1 from transcript Bradi1g61320.1 (locus Brad i1g61320) derived from phytozome v7.0 (chr-ID Bd1; pos 607 02909 to 60703823 reverse strand)
cgtcaggtatgtgatgcgtctgttgtccaactaaagctcctgctccggtttcagtacagtactgtctggttcctttcttgctctcctttatgtcgccgaagattctttacttaactagagatacatggccatagcatctcagaaaagaaaggatgtaacatgacaccacgtacacgtaacgtctttctccaaagtcaatttttctgtcgagagacgtgactatgcacaaagttttattttctgaaagtgcagcatgacagaataccaagggatttttaagctgcgggtgtttaggatatgcccggtcctttccatcccttttcgtagccttatcttgagtcgagtcatgcagaaaagcaggcgcgacccgtgtcgaattgaagctcatgttgaagaacctgaatgatgcgagtacctacctacctaacctatcgtcgatgagtgtttctctctgacacgtatgaaggctttaccgaccatctcttttcaaacctgccgctcaagtacagtaacagactgaaccttgaaatctcttttgattaattgcgtggctgtgatgctgtaccggaaagaaagtgatatctgtaggctacatgttgcgcatttatgtaagattattgcagttttgttttttgaaactaagatcattgcagtttgggttgcaagtgggctcccacttaaagtcccacttctagttcatttggtatttgctacttcaaaatcttgactcaaaatttgaactaaaattgaaaatttgaactagaagtgggacttaggtgggagcccacttgcagttagggtactatagcacgaagggactaacttaactgcactgacaccagaactgaatttcacctttgcgcgctttcacgacgaacaggcacaacttctctgggagttcttccgtcggacttg

SEQ ID NO: 14557 - DNA, 998 bp, Brachypodium distachyon
  Intron number 1 from transcript Bradi2g17850.1 (locus Brad i2g17850) derived from phytozome v7.0 (chr-ID Bd2; pos 158 81946 to 15882943)
aagcgacttggatttgctcctccgagtctgtgttggtaagggaaccctagctcgattggttggattgtgccgataagttcgttttgttatgattgggaggatcttctcattccctccactcggttttgttattgttacaataggtggacgccacttgtttatttctctagactgaaggcttccagctttacaagctgcatattttctgtcactttgaaccaacattccgcagattaagtccgtctctggtgacatctataaatgaaatacacgacggaaccatagatatttgtgcaggcgagagagtgcccttcatttgcaattttgggcacgatagaatggtctgaagcttctgagaaaatcacagacgtcgaacacatagagtaaacctgcaaattttcctatttagattcatcacggttgtcgtgaaacaaaagacagggcaactcttactgtagcaaatatatctacaatctattccggccaacagtgacaatatgaacatttttttgccaccttttctttcccatatgaatatcatatgaagtactccctctgatcctaaattcttgactcaaatttgctcaaatatggatgtatctattcttaaaaaaacgtccagatactgatacatgtaatatttcgacaacaatttagggtctgagggagtagaaaaagaacctcttgtcgttttcctttgttcttaataccaacggtgaatttgatatcaaaatttgcaggcatagataaattacgtgagctacacaaatgatttttaatagtttttgaacagtacatcataacctttgcactcaaaatgtgactagaacacttgggcaccaaaatcgcatcatctgctcatactcgttgaaaattacattcgacattgacatgtttttcatagttgctctccaatccactcttgttgatgctgtcatgctgataccccattattagtttatctgtgcagatactggtgatcaagaggtgaaaataga

SEQ ID NO: 14558 - DNA, 996 bp, Brachypodium distachyon
  Intron number 2 from transcript Bradi2g09830.1 (locus Brad i2g09830) derived from phytozome v7.0 (chr-ID Bd2; pos 804 8424 to 8049419 reverse strand)
agttcgccaggcacgccgagtacctcaacaccctggtaagtacgtacgggcgcccgcccatttgttggcttcgctccttccctggatcggccgcttattgacctgcggcgatgcttttgcggtccgagattctcttgtttctgcaaaaagtgcaatgccctggaagaggaagttagtgcagaactatatatgtaggttagttagtgtaatttttttttgccaagatgttatgagtgctaggtgttcggtgaaattcccacacaacctgtgagtgaccagtggtgcggtggtagctgcttcctactgtgtctgctgagtgctcaactctaatcaagcagggtttcagtttaataaaaatgtcacattggagcgaacattttgatagccaagagaccatcaaccatgtggtgtgggcagcaaaatttgcgttgaaccaacctgattttctattcctgtttaccagggctctcttttgctactgtggatataagaaactacatcaattcctacataatatggagtctgtttgcaggcaatgctcaatctcgacccaattgatatgaatggcattttcttgcctctccccctggttgaagttagacttcctttacatttgcgtgtggatgcctataagatcgtggcaaagttggaactattgttgcattcctttttcctttactgaacttatcgtgtgcaattatgtactccctccctcccgtattaagtgactcaaatttactcaaatatggatgtatctatgcctaaaaagcgtctagatacatgtaataaaaagtcacttgatatgggacggagggagtactactttaccggcatgtctcttcaaggatgcctgcactatattctagaagtcttaaccaatcttctttaagatatacttcaatcctgccactagtttttccattagacaatgttcctccttaggtaatattaacttcttttgctttggttctcatcacttctccgtatcactgtaga

SEQ ID NO: 14559 - DNA, 914 bp, Brachypodium distachyon
  Intron number 2 from transcript Bradi2g35110.1 (locus Brad i2g35110) derived from phytozome v7.0 (chr-ID Bd2; pos 352 16308 to 35217221)
cttcagaaggtgcgttttttcagctaagatccttcacccgggaatcgcttcattgtcgattgcagttggagtgaacatgtagtgcatggttttgctagatcctatgctaggggaaaggtggtgatgggtgttgtttgccactaggcagagggctgatggcattttgtacgggtagcaccatagtggagtgatggggtacaagggcacctgtggaggaatggctagagagtgataaaaggaacgtggacagttttggtttttatttttgttggtgtttgttagtagattttccacgagtttatcagctacacattaacccctaattatatgcactagttttcaggaatagctgatttgaggatcacctcttgctctagtcacttgtagctgtttttataatatcttgtggttatgtgttttggtttgcgggaaactacattccgtggtacgagtatcattacaataactgccttaattgtattttgaccacacttacactgaaaaaggataggtgtgtcaatagggaaatgttttttcgtgattgaagaacttgatgtaaatcttttatgctattttagaggcaatttcgtactatcgaagatatataactgtcacatacatactgtgattgaatgatctaaggtaatcagtaacctttgttttctttttatggttgaagataaaaaaaacacataattacctacagaaatgtgcaaatagataaataaatataaatgttgacattgggagcaatttaaatcacttgaggtcttgattcttcttttatattgtcttggaagtagtctagactcaagaaaagtcatatgtgctgtatccgtaaagcgtatgtaggatgccagctctgagccataatctcagtatttttcgtgtttgagctgcaggaaattgctaca

SEQ ID NO: 14560 - DNA, 1004 bp, Brachypodium distachyon
  Intron number 3 from transcript Bradi1g70400.1 (locus Brad i1g70400) derived from phytozome v7.0 (chr-ID Bd1; pos 687 45754 to 68746757)
ctaaaggaaggtaactgaaagtctgaaacaacctacttgtgtgcaaggttgtcagaattgtgtttctatcgtgactgtacaaactgaatgaactggattaattctatgtctgtcgttactataatataattccttcgatgcatttggtttcgttaagataaaactttgaataagaattataaatatgtaatttacacgatagaaaaccaaaattgttagcaagaactttggaagaatttcctgtctcaaaaacacatattcattaagtaatttttgtttaaagatttgtcttaacgaaacccaatatgctgatgaaaagaaagaattatggttgtacaattcttataattaagatactgcgatttgcgttactacatacagcccgatccaattcagcacgattctgaggttcatatttagtaaacccaaccatgcacgttcaaaactacaaaaagaaaaacaattgcagttaactcaaactagaagttttgttttattattcccatttgggtcaattaaggaagctcgctatgtcaggaaccatatctgattaggtacgtactatgtttcttacttagaattaaatggttttgctttgatcattttgttacatgatactacattcgttcctaaatgtacgaaatgctagatttgtcttaagtcaactttcttcaactttgaccaaatttatcgaaaaatataccaacatttatgactataaattagttttacttaattcatcatgatatatattttcatagttcacttattttatattctatatgttgatgcatttctataaacttggttaaattttaagaagtttgatttaggacaaagacaggactactaacatttacaacggatgaagtatattttaccaaactcaactgagatgcacgtggtttcaccgttttggttctttttttttgactcaaatttgtatgtattctaaacatgacaatgtagatttgttccccaaaagttcgaggaaatattcacta

SEQ ID NO: 14561 - DNA, 777 bp, Brachypodium distachyon
  Intron number 1 from transcript Bradi1g66690.1 (locus Brad i1g66690) derived from phytozome v7.0 (chr-ID Bd1; pos 654 72839 to 65473615 reverse strand)
agctggggtactgctgtgcacaaatcggtcaacgggtgagtctccgcgccggcttacctccccccccttctcttcagatccgcctccagctctcccgatttagtcagggtttgtgtttactagcctgcgtatgcttatcgctgcctctcggctgcttgatctgacgctcccgcggcccgatctcagctgctggcgttgccgccgctcgttgattcttgtcaattgtgaatcgcgctttccatttaagttccaagctcggggctttagtgatcgcagtactatactgtactacttgcttagtgatcccaacgttcggagagtagcttagtggctgttctgtgctgaagagatcagtgatctgtgtattcactatgtagaaaaggcagttcttacttaacagtatgacgaagtgaacaatttgttcaagttgattctttttcttgatatatgtaggtagtagcagatatggtaattgttttgttttttaaatacaggcaactctgtttgtgcaactcaaagcagataggttgtcggctttgctgaatactgatacaaataatgtacacggatttaagttttctatactttaaactaaattggcatgcagatagtttggtatccattcacgttattcttatttttttacatttgtggcttgaattcttctgaaatgtgcatgctcatcagatatatgctggtctctcttgtgaatatattattttagtacgaaagaaaatcgttgtagcgatcaatgagcagttatgtgctatctatagg

SEQ ID NO: 14562 - DNA, 834 bp, Brachypodium distachyon
  Intron number 1 from transcript Bradi2g12790.1 (locus Brad i2g12790) derived from phytozome v7.0 (chr-ID Bd2; pos 111 58456 to 11159289 reverse strand)
ttgctgaaatctctctcgctctccaagggtttaaggtacaatcttttccccgcttccagttttcagtaatggaatcttcctttattctttgagtgattcttgctgcctgtttttgcttgctccctccaaattttgtatgatgtgttcagtcagtgtgatcaaattttggtttactcttcggcggatgtttacttcgctcccctccaagaactgttcttccgtttctggcaccaagaaatggatggtttggtttcgtgccggctctagatctgactcgtctgagcagctggactggtttttgtgtgaatcccagttcgggagtaatttctttggtttctactagtagtttactactattagaagttctaaccttttttctgttaccgcgataagcgtgccattgaagatgtaaatctctggagtctatcaccatcacctgctgtgagtcgcggacccaaatttcttttttgaaaatagttctggatctgaaagaaagggagagcctctccgctaacgcgctctcttctttttgagttgctatttctgttttcaagtttccttttaagtttcctctgcaaataattttagtctgagtgaactgtgaatctgtgatttccccccctcttttcttaagtgatttatatccagcagggtatcaaccttctattggtttgccttttctatttatggatagaacatgaaatgcacgttctgtattttgttgtgtatgttgaaagggacattctgcaacttgattgttggtaaatatttttccttccagctaattaacttgtcctttcaccagagagaaggtgaaattgtcctgaggggtat

SEQ ID NO: 14563 - DNA, 963 bp, Brachypodium distachyon
  Intron number 1 from transcript Bradi1g62000.2 (locus Brad i1g62000) derived from phytozome v7.0 (chr-ID Bd1; pos 612 90739 to 61291701 reverse strand)
gtcgccgcccccatccaccgatcgatccttcgcaggtaacgccgggtcgcgccctctatcccgccgtcgatcgacggcctaatgtttatttccctctctctcgtcactgcattcggtgattggacgcgattgtgatttcctccgttccccgccactgcgtgtttatggcggtgttacgtttgcgggttggggtgtgaaatgtggcgtttgtttggccgagttacggtacggtttgatttatgcctttatggttgtgggtggtggtcgaaccgaaccccaggaatgggggtgaattgcgagcaagcgatcatcggatttgtgattgttctgttgataataggtgatgatgtatgttgccgttgatatgtctggtcgatcggatcggtggttgcattgatcgaacactggctcgcggtagcccggtttttaaaacaatgactcctgtcggtacatagttcagtgggtggtgaaaccgtgaatagataactaatagctcttatatgatttgggtgtcatgggaggatggtgatattggtgatcttgtaatgatatcagagattgccattttctttgtttgattcctatgtgtgacagacacatggtcgttggtgctgcatatacatgcctggatatatatgttctgatgtgacttttagttttggcaggagcaagaaattaatgcgattccagcctcatgacttgtcatgacgaaattctgttcggctgatgatactccattggctggcgttctcttatttgttgatagttccttgtcccagccgcttacttcttcagttgccttctcctttctagttgtgttgtttgaatctcattattttagtttaacgtctatattcaatccatacccaggaccctaattaaaatataggtttttatgctctaactgcttttctatttcctttctcagtatataagttccaagtgttctgtggcagttttttg

SEQ ID NO: 14564 - DNA, 572 bp, Brachypodium distachyon
  Intron number 2 from transcript Bradi1g49700.1 (locus Brad i1g49700) derived from phytozome v7.0 (chr-ID Bd1; pos 483 73923 to 48374494)
taaccttgttagcgatcgtgcttaaatctggaaatgttagtgtcttgtctaactaagtacaatcactgctggcgtggagcctcggtttgatttttgtgagtaaaggtaactcaaatatgtgctgattttccatcttgcctgaaagaaaccctatttaatttggcataatgtttttggtaaccgggttgtgaaggagaaagaaagttattttgggtttgtttatttcatgtggtagctatcggtattaactgtgtggtcgtagcacttatttgctcttgaggatgaatatctgcatggtttagctttatttctattgtgcatattcatcttcttgaacttatatagaattttccactctaagctagcggattttactcatgttagtggttgttttttccattttgctatcactttcttaccaccatgctttatcttaagaaaagttggatactttaaatatgacagtacaatcttgagctgtgttgtatgcttatatttttgcattagtttatactcatattaattttgatgacctattgaataattttgttcactcttgctatgcagattcc

SEQ ID NO: 14565 - DNA, 666 bp, Brachypodium distachyon
  Intron number 3 from transcript Bradi2g25930.1 (locus Brad i2g25930) derived from phytozome v7.0 (chr-ID Bd2; pos 242 06538 to 24207203 reverse strand)
catatcctggtgagtattatctagttattaccagagctagtatcatttgctttgcttcctaactgtccataacgggcgttcactgttattcatgatgtttatggaatcaaagttttttgaatgtattttctcattctttctaggatttggatgtttttgttgatttcttatattggatacaactatacatgaatagtagtttgtattgtttgaaaaatgagttagcatttgagtctgataaataatagttcttgttgaaagtaaacttattatgcgactttataatatgacaatcacatctcatgcaatgaagctatatcttcaatcttggttcatagcattttcagccgcttagtttattgcttctgataatctattaactagtaagttcagaccaactttctatcccgtcaaatcattctctgagataacatactagaatatggtcttactgcaagagcactttggtgctgtttttacattatttaaggctatttccactaacttttgccttgccagagttttctgcacgtgctagccatgcttatgcagtattgtttgtttctattgcaagccatgagataccatcaatttgaaatattataataaatgtgggctatcataatactaggtggtttgcaagttggaggtggaataaatttggag

SEQ ID NO: 14566 - DNA, 885 bp, Brachypodium distachyon
  Intron number 1 from transcript Bradi1g59010.1 (locus Brad i1g59010) derived from phytozome v7.0 (chr-ID Bd1; pos 581 15558 to 58116442)
tactgggactacgaggccctcgccgtgcagtgggggtgagtcgagctcgccctccgtgtacccctccccatcctcctacttcagcttttgttcttcttcttttcccaccccccgtgggccgtgccgcatgagcgcatctcatctgccttgcgtgtcgtcgtggattcgacccatggcctcgtcgcgacgggattcagggatgaacctgcgctcgaattctagcttgattcagggatgctgttgcctgattgctttctagcaatacctgagttcgctactcactaccctcatattactgttttctgatactcttgctcttggtaggccagtacgaagttatgcgtccgtgacgtgccatggttgtgtatcttggaaatcattattactagttttgaacatccttaatggaagtgttgtttacttttgccaaatagggcgctgagttcgactgtcggaatccaacaccggtgttatttcctatgcccgacatatcttgctgaaacaggcacttgaatatctgtcttggattgtgaacccactcttgtcttctagaaacactacacatgacacctgcatgttctaactatgttgatttgcaatttagtgaatgtgtgtaataaattttgtgacgcacagctatatttaaaattgtgacgtacacttgatgcttgaatattagtgacaataaagcttggatggtgcgtaaattataataagggcctaggcttttgcctgttctcctttgagcttgtcatgtgatttactgctttcttactgatcttatattgatgaaaaagacagaaccttaagtctgaccaatccacccagtgattgattgatttgattctaactagcatgatgttctttttccaatcagtgagcagg

SEQ ID NO: 14567 - DNA, 941 bp, Brachypodium distachyon
  Intron number 1 from transcript Bradi1g49550.2 (locus Brad i1g49550) derived from phytozome v7.0 (chr-ID Bd1; pos 482 51166 to 48252106)
cgccgggacgagtacgatctccttctttcagccaggtacgagcaccaaccaaccccaaattcgggccaacttctccttcctcgtctctgttctccagctcgccgctgcgccttcttcctgtccccccaccaaacccttcagcagtttctgggattccgctctctatccttcctctagcttcgcgtgatctgctggatgatgccctattcttcctatgtttagtctaccgacgccgctgccctccgtacgtagcttagcgttacctccgagacctggcccctatggtggcgtcgccgttcatgctctgactcccaatcctttcacccccccccccccccccccttccgccaatcttggcttttcaaggtatgtgctgctcttactcccaatcccaaactaacctctgttagtctgccagagcacacccggcacacaagagatccgccccctttttatgcaatccagtgacagcataacgactgcagatcaagaggaatttttttggaatcgaaaagcgaattttcaatagagaaggtgaatatatgagatgggtacaactatagtttttaggattctactgaaccttttagtgcgctaagtttgattggaactctataaccagattgaaatcagttgtcatcgagtgacctttatgttcctctgaacaaacatatgtcatccctggattgtatggttaatactataaaccaaaattcagtccagcaaagttcctattttatcttgaggctctgagccttcttgttgtatcatatgcagcagaacagaggtcattgggcgaacacaaattaggtcattagtttttggtttaagttctttttttcctgcttcacttgcgtgtattcttatgtcgtattaatctcccttggttcgctgttgtaatttttacaccacatcgcttatacagttagtcaagatccaat

SEQ ID NO: 14568 - DNA, 1052 bp, Brachypodium distachyon
  Intron number 1 from transcript Bradi2g09940.2 (locus Brad i2g09940) derived from phytozome v7.0 (chr-ID Bd2; pos 812 2682 to 8123733 reverse strand)
ctcctccgactccaagagaaggaagaacaactctggtacgaactcgtttccctccctccctcctcctcctcccccgccgcatcgcgaacgaatttcccggcattgccgtgcgttggtttctccggcgccggcctggcgagattggttagcagcctctcggtttaaggtttcttctcggcgttcgattccgctaaggttggttgttctcggcggccacggacgccggttagtctgccaggtttgagacgcgagccgtgagacgtacgtgtctgtctcgattgggctcgggtgcgtcctccctcgattggggcgaagcgccgtggttataattcccatcttcttcaagtttcacgtagtgcccctggatccctacatgttggtgtggtcgaagctgtggtggagtcaggataggaggagtttgattttgttcacgttgtttagctgtttgtgtggtgtgtgtgtctttcgtgtggacataggaggtcattaatatcagtagggagtttcaagattccgccaaatcttttcctaaaaaaaaaaactaattcaattcatgtttgtactgtttgcatgcttgcagaaagcaagctgcaacatgcgatcagcgaatcttctctctgctcctcgatcttttcttaccctctgttccttttctcttgaatattctctgccatacttttcccttttatatcttcccctgttctcttcgttttagctcttcattactcctcttgattctacatggatggtgatcaagttgcattgcttttgttccctatttgagtcaaattcaagataccagttcagttttcctgtaggcgtttcaagtaaaaaaaaaggaattcttttcttagcagacgccggtatggcaatatttcataacggaaataagaagatgctaattcgaccccctacaattctggttgttattcaaaataattctcttcttattcaaaagtgaagatcaaactgacagtctgtttacacttcccatgttttctgcaatttgtgcctcaggcttgaaggctcaagcgcgcacacacacacacaaa

SEQ ID NO: 14569 - DNA, 865 bp, Brachypodium distachyon
  Intron number 1 from transcript Bradi2g38970.1 (locus Brad i2g38970) derived from phytozome v7.0 (chr-ID Bd2; pos 391 72652 to 39173516)
gatcagctccgacaacagctcctcgtccccttcaggtgcgtgcctcttcttcttgtttctccggatactggggaaacttctaattggagcgctaatttgagctatccggcaggctgctaggtgtttttgttcccccaatttctttctcaagtgatcaatcgatttttttttcctcctgaggcacacagtcgatttattaggaaaacaagtactggatcaacaattggtctgtggtaattgtgcgctttgcatctcttgtcctcctccggaaaatagtactattaggttatgctgatttctgtccaaattaactggattaagatagaccaatcagtaaattcagttgatcaccaaactggatttgcctcctagcaaagttcagttcctgctctagaaaaatatctgtattgagcttacactcttggtcttggactgcttcatgtttgaacatcaattcgttcgttttaggggctaggagaggaagcttcggatgtaaatgctagagtttgcttttatctgacttttcctttgatttctgagtgccctgttgaaatcatctgacagataggaaggtttgaattcggatgctgcttttggctaaaactatgtgcttttcttaaatgttacgtattgtctgtcttatgctgcttatttaattctcttctaattaaagaggaaagttcatatttttcgtccgacctaacttatccaagcttaactttttgccgttcaatgttaggcaagtcaaattaatgatacagtaaggaacagccatttttctacactagaaatgtgattggataatgtctgaaagtctgcactttcttgtgatgttcaggggcaacttccaagtttgctagtagga

SEQ ID NO: 14570 - DNA, 1053 bp, Brachypodium distachyon
  Intron number 1 from transcript Bradi1g65320.1 (locus Brad i1g65320) derived from phytozome v7.0 (chr-ID Bd1; pos 643 52427 to 64353479)
catcttcggcctgaacgggtttggtgccgatacaggtgtgcccctcctcctttaatttctgatgatttagacatttcgtattttagttagtccattactattgtaacgttggcgttggcgctggcgctactgttgcagttattttgctgctcttatatatttgttggcaacatgaaatctgtgattactttgctctatcccatggtgtgcaatgcaattctgcagacagactaagttgctgtattgagaaatattttttttggatagtcatgtgatgtctaatttgtctaccaagcaaacggagtgaaaggcttaaattgctgacatattctactatgattgccaaatcttgtacttcctttgagtttctagtggaatatagagagatgtaaatcatgtgtgcccttttctgatttttatgcaaatttatggatattttttgtttaggccttgtccctttattgtaggatacactgttggctactttcacttactctgccttgctgattgttttgtagtcctattttgtaaattacatttgtatctgttttgtgattgccactagaaatttatgagaaaccctgtacacatagctgatatgctactggttttgcaaactctggcaaggcaagtgctggactgctggttgctttagggcatgtacaatggggtgacgtcagccttctcttagcgatgccacataagataaaatctgatgtggaagagagagaaatgaagaaaaaacacaagctttctcttaattaagagatgatctcttcacaagaatgataaggcaaagataaagcaaatttaccattgtactagatttcaccttttcttagcatttatttagttaattttattcatctaaacattaattctaagatagaacactaagagataacccattgtacaacatgttttgttgtcttttctaattgatgtggaatgtctaaaataagacagtcttatcaaccattgtacatgctagtgaaatgagtagtccatggatattcagttactagttttgacttatccattgatcggcattat

SEQ ID NO: 14571 - DNA, 685 bp, Brachypodium distachyon
  Intron number 2 from transcript Bradi2g31990.1 (locus Brad i2g31990) derived from phytozome v7.0 (chr-ID Bd2; pos 320 62529 to 32063213)
tgtgaccaataacacattggaattccacttacacggtatgattgttttcctgttctgcctaatttatccatgattcctcatgttttgggtctacttagtttgtctctgattttgtgttacataccttttgatgtatgattaagatgttaaaacttagcacttgtaagatacatcgggactcttagccttgactttctaaagctatcaatacatctatttcatataaatactgtataaatacatctactcacatggtaaattcttctgactttcaagtgaaaactggacacaactgaaactgcttgatttaaatttctggagtacagttcatttttactaaagtagtgcatgaagtcatgatcagaaattttgcatttatggggaagaaccaagtagaatcagaagccatatagtaggaccctcagtttcacaaaatcatatagtcatggagaaatcagaaatcatccattgaacaccaatcaacatcattacatgatgacactgcagcagtgcatctttaaatttaaaatcttcaatgccactagtcttttccctggagttgctttgatgaagtcagtaaaattccttctcaactagggaagcttatggatgaacttattgccttaagtgttgttgctgattattaagaccgattttcaccttaataggaaaaggtcgacctgtg

SEQ ID NO: 14572 - DNA, 1054 bp, Brachypodium distachyon
  Intron number 1 from transcript Bradi1g75340.1 (locus Brad i1g75340) derived from phytozome v7.0 (chr-ID Bd1; pos 722 57450 to 72258503 reverse strand)
atcccccaccgaccacgacatctcccccaccataggtaccaccacggccttcccaaaccctccgctccgctggatctcccagcttcaattcgtcacgccgtgcgcgcgtcgtcccccaccctgcgcccaagcctgccccgtcccgattaggggaacaccgcagcaattaatgctgtctctgatgggacggggatgggattgctgtcgcggctggcgttatcctgtcccgctgtttatagattatcatgatgatgccccctcccccgtgcgtgccgtcttcgtatattttccctgcctggagatggtcatgggctcatggctctcatgctagtgctggtgaagtcggttttcgagggtgctaagctaagggcaggggtcatcacccgcgacaccggccgcgacatcagtttgttggggatacggggtgccagggtacttctgctctttagcaacggctcgtgccgcaaccttggtttttaaataacaggtgtcatgccgtgcgtgggatagatttttgatggtctggaaggtggaaccttgacccgagaatgttttgtctgttcattcgttaagaggctagaaattcgttagtggtaagcagcggttttaaggcaaggggggtcgcaccgtcttctttttattctcctttttcaaaggaaaacagtgggacgagcttttaccatctggttcatgcttggtgctactacagatgaaaaaagaagaagattcaggagcgtctgtaaaactacctcgcttaaaatcgagtgaaactaattttgacattactagcagacgaaacaggtgtggcgaactatattccaaatagacagtgatcagctcatctcgcattctgtcagtatcagcacatttttaccatgaatattttccagcactagtaggctagcagctccaactccttttgtcctgaataggaacccatccagttattccaccatagttgatgtatcgtccctgttatttacttgtcagaatttatttgaattgacaacgatttccaggagtggattttaaaatcaagtttctcactgtcggt

SEQ ID NO: 14573 - DNA, 968 bp, Brachypodium distachyon
  Intron number 1 from transcript Bradi2g35570.1 (locus Brad i2g35570) derived from phytozome v7.0 (chr-ID Bd2; pos 359 10046 to 35911013 reverse strand)
caacgccgccgactaccccctcgtcacccaggacggtatggccaacgcggatttgtgttggtactcctggattttcgttgcatggtctctaattgacacgagatggccccatgtcggtctttcatttctccaatagtgttgggaacgaaattaatcttgccagctacattttcgttaatcttctaatatcaaatggaggagtgttcatgcttaactgtgacacaaacaaggtagcaattgtttgcagcttacagaccctgggaattagttaggaaccaagtggctattgcccacacacctccctatggacgaacattattgtctgttcaaagtaacggtaaattcaggcccctgtttttcccttggttttgacatatctgaagtagaatagacaatgtacattttgtaacatcaaatggaggagtattcttccataagaaaaaatggaggagtgtctatgcttaattgtgacacgaacaaggtagcaattgtttacaacttacagaacctgggtattattaggaaccaagtggctattccccacacatatgtagtgccatcgcagttatttattaacctccctacggatgaacattattgtctgtttaaaatttaaacggttaaattcaggcccctgtttttcccttggttttgatatatctgaagtagaatagataatgtacattttataacatgcactgcgcctatatgtcagttataaagctaacctcaaataatgttgatgattgtcatgctatgtataatttgtttgctagtatctagtatgtgctgtaccatgccgagcgttggagctgttttgtttttcgcatgacatctccagtgtatcttgcacatatatcactgatattttcttgttaattttttttgcatagtcaagtgcttaagttcatactgattatggtattatctattgtacattttactctgttgtgttgcagacttgattc

SEQ ID NO: 14574 - DNA, 885 bp, Brachypodium distachyon
  Intron number 1 from transcript Bradi1g54400.1 (locus Brad i1g54400) derived from phytozome v7.0 (chr-ID Bd1; pos 527 79103 to 52779987)
tttctctctcggcgaggagacagagatctcgcgaggtacgtgttagtccccccttttctcttctcttctcttcctacctccgattcgagaaccgtagatcttagtgctacgtcgcgggcctccttctcgtttgagatctgccgcgcgtccgtgttgttttcgttcgatttcgatttcgatttcgtttcggccgaggcagctgcgggcgagcggcaggccgaggggagaggggggagttcgcatttaaataggagaagggaaggggaacggaggtagtacggcgtgggtcgccgacgggagggccttaacatcccggcgggcaggctgcgagcggtgttcttcgcgtcggcgggccgtggcccgtgggggccgagggacgacacctgcagcggttgcctcgatgcctcgtggattagtacactcatttctaaccggctagtataatgataataaaggatgtactcacatgcgttgttcgtcttattcacaatttcgtcatctgatctgagcgatattgaggtctggcagcactaaaactccacacggaactttaaacgatgtagattggctgcgttggacattgccattttgctgttgtccactggatgttcagcggaacgcatgcttatcatgtgcattctcgccggccaagtcaaactatgaagttttgttttgttttgttggacatgtatatgatttttgtccccaatttcttatgtataaggaaagcaaaggggaaagattctgcacaaataatttgctggggtcagtttgttttaataatgtgttatgattccatctattgttgacgcatttgtttgatcctctgttgattactcttctgatacagttggaagcttaacttattaatactcctctgatctg

SEQ ID NO: 14575 - DNA, 952 bp, Brachypodium distachyon
  Intron number 1 from transcript Bradi2g35100.1 (locus Brad i2g35100) derived from phytozome v7.0 (chr-ID Bd2; pos 352 13231 to 35214182)
taggcagcagtaacaacgaggaagaggaagaggaggtaaaaagaaaaaggaattttctagctgcaagtagactaatgtctactccctctgggaaatgtagacctagaaattttaaccggatgctgtttatttgtaccaatactagaatactggcatttcttacttacagacttgccaatcttcccttgtagagttcattctcgtctgctgggtctcattacggtaggccaattttgctcccattgtgtgaggactggataagaacttcttgcagactatttcccctgacagtggactttttttttttgcgaacaaacaatatgtattaatcagcagggatacaatcgttcagtattttttttgtgattacatatttacatcttcagtatataacatgaattaactttttagttgactccattcttgtttgattggtagttgagtataggttaacagattgagcttgatatcgcctgggattttggttcagcttgacagcatttccctgcatttgcagaactattctggtgcagttttgtatctataaatgttctgtaagatttctttttctttttcttctattccaaataaacctgctatgctatgtgttgaaactgtcctacttttagtcccagtttctacattgtttctgctacagtgaagtctggctcagcttctgctcaagttcaagcccagcatagcaaggggaaatagtctgtgtgcatcgattgatgcagaggccgggaaacgtccctttttcggagggaaaaaggcctaaatgcctaatccaaacgagttttttgtccccaggattgaggacagggcgatcctgaaattctaatactccaatattagcgagcaattcatcatcgatccttcgaccgaccatttatatttagctgctttctgaaataagttgatttttaaccatggcaggaagaactcgttgaca

SEQ ID NO: 14576 - DNA, 1002 bp, Brachypodium distachyon
  Intron number 1 from transcript Bradi1g54540.1 (locus Brad i1g54540) derived from phytozome v7.0 (chr-ID Bd1; pos 529 15718 to 52916719 reverse strand)
ctgcattcatcaggtctggcagctgccctaagcgtgtaatcatgtttgataattttatccattgttactatcgtgatagaaatcaacctccctaatcatgacgaaacatcacaggatggtatcatttatttatcgcttccagtgtttatttatttttcattcttgttaacgtttgcataaggcttacaagaacaactaaacatgaagagacatcacaaaagttatgtcttttaattattgctgctgatatttttctccactctgataagtgctgcattagaaccacaggaacaaccaaatgtgacttttggtccttctaatcaaccctgcaccattcgtacccattagtccattacactgataaaacttgcttaacatttgcctatttcattttacttttttatattatactttttctgacaatttaattaaactttttggagatggttttgatacaagcaccagttagctacaaaagtaaatgaacttttctcttccatgttttcatacttatacctatttcccacttgttagctgagtggatggttggaaaattgtttgataagcatataacaaagaatcacacacaatatagtcagtcagtcactcctaacatgttttttcatcttatagtttgtgtctgcaacataaattctgtagggtactaactttcctgtaattttttttctgtcctcaccagaaaagtcaatgctctgacaatcaagagttccagtattttttttctagctgtaacctctcaagtgttattaattcagaaataaaggaatataatcatttttttcatggtgaattagtgatgtgcaaagcatcggatttgtggcatgtgatatcataattttgcattaagtgcctttgctgttgaaataactagtttatttatctcagttctccctcttattttcctttgtccccactaatatctgataactgatcttctggacatcagaacatcgaaggagatatcagatctcgaaggggagc

SEQ ID NO: 14577 - DNA, 890 bp, Brachypodium distachyon
  Intron number 1 from transcript Bradi1g55440.1 (locus Brad i1g55440) derived from phytozome v7.0 (chr-ID Bd1; pos 538 82150 to 53883039)
cgggcaccttctccaagctgaaggagcagggcaaggtatggcctcccctctccagcccggccacggcccccgacggttgcgccgtatttttggttccattgaattaggttgcgaattggcgatctcttattccgtatgtgttggctacacgcgcggcatggtctagacttggtagctaattgcaaactgtgagtccctgttcgcgtcctgatgggctggatcggtcgggccagggcgaggtcaaacctctccgggtttggtgcttcgttctaccagtgcattttgcgtgttgtcgagcaggattagatgaactttagggtgcatcggatgatttgggccgctgttacagcgccttattcgaattttgctcatgttgtgggttaaatttgtcctgcgatcgtccaggtcgcatatgtgttttctgtggtgacatgagtctctttgattcgaaccaggattatgcattcctgtgttgggcaaggtagagttttcggcaattaaggatgtaaaccctaatgatatcactacgaatgtttaggtctcattgtggcaataaaagtttgtacttggaagagattcgcgttcggtgggtatcgtcaccacccctattttagttatattactgttttcatttctgcaagtgggtttcataactttaccatgtttcattttctcaatctgtagtgcccgcctaatgtttatactcaagctcctaaaatatgaaattcatttatgtgacttgtgatgtgatatatttctctaggtcatcatatatgttcataactttttttgtctatcatactagtattatatttaaaattttctttgtcttctaatagcatttgcaatttccagattgcattcattccattcatcgttgctggtgaccc

SEQ ID NO: 14578 - DNA, 829 bp, Brachypodium distachyon
  Intron number 1 from transcript Bradi2g38590.1 (locus Brad i2g38590) derived from phytozome v7.0 (chr-ID Bd2; pos 388 69508 to 38870336 reverse strand)
ctaaacgcgtcgggggaagccttctgatcgggcaggtgaggcaatcgatcgatcgatcaatcctagctcgtttttttttgccgtcccctgtttctggatccggcgattccggcgggttgtcttgcgcgagggggagggagctgtggttctcgtcgccgccgtgtcccggacgccgcgatcggtcctacggcgctgcgctttcggcggtggattccggggatacgtgcttgcttttcttttgattttctcatgtagtttgagaaattttgggggccgtgagttcggctgttttctctgcgcacctgaatgtgtcctagggcggcgagatggtgagggtgggtgccgacttggatgcaaattcggtgatctggatcgagaatgtgtcatttcattcctatgcctgccgtcgtaccaagcaagcagagacgaatcggtcgacaaggtttccgaagctgaatacgaggatcggctttgctgaatcctatcttgtgtggttctgatcagagtcgaattgctgacgggaaagggtgctgtgatatcagatatgtacaagcagtagccttcttattatcctcgactgttctcatgtttccagaattaagttgggctatggagaagaaactctccaatccctgtaccatcttgacatcttcaagcctatcgagcaataagaattgtctgcgactggaaatggatgtgcttccaagttccaacacttggcccgaccacgtctttctttagatgatcagcttagttacacctttgtggcttacgtttaatgctggcctttgcaggttaattgagtacggcatcttgaacggtgcctata

SEQ ID NO: 14579 - DNA, 321 bp, Brachypodium distachyon
  Intron number 1 from transcript Bradi1g51160.1 (locus Brad i1g51160) derived from phytozome v7.0 (chr-ID Bd1; pos 495 83101 to 49583421 reverse strand)
aggcgccacgaggagaagggctgcctctacgcgtcagacctctagttctagctatatgatgatgatccactccactatttgagtttctcctcgtcttatattagccggaattttatttttctcatgcacctttcgatgcagaagatgggggaagacgtgaattatttcctactccgtatattacaactgattatatttatgcccctgcttctgttatgaactcaattcattaattcctctattattatttttgtttctctgacgattgagatggatttgggtgcagcttattcacggcgctgtgctgcttctgctgctacg

SEQ ID NO: 14580 - DNA, 824 bp, Brachypodium distachyon
  Intron number 5 from transcript Bradi1g69370.1 (locus Brad i1g69370) derived from phytozome v7.0 (chr-ID Bd1; pos 678 07749 to 67808572)
ttttcttggcttgttattgcggctgttgctgggtaagttatctgttagacggcaattatcaaacatcagttatatgtaaactccaccagaagcttcaacattagctcaacagaccacatcacttatttgtctgttcagttatcaattagtgtttgtctaagagggcatcccaacagcgtgaatacaatccagcaatacctttgacgacagagttgtgcgctttgtgcttgtggaagctttgaatttggcatgagcatgcaaatgtttacggactgtcgaaactttaaatcatctggagaagtcagaagtggataacagaagataaatatgcaattgataatattgtatgggaagctatgactgttgtcctgatcctgactgtgactgaccgaagcaatgattcacattgagttttaagcctgtaacactttccagctgagactgtttctgttctggtgaatcataatttatttatatctcatactcaattacctctacacccctttgttataagctgagtattaaataggaatagtcaataaggaaaacaaaactttatcttccctaatattgcagccatctagtttcattacctcagttggagcactgcagtcctttcatccaggctgtatctatttggattatccaccttcaaattaatcatgaacgttggtgactcgtgtttgagtttgtggcagttatcttagtttcattggtcaaaactaaagcatgtccatgaatatatttttattaattgtatgagatattgggtcatttatctttaggcatgctcatggaaacttctttttttcacaggtcaatca

SEQ ID NO: 14581 - DNA, 662 bp, Brachypodium distachyon
  Intron number 1 from transcript Bradi2g17290.1 (locus Brad i2g17290) derived from phytozome v7.0 (chr-ID Bd2; pos 154 02059 to 15402720)
gccagcgcgtcctcaacaccggctcccccatcactgtaatgacacatcttgctcccgctccaagtttaggatggtacatttctgcctgtgatgcccgtgcccgatctgatgagatgcagatctgggagtgttatgtttgatctgggtgtacaaatccgagtagcacctgttgatatatacatctcacttgtgttttatttactgatatactgtttgctgtcttgtatgtgaagtgctataatttattttgttcacctagtttcaatgcctgtggtcatatgttggtttttgcagtgtgttggtgcgcgcatcaaacatttggagtttattgtgatcataggtgcacctttctgatataactaggtttaattgttatgcatcgtaggattatagacacggattgtttgattgagaacactgtaacatacagtcatctatttgtcaggtgtttgcttagttaattttagaaattaggaggacccaaaatgcttctggtgggattatttcgcagtctgctgcagaagtctcttcatgtatatgattaaattattgcttttttggaagatgaaacgtaaacacctatagcgttgcttcattttgttttgacacagctgtttttttccctaggttcctgtcggcagggcaacacttggacgtatcat

SEQ ID NO: 14582 - DNA, 886 bp, Brachypodium distachyon
  Intron number 1 from transcript Bradi2g21340.1 (locus Brad i2g21340) derived from phytozome v7.0 (chr-ID Bd2; pos 187 16030 to 18716915)
ctcctcctgcgctccctccgttcgtcgaatttaaggtatttttctagcatttgctcctgctagttcctgtcggtctgatctactgcttcgtgtgaatctgcatctttgccgtgtggatttcgggtcaaatgatttgaaataggtgatgttattttgggtgagaaagtaggaaatgtgcgcggatctgagggtctatccagtggttttggctctgagatgcgtggatccggtagtttcagttggtgctcagttttgcagtgggtagatttgtgcttttatagtgacaagtgcttcgatctgctaggtttttttttttttttttggggggggggggggggggtggggcggggcttgagatttgtgcgcgtaacgcagcagatctgcagtgcgcttctgggaatctggcggaaagcaagcatgtagcccttgcatgagttctttgccgtgattctccaaggttcctattttgttgaggcgatacaatttagttcaatccccgcgttggatcatttagggaggcagattccgtttagccatgttttggagcattagtctggtggtaatttagtaggcacttgttttgttgcagcgttctatgtttgaaattactgtgtggccgcatctagtcacttgaagtcttgctttgattgctcgctctgagactaaggttacaagtagtatcgtagagatcttcggtttataacaaccgcagatgatttgtattttctacacatactttatgctttggttcagaaagtgaaacatgtcagatcttgctttattctgagtaaatctagctgaatgcatcattttgcaaggtttactgccctataggacatattgcactgttgcttatcctatgcattttgtgattttcagagagaag

SEQ ID NO: 14583 - DNA, 613 bp, Brachypodium distachyon
  Intron number 3 from transcript Bradi2g21340.1 (locus Brad i2g21340) derived from phytozome v7.0 (chr-ID Bd2; pos 187 17835 to 18718447)
ctgtttcaggactctcaagctgaccactcccagctgtaagcaaaacttgcctcctcttattgttacgttttacagatggctatgagtatgataccaattcaatcttcttaattctggctattttgtaaatatctgttgtattatgcttagcacaaatatgtaatgcagaatcgctatttttcacatcatgtgctcagctgctcaatatgactaactaaaagattgaaaaatgttttaggtcattagtttgttttttaacttgtgtttttggaaagtgttcttgttctggcaaattatttgattagggcatggtctggaacacttgttgagccctagtgctggatacatctattagaaatttgtgtgcactttattttgtgatcactatttgtatgttgttatgcttcagatctgtcttggttacatgctaatccaacaaactgtttatatggtattatggcatgactctaggatactattttatcttcggctgaatcacatgaaaccaaacaaacaattttaaggcctatcgtttgcttggcctctaataacattcttctcatgcatgctaatttctgcagttggagatttgaaccatttgatctctgcaacc

SEQ ID NO: 14584 - DNA, 875 bp, Brachypodium distachyon
  Intron number 1 from transcript Bradi2g10250.1 (locus Brad i2g10250) derived from phytozome v7.0 (chr-ID Bd2; pos 844 1415 to 8442289 reverse strand)
tcgtcgtcgacccgctccccgccggcaaggaccacgtacgtacgccacgagaaacacaatttttgtctgcctctcgtttcggtttgtttgttagttagtatgtttgttttgggacgtggggcaccgtggggctacgcgtgcagaagaactgtgcgttcgggaatttaagacgagaaaaaaaaaacttggtgcttcggttcggttccaacttacagtgtcagaatcaaatggatatttctttatttttgtttccggcaggtcgatggcctctttgattctcacgattttcaaaacacaaaactagtaaaaatgcagtatcaaagtgtcaagccatcttgaatagtataggagtcaaatgatgtttgaccgtgcactgtaaaaacgtagaattcttttcaagagtttggagtggatgaaattttcgtatgaaatctagtgcaaatgaattgcaagaaaaagttctatggtttgcaatcctatgaatcagatgcaagtaggaaaattttcaaaaattaaaatcctccaaaaatcctttggatatcttttgaaacaaagagtccctgacataggggaattgctcctgctcatgattctttgtctgggaaaaaacccaactaattttgagaagaaacttgcatgtggggtaaagaatcatggctaatttacagtaccagtaaggcagcatgcactcaacaccttgtgctgtaacaacacactagtgtgatcttttcaagtcttgctttcttgccttctcatgaagggcaggctatttgtacagtcactttgaactccattctgttaatgttagcccgattactgcggaaaacaccatcagtttcgctccttaggtttgattcttatctacctgcagggct

SEQ ID NO: 14585 - DNA, 912 bp, Brachypodium distachyon
  Intron number 1 from transcript Bradi2g37370.1 (locus Brad i2g37370) derived from phytozome v7.0 (chr-ID Bd2; pos 376 81955 to 37682866 reverse strand)
gtccttccaggacgagctccagccccaagaggtgaattgaattaatttgcccccctccatcttgatccttcctctaatccacagcaatttcagtttttttcttcttttccccttcgtctcctcctccggccgccgccgccgcgtatctccggccggtcggccgtccaccggcggcaatgcttgctgctccagtgcagcgacaggggatcaaggagggccctgctgtcttcctttaatttctgtgtttggtcgtggtcaaagaggagttaggcgagcaacgaaattcgtccggagctcgagacgtttccttagcgtgctgcaattcttctctgcattttttttctttgcttgcttgctcgattttgatgcccttgtggaaaacgaacttactccagtagtagacttgtgcagttcctttctgtactcgtttactgacttctcacagtttggtttggtttctttttcaacaaaaaagtttggcactgttttgagatgctgtgcgaggcaatgatggtgttgttcttggttgggtccctttcttcttcttcttctctcaagaaaaaaaatcaacagagagaaagatcaattttttattgtttagattactattattcttccccttttggttttttctgatggacccaaagcagtagtaagcctccactacaagttgttgcatgatgcaatcatttgaggggaatcaaaatcatttgctcctcggactagaaattggaattataatcagataaatcatgcatcctagatgctctacaaccatcatcaccttcttgtatctttatgctagacccttttacatagtaatttgttgaagttcataacataatgttgttgaatctgactaatttgtttttatcagagcgtggaggagctgcggcagagcctgctggcggc

SEQ ID NO: 14586 - DNA, 872 bp, Brachypodium distachyon
  Intron number 2 from transcript Bradi2g01580.1 (locus Brad i2g01580) derived from phytozome v7.0 (chr-ID Bd2; pos 107 4446 to 1075317 reverse strand)
tggaggccccctgctcctgccgcggcagcctcaaggttagttaacacaccaacatcattcattgctctcccttttatccctgttcttgaacgtgtgaaattcgtagcgaatttgcggcgatttcaccggaagcggttggattattcctgtaggaatcaggaaaaattgccggcgctccagatgagtgtgcaaaagagtagtagtgcattgcttttttctgttctgtgggatggaaagtttgatcctttttgtttagtgcaggatggatggactagctaattggtgttactgagtaattattttgggggtctatttttgtttctggttttatattagtgagtgtggtttgactttgctttgagggattgttggtgattatggttggggttagatgcagtaggttgtactacagcttgattaagtattatctgaaaagggttatttgaggaagaaatcaactgtgttttgactcagtgtacttgctttgaaggcaatgtctaatattggcttacctttttggattgtgacatagtataataaagtggaatagagaaagtattttcaaaaacatataatggaagtaggtgttttgttttcgcggagtggctacttggaaggaacagaaagaactatatttagaccctcacctaatgtgtgagacaaccgctcacattctcttccatgcatggtcaaactgtagttgagacttcacagaaacattatggcttttcccctttcttgatgatgcttgttgtatcaaatgatgctttatcatgggtatgctgagaattgactaacatagtagcagtatttcagtcgataatactgttgaattatcagattaaaactcatagcttctacactactgcagt

SEQ ID NO: 14587 - DNA, 687 bp, Brachypodium distachyon
  Intron number 1 from transcript Bradi1g48730.1 (locus Brad i1g48730) derived from phytozome v7.0 (chr-ID Bd1; pos 474 14127 to 47414813 reverse strand)
tcggcatctactcccgctgactccggctagggaaggtgaggaactgatgaattatcggtcgattcatttttctgatactacgctagtgccacttgatgacttttagattccaatgcttttcaatcgtatgactattcattgttcagtggttgagttgaagtgttgaacttgagttgttaaaatttagtacaatttcagaaattgtactaaatctgcgacaaataatatggatcggagggagtaccaagtttttttagtagctctgctgtgatgtgaccatttggtagatggagtttatgaattcatgagacatgattgtaacgacaaataataaatgtgatgtgcgttacttactgggctgctatctgtgctcaaaataaatatgatgaagttagcatcgtggggaaatttcctactccctccaatcctaaattgttgtcgttgttttagtttaaatttgcactaaaacaatgacaagaattaggatcggagggagtattttgttcagtcttcttctcgcaccgaaatagcactccttgttttttctttgttgaaggtaattaccaccatggctatcatcgtaagttaatttgctttggtagttgctcatagggtctcttgtaaacaaaaaattctcttgtggtttggccaggctccaagattttactggttctgcccggtggagga

SEQ ID NO: 14588 - DNA, 858 bp, Brachypodium distachyon
  Intron number 1 from transcript Bradi1g55970.2 (locus Brad i1g55970) derived from phytozome v7.0 (chr-ID Bd1; pos 546 33983 to 54634840)
ccaaggtgaaggttctctccgccgtcgcccccaaggtgaagctcacttgtgccttctttgattctctgttggctgcaccttgtgcgtgagagagaggaaggaaagggagagagctgctgctgctgcagttagaaatagtgttttgccataaagagcccttaggccaatatcttctatatatatcaacagatacattgtacatatggcaagtacatggttagctacaattacgcacacaatcaggcgtcaatcctaaccaaattaatctaccgatttgtttctttaacagctgctacgtggttcttgttccagagtatttctttcatagcatttctttcagagcaatgctcttttcatatgcaaatatcccggatcattttctttcatagcaggtgttgccttggattacagggtttttgttaaccttgaaggtcctttgataattatatcaggtccaggttgcttagaaaaagaatgatccgagacaaagaagtaaatgatttgatagttttcgctaggagtctatttacaagcatctaactcattctagtctgacaaaaatgacttgcaacggtttcacaaagaaaaatgaacaagctcactgaagaatctgcacatatgaacatcctgatacatacagtacagtaaaaacgactgaaacaaaatgattgtcgtgctcatgccaacaatactgaatagtttgctgatgcacagcacgtaatgaactagaagtactacttgcacaagttaatttcacaagctgtgttttacttcagaccgatttaatttctccctccttgtttgttgttaatttaaatttcagaacagtctacaagttcagcaccagtggcgacgacg

SEQ ID NO: 14589 - DNA, 882 bp, Brachypodium distachyon
  Intron number 3 from transcript Bradi2g19440.1 (locus Brad i2g19440) derived from phytozome v7.0 (chr-ID Bd2; pos 171 24062 to 17124943)
cagcaactgaaaggcagttgttataggtaactccagacagttgcttttgattatctttatgcaatcgatgatgcatgcctatgtcacagaactggtgttggactcttagaggctgttgaatttattgcccttttaggcaagttcttgcctagtattaattacctattcggtgggaaaaggaaaatcctgattttcccaacaaactgttcaacttggatttgaaagccatctcctgttgaaggagagccgcacgtggcggtgtcatgagctatcaatgagaatgttttggtttcatgttttcttgcatagtttgcactgaacttagtctgaacctttgactacacttattattgtacaagttatatgtatgggaaatttgtcaaatgagttgtcaactatttgtttcatgagccaccagaatgctcctgcaggattggattctagacttcttctagatgtctggtgtgttcgaccactttattttttgtgttctcaactcgaaatagtgccttgtagttagttcaattacattctttgcttggagtgcttcagcatttgtattttacttgacgtgcctctgtttagtgccctgttaatgcagttaaagcccagtgaatgtgcaaaccaaattttacagagatctgctaatgcagagacttgtattgcttttgctggtgtgctactggtcatgtgcgtccattttaactaaagttcaatgcatgtggaggtggcgacgtcgacctattataaatgatgagattacatgcttacagcttatttgtcatcatgatataaggagctgacaattttgcatttgttttatatattatgattatagtgttttggtttaacacaacttgtcacagcattggtgcttctaag

SEQ ID NO: 14590 - DNA, 282 bp, Brachypodium distachyon
  Intron number 2 from transcript Bradi1g58340.1 (locus Brad i1g58340) derived from phytozome v7.0 (chr-ID Bd1; pos 571 73308 to 57173589)
gtttgagacagttgagattaacacctaaactcgaggtaagtgcatccagcctctccttctcttctgttttctagtacagaaaattcactgctttctttgcttttgaataactagagagaaacaagtttgttagtttgtatgctagttgccagacctaggaattgtgcaaagatatatacagccagcatagcttatgaaatggaaggagtgggatagaatggctgctaattatatttcttgtttttagtttgtttatcttcgggacaatctgttatcaagttt

SEQ ID NO: 14591 - DNA, 1016 bp, Brachypodium distachyon
  Intron number 1 from transcript Bradi2g17880.1 (locus Brad i2g17880) derived from phytozome v7.0 (chr-ID Bd2; pos 159 22818 to 15923833)
caacattgcaggttatagaagttgcttgactcatttttcttcccttttgtagttttcctaccttaatgcacttagatatggactcaaagaggatattttttggtggattcttcattcgtggtcatgcttacaccatggacaccatttcttttgcagtacatttctagtaaatattctgaaagcattttagttttggtcttctagatacgttttaatgtactccccatgtccaacaaaagatgtctgaactttgattaaatttgaatgtatctatacactaagtcatgtctagatacatccaaattttgacaaacttgagacatcctttattggacggaggaagtaattaattttgaaagaaatactccttcatgttgtattcgaataatatgttcctgaaaccaacatactctattgttttggaaaggtcaaaaggagaagcaaaagctatgtttctgcgtcatgacgactttctaggagcactgggcgtgtttatgagttatgagaagcatgatcttgataacttgagtgaacgtcacttggttgagagcattttctaatgggtgctccatatgttggtgggaagattcatggacctcctctaggttatctcaaagagaaagcaaggacatctattcttgattatggttaccttaattactgtttgtttggtattctgtagagtagaacatcctgtctcagtattgatttttttacaagggagaactctgaattgcatgatcaataaattttgatatggaactctaaattacactgttcaaatggggatcacttccaaccaaccaaaagccacacaagtgcacgcacccaaaaaatgactcacaaccttatctccatattagagtcgaatgagtcagatgttttgtcatcacaattttctactctttcgctcttggttaacattttctttttaatctattccacatttcagttattaaatattcttctgtatggattagatcaataaaattttaatatggaacttgtcagatatc

SEQ ID NO: 14592 - DNA, 975 bp, Brachypodium distachyon
  Intron number 1 from transcript Bradi2g39240.1 (locus Brad i2g39240) derived from phytozome v7.0 (chr-ID Bd2; pos 393 59559 to 39360533)
ctcggcagcggagcttctccggtatcttccaggtggttgctctgagcaaagatctcatctctctctttttttttttaccttctcgctttcgctttcagcatgttattaatctcttttcagtagactggcatgagtgaatggtgactgaaaaccctggagttgtgtgcgcttgttggctgaaaaagagtgcagttttgtggatcataccgtctatgtgttcgaactaccatttcacactcttaccaactagttaacgagcagtttggttgcacattagacgtgatagcatgggccgagtaatcgggtcttggcacagtccgatgcacacataggaagattttgtggtttgagtttgcttattcaaaagaaatatggcttcagtttttagtttgcttattcccagctagcattctttacattcatgcaggaggttattataaccgttagcatccatagttcctgaatgaccactctaaagctactggatctaagaaatattctgcagtgtatgtttagaactctgtgtgttgtgaacctggtgtttcgtcctgttatcggttgacagtgtaacccggtgaaagatcgtaaggagagaaaaaaaaatctccagtgctccacaacatagcaattcctgtttgtgcttctatgtctcatttgcgtagttaatccatgggggccactcggccagcaactctatggtgtagcatgtttatttcagtttgcatttcatgttgattgaaccaatacctgcatcacgcatctggaagaaagcttccaaactttatggttgtatcactaaccttgtttatgagcatgcgtcctggttctgtgtttcaatcacaaacaatttaacatggccttttggcagttttatttgtcttcggtttgatttcatgcaagcagctgatcagatttgtttgacttgttgtaaatgttgcaggaggactcgaatcaacgcaatatcaacagacagag

SEQ ID NO: 14593 - DNA, 835 bp, Brachypodium distachyon
  Intron number 1 from transcript Bradi1g62370.1 (locus Brad i1g62370) derived from phytozome v7.0 (chr-ID Bd1; pos 616 15643 to 61616477)
gagggaggggctgcgagaggaccgctggtgcggaggtgagtgccggggaatgcaggtcgctcgcgccttgcttatctttccgtctggctaccaactgaaatcgtgctcgcgtttggtgaaatcgtaacaatagggccaattggtctgtttaatgcgggatgcaggttgcctactgtagcgctgcatgctcaattggggatttcctgccttctgattgtagtggtacctaggctcggtgaatttgagctttgggagggctgaacttgtgatagagcgtcctttggtttgcagctctgtatactctgggggtgtgctcccgatctgtagtaatcacgtgcttcgtgcggattgaacttttttggtgttccttaggaggggtttattatgagtaggatttagtaactgtgtgtgggtatttagcaggtctcgtctttgctttgaatcaattaggtggttttgggtgtagtgatggaatattaactaactgctgttattttacatcatcgctacttgatgaacatggacttaggctttgtgacaaaaaagcttattgttcatccatcatcacaaattctggtgcaatgaccatacattcagttcccattaatactgagttcatgactaccattgtgatgaatcttctctgttaacaccataagagtcaccgatatgtcaataatgataattggaaaatctgaggggaagcacttctcctttacataatttgaagttgatcatgctatcgttgcttcaccaatactccctcgttacatacatcttgctctcgtgcaatgggaaactttccaatttcttatgtgtctgttttctacagctc

SEQ ID NO: 14594 - DNA, 636 bp, Brachypodium distachyon
  Intron number 1 from transcript Bradi1g72970.1 (locus Brad i1g72970) derived from phytozome v7.0 (chr-ID Bd1; pos 705 74026 to 70574661 reverse strand)
gaggttagagaatttggtttttttatgatgtgtacacatgggtattatgttgcatcgagtttgatgtctactgttacattgttcacgttgcaaacatgtttcttttgttgttgcatgagttgacgtgttcacttttgatgttgcatgtgttgcaaatttttttgacatctttgttgcaccgaaatgcgtatttgtcacgtgcattgaaaactttgcacgtgtttgaatgtcctttgaggttatcagggtgaaaatgttgcaacaatgtttgatgatcaggtgaacgaattttgcctttttttctctaagtagatcgaacggtaaaaaagatgacacacagtgacatagagtgaaaatattagccgaccattgtccatcactatcgcttttctagaccttactggatgtataagtgacttagttttcgctaataatattgtcattttcctctctctcttttgcgagtaataatattgtcttcttttttgaaacttcagtaacaacggaattagattgcacaaaccacgaacgtggaaagtcggatgtgtgaccggtgcttcacgggattactgacttgagtagttctgtgccgttagcccagttagaaaacggtttggtacgctttccgccttcccc

SEQ ID NO: 14595 - DNA, 988 bp, Brachypodium distachyon
  Intron number 2 from transcript Bradi2g20310.1 (locus Brad i2g20310) derived from phytozome v7.0 (chr-ID Bd2; pos 178 11345 to 17812332)
tgtgttttctctgaggctaatcaaggtaggaaacaaattccatgctcgtttgctttgtagtgcttggatagttggatgcacttgctgccctgaccattctactctactgtcctgactgatgcacacagtttggtttgtcgttgtcagaacttcattcatgtttggttcctttatgtatttcttggtttaacatagtgatttgatttgagcaatagtaagcttgtggaaacaatcaagtatgcagaactataattctattctgtagcatgtctctaatattccgaacattctgctcattctctacaagagtgccagatatacatgcttcaaatgttcatctataaatgatttcattctcaaaccttttgcaccgtactcatgagaaaggaatccatgcagttacttatgctactatcaattgtctgacttaaatgtcatcgatgtcatcgtgcgggtgtacaccatgttgtgcttttcatgatatgtttgtctgtctattgcaactggcctcaatatcctaaacctcctgcttttgaggcttccccacaaattgccagtgctgcagtgcataattctacttagaggcgggatttaagatctattatgtggcagggtggttgtttaatagtatatggccaatattagtatttcctagatcgtttactactttagttaatgtctggcatttattttgggtcgtaggggatccatgctgcgtcctaaggaactttgcatgatttatgcacatagacacatcctctagcagtttttttcaaagaaatagggattagggagactactgtcatatgttccgctgcctaaagcacattgatttcgaaatttatatagtttttaaaagattgaaaagttcccacatatcagtagttctgcagattttggttcccaaggatttgtaggttcttccagggctcctattatttttaagtatcactgaattagaatctctctttattgcaggaaaactctc

SEQ ID NO: 14596 - DNA, 845 bp, Brachypodium distachyon
  Intron number 3 from transcript Bradi2g22610.1 (locus Brad i2g22610) derived from phytozome v7.0 (chr-ID Bd2; pos 201 27304 to 20128148)
cattctctgtaagcatattttgtacttacttcagtgacatgttttatcaacactatgtttttcacaatattacacgtttcacacttttaccagtgttatatttcataattctggaactacaactgaatcagcatactttttgtgctgtggtcaatgcttggcagtaaaactgaaactgtgtatcatgtatgataattttttcaagggcatatgaccttatcctttgagctttcaattcaggcagatcattagcatgctgcatattctttcttggcatctagtcgatacaagacatgcgtttctccttgaatctagggaagttttgggaatatgttagtgataacggttggaattagaatagttcatcagatgctaagttgttgttttctccattcttattctaattattttctgggaactgttcttattttaattaaccagtaagagcacttcagttacaaatcagtaagtgaagacagtccgtggccacagaaatctgcattgatctaattcatttctacgattgtttgatggaaaacaatctccacaccaacacccactaacatacaatccttggccatgcttgttctccattgcatagagctatctgagttacgaactgaattaacgtcttccactcattagtggaatcagctatcttgttggtacgtatacctgttcaggcattcaccgaatagcatcttatatgtcttcatattttgattttgtatatgctatggacttgtattacttgcaagatggtgttcctccttcagaatattttgattttaatttcttccatccatacagcatcctgcacaagaactctttctacggtatcatcc

SEQ ID NO: 14597 - DNA, 387 bp, Brachypodium distachyon
  Intron number 1 from transcript Bradi2g05830.1 (locus Brad i2g05830) derived from phytozome v7.0 (chr-ID Bd2; pos 433 4893 to 4335279 reverse strand)
ggcctgagcgcggcgtgttcttctccatcctctatgtgagtgccgctgcttcgctgtttcttccttgatacagttcaatcaccaagctcatagagttctctccactgtttatttttcttcttctcgcgaagttgcgattccgtgcatatcccgtgttaattctgagaagaatatacggtttctacctttgcttcgaattttatgatattaatagcactgtttttcaacaaacaaaacatggttaattcaaggtgcttaattgagtctgtttatgctcgataaacatgctttgatagtggcttcagattttgtaatctatttttcataatgaaagcgttgatgatatttttagagttgccttggggcctgggggcgtaaggtgtggac

SEQ ID NO: 14598 - DNA, 1035 bp, Brachypodium distachyon
  Intron number 1 from transcript Bradi2g06660.1 (locus Brad i2g06660) derived from phytozome v7.0 (chr-ID Bd2; pos 509 1023 to 5092057 reverse strand)
gtgtgaggagtcgccgcgcgtatcctgcgtggggggtaggtgggcacgctctcggctctctctcttccaataattaaagacctccgctgcggctgctctcgctctctctggagtctggacgcggaaaaaaacaaaacggaaaaaaggggcaggacgaagaagctcttcgtctttctcaggcaagcagagggggagatagtggggagaggaaggtacaggggaggggataagcgcgaccgaggcaaccccgccgatcacgccgggagtgagttctctaacctctctccatctctgatcgcaacccccatcgatccttccatacgtctagcgagggcttccggccgtcgcaatgtggggttttcagtctggggttttcgggtaaaatcggtgctgtattccggtgttttgggtcggttttgagcgccggggttagtgtttcgaactgcgtccggtggggaaatttcttagggctttggggtttgttgaaggttttggttcgaatgttgtgagattttgcggcagtctagtaagcttgactggtggaagcggcggattgttgggtggctctaggtggggcttctgatcaggacgaaatgtaggatgttaccgcggcggttttgggcggttatgcgatcatttgggggtactaccggggttcgcttctattggaaaaactttacgcgttttggtgtttccaagttgatctaacatggaatcgctttagcttcaagtttcggagttttggtattcaggggtttggttttattgggatgatcatgatgactctgtgctattcccttttaccctagggtttcgatgcggaatgatagcgacttgcttaatctcctaactagatgggcctttttctttgttccgaaacctgcagtgcattgttgtgttaacaagaggggactagactttaaaattcagatttaggtgtagttttactgcatgcacctcgaggagtccgggatttgcatgtggacccatatgttgttgtgattaaattagctttgtgctgtgtttatcaggaca

SEQ ID NO: 14599 - DNA, 754 bp, Brachypodium distachyon
  Intron number 1 from transcript Bradi1g61610.1 (locus Brad i1g61610) derived from phytozome v7.0 (chr-ID Bd1; pos 609 56718 to 60957471)
ggaagtgtcgtgatttcctcctcaccaagtgcaaggtgattcatttccctttagatggtgcatatgaacataattgtggtgtatgtgtaggcagtgagcttgtatatgtataggcagatgattattattttttaggactgggtgcatttttctgttctttcagactcagttagttcgagctttcgaggagagatctctgatttgatcgaagctgttttccccaaattttaggctgaagtcttgcattttagtttccgatttcttttatctttttcaaaatgctaatctcattataatcagaaccaaatcaataatgacggcatgactgaaattagttcatttgcactctacaatgaacaccgttcatcagatcagaaagtggcatgctctttcagagatgaagttatcgctttgatcagtagtatttgagccgtttcacctactgccattatagctgaaaggaaattcaagatcgattgagcatgcatagtaaaaaatatatataatagcagtcaagaaacaattcagtgatcaaggaaaataagtttagtaactagctagtatgtgttgacatatgacttggcacttcattagctagtgcttacggacagatcatttagttagctttcatgccgattgaaaatgaatcaaatgaaatccaagggcattacagactttttctactctaatcagacaagaaatcgaaattccagaagccataaagaaaaggtagtacagttttgcagggcttcct

SEQ ID NO: 14600 - DNA, 653 bp, Brachypodium distachyon
  Intron number 2 from transcript Bradi1g61610.1 (locus Brad i1g61610) derived from phytozome v7.0 (chr-ID Bd1; pos 609 57617 to 60958269)
acgagccctgcctaacacctttccccattcaataggtaagtctgattgctccctccttccctctatgtagaaccacatgtaaccacgtcgtatctggtcattttgattgctgggacttaatcgatgaatgcctggaatgaccagatgagcatcaaactatgatgtattaagaactcatgctacacatctggccttgtagatacgagtcagttcttgtttatgagggtttatattgttattgcactctagttgtttgatgaaatgtgggaaccaatccgtagcagcaaacctatgtgttgattgactcacatcagctcagagtagttagttacctaccctgaacatagaagtgctattgataaactggaaatcccctactttattagcacctgaaaagcataggtaataatgtagataattctgcgggatcatggtaattgccagggctccccgcaaaaaacaaatccgcgtaaaaaaatggtaattgccagggctcctgtgtggtgtacttgatattaccttgaggttccattatgtttatttgctaagaaaatatgcccttctttgctgtccttttcacctcatacaataaaaactgtgaagctctagtttgacctcttctctaaatatcataggttgtgtgcaaagtcagc

SEQ ID NO: 14601 - DNA, 996 bp, Brachypodium distachyon
  Intron number 1 from transcript Bradi2g19280.1 (locus Brad i2g19280) derived from phytozome v7.0 (chr-ID Bd2; pos 169 79671 to 16980666 reverse strand)
ttccggcttgtcgccgtgccttggggcgcggcggggtacgaagtggcgtcggtcacgcggtcggggacgctgctgtcggcgcggctggagctcgccggcgggacggcggcaccgtcgtcgctcgggcccgacgtccggagtctcctcctcactgccaggcaagtagtacgacgcttcgcgcatggggcttcattaaagagcgtttagcttgatcctacggtttagatgtttaatttcatcgagctacaacgacgatttgtttggtcgggattggtgctgcttcaacgatttcgtgagctgttgacctcttttgtcagcaagaaaatgagttcagcttcagtagtcttctttttgttcatggcttttagcttctgcactgtctttagttttggtttcaggcctaaacctgttggatctcgtgaggctacatgttggtttcatctttcataaagaagatgtgcccggggagtgatcctgtttatctaaaaaactaaaggactgactaggagtgcgtataccagataaacttttgatccagaagatcagaagagtaacggtacagaactaacgaaaaacaaaaaccctgagcgcctgatcgatcaagttaggatttcgacccagaatcttccgctccaaaattttgtatgccgccaacaatctttacgctcagcattacttctataaaagataaatacaagacttagttggtgataaccgtccgtcattttcgttaattcacttgattatttagtgctgttcccgttacttgttaatttggcacagattattggtaccagaacgaatatggattatattaatccaaaataatagataataatacaccatcatatttaaacatgtattttttttttaagttcatagcaatgtgtgtgtattatgccggtactaatagaatcttgcttttcgcctgaccattcaaattgtcatgttggcggcacagcctcgagacggacagctggcttcacgtccgcatca

SEQ ID NO: 14602 - DNA, 926 bp, Brachypodium distachyon
  Intron number 1 from transcript Bradi2g07450.1 (locus Brad i2g07450) derived from phytozome v7.0 (chr-ID Bd2; pos 580 3388 to 5804313)
tcacgcttcgacctcccgcacttcatcgcccacaggtgcccttatcagctggcggtttccgtttagctttggtgctgcagttcgttggccatggcatgtctctaggttggagcttggaacctcctgtagcaaattcgagatttcacgtttgtctgagtgggaatttagggtgaatgttctagactttagtttgttttttccggttcggtgctgggaattatgcgtttaatctagttgtaatggacaatccttgcggaaatttttgaccaatgtaggcacgtcatgtaagctaaccttactcgtcggaaaaaagaaaaccttactctcacaaaaaaaagtaagttaaccttacgtatctaacaatgaggctacgagggaatgtttcagctctactacttgttttgacatagttgtcaccgtgcaagccagatggcccatgtcccctccaatgctttgttaaaccaaggaaataagaacctacgatttgtgcgctctcttatgtttggtttccaatcctctcaagtcttaagacccacattgtatctttgtagcatcaattgtgaaaacatggtgtgccaatattctacttcataaattcatctactggccctggtcagcccacaagattgaaacatggacgcagtcctacgttacaacctgatacgacttgctaaaactgtgaccatagatgtctatttgttatattagattttgaagaattttgtctgaactcggaagactaaagaagtggactgtatatttatttgcaatttaaatgctttgatgggttaaattgctcctttgctgcttcaagatagcataattttattgttgactgtaactcataattatatcatagttaaggaaatgttttggttgcttctgcttcaggactcctacgtggttcaaaaggatattatcaccat

SEQ ID NO: 14603 - DNA, 1030 bp, Brachypodium distachyon
  Intron number 1 from transcript Bradi2g26990.1 (locus Brad i2g26990) derived from phytozome v7.0 (chr-ID Bd2; pos 257 43930 to 25744959)
gggaagcgcagctccatctaccgcggggtcacccggtacgtatggctcctggtccctggctggcccgatctccggcgcggttggaagttcagttcagatcgctgtcgaactttcctgtctgtgcgtctcgagtgcatgtttgtttgaacccgaatatgatgcagagcatcagtactagcctgggagatctgaagagaagtggcacacgacgacgatgaatgttagtgaggactgtttggtgttaggtatcttattacattgcatccagtgtctgtcgctggttattcagacaaacaattgaaaattaatgcatggacattacagttattcaaaagatggtttgcacaagctaatgcttactatgatcaaccagaaatctctgtgaaaatataagtatcatcagtacatcgatttatccagttacaaatatttttcacttttgacaactttatttatttctttatgatatacttggcacttcatgaatcccaatgcacgcatctgagctgacagtactattttgtgctactatcctgaattacccatttttgcccctcgcagacttactccactcgttctaaaattgatgatgctcttggctttgcacattcttcagtatgcagttttgaccatcacattatgcatatgcaagtaaaaaaaaaattcaaaaacatatactcccttcgacccatattacttgtctcaaatttgcccaaatatgaatgtatctatgtttaaaaagtgtctagatacatgtaatagtttgacaagtaatatgggtcggagggagtattattaaactgatttccgtgacaaatctaatgataccattcatataactaatctagataggtttttattatttagttgagaagtttgactgcacaatttgtaggatgtggtctattctggaatagatagggtactttcttgaccttgttaggaataaaacgttctcttccggatgttctgtattaacatgtatccgtttgacttactattgagtgtaatgttgcattaataggcatag

SEQ ID NO: 14604 - DNA, 896 bp, Brachypodium distachyon
  Intron number 1 from transcript Bradi2g11300.1 (locus Brad i2g11300) derived from phytozome v7.0 (chr-ID Bd2; pos 958 3142 to 9584037 reverse strand)
attgctttgtcagggtatgaaatgacattttagtaattttatttatatacttctttgtttgtttatttatcattttgaacattataatatactctaactcttcgttctaaaatataagacgtactttctccttttcataatataagatgtatttcgtgtgcattgaccaaacttttgagtaagtattactgcatcaacgtgagatatgtgatacaaatcataaccataaacaaataccctgaatatggatataatgatattaattttataagtgataaccatagagaaatttgaaaaggagatagtggtaaccgtagatacaagtcaaaaaaaatacatgtcataaataaatacttatgtgatacaagtcataaccatagagagatttttggtcaaaggataagtcaaaaaaataggccttatattttgaaatggagagagtctacttatgttgactaacaaactttcttaaatttgatcatatttagaacacaaaatatcaacaactaccgtctcatataggatcattagattacttgtaagatatattttcattgtatcttgatttaaaaaagtatatatgttgatatcttttgcaataagtttggtcgaattttatatattttttaacggatcttttttttttgagtaatttcctacaaagcttgaaagaaatatataattgagagcaccgttagctcacgcttgctttgggactatttatctccgtttactcactctactgcaaaacgcgcgtactccatacaagcagagtctacatttaataggagtagcatcttttttcaacgaaagagaggaagaattgttttgcttcgacctataacagctttgcattaatagggctgcgacgcctccatactcctggacccctccag

SEQ ID NO: 14605 - DNA, 620 bp, Brachypodium distachyon; identical to SEQ ID NO: 14313
  Intron number 1 from transcript Bradi1g68860.1 (locus Brad i1g68860) derived from phytozome v7.0 (chr-ID Bd1; pos 673 34656 to 67335275)

SEQ ID NO: 14606 - DNA, 650 bp, Brachypodium distachyon
  Intron number 2 from transcript Bradi2g19490.2 (locus Brad i2g19490) derived from phytozome v7.0 (chr-ID Bd2; pos 171 84738 to 17185387)
gcggttcggtcgccccaggcgaagaacttaaggtaagctggacttcgaaatgttctgcaggattgtgcctaaatttctagtacaaaaggacccatgcacattccatgcatgattaattggctcctggccctgaatgcttatcatctgggctgtgtttttttgctttcttcatgacttcgtaccctgaggataaggaaatgcctgtgtattgttacacatcaacaaatcacattacctcaacattgttatgttgtcacgctccatgacacacccttggctttgcaacagttctcggttgagcttttccatgggtagaattgggaattttttatggagggcaacatcttggacggatttgaatttgtggggttggagtcgatgaatgaggaggacaattacactggcatgtaggttttaccgtttgaccaacaatttgagatggccccacatgtaaaggatgatgatgagaatgtaaacagactgttaccactggttgatgtctttataggagtgaagaatgctggatcgcctgaactgtgtttaccaaatactctttgttttctgttggaatccctcgattctagatttaaacttgttttgagtttgggcactgtggtttgcaggttttagtcgtgcgtcaggacctgaag

SEQ ID NO: 14607 - DNA, 912 bp, Brachypodium distachyon
  Intron number 2 from transcript Bradi2g18250.1 (locus Brad i2g18250) derived from phytozome v7.0 (chr-ID Bd2; pos 161 81536 to 16182447 reverse strand)
acctgaagcggcggcctgctgtggagaaggagaaggtgggctagcaacttttcgggtttatatccaaagttttggtacttctgtagcattttaactgagctgagtgtttagctattcatacgcattatgtgcataccggacgtacgggaaattttgtcattgagttgtgttcattgcccgtggatttgaactagaaggacatgcaaaatgtagatagatttatgtgcaattgttatttttagtcagcggcaatacgaggtcctcgttatcagactaaactttatgggatgcactgcataatctaggaacatcaggggaaaaattctgccagtttaatgaatcactgaaagttaatacatatagtatgctcctgtttcatgaggcattttggtccaaatctggacaatcattcttcataattacgacgtgaactacagttagaattgtgcttctctagaaataccaacatttttgtgtcacttcacctttaatgttgactaaatgtcatagttagtttattaatttgttgtgggattgtaaatctattgtagcatgatcattcaacttgtattgaactccatgtcatgtggagcagaatatgactagaagtatatgccaccttttctattctagtttagaacttggttaacaagttgtttgttcctttaattcaaatactaaatgaaatcattaaaatgttttgtgttctgttcggttcagcatctttatcttgttaccagtgcatgggtcactatagatcataacataacttgtaagcatgacgcaggtgtcggatttgtcatatttctttgtggcatgtgtatacattttttgtagcctggtaattcttgctctttggtggactgctgtaggtggtttgacttgaaaatattaattacttctgcagatagc

SEQ ID NO: 14608 - DNA, 744 bp, Brachypodium distachyon
  Intron number 1 from transcript Bradi1g63130.1 (locus Brad i1g63130) derived from phytozome v7.0 (chr-ID Bd1; pos 623 46445 to 62347188 reverse strand)
cgaggtgcgtgctctgtctcgcgtccgtttcgcgaaacgctcgcgtgcggcggcccgttttttttttgtgtgtgtgttcttcagcttcgggttttttggttcggtaatcctccaggtcaggtggatgtttgattagtaactcaagcctctccacctgagacgtctcgggattctcgtgcgtgttacattagttttcgttcgtcctagtctgattccgtcgctttctccgatttgagagccatctcgtgtctgggacagaattttatgctttttgatttgattaatcggttcgtacggatcaggactaccgttaattcttaaactaattactgacggcgcttggtaccgattccgtgccttctcgtaatattttctgcggtaatagctgttaatttttattgtaaattttgactaattggtcttatgttaagactaagtcgtgacacgagaagacccttcgtttttgcgtgtcacggtctacgaaaaggaagttggaaatcagaaatgagctttctgtttgcttggatgtactgtgtgtttccgctttttcagcacacggaaaaggcacggtatgctttacgaaatccaacttttacaatcttaacagggttcctttcagggggcgtagaactctgtcatttatccgaaaagtttagaatctttttgtttcttggtttggttctgactctgcccgtgatctcatgcttgactgactggcagaggtgtgcacttcacgcggtgcat

SEQ ID NO: 14609 - DNA, 1032 bp, Brachypodium distachyon
  Intron number 1 from transcript Bradi2g34710.1 (locus Brad i2g34710) derived from phytozome v7.0 (chr-ID Bd2; pos 347 88223 to 34789254)
ggcaggccgtctccgacatcctccacgaccgcggggtgagtgagctcgccgacccttccttgccctccttcgacagggcatcctcctctttggcttcccgaatccaaattcggcagcgtgaagtggggtggggattgtttgactgaggttaattcgttgcatcggcacgtcaatgtgatgagctcagtgcacttgttaggaatccaagctttaatttgtgccgtgcgactagtgtggttagtgccctagcttgttttggcctcgaattggaggactgagaagagcttgtcagtgcgagtattgctttgacgagtttttgcttgtgtgctgctgaagtgtccttttgaatccattcacacacaagaaacatctcattcttagatcgttcatgtttccttagtggcattttgaacacggtggttgtcttgtccatatgcttgtgatttgtttggtttgacgaagtgatacatcttaactacaaacctaatgtttttttatttgagaaatgaaatactgagatacatcgccacttcatacctcatgagcacatggctagttgaaagtaagggatggggccattccgccataatcatgatgctatgctctcacgacggatcagttcatcaaaacaaaaccctatttgtgttttctaggcttgatgtggttagtggtcacagtggcaaatcaaatacaagtatggaaggaatcaaggaagtttccatttttacagtcgtaatgtccatgtcaatctgtttctttaccattacaaatgaagtgactttggaattagctcacattgtctgtgttgaaagagttgatttctcaggaagttatctagatactatgaagtggttttgttacacaagtaaacagattaagggttggattcttactcatgttttggatgtgaagaatagcggtcactggtcaggttgcaagtttgcatctgctttctgttgttttatctaagacgtgtctgttactgtgtgatctacagggcacacaaaactacaaaagtttcaagaaaacagt

SEQ ID NO: 14610 - DNA, 719 bp, Brachypodium distachyon
  Intron number 1 from transcript Bradi2g12430.1 (locus Brad i2g12430) derived from phytozome v7.0 (chr-ID Bd2; pos 107 73417 to 10774135)
tccgcaatttcctcctccacaccttgcagctgcaggtgagcgccttgcctattggggatccggattgcttagtttgagttgaaaattagcgcgttgtgactactagtgttgattgcgtgcacgtcacttgctagttggggggaagttaacaccgattttgcgttgtttgaatgtgtagtacatcagaattttcggcattagtaaacgtaacataccattccttaatgaatttgctctcagcatgtgaatttttttcttctaattaattcctgttctaattggcttgtattgtattctatgggtgaaatagagataagatttcacttttggagtctaatatgtctctttcatacatgtactaagcagtacttgtttggtagcgattatacatcctcatagcttagcctaaattagcctaaacggcaattatgaggtaacaatagttatctgtatgcaatactaccacactgagtaaacttcacttttttatacgattcgaaaagcctagaacagacgagaaaaatctacaacttttgtccaaatttccttaagatgtgatcacatttaccataaaacgccactaaactggcttgctagtaattgtttgtgaactttagtttcttatctggcacttgaatcaaattttcttcatttactgatctttctcatttatttgatgatcagagctgggagaaaactgttgactgttacagccctgg

SEQ ID NO: 14611 - DNA, 759 bp, Brachypodium distachyon
  Intron number 1 from transcript Bradi1g59180.1 (locus Brad i1g59180) derived from phytozome v7.0 (chr-ID Bd1; pos 583 14503 to 58315261)
gacgggaagccggccaccggcgcgacagaggcagcgtaagcgaagttaaagcttaattgctcgatcgccctgatcaatcctcatctcccgcgcgcctagcttgttcaatttggctaattttatcagctcatctctctgttaattctgttcctgtcaccattgatgtttcctgcaaaattttgcacaagaggaaaattttactcttgtaaattctctttcttccgatctgtccatctttcaatttcctgtcatttctcttgtgtagtacagtttcttttctatttgtctgaatctgaatacttgttagtaaatccgggggcagtttggtaattgtgttgcagtgataagaaattgatttgcagagataagagcggggtggttggtccggattttccgtgctaaacaccacgcggtttcgtcctcaactttctcactctctttcatttttctaataagcccgtgatcgttcctcaaaaaaaaaaaaagcccgtgatgagattgttaatttggacgcatgcacactagttagattcacatggccaaccgcagtatcattattcttcagtatttgttcagttaaaatagacattcgaattgaactaaaaatttgttatgtatagcgtcgctgtcgtttgatctgtgtctgcaaaaggatcatttgaatgaactcaaaatggaatgaatttgagacgatattctgatctgtgtggatgcatatatgcaggagcaagccggcaccggcgccggggaggaagggtc

SEQ ID NO: 14612 - DNA, 507 bp, Brachypodium distachyon
  Intron number 3 from transcript Bradi1g49340.1 (locus Brad i1g49340) derived from phytozome v7.0 (chr-ID Bd1; pos 481 30536 to 48131042)
ctcgcgttaaatgtgagttgtagtatcgactgtcgagtcaagttcatcctgcatttttcttgtttctgctccgtagaaatcctatgctccattttgagtacgaatttagacaattgaatgctgaaatcatgtatccggttggacaattcacagtagtaaatcaaatcagtggaaactgtaagagaaaagcagtcttgctctcgctgcatgatcaaaacccatatattggacttatataaaatgtgatctagattctcatgctttttcttcttatactttgaccatatgagtatattatgagccaaaagtgtaagacacatcttctctaatgtaaagtacatgtttaatgtaagcaatagtagtgactagcgagaaataattctatacctacttgtgtcttgttcataaaccttctagcttcatagcttattgggttgatcatttgattgtcattgtcactgatctaatactttattgcattttagggaactgtttttgatcccgaga

SEQ ID NO: 14613 - DNA, 864 bp, Brachypodium distachyon
  Intron number 2 from transcript Bradi2g09530.1 (locus Brad i2g09530) derived from phytozome v7.0 (chr-ID Bd2; pos 779 8042 to 7798905 reverse strand)
ggatttacctggtaagttgaacatgcttcagtagttccttgtgatcatttaggtacatagagtggtggagaaaaagcttaagtttcaactatcatatgtactccctctgttcctaaatgttagaagtcttagctttatccttagtcaaacttcttaaactttgaccaggtttatagagaaatctacctacatctatgactctaaataagttctattgaatctatcatggtatatattttcatagtatgcttatttaatattctatacgtgtatatatttttctataaacttggttaaactttaggacaaagctagaacttcttacatttaggaactgagggagtactccctccgttccataattcttgtctcaaatttgtccaaaaatggatgtatctattcctaaaaagcgtctagatacatgtaatatttcgacaagaattatggaacggagggaatatttattgatctctgtgttttttgtcaaactgagtcttctgaggtcacataataacaatattctggtaaatgtgatcataactagacatttgtcaagaacaactaaagaatgcgacagatcccctgatcaaaccaattttagcagtcaatcaggtgtgtcttttgttagctacatttaacagtttcgataatcaaacatgatcgttgttgcgggcctatgggaaagaacatttagcagttattctctaatgatgtattttctttgtccattaccagttctctatctttttggagtatttactctttgttttcagtacccattataatttagaaatgtactgtgttttctaaaatttctcattttatctaatcctctgatgatatttcatattgcagcaaagtgca

SEQ ID NO: 14614 - DNA, 895 bp, Brachypodium distachyon
  Intron number 1 from transcript Bradi1g51100.1 (locus Brad i1g51100) derived from phytozome v7.0 (chr-ID Bd1; pos 495 15391 to 49516285)
ctggtgcgtatggtatggcgcatcagcgggaccaggcggccattttgtttgttgttgttgcttgagaattggttgtagaagaactgcaaatcattcaattcgaatcctttaatgttttttgtctaccgcacatgtgaaatcaaatggggaaaacgatgggctgagactgagacaggtttctcagtgatgacatatatgtaaggaatcagattcaaaacgtagtggtatatatggatgaatagacagatatggagatctttaaactgaaaagttgcataggaatatgcaaaaacaacatgtatatgcaaactgaaacaagctactaaatgttttttttattagagcagtaatttccctaacaatctctagaatgaaaacagaaacaaagatgtcgtctggagtgtacgctgaaagagacttctcatttttttctacccacgtttttcctatgcagttcaaatttgaacttgaattcttctgtggtgaaaaaaagacttgaaataggagattagttaagagagacgtacataattcatgctctactttctgagaccaccatttatttcttcatccgattcatatttgtttgggtcaaaatgcttgtaatagtgggatcaaactcttaactaatcactgatatattctgtatgattggagttttaaggaattttaccatggtgttttgatcgttggaatggctttaacatttttagtgggctttaacatatcttaaactcagacaaatagatactaatttttttatatttttgtggggccaaatgacccataccaattagataacatgcatccagccctgatacatcaatatttatgatacatgtatttatcattgcctacaggtcagaagctcatattacttttcatcgccacccta

SEQ ID NO: 14615 - DNA, 828 bp, Brachypodium distachyon
  Intron number 2 from transcript Bradi2g22930.1 (locus Brad i2g22930) derived from phytozome v7.0 (chr-ID Bd2; pos 205 10064 to 20510891)
tgccatacctgccttcagaaaaccaaaataaccaggttgcttgtttaatactccctctattccacaatacaacgtgtataaatttttctcatttgttccacaatacacctcattttgtcttgatacccgcacccggccaataactactcacatccatttattattaacccaagatgagtggtcagtcactagaaacgagagatgccttgatccaagtgtgcaaatctagatgaggtgtattttggaatggagggagtagcttctttacttccagaccattttctatcattttgtttctggcatgtcaaacatcaagtggtccataacctagatgcatacatatcaagctttttgaaagcaaaaataaccaggttgtttttatcaaactagaatagcttctttacttcatggtcatttttctaggattttgttttcgtcaatgtcaaacatcaggtgatccataacctagatgcatgtcacttaacatgagcagacatatgcaataagctgattttatcagcatatttactcaaaccactttggcactattgtttattgtacaattgtttgatccatttctttgcgacttaaaatttagtgggaagctggccagttctgaacaagtgaaacagtatctctgtatctgcactaaattggggatgatggtatgatgtctggcatcatattgtaaactaagcaactacaagagtagaacttgtccaatcacattcctccagttcctctttctatacaaacatgcagctcctgaagttcgcattaatcatcatccagttgtttgataatttgatggtcaattatatcaggtca

SEQ ID NO: 14616 - DNA, 581 bp, Brachypodium distachyon
  Intron number 3 from transcript Bradi2g38310.1 (locus Brad i2g38310) derived from phytozome v7.0 (chr-ID Bd2; pos 386 49773 to 38650353 reverse strand)
gctaactgtacgatctttaaacactaccctatcaggtatcccaatccatgcactcttaatattctgatggcttcagtattctaactacatcgacgtattcaacaaaccatgagacattgagacggacctgctcggaaaacctaatatatcatttgaatttgagtgttatattgcactaggaatctgaatcttatttctttggagaacctgaactagacatcatgttacttttgtgcaccccattaaatgctgttgcaacttctgcatggagttcttgcattcagttctcatcttatttgattcttttttgcagaaggcacttacctagcttcttatttttaccatattacatgtattcttgtttttcccattttctgattttcttagtctttgcttccaattttaggcattgttttcataagtatcttttttttactatactacacatattcttgttgatctcatcttctgattttttagtcttcacattttttttgtctttaaattttagatattgttttggtaggtattttaggatttatagattaggtgacaatactatcttctttataggaattttc

SEQ ID NO: 14617 - DNA, 693 bp, Brachypodium distachyon
  Intron number 1 from transcript Bradi1g49070.1 (locus Brad i1g49070) derived from phytozome v7.0 (chr-ID Bd1; pos 478 17771 to 47818463 reverse strand)
cggaaagcaacgcccgatcggattcacagcctccggtaccatacttgagttcctgctccctgcttctttggttaaatctctttccccgcctctgcatacctggtttcctggggccttcttggtttggttaatttggtggatggatgagcggaggaggagccgatgagccatgggtttgcttattggtcaggttaggaggacaaagtttcggtctttcttccgtcagtcctggcggccctgggagatttccgtctgttcttggcttgtattttagatagatgttgcgcctcttgttctgtttgagttgacctgccattcttgttcattttccgggtggcttctgaatgcagcttttttggtgagattttgcaaaaaatgaaattattcgattctcacgcttgttgttgcccgtgcatgtttccagtaactagttcagaaacattgggtttggttatttactgtctatgcatttggattttagctcaagatatagccaaaccgaatttcagaacaacacaataaactttgttcactagtggtaatttttttatcaagccatgttgcaccatcttgtgctgtgaattttttgtgttccaccgacaaaacaaaccaggcatgggtggctgattgatttccttttattttccatgtgatctaggcaaagagatttgaagacaaactgatctcctgagg

SEQ ID NO: 14618 - DNA, 741 bp, Brachypodium distachyon
  Intron number 2 from transcript Bradi1g65000.1 (locus Brad i1g65000) derived from phytozome v7.0 (chr-ID Bd1; pos 641 50444 to 64151184)
gcctgcaggacttcgatttttacggcaaaagagtgagtcatcttcactttagctgatgattttcaactgttttcgttcttttattctcctttttgccttgtgtttataggtaacatggtggatatgttttgtctttaacatggaatctatgtatttctgattattaagtggactattaagtgccccccttatgtttagatttgcattagcacacaatgttccaattcaaagtatccccctataacttttcaacaatagttatacactggcacacttgtggcgatttaggttgccacaaaaagtatggccatatggagcatatgcttcttatattactaatatgctgatctgcctggcaagtgtgaagcatgtagcggtcatttacagtgttttgagtgaaatgtttaatttaatggatgctgtggatagaggataggcacatgttcttcatatgatggtgctaacatatactttttgcttgggttatactgtgaacatactctttcaagaatcatatgtccagatggtctctgttagatgctgaagcacattgcctgtgtctaatgactaatctgttactcctcgttcaatctattctttgttcactgtctaagtgaaatgagcctttttctcttaaatagccattgcaacattaacaagagaccagtcttaccaatgctcctattatggaccatattaaaagtataacttcttttccttcccttgtgcagcgagtacaat

SEQ ID NO: 14619 - DNA, 893 bp, Brachypodium distachyon
  Intron number 1 from transcript Bradi2g24960.1 (locus Brad i2g24960) derived from phytozome v7.0 (chr-ID Bd2; pos 227 55723 to 22756615)
ccgtcgtcgagcccctcgcggggctgtctgctgcggtaggttttctttctctccgttctgtgtcttacgttatgcttcttgcttcttctacctaaatgtgtggaatttgtgggttcaccaagcctgcgaactgagggatttcaagtgggattttagtgcatctattgagactagcaagatatgattttctgtggaatgaccggatttaatgatgtatccaggggaggcctaatgtagaacgagcgtacaggataattttagaacagaaaaaggggggaaagagggtagagacagcaaaatcgagggtatttaacataagacaaatcatacatcaaatgatctcgcagaatcctttggaatatgattttattcttctacagggcatcaaaacatatacctgattgccaccagatgtgctgcaaaatcctgaagaaacccaagaatcttttcggtgttactttagaaatggaattacttgcttctgagatgctactcagtacctactattcaagaggcatgcgattcataaataacattttctctatttgcttgttagtaacttagtactccatccgtcccatattaagtgactcaatttgcccaaatagggatgtatctatacccaaaaagcgtctagatacatgtaatattttgtcacttaatatgggacagagggagtatatcaaataatttcatgtattattgccttaccgattgcattgacagttgctgcacttgtccattcagtagatcattacgatctaacttgtgtttttcttcaactgcgatagattaatctgctttgttgttgcaaaatagttgccatattgcactatttatactgaggctacctcatcttctatatcaggcacctcccacagaaaacgacccaa

SEQ ID NO: 14620 - DNA, 692 bp, Brachypodium distachyon
  Intron number 3 from transcript Bradi2g01570.1 (locus Brad i2g01570) derived from phytozome v7.0 (chr-ID Bd2; pos 107 0870 to 1071561)
agcggacgactcttgcagcagcttgcaaagcaagggtacgttgaggaaacagaaaactctgaccctgcaacttgttactttccatttcccatgcctgctcttagcattaatgttgcttttgctgtaaacatctataaatttagcaaagttcctttgtatattgtttgctaatggacatgagataaactggtaggctatcttttttatcctagatttttatgccttgcaatagttgagcatatggtttgagttgaaattttgtttcctcctgtgattttagtaggagacactacaatttggatgcttatgtaatcatcacagatagaggcaaagcgaggatagtcggtccgtattgatttatcctgtttatgtatgacatgttacaagttctgaaggatcatatgatttttaattctcgcaatggattagctattggaaactgataatacttctatgctttgaggaagatcgtgctggcaatctcatgtcccttttgaaacgcacctgcatctctatgacgttagaaggtttttgcatataagagaaattcattcatatattttttgtgtgggtaaaattcattcacatgtactctatcccacattattatttattaatacctctttggcagtactgatgtgtcaagtcaatatgcaggttttctgatctaacaggcatcgactatagtgaag

SEQ ID NO: 14621 - DNA, 970 bp, Brachypodium distachyon
  Intron number 2 from transcript Bradi2g26810.1 (locus Brad i2g26810) derived from phytozome v7.0 (chr-ID Bd2; pos 255 44615 to 25545584 reverse strand)
gtttggagatattccagaggatatttgtgacaaacgtgcttcaattaggctgtttgctaaaatgctaattgatactatgctttgagagagcagtttctatgattgaattggttcctgcggcagttcctttgatctagctgcgagtttattagaattggcccacatccagtattgggctttggtgcgtgagtttgcttcgaaaggtcgtgccattagctagttgaatcaatactatattgcctgtggttattactgacagataattcccactctgatagggttagaaaattctttccccttctattgagggttgctttgttccctcattgcatgtgtggtatagcgaggaattttgatgtagtccttaacttgagagaaggtaccaaatgtggccggactataccaaatgcatatgtcttcatgagtacttcaatgaatccaaaattgtcctatgttattttgcatattttccccgcattttttttgcatatttgactatcaaaaagcaaatttcctgtggaattgttagttcatgtggcatattaataaatgacaactttgcacatgctttctgttttttactatctatttgttctcttgtgcactgagaagctacctccagtaatgttctccttccctgttatagcttgaataacaattttgattctctcaaatcttaattgatcggtgttgcagtctacaatgatatgttgctcgttttccatttctaaattgattgaaactgcatgaaagaccagttataattgaattcattaatggatactttaaacacatgttaatattttgttgtgttctaaggtttctcctttgatatacaaaaaatactgatgtttcctgatttagttcggtagaatagtaactcagatgctagttactgatgcttgatacaactttactccccactgatattgcaggccatcactgctctcaagaaaggagcatacttgct

SEQ ID NO: 14622 - DNA, 442 bp, Brachypodium distachyon
  Intron number 3 from transcript Bradi2g10810.1 (locus Brad i2g10810) derived from phytozome v7.0 (chr-ID Bd2; pos 903 2197 to 9032638)
ggaattggtgaggtacagtgtgaattttcttaattattttcattgtgaggttaaaaaattccatctattctacatatagtttgctcgtataactattgtgtgtggcattattgggactcttgagtgaatatcattatatgggtattaattttggtgttgtactccctccgatccataataagtgtcttggataaatccaagacacttattatggatcggagggagtactatttttgttttgtgggaaagtttagtgttgtactataagagaaaacagttgaaacttcaagtcttcaaaaaaaatagagagcaagccaactggaagaaaagggtcaaaagatttcctaggacaagaaacacacacaaaaattgtagttgatgtcatttatgcacttgtgtattgatatgataaacatttgaattcttgcaccagggggttgcc

SEQ ID NO: 14623 - DNA, 862 bp, Brachypodium distachyon
  Intron number 4 from transcript Bradi1g48110.1 (locus Brad i1g48110) derived from phytozome v7.0 (chr-ID Bd1; pos 467 18776 to 46719637 reverse strand)
atccctgtgaaggctgatcctagtgatgttagttgatatcaacaatctctaatactttttgtacatcatagtatatttcgttaaaacaacaactttgagggtttgatggttggatgtgtactacatgtccagttccattagttttgacctttggttgattacagctcttcctgtgtagagaatattcagtacgaatattttacacttgatagttgttaaatatctaaaatttaataaatttctttataaatggtctcaccaaaatgctaaatattgaagggccacctaatagatttttcacctttgcatcctatcggatttatgtaatcaaacattgtctgcaagttttaatctagctgaaatataacagcatttgacaataacgatggtttgctgatgtaaaggtaaacacacctggctggatgttctgattgcgtttttcagttggcagtgaacgtgcacatcctcattttatcatcctatctccttaaaacattttgtatgtggatgtattgcagctttaggtatccccttgattgtttagttatctaactacatatcagggcactgttatcgaaagttcagggacataagttgtcatcatgttcactccattgcttgactttcttgtcgctaattctattcagttcttttttgttacccagtttggccacctgcatcattgcatgtcaactataacaaacttgagagctttcctatcttaggtgctacttgacattgatgtgtattttaatatatcataggtgctttttatattctttgtggtacaaatgccaatgttttggtacttctgcaaattgtaacaggctgctggaagctcccaaggcatcagtggtggggc

SEQ ID NO: 14624 - DNA, 830 bp, Brachypodium distachyon
  Intron number 1 from transcript Bradi1g51070.1 (locus Brad i1g51070) derived from phytozome v7.0 (chr-ID Bd1; pos 494 94586 to 49495415 reverse strand)
gataaccctagtactaaaccaaaagctttcacagggtatgtgtcccttcctgttcctctgttgctatttttggacgatttttttaagaccaagttcctctcttgttcttgtggcccatttatcagactgggaccatttagttcattgtgtaatcttcttgaaaaaggtcatgtagtcctattctggctgttaatctactaatatctgctcataaaaatattatttacaacggtatgtttgatgcttgtgatgtgcacaagattttgattcctggctaaatagcttcattaatactttgatggatggaattaactagttgtatcttatctttttggctaatgaccatgtttaatccttttgtttcttctttttcttcctattgtcactctatctaaaaatgttaccttatgtatctacatctgcaaatataatagatataaagcgccaagttagcctaatttagttaacggaacctttgctttattgatttctttccagagtcacaacattcgttctttttagtttgtgtttacatgagatatacatagttaatcatcttaggtacgtgtattctcattctttgtcttctagctccttgctacctagataataattcataatctcattggcccaggaaccccacatatataattactgcaacacaacttctctgtagtatctctatgctcatactacacagatatggagcagtgagctgatgagtagctcggagtttagagtacttgcagtattagatttgtttagttgttattttcctctcttcatgtgagaacttcttgacacatccatgcatgcagggctaactgcga

SEQ ID NO: 14625 - DNA, 727 bp, Brachypodium distachyon
  Intron number 2 from transcript Bradi2g04170.1 (locus Brad i2g04170) derived from phytozome v7.0 (chr-ID Bd2; pos 291 6806 to 2917532 reverse strand)
gcttgcagaaaacctggaaggtaagctgacactaccaggaaaatgcctctatgattttgttagtacttgctagtatatgtttactgtcaatgcatgcataggtacagtaccattttctgattgtatcttgcactgggatgagcatagatgaacaataagccaaaggaagtacgacatctatcttctgtagtactcagatgcttctgatgtacatatggtatctatggtacagtagcaccatctgattgtttttcattaagcttaccaggaatgggcattttagtaaatgaagtaccatggaagttcacacaggtttaggtgtagtatgcttctgtgtttattcacagtgcatttgctccaagttttaacattatttaataatacacaaaactgctggagaacataaataagactgctgatgcttccatggacaagtgagagaaatgttgtacttatttcattttagcagaaactgacagcgaggtgaaagaagaatgtttgatattttacatggaactttgctgttgtttttgttacaagcactactcatgttctttgttttaaagctcttctcttattattcattttactggaatgagtataagattgtaattgggtcatttgaggtgttgtctttgcttgtttcaactgttatctattagtatgtcactgttgttcatgctcaaagtagccttgtctaatctttccctgactgaaatatgtagaa

SEQ ID NO: 14626 - DNA, 800 bp, Brachypodium distachyon
  Intron number 1 from transcript Bradi2g04170.1 (locus Brad i2g04170) derived from phytozome v7.0 (chr-ID Bd2; pos 291 7619 to 2918418 reverse strand)
acttgagactgaaggggaggggcctcttctctcaggtgagattgtgttcttgctgtttcctgcttatgtggaatctgttccaatccttctcggttgtatgtttgagtttgttggtgtgtgttcagttgctctttttggagagatatctattcccaagatcttgcagatttctgcagagatgatgttttcttttgatatggttttggttacatggccaccgctgtttctttcttaatgaaaccggcctatattaacgcgcttgtttaatcattgaacagtggaatgccttgtggcttttctgaaccattgcttttttgtttggacaaaaaaaggccattctttgaggaaaatatgttcatgtttttgttgctgcacaaataactcgatcttatctattaacctgatgatctcaccagatatatggtgtatctttcatttcttctagtgcatcacatgtgtgatttagacatttgtttctcacatgatagatttagttctagtgaggaactagaaaaccggcacagttctacactactgtagtaccagatgctaattgcatggtgctatttttcacattgaaagcatttcgtcacccaacgaacaaggtctgtgtgtttatgctatgtggcgtattgtattcatttcacggtgctaaacttcagccctaaagtttatggttggcatttataattcttttttctttggaattgtgacatacttgccgtcaatccacattttgcccttacatttggtgcttgcatctgctaaacttcttgcttttccttgaagattagtgaaaa

SEQ ID NO: 14627 - DNA, 348 bp, Brachypodium distachyon
  Intron number 1 from transcript Bradi2g06460.3 (locus Brad i2g06460) derived from phytozome v7.0 (chr-ID Bd2; pos 494 1431 to 4941778)
ctcctttcccggatcattttctgctctcctcaaaggtgagtgtcaaacattttcagtaattaacttttatcttcgagaggaatattttagtgcccttatttgccatgtgttcattgctgatattttcagtccatttttgccatttaaagtccagttgttcatgccccaaccttgcaacagtttctgaaaccatatttattaccaaggaaaaattcaaagaaaagaaaagagagagagtataaacaattgctgaactatatccacaatgcacacatcaaaccttgacgaacttggtacgtactagcattttcaggtggtgttctcccccgtgctccacggcaaggcttt

SEQ ID NO: 14628 - DNA, 731 bp, Brachypodium distachyon
  Intron number 4 from transcript Bradi1g54970.1 (locus Brad i1g54970) derived from phytozome v7.0 (chr-ID Bd1; pos 533 33916 to 53334646 reverse strand)
gtggggctaaggctgtaaagggatcccgtgtcgcagtatgtaccagcactactatttgtattcgatcaagcttagcatttgtagaatcatgtagaagattattggcatgaacctgtagcaatgagaggaactgataaggatgaagtctcatgaaatgggaattctgaaatgtgcaaaattttcttttacctcctcgagtttatgtggtccgatttgactctattttatctcatctaattcatcacataaaaggtgatatcttataattgtgttgacactctttctcaagaatgtccaattgtccagaaacatccatttgttgtgtttgtcttcatttattttgactaatcatatcatcatatggatgagtagaggtgcaacaagttaccattagggtacccaacaacccccttgagttcaaacaaatgaactagtttttcaaaaagtgatgtgattttgaaattttagctcatttgattacccgtttgcacctctatggatgagtgacaaatctgttgacatatagtgttttagagaacaagttatcatgcagcacttagccacttttgctaaaaattgcaagattgaactaataggaagcctaagttaaataacagtgttccgatatatcaagttatattctaccaggtgattggtcataagttgcaatttatttttaacttcattttttcaagtataatggtttatcctatctttagtgtaggtacatt

SEQ ID NO: 14629 - DNA, 342 bp, Brachypodium distachyon
  Intron number 1 from transcript Bradi2g02480.1 (locus Brad i2g02480) derived from phytozome v7.0 (chr-ID Bd2; pos 165 3895 to 1654236)
ttgctccgacggtggcctacgcgcttcgacttgcggtaacctgttacctgcttgcctggacatgcatgttttttttctgtcagaatagcaccatccttatactgataaacctttgtcatgcagatggcaagcataaaagaaagaccctcactttgataggtaactattctgctgaatgatataatctagtcaaaaaattcaaatgatacagagaatgtgctgtacttaactacttaattatctgaagtatcacatggcttcatgctcagtttgctcaccacctctggtatcttctgtccactttcagtttctctgtcggttgcggctgtcttaagtttggca

SEQ ID NO: 14630 - DNA, 1000 bp, Brachypodium distachyon
  Intron number 2 from transcript Bradi2g37920.1 (locus Brad i2g37920) derived from phytozome v7.0 (chr-ID Bd2; pos 382 69470 to 38270469)
caggcttcaaaaaccaggttagctggctctagatgtcctgtaactttcatgtgttttttcccttcattcttttgtgcatgtgttgctcaagcacactgtagttctacacatgcatgtgcctccctgaggcagtgtttaccacctcggtggacagtagtatctagggtgtcataatgcttgcattaaagggatcgaatgtactgggatcagtgcaggtcaaacttgtgatttacttctgcatagtaaaatatatttacaaatcttgtgttgactaggattttctttctttacctttgccaggccatcaaaataattactaatgatttttatcctttggttgtaacatattaacactgtaggttatgtcttttttttctgttgaaagtgaagtttctactagatgtgtttggattgagcctcaacttgccctactgaaattttggctagccaaaaatataggccaaccttttgcttgcccatgagttggccaactttggtactccctccgatccatattagttgtcgaaatattacatgtatctagacgcattttaggcatagatacatccatatttggtcaaatttgagacaattaatatggatccgagggagtaagaaaaatgaactagagttggcaaaggaacattggcaagccaaaatattagctatcatccaaacaaagaccaaactttcggtcatgactaaaaaattggcatggtgaattttggcaatgaaccaagcataccttggtatcatatcaaatttggttagaaatttataaccaagtagcagatctcctgagtttattttctaattactattacactgcatgcacacttcatgagtccctaaccaagtagccgagctcctgggtttattttctaattaccactgcatgtacacttcatcttcatgagtcctttcctacaattcaataagcattcaatgtgagattttatacttgatactaaagccttttgccgttccgagttctgtagga

SEQ ID NO: 14631 - DNA, 516 bp, Brachypodium distachyon
  Intron number 2 from transcript Bradi1g51920.1 (locus Brad i1g51920) derived from phytozome v7.0 (chr-ID Bd1; pos 503 81888 to 50382403)
ccagtggttaccttcttgatttcactcgctttcgggtaatcattgttccttcttttcttttacaccgcaacgtcttcttcttcttttttgaaaaaaataaatccaaccacaggagcaagtcttcttttttgtttggtaaaaatatgagtctcatataatgacaacagaattatgccatcttgtataactatattataagtctgaatcgattctatttgaacaattattactattttactttccattaaataatttaaccagcacacaccagaattaatctttaaatgcagactgaactaagatcaaattttactaagatcctagtagagaaagaactttgtagattcctcatgaatcataaaggaaaaaaagaagtttgtaaactccatggatcctacaactggtttcacctcgattagtttcctatgcagagcaaacccatcaactaaacacttgttttcataagctagttggttaattgcaccaaatgtatgaatgtaatgtaattattcaggt

SEQ ID NO: 14632 - DNA, 1000 bp, Brachypodium distachyon
  Intron number 2 from transcript Bradi1g70960.1 (locus Brad i1g70960) derived from phytozome v7.0 (chr-ID Bd1; pos 690 90920 to 69091919)
gagagtcctggcggcctcgatcttccttctttcaggttcttgtcttctacccatgtacagaaatggattaccaccagttgttttatgttttttgcttccattgtcttgatagcagttaactgtgcacttaatagataattagaggatcggtgcctgaatgtttacatgtgctggagcagtacctgccaattcctgtgccggttatcgttatgaaacgtgtatctgttatcctaagtagaaagtactacagattaacaagagggccgatgggcttaaattacatctcatctgtttattttattcgatattgtccacatatacatggttttgtaggtgttgtgttgcaagttatgtcctgtgtttgtcagtatgcagtatgattttataggaaaatatattatggaagtctttcacaaggaaaattgaatgccaaaatttaatgttgtgatgttgtcagtctatatgctgaatgctctcacatatactaacgatcaaatatttgaaggttgattgcatggatcccatggtcacctattagcattactgtattagagacagagggagtacaagtttcttcattttgatggctttctgattcaagttggtttagcttacttgtagtttactcggatgctctatagtcttgatgctctttccaatggatttcgatctaagtttattttttgtagtttaggacataactgctttggttgtattaagacacatatcttctgatgatttttccttctacaactcaattaattacgagcaacgagtatgttctttcttttatattggtgttcatgttgtttccttgtactgttgcggagctaatgtatttgcggtgaggatgttggcttgtcgctaaagctatctctttgttatcataactcataagtagtatatttctggtaattgtagtggtatttcttttatgacacttgcacttgaagtgtcacagtattaacaatgttaggctacttatgcttgtatgtacagc

SEQ ID NO: 14633 - DNA, 733 bp, Brachypodium distachyon
  Intron number 2 from transcript Bradi1g65010.1 (locus Brad i1g65010) derived from phytozome v7.0 (chr-ID Bd1; pos 641 56751 to 64157483)
aacaaattcggaggttttaggacaagggtaggtgattgatgtacgtattaacatcccctttgacttcatggtggttagctcttgttgaaggtcttgtcctagctcagcaacagaggacaatttctctgtttctgattgtgatcaagcactttcttgtcatcatataattaattaacttctgtttttttttaatcttctcttggcattttcctgtaatagaaaaaaaacttttcccattacatggagcctgaaggttgaagcaaaagacaggcttgttacattaatttcccccgtttatttgtgttattgaaatcgatgaccattgtcatttctgttatccatcaccttcagataggagtattcttctctttttttgctttctgctgtgggggtcccgtacggcataagctataataacaattattctggcctcaaaagtttcagatgttcttgaattgcacttaagccatgttaggacatactggttcaatcttcaatgttcctattcttaggttccttttggttgccagtggcatttaagaagcacttctttcttttgaaagaaaattttgtaagcacttgcggttttggattgtaaccggtgaaaattccctcaactagaataatttcacagcataactaactgtaaaaaattgacagattcgccgtcgcaaatttataacttgacgtccgtgtacttgtaggtttgctgcacaggtcttccacgggctgt

SEQ ID NO: 14634 - DNA, 950 bp, Brachypodium distachyon
  Intron number 1 from transcript Bradi2g05800.1 (locus Brad i2g05800) derived from phytozome v7.0 (chr-ID Bd2; pos 430 6355 to 4307304 reverse strand)
cgctccctgtcatctcccacttctgtgagtctctctaagtctctatctctaagaaaatgctctagttcataaatttactgtttctaggttgaattgtatctttagctttaacctgcctacgtaagtatgtgtttctctaagaattgatcttccatctaaatttgtgctttgcctatcagaatttaaggaggacaagaggtaaagtgtgcgagaatcggagaagaatttcgagattttttttttaaccattcgttaatttttttaaatgaactcaattttgggctgaagtcagctaactttgatgggtacttggtagaaataataattccattgggaacaggatagtttgtagggcttctatagtccatatcagctgcacgcagaaataatcaactagaatgttttagacgcaagaagatttgatgacaacatgctctccattgcagtagtggtgctcggtttatgtcaaaagcctgctgctcattggttagactttaaagttcgaggtctcttagatattagttgtggatttttgcttcatctgaaaacttgaaaatggcattggcttaaaatgttgactactcatgtaccggcagattgcagcaatgcagtttgaattaaaaagtgccatctgctcattttattaactccatggatgaacatgagtagtgtcttgttcatagtgctatatctcatatgaaaacttgagcttatgtagctggctagctgctacgtggaacctctctatgtaaatactcttgtttcaacatgtagtactaactcgtgttattagcactaaacagagatacataatttttgcagctaaagctgcatctgccatactggatttatggtctatttagtttaagatatttaactggttagcttaacctcgcttgtgatgatcccagattaaaatttgtctatgcaggtcataatctttttaaatt

SEQ ID NO: 14635 - DNA, 796 bp, Brachypodium distachyon
  Intron number 1 from transcript Bradi1g72490.1 (locus Brad i1g72490) derived from phytozome v7.0 (chr-ID Bd1; pos 702 08712 to 70209507 reverse strand)
tccttcagaagttccggctctacgagaccagatcggtaaggatttcacgcaaacttggttgactttgatgcttgatttggtttggcttgaactggattgtacctgtaggttccttagacttggcgatctttgtgtcagtaacctcgtgcgtttgactttgttataagggtgtgtgtttgtttgttcatggttgattggattattgagtgatttaatgcttccaccgtgggatggatctcctttatgtttgattctgttcaatttgattataagaaaaggttaaaaggctgcaaaaaggcgagggaagatccccctttttgtttcttttgcagggggagtaaagaaatggctatttgtttttcatgcttgcctgcaattgtttcacgaagacaagatatgtgctggtagatcttgtttagtgatgctgttgttgtgttcttgggcttaatgtgtgatccttttctgcttggcgactcccatgctaatgccagaattgaaggtttctggttcccagctgaccttacatatatcagtatatgcataaggattctcaatattggacgatagtttgatttacaattcagaagctaagttttaactattggttgatacgacaggcaaccaaagttatgtaattgttctcctccaaatactgtttcattgattgactggaagcgatgttacatgtcaagtgttcatatgcgttctaccagttgctcaattgctattctaacaaatatttgtgctatattttgatgcagaaattttatcttattggaagaaacaagagcaggac

SEQ ID NO: 14636 - DNA, 634 bp, Brachypodium distachyon
  Intron number 1 from transcript Bradi1g74890.1 (locus Brad i1g74890) derived from phytozome v7.0 (chr-ID Bd1; pos 719 38241 to 71938874 reverse strand)
ggcgacgacgcgccttcatcgcaggctcccgtgaggtttgtgaagtcgtttcgcttgggcttgcctgtttctccatctgttccgctgcatgtccaagttgttttttcctcgagagaagcctttgagatcggagtcgatgcttgtcacgtgtatgctgatccgtagagttcttcgtgtttgttctgcgaattacgtcctgcagatctgcctagcccaaagcgtcaaatcttagatccaactcttattttgtaggctgatgcaggtccactaaaaatacaagtcgtatgattcctggccttcggagttagactgtataacgaagcaccgtaaagttaatgtgcaaatttgctgctctgtcctgtctattcgtctacgatgattactgcttttaggtgctatacagagtttctgtagatatatattcttatttactttgaataatcaaatattggataattcctgtctcccaccttatagttaatagcaagctataagaattaggactgtgccattgctcaaatagctacttctagtcatcctttctgtagttggtttatattagtctagtgcatatgtaataagtgattttaaaacagcagcaagaagaaaaagagaagagcatcagcagttggtc

SEQ ID NO: 14637 - DNA, 586 bp, Brachypodium distachyon
  Intron number 1 from transcript Bradi1g68760.1 (locus Brad i1g68760) derived from phytozome v7.0 (chr-ID Bd1; pos 672 79226 to 67279811 reverse strand)
acctacggttccggtacctcgccgccaagtgccttgtgagctctactccccagagcctttttctgcttctgcatttcgtcgaacacggtgcgtgcgtcccgatatgtccagtttggcttcccctatttgtgtaaacgcctcaatgggccggcgcggccgcacgctagggcttccttgcagttagtttgtttggcctgatttagcgaggcgcctttaggtaatcttttttgccgagtatcttgtgggcttctgcaagcattcgacaaaatacatatgttttgctttcagctgaatgtgtttgaactggattatacattttgttacacagtactcccctagtgcctacagctggtggcttatagtcaaatgccctgcgagttcttcaaaatgactagcacaaactagtataagattgtctaatttattatttgtatacaatgctttattggttactgtagaaagattaaggttttgatgtttctgattctattattttagattgttaacttcatgactaggtttgcatagatctttgcatatgctgcattggttcatattttttcattggccaggaggagttgaaaga

SEQ ID NO: 14638 - DNA, 863 bp, Brachypodium distachyon
  Intron number 1 from transcript Bradi2g14500.1 (locus Brad i2g14500) derived from phytozome v7.0 (chr-ID Bd2; pos 130 96378 to 13097240)
ttcgcccaactcatcctcctctgcgcttcaccaaggtaataataactaattaaaactcccgatcgacgacgacaacgtgactaattaactattgagctgtctctcttactggctagctagcttctcgatagcaaattaactaaccccgttaagtttttacggttttattcttggcaacacattactgagtagtagtgcactagcttgtgtggcgatttccagctggccaaggccaagtgtacatgcatgcgtccacgtcagcgtgtgtacgtgcatggggccggtcaccgtcggtcgccgtggcagccagggaaatctatacatcccatgccaggccgcccaataactatagccgatcgatcgagacgtggcatcgacccttagccagcagtacgtgacgtacgaaaatatattttcccggctggcccatttaatctcatttataaagaaaccgaattcattattatctttctttctcgaacaatcgctatgaacactgcctgccttgtcgtcaagaagagagagtaaatagagttgaaagaaaaaagagacactaaatatgtatagacaagaggtcatgcatgtttctagctagacagaacgcataaaaaattcttaaattacgtatgttttcctgtcttgcattcgacctgagcaacgctgaccatctggtttgactttggagtcacaatcgatcgatcacagatgttttttcttcataaaaaaggttatcatggctagctttattaggaattgaaccttcgtaacatacagtcaatgagaatgataaaataggagtaaccttttattttaactacggttgatcaggtacataaactcatcgcccttggagagcgaagagg

SEQ ID NO: 14639 - DNA, 881 bp, Brachypodium distachyon
  Intron number 1 from transcript Bradi2g31550.1 (locus Brad i2g31550) derived from phytozome v7.0 (chr-ID Bd2; pos 313 61492 to 31362372 reverse strand)
gcaagaccgaatcggacaccgtctttgtcacgaaggttcgtcgctacggtttgcctcgattcttttccccgttgatccgtggcatgtgcgcagcggtggatcttagtgtcgttaattggctagggtttcggtgtgttcattaatatgaatcctttataattatttagatggtgggtgtgtactgttttaccgtttggacgatgaaagattttgtaattgcacgacaacatgatggattggatgccttgtttcctgacgagcctagtttaggtcattgtatggattcgtgaccggaaagtcgggattcagactatttgtctttcatttggtttattaaacgagaagatgttttgctatttgtaaatttgatttattatagtgctgaacgattgagtggttggagatttgcgtctgagttaactgaataccatgatttctctatttttcttgtgatacatggcattccaagatatttattgttgcctcaaggctagtgaaatatccttttgcatgtgccttgcaaattaagtgcatttggggtacaacagagctagagatgttgcgaatttcattaattagagtaatttagtgacattagtagatgagctagtgtccctttttttgtactgttttcactacaaagaagtttgtctcgtaatctaattattttgcctgatgagttatacatcgtgaattttgagaacatagaaataagttgtacctgtatgaaaggtttgtgcttatcatgattgaggtgtccagcattctaacctgtgcataccacggaaaagtgaactgatatcttttttgacaagtatttgaatgctttgttcacaacctaagaggattacattttcatctcttattccatttaataggcc

SEQ ID NO: 14640 - DNA, 773 bp, Brachypodium distachyon
  Intron number 1 from transcript Bradi1g71810.2 (locus Brad i1g71810) derived from phytozome v7.0 (chr-ID Bd1; pos 697 38571 to 69739343)
cgaggggcggcgctacgcgatcgcgccgcagctgggtgagtgcgaccggactccatagggcctgccttggattttttttcgggtttcgttcgttctgatccgcctgaccgctgcggctggccggctctggtcaacgcctcgttctttgtttggattttgatttgtgtccctccacgcctgcgttgcgtgtgggaatcggagtttgtagcgtggaacctggtgggactggaagttggtgcgttgcgttcgcccggtgatttttgaggccgcgtatttgtttggtgcgtagtaattcgcgagaattttgtgtttctgcggcggagtcgtgtgcgaatttagccgtttggtggctgccgcgatgtagagtggagatttcacgcgcaagtgtcctgggagtggaaccatcggaagctgtaccagctactcgaaataattggggacttttggggtttcagtggtctggagatgaatggatttctgccagtatcctgcgttttctaggtgttcaagtcgtaccttctaatcgttagtttatttttggagaaatctatattctagtgatgtgtccacatgaacttgaaatatgaaattataccgtgcaagttaattttggccatggtacatgtttcatttgtgaagattgggaagcaacaatgttgaaattttcattcaaacgtctttaaatacttttttttaacgatgattgcctaactctacatttcaatggctcctgaacagacattgagcagatactgaaggaggctcaacatcga

SEQ ID NO: 14641 - DNA, 651 bp, Brachypodium distachyon
  Intron number 1 from transcript Bradi1g53640.1 (locus Brad i1g53640) derived from phytozome v7.0 (chr-ID Bd1; pos 519 30177 to 51930827)
gagtttcttgttcgggaagcggaagacgcccgccggtaagatccctgccctcaaccttgaagaaatttagtgcaaattcgcattctttttttactccgatctagtttctgtgtgccgcgcgctgttacgtatatctgtgtcgtggagttgcagctccccgcacaaggactgggagccgtcttaactctggacgcaagctgcgtaaagggtgaatttagttttcttgtcgctgctttggtcataaggagtatggatttagtgcaaggtcaatatttggattggattgtcttggtcttagcatgcccggagtggtcagatattttgctttgttttgattttgcatatcatcttctcatgttctccctcaactaataaaagaaacattgttagaatgtccactgtttgggtttggtcccctctgcctcctctttcaaactggggattaatatctctggcacctggtatggaagcaacatactggcatgctcaagttacttgtagtattatcgatagcgaacttctgcaggattatgtatctcgtagtatatttcccatgttgagtagtgccttttcttatgtcaaatgaatgtttggtagtaatttactttgtcttcgccggtaatttcagagctcttgagggagaacaagaga

SEQ ID NO: 14642 - DNA, 1030 bp, Brachypodium distachyon
  Intron number 2 from transcript Bradi1g57250.1 (locus Brad i1g57250) derived from phytozome v7.0 (chr-ID Bd1; pos 559 77352 to 55978381)
gttgctctctcaggtagagtatttttttcgaggaggaggaaacccgttggactctgcatcaacagtcatgtatcacggccaacaaactttaaactatcgccaccaaagaaattaacttcaaagtatctaacgaacgagcaactttgtagaggtaaacgatgatcaatctagtgcaggcagtacatctatgtcgtcctctagtgcgtatatatgcatattattgcatgcaggcaccatccaaagtgcctatgcgcgtatatgtgtgtaggctttttagtgccattacgactcttttttcacaagttcttggcaacttctttccgttcacctaatgatcgtcatcgtcccagtgattcatccagggtgcatgtgcatccagtatagctcttgtctctattctcggctcacagtacctttccttttcgcaaccagacaaggcacatgcatgcattcacgagacatcaagtacctgatcactcgagtggtcaaaatgtgccacccaaccaccccctatatattcagtgaccccatatgcatgcaacatgcaatgtttctgagacaaaacaaaagaagaaatatgccgtgcaaatcgttcatgcatgcttgcatgttactctatcgaccaatcaaaagaccccaagaaagcaaaatgcgagagcgacgtttcgatcaatatagtagatcaaaagctcccaaaaaacaataggttgcaccaaatgattatattttgaaaaacttgagcccatgattttgtttaaaaatgtaatataaagaaatccttaaattctacagaacttttgtgatatatagaccatataactagataagtaaatctgccaatgtaacgtattgtttttctagtgtaggttagtagactattccaaaatgcgaaacctcatatatttcgatcaatataatagatcaaaagctcccaaggaaaatcaccgcattattcttgctgcctcgccggccatgtgaaatgtacatctctgcaggagcccacaccataggccgcgcgcagtgcaagaac

SEQ ID NO: 14643 - DNA, 758 bp, Brachypodium distachyon
  Intron number 2 from transcript Bradi1g60630.1 (locus Brad i1g60630) derived from phytozome v7.0 (chr-ID Bd1; pos 599 91793 to 59992550 reverse strand)
ttcttgttcttggcgttgacaaggctggcaagacagtaagtgtactcaagctttaataagttaatgatcaactgattatttcttatttacttctttctgtcaagatcggtcaatcatttattacgttttcacccgttcgaacttctcttcgcactatttgttaactgatgataatttattgtcaagtttgtcaaatctgaactggatttgttcccacacatttgttaactgatgataatttatcgcacattctactattctagcatatatactctcatctggtaacatatttattgattgcgctgcttggaaattgcctgaatcttgattttgtttttagtatatttgaaaataggtgtattctatgcaaacttctcttcgcactattctatactactccctccgatcctaaattgttgtcgaaatattacatgtatctagacgctttttaagagtagatacatccatatttgggcaaatttgagacaagaatttaggatcggagggagtagccttcttcttgtttatatcaacttgtaagtccaacttacttccagcattgacctttctagttaacttcttttgttctacaatgtttatattttttatcccttgctgcttttcttaatactttttgtgtttaaaaatatgatattatctagttttatgataacatatttacctagtattaacgtgttcttaaccctataattcatgttatagacattgttggaaaagttgaagtcaacttatctgaa

SEQ ID NO: 14644 - DNA, 623 bp, Brachypodium distachyon
  Intron number 2 from transcript Bradi1g71520.1 (locus Brad i1g71520) derived from phytozome v7.0 (chr-ID Bd1; pos 695 17138 to 69517760)
tcctcttcacgccgcaccaaacaagaagcatcgtaattgtcaaacacccactatttttgcccgtcctgtccaaagagttgcccctttttagggttttgtgtaagggcctgtaagattttgcttcggcttgttacctacgggcctacggccgagtccttgtgatgcggtaaacttgcagagttgcttgtctgcttaaactagcctctactggtgttttggtgatttcggtgagacgcatcatttaaagttgggttttcgttggaggaacttgtgtgggatgattggatcgaggtgtttggccgataaaattaacctcatcacgcatgttatttacgttttgtactggaaatcctgtactttgactctgtggctttaatcaaaccgggcctgatgcctaatttctaaaaagaagatggattgaagttagattcgtagttaaaagttttaactcgagatgtttttattttgcgatttgtgttactgctgagtttattacatgtcatgttgtcgcgttgttatgtacctactgcagagaagatgaaatgttcttcaccagaagttagtatttgcgttctgcatttgcaaatagaagtgaacaaccctttttatctctgatttcagtg

SEQ ID NO: 14645 - DNA, 664 bp, Brachypodium distachyon
  Intron number 1 from transcript Bradi1g55930.1 (locus Brad i1g55930) derived from phytozome v7.0 (chr-ID Bd1; pos 545 37832 to 54538495)
ccgccccaccaggaggttcgtatgtttctcgattcttttctcttttgtaactttgatggtggcactcctttgcctacgctaattgggaaggaaaaacaaagacatgccaaacataccatatatcaatagatcagatgctgtcagtgtcaccctgaaaacctttttgcaacatatgattttttttttcaaattaattaagaaacataaaatatacccgataagccaatgacaaagtcgtttgtactattttcggtactttacttccaacactatactagtggtctactcaccgagcagatgtggacacacacacgcacacacgcacacgcaaagaaagaccacagctgttgacgttcttgttcctctgatatcccaacacacactggacgagcgggcggcgaagtttgtatactcgtatatatgtacatttgtactccgtatttttgctactccattttacttcttccaaacgtatactctagctagtactagtgtattgggaaagccttaagatatatctaaatctgtcttgcctattcactcaccgcgtggaccacacacgcaataaaacggccacaggccacagctgttggcgtttctgtttctgagagaccccagttgtcttgtaggaggacacggtttagcgacgaacgagaaagccccc

SEQ ID NO: 14646 - DNA, 803 bp, Brachypodium distachyon
  Intron number 1 from transcript Bradi2g12160.1 (locus Brad i2g12160) derived from phytozome v7.0 (chr-ID Bd2; pos 104 96585 to 10497387 reverse strand)
aggagcgaaagcggcggcggcagctgcagcccaaggtgagctcttcctccttcccgcccggtacttcgtttgccgtctctcgtctgctagatctctctctcttcctgttggattcgatagttttcacgtgcgagggactcttgctttcgcgattggaagcgggtgattcttccgtgtagatctggtctcagcgcgctttgtttttgttttgtttcgactcctcattagaggaaaggaaaagttgggaatattcttgcttttgttgttattagtagttgataacttaagaaatttggttctgaaatttagggacggtttagaaattcgcggggataggaagttacccgtgggtagtggccgagaaattgcgtctctccccatggtgttcttcatatggatctcgccaactgctgatctgatacggctttttatatttgcaaatcagtactagttgacggtcgtacgggacactcgtagatctttgttctatttattttaatttgcaaattagttgacggtcgtgcgatccactttcagatctctgtactagtttttcttaatatgctaattagtacggtcgacagattgaaatttctgtggacatgtctgtttggaattgacagtagtcttcgttacgaatgaaaaaacaaatattattcctcagatctggtatttcgtcgttacagtcagccaaaacatgctagttctagccattcgccgttgtgctttgattctaaatttctaatatggtcgtcgtgtttgaatccgcagaggtagataagggtatctccaccaagcaagaa

SEQ ID NO: 14647 - DNA, 761 bp, Brachypodium distachyon
  Intron number 1 from transcript Bradi2g05390.1 (locus Brad i2g05390) derived from phytozome v7.0 (chr-ID Bd2; pos 391 2882 to 3913642 reverse strand)
ggaagacgctcgcctacttgctccctcttgttcaggtacatggattggctttgttgatttgaaggggaaaaaaccgtgtaataaagagcgacattgcagcatgtgtctggtgatatagtaatgccgttatgcataactcataccagagagtctcatttctagccactccagttacagagagggcctattaatatgtcatgcttagcatctggagaccattacaagagtgaggcagttcagtatttgagtagcatgtaagtgttgaacagaaaatactacgagtaattagttcagaagtctcaggggaaaggggatgtattatgtaagaattactttatgagctatatggttgaagctaaaacttgtgataaattataatcagtatgataaaactaaggatttatagaaatttggatcagttgtttataggaaatcaatggcctggttgcggtccagggaaaaattaaaactggaaacttatacccttcaggtacgtactagctccattgcatcttccagaagtcaggaaatgaaaatggatctagctccgtcttgtttctgcaatcacatggctccatttttcattgagaaaaaaaaagaatggtagagtccaatcaggcgaaatggatgtttcttcttttgaatttagcactctgatctgattatcgcctgtgaattaagacataaagtactttctaagttatatccagaaggttcagtaaccatggtagctcttcgatttgtgtagctcctgcgtcacg

SEQ ID NO: 14648 - DNA, 592 bp, Brachypodium distachyon
  Intron number 1 from transcript Bradi2g07680.1 (locus Brad i2g07680) derived from phytozome v7.0 (chr-ID Bd2; pos 602 4396 to 6024987)
tccaccaaagcaagtaagttcagggagccagtttctttttctcctgtaccatgttgcaaaggtggtcttcatttatttattttaacattttggcatttatgtaacatcgcattttataccatcaccagctaaatacatgtgcattgctacggaataaaaaaaaatgcatgacttttaaaaaaaaaatgtcatatgcaatcaagtgattgcccaacaagctaggaggtagtctcaataggatgaacggacgaccaccaacttgaatctttatgtgtaaagataaaagataaagaaaagctagagattggcttcctttgattttgattcttctattcttttgcccttgctttatgattagagacattcacttgtttcatttgcttatactttcactcatgcttctctagtctctaccgcgttcattttcttttctttttctttcctgttattgggaacacctatctgcgtctcgtcacaagtctaagctttgacagaatactttctactttcccagcggaatgttttcctgatagaaccgacgtacaatgcctgcacaggtggcaaaaggttctaaatcctgagttgatcaaag

SEQ ID NO: 14649 - DNA, 653 bp, Brachypodium distachyon
  Intron number 2 from transcript Bradi2g22250.1 (locus Brad i2g22250) derived from phytozome v7.0 (chr-ID Bd2; pos 197 90311 to 19790963 reverse strand)
cttgccttcaggtgtctcagacaggtatttaatctagttctctcagaacatcaagcctcaactcatcgtacttcttttcaaatttatgtccatgctagatttgttttgtgttcagtctctgtgtcactgtcacctagtgttgatgatgcatgtatgctccctgtaacttagcaattgatgtttcagtctatcttacgtgcattgcaatgagttttagctagtgttatagactaacctgtattcgctcaaccctgcaaaccttaccgagtgtatagaagctgttgatgagattcattataggtgcttttaattagagtaggccacccttttgacacttaaattgatttgatggatcatgacatcagtgcatttaccttggaagtcttgtttgaaagatattattgtactgaatactaccattttctttctgtcattattttgacttctgtgtcttctctctgttattactgtactgtactatagcatggcctcaatttaatgaatccaaggaagcattattttgtctcaaacaaaaatgggactacgttctaatatggagcatctagaccttcactttcatgagtctgaaaagttattcatgtttgtttgttcttgcagcttcagctggacaatttgttattgttcagaataga

SEQ ID NO: 14650 - DNA, 641 bp, Brachypodium distachyon
  Intron number 4 from transcript Bradi1g53210.1 (locus Brad i1g53210) derived from phytozome v7.0 (chr-ID Bd1; pos 515 76168 to 51576808 reverse strand)
cagatctgccactgtatgtgctccaactttactcaaacagtgttcattttggggacgctaatttttagttaggttgatgctctgtcgttacagaaattagctgatgcttgttgattgtactaaagccctcgtactgtgctggaccctaagctttttaaaatggctaacctctatccaagcaaaaaccaggattgcagtttcatttcatggcatgttaaaaatatgttttattgtattttagtgataacatcccaaaatttacataaaaatgtatagtttgttgctgcttgctagttggagagaatctaaaagaaaaatacaaatattttaggttttattttggggtagtagtttatatcaagaacaaataaactaattgaattaattttttcatctatttgtttcttcactgttccattttggtttgtctctgagcatggtcgttactccttagctttatgttcacagaatactaaatttgcatgtcttcatagatgtcttatctttatattttatttccttgtggaatacagtgtatacagtttagttgaagtgttttgtttatggaagacgttgcccttttcatcgcaagatgctactagaatttatttgtgatatgtatcttcaatttattgaacaga

SEQ ID NO: 14651 - DNA, 841 bp, Brachypodium distachyon
  Intron number 3 from transcript Bradi1g77580.1 (locus Brad i1g77580) derived from phytozome v7.0 (chr-ID Bd1; pos 738 52398 to 73853238 reverse strand)
gctcgtcgctgagcacaacaaggtaaccaacccagatctgcttgccactagtgtctctctctctcagtccaactgatggtgatgctttttgagctgggctgcctttaacttcaatccaaagctggaattctccttttagtttgctcccctgtatctagaatgcgtacaaagcatgcatctttggaatgtgttgaccttatttaagtaatgctgcttatccctttattcctagtgattagtgaataaagtattagagtgtgttggatgtttgactgctcatgctacaagcacatatataaaaaaggaacattatgtgttggagaattagagatcatgtgtatgagcaagacagtaccccagttaaacgtcactctgtcaggatctgaaaaagactgaaatcttgctcaaatccaccatgttttgtttatttttgtttcatcactggtccttgttgtgtcggtggatcaggtcaggtggttgccaacttgccgtagccagatgggtggccatttaacaagcatggcccagttttaataaagctctttaggattgtcttacagggatttgtccttttattcgtccgtgtgctgtcgcctgtcagtattaatctagtacatacgcaattatcccaaagaatccaaggatccagcagagtatctgcagcatgtgacacaaaattttagtgttcttcttctgctcatgattgaggcatggagctgtactattgattaatactaactaataactggtccgtgtcatctgcaaattatgcattagtataccttgtattgataccggcaatgtgaatgctcaccttgatgtttgttttcacagagaggct

SEQ ID NO: 14652 - DNA, 986 bp, Brachypodium distachyon
  Intron number 2 from transcript Bradi1g72790.1 (locus Brad i1g72790) derived from phytozome v7.0 (chr-ID Bd1; pos 704 57179 to 70458164)
gtggcattatttgggcctggaagaggtatatttggccccaatgtcatttttaaagccttatgcgttggtgtgcttgcctgttgctgcttactactccctccgtcatgaaaaatttggtaaatcccattttggaaaacggaaattcaattaaaagcggtcccatattaagtgacttgaatttgcccaaatatgaatgtatctagtctaatattactccctccgtcccataatatgaggcacgcacgcgtccctagatcatcagtttagctaactaaatataaattaaataattaaaaaaatcatattattagaaagttctttccataacgaatcttatggtgtaatttttgttaagaaacatacatatttaattaatcaaattggggatatagggatgcgtgcgtgcctcatattatgggatggagggagtaaatgactttatattatatgtatctagacgctttttagactagatacatataatataaagtcatttaatatgggacggagggagtactaatttatgcctcctcacagtttcatggtgatcaatgtcagatagtgacttctcgcaaaaaaaagaagtcaggtagtgactgataggtgcattatgccatatccgatatgtttataagaatgatatatatataactctatagcaccaggcagcttgtctgactcaagatgtcgtcaactcttgaatctacatgtagtcatccttagtgtaatatctggttttcattcatgagtttttgcttggcatgatggtgtttagagaaatttgtttgattgctcccaagaataatggtagaatcagagggactgtgaaatttgtattctagtgtgaagaaaaccgcattttgaggaccaacttcaagttcaatctgatgccctttttcagcatggttgtccactttgttttttttaggtatttttataaatcctttctcacaatatggtcaatggaactccagatatactttttg

SEQ ID NO: 14653 - DNA, 1037 bp, Brachypodium distachyon
  Intron number 2 from transcript Bradi1g77500.1 (locus Brad i1g77500) derived from phytozome v7.0 (chr-ID Bd1; pos 738 08359 to 73809395 reverse strand)
agatcagtgagatcaaggagtggcctctgggtgaggtatgtcatggactggcacgattatttaacgctgttttaagatgtacaggtgcctgtagaagaaagggctgatcttggatgttttgtagatatgctggtacttcactgattcctgggaacagtttcgtatcagcggtatcatagatgtgatcgatggttcgagcctggaccctgccaagctccaggttagagcttatgacagtccctctgattgtgctctgctctgtaaagtggagtggggtaacaaatggaagcgtaactgttatctttagacgattatggaagcataactatagtgccacagctttggttatgcccaaactagtaattgttctagctcacatgggtctgatcaccccgtcaacagacaatggtttaaccgtgtgtcgatatctcagataactttcacttttcgaagctttcgtgtatgttcaggaacaataaaccatcttctgttgctcgcttatgtagtgtcagtttactttcattattttgattaacccatggtaaacagtggttgtcgacttgtggtttctttgtacagctgagagagaaagcttggtttgcaagctcagttaagtcgagatcacagtacttaggaccatgcccagggcttcctgttgcaaatgatgatcatattaaggatgttcatgtcgacgcatcagctggcccagttgatgcgtattgtcttctgactcttgatcctgaaaaggttagattaggtacctctattttgaactttgtttgtgttgctcaggatttctaataagtactacctccgttccataattcttgtctcaaatttgtcccaaaatggatgtatctattcctaaaaagcgtctagatacatgtaatatttcgacaagaattatggaacggagggagtatttgtgtatactttgaaacatagaatctgcatgccgcaattgtttagaaaatttcagatttatatgcccctggttatgttgcttaatactcttggtttttctacttaggttgatt

SEQ ID NO: 14654 - DNA, 978 bp, Brachypodium distachyon
  Intron number 1 from transcript Bradi2g37690.2 (locus Brad i2g37690) derived from phytozome v7.0 (chr-ID Bd2; pos 380 81542 to 38082519 reverse strand)
cgaccgactcttcttcaaaatcatcaaaagctcaggtaagcgtttgctccctcgctcccgtctcgttagatcccacgttcctccatgttcctgtttagcttgcactggatggtgaaatttgtgggcggggggatgggggatctttttggtttcgaggccgtgcaagggggccgggaagattgatcgattgcggatctggttccttttctgcgggattactttttactggccggttgttgtggaattgtgaattcgtctgtttgttcggtagattgcgtgtgtaatgtttgatttcggttgattcgatttattcctgcttggtcgattggggaatggggatatataaggttatggtgaatttgtgatgcgcctaatctgcctgcctgcttgtgcttggtaccttgggtagcgctaaattgccgctagttcaattaccttcaaaacgttcgtcaaaaaattaccttcaaaataaataggagtgctcctatataaatttctgaattgtttgtcagaacaaccaagtctccggttggttattattattattattacgccccttcttgttttaggataattataggtttccacgtgtaccttgtatgaccagttcatgatacaaggacagtttgaattgagttgggtaggcaaataggcgtgacaactattgcgtttgatcttgttcctctcacacaacactgattcaggcacacgttttgtaaggagagagggaggactagttctcaactactagttgacaaacttgacatacacacatcaatatggtgctatctgcttaaggggaatgtgttgctgtattggatatatgatgatctcacaagaaaattattttctctgcatatatactgaaccttttcttatggcaaactccatatctctgtcgtatgtgtaacatttgtctgattacaaattcaatttcacacagttgagttcttcgattggatagtttggtggtgcgac

SEQ ID NO: 14655 - DNA, 833 bp, Brachypodium distachyon
  Intron number 1 from transcript Bradi1g55060.1 (locus Brad i1g55060) derived from phytozome v7.0 (chr-ID Bd1; pos 534 33229 to 53434061)
gcgacgagcaggaggggcggtgagggcggcgagcgagcggcggcccagcacaacaactgggacgacgcaggagcggggacggggatgggacgcgaggatagcagggtgctgcgccgttgccgacagactgctcgcgggcgtagcagggcggcggctggcgtcgacgacgagtccgcggcgcgtcggcaccagggaccgaccagccgaatcccccaccccctcccacccaagccgaatccccgccgtcctctcgagcgctctgcccagcaaaatggggagaagagggtgtgagcctgcgaaggagcagtcggaggaaaaaaaagccagaaaaccaaaaagatagacacagctacgacccgaatctcaaagacgatggagtggccaacagtgtcgcctgctttgaaagacaaaagcaggcgcctggtgtatagcaaaactgtaaaattattgggcacatgatacctatagattgtctgttggagaactttttttttctgtccgtgtctaaaaaacggtttttgaccgaaagccctattttatatcatctgttggagatgctttaagaaagtttatagtttataccagtatccgatcccgtgagtaacatcgtgaggtgtaggtactgtattttacagattttgaattcatgagttcaatttgtattgttctgaaaatcacggccggctaaatagcccgatacaaactctgttacgagtattaattcgaattcgacgaacctcacatctgcgacacccgatgcctacataataacgtggctgcaacccggcccccgtggagggcgaagctgcgtatcgacccaagtctagagccgc

SEQ ID NO: 14656 - DNA, 961 bp, Brachypodium distachyon
  Intron number 1 from transcript Bradi2g16220.1 (locus Brad i2g16220) derived from phytozome v7.0 (chr-ID Bd2; pos 142 83804 to 14284764)
tgttgtaagaacatggccttgccaggctctttcgcgttattagaatataacaagtggtggggaactgaagaatacattagaaatatacgtacattgtacacgtgtaaagtgaagaattgaaaagtacaggagaaatgtgatatgagttgtttgatttgctgaaactgtaaaaacatacgaatccaactaatgatgtttcaacactaatatacgtacactgtctttgcctcgatcctacacataccaatcaaataatgaggtcaacgtggatgttaaatttcgtacggttttttcctttgaaatggcatccaaaggaaattttcatttgcctcatccctacgaatgaaacgatacctagtgaccaattcgacgggaattctgatcctttgggtttcctccaaatcaaatagtccctgctttatcttggaaagccaataaatctggtgctaattttgtatgcacccttaggtagcattttttgttactactccctccatcccaaattatcatgcattctaggtttagtcaaagtcagctttttaaaatttgactaagtatatacaaataaatattgacatttataatatcaaatacatacgatatttgaatatatttcattataattctaataatattagttttatattgtagatgtcaacattttcttaaaattggccagtgattggccaccatattttcttgaaatgggtctacccgtggcctctaaaaatggccttgagccgcatcgatcgtcaaggtcaggtctgggttgcgctttatatatattaccatcatgacccatcacaatacatcattgtttttcttgccattcattcagcactatctctgcactttatcctatttgaacttccatttattcctaaacaatatgtatatgtattcattactgatcgatggagttttttctttagataggactggcaactggactggaaactat

SEQ ID NO: 14657 - DNA, 895 bp, Brachypodium distachyon
  Intron number 1 from transcript Bradi2g11520.1 (locus Brad i2g11520) derived from phytozome v7.0 (chr-ID Bd2; pos 979 9568 to 9800462)
ctcgaaggaagggcataaggcgcccgcccagaaaggtccatttccctttataatgttggaaatttcgttttggcgttgataaatgtgccaagaatcgcttctccatttgggctctgcttccctattgtatatttgtatacggtcccggcaactttgcattaatattaaaaatacaattgtaataatattaaaaatatacgcgaatgaacatttgaatcgtactactccgtattaattataaatagtacatatttaattttatgcctcaaacattttggtaatcagatagtcgatatccttgtatgcttttctgccaggagggcggccgggcggcatggctgattgtgtagacagttaggatagagattggaaggaaagtagtcagaagattgattgaaattcttcttgcttgatgaaaatggatgtaccaagactcatatatttagctggccctaacaactgaatctaaacaaatttcatcgtaaggaaatatctcgaattggcttaaaggcccaagctaagtgatgcattatctctaatttgatttcttcctaatttaaatcattaatgatactattattatcagaaagatatcagggattgtaccccctaggcctgctcggattgagtgtatttttagtggggggctggtacttagttaccaacccccaactaaaaatacactcaattcaagcagctggcccttaattggaaccagctaggatagcgcatgattgactaacccacttgacagttgacagtttgacaaaacaaacgcggcttgctgcattatgccagttgaaatcgagttggtctttcagactgactaatttttcatgtgcgtctggtctgccatggcccatggtcgcaattcccacaggagattctgggactc

SEQ ID NO: 14658 - DNA, 837 bp, Brachypodium distachyon
  Intron number 2 from transcript Bradi1g51480.1 (locus Brad i1g51480) derived from phytozome v7.0 (chr-ID Bd1; pos 498 85241 to 49886077)
ccgacgagacggtctgccggcctgacgatcaggaggtatgtgcggtgtcttctctgttgcttacttgattagtttgatcagtgcggttatccaaagcattaaaacagttgtagctttacaccctattgtgtgagtttggctaagtgaacatcaaatccgaggatgcttatgctatgccacggttgtgctaacaatggaattgcgttgcttcatatttctggtagcagggataaatgtgggggagagtgggtatgaaggtgaggttattgatgggaggtttcttttttttgatatggtcgagcgcagatggcaatgtcatactgggcgttgtcaaggtctagggtgttatcaccactgatttggctacctctttgtagagatacatacttctggttttccagaatctcttctttaccaacatgttgctgataagcagcaatgaccaacatagtgtcattatgctttatgcacacccattttttgcatgataaacacattcacgttcttctgtcattaacttagtatcagcaaattaaaatttaattgttattgtagttattgaatacttcaagttcattgtgttaaccagctaggtcagttaaccagtactattatcttgctgacttcttatcccagccacagtggtaacactgcaaaaagcatttctagtctctgttaggtcatgttacttagacgagtgttgtccaacatccactgtgaattgtctatcacagaattctctccgcagatgagtgcttatttaggctactgttagctctactcagtttgtgtctgtatctaatatttgttcttgtgtccagctgtttgcagggaacg

SEQ ID NO: 14659 - DNA, 999 bp, Brachypodium distachyon
  Intron number 1 from transcript Bradi1g62320.1 (locus Brad i1g62320) derived from phytozome v7.0 (chr-ID Bd1; pos 615 74031 to 61575029 reverse strand)
gcgggctctcttactccaacctcttcaaccttgaggtagttgctcgcttcctctttctcttgactctctgtctcttcgcgtcactggagctctctccgcgcggtaggggtttcgttgtattgggggcgcgtcgtaatggggcctggggatggactgtggagctcattgtcactggactcggggaatcctctccaggttgacgttttgtccgtagtttcctggcataatttggccggtgttttgttgagccgcttgtttggctcaggggtagaggctcgctagtaggagactaatgcaggttgcttggtgattgtgttgcaatcgtgcgtgtgggctaatgctttgtgctacagtagtcctggttactggcgttgcgactgtccgctataccatcttatatcatctgtgctgctagtagctttgccaagatcgtctagtattccatgtattggaatgccattcttttgatgcaactgcatacctcggttatgtttcagttatgatcgaagtattttagttgctgggatctgcgtgttatccttagctttagtattttgctatactatcctagcttacgcagaagagtttattttctatggttcaaatcttatgcaatttttgttaatgttatgatttagggcttgcaatggaacttcattttatcataacacattttgttgcctcatttgcatattttaccttatgcattcattatttttttgtaattctattgtagtattgttgttgtctgtttgtttggctgtgtggatgtagcttaattgaaatatgtactgttttacgtagtgacttattagtatggaaatgcaatagtgatatcatctgcccttttgttttttgacctagtgaagtaaaaaagtagtttctacttgtacattgttgttgttttattgagttttctgatctaccattctcatatggctcttttttactggacatgttgtagccattgctaaactttaaggtccctttacctgaaga

SEQ ID NO: 14660 - DNA, 626 bp, Brachypodium distachyon
  Intron number 2 from transcript Bradi2g12930.1 (locus Brad i2g12930) derived from phytozome v7.0 (chr-ID Bd2; pos 113 25379 to 11326004 reverse strand)
gcaacaggttgagagaagtatcttcctgactttcgtgacttttctgttattttgctatatcaaggagttccagttaacatttcgagctgatgaaatgattgtcttactgaaagatttaattcccaagctaatgaaacaaaaaattactcatgttcaaatggagtcttctttcttgtttaaactacatttgttccttttagatgttagcatttctccagtggtacaggaaactgtaactatcaccctgaagtagggatgcaagcgggtaacacgcaaagccaacatacaagtatacttaaagtcaacctgctgcaatttttcacttgaactttgtataaggttgacttagatatacttttatgcgtgttttgagggtcgccaactatccttaccctgaagatcatttctttgaacattgatgatcctcttttttatttgatcttaccaaacaacatttttgttttcttttgtctgtatgatacaatgcgtgagttcagagttgtgtccttataataaatatattctgccttcttattctgctttgtattgtaaggattatatgttcaagaatagctttcatatctcttacaggagcatccaggttgcaaaatatttggccagactgc

SEQ ID NO: 14661 - DNA, 829 bp, Brachypodium distachyon
  Intron number 2 from transcript Bradi2g19060.2 (locus Brad i2g19060) derived from phytozome v7.0 (chr-ID Bd2; pos 167 93846 to 16794674)
actggctggtaagtatttccttgtgccaaataaatcctgatgtacacattgcagtatgcgttgaggatcggtggtgtgcactgaagatgtcgaattaatggacggtagagctataggatccgctagaatttaccttcagtgctttttttacgcagtaggaaataatttgggcaggttatgtcataagctaattactacagacagcgtctcagtgttatgtctgccctttgtttctgggccttacttcttaattttaaaagaatcagcttatagattgttggaacgtcaagaagtttttgatgtgaagaatttacaacttttcactttcctgatagcttcattgtggttatccaacaacttaaatggaagcatgaattgattcaagcaagaaatagaagaatagttccgtgttgcccctaggggaagaatccttccactaaaccctagtacgcaacaagaaatgtgttaccaaacaatagcatgatgcctaaagccggcccagaagtaccattgcagtcctttgtattttcggtcagtttcagagttcagacaagcatgtttctccactgtggaaatagaattccatatacatcagtgcaaaattcatataagtatttagtgtgtaaatcacaggaacaggctagcatttgataatggttggtgcacatactcactggttattgcaagtacaaacaatagcaagatttactatgtgcaggcagtacttgtaatgcctaaacacaccaaaaatgctgatattgttttgctgtctttttctttttccgggaccccagcgtaattctcttccccatagcaataacattctact

SEQ ID NO: 14662 - DNA, 532 bp, Brachypodium distachyon
  Intron number 1 from transcript Bradi1g75150.1 (locus Brad i1g75150) derived from phytozome v7.0 (chr-ID Bd1; pos 721 18660 to 72119191)
gtgccggcgcaggagacatccgtcgataaatttctgtaggtctcctcgattccttagcctaaattgtctgtttatgacctgtttgcctcttttcccccatagaagctatcgaggggttgagcttttaatacgtttattgtgtgtctagacatgtttcggagataatattgtttcgttcctggcctagatggattcttttctatgccatcttacattggttttgttggtatagttttgaattgtgatggagctcgtaagcccatcagtcctttgctggagcatagctttacttaggatgtattcaagtctactgcttaatttgaacctggtatgtttgagttgctgagccgactctacaatttgtgtgtcgacgcatgagtgatccagctgctatttgtggttcctgatcatgcattattttgtttaagttccatcgtggattcgacctttttttgtcagtagtaatgcgtaaacggaatcattgtctttgaccactggtgatctttcaggacggcgagtggcacattcaagg

SEQ ID NO: 14663 - DNA, 947 bp, Brachypodium distachyon
  Intron number 1 from transcript Bradi2g22900.1 (locus Brad i2g22900) derived from phytozome v7.0 (chr-ID Bd2; pos 203 87070 to 20388016)
gggtgagtgaaaatatctattctccctccccttcattctaatgtgtttcaagcacacaattttctttcccgtcgatgatctatcagtcctgatcgtgttaacctgtatcttccatggagaagtttcttcaacgcgcttcctgattctctcttttgcgtttcgctatgatatatacgctcctacacgatcggttcttttgcgttaagacgaatcaagtagtaccatgtgatttagcctgattatgttagtattagagaatgagatcggcgttccgatgcaagggaactaagcttattgacggtccagtgctgatcagataccacatcagtgctaaacatactcataagcgatatgaatccgttgccaccgttgtagtcatgtattccttcgtccaatgattgggctttggagattacacatggtagcatacaagttcctttattttgaacacagcaacttggctgtcgtctgtttgattgttatgatattatgcctatatccccggtgcttgttgtgttcttaatgttgtcatacgtggtttatttgtttgtgattgccatacgtggtttattttgtaactggttgaaatacctagacaatgactaattgtgtcctacggaagatttgatttgcgagctgcaattagaagcaatatatgtcacctatgtactgcagtagcatcttctagtccatagcatctaaattgcaatatattttctttatttagcttcagcattgacatttcctatttgtctgtactttaacatttcatattgtctactagtagccaatatgtttttgaataaacctttcttgttacaagttgaaagtaatgtgcctatgtttatttgaaggaagattgtatgattattataactgcttatcttgtgagttgtgtttaatcaatgtaaacatggatctctacacattacaggaagacacgtggt

SEQ ID NO: 14664 - DNA, 967 bp, Brachypodium distachyon
  Intron number 2 from transcript Bradi1g62540.1 (locus Brad i1g62540) derived from phytozome v7.0 (chr-ID Bd1; pos 617 37806 to 61738772)
agctcaagcctctgcagggtgaggtttctcagactgtaagcctctcccatctccgcctagaggcaaacctctaaacttgctgcgcagtggggccaccaataaaagagagggcttggggattttggatcacataaaaactaattttgcttatagctaaccttattttcctatctagaggtactaggcttgtggcgagacccctctaagaactgtgaaatcctagggactacctgtgaagcccagattccatgatgaccgagtccctagacctaataggaactttggcactaattattactaccaatgcacaggctttggaacactttacaatcttaatatagggcaataattattttacctactttttgtctttattaacatggctaaaacatgtcttatttcttgtaactgcacaactgggtatttgccatcagaaaaaggtcatgttagcacgagcactattactagtttattttatttttataaatgggtaaaatcttgcaggaattaccctccttgtaaaactcgtgagaaccaaaccagaaggttataaaatactttaacacgtgcagggagctatattctataaacctataaagtttcaaaataaaattgaattgcatttccaaggtataagaaaaataaatatttaagattatagtaaaaaatgacacctctattggaaatttgtttgattttagaagtaactcagaactattatcacttttttgtttttcctttgcatgtttagaaataacatgctttattttgcttgtcttcagagtaggtacacaatttgtaaccgaaaataaaaattcatggatgcaactctaataaagaaccgtcttgcctactaacattactattttcttgcctgtatatcatatggttacataaatgtcatcacacacaagtttttagttatcagcataacttacaattatgtatgcatgtaggggtcagagca

SEQ ID NO: 14665 - DNA, 207 bp, Brachypodium distachyon
  Intron number 1 from transcript Bradi2g12580.1 (locus Brad i2g12580) derived from phytozome v7.0 (chr-ID Bd2; pos 109 23187 to 10923393)
cctaaaagtacgtacacttactttgttgtttgaatttaatttccaggcatatatatagttacgaaggaaattaaacatgtacgatatatatagcagcttaaaattaatatgactgcattttcagtcgaagaaaacaaaaggaaaataaatgcagtttcttattcactaaaactgttttttcttctttttttcatacgtatatccaag

SEQ ID NO: 14666 - DNA, 918 bp, Brachypodium distachyon
  Intron number 2 from transcript Bradi2g25150.1 (locus Brad i2g25150) derived from phytozome v7.0 (chr-ID Bd2; pos 230 59465 to 23060382)
cgccgcccaccaccgacgccgatctcttctacaaggtagtcgtactactgttaattgagggaattcgcgatctctcttctagggttttgggggccagatcgagcatgaactcgattagttttgaaaattgatgtccaccgaaccagactccagcttgctagtagagtagtagttgttcttcttgatgcggccaatcatcaatttgatctgctttttgctcaccgctagctagcgctttactttgctcgcatgatttatatgaacatgtgacatgcttttctttctttcttttcagatctaggagtttagggtttgctttttgcttgttctttttggcatacatcaggacatgtacaaaagctgccctgttgaaattcggaattcctcttatagctagctagataccacctgcatgtctgccttgcagattctccaaagctatttgcatgtccaagttaaacagttaacttaggttcccctttgctaaattattcagatctgaacttaattgaagcattaaattgcgtctcctagcaagattcccgattcatgttttacagctggcagcatgcatgctgcgagcactcacttcatgcatatgcatgagcgtgcatatcttcagtgagtccccttctcgctcactcaatttaccggcttactgagcatatcccctagtaccacgaactcatctctctaagaaactcgttgagatatatgtttggtaaaatcggtggcaattaaaattactgtattcctaaaaaaattaaaataactttagctttgacatccctgccgtaactgttgaatttctttgattaagtcatgcatgtatgctttgcttaagagtggctatcaacctaaattttcacattgtctcatgcagtccgagatctcgctctgccgcgtgtacaagcggtc

SEQ ID NO: 14667 - DNA, 675 bp, Brachypodium distachyon
  Intron number 2 from transcript Bradi1g61730.1 (locus Brad i1g61730) derived from phytozome v7.0 (chr-ID Bd1; pos 610 82958 to 61083632 reverse strand)
tgtaccttccaaggaattttcacacaaagtaatcatagcttagcttaagtttatttgcatttttatgcatttgagctatgtctcgtgctctcatgtcatgcgcatggaaaatgagttatgatgtgagctaaaatgaaggataaataataagatgctaaataatgctagaaagctgatgtgctatgcagcttgagtgataatttacaaactgcactcttagatcttatactggtgtgattcatgtgggtctaaaggatgatgtaatcacaacagactcgaactttttcactaaaatataataattcccttagcaactcctttgtgatgtcatgccatatcgttattagctctctgattttgtttttttacattatatgcatgtgtgcatcagtgacttccatatgcttgcagttaatattaggatcatgtaattcttcttgaaaataatgtcggtgagtgcttgttgtgtatcctctgctattgccaaacaatgcttacacgtatttagtatttgccaactgcacattttaaaatggtgaatgaaagctaactgtcagaaaatggatttctctgagctgttgattttttgttgatccgcaataggttttcatcattggttgggttgatatatattttacagggaactacgtggttttgggtttgtgaaattccgct

SEQ ID NO: 14668 - DNA, 391 bp, Brachypodium distachyon
  Intron number 2 from transcript Bradi1g60840.1 (locus Brad i1g60840) derived from phytozome v7.0 (chr-ID Bd1; pos 602 04650 to 60205040)
gcgccgccaacgtcaagcggattctcgagagccaggttttgatactcaatttaattttcgtttggtttttagtttttgcaaacacattacctggcgtatctctctgtgtttgggctttagcaaagatttttttttttttgccgagaatttagcaaagattttaactagagtcaaagtaaacccatcttctctcttaagtcttaaccattctggattaaaatacacatcgaggattataatctaccaatgaaagcatcagggctttgtagtgcctggtaaagaagcacttgccgcggataaaaagaaacatgacccgtgaattgtaaattcagttactccgtactaaacttctgcagcctgaggttgcttctgccacggtcgactttgagaa

SEQ ID NO: 14669 - DNA, 676 bp, Brachypodium distachyon
  Intron number 1 from transcript Bradi2g19840.1 (locus Brad i2g19840) derived from phytozome v7.0 (chr-ID Bd2; pos 174 77030 to 17477705)
ctcttttcctgaaggtagatcctttaggtttttttcttcttctcttggcacacatccttattttactataggcttatacataccaaacaaactaggttttttatgagaaaacctcagtggtttccaaaattatagggactaatggtaatattccttttcttttgttgatgtacgtcttagtgggtgtttcatgattggggcgatgaagactgtgtcaagatattgaagaagtgcaaggaagctatctctcccagagatgctggcgggaaagtgataatcatagatatggtagtttggtctgggccaaatgatattgttacaagagagacacaggttttctttgatctccttatcatgtttgctgagggaatagagcgagaggaatttgagtgaaagaagatattcatggaagctgggttcatcgattacaaaattatatcagtgctgggtgttagatctgttattgagctctacccttgaacacagtgaataactacagggtaatctgcattgtatgttcaaaaactggcatgaacaacatgtgtgttgtcttctcatattcctagggcttgttgtgatgaataagtgtactgctcattgtatgtttgtgagtcattgtgatccataagctggctctctcttattacaacacaaatatatgttgcaggtttcatag

SEQ ID NO: 14670 - DNA, 988 bp, Brachypodium distachyon
  Intron number 1 from transcript Bradi1g50880.1 (locus Brad i1g50880) derived from phytozome v7.0 (chr-ID Bd1; pos 493 46704 to 49347691 reverse strand)
tcttccggggcaaggcctacctccagccccacaaggtgatccatcgccccatggccacattttgagtaaaatacaccgaaggttactattttttcgtaaatgtgtcgagcaggtcactaatctttcaaaacacacgtttaggtcttgatcgtttgataaatggttcatctcaggtccctcgcctgtataggcagctccggccgcatgacgaagctgccattgggtccacacgtgaggcgaggatgtggcgtgatgtggcgttgcaatctcacagaaccccccccccccccaaaacacacacacacacctattcttctctcatttcgcggccctctctccttctcctcaccggcgttcgacgaggcaacggactggggaggggggtgggagctcccgcgcgattgcttgggggcagagttcacggccggggagatggaactggagaacggatggctggaccgcaaaatgcaagagacttacacgcggggggtttctgtaagatggcaacgccacgtcgtcgtctgacttgtgggcccaaatccttcatgtcaaccacgtcatgcagccagatttgcgcatacaaccgaaggacctatgatgaaccacttaacaaacaatgaggatctaaatgtgcattttcaaagattcgagacctgcttgacagcttcccgaaagaatagggacctcgggtgcattttacttccacatttttaccagggacaacatatctgttgttaagatatatactccttacgttccaaatagatagagtataactttgtcgactgccaaacttttaaaactttaatcaaacttatattccctccgtccggaaataagatccaagtcacttatttccgtaaggagggagtattaaaaatatcaagatatacactgtcaaacaaaatgttagggaaataaatatttcgcaatgaatctaattaccgttgacgttaggtcgtggacctggtaacaagtgctgtgccgc

SEQ ID NO: 14671 - DNA, 878 bp, Brachypodium distachyon
  Intron number 1 from transcript Bradi1g60130.1 (locus Brad i1g60130) derived from phytozome v7.0 (chr-ID Bd1; pos 593 53070 to 59353947)
ctgcggctcctgaaggtcgaggagacaggcggaaggtaaaacatccgcaccgcatctttttcctgaaaccgcgcgtgttaatcgctatgcttttgggtgctattttctccgccgggagtgtgattaatggttttatcattctaattagtatgtgggctgtcggctgctttaatttccttgtctaacccaaatgtttccttgaacgtccttgagttgtttctcaagttcggatcttcacatctggtcaaactggtagtatgacgaattgcgtctggaaaccagggtttatgctaggtttgttttcccgtaattattctgttgttaggaactagtagtagtacttcgattcacttatcaacaggaaaataaactgccgtaccattgacaacccctgcatgtatatcgtcaagggcaaaatgcttattcagcccacctatctaggatttaactctgtattcttgctttccgctgcgctggctaataaacaaggatttagtaactctggattcaaggaaatctaaggattaattgcaagctactctagtttttttttaattttagttacagctcttgggtgacaagctcaaactttgttcgggtgatcaacgatcgcacttgcctgataaaatgataatgattcctcagcttccactacaattagataaaagtattttttttttcagaaggtatcagtttatttactgattgttgatctcaattttacttccactactcttggatatgcaaattttgtcagtaatcaaatagttgcattatacaaggctataatcctattactgtcaaaaggttactgaacaactctcgtctggatgtctctaacaggctggtcagcacattgaaaggtgaacccaaatata

SEQ ID NO: 14672 - DNA, 876 bp, Brachypodium distachyon
  Intron number 1 from transcript Bradi2g02880.1 (locus Brad i2g02880) derived from phytozome v7.0 (chr-ID Bd2; pos 211 1621 to 2112496)
ccgctcccctcgcccgcctcaccatcctcttccaggtaaagatttttctattttagatttttctagtagcttttcttgtacgggcggcgaggtggggattgggaagctcaggggagggggagggtgaaagagcattttttttacttttgcgctgacgggagagggaattgtaggatgcaggagcaccagggtagtactaattaagaaggaaaaaattgttttggaagtcttaagagattatttgaccagaaagggcaggaatctcccttcatatgttctggaacttgtgagttctgtttcggctggtttcaagcgcatgtgttgctttgggattttgcgtgtcctggtcgaattgggacctaagagtgcatgggagaaacaagaatttttgggggtgtagggattgatgccactttcactatatgagtgaaggaagaatttcttcatttttgggacgtcgccgtgctttgtcctgcttttgcatgaagactcttgaaagggattggatgctgataatagattcacatttgtgttctacttactgattttatactcaatttagttccaaactgattgttccatactatctatccctggttgacaataatgggcaactattgttgttactttagaatacgttgcacaactagtctcccgtcactccttttcttgagttccgtagggctctgtttggcactcaagttaaacttgaccataaattccttgtacaacactaagtagttacaaaatcacaaccacatgaaaatgtgtttgattatgaatccaacagtattagttttgggtcacatagcccgcatatcgatgataaattgtgttatacgagcttgtgacctactgatccgacaggtggcaggt

SEQ ID NO: 14673 - DNA, 859 bp, Brachypodium distachyon
  Intron number 1 from transcript Bradi1g46690.3 (locus Brad i1g46690) derived from phytozome v7.0 (chr-ID Bd1; pos 452 71311 to 45272169 reverse strand)
gccctccctcgccagcaggaacggcagcgccggaggtaaaaaggaattggttccgccgtccgcgtcgatctgtgtggctttgttggtcccttcgggcgagacatagaggggttggtttccttggtttcgtcctgagaaatatctagtgttctgggtcactggtctgtggatccgtagatttgctcctcatattcatgccttgggagggagtatatttgagttcataggtgggttggtggtggattagcttagttttcttttccgatttgttcactaggaaggtaggtttctttaaatgttcaacccaaattccgactggtgagtatcagtaatcatctctatgatatgatgtgagtacttccctggattcttaagatcgagcttccatacgtcacccgtaggagttgggcttttttctgagaacttccccagattgcatctaattagtttttcaatgttaaattgacttagcctcgttacttttgtgggagaactttgcctaactccagtcaaaacttatttttttgtcatgttgactgggagatgtgggaaaataagtgatggatgccacagccacgctggttgtagagaaggttgtaatttttgtatgaagataggtgttgtagcagtggcttgttctgattatttctttttaaatttctccaccttctgattgggctggtcatcagttctctctcatgaatttttttatttgtcatacagttcttgtgttaaaaagtatttcatgctctaatcatctaatcaactattaatgctgtatgctcatagtctaccatatagtagagcttacttttatggaatagtggatctcttatgttgatctcactgcttcattcag

SEQ ID NO: 14674 - DNA, 989 bp, Brachypodium distachyon
  Intron number 2 from transcript Bradi2g27270.1 (locus Brad i2g27270) derived from phytozome v7.0 (chr-ID Bd2; pos 260 62440 to 26063428 reverse strand)
ttctttctaaggtacaaattgtaattattattttctaagcatttcaatctctatattgcaatttttgcatataagaaggtagacaattgtctacctcatatattccaaacagacaaggagtctgaggtaacaacgtctgtccgatcaacagacagaaaagggcagaaaaaactggaagaacgagaacgaaaagaaaaggaagaaaggaaaacaaaatatattccattttatattgcaattttcatttcagtagtacagcttactgtgtcataacttagaaaatggaattaaattgttggaactgaaacaggtgcttctcaacattggatactctttggctcttcactaaaagctttaagttaagactaaggaaataacaagttgttgtgtgtgaagcgatgtagttttgtgcttctatgtccatgtgtcctttttataccctcttattaattattatacagtttttacctcttgtagaccaataaattttgtgcatgagctataattgcatttttatattggcatgatttggcttattgttgtgatacaaaaggtaaacaaagatgattttctagtttaaacttgtaggttctatgtaatagaagagcaacgattccagtgggacatctacttgccatgcaaatattaagttttaacaaaagaaaaatatggcttacattgtgaataggtgaaaccaagttttacatgattcatgctcaaggcaaaccaccaacccagaaagtcaaatgcctcatttgaatgatatgttgatttgatctcttttagtttatactccgtatatgatatatgtgtttacatgccgaagatcgttgcattatttacattcacgagttgtgtttgaatattgttcaaatatttttactgcatatagcaaaagctatggtacttaattgtgcttggttgcttgtgtatgtgcatgtatcaaccacaactttaactattatctgctactggtgtagagtgatcct

SEQ ID NO: 14675 - DNA, 785 bp, Brachypodium distachyon
  Intron number 1 from transcript Bradi2g27270.1 (locus Brad i2g27270) derived from phytozome v7.0 (chr-ID Bd2; pos 260 63436 to 26064220 reverse strand)
cctctcgaggtatcatcgctccgcggaaaaccctagtatccaccactcgctactcgtggatttgtattgcccgcccgttgagattgaattgaagtgggattttggagttggggttcgtcgcgatgggttatcacgaggtagatttggggcttcgctgtccggttaggcgggtttggtgttgtttatttgataaatgtggttcgtttttcactagatcacagcgaactagatgtttcgattctctcaccaaccttttcagcattgcaaattctctgcccgtgcgaattacggatttggttttggtttcaacggtactttttttttctttgtctgtgtcgctatatgcaaattttgacatgtgaagttttgggggctatcactgaagttttgaaaatggtgttgctcgtctgaattggggatttaggaaatgcttcatagtggttttaatgcatgcccaaatatagtcttttgcttggagagttggagtgttttttaccctatatgttcaagccagctatactgtttacgaatttgatgtacgacgtacgtgcccattgcatgctaacatgttctcagttacttcctccgattcatattaattgtctcaaatttgcacaaatatggatgtatctatgcctaaaaagcgtttagatacatgtaatatttcgccaattaatatggatcggagggagtagtcaattgtggatgtcgatctgatctcgtacactgacatgttacatcttccttcatcacagctatctttttcggcatccaagttgaggaat

SEQ ID NO: 14676 - DNA, 776 bp, Brachypodium distachyon
  Intron number 1 from transcript Bradi1g63940.2 (locus Brad i1g63940) derived from phytozome v7.0 (chr-ID Bd1; pos 631 41840 to 63142615)
ccgggtgtgaccttccattgtctaaagagtcctgggtgtgtgcgtgccctttttgtgtgtatgtggttaatttccgatcagttgatttggctatgctgttatcgtggttgattttcccccctctttcattagtatataactagtagaattgggttcccttacttattgtataaacatccctgtaggcaaataccccctccgttcctaaatattataagtcctaattttgtcctaagtcaaaacaccttcaagttttgccaagtttatagaaaaaattactacgatctacgatatcaaatgagtatactactccctccaccccatattaagtgccgaaatattacatgtatctagatgtattttagtatataaatacgtccatatttagacaaatttgagtcacttgatatgggacggaggagtatgaaaacatgtataatgaaaaatttaataaaactaatttggagttttagatgttggtagttttttttatataaacttggtcaaacttcaagaaatttgacttaggaagaagttcttatatttaggaacggagggagtaggattcaattagattctggaactcttcatcattttgttcttattacatatttcatgagttttagatcaatataaggtgcaatgccttctcatcttatgacaggactagacaaagtctttttagcacctttcttatttcatattatgcattagcttactgctgtgttatcttatatgcagggctgtatctatattctgctacagagagtaagctc

SEQ ID NO: 14677 - DNA, 805 bp, Brachypodium distachyon
  Intron number 4 from transcript Bradi2g02780.1 (locus Brad i2g02780) derived from phytozome v7.0 (chr-ID Bd2; pos 196 3875 to 1964679)
aggaggtactacgtataatgtttaggatccaccccttgttcagtcatggttttgaacctgccagtttcttggtagtaaccctgcagcaatcgaccttgtatctcctttcataaattgcattcttgagcaggttagtctacgtgaaatgtggttggatatggagtccatagactactttgaatcatgagatatatgctagatttccagcatgccttggcgtgagtaccacaaatctgaagttttaaactcttgtcctgtaaaagctgaaaattgtttaaacatcttgctgaaactttctgtagctggagacctagtgttagtactctctttgtggaccttgaatcaagagcttcttggaatgaccttagtaactaacttgaagcatgctatgtgcggcacaatctgatatcatggtacactgatatccgtggctccatatttgttttcttgtaataacaacctagcaaaaatgtatgagttcaactgtgttgatgaactgcgcaacatacctgcaagcattgtctgatgaactgatgggggctcatctccatctccttctcaatgcagaccactctaattgtttcgtaagcactatgagatgaatcgaacaggtagtgttattctatgtcgtgctctctaagggaactgcattcatcctcattttcgtgccatttatattccattattccatatgcatttgtgcgagtcgttattcttctgagttgaggaatatattttttagatgaactgagttgaggaatataaacaagtgattactattgaatttcaaattgtatcatcccag

SEQ ID NO: 14678 - DNA, 627 bp, Brachypodium distachyon
  Intron number 1 from transcript Bradi1g47620.1 (locus Brad i1g47620) derived from phytozome v7.0 (chr-ID Bd1; pos 462 77887 to 46278513)
catacctggtgcaggtaattcagttcattccctctctaggatgtaaggcccctttctcaatataagttttccaaagttattaacccacacttttttcaatttttctcttttaactcgtgcctcacataatttcaagtcttttgggttccaaatctattggtcaaaccgaaaaaagaagaactcctaaaaaatatgttggaactaggagttgaattccattttgtaattgcagttctacgatccagatggagaattatttgaaattcatcctcccttttacttgaactatttgaaatatgtttttttatccattgatttatttcattatttgaccttttgcaggctttgaagtatggtcaaaattacacaaattagatctcttgatctatctggaaatgtattgaatgacactagcatctcatccttagttgcactttcgtcaattcggtccctgctcctaaatggtatggtcttgacctctgctcgtactatccaacgtgagcttcacgacaaactaatactggaaacttatttttaatccttttcttggttttgtttgtgcaaactgtatctgtataagattttgtcatggtttatctttttgtttcttgtacaggactgagcaca

SEQ ID NO: 14679 - DNA, 1003 bp, Brachypodium distachyon
  Intron number 4 from transcript Bradi1g66320.1 (locus Brad i1g66320) derived from phytozome v7.0 (chr-ID Bd1; pos 651 50758 to 65151760 reverse strand)
gatcagagagtatagctcgatcaggtgcaaaagaggtacttggttctattgccaactgataagtgaatacattatctgtttgtcataccctgtcctactgaaccacttgagttcagctgacttgtccatatttcacttcgtaaagtacatgccggaagaggatgaaattatatatcattgtgtcccatctaaatagttgtatcgaacaactctatctagtttagaaatgctgcaggcccattattttctcagcaaaaagaaagcacttgttattggcaaaggtggcaacaagtgttttagtgtgttctgtgttaacttaacttagtattatgacatagtacatttaatcttagtctggttctcttttagaatgtcagcacttcttaaatgccaatccattttgaagtcatgatttgtagcatgctgataggttagagcaagagaagcaggagagctgaataagagcttgttaacactgggtcgtgtcatcactgcacttgtggagcattcaattcatgtaccatacaggtagtacctgctattttttttataataattcaaaaagcttgtgcgtcatttattcatttttcatggaattaatacatatccattttgatactttaccagagacagtaagctcaccagactgctaagggaatccttaggtggaaaagccaaaacttgcatcattgcaacagtaactccatctatccattgcctggaagaaactctagttacacttgattatgcttaccgtgctaaaagcataagaaacaaaccagaggtgctagttgccttgttttactcatttatggttttcggatttagttgatatccttttgataaactttactattactgtaggtaaaccaaaaagttttcgaatatgttatgctcaaggatctctatcaagaaatggaaaaaatgaaacaaggttctattcggtcttctagtttatttctgttcctcacaatcttataggatctcacaagtacattgtcag

SEQ ID NO: 14680 - DNA, 548 bp, Brachypodium distachyon
  Intron number 1 from transcript Bradi1g49870.1 (locus Brad i1g49870) derived from phytozome v7.0 (chr-ID Bd1; pos 485 53639 to 48554186)
tcctcaagacaaactttagtaactacagcaaggtgatttttcttgctgatcatctttgttgctcactaactttctcactgagtgacatggtaatacatcatgctgtatgtcacatgtttagatcatggtagatttatacagaggatggtcaaaagttcaaacttgactaacatgttaaatgttaagtatatgcaatatgctatgatctgatccaataactgttttttcaaggcaacattgtaattaggcaaccttcattttctgttgacagatattaagttgacacagaaaataatctagtggtccaacagttcatcctccaataaacagagcaatcctaatttaactgaaagctaaaactgtacaacataatgccatgtaaataaatcaaatgaacgtcaccaggtagaaaattttctgcgtaaggtagaagactaaccttgaatttacatacgggttagtcagaataatcatataatttaaatttgaaaaaagaggttatattgaataaactaagtgtacaaaatgaagcaaaaaaactgtacaga

SEQ ID NO: 14681 - DNA, 883 bp, Brachypodium distachyon
  Intron number 3 from transcript Bradi2g13510.2 (locus Brad i2g13510) derived from phytozome v7.0 (chr-ID Bd2; pos 119 91614 to 11992496 reverse strand)
agtggtctgaatttcgggaaggtgctatatctttctttggtgtcattagtctcaattttggatgcagtggtcacaacttgaaatagactttcagttcactcaaaaactacttaaatagttacacatgaattttgcaacttgtagtggatccttaatagttatcttttgatatatgatcagaactattggtctctcttttgaattttacaacttgtagggggtggtcttctaagtcttgtactgttccttctgcaatcataacttgaatgatttcatttgtgttacaatggttgctgattgcatttcaaactcttatcggtcatttcgttgagggaatactttgtttggctccatctggtatttttaaagggctgcttgaacttcaatgatacttggtaatagttatgtggatgcagaataactgcttgagcagaatgctgcttctcttttatttttgtgttcaatggtttctaattgcatttcaaattctatcagtcatgccattttgggaatactttgtttggatcctgttctggtatttttaaagggctgcttttgaacttcgatgatacttggtaatagttatgtggatgtagagtaactgcttcagcagaatgctgcttctcttttgttttgttattatggttaactgtgccacgctacgctctagaaatgcaatttttgtgatgtaagctaatgaaagggaactggacacaataacaaatggtttgttctatttttaaaatcctggctcgaagttcgtattgggtaacttcctgttacaacacttcttccgcatgtatgatcaacatgatgcttacagtatactgaatttagacaggtgtaacattaggtggagatcgttctaaggggacacttgttg

SEQ ID NO: 14682 - DNA, 876 bp, Brachypodium distachyon
  Intron number 2 from transcript Bradi2g09030.1 (locus Brad i2g09030) derived from phytozome v7.0 (chr-ID Bd2; pos 734 0613 to 7341488 reverse strand)
tgctgaagtttgcacagatttcggtgaaaactttggtgagatttgatgcacctatgtagtatccttcattgcttttcattactcatgctgtgaactgttggcatgttctggctgctgcgatgggttttaactcgcaacattcaagtttgttagcttttacatccatagacgtgacccatagacgtaacaggggctatacctattgggattgtccatcaccacctttgatgagaaacaggtgaacaacgtgaattaaaagttgccagttctctatgaactagcttgtttctgaactttgtcctacttagcgtttggctttgttatttttcgtttggattgacatatatgaatacacttctcattttattttagaacaccagataaggcaggtaactgcttgttcttatatctaaactctaatgccaaaactgaattaagtttctgtagacaataagtgcatgcctaattatgttccttctgcttcaactacctttagaagctctagttccgccccagaaatggtgcctaatttgttagtttgattgaacatcatctttgaataaattctttcaggatagctagtcttggttatcttggttgggcaatgtagttatagctcataagctaccattccggagaagtaaggttattgtagccccaccattgcagcatttcttcacaacaactcagcaagaaatcttcattaggagcttagtgtgccttcagttttttctgtagatatctttgttttgcgctggcgatgcaaagataaatattcttatttttatctgtctgcaacagttttatagagaaccaacattatttcttgcttttacccctaacactgttgatctctggatcatgctcatctcgcag

SEQ ID NO: 14683 - DNA, 592 bp, Brachypodium distachyon
  Intron number 5 from transcript Bradi2g15940.1 (locus Brad i2g15940) derived from phytozome v7.0 (chr-ID Bd2; pos 140 81181 to 14081772 reverse strand)
gtggagcttacccacatccgcttgtgcccgtaaacatcaaatcctcatgtgcttctgtgcacttattctcaaataaactcaaatttgaagcattgaatgtttaagcataatgtgtttcttggtatttaaagaaaaaggtagatggttgttatcaccattttgggctcttccattaattttatcatgacatagtagtattgtggtttggaggaaataaggatgatgcgaatttaaaatgttccggcacacagtactttcggaacaactgaacaccgctgagcaaacaattaaatgctgtagggaaatttttcatgaaaccagaagattgcttttttttttgcgaaataccagaagatcatgtttaggataggtttgccatgtagctcatcggaagaaaagaattagttgtataagataatcagattcccatttctgatgactcatcatgcccatggatcatactcatttccttagttttatatttctaccagcatcttaacctcttatgttgatatcttacgtgaactgaacctctatgtttctcgttaagacaatttctagtaatctgattttttttcttgatgctttgaag

SEQ ID NO: 14684 - DNA, 890 bp, Brachypodium distachyon
  Intron number 2 from transcript Bradi2g36010.1 (locus Brad i2g36010) derived from phytozome v7.0 (chr-ID Bd2; pos 363 62856 to 36363745)
gagcaaaggtcagtgttgtcacgatttttagtttcaggagttgcacatgacaggtttcatatgtaacaaattaacatctgtggatagtattgcttataatgttaacattagtatatggattttataacctgcacactgcatacaagttgtgttaattcaaatgtgattaattagttatctcattagtcacgcttattacttttgtttgaggctacagttatgtgtcatactatttagcatatcctagtttacttgacaaagaatccgtgctatatgttcatttagtaatttaactgtggatgggaattttgacatctgtacatatttatttttatcaatactttgggactggaattgacaattcacaatatcttaacacatattacctattggaaattttcagaaacgccacctcctagtgtgtgtagacttaaacatatacattgcttaatatctgatatggagatggtcgatccaagttcacagacatggtatgctttggactaaattcgatggcacacggctagaatagaatcagaatggagtgaattattctgtacctggagttctgtaacaaaatttctttagacttcagaaatagcagctaggagagttttgtgatatgcacacaacacagaagcaattctataaaatgattgactaaactgcactcaacctgcacaaaaaagaagaattttacacaaaatgcatgcaagatttaaatccagggttagtgtacagttacataacaagatgttctttatacttctgtgacatccctttcagaggtccctttaacagcgattacctacctcattaagtacttattgtctttaggtaattaatatagctactttatccttaggagatcagttgatcttggaagctcg

SEQ ID NO: 14685 - DNA, 434 bp, Brachypodium distachyon
  Intron number 1 from transcript Bradi2g04020.1 (locus Brad i2g04020) derived from phytozome v7.0 (chr-ID Bd2; pos 283 6486 to 2836919 reverse strand)
ctccgtcttcgagggcatcgccattggcgtctcaggtcaacaccaagcgacaccaatttttttttgattaatcgacagaggtttacacatcattaagctaaacatgccaattttagatcgacaagagtatgtaaaatgtttaatcgcacaccttctgaaccataaaaatgcacataatgggtacattggtcaactactaaaactgtaatttctccgtcccatattaagtgactcaaatttatctaaaaatggtgtatttatatactaaaatatgtctagatacatgtaatatttcgacacttaatatgtgacggcaggagtatactactggatccgttaacctggaagctcacgactcgaaatggtagagaaaattgaagaatatgtttttataatttaattaattgatcaatttatgtgtacagcgacaaagg

SEQ ID NO: 14686 - DNA, 969 bp, Brachypodium distachyon
  Intron number 2 from transcript Bradi2g24310.3 (locus Brad i2g24310) derived from phytozome v7.0 (chr-ID Bd2; pos 221 26262 to 22127230 reverse strand)
cttcctgtaagcaacgcattttacacatcgtctcttttgatattgttcatcctgatagagtgtgtttggtgaatctcctagcttgagagaaagggtggcacatgtttaggtgctcaatcttaattctccacttataatcgaggaactctatttgcattacctatactgtatttcatcttgggatgtacagctcaatggctgcttctaatttactgggatttttttttcctttgcgctaatactaacatcttgggtggttgaaacatttttgtgtattcattgtcatacccactggcatcctgagtcctgcgtcgaaattgtatgtatatatcagtaaatgtctagatgatacagtccctgccgttgcttacaggcagaccagatgtgttaatttcctttttgtataaatgggctctctgggttgtatgaatgatccctaaacatgtgtcaattgtaattcctttcaaaatttctgagctgcatagctattattctgtgtgtcatggaccacccataacccatggtaacaagtattatgctactacttgccataacctatggtgcagcatggtaccataacctatggtgcagcattgtagctattatctgataacacattaacctatttcttccgtaaaagttaaatcccgtgttatatgtttggttaccacatcagttattactgaagcaattagaactgttcattctctatgaagcaagattattactgtttaaaactatgtctggaagtttgttgggatagatgtttgttactgttttcatgatatgtcaacatgacaattcttgtttctatgtatccgccagtgttttttttctctgtcgctggtcacccaaggtatattgcccatgatgctagttgaaatggaatatgatgttttaacgaaatattctctaactattgttcactccattgcagtagtaactgtcagtttcagctagacggtaatc

SEQ ID NO: 14687 - DNA, 966 bp, Brachypodium distachyon
  Intron number 1 from transcript Bradi2g10830.1 (locus Brad i2g10830) derived from phytozome v7.0 (chr-ID Bd2; pos 904 8184 to 9049149)
tccccaattcgtaactgaggcaaaaatcaaggtaggtggccgccctaccttgccctactgggtcctcagcccgtgcttgtagtcttcatgagaaataagcttgcttttggtgtttcttcgttttctctggtccccttttgtttgtcctgaacctattcgtaagtccttgcattacacatcttaccgtaccatatgatccttatttagtatgaaaatctgaacgctctaaatatggtcgtcctgcagtataatttgacaccagaatgttgaatactactactttgtacagtaggtgttttgtatacgtacggaagtgtggtcgatttgaatcctttacttgcaatcgaagatgaatggtgttggatttgttcctgtttgaaaagtggaaagtataaaggcagctacctttacatgtggaaggtgatgggagtagggatccctagccagtttttgtggccattggtgcactaattgcagggtttagccggtcgctgtttgcatccctagacgggaggtagaaggaaatatgagtgtcaagttaatttgttacaattaagttatccattgattttttgtggcaatttcctaactccagaggaattttgattgttgaatatttgagtatgttctcccagatagatgctttgctgtttatggaatcttgccatttcaatcctttcatcaaattaattaacccaaattaattgttttcttttcaatgctacctgaatatctagtactcgctctgatccataacaagtgttgctgatttagtaaaaatttagtacaactttgtactaaatcagctgcacttattatggatcggagggagtatatatattttggtggatatgtatggtttccttaagtctttggtcttcaaataaatattatttatctttgacatgttttatccatcatgtacaggtagtagatattagatctacagctttgtcacaaaggaat

SEQ ID NO: 14688 - DNA, 847 bp, Brachypodium distachyon
  Intron number 2 from transcript Bradi1g51600.1 (locus Brad i1g51600) derived from phytozome v7.0 (chr-ID Bd1; pos 500 41588 to 50042434 reverse strand)
gtcgaagctagtgggttgtctgcgtcttctagaaggttagatttgaagatgtactttatcttaccaaacgtacatatatccatgttgtgaaatttatatcagtacatacatgtcgaagatcctcttatcgtatggttgtcaaataaattatgtagaaattatgaaggtacctaatttaaggaagccaaataggtacctatgtaaggaagcagttaccttgtactgtttgaacttggttttgcaaggtactgtagtagaataaagtggtttgtgcgtgttctagaaggttagatttgaaaatgtacttcatcttacccaacgtacatctgtcaatgttgtcagaatttccaagaatacataaatttatatcagtaccttcatgtcgaaaatcctgttaccgtatggttgtcatataaattatgtacaaattaatgaaaatacgtaatttatggaagcaaaagaggtacctatgtgaagaagcagttaccttgtactatgtgaacttggtttcgcaatgaactgtactataaattcttgtaattacataaaaactattaatgtacctctatgaagcatgcgagcgaagtttaccaagaattttagtactttctgctaagaaacccagtaaattatatgcgagcacttcattgtatcaccacttttcagctatgattacatttttgttactacttaatccaaaaagttttagtacgtacctaagtttcgagcatagatgttgttcctatgaattaagttaaacgtcgactaccaattcctatttcctatgattctgtatgtattgtaatatttattttgcgtctatgatgagcacataggaaaaagtctg

SEQ ID NO: 14689 - DNA, 995 bp, Brachypodium distachyon
  Intron number 1 from transcript Bradi2g06430.1 (locus Brad i2g06430) derived from phytozome v7.0 (chr-ID Bd2; pos 492 1754 to 4922748 reverse strand)
agatccacgccctcttctccgaccagctccgcgtggtaacttacaggaaatttccccccgctctgacggcccaatcgccgctcccatgattcactcgtccgatttcgcctcgtattgcttgcctatgcggggtttctctgcgtggggtgtttagggtagacgcgatttgttggggtcctttggtcgtgttgtgttttggggctcggttggtgcgactggtgtgagttagggctgcgattgctctgaagtgcaaccttctggtgatttttcttttttgcccttgttagtggctcattccgggtcaaggtctgattgcgtggggggaatttcatgaaaatattttgtatttccactgaggcacagtttctgtatggattgtagcaaacacgattgaatttttctgtatagacgattatctaaaattgctgtaatcctctctgcgaggattgagtttgttagtctgctcagttttcaactgactaaaatatttaagcatgcaaaaactcagatagatagttacgaggaagtatccaatgagactgcttttttctgtgagtacattcatactccctccgatcctaaattcttgtctccaatttgcccaaatatgaatgtatctactcttaaaaggcgtctagatacatgtaatatttcgacaacaatttaggatcggagggagtactttagaatttagagtgattaaaccataatttgttactcaagctccatgcggtgaatcgatgttttctcatgtcacttgagatttttcgtatgttgcttcttttgtggttgccccattgaccattcttcagtgcattgtaattgtttacaactacttcctccgttcctaaattcttgtcgtggttttagtacaaatttgaactaaaaccacgacaagaatttaggaacggagggagtatttgagtatgtttttttttacatggtggttaacattcccacattctacatctgttcttctaacagatttcatacaa

SEQ ID NO: 14690 - DNA, 983 bp, Brachypodium distachyon
  Intron number 3 from transcript Bradi1g78160.1 (locus Brad i1g78160) derived from phytozome v7.0 (chr-ID Bd1; pos 742 19323 to 74220305)
aaaccgggggtgtaagtattttgctatcaactgaggaagacatgatttcaaaagtgggaaacatatactccccccgtcccaaaataactgatgtggatttatatagattcttatacaaattcacgtaactcattttgggacggagggagtataaaattactgcttactactgttgattacttaataatgcttttttttaacaccacaaccctgcaaagatacagaagatgctatcaacttaattgcgtaacataatagctgtgacttgtagaattgaaagtattaacctggttttaatagcggccagtaagtcttcgagacaaagtgcagtttagtatgagttgtatatgatacacctacttgggtgtatttgagaagaaaaagacatgagttgaataacaaacttagacacttaggagaaaaaggattcagatatgatctcataaatgtagtgagaagttgaaggaatacctccttactatgtgttgactttcattgatcaaaccgtcatccagtatacagactctgttcaagctttgagagtgtcttttgtatcaaaactgtatgcattttttagtgttggcctgctgaaaactttagttggataacttattacaatctgtttgagtttctaagttattgttgcctccaaactgaaacatggtaaaataaactgaatgatttaacaaaataagatttactccgaagtgtatgttaacacagcaaggcatcgtaatggcatattgtctaggttcccctgagtctattattaaatggtcaattttgtaatgtttatgctgcatactccctccgaccaacaaaagatgtctcaagtttgtcaaaatttggatgtatctagacatgacttagtatatagatgcattcaaatttagtcaaagttgagacatcctttgttggacggaggaagtactaaaacttattccttgtaagaattgatgtttcagtcctatatttgtcagaac

SEQ ID NO: 14691 - DNA, 994 bp, Brachypodium distachyon
  Intron number 2 from transcript Bradi1g66910.1 (locus Brad i1g66910) derived from phytozome v7.0 (chr-ID Bd1; pos 656 51417 to 65652410)
tcgccgaacgtttcggcggcaagctcgacatcctcgtgagtcggaaccaatccttctctgtctcaatctatatactgtacctgttaaaaatctagcagcatcgacatttctctgaatgcaagcctgcaatggagttcaagttatgcaatagacctgtactatacgtctactataccccgtcctacccaagaaactttgactaatgttgagatagcaatgagaacagggaagtcaaagagaaaagaccagaaagtaaaattggcatggtacatcttggcaccaaacctaacacaccctaaatccatgtactcctactacatagactcgtacctctcactaattcattgtcaatcatgtccgtggtttattcagctttcctcactttcagggccaattatgttaatctcacgacaacatgttacagttgcagaaggacactcccaacggaaattatcttatacgagtagttcttatgttaatgctgtagcagtgcagcacatagttgaattcaagatctgaaaaattgtaacatgaggttgaatggaggattttgatggctccattaatcttctgatgaaaaatgtgagctgaagttaaattacagatgtgctggtgaagttcttttaatggcataggccaatattttcacttgagatctgcattcattcaaatgtagctcaattccactaaaatctgtggttaccagagtacaggacgacatgctgaccctgcaagatgaactgtttgctgaatctccatttcattttctgttatgtttccattaatgctgattccacaccgtgaatgctcgtctttatttttttttactatcttgacttctctttaatgtaaacaatgtaggcgcaaacataagaaagctaaccactcaatgttctgtataaatttactcactctgatggccagtaatcttgaatctgcattttatttgtgccaatttgcactgactttcttcatttcctgtttaaggtaaaca

SEQ ID NO: 14692 - DNA, 979 bp, Brachypodium distachyon; identical to SEQ ID NO: 14156
  Intron number 3 from transcript Bradi2g28380.1 (locus Brad i2g28380) derived from phytozome v7.0 (chr-ID Bd2; pos 275 93701 to 27594679)

SEQ ID NO: 14693 - DNA, 794 bp, Brachypodium distachyon
  Intron number 2 from transcript Bradi1g72900.1 (locus Brad i1g72900) derived from phytozome v7.0 (chr-ID Bd1; pos 705 11088 to 70511881 reverse strand)
cacagatcaaattagtaatagaactgctttacaaggtaattttccagaagttcaacttgatgagactacctggtcttccattattctgtcacatccatattgagagggtttttcttttgctgctctagccttggaaaatagttagtataattcattatgcaaaccaagctgctaactgagccttattggacaaggggtgattcgttggataggttttgactgttaccttttatgtctttcagtttgcagatgtactatgatattccttttcctctttgtgacaaatagaagacactccctcctttttcagtttataaggcctatctcaaaaatcatagcttgtaagcccgttttccttgggaacaagcaaatttaattacatgtacacaaattagtaattacgagtactatgtaacttctcaatgtggaaccaaccaatgcttgattaagacctgtgtgcatacatgcttagtctagcatctaactaggcactccttggttagtgtgatttaggagatgggccttacaatctgaaagggagggagcagtatgcttgcattctcgatatttgttcgtgctgaaatatgtatttgcgccttgtcattttactcaagcattattccaatttattggtacaaatgatggacttcttagtatggtaagaaaaaaaatgttatcttccaacttttgtccttgaatacatgttatgtgttctgtcagaactcagaagtaatgcccctcgttttcttttctgacctcgcagacaagactagcttttacggcagagcaaatag

SEQ ID NO: 14694 - DNA, 992 bp, Brachypodium distachyon
  Intron number 3 from transcript Bradi2g16160.1 (locus Brad i2g16160) derived from phytozome v7.0 (chr-ID Bd2; pos 142 28477 to 14229468 reverse strand)
caaggcagggcagtcaagcacttacaagaagagttagcgtcttaaaacttctcaccagcaggctagtttttgtgctgtgctgtagcagacaggttgcctgcctatcaatttgcttactgttaaagccagtgaatatagtatggaatacatccttctcttaattgtgtacttcacaattcacatgcatttccccttcaccagctaaccgtcctactgatgtgagaatgattattttttatttaaattagaattaaaatcttcatggtatttcttatctacttagttccaggtagtggcttagcttatagtatgtgtcatattgacatatgcctgtttgttaacccaaaattggcctttgttctgaagagatgttcagtatttatggatgaatatatggtttgcggtaccaatcatattgaattctggaattaaatctgtatgcgctgggtccaagtcatgaaaaatagtttccgagaaacccaaaacccatattagatgtgtagacctttcatggttagcaacgtccagcaagattgtttgcttgacgttaggtgcaacatcctttttcaaggatgttaaaaaataactgatgtggatgtagtgccaatcggtgtagtctgacatagtgctggagtgtcgcagcaatatctttctttattgagcatattaaatacatgtatgtaccggagtaactacactaagccttaaatttaacacatgcctgtaaattggtctgtttattcttcagcacttgcaactttaatcaattattaagcacaaatcatcatgtttagtccttacatttttgtgtcatggagtaaacatttttttatagagtgatatattgataaaatcttctggcatattcttattgtttttatttttgtttgctttgattaattcatctctttaagcgtccttaaggtagcccattcgccatttgacaatgttgttctatcttgtctcaccaggaaaacctgctgccattcagt

SEQ ID NO: 14695 - DNA, 548 bp, Brachypodium distachyon
  Intron number 2 from transcript Bradi2g23460.1 (locus Brad i2g23460) derived from phytozome v7.0 (chr-ID Bd2; pos 210 23261 to 21023808)
agaaagaggtattagtagttacttgcaccatagctttccaccgcatctttatcccttcaatgtgcatgatgcagccttttttttctaacgggttaagtcagactgataagtactctcagaaaatgttaagcatatgtttaaatatagcatcgatgattgtttgatcccccatgaatactacctttgtctaaatgtttagattctatggtattgaaaacgtgctcttttaattttgatagttaggcacatataaatctgtagtttctgtgctgaaattttatgcgcattttctgaaaacaatattaatggaaatacaataatattttgatgataagtcagaaggaaacaagtctgaaaattataatcaagcagaagataagatactaaaaatttcattatcagtgaaactgaaaatatcttgaaaacattggatgaagccttcttgaggcaattattattctaatttcaaaatatgttatccatattgctaactaaagtgaaattgaactgtttgtaggttggtttggctttgaagaaattatttgagg

SEQ ID NO: 14696 - DNA, 865 bp, Brachypodium distachyon
  Intron number 1 from transcript Bradi1g46610.1 (locus Brad i1g46610) derived from phytozome v7.0 (chr-ID Bd1; pos 451 39071 to 45139935)
ggcaaggtaccaagttctaacgcagctcgattcaaatgctgaccctttgcttaactggatcagcggctaattaaagctaccgttgtacttaagttcttagccagtaaagccggtagctttcgctcttggaaagtgaccgtgtggtcggtttggtgcctttgatagatcgaatgaccgttttctccccttttgttggttagcaatgtgatctccgaggatagtaggatttttagtacaaatgccaaggagaattggctgatggtgagatggagacgctggaatttgaattgtgttggtgatgtgacatctgattttggcaaatagggacagtgggggcgagttacgagtaaagatcataggggtagatctctagcagttaagaaagtaaaattctgacagacattgttggttgtggtacattggttgaaatgcgatgctcttttaattccgttctttgatgccaaacagaggatgatgaagcacactttgggagttgatgtcattaacttttttattgttgtaaaagggtagttgaatacaatcttaaaatcagggcaagtacttcctcgcaggaagtcgccaagagtgtaatctctagaaaatatcgtataatcttggcagtgaattacttgtgccaagatttagcaacttcaatatgttctttgggtagtatcagtaggttatgagcgaatggactagtattttgtaagaatgttactttctctactttgctctatttggttgtatctagttagagactaagtggttatttattgtcccactctgctatatttgtttgttgctgacaagataactgctctatctgacagattgacaaggcccgggctggtgtacttgtgggcac

SEQ ID NO: 14697 - DNA, 668 bp, Brachypodium distachyon
  Intron number 1 from transcript Bradi2g10880.1 (locus Brad i2g10880) derived from phytozome v7.0 (chr-ID Bd2; pos 909 9395 to 9100062 reverse strand)
gtcctcttttgcctggccctgcaagcctttgtttggtgaattgctgatgccaaacgctgcaagttaattatggtttggggttttgattttttgctttcttcggctcagggtatcatgagatctgagcatcagagcgcttgcgtgtactgcttttctttttcttttcttgcaaatcgcctcaccttcgcaagttgatgactgcggtggtgtttgatacgctctgttaagttgtgataattccgtttcattcttgctgtgatttacttttcaaagccaaaaaaatgaagaataaaattttgtcacgttgcttcctagtacatgattgaatttcttaatcggttagagttgtgatatgtgtagcagcaggtactgtaagctcagccgcatgattggtctcctctttgcccaaaggaacacatacacggttttttgtccgtagcttaaatgaatcggccttttatgcttagcctacatgaattggccttctttgcttagattgatgctcagtatctgcaaactgattaaccctcagttacaactttgcttaaaagaaatcctgaatctatgaatcagagcttcagtaaatacccatcaatgcaaaaaaaataaaaaattgtgtgtggcatttagtttggttgatgttctaatagtgtctttactttttccag

SEQ ID NO: 14698 - DNA, 617 bp, Brachypodium distachyon
  Intron number 3 from transcript Bradi1g63540.1 (locus Brad i1g63540) derived from phytozome v7.0 (chr-ID Bd1; pos 626 87246 to 62687862)
ctgctctctttagtcttgcaattaaccataaacaggttctctctcttcagtcgataattatttacttaagctttgtcgccaaacatgtaaacaacatggagagtgtttcacctttgcaaagccacagattcccaacaatagaaaagataagttacttgggcggatagttgaaaactaacttggcccaagagatagtctataaatggcaaagtcggtactcatggtccaagtggtaattgcatcgacagtcaacacaattttgagtgttttttttgttgccttgggatgcttgaggcgcactgttgcagtaattggggagttgaggtgtataaacaacggtggactaggtttcatcatatttgtcccgaacaatgcaataggccactaagctactatgagtcatgtgtgtactgtttctgcaattttagtactcgacttttgatgcctgctgactggatttccagctaggtcaagctggcactagaatgtgttgctagaaatagaaatgggaagcgaatccatacaacaattttctcccattcatctacagtgctatacagagcttttcatagcccatgcttattctctatacattgcaaatatatgatatcatgcag

SEQ ID NO: 14699 - DNA, 540 bp, Brachypodium distachyon
  Intron number 3 from transcript Bradi1g75010.1 (locus Brad i1g75010) derived from phytozome v7.0 (chr-ID Bd1; pos 720 14286 to 72014825)
atctgcctgcaaggttggtgatttgattctgttttgatcctagtcaacactttttagttgcagagtagtcttgtctgcaaaagagcagttgcagggtaagtgggttactaagccaactttagatgatatattttacatttagttatttacagaccgtgagaagatatatttgcccaaaacactcgttatgatctgaccatatgggtgtttacactggttgcgaaacgcaacactagccattacaactgcagtgttcatcatagaccggccatgatgtaatcatgctagttttctctgtttccatgtaccatgccgcacttcgtactgtggatgctattggagtatggctgtaatttgcttaataatacaattttaatgctggattttccatgtgaataatactcgctttaagcgtaagagagcagagtgtgcctgttttagactcaaggatgatatttgattcccattatatttgcttttctttatctatgtttatcaacttgttttgcaggaaagtcatccatacagtgggccctaaat

SEQ ID NO: 14700 - DNA, 575 bp, Brachypodium distachyon
  Intron number 1 from transcript Bradi2g02810.1 (locus Brad i2g02810) derived from phytozome v7.0 (chr-ID Bd2; pos 198 1109 to 1981683 reverse strand)
ctaagccggacgcagccgccggagatcaacgagaggtcagagatttttgctccttttttgatgtttttttagttcttgctgctgttagtctgttactgggggcggaattccgcttcttcctggcgaaattcggaggttttgctgctgtgggtgtttggtgattgagtggaattttagtttagggattggatggaaccgttcgtgcagaattggggacgcgaattttgggtttgggttggagtaattcgcgatcctgatcgtgtaatttggggagagcagttagctcggaggtccttggtgtggtagtactggtacttgctgttcttgaatccaaaccagcttttttgttcgtcaaacagaaacaaagatcccgcttttcctgcaattctcccccgccaattccgtgctcaccttcactgatccgcatatcaacgagagatcatattattgttaccgaaaatcctgagctgaaaatccgatcttcttttacaagatgcccccaaaaggtaatctcagctgacaaaagccgtgtgatttctcctgcagcgatcccccctgctgtgcgctgagctgag

SEQ ID NO: 14701 - DNA, 785 bp, Brachypodium distachyon
  Intron number 1 from transcript Bradi1g71540.1 (locus Brad i1g71540) derived from phytozome v7.0 (chr-ID Bd1; pos 695 38134 to 69538918 reverse strand)
ccggaggctccaactccaggctgcaccgtcgtaacgtgagttcctttctcctttctccagctttgattgattaagagaatttaacttgattaaacaaagaggaatcgatggtagtagtactactctggatttttcttgaatggctcaatgctcgattggctccattcgccgtcgaatagtttagataattcccgaaagaaaaatatttttcttttcaatgttaggtagtttttgataagtgatgatcaagtagaggacggcgacgccgtttaagatatttcagtatggttggagactacttggagatgaccggaattgagagagagttgttcgattcagctatttggacgtgacatataagacctccctaatggtttacttttgacgctctaggatttcaataatacgatgtgataggttgcaatcggacagtgatagcgatgacgataaaacctatcccctctgctgatgcgttcctaagccagagatggtcaaccaactccgagaagcaaccactaggagggagctgcacctgcagcacacctttgatttgtcagcagaccaactttggtagtggtagtagtattatgcagcttagccgcctagaactgttcaaccttgtaaaacagagtaatttagtactcctcctaagcatgcatcgaattattgaacctaatcacctgaatgttttgattctgatcgcaattttgtttttcgctgcctctgaccatgtgctcatatatgtaacagctccacgggatcctgaacgcggtgggctggggcat

SEQ ID NO: 14702 - DNA, 994 bp, Brachypodium distachyon
  Intron number 1 from transcript Bradi2g08210.1 (locus Brad i2g08210) derived from phytozome v7.0 (chr-ID Bd2; pos 659 8734 to 6599727 reverse strand)
aagcaccgaggtattaactaccctcacgctgcttctgcttctgcacaagccctcctcgtccctcgcttctcgtcgtatctcctgttacgcacaggaagaacacgagggtttcatcccatggtgagagaggaggctattggtgttaatttgaagtcactgcttgcttagtactcccattagtgcgaacgcctagtgtgcatatccggtgatttgcgaggaatactctgctatggaggtggggtttaactgagagaagaacagaaataatctgatcacctcatgttaagatctgatttggatgcaaacatttgagagtatgtggcccttttcagtaccatgattgcacttgttgtacctcctggattctggatggacaggatgttcattgtccagtggcaatgtttgaaattgtgaattagtatttggtaagatgaaaggcacagtggcacacaattacacaaacacattcatcagatgccggcacatgcattggtagttttgtgttcttgccttagactgaaattatgttacctctttcaactgttcaatgtgtcaagcaagtattatgttggtaagataccgtgtgttggaacttgttatcctcattttgtctaactaccatttagaacggtaacctagtaatctagtctcggatttgaatcaccaggtattatgcagcttcattaatggagaacaagtgtaagataaattatttggagtactggcttgccttttgcttttctgtcttgaccttagcatgtataagaaaagaaaaaaatgttatgaacttgtaatattgtgtaatgtttagtatacgaaattctctcacctcacatctgtcatatgttcagtagttttgtctttcagaaactttgtcatctcgagagggtaggtaaacattgctgtggtgctatttgatttttacaaatttattctgttgacttatcagtacttttcaggttacataaaaaatttcgaggtcttcgatccgcat

SEQ ID NO: 14703 - DNA, 600 bp, Brachypodium distachyon
  Intron number 3 from transcript Bradi1g51230.1 (locus Brad i1g51230) derived from phytozome v7.0 (chr-ID Bd1; pos 496 68550 to 49669149 reverse strand)
tgtccaggatatacaggtacatgatgtataatactttgctccctgttgttgatgcgtatgtttggagtttcttgatcactttgagggttatcagtttgtttagccatgtcatattgttattgtcatgattgatctatagtccatgttcacaccgataggtaaaagtaaaagcgaaaaccaaaatgaaaagggcagtgttttgcatgttttctaaactccttccataaaatgtccgtctcattatttttgaaatgcttgattccagtccctaggttgcctgctttgatcaccaagcttcgggtgtattctagaaaaaaaaaatcaccaagcttcttaaaaagtactgttcctggatagcttaatcttctggttgaatatcctgttcctgcacttttggtttgctattgaaattttcttcaactcgtctcaaggtctggtgcttcgtatttttttttttatttaatcaaattgatgtgcctcgctgtacccccgtgttctggtatctccagtatcctcatatgttcaaacttcacttacctattccttcttctctctttgagggattacacaaacctgctatcagcatagggaggagtgtaa

SEQ ID NO: 14704 - DNA, 657 bp, Brachypodium distachyon
  Intron number 1 from transcript Bradi1g70440.1 (locus Brad i1g70440) derived from phytozome v7.0 (chr-ID Bd1; pos 687 70408 to 68771064 reverse strand)
agcaggagctctccgccatcggcggcgacatctcggttagtgctgcctctcctgccttatggtgtcattcttcttttgctttcttgcctctcttttttcctgttctttggggattggagtttcttctggttcttgatgaatctattggactgctgaaaatgtcggttcctctggttcgagattgcttgtttctaggagattttgcgggcttctgttacatggaaaacggagatggagttttttttggggggtgcttatctttctctggtgttgttgccgttgagaaataatctggccgcgacctttcgaggtttatttttgttagtgcatgaggtcaattttgagttcttgtatcgttcatcggcagatctttctctattattcttctctttaaggctggatttgattcattcccttttttctctccataagcagcaaaagcaattgctttggcctattttatgcagcctttttttttctgagtggactgaaatatgaaaataaacattcggttcgattacactcatgcatcctttgtaccgacgcatactctactctaggtccaattattcagttcagcattagcaaatagtacctctgataacccaattattctgatttgcagcgtctctctagcaccgtggaggagaaggcgaa

SEQ ID NO: 14705 - DNA, 603 bp, Brachypodium distachyon
  Intron number 3 from transcript Bradi1g62480.1 (locus Brad i1g62480) derived from phytozome v7.0 (chr-ID Bd1; pos 616 91279 to 61691881)
agctcactagggacctcaaatcgtttgaactcaaggtgattagcttgtccatgtcagagaatgctatggataatctcatgtgttggtcgttagatcaaccagttgattttgctgaagccataacatttgcgttgtgcactcttttcttcaatgtataaccgtttattgaggcttttcacttttgattgtcagtattaataatttcactttctcggttttctacgtcaatggaaggtctcaattttacttttggacataagctcaatttttttatttacttttggacatattcctagtgtggatggtacaaatcacattttttcctggaaccattatttttgtagtctcagttgagaagctgcctactcatatgcagaaaatagtgttgagtggtctggtattttattatagtgtagcaatctttcctaccaattatgcaagcacataatactgtaatattgttttatgccgttttggctctatatgtatctgcgtttgcttgttactgtcaatttacaactcttgaatatcactcactggactggttatgagtctacattatggtggacttatttgttttatttttgcagaccacctttgagg

SEQ ID NO: 14706 - DNA, 1009 bp, Brachypodium distachyon
  Intron number 1 from transcript Bradi1g73750.1 (locus Brad i1g73750) derived from phytozome v7.0 (chr-ID Bd1; pos 711 70760 to 71171768 reverse strand)
gagatacatctttcacaaaagtcatgccctacatgagcttcttcactaaaggtacaaacgaaaactagcctcctactatttttttattttaaatgtgagtcatgaacatttaacacaccgttaactacagtattttagattttcagtgctttccttgtagcttagattgttcaaaaaaattttgcgggtttgattgttcaataatttacatttgagaattcccagttcagcatttgatttctaaacgtccatgggtataacacaccattaactactatttcagatcttcagtgcttttgcttgtagcttaggttgttcaataatttacattcaagaattccgagttcagcatttgatttctaaacatcatgggtagagtttttcttttcatgtttctgtgtaactagatagacatttatatttagagttcctagtagttgtgtggaatcgcctaaggtagattagccaagcagctgaccaaagaactccatggtgttttgggtaggataaattggtcccatgcaggcaactagacacatggttcttgctatttaacaattagtacttcccgatttggacgcagatcgaatcatattgcaatttgcatgcttctctctattgcttggttgatttggacatctacaattgaaatgattttgatgggcaatgtgtgcacctctcctactcaccatatcatcttataaagtattgtctcttaccgtgcagagtgggggcggcagccgacctctgagtaagcttccatgcagttgttggtgcgacaaggatgtaggccctgtttggttgggtttaaaactgttttttgacttttggcttataagtcacaaaagcacctaaatagttgcttttgactttggctttttgcttataccatcatctaacagtatcaagtcaaatgtcaaaaaccaaagccgaaagcatctaatttggtgctttcgtggcttataagccaaaagtcagaaaacagttttaacccaaaccaaacaagccc

SEQ ID NO: 14707 - DNA, 585 bp, Brachypodium distachyon
  Intron number 1 from transcript Bradi1g72470.1 (locus Brad i1g72470) derived from phytozome v7.0 (chr-ID Bd1; pos 701 90084 to 70190668)
acctcgagatctttgtcaacgagcaggtgaaccctagccctgctgtgcggttacccctgtttgttccgttcgtttagttggtataaattggtagggctcagcctgccggttttatggtttgttgtggtaaaagcaatctctgtttcgtggcgaaattaggtggtcggtggtgtgctatattgtgcggctttgtcagatggaagtcactcgtagcaatacagactagaaatttagggtacctgaccccaaaaacgtgttcataatttgtcagcaatggtggatggatggagagatggtctttgaattattagatacgtggctagtgatcaggatttcgcagtattgagcttatttgcacatgatacacatagaacacacttgatttattgatacacttattgctcggcctgtgaattcacaggaacatgtttgacaaatctggttttaggttttgtggtattgtgcactagtattcaagcatgcctttttactattaggtatgacatgtttttatcctttcagattaataatatgtcttttcttctattaggtttcctctcaaacatataacctggacgcaaatct

SEQ ID NO: 14708 - DNA, 850 bp, Brachypodium distachyon
  Intron number 1 from transcript Bradi1g68380.1 (locus Brad i1g68380) derived from phytozome v7.0 (chr-ID Bd1; pos 669 12810 to 66913659)
ctgcgtcgccggcaagcctctcctttccgatactggtacgcggcccgtatgcaccataccacctctaacatgttcggcgaattgccgccgagctgactcatcgtccattacggccaatcactagtttaccaccattcatgatgagcttataggaagtcacttcttcagcttttttgctacgtgatgcacattgaggtataggatttggccaattatgattttgagttcccctttttctgaggaactggaacttgagtttccatacagctatgggaggcttgtttcttcttcatattgtcacatgtgcattccatttccacctagaatcaacccccctcaaggctgtgtacgcctttggaagggtgggaaccggaagaaactgatgcaattatcacatgaacataagcatagctaccaaataagaagttgaactggcgtaagcacgattggttacttgattgatgatgcccatgtgtaattgtttaagagctacaattcctctgttctagaaaaagtgtgcctcgattctttaaatggtaaaagatcggcaacttgtgcatgaatgaaagatttgtgcctttaggagggaaataaaataatctcacactgcagcgtttttgtccaagttccaatggtaggcattttgccattccctatttttccatattatggatgctacactcagagcagtgatcacatgcaacgagaagactagttactcatctaaagattgtcctgcacaatattactggagcatcaatttaggatgtgttcccaggctatactaattaattgaagggacttgtttagtagtatttttagtcttttgtttgtttaattctgtaggtga

SEQ ID NO: 14709 - DNA, 762 bp, Brachypodium distachyon
  Intron number 1 from transcript Bradi2g24990.1 (locus Brad i2g24990) derived from phytozome v7.0 (chr-ID Bd2; pos 227 91480 to 22792241 reverse strand)
tcgaccgctccgcccgcaggaagaacagcctcagggtacgcgcctccatctctcacacttgcacaaacgtatgctgaattgcaacatttaaaaaaaatattcatcgtgtgtgttttccaaatttgtatctaggtaattccatatgttttgctatctttcgatttgcatttttgtattcatgttaacttcgtatgttaattatccgtctcacattttgttcgatgctccctccgtcttataattcccgtcgtggttgagtaatattttgaatatggatttcggtcgtcgacatgtgaacatcaatggtcaaagttacatgcatatgttcatttacaaaacgacatgtatctctgaacagtaagatgaaacgctgcctttaatttatctgtctttttataacgccatcactagcatattccaaacgattagatatggacttggttatcgtcatgtttcgatcatacgcacaagataagtggggacttaatcgtgtatgatccctgtcacgggcagctttcgcatggaagtgtgaacaccaagagatgctgtacttcgtgcgtcatctctttcacccgccaattatatctcgcgcttcctgcgctaggattgcgacgcatgcatatgaattagtaccgaattctgtatccaataattccgtcgaattacacaaataaaaatcgttcctagacgaatagtactatattagaacgtcacgattgtctttctgaattgattttcttttctcgccggtgttgcagctgg

SEQ ID NO: 14710 - DNA, 770 bp, Brachypodium distachyon
  Intron number 1 from transcript Bradi2g19590.1 (locus Brad i2g19590) derived from phytozome v7.0 (chr-ID Bd2; pos 172 44688 to 17245457 reverse strand)
cgaggacgagcaaggcgtagaagctttttcccggggtaagcgattcgccctcgcctttcccgtgctttctgatgtgactaacaacattcttttccttttcccccatttttggttcttccccttttcttcttccgtccccttgtgctccccgtgatctcgaattcggcccgtttgtccccgctataatcggttgtttcccccggttcgatcgggggtggtggttaatccccttttccttcattcagattagattcggcttgatttaggaaagctcttctttttgggtggcgtcagagtcagagatgggggatttggcgtgggacggacgaatgggcttcgaatgaatgaatccccggtagccgccagaacaaggatatactactgtagtgctcttctatggaggagtagtttgcttgggaggagcgacgcatttcgctttcccttccgcactcacctcaccactccctctatcttcgccgagacatgtagtacggggtacggcccgttgtttggtccatgccttttgctttcccaaaccggttgctttgtttgttccaccgattggtctgctagctgcccttatttcttcctcgttcggtagattctgccaatcagtctggtgagcttcagatgcaaaaccaaacaccgatcgcgatgcgattaccatgttttggttcttgatttttttttactgtactgtttgtttgagtgtttgattccaaaatatgggttcaggtttaggaagtggaggaggcgattgattgaatctg

SEQ ID NO: 14711 - DNA, 1012 bp, Brachypodium distachyon
  Intron number 1 from transcript Bradi2g06820.1 (locus Brad i2g06820) derived from phytozome v7.0 (chr-ID Bd2; pos 523 5841 to 5236852)
cagggcaactctcccactaatccaccaaggaccaggtaacacatgactgtttgttctcttattgcatcttagtgtatctgaatggatttgtgtatctgaataaccatgtaatggatgtctgctccttgcaagttcgtgtccttgtcaaatttcattatttgcttgcgatggtaaatggtgatctagtgcattcagatttctttgattaccagatttggtgattttcctcttgtacggagaccatgtatgcagtcctcatcattagtgttataatacaatatgctgtcattagttgccactgcatgttgacacaatctagtgttttctggctttttctaagatctcatttttgctcctactttgaaagcgaaaaagaaagttgtacatgtcattgactttgaggtactgcatgactactctaacagatgccattttgattgtgactgatttatctgaatgccatgtagtgcgtgatgcatgttgttgatagtggattttccaagcagaagtgataacccggtacattatcttcgttctattttttttcttcaatctggctatcatagatatagctttactttcgtttcttttcatagtatatttttgtgtgaaatcctgaaatttgaatgccaactgctgcaatgatcttcagactgtggcctgctagttcccattcaattgtgcatccataagaaaaccccttgactagttgacttgcaatccagtaactaatctctatctgtaaaagcaatccagatgagttaattaaggaccgttatcattatttgcttattggaaatataatggacctgttaatattttgaagttatctatgacatacttcagggctaacacattacttgtggcattgaccctcatccatctttaagctggactgagcaatcaaaaccgagatcaaattgttttgctgtagttttttctaccatgtttgcttcgtttggtcttctttgttgcagtctcctttcgcaaatttctgacatcgagaagtata

SEQ ID NO: 14712 - DNA, 860 bp, Brachypodium distachyon
  Intron number 1 from transcript Bradi1g67360.1 (locus Brad i1g67360) derived from phytozome v7.0 (chr-ID Bd1; pos 659 98768 to 65999627 reverse strand)
ccgtccgcctccgaattcgtcaagtccatcaaggggtcagtccccctcccctcccttcccctccgctcccgttccccccaaattacatgctgggcagactctcgattcagttcgttgtgtagagatctgggatggtagtttactgcgtcgtttcgtccctgctcgatgcgcgtaggtgcaatcggtgcgggaggagatattgtagtcgtttcgtggggatgcggtacgtcttgagcgcaggtcgaatgggattctggtgctgtgccagtttgtttggaaagcttaacctaggattgatgttgcctcttcatccacaggcttaccatcgtttgtgtaatttcgagttgggcttcaatggcattcttgtttgcccttggccagcgtgtagaagaaacttcgtgatcagtgactcagtgtgtacccctacataggtgtgtacttgagcttcggcagattcttatttgagtgaaatatctactttgggtgcagcgtatggaatttattctgggctaaagataaatctctggggcttatttagacttttagagatggacgaaaattgtaagcttcaacttttgcaaggatactacaatcaaacattgctcaatgggttttccatctccatatgttgctgaatggtcataatagcaaattagtgctctgtgaacttgtgtattactcggttcttctatatgtaggaagtttgactgtggggccgtaccaccctcaactggactcagtaccggtgcttagtaaatacttgtcatttatgtaggttttcatgaaataatatggcattaatgtagttatgttttatggatacagctttatcgtaacattctcaaacagagctcctgatc

SEQ ID NO: 14713 - DNA, 1033 bp, Brachypodium distachyon
  Intron number 1 from transcript Bradi2g12540.1 (locus Brad i2g12540) derived from phytozome v7.0 (chr-ID Bd2; pos 108 69301 to 10870333 reverse strand)
ccattgcggttggtaagtcgggagaatacttcgtatttttgatcgggcgagttcaaattggtccatgttactgattcgctcaggtttgcgaattttgtctaccatcgattgatcatcatttacacgggaacaaaatttatactaatacattaaaccaaaattaatgcattcaggaagatttttcatcctggtagaacatcattttgaaattttgaggaaaattatctatggttccgacacctttgatagattctcgttttccacaaattaacggatgagaaatcgactgtaatcgtactgcacattgtcatcatccggaattcattactaaacttgtttgattagaaatttgctcctcgtgctaagcaaaggtgctctgtcaaagcattgaccaagtagtagatgattcgtatgaaacatcttagccgctgccatactattttatactgcggagtattttttttatgccggaagtcaactctgaagtaatccaagatctgcatttgaaaaacacacaccttttgttagggacttactcctggtttaaggaaactagtagaaaaagatgctctgtcaaagcattgaccaagtagcacatgctataggccgaaggcgccatattccaactcttgtccaccttttttctcccccttgcattttgttagctaagaagcatgcatgtttgaatttctttgattaactttgcggactttgtaataagctgcttgacccgttattagtgcctgtcgaaatatagcaagtttttaccgttgcaaattacaaagaagattgaatattatgctgaactgtatactcagaagataaagataaaatttgaagttaaatagaatccacatcgcaatcactaaacaagtatgaagaccggcaaagtttcaaattcaaattcgtcctgttatgtttagagagaaatttgtgcttattttggcaatagtttcagtctgagtaattaacgtgttaaacattatttaatgatccaggagcaaactcgttcctgtacacccaatacaagtac

SEQ ID NO: 14714 - DNA, 559 bp, Brachypodium distachyon
  Intron number 3 from transcript Bradi2g34820.1 (locus Brad i2g34820) derived from phytozome v7.0 (chr-ID Bd2; pos 348 94960 to 34895518 reverse strand)
ctgtccaccagaagaggtgagttcaaatattgaaagctgatatttagaatattcttctttaggctgctattttctaattggccagcaaaattatatttgttcatattaagtggacaataaatactctgtgaagtattatttctgtgcattactaagttcaaactacaaggattgactatttcaaacttcgaatgaatttcagtagcagaacatttacttggctctagtcttctgatttatgctcaatatacagctcttgctgagtgaacttccatgaatggaaaattcaattaacatttcacttgggaaggctgaagtcctacatcctcttaatgccctaaattttattctgtggtttcagtagaggaaaattatattttgtgtatgttgctttgtttatgttgctattgtctcttctcatgtctttatatgctctatttcttttttcatttctgtacttactatagatcatttccaggctccagcagatgctattttccatcatccatgatgaaatgaacaactctgcatttgacttgtttattgtgttttgataggt

SEQ ID NO: 14715 - DNA, 588 bp, Brachypodium distachyon
  Intron number 2 from transcript Bradi2g34820.1 (locus Brad i2g34820) derived from phytozome v7.0 (chr-ID Bd2; pos 348 95612 to 34896199 reverse strand)
ttaaacgtatgtatcatatgctactttttggcaatgttctactttgtgttgtatgcaaatattcttctgtttcttaggacttatgctgacctgtggcatatgctaaatttgttggtacttcttaatgctatggagatattgccccgccacccccacccctttctattgatcagagatgattttaactcagtctgttcagtgtatttgttttcatccctgtatgaaattgccatacttgtatatttgttctgaacttatatccttatttgctgacctaattagtatcttcctgttttcctaaggacaagcacctacttgccatgttttcatccctgtatgaaattgccatactggtatatttgttctgaactttgatcctcattttctgacctagttagcatcttcctgcttttctaaggacaaacacctacttgccagttactatttttttgagttttaactgatgccaagaaagtttattttctctccactctgagcctgtattctacttttgctcagcctctttgacatgatattctttttgctacatctgtggcattggctataacataccttttgatgtaggag

SEQ ID NO: 14716 - DNA, 869 bp, Brachypodium distachyon
  Intron number 1 from transcript Bradi2g04680.1 (locus Brad i2g04680) derived from phytozome v7.0 (chr-ID Bd2; pos 331 1372 to 3312240 reverse strand)
gttcatctacctgcgtccctccgacgacggctccggtacgtctagcgttcaccttcctgtccctcccaattgctcccacgtctgttcaccttttcctctctaacggagaccgtgcgcgcgggcgcgtgtgtgcagacgtgaaagctctcatgaaggcggccctcgacggcgatctccgccgcctcaaaggtagtcttctcctcttctccgacgccaagctcctgtgctttttcctcggttttcggctctagtttagcgaggcattatgtgcccccgctgtgtccacggggtcggagagatatgctgcattgcggcgtttaatagccaatctagcaatgcttgcgtttggaaatatgtttgtcagattctattttcttccttgatcagatgctataaattgcttgcttgatttgatgattcgttcggagcatggcagcagcgatggccaagttattctgctatccagtcactgcaaactctgacgcctaagtttgctctcttgaaactatgatgaactgacagccagtcatcagataaatgtgagaattttcagatgatgcaatctgattgtccattgcatccaaatttgcaacgtgatcaagtactctaatatgatgtgtcatcacctgtcaagtattttcaccgggtgaatgtgtccagcggtgcatcagattggttctgttgacctaacaattttcttcttcactgcacatatttgcttcttttcttttatattttctagcttgttaatctgagtatttgtgtctgtaactgttggaaataatgcaagatctagctctaacagtaatgtgatgatttttactttggggaaaggtattgtgcatagtcttacccaagggagtggcgac

SEQ ID NO: 14717 - DNA, 877 bp, Brachypodium distachyon
  Intron number 3 from transcript Bradi2g02900.1 (locus Brad i2g02900) derived from phytozome v7.0 (chr-ID Bd2; pos 212 0005 to 2120881 reverse strand)
tgttaatagcagagaagctttcaccaggtctgaaggtatatataattcttttttatcgctaactcgtgtgtcaaatcaaaccacttcctactatcatttttacgttatcctgatacaaatttctgagatatcgacctgaatttgtattttcgatatgtttttagcattgcacattaaaattagtttagcattgcacgttataattcttttctatttcaagattactcttgctattttattgtccgcggttgttgtttcaaactgttttgctacaaatatcatacaatgcattgaggatattttgtcctgttgccttaccattctttactggcacgataacatgtaaatgctgactagacaagtcacattcacattatgtgtgttgatttgatcataggagtgtcctgggcctatactacatttatatatttgtttctctagcttcctagtttgtttttttaatgttctggctttatgtttgtttatactaggacatgccaatgtgaatagaaaataccctcgtggaacactgaaactgtagcatactgacataggtttgttttgtggtactagttcattgtagtaccgaaaaatagttgtctttgttcattgtgttatcataatcttcagtatagccaagtagccaaaatcctctaaattatgataaaatatatcacaaatggataattttcaggttgttacaggccaaagcatatactttatatagttccgtgaaaattaatgccttaagtatctacgcactggggatcctttatttctttcctgaaatattagtgggtaatgctcctcctttacctcccttgtcttgcatttgtgtgcaggttcttgcacatcagaagtcatccaggcgcttcct

SEQ ID NO: 14718 - DNA, 532 bp, Brachypodium distachyon
  Intron number 2 from transcript Bradi2g02900.1 (locus Brad i2g02900) derived from phytozome v7.0 (chr-ID Bd2; pos 212 0854 to 2121385 reverse strand)
gattgttctgatcgcctacttcaacagcggcccaggtgtgtatgtgtttcaaactcttagcatgattgcatgtttttttttgtttaattgatgtatatattgtgaaataaccacagagagtgaccggtgacatgtagtagctctgtttttgttgttctgtgctctggttccaactgggaaaagaatgtggcaactcatattaacgaatttcggagtataggtgcatgcgtcatttcgataatgatgtacagtagcactgtagtattgtacctgccttttctgaactagtcgtgaatatgtattatcagtttaaaacagttatttgagaataaactccatgttacatatgcaaacagtactgggggtctggttctctatgatacggaattttatggacatgctttgtgatgttgaacagtggtctggtctcagtgatagtctgtagatgtattgtggtctggcttggtttgatttttcgctctctctccaattgccaggtgtaactgttaatagcagagaagctttcaccagg

SEQ ID NO: 14719 - DNA, 1018 bp, Brachypodium distachyon
  Intron number 1 from transcript Bradi1g67480.1 (locus Brad i1g67480) derived from phytozome v7.0 (chr-ID Bd1; pos 661 44295 to 66145312)
tttggattctccgacaaggtgagccagccagaacatggactggggaacggtgttccacttccactggactatttgagtacggagtagtatctttgttgttttcgcgtgcttctgcgtttgattcgttgcgacgaggactgtttggagtggtgacgcagtgcgaattcatgattcgttagttagttagctagttgatggtttagggcatccacatccctaggtgttaagaagacgcttgaagggagagaatttatctagcacttgtgctaaggcatatgagcaccggtgctaagataaaaatgcttagagcatgttcaatgcaaggtgcttaaggtagtgctacaaaattaaaccggtttattctcaagcaccagtgcttatttctatactagaggtgcctaattaagcacctgtcctatagaacacaagcaccagtgcttagacaaaacccagttttctttgtgcaagcacctttctaagcttagcacccaatgctatgctaagtaaatttattttaattagtttatgtatatcaatttttaatgtagtccctagcacctatatgtggtgcttaaggatgtgataatagaagcttagacatgtggatggagggacaagatgccatgattgttgttagtttgcactagaattgttttgcttccaagagaaaaacctgatattggtttgaagatcatgtttatgtagggtattgcagggggcaggtgaccattgtgcaacctacctgcaatgagcatgcccaagtgcaaacgcctggatgctcagggtatgcactgcatggtgcatgctagtgtgcggtgtgggtcagtggtgtatgcctctcctgagcatgctcgtgcattggatttgtgcattcatgattactttcacatgtttcttgttaggcaatattaatgttgttctcgtcacattccgccgaaccgttgagatatctggtaagaagtatgatatatgtcgtcatccagggaaacttaaatttgattacacgagcactagaagc

SEQ ID NO: 14720 - DNA, 656 bp, Brachypodium distachyon
  Intron number 3 from transcript Bradi2g26940.1 (locus Brad i2g26940) derived from phytozome v7.0 (chr-ID Bd2; pos 257 02036 to 25702691)
gggacaaaccgtcaaaattgcagttcttacccaaggtgagtggccaccggttgcgtggtgtttctagatagttagtgcgggttgcggaatccatgcaaattgcactcggcgatgcatgggttgattggatcgctgtgctattggtaatttgcatagttgtgctgtttgaccataccttgttcatcagtgtggtgattgattgaattcgaggcactgcttcagattttttttttgcgtgtttatatttttggaagctattggcttcagcattgtattgttcgagccagcatttgaggggttatggaacaaggccatcaacatcattggtcaatatgttattgatacataaatcaccaatggaattcaaaaatcatgattgaaaaattgttaggagtaatacagttcctgttgggttggaagaaaatagttgtcttagatggcaacctcagcagaacctctcaattagtttgttatgttcatgatgtttctacttctgctcatatacataagatgtcagtagggctaccactctggtttattgcatgtcatgagtttgttgagtaatttgaactcttctttcacaatacttttgtatttatttgttcttacctttatatattagtgattatctgatgttcttgcaggtgagaagatag

SEQ ID NO: 14721 - DNA, 791 bp, Brachypodium distachyon
  Intron number 3 from transcript Bradi1g61820.1 (locus Brad i1g61820) derived from phytozome v7.0 (chr-ID Bd1; pos 611 38516 to 61139306)
gcccttcaacgcactccgatccgtcgggaaaggtagtatcttgacgcaaagcgattctcaatatggtttgctagttcagctgaagggactgctgactctgctactttaggaccgtttagtcgggcacttctgatttatgttctttacctcgttattgggggttatagtgtttgtatgggttaatgctatgattatttatactaaagttgtactaaatcagcgacacttgttatggatcggagggagtatattttattgccccctgatgcatcagatggtaaacctttaggcagtttctatggtaaaacaggggtgttaactcatgttactgtgacctcaataaagaattagcatctcgttacatgttgacaagaagtaatttattttcatttgttctggtaacatgaagataccttcaccgagtgatgagtagtgcttcattaagaatttgaacaacataaagtaccgaattatcaatgaaacgagacaacagttgtggtttctcttgatatgataaatgggaaataacagtatggttctgtaataactaatggctccatgctctttgattataccgggtagaggaaatacatgcttctatggtctgttaccatgttcttagttttttgtaatgagcttttataggcgtcacgtaccaaaatagagatagtattattgtccatgtaattcaggattgtgttttccaatttctgtacactgagtttttcattttgtaattctgtacttctgttgcagtttttgaaccattcaaggaccccagggtggataca

SEQ ID NO: 14722 - DNA, 837 bp, Brachypodium distachyon
  Intron number 1 from transcript Bradi1g53750.1 (locus Brad i1g53750) derived from phytozome v7.0 (chr-ID Bd1; pos 520 55792 to 52056628)
tcaactggttggtaccctctcattgctttccttgatatctcaatgagggaaatattttgttctgcttgagttgtctcttgttgtagtgctggaaggttacatttgtgactgacatgtcatggttccttttgacgattgagcaaattagttgccaacttgccatgtgtttatatattaccgttatactgataccaatttcttctctgcatccacacctgtattactgctgaaagttcagagctgtgcggtcgtaccaaataaatttgatgggcatggttgtcagtgtataacattgagaatggattcaatcgttcatgtaaataacatatttggcttgaaatataacatgattgatcctgcacgaatttgttatatactgagaattcttaggtgactagctaaatgcacgtgcgttgctccggatttaaaaatatacatattagatgttttagttttttaaaatattatgcacttgtattttttctattttttgtcaaataagattttttttcataatatttatttgagaaaacaatcatatcaaaagtatatgtcaaaccaatcaattataatcaaaatatcaccatacatatatgtacatattgaacgagtggcaatcaaatgattttctaacaagttaggaagtagttttggtaggatgaattgacgaccaccaacttgaatctttataagtgcaaagatccttcttatatgcaacaagtctggcaaattctgtaaggaaaatattaccaaccaaagtctgtaaaactgtaagtaacttgccgtttcttttacttcactgcagcaaatacttatcacagtacaggctgccagaaa

SEQ ID NO: 14723 - DNA, 318 bp, Brachypodium distachyon
  Intron number 1 from transcript Bradi2g14600.1 (locus Brad i2g14600) derived from phytozome v7.0 (chr-ID Bd2; pos 131 57028 to 13157345 reverse strand)
gcggtaaggttagtctagtcattcttgcatggcaagggtctacattgcttgccaaacttggtacttgatccgtgctagcaacatatgtttcttcgctgttctcagtttttttatgatggtgtggtttaatggttaactggtgcttttcatgagcaaaatgatgcaaatgtacggacgtgcataactctagtttagtcgaagagctgctatgttcttatgtttgccttggtttgttaatggtgtgcattttttttgatctatctgagatcgtatatatcacgatgttcctgatgaaggtgtatttctcttgttgcagta

SEQ ID NO: 14724 - DNA, 921 bp, Brachypodium distachyon
  Intron number 3 from transcript Bradi2g05430.1 (locus Brad i2g05430) derived from phytozome v7.0 (chr-ID Bd2; pos 392 3367 to 3924287)
tttagtggttttcgcgaacaggttgttatttccttatcactcttttccttttaatgtaattgagtactgatattgtatatctgacagaaaacaggagagatatttgccttagaagttacaaccatctgtgcacaatatttttttttaaaaattcttgattgtgatgcttgctagtttgcagaatctatctacaagactaaaaagtaacagtatcaattctgtttgtagaactatcaacgctatctagattgtcccatattaatttgctgtgctgtagccatgtttttgtaaatatttttgttttgccaagccagttatatttaacctgagtaatttatgttttgctatttgatatgttttcttgtatgaactcgtcatgtatgacttatcaaacctgcggctgaggcattctacctttatcttttatgtctatttcaatcatggtgaattggtaaactgattgattctgtgtcatatgttttacgtgggttatttaagtcgtgcagtatttattatattttgttggaagaccatactttgtatatgtatgtgaaccttatggaaatattgaaggaagattacacatagtgcttctgtaatcgatacagcatgctgtatttatcatactatcagcacgaaaagtctggatgccctattgttgtatctcactcaagatgggatcctttgaattttcaaacactcttgctatagagtgggatcaggtcattgttattcaccagtggagactaaaaccatcagattgtaaaatcgacaagcatgatttgtttttcaaaatattgctagttagttctatgagtattaacttgttagcggtagtgagtggtgaggttaatgtattctacaaatgcaatattcaccatgaactttctttcataggatacaagcaacctgaccaacttc

SEQ ID NO: 14725 - DNA, 876 bp, Brachypodium distachyon
  Intron number 3 from transcript Bradi2g13510.1 (locus Brad i2g13510) derived from phytozome v7.0 (chr-ID Bd2; pos 119 91621 to 11992496 reverse strand)
agtggtctgaatttcgggaaggtgctatatctttctttggtgtcattagtctcaattttggatgcagtggtcacaacttgaaatagactttcagttcactcaaaaactacttaaatagttacacatgaattttgcaacttgtagtggatccttaatagttatcttttgatatatgatcagaactattggtctctcttttgaattttacaacttgtagggggtggtcttctaagtcttgtactgttccttctgcaatcataacttgaatgatttcatttgtgttacaatggttgctgattgcatttcaaactcttatcggtcatttcgttgagggaatactttgtttggctccatctggtatttttaaagggctgcttgaacttcaatgatacttggtaatagttatgtggatgcagaataactgcttgagcagaatgctgcttctcttttatttttgtgttcaatggtttctaattgcatttcaaattctatcagtcatgccattttgggaatactttgtttggatcctgttctggtatttttaaagggctgcttttgaacttcgatgatacttggtaatagttatgtggatgtagagtaactgcttcagcagaatgctgcttctcttttgttttgttattatggttaactgtgccacgctacgctctagaaatgcaatttttgtgatgtaagctaatgaaagggaactggacacaataacaaatggtttgttctatttttaaaatcctggctcgaagttcgtattgggtaacttcctgttacaacacttcttccgcatgtatgatcaacatgatgcttacagtatactgaatttagacaggtgtaacattaggtggagatcgttctaaggggaca

SEQ ID NO: 14726 - DNA, 941 bp, Brachypodium distachyon
  Intron number 1 from transcript Bradi2g08530.1 (locus Brad i2g08530) derived from phytozome v7.0 (chr-ID Bd2; pos 690 9825 to 6910765 reverse strand)
ggtaatgttacgttttgttgctttactgcatggtgaaacttatgcatgaattaaccttgattgatgcaaagtactcattcttatccttaggccttgtatttttgcaaataaacagtttaattaatataagagttaattatttgaacattgtcgtttattattgagttccaatgttccgctcattttgttacaccattttctgtttgttgtgattgaagttggtatacggtatgtgctgtgtttatgttataaagagcatattgttcaatatgagctacataattttatattcgctgatttcttacagattaccgtgattaaaacttagcacttacgatctgaacctagactattataactttcatctcaaataattttaggagaaaatggattaacaattacggttcatttggagacatgagcacatgacatgacgatagtaacaagcaaatgcaaaagggaacacatcacagaaagtactttctacatgtgttgtgtcagttgctttgttgcttatgcatgtatatccatgcatcggttttgaatgtggggctgggctttaagatattcagtggttctagtacatagctctgtttaatatcaaaatcccaattattttttctagttagtgtccatgattaatgattgtcagagtatttcttgcccgcagagttgaactgccttttggcagtggttgctaacgactgtaaaccatcaatatatgctttggtacatgcattacaagactactatgtatttctgttcgctcaataaattgtacttacccatatatcgcttgtaggattttgtcagattgtattccaattaggcagaggaagcgtgtaccttatttgataatttctagttgtctttctctccttccgtggcttatcattgggctttcagaacctttgaggagctctagcaattttcttacgcta

SEQ ID NO: 14727 - DNA, 788 bp, Brachypodium distachyon
  Intron number 1 from transcript Bradi1g76700.1 (locus Brad i1g76700) derived from phytozome v7.0 (chr-ID Bd1; pos 731 86742 to 73187529 reverse strand)
agctcgagctcaagaaggaggcacgcaaggagagggtaagcatctgttttcgctctggtaccttgctatactataattcttagtgttgggcagccacatcaccaaattattagtattgcctaatccccacctcctgtggctatattttggtgtggaaaattccaaacgattactcttccataggtagtattagatgctttacttagaccgattgtttccatggtcgaaactgattactcttttgtttcgatgaggtcatccattgctgtgtaagatagcccatcatcggccaatcgagttgtttgctcaaggcactactcgagacatgagttggtcgaccgtatggtagttagcttgtcatccgagcccgaggtcttcctttgtaggttttgattacattcctttgtatgctgtaaagagtgaatgcacaaaaaacattttcataaattgattctctttgttgtgagttcagagttgagttgaaatctgcaattagggccaaagcaccggtgtgtattataaattttgtttgcagcaccagactcagtccttcaataacacagactttcctgggccgggatacctgtcgttggccagcaatctattgccacatttagctatgtaggcagagaattttgtgttaattttttcttcattttttttacgtttgttatttatgttaattttcataggcatatgtatttttctccttgtgcttattgcacattgataaaatattgtggtctcttcttttcaggctcggaagaggaagcttgggttgcctgagg

SEQ ID NO: 14728 - DNA, 385 bp, Brachypodium distachyon
  Intron number 2 from transcript Bradi1g51410.1 (locus Brad i1g51410) derived from phytozome v7.0 (chr-ID Bd1; pos 498 41535 to 49841919)
ttggcaaccagtataggtaattgagtttgcacttgatttcgttttcatttcagtaaattgacttgtttaagaccttgatcatcttttgtttcatccagtacttttttcatgctagatgatttttttttggtatttagcataatgtatgcttacagcggagccaccattttttcctcggtttcatcttttcatggaattagtctagactttgattccacagatttgtgtaacccatttgcataactagttcaaacaagaacttctgtttgcattcagtgtatagcgcaatacgatggtagccctagtaagcaaataatcttcttatggacatcatggccattaactgttgctaatttgtggggtcacagatccatcattttcacaa

SEQ ID NO: 14729 - DNA, 743 bp, Brachypodium distachyon
  Intron number 1 from transcript Bradi1g59100.1 (locus Brad i1g59100) derived from phytozome v7.0 (chr-ID Bd1; pos 582 19723 to 58220465 reverse strand)
ggtggtgagtggattctcctcatcttctatgtcgccatttgttagaattctaaaaaccccgcattcaattctgctgctgcatttagtttcacagcattctgacttgacgcatcttatagtgcaagtaattgctccctccgttttttttaatgtaaggcgtataaaatttccttcgtatttctgaatttaaggcgcacaaagtctgaaccagtccacgcgagcccaccttcgcatgccaacagaaaaatcggcaaccggccattgcatgagtagagaagaaattccttttgtgcatatattcatgcacggaacaggcagttgctctctagtggataagcattgagtcaaatgatcgttagctgcgttttttttggtgccagaaactataggccgtacatacaaaagcggagggagtaattacgttgtgagttatctgtgctgccacattttgtatcgcagcactgagacttggtgcatcttgtgtcatgagttcttaattatttgtgggtttatttgatatcctgtcaattttacttaattgtggtgcagtaaggtactaagtaaggtcttctttttgtgccataatcctatgatcgtatctttatgatgagagactatcaatatgttttcctttgtagccaatgtaccgctagtcagacctctcaattgtgatacctgcattcagctttgttctagaactagtccattctgtacatttactttgtgaagttaactttcaggag

SEQ ID NO: 14730 - DNA, 798 bp, Brachypodium distachyon
  Intron number 2 from transcript Bradi1g77430.1 (locus Brad i1g77430) derived from phytozome v7.0 (chr-ID Bd1; pos 737 62794 to 73763591 reverse strand)
ccaactacagaatctaggtaactttgagctcaaaatcttgcatcccaagttcttatacatactcatgttggcagtactgtttttcattttctgtcttgggactcttggatgcacccttcaggtgtttgagtgttgacacatccaacgttgtcctggaatagagtgctacccaaaaaaagaaatagaatgaaagcttcaccccctacttttgacaaacttatattgataaaaaatttatgtcttgattgctagtagctttgctgtatctgtgaggtaagcatggacgctagcaaaaattgacaggagaacaattgactgccaacaggtgttgcgtggagctgaaattttcaattatttgtgacaactttacatccttgccttttgaagaagtcttgttcaatctcgaaaaaaaagtcttgttatttagccagatacgttacacaaagagatttgcccagacgtatgtggaactgtctgtgctgctgctgcatgccagacatggtgattcatcgcctattccttctagtcaatggaacattttagtctttcagataccagtgtaatccaagaagttaaagaacaatatctatctgtcgtagctgacgcctaaccaaacaacaaacaacaaatgcaacggctcttgccttgcattaaacaatctcccgtgcatttttcagacttgaagaacaaaaatgacactgttttcgcatacaattaattatgtaatctgaacctctaatgaatctctgcttgtttcctgcaggttccgctcggtggcatacctgcagcagatctggt

SEQ ID NO: 14731 - DNA, 552 bp, Brachypodium distachyon
  Intron number 1 from transcript Bradi2g32890.1 (locus Brad i2g32890) derived from phytozome v7.0 (chr-ID Bd2; pos 328 15505 to 32816056)
ctctctgtccagttcgtccagaaggtatgtgtttgtatatgcatatgattttcttcgaccaattcttccccttctttccctttgtgcatatcttgacatgattcttggatttttatccagaagatcgtagttgatcgcccttacacaagcactccgtagttcaggtaggagaaacaaaacacagtagtgtccaaagtcgaaacactagaagagtcaaaggaatggacaaagctgagaaactctcgcgtggtttgatccgctaagagcgtgtcagcatgtgaatgaatacacaacaatccaaaatcagcgacaatagtataacattgcggctaagggaaaattccaaaagaattattcgttcgtgtttgcaaattgtcatcgttctgctgctacagccagtcttcatttggtcatacttgcaatcaatcaatcagtatctatccatccattaaattaaatttatcaacaacatgtggccaactcggacaagcaattgacctgaacttgtttgttgaagatcctggcggagatcttcgggacatacttcctgat

SEQ ID NO: 14732 - DNA, 818 bp, Brachypodium distachyon
  Intron number 1 from transcript Bradi2g07290.1 (locus Brad i2g07290) derived from phytozome v7.0 (chr-ID Bd2; pos 561 8434 to 5619251 reverse strand)
agaaggcctccgagatcgaggtcgcctccgccgaggtaacactgggttccgcttccgctgtgcgttccacttctaggggacttgtcagctttggatcccggctgcgatcggcgagatcggggtcgcggagggtcggatctgttgcgttaaggctccagggtagcgtatggtgctagcgaactgggggcatggatcggacaacgacgtcgccctgagaggtcttctttggggcctgggttaatggggggctgccttttggattagccttgtcttgagattcctacatcgcgtgctgctggaatgttcgaattttatgctagcaatgtttgtgatctgttttttttttatggaacctcgtcaaatgtttgtgatctgtggcatatattgcaatttttgcagattctctagcatgactagagtatctctgtacgagtgctgctactaattaggacatccatttgtccttccttcaatagcacagtaacaaattatgtgctacaatgtaatgcaactctagaaaagttatatacttaactgggtaactactcttctacggtgaattgcaggaactccctacccctttgaggtttgtcggaaaaaaaaactttataatgttcccctgaagtactctgttagtctattatttccattgttttttttgtgtgcattggattgttgggatatttgataatgggtgagcatggcttgagtaaatcctaataatttgggtgatgccttcttcaaattttatatactaattttctgatgagaatgataactcaggaatttgaaattgagaaattgcaactggtggaagc

SEQ ID NO: 14733 - DNA, 998 bp, Brachypodium distachyon
  Intron number 1 from transcript Bradi1g54980.1 (locus Brad i1g54980) derived from phytozome v7.0 (chr-ID Bd1; pos 533 45280 to 53346277)
tccgcgtggccgacaaggacgtttgccactacgatgtaagccttcctctgcgatctcttcctgctcgagtctaaatctctactaatcttgtacctgcttaattatctgcttaaatctcgcgtggtttcggttaagtaaaactaaatctctgcggtgccgttctatgctgcttcgatagatcgatcccctctctgctagagataggatcaaatgtaggagttcgaacaagggacgatggtagggcagtaggcgcgcgtagttacgttgttgatgttcggtagggcccagatctcttgctcgtagtccatgttcgagggccatgtttcactttgataaaaaaaaacgcgcagatcttgtgacggttctctgttcttttatacgtgtcgattgtgtgtgtaacattttttccagtctatatattcgatcaagctatgcaatgtgtactagctactaggcgtacctttcaatgtgagatgtacacacatttcctcgaagtttctgagctccgcaaatgtggcttatgtttcttttcttttgtgtatttactacttttttcacgcggtagctagaggggtttctatttcgagcaaaagtcttgcagcgcgcatgtggcgtgctggctccgttctggacggcgctgcattgctctgtgctcgcagcacagctggtttctttcaatgatgaataacggaggcaaagactggtacacgggataatgtgctttgtccaacctttgctgatttaggcaagacctcggctctgtgtggttgcgccgttgataggcatactagctgcagagtttgccttgttctgtgtgtggcgttctggtcttttttaccacgctcgttttgactatgataaaccaacgctgtgcttgtttaagattgttgattatttcgtgctgctctttaacccaatgctaattagtggacttactttacttttatcggatccccctttcaggtcgccatcaatcccgagccgaaggcgagacggat

SEQ ID NO: 14734 - DNA, 968 bp, Brachypodium distachyon
  Intron number 1 from transcript Bradi2g26260.1 (locus Brad i2g26260) derived from phytozome v7.0 (chr-ID Bd2; pos 246 39692 to 24640659 reverse strand)
gcgcagcggcaccgactcggagaaggctcaggctggtccgatccgaaaccctaaccttttctatccttcctctcggtgtgctcgatctggttccagtcttagaagtgatgtttatgaggtagtattgtgctatgttacaatggggattgagagtatcattattaaatcgtttattatttttctgctgttttaagaatcggacttactgcttctgttttgttacgaatccgaaggattttgtggttctgaccgtagcttttcatgtgctaagtcatctaaattttttcgttcatgataataaaaaaactttccgtcgtcatgttgctagaaatgttgtggagtggaagcagatcaaacaaaaaggtattcctagtaaggaagtgagaaaaaggcgtgtaggtgggatttgacttctatctgagaaggtatggaatgatcaatgatacgtcagtggagggtgaattagaagtattatgcaacgaaaatgtctgctggaggttcctgcatccgccatgtttgtttctgggggtgtcacccaactgtggttttcgtcacgtaaaatgtactccctctgtcccatattaagtgactcaaatttgtctaaaaatggacgtatctatatactaaaataggtctagatacatcatacatgtaatatttcagcactcaatatgggacggagggagtattctctaacttttggtgtttttgtttatccttctgagatgctgtgtcataatcggaaatgagagactgagaaattcagatcttcatgtgttaggcttaagtgcttatcaagtcataccgattcagtgtcacctctttcagcatgtcaattttaaatgtttaataatcataagctgatgctactattcgattgaaggttttgttgtagctcgtgtttcggttgcttatgtgttttgcttcctgcagctactatccttccagttgttcaaaagcagcaccag

SEQ ID NO: 14735 - DNA, 660 bp, Brachypodium distachyon
  Intron number 2 from transcript Bradi1g78220.1 (locus Brad i1g78220) derived from phytozome v7.0 (chr-ID Bd1; pos 742 80591 to 74281250)
tttaagaggtaaaacacgtgttctgcatttgttggtgacattagcctaataaactcgcttaaccattcgctattgtcaaccttatctgctgtacagttatgatttgagcttgagcctactgtttccataatcatctattcatcttatggttcaagctgcagaatcaaataagatagtccctccgtcccataattcttgtctcaaatttgcccaaaaatggatgtatctattcctaaaaagcgatttcgacaagaattatggaacggagggaatagtatatttgtcttcagggcgctatgattttgatgtcttttctttggtcatgacctcaaaattatgttctgtttcatcatcagaaaaagacatagtaactgttttcattgatgtaagagatgcacttgtgtgaaacaaaatctatttacccaaatgcactaattgcaccccatgctaactacattgacaaccatgttataattgtcgtactccaaataaaacatagaaacaaatgcgatgcagaatgataattgagtttaattatgaacatgttaaccatgatacaggatgctgccttagcttcctattttataattttacaatcatgaacacctcacttaaccgcagtattttgtgttttccccatgctcagcatttcaggcaaca

SEQ ID NO: 14736 - DNA, 882 bp, Brachypodium distachyon
  Intron number 1 from transcript Bradi2g08330.1 (locus Brad i2g08330) derived from phytozome v7.0 (chr-ID Bd2; pos 671 6711 to 6717592)
aggccaagttcaagcagatctccgaggcgtacgaggttgccattctttcttgatctcctctcgcaaagattaggtttttctttcattctccgtgttgcgcttgtcgatgcccctgcggattctgctgtggagcgaaatcacgaaaaatatggctgttctataggcacataaaacgtaatacgacattgccatttaggcctgcatcaccagtcatgaaaatatcacgttttgatacttgtgtatgtgtgtatgcgatcgattcagattgatttatcgtcattgctatgcttgtgggaatagatttcgtttaaggaccagcttgacatgatatttgtatgttctttgttggtactgctgtatccaggcacatcatttggcatattatataaaaaaaaatgtttaaactggcagaactgcatggcaaatcctttggaagtttcatctacatccattttgcagccctttgatgatgtcatatggggtgttactgcggccattcgttgcataactagtgttgtagttacattatttatcagtgtttagaggtggtgttataaaaagtaatgggaggttggaaccccaggaacaagttcaacttcagaagatacttctttgttgatgcaatctttaatccacccctttggcatcctttagtcggaagaatccacagaagctaaattgtactaagttttaatctatggttggtattttctggtagtacaatttagaatgttatttcttatccagatcttgcaatttgttggtaagttcaactaatttgtttagtctctacttccaggcatttattatgaatgtgcattcatgatatgcgtttcctcattatctttcaggtccttagtgattcccagaaacgctcaatct

SEQ ID NO: 14737 - DNA, 1045 bp, Brachypodium distachyon
  Intron number 1 from transcript Bradi1g65200.1 (locus Brad i1g65200) derived from phytozome v7.0 (chr-ID Bd1; pos 642 52804 to 64253848 reverse strand)
aacgtcacccgctacgcgtccgccgtactgttcgagtaagagccgcatcccctcctcccgttccaatgcgcggttactatgcgccggcgcatttgcggccttgccggctactggtcttacactagggtagtcttccactggtcattttcctttcttttcgagatatggtattttactgatgttatatcatgggatgggaagggaccaacacgcagtccttagttagatcaattctaaattatgtttcagttgaccaaattcttggagtgcaccagatgaattggttactcgatttgcatccacaggagtggccagtctgctgacatctcacaacctatctccttaataatgctgacggttgaccaatctgaactgaagatggaagatatactgctttagcctttagtccagtgccattggttgacttcaataggttatgtgtctgaatcgaagtagatgcacctgaattttcttattactaggtacatcaaggtcttttttcgtgaaacatagctagatttataaaacaggccgcaaatgtcagtaccgacgcgccagcaggtcactgtattccagagttccaaatcctttgagttttgatggatttggtgacccagaggtgataagaaaaggctgggggcacgacctcctttcgaaaaaagaggtgataagaaagacttgtcttgactcccgctacaagacttagactgtcagaggatgtttcgttctggctaagcattccttattgttgtttctaggttgatcggtagcagacaaaccagatagagactacaatgtcaccaatgttttctttcacattaattaagtatgtttgtattattggtattaaatttgaattaatagtagtcaagtgtaggatgaatcctggattggaggcacatgatctgttttgtaacaatgcttaatttgttttttttttttggtatttgcatccatgctacatttacaggtattatctgggtttgtttgatattatctgttttactgacgagcgaattaatttacaggtatattgctgttggag

SEQ ID NO: 14738 - DNA, 566 bp, Brachypodium distachyon
  Intron number 1 from transcript Bradi2g23020.1 (locus Brad i2g23020) derived from phytozome v7.0 (chr-ID Bd2; pos 205 76999 to 20577564)
cggcggccgctggatccgacgccacgagcgtcgaggtatgtgacctgtttattatttcttcgagaaaatattggcgctagtttgattccaatctccgttgattggcttgttttgtttctttgttctatgttcgttgtaattaggacgcaacgtgttttggtcctgctaatcaccgcagttgtaggaaattctagcttttttagcataggctatgccattaattttaattggcaggccagctgtgctgtgtcgtacatgtactgaagctaaagatgattttttttttaatttagctgtcataaggtggctgtgtttgcttttgtgctaaaatttctctatctgagattgaaggccttgctgtagtatgatgtttaaagtacgtggtaggttggttttactgaatctgtggaagcctggtagcagaaaatcacactagttttgacaaatttcaccaatgctggaatgcagacctaaaacttgttctatcccccacaatactgagcttgtcatttagattaaagctgtaatcaggttgtcccttctgttcgtggttgcgtccgtgataa

SEQ ID NO: 14739 - DNA, 610 bp, Brachypodium distachyon
  Intron number 3 from transcript Bradi2g04650.1 (locus Brad i2g04650) derived from phytozome v7.0 (chr-ID Bd2; pos 326 1424 to 3262033 reverse strand)
gagccaggtacgtaagcaaccaggcaatccttcccttccccgtctcagttccactcgattggattgatatgtttaccggatgcctagatgatgggcgagggcgaactgtctgttcgtcttgaattctggacgagcttaaccacctggactatgggctgtggtgcaggagacatatcgctgtcctgcaatttatgatgagcataatcattttcctgccttagaaccatgtgttttgatgttgaaatcccaaatcatccgatttgcaaatagatatttcttgtgacatttttgatgatcaacggagtaaaatcagctataccttttgtgtattgtttcacaagaagcacagctgatattgttaattgttgatagacatgtcttcacatatgctgagctgcgcataaaatgctggattattattggcaagaaagatggcttctgtgctatcatgattttaaacaaaccatgcactgttctctcaaaaaaaaacttcaaagtgtgtactgcaatattataagttacttttctgagagatacagcagaaataatgaattttccatgttatatattgacagctggtctcaactgttggaaactcttccccttccca

SEQ ID NO: 14740 - DNA, 947 bp, Brachypodium distachyon
  Intron number 2 from transcript Bradi1g64000.1 (locus Brad i1g64000) derived from phytozome v7.0 (chr-ID Bd1; pos 632 00665 to 63201611)
aaccccgcatctgtaagtgctttctacacttaagggcatggatgatctagaaatgaacctctaggatttgaacaaaattacacgtgtgctcaacttccatatgaatcaagttgaatgtatgaaagtaccatgcaaacacatgtatgatggcaccaatttgtggcgccagtacattctgctaggcacatttgattgcacttgtgttttgttgcattatgttatgattgattgagatgtatattgctcatctcggccacttatcaacttgctatgctgcctcttatactttccaagtgaaatatggtgataacttagcccgtgaaatcaagcactttgtaagatttcctgcacatgcagagttgcagaatgcagactttcctgtagtaccaaaagtgtgtcctgtgaaaaccacctttactgtgaaaactccatgaaaaacattgtaaagagttcgaaaggttctaaaaaatcgcatatgttagagaaatgatgttttatagatttgtaaatttcaagtccggacttaagtgtgtcaagcagcatggaaaaacaaattcagcatgtatatagtggttcttcgttgtttgacacttttctctttttcattccttccaaatacaattgagtttctacttgaaattctgcacgtttgtagaaaatcacactccaacatatggtatttttgtagattgttttggaacttctaaacatggttcctatggagtttgcactgcaagggtggttttcatctgatattttgtagatgttcattcctaaatcctaacaattaggtattaagcttggtgttataccttaaatacattttcatcccggaaagacttatatcggacatgcatttttaacttgctagttgtaattgttgaatctaacttcagttatgtaataatatccctgctgttatattctataggcttttgcttgggctt

SEQ ID NO: 14741 - DNA, 599 bp, Brachypodium distachyon
  Intron number 3 from transcript Bradi1g52250.1 (locus Brad i1g52250) derived from phytozome v7.0 (chr-ID Bd1; pos 506 18070 to 50618668 reverse strand)
ctcgggtatgttgtgcataactagttcttcttttctcatgagctgcagtgtagaagagaggtctcagtacacaacttactgaccttgcctattcattttctgaaagcctgtttgctacttaacacaaatctagtccagagcttccttgtggatttgtggttaacaaacttaagcacatctgaaacatctaatattgaaaatactgaacatgttttcttggaaattttcttttacctctcacattctagccagtatagttagatggtgcctcttaagtttatttgttaactgaagaagtttcttttacctctcgccttctagccagtatagtcagcactattctgatactcttcagttattgcatatgggtactgtagctttcttctcaatccctagtgtccagctcttactgtaccctgtacatagaaagacccttaaaagcacatttttgtaattgaatcttgagatcaaatttgttgttgaagttagctacttagctcctcaaattcccagttaggttaaaaattattactcattttgttctcaatcctatcattcgaacagcaacaggaagagcaactgaaggagtatcaggcagc

SEQ ID NO: 14742 - DNA, 774 bp, Brachypodium distachyon
  Intron number 3 from transcript Bradi2g22190.1 (locus Brad i2g22190) derived from phytozome v7.0 (chr-ID Bd2; pos 196 79196 to 19679969)
atttcccccctgattatccattcaaacccccgaaggtataggaatatgtgtgctctgcctacattcatatacttcagtttttttaatctggctaagttatctgttcttttgatcttgcttggaggggagcggtgggtcgggtatagatagcagaactctttcttctgtttgcttacttaatcaatctcaatggttcacctctattcttatagaggaaggccctagcaaaagataactaatcgcaatacctaacggatatatcaatctcaatacctgaactctaggatatcttgctaacaaatcaatgaactaattaaccactatcatctgccacccttactttctatgtggctactattggcctagttcacgcccatagtacaggtcattgaacattgcctctcctgttaggtgtcacatgtgcacattccctgctgatgcttttcttcatgttgtactcatggtatcacactattttcgtggtctttttttttgttacttccatagaagcatcttttggctatatggttaaccatgtgtgcaatttggtccccactatttttttttgtaattgtgttattgctttgcgcccccaaggaatttttgcgcaccccagagcatgcttagaacctcgcgtgaaccagttataataaaaacaggacttaagtgttcagtttcatagttttaggaccaaagtgacaccgcgacaataaaagtaggaccgcgggtgtattcaccactaacctaactgacttgtagagctccaaaatagaa

SEQ ID NO: 14743 - DNA, 957 bp, Brachypodium distachyon
  Intron number 2 from transcript Bradi1g56890.1 (locus Brad i1g56890) derived from phytozome v7.0 (chr-ID Bd1; pos 555 27517 to 55528473)
ttcgacttcaccagcgaggagcggatatataagtggtaatatagtgtctctgctatgacttatctctgctcacttgcttggtaatccattaacgtggtcatgatcggcatgattagggtttgacctgtagttcggcaagtttatacaagtttttgatgtatggtctattacactggagagattgacatgattgtatttccgttaacacccttccatgaggagtaagttgaggggctgcattttagttgtcaatgtgggaatgtatgaagaggcgtcaccgggaaaggtagagttactgagccgactactggttcttacaaattgtttgcctcccaatccactgataatattggctagcaaatcattggactagatatctaaatagtttcgtcgccaaggaggaactaaaactaagcactgataatgttaccgtgcattgcttgcttactaacctatgaataaacatagttagcaagttcaaagatatgggaagttagtctgtttgtgttactgatatggttatcccagagtgtgatatttagggtacaataaggagtcaagtttagtcacttttgttggaacagtatttagtgccattattcttatgtttcatatatttattgtctgtttcgttttttatccagtaatatattgctatgtgcatgaatcaaatttgacttagttactatataggatttgcactcaattcccatttggattagcattgcaacctaggatgaagactgctagatatatagtcttattatttggttcaactattgtacctctgaacatattgaattgaatatatctaatttcattttgcacttgcttgtccctgtttccctaaaagttcatgatggattgtgctatgattacttctggcacaaatttttccttatacgaatggggtgctttataggtgggagtctcaaggattctttaagcctaacgttg

SEQ ID NO: 14744 - DNA, 983 bp, Brachypodium distachyon
  Intron number 1 from transcript Bradi2g33500.1 (locus Brad i2g33500) derived from phytozome v7.0 (chr-ID Bd2; pos 336 39248 to 33640230)
cgagcaggccctgacggcccaggagcagtcccagggtgagtctttcgtttccctggtggtagctcatctgtgtagaaggggtgtactttttacctgtatgagttctagttaggtggttgatggaacgaatgtttctgcgacggttagtgccttagtggcttggtttggggagtgagaagacgtggtttggcaggtttgcaaattttgtgagtttcgtggaggaagatgccgtgcaccgtgctacctcaatttgggcctggactgtccaaatttttttttcagtatgcagttagagcaatactaatagtactactagtagtagtaccaagtcctaagttgcagaccaagttccagaggctatctgtgttgtgtttgcctattgagtggcacatcaattccatgtcaatgttttctcatgttttaggtattaaaacctcaatccacgacatgttttttttagaatcatagccacgacatgtgtttagtagtttctatggaagtagcaatattgtaggagtatatctgtttcgatcatattctggcgtaccagaccaaactagccagggttgctgactagtgatgcaagcgggtcctgtttatcccgcttaattgacttgctagttcaaaatatttactcaaaatatgacctgaagatttggaggttggcctgcaagcggaaacatgcggtaccccgcttgcatcctactgctgaccaacccaacctcagtcattattcacatctgcagcatttttctcagaaattagtgttcactagatttttcttgcttatgttatcacatagtatgtcagtatccgcagaatcaaaatataagtgttaggtaggtattgacctctctgtagcttaatttgcagaatgtcgtagagtattctgcattcctatcggccaaaacagttttttgttcaaggttccgagattatcttcagttaaaattgtgatctgattttcgatgcagaacctgagt

SEQ ID NO: 14745 - DNA, 607 bp, Brachypodium distachyon
  Intron number 3 from transcript Bradi2g23820.1 (locus Brad i2g23820) derived from phytozome v7.0 (chr-ID Bd2; pos 215 78369 to 21578975 reverse strand)
gaaaaaggttggtaggcttgatcatttctaggcatgctttactttgatgttttgatgagtatcacgtgccaactatggtggatgctttctccactttattttctcttgggcaattattttccagttttcgttgattattttccagcatctgaactgtagtgatcctcatcaccaggaaacatagcgagtaattctttccagatgcactttttctacacactgaccatatcgacttgcacccattttacagttcacacactggccttatcaaatcaatgttggtagaaaggttatagaaataatgtgtgcattagttgttaacttataaatgcactcaaaacttaagtggagaaatgcatctgctcctaacgtgtgcaattgtaaattgcttgaatattagtatttcatgatgaatattgtttgctaattctagttttgttaagttctctctagcttttaagcacaagaaatttaccaagttgagaagccaggattaccttgttaatgggtcttcaattgtattagttcaacattccgtttgctcactgctaaccatctttttcttgagtctcttgcagccaggttacgagcgtctttgctgcctccg

SEQ ID NO: 14746 - DNA, 930 bp, Brachypodium distachyon
  Intron number 1 from transcript Bradi1g75700.1 (locus Brad i1g75700) derived from phytozome v7.0 (chr-ID Bd1; pos 725 34843 to 72535772)
gcggcggcctcggaggtttgtttcttgcctcgccaactaccttcaatcttacaaatttgtgtccgcactttcaattgcaattgatacctacactactgattcgaattacttgctgatcggaagtgatccgatctggtagcgggtagatttactagaaatttgggcaaatgtggcattgtgttagtgtgactgggttgatactggcttgtttgtgcactcttgtcggtggatttgtcggtacgtgcgttggtgagatcttgatacgattctttgtttagctttccttgagaattgattgatagggattgagggctcctccttgtggttgtttcttttgtgaatttggtggttttggtcaaatttgagtacattacttccatctcatgtgctcattgtctctagattacatggtccagcattaggtaggttaggtttatgagcgtatctttcccatgtcgaagtggaactatgatagagacagtgggatgatattgttcctttcttggttggtcagcttaagaattgagggacagggattatgtttctttctgatgtgaggatctctcactttcttttgtcaattacacttgttctgtgtactgtcagttcagtttaggggatgctgcacattactgataagtgataatcctattatatagtccatgctttgtttttctgaactatatggcagcagattaggtgcatcttctgttctgcacatttgtttatgcatctgtctattcagtcttcgagaaaagttgttttccactagtaccttttaactttctttctggattttctggagatatatgcatctattattattgttcccatgattagacgtggtatccctagtttgatctgtcgatttggctcttctcattgtgcatctcagggcagcagacagcgaagactgtagccatcgtgctg

SEQ ID NO: 14747 - DNA, 715 bp, Brachypodium distachyon
  Intron number 1 from transcript Bradi2g14290.1 (locus Brad i2g14290) derived from phytozome v7.0 (chr-ID Bd2; pos 128 79112 to 12879826 reverse strand)
ccagctccgctctctcctccgcttcccccggacaggttccattctttctttctttctgtgcctctaacctccctctatctatattatctcttggaatttattactcctagctagctggattgcaatttcacatgcccatccgtatgctagtggattactaggtgtatctattagtattatttttgttattatgcgctgagtgctacatttattgtgggtgaagcaaatcctgctgtttgtttgattccgagtgccgccagatgcttacctagtgttggccctcgaccgaaagaaatgctccttatgttcggtagatactttatctttacgtactaaaattcaaagctaattggaccagtaactaggaattaataatttagctatgtctctgtttatctaaagtcctcacttgaaagattatatctttcttccccgcaaaaagaagaagaagaaagattataacttctatgtacacacggacacggcaaagataatgaggtggaggtagcagaggattccccttggctacatattacagttcaacaaacccttccattttttttgggccgaaagaaatgttcatggcggaggagtttttagttggatatggcttggcaaagtttttgtttataatattctgttgcatctttcaaaatattaacttgcaccttttcttgtagattggtgggagcgacagacctctctttccatcatt

SEQ ID NO: 14748 - DNA, 844 bp, Brachypodium distachyon
  Intron number 2 from transcript Bradi1g60890.1 (locus Brad i1g60890) derived from phytozome v7.0 (chr-ID Bd1; pos 602 58945 to 60259788 reverse strand)
gcgagttctcaagctaaaggaagaggtatgtgttaattttgctgcacttatccatttgctcgccagatgattagtctacagtgcgcatcaattttagtaaaactgagcctctgtaggctggagcagcataattatcgataaggtgaaatttagttttgtttcttcatagatctacttccatttagttttttggtgaaacattgtcaatgagttacgagatgctgccagtagtcaccagccagaatagttcatcagatactggtctacacaagtttatcagatcacatgtggctagatttggttaggaggagctcgatggccgctagcaaccattagagttggtcagaggctcagagcaacatgtttctcaggccagctacaggaattatgtttgagtttatgagatgctgtcagtagtcaccagccagaatagttttcttggtgttctcgagattataagatatgctgggaaaacattggaagtttggtaggtgggaatggtgttgttgagcgaagaagattctcaagttgtcttgggagcaccgttaagaggtcgtgtggtctgaagttctttctttgatgctcatgcgatgattgtttctacggagttgatggaaaccatgaaataatttgttcaggtcattgtgttttgtttatttcttttcacttatttgagatttttgtgagacaaacaagttcggttgttatctgaatcttctgtgttaattcaattggtatcttcgtctttggatgttttccttgaaaaaacactaaatagatagcttctcaattttttctgaatctgtctcatccttatgttgccttgcaggataggcccgttagt

SEQ ID NO: 14749 - DNA, 818 bp, Brachypodium distachyon
  Intron number 2 from transcript Bradi2g46860.2 (locus Brad i2g46860) derived from phytozome v7.0 (chr-ID Bd2; pos 472 84395 to 47285212)
tactgaatattgctagctgctgtggtcaattgaaggtaacattgctgaaaactttcccatttgttttctgttgtcttgctgtatgcgatgcagtgttacttatgtgtagaattctatcttgcgagtagatacttgatttttatgacgactttaatttctcatagtattgcgtttagaagtctgtcttacaaatacgaaaattgcattgtagcttcagcatgtcagaattagagttcgtttcatatataactgaataaaacaaaagaagaaagatgatatattgagagaacatattttgggctagcatatctcagtttgcacaggggaccaagatatttagggtgctttactgacgatgagcccaggcatattcttaggaagtagtatttgctcaaagaaatgtatgatggttctgaagttaaatgctacgataggctgcatttaattaagtgaaagtttgattttttgtgttttgggattattccatgtttctgtgtgtaaagtgttatataataatcattgaaatatatgcacgagtagtggagaattcgttttcaaacatgtattgcataatgttcaaaacttcaaaatcttcaaactttacaattccacagtttgtacatccaaacatgacttagaattgggtgctaccctttgattccaactagcaattacatacacatccaaacagcagaattggcattgcaggtcaaatccaattcttccagctgaatatgtgcatcccaacagagccttatgattttacttgtttcttccaccacaaatcctcacagcaaattctcagtccaaaaggaact

SEQ ID NO: 14750 - DNA, 731 bp, Brachypodium distachyon
  Intron number 5 from transcript Bradi2g46860.2 (locus Brad i2g46860) derived from phytozome v7.0 (chr-ID Bd2; pos 472 85783 to 47286513)
tttacctcaaaggtttcttgatatcccaccatgtaagtctggaaatcttgctgccaaactaccagctttgacttatttttcgtactgttcaatcgatgtgctgcatgatgaactagaattatcttatgtttaaacagaaaaactaggcaactaggaatccagcattactgactgtcgactgtttacttcttacaatgcaacacaatgggaatgagctattattcttgtataatgcttgaagtatgtacttgtagtttattgactgtcgactgtttacttcttacaatgaaacaccgtcttcttgtctgcacaaagaaatcctgaaatttctgatatatttgaatacaacatttgtttttggtgtcatgggacagagaagtgctcattgttgcacaaaacgttgtagttacacatatcccggaatcgattacaagcattggtttaaaaaaattgtgctgtgaaaaatatttttttgctgatgcaacaaagaacatgtgggtgtattttcgtacttctgtgtggtccaacatagtcaatcaagcagccttgaccagacgttaacagtgtggaatcagtaaatatgaaaggaaattaacacaataatgatttgtatgtctcttttttgagtgagatttgttatgtctcgttgtatgaggtatggtgaatagtgatttttcatgtctccttgtatatcaggtacggtgaatatacacccaagtttgttacctcta

SEQ ID NO: 14751 - DNA, 719 bp, Brachypodium distachyon
  Intron number 2 from transcript Bradi2g46460.1 (locus Brad i2g46460) derived from phytozome v7.0 (chr-ID Bd2; pos 468 94237 to 46894955)
tttcgtcgccgttcccggtccatccgaattttggggtacggtgtgacatcttatctcctgtgtacaaactggtagcagtcgtttcagcctttcgggaacagatcagctgatctatgaaaacttaatatagaaagttagaaaagtatgacatgattcagtggtcgttcatgtatatatactcgattgctagttaggtgtgaaatgcataggagcagttactacggactaatgcttttatctgctcgctaaacaagagaggaaatttaagtttttacttgtaaatgaacattggaaattttctttctcaaataagcaacccaattggtgtcattttgtgcgagaggagtgatcagggagtagtaatttgctgtctttcatttgttcaaaacaaaatgaatagacattgtaaaattcattaatttgagctttgttcatatgtttctagtaagttgctagctctctaaattaatgttctcttcgtactttttctctcttcgatcatcgcttgttctgtttatctagaaattttctgacatctatggatcccccctactgtttttataatacgaaaaatctacatgatcaaactttctctgacacgtatttacatgttcttcgtgctcgccgtagtacagtatcttgtttattcttccatgcacgtgagctatcagagatcaatctcttacagtatctccgacattatcatgtataggtcgcat

SEQ ID NO: 14752 - DNA, 517 bp, Brachypodium distachyon
  Intron number 1 from transcript Bradi3g39340.1 (locus Brad i3g39340) derived from phytozome v7.0 (chr-ID Bd3; pos 416 62886 to 41663402)
tgtcgatccggtctccggtcgtgattccaccgggcgtgagtccaagggaacttctcgagtcgccagtttttcttcccaacgccattgtatgttagtactatcctgtctcagttagtaacatttgctatgtaatactctatcatctgtggagagcatttttgttggtgcatgccaaattaatcaaatgatatgtaaattgcatcgtttttgaaatgttttctgactagggtagctgcattttgatttctactgtgcaatttacccttccttactatcataggggatgcaattttcgattattagtactccctccgtccaacaaaagatgtttcaagtttgtcaaaatttggatgtatctagacattacttagtgtatagatgcattcaaatttaatcaaagttgagacatcctttgttggacgtagggaatatatattgtgtttatggtgtgaaacttctttaagtgtttatgatctatgcaggcgcaaccttctcctaccactggcaaattgccatt

SEQ ID NO: 14753 - DNA, 830 bp, Brachypodium distachyon
  Intron number 1 from transcript Bradi3g04440.1 (locus Brad i3g04440) derived from phytozome v7.0 (chr-ID Bd3; pos 304 7028 to 3047857)
ccgccggcaagatcggcaagaccctcatcttcaaggtataccttccttcctaaacaagctaacccttagcattgcaaacggtatcgaattgatcggtaaattctcaaaataagaaatgcgctgccgctttatgggaaacgtgaacatcagatctcagatcgtactgtaactatattttgctttatccaatatccattgtgtgtcagactgtcagtagtcttctttctgtaatttccttggtgaaatgttgtgcacatgatgcaaaacatgctcgttatgatttggcaatttttgtcactatccaaccaacattttgtttccatttgcggttatttgtcactgtctatttcatgagacgttgtggaattacaacgattgggtctgttgttgataggtcgttttcgccctgtgttcatccgacaattaagatactctctacatttctgtgtaataacagaatcttgctaaatagatgaatttatgttttaactcaacattttctttaataatatggttacacaatgtaaagcaagcatacatcatttactctgactggttgaatggtgtcatatgaagttatcaacaattaaacatacttagctgatacatcttcatgtgaaagttgaaaaaacaaaatagtgcctcgttaagctcagcaaaacagagtaacttgtgtgttcacctttctggcttacagcctgtgaaacactgcatttgcatttgtaatcatgagaagttatgctatccttattgtcaaaacagttgcttcttgtcttgtgcctttggatttctttagttaatagttttcaaaactaccctgcaggttaagg

SEQ ID NO: 14754 - DNA, 1005 bp, Brachypodium distachyon
  Intron number 1 from transcript Bradi3g39940.1 (locus Brad i3g39940) derived from phytozome v7.0 (chr-ID Bd3; pos 421 79600 to 42180604 reverse strand)
gagcatgtgtgtgtggaatatagtttgtttggtgctatatttaccttatctgtccgactgtccccagtgctaaaagtttcacatttctgcatctgtctgtcgtgatggtaggtagtagctgcaggatttgcttgttcttattgtgaggctgttcttgtgtaggttggtaggccaccaatgttagctcatacttgacaagcgcgttttgaaatttagctctttttttgttgatgcaccttgatggaaatggaagcaaaaacagtgtgcttaaacttggttcgttgattggattttgctaagggcaagctctggcttagttggcatggtgaatgacaggttttactgtctgtgggttttcggttaccggggccaggttggaaacaacctagaaaaatatgaagattatttccttctacgcatacaaactgcaagggtcctttttagagtgcctagactgttttccctctgatttagagcagcctatttgtgccaattggttaatgaactaacttcccggcagtgtaatacatgtactaaaatcattactacagagtaccaaactgttatgttggctgtaaatgatgttccggtacaaatttcaaagtgggaaccatactgaatcatagtgctcccaggttgctaggttggctgtaaatgttgttctggtacacattacaaagtggaaaccatactgaatcatagtaccaggttgttaagttggttgtaaatgttgttcggttacacattacaaagcaggagccactagtacttgaaacagtcattgacaaactagggacctgcaaacttatgcagagttgattaacttgattttagcatgtctttaataaaatgttacactcttactcgaactgtgttgtatcttgttggtacatcatcttttcatgaatgacattcattttgctttgtcaatcgtcttctaacattcaaacttgctgcttgattgatgaattacctcaggcttatagtgaagagcctttgggtgga

SEQ ID NO: 14755 - DNA, 945 bp, Brachypodium distachyon
  Intron number 1 from transcript Bradi3g04160.1 (locus Brad i3g04160) derived from phytozome v7.0 (chr-ID Bd3; pos 283 8564 to 2839508 reverse strand)
atctctgccaaggcttccgtaaggcccggtgtaagacctgtatgcctacttgtttttgtttttgttcagctagatttaatttgtgagagttcccagaaattttgacataaaaaaagaaagcaacccaataggttctcaaacttcaaggcttccagattttagtggaatccacagtattttatttttttcacgtggaatagttcagcagggaaaaatcttgaagcaaaaaatgttaaaaatcaccacgaagttgaaaaatatgtacaatgtatgcatcaaatgtagcaaaaatatatctcatataaaactgtgtagctggaggaatgttcggccatccaaacggaaggggtcagtatatttttgctacttgagtatgtggtccatttccaattctccatccatcacgaatcattcgtgctacttaccttattacagttaagttaatcaactatgggttaaatcctcatgcaccccttcaaagttgaaatcccatgcgtttgtgacatgcggaccacactgtatctccgatacgtgggtctatgggcacatcatttttttgtaagggcatataaggattcacccagaactattcgactcatacgttccagactctggctagacaaaaaagaatgcaaaacgaaaaaaattgaaggacttaatttaattctaaatatcagggttaagcggatctagctgaaattccataggaaaacgaggcttatttatttcagaacaaatatgtttcttgcctatattctaaatgtggaagatgtactgaagttgctgcagtggtctgtaagtctggaatgctgatgttgctccacatcataaattggaacaacaggatatgttagctctgctcgtttgatcaagtggcctgaccagcaaattcgcaagcatctctcacagattgcctctggaacttctttttctgcagaacataac

SEQ ID NO: 14756 - DNA, 532 bp, Brachypodium distachyon
  Intron number 3 from transcript Bradi3g08610.1 (locus Brad i3g08610) derived from phytozome v7.0 (chr-ID Bd3; pos 677 6224 to 6776755)
gccatactcttcttgacgagatcagaattctcgttagtctgtttcactcattgctagcgtcactctttttctattatagtagcgcctctgtacatatccaccatttctgtttatctcctaatgtctaattgcaccctcactgatatacaatcaatgaacaaacggttgtgtacttcttgtccgatttatcatggaccataacattagagatgtcaggtaatggtgttgttgagattataaactatagtttgaacaatcaaagtagcaaataaaatgtgatggaaattggataaatgttgacaagagaccagggaaatagcaaggtaggtttgcatttacgtcatgtatctctgacttagtgctaagtttgattttgaaagttgaaattgcttggctacctctctgtgtaagtgaagcaattactttgatgatacttctggtgtatcttgtgaagaaacttgcatgtaattgttcgatgttggaactgcttgcaacctattatgtgctaaccaacttaatcttgatcaggtgc

SEQ ID NO: 14757 - DNA, 435 bp, Brachypodium distachyon
  Intron number 1 from transcript Bradi3g34880.2 (locus Brad i3g34880) derived from phytozome v7.0 (chr-ID Bd3; pos 372 40884 to 37241318 reverse strand)
ttgctggtttcccatctggaattcggtttctcctggtgagtttttctcgatccttccatttattttgtttttgtggagaaaatcggtgagattttgcttcgggactccgccttgtccgaattagtgtttgggatttcgctccgtatcttagggcactctgctcgaactctggtggtgttttattggatagtttggtcgattttcggtgaatagtgtggagtttaatcttttcccccacgatttttattttattattaagccttgatttcttggttccatccataggccagggaatccttttcactgctcccgttttgattattctttcgcaatttgatactgctttgaattctttggctccctatgtgaatgcttagtagctgttcaaccataatttgacttcaggatttctgtttcttcattaatgcagtgatt

SEQ ID NO: 14758 - DNA, 620 bp, Brachypodium distachyon
  Intron number 3 from transcript Bradi3g30740.2 (locus Brad i3g30740) derived from phytozome v7.0 (chr-ID Bd3; pos 329 32683 to 32933302 reverse strand)
tgttcgaggcggccgacaggctccctctcctgcaggtgcctctgcctgttgtgttgcctccagctttctagttcatcctgagaattccattccaattaccaactgcaaatgccaatatgcaacccttagcaactggcgtatgaattgttatatacttcctctattctaaatatctgtacattcaacacttctcagaccaaataagatagagagacaatgtttggtcttccatgcaattaattttgtcattcattcaatcctctcccagtctattctcatctccaccttgccttacccaataggccaatactaggatgatagcatcaaaattgtttgtctagggaaactaaacatggttaattatacaatgattgattaggctttcggagtctaaatgtatagatattttgaaaaagacttgcctatgcttcatgtacagataaaaagaaacagagtaagtactgtggaaacttctgttaaattctgtcgtgtgcatttaaacattctatagaaagcttgcggttgatgatgagttgatttgtgacacttcagcaaattaatggtgtgtgctgtgatccttttgaatttgagcagattgggcaaatataccagaaattcga

SEQ ID NO: 14759 - DNA, 817 bp, Brachypodium distachyon
  Intron number 1 from transcript Bradi3g13080.1 (locus Brad i3g13080) derived from phytozome v7.0 (chr-ID Bd3; pos 116 86872 to 11687688)
ggtcaagccgaggagcctcgatttgggggcggcgggtaagatgtctactcccccttcatccttcagttcttctttcctagtgtccaggcttccattttgcatctcgattcgatgctcataaatttttgtaggtagagagaaaatggaccatggattcctgagattaccctttcatttcacaacataaagaataacagtttcgctgtagttcatatagatcttgtacttgtgcacaatagtttagggatatgcagatcactgacgagggataaaaaaaaggtcaaactttgtttcagtcaatatttccgtgccctgcctatatgatatcattatattttttaagtgaaatggcgtgttctgttagcctttcaccatcagcgagttcttctttttctgagacttcaccgtcagagagttggctgtttatgttgccatatgtatcgtacattgagtgcgagactagaactggtagcccactgacttcagagttcagactattcttacatcattggaaatttcccggattcattcatagtcgctttctttgattaatgcttagtttaactaacagtcctgtttggtggttgatacttagccttttattctagctgtgacgctggtggttttgtggtcttcattgttgtagatgcttgcattttccccttctcaatgtgcttttgtggttttgttttgtaaatcaaagaaatctgttggagatcagcgttaattttccttttgccggagatcagtatttagtaatgttttatcttgtgcatatgcagtgccggcgagctgatctgaaaggtctttatcacta

SEQ ID NO: 14760 - DNA, 969 bp, Brachypodium distachyon
  Intron number 2 from transcript Bradi3g22020.3 (locus Brad i3g22020) derived from phytozome v7.0 (chr-ID Bd3; pos 211 14305 to 21115273)
agccgttggtgtctctccacagggcgaataaccctgttagttcttgatttctgttctgttaattttttttctttcaatttcgttgattccccgaggaatttatgtgattggctcttcaagtgctcttgtatgggacttttttttttgaggaatttgtacgggaattttgataaatatgtccatggtttgtttacgtggtaaagaccattagggtttatcttttgggcggagaaccatttagtccttgtttggcactagtgtgtatattttactcacaactcacaagtataccccaagtgtattgggtattcgaggggacgtggtgttcacccaataatctcaaaaccattccacgacaaaacactagtataagagtgttttgaatttatacaaaaatgtgttttgtgggggaatccagggataatcccccgtaatccctccctaccaaacaactcatttggggtttctagtgtttttgaatttgaaggagatacaactctagaaacactagaaaaacactagtgccaaacaaggccctagggtttttattttgtgcggagaagcggagggtgcagaatcaggcggaagggacgagccactgttggtgaaggtgatggcggatgggacgagccgctgctggagaagatgacggcaggtgggaggagagtagaatgtgagtgtgttacatgagagaacatactgtgattctaaaaggagattagagaagaaccaggaatgagagaaattggatgagtgtggacgccatgtcaactcgtagtgctagttcaggctcttctcgatggtttatgatccgtttaatatgctttaaggatctaaatctccattttgcaagttcagcaccaatttgaatcacgtgcgcaagttcaagggctcgccaggcagtttactgttattttttccccttgctaactgccaactcctttctgttggtttctattacaggtaaga

SEQ ID NO: 14761 - DNA, 793 bp, Brachypodium distachyon
  Intron number 2 from transcript Bradi3g34420.1 (locus Brad i3g34420) derived from phytozome v7.0 (chr-ID Bd3; pos 368 10203 to 36810995 reverse strand)
gccgcacgaccgtctcgacggtaacctccctagctcgtcttcttcctcccatcgatcatcgtgaactggttgctcgttactgaatctggacggaattcttttagaaagatgaatctggacggaatttaggctaggttaatcccccgcgcccttcttttgccttcaggactaactgaattgcgagttggttactgaatctggacggaaaacttgactaggttaatcaatccataggaaccgccgtaccagagagcggaacgttattgtatgcctgcatctgtaaattctgatgggaccgtgcatgtttaattgttcatctctaggaatgttcaataatgctgtaacagtattgttcctgacaagaaactgaattccttgtatctgcagtcgttcaacgaatcaggatagaaaatttggtgcagttattacataggagtacatctgcagagttccatgagaatttcgtagctaggatttatttggttcttcagtaatcttcgttttgatcagtaatgctgttgcaacacaaatttcaaataagaaacgtgaaacatggttaaaatacagtcaggaatctgatttttctttgtatctgcaaatgcgtttgcagtagcctgtttatgtttgcaatatggtactacaaaggtcaaagggtgtcgctgaaagtctgaagctagatggaacagtacatcgtgatttctgttgattcttcagtagctttcgatttcaacacacatcttcccttttgctgacaagaaacctgaaccatgatcaaaatccagccaacctggag

SEQ ID NO: 14762 - DNA, 807 bp, Brachypodium distachyon
  Intron number 1 from transcript Bradi2g53100.3 (locus Brad i2g53100) derived from phytozome v7.0 (chr-ID Bd2; pos 523 14689 to 52315495)
cgcccaatcgcaagtgcatcaattgcaacagtgtggtaatctcttccacctgtctatcccgttgttaagctgattcgtgcatctgtcttgttttgcttcgtggatcgttgagccggaggctgtggaattcgtctgctgtattgagtgttcggtgattagctcagatttacgaattttgttgtctgtggtgtgaatttttgttcgctcatgtgtttaaagctgcagctgttggcttccctaaaaaaaagctgttggttggtagatgataaggattgctgtttgtctagggcctgtggaagttcttgtatcattttgtcttatatggttggttgatcaatatggtagttcctttctgggttactctggtttatgaacttctaagtttgtcgccattaagtattctagggttgttattcaaattttaatacggagtagaaaacctttttgatttatgtagatgttgctaatttcatcaatttatgtgcatactttcttttcattatgtgttaatgaagttgcataattggctagttgctgatattttagtgtttttcatgttagtggaaataacatgtggtgctcttatgtagttttgaggtgatagaatcgcttgatttttttaagaatagtcgcttaaactgtaaagtcactccattatgactgttgttgaatcctacctttgcagtgttgcactaaatataacgagcacatactatttttagttaaccctttgaattgcgtttgttgtagttctcttgacattattttgaatcatactagtatttgttttgttgtaggggccacaat

SEQ ID NO: 14763 - DNA, 581 bp, Brachypodium distachyon
  Intron number 2 from transcript Bradi2g53100.3 (locus Brad i2g53100) derived from phytozome v7.0 (chr-ID Bd2; pos 523 15536 to 52316116)
cagtggaatacagtgagtatcttggctcttttcagatttttagctgctttctgttctttcttttagtttttgaccatatatttcacatgtagttatattcaaaattcacttctacaagaaaacatgatgtggtatttgatgtctctaacacaacaacggagtgtatgtgctttcttcatcatgtagataacctctaatcttagtccatatggaattttccattttatcattctagaactctagggcattttttatttgaagaatggattagtccttggatgggctgcccatcatgaggtcattccatgattgttatgggacggtcccatttcttttcatgcggtcattccaagattgtcatggcctcatgggatggtccgttcctcaaaccaaacaccccactagtgtcttggagatagcggcatacagtcagtttgccattgggaagtagacaataaagctacgttatattattaagctatgttcaattactacattttgttttcatactcttgataatatgattttctgtgtgtgatacaacagccgtgagttcactcatcgtgttaaatcagtgtcaa

SEQ ID NO: 14764 - DNA, 736 bp, Brachypodium distachyon
  Intron number 2 from transcript Bradi3g01670.1 (locus Brad i3g01670) derived from phytozome v7.0 (chr-ID Bd3; pos 102 9985 to 1030720 reverse strand)
ggagctgattctcggggctaatcggaagctcggtaaacaagccctccccacgcttttccctatttcagatttgtgctgcttgagatgcaaagaaagaaaaataacaagtccacttttctaccatgaactttcaccagagtttactcttctctacttaaatgttctcgttggtgtgaaaagaactataaaccttccaaacccacatcacagagtgaaatgaagatggatttgatggcttgttttgttcctcttctctattacagttcttgtgaatgttgacagtaatgtactggttgttggcaagtactttctatacctcatttactgtttgttgcaatgccggcaataatgaaatttctgaagatcagatcaaatgagctgtccaggctgtttatttaacatgtagcaatttcttgatgtagtgtacatatttcaatgaagaaaaacactggaataacaggtcctgatgtattatactgaaataacacttaaaaagagggactgaatgatttggaaagtttagttttttctttttattttccaccaataaagacatttaggacgaaaagtaacttttttcttaactgaataacatatttgccttcgtttttgttagatgaagataactgttagaacaaagcacctaatatctatgaatttacgatgctattgataatcatcgcgttctctgctcaattcagagctcagagattgtggcttgggtgatcccggaact

SEQ ID NO: 14765 - DNA, 683 bp, Brachypodium distachyon
  Intron number 1 from transcript Bradi3g05760.2 (locus Brad i3g05760) derived from phytozome v7.0 (chr-ID Bd3; pos 410 4652 to 4105334 reverse strand)
gaggcgaagcggtcgcggccccctgctctggccaggttaggagtctcgtggagttttttagcttcccttttcaagtgcttcgggtgatgtctgtatagttgtgtggatttagttgcccgagtgctaatccagtggagttgcttgggtttagtctgctggatcgggcaaaagcgttcgtgatttaggggcgcctcctttggtactccacgattggggatttgggaatccgtgcttaaatctggtgcttgcggtttagtgttgtgtgactgaaaatctgtagaacataatcctttgttttttagttggagtaatgatttgatggcagtcttctagttgctctgcttagccataatagcttcggaattttggttatgcttttagaaatcatgggcggtttgattactgcttaactgactgaatattctggctaaaaaaaagaataggatatgtagtaagcagcttgaggagcacacctctgttacaaacatcaaggatgtacacacaggggctcctttgcacttagcactgcaaccagttctttcgtgtaacattgaaaacaaaagaatatatgtgttaaatgatgtttacctttcaattcggaacatcatttaatcaggacaataatacttattcattctacttgtacagtgttattgttgaagcactaaaggtggatagtctgc

SEQ ID NO: 14766 - DNA, 994 bp, Brachypodium distachyon
  Intron number 1 from transcript Bradi3g04730.2 (locus Brad i3g04730) derived from phytozome v7.0 (chr-ID Bd3; pos 323 6105 to 3237098 reverse strand)
tcgaagctcgtcgaatcctcccccacctcctcaaggtacggcagcgattcccccttcccccgtctcgtgtggatctgcgtgtttattatctgcttcgtatcgttgttggatctgttatgtgtctctgcgagatgtgttagtctgatgtcgttggggcgagattactgttagatttgttcgatttctgcctgtggatgttcgatctggcatcgcgggagggaggttactggtagatttgttcgatttccgctcgtagatgttggatctggcatcgcgggagccaagttactggccgatttgttcgatttccggtttatatgttaggacgcgggagggaacttactggtaggtttgttcgattcctgctcatagatgttcttggtctgatgtgagtttggtcgtcagatctatacgtttgtgttcgatccttgttgatatctcgaatacgcaagtcttatttatcacctgtagatctcgaatttgttagacgggtgcctgttttttattcaattcctgatgccccacgtctaatctgttaatctataatatatgcatgtcttatctagttcatccaatcctgtttggtagatgcgtaatactgtgctcgtcatgatataattttgtagtagtagttgctgtcacatattttttcttctggcgtgtatggtacataatctgctgctcttgatcatattggataaaaaatcgtaatatgtgaggaactagatttgtagccatcggatctgtagcttagaatatatccatgtccatcagctatgtgcttccttagataggctgcctctggtagattatatatccatgtccatcagttactttggttacagctatctttgagcaagatgtgagccgatatcattttatttatcttagctaggatgtacgaaggtgtatctatgtttgtatcttctgttttgatgattatgctgtctgtttacttttggaggcttaccatactgtttggggattcctgcag

SEQ ID NO: 14767 - DNA, 455 bp, Brachypodium distachyon
  Intron number 1 from transcript Bradi3g13310.1 (locus Brad i3g13310) derived from phytozome v7.0 (chr-ID Bd3; pos 118 10412 to 11810866 reverse strand)
tccttggttagttacctactcaatattaattattccatatgaaaatatatatcttgctgtttttccattcttgatcaataaaagtcttccctgtaaagaaaaaaggaacccttctgttttgttgttctagagagaagcatttttttacttgtatatgcttttctgtgtcttgttataactttaaattatatattgttggaaggatcctggaatattttctgtcatgaagcatgcgaatggaactgcccacctgaagtggggttaaaggggaacacaaaatagactgaaatgtgaaactgaaactgaatttgtgggagctgaactttgatttcttcagagctgctctgtttcaaacatttgttttccatctgtatctttaaaatcaagtgatcatctaaaaatataaccctgaaagtcaatttgaactgacaaatgctttgtttttgccgtcaaag

SEQ ID NO: 14768 - DNA, 753 bp, Brachypodium distachyon
  Intron number 4 from transcript Bradi2g52800.3 (locus Brad i2g52800) derived from phytozome v7.0 (chr-ID Bd2; pos 520 57984 to 52058736 reverse strand)
actgcttcagatcctagctctaggttacctgaaaggtatgcttcactgctcattttattttcatcacgtatcattctgttaaataatgtttaaattattggtgttccgatcagtttatttgtttggtaaggatgtattttccgctttggtttcacttgatactgggttgaaatgcttatctacaatatagatggtataaattggaaactggtctccttgaagatcagaagggtgttttcaacttttcatgggcaaacacagtttgccttgagcacaaattttctttgcacgaaagatccagatttctaattaattcttaccatgttgccatttgtgtggtggtaaaggctaatgttctaatgatattaaggcccacagtgttatctctggactgctgatatgttgtgttcttcgaatcattgcttaaaggagatttgtgcatctcatctatctgagccttgtcaatgggtgcgcttcacatgtttgattctagtcaaggaaaactaagtaacaaatagtttgactagttttcaccacattaagttcagttcattttctgtaagttgcgaactgttgtaatacgttccaccattggactgtttgtatttacttctttctgtggtttttagactcgcactattcttttcttgttgcctagtgccatatatttaggtacttgtattcgattttggctgacatcttagtcttcgaagtgcagatccttctttggccccactgatatctggaccatat

SEQ ID NO: 14769 - DNA, 1038 bp, Brachypodium distachyon
  Intron number 1 from transcript Bradi3g29190.1 (locus Brad i3g29190) derived from phytozome v7.0 (chr-ID Bd3; pos 310 99466 to 31100503 reverse strand)
tgaaggtgaaactcaaacaaaggaaaccgacaaaggtatctcatgattatgtgttactttattttgtttgtttgatgatggattgctgtgaatttatctactatacattttaatcttcttagcatataaaatgtggaagcagtttacaggacactatttcgagactagaaggattaacaatgctttggaaattgaaatgtacaactattttgagaaaaatttcaagagcgacatgtacaactaaaatgaaacggagggagtacttggttgattatcaagtgtgtgaattcatataaaaaatataaatagcatttctaatgtagtactccctccgtcccatatttaagtgtcgaaatattacatgtatctagacgctttctaggcatagatacatccatacttggacaaatttgagacacttaatatgggacggagggagtatgtgcgaaacatgtgaaatttaaaataagttgtagaaaattaatccacacggcttcttgtcgaactacacagaagcatctatttatatactttatgttgcagtgaagtagttttgttcatctacaaacaagggtagtttctgagaacttagtagtagtatagtgatactcatttatacatcttaattttggcatgctgtcagaacttagaagaaagatatcacatttttgtttttgtcaaattcacaagctcactttgatggttgtcatttactcattttggtggaatgctcaacttagaaaacacttcaacacagagaaaagcaaaatgtccagcatgttgtgctactaaaaacatgctctcgtctggtatagttgcacgcaatattgttgtattgcaggacaactcttttgttttggtgagcccgtttgtctcaggtaaaactattttggttttaactatgatgcccaacaactaaaaacgagctcaatttcaacttgtatttcccgtatttaccacaaatgcttgacctcactgtttggaattggaccttcacttgcagaataggccggtggtgcaggacgatcagtctcggtg

SEQ ID NO: 14770 - DNA, 782 bp, Brachypodium distachyon
  Intron number 1 from transcript Bradi3g16300.1 (locus Brad i3g16300) derived from phytozome v7.0 (chr-ID Bd3; pos 144 46299 to 14447080)
gggttagtgatgcattgtgcttcctgcccatctccacgacatcgcgctctgtttttggtgtggttttgttgcatctaattgatttagtctgtcctttcgttccttttattaactgccttgaaatatgatctgaaaaatgtgctgtgcatttcttgttggtatgtgatagtactactgtactgcattcatatgggtgttatttttccttttcccctttctgaattttgaggtgcagcaggaactgtgccttttgatatccagcaggagctgtgcatgtgggctattgaataatgaactctgcttggtttgactgaattgggcgaggaaagtgacgtttcttcgattagagttgtctggatgcatgtgggagtggaaccctgttgtttttcctgttgtcgctcctagaattttggatagctgggggaaattcagtgctttataatgaattattaatctgtgggggtgcgatatcaggcagacttggttaatgtggcagatttttttgggaacacgatgtggatctgcaggccaattatattaagatggacgaaaatgatgccctaggagaaaaaccttaggcttttctttagtaccaaaatttgaaatagataattatgggtctgatttgggagcatgttcaatcctcggttacaaccatatcagtctttatgttcagtagggttcatttcttttcttctgtttccattttaatgtgttctggaggtacacaagacatttgctgtgcagaacatgctgatgtttgtaatttaatgactgcaggt

SEQ ID NO: 14771 - DNA, 924 bp, Brachypodium distachyon
  Intron number 1 from transcript Bradi3g25160.1 (locus Brad i3g25160) derived from phytozome v7.0 (chr-ID Bd3; pos 248 96917 to 24897840)
cggcgccgatcgggaacggccgcctcggtgccgtatggggcggcgtcgcctccgagaggctccagctcaaccgtacttaaccgacccccttccttgtcttaaatgctattactctgcgctaatctccaagtttagtaaaatatgtggttcttggttggttaattaaacgttctcgttccagctcgggaatcagttaactaccgataaatttgggcaattgacacccggagttgtttccttttaactaccggttgttacgagaaggatgggccatggagcgtgcgattgctcgtttgttcatactgataattcatgaattctatgcattgtcatagtagcttaaatttgtaagttggactaggggtgagtttggcattgaggtggattaggataatccagcttttccaactagcttttggctatttttatgttggctaaccaattttttcctgctttcatgtgtattttcccacaacagattattaaattagttcagcgcagcatgcaatgctaaactgagcctagaagttttattaggccaacttaacttttgctagcctgtttcaagtaaaatggtgggagaccctccttttgttttgatgaattttcaaacatccaaaacggtatgtttttcttgctctttgagatgggatggttagtcttgttggtttattttgaagaaaaaggtacagctagtaatggccttattagatcatagtgctgatggttgtaatattgaacttttgttttacaaattcatgatctttttttctttctttttttttccagattttgagaatttcaaaatttgtgtgttacacgagtttttcagaaagttttaaattttaaaatttcaaaattctttctgccaatctgtgtatttttgtagagttcattgcttcatattagaactgttggtgtaga

SEQ ID NO: 14772 - DNA, 937 bp, Brachypodium distachyon
  Intron number 1 from transcript Bradi2g44300.1 (locus Brad i2g44300) derived from phytozome v7.0 (chr-ID Bd2; pos 448 28571 to 44829507)
aaggagcacggtacgtattactgtacatgcttgtttctctcttagtcctaacccgaatcatgcatctctcttcagccttgaccatactgttgtactgttgcactggaattaatcatcagctcatctggtcgtatcgtacgtacgtatggtcgtctcaaaaacacatgtttccaccaaaggatttattgcttctcttggttgactagaaccgttttcattatgtacacttggaattcacttgcaatgaaaaatagtactccgtagctttaggtaagatccattcgttatcctaaacatgcatggatgtatgttgttttgtaatctataccacgtacggagtacaatttttcatatgtgttcaaatagcttaattttaactactagtacattgcaatgttgcaaaacaatcaaagggtagaagagtagagtattcattgcaaagaagagtattcggaagaaaatttagtaataagtgggacgtttcaaagagtgcgggaagaaaattctgcgttgaatcagaaattgcgtccagtaatgaacagtgcaaagtagaaagtcatcatgatcactagactttagatcccaccgttcatacttatttaatggatagactttagatcccaccgatcatattttaatggatacgtttgggtttaattagtgatctaggaggtccggtgttctaacaacagcatcttttgtgggcctgtccgaagaaaaaaaaacatctttggtgggcacatcacacaatcaagaaatggactatgtaggccctttcgctaatacaatacagattccccatttctgtgtgtgatactcacagcttagctgaaactgaaacctgtattctctaaataaacttgtaacaagctacgcgttgaccgtgaaaaatgaactgacaggtaaaatatcgatcacctggtttgggccggtgcct

SEQ ID NO: 14773 - DNA, 893 bp, Brachypodium distachyon
  Intron number 2 from transcript Bradi3g15660.1 (locus Brad i3g15660) derived from phytozome v7.0 (chr-ID Bd3; pos 139 48820 to 13949712 reverse strand)
gattcattggggaacctattgaagctacgattcctgtatgatcccttcatttagtagctatactactcactatagataccagaattttatactagggattttttttttctgtacatgctagatgtgtctcatcatgtacatagtcagctgcttcatagtttaatgacacttgtggaaatgaaatgattgttaggaatttgtgaaaccacttgtttaacatagtggcaaatattctagagctggcaacttgatgattttgaaaggcgcatgcatgcagattttgataacagagtctcactgtgccaatatgagaggcattttgatttacattttcctttgtaagagctgccattcattgcttttggagttatgctagcttaaccatgtagtgacatagttttatacaatcatttgactcgatatcaataggaaggaacaacgcttgcatatattttggacagcaactccttgcatgcatatgcttacatgttgccatggcttaaagtataaacgtgtatcaacaaatagctaagccgctaaataatggaagaagatgtaccttatgtattctggatagggcaaagattttgtctgatttatgttttctctggtttggcatttgctctgaagttgtttacatattacaattattgctacttgctgtttgtcaggcagcatgtgttatgctacttgataatccttctgtgtctagggtgtctatcatgtatttaggttatccaagtacaaattctggtcaagacttaggatttaggagtccctgtgttattgttttcattcataacattctgcatatggtactaattttgtgtgctttttgtatttttgttgtgatgatagacgtcttaacaacaacagcctttccggtacaattc

SEQ ID NO: 14774 - DNA, 952 bp, Brachypodium distachyon
  Intron number 2 from transcript Bradi2g46370.1 (locus Brad i2g46370) derived from phytozome v7.0 (chr-ID Bd2; pos 468 28525 to 46829476)
ctgtgagtcggaatgttggttgttgtcttttttttttgtatggttctatttgggaaatggaacgttgttcatcaattctctgatgaaccactatcagaaaaatcagcatttagttcttctgtttaacgggtcttccatctgaccgcatctttccgtgttcaagagtagttaaagtattgatttattgttaaatggatgttgcatcggcaactgtcttttatattccttgttttctccttcacagttatcgtggtttgacttatacgaaatgaatgtgtattgtgtctattgagtttctgctgacacaagcatctctccgcttggtataatttacaaaagataggctaaagggtaggggctcgacgatcaacgcactggaacttttgtcataaaatttcatgcaaccagcccatgaatgcgctattttgctagtaattaataaacatagtatacagtttctttgttgatttgagcacttcaggaatctcctttttcttgcattctttgaatttacaatgtataaattgttcacgatttcccagaaaaatatgttctttgggagctagaggcatgcgcacaatcgtattatatgttttatcataattttaaatcacattatttgccttattagaatggtttcttgatgaccaacaaaaacaagtttttttttcgaaaaaacacaaacaagtggctacagctaggttaattcaaacaagttttgttatgtttggtttcttctactggtgatattattctgtgttggggattattgacttaaagtgagacaactggcaataacatgtttggcatagttttgctcaagtgaattactgttaactgaatgttataatctgctatattatagagtatgttggcttgatttatcataataagaattctgaacaatttgtttgcaggaacctgaaggatctctcattaagaggaactctgg

SEQ ID NO: 14775 - DNA, 992 bp, Brachypodium distachyon
  Intron number 2 from transcript Bradi3g10810.2 (locus Brad i3g10810) derived from phytozome v7.0 (chr-ID Bd3; pos 905 1963 to 9052954)
tgtcaattgaagatcctgaggttccgattagactggtacttgctcctttccctttcttgttatcctgctcatcgaaaattactttgtgtataaccaggcatgcctcgtaaccatgcgcaaaaagtttacatcggactgatttgagactattccctgaattggttaattgaacacaatacatttttctcccgttgattttacggcaaggtataatctttactatctcttgattgattttcagttgttggcgttattggtgcgtgtaggacccccctcaaatctaatttgatctccttttttagttggaaatttgatctcctaacattagtacccgagtctaatacaattagcacatttccttatgtgtacataattagcaccagatttccaaaatttagggtccaataaaaagaaaaatatttgttagattaaaaataaaacaatatagtaaactgtagtagtacacagcaaggcacgatcacttagcgagttcctgagtaatttggagctgacgagtaaagacgagcaaccgaatgctcttgtttttggcgtaaagttaagtgcaaaggtactgaaatgtcgaataacagtgcaaaggtactgaaaatctctcaatctgaaatgtcgaataacagtgcaaagctgaagctaacatcaaaatagcatgttcgcatggttccacacttccactaagaaatgagatcagcagacgtattcatctcttcattcaatgctgctggatggtctggttcgcctcagtggtcagaaacagatgcgtgattgaagttcgtctcctgtaccgttggtcacgcagtattatctatctttaaccaactataaacagactggatgacttcatcaacaaattttctgttcttcaggataattactagtgtaccacatgatgaaattacgccatacaatttcgtttaatcattttacactgaaagagagaaatctgaaacatttttctgcacatctcggtcttcagg

SEQ ID NO: 14776 - DNA, 449 bp, Brachypodium distachyon
  Intron number 1 from transcript Bradi3g25680.1 (locus Brad i3g25680) derived from phytozome v7.0 (chr-ID Bd3; pos 263 19735 to 26320183)
tcgtcttcttcctcgcgcgaacgcggccaccgcaggttggtctcccttcgattctctcgctcccgaccgtttctcctcccgtcaccccacgaacggattccgccctttctcaattcgtaactgaggcaaaaatcaaagtagggcggcctactgggtcctccgctcacttggattattttcttattggcgacgaaccctaaatttcttcggttgttcgagaatttttctggtttttcattttaataatccgtattttatctttctctccagtccatccagtttgctcaggatttacgctgttgctagtagcagtccatttcccaaactgattggggctccaacagaaccctaagctgctcctgaatgttgcattctgaaatatcaacgtaatcatatttggttcacctctttcaggttggctgaattgcgtggttgtgcgggttcgcagc

SEQ ID NO: 14777 - DNA, 629 bp, Brachypodium distachyon
  Intron number 2 from transcript Bradi3g23320.2 (locus Brad i3g23320) derived from phytozome v7.0 (chr-ID Bd3; pos 228 26641 to 22827269)
gatatagctctataaggtttgtgatttttggactgaaagctcaaaattttagcatttacatttgattccttccagaaatttgtagtctcttgaattgataggttcttggaatagtcgggagtagtcaagtgtggtgccagatttttataaaagggtccagttcttgtggcatttggtgttccttggtgaaactcactgaacatcagctcccctggttgttgtcatattttctacggagtacttggtactcaagaatcatattacatttcattgtgtcagatttaggacaaaaatgcccttctgacctaaagaagtttgcgcgttgtcgattgaagaaaacataaataatatatgtttgcgtagctgtgagagaacggtgagcaaagatttctatgtggaagtgctaattcacataatatggtggagatgaaatgcatccttaataatcttcatctgatatgttgtccaaggagaaatgaataatgatgagttaattgcagatgggtttttttcatgattttaacacgtatgttccgtacctaagtttggtgttttgtgttaatgttccatatagcatgacctgtctgagttactaattggatatctgatttgtggatgacggaagacac

SEQ ID NO: 14778 - DNA, 675 bp, Brachypodium distachyon
  Intron number 3 from transcript Bradi3g07640.4 (locus Brad i3g07640) derived from phytozome v7.0 (chr-ID Bd3; pos 576 1306 to 5761980)
cacaggtaatcttctttttatcttgttttaggtcagtagatacaaatagcatttgaagctaacttgtacttctgactatttctgacaactggtctgtttttttttaaagtccaaagtctgacattatacttatgagttcgtttctttaaatgcaccttctttaaatttcccaggataaatgtatttgcatacttccactcaaaatattggccaatcaatgaaataatgcaggttgtacaatctaaggcggcctactcatggcagttactatatatgaaaaatctatacacattcaaatacaaaacaaatgatgcaattggcttaggtgcagttttttccgtcccccttttggggcacatttaggtgtcaattcctagtgtgaattgaagatctggaactctgaactcgtgtttatacttatgtacctactgttgtggctgcagttctggtctagaaattatgttctaaactatgagcatgattcagaatgctaatatttacatgtgtacctgttaaaatcatggaataacatattgctatagacatttttttggttgtgctagggcccacaatttcaacatgttggtctgccaggttaacttcgtttttgaaaagttcagtcccttgttctgtgactgttgctcttgttaatcgaggttgtatgctccaggtgag

SEQ ID NO: 14779 - DNA, 549 bp, Brachypodium distachyon
  Intron number 2 from transcript Bradi2g47560.1 (locus Brad i2g47560) derived from phytozome v7.0 (chr-ID Bd2; pos 479 59375 to 47959923 reverse strand)
ttgaggtaccacatgcatacttgggtcttcctaggtagattacctccatttccagcaaaaatatccaaaagtaacatgttgctttgatattctagagtaaatttcataaaacaacaactttaatgcacaaactataaaaaaaactacatattaagaaccattttgatagaactataaaattagagatcgcgccacaaaactacagagggttttctgagtaccatgtgattcaggattttgtgaagttgcatcacaacctgtagttctgtggtataattggtctctaaatatgtagctctgtgaaattgatgtttactttgtgctacagagcctacggttgatcccttaatctgtagttttgagaaattggtacttaaacttatgtttttttggtagtttgtacattagagcagtggctttcttactcttatatcaaatttgatgtctttcttaaagctatgttcagaagaaaaatccttttctgaccatttggtgctatgcattccatgtgtagatttctgaaagcaaggaagtttgatattgaaaaag

SEQ ID NO: 14780 - DNA, 645 bp, Brachypodium distachyon
  Intron number 1 from transcript Bradi3g05100.1 (locus Brad i3g05100) derived from phytozome v7.0 (chr-ID Bd3; pos 354 7776 to 3548420)
gcggggacgtcgacgaggagctcaggcgagaggtatctacaaaacattctccggtttgtatgtttattggtgtgtgcgcagctctatcagtattcagactgtattgtcgctgagtagcagcaaaaaagttgaatagcgtgatgcataaaatttgaactgatcgaatttgtcatgtgcatgctgttgatgtggtcttcgtggatagattaggtgttttagcctagatgggccatcatctgtcttctattgtcagttatctagattttttttctgaaaacgcatcataatgtgtgtcatttagtacggagtagttcgtttggtattttatatggtataggtagttcaggataatgtgatgatctgttaggaatttaggactataatcttgtatgtagatcacattgtgctggctttgagttttcagcatagttcattccgactaaactaccttcgaaatgttctctgatgctgatttgccaagagtttctaggttaacgtctgtcatcattacacttcacttttgctagtttgttcatatgaacccaagacgttactttatattaatcgatggcatgctgaataaattttcatggcattccactctaaccaggcaaattatctcaaatcctgtggcacaatatcaga

SEQ ID NO: 14781 - DNA, 770 bp, Brachypodium distachyon
  Intron number 1 from transcript Bradi3g03630.1 (locus Brad i3g03630) derived from phytozome v7.0 (chr-ID Bd3; pos 241 1897 to 2412666 reverse strand)
ccctcgccggccccgccgccaagtaccgcaggctggtgagcgtcttcgctcgccgtcccgcagcattaccttaaccgtttccgcgcgcgcgattttgcttgcttccgtgacgcgctccgtgtctgctgtgtgtgcaagtttgctaagcttcagagaagcgtggttgacctgcatgttgatgcttacggtgcagtttatgctgggatctgttcgtttagcttcaggtttctgcggtttggtttaggtgtttgttcgtagcttgcatgtgcaggtgggcggttggtcggagtagctgtttgattgctgtatgtgcttgttaggtttgctactagcttggcggagtacattggtgcactttgggtgctagacttgtagcagtcagtgattcatgtgtattttgggtggcatccacttcggttggttggttgcatgatgtcgtgtttcaactgtattttgacttctttttttgagaagtatggtgattgcatcgcttaattggttgtcatgagtcatgacatatcttcaacacattcgtgcactaggttgggctgctctatggtatctgcatgcggtttgatggaatctatgtatgatgaatcttgtggaaaagatggtttctagatgaataggcctgcttgcaatgccatgctactgtattgtacgtagttacaaaccccgagaaatgaaatagtgtgatggcagcactccttggattgcacttaagttcatatctatgcttattaatttctctatgctagtctgccataccc

SEQ ID NO: 14782 - DNA, 354 bp, Brachypodium distachyon
  Intron number 2 from transcript Bradi3g11200.3 (locus Brad i3g11200) derived from phytozome v7.0 (chr-ID Bd3; pos 962 8442 to 9628795)
ctgttacggtaatttgatactatttcttctcagttactctctgtaatataatatcatctgtgtgttttgattgatgaacttaaaaaaccagaattatttttgagtacttttgttctccagtataccttcttacgcattgttcatggcttcattttactgcaagtcttgaatattttgccctgcacaaactaaattgctaaatacgctgtcacattgtcagctatctttactgaactaagtgattggttttgttgctgaactgtaagtatatatacttcaatcttttcacatagttattgtccttcattattttaaacagattcttgaaggcgagaaagtttgacattgagaaag

SEQ ID NO: 14783 - DNA, 576 bp, Brachypodium distachyon
  Intron number 3 from transcript Bradi3g11200.3 (locus Brad i3g11200) derived from phytozome v7.0 (chr-ID Bd3; pos 962 8826 to 9629401)
ggaggagagactttggtgctgacactataacagaggtaatggttttgagtcgtgagtcagtaatttatttccctgattttcttttaccaacaaacttgttcctataggccataacttacaagcaacaggttccgtgtcaacatttcataacagtcatttatatcaatttgagaaatataattttagttattcttcttcattgcaagacaatatatttcacttgtgcagtatgccacttgcaaatgcgtcatctgagttatttgctcaactagtacactgtggcttacagcggtaattgtcagcatgatgtgtacctaatcctgatatgatgtgttttgatgcgtgcctaattgaaaaacaagcttttgcattttctcagaagaaaaacagtaaaatgtcaatcgctccattgctttagttcagatttttctggaaagttctgccatcttgttttactttatgcttgcttttgttctacacccaacatgtgcttttttcttttttgatagctaatagttttagttttgttatatttaatcaggattttgagtacaaagaattagatcaagtcctgga

SEQ ID NO: 14784 - DNA, 659 bp, Brachypodium distachyon
  Intron number 1 from transcript Bradi3g35310.2 (locus Brad i3g35310) derived from phytozome v7.0 (chr-ID Bd3; pos 375 97513 to 37598171)
cttggtgttcctctgctttatcagattatctcaaggtacattccatctacttcagtttatctatgctttctcagatcatcaatgtgaatcatcgcccttcaaagaaagctcagtttttcagacgttggactttgattcctcaatgttctctcgctttctttcttcaatcagcttggtataccacaatggctgttatctagagattttgacctcgctcaggattttatgtgcctttatttagatattttgctacacaaagacttctaacaaagcccgtcatcttctcctaattattctacattctgattatgtagttgtttctttgccctgaagtggcactcccgctattataagcatctttggtataaataaatgatgcataagaaagcatcatcaaattagagagctggaaagttgaaaaaagaaagggcggaatggtgtgccttccctttttttcttttgtctcgacaggagataacccgacaaaacctgatgaataagatgaagtgtttagcataacagggctgggatatccttatatatcaagcagaagaaaaaagtgattgaatctttacctgaaaccaactaacttcacgtaataacatgaaacacttgaacttacaggaagaaacaattcagccacactggatctccctcca

SEQ ID NO: 14785 - DNA, 806 bp, Brachypodium distachyon
  Intron number 2 from transcript Bradi3g40890.1 (locus Brad i3g40890) derived from phytozome v7.0 (chr-ID Bd3; pos 429 66000 to 42966805)
tcgtgcggacaccttcaagttcaagctgggacaaggtgcacttctttctcgtctcatgtttatgatttaattcacattttgcgtacaattgctcataaatgatgtgatcgaccacttttggcacatgtttagttttgctaaattccagcttctatgcatgcatctaaggtaggaacctatcattttggaccataaatcccattaatattctgttctcaagttttgttgttccctcaatcttctatgccttgtcttattctcaaaattaaatagttatatgaaatgaatcatttcatactgttggtagttctagtacatacctctgggttctgcgatttgtagtaattggtttgttaccactgggaaatgatacccttgattgtgtctgaccatgaggagttcagttctaccactttccataagcatgttagcttgatgccttgatgttgcgcgcgtgtctttaccatccatggaagaaaataatgatcgacgagtattcattcagctttgatgctgattgagttggtgccaacaaggaggaacctttcttttttcctagtttagtcatgcctgtcatttgacaatttgaagagattgacaaatttgttcttatgttccaggatgttaggattgtgcatctagtgtctgtttcaatgctcatttactacttcattgtcaactcatgtccatcttatgttccaggatgttaggcttgtgcatatagtgtctgttcaatgctcatttactacttcattgtcaactcatgtccaggtcaagtgataaagggttgggatcaaggcatcaag

SEQ ID NO: 14786 - DNA, 594 bp, Brachypodium distachyon
  Intron number 3 from transcript Bradi3g02970.2 (locus Brad i3g02970) derived from phytozome v7.0 (chr-ID Bd3; pos 188 8654 to 1889247)
gagatcacacattgatcttttttattgtgcaactagtaagatgttcacaccatttatagtctagttcaatgaactacttttcttcagtgatctaacaatagttcgcaccagacgttctgtttctagatatgttgttgtctatttttatgattttgatgatgttataatacacagccaagtacactagttattactacattggacctctttgtgattgcaatgccaaacatgtgctctgttttgtcttagacatgttaagctaatgtcatccagaagcatattcgctgataagaggaaaataataatgggaaaacaagttgctgttagtttctttctaaagattctgatgaacttacatggatgtgtgttgctgagattgataacattttcttgcttgtagttctgcaaaattttgttttggtaaatatagaaataaacatatcgctatttttgtttactgcatcagaaaagggcagtatgcatcctcaaaatgaccattcaaataatgcaatatgcactgagattatatatcattgttttttatcttacaaacttgattttctttttgcctgataggttgttgttttcttgggt

SEQ ID NO: 14787 - DNA, 693 bp, Brachypodium distachyon
  Intron number 2 from transcript Bradi3g42020.1 (locus Brad i3g42020) derived from phytozome v7.0 (chr-ID Bd3; pos 437 94152 to 43794844)
gatcgtatgtgccaactgcaagattatcacttaagtgtacctgcagggtaaaacttctgctggctaatttagtcatgtgctgcaatccactggataaattctggtttatatatgaactgacgctgcgccaactcatgaaatgtgggattactttgatatagggccaaagggctctattactgtattctgcactcctgtaattaagcatccttgtcgggacttatatgatataatatccagcttcttatttcaaatcgcgggttcatgtgaatttattttttactgtattaaccagataatatcaatgttgcccctctggagagttaatttgtaccgtagctatgttggttgtcctaaatcttcctgaccttcaatcatctagaatattaagcaggaagaaaaatgaagctatgttgatgatttctgaaagacttgcaaaatactagccaaactttcgttgtttctgtaactggaatgatagcttaaacatggtgctaggttcttttgattattttgtgtatccaggggcaattgatctttagtactatacaatactaatactatattgcattacatttctttatattgaaaatatgcagcatacttatattctcgtttccagatttggttaattatattttgattttcatactgttagttgcttcttgatttgctggaatttcgtgaacaagt

SEQ ID NO: 14788 - DNA, 523 bp, Brachypodium distachyon
  Intron number 1 from transcript Bradi3g15100.1 (locus Brad i3g15100) derived from phytozome v7.0 (chr-ID Bd3; pos 134 12826 to 13413348)
ttcaattttatttcaaacaagggcgtactgtacatgtaagtatatgtttgtttttggtgtggatctgaggcctccaaaaggcagagggagggcacacactttgttgaagcttttcatttgtaaattcagcatctctgcaataaagtgacgatttgtttagctggggctttggaataattagtatatgtggactatatacaccattcttttctcaatacatagcaaatcatgagacaaagctttgaccaagaattactttgttagtatatggttttatgacatgaaatttataccactagattcatcttcaaaagtacttactggtaattttgatttcgtatcatataaatcccatattaatgaagtaattcttggtgaaagcattgtcttaatgaaacctcatatgacatgcatggagaaaagaagggagtgtgtattttgtgtatggatatgattattctgcatttctgcaagtagtttctttgttttttgtcagggcggcatcataaaatacgaggtagcc

SEQ ID NO: 14789 - DNA, 1024 bp, Brachypodium distachyon
  Intron number 2 from transcript Bradi3g04720.1 (locus Brad i3g04720) derived from phytozome v7.0 (chr-ID Bd3; pos 323 1017 to 3232040 reverse strand)
gggcctcggcgtgcgcgacctcgtctggctctcaggtccctacaccataagcaacatacatataattatctctacaattatataaacttccagatcaatcaatcacattattcaacatgctagtactaaatatgttttaaacaaggaatatataatgactcaaaaattaatctgtaaatattgctggagagatacatggtagccaccgacacgatgaaaggcggtctcttatcgcccattctttgtgtgtggagagggcatagagaaggaccacgaacaatcgttgctttctctgcccatcttaaaccagataggcagattccttcaggaaaactgtagcttctggacactgcgaatcgaataagacactttccagacttcagtaaaatgttacgaatatgtagattaggtatagaaaggctgcttacttgcaattgcatcatctttggccataaagtagctattgctatgcctgtctcgatttttcttttcacttcatcttattttgggagccatttcacagtcctttttgatactttcatgtcaggttctgataaacctgataacctgagtcgctgtctcactgatgcattcattgcatatgaataggcatccatttgcaacgatgacaagctcacacttgcatgtctacttcatttccattggcagtcatgtcgaaaccgatagccttttgctttatatcctgtctcctcatgtcctccatacacgttagcatttgggcatttggcgccaactttctagactaacaaacgctatgtctttcagtacatctgccttgtgattcctagctgataatcaattatcacatcaacaactttactcaactaaatcactgacttgttttgtttcaatttgagaataacgttacattagccacagaatttcaactccgtgagtataatacttgagtgagtttacggcaaacctgacaaacaaaatttgaaatgtgtttctgacttgagcctgagctgcaggtgcgcacaccattggcgtcgcccactgc

SEQ ID NO: 14790 - DNA, 726 bp, Brachypodium distachyon
  Intron number 1 from transcript Bradi3g37350.1 (locus Brad i3g37350) derived from phytozome v7.0 (chr-ID Bd3; pos 397 46289 to 39747014)
cgtccaatccattcaccttttgcttgaataggtatgccttttcagccttctggccttttccgtcaacaaattaaactacactaactttatgcaatgtctacaacaaagaaagattgtttgaattggttggcaatctgtaacctgagaccatacttcttaaattctgatacatgtcttatccgaaatctaatacatgtgttcttagatttgggtgacaggattgaactagagtcattacatattttccccgcaaaaaaagagagtcattacttatttggtcatagtattttctgggtgcaattccgagtaccagaaccttgtttttttggtaaaacatgcctaaatggagttgatatcttgttttaatcaatgtttgctcaaattttaagtacaactgttttttagtgatacatgtacagtttgcttcctttatagcacgccaccacaatagtctcagaatgccccttctgcacttctggtgttttatctaatgaaatcatgctagtgtgactggaatcataagctgtttatttggagaacatagaaaatcataagctgttggctagaatcatgttagccaacaaagggtgactagaatcaagctccattatctggaaagtttgtgccgaggaatcatcaactcaaaaaataaaggaagaggaagactgcttcaaattcaagttgcatttttgtgactaattcaatatttattttgttccaggagtg

SEQ ID NO: 14791 - DNA, 771 bp, Brachypodium distachyon
  Intron number 2 from transcript Bradi2g45200.2 (locus Brad i2g45200) derived from phytozome v7.0 (chr-ID Bd2; pos 455 83505 to 45584275)
acctctgcaccgccatcgccaagtactgtcccaatgtatgttaactctcatggaatatagacctgtcgctgatttactcgcgctgttgattgttctggcttccgtgggtgcgcagtcactacagatcaatctagggcgtatggaaggcttgggcactccgtactgataattttatttactgtacaatataatttgtaaagtgaacatggtttggttatcaacactcagaccagtacatgtcttccaaatgggcagcaacatgtctgcctttttggcgctagcacttccgatctcctgttagataatttggtcccttgttatgttactttttgttgatgcaaaacttaattgctttctgattcttttgtgtattagcttgacaaatgaaaactagctcagtgttaccctggtttgcctcgctgttttctcttagaacttatcttttttctatgttgactcttaggcatatattatgatatggactgtctttatatacatatccgtttgtcctatgttttttctgcccatttgttaaacctcttatttacatttttcaaccgaaaagaaatgataataaatatattatgttgtcattgaaaaaatcagtctgttagctcacaatgtatcaaatttcagtgtatgttgtgtcaggaaatctttatgtgttacatgatacatttgatagcctaactacctcttttgctgcttaagttcatttgtgcacatattgctgcttatttgatttgatttgtatcttaggctcttatcaac

SEQ ID NO: 14792 - DNA, 840 bp, Brachypodium distachyon
  Intron number 1 from transcript Bradi2g60090.2 (locus Brad i2g60090) derived from phytozome v7.0 (chr-ID Bd2; pos 575 12979 to 57513818)
ccgaggccggcgccgccggcgccgaccagcttccggtacgcgccccaggctccctctcattgtccccgcccttccattttccttcgccattattcgtttgcgctgattggaccggacgtgaatcggagacctaaatcagagtgttctcgcttctccgggtcgttgtgcgggctctgcgggttcgcctaggcccgaatgatcctagggtgagatgctggtggatttgatgcggagttctggtaggggggatcagggatttcgcccgacttgtacgggagatctcatctctgcattcgtttcggtattttttgttcttctgggactcgatcggaagggggttctctttttgtgttttttatcgttgtgttttcctggagaagatttggtttcggcattttgttttgctgcgaatgaatgatatgtgcaggaaatgagctagccttcataatcggcttcacaagcgtttttcttttctttgtaagatttgattttacaagtgagaaagagcatatctatgatggaaaaatgccgatattgtttacaatcacttcgcaattgtaggaagggatgggattgctgccaatagaaaaaaaattgattaaaaagagggaaacaccaattttcatgtcttcaggcaggacattttatccatttaagttccgatgatagaaaagaagagttaggatgtatgtagagtaccagggataccttttatgagcctgtacttcctaagttcttacagaggcatggagcagtatgttgctccaccacagagacttcctaactcttattcatgcattttcagtggcggcaacgctacaggaatctactacttctagc

SEQ ID NO: 14793 - DNA, 680 bp, Brachypodium distachyon
  Intron number 2 from transcript Bradi3g10170.1 (locus Brad i3g10170) derived from phytozome v7.0 (chr-ID Bd3; pos 830 9450 to 8310129)
ccctctccggcgagattgttccagccagcaccgaggtgcgtgctgccccatctctttgtctttgcatttttttccctccctttacgctcttgacctgagtacccgacggtgcacctgtacatgatgggagcggattccgcccgccagattcttggatcttctgataaaattgaatgaaattgtttccctgcaaaaaaaaaatcgaatgaaattgaggatgaggagaggcaagatatgtaggagtatgttgttatgtgttttttgtttatgtgtatgcatcagcaattgttgtgtttgaactaaccaatttgtgaaaaagaacagaaaaatgaagctgtgaattagagagcagaagggcaactcagcatttaataagctcaatagctcattagagagtaaacttattcgaatttgttaaagaaaacgctgacaaatcatcaaaatgaacgaccaacttttgggattatgtcaacgaactttgagggaaaacaccagtttcccatttaataattatcaattacaccacctgatcctccgttatctcattcccattatgttgacattacgattcttttctgggccctgcatcaccttatttcagttctgcaacattgagcgtggtatttcatttgtcaggtctaacaatgttttcatatgttggacattgtaggtcttgaatt

SEQ ID NO: 14794 - DNA, 1040 bp, Brachypodium distachyon
  Intron number 2 from transcript Bradi3g44140.4 (locus Brad i3g44140) derived from phytozome v7.0 (chr-ID Bd3; pos 457 79059 to 45780098)
tcgtaaagtaaagaagatactcaaaggatttggtaatggagggggaattttttctctttaacttaccttatcttctccatgatttctataaggctctgttcttggtactagcatgtttttttccatcggtgtttctcttagttgcactgcagtttctagtgttcagcgtatgtctttgagacttcgatggttatagattgtttggagagtatgtattctctccgttcttttggccagtttgagctttttttttttggagccagtttgagtttggcccgggccatttggaattctgttgctctattttgttttctgggggagggctaaattttattggttgagctcttggctgatcaaactgtttactcatttgatttttttttcggtccttctttctactactttttattgtaaagagtttgttagtgtttactaagtgtatccataaaagtctttgaggttcagattttctcttcaattttcgtttggactagtctatctattttcctttttgcagagtctatcttttctcccttttgcaaagttaggtacagagacctatatttccagtcaactaaatgtatgtatttaaaagactaatttggaatccagttcacttgattagaccttctttgagtacacgttcctctctgtgttgatgataggacaaacacgactatacataacttaaaacgccaaatcagatagattcataggaaattacaacttgtagtatgtcactccatacagcgcaccttaaaaaaggttttagatttcttttaaattgttgggtattaaaatgctgagccatccaaacctcgcagttttcaaaatttgtacagctcacaaagccaaagactccctagaccaattacgtgcagttattttagagaattatctacagttttacagttactttgtgcagtcggtttttagaaatgaattattttctcatcattgctgatctgattcaaaacgtgagagttggccaaatgagctccaagtctaaaaggtagtatgatggaatgcaggagtggaag

SEQ ID NO: 14795 - DNA, 912 bp, Brachypodium distachyon
  Intron number 1 from transcript Bradi3g14370.2 (locus Brad i3g14370) derived from phytozome v7.0 (chr-ID Bd3; pos 127 82777 to 12783688)
aggataagggtatgtcgtgctattctgcttcagtcctagcttggaccttaaaatgttctttctagtaatgtggttatggtactggcatccttgctagtacttgctagtagagataaggggcgacaaatcagttgtattgccatttttctatttaggacttactagttaatgcagggaaaggctgcgtacaaaagacccaaagtggtcggacccttccccggaccctgcgcaagcgggagctacatgcaccgggctgcccttttttttaggacttactagttaatcactatagctgctatccatgatgactattgtttattcgatattaaaactgcttctaagcgcgtgaagattttcttgccacaaattctggggacttaataattttgatgctattgcccttttgctatggtagattcttatttgacatatagatcagatgaagatgtcagatactcagatcattaatgttgtttactgtttagtgtgtgtatcttctgaatgaaatccgtttcaactagttatattaatatctacacttccatatgtacataccatttctatgactgttcatcagtaccttgatatgtaccatgtgtaattgcatgccataataatatggaattatgaatagctctatggacaatttcttgaatttttcatatgatttttccttcgtgggggattttcaccttttcacaagttatattcttattgactaacatctgaagtaatatgaaaaagtttatttgattttctagtttttcttaaatagtcatttttagcatccactttgtattgcaaaacaaaaacacaagtacacaacatgctagttctatgataacactgtcgttttatccccaggctagcatatttggctaaaccctacaatttcgtatttttggacagtcg

SEQ ID NO: 14796 - DNA, 833 bp, Brachypodium distachyon
  Intron number 1 from transcript Bradi3g38670.1 (locus Brad i3g38670) derived from phytozome v7.0 (chr-ID Bd3; pos 411 63088 to 41163920 reverse strand)
cctataatcaaggtataaaacgcccccggaactttagctacgtagtaggagtagtttcctttctaatgttcagttgtacgttttccgggcactgtgtgagttatgagcaaaaaagtgtcatatttttagaaatttctatttcacatattttgctgattaattgcaattatgttataatttctctgggaagcaggagtctgcttcagttgcgtttgtgctctgtttctcatgtctcactttggaagtccagaaacccttctcctatctgacttgcgctggactttgcttgtacttgttccctttttacaattagagcgctgatgaattacataaagcctacatctgatcatgacactgtttaactatttacacttgtttcccagttccatttcagttttgttatcagactcagacattgttcactcctgtaaaggaatataaactgtaattttacccgcaaaagaaaaggaatataaactgtaattgaatttaacgaatcatactagaagatcattacaagccgacagacagctacacaaaaaaggcagatttggtgtgggaacagaataacccactaagatgaccaagctccacaacattcaaactgcagaaacgctgcaaacaacaaacaggaagcactatcatctgccagactataaataaccacagaggcacctatccttccatatgactgaaggctttagaggtgatgatcatcagcctcccagagccctactgacgtgcacccctcaccatgaactactgcagaacagaccaatgatcaaacaagcaacattacttattgtgttacatggaatgtgtaggtaggaaga

SEQ ID NO: 14797 - DNA, 553 bp, Brachypodium distachyon
  Intron number 4 from transcript Bradi2g56090.3 (locus Brad i2g56090) derived from phytozome v7.0 (chr-ID Bd2; pos 544 99052 to 54499604)
agagattcagagtgtagttctggcagagggtgaaggtacaatcttcaatatttcgtaataatgttgtgctgtatattatttcttgaaaaaacatgctgtacttttgctcttggcataaaataggctgaaatagccagcaaaatttataagaaatattttactatctactcttcctttgagttcttttttttctgcaactatagtttacagggagcatgcttgaccattcaatcatacatagtattataaattgtctctgcttcaatattttgcatgaccacctgagtttgtaattttcaccaaccatcgcctgcatgggcacttggattttcagcttaagacttggctttttaattggttttagcttaggtttgtaagttgaactcctagtcacatatataccatttctgttgactccatgtgtggctgtagagtctggtcagttcttgggttttgttaaaatataatcatttgtattctagaatttatttcctatttgaagttttgtgatgtttcaggtgatagctgcttgattctgggaactgttgactct

SEQ ID NO: 14798 - DNA, 321 bp, Brachypodium distachyon
  Intron number 5 from transcript Bradi3g10640.1 (locus Brad i3g10640) derived from phytozome v7.0 (chr-ID Bd3; pos 883 7937 to 8838257 reverse strand)
gaagataagattgcctgtgaggtctcttctcttagtgttttttttttttgtcaatgttgtaggaaactttttggctatcaaaatttggtcaacttagtagaagcagcagcagcagcagtagtattgcagacttcccttttatctcacacaaaatgtttttgcaattctgtcattttatcttttcttatgatactttttgagtcttgtgttgtacatatccataattaaccctcaagatatttttggtattctgtttatatgatgtctctctctcctattgacatctgaaggaaatccttcttgcagttgcattcagactat

SEQ ID NO: 14799 - DNA, 359 bp, Brachypodium distachyon
  Intron number 2 from transcript Bradi2g60700.1 (locus Brad i2g60700) derived from phytozome v7.0 (chr-ID Bd2; pos 579 83090 to 57983448 reverse strand)
aaggtatacatactgacacttttgacctttccagcatttgtgaacgtgagttctcgtagtattcttcacatttgaggcctgcaaggttcgccccttttctgtacaacaactatgcatctaaaaatttcagaaaatttacatttgagatctgaaccattaaaaggtaatacaagaattaatcacagagtgcaacccaaaccgtgtgaaaatgaagacaaagactgatgcaagcttccaaaattaatttgacctaatatgttggactccgaaagttgaatgaaaacctcccactaatgcagctgtgatctaactatatgatcttctaagctttattttctgtttattttgcaggttctgat

SEQ ID NO: 14800 - DNA, 1020 bp, Brachypodium distachyon
  Intron number 2 from transcript Bradi3g33430.1 (locus Brad i3g33430) derived from phytozome v7.0 (chr-ID Bd3; pos 358 06404 to 35807423)
agaggcttgttcccaaatcactatacgaggtataatcacattgctaaatcttgtagtatttgagtggtcaagttctcaactgctgtattgtttcttgcatccttgattgtgaattccatcttgcctacacggcaccagcatattattaccaaattgtctgcattatgaaaccagccatccactgttgatctgatctgtgtttgaaggatcaatatgtccagcatgtgcaatggctgcagaacaattactgtgcgtatgtttggctcgtgcctagaatagccttgccaaaaaaaaatgtcagcacatgatattggtcctcggttgatttgttgccaaaattttcttgcatatgggtttgttcgaaggatcagtgtgtctagggtagaagtgcaatggctgcagaacaattactgttggtatgtttgatttgtgccaggttagccttccccccaaaaaaaaatccagaccatgatattggtccttgttggtttgttgccaaaaataaaataaaaaatcttgcctatgagtacccaccccccacatatgcttgccaaacaattggccaagtgagggtgcttgaatccttcactgaaaaaggatcaaccaaacatacccacatttgtttgccagcttggtgtatatccatcagatccagtatttaagcaatgcttcacaagcccttttttggctgatgggtcagaggattggtgcttgttaggtagattcccattgtgcgctgatagttgtggaccttctgatgaactgaagagctaatatcagtgtcgtgttcactatacatgttcaacaatgtttaactgtaatatgacagcagaagtgttaatttcaacatagttgcaaatgtgtcaacttcaaagaaggattagttttgcttatctctgctttttgtttggttacattgttcaactaagtagcatcgggtcctcttcaagatcattaccttcggtattatatgaacgcaccagcactccataagttaacggtcttctttattttaggctc

SEQ ID NO: 14801 - DNA, 503 bp, Brachypodium distachyon
  Intron number 1 from transcript Bradi2g57150.1 (locus Brad i2g57150) derived from phytozome v7.0 (chr-ID Bd2; pos 553 75677 to 55376179 reverse strand)
taccttcctcacacagttctccgggttcattgagggtaatggaatgatcgagctgtgctcttagctcctcttgctttgtgcttgtctggcctaagctgtgaaatactgacaatagcgaaatgtcttcttaagttagtgcgaattctgcgctgaaacatagtactaggtgattagataccagtggctttttagcaagattttagaagtttagacttcatacttcattgaagaaatatctaggtcttgactagttcacaaatcaaaagaattaaaaactaaaaagatcagtcaacttattattgttaagaatctctccattatgcaatatggctaactaaagttgttcaaagtgtattgtgtggtaaaataagggccgcaggactggctatatgcagatctgtagcttcgttttttatcattataaaatctttcaaataaacgttcatccttgggttgttttgcttaagcgcttaaactgttatgttactttatatggacaggct

SEQ ID NO: 14802 - DNA, 646 bp, Brachypodium distachyon
  Intron number 2 from transcript Bradi3g34990.1 (locus Brad i3g34990) derived from phytozome v7.0 (chr-ID Bd3; pos 373 71167 to 37371812 reverse strand)
agccttgttaacatcaaagacctaggtgacacggagtatgacacctgtacagtttctatatgctgtagctgaaacaagtgtatccctttaatctctcttcgtttttttcagagtatcatagacaaatagttgtgataggaggtattttctgttatgctgtatatctgttgcaacctagagctgaaatgttgtgagttacaattttgtcgcatatcaaaattagggaacaagataagatggcatattttaactgaaatatatctaaagttgtaggcaaatgctcgcaacaagcttgtaatacagtaatctacccaacaaaaaggaaaggagtgagttaatgatggtattaactgtaccattccatcaaaacattatcaattaaatttatgaacgaattgtggaaagtaggatggaactaaatcaactaatgagcactcttggaagttggaacttgtactatttgtcttggtcatatgttctctataacttatctgcaggatggcgctgaaggaaaagtcaggaccatgtaatcttgtacttgaacggccatttgctccttatccgatacatcagttgcatcaaaatgaagattatcatatcctatttaacagggggagggttgctcttgctacctggaatagtgctc

SEQ ID NO: 14803 - DNA, 877 bp, Brachypodium distachyon
  Intron number 2 from transcript Bradi3g36320.1 (locus Brad i3g36320) derived from phytozome v7.0 (chr-ID Bd3; pos 385 81006 to 38581882 reverse strand)
ttaacgcccgaccatctgcacgcattattgccaaggcaaggccaaaactgtcactatgtttttcttcatggccagattcctgaataaagtagaaaactgaatgaggagagcatccctaagttcattattatatggagggacagtaataacagtggtgtttaccactagcaagcctttgttggctagagcgtctcgtttgtcatgtggaggggcagaagtaaccttggtatttctccctaaggaatacattgttgggtagagcatctctaagcctttgtttatggaatggcagaagtaaatgtgatgagtacctccaatggaaactttgaaggataccacctgtttatcaaacagaaaggcctaaacaaaaaaaagatactttctggagttcctgcaattcgatgtgtatggtacatgaggcaccgaaggaggggtctccactcaccctgttgctatgttcaaaactttatggagttcttgcaatttgatgtgtatgggtccatgaggcactgaagggttttggaactgcaatgtgccgctcttgagacagttctggactctactccacagaggtgctaggtgcttctaggctgtctccagagcaagtgcttgagccatttataaatttggctttgatatcggtgatattgttggaacccttgtcctccccattgttaacttcatgcagtatttcatagcttagctgcttttcagtaacttgttgcttctctaccataatggttgataccaagtcaatgtggttcctaattgttggcatgatcatatcaaacagtttgaggtggtattcttctatggtgacatgtttcctcacatgctggttctttggcattttcagtctttcagcagaaccaaagat

SEQ ID NO: 14804 - DNA, 658 bp, Brachypodium distachyon
  Intron number 1 from transcript Bradi3g05780.5 (locus Brad i3g05780) derived from phytozome v7.0 (chr-ID Bd3; pos 411 1216 to 4111873)
gggcgtcgacgtcggcacaggcagtgctcgcgcaggctcgtcctcctccgactcctttgagtccgcctcccgccccttttccttggctagttttagtagatagacctctgccgtttctggattcaggagcagtaattcagtaggctagcagtgctgctttggtagcgaagctactacctttgtagtcttgggaaaattccactttcgaggagtatttttactctgagaaatactagttggtccactcagtgatgaactgaatgttggcttcatgggaggaaatacgtttgagtttgctgtcatttccatacgtttttttttaagatgttggtaaggccatgtacaatggggtgatgtcagtcttttcttaggataattgctgatgtggaagagagaggaacgaaggcatgagcctttctcttaaataagagatgatgttcacaagaatgataaggcaaaaacagggcaaatttgccgttatactagatttcaccttttattaacatttatttaactaattttattcatctaagcattaattgtgagatatggctctaagagataacctattgtacaacatgttttcttgtcaatcattgtacatgcccttgggttactgttgtaaatttttcgttatcctttgatgcaggcctatttg

SEQ ID NO: 14805 - DNA, 668 bp, Brachypodium distachyon
  Intron number 2 from transcript Bradi2g44040.1 (locus Brad i2g44040) derived from phytozome v7.0 (chr-ID Bd2; pos 445 36791 to 44537458)
atctccacgcctttgacacggaacttatacctgatgtaagacgacagctgcatttctagaagaaattgtttctgttttttaaaccatacatcacttctgttttgatgatctcgtgcggatattttgggtttatgttctagattgtttctgatgttgttgatctgacgttttgaatcccagtgtcaaggtatggccgcataagttgtcagaagtatttacttctctttgattgatcagctaccggaaagcaaacaagaactttgttgttttttgttttggtactgatcttcttttaggcgtgttaggacgggtatgcaatttctgagggttaggatgtttgagtcttaaacaagtactccctccagtccataataaccgtcggggatttagtacaaagttaaatcccggacacttactatggatcggagggagtaatagtttgttggattatatgtggcattgagatgtggcactgcatcaatattcagtacttgttgtatgatcaaacatacagtactacatatctgtcctactcacaatgagtattgatttatttaagttacacagaccatttgatgttacagcaaaggaatacagatactattttccacactgaagttcctgtattaatgggtacctaatttcttatacagtttcaagtacaaggg

SEQ ID NO: 14806 - DNA, 747 bp, Brachypodium distachyon
  Intron number 1 from transcript Bradi3g01750.1 (locus Brad i3g01750) derived from phytozome v7.0 (chr-ID Bd3; pos 109 1705 to 1092451)
ctcaccccgatctcgcgggacatctaccactccaggtacgccccccgcctccccctcgccgcagaccgaccttaccctcctggattccggtagagcttcttccgtttcgccacaaccccacgtcacccaccaaccgccaggtctgaattggtagtcgctgaatcaaacgtctcgtaaattagtaatttttctgagtgcatcagctgcccgttgcgattggttgtggacttgtggttctcactcccaatgcgcgtactgctagttgatttggaattggtctggtctttgatgaatattttttgttttgaggtatctatcacagtctgcggagacagcatatattatagccccctccctttctactacagtacactactatgctcctgctcggcaaccggaaatcccgtgttttgttagctagcttgatggaagctatgactgtgtgcgcaaatcatcgccagcactagtatgatatgaatctgagtgagtgaaatgcttcctgatgggtactcttttagggcgcgtaatgccgccgggtctactagcatttttgtatttgcttcgtaatcctagatgtaatgtgggagcctgcattgtggcgttgcttgtctgcttatcacttgaatcaaagtaatgttttttctcctgtatcgacttgccaatttatgcgctctcttctttatgctggtggtgcttactgttgtggtaactggttctgtttatctatttgtagtgattctattctgc

SEQ ID NO: 14807 - DNA, 913 bp, Brachypodium distachyon
  Intron number 3 from transcript Bradi3g08500.1 (locus Brad i3g08500) derived from phytozome v7.0 (chr-ID Bd3; pos 668 7210 to 6688122)
ctgaggtgagttctaaagatattgttaacttggtccaatgcagaagttattaatttattctactattatttctcgacatagacatccatgcaatctgttaatcttgggagttttgatgtatctgttgcttaagcaaggaaatacagaagttgttaggttgctgctcgctcatcaacgatgcaaacataatagttcctttccaagactactagaaatagcatgcgagttccatgttttgataataaatacccaattttatattgctctttctcagttgataataatttcccttctgaattgtcaaattaaccacctaggaactggctggttttgaatgttttatccttcagcataatgctagttgactggtgctctcaatggttaaggcttaattggaggttcttgatttatgctgcactgaacttatttttaacttgttgtggaatgatagccgtaaaagaagaaaattttctggttagccaaacactaaggaaaagttggcaggacaaggcagggttatcataatcaagcaggatgtgaacatctcagtatttcctagttgatagaattcattcacatgtttgttatgatatgtatagatatgaacatctcaatattttctaatcgataaagttcggtcacatattttatatttaccatggtcgattaggaggaaatgcattcccaaccattcaaccaaaattaattatttactaaaatgaattaagagaaatcgcctgtatagtgtgttctcagaagcataaataaaatgacaggttctacctctgtcattgctgtatggtaaactagttgcaagtttgatagtttatgtcgtaatttttagaaacacataaatcttgcattttgcacctttataggttcttgtgcacctgcggggtaacaccactgaaaa

SEQ ID NO: 14808 - DNA, 329 bp, Brachypodium distachyon
  Intron number 1 from transcript Bradi3g34060.1 (locus Brad i3g34060) derived from phytozome v7.0 (chr-ID Bd3; pos 365 04256 to 36504584 reverse strand)
aagtggtaattgttgctgcgaagggacaggtaaggtctttctgattctttgtctccttacctctacaatttcatgcttaatcggtaaattcaccatttggatttagatagtttgttttgtttactcgatagatgtgatgctgtataagagatgagacggcacataaagcaaaatttagaatagattcggctaaatgaatttttgcacattactagtagaagactagtcatcgtgatcgaaaaaatccatgaaccgatggaaccatcttttttcttcttcttctcatgtctgtagatcaaagtgaaggtggaaatagatcaatcggggca

SEQ ID NO: 14809 - DNA, 847 bp, Brachypodium distachyon
  Intron number 1 from transcript Bradi2g40090.2 (locus Brad i2g40090) derived from phytozome v7.0 (chr-ID Bd2; pos 400 37186 to 40038032 reverse strand)
cggcgtcgtcgtcttcaccgcaaggaacgaacaaggttgtttcttcttaccgtacggaattcttccatgatcctattattaccaacgacttgagagactacggaatagtacctgcctagcatctaactaactcactgcactagatcgttgccgccggtgatgcttgtcttacacttttaagttggaacagtagcggaggtaggaaaagaaattaggggcgacggatcgtttaatccgcacacaaatacagatacgtactatgtaaagcttataaattttgatgtgcgcggaagccatagcttgccatattggtagctccggcatggtacttgttgcatttcctagtttgtgcatcctgtgcaaatacttctatcacactatggatatggaatggttctcggctctcaaccaattagcctgccccatgttttacaccacttaaatttctttgtttcttaatgtggttgaatatatgctagctgagattttaacctgtgtccttttccccttttgaaacatatcggttgagacgccgcaaaatctcttccaatccttaatgttacacattcatcacttaatgatgtaatcagggtttaacttcttggtgtgcaaaatcaatgttgaattttttttactataattattaactcccaacatatgatacatacatcccaaatcatgcagtgaatacattgtctcttcaaatctgttctggagttttctacacatccccacaccatatcttgttggatacatcataaatcatgcagtaaaataagtttcttgctcgtggtaattgcatattttagctcaaacatgtggttatttcttgtctgcagtggacgta

SEQ ID NO: 14810 - DNA, 802 bp, Brachypodium distachyon
  Intron number 1 from transcript Bradi3g14070.1 (locus Brad i3g14070) derived from phytozome v7.0 (chr-ID Bd3; pos 125 04699 to 12505500)
aagtcccgcgacgccgcgtggaggtaccgccgcaggtatacgcccactccccctgctcgatccatttgattgattgcttgaccccgtgatcctgccctttgggagctaatttcgatcattttgtctcactgtgatttgctccattagcttaactaccaactttatgtgaatacaaatctcgtggttgctgattatgctgtatcattgtttttgttcctgttccatggtagcaacatttcatccacgttatggacatgatgtttgcatctaaatagcaggaaaatccatttcacagtagattgctgtgttgatcatatcaggtcacagtgcatacattacatagtagcaatttaaccaatcaactcgagctgtattgttcaaactaattccaaatgcaagaaattgtggatgtgaaatgattcatgtcagaggtcgtacatctgtcttcagtatttgaattgttttgtggaccatccatcagctttgtatctatcatgtgcgtcggcgattattatcttggtgtcattgctaatcatgaattcactggtaacaaacgcgcattgccaattcgtaaataccttaacgctgcaccaagttaactatctgttggagaatcgtgtttccaagtttgcgctgaacttcatagtgtgcaaggggcatctatctctacgcttgaaaacacacagttacagtctggttcagaaacacttggaggtcattcagattatagcactgttcttcctagttggtgctaatctcccttttctttcgcgcaggcgcttcaagggtccatatccattcg

SEQ ID NO: 14811 - DNA, 904 bp, Brachypodium distachyon
  Intron number 1 from transcript Bradi3g18930.1 (locus Brad i3g18930) derived from phytozome v7.0 (chr-ID Bd3; pos 175 04128 to 17505031 reverse strand)
caggctgccgaggaggtgcaggagtcggcagacctgtgagtgccttcctagttcctacgccttttccttccttccctgaggatccaaaagattgggttttgatgcgtgtttatcgcaggctaatttactttttgccatcaatttgtttcgcctgggattgttttgggaggtggggatgggtgaaattttggatacttttgtatagcgttgtattctactttatcaagatgtgatctccgtgtgtgcttgcttgctggtggatttagatgagtcgtgagtgtttgttcataaattttgttggattttatgctttgctgggagttcagctgcgtggtttgattggtaaactgctgttaatattgtacaaaatactactccctccgtcccatattaagtgactttctattaggcatagatacatccatattttgacaaatttgagtcacttaatatgggacggagggagtagctaattgtgtatgtatttctagcttagtacacagagtgttgattttatgtcttttggtggcatctctgtcaaacagcccaggttagcagcctgacaatctcacctctagttgactagatgttctatgtgcagtatgaatagattaaatttcttggttgatggtattacctgttcttaggagttaggactacaaaaaatgtgttgctttccatgctgagttgacctatttggttttctttgcgataccttttttaatgtctggtcttccccttccttgttaacttgttaatttgttcggcgtggcaatttgtgtgtatcaatttagccatctagctttaattggatttccagaacatcaattgtgagcttttgttttagacatttctcctatttttccatgtgaagttcttaagtttgctgaattgttctttcagg

SEQ ID NO: 14812 - DNA, 887 bp, Brachypodium distachyon
  Intron number 1 from transcript Bradi3g40920.1 (locus Brad i3g40920) derived from phytozome v7.0 (chr-ID Bd3; pos 429 95761 to 42996647 reverse strand)
agtccaggagtgagcacaaggatctgctaagtgaggttcatgctttttacctttgaactcacttgccaagttggctgcattttatgcttcacaaaacggtgtcgttgcactaacttggcagtggatgacaagatgagtaattgagcatgcttaaatgaaaagggtctttgcctcgttgtatgcaggctaaaatacaccgaatcctatttatctgttggaaatagagggtgcatgctaactatatacctgcctctttagatggagattgtctgtcattttgtgagccttgttttggacatattgtctagttgtagcagaagttacagctaacatattttaggtttgttctttgtagacaagaaatgtttttctattctgtactgatctgaaaaccactatcctgctgtgtgtcaacatttggagatcccttgttattagtatctgataaagtgataatgctagtaactattgctgcatctcggtagtttagtttagctcaacttacctagaatacaggggtataaagtctaaacgttttctctgaaatgttgttgtacttgaagtaagttttccttttgatctggctctatggatctccgttcgcactctgaaacttaaatgttgatctagatgaatttaagataccctgtgaaacatatgtggcctgattatccctgcctgtaatatgattatgttggtttaaaaaccgtgatgaggtcttgtaaaattttattacgatctatattcaacatttgcacctttatgttttcatggttactttatttatattgaacctttggcaccatttctatgtttgctgttattgatgttgaatctgtggcaccatttcaggaaaagcgcaaggcgaagaagcaaaaaaagggaaa

SEQ ID NO: 14813 - DNA, 742 bp, Brachypodium distachyon
  Intron number 1 from transcript Bradi3g26930.5 (locus Brad i3g26930) derived from phytozome v7.0 (chr-ID Bd3; pos 277 10676 to 27711417 reverse strand)
cgccaaggagttcctgcccctctccaagctagaaggtgctaataatggttcttggttacttacaacctccctactcgcttaaggtctctgaaggcctttatgcaactgcttgaattaatcaagcaattgaataaatcaagcaattcgcataggtttccctgagattgcatctgaaatgatatatgttctattgttcatagaggtttagatcagaaatttcttctgtcttttggtttctgtatttaccttatcaaaatttcataaaaatatgcgcaagatcttttcctgctgtttcccctaaaaaaggttgatagatgttctcacatttaataatgctgtgtgtggacaagttcttgtttgttgtgcagcattagtgtctctgggaaattatggttcctgagcaaaccatgcaatgcgacttgcaaactggtataattgtgaatggcatcctgcaaaatttgagcattagccacatggaagagatcgatttaaaagtatgggctgaccatggttctttatttcattctctgtcaacaaacaaacaatagaaagttaattaatacataacctgttccttgaaaataaaatgatactcaacatgattatctgactaaagcatgtaaacaaggcgtctgagcaaagggttcagttcttgtatcgggcatgcttttctaaggaacttaccgtaagtatcctgttttttgcagagattggtgtgttatattggcatttggatccaaag

SEQ ID NO: 14814 - DNA, 590 bp, Brachypodium distachyon
  Intron number 1 from transcript Bradi3g07110.2 (locus Brad i3g07110) derived from phytozome v7.0 (chr-ID Bd3; pos 527 4083 to 5274672)
cgccgccgccgcgatcgccggataccgaggtaaccgccgccgttcgccgcctttgctgagttttttgtgctttgtttctctgtctccatgggtttttgattccgctcgtggcgtggagttgccgccctccgtttttttttcctggttaccccgttaaatttggtgaatggagcttttggcgcccgtcagtggcggttattctcgaagcttgaaatttaaatggcgacgcgtttaattggccgtagcttacttgagtggagcaagtgagcaacgctgctgcgggatttagttgggcggtaagtacataagaaaaaccgtcgaagaaacaaaagattttgcaacttcagatgcccctatttaactgaagattgggggaaggcagcagctctggttctggttagtagcagtaatcaccttggctgtaccgtgctcgtgagatcgagacaggcagtagactgtagtacctctaatgcagatgctgctgtcactcagtcacctagaacagtaattgcactccgttaataggttttgatgatttcttgatattctgttctgcacatgttcttgttgtgacagattttgtaacaggg

SEQ ID NO: 14815 - DNA, 732 bp, Brachypodium distachyon
  Intron number 3 from transcript Bradi3g43740.1 (locus Brad i3g43740) derived from phytozome v7.0 (chr-ID Bd3; pos 453 68967 to 45369698 reverse strand)
gcgtcctccagactataaatccacacacgggcgaggtccctttttttaatcttttaccatgtttcgatggaagtacataaaaagactttgaattgataggacaattgagataccttatgtatcatgtaaaatttataatatctggaagggcataggattttctttcttccttgctgtgattgtgtctggccataaatatcttctctattatacttgtctgctttttgaacatttattatatgtttacaacttaacatacacaaaatcaggttcaagcacacatataacttagctagatggagcaatatttgaacacacatatcacggtcactatataacgagcacataacacatagcataaccagtatctactatggtaaagtagcatgagcctagggctaagtatgcatttcacatgtgttctcttctcccagctcaagaaatattattttagttgtttcggtgtcttcgagcaaatcacccactttttttaacagtagtgggtatataggtgtttaattgtccgataaattgatgcaaaataacaatatccaactgccaattttgcaactgttcttttcttgatcctaagtactcccttttcagtaggaatagttcagtttgctacagggctattacgttttctggaataatgctgaaatgttctagaaactcataacctcattgattagtttttgttcttgaagttcagaaggtctgtctcagctacag

SEQ ID NO: 14816 - DNA, 867 bp, Brachypodium distachyon
  Intron number 3 from transcript Bradi2g46290.1 (locus Brad i2g46290) derived from phytozome v7.0 (chr-ID Bd2; pos 466 97865 to 46698731 reverse strand)
atccttgggccggcgcagtcgccctacgaaggtatgcttattatttttgacagaatagcggcgttcttgtgttttttagggataaattacggcacttctagttagcaattattgaatcgatatgtttctgttcaaagcctgttactagatgttagagttctcaaatttttgtgttgcaatcatggtagcttctacacacattttatggttctgctgttcgatcattctggtgacttggcctcttcttgggcggttatcatgtttgatgagtctcaggtgttgaaggtttgtaactattaggaatattttccggacagtcgtacacttgttttgcttgtttcttggttttggggaggagagtcatcttctattgtttctaatcgaattgttctgttgtttgattctgtctgttttcattttgtcatgtcatattgatatgtatgccgtcttatggtacatagtgtgctacattggcttgcttaagccctttggaattcgtaagtttggtgtatgaaataggacaaaatttctatcatctttaaatggtaggaaatgactcatttaggataatggatttgttcccatttaagaaagtgcactggttgagtatcctgtgtagcaaatactccccccgttccataattcttgacgcaactttgtctagatacagatgtatctagacgcattttagtgtgttggtttgctcattttagaaagaatttgcatcaagaattatggaacggagggagtactattttgcacagctgtatctgtcatgcaacagacatttttggttttctgatatcgttctgctgcctaatctgttgatcaggtggagtttttaagctggaactcttcttgcctgag

SEQ ID NO: 14817 - DNA, 337 bp, Brachypodium distachyon
  Intron number 4 from transcript Bradi2g56880.1 (locus Brad i2g56880) derived from phytozome v7.0 (chr-ID Bd2; pos 551 45160 to 55145496)
cgacaagccactgcacaggtttgttgtgtttattgttaatcataaaatatatcagtggcattacgaattctgcttctctgtttcaacaactttatgttaagctgtcttaactagtctcaaatactttgaggtgttgatggcttgatgctagtttggttagctgcctcgtgtttaattaccagatacttgtttttttcttcttcttctgatcactacgcatgtaaatatgtaaatttcaaatgtgaacctattgtacgtactctgtgtattctacttgctaatatggattttggttgtggaaggtcttggcgtctcaaaagcggcttgagaacaagta

SEQ ID NO: 14818 - DNA, 450 bp, Brachypodium distachyon
  Intron number 1 from transcript Bradi3g00200.1 (locus Brad i3g00200) derived from phytozome v7.0 (chr-ID Bd3; pos 581 2 to 6261 reverse strand)
ttcctcctcgcgcgagcgcctcccctccaccgcaggttcgtctccccttcgattctctcgctcccgaccgtttctcctcccatcaccccacgaacggattctgccctttagatccccgtttcataatcttccccaattcgtaactgaggcaaaaatcaaggtagggcggccgccctaccttgccctactgggtgctccgcccgtgcttggacttgttgggtcgagttgcagtaggacgattgggcctgattgatttctatttgacaatcggattcttcttcggattcgaatcgctgttgcccttgattaagatttggatactttgatttgcctggttgagttgcagtaggacgattgggcctgattgaaatttgacaatcgatttttcttcgaattcgaatcgcaggaaccagatctacgatcgagtaataattcaggaaaggaacgagg

SEQ ID NO: 14819 - DNA, 864 bp, Brachypodium distachyon
  Intron number 1 from transcript Bradi2g40590.1 (locus Brad i2g40590) derived from phytozome v7.0 (chr-ID Bd2; pos 408 84827 to 40885690)
tcctcgccctcgccgcccgcgactccaccgtcgtacgttattattaccatctatctatatatgctttcttatcttgtttgtcagaagaaatgctattatgagtgtacacacgtacgagctagctagctagctatacacatggtaaaagaaaacccgggccacctttgtctttgtcttgagttagagtgtaaaactgtcgagtcgaggacaaagtaactatactactcaaacaagacacaaagtgggggcacattgctcggtaaagcagaggcaaagctatcgcggtacaatacaaaggtgcatgtgcatgacatgccacgggataattaaggactgacacggtaaaaaggtgcatgctctctgttattttaaattttaggctaaacaaacctactccactaaagttttcatcaggaaattaacggcgggagcttaattagaaaaatgacgttcagcgtttggagagtctttggactgaaacacgcttatcgtactgtccaattccatgatccactcctttacagaaaacactcgagcattaataattgttcacttatcttcgatatatatctccggtcccggcccgtgctaagtttgtggggtcatttaggctcgagcaaaaagagaaaaacaaatgattatatgagaggaacctttttactgctagattttggttacaacgcaaagatgctcggtgtgcccactcacagtcaaagtgggggctctcctcaaatcacaatcaaatctgtttaacaattccctgacttacattttcgttgctatttgttatgatggtttgtacttactatggaaaataaatctttgacagaccggtgggccagggtggatcgtgccgctaggcag

SEQ ID NO: 14820 - DNA, 584 bp, Brachypodium distachyon
  Intron number 5 from transcript Bradi3g17280.3 (locus Brad i3g17280) derived from phytozome v7.0 (chr-ID Bd3; pos 154 22002 to 15422585)
aaagctacacttgagtttgaaagccttgaagaggggtaatgtcctctcgttccattttccatcacctttgaagaaagactgttggctcttcgcatggaatccttttctagtaactaataaggatatatagcaattatttcactctaaaacatgttattacatgtccaacgtgtacagatagttgtgaagtttggtttagtctggttttcatacttcggactagttaagtagtcttcaactcttcatttgaattccctgtcattgataataacctcaatattttgctagatctcgttacatttctgtccattcttcttagacgagcatgcacacacctgggttcaagtcctcatggatgcaaatttaggttccagtttatacgaattgggctctcttttatagttttcttaaaaaaagaatgggtttatgtagtcgtgcttttgttctaagcttctttctctgtgtataatttgtacttgctagtttaattttattcccatgttccattttatcacttaccatcatgcatatctgtgtaccctgctgcaggtatctggcaaagattttagtacctgaaggttcaa

SEQ ID NO: 14821 - DNA, 684 bp, Brachypodium distachyon
  Intron number 2 from transcript Bradi2g62760.1 (locus Brad i2g62760) derived from phytozome v7.0 (chr-ID Bd2; pos 592 51182 to 59251865)
taaggaggctcggaaggaaggatcccacaacaaaggtttccatcgtgttccttttcttttccccctttctttctccagctcaagctctcgtaatgctcgttctcttgtactgccattagccccatcatggcttgcactcaaaacaatcttgcaattattattgtcttcatataagataaatatgtctagaggatcacacgctttcataagatcaaaagataggtatcaaactgtcaaccacaagttccttctcagaataaacaccctgggtcctcaaaatgaagtgaacttacggctgatacttcctgcacatgaagttcttcttcctctataataacttatgctatgtttcttcttgactatattcaaaatttggcaaagcatctacaagtccacaacatggaaaccatattctatcagttagatgtcatttaacgctggttcttctttgaggtgatcgtgctaaatcatgtcttacacttgatgccttaatcattttagcagaaggttgattactcttatcatgtctgtaaatcattttttgcctgaacctatgaatggtaaaagtaataatgtcaatgtatttgttgcgctgataaatgttgcaacaactgatttttcttagcatgtcacttttttcctttttcttgttttatgcagctcaaggcattatctaccctctct

SEQ ID NO: 14822 - DNA, 991 bp, Brachypodium distachyon
  Intron number 1 from transcript Bradi3g19700.1 (locus Brad i3g19700) derived from phytozome v7.0 (chr-ID Bd3; pos 185 76575 to 18577565)
ctcttcaccgtgccccccaagcgcaaggagttcgggtgagcattagaccacgactaaccgcttcccctgtctgggattgagggtctaccgttgggtaactaatttcgaggtggagatgagaaatgacaggtattgtttgatgtgaacaactaatctcgttgcggaattatcgccaaaacaccagtaggattgatagatcagatgggataggaatcaacactgctccagtgttggaatttggagttaattcctttcctgaagctgcagtttgactggtactccctccgtttcgtaaaggttggcacggctttgaattagaggtagttcacaaccgtgccaacctttatgaaacggagggaattgtgactatcatttgagttcagcatgagagctggaattaccccaaaacacttagcattgctgaagattttattttgtgagaatcctactctgctaaatgtagtctggaaattcgagcttcaagagtttttttttcatttctgaataccgaggtagaagtcgctttgaatcccaaattcatggtgtctgttctgtttaattcaaacaaatcatgtctggactgagatcatgtctttcgttttaatagtgatgtcattacttgatgatctttggtcaacatgcttcccattcagtgctatctcttcatgtgctgactattattctctgctggctataaggaagtccaatacatgacatgaaaagaccaatcgaagattactatcagttcaaaggggtcataatttctatctctagttgttcccatgatacttctcacaaacatatgtgtgccatctagaatgaatttacaaaattgatcaccacctgacctataatatttattggagtgctggttttggagatggcttccattacaaacaaattctgagcgaaagtcttcattgatttctatttctatcatttgttttgcatttcaggcttgacttccaccttgtgcaactcttctttgttt

SEQ ID NO: 14823 - DNA, 684 bp, Brachypodium distachyon
  Intron number 2 from transcript Bradi2g47340.1 (locus Brad i2g47340) derived from phytozome v7.0 (chr-ID Bd2; pos 476 95151 to 47695834 reverse strand)
tctgggcatcggaacagcagttgcctgctttcttcgtaagtatactttccattctattcttcaaacagtaagtacatgttacctgtcattctgtcaatgaaacattagatggcaagcaataacatgcatgcatggaaaattggttatacattcagtcgggatataacatttgtaactgaactaaactacagaagatagttaaccaagttatttatagggtattctataaacttgcgagagaggatatgaaatgagcattgagcaatgatgcactggcactgcaatactcgaagcagttctctcaaattgttttacctatttcttcgttagattccaaagcatgaaatggtacccttttgtattaacacacatcaaaacatgaatcacttgtatttgtattagaagaaagggcccaaatttcacaaaagctacacagccaccatgggtggtgctgggctgccggcctgaaacagagaaaacgtaaaaaggaaaacaaaattttattcgcatgtgaatggtaaacatacagatacagtgatcagaacaaaccaatcattattaatgatcatgcattcatctcatgagaactaccaactgcatttcccaatgatctagtaatatacttggttaacttgcatactgatggcagaattgctagtaaaaaaggctcaccctttatttgtt

SEQ ID NO: 14824 - DNA, 873 bp, Brachypodium distachyon
  Intron number 1 from transcript Bradi3g05160.1 (locus Brad i3g05160) derived from phytozome v7.0 (chr-ID Bd3; pos 358 7472 to 3588344)
aaggtctccctcatccggattggcacgcgcgggaggtgaacaaattcgaacctttgccctgtgtttctttcttcttgggattggagcctaggatggtggcgaattttgcggccgagttcgtgaaaacccgtgccttgatgtgcttactcggtcgtgattcgggggttgcaatgtagtggaggagttgtctgtgattttgaggggttcgtagatttacttttttttcttgcctattttgtgtcctgggaatttgggttttgagatgcggctctgatccgatcgcgtttccagatgccagatactgtgaaatctgggtgaattcagatgcgaattggtgagaatggctaccaagatctgcgttttagccccgtttcgctggaatcgtgatatatcatcggagcagcatgccgttgaccctggtagtgctaattactgctgaatagtggactctttgccatcagcataactggacctgcagatgttatctgtgcgatttggggccaatatgagacgttttggtgtttttgagtttaatcaactagctgtgtgttccatgtgggtgtatacacggtcggtgtagcttttagctgccttttgcttgttttggcttagtgaatctgatttcgacttggatctcctgggaagcttgcattgctttggccttcattttttaagctgaagaaaagaaaagaactcgaggtagaaacccccaagagaagcatatttttgaattctagctgtctttttcaatgttctgttggatgtgcttccactgctgttttctgtaccagaatatcatcttgcttaaatatgcgagtctataattcaaattattggctatgtaggacagtcctcttgcacttgcacaagctc

SEQ ID NO: 14825 - DNA, 986 bp, Brachypodium distachyon
  Intron number 1 from transcript Bradi2g52580.1 (locus Brad i2g52580) derived from phytozome v7.0 (chr-ID Bd2; pos 519 20134 to 51921119 reverse strand)
gactccgtcgagatcctactggacagctgcccagagtacgtgaacagttcgtttgtttccttagttttttctgttgaaataatttgatcatgaggcggataagttcaagaacaatcaaaggtgttaaaaaatcgatgggtctgacgtgtaacccattgttttatttaagagaacaatgtagggaaatcaatgaatagaagaaacagaaagaggtatagctaatccatgaatacttcacttagtctcttgaccttttgttttattcaatttctttcctgattgaaatgtccaatgctgtgaatcatggcccatagtatgtgattaggactgatctgggtagcttgtttaaatggaagatgcagtttaaagctgtgcaattcaaattttgtggctacacatagtcaatggaatgaaacgagtggggtgacaatgcattaagttaggtgtttgtgttgcaaatgtattccaggatgaagttttgtaaatctgtgggtaaatggctcaatgctactccctccgtttctaaattcttgtcgttgttttagttccaaatttgaactaaaaccatgacaagaatttaggaatggagggaatattttgttagcaaaacagtaattgacattgaatccttgcgaagctcatctcagccagattttttttttcttctgaaaactttgttacatagtatagtgttactgattagctcaaagttaatgtataaatgtgatcttggaaatgggtaaatagtagaaaatcagtctaaacttcttggtgaaggctaccatttcagttttcatgttatgtattgcacatttgcacttatactccacaagtccgtatacagttaggtcactctgtacaaattttatgtgttacctctcgttagtagtgagaataaaactatcagtttgggagtttttgcttagaattgcacttattactccatatctgagctttcctttgcttttctaggtttttcaattccc

SEQ ID NO: 14826 - DNA, 374 bp, Brachypodium distachyon
  Intron number 2 from transcript Bradi3g02800.1 (locus Brad i3g02800) derived from phytozome v7.0 (chr-ID Bd3; pos 175 7469 to 1757842)
ggaagtgatcaggtgagcaaagttttgtgcttgactcgcttaaccgaccttgttgtctagcattgtcataataatttggtgtttgttagctcgtcttactattaccgtgaagttagttgccacccatatggcctacaatgttgtagttccaacttgcagtagtgttctggttgcatcatacaccagtatttatgtgggccagtattctgtaattataaggtgccaagtagactgaaataatatgcagaatcacatcgtcaagtttactgattcttcatcttgcagcccagctttttctttgagattttgatttagccaacaaaaaaaaggtgatgactcatgtgtttttctttctttttgaattgtaatagtta

SEQ ID NO: 14827 - DNA, 564 bp, Brachypodium distachyon
  Intron number 1 from transcript Bradi3g10420.1 (locus Brad i3g10420) derived from phytozome v7.0 (chr-ID Bd3; pos 861 0405 to 8610968)
aggtataccaaaaccaaaataaattattacagtattacacaattttgtattcgtgtgtgggggcaggttgtgtgctaattgttctgtttctcaatttcccatcacggcttgttcttccaacaaactacatagtacaagtaagactgctgataaatgcatctcatattttcttatgaaaatgacagaagaggtcacagacagaattgctacagattgtaatgacataaaagggagtaatagaattctacaagccagggaaagaaatcgctggctgataactccgcaaacattgttttactgttgcatccatcagcaaataatatgaaactaggcgggtatagttatcacaaacacatggagaatctattccctagaactggctacatatcaatcaaatcttggtcaatgtcgtgagccattggatcctgatccgatgcagaaaaaaaaaagaaaggaaaacaattttggacccccaaataagatgatttgagtattagcagttccaatatttattcccgaggagttagtataatttatttacttgcatgcaggaacaatcagtaa

SEQ ID NO: 14828 - DNA, 739 bp, Brachypodium distachyon
  Intron number 2 from transcript Bradi3g22620.1 (locus Brad i3g22620) derived from phytozome v7.0 (chr-ID Bd3; pos 218 10580 to 21811318)
ggcggcttcctctccagggtcctcctgtaagcccaaccacccatccacagaatcctgaaatacttcttctctcgttttttttttcgtgtatgttctttggcagcggagatgggttcagaattaagttttgaagaatgaatctcctgttctgttgtgttgtttgtggtgtctacatttgtctgaaactagtcttggtaatgtgtgcttcttgctctttggatgttagtagaatcaacagcccgcaccgcacgctggttggaaaatatacacattatctgtattctttcgaggacaggaggaagcttaagaattaagatacacggcgaagtctttgatgtttgagagttgtcatgttttaagtatctctgcagtaaccaaatttcttggttttccttttccatggcatgaatccttgtcttttccttttacttgcacttgcaattgctgtgcgtttggggtcttttccgactacatgattattcttttgtatctatccatacgtacatgccacttcaaacacacttcaaacatgtgcttctctccggttcatgagccaaaagaaaaatgtagattcttcaacgttatggagataaaatattcattgctcttatcaacagccaactaccacagtgttgtatctgttgtcttggaaaacgggacttagtattatatcctgggttagatttatatacattgtggatcctcatgtgcaaactgttatgcagattggcctttggct

SEQ ID NO: 14829 - DNA, 183 bp, Brachypodium distachyon
  Intron number 6 from transcript Bradi3g09290.2 (locus Brad i3g09290) derived from phytozome v7.0 (chr-ID Bd3; pos 740 4627 to 7404809 reverse strand)
actatttctggactaggtgctcaaagcttatttctgtaagtctctcaaaaatatcaaaacttactctttttttcttcaaaagtttaaccatgcaaattatttaatgtttccttgatttgtttttgggtataaaatatgtaactatcacatgcaggtcaccctgtttgcagtgcattgtgcggg

SEQ ID NO: 14830 - DNA, 882 bp, Brachypodium distachyon
  Intron number 1 from transcript Bradi3g01810.1 (locus Brad i3g01810) derived from phytozome v7.0 (chr-ID Bd3; pos 111 4314 to 1115195 reverse strand)
tcgcgattcgtccacctcttcccgctctggttcccgtaagcacacacacacaccctcgctccacagcccgccgtccgattattgctcgtttctttttcgtccatgggtgctcctcatacgtgcgtgttcgccttgatctgttccttggcaagttcaatgcgcaatgcagcaccaatgccgcaggcttaacttgttcttgggattaactgctctgtacgaccaacgcaaacacatttatcttttccgtttattttagcgcagattatagtagcatcttagcgttctcctttggctcgttaggtattgccttatgtatatgattttggaaatatgcgctttgctttactacagaataaggaaccatcttttaaaccttcaggagcatccaagtagacatctcaaaagtgccaacttttgcttagtggagtcactcaggaggcgctggaaagtttggctttgcatatattctgtagtttaatactggattagctactcgttttcgtacacatgctagagagaggttctctaaggtggtctgtcgtttggaggatttattcgtggctttgctaaagtggccgattcaaaacttcagcgtggtcattctttattcatgtagacgtgagcgatccaaacccattttttttctaaggggaggttttgctgtggtgggttgttgtgaacccaagacatattatgcttgtttatatgttccttttactatttataatcaaagtttagcactgctaaattatacattggttacttaatgaaagtaattatgtatacgttttgcctttgacttgttttctttgttcaaatatgtggagcaaagactaatcttctttcttttgtttcgttgttggaatcatctgcagaccaaac

SEQ ID NO: 14831 - DNA, 758 bp, Brachypodium distachyon
  Intron number 1 from transcript Bradi3g03900.1 (locus Brad i3g03900) derived from phytozome v7.0 (chr-ID Bd3; pos 265 0454 to 2651211 reverse strand)
caagctgccgggttagtgttttactcatcttgccctgtctctcttttcttcgtgtaactaaaatgttagttactgccggtaaaaaaaatttaatgttagttactgatttttcatgcatggcctgcaatgcaacatgttgtcaatttgaccgttaccttctcgtacagctatttatatacgtagtatatactccctccgatcctaaattgttgtcgaaatattacatgtatctagacggtttttaacaatagattcattcatatttgggaaaatttgagtcaagaatttagaatcagaaggagtatatcatatataagtacgtacataaattgcagtagaaaaaacatattatagaagtgatttatacatgaatctagtgtgatcatatggttcgacggatctcaaaactcaaaagattccaacaaatgaatatgatcacactaggagtctaggacaccgtgcttacatatttatagtaaataaattaaaatgagagagcaagatttcttgttagcgaacacataaagatatataggacgatttttttcgtgccattgggcgcagttactcccacgtgcttttcacacaaaaattatagagtatgtagccctgtagcccaacaaaaagtatgtaccggtactatgaaaaaattgtttaatcttaccatgtgataaaaaaacataatcattttttttgttctaatataatttgaacttccaacaggctgttcaacctgatcggagatcatacgtttgctt

SEQ ID NO: 14832 - DNA, 1013 bp, Brachypodium distachyon
  Intron number 1 from transcript Bradi2g47200.2 (locus Brad i2g47200) derived from phytozome v7.0 (chr-ID Bd2; pos 475 44070 to 47545082)
gagcggtggctcttctctgagtagctttgctaaaggtttgatcctgtctcgcctctgctgtatgcatgttaggtgtgtgaagtaatggcgactaattgcgctccatgaacgccgggacctgggtgcggcaaaacgccgagcgctctgtgtgcactctgtttgtgccaccaaggcaccaacccacagatgcccttatgtcctgattgtactaggagttgccatttgccaggaacacgaggcagttgctgttcttccttgattcctgcaacttctacttgatattggacttgcaacacttttgcagcataactgcatgtgccatcataactcataatcgttgtgtagaattcacctgtgatatttctgttatgcatagagatgatatgtctcgcgatttatccgtagccacagcatcataattaattcgcctacttactagtgttatatgatgaggcactccattttcaatagcagctttgtccgtgtcctggttatgtcatgatgttctattttttgactcatcatatttgattatgctgctgttaacatgcctgtgagtacatggataattcaaacaatcggcatcattactttacacgcataggccagtttgaggagctatctctgtcttggacttctatagcccatagggagcattttaggaactgtcagtgacagagtgagattaacaagaagaaatcggctcatggtttataattggcttaacaaagaaaatttgacataaactgcatgctattttcactcaaaagtaaaatttcatcattgtgctgatgctaaagaggcctagtttcttggttgctagtctctacaacatagaaacatgtgcaactatagtcctgactgcctctttgatggtagaaaatcaaggttcttcaaactgatgatttaaattttattatttattgaccaatagggatagcatactgtaatttatttagaggattcttaaatttattcggttgataaattggcagatcagaacttctgaagcg

SEQ ID NO: 14833 - DNA, 682 bp, Brachypodium distachyon
  Intron number 3 from transcript Bradi3g38500.1 (locus Brad i3g38500) derived from phytozome v7.0 (chr-ID Bd3; pos 410 09794 to 41010475 reverse strand)
atcgagctgctacttcatcgtgggaaactttcaaggtgaatggtcaaaggaaagtggtttcttagagaaaggaaaaggaactgatagtacaaatatttggcgcctatttggcaaggtgaattgggctattcatgttttttggatatctgagggaaaactgcattaagcatgccttcacctcaatattaggccttgatctgttcatcaaaggggccatttttgttctgttctggagatttgagataaaactgcactgaatgtagcatttgtttttcaacttttagtccataatatttcttcaagggcattgtttcaagtcaccgaggcgactcacaaagcctacttatttgatttagacctgccacaaagctggaggaccagtatattaccaaacagtttttacagaggttataaacaaaaagacagaattatattgtgtatgtgaatgtgtgtttcccaattcccagtggtagaaggtatagttttagtaaattggcgcaagtttaccagtttattttcccattctttgtcttttgcgtctgtcttgaatctttaccattgacacagaaacctatcatacttcaggagaatgctaaagttaatcatattgtagatcctaattgcatttgtcttggcaccattttcagctgtggagagtttctgatagtgaatttcaattccg

SEQ ID NO: 14834 - DNA, 987 bp, Brachypodium distachyon
  Intron number 2 from transcript Bradi3g44350.1 (locus Brad i3g44350) derived from phytozome v7.0 (chr-ID Bd3; pos 461 70443 to 46171429 reverse strand)
ggattatccagtcatttggttagggaatctgataggtaatattttctaatccaaaaaatagtttcttttccacaattcaatttttaatacgataaaaaatatgcacacgacatggtgtatattttcccattttagtttaatgttttttagccatttgtatccatgctccaatttgaacatgatagatcgtcctgtatatcttatattgcaagggcctagtgcattgtattgattatatatacttagtgttatctattagctagtatggtgtttcagtctaccagaattgagcagagtggcggagacttaatgcatatgtttgatgtttatccaatacaaatattgaatttgacaaaaaaatatgtagtgaatatggtttgactgatactgttctttccctttattaggttcagttagtgctgtaagaaaacattttggaaacttttatactagcttattggacagttggtttcatatggacattatactacgtagggtaaatagtagaaaagaagatttcatgatgaagtcaggaagatattattctattcagcttgatcttctacattgtcaatcaaggtgttctatgcatgctgtgtttcatatggacattatactacatagtgtaaatagtatagccgaatatttcatgataagccaggaagatattattctattcagcttgatcttctacattgtcaatcaaggtgttctatgcatgctgttttgttccctgaaaagtcaagttattttgttgattgttttacttctggtcagatcaactattggcattggcaatgcattgtaccagcatgttaattcataagtatctgcttcagtcacataagttggctacatggcctaggtcctattctttcatggtattaggctgcctaatctcaaaaactttcatttccagtataattttaacaatgtagctcatattttgcagactcagttgttccagctatcggagaatctgttgat

SEQ ID NO: 14835 - DNA, 801 bp, Brachypodium distachyon
  Intron number 1 from transcript Bradi2g46260.1 (locus Brad i2g46260) derived from phytozome v7.0 (chr-ID Bd2; pos 466 69708 to 46670508)
ctgcagctacacaagggtcaggacttttgccttcgttacttgattgatgaggcaaaatagagattttgacaatctcagatatagcgaattcaaaattttacttttgcaatttgtaatcatagttttgccctgtgtggccgggagtatattcatcgaatttcctcctgacaacaagtgattggagagtggtagttttgaaaagtacacagttggggggatattttgtactccctccgatcctaaattcttatcgtagttttggttcaaatttgactaaaatcatgacaagaatttaggatcggagggagtattttgcaagtggttcgaactgcgttaccccagttgagaatttgttacagtaccaaggagaccatactgttcgagtatcagaagcttggaatgtccacttggtgccttcagaaaaataggaagttacagtttgtacagtggactagtaaagtattgctgcattttctgcatggttgaaaaatgcacattttatcacttacattaatgtccgaagtacaaattctcaccaaaactaatcttatagtggtgtgcatgaattggttatgcagaaagtgataagaaaatattctagcaaacaatgaagctatgttacacattttatttaggctcctgaatcacatttcttttggtctttgagagcttatagtagtgtagcttgggttctttagaaacttacatggtttcgagctggtgactttgtctgatgcactattgaagttttgcctatttgtttcagagattcttgacttttgtgattttatctcaccttct

SEQ ID NO: 14836 - DNA, 804 bp, Brachypodium distachyon
  Intron number 1 from transcript Bradi2g57520.1 (locus Brad i2g57520) derived from phytozome v7.0 (chr-ID Bd2; pos 556 57881 to 55658684 reverse strand)
tggactccccctgcgcctgcactggcacactcaaggtaaacccccatctctgtcctctggactctgcctccctccctttcttcctctccccgggaggatgtttcttttcttgcttgcttgttgaggagctgaagtgagccaagcgtagcggtctgtaaaagcgacgcagaaatctgttgctattttcttcggtgagattagcatatgtcgagatgttctttccgagttcccccgtcctctgatatttgcttcaatcaactctagtttgtgcttgttagtcatgtgactcctgtgttttcctttcttttggtttatgctgacgctactaggtgcatccctcttcctttttttctgctgaaatttgtcttgatgccctctactgttactatgaccttgatttttgtttgattaaatttctttggtcttatcgattgtgaacatatctctagactggaatttaatgtgattaggagcagcgaaagttctaaattaagcccaacgcaactaaggaatcagacgtgttgcagtgtccaaaacactgccctctgatcgaatggtttctcaataaataaaatgtgtttttggtgatgaaatcctcgtatagtgttaacattcgaatttccagcggatgatggtccatgtttatccaagcaattatttgcttccccttccagctgtcaaataattgattgtttcctttcacgattgttgtacacgtggcttgggattatcctctaaacaaaatgctaatcgtatgttggtcaactcaactggtgttgcttggatgcagttcgcccacaggaa

SEQ ID NO: 14837 - DNA, 574 bp, Brachypodium distachyon
  Intron number 1 from transcript Bradi3g29790.1 (locus Brad i3g29790) derived from phytozome v7.0 (chr-ID Bd3; pos 318 30608 to 31831181 reverse strand)
acgacctctggctgcgccgcgagggtggccgctacgtgagttgatttcgcttccccccttttctttcctctgtttgacttccttgtgctgcaagcaaggtgtttgacgaaatgcattgccgtactgcttccggcggatcatagtcttcagtattgaaacggctgcctgctttacgttcgctgctgtgtagaaagtcgttgcttaaaggtgctaattcgagatgtagtgcaaaggttaccaacgaggtttttattttgatcaccggtttctggcagtcttgttaatttgagccacatttcagctgtgaacctactatttactggcacactgagtggtgttggttcttgttttctgtgtgaaaggcttagacgttggatatttgttgctgggagagttattaaatagcttgtacacaaattttatacaactgaaaggatgcgacaatgcttgtattgttggattgtagctactaacatactaaaataggagttcattatgttttcctttcagcgcatcattaacctgttatgtatattggtctgcttgctcagttgctcaatttatttttttccag

SEQ ID NO: 14838 - DNA, 664 bp, Brachypodium distachyon
  Intron number 2 from transcript Bradi3g34750.2 (locus Brad i3g34750) derived from phytozome v7.0 (chr-ID Bd3; pos 371 24764 to 37125427 reverse strand)
tcaaaatgtaaggtttatatttcaattcattttacttactagatctttcttttcctcatctttcaaaagagatgtgttctagcttgttcttgatcattagtcgatttatattattttgagacaaagccctacacttattctgcacattatgacagtatgtactccactacgtagcatgtaatgatgaacggctttttaatgccctgcctgtcctttgctgtaccgtactactccctgctaacaactttcagaatgggtatcctcaggtgctgcctagttcgaccttttaaaaactggctgtgacttcatttttttaaggctccattgttggttaactattttctggggaaattgaaatatataggtgtagaagggaaaatatttcaatatctaaacatgggcgtacagctcatgcagtagggtctaaaattatgagaatacaagtgctgttctatattcagtcaacacttgcaaccaagtagaagcattccataattttaagtgcaaagatacatctaaaatgtatcccaaatcccattgattaaacatggtttttctcttatcatttcgcataacgaaaaaaatcgaaaacataaaaaaatttcaaaaagattccatggttggtattgtgaattgagtttggttttttctcgctgccacaggt

SEQ ID NO: 14839 - DNA, 899 bp, Brachypodium distachyon
  Intron number 1 from transcript Bradi3g01220.1 (locus Brad i3g01220) derived from phytozome v7.0 (chr-ID Bd3; pos 766 731 to 767629 reverse strand)
ccagtcaccgccggcagggttctcctcaagccgtggtaagtcaagccccgtctcccgtctctggttgcttacgttctagatcccaaatatatagatcacacagacctacgcgatttctgggtgaatacgttgtagatccgccgcccttgtctgtttgatttccgttccgatcggggttccttgaatagcagccgccggttgcatgttgggctggatgaatgagatttggggagaaactaagcagtgtgctatgatcttgttctgttcataattcatccatacctgttgttcgtctgttaatcttgtcctgtgcattcatgattgatgctaaaatcttttaccgtttcactcaatcccctctgtgaacaaggcttttgtgtacaggttttagggtgcttgtcaacatttagctgtggcagtcaccgacttatatctttacatattttattagagttgtacagtcatggaatcttgattgattgaacactggtagtattgctgtatttgtggtggtataagggacacaaaagatggcttttctgtgttttgcaatgaaaatgtgtaattgttgaaaacttcacttagtatgaatttgagtttccaagttgtgtattaattcttctgagtattttgtcttgtgtttacacatattgcacgtagaagaacttgtgaaatagcgtgttcaacaggtcacctgctactagttattttcagagcattgtatgaaatattgtgtttcccctaaactttcgcaatgaaatatatctgatgaactcaataaatgacacatgctttttgatcatcgagcgttcagcgctgtatgttttggttcttcatggtaatagatatacaagtctcatggtacaaacttgaacttctatgcagagagctaaaacaag

SEQ ID NO: 14840 - DNA, 693 bp, Brachypodium distachyon
  Intron number 1 from transcript Bradi2g58060.1 (locus Brad i2g58060) derived from phytozome v7.0 (chr-ID Bd2; pos 560 80693 to 56081385 reverse strand)
tctgcagctccgtcgccgttttcttccagatccaggtcagcgccgcctccctcgaggtcccgcttccctctcccacgctccgcatttcggtgggtttcgcggcggcggcgcggaattgcgtcggagccgcgaaaactgcggattttttttttcaaacgttttattactgctggtgcctttcgaggagtaattttctgcggagaattttcttctccgtaccgattggagctttagcttggggttttaccgtcgactgtgtacggtaagggcgcaattgttatgtatgtggaaggaagttgcaaggtttcacagtggtaaacttctgtggtgtgcttctggagtgttgtaacctggagatggtgatttgattcctgtgtctcaagctggcgagtatgtaatacttgatgtatatctgtctaggcacataggctttaacgtcttgtcggtttcgttccgacaagcaatgtcgatctcgacctttctcactcgtttcgtatgcgtgatgtgttgccatttggctaactgaccttcgtttgactcttgttgagtgtccatgagaatataacatggaacatatattttagtctaggtttagattaccttctgacattaagtgcttgatccttgtttctaatgcaattccccataatttattcaggggtgttgtatctgcttattacttgctcttggttg

SEQ ID NO: 14841 - DNA, 604 bp, Brachypodium distachyon
  Intron number 2 from transcript Bradi3g10220.1 (locus Brad i3g10220) derived from phytozome v7.0 (chr-ID Bd3; pos 836 3051 to 8363654)
gttatcaccggtaagccttaattatgatctgaacgcgctcttcatcctttccttgtactaaacgatgacatcatttgcactttcttggcatattatgttttgttttatgcatgcatcatgttcttggtgaatcccaagcaagcatgtaactataatcacaaacttttacactcaatgttttttcttaagtaatactccagtactagtattaaagtagctgctgaagattctctttggcaatcttaagatattgggtgtgatgcagttgtagaagtaaaatttctcaagaagctaatcaatcatgtctgatttcgagccttccagctgatctcttgcttagtctaaatatagattgcaatacttattcgaactgcttcattcttgcttactaaagtataatcttgtactgcagcagaacagaacatagaacaaacactacacaagattttggtggcttgtatttttcttgatttgaatcatggggtcttcgataccaaatccagatcacacatttcctttaccaactggaatcctagagtaggcagtttcaacacctcatctagtcaaatccttgcaggtcattgtgggtggtgtagcagccggc

SEQ ID NO: 14842 - DNA, 860 bp, Brachypodium distachyon
  Intron number 2 from transcript Bradi3g35220.1 (locus Brad i3g35220) derived from phytozome v7.0 (chr-ID Bd3; pos 375 26307 to 37527166)
tcgttgcctgtaactgcaataacctgcttacaaaggtgtagtatatagttctcaatggctatatgcatggtgtctggcttctccaccacctctagcatcattaccctgttcttggtgtggcgtgctgtttacgcgcggtgtactatgtgtaaatattggttgtagtggccacaatgccgattttgcggttttgattgcctaccacagagtgtcaatgacatcatatcagtctttagaggaccaatatgaacccaatgtccactatcttgagcatgctgttatgtcacagttcgtgtttacattggtgctcttacaaaatatttctgtgtagcatttacctttatatgtggcagtggcatccttaagaaattttagcttttaccatttgaaccccaaaatttgtttgtagtttttgccaatatgtgccagtgattcttgtattagttttttattttgcacaaactagtttagtttttttgttaaagcgtaacgtagaggttactgcaagcctttgaaatcaggttgttgttgtttcaacaatattccttatttcgtctgcatcaattttgagtttacacaagcctgtctcctaacttgttttcttcctatcaaaacctgtgaatgtgcatgtttgtttctacagccatattgagaagttggaattgattccggaatttgatatacaaataaacgtttgaataaatgaccagactataagttctgatgttgtatgtattctcattgtttgattagagctacaatcgatcttcctttccttagttctgaaccacttgttatgtttgcagaaaaccttctttatttagattccattttctcagcctcttttatttcacaggaaa

SEQ ID NO: 14843 - DNA, 891 bp, Brachypodium distachyon
  Intron number 3 from transcript Bradi3g33850.1 (locus Brad i3g33850) derived from phytozome v7.0 (chr-ID Bd3; pos 363 02940 to 36303830 reverse strand)
cccaggcgccggttcactgatttcggtgagcttcctctctctctgcccgcgcgcgcatacaacttcattgatgtgcaattaggtgttgttctggggttatgctttgagattgctgtactcgataggagtagtaaacaagcaacacaagggctcgttacctatgtttactgtgattcgcccgatactagcaggtgcagtggaatgatatccgtaattgtgtcggcatcattgcttggttaaagcttaaatgttctgcacagctacatatgtgattctattcaggctgtgtgcatgcataagctgggagtgttaacaccacaaggataacacatgttagataaagttcaatggtcactctccagtctccattctacgaggatagctcagaatacattgtgaatttgattaagttgcttgaatgagtagtgcattgccatcaaggatgtgacggccgatgagtaggtgttgatgctgcgagtagcaccattcctagggctatatataggtgcattgaaactattttgcttgaccaatacaagtggtatggattaattttctctacccttctcgtcctacaagttcaagtattacgcgtttgtggtcaggctgatttgtacatttcaacatgtatccaaaaatagcatacacctcatttgtaagaaaaaaacacgatcacctgcatgcaatgatggctcttctgtttttgttttcttaacctccccctgagctctagtccttcctttctgtttctttatgtacctcctggagccagggtcttccttccgctgaggttgttttgtaaaaaaaaagcgacacaagtcaatgatttacttattgagtactcgctgctgatgtttctttctgcagctcttgtgcgaaaggaaatcgaag

SEQ ID NO: 14844 - DNA, 936 bp, Brachypodium distachyon
  Intron number 3 from transcript Bradi3g43900.1 (locus Brad i3g43900) derived from phytozome v7.0 (chr-ID Bd3; pos 455 78444 to 45579379)
cacggcacgtgcgaccagggcacttcacttctccggtatgtataattatagcgtccgagtccctttgactatcatgttatctcttgctaatgccattgtacatgacattgcctatgataagaataattttatgtggcctttttccggctgctttcttcctactaggtcttattccttttttgcactgtcacaagttggcggtgggatttatcgaatgccataccatcatttacttcatactcaccaaacaaagcacaatcttactcgaagtgtcgtgtagaactacaacgttcatgtgaatacaataatcggactacttacttggctaaaaacacaaataagtgaaagccaagcaatactatttgaagttttgaccagaaagggtctaaatttaggcttggtgtagcattgcagtggtttatagtaggttagtagcctcattggtggaagtggaactgcttcgagaagcttttgtgtttgtctatttgttttcgtctaaacaacgttatgacagaacatatttctaaactatgttatgacagaacatattataggttctaaataacaaaacatatcggattagatagctaacaaaacagtggtaaaggaaacatagatagcttaactattggataacataaaaaaaaagagtgaaacaaggatagtaatactgaacaatcaaatttattaaactataatcccttttattaaactagaagttctgttaatgatgacagcaggattgagttactaaattatctgaatgggccagcataaacaatgtgtaggaatttgtcttctgcagtattactttgtatgatttggtgatatcatctcatgtgactgtaaatcagaagacagtgatgtgtacaactttgctgaaccatgcacttttacttaggtaatagcaccatcgaaggtgccattaattggctt

SEQ ID NO: 14845 - DNA, 521 bp, Brachypodium distachyon
  Intron number 2 from transcript Bradi2g46880.1 (locus Brad i2g46880) derived from phytozome v7.0 (chr-ID Bd2; pos 472 97141 to 47297661 reverse strand)
aagcttcagctttcagagacaggtattggccactttttttctgttactttggatctattatttccatttgattgcgctagtatgctgctactcaattacaagcaatagtgtggctacttgtgtgagcataccagagtatgtttccatagcagaaattcagtgactatgcgattccatggttgtgcttaactcctcttctcatctatacatcgattgtctacgctaatgatctgaagtttatataattatacatgtttatgtgcatgattcaaatatagccaatccattgtttattgaatggctctaaactaaaataaataactcttgcacgcatgagtaaaattccattcaaaatcatagggaaagctgtgttgtatattcatcaattggcagttcagcacacacagtaaatacttaggtttgtacagttttcatccctttttgcttccttttcatagttctgaagaattttattatttattttcaatgtttgacagcttcgaaagattccacccttggaa

SEQ ID NO: 14846 - DNA, 583 bp, Brachypodium distachyon
  Intron number 1 from transcript Bradi3g44370.2 (locus Brad i3g44370) derived from phytozome v7.0 (chr-ID Bd3; pos 461 84360 to 46184942 reverse strand)
atccccgccggcggttgtcgccttgccgatatccggtgagctgccctttgattcttaattggtgttaaaattacgagtcctcttgtcgcgaaattgggctcttcttccttgattgtgaattcgggtatcagaggttttgctgcttctgggtgtttttcttctcttccaaaacagagctttccgttgaccgatttgtgcttgcctgttcattggaggtaaaaaacgcgggaagctttttactactgtagttcatatccgtggtaaatttgagttattgattcttactgctcgtaaaaacgcgagctagtttcttccgggttccatgctaaatagcttaactgaagtaattggcactgcactgctacctcgttaattttgagatcgatgcaccgtgtcctctttgcgttatactagtaattcgaatcgtcgtaagtctcaagtgtaatgcactaggagtttgtggagaaactgaagttttgaggcttgagtaatctgcctgattcttctactcggttcatcgattaattcgtgttgtttttccgtctcagagaagtcggaagcatcaaggcaacagagcactgag

SEQ ID NO: 14847 - DNA, 1048 bp, Brachypodium distachyon
  Intron number 1 from transcript Bradi3g29090.1 (locus Brad i3g29090) derived from phytozome v7.0 (chr-ID Bd3; pos 309 79818 to 30980865 reverse strand)
ccagtggagcagtgcctattgatctggtggccaatgtagaggaggtggtcatggatgctgaatttgattcagatgatgaagcttactcctatgatgatgacactgatgcagaagatggccaatatgtcagaagaaaaagcaaatatcctagatatagcagcaagtcagatgtgccacactttagtttgtcaatggtgtttagtagcaaacaacaggtgaggaaagcattgcagaaatatgggctggtgactaagaggagtatattgttcttgaaatcagaggacgatgcaaaatgatggttagaatccaagagcaaagggagaaatgtgagaagtggcatggaataatctgccccaacattttcaagaaactgaaagtcagtatcaaaatgactgcattctgtgatgtcctgtggaatggcaaagatggatttgaggtcaaacacactagtggtagaggcagaaggtacactgttcatttggagaatagaacatgctcttgtggatattttcaattggcaggtttgccttgttgtcatgccattgcagctatatacaaatgtggcagacaagtagatgacttcattgacaaatctttttacattgaagagttcaagaagacatatgagcattgtatggaacctgtagaaggagaagacaagtggcccatttctcaaaacccaaggccaaaggcaccatcttatgttaggatgcctggcaggcctaagaagaataacaggaagagggaagaccatgagaaacccaaaggaagaaaaatgaccagggttggcatacaaatgaggtgtacagtttgccataaaactggacacaataaggtttcatgcttaaagaataaggaaaagggaaggaacaccaatgctttcattgccaaagctggtcaaaagattaaggcaacagaggtattttcaattttcttcttctatttgtcaccaattctgtatatattgcagattagatgattattaaactattgattgttttatgtcttttcagcaagcacaaacagctctagccactagtggcagcca

SEQ ID NO: 14848 - DNA, 683 bp, Brachypodium distachyon
  Intron number 4 from transcript Bradi3g02490.2 (locus Brad i3g02490) derived from phytozome v7.0 (chr-ID Bd3; pos 149 5707 to 1496389 reverse strand)
ggaactgggaaggctcttctcaaggtactctaacaagttccattacttctggatagaatttgaaaattgtgttgcaataaataaaaaacaaaggcctatctttcttagtatgtggcaactgaactttggttctatatcttctttagtatgtgtggaccaaattatattaaaaaaaggcttactatgaaaaaggatgaagactaatctttttacaactccctctaactccactgaactcaaggtgtccgacgcttgaatgtgtgtgctgactttaggaatcaccaggctgtgaacaaatatgaaaactcaagctgtatatcttacagaagtagcacaatgttctgtattgtttatacatcatatattggatcatccgaattccaaagtatacttcatccagaaatatggataatagatacattcacagtagcatccgattagcacaattcagacaacagtcatgctctcccattttcatgtcctttgtgcttctcacattctatttattttttaatgtgataaataatgcttttgaacatgctatatctttatcatactgtgaagacaagtttctctttgtcatgtatggatacactacgtcaactatagaaaaagaaaagatggtgttttcatcctgttaaatcttatttttcaggtgcctccaactatcaggttcgtattag

SEQ ID NO: 14849 - DNA, 843 bp, Brachypodium distachyon
  Intron number 2 from transcript Bradi3g34180.1 (locus Brad i3g34180) derived from phytozome v7.0 (chr-ID Bd3; pos 366 24193 to 36625035 reverse strand)
caccgcagccttggcgtccacgtttcatttgtcaggtctgatttcccagcctcctttcctcagggcgcttgcgttgcgcgcctcactcactgtccgagtgtaatctagtgcggtgtggtttcagaatgatcagctgtgcacatgtatgggagaaaagcaatcaacgtagaattcagatttggatcgtctagctagggttcggattgattcattgtcatgctcgtctaaattttcatgtcatgtcaagaatcgattcttgtgacagaatgtggcatatagtactaatgaatgtgtaaccttttctgtggatgagccaatctgtaatatctatgcccactgttgtttttaatctagggagctggggtttattctccattcttatcactgggcctctagatcatgaacagttggtggaatagattgtgctgaggtgccattttttcatcatgcatgttcagtgaagagcatattgtcgaatgaagttagccaatgttcaaaattttcagcgtaacatttttggctaaactttgtaaatcatccttctccttatggaacgattgaattatgattctgactggcatcagtctgtcaacttgcgtttctgatatctgaatatatgtatttgagttggtaaattcattgtaaaatatgtccaagttgatttagcctgtatttgtgtcatacatttattgtggtcaccttttcttttccttccgatcctgaccatctagcatattctcactcttactgttggacattgaataggaattatggaaatttatcaccgagttttgacaataatctgcagatcaacaaatttggattcttggaccccagaacaat

SEQ ID NO: 14850 - DNA, 724 bp, Brachypodium distachyon
  Intron number 1 from transcript Bradi3g15690.1 (locus Brad i3g15690) derived from phytozome v7.0 (chr-ID Bd3; pos 139 67046 to 13967769 reverse strand)
gcacgctgcgcaagtacacgcccgatctgccactggtaaagttcctcctctaatatcagattgattcgtacatttctcggatcgatattcgtacctgcggttcaattttggaccttgtaccaccatctgattgttctttctatttaaaatttaaacaaaccccttgctctactgagtggtgaaaaaaagaatccacttttgatgatgggccgtacggaacaagaggaaaaatatgtacacaccgatgcttaggtttgttgacgaatattttgggttgagtgagtcgagattttgtttcgatcagcatggctattacttaatcgccttaatttgttttgatcgatgctaaccgaaacactaatgcatgccctaaaaaacagtaacaatgcagcaagtggtttttcttttggattatatttttgaaaaaaaatctacagaatctcataatataatttttttaaagggcaagagaatctttaatataagttttttgagaaaataatatataactcgtctctcaacttgtcaaaaactacacaaacggccactcaattttttttgccgtatatttatcgtccgccaactttcgaagtcacaccaatagcctctgcctctcaacaagtggtttccaaagacgagcgaagcaggctttcacggccttcttctaacattctttcatggggccgttccccggcggcgtgcatatgcaggtggcgcgaacgga

SEQ ID NO: 14851 - DNA, 461 bp, Brachypodium distachyon
  Intron number 1 from transcript Bradi3g15620.1 (locus Brad i3g15620) derived from phytozome v7.0 (chr-ID Bd3; pos 139 00339 to 13900799)
cggcacagaggtatttaacaaaacccctgtttgaattatttccctttctctagaatgattatgctgtccatccctacccggagtaatgtctcgttacaatgaggtttccatgcgttacatccgttttattctctcttcgtagtcatcctgagaagttgatttcggatctaaggtcctcacctgttctttgtggactcatgcaacggtttttctgttaggttcttgttcatgtgctatgagtttattatcatccacgatgaacagatcaaaccactgccaaagtcatgaacgatgaaataagtagaattgtattctcttagttgcaggagtacgctcacaagttactgctgggatagcagctatggtgacaagtacctggaatttaattgcatgatgcgtactaagctcctaaagctgttctaatttaggatggtgcaattttttgcaggtaacaaatattg

SEQ ID NO: 14852 - DNA, 1027 bp, Brachypodium distachyon
  Intron number 2 from transcript Bradi2g54600.2 (locus Brad i2g54600) derived from phytozome v7.0 (chr-ID Bd2; pos 534 66332 to 53467358 reverse strand)
gcgagcttccaccacgcccgtccgaccgcaagggggtaagcactttcccaccttcgctgttcttcctctactgaacctcaccatacatgtcttctttgctatgcgatttcaatgccatccgttgtttatgtaatactagcaaatgcctaactgtctgttgacattttttttttgtgatgatgtctgttgacattctaatactgtattttaattggttctattctacgtacttgatacgccagtagtttctctttttttacgatcttgaaaggctaggtggaaaaacactgtactccctctgtccaacaaaggatgtctcaagtttgtcaaaatttgaatgtatctagacatgacttagtgtatagatgcatttaaatttagtcaaagttgaaacatcctttgttggacggagggagtagctgatatgactgaatgatcccccattggcccattgtagctcttttttttggcctggggcgttagaaattcctggctccgctgctgattataggtgtgtgaggtttaccttacaattgcaggggaacgcacaacgtctactccctccgatccataaaaaggtcgcccacttagtacaaattttgtactaactttagtacaaaatgggcgacacttattatggatcggagggagttcgtacttgagacagcttggtgtttgtaattatgtattgatggctatggctcgtctcaccttggcaattttgagtctgcagaactccaaacgctaggcctggagacatatattaactatctcgtctctcgatgtcaaaatggggaaaccctgagtttatggttgttacctctatattaacagtttgtggagccatttgactgtgccatctttaataaatcggaatttctggaattgaaagttgaacgctgcagtttaatgttcctatattctgagtttatagttgttgcttctatattaacattcagttcttacattattatcttgtccaacttttgcagaaaagtaccaagagggtgctgtttgtcaggaactt

SEQ ID NO: 14853 - DNA, 952 bp, Brachypodium distachyon
  Intron number 2 from transcript Bradi2g51610.1 (locus Brad i2g51610) derived from phytozome v7.0 (chr-ID Bd2; pos 511 86750 to 51187701 reverse strand)
gccagcacgcgccgctgcggcttctggggctcaaggtacaaatccatctgtttctctcgcagcatgttaattgtaacccaatcgttatgcatgcgttatcgatgtagatattagttattgaatgttgggatgtagtttgtgagtcgatcttcacatgatttcttagtagttccgcccaattctgcatcgcgatcggattgtgtcgcccaattctgcatcatgattagattgtaccgcccaattctgcatcgttattgggtactttcgctcctcatggatggatattttggtgcttacggttgatctcattaatgatcgttcgttattgattgtgctaagctttgctattggcccagggtgtgttggttgatcttgtcgatttcatagtcacactaattacaagaaaaaaaatacttgtcacaaagtattcacagaactaggaatccgttgctttggctggaaaactagcctatacctactggtgatgattggcaacttgtcattttatggttcatattttacagtatcatttatatcaaataatagaaatcactggggatgattacattggtttgagattcattcttgacatgcatctcatggtacttatgtttatgttaaagtttacgatgactctgatactatattttgtttcatccttttgatgattacttgaagcttttaattgattactaaataaattggctttcacactttggtgagtgagtacttcagttagctgtggctgtgacctgtacggtactcttgctatacacatgaagttcatggcttttatgcatgtataccttgttgtttctgcactcccacagtatctgtatgatgccaattgttgttacaactaaagtctcaactagacactcaaatccatttgctcatttgagatttactatatatttttattccaatgtaggtttggccccttgatatagag

SEQ ID NO: 14854 - DNA, 342 bp, Brachypodium distachyon
  Intron number 1 from transcript Bradi3g29700.1 (locus Brad i3g29700) derived from phytozome v7.0 (chr-ID Bd3; pos 317 54294 to 31754635 reverse strand)
acaatttaactgtaaactgcacttctgggaagaaggtctgttcccagtttgttgataacttttattcttttctttctccaaaagtaacatttatgaatgtatgtataccaaatgttttggccttttgggtcatttccgctcattctttactaggactattacactattttctccttgagattttttttatctcagtcaaccattatttaggttgcagctgcagatttgttagtgccaatatctgatgcatgtagcttttgactgtaatcaaagaatgataaatgaaattcaaaattcatgcacttaatgccaagtttatattctaactacaggttactgcca

SEQ ID NO: 14855 - DNA, 733 bp, Brachypodium distachyon
  Intron number 3 from transcript Bradi3g14400.2 (locus Brad i3g14400) derived from phytozome v7.0 (chr-ID Bd3; pos 127 94437 to 12795169 reverse strand)
ttcttgacctctgtgctgccccaggtaattgtttttaatagtatattttagtaacacattagacctgtgttttcttagtggcatatgtgtaccgtaaaattatagatggtcacttgtactagatttttctggggcccacgtgtattcaccaatatggcaaggcctacctttctccatagcataaaaacatgcatagcctttcctgattggttgatctttggataagtaactgcttgaattaagtccattgagccacatgatctctgttgtttgatagactgacacaaccatacagtttcaagtaatatccctctgttttagtttgactttaccaaatatctaatccaaatgtttttgaagatagcaatagtcaaagttttcatagtttgacttacctatgtctaaaactacagcgctcatggaacttacgtatgttacttctaggatatcgtgttacaatcctgtttgtttggcaggcctgtatggtttcaagtttgattgatatgttaaatattattctccaatagtttgatatagtagtgttagcccaacacatatttctccatcctcgggatggtgttgtttaaattcaagcactaattttagtttgttatgcgattattttccgatgggtcatgtagcttgtgttagacttcgcttttttgtgggattaattttattcagagctaaattaatgttgcacctatatggcatgcaaggcgcgaagctttgc

SEQ ID NO: 14856 - DNA, 903 bp, Brachypodium distachyon
  Intron number 2 from transcript Bradi3g34280.3 (locus Brad i3g34280) derived from phytozome v7.0 (chr-ID Bd3; pos 367 13827 to 36714729)
actggagcgacctcgccttctgcaggaaattcaaggtgattgtttaattgccaaccttaaaactaatatagtactttaaaacagcaagaaaccaaccaggaatctgagtatatatgtatatgttcaatatcggtccacgtccatgcaatacgtacgcaagcactgagtaaacaccaaaagcaagaagaagcagcaggcttgctgttatgaaacccagcacggaaagaaaacgggctaccaaacccaacaaagcaagcatgcatagtacagtcgctctttgtgttgattactgtttttgtgcaaattcaatcatctaggagctgccaacaagaagaaagaaaaaagaagtccttacctgcgcgtgtcaaatctaataaaagtactgacttgtcaactttgaagattaggacgttgccgtctaattaaaaaaaatcaggacacaagaaagatagctgagaaattgacttttagtactataccacataaaacaagtgttagacccaaggccactcaaagattatccttcatttgatttgcttagttgattggaactttggaagatgctaaatagtagttcagcaggtaggaaatcacatagtacttttaaattgcttcggctagttatttatttttctttgaattctgataggaagtagctagttggggccatccaccaccacagcgaccccatgtccccgacatgtttgacaaaatgccagacacaagctactagcatctgttcgtgcagctgtcaccaaagctgcatgtgcaatcttcagcattgcttttagaacacacgattcctgtgtctgaaacacaactatagttgacagtatggtttacttactggttactgtggttggtgcagttgtggcacgctctggccaagacactatcggagaa

SEQ ID NO: 14857 - DNA, 821 bp, Brachypodium distachyon
  Intron number 1 from transcript Bradi2g43710.1 (locus Brad i2g43710) derived from phytozome v7.0 (chr-ID Bd2; pos 441 94234 to 44195054)
gctcatacctcagcgagacacggtaacagcgaaaaagccacgcagaaactcttactcaacttttcaaatttgtggaaatgtagagtttgagttcagttaatgttgcgtcgttctgaaataagaaatgttgcatgattttaccagtgaagcttaattcttaaaacattgtgttaggaagaaatatagattcatcaacctatgctataagctatcactgttctgctacaattatttgattttcacaaagttccaatagtcttctatgttcgtagaaatgaaaatgtttagcattataaatcaatggttgctttttaagtagtactacgtttgacatttttgcgatggattataattatctcatttgatggagctgctcttaaatactttggttgcttgcattaccttttttttccgtgacccaagttgcaaatggacatattgtgtcccagaacatagaagaagaaatatgagattgcagtcattggataacataatttatctaactttaaccaaatagaccaaacatggtactccgtaatagatttcacacaacttatttcttaatgcagctgtaaataagtatggcatggcacaacgtagaacaaataaccaaaactgggccttacacagatctacacagttacaaaataaggagtatttgtgcaatttggaactggggactaaattactaatgttctactagacactgtttgcctgattattggaaatatcatggatttgatggatatttgggtttaataatctcacgagtcatacatatttcaggtttgatcaatctgctatttctccattatcactga

SEQ ID NO: 14858 - DNA, 994 bp, Brachypodium distachyon
  Intron number 1 from transcript Bradi2g46730.2 (locus Brad i2g46730) derived from phytozome v7.0 (chr-ID Bd2; pos 471 84698 to 47185691)
aatctcaccagcaacgttaaatccatcaactacaggttcctcccgttcgcttcttccaactaaaaatttgggattcgatctactatgctctgttcgtctatattgcttcgaatttcgattgggagtttgggactggtgcgacctggtagtttgagcataggcttaagatattgctcctactcgtgtagctgcaggcccacgatttagactcgatgtgtatgattggaaaaatagagatttggtaacgcaagtggaaaaaggaaagagacagcgaaagtaggacttcccagatagtcgctgttcaaacgaattgcaattggagtgcttaaagacaagcatgtttgagcggttgcatcaatggtgcaagatgaaatttcttttgatctattagcaattccattaggttgaatttttgtatggtgggtatgaatctgtagtgcttgcagtgctttgatgggcacatttaaagctcattggattcaaagggaaactagaaaggtttcatctatgttgaaccgaggaatagtccaaacaaatgagcatggcaagttggcaaccataggatcagatgtgtaatgctccaaagaatgctggtactgttgcacttattctagggtttactcagcatgaagtgacaaacatgctagaactcacttatcaggcttgtgcatcatctgaaagtgtgaacatttttaaatgaaggcatgctttcgttcttctttctcaagtggacatcgtataatccccatgatcctcaattctttcggagcccctcttgcaattcatcacattacaaactatttgactgcttcatttctacaccaagatttgtcctaaccacaatgaatctcctgtgccttgcagtcgtacgtttttgtcaatcattagtggagttgttgctggaatctggggattcactggcttgacaggatttgtgttctacttccttgtcatgatagtgtcatcacttgggcttttggtgaaggctaaattt

SEQ ID NO: 14859 - DNA, 886 bp, Brachypodium distachyon
  Intron number 1 from transcript Bradi3g39630.1 (locus Brad i3g39630) derived from phytozome v7.0 (chr-ID Bd3; pos 418 64034 to 41864919 reverse strand)
tcttcctccgcgagctcatctccaactcctccgatgtaagccctctccacgcgcccatgtaattttgcctttgctgctctagatccgtgtgcgctatgtccccttgtcgcatcaaaaatagatccgtttgtttcatctgattctgacatgttttctcgctgattagtgaaagggcgtcttaatctgtatagatgaatgtacagttctgtgcataaacatagcgatgatttttttatctatatggcctctcgcttgtgaaactagccgtgtttagagagctgattggagtcctgtactagctctcgaaacaattactctctgttgcaagcagttctgtgcataaaacatagcgatgatttttttttatcaatgtggcctctcgcttgtgaaactagccgtgtttagagagctgatttgagtcctgtactagctctcgaaacaattactctctgttgcaagctcaatcatgccttgtgtgctaggttttgatcatagaagcttaaacgttcacatgactattgcctttgtgctgattatgttgaatctatgtttgatttaagattttaatagattctgagaatgatttgtttcttcgcctttaaatttccaaggtagatttgaatgtttggagttggccattatcttttaaaactaaactcagaccatgagttgctattataggattgtaattcaagaattaatgtaaataggatctgtaatctacttgtgatttctaaagaaaacagtccatcaatatagtacagagcagttactttacgttgttgactcactggatggtggatgctgtttatgaagttttactaaattaaattggattctctaatctgcaggcgttggacaagatcagattcgagagcctgactga

SEQ ID NO: 14860 - DNA, 769 bp, Brachypodium distachyon
  Intron number 3 from transcript Bradi3g22390.2 (locus Brad i3g22390) derived from phytozome v7.0 (chr-ID Bd3; pos 214 70201 to 21470969)
ttccaaagaatttgctcacaccaactgctggtagtatcatctcttgttttacttgtccattgttctgacttccccacccctaagaattgtaaatgttactccctccgttcctaattaattggcgccggctgttttgcaaagaaacccctgtaaatttccgaaataaacctgcagtccacatcttcaattaaatgtggactgcgcgttgatttcgagaaacaacaggttttttccgcaaaagttccgatagaacatggactgcagttttatttcggaaatttacgaggattcctttgcaaaaaagccaacgccaattaattaggaacggagggagtggcagttagaaatgccattcgctgaacaattattgtagcttctggtttatcagttaactttatttttatttttgaattgtttctttttccatgctccagtgcattcagtattcctctttattctcttatatattgtggtttatcattttgcatcatgctttcagcccacattttctagtcgctattggattggaagtgttctgtattataaagtactcttgcaagttttttcttcttcttcttatatacactatcaaatacattgatttttattactcctcatgtttcagttttgtataccagttaacagttatgaatcttactagtccatagccattcatttagcatattcatttaatctgaattgcatatgcatctaagatatgtatttgttcccagccgtttcagttgaacaagttgaagccagcacttat

SEQ ID NO: 14861 - DNA, 960 bp, Brachypodium distachyon
  Intron number 1 from transcript Bradi3g07300.1 (locus Brad i3g07300) derived from phytozome v7.0 (chr-ID Bd3; pos 543 3839 to 5434798 reverse strand)
atctcgccggcacaccttctccgccggccaacgctgtgagctctctctctacccttgctttgtttcttccccttctccggctgcccgcccgctcggcaagctccacccggaggagattcccccccttcaggatcctcctgcctgggcgaatccattcggtttattgcggatttgtttgctgtatgttgcattcttatttcctaaaagtctcggttaagtcacgccccatgcggcggtacgatccattaacctattacggatttgttctgctgcttagggacttcatgatgtgcgatgctgcggatgagggttttagggtttatagggtggaatatagtggctatgtctcgctcttgccccctattgcttcgaggcatttgatatttagcagatggatgggcttgttagcctattaagatggaagagctaatgttctgtctcgtgggagacaggctgcttaggggagtttctgtacttcgccagtcgatcatgtcaaaggattcatccctcttctcatcgaatagtggaagttatggtgcttgttttttggctattgcggcgtggcatttcgaaattgaggctaaagtagtgtacttgtggataatgtgaaagggtttggggggaaacaaccatcttttctgtcggtgagttacgatttccatttagttccgaatccaatattccatttctccgaatcatcataacattactttctaaactcttaagatagatatcgggacttgtccaccatcttttagctgcttttatttgaaagatgaaacatgtgcttctccttatgtgccggaggttatttattgcttcaaactgcatttagggaggttttcatggcattccatttagtattaatttcctttttgtttttgtgcagggcagataatctttagtttcttctccttccctgcctatctttgtgtgccaactcactttggtgacagtagg

SEQ ID NO: 14862 - DNA, 1035 bp, Brachypodium distachyon
  Intron number 3 from transcript Bradi3g08420.1 (locus Brad i3g08420) derived from phytozome v7.0 (chr-ID Bd3; pos 661 1648 to 6612682)
ttggagtgcaagagccggggttctttggtgcgattgtgagttttcttctctcgtactgtaatttccaacagttatccctgcatagatcatgtcgagctcctctttacatcgtgcgatgtttactgtattatgatctcattgtgtgtgcagttatattaccccacgccagggccgtatctaggaatgaggggccctggtgcgaaatgtgaaatgaggccttcataataaaaaaaatgtcgcataatcttaattatattacttcaatatatgatatttgatcgggtttgctatatcttcgtctgatttttagtcagagataacctgattcgtcatccattggatatggtttttgtgctttaagatttgaaacaaacgatggaaaaacaagagtaaaatggcatttaaatactaatccaacaactttgattcgtcaacttagaagccttttacgtaaaaatcaggtgcctgaaatatagccacatcctttctatagtacttagaaaaattaaaattttatgttaaaataataaaggttgtatttataagcaataagctgacctcccaacggctgtaaaaaaaaagcttacctcccaacggctgtaaaagacaaagctgacctcccgcggccccgccctagccccttctgatcgattgatccgcacaggaggagttgcccgagcaggccttctgtcctttgccttcatggtctttcttcttatacgtttaatgggctttttttgctgttaattaggatggctaagcactaatcagtactattaaggctagatttggaggaccctaatttttggaggccctgaacagttgccccacacaaacaaacatattttcatccaatttacgttcataatacaaaaactttatatggcagtttattgtattctaacagcttagttgagaatgatccctgctatagtgatatttcaaatcaacctgtacatgctcattttcctaacttcgccttttctttttgttcacaaaggatattgcctctggacagtcgattttgttcgctcc

SEQ ID NO: 14863 - DNA, 901 bp, Brachypodium distachyon
  Intron number 1 from transcript Bradi3g27520.1 (locus Brad i3g27520) derived from phytozome v7.0 (chr-ID Bd3; pos 285 35595 to 28536495 reverse strand)
gcgcgccatcgccgcagaccgccgcgaggtccgtgaaatatgctgttgcgttgctgtttaatatgagttgtacttgcaaacctccagctttgtcccccagggaagtgtgtactcccgtctgagctcttcgggatttgctgcgtggtagacgtacaatttcctttccgtgatctaagattgttctctggtttactatgtggggttgcatttgtctgcacactagattcagttgatgcatagttttgtagcttgtgttggtttgatttggtgcgcattgaccatggaagaggtgttaggacatgcagaacttgtgattgctatgcattagaatgttgaacctgctattggtaactgtttcggtcacaatatgcttgcttgctgaagttcgttgtttcaaaaagtttaacatgtgagtgttcatgtattgcttgggacttatcttcaagctattggatgcaacactcatatcttgtatttgttacatcagtttcttcctctgtggagtagataagtagggtgataacaagctctgctaatcccttatatgggtactcatgctgtaaattgaatatgttgatagataatgatagaatcatttcgtaactgcgtcgatggaaggttttgctacttttgatttgtctatgatcaaagctactcgcctgttcacttggttcttaacttattttatttcttcctgagattcagtttttcttattcctgattgattaaaaaagctagcagtgttaaagattttaaagtgattatgctttatcgttgcaaaacttatattttggatgttctcttacttatattttcctggcaatttacaagtagaagagcacttttgagacttagttgtattggtttttgtgatgcagcaagaagaaaaagaaaggagcac

SEQ ID NO: 14864 - DNA, 849 bp, Brachypodium distachyon
  Intron number 2 from transcript Bradi3g28730.1 (locus Brad i3g28730) derived from phytozome v7.0 (chr-ID Bd3; pos 301 56264 to 30157112 reverse strand)
ctacaagaggtgattggttccgtccctgtacacttaccaccaacaggagaactgattattctagtgctaattattaggttgaagtgtaccaagttacatgtgctagctattgtagtctgcatctaatgctagatgaatgaaaagctggtttcgttgcattcgatttttttattaccaacaattcgagctgattgtagcctccatgttggcttatcttctggatttaaggtgaaattgctgttattttgtgtaaattgaatgctagtaaggttgccaaaccaaatgcccaaaacttgatttggaatgaatgcgtttatctgaagcccttggctgctgtatggtgtggcctgccatgatatctgtagttccttccattctatcataaatccattatatgagtacacgcaaagctttcgcttgtttgctaaataaagggtgttgaatttgaggagttcaggttacattgaattgtaaaacaccgagggaaatgctatcctgcatctagccctagaaacaacatgtttaataatttgttttatgtcacttatgacctctttattactccaactgtattcatttcattactccattagcatgtgacttatgtgattcaaatcataatcataaacaagtacttttgaataagaatacaatgatattaacttcatgccacataaattgtatattaacggagtgattcggtcaaagccttggtcaaaggaaacgaaatctgtcttatattttggaacggaggtagtatcgcttttccccaaggttctgaagttatctaatgcctgaactgtgttatctgcaggtattgagagggacattgggacattacagctagag

SEQ ID NO: 14865 - DNA, 310 bp, Brachypodium distachyon
  Intron number 1 from transcript Bradi3g24440.1 (locus Brad i3g24440) derived from phytozome v7.0 (chr-ID Bd3; pos 240 77045 to 24077354 reverse strand)
gcttgttgtggacaaaagaggaggatcgtagattggtaagcttgtttctttgcatgctggctccatgtattaaattactagcacaacaataaactctttataatattataggttagtgcttggttgaataattcaaatgatccaatccaatcaaattacaagaagaacgaccagtattggaaagatgttgctgctgtttacaacagtaccaccacaaaaaacaggacaaggctagtcaagcaagtgaaggatcgctttgcgagaattaagaaaagggttgcatggttttgtgcgagctggaaggaggcta

SEQ ID NO: 14866 - DNA, 935 bp, Brachypodium distachyon
  Intron number 1 from transcript Bradi3g38390.1 (locus Brad i3g38390) derived from phytozome v7.0 (chr-ID Bd3; pos 409 03046 to 40903980 reverse strand)
acgtcaacaaccagctccagaccaagttctcgcaggtatccctcccgtcgccttctcgctccgtccgatttgaactagggttcccagatctggccgcccctcttccaggacctcatcgtcatcctattatcggatccggtccttatgtattattgagcgtaggaatttcatgacgaattgttagtggaacaaatcatatttgttgggaactctgtaacgcctgtgctttctaataacccgtgtgagggctgatacaatttagtgagattttgggtattggatggctggtgaataggctattgttgcatttttgctcggtgatcattgttgattttgttctgtgagcagtcacgctactgtttcagaatagtaccgggtattaaactattaatacgttctgttggattaccaattgtgatgtttcaaagcatgggaaatttgattgtttggggtcatgcttatcaagacacagggccagaagagccattatacatcttatcttttggagtagtcaacttgtatttctgtgtttgagccctccatgtccatgacaaatagcacgacgattcatcagctatgatatgcattcttctgactaaaggaataatagctttcatgagttttgtctttcatagtgcaaataaacatttctcagtacgtaacaagcttcacgtggaacaagattattttatggtgaattaagtgccactttctgtcacgttggatgcttgtactcatagtatttggctaattatatcttgaaaacagtctagaacttgtaatataagccttgaggtcttgaggacatgcatttacctgaattgtattcgtgtttctagtcattgtaattttgtacaatagatcaatgtgccgtcaatgactgtattgctgttattaaaggaacccaaaccgattgactgggagtactacagaaa

SEQ ID NO: 14867 - DNA, 481 bp, Brachypodium distachyon
  Intron number 4 from transcript Bradi3g12870.1 (locus Brad i3g12870) derived from phytozome v7.0 (chr-ID Bd3; pos 115 16720 to 11517200 reverse strand)
tcaaaatagcctggtcactaacgaaggttgatcccaaatattttcaacatcgatgcaccatctatggccagatgtttcatttctgttccgctgattgtgtgcaatgttctatcgttaaaatcctaatgtgtggttgaattttgattgaagagcaattttcttgggattttcagtcgtggtcagttatgtagagataatttcttcctgttttttataaagacctggttcacattggaattttatgcttaatgctgcctccgatgagtagaagaaatcagatgagttttaaggactactatagcctatgtttgtgttctaggatctgctagtgtgattatgttacaccacatactaatgtcattgcttcttagatatgatgcctaattttttttttcttgtgcaagttcatggaactatttcatgttcatttttctcctaataattttcatatgttcatgttctcaagcagtccctattttag

SEQ ID NO: 14868 - DNA, 644 bp, Brachypodium distachyon
  Intron number 1 from transcript Bradi2g50100.2 (locus Brad i2g50100) derived from phytozome v7.0 (chr-ID Bd2; pos 500 42097 to 50042740 reverse strand)
ctcggcatcggacgacgcagggcggagagaaccttgtgaggcccctttctttgctattccccccttgatttcttggttggattatataagctcacgcaataatcccctggtgccggctcgagtttttcggtctggttgggattttcccgtcctcgggcgtcccttcaaggtttcagcagctttgggggttaattttgtttgtcgggtgtgagttcttagcatgaacatattacatatagatatggaattgaatagtgcagatttggtgaatatgcgcttgtgtgatggcatatgatcatagacaactcgcctaacttgcagaaaacctatataatagttagatggatcatggatgtgagtgaggtttactaggagttggttgcttatgagcctaactccatttgtgaacctttactgtggcacttgagttttgctgttgctatagagtgcctatgtgagtaataatttttgcaaaagttagaatgttcttcatgattgcagctttgactgaagctaatatttttccatcgaaaagcagaaatacaaccatttgcttttctcagaataccacatattcgtttctcaaaaatagaatacaacatattcagtgcaggccttcaaattgcagcctacaacttgaacag

SEQ ID NO: 14869 - DNA, 883 bp, Brachypodium distachyon
  Intron number 1 from transcript Bradi3g12850.1 (locus Brad i3g12850) derived from phytozome v7.0 (chr-ID Bd3; pos 114 99731 to 11500613)
gctttctctcgtcggtggcttaagcacctcccttggtactcatatgcaccacttctttcatccgttcacttctgttctatgttcataacatatcgtgtattcatcatggcatgaactattcaatttgatgcatgcatgcctttattatcttttcgtttcaaaagatgtaaaatacagggtcttattttttagttagttgcatggatcaagatttttcccatggtatatctgaaatgcgaaactaggaatgcttagtactatcttctgttcaaagtaaatgtataatagcaaataagcaactattttcaatttgtaattcacatctaaaagctcaagagaaaactaatagactgctactatatggaaagaagatttgtgtgcatagaacattttcaatgaaccacaagcaaacacgagggttacatgtccctatctgcactttcaccacacccactttcacagaaaaatccactcaaacatcatacactcctctatcttgccactgtctggttcaccctatccatccatcgactctaactagccttgaaataggtgtaagttctctagaaaatgttttttttttaaatgtgtcttcagtcatattataaattagtgagcccatgtcatataaccagtcccattaaaaaatctaaccggaacagagagggcacatgaactgagtttctacagataaatctgttagggcattacttaaattacagccaagagcaattctgtttctcaatgggaagtttgcaaaaacaatgggaatgatagattacagatatcaaatgctagatgtttcacctcctgacatttgcctactcatttgtcaataatacttgtatatactcatcaggtgcattactagcaatactaaatc

SEQ ID NO: 14870 - DNA, 1049 bp, Brachypodium distachyon
  Intron number 2 from transcript Bradi3g19740.2 (locus Brad i3g19740) derived from phytozome v7.0 (chr-ID Bd3; pos 186 48912 to 18649960 reverse strand)
acgccaacagctactgggtatgtatctctctggtgctttatcaacacaattggatgatgtcgtttgaggttcttatatagcactgctatttcgaaggattaaccaaaattagtaatgtaggattcagttgaattaaatgctgttattatttcaatgttcctttacgtagtagcaaaacaaaagaactgggaaaaatgttctttcaggccccagtgccaccacgattcattgttatcttagtacgactcttgatataattcaagcaagtaatcaaaatttattcgttatcttcgatcttgctcgtgctgattggaatttggggactaacagggctatatgttagctggaaataaaaaagtgtagtagaaacccatttttgaagctgagcattggtaataccctaaacatgttccccaaattgtatctcatatcaaggcaaaatacaatggccaatttacagacccctgttttcaatttgacagttgatgcgtcaatttaattacatatataggtggtaccccttcaatttcaagctgagcattggggatgggtaaacttcatctccaaattgtatcataaaataaaataaaataaaaggccaatctgcagatcatcaattcatttgtgccaacgcggagactggccatttcagatacataattttttttaagggttcagatacatacttgttacttgtactgatcatttggaagtggtactttccagcagattattgatcattttcctggccttctttttcgtgaaaattaactcaatatggaacttactgaatgcaaatttaaacagttatgtattggagattgccatatgaagttgcagcatatattttgataagagtaacctgacttgtgtttttgttacttctcttctggtatttcatgttggaacatatttgagtagtttgttccaataatcattcagaactcatgcttagaagttctgtcttgagcattttctcgacaacttattttcataacatgtctcggaatgcagatcgtgagacctcaaccagatacttcagcaaaaca

SEQ ID NO: 14871 - DNA, 639 bp, Brachypodium distachyon
  Intron number 1 from transcript Bradi2g60740.1 (locus Brad i2g60740) derived from phytozome v7.0 (chr-ID Bd2; pos 580 23386 to 58024024 reverse strand)
gtccgtcgtccgcgtcgtcggcaagttcttccccggtgcgctaaaacccctcttgttatttcccgtcctcttgttccgggactcatcgatgggtcgtctcgtctggggattgctgatgctcgtctagggtttggctgcatagatttgatgaactgtagttaaaatgtttggcatatccatgtctcgacgaattaggctttgtcgtgtgaagtaggttgtcaaaattgaaacatctgggtctcggagatgtacacttcatcatttaatccatttcgatcgtgatttagtttgtagtgaaaatattaggcacatctttgtctcgagcaattagcctttctagtgtgaagttggttaccaaaattgaaacgtctggatgtagagttcatgcttgtccatttcgatggtaatctaatttaatccatgtttatatgtagcttctttgctattaatggatggtccttgccatctccataggtctaacttcatcattctcaaacctatagcttataaacttatcccatagactcaatcttgtgatgctacaaatttgatccctttatacgatattagttcctactgctcccttcaacactcagtctcacatggcattttcttttggtggcccagctcctgttatag

SEQ ID NO: 14872 - DNA, 675 bp, Brachypodium distachyon
  Intron number 4 from transcript Bradi3g36480.1 (locus Brad i3g36480) derived from phytozome v7.0 (chr-ID Bd3; pos 388 29963 to 38830637 reverse strand)
actctccagacaaagcttgcaaccttgcaaagcaggttagtgccacatttacctttctgattttatcttttgtactgtaggatgtttctttgttgtggcctaagttatatgttgtgcatttgatgatttgaatctgcacctgatctttattgtgatattacattgcaactacaaatgattcgattcctttattattttctttgcatggcttgattgagtcttatgcagtgaagtttatggggaggaattattatagagcatttttctcttagtggttgacgggatcagcagcatattttgaagggacaagtctatggaaatacatattttttttcaattatattggtgatttaatatttatctacatggcgtgttgatgggcattagccctcttcgcgtcacataataacctgatatgtagaaagtggtaaaaccttgctgctggtagcacgtttaattggtttgcttgggggtgtccattctttaagaacactgtcatgtcctctatagagttacagtcaaaggagtgaaaaatcttggtgtcctcactctgatgaggatgccaatttagaatttgtgtaaatacctggtgctttcttctcgtctcatggatattgcgactgattacttttccctgcaggcatttgacgaagctatctctgagttggacaccct

SEQ ID NO: 14873 - DNA, 302 bp, Brachypodium distachyon
  Intron number 2 from transcript Bradi3g04920.1 (locus Brad i3g04920) derived from phytozome v7.0 (chr-ID Bd3; pos 337 4219 to 3374520)
gggtgttgtattttcctcaaggtcacagcgagcaggttactcttccagtcttcctctcaatacaaagattaaactcaaatgtaccgttcacaaaaaagagattaaattcaaatgctgcataatttgtataagtatcagtaaatcttgcaaaattcctttcatccttttctttttgtaagcttcctcttaaattatctatcttgtggcgtttctttatcagatcttaaacagttctgccagaacttacaaaataaatttctaccacaggtatccgcatcaaccaataaggaaattgagtccca

SEQ ID NO: 14874 - DNA, 526 bp, Brachypodium distachyon
  Intron number 2 from transcript Bradi3g31470.1 (locus Brad i3g31470) derived from phytozome v7.0 (chr-ID Bd3; pos 336 17870 to 33618395)
gtgtttcatctttaaagcttatttttcaggtacctccaactatcaagtttgtattagacggagaatgacaccttatttacttgtgatggatctgattttacaagccagaaaataatcttggttttgctaaaatttctcttctccttggtatttactcattgtaactggggatgtctcatccttggtgatatctctttacaggttattggcaagaaatctgcaactggtgcaacatacaaatcaatggagttagttgtatgtttcatcttcataataactgtattaagaaattgtcatatcatgtatgatgatcaaatcaaacatatagatcctttagtgacttcaaatttgaacaccaccaaagctactactctcctgcaattgacttctaattatttttctatgtagcttgccttagagtttagataaagtcgatagcatgtatggagcacaacaatctctaactatctcgtacagaagcttatgaccaactcttttgctaactatctcgtacagaagctgctgg

SEQ ID NO: 14875 - DNA, 516 bp, Brachypodium distachyon
  Intron number 1 from transcript Bradi3g07940.1 (locus Brad i3g07940) derived from phytozome v7.0 (chr-ID Bd3; pos 614 8344 to 6148859 reverse strand)
gcggctcccagtccacccgtccatcgtgtttcccggtatgttttcttttctaatgctaaagcttgcgcctttggttggttactacagttttggatctggattgtgaccaaatttgggtctctatttagcctcatgttgatttttgacggcaaacggggaaaatctttttagccaatcccatgtgactaccaaatcaaacgataaaggccgaaagagaatagaatcaatttcaggcttattacgacttcagtcctgagtaatgctaccatgttactctatccgttccacaaaacacctcaacttagattaaaacaagtctcctttaatagtgtctgaccattcatattagattaagattgggtgtgagcagttatttggctgggcacgggagccaagaaaaaatgagatatattatgaaacaaacgagaaaaagttatatgaggtgttttgtgtaaccgagggagtatttgcgcctcatggtgatttttaccttgctctttgttaatagatttcctc

SEQ ID NO: 14876 - DNA, 541 bp, Brachypodium distachyon
  Intron number 1 from transcript Bradi3g32510.2 (locus Brad i3g32510) derived from phytozome v7.0 (chr-ID Bd3; pos 348 62866 to 34863406)
gcccgctccagctcgtctcctaccccgccgtcaaggtcggtcctctcgactctttgtcgaatgaatctgtgcaatgcgttcgatttgcaacggagatttgggacatgtttactgcagattccatggggaagattgcatgttctcgcgcttacaagttactgctccctccgtccaacaaaagatgtctcaagtttttgtcaaaatttggatgtatctagacatgacttagtgtatagatgaatttaaatttggtcaaacttgagacatcctttgttggacggagggagtagtacttatttagattcccatgcgagtgcccttttgatctatctgtttgtatgcacgtatcagatttgaggaatttttgtgatctgggttctactccaaaaccctgtagaagtaatcaacatttcaaagatttcttttttttcacgcatttctgttgcaattagaagaaagattgatcctggcatgcccgttagatttctctcattgtacttaatatcaaataagaataaattgatcttcttaatcattgcag

SEQ ID NO: 14877 - DNA, 958 bp, Brachypodium distachyon
  Intron number 1 from transcript Bradi3g19190.1 (locus Brad i3g19190) derived from phytozome v7.0 (chr-ID Bd3; pos 178 40597 to 17841554)
ccccagctgctgcctaattgaggaccagatcaggggtatgcatatatgatagatccatgtatgttaatgtaaccatgtattataatgttatgtttaattagtttcactgttttagcaaaaaaatcaatttctgttcaatttgttagtacttaattaacttcttctacggctcacaaacaaggtttgcatgggtaattaggtatattttatatttttgtagaatgtagatgttcttgtttctctgggtcctccaaagttttctgaattcccgggttgtttgctttttggagttgatgctaagtgagagtactgttcagtaccggctacctggctcctttgagtgactgaaacatctctcttcttttacaccagtgtaaaagatctgtccgtggtacatttcactagacaatttctttttagcaagagacaatgtacgtctcagatttccgttatcagaaacctcaccactagtagcccatctgaggacacattgttcttgcttctgaactctgctatctctcatttccacactcgtaaccttttcctttttcatttcggatgcagtatcctttttcttctataaatttggagcctcttctctagtgtatgttaatgtctaatgtctcttcctcctctgaaatattgaagcagcattcagatttatttactagtctctactgcgttctttagctcttcagcaatttttgcctgcagggaagacacaaaattgcctgcaggggtaactttttcgtactgcatccacttcagctattgttttctcaacatttaactactctccggagctgtagtttatttctatcttttgagcaagaatatatatggacatttaggaacacaatcatagtctgtaatcctgtattatcctgcgttctgacagttagcgttttctgttcttttggcaggcagaggctgccagaattattgcagacatacaaat

SEQ ID NO: 14878 - DNA, 879 bp, Brachypodium distachyon
  Intron number 1 from transcript Bradi3g34020.1 (locus Brad i3g34020) derived from phytozome v7.0 (chr-ID Bd3; pos 364 85657 to 36486535 reverse strand)
gcctcgccggccagcagcgcctccgatcaggtctgccgcttcctccccctcctctcccctcccagatcccagtccatcggttgccctgtgtggatcactcgatcccaacccccgcgtcttattgctctgctcgcgcttccttcgattgcatccgcgtcctctcgctctgcttcggttcgtgctctcattatttaacttcgggtaagctgaagtgttaggttagggctaaggatgcttgatgcttaaactgtctgacggcctctatgcggtggttcgcagctccagtttggtcgattccaataggtttggggattcccctttcgcttgcctaacgcctagtgattataaattagcacacgaatggttggttggatagacgagtcacaaattgtcctcggaagactggaatcacttggccatacttgattaggtcgccaattttgagttttggccaagctcggacattccagaccgattacacgtctcgtctggtctgcaaaaagaaatgagtcggttgcttgagttcaagcagcaccctctttaatcatccggaccatttagtcacatccttgagtgggttttgttctgttctagtacatattctgattggtgtatattagttctgggatgctcaatatatttccaagggtttgcatgatttttataaccaactaatgctgtgctgtttcgtataataatgggctgtattctcaaacatatcaccttttactatatgcatattttccctgatgctatcttgcactcaactttcaactctaagtaccgatttcaccacaaaataacgagccatttttcctcaaataaataagtaactagtcttttctccaccctcgatttgccaggtactggtggaagcaa

SEQ ID NO: 14879 - DNA, 895 bp, Brachypodium distachyon
  Intron number 2 from transcript Bradi3g38730.3 (locus Brad i3g38730) derived from phytozome v7.0 (chr-ID Bd3; pos 412 15207 to 41216101)
aggcccaccgcgccggcgtcaaggtcttgcatcaggtgagatgcatgttcactggaatggatgaatttcggcttgtgcttaccacttgtgccgttgttattgccaatttccctgtctgataagtttggtgagccaatgtctgttccagtttccctaattaacgtatttgatgtcattgttagtattttgatgcgaagatatggccctgaaaatagactctgtgttcctaccgacagacctaactaaatgtccaactcataagcccaaaaccaggggagcaaaatcatgtttgttttttaagagtgggggcaaagtcattggcggctggtggctggtagatagtgatggttacttaatgtttcgttaatttgctaaaggaatggacaatgggcatgactgtgtatatcaaacttcaaagaggtcatgtgttctcctatggtttcagtcaaatgtgatggacaataaggagcaggctttgatctttaattaacagatggagactgccaacagaatcaggcttaccgaataccgatagtgaacataaagtcgagttaatgagaattactttgttactttgccttctggcaatcaggctttgatgaaaaatttggtgccaagaaatacgctacaagttccactacaagatctgtagtgaaggccttggtgttctatgatgatgatatgaccatgcactccctctgtcccatattaagtgatgaaatattacatgtatctagacacatttttagatacatccatatttgggaaaatttgagtcaatatgggacggagggagtacattcttgcatatattttttgtcgattatcgatatttagattttcccttttgatttgtgcaggtcggtacccttgaggaggcagagaaagctaagga

SEQ ID NO: 14880 - DNA, 935 bp, Brachypodium distachyon
  Intron number 4 from transcript Bradi3g44230.1 (locus Brad i3g44230) derived from phytozome v7.0 (chr-ID Bd3; pos 459 22585 to 45923519)
aaatcatcacaaaagataagccatttcttgcacaggtgggtcaagcttttcatttttgaaggctcattttgttcattgctttctagtggcccatttaccaaaactaattactccctctgttcagaaaatacaaagtttaaggatacgtctatgaaggagggcttcgtctttctttgaccattttaaaatatgcaatgtaacttttttttaacggttttttgctatgtgtaagacgcgtaccttttaagtttcaagtcacttattgtgatcattgtttttatggagatatgtgctcaattgttgggtttacttttattagttcgatgacaatgtgcaggcattccgctagtatgtcaacataatggtcaaagcttactggaggccttggcgatgccctaaatgatatgttcttgacatatatagtagtaatggagctgataattttttatagtacaaacaaatggtccaaacttggacacaacataagttattgctgcacatttgttatcctcttacatgaagcacaaaaatccaaacaaaacaagtgagtaactaatggatgttttggtcaatgtcacatttctcttcttttttctgcgatgaacccacatttctcttattatttagctaaactttaaaatagttgtactctttgaaatgttaatggaagttatatccataaggttccttttaagttgatgatgattccgtgtttaacatacatgcatgccgtttatttatgtagttcctgagccgctcccagtttctctataggttccaatttcccatctttgattccattatttgcattacatgctccccttgggttttaacaactgatcctttttattcttgctttaacataaataactcatgcatatttctcatttgtaaatcgggttggcatattcttgaagatcattattctttcaggc

SEQ ID NO: 14881 - DNA, 964 bp, Brachypodium distachyon
  Intron number 1 from transcript Bradi3g11410.1 (locus Brad i3g11410) derived from phytozome v7.0 (chr-ID Bd3; pos 986 0957 to 9861920 reverse strand)
gattgacgacctcaggcttaagattgcgcggttgggtgaggcgccttcttcctctgatcccactaatgctaccgttctcccagttttggagttctagtgtaaattacagaagtttgaaatgatgcgagagcctcgggacttctgtaaatataggtcatacacattggtctacactgatgtgagagcttggagaattcgtaaatataggtcatacgtttgaaacaaaccgtctgagtcggaagacaaagacacatggtcatacatcggattcatcactgccttctcttggatttaaagttcaagtttattggaaattggaagttttggaattgcaagtataagcttaattctacatttccattggattttacaagtcccagtgttaccatttttcaaaactaaaacattttaagagtagttttgagtttgagacatacaatactatctcatttagaatttcaaattatatattaaattctggcacacttctaaatgattaatgtaccggcaatgttttaaaaagaattagaattttttgaacatcggattgagaagtccgaattctgtgtgcaagggatttgagtacttggatacttggactgatatttatattaaaaattgcatgctgttttaaattcataggaagtcttaatggttcgtaaacaaatattcaagttcaactaaagttttagtctgtcactgtaaaatctatccgtgatttgagtcaaacctagcaggttggtatatcgtatcaaaaccttatgcatcattggccatttatttttctcagtttctagttcatgagtataatgcacaagcttcttagttgtcataaagtaatataatttacctgcatcaccagttctttgctgctgatttatccaatgccatcccttaacctttataaaattcatctgtatctgtctcagaatctatcttggagggggacacaaaatctttgagg

SEQ ID NO: 14882 - DNA, 604 bp, Brachypodium distachyon
  Intron number 3 from transcript Bradi2g49200.1 (locus Brad i2g49200) derived from phytozome v7.0 (chr-ID Bd2; pos 493 17229 to 49317832 reverse strand)
tcaggtttgttgatctgctacgacacaattgtctgatatgctgttacagtttgaacttcattttcttaactacttatattttaagatatttctgttgacaagtatacaagcgatttttgtaaggctttgtttcatactttcactcactatttgctgagatgagagcaagattgagtggcaaaacaactctgctaggttgcttgatgttaggatagatattctcatccattgcatacgtccattttaaaaattaataagtcagtacctgggataatagattctgtttgctcagggtagtaaatgttaaagctaatgaactatatagcctcgtgctttagttgaatcgtgttgctttatatacagggatggtacaagaaaataaccgttaattttgttctgttttggtcgcttaatgttaccccttcaagtttttgagccaatatatattttttatatgtattgggtggtaattgaacaactaccttttcttttctttttgccagaaaccaaagcactgaaaatatccattgcacatacagtgatttcttaatgtttcattgccatttggttgcttatgctgagttgtatttgtttcaggacagag

SEQ ID NO: 14883 - DNA, 899 bp, Brachypodium distachyon
  Intron number 1 from transcript Bradi2g45420.1 (locus Brad i2g45420) derived from phytozome v7.0 (chr-ID Bd2; pos 457 89651 to 45790549 reverse strand)
gacggtcagatcccactcccccttctccggcagatagatctatctcgcggccacggcgctgttcgcttatcgatataatcgatgcctgtgctaaattttgaattgtcgtttggggtgtggccgtgagatctacgagatctaaccatcgttatgtcctccgtttgtaaactgttgacaccggtgtctctgatctctatctgcatagctgaatcgccgctgtcagtatgcggaaactcgggaggcgactcccttccctttggtctcagacatcggatttagatatgtagatgatgagatattgaacatgcgtgagtatgaacatgatgatctatgcgcagagggaagttgcagggttggatgtagaggtaactacagaatacgcgctggttttagatatccgaccatttagatattagcacttgcttcaccggtatgttccggtggacatataactagcggatctcgttttctatatgtaatttcagaaaccgcaacctaagtatttcgcgatgcaagtattatgttcgtgctttgggatccgaactccaaacgtaactcttcttgacaacgaaaagagttgtcatctttgagaaaaattgttgaaaacacggtctgataggtgagcaaaattgttgcatctgccagcaaatatcagtaataataagtttgcacaaacgatcgtttgcctgtggtatatatcagtactccctccgatccaaattaaattgtcgagatattacatgtatctagacgctttttgagcatagatacatccatatttgggcaaatttgaggcaattaatatggatcggagggaatagcattttttttcatcatttgtaatcaattgatttgatgatccactacggtgctgatatattgtcatttacctttaggtg

SEQ ID NO: 14884 - DNA, 892 bp, Brachypodium distachyon
  Intron number 3 from transcript Bradi3g08150.1 (locus Brad i3g08150) derived from phytozome v7.0 (chr-ID Bd3; pos 633 0194 to 6331085)
ggctccgcctctgcctccttccgctggttccacaagtacgcacgtttgatttttatttcttgttcttcacatctccccttttttccctttttgggttagcgtaagtgaatctggattactattagctagggtgttatgatcgatcgttcgttgcgcagttaattaaaaggtggccagagagaaaagcgtttgcccgccttttttgggctattaatttcgagtacgggaacaaatgcctttggtaacaattaaagttcatttcttaattagagattggtagacctcatgtcatgtcacatttcttctggtatactagctgtgtactgtgtacgctatacacgatgtgtgcgttgcaatgtactagtggtgattgttggcacttggctaatctggtaagccgccgttttctgcatatacatttcatatgtttgacataagacctagatcatgttttgttttcataaccgagtcatcaaaatgattgtacttgaagctctattgtttattgtttgtagtactctttcctggcattgaacttttacttagatttacttttggtcattagcttctgaagctgacttcagtaataatttgccgtattgtgctgacctacggggttcctctcacgccctctggattcagaaacttcttgatatttgaccgtgctgattataactgcatctagttttctcagaaaaacagaccacgccggcacgccctggttccattaaacaacaggactacataatagttcaactgtatttgttactcattggacatctgatcgttcattagctttgagcctgtgatatgcatactatcttttgtattagcacttagtattacttaacactacgtttgcatccacaatgcagggtgttgagcattcctg

SEQ ID NO: 14885 - DNA, 940 bp, Brachypodium distachyon
  Intron number 1 from transcript Bradi3g22530.1 (locus Brad i3g22530) derived from phytozome v7.0 (chr-ID Bd3; pos 217 33587 to 21734526)
gccgcaatcgcgcctctcgccttcatcttcgagaggtcagtcactactagctgcgttgccttgcgttggttgcgtacgtagactgcctatatatttctgtatttccgcgtacatacatacagcctacaggcatatgctctatagttcttctaccgtttcggtttggaatgtagctaactcgcatgtggattgtatgagctactgtacttcatttttctcctcccctttttcttcgatcgggtaagtactctgttttgagcaaaaataaataaatacgctactccctccgtcctaaataagtcgcaattttgtctagataacttatttcctagccaacttttgccacacttctggcaagcaaattgctcaccacaaaaaatgtgacatgccgcacttgcggcacaaagtggggcaaagtgtggacatccgccaaacatgtttctagtactccagttttggcacgttgatttttgtttgcaaatacttgacgtgacatacatctcatttcaaatacttgatgcatcgaagatatctcctatgactttgattatttgtcaattaatggcatcatcatacctgaaggggaatataaagaatacccaataacatagaatttttggtgttgcaaagtcttcactcttttttatttcaagaaacacttccaactgaatgtccctgctagtgattgcttgttggcagtggtgtcacaaaaaaaggtgaacagctatgacaggaaaatcatcacaaatatatatttttcaatgctatttgaaggggggggaaatcttctatgaagaaaagtagtagtagtagtaatccacattaatttcttccatttaaattttagattgatgccttatctgacgttactattttttttttcctggaatcatcttatcttgcaggaaagcaaggaaaatccctaacctcgtagagtggg

SEQ ID NO: 14886 - DNA, 924 bp, Brachypodium distachyon
  Intron number 1 from transcript Bradi3g30390.1 (locus Brad i3g30390) derived from phytozome v7.0 (chr-ID Bd3; pos 324 79134 to 32480057 reverse strand)
aaatctaccaccctgacaagtaccaggaccctcaggtatcccccttcctttcacccactctctgtacgctgcagctgcgattcagtcggctagaactgattgcgcactggctagtgatagcttaggattgctacgctcggagttttactggtgctgttatggcgttagtggtgtggtgcgacaaattggtgtcatgatttggtcgttctgaagtggttaagcagttggtttcacgggtttcatccagtactgtgttctgttcgtattgggcttcggtacaggcactccttttgatacgccagtagatggtattgatttccctttccgttgagagatggtgaaagggaagagttgggcaatttcgatgctaactaatgtagtagggattcacttctttgtatatcaaatcgattaccactggggagaatttaggggaatgataagagtcaaccgcgggcagattttgtcagggtggatgcaacctatattttgtgctggtcattccgcagaagggattgtgctttttttttctgcaaaaagctttgtaagtttgatggtgctatggtagattggagaaataccaatttgtcatgcacattgcgctgtgtatgttggcatgttagttttttaaaccgacctgaaacttatcccgtaaaaagttgtaccatgtactaaattccagacacttattatgaatcggagggagtggcattctttggtgattttagcttgtcagaatggaaattagagagagagaaccattcgttatctgatttttcatacaattttgtgaagattgttaacattagattctttcactcgtgctacctgtattttcttgaacaactcatctcctgcaacttacatttctcaattcttccaagctgactagattcttctttgctgtgttctttgcttgtctag

SEQ ID NO: 14887 - DNA, 567 bp, Brachypodium distachyon
  Intron number 1 from transcript Bradi3g07700.1 (locus Brad i3g07700) derived from phytozome v7.0 (chr-ID Bd3; pos 582 4733 to 5825299 reverse strand)
cctcgaggcccagcgcaacgatctcaactcccgaggtgaccttactggattattcatgtagccccttccaaaaccctagaaatagctttgcgtggtgaactaatggatcgcattagtggaaccctagcttaccctgtgcacgaatcttggaaaaattcacaattttgagtcacatccttggacagtaggtgattggctgtgttgatttggaagtcttttgccataatctagaaattagaagatgccgtgttgattttttaagtgcttaccttggacattcaatctttcttttaattgtgagattatccattactaatcaataatattactttcttgtgagaaaatcatgtttttctcactctaatgcataatcctagtaccaaagaattcaaaacatgactcttcttgagtggtgaagtttatttcgtgatcgtcctgtggccccaagttttctacgggtgatgatatatagcagtcattctttggatcttggttcatggagtggcgcatctttttttgcatgtgcttttactaaatctgtcttcaaatatctattttgcagttaga

SEQ ID NO: 14888 - DNA, 829 bp, Brachypodium distachyon
  Intron number 1 from transcript Bradi3g01720.1 (locus Brad i3g01720) derived from phytozome v7.0 (chr-ID Bd3; pos 107 4706 to 1075534)
aaagtgtctacactgcaggtaataccatgcccttacggttatagcacgaacaagttatttttcgataattggttgattgaacgctattcatatcctcttgtgttaagcagcctgaattttcaaagtagttttgtatgaattagttcttttgatgcttgatgatctcttcaacattgtgaagttgttatgctctgtattttctgatgcttgtgtggtcgggttttatgttaattttgtggtcttgaaataatattagttttgcaatatgctttagtttatctcaccagttctgcttctgtagccaggccatgggctgccatcgttgtatcgcggttcctctaattggagcagggcttgatgctagttatgtttctgctgaatcctgatcttactaataatgagtaaatccataacagcgacttgttttaaaatttatggaattgtaaatgttcaattataaattgtaggagagtcttgctgcgagtggcaagttcatttctatgggatttttttaataaatggagttcatttcacctttccaggctacatttatttaaagatgatgaaaatctgtatattcatgatcacttctgtcgctatgattttttggtacaagtatactttatgtgttcccatcatatgagttaatagagtgagcatgcatgttttttatttttaaccatattaattattatgtgtttcagaatattattttaatttgacagttgatgtggttttgtttatctattcctagcgttgtacataaacatagtttttttcttctcaaattacagctgtgagtttttgtatatatctcaccggtgcctcc

SEQ ID NO: 14889 - DNA, 524 bp, Brachypodium distachyon
  Intron number 2 from transcript Bradi3g31420.1 (locus Brad i3g31420) derived from phytozome v7.0 (chr-ID Bd3; pos 335 49918 to 33550441 reverse strand)
aactgtcgcaagagcaagattttcttcatctcctggttggttaacctcttcttagccttgtctttcttgccccccgttttgttcagtcgtgacttgattcagtttggttaaggacataagattctgtcttgatttgtttatggatgtgctgattgctcaaaaagatttattgctgagctaattatttaaaaagatttgttgctgtatttattgttgcttctaaaaatacagctatcttaattgttcaaaaatagttattgcttgtacgcattacatgacactctatcctacaagcactatccagctaccaccttaattctccgtatgcaacaaaggaatcagtttatctctcaaagttttggtagtccatgacagcaaactcattagacaacaattgataaatgtcattcatggttaggaacacctacttttcggttcaaaaaatttcacggtactctgtcacaaacaactgctgctaaatcaaaagaatataacggatgttccctttcttttcaggtcccctg

SEQ ID NO: 14890 - DNA, 1040 bp, Brachypodium distachyon
  Intron number 1 from transcript Bradi3g16640.1 (locus Brad i3g16640) derived from phytozome v7.0 (chr-ID Bd3; pos 147 97132 to 14798171 reverse strand)
gatcggcggaggactctcgccaacccccaacggaggtgcgtgcttgtcccgaatcccggcccctcttggcttcatcgttcttgctggtacttttaggccaatccgtagcttgtttctttttccttcattttgtgtgtgggttcttggtttggcggtgggagatgatggatttctttttttcttttttgcggattgggagatgatggatttctaggggagctaggtttggattgggcgcaggacggagggagttgggaaggattttgtctgaggattcatgggaagacacgctagtctctcatgttgcttccctgaatcatcagggcccttgttctgctccgtagccgtggatttagcattcgaacagcaattgctgggttgggaattgaatagtttatagtgtaccttgatgcagactgggaattttggaaagaagctgatgtcagatcagctttttacctgcatccactaagggtaatactattttattttaacctgcccaggttaataatgagtacttaagaagtcaagtctaagttgattggctggtaggaattgcgttagcactgatggctggatttattggtggtgttggagatagaaagagtgtactctgttcatgatcattcaccgtcatagttggcatggtcttggttattgtggggaacaagagcatgaaagatttatgcttttagtgctctgatctagtcaatgggttgcacttttgatcattggactggaccagtgaacagaaggattaatttgcttcctgaaatgcttgggatcataggatgcatcaatttccccccatgtttgtgtggcaaaaattgtacagtagacaaagttgcattttgatcagtgtcttcgagttaaaagaaaaccatgatctcttatggatgtttctaaattattatgtatatatagcttcagctaccaatcacatcacagaattgattaagtccgtttgtccattttcttacttgcatcctcccttactgctttcaggtggtgatcattcttgtatcaagaagcgtgtgtct

SEQ ID NO: 14891 - DNA, 612 bp, Brachypodium distachyon
  Intron number 2 from transcript Bradi3g43560.1 (locus Brad i3g43560) derived from phytozome v7.0 (chr-ID Bd3; pos 451 06048 to 45106659)
ggcggcaagcagaaggcctggaggaagaagcgaaagtgagtgaccaaccaacctccagatctcttccactggatgcttgttttatgtatatattaccaacactaagattaatcaagggggcttgtagtatatttggatctcgctagtgtgtgaaatttaagggagtcgtgattcacccatcagtaagcttaggctaggacgcgtagccatagtctctggcctaatcaggcttcggttgcaacaaatgaatcttgtttgattacagatttctgtatcgttgtttagctgccgatgttttgaaatgaccattcagatttatgatagcgtaatacgcaggttatttatgaagtttaagttgcgttccggtgtgtagggtatatcacttagctttttctcgctgagctaactgcgaaagctggtgtagattttggtacttttggggcttgtgccttgctgtgagcaatgcgtgttataagggaaattgaaacctgttacatccttatattcactaatttggagaaatctgtagaacctcagctttttgctgcctaaattgtgctgtttctttcgttctgtagatgttagtttaacagtctcttttgccctgaaggt

SEQ ID NO: 14892 - DNA, 951 bp, Brachypodium distachyon
  Intron number 1 from transcript Bradi3g19330.1 (locus Brad i3g19330) derived from phytozome v7.0 (chr-ID Bd3; pos 180 48288 to 18049238)
ggggacgccgtggtggcgcagtgcaagggcatctggtgagtgtgagtctgactggattttgcattttctgctgtttgattcatgtgcttcaaggtgttgtgggcagtgcgatataggttctctggtagcccttcatgcggactataagagacatatgttattttgatcaatgcttcactagtttggttatcctattatggttgaatgcagtgatgcgcagatacttttttcattccggataaaagaacactaagcttaaggtttactctttgtatatttttgttgtgtgatggtcttcatatcaagatgtcactggctctgtgttttgaaagaaatgcacgttctcatatggatcagatgattatgttctgcaataatttgtctcgaaatattaagaaaatgtttttgccatatttacgttccatttccagaaggctatggctcattatttgtcattctgttgactgattagtagcaatggagaagctttcaggtgcgaaacttgataaactgcacaatcttgtcaatttatgcttggagtgtactgctaagatattccctaatgtatgggacaactacctggttttggtttatttagtgagaagcagaaagattggatctgtggcttttcataggattgatggcttttaggtcaacctgtaatcttgcaaaacatcatgtggatttagctgtactcccagcaaatatatagttggaagattaaggttctttcacatgctcaggtcatatagcactggttgtattactttcaagtttcaactggttaattctgctaacatgtgataaaaataggaaaaacagaagtcataattatcgttgtgcaactgaatatagtatcataattttatattgttcctaatgctccattggtgctattatgctgatttcattaacttgtaattttgcaggggtcgtggcattgccactggc

SEQ ID NO: 14893 - DNA, 870 bp, Brachypodium distachyon
  Intron number 1 from transcript Bradi3g40620.2 (locus Brad i3g40620) derived from phytozome v7.0 (chr-ID Bd3; pos 427 71071 to 42771940)
tcgccaccccgaacggcactcccgtcataaaggtaaccacgccttgaacgcttagggaacggggttcagagcgcgagttggcgaaggttttttgtccgggtgttgttggtcgctgtgagtagtgaagtagatgggcgtggcagcatagaacactggatgaatcccggaagagatttgatttgttgcgattggggagttctgttaggcgctggattggatgcgaggtaatatcgtggacgtacctacacctggctgtatgtctgggttgttcgattaccttcttacgaaggtgtcactgggtttcgaaacttgatatgtttgaaatcggctgggaagatttttaagaagcgtgtctttttcgtaccaagcaactgaaagtttctggatgttgaattagttgagacttgagaatcatctctccggatgtgtcgttcgcgatacgcgaagatacatcttttgttgttgagaaaaggcctataaagatatcatttatcttctttgtcgtaaaagatcaagatgatcctgtaaatatcggttccagactcttcctgactaatgggcaatgcttctgcctcgaaagaaaaatattttttgataagatgaagtagtccaattttagttttgtttagtttgccttctgattggtcacatatgtttgtttatttctaaccagttgcttaacattctaagagtgattagagtcgtagtgtcatttgccttttgagcggtcaccatattagtttagtactaaccgttgtttaacaattgaagaatgattagagtcttagtgttttttgccttttgatcggtcatgcatgttcggttcgtactaaactgctgctcaacagttgaagagtgatccaagtcaaa

SEQ ID NO: 14894 - DNA, 678 bp, Brachypodium distachyon
  Intron number 2 from transcript Bradi2g44340.5 (locus Brad i2g44340) derived from phytozome v7.0 (chr-ID Bd2; pos 448 47351 to 44848028)
tcatcaaggtaatctgcatatttccagtctgatctgtttagttagactcaacatgatcgttttgtctctcactgaattctggattttcttctgggagattgtttttgttctgtacttttagcaacggtgactctttgagcacatacgcatcctggaatgcaaagtcatcagttctagccatgttactaaaactgacagcgtggtgattttgacttaacaatacttcgtagtatgaacagctacattgcatgacagaagcaatcttgtgtatgtactataacattttatactggttctgctaaacagtacgtctaagttataaagtgtatgagaacaaaccttctgtagtaatgaaataatggaagagataagagcatgtcgcttatatttgtgctgagactaatagtagaatattcatatatgcgcccccccccccccccttctgctttagaacaccccgacatttcctcgttctatatgcatataactgtccttttacaaacgactggatatctgaacttcatcagcacaaacacgactattgatgttattgctgccatctattagtagcatatgcatacatgtttctctgaaaaacagcagtaagtctatgcttgcaatttaattaattatttgtttgcagtctgttctactgccgaagtatccgggggaaacatt

SEQ ID NO: 14895 - DNA, 795 bp, Brachypodium distachyon
  Intron number 1 from transcript Bradi3g03830.1 (locus Brad i3g03830) derived from phytozome v7.0 (chr-ID Bd3; pos 257 0871 to 2571665)
agtcgctgctccggaacttccaccgcttctcccaggtcagcagcacccgcaccgcacctcaccgcggcatccctccctccctaccaccgtcccgccgctcccccgactcgttcgttcgcccttccagttcgtttcgggtcttaggttcggtttgatgccacgttctggttccgatggagctcaccctagtcgtcgtagcaatcgcctgaaccttccgtgctcggctcaggtgaattggatgatgaaatgcctgcgagatggcgcgtgtcgaactgaatagataattctccggcgacatttgcgcaatcgagggaattcacgtagtaggccgtccatcttctgtgcctattttgtttttaacttttgatcttccggttggatgccatgcttggccaatgctgtggaccgtggtggttaattggttggttatgctgaagaatgtctcgtcgtattgatcattgagagatgattttggtgggggggattccacactagttcagcctcagtgctcgattctcactgtagggctcgaatcccctgcaatcgatttctagaattgggatcccaagtgctcagcaaaccaaaatatatgggttgtctgcatggcaggagcgtgcttctgttgcaatgtttactgcttccagagctcaagtgttgccatagatgttcaatctaccagttttaattgcctaaagatgaatgatgacctatatccaagcatttttcttatagtgtgttgattttcttttctattgtgtgttcactggttccttggttttgaacagggttataaag

SEQ ID NO: 14896 - DNA, 1018 bp, Brachypodium distachyon
  Intron number 1 from transcript Bradi3g15500.1 (locus Brad i3g15500) derived from phytozome v7.0 (chr-ID Bd3; pos 137 89584 to 13790601)
gacggcgacaggccagacctcgattgggaccccaggtaaacgatccgacccgacacggcgcgcaaagttttttagcctcacctaggaatcatgattccaggattccctttgtcgtgagcatgttgccgacttggtagccgctttttgatgatgccgaaacgatcgatgcatctgtgttgttgaaattttattttgttcttggaaaattctgaactttaggtgatgattacctggattaatcaggtgaaccaatctagttgtgggttctttcttataacaagttttacgtctgtatatttatttatgtgaaatggaacgatagaacagaaacgaatgttactactttgaaaggatcaagataccctgtcgacatttcatatttgcaattggcatttttaaaggattgattgttacctgcaacattgtgtctgcattttgaaggatttactttttctaattaaaatcgtgacaagattattgagtactatggatgttattctaagaaaacaggagggaaggccccagcttatgattttatctattcttgcatgatacttcagaattctgtacttatatatagccttacgattagaaagggggaaggccaaaatactctaggtctcccaaactcatgttttcttatactccattgatatggataaaggtctattcggttgcaaactgttacaaaatatttgaagtgttaatcatttttgaaataaaggaaggaaataatcataaatctcatggttgcggttattttaaggccttacctaaaactgaactcgatttcccttttcattacgcgcttgtggtgtttttatgtaccctgaaactagtttattttaggggtgaaactagttgctattcttctatatgaatatgtttgatccgttgtttgcttgatgctaggtagcagaaatctaattatatgttgacattgtagtttgctttccaaaaacattgtagtttgccgtgttaagctaaatcattaaaatgcatagacctactttgcagg

SEQ ID NO: 14897 - DNA, 831 bp, Brachypodium distachyon
  Intron number 1 from transcript Bradi2g52470.2 (locus Brad i2g52470) derived from phytozome v7.0 (chr-ID Bd2; pos 518 39845 to 51840675)
aatcttatcacaggtgcgatcggggggctacgattagcctcgcctgtgtttcatgcgtatgtttctcccctttttactgaagtgattgagaaatggtaggattagcaaagctagttacggccttcagatatggaaccaagtttggaggagatagatcgacgcctatgtgatgtggatctgatttaggattaattccagcgctgtcaatatcttagatgaacaattagatcgttttttctgtcgatgattcatagctatgcttaagttttattatgcacttacggctcattcatgaattcattcattcgttttgcgatgcagtaagtttaagatgatcttcacaaatttttggcttattgcaccgattgttggagtagggaatgttttgcagttcaactgcgaaactgttggggataggaagggaaactgtttcacatggaactgctcactgtgcacattatctggttgtactaattcccaagatcttgtagctttgtgaactgggtatatcaaatttgttttgttttggcaaaatggttgttagcatggcaggatttgattcgagtatatttatcagttccactgatgtctaagcgtaatcacaaatatcatgtgtggttaacagaaatacaatgaaatgcagtaaatgactatcatgctaatgcagtcctcatataacaatcatgctaatgcagtatatgacaatgatacggattccttttcactttaaaattaagactagtccagacacagattgtcacttcttgaagtccctaacttgttgctatctgtgcagaccaagatttcagggaacttgtgcagaaggtccct

SEQ ID NO: 14898 - DNA, 743 bp, Brachypodium distachyon
  Intron number 1 from transcript Bradi3g08910.1 (locus Brad i3g08910) derived from phytozome v7.0 (chr-ID Bd3; pos 701 5908 to 7016650)
aggacggcaccgtgcgcgccactgacttcaagaaggtaaacagcagtacgggctggagcttgagttctggagtttggttatggtgaaaggggcaggctgagcttttgtggattagggattggattaggattgtattgtattgtacttgacgtatcttggagcatgtatacgggcgtaatcatggcatgaagttcgcgtttccagtctactaatttggatttgttgtgcctgtgattagatggtctagcaattgatgaagttttcttctttttctagtcgttgtgattaaggatgatagataaaccaaaatttgtttaaccccgctatctatctaaatttacttaatcacactgattgaattgaaagtgatggagccgatggtctatatgctaattgtgtgtgccaggttatagttgagttgataatgagtagaatcttgtaacttgttttgatggaaaataattccaagtgacagcatgacctaggaaacccttctgattgaccgacatttatatagcttgcggtggagctggcagccccaactgatttcttttgttctttcagtgaacatcttgatactacttctatacattcgtgtgattctgcagcatcaaatttgaatgaaacttgcttaaaattcaagcattttactttgcacgacgcttcatttgtataacgaaatcaaatcaaagagaaggaaactgactcttgttacgatatgttgtagattaccaccggagaag

SEQ ID NO: 14899 - DNA, 667 bp, Brachypodium distachyon
  Intron number 3 from transcript Bradi2g51040.2 (locus Brad i2g51040) derived from phytozome v7.0 (chr-ID Bd2; pos 507 05897 to 50706563)
caaccgcagggaaccgtaagtaattagtgttctgcttacctaatttactcttgattttagtaactactccctccgtttctaaatacttgtcgctgttttagtacaagtttgcactaaaacagcgacaagtatttaggaacggagggagtactctgtatttgcaaggcaaccgttattcagaattcgggttgcagtttaatacctttgatgtctttctgatctgtatggactttcaaactgtccttaattcatcttactggatctttatgtgaagtggtatccgtagaaaatttgagtatttatttttaaccggaaactgtaggagaggctcagacaatacatatatagttacaggggaaatggggtaaaagaagaaaaaaaaaggactattatagtgatgatggcgtatcagtactccagcagtccagcgtggtgtgttggtgacttgccgagctcagagtttgccttctttttgggggtttagcataatgtaatgccatgatgaatcatcatgcaccaaacttcgaagccgattatgtattttttgccgtgaagaattttcctgtccggtgactggcgctctctgttttttggtgtttcatgggtttcctatttcatctctgtcaaagcaggtacaaacaagatcaatccagaaagaggcacggca

SEQ ID NO: 14900 - DNA, 870 bp, Brachypodium distachyon
  Intron number 1 from transcript Bradi3g41530.1 (locus Brad i3g41530) derived from phytozome v7.0 (chr-ID Bd3; pos 434 70824 to 43471693 reverse strand)
ccgaggggccccaggtgccgtacgtcggggacaaggtgaggcgcctcctctctccctctccctctccctctatctgtgcaatcgctttagatttgttcgtgtggtggaatgggtcgggaacgtcacgcgaatgttaatccgatgcccaatttaggtttcgtggcgtggtcgggagcttttgaggtcgatcctgttgatccaggaatatgccaatgttggtactggtaactcttatactggagtttagtatcgtcggtcaattgtcgcttgtaatgcctagggtagggtaaggaatttgaacttggatagatagggagcaattcacgttctgttctgggagctctttgcttgatcttctcgttagcatacaggagaagataggtctaacgagtttgtcccatctcgtcgatgtaggaaccgcactgagactggagcacaacagaaattgcgtttgtgattatttatctcggaagtcggttctacacctactttcctctaaaacaggatgttatggttggactttgaagttaaaaaatgacgagatgggaaatccatatggggaagtggggagcaacagctacacatttccatatcaaatgaaatacgtatattcagattgaactcttttgtttcggtcaattagttggatatcgcaagtgcatttggttttagtggtgaatttcaaggcttttctcggtggataacggtaatgcactgttatgattatcggtatgctatagggttgtttgaattgttttgtaacttagtaccgtactatttattgtcgttgttttaacaattttttaacatgattggcatcttttgaatcttccaggaacctctctccgccttagcagcagagttccagtc

SEQ ID NO: 14901 - DNA, 532 bp, Brachypodium distachyon
  Intron number 2 from transcript Bradi2g43470.1 (locus Brad i2g43470) derived from phytozome v7.0 (chr-ID Bd2; pos 439 56055 to 43956586)
cagatacctcccaggaagacagcagcctcttacaggtactgctcttcttagttcattgaagaaactgataatggactggtaggaaggatttatttgtaattgtcagggtgaataacaacagtagccaaatcgactaccaaaatctgaatgagctaatggttgccctgttttggtttgattcacccgtacgattgcaaatatgattcattcgtttgcttcatgattgtttgttctgttatgattgatgattagtataaactgagatacacttgtggggcgtttttttgagtaatgggatgacttaacctttttttggtttgacgaatgtacagtactagttccatcacctcctcctcattccttataatctcagcagcagcagagaaaaaagaaactacggagtaataaaagtaaccctagattaacaatgcagtaacccataataggattaatccatttccattcctcgaatcatgcatgccttttgtgaaccatggaaaatgtccattgacattagtgacatccagggctg

SEQ ID NO: 14902 - DNA, 806 bp, Brachypodium distachyon
  Intron number 3 from transcript Bradi2g40910.1 (locus Brad i2g40910) derived from phytozome v7.0 (chr-ID Bd2; pos 412 16631 to 41217436 reverse strand)
aatatattccaggtattggaaccctcttttgctggtagagtttgtgtatgttactttctgaatatttatggagtggtcgacatcaagtgtatgtagtgctgctaaggaagaatggggatagctttatgcggatgcactctttagtctgtaacgaatttaaaagcagcaatctttgatgcatgaaaatgttttttgggtttatccactgcattgcagcctgatacaacaatgatggcttgaagtttgaaaaaaaaggcctaaatgtgcaacgggctgcaaaacaacacgaaagaaccactcattttatttttcactcattccttggatttaaagagatgtcagaacaattatatgggccagatgctcgattatctgtcggtgtacattaatatatcatcaatctcataagaacaagagtctcctattggactggggtgggatttccctgaatgatggatatcagttagatcaaagtgaaatttaatgagctgtgaatggattattcttcactatacacatacctgatggtttgctttgactgcataagtttcttgtgctgacggtactgttggttaatgagttgaggcaaatgttaactatacatgattttagaattaactttcatttttgtactattaagtccgttcactttgtgcggtttcaggttactcatttagcagattttattttcaaatggcgccatgccattcaaattactgctgacatgcaaattgttcaaatctgtagtatgattttcactagttttgaatggacctgttctcattctacaggggatcataaagaca

SEQ ID NO: 14903 - DNA, 757 bp, Brachypodium distachyon
  Intron number 3 from transcript Bradi2g59520.1 (locus Brad i2g59520) derived from phytozome v7.0 (chr-ID Bd2; pos 572 00685 to 57201441)
ccaagttcttcgagtccactgccgccgaggcctctgtaaggctcttatttcttgtgatacctccagccatggtctattggcattatttttcttgtttagacaatggaagctttattacccccggctctgtactcaagatgcatatagcctaaagtctttacattattcgccaaaaacacaaaacaagtgaccgaatcaaaaggtgtgataggcgacaccatgaaccgtcctacagactactaatcttaagttgcgtaagatgtagatgcatttgcttgtgtttaatggtacgaaaagaggagagtgtattagatcagattcagaccttcattgatatatgaactcggcaagtaccaatacacagtataggctaagctatcctagcctttttattggatgaaagctgggtgcttctttgccagtctttgctcatttgctgacatggtaaactgcatcatggaaaatagcatactgttttgagatccttctctataatatgggtgggatttactatacataatgcgttgaactgcagcaatacaactttgtacgggtggcgctaaacttgagtagccatatgtttggtgtgtcaccatgtttatactctttttcttaacaaagttgagaactgttaacatgttggtcttcaaccttcattgtttcaccgtgagctttgcttctatgcaaacttactctaaattggatgcttagctatgttgatgcctgcaggagggtcttgttgaaataagggaagaat

SEQ ID NO: 14904 - DNA, 601 bp, Brachypodium distachyon
  Intron number 1 from transcript Bradi2g62610.1 (locus Brad i2g62610) derived from phytozome v7.0 (chr-ID Bd2; pos 591 83971 to 59184571)
aagctagaggtggactggcgctcgacctcaacaaggtactccctctgtcagctttgcccatagcaccttaaagttccttttgtgacagcacctgattactcccttgaagttcgtgttgtggaacaccttaaagttagctgaacaatttgaagtttgtgttgtggaacaccttaaagttcctttttgtgactgcacatgattacagtactcccttgattactcccctgaagtgttgcgcataatttggttaactaatcaaggagtaatttgctccctttcgtaggcagtagttttggtaggagtagtccctttgatcactttgtaaatgactcatccatggttagtccttactgcttatgggttttgtcacctgttgctctgcaaatttgaaatctgaaatattgttccacaacaaagttttaggtgttccttttgtgactgaagatgtactcctaccaaaactaagttctcaattttgttcttgtttcatgttcgttgttccaaggttcaccgctccaaaatcccaattgagttttctgttcttttttcatgttgtttattccaaggttgaggcgctactcttcttcgttctccggcacgc

SEQ ID NO: 14905 - DNA, 891 bp, Brachypodium distachyon
  Intron number 1 from transcript Bradi3g36440.1 (locus Brad i3g36440) derived from phytozome v7.0 (chr-ID Bd3; pos 387 94195 to 38795085 reverse strand)
aggaaggctggagcaaaaggtatacgcaaccctagatcttagagatctcagtagtttctctacctgctgctttgctgcctcccgtggcgccggattagggggggtttaacaggtggtatttggtctggtgtcggctgccgccacggtgatcaaccctgtggttcgccggttccgccatgagctacggatggaagatgggttttcgcccttcggatgtcagatctgctttgtcctgaggaatttggatttctggctgaggaatttgtctcagttcaatctgtgggcctcgagctgttgttcatcgtttctgtgcatccgccagagaaaggtgctcatcggaaattcgtcagcttccagatctgcctgctttcctgggaattagttgtctcggaagaagacaaattggttctcaatggggtggaggagtctgatggctgagggatgagggcagttgacttcacttgtggagcagcagctgttttgttctattgccatgggggttcagtcttggcaggacaacctcttaagtttagcttctggtgtgccatacgtgctgcaagacaaatgtcattgtttgtagccatcatgctggaagctcaaagtctattcttattttactgaaaaccacaagctggaaattcaaagtctttttcttaatttggtgctgaattggttcaaggtagtgggcatactgtggatgtttggtgcagtcgcattgctgaagaatccacgcgtagcttttaactcttgcttatgcgcatcctttgtggactgtgacactattattcttcaaaccgtttcataagcattggtcgtgtggtgctcaacaggaaccttctattgtttttgtttccagaggatattgagggatctattggatttgaacgtgcg

SEQ ID NO: 14906 - DNA, 1003 bp, Brachypodium distachyon
  Intron number 1 from transcript Bradi2g58190.1 (locus Brad i2g58190) derived from phytozome v7.0 (chr-ID Bd2; pos 561 86873 to 56187875 reverse strand)
cgcgcatcgccgacgacttccagtcggtggatcaggtacccccgcgattgctttaatttcgagtcgagatgggaatatttgttgcggcttttcggtgttactttggatgttagatcttatgcttcaaagcattgaactgggtggattcggattcgaatacacctttacattcgaatatgctcatcctaggattgctgggaatctgatggcatcaccgatttgtgctccatattcggtcaacctgcagccgctcgaaatttctagggggttcaggatgctgtataattggtcaaccagtttgaggaggttacgctcaatcagcacgagatcacaagttgatttgatggtcaactgtcgattactgttgatacagattcgcatacacaaaaataaatggcttggtgttcacagctcattagaagaattagaaaggtttattgtggttgcaacttggtactcgtatgttcggttgtagttggtatgtgttgcttggtcctctcaaaaaagggtatctggatatggctatgcgtggaaataatccacgagtctcaaattctgaatgttcctcactaaacgtgtcaagttgatgcccctatattggagaaagtggcactgtttttgactgttcccttgtctgattaataaatgaatatatttatgccaaactttcttacctgtttctctaagcaagtcctagtaagtttcttgctacgagcctacgactggttgcttatatggcatagttgtttatcaatgaacatattgttgacttgacttccttaggttctggcgttctttctgtatactggcttcgataacatcagtaattggtactccctccgtgccatattaagtgacgaaatattaaatgtatctagacacttttgggtatagattcatccatattagggcaaatttgagtcttaatatgggacggaggaagtatttactgatattcccctgaactggtttatttaagattggtattttttttaggttactg

SEQ ID NO: 14907 - DNA, 629 bp, Brachypodium distachyon
  Intron number 1 from transcript Bradi3g05230.1 (locus Brad i3g05230) derived from phytozome v7.0 (chr-ID Bd3; pos 363 7516 to 3638144)
cttgtctgaatatctctggtgcattgatcctttaggtttggctcattaattccgctttatgatctgatgaacaactatttgtgtagtgggattaattagtattttctgccatgaataaccatcagttctagtgccggagaatttctgaggattacttaatttgctagatgcaagctgtgcacctgcatggggtagtccgtttcactgctttgggatgtgacaattatatgcgttggtatgcaattatatgtgttagacagatttgaaacactcataagtttggaatcacgcagggatcagataggtactctgaaggacctttgagtttatttgaacttttgttactccagtagaaactttagtaatccctccgatccatattaatcgtcgaaatattacatgcatctacactctttttaagcatagatacatccatatttgggcaaatttgagacaattaatatggatcggagggagtatctaactttgaggcattatgattttattctttgatccattttgactagagatgatggaacaaaatatttaaatttagtacaattaagtcagtttgtggctttctactcttcttcctgaacaatctaacatactaatttaaccccctttag

SEQ ID NO: 14908 - DNA, 688 bp, Brachypodium distachyon
  Intron number 1 from transcript Bradi3g37310.1 (locus Brad i3g37310) derived from phytozome v7.0 (chr-ID Bd3; pos 396 63025 to 39663712)
gagcggcaggtgtcgctgcagctgagatactgcagggcggacagcatgcaggagcggacgcctcccagccacccaggctgatttgatttgaatttgattagatccaggatttacatttgcggatcttcgtgtgtaagaagagtatatggatttagatgggtgttttttattgtcccatcatttctgtacatcttctgccatgtttttttcttctaggattgatttgtattctgagattgagattcggtagtgtaaataggcattagaaaataacgagcatttaattcgtgattgtcaatcagctcaataattcaggaaaaaacaatggtgctcagcttcatgtggcgatagaccaggggaaatactcgaatgcaagatgtttgtttgttttttcggtttggcaaactctgtagtggggttcagtatctcatattgctcatctgcttctacattatcagtttgggtttgcagattagagttttgctagctgagtacacgcgcttggctgcgccgttaatgatttgaatcgatattgtgagtttcttattggtagttgacttatatttggttatttcccaaatccattcacgaaatcaaacaggctactacgtcaattttgagacagaatataaatagacgtgctagatgttcatcatcacctacagagagctaaaggtaggagagacaa

SEQ ID NO: 14909 - DNA, 847 bp, Brachypodium distachyon
  Intron number 2 from transcript Bradi2g61540.2 (locus Brad i2g61540) derived from phytozome v7.0 (chr-ID Bd2; pos 586 00991 to 58601837 reverse strand)
ggtcccgccccagaccagcgccatcatcaccaacggtacggcccccctccgctttctactacccatgggaatcactgatccctcgtcgtcgagatcgcggtttttccttctagaggggctctaccggattatgatgcttggatttgatcatcgaattttgatgcctaggaaggattacatgtctagtctggtccgaataggtgtttggtttattggggctgtggcaaattaatttggggactccatggcctagtggatgcttgcgaatgatcggcaccgtttctgagatacgaatgatgcgaataggaacccttgtagttttggtttttcttcccgggacatagatcttgtaccctataggatggctgctgctgatctgttccgtttgagcttcttttttaatctagacaccattacacattatcagtattcatagcttatcacatacacccgactacttctatgatgtgtcattaggaatgcggaatgccggttcttagagagagaaaaatcccatcttagtgaattcacaaatgatgatctcatttgttaacggaaagtttcaccccatcaaagatgaaattctagatcagcacttgcagatgtatatcatgtctttatcccagcttgtttgtttacaaggatctgaggtatagttttcagctgttagtttattggctattgacaggtggtggtaggacttgcatatttacatgagcttagtgcaaccatgaactgtcatttgattatgaacagttagggtagagcagaaaaatgatgatctatttgcttatttgtttgacatacgcaatgtccttacttgaaataacgcatcccccctttgcag

SEQ ID NO: 14910 - DNA, 1029 bp, Brachypodium distachyon
  Intron number 1 from transcript Bradi2g43520.1 (locus Brad i2g43520) derived from phytozome v7.0 (chr-ID Bd2; pos 439 80914 to 43981942 reverse strand)
aggtccgcctcgaggacaccgtgctcctcgcccaggtcagattcggtcacctgcattccctggttcatttgcttgtgataaattcggagcgccattctgttttggatctgaatcctgtggaggttaggtgttctggatctgttgggtagaggagggtgtcggctggcgagtaacgtcgttgactaggaaatctggaaatgacaatgacaaactgacaatagccatggcgtgcataaacagctctagtgaatttctcgattactgtataaatcacgggacaccggaatttcttctagctaactgctgcaatagaacagtcagcttaaggattcgacatgtatgtgaggaggtgatggctcatggcatggccatgaattgcttgagctgatctaagctgctgacttttgagatccatcacctcagaaatctcagagatccagacatgatgcaattccaaactgttcttgctgcctacctaattgatttgcagcacatccatcaagatttctagctttcatcagagtatcagactgttgataacaacctacttgacaaattgacaaaaatggtatcttcttcaacattagagcaagcacagttttaaatacaaacatgctttagagcatttaaagattgaataaagatctggaaatgtttgattacgtaatcttcaactgtcattatatttagtctatgcacacttcaaatttattcactgtgtatatgcatcatatgtttttggtttatttcacttgagctacaattaatctccctaaccaatttgttgcgactagaatggaaaatacaatatcagaggtaagaggtacaaaataagtgggggtttttgttggtaaatacactatttgatcaggtcacattgtttcagtatttccctttctacagaggctactgtaaggctctatgactagttagcactgaacttaccgtgtgtagtgtctccaatgatcaaaaattctgttttctttatgttcagattactaagttcacctgcggtggattctctgtggg

SEQ ID NO: 14911 - DNA, 607 bp, Brachypodium distachyon
  Intron number 1 from transcript Bradi3g32880.1 (locus Brad i3g32880) derived from phytozome v7.0 (chr-ID Bd3; pos 352 80230 to 35280836)
ccgtcgacgtggccgccgcgctcccgccgggctcggtacgtgctccgcttcgtttcgtttacttttcctttctttctttctttcctccgccgtggcgtgcgttggcgaacggtggtacggagaagtgccacgtcggacggaatcggaatcctcgggctcggggggtgttcgcctgtctgaggtagtggacacgcggattccttgggaatcttctcgtagtgaaacgggatcacacggctgtcactgctccatgggccctgaaaacatgccgcctagtttacttccgacaagctcgtcttggctttggcttctccgccgctcgtttccttcacaactttataaaaccgtactaatcgtttccttatttagacatttcccactagctaaaatcaaaacaagagaataaggaaacgattccctgagaaaatggtgttttttgcgtgtcagaattagtactccactcccgcacaaaaaagaaaagaattagcactccactaaactaagtaggctaagtaattaggcttgaagattaagcttaactaattatgctttcgttttgtgcatgcgtgcaggcgagtgtgtgtatcaagatcacggcgctgtgccc

SEQ ID NO: 14912 - DNA, 912 bp, Brachypodium distachyon
  Intron number 2 from transcript Bradi3g28420.1 (locus Brad i3g28420) derived from phytozome v7.0 (chr-ID Bd3; pos 297 71836 to 29772747)
gtcttctccgtgatctaccttatcgtgagtcaacgtgactgtctattttcctatcgttttgtcctcctgatatataagtaatgagatcaaaacaagcttgctactaattagatgccaacctaagccacaaacataaatgataaattacatgcatctttctagagaccaaataaagggaattcacctaaatagacatacattggttacgattgtcgtcgactgagaaataactattttctaaacgactgagatatagacactctcaaaaatttataccatgacccatggtagtatatataagcaactgtgcatggtttatgacctgggtcttcacacaaagcattcatcaattacaaaatttgcaacatagttcctaaagcatagttcaattaccattgcaggaaagaacaaaacaacatggttgcagggatgttgtttaaattgttctgtttaggcgttcagcatcttctaatgcaggagatccgaaccatcagtttgtccaagaatgtgtattcgtggttgcatatatttatggaatcagctatgaaattttcctgaatatcagtcttaatttgaaagcttttagatcggcatacgcgcattttcatacttaagtcactccattaattattagagtaaattccagtttttaccccctactttcaagttttggacaacaattaccccatttagtgaaaattctataattttaccccatttagtgaaagttgtaccagattttaccccatttaatattttgactccctttttgacaaactaaaagttgctccggcaactccaaataatgcaataaccatgtgcaactttaggcgtataaaattttaaaattttcaaagaagtaggaattaccaaaaggcgtgtatttaccacccgctattaatcatgcaggga

SEQ ID NO: 14913 - DNA, 917 bp, Brachypodium distachyon
  Intron number 2 from transcript Bradi2g46240.3 (locus Brad i2g46240) derived from phytozome v7.0 (chr-ID Bd2; pos 466 53723 to 46654639)
tcgaggaggaccacccctacgagccccaccccgcggtcagtcaatcttcgccctcccctcccctcccctccctgcaacaatcttgactctcatagtctcatgtgatgctcaaaacttatatcttgtatataagtacgtttgagatgtggaaaattggaggtgttgaccgcggaggaactcatgattttagctattttttattttgatagtgcatcatctccttcatgtttgaagtacggaaaatgctaagcaactatagctttacgaaatgcaactgtactctctactcgtgcttaggtgtctcaggaggtagagtcgggtattttatcagtaaactacaacgcagcactggttatgtattcagacctaactgaggttgggaattaggggtttgtagaggaaagagcttgtaccttggcccagaaatcaagaggtttagggtcaattgctaacatatcggacttccaagctctgaaagctattgtgtcttgtacttgaacttcaaggtctacttctggaaacaatgcgttgtagttccttttgcatttgattgccaacatagtatttctatcatactgcccagtgtgcaccttacaattggtgggaaattgttactagcatttagtctgagaatattgtcatgatcacttaagctatgctgggccgacatataagttttgctggacaacatgggctaacacataagagaagtaatccacttacgttgcaactggtgtgtttcaaccaacttaaagtttgtggtaactttctacctgttaggatgcataatacagtttctttggtttggagagaaaagggttggactgttcaaacagatttgtctatatcttcccctaatttatttttctgttcttatttcagccctgtcccatctgctctgaaaagattacaagaga

SEQ ID NO: 14914 - DNA, 874 bp, Brachypodium distachyon
  Intron number 1 from transcript Bradi3g02890.1 (locus Brad i3g02890) derived from phytozome v7.0 (chr-ID Bd3; pos 182 4185 to 1825058 reverse strand)
cgctcgccgctcgcctcgtctcccgctcccgccaggttcgtcctctcttcctctccttcgcccgcctgcccggctcggctaggcatcctcgccgtcggaaaccctagctggtggaggctcgctagatctggcccgccgccggtctgcttcgcgccgccgtctggccgattccgactgcaccgggcgggaacgggatctatgtcgcgcctgggttgatgttttttgttggtcgtggatcgtagtggtgggcgatgagtgtccgtatacgatgcgtttcgattcggttgcagactgtttgggttgattgggaggtagtgggatcctctcgatttggagcggaaacgttccagtttattcggtacaggagattggaggggacaggcagacttgtttgcgacacctccagatctttcagcgcccgtgtgattcccccggttcgatgcccttcttggtaccaactcgtgtgttttcatgccaaatcggaacccgtcgactggccatttttatcttcgcaagtagaaatgttgataatcctgggtgcttgttcccagttttctgtttctcggctgtgcgtgtctgctgacatgtggacactggacagtggctgaacactgaatttgagatcataacagcttaagtcaaatatggtggcatagttttgtgaaatctgggtgggttctagttaggattattccatgcgctccatttgatgtccaaatgtccggtctgtcaaaatatcaatatggaactattttatgtttgaacgttttgtttctgatgatgcctcatctattaaatttacaatgctttttgggctgatcagtttgttaaataatttttctacagctatattctgcccaagctgctttggcca

SEQ ID NO: 14915 - DNA, 826 bp, Brachypodium distachyon
  Intron number 2 from transcript Bradi3g32000.1 (locus Brad i3g32000) derived from phytozome v7.0 (chr-ID Bd3; pos 342 09795 to 34210620)
agaatgtaagagttatctgctttcatttgtttggacatttctactggtcgccaagtgtgcttgccttaccacaactaggtatttattctgtgtgtgttatatacatttctatacatagaaggtcaccattgggcaagacatttttccattgtgaacactttgttgttttggacagaacacttttactgctcttattagttcattttcgaatatttgattctggcatatgtaagtggtcttgcacttttttccttctggttataaataattgctatacataaggaaagaaataattcatctgtaataccccctctgtttcttactatctatacatttggggttgtcctaagtcctaagtcaaactatgtcaactttgaccgagtttgtagataaaaataccagcatatgcaataccaaacaaatggagtgtgaaaatatatttgatagtagtcctaacgatactagtttggtatttcttatcttatgttggtgttttttttcctacgaacttggtcaaagttgacatagttgacttaggataacctcaaatgtatagatattttgaaacagagggagtatgagacgaatgaactcagaatagtactggatccaggtactggtggtttttgttcatctgtctacatttttagaagtggttttgcctagtgtggttctgatttcctgtcattacaatttcaccgtggatgggccatgttgtacctgcttatgcatactgtcagacattcctacgatgggttttgtctaattttggtttcaatattgcatcacagattattgccataaaggacataatacgccccccaag

SEQ ID NO: 14916 - DNA, 786 bp, Brachypodium distachyon
  Intron number 2 from transcript Bradi3g21500.1 (locus Brad i3g21500) derived from phytozome v7.0 (chr-ID Bd3; pos 206 48328 to 20649113)
cgaagtacaatgtgagtcttcgcactagattttacagcctgctactgcgccatgtgctgcttttaaattttaatattcctccgtccaataaaggatgtctcaaatttgactaaatttgaatgcatctatacactaagtcatatctagatacatccaagttttgacaaagttgagacatcttttgttggacggaaggagtacaataatttatgctgatttgtggaaatgatctgtatctcgttagttttggggaattatggatataccattccatggttctagcaacacgtgatggtgcgcagggttactgaaagaagtatgtgcctataacaacactctgttcacctgttgtggtggcagttgcaaagaatgatttgcgagatacaacttgattgagccttacctgtatttttatcattaatcagtgttttttttcagttactatagcacattcagaaaatgttgcagagcttgctagagttatgacatattcaaatgcttagctggaaacatcattaaaataacaagttcatgctggcactttcagttttacacaataaggaggtcactttttctgtatgttctaaacgtactgtacatttttggctgcatcatcaacaatgccgatttctcattactctcagctagtagattgtcctctgttactcataaatcatgaccgttatggtttttaaaatcgtgcatgcttcttgtttctgttttcctcttcacagccgtgtttgcactgcagtttcctgcaaagaagcttgatcaaaggcttttagg

SEQ ID NO: 14917 - DNA, 591 bp, Brachypodium distachyon
  Intron number 1 from transcript Bradi3g40590.1 (locus Brad i3g40590) derived from phytozome v7.0 (chr-ID Bd3; pos 427 38150 to 42738740 reverse strand)
gaggtccgccgcgccgccgccgattcgcgccggaggtgaggctgccgtccccttcgcctcggccaccgctggttccgtgttatgattatgtttggttggtgtgctgtctttttgcggcaggaaacctgttccttgttgagttgatgttgttattgttatgcctttctgtttgatccttgtgtggttagatagatgttgtcttcgttatgatgagaaatttatctgtttatcttagtaaagtaatgcagtcacataagagctaatttcccccccttagatttctcagagcaaataatgcctgtaaattggcttggccacatgaataacttgtagattgctggatttgagttttgtggcggtgttatcgtgcacatggcgatatgtcatatctatttcatgtgatgagattttggtaacagagatcattgctgtgtttttttttgcgggtgagagatcattgctgttgatgatataaatgattggagcaatggtttttgttctttgatgttcttatttgtgtgcttgtgtctacgcaagtttgttctttctaccagaaaatggcattcaactggttttgtgtttgttgtaggt

SEQ ID NO: 14918 - DNA, 898 bp, Brachypodium distachyon
  Intron number 2 from transcript Bradi3g09730.2 (locus Brad i3g09730) derived from phytozome v7.0 (chr-ID Bd3; pos 789 4347 to 7895244 reverse strand)
atcaggtttagtgcttgtgcttctatacatatttttgttgaagactccatgttgatgtcttgactgttttatatagtgcttttggtactgcatggtttccctccagcttttggatggaaaaagaaaatcctttggagaaccacctcactgtgtttttatcttatagaagtagttagctaagaagtatttcctcaagagctaaagaagagttgctccatcatgctgcttccggctagtaggaatacttgtgattagatatgttagagatccatgaaaatgtgatttgatatgttagagatccatctcttctcttctaggcaaggatccttctgtaccttgttcttagctgtgcttgttggtcttgatgtggctatgctcacatgttaggaaaataactcagctgttacctgttttttcatttagttcacttagtccattgaaatgttgataagcatgcaaatctgactaaatacatgatagctgagaagaaaaatcttgagggtaccttgtttgaaacgatgctacctataatacattctgaaattatgtaaatttggtattgagctagtacattttggaagtaaaggaatcattatgctgtatgtatggaaacgttttgatgccttcacttgtttggtatagcaaatgtgtagcctatgatttgctatttcacctaaatctgatcttcagaacctatttatttagttcctggtgtagcggtgtatttgtgtatgtattagcttcattatttccccactaatgacattctaagtcaaaacctgcaatcccacattcatatggatcctccacatccttttctattctgccagaactttaactcccagataatgcttgatacacagatcatattaaacaaggtacttctagtatcaactag

SEQ ID NO: 14919 - DNA, 711 bp, Brachypodium distachyon
  Intron number 1 from transcript Bradi2g54170.6 (locus Brad i2g54170) derived from phytozome v7.0 (chr-ID Bd2; pos 531 10239 to 53110949 reverse strand)
gattgcggaagagttggccttcaggcgacgttcaggtgcgagggtttatgtggggggcgaaattcagtctgtttcagttcgtgtgcttgattctttcaggttttgtgttttcgctgcccgatttatcgaggtacaagggtaacgcgcgaaacagtgctgatttgtgaaccattgtagtttatggtgaagaattatgccctcgtggcggcgaaaatatgtttttctgacgctaatcgtctagccctacacctgggaggctgggagttcagttccttctcgtttctctactagattcggttaaggctttggcttgctcacgattttatagatgcagttacaggattttatgattatctaaaaattacaggattttatgcataactgatagctccgcacctctttgttgatttcgcagccgatttttggtggagatgctgatttggtatagcttttttttggtgtcaaaacgttgtttctttctttccgattcttccacctgtaattcctgcttcatcagggaacggcagcaacagaacattttgatctctagaaatatagtatttttggaacaactatccttgtgctgatcgtggatgtgctatggttaaggttgaaaacccttggattttcttgtttcttttgtatcattactgtactgaagatttgatctgctgtacttttaggtgaaggcgaagaaaaggaacactaaga

SEQ ID NO: 14920 - DNA, 1001 bp, Brachypodium distachyon
  Intron number 3 from transcript Bradi3g20210.2 (locus Brad i3g20210) derived from phytozome v7.0 (chr-ID Bd3; pos 192 83712 to 19284712 reverse strand)
gtctctgggtatgccctgaaggaaaatccaactgtagtagttttatggtaaaaagctacatgctcattttttttcatgtttattagttgaaaatgaacattgatatatactattggatcttgatgtaataggattctcctttcacattataaggtacctgaactgatgtaccaatatggtttcagaggatagaaactacgaattggaatgatatgttaaactaataggtgatacctgtttagatgtaactcagatggttgaatatgcattctccactgaagagcacgctaatacaatgtctatatattcaaagagtaaaaaataaggttgtgcctgctaggtaatagtggtagctctttcaaaaaaataacactagaacagtgtagcttcccctgtgcccctctgtaatctctctttgtatttgttttatattttaatattatatactgtcagaacctctcctacagtttttcttgaaaaaacagtagtatctcgaaactggcttcgttctggagttctggatatctgggcactgtttatttgtatatatggaaccacattttgtttttgccaaaatgtaccacatagttatccgtacatgaacgctgaagttgccaatcttacatcaaaacctcaaaggtaagtgtggctaatgaaagattattttccaaagtatctttcctctgattccacttccacccatgacctttcccgcgttgtaggatattattatatttaaaaaaagtcccaattcagaattctcgagtgaatgtttctaggtgtttcttacatggtaaacattcttttttgctgaaatgcccctcgaaactgcaggcttacttgctatctgagttttccttttttttacttcttttttcttatttgtgggaatacctagttatgcgattctgtgaggcacgcaagtaagatattaagccatgtaaccatggaacttttaaactgatcattctccgtctttgcccacctgattgcagttttcc

SEQ ID NO: 14921 - DNA, 966 bp, Brachypodium distachyon
  Intron number 5 from transcript Bradi3g35370.2 (locus Brad i3g35370) derived from phytozome v7.0 (chr-ID Bd3; pos 376 53258 to 37654223 reverse strand)
agatcaacgcaggcaagttcaagttccactttttttattcttggctaacatatcaactgcgtgcgagtttttttagaagcattagcgcaactgtcatgtgtttacacttcagatctggtgcaatgctaggcattccaagaaactacgatagttcttttttagtttagaaaggagaggtgaatcagtggcatggtcttgagaccttgagtgctgtagcttcctgctgttgaaaagatgtcactacttaaagttaaattaattttcacaaagttacacgtattgccagagcgattcaataaagcatattcctgctatattagaaaaagttagacccatttgtctgaaaactaaaattctatagaactacacatattttatcttatgatatttgggttctaaatgtcgacaagtaggtccgacatgtcatacttcattgcatttatcgggattcaatggatgtggtttgtaatcaaaacaatatgctcaacggctcaagtatgtgtccctggaaatgtaaatgaagaagtgttgaattctgctagttataccaagtatttgtagttacagcctcgcaggaaacttactcttagagttatgttcatgaagcctgcacgaaactgatttttcataacaattggcagaattgttttacattttctttgacatataggtttccatcgtcttgcttgaatttggaaatgagcgggttatttcagatgtgcatattgtgttttgaacttcttgaaggcttacgtggttacatggaacaaattgttctggtcaactaatagtcaaaaacaaattcagttaactttttccaagattgtgctgtttgattggatgattttctctttggaaactatgggttttacacatatacagcattgcagccttttagcacatattatcagatatgttggacaataacatttagctgttctcgtgatttgtaaaacagctgctaga

SEQ ID NO: 14922 - DNA, 853 bp, Brachypodium distachyon
  Intron number 1 from transcript Bradi3g26430.1 (locus Brad i3g26430) derived from phytozome v7.0 (chr-ID Bd3; pos 271 78545 to 27179397)
ccaaggtgaaggtcctctccgccgtcgcccccaaggtgaagctcacttgtgccttctttgattctctgttggctgcaccttgtgcgtgagagagaggaaggaaagggagagagctgctgctgctgcagttagaaatagtgttttgccgtaaagagccttaggccaatatcttctatatatatcaacagatacattgtacatatggcaagtacatggttagctacaattacgcacacaatcaggcgtcaatcctaaccaaattaatctaccgatttgtttctttaacagctgctacgtggttcttgttccatagtatttctttcatagcatttctttcagagcaatgctcttttcatatgcaaatatctcggatcattttctttcatagcaggtgttgccttggattacagggtttttgttaaccttgaaggtcctttgataattatatcaggtccaggttgcttagaaaaaagaatgatccgagacaaagaagtaaatgatttgatagttttgtctaggagtctatttacaagcatctaactcattcagtctgacaaaaatgacttgcaacagtttctttcatgtgaacaagctcactgaagaatctgcacatatgaacatcctgatacatacagtacagtaaaaacgactgaaacaaaattattgtcgtgctcatgccaacaatactgaatagtttgctgatgcatagcacttaatgaactagaagtactacttgcacaagttaatttcaaaagctgtgttttacttcagaccgatttaatttctccctccttgtttgttgttaattttaattccagaacagtctacaagttcagcaccagtggcgccgacg

SEQ ID NO: 14923 - DNA, 804 bp, Brachypodium distachyon
  Intron number 1 from transcript Bradi3g06080.3 (locus Brad i3g06080) derived from phytozome v7.0 (chr-ID Bd3; pos 436 7380 to 4368183)
tcctcctcttcggctgcccgacgaccggtgcataggtatttccaggtaaccctcgacccagcttctctgcctcccctaaccccttggccgatgccaatcaattctcccggtacctgcacccgattccggtcgtgctcctgtccgtgctccgatgggatgaccggatcgtcaatctaatctaatattctaagcggaggcatgtgtactataatcatacgcttgcgtgctgccggtgttcgtcccacaagtgcgggaaaaggaatcacttttatgcgtttgattgatgacgcgcaacctcttccgctgagtcggtgtagtaattttagttgaagtaccgcatgagcatcggttgtgttatactcagactctgcatcctgaacaggagttttgtttgtttgtttgtctaccactagacctcgcttccagttacccaagggctgtgctatgccatcttcatagagctagagaacctatgaacttttagcaggatctactattccaactgcatctagtaacccctgaagatttagtttcatcacaccatggcctagcacttttgcctagtcctgagaagctattatggcttatcagtatcgagcatctgcaaattagagtaggacttaggtctcctttcttgattgtcgcaaaacttcatctgtgagtaaagttcaattctgttgtgattatttgcgaatgtgtagtattgtattatctgcttttcttttcttcatcaccgtttaactatgtgttctcgttcctcgtatgctagggttcaaaaggggttgaccttctggtttgcaatat

SEQ ID NO: 14924 - DNA, 662 bp, Brachypodium distachyon
  Intron number 3 from transcript Bradi2g49420.7 (locus Brad i2g49420) derived from phytozome v7.0 (chr-ID Bd2; pos 495 24995 to 49525656)
cgcaacaacggcaacagaccaccagcgcgaggaaggtaatgattttgccatctttccttctctcagcaagggaagatatcaaaatggttgctcctgtcatcatttatatagttcattcaaggattgctctttcacgctcttaacagctttccagaaattgcagtgtccaaatttccttcccgcggaccttaaaaaagtatctttcccatcttttgagtttcagctgccgtgcaattatgatgaagtttagtttttcttagttggtcaacatgagactctgctctaaggatcaaagttaatctttccaaaatatcactttactcgtttaaaaaacaaaaagctcacttactttataatagtttttatttaaatatgatcctctttttcgctcaattctatatatactgtattacctttggattaagagcatcataatagtttaatttcttggaaacaagtgcagtactaaactactaatagaaaagtgaatattcgtatgaaccatgatgctgtttatcgcctcatcatatattcagctattttggttcactaatactagcatgcaaagtatttagttgactggcctgtctgtcaccaactaactcaccatgctctaatctgacacagaggggctgcagttccagtggttggttggcctccaa

SEQ ID NO: 14925 - DNA, 934 bp, Brachypodium distachyon
  Intron number 2 from transcript Bradi3g33180.1 (locus Brad i3g33180) derived from phytozome v7.0 (chr-ID Bd3; pos 355 45628 to 35546561)
aatatgtaagtttagcacggaatcaaccgttggtgacaaactattgatgagtacgaatggagaaattttaattttgaagtaatttcagtgcttacgttgttgactattccttttgtgcttgatgtacatgacaattcatatttagaatatttgtatagacatgatgatgatgataatgtaactgaaccggtaagagtagttgcattgtttcataaattgtttgcttgaactgccttagtttttctctaacagatacatgtcctatagtctgtagtcttttcttataattttctatctgtttttcgtttgacatttgtatttcgagattcagatatttggagtaatatagaagtcccagaaggcagctaagtaatccagcaaattcacagaagtgagaaaaaagtgcatttcttttagtaaataattaatgtgtttgagtggtaaaaggaaagccttgtgttcctttgcaaaagttgttgtactgtaactttagcactatagctactaagacatgcatgtcaactccagtccacacatgagctgaatacagagaaataaaagagagatgcatgcaatagctttaatttgcattgctagataacaagctagtaaaattgatatttacaactggtgctctaaggaccttttgaatggttacatgctggaatatatgctctgtacagttattttctgagccttcaagtaggaacaaacagagttgtagccacaccttaatgcgaggacatctgactatttatttccaccagttatgagaacggaactcgatctctctctctctctctctcctgtgtgcaaacaacaaattctcatcactatatcatgtatatcttcaatatttccacatatggtattaccatgcatattttaattctgacaactggtattttcatttcttagggcactagaagcgaca

SEQ ID NO: 14926 - DNA, 858 bp, Brachypodium distachyon
  Intron number 1 from transcript Bradi2g54160.1 (locus Brad i2g54160) derived from phytozome v7.0 (chr-ID Bd2; pos 531 05118 to 53105975 reverse strand)
tcgtcttcctcctcgctcgagcgcctctaccgcaggttgatctccccttcgattctctcgctcccgaccgtttctcctcccatcaccccacgaacgggttccgccctttagatccccgtttcataatcttccccaattcgtaactgaggcaaaaatcaaggtagggcgcccgccctaccttgccctactgggtcctccgcccgtggttgtgctctctgtggatgcgtcgtctgggtacccatagttggttcgtgcgtgcagtacgagggttgtgcgggttggcgcgttgtgaggcataccatgcaatttgggttgcaaagtatctgctgccatatcaatattgtgtgaaggcctgatcgggaacattattgcttgacctgtttggataatttggctcgagattcttagatttcatcgggatgttaagttgtttgattaagggtatcggatcatattattttgtggtgtggaacaatctgtattttcatcagaatgaattcagttaaatatagtgttgttttaatcgatgtctatcagttatttggacaatgtacttccagaatgtgtaaatattggcgtcagatgtatgtggatctcattagtatatttataatataccgtttttaatctgttatacgcttaaacataagttacagtgtattttttgaaatcctatttgatgcactcataaaacattctctcgtgtcttaccattcgctgtttatcatgtttgattggttgtgcatttgcagttctcactaacttctttcaattaccatgcatggcttgtttgtgtgggaaataattaacttttctcttgcagttctataacttgctgacctgacttcagtgattcgt

SEQ ID NO: 14927 - DNA, 968 bp, Brachypodium distachyon
  Intron number 1 from transcript Bradi2g60530.1 (locus Brad i2g60530) derived from phytozome v7.0 (chr-ID Bd2; pos 578 65202 to 57866169 reverse strand)
gctgcactgaaggtatatccatctctcacactgctgtatactacttaataaaactgtctttgcgtcaatgaagtgaagtttttctctgtgcgttttttttttaagtttacttaactcaaaagataaaataacctccactgcaaaagttattctgaaaacagtgacccatctttcaaatcttccagtattatttgccaacctatgagcaattgtaaaaaaaaaaaagcttctgttactccagcagtttacaatgagttgattcgaagactcagctaacacaaataggaccactgcatatggttcaaacaaaggaacattgcatgcttgatgtatatcctgttaccagtgtgcaaaggcaatatgaaatctacccgcagagcctcacacatctttttgattcaaattttcagtataaatttgtctcctgtggaagagagaacacaaagtgccttttgcacttccaagtacatgatatgtaaaagaataatgaaaaatacatagttgcctgcgcttacaagctttatttctgttgttctgctggctgatgttttttccaagctgattacctgtgatctttactgatattaccgtttaagactctgtttgcagacaccgtgttttggcagtttctctaatagaaatcgatggggacagcccattgtttttttttactttatgtatttgaattattttccccaacattgatataccaagagtccgttttttttactttacttcatgtaggctgtagcatgctaataagtcttcttttttaattattgggtcatttaattagcaaatgcccatggtccaccccataggattggtttacaacaagcagtacacacactaattttatccactcaaattctattttttaactcccatgcacctaaccttccttctatctaatgtcaatctacccggtgaaagattacaacccaaaaccaagaggaagttgtgagaaa

SEQ ID NO: 14928 - DNA, 823 bp, Brachypodium distachyon
  Intron number 2 from transcript Bradi3g40390.3 (locus Brad i3g40390) derived from phytozome v7.0 (chr-ID Bd3; pos 425 91057 to 42591879 reverse strand)
acagccggatccagtactccgaccactgaaccaaggtctgtactgcagattttccaccatcccccgttgcatcctctactgcagtttgtttattttgcatggcaaatgtgtgtattttacagtggcttgatctgtgtgaatgcgtggaaaatttgtgcaatgactgaaaattatatgccatgttatagggtgaatacctgaaatctatgtatagcatgacgccaaaaatatgcaatgttatagtaaaaatatgatgcgcatgctatggcagtgagtaatttcgtttgagttttaacatttattttgtcacggctcgcgatgacgcccctagccacctctcccgccgcctactgctacctaccactacctatgacctctctctttcatatgaataacatcacaataactactgctactaattaacaggcactacagcggaccatggcaacctacatgttctgtttggccaacttcttccaaatgaagcactgatgtgattctagagtggttaataagttgattgatgtaacaaaatccaagtgctttttttgctcacttgtacgattgaaggccatgagcctattttggtttcttttcctcaaagcatgatgtaaactatgcaatccaagcatgatatagtcgtcatgggacttagtttactgtgatttagtttcctcaaagcatttctatgtgatatttgtttatgtgactactataaataaagttttctgatattcataatacgaattagctgaggcctatatcatgttatttgatattgaagtgtttcttttgactcttataaataaagcaaacccaggaa

SEQ ID NO: 14929 - DNA, 949 bp, Brachypodium distachyon
  Intron number 1 from transcript Bradi3g17760.2 (locus Brad i3g17760) derived from phytozome v7.0 (chr-ID Bd3; pos 161 08784 to 16109732 reverse strand)
tcctcctcagatccagctccagcgccgcctccaaggtgaccaccgtggtacctcttccatctactagcaattccttatcgccggctgtagatacgggaacagagagaggcgttcgctcttgttcttatcacccagaaaatgcgggaagtggagtggttcttggttgttccttgttcgtgattccagtggagcggcggattaagttcgatttaagttgttttcgttttgtttgatcggttccggacttccgggacaacagcaacagtagtaccgtacagtttacttgagctctgtttttattttctttcctctccctcacaatattcaggtttttatgggatttggtcgatgtgtgatcggcagtagtctttcaggtttttttgtcaaaatattctctgagtgaacatgtgggctacgtcagcgtgttatggtgtctgctctgaagatcagaaatttttcatttggtttaagatgtcaggggaatggggcagttttgacaatataaaaagtgcagaactgagcagaggatgccgcgagacattccattcacctgggctgagctcaaatctgtgatgcctcagttcttcgaaaagtgaatcgtgcatgcctgatgcttaaaaaaagagacaagaaagtatgtaatagtcctctggttcatgaaaaaagacaatgaaacatatctaatcctcttcctagttcatagggcatgtcattttgaatattgtcatggtccaaaaaatgcaactttgactagtcaattttatcttaaaatatatttataatacatgttaaaataaattaaatatatcgaaagtacattttcgttctaaaaaatcgcatctatcatttgcttgttttgtcaaccggaggcagtaattttgtgcgtacataaaagttaatatgcctgattttttttctgctgtcatgcaggctgagagtttagtaaaat

SEQ ID NO: 14930 - DNA, 656 bp, Brachypodium distachyon
  Intron number 2 from transcript Bradi2g40640.1 (locus Brad i2g40640) derived from phytozome v7.0 (chr-ID Bd2; pos 409 51330 to 40951985 reverse strand)
ggtacgtcaaattgtgatttatatcctgaaatttgttattttctttcacatcagtctgatttgtattgttccggaacataatggctgtcatggcgaaacatcggttgtaataaagtggcactagtaaccatatactgaactcggagaggttcagcatgttcattttgaagtccttgtcgaccaaacaatctatcggaacaaacaaactatgtttgcatgtagtccttcagtttccccactcagtcgtatgtccgtttctcttcttttttttctagtaaaatgcactacagatggttattttgctctccaactttgtcagagagcaaggtacaaaaattttatccacccttctctcggttgctgtaaagaacatactgattagcttcagtaagggcaatcaagcgttatgctatgccgttccaaagaaaaatctattttaaattccgtaataaaggtttcctaactgatagtccctctgtagaagctggtcgaaacgattagttatttatgcagcaattggtttgttctcttaaaacattttaccttttgaattagtcacgtacttacgttttctatttgtacatgcattaatatttttatgcgccttttcttctgtcttaggatttctggggcgatcaacatatactgccttggtc

SEQ ID NO: 14931 - DNA, 880 bp, Brachypodium distachyon
  Intron number 1 from transcript Bradi3g37420.1 (locus Brad i3g37420) derived from phytozome v7.0 (chr-ID Bd3; pos 398 93478 to 39894357)
gctgcttccacattatctgcaggtaatatatcacccttttgaactcaacttaattggatctccggccatcacgatcaatgcatgctcctctccggcgtacgtcggcgtgggagttgtccttttcagccatggcacatcgaggttaaaggttttgggttcagatggggcttgaagaagatgagcattttccgtgctccccgggcttatagaggtagagcttcacggataaacacaacggggaatatagacaactacgatttgtagtgatcacgttgtggcaaaagtggtagttgctagaggcggcacgtatagggtttcaaatttcggtttcagaaatatttcgaccactgttaaaatcactaaaatccaataatgtcaatgatccggtcaaaggactgaaattttcactgggaaattgactaaactcaaaccatttttttaagttaaatttatttgaatttctatgcaaaagtgaaatggctgaaataatctgagcgagggtaaaataattcggtatctaccgaaaatgactgaaattcagtgcgatgaaatttcactagaattgaacaccactatagtgtaggtgaggcaaccgcgacgagagtggacagcaatgtggaattgatgaggaagaggtgggctgaagaaggattgatttgtgcatgagcatgaatgtagaaggcccttccattttctttaatttagcatacaataagtttttaaaatctcagattgggaaggcaaaactttttcttagcaatcattagttctagaagtatttagagtattatttttctagaatcatacaagtgttaacttcatcgcaataaaaaatcgcatggctaaatacttgatcgttgcataatcaacaggtgtgact

SEQ ID NO: 14932 - DNA, 768 bp, Brachypodium distachyon
  Intron number 1 from transcript Bradi3g39240.1 (locus Brad i3g39240) derived from phytozome v7.0 (chr-ID Bd3; pos 415 83265 to 41584032)
cctctttccacgccttccgctcgctcggtcttaaggtgcgcatttcgctgcctcgtcccctcttctctgcttttgtgattcctcgcggcgatgccgtcatttccgagggctgaggaaatgagccgggacgaggaatttgtgaagagattctctggaaagtgacgttagtatggattttcatcgagaccattttggttttgggtttaacatttgatcaatttggacttcggagtgaaattgttatctgcttgctgcaatgaactcgcagttacaataaaacctcggccgtgctcgcggtctaaattttgcagtcaagaggaatagcaaatgcttgctagttgctactaacatgataactcttccagtgaattcttttttgttgaatagaaaatgatgtctcagtctgttgcagttacccagtgtaaaaaagtaatcaccgattgttttcctttgcacatgtggatgtggagcatgagctcttgtttgattatgaaatgcacactctggctatacagttaatttttttgaaacttttaaggggtactccctccgatcctaaattgttgtcaaaatagtacatgtatctagacaccttttaagaatagatacgtccatatttgggcaaatttgagacaataatttaggatcggagggagtactatatatagcctgtcacattcatctgtttatcttggcttcaaatttgtgctgctcattgaaaataattcttcagaatttatttgtttcattttagagttcattgggcca

SEQ ID NO: 14933 - DNA, 971 bp, Brachypodium distachyon
  Intron number 1 from transcript Bradi2g60990.1 (locus Brad i2g60990) derived from phytozome v7.0 (chr-ID Bd2; pos 581 94889 to 58195859)
ggcgagccaactccccacgaagagcccccaaccaggtgagtgccgcactcctctcgggcgacttcctccgctcgattatttttcctcttcgtcgatttcccccgccgaattcgtccatcaggagtccgctagctagtactcgacggctgatagagctagtttattaggttcgggggtccccggattgattcatgcccggctgcggtgaatgattattctgcagtgtctatctagcaatattaattcttccctgaagcaccagccggtgacccttgtagccactactaatgaattaacaagcactcacagtcccaagggttgagtttaggcaccaaagccatcaaccagttgacccaaaaatcttaacctctgcttttatattgagtttaagtaccaaccggtttacttgaatcttaagttggtgaaaaaagctagaatatacttcgacatcaagaacaatatgtgatctgctggtgcctcctggttcacaagagaaggtcattgtgcgtggtaaattatgtaagcattgaaacatggttctctgggtgtcagttccttacggtttgagtgttttctctttccaaaagaggcacaagctttaccagtttcattaataaagcgagagcaagtgctcttctttctggtagtaagttttgcttcatacatccttccatgtgcatggtctgagttatgcgttcattatgttttcctgtttcatgtgtgcttccctgtttatgaaaatgagctatgacaggcttcagtaagcaaatttaatcacatgcacaatgtatgtgaagcagaacccaacttgtattaaacatggaacagtgcctaaaaatcttgagaatagtcgtagaaatcttcatggccttggtttcttgcagctctgattttatctctttttttttgctgaaaatgatcttaagtttctattcctgatatataaatatgaatcgatatcttcaggcaca

SEQ ID NO: 14934 - DNA, 769 bp, Brachypodium distachyon
  Intron number 3 from transcript Bradi3g27670.2 (locus Brad i3g27670) derived from phytozome v7.0 (chr-ID Bd3; pos 287 15875 to 28716643)
atcttcctgcaaggttagctgtgctgtttcagttttgcctgtgctttgttatttttctttccacatgttcgctcatgagggagataaatgtgtgcacacacacatgaatatggaagcaccattgaagtctgaaattacaaaattggtgtattttctgtttttgcgatgagaattccggctggcacaatggccctcatataaatcaaagaaaataaattaattttgatatgcacactgttttaaaggttatttttccattattaataaagggaataccaaaattaattgcttcagcaaaatgcagactgatgctacaaagtttggtagatcatcggaatgtacctgtaaaaatttgtcgtcaacctcttttctgtttagctggagtgctgtaatgctcacgcagctttgcttataaatttctgttgaacccctagaacctgaaccttgttggatcttgaggtttcgttaacaaaatcgggagctggacttctcttctgttggattcaatacttaggtggtgtctctatatgggaagttcatatttcggcacaatgatcagttttaagtaccagaatgttcaactcacataactcgaatagctgaaaattacattggagttcagaacaaatctaatagagctgaaaatgttgtgtgatacttccaatcattattcactgtactgaatccaagttgtatgtattgctacttatgctaacatgtatatacaactaattatgcaggaaggtcatccatacagtgggccccaaat

SEQ ID NO: 14935 - DNA, 637 bp, Brachypodium distachyon
  Intron number 2 from transcript Bradi2g61580.1 (locus Brad i2g61580) derived from phytozome v7.0 (chr-ID Bd2; pos 586 16231 to 58616867)
caacctggtaagcgactagtaacttgtggtccagaatgtcttaatgggttatatcagtgctttatactagatatatgttctctctgttgtctctttgttaaaacccttgtgaaacaaagtttagtggaggcatgtcctgtccctgccgagaaagtaccaccaaccttgtggacaataaacttcgactggccttatgttcatcttctacattaattccatgcaacatctttgtactgatttccccccaaatttacagtactgaagtttacggtagaactagtaagaaaagagactgtagtttgatcttgttagttcatatgctttgcatcgatcgatgtggaggcggtgtggtgctccctccttttaaaaaaaattatgcttttaacaaagatgtgcattattccttctgacaaaaagagaccgtagtttactgactcttctagtaaaccaaagtccaaactggaacagctaatgcctgttggtacctctaggcttaactgcagcatggttgattattctaatcttggaatccgttctgaaagcagcataattctctactgacagaaaatttggtttaggatatactttgatgctatatctttgtatttactgatatactttttgttaggtgtggtcc

SEQ ID NO: 14936 - DNA, 971 bp, Brachypodium distachyon
  Intron number 2 from transcript Bradi2g53010.1 (locus Brad i2g53010) derived from phytozome v7.0 (chr-ID Bd2; pos 522 44235 to 52245205)
gctgctcatgtaagtgcaacgcgacgtggattccgtgatttccatgttgataatttgcacgctgttggtgtgatgttacgagccttgcatgattgttctttacgtcatggtcacatggggtaaaaaattagtagcttttaactgataagtgcttcggatcttccaatacatgcaattttcagttcaagatgcctgacatgtctagttagttattacccctcttgaggaatcctttatttagtgaagtgttttgtttcaggcatattttggaaccgtatcactagtctttgtttcccttagtggtacctactgttattgctctgaaacatgaacctggatggttttctagggcagttcagaaagttaccaaactttggttttaaactgtgttattctctacttttgttgttactgaaagcaagttggcctaacatgtagaaggttgaaaatgaagtggtacatatgtatgccataaataggcagtccattatgactttgactgtgttcaaggtattggctgcttagtctagtcagatggaggccaggcatatctatgttgcgtaatgacaattgactattttccatactactccatagtacttgaaacctttttcaatgtgaccaagagtactagtttgtttgtagctttattattaaccatctaaggctaataacctgtactactgttgattgtcatggctcacagttatttattcaattacttctctgtcaagtatgtccttatcttgtaaatgctgtgactacctttttccgtcttaatgattccttaatacaattcagacataaatcctatacaatttattcaatattcatttacaatgcttcgatgaaaaataggctagtatctttaattaccttatcctgtgcatatgagtcactgtttttcttcttatatattgttgttatattaacttcaagcacctcttctcagctgccagggcgtactgaca

SEQ ID NO: 14937 - DNA, 878 bp, Brachypodium distachyon
  Intron number 1 from transcript Bradi3g20620.1 (locus Brad i3g20620) derived from phytozome v7.0 (chr-ID Bd3; pos 196 45337 to 19646214)
gaaggttagagacttacattgtactgatgtttgatgcacttataacactacctgatggctatgtatttgatggttaatgggagcttgtttttgctagtattagcaacctgaatgttaagttgttactaaacaaatttgatgttcgaaatctatggacagcctgaatgtgatgaaatattgtgctcctatatgctattagtctcgcttctgcatcttatccatgccaacataaaaagtacgagttgggatgggatacttttgatctgagcagtctaaaatctgtaatctaatccataactatctatccacttatccagtggttgtgaccaaatgtcatatccccctctaatcacttctatacttatagccttttaactattctgattgcatcccattgttctctaattttgttttgtgtacatgagtgtttttttatatctttacacaatttatgtgatatttctttcataaaaaatagcaaacatgtacatgaaatgcacgttttgtgaaaaaacaaacaaaaaagagacctattttgatggaattatattatatgagacatagcttatatattggacaaaacatgcattgcatgtttagtctgctagtcaaatttgacgatcaatattcttagctaggataaaaccatttaccttgtgtgcagtctgaatagctagtttttgtattctcctgtaatagctttgcactttttcttgctcaatcattttgtagacctttaactttaagggatggttctttcagaactttgtctgccagagaaatggcaagattgccttggaaaatgtttcttttatttacattgtgtctgaggtgtatgactaacactctccatgattctgccttttgtttcagcatat

SEQ ID NO: 14938 - DNA, 927 bp, Brachypodium distachyon
  Intron number 2 from transcript Bradi2g45330.1 (locus Brad i2g45330) derived from phytozome v7.0 (chr-ID Bd2; pos 457 04248 to 45705174)
gggctcgcaggttaaaaagatgcaaaccttcttttctactccctccgattcatattaattgtcgaaatattacatgtatctagacgctttgtaagcgtagatacatccatatttgatcaaatttgagacaattaatatggatcggagggagtatatgcgtgggaagtctattatgttaaagaaagttgttgcatcctatattggtggtgaaattctagtgacggtataatttttgtctttttggtgaagaatgagggcgtgactagcatttttctgacggggtacactttgttcggacacattttctagcaaacttccgatggtggattttttttttagaataataggggttcccccccagccccatttgataaatgagaccaaaagtcgtccaaacattcagaatccacagcaagaccaggccaggctaacagagtctgacaggcagaaaagagaaaacatagttcgtgctggactagaacgataagcaacactcagcattctaagagcttcaggctgagacatggtcagcagccgggaaccagttcgtgcgcgccagctgggtgttcagacttctatccagactttagatggggctggggggaaacccctatagatcggggcttcagttacttgtttgatatagatatatgagtagtgaggatttagtgcgtgttgatgcttatattggtggtgccagacacgatgaagcctctccatttaaaagaaactagcgatatctttgataactgggtgcagatgttgatgtgcttcattagcactttccctatttacttcaaagatcttttctgtcacttgtgctcaacaaaataagtactcttatagtgaaaggcatgttcaggctataacagcgtctgtgctatttttgcagggtccagcacaagctcagaacttgagggattcact

SEQ ID NO: 14939 - DNA, 879 bp, Brachypodium distachyon
  Intron number 1 from transcript Bradi3g10440.1 (locus Brad i3g10440) derived from phytozome v7.0 (chr-ID Bd3; pos 862 9495 to 8630373)
aaggtttccgtaaccctgagtctcgcaggaaaaaggtatcacttgaacttatctgtttactgtttgctgtttccatttgtcagttaaataatatacggagtagaagataaactagctaggtgacctgctcatccgtggggctacatttactacatttgtttttctattttccatgtgaacaattgttattcgatttaatttaccgccacattaacattgatgtatcattcaaagagaaataaaaataatattgcatactccctccgattcataataaggagtataagaataaaactgccatttttgtatgcatctataccaatttttttgtcttttctgatttcgtatggagcagatatgtatatcaaattggtattcttctatttagttttttagtttttattcacataagagtcgcatcatgtctttttattgttaggcacaacaaaatctgggtattatagaattcgtacagactacatccgagacgtaactaataattttattattctggatttcacgtataaaatatatactacgcatgccagtaatttttctcttcttccagttgttgttcttgtttcttcgtatggattgttatctttttggtgatatattgtaagttgtatgtgctttagaagtctagcatatctgtgtgcatgttgatcgtcgtgtccatctaaaccatcttgctttcctatacgtgtccttgtccatcaaactaatatgagccgttcttgtcctgttgcatatgtatagttaacccgaatcgtttgttttccactactttaacaatataagagatagccaggcaattacagtcgccagaaatacctaatggctgtctttcacatataattctattgcaggccattaaaa

SEQ ID NO: 14940 - DNA, 933 bp, Brachypodium distachyon
  Intron number 2 from transcript Bradi3g18890.2 (locus Brad i3g18890) derived from phytozome v7.0 (chr-ID Bd3; pos 174 68326 to 17469258 reverse strand)
gcaggagctcttcccctcctgcactgtcttgcctggtgagaaaaggattgtttgcttctctccttccttggaactataatctcccaggctcccagtcctgtacttgtactttgtaacgcgatagatcaaactttgtcacttgtcagttggggttgggacaactaaattgccaatttgacatgacttgattgatactagtctttgatagtttattcattaggtccacaggttgcttgacgaaaagactgagaagaaaaagggtttgatctgaaaaggaagctcagttaatgtaataatcgtaatttgcttagggctttgtgctatctaagaaacttgttcactgtcactggcaagcaaaataagtaactgaaagtattaaaccatctaaatactaggaatgtgttggcaactcatatcctgcaaagataatatgcttcattggcctgacttaggctatcggttctattgtcatctgtagtcatgtggcattctcaaaccaacctagtaatgctacagtactccactacacctacactattgaagcaaattgatattacccttatttgttggaggcttgggttgaagggaagtcgtatttaagggaattaatttagtaaatatatttcgtaacaatgttggtagctttaagatctatctttaattaatataatgagaagaagttcaagttcatataatctgatgtgttctctcactgaacatattgaacgaatctctccattgaaggaaaataatatattcaaacaccattgatttgcttacttgctgctaaattacaagtgtcatgtgattctcttttattatttttgaactcttatttacctctggctgctaaatatatatatgcataattttgcttatgatgtatatgaatcgtttgtctgtcaggagtactacgcttgattcatcatcttc

SEQ ID NO: 14941 - DNA, 591 bp, Brachypodium distachyon
  Intron number 3 from transcript Bradi3g27860.1 (locus Brad i3g27860) derived from phytozome v7.0 (chr-ID Bd3; pos 290 52505 to 29053095 reverse strand)
ctggtgttattgcattgtctgattccagtttgaaggtaactaattccaacttgtttgcaatacctttaaacaaatgcaaagcagcagagtatagctgtgatttgtggtttatcttcagtactacctttctagggaaaattaatgaaagtgcttgtgtcaattgtctgtgcaaatatataatgtagtggtcattggttattttgtattgactagagcccagaggaaataccgaaatatccctgaatagaattcgtgcgcacatcaccctgtgaggttcttctgatgattggtagactcagttgtagtcaacatctagctactttattaggtctggcactgcattcctatggcattaccagattcatcacaagaaaccaagtgatgaagcagacagctggtctttatttttttttaattggtgaataactgttcttttctgttgtatgccaacagtccatccattaactctagccttttgaattatgaatggtaattattttattctttgaatacatgattttttttctttggctgcaattagggagttactttttgtggttgtcttttcaaacaggcagtgcctgaagaagt

SEQ ID NO: 14942 - DNA, 253 bp, Brachypodium distachyon
  Intron number 2 from transcript Bradi2g55590.1 (locus Brad i2g55590) derived from phytozome v7.0 (chr-ID Bd2; pos 541 86261 to 54186513)
gtttttgtgacggtaagtcgacttaagcttatgtgtttttttcttccttgcagctccgcagaaagaaaatcaaatatcgaggcagtcatttcttgtagacaattggaactaggcaaaatcaaatatattatatgtgcatattgctgtttttgataactacttcagttggatgtttatattaggccatagttcccataaactttaccacattagttttacacagtgttaatttaaatgtgattttcaggcagga

SEQ ID NO: 14943 - DNA, 506 bp, Brachypodium distachyon
  Intron number 1 from transcript Bradi3g40800.1 (locus Brad i3g40800) derived from phytozome v7.0 (chr-ID Bd3; pos 429 03520 to 42904025)
cggtaagaaattcttccttgttcacccgtagcagttttgttttccattgaatgctttgagcaaatggaaattcttaagccggcgatggcacaaacagcccttattagttacttacaagttacagctgaaagcaaagaatttttaacagcccttattacaactgaaagcaaaggatttcgcctagccactcactcattcatcttccagttcctcttcgatcttatgagcagaattagcttatgaaatgttcaactctcatatcaaaatttcaaatcaggacttgttaatcggagaatgttaagtccatgagattcttgattgaataccgtgaaacactgaaacctatttgacaaatgatttaattttcctagttacacggtttattccaagaataattttcttttttcttttttgatctttcattttgcactcaagcaccatcgatgtttgaatcactagtcccaaattgatttgtttcatttcaatctcttggaaacaggtgaaat

SEQ ID NO: 14944 - DNA, 682 bp, Brachypodium distachyon
  Intron number 1 from transcript Bradi3g43830.1 (locus Brad i3g43830) derived from phytozome v7.0 (chr-ID Bd3; pos 455 17091 to 45517772)
cgccggcaccgccaccgtcacgctcaccgaccccagtcagtaactacactagttttcttccttccttccttccttcgctatcactgctccgtcggtcgattctcgtttcttttcgtcgtgattatgtttcccgctgtgtctagcactgtgtgcctgtgtctgatgcttcttcttttcttttcttgcgtgcttttgctttttccgcttggtctcggagtcggagcgtctcttttgctttgtgcattcggttctggagtactactatcgatgccactatttactaaatagttgcatgcttttcttttttgaacctttgagattgccctttgttgcggaatcctagtaaggtagcttgaaaaactattggtggaaagaattatccaaataactggagcaattttaaattgagggtttctataattgactgtgatttgtaataatctagggcatccatgattgattgaccaaattagtggtgatttgaaattaaatggattgatttgtaatcaattggatttccatagatgggaggttggacataccaatgtaattaaaaacgtgatatacatcatacatctttgaagcggcgcgggatgctgaatttagctggttggatggctaggatcttttggatcaactcatgtgttttcaatagtagtagagaaggatagttctggtagtg

SEQ ID NO: 14945 - DNA, 950 bp, Brachypodium distachyon
  Intron number 1 from transcript Bradi2g44240.2 (locus Brad i2g44240) derived from phytozome v7.0 (chr-ID Bd2; pos 447 54213 to 44755162 reverse strand)
gcgggatcggcgtcaccggcaaatccaaccccgtagtaagcttcttctcttctctgggttcggataccctagtttcccgcgagccgctcctgcgactcccccccctcatgctcgcgcgcggcgacgtggttccggcggcacggtggcgagatttcggtggcagcagtcggatagatccgcggcggctcgctccggcgcgaaggacaaatcactcgcgctgctccgggattgcggtttcgcggcgggcaccgcggttgctcgcgctgcctcttgtcgggagccagcgggagggcactgcggttgagtgacggcgagcgccgctgctgctggtgctgcgtcacagtgcgcccggcgtggggctttctcttttcagactaaatagatcaaagcccgttaataaccacaattccacataagaaaagatacaacctaggatgatactgattaatgctccgtacaatattctatatgttagtacaatagcacaactaccaacggaaaaaaattagtttatcatgagtatgttacaatgaatcactacaatagttatgttaatttgagctgtcactacaataattatgttaaacaaaaatcaagctgatctcgaatccagctaacaaacgagttgatctcgcctttttgagatactgtatctatggcttatatgcgccaatcaaaatagtggttctgtctgtgcaaagagtgaccaaagattaatttgttttttgtgcaattttctttaaaaataatgcaaggttttatggcaatgggagggagaagagtgtcggaggtggagtacaggccacgttttgcaaatatacctacgtcctaagattatttgaagttttattttcttgttcacaagttggataataaaaacaaattgggtgtgcctatgcttgttgttttctttattgacatctctttcaaccacgcatgatgtgttgcag

SEQ ID NO: 14946 - DNA, 955 bp, Brachypodium distachyon
  Intron number 1 from transcript Bradi3g24730.2 (locus Brad i3g24730) derived from phytozome v7.0 (chr-ID Bd3; pos 244 25598 to 24426552 reverse strand)
gcagcccgctcccccgctatctcccagccgtaagatctccacccccgactcctcccttcttattgatccgcctcttcttatatcagttgctccctagagatccgaccgatctggcgatggatctgatcttcccgtaggcgagtagctccgttcgacgtcataaggcgtgtccgcatgtggaaactgcaaaatctatgtctacgttttggttctgtttgcaaatgattgtttcggttaaaggattcctgaaggcttttttgcggtcgaggtcgaggcacgtgctggagggtttttaatcgtcttgtgaaatgctggtgtaaataggattttggaatgcctatctgagagagggttgtgattcttcctgaatagttcaatgtgatgcttggtcatgctgcgttgtggtggttttgtgttcacaagagtggtggtgtgcgtgtcctgaggtaattgatgtgatgtggtaaagagttcggatgcttttgggttcatcaaggataaaaatgaccatttttttaacaatctaattgtatgctcttttgctatgcaaatgttaaggcattatgttaattcatgctgccaattatgaatcaatcatgtatgttgtgctgataggttttgtttagctaattctgtaaaatgtatacgtgttggaatttgcttgttgaatgtttgaaacatggctttggttattcggtttcactttccacatatattgttgaaaagtcaatgttaaaattgcacatcctttaggtgcatgtaacaatacgtcatggactttctgtggctgtggtgccatgttgtggtatcatttctgtatttctataactatggtattcgacttgactacgacactgcttatttgataagcactatgtttttttacttagaatgtgattattttgcatttgaatcttcagggagattgctccacttggtgcacggtccatctcaa

SEQ ID NO: 14947 - DNA, 977 bp, Brachypodium distachyon
  Intron number 1 from transcript Bradi3g05530.1 (locus Brad i3g05530) derived from phytozome v7.0 (chr-ID Bd3; pos 390 6813 to 3907789)
atttgggtatgactcctccctcgtttgcttcctgtgttcaccggccagccagaactgattcgcctgtgggcagaggtttcgatttggtaatcgtgtgctttgatttatgatatgttggtgatacttgatggtacagtagtaaatctgtgcagcttatgttatatggttgatgcttatgtgagtctgaaatgcagccacatggcattgcaatgacacaaggcagaatatattttttcatgaaatggggtgttatgccacaatgaggtgttccttaactgaagatggttttctttggacattagtgaagtagtagtaaactgatacttcatttggtaattagctccacattctgaagagtgctttaattttttttgttgcttctaatatatgccagcattttgtaggaacctatgtgaaactccctgatccgaatttgttactcccaccgatccataaaaagtgtcgcccattttgtactaagttagtaaaaaatttgtactaagtgggcgacacttcttatggatcggagggagtaatataaactattatttcatagtactcaatgttctcttctgtaggtcaatagaaatttctgatgagtgatgacacaatatataccaagtgcatgtgaggttctcaattcctcataagtcatctcatattgggtgaaccattgaagcccatttgctaccaacattgccttgttttattttgcattgacatcgttgttatattcttatatggatggtttgctgaagtaccatcttttgtgtttgtgcagacctgaatgtacaaaatgatcgtctgtcgcacatgatgatgacatatgtttatatattgaaatctgattcattaccttttcctaccagctactgttaaaacttgttcatttcctgtcatgttttactactctgtactaacttgtgtgttccgtttacctagaatactgcgagacagaaacacagaacgagccgaaa

SEQ ID NO: 14948 - DNA, 400 bp, Brachypodium distachyon
  Intron number 3 from transcript Bradi3g29740.2 (locus Brad i3g29740) derived from phytozome v7.0 (chr-ID Bd3; pos 317 85308 to 31785707)
aggacgaagttgaaaaggctcctaaaaggcccaaggtgagcaaaggatgagatttgcaacattatattgcttgatacatcgttcttgttaccttaattgcaaaaattcttgttatgattctgaaaattttgatgtcgtaatagtttacaagttctgttgatttgacaaaataattttaatccggattgttaactactgagttctttgtgcagtaattggaaatggtatttgtgttagataaacataacaccttgcatcagatactgcagaatgttagcttggtttaggggacaatacagatgtgttgttccttgcacattactgtatcatcaacaagttacttttagttgttacttcttctgaaggcatctgactatgtcctaattatcagcaggacacg

SEQ ID NO: 14949 - DNA, 777 bp, Brachypodium distachyon
  Intron number 2 from transcript Bradi3g42680.1 (locus Brad i3g42680) derived from phytozome v7.0 (chr-ID Bd3; pos 441 60281 to 44161057 reverse strand)
agttcctgctggaggacgaggaggtgcacgcccaggtacgccccttccccttccccccctccccaagtttatgttcctcagctgtcctgaatgcttatatatactgtcgtcgtggatttaaactttgcggttcggatgacgtgtcttatttatgcgcacttgcttcccaagtaaaatgtacttgtaacagaaacagctgacccgaagaagaatcgagtacggtttagcaagcttgctctgaatgaaaccaaattactatctcgctgtccgtttgcgtaaccagatggaacaaattgatgaaaaacgactcggtttgtcgttttggtgaataatgtatgccattcagttaggtgggggtggactacctataggcttgtacataatacgtggcagctattttttttgttgcaatgcatcaagatggaacctcttgcgtgaaaagcacaatggtaggtactggagtagtatagccatattaccagcgccattccgaagcagtgtataacacgcccatggtaaggctatatagcggcgaaatgatttgtgtggggccagatcagttgagtgctcaaggctatttagttttaagttaccgtgacttgtgtttgactttcaagttcgtgtacacatctaaggataattacaaaccaccagtttgtaaatgacaatgtatttccagacataaaacaaaaaacttacactggctgaatttcggatttgacttcaacatttgtccatcttgaatttgatccctctcgcctctccttatgcagggtc

SEQ ID NO: 14950 - DNA, 736 bp, Brachypodium distachyon
  Intron number 1 from transcript Bradi3g38690.1 (locus Brad i3g38690) derived from phytozome v7.0 (chr-ID Bd3; pos 411 80908 to 41181643 reverse strand)
tggcgcttcaaccagacactccgcaacgtgcaagggtcagtccctccctcccgcggaattcccctacgatataatttttctgaatggatgcaagcttgtactcttggtgcggaactgtggaagttagcgcctttcttctgtgggttcctggcttcctaccgtaaaggttgattgcgttattggtgtacggaactgtgtgaaagttggacttggaccccatagtctggctgcacgagttaaaaacggatttgatcctgtgaattacatgatttttggagggatttctgtctaggcaactgattgggtgttcagattagtgtgagcatcatcaatgtgtatttttggcaaaaataattggtatcgttaagagcatgtgtatgttaacgttctgttattttgtttccttttagtttgtctcgcttggtccgcactctgcagtcaacacactatcatgatttcacttgcagaacaaaattactatcatgatttaacaactaggagttttgatttattatataaagacatcactattgtagtcttctggagcaaaatttctcttttaaaaattgttggctgctggctggtgatcttgtcaagtgttcatgtctaaatttattccattatcatgattggagatacgacttactgtcgtcgttgttgctagctattgcaaggcctgcctgcttgtaatctcacagaaagagcctgttgctatttttcccaactctttgtcaga

SEQ ID NO: 14951 - DNA, 886 bp, Brachypodium distachyon
  Intron number 1 from transcript Bradi2g56580.1 (locus Brad i2g56580) derived from phytozome v7.0 (chr-ID Bd2; pos 548 99862 to 54900747)
ccctcggcacgctctgcaaggtttgcaggcctgaggtacgtgcgtccgtgcactgactgtctgcagttcgagctgagcattggtttacttgtgctctgcaacttcaaattgccgatttgtgggagcgtgtctctatgcactggctaagcttggttccgggcttccggctccccccttggaagcatgtgcttggaggcatgcataaacgaattgctattgctagtaggagcatttcagagtgtcttttacttacccctgtgataaaatgttctacactttacttagagaaaatatgtttagaatagtcatgaaggcatcgttcacgaagagcagtcctaaagaaaatgctatgtagctatactattttgtctgcggaggtttaagctagtgtcacctagagctaatctgtagtgtagagatttttgttcatggtttatcccagagttggtagtagatcggatcagcaacatacatgaaaagggaatcatggctggatggatctcggcagaggaccaaaaggtcccgcagcctccatccataaagaaaggattctaattacaaaagaacaaaattagcagtggggctaagctccctcccaaggttcccacagccacaagcaaaactcccacctaagccggccataaacaagggcattatacgaaacccaatcctgccggccggccggccgtgatttgctttgcttgaatcaaaagtcagaatctcaatgtagtgcagtacaccatagtactccccggcgtaagtgtaaccggacgctcatgaactattcctttgtcctcttgcctgtgaaaaaaaaagtggagaactcatggcatggagatgaatgttggtaggtggaggttgaagcgcttgtgatccaaggtcccaa

SEQ ID NO: 14952 - DNA, 567 bp, Brachypodium distachyon
  Intron number 2 from transcript Bradi3g12820.2 (locus Brad i3g12820) derived from phytozome v7.0 (chr-ID Bd3; pos 114 78422 to 11478988)
cgcaccgctacctgaggcatcagcaacacgaccaggttccttccctaattctctctcttacaatttagcctcttttgcgcctgctctctctctcttcacgcaagcttccagctgatccatatgtagtttctaaatcgttactactaaatactagataacacttccaatcgctgttacttcaatgcgatgggcttaaaagatttatgatatatagctggtacccagtcatatgaactcatctcctccacgaccgaaacctaagcacatatactcttcttaggtgcttacatgtctactaactaagctaattacatgcctgattaataatttgattacatgttaaacaccgatgcttagtcaacctcatctcacatgtatggcaacacaagtcctcttttcgtgtgctatgcctatgcacctgcgggactaattaaccgccttctcttaaatcttgaaaaggaagtgcttcttgtcatggcatgatctaccttgccttttgatttcatttcatttcttccccacatgcaattatatcgtctcatgatatgcctacagcaggcctcttca

SEQ ID NO: 14953 - DNA, 868 bp, Brachypodium distachyon
  Intron number 1 from transcript Bradi3g36270.1 (locus Brad i3g36270) derived from phytozome v7.0 (chr-ID Bd3; pos 385 42762 to 38543629)
attggcctctgtgaggggatcatcactttcacaaggtttgcttttcattccgctgcacgattctcgcaaggaactgaagtagttgtgcatttagcggtcgtttgtcgttaccagtaaccagttaccatttcagttgagactttcttctgttctggtacataacattggcgacatcattccattgtgttttactccctccgttcctaaatacttgtcgtggttttactgcaaatttatactaaaagcacgacaagtatttaggaacggagggagtatttgtttacatttgtaggcgttcggtcttatcgagccgtaataagcactagcttgctgctcccaaaacttaattaagcccaaatttcactaagctttgtggcgtggcatatcagttcctcatgcagtggaatctagtgttcatgaatttggtggcatatcttcctgcttataattttcaaggaagaacttacatatgtcgtgcgggacttgaaccaaaggttttaagtgttggttcgctgcaaattgcgaaccttacagtgtttaaggtcaaagtattgctttaagtacatcttaattttaaaggtaccaagttctttagatcgccttttctgtagagaattcacatatattccattagatcactggacaattgtgaacatctgttagtatggactaacatggaaccataaaaggcccacagatcagagcgctttgtaggcagcagtttgtttatcattgctttacgtcccaaatgattctccaatcaatgtcgatcctttacttgtgctacttcatttcttgccttattttgttgtatttagccatttcatctctctgatgttaattatgtgcagaatattttcccctgaag

SEQ ID NO: 14954 - DNA, 724 bp, Brachypodium distachyon
  Intron number 2 from transcript Bradi2g58960.1 (locus Brad i2g58960) derived from phytozome v7.0 (chr-ID Bd2; pos 567 28582 to 56729305 reverse strand)
aaggctctttgcaggtttggctccccatccatcaaagtccaatatatgcctaacaattacttctttttgttgtcgacaaatcatggtcaacgattactatgtgtaacaactgtgaagaatggcatattgcatagcaatcagtgcatagcaatcagttaagattgcttggatttgatctgtgcctggtagaatagaaacttatgcctcttcaagagttaatcgtgttgtttgattttcacccaaagcacagagatttctctttatttctcataaagcaaactgcaggcttatcaatttctgatcaatgagttaatggctttagtagatagttactgcagtttataccagtaccagtctctataacattgtttcttaagctttctaatgcaaagttttcagaggtacaagtaacaaaagaagcatgtgtgctttaagacatccttttgcacaatcattaagtattatgcagtgttatgaactctttgttgcacataagtactagtttcagtagttgttttagtcaggttccgtcagcattgagccttggccatttcatcatgaacctgtatgctacctcaagttgccacattagagcacttgtgttctgttgcacactccggttgtctccaattaggatgctatggttttccctagagaatcgaaggaatcattcctcatccttattattaaccactaatgatctcattttgtttcattagggcct

SEQ ID NO: 14955 - DNA, 851 bp, Brachypodium distachyon
  Intron number 1 from transcript Bradi3g11400.1 (locus Brad i3g11400) derived from phytozome v7.0 (chr-ID Bd3; pos 985 0203 to 9851053 reverse strand)
gcagcatcagcaggccaccaccgcgtcgcaccagggtatccttcccgttttctgacctgtcctagcaaggtgccgatttcctaagacaatgatctggcgccagaaatttgtccggattgagttatgccgtgttgctgggtttctgttggatctcgattatttgctcgcggcacggggctccgtcgtgatggattaaatgctagcaatcagattagatttcgttatatccgttggcgaaaatctaagaaaatttgagcgtgcagctggaacgcgtttttgtttcgttcgattcttttgcattttctggcgttggtttggaataaggctcgcggaattagatctgacctgtttatatcttccattttctctctagataatctgttttgcatatgtaatgataataagatttttttttaaaatattattttttgtggcattggtttctcttccattgcctgcgttaaattttctaaaagatcccgatttcaagctatattgctttctgtgtcaaaagttttaattcgctcaacgtttgattggttcatatcggttttgatgcaaaaatttcaccatgtttctattgctcatgtaaaagtttcaagccttgcttaaagtttttatatgtgaaatgatgcttttttggtcatatttttacaatattgctctcggacctttaaagacctcggctatgtgagatcaaaagcataatctttgacattatattcctttcttatgtctcttcatgttcaatttatcttattggactccgatcgaaatatgaaaatagcataattttttatataaagctttagcataagtgtcaaatgttccacttgcagatcggtttggct

SEQ ID NO: 14956 - DNA, 972 bp, Brachypodium distachyon
  Intron number 3 from transcript Bradi2g60060.1 (locus Brad i2g60060) derived from phytozome v7.0 (chr-ID Bd2; pos 574 98555 to 57499526)
acaagaacattcttgcagattgtgttcgtgcagtactttgttagtctttgtttctgtttcgcagttttttatggctaaggaaatatttctatttccagtttttcccactagatcagatctagttgacatggtatttgaaattctacatagttccaaccaagagttcgagtggttgtgtcaatactccgcagaatcatagtgtttctctgcaaaaaaaaggttaatatcacatttgctcaatctacaactaagtagcaaccagataatgtgaaaacacatggtgttgtgatatgtctccccttgtttggggggttgttgcaaatgggaaacttgggatttgttggggggatctagacccgcagtgggatagatgtagagagaatagattgattcttcttgcttgctcaaaatgagatacagtgcatccctaaagtttggatgttttgcctcttgacctttcctaatacagttggactccttacatttttcccaatacaaaatcccctcctaattcctaaaccggtttagcttactaaatctgctagccgactccctctctgacccaaattctcgaactcctagccaactccaaccctgcctattccgatttagttttccctaacaggagtctgcaacagaactcttcattaaaaataatgtatgaatcttatgatgcatgttgaaagagctctttgatatcacttctgtgttattattttatttggtctacagcaggcatgaatatattatatatgataaataaggagttgagtgcagaaccatcatgatatcaaaatgccgattgtacgttttgatatgcatatataattttcatgtatttgtctgcatcacatgctaagcaatcccctttcattagcatcagaggtatacatccttctccctttgttaacttttatctcactatttatttacttaggttttaccccatctatcggacaagagaggtggcca

SEQ ID NO: 14957 - DNA, 967 bp, Brachypodium distachyon
  Intron number 3 from transcript Bradi3g05990.2 (locus Brad i3g05990) derived from phytozome v7.0 (chr-ID Bd3; pos 426 4068 to 4265034)
ctgtgagttttccactccaattctattctcattagttgatgtcacttaacacaattgaacattgagctcatttctttactcctataaaagactcaattggtggcggcggtccattaccttcagacatgcccttctttttctttcttgcatcacttgtatgatttggcgcaaatcattgagacgagaacgaatatggagtatctgatctaaagataatattataacatgccatctgtagcagataatattataacatgccatctgtagcaacgaacaggtattatgctagtcttaccttgatgacatgatccaacttgtcatgattgtggatttgtagttactttctaaaaataatgatgatacccttgaaggtgatggggccacacattcgagatttgaacttgtagtagtgtttctatgctgtatagtacatacaattaaaggcctactcttttcttcttttttgcgaataattaaaggcctactcgactagtgacttaatgtttcttcaggatttgtccaatttggttctggagagagcatagaacaactattatttatcttctgcagtaacttggtgacgaatatgtgggcacatgaaagaagtggcatgtggtttattttcatcagaaaagagataaccattcgcacttatccaaatctattcatttagtgaactactgaactgacaaaaactaggtttccattgtttgactttttttttgtcacggcttcaggctttcagctttattaccatcattttcatggatgtataagctctcgttcatcactccatccagattctaagaatcagtatttcaatattgcagtaatagcagcgatgcttttgatgctgaatgctgtaatcttgtttatttcatctaaacatatttctgaaacccttattgtatgcactgtctaatgtcctgcacaactctgcagcattcagcattgctagatcttgaca

SEQ ID NO: 14958 - DNA, 945 bp, Brachypodium distachyon
  Intron number 3 from transcript Bradi3g04900.4 (locus Brad i3g04900) derived from phytozome v7.0 (chr-ID Bd3; pos 334 8750 to 3349694)
agcataatagaaacaaggcttctgagctcagacaggtaactgcttcgaataactgtttagcaatttggtagtacttgttgtgctttcttttcccctgctttcccatgtttgtagactttgatgttgtgtaggtggtaatatatacctcgtggtgttttgcacagaagtagaatcgtgacgagtacgaagcttgttgttctaaaatcaatcaatagtactaactttgaactatatccaagacacttgttatggattggaaggagtacttgataagcaggctatgctctttttacagtacatttaacgtgttctggtgtcgattttctaccagaacagtggtatggtcactgccaactgtattgattgaaacagctttttggatgaaaaaggccatcgattttgacatcagtattgaaatatctgacagatgagcatgagctgctgaatattaattgaactgatatagacaaacttctttagaccttctttcatggcatgtactgattagctaatgcaataagattaaattggctccaagagcatagcagttgtttaagtgttgttccatagttttgtcaattctaccaagtgaatgttcttaaaaatagttacgcaggctctcaggttgttctgttaacgcgctattgactttacagtccttcgatccagtacctacagtgtgttttgttcagtacaatctatcagtggaaaataagaacaaacacaattgaaaataacttaagtgcacttaggataaatgaatcactgatttgtacaccatgatgttccttttacctagtaactgtcatgtacgtagtgctgctggtatgtacatgctattgccattttgttaatttttaaaaacttccaatcttgactgtgctgctttctattccctgtttgctcgaaggtcatagcagcagcagttgctagtgatcctgaaaa

SEQ ID NO: 14959 - DNA, 731 bp, Brachypodium distachyon
  Intron number 2 from transcript Bradi3g21370.4 (locus Brad i3g21370) derived from phytozome v7.0 (chr-ID Bd3; pos 204 60224 to 20460954 reverse strand)
cggtaaggaatgcatatggtctcatgcccatttctttctttccatataatggaaaatggacaagcagctgatttaatgttaacccaactgagctgagatatcttggttgaagtgaatagtagggtttgttgctcatgtagtagtcgaggataataggattccgatgaacaaagggttgcacttgggcagcggcatgctacaggctcttcattttagtttctaattaatggcttctgataacttgaagctgcttcttgtcgtcaggctagtgttctggcaatacagagttttgcattgccatgctttgatttaacacagttggcttgtcacaccatgctttacaaattacatttggcttacaaaattctctagcaaagttgtttggcattgttgtgctggcaatagtgtgagttgtattgtacacattcttgttttgttttcatgttagcactgttgtaaaatgtattgtacttgttctccaacattattagtctaaatggaaaataactattggagccaatattttctcacaatttcaatgtggtgatgcttaatcatgcctgcactgaacctgcaattgatacattgtactgtaaagtgtactcctggtgacccatagttagtaaaaacaatttatgttagtcttgccatattcctcgaagcaacttgatgtaatttgacctttcttaattgtagggaccactgttattctttgtggaattgctatagca

SEQ ID NO: 14960 - DNA, 1012 bp, Brachypodium distachyon
  Intron number 2 from transcript Bradi2g43400.1 (locus Brad i2g43400) derived from phytozome v7.0 (chr-ID Bd2; pos 438 94637 to 43895648)
ttggactttgagagaatcaaggcagtcttcccctagtgagcattctctctgccgttttttcgttcctattggttcttccaatattgcatctgtttcagaatcaggtgcaatgctataatctgatggattattttttatgtgaagcaaaattttgaacagtgcctaggttagtgtcagtcaaatcatttcagggcatatattccatattgcagagcatggaaatttcaattaaggttaagggaataattcaaaattgctatcagaccacccaaggaaaaggtgccaaatgttttatcaagcagcacaacacgagagtgtgttggaatgtttaataccaccatgcgtccatgtgtttcagatgcagaagaattccttcaggccagcaagacagtttcccgagcagatgcaaaactaacaagtgtaaataacaagacaaaccaccttaagtaaacgaagcctactgtttcattaactgtcgagcattgtacttatggtgagtgatcgaatgttaaatagttgcattatgcaatgtacggcagcagccaataatgcaaaggcagcttatatgaatttatgtggatatgtaccttgaagaggcaatctgacgattgacattactcattcagaagatgaacttgcaaagctgaaaattggatattcagagtactgaattatagagttcctataaggctatggtcatggttgcaccaaccaattacttggtaggcaatcagaaaaattaacataaccatgatttgacagtaaaaactcaccacaattgagtagtattggtatatcataaaggcttggctgtgagcgcatcatgatcatcgataacagctaactggaatctagaggtttgcctcagatgtcggatgtccaggctttaattcactgcagttactgaacttctgacaatttgcatctttgtgtcacatgacagcttgtacatattttcctcgtttttttttttgcagtggcgagatcactagcattgaggttgtcgaaggtg

SEQ ID NO: 14961 - DNA, 467 bp, Brachypodium distachyon
  Intron number 1 from transcript Bradi3g29920.1 (locus Brad i3g29920) derived from phytozome v7.0 (chr-ID Bd3; pos 319 68957 to 31969423)
cctcctccgacaccctcagaaatatccttcttcgtgttcttttcattcgttcagaaaatgccttttcttttatctttatctggttcagtgatactgtgtagctatatcattttagcaattgcaactttcaacaagcagtttgagttatctgtgtccatattcccgtctcttgcttgcttatgttgaggcggctcgagttcttttactaaatccaagtactgacagctaacactattgatagtttctcagatccaaatggacgcctgcgtatgcacttcaagtatattcacttacaatcaagaagaacagaaaccaattaagcttgcgagaattttagaaggcatactacatttgtggatactggatatcaaagcgattaatgcataaagtagcatggttaatgttctatttcttttcttctccttaacatagtctatactatccttagagaagggtcatctgcttcc

SEQ ID NO: 14962 - DNA, 560 bp, Brachypodium distachyon
  Intron number 2 from transcript Bradi2g40680.1 (locus Brad i2g40680) derived from phytozome v7.0 (chr-ID Bd2; pos 409 69254 to 40969813)
ccctgctttacctgaaggattggcattttgttaaggtctgtcctgattccagagtacgctcttttctcgaccttactattaaagatatggtattgcaggagagattagtagtactaatcacgtttctacaaaatcgacccactgttttgtaacatattttctgtactttcagttgaagatgtaacgttggcagtatgataaactgagatttttagtgttatttattttggtttccagtgatcaagagtcatagccagtgcaacacttgtcagatttatgtttactaaatttattcttttgctacaacatggaacattgttttcaaacacatgctatttgataatttgtatatcaaattgtcacccgtttggtaattgtttagacttgactgtgatgcattttactttttggatgatatgtgcgtatggctcctgaagagtgagctccaaccctctgctatctcaaacatttgaatgcatcttttcaagctgatatctcatctcctgctcaatgtggttgtcattacatttttgtcttgatctttcaggagtaccctgatt

SEQ ID NO: 14963 - DNA, 877 bp, Brachypodium distachyon
  Intron number 2 from transcript Bradi3g06640.2 (locus Brad i3g06640) derived from phytozome v7.0 (chr-ID Bd3; pos 481 5960 to 4816836 reverse strand)
attatcataggtatgcctgttgcagaacccttttttgttatgcttagttacgatgtagagttgtactgtcgagtattgaacactggtagtctggtagtataaattcaggtgctactttgagttgcttgtaggcaaaatctaaattccattggaagctatttagttttgtaattactcaggttgaacatcgcaacacgaattcaggaaaacatccctatttggtgataccatactgcttgcaatgtttggtacttgtacttatttggttgagttcagctgattattgacttagattattttcactagagatgggtttccttttctttttagtaattaaccacttaggtactgttaagtgttaacattgaactgtacttgtagtttgatcgacctttttccactgtactacatgatatgctccaattcgtgtccaagtgctgtgctagatggttactttccacttgtgataattggaataattgcaggaaacgccgaaattatctcttattagtaatcattctatccttgtttagacctttcaattttcctcaaactactgttgatactgtacattcatctttactaggggatgtgctatccggaacatcgactacaggtgttcatcaccgtggtatctttgaggggtggtttggacctcatttgtggaactctcgtcctgttgtcctccttgccacgacactttttgtgtttgctccattggtgagcttcaagcgattgggtaggttgtcatgcattgaagaaagatgtgcattatgtaaaaaaaaaatcctttatggtacatgaaatcaattcatttgctaatagaatatctttggacacagattcattgagatacacatctgctctatcagttgct

SEQ ID NO: 14964 - DNA, 300 bp, Brachypodium distachyon
  Intron number 2 from transcript Bradi3g34620.1 (locus Brad i3g34620) derived from phytozome v7.0 (chr-ID Bd3; pos 369 84079 to 36984378 reverse strand)
agtagttcgaggggcagacacagccattgaaagtaggctggttgctttaagcctgtcgatcttcctttgattaactgagttagatctggcttcgcttggtgtttaatgtgatgaacatgttaacagtttcttttgtatcgctacaattatgtagtccctctttcttcgcctaataaaattagtagttacattttctcggtaaaaaaataattagtagttgcattttgttttctagaggagctgatttgttctattgtacctccaggtggttcttgccgcttccatcatctccaagtctgg

SEQ ID NO: 14965 - DNA, 736 bp, Brachypodium distachyon
  Intron number 1 from transcript Bradi2g51640.1 (locus Brad i2g51640) derived from phytozome v7.0 (chr-ID Bd2; pos 512 12567 to 51213302)
agcgaccgcctctgcaagggcatcccgaccaccaggttccgccccggctcccctttcttggacccagggaagagagttctgaccccaataggtttcttgctccctcccccccaactgctgaaacctaatcgacggatccaggaaattaatttctttgcagtcgatttcattcccaatcttttagcgtatctatagcctcacgaagtagtgagcccaccagcatgattgcttggtccagccagggtttttttgattggttttgtggcttgaatcccaattgatgaatcctgtcccagatgaaggataaatgggggcccttgtttatgtcgtctcagtattgctgaaaggagattcatttgttctgttttagccctaaaaacgtagttctttatctgctatggtgccaagatttaatctatgttcaggttaagatcaaaatacatattttggcaaaatctggtcctgctttagttccaagaattaacaatttcaattcatgaaaattttgttggaaatggtccacgcacaaaaagttttataaatataacaatgacattgctggcttttgtactggaatatcttcctatgcagttgaaatgcgcctgtcatggaatcatcatgcagacggcctttgagttaaactgcaatcctctatggctatcacgtttggagtgcagcaccataaactcactgcaatttccccccttgaattttaaccaggcatattgagtactgc

SEQ ID NO: 14966 - DNA, 604 bp, Brachypodium distachyon
  Intron number 3 from transcript Bradi3g07230.3 (locus Brad i3g07230) derived from phytozome v7.0 (chr-ID Bd3; pos 535 2089 to 5352692)
tttatcttctcaacgatccagctgtgtcagaagcagtatcctttgtgctttgatatagaaaatactcctaccttttgagtttttgctgtcatttgtgcaaattagacttcttttaataccggaagcacatgcgagctataattaggaagctataaaggtgcaaccaattcatataagcaacatcaattttctccattataaacaaaatctgaatgtgaatattttttattggcaagatacagtatgattgcgcttgaagctaatggttggtagttggtgcactaacatatactagtactcttgcagaaatgaattcctatgtttttcgtgcaatacattgatatatcagtatagggactaggggctggagctatttcagaagtgcctcagatcgggttattctgtgaagatgtaaattatctacggagtagtttgcaacaaaacctgtttaaaaattgtccaggggatacagtttctttcttgaacatcttttggtcattatagatagagatataagggcaattatgtagatatgtctattcatgtgttctattttatgaggagacttgttatgtccttgatgtgtttgctttagagaaaaaga

SEQ ID NO: 14967 - DNA, 856 bp, Brachypodium distachyon
  Intron number 1 from transcript Bradi3g27480.1 (locus Brad i3g27480) derived from phytozome v7.0 (chr-ID Bd3; pos 284 37319 to 28438174)
gaccgacaccgtgactaccgagaccgtgatttcaggtgcggatttgttgacctcccctattactttcactgtattaaaacacctctgaatgtgatagtcgtagaggttaaatgtctaggcagaaatcctttggccctgtttggaacacaagaatttccctagattcctgcaggatttaaatggtgtgatgtaaaattcctcttttagtactgtgaattttgtccaaatatgttcttagatggtgaatatgcctacgaaaatcccccgtgaaatatgtattagactaatttgactagtcatttttcttttgttaggtaaaagagtaatgtgatttagaatggggagagagcagtgcttggttggacgctcttgatattttttgcaggatgctagtagtggtcctgcttgttttttaaattttgtttggcatacacatggaacaagtaacatcatgcatgcatatatcaagtaatctacttagctgctcaatgtttcctgtagtatattgttattatgagctaggcttgtcaagtctggatattgaacgttaaatatgggactcgcagatacaaaatcctagagctctcttcagatggtttcagcagttgagcctgactcgagatataaggtcatgaatctttaattctttattgcgaaatatttactacttggccacttggcttggactactactgccagcctcttgaagataattggcgatttttgcatgggggtttctgatcagcaataaatcatgctatctgtaattacagtgtctgtttgttactatttgatgtgtttagtatgctgcttcctcctgtgctaaaatacctttttttgtgcaggcgcaagaaag

SEQ ID NO: 14968 - DNA, 640 bp, Brachypodium distachyon
  Intron number 4 from transcript Bradi3g00230.3 (locus Brad i3g00230) derived from phytozome v7.0 (chr-ID Bd3; pos 263 04 to 26943 reverse strand)
agagagaggtgagctcgtttattaaatctcatgttttattatcttccgtgatagtgcgtagaaaaaaaaggatgagatgctttttcatgtttaagttagagatgtagttccttctatttccctattgcgatgcaggttgaggctcttgtcattccctgagggtaccctttgaccctccttagttcaaccaaatgaactaaaattttaaagtgacacaactttttggaaaactagttcatttgtttgaactaagaagggtcaaagggtaccctgagggtcaaaaatttgcagctctacctagcataggtttctcttccttgtggttccatttggtaatctgctatgggagcggatattggcaccaacacgatgtacctcagtgtgatgtgtgacatacagcatacagtatattaataaatgcttgtgtatggtaaacaactgtggaactccctatttgttcttgctgttcatgtaaggatatagagcaaaagattggttagaaccatctgctcttcacccactgatttatggtaaacaagtggaatataatttgtgctgactttctcctggaagggatataaaagcgaaagctcggtttgaatcgtttgttcaactgtgtgatctacttttacaggaagga

SEQ ID NO: 14969 - DNA, 785 bp, Brachypodium distachyon
  Intron number 1 from transcript Bradi3g06120.2 (locus Brad i3g06120) derived from phytozome v7.0 (chr-ID Bd3; pos 440 9830 to 4410614 reverse strand)
cctcgagagcctcttgctccgctgcgactaccacggtacgtgcggcgaccataccactactaccgcccccctcccttctcattcctgcttattttaggaggatcttcactccgccgaacaaaactcgtctggttttctctccgtgtgtgtgtttgtgtgttttccggcagtgtatttttctcttagatttaattctggctatattttgcttctttaggtgtgattattcgcgagattcggtgtcttagttttgcatttacagcggtacttttatgggatttacgctctctagtattttctcttgttctgtcggtctattttctctcttcttcatgtcccgtgtaatgccaattcaagattggattttgtcattattgtctttccctgatttttcatcccctttctttcgcgtgtccctttatttagaacaaccttgttttggaatctatgtttttctgtcggatacctgtggaagattggacaatctcttattatctctagtactactagtaatatctggggacatctcccaactctgtagcactgttcttttgctggtttacttttagttttccacggtgacaaaatttggttagattttttttttaccttcatctctgcgatcttctgctgtgcttgtttttttgttcttctctttcatatttcttttgatgattaaacttttgtgagtgtactgtgttgttctggtgtgggctaatgtgtttgattccacgtgctatcatgttgcagtgacaacaactgggcaggcagctacagccctgagg

SEQ ID NO: 14970 - DNA, 629 bp, Brachypodium distachyon
  Intron number 3 from transcript Bradi2g40420.1 (locus Brad i2g40420) derived from phytozome v7.0 (chr-ID Bd2; pos 404 56973 to 40457601)
tgggatcaaccgcgctgtaaggggggaagaggctggtaagtatgcaccactactgttgctaatatcccaatgttgtgctgattttttagtgtaatttgtctttttaagagagtcggtattaagtgaagatattcttgttatgctggaaacctccaaacttaagctgaactcaaaagtaagttgttatacataagagactttgcgctctactgaaaaggtcatggtctaaattgtaaattggtataaaggatttttttttacaattttttaattaaaaaactgcaccatgccaggttgacttcagctcgttttttttcttaagtaaattactcagtgttgcgttacgatttctctgggagcttgctctgtgttccattatcatattacacagcttaaacggaatgtgcacctcgcttgaggtatctaccttctgagaagggcattaaatttgatacgtctgcttgtatcttttattttgtatgacaaattttgggatttacttatctgttttttgcttttgttatatagttactgctgtgttcacaatttcaccttagcacataaaagatatgttacaatgtcttgtcattgaaggtctgggggaaggtggtgattcagagcctgcacaa

SEQ ID NO: 14971 - DNA, 954 bp, Brachypodium distachyon
  Intron number 2 from transcript Bradi3g05600.2 (locus Brad i3g05600) derived from phytozome v7.0 (chr-ID Bd3; pos 395 5920 to 3956873)
ctctgtttgtgaaccgagaaattcacagtgaaagggtactaacttccatctctactttgtatacgtcttttccgtgctttaccttaagttatgtgtttaatcaggtgcttgaattcaaactagtaagaaaaaaagaccatcgcatctttaagtctgtgaggttgctgagaaacaagaaagttgtggcattgcttgtgttttcgccacaatcttgtttgatgtgaaaaactgataaataacagtaacagttacgaccaaaaggcagtcagcaatttgtactagggcctaaggctgccactgggtagggtatcgatgagtgcaaatgtgcaatactacaaagccatgatggtgacagtctctctggattgatcactatttacttatttagtattggataatcatgtaaaccataataaaataactggattggtcactcaatttttttctagataactatgtgttgctcatcttgctagatacccaagcgtcttaatgcgaccataaaccataatacgcctctacataaaaacattcatgatctttgttttattgagagtttgtctctcatgctggagctgctgtaggattataaaaaggaaccaaaatctaagagatggtatcgtgagatcgtggaaaagatcgtgacagaagaaaaaagtgtacagaggcaatatgagcttataggaaatctgaaattcaagggctaagtgactacttttgcagtcatgcatgccacatcttttatctggatttaacttgccgtgttttatatggggttggttctcctacgaagactatggtacaactttgcagcaatcaacctataccccatcttttagaatttcataagtatgagttgttccctcattgttctgcataagtcatattattaatttaaggcaaatctttgtatttatagaactaaaacactaatgtctttgtaatgcaggtagt

SEQ ID NO: 14972 - DNA, 699 bp, Brachypodium distachyon
  Intron number 2 from transcript Bradi2g54880.1 (locus Brad i2g54880) derived from phytozome v7.0 (chr-ID Bd2; pos 536 78026 to 53678724 reverse strand)
ctgttctcgtgagcttatttgttgttggcgattgggtaattccttgattattattagatctttggatgctatgttttattgcacttcatttgatccaacataacttgccacattttgaatgccaaacctaaaaccttctaagttcatttaatttctcaggtgatgttatttaagtaccttatattgtgacccctgtattccctcagtactgaggaacatgttaggcagcattttggtttgtgtaattgcacattatgttaagatagcagtaccagacaatggattgcatttactgaaaacttatattggaatattacagagcagcaaactttcagctacaatgcattgcatttactgaaaactctatatgcgaagttgaatgaatctcattttcttagtttcagttaacactttttggtcacatccaattaattaaaacaatttgaggcaaacctggaagacaacattaagttcttggatgttttttatggagtagttgcattaggaaccaaggatgagacccatgacccatctagtcatattctgcagttcagtttaaatttagattttggacacatgtctatgaacacatgttacgtctatggtgtttgataaattctcattgaagattccttttgaagtagcgaggcaatcattctttgtgatgcaggtaacgtcaatcctgtcattcgctgcttc

SEQ ID NO: 14973 - DNA, 936 bp, Brachypodium distachyon
  Intron number 1 from transcript Bradi2g53660.1 (locus Brad i2g53660) derived from phytozome v7.0 (chr-ID Bd2; pos 527 83605 to 52784540)
ctgcggcgggtggagtactgtggtggcccgttcaggtaatgaattctgactgggatatgcgacctgcgtcctgcacttgtttccctcgttttggtaatttttgagtgggttcagtgatcacttgccttgggttttttttcccacttgtcatcgtaccatttgaattctctgctgcttgtttgtcatggagatgttcatcatgtatgctctgtttgcattctggtgcaagttctttttacctgcgatgcaactggaatgtacatattcagtgtaccggcgtaaagcagaaaaaaacaacataagtgggttctttttacactgcatcgacatgttcttttctcgaaccacgcctgaacgcctgtcgttttgttgcatcatcatcttttagtttagactatgtggcggtttagtgttataatcaccatgaaattcataacctcagtgtggacctcctttccaggcttcgggagacgaccagcagcatcttgcgctaatcaggtgcgtcaacatccccatcctcttgctaaatgtctcctcttacttaccgatttactgcgcaaaccgctaacgcacgtccatgagaaaatgcttggcctcaccctcagcgtacttttaattaagaccactgcaatacaagcgcgaaatgatcaaatggcgcgatttgcggtttaattcttttttttcttcatatgctcttcatccacacgccccataaccaagccaaagtagtctagtcacagctaggctgctagggcaacacagcaaattgagggcccggcaaagcaggtgccccgctgcaatctccactagcttgccagtcctttcaacgcctacgggccccgtctctccttttcaccatactatgctgctccgtcgatctcaccccttgattattatttcgtgctggcaggaggaccgttcaagaggcggccggca

SEQ ID NO: 14974 - DNA, 987 bp, Brachypodium distachyon
  Intron number 2 from transcript Bradi3g15380.1 (locus Brad i3g15380) derived from phytozome v7.0 (chr-ID Bd3; pos 137 10748 to 13711734 reverse strand)
agagagcggtatatcacgaggctatccaggtatgcatctttggtccactgagatatacactacatatatgttcctcccagctaatcacgcggcactttgtccagattccagaggcaattttgtaatagacttattcttctatatgttttgtgaattgcattgctgacttggcttgatagattagaagacacttcacagtctctataatttacttatagtaggtattattccagttcgtcaaaattcaaaaggatactctgtaatgactaatgagattgtactttatgccacatgtacctttttttaagtatcatttttaaagaaaacacaggttctgacctgtttgaatttgcatgatagttttatattgtattgtacatgatgatatttatattcctttgttgtggcacggattccatgaatcagtgggcttgttggcgttttacactttgtcaagtgaaagttagtctgtccattcaatgacccattctgtctagtctaaacaatagatttattgtgtctaatatcactctatctatcggagtacctggattctcagtttgctcctaaaagaatttcctgttacgaaattgcaaatataccggttaatattccccagcagtctaatcctcgaacataccatgctattttttaatgaataaacatcttgttatgtaaataccttgcaaaacatttcttatgttaatttaccgttgtatttatggagattcaaatatttcctgaattatttcattgacttcaaatttcaaaatgcaagtgcaacttagctttcgaatgaagcatatacatttgcattttcttttttctcagccagtaggaattataggtttgagtgatgactcatgagtgatcaggcccgctaatctgttgtagctatggcccttacatttgattctacacttagtactgagcaacattgcttctcataatttgttatgcagaatattagtcagcataaaaaggaag

SEQ ID NO: 14975 - DNA, 753 bp, Brachypodium distachyon
  Intron number 3 from transcript Bradi3g18710.1 (locus Brad i3g18710) derived from phytozome v7.0 (chr-ID Bd3; pos 172 61886 to 17262638)
ggtgattcttacatcatcttgaaggtatcaaagcacgtgatttgttgatgcatgcctttacccccttttgttatttagtatattgcatttcttaaatagtataatacatggtcaattgtatattttccatagtaaccgaagaactacaaaattttgcaacgtgcaaaaatcatggtaagttcagtccatgtgtttgttccatatgtactgtgatcttttggttttaagaaaactgaagatttgatgtatttgctgcgatgccacagccctaaatctcatcatagacttattgctacttatgatatgttgtgaacttgactaccctaaaaggttccttctcacttagtctcttggagaaaaggcagtctccaggtccgggatcaaatatatgaaatgagagttctggtgtagaattctgatggattatgcaatcatgaatggtacatgatgcactaaacaaggtgacaatgtctgagagatctagctatgagaactcttctcagtcagtcagttatccaattagtttaaatgcagctatctccagcaaagatatagggtcgtttttttttctgtattttcaattgccattgagtgtcgaaaaatacaattttggtgcatcacatgcttctatgtttacgttgagattcatgtttttttgtcatatgcttgaactcaaccgcataatgctcaaactaatggaaagatttttttctcgtgttcttttcccctccgtacagactactgccttgaaaa

SEQ ID NO: 14976 - DNA, 573 bp, Brachypodium distachyon
  Intron number 2 from transcript Bradi3g21100.1 (locus Brad i3g21100) derived from phytozome v7.0 (chr-ID Bd3; pos 201 04084 to 20104656)
tacaccgtcaccttctgccccggcgcgtccccgaggtcagtcacttcacttccatggccagcctgtccctccgtgcacattgcaaatctggatctttggttggttcttggcttgtgtaggggggttgatctgttctactcctttttactgctgtcttgtagctgatgtttgtagatagatattccgccatggccacccatgaggggctgccgctgctgatttttttccccctcgtgtcctttagctcagccttgtcagagattagtgactttttttgtctgagaaatttatcaatcatcgcatcgttcactccactcttgttactgctaatcttgtgtgctcaaaagataagaggatcgagattaaaacgacagatctaggcaagatctttattatagattcagttatcagcagaatggggtggaatgagaagtgcgacaagaagctttgttttctttcatttgtttactgtttctgccattccacgctcgtgaactgaccatgtgagcctgtcctgtcttttctcttgtcccgtgagcagccagaagtcgaccacgctgccgggcacgacgc

SEQ ID NO: 14977 - DNA, 879 bp, Brachypodium distachyon
  Intron number 2 from transcript Bradi3g30620.1 (locus Brad i3g30620) derived from phytozome v7.0 (chr-ID Bd3; pos 327 96032 to 32796910 reverse strand)
gtcgttcttcaggtcccgtggcaagtggaattgcggtgagctagcatcttggactgctgcttagtatgtgtgtttagtgttattaatcatttatagttttgaattaataggattacaccatgaatgctggagtaggtgttggatattcatagatatttattaaatattccatccgttgtactaaatagcaacacttaatatgggacggagagaatatttaacatgcaattacttctgacataatggcagacgaaactggtgttgaaaaaaaaataactcttgaaagaagcaggccgtgatgattttctatactgcttcaataaatacataaattgaatatgctggtcttgccctgttgggcacctccagcatgaatacgtgatctggttcaatgatgatgtagagttcgtagaagatgactttttgtaaagcaatatagcttatgtccaatcaggccctgctatagccttgtgtatatcctgaagccaaatcatatttattgtatttttagtttatggaggagtgatgggtacgttcagttagcatttcatcatattggggaagaagctccacatttccaggacatccgtctttgtagtctgttgatgtgttgtgtcctgatatagtctttgtatacacttaagtaaaagtagattttattggtttcgaggggaaatagatatgttcagtggaaggaagctccatgacaaaacttttgctgcttttaattattctatataagtatgttgatatacatatatatacacacatgtagtatgtgcatgtagctactgaataatagtttgatctgacatgtcctgtttcttgatgtccgacatgtcaggttggcacatctgcagcagctgcgagaaggcagta

SEQ ID NO: 14978 - DNA, 526 bp, Brachypodium distachyon
  Intron number 1 from transcript Bradi2g57810.2 (locus Brad i2g57810) derived from phytozome v7.0 (chr-ID Bd2; pos 558 84661 to 55885186 reverse strand)
gtctggtcgggagctccgcccgctgcgctcgatccgtaagtcttctgatttctggtttctcttcaagcttctttgcgatcagtgtgatatgtgtgatcagtgagttgcttgtgctcgagggagaaaaaaaaattaaggagggagaaagcaaagttatgtgtggatttgaagcggtattaattaattaactaatcgaggagttagatgctttacaggacttctattattcctccacgctttgccatctctgtgcatgccctgtttctctatgaccagtttaaggttgcagtcctacagaaccgggtatccactttgacatattcagaaggaagatcaatattaaaaataagtgaccatcttaggatatgtgctgctttgcatcactctaagcgaatatttatttctgggaaacactataggtggttaattctcatgagcctcagcttggcggtctggatttttgaacataggaactagtagacctgtagaccttatgctgccttcaaattttcaggaattacagggg

SEQ ID NO: 14979 - DNA, 1012 bp, Brachypodium distachyon
  Intron number 1 from transcript Bradi3g02850.1 (locus Brad i3g02850) derived from phytozome v7.0 (chr-ID Bd3; pos 178 8892 to 1789903 reverse strand)
gcgcggcgggggacggcaccgccgacgacacggaggtactattattagtagtagtagcagtaattttgaatctgcacatttgattacttgcgatcttttcctccatggattgttcttatcttcgattacttggcggcgtgtgacgagaagagccgttacctttttttttcgccgaacgtttcctgcgcatcatcatctcacctttcagtttgttgcgacattaattctgctttacttggaaaagttgagtggcactttttagcttaagtaatgtcgttttggtgcattacaactttacaagtgttttgattcctgctgtcgctagctagatgtgtgatgtgtcgtgttatatttcatgttgtcacccctcgtgggtggtacataactctacttttgttcttaccattgcaacgagctagacgcaataaaattcgagttctctcatgaaagttgcaatttgtatacatcactcaagtaactagctaggattaattaaacaccttgcaaatgaagttggctagcaggaggccacactttccatgtgtgtattttgatgtgatgatcgatgagctaacaaaaaaaaagaggttgactgatttgatggctattggcggttgcttaattagcttagttaactgactcaacaatcatcgtcaagatccacaagctagcaaggccggtgtgcaaatctcgttgagagatcgctcaatccagcctaatcaggaagaaaagcatatatataatctctgcgtgcacgcatgcctgcctgcgtgtttatcttgtcaacgtttcctctttttgggtcccacttttttatacgatgaaaaatgcttcgtcgataagccacatgacagcaataaacatttttgactaatcctcagttgcagatttttccccccctacaaagcagtgcaatttttagtcattttggtaaatataacaagtaataactgaagtgttgattatataattgccaggcattccggaacgcgtggaagaaggcgtgctcgct

SEQ ID NO: 14980 - DNA, 545 bp, Brachypodium distachyon
  Intron number 1 from transcript Bradi3g43630.1 (locus Brad i3g43630) derived from phytozome v7.0 (chr-ID Bd3; pos 451 58606 to 45159150)
atgtaagtgccaccggctctgattcttgagatttctaattgtggcttccaactctgtttctaatccaagtcccctctcttcttctggtttatatctggttcttgatgttactcggatgatgaattttctgtatgttttgtcttatttttgtgcaagaacttctcgctgtgtaattcctgttgccatcgcaacataattgcacaacgcaatgctacatggcgatcaccgatcaagtgttcactggaaaaagatcttttcaagttcaaaccaagaaaacgttggtagaaaaatcccttatgctaattctagaaataatttttctccttgtctttgttaaagaatcagtagaattagggtgcattttcttttttattacaagttcagtagtatcatgcattcatgtgtaacagttgcatttgctcaaattgattgagctagctcgatcatttccaatagttgcatcgagtcaaatttatggaacaatctctacctatttaccaatattaattagacaatcatggtgtttttcttaggccaatccattg

SEQ ID NO: 14981 - DNA, 725 bp, Brachypodium distachyon
  Intron number 1 from transcript Bradi2g46340.1 (locus Brad i2g46340) derived from phytozome v7.0 (chr-ID Bd2; pos 467 94868 to 46795592 reverse strand)
gtttctattcaatcattccggtgaggtctccctctcagtaaccgttgtttgttctttgcagacatattcctgacttcctgtaaaataacgacagtagattatttgtgcatgtcatgcggctttgagttagattttcccaaatactcactctgctcctaaatagaagatgttctacctttgtccttggtagaacttctaacatctttaactctagttttttagatgatttacaacactagattagttttattaaatccgtcatgatatatatcttcgtagtatgcttatttgatatggtttagtactttagtacatctttctataaacttggtcaaactttaaaaggtttgatgtaggaaaaagctagattttaggaacagtggtggtacatgtcaaggactttctgaagaagatgcttaattattaaagcctcactaggttatgaagcgccacagtttcatggtacatgaaacatgtcaaccttccaaatgtatttgttgtgtgaggagtcagattcctaggtctaacaaattagtgatcactggaaaagtgctataatttggaattctgatttagcaacgatgtttttcttttagccacattattaagtcttggataatttagagaaagttttgcttttgttttatttctctgtggttatgttttccacctgtaatgcaattcatacaggataaaaagctgaaggagtgtttcccaacaatacc

SEQ ID NO: 14982 - DNA, 829 bp, Brachypodium distachyon
  Intron number 3 from transcript Bradi2g50290.2 (locus Brad i2g50290) derived from phytozome v7.0 (chr-ID Bd2; pos 502 16840 to 50217668)
tcatgtgagttttgacttatctcggtcgtttgtataggtgatggagttttgaagcgatgagtccttaatgcagcatgtggcccggtttgcttatcagatcttgattcttgagtcgtaggtttctgtattagcttagttgctttggtgaagaaagaaacgggttctaattggcttggaattatatgaccgctaaagtaagatgtcaactcatactgcttggacagttggactcgtatgctggatgcatagcacagttcctctcgatggcttgtcagaatcagggggcacccgtagtccaactggagattaaggattttgggcaccacaccttaccgattgacagttaggtccacattgacttgtcaatgtagttcaaaaatatttcttgctagagttttgaaatcatccaggattggtgatgtcggtactaccagaatggttttatggggataattttggtcattgttttgggttttatctggagcacaatttgagttattcccgatttccttgtcaaaattagaacaacacaagaccgcttctatctatatatcctagtgttagtcgtcacactgtgattttccatgaaaggaaagaacaagcatcatctccaaaaatgtttaaattgtatggaaaactaatatgtttccactctgtacaatgctgatctattgtttgagtggattttaatttcaatatttaatgttcctaaaaaatgtttttcaaggttgactcttgagttattcagatcattttatgtttttgacacaacaattcgggtgtaacttttgcagccagaagcctctcctaccttcatttgagtcagctg

SEQ ID NO: 14983 - DNA, 448 bp, Brachypodium distachyon
  Intron number 2 from transcript Bradi2g42030.1 (locus Brad i2g42030) derived from phytozome v7.0 (chr-ID Bd2; pos 425 29542 to 42529989)
ccaaggcggaggagcacgagcgcttcatcttcaaggtcttttccctgattcgcccctgcttaatgttgttttcttttcgtggtactatcgtgctaatagttacttcatcttcaagaaactgtagggtagtctttgtgctgctatgctttatctgttcatttcgcggctaatttctgcgggaattgattgttttgggcaatgttttcaaactgttctgtaaatagtactctgggggctggcattttgggcaggaagggggggtacggtagttaccaatttgttcatttattgccttgtgctggaagtatgtacggccaagattgatgttatttaccaatttgttcatttattgccttgtgctggaagtatgtacggccaagactgtgatgttatttgactgttggaatgtggggaatgcttggtttttaatgtgcagctcacacacttg

SEQ ID NO: 14984 - DNA, 1023 bp, Brachypodium distachyon
  Intron number 1 from transcript Bradi3g08390.1 (locus Brad i3g08390) derived from phytozome v7.0 (chr-ID Bd3; pos 657 9796 to 6580818)
aagggcccaaccaggacgccgtcatcctctgccaggtgcgctgttgaatttcaccgtcaatttctcggctttgcggtagtcgggttgaatttgttttctgttcgagttgctgcggacttttatttactctggttgggtgggtgttcttgaggccacgccgccacggagcttccatctccatgagatccttttaatttgttcttcagttatcccggaaaattttgttcttcactttctctgtgtgatcctctagcatggtgaaattgctcagttggggtctgctctgtggttgcgatcagtgggttattatgttgggatttggtggtgttgttgatgctagtggggtaattttgttttgcttctaaaatagtgaacagtttatttttctggagggttcttttagctctacgctggacagatatttccacgaacagtacagatgtgctcatttttctcccatgtctaatcatgaacacttggccaccgtttcaagacttatgttccacctgtaattattaagactataaaatacggagtaagtcagttgacaaattgacgaactgttccatcttttgattctcatcggaggggagacgaataatgggtgctagaactatctttgttgtgctaatcattgttgctttccaacaacaaacgtacagcagcatcaaattcagatttcgcagccaagttcaaaacaatagtactaattcagatttggcagcgattttctccctaatcatttcacctaatgttgcctaagctttagacacaccatgtgatgctattccaaagattatgttccccaagcagccatgtgacgcttccagaggttccaatctgtttgcttcaccaaacaccactaatctcacctaccatctaatcttcacttttacttttacaatcacgaaagatatttccaagaatcatttggtagttactaccattcttccccaaattgacgatgcaatgtggtctgaatctcatcaatcgatgtaattctttataatccaggggttcggc

SEQ ID NO: 14985 - DNA, 939 bp, Brachypodium distachyon
  Intron number 3 from transcript Bradi3g43120.1 (locus Brad i3g43120) derived from phytozome v7.0 (chr-ID Bd3; pos 444 35138 to 44436076)
tggtggtaagtaagactaccttcttttttgggcgaaccctctgattactaaaattacatcactcatcgtcagtgacttcattgatgaaccatcgaatggatgtgcatttgttccaacttgcatgctcaattgatacttctgtcagtgctatgatatgataaggagacaaaaggttaaaataagtaaacacaaaaattaaatatgttagccactgattgtgcaaaataggcttaaatgtatcactattttattttcctttctgaccaagaactgtaggggatgcccctacagtgaaggattttatggaacaaaaaagaagttatgttcaacaaacaataacttgtcactcgtttctcaaccagcctaactcctattattacaaaaaagaagttaaggacaacgttttattttcttgttgcttgtatgtaagaccgacagaagtgcttattgaacacaccactttctcaaccagcctaacgcctattattaccatcacagctcagagcactgatgcagacactcgttctgttgcttgtactgggtctttagctacccaagcaccctatggacaactaatttgtctcagattaccatgaattaaaatttgcatgatctgaaatgtatttagaatgccatcaggcccactttctgcccctacacatatatcctttcaaagaggttaaatgctacacattgtcacttctcattaacctttttgtccgtgcaaccggtaaactgtagacaaatataccacaaaagagggggtatctgaaatagatgagtttgctttctcttcacaaaattttgcgggccttttttgaggattgtgttggacctgtcttaaatttgctccactatctgtagtttgtaccattttatatcaccagttgctaacaaaaaatcatgtcaggtttggactttttaaccctgcaatagtat

SEQ ID NO: 14986 - DNA, 959 bp, Brachypodium distachyon
  Intron number 2 from transcript Bradi3g15440.1 (locus Brad i3g15440) derived from phytozome v7.0 (chr-ID Bd3; pos 137 59745 to 13760703)
cggcgcaatctaggccggcaagcctcgcggcaaaggttagtgtactgtagtgtgtacatgcatatatgtacgcctttcatatttatctattttttttaaaatcaattttgagtttacttactcatcacttttgtccccttctacgtactcttatagtctcttatactggacaacaacccttaagcttctaaaacacaaaatcctctgtattatgtatgtggttatttctttggccgggtattatgtggttgttatatggaagatttcgtaaattgacgattaattcaaaacgaatgcaacgatcggtcatttggcacatcaatcacatctttgatgttttctctccggtggttccatatatggcaacacatggaaaattaatacactagtataaacatataccgatccacatagcgttatacgcataagtgatcgacatactcaacttttgcaaggtttataattttgacatttttttgataatttgagcgggcgtcgcaattttagccttattttggttataaaagatcgatttgacgacactttgagcccagcgcaaaatagctcgtgtagacttgctctatcctacaatcgatctagtatgtcatttttgttttttgattgagaaaagagtaattaactagtgtaatttgtgctggacacatttattagttttctgctacaattttgataaagtacatttggtggaattttaaacatcaaaatctgaaatagcttctgaaattttggtcattttggtgggtaccgaaatttcagaccttgctcaacgtattggtttcatggttaattcgatcatgcaagaataatctgactttttcatagtttgtttctggaataaaaaactaattaatataaaatttctgcgtgaagatactgatttttttccttttttttcttctctagaatacattggaaggggtaggagactcaagcagttg

SEQ ID NO: 14987 - DNA, 753 bp, Brachypodium distachyon
  Intron number 2 from transcript Bradi3g14840.1 (locus Brad i3g14840) derived from phytozome v7.0 (chr-ID Bd3; pos 131 45929 to 13146681)
taattgtgcactgtaagttggtttttgtacttttaccgatcacagtcactagtttgctactgatttgcatgctttaatatcatgctcttttcaaatcgtctgtttgtttatttcattcattcattgtttgacttaatttggtaataataataaaatcttcttgacaaaaaagcatttagaattttgttgattcttacattaatatagctgaaacttaatgaagctgtttctttttttaatgatgagtatatttccatttatttcttggcatgtcacgataatctttcgattcatctttctgttagcattgcttcattctgatgcatggataactatactatgatattcaaccagatatgggttaacataatgtcagtcggaaagctgtgtgtttgtgtgtctttattttcaatcacaaatatgccttgttattgaaaattttgtgttggaaaatattaatttgtagactagcactgggatcttttggacaatgtggcaccggagtatttatagtcagaattagaaatgacgacatatcaggtgaaaacctctattcagtgaaaacttgaaaacttccaatcccagccatcagatctcaaatattgatgtaactatgattgttatgggggaactataagtagtctagactgaactattatttacgtaactgtaaaaataggtagtctatgagcatatttatcaagattgtgttacttagccctattgttcaattttacaggtagtgagaaaaac

SEQ ID NO: 14988 - DNA, 637 bp, Brachypodium distachyon
  Intron number 2 from transcript Bradi2g58170.2 (locus Brad i2g58170) derived from phytozome v7.0 (chr-ID Bd2; pos 561 72076 to 56172712 reverse strand)
gaagcaccaaggttttaccttttgaattccgtgctcttgaagtttgccttgagtcatcctgtagatctctggaagaagaagtacgtgtttcatcttatatctgtaaattttggttcaagatatttgaatataactggattaatttatctgccatcttaggatagcatgttctagcctgttatggttcacattatggcttgtttgatacctgaatcattgttgtcacataggttgttggataatttcttgacatgggctcattagaggaacttgaggccttgttggagcaatttttacttgtaaatcctggcttctcaaaaaatctgggaaagtgctggtttaaattgtacttgtagatagatggagccgtgcttcttgtagaagctgcccttaagctatctatctgtttttgttttaaactaaacttaagctatctatctgaatagtcttttgactgttctctgttttctttaatattattgcatttaagatactagtatacagtagtttacaaattgccttttgagatatcagtagttctcacaataaacagaaagtgatctacttgtagttgtagacagtgactgtcctccttttttcagaccgtgactctggagaaagaggcatatccagcatt

SEQ ID NO: 14989 - DNA, 703 bp, Brachypodium distachyon
  Intron number 2 from transcript Bradi3g19850.3 (locus Brad i3g19850) derived from phytozome v7.0 (chr-ID Bd3; pos 188 41168 to 18841870 reverse strand)
atcgtcgagaaggtaaaaattgtaaacccttgattgattttcttttgtgtgctgcaacaatgcaaatgtcgtcagtgccaattgggggtgatccaaaactgaatctatcttggagaaggctgcagggcgagtgggcttcattgcagatcctaagtccttttaacccaattttagtgcgttatacatttcacttgatccagacatcaactgcattggttataatgccattgaaatttcgaacccttgacagcaaaaaaacacgcagaagaaacctatctctgctacacatcagtggatttttggtttgtggaatgaaaccacatgaataattttctgtttttatctgatacagctatttttttcatttcttggacttgtttaatttgcataaaaatactactccctccgttcctaaatacttgtactaaaaccacgacaagtatttaggaacggagggagtacaaactattcccaccaatcctaaattcttgtcgtggtccctccgttcctaaattcttgtcgtggttttagtacaaatttgaactaaaacctcgaccggagggagtattactcaagggtatgcctgtatctgaaaatagctgatagattgaccagtttttttttcctgatatttacctggtggtaaagtatgtttattttgatcaatagtcttctatgttctaagagttttatttgttttagt

SEQ ID NO: 14990 - DNA, 966 bp, Brachypodium distachyon
  Intron number 1 from transcript Bradi3g05920.5 (locus Brad i3g05920) derived from phytozome v7.0 (chr-ID Bd3; pos 420 2611 to 4203576)
acaccgtgagatcccccacctgcgctcccccttttagtttcaatttttttttctctcgtccgatcttttcgttttcagagggggcggcgggcctcgtattcttcactgggtgcggtgctttctagcgatttttgttccgggagttcactagcatttcgatcaacggggatgccgcgacggtgagctagctgctagtgctgggggcatgtggttatgcgttgatgaaggggatttgctccttcgatttctaaggtgtcgcgagatgggatggggtttgggtgagtgctctggattacctgatatatgcacgcgtttggggaagaagagtacgggtgcggatgatttttctggaaggatgatccacgctactggtggtttatcgcctttgatttatcgtaggcagacgattttggcagtgttccaaatggacatgattggtacagccgtacaggcatgctttcgtttaaaaaaatagagatgatgtgttgggaaccatgtctgtgtccttttgccgtggatccacgccactagtagattcaggagtgtttttaacgtatatgcagcagcatttcttttcaatgccttgttatgccgtgttcttctccacctctgtgtccctctgccatgaggattgcacttgtttccaaattgttttgtgatcctagccaaaaggttttgttcagatatactacctcagttcttacttgacgtcctaggatatgtgctggcaaactttaactggcaattggtttaaatttagacctatataggttgttcatataaaaactagtatatcattaatttgttattaatgtgtttgtaatattataattatactagtacgtcttatcttaagttgcataagtatttgtcaaagtagcatcttgaagacattaagctttgaattgtaaatttgtcgagtttcaagttcttgctaactgtttactgttttctttgaatcagatt

SEQ ID NO: 14991 - DNA, 886 bp, Brachypodium distachyon
  Intron number 1 from transcript Bradi3g10940.1 (locus Brad i3g10940) derived from phytozome v7.0 (chr-ID Bd3; pos 920 5790 to 9206675 reverse strand)
gccgctgatctccttcgcagcgggggaaaacgcaggtgagggacccttggcatttctcttttcttttcaatcatgcctgtatgtacccaaagaccagatgaattttcatcttttggggcaaactcaatggaagagccagcctgctcgcgaagcctgggcaaggcatacttgcagcgacgcaggcaagagtttgcttttattgagttgaaatgtagctcaaatcatgcattacttacgcagttctctactgttatataggtaaagagagagtaataatgtataaaataacgtcatgtccagatgtgcgaacagattttccgtgccaaacgcgcagggaatcacctagtactaacatatattcgtgtgcacatcaataacctgcaaataataaatgtaggataaggtaggggaagaaccacttgccatatgcaaatctccagtaaacttctcttgttcctctgataacaactcattctgttggatatgcatttgtcctgttgttaaaacttaaaaatatgtacccatgtcatacccatggttgttagggtacagagttctgcacattacatatggtttggttgtgtttttcttggaggaaatgaacaattgaggttgcaagttatgctctggttgatcaagaatctcgtaatgtaatgtagttatataccaacatattgcaatcattgggctgcaaaatctattatcttgcactttcagacaatcaaacttcatagaagaggattttaaaattaactatgggctgtttcagtttgctcggcataatgtatttcttaaaatgtaattcaagattaacttttaactattgcaacataactcataacgatgaatcatcattcttttttctgtacttttgctgtagttggtg

SEQ ID NO: 14992 - DNA, 833 bp, Brachypodium distachyon
  Intron number 2 from transcript Bradi3g19680.1 (locus Brad i3g19680) derived from phytozome v7.0 (chr-ID Bd3; pos 185 67561 to 18568393)
cgcaccgacaacaccatcaggtaatcaatcccgcccgcctagacctatttccattggatacggagcatcgccacggatatgcggccgtcgaattctatgtgtaccgtggccatgtcattttgttctccggcttattaatcgaaattacatatgagaatataattttttgttgatttaacacagtagaattgatgtacatttgagaacttcgacagccttgtttgatgaagctgttagtgtccaaatgtatgcttggaaaatcgaggcatctgtgaacctttgatagatcaaactgtcgtggcaaaatctaaactggtaaatttagacatttgtgaagcctagtcaggtgaaattatagtgtggaaacctttgctagaagaaattatggtgtggaatgtttgccaatcgttatctatcaagttaagttctgtgcacagacagagtactcagtagtcagttctcagacaattctaaaatttagaataggtaccagtgctcacttcagggtctattcatttgtcagcaactcaatactacaccatccagttaagttttgtgcagttagtacgtgcattatctgccaattctaaaatttagaataggcacctgtgctcactttaggttttttgcagccaggtctaaaattttgaatggccagtgatatgttctttattaccagactgctgttactttgatttatcctgattggtgcccttctcatctctgtgccattatgcactttgcctgggtacaaagccatggaattttacatacaattcagttatgtcttgttttaaatatttgtcatttttttcttctcattttcaggtaca

SEQ ID NO: 14993 - DNA, 553 bp, Brachypodium distachyon
  Intron number 3 from transcript Bradi3g04990.6 (locus Brad i3g04990) derived from phytozome v7.0 (chr-ID Bd3; pos 345 7746 to 3458298)
agcaagggcttctacagcgcgcctcgtgtttggtggtaagcagaacgcatggattcagtttaacaaaatgatgaaactgaatgttgctactgcacaaagaaagttaagctgtcaatttgtaatgtgtcaaaagttcatggtaatatatgtttcttattttatttagtgcacgtgaaggtacatctttcctcttttgtagaatttctcatctatacaagttgatcagaattaattacttatcaacccattgttttttgatggttcatggcttacttcaaagactgaaaacatgaaagagtactatgtgtatgtctgtcaacttgaaacactgcactctcacagttttacctaatttgttgtgttgcggacagaaaattgagcaagtctccgttttcaataacaacaaaaatgaatgaattaatgcataaacgttggaaatatacctggcaaacatgccagactagccattctctcatttcaagtaaatgctctacgtctagtcttctacatgcaaaagttgatgatatttatgcacacttcataaattaacagg

SEQ ID NO: 14994 - DNA, 972 bp, Brachypodium distachyon
  Intron number 2 from transcript Bradi2g59270.1 (locus Brad i2g59270) derived from phytozome v7.0 (chr-ID Bd2; pos 570 19044 to 57020015)
gggctctggaaccaagctgaaggaaatccccaacggtaacttatctcccctaaaatatcttcgatctcttgctgttactggtagacgtccctgttgatctgtggcatcgtgcgccctggtcatgatccacataagttttgagttctagtacgatgtatgtgtttgcctgttgctgtcgttatgttgctatgggtacggattatctatgtcttggtggttgtctcaaaattttctggatcgctagtcagatttgccaaagatctgaaatgaaactttgatactgttgtccagatcatttgcttttgtaacctgtatatatgagctagattatcaaatacatttgaatatccttctaaggcaaatggctggctgtaaggatgtggttacacttgtcgtgtggataccgtaaaatggaatcataacggggtctgcctaacaagtaaactggaatgttatgcccatcaaccgatcatgctgtcattgaaaagagtatgtatgctttttttagtccaggggccatgtccgatagaacaaaagaaaaataagtagatgggctaaaagaagtttcttttagacagtttagggttgatgcgcccatgatcttttaagcagctcaaggatctgtctacacagttatatgtgcttaggttctgttttctgagtacatattcgtgcatgttggatgaatcgtgctgttttcaatgtttgtaatctgcctccgtgctctttggagttctattctccatgttgtttcattgttctagttatatatgatttgttttgttaatgccatgtttattatttagtgttgaattaataaaaaaataacatgctctgttttcattttctaactgatatttattgttcagtatgttcttttggtactagctgcatactagtccacagattggattaattgtttgttctccactgcttcattagtttccttcaaactgtccaagagaaagatag

SEQ ID NO: 14995 - DNA, 853 bp, Brachypodium distachyon
  Intron number 1 from transcript Bradi3g21610.1 (locus Brad i3g21610) derived from phytozome v7.0 (chr-ID Bd3; pos 207 70231 to 20771083)
cgcaacagctgcctgcctcgcgcttcaatcttcaggttactctctcttctcttctcttctttctttctgtatttccgtcgccgtctcctctgttagctcgtcgaattcgattttaggatcgatatgggtggataggtcgatcgattattctgcaagagaacggatcgatttgcaattcggatcgaatccgccgtaattcttgcccgtagcgtctcccttgattgtggaccatgcttcctgccggccatcctgaaatttttgcatcattcattccaaccaagaagaaaagattagcccgtaataatcaacggcggaaatttgggttgttgctggtaggtttctatccctttttttttcctttcttttgcttggagaaggggcaggtctctgtgtgtgctgtcacaggtaacgcttttaagtagtttattaatgactcgataatcatatcggttaccaaatcctccaatcaatcacgcccagaattctgctaatctcgatttaggcttgtgtcaactaagtttgccttggtccactactcagaattgtcaaaccatcatttttattctagcaataggtgtaaccagccttttaagtagtttactctttgctctgaaaaatataccattactctggctggtctcgttcaacagtttcacatcaaactgcatttagtgaatctgtttactatccaggacctatcatttccatctgttactaaaaaaagatgaattttattgattttgtaattgctgatcatgggccaactagcagatacatctcttaatgttccgacatatacctttttcttgactctcattgctctctcatcaaacaggttgctgctcttattcgt

SEQ ID NO: 14996 - DNA, 1037 bp, Brachypodium distachyon
  Intron number 2 from transcript Bradi2g47920.1 (locus Brad i2g47920) derived from phytozome v7.0 (chr-ID Bd2; pos 482 70098 to 48271134 reverse strand)
acctcatcaatatcattcaccttcatattctccaggttagttgtgttaattttaggaagagtcgaagagaagtaaaaacttcggaactgttcaacttattccatcatgacttagctatatacataagagagttaagggccatatgggccagtatacgagttatacaccctaaagaagttgttcttcgtttcaatatttattacaatttgcttttattctttacatcatgtcatctgttctaagagcagattcaaacatgcacaaatcatgccttgccaaaggcactaatgtacagagtttgtttatgcttacccatgcatgctgactacatcattgagaattgagacatgccatgtcattgattagtacacgtataattttgtggtaatgaaagaattatatatggtttaattgattaaatttcatatttagtccaaaaatattgattgagactcatccttgatctgaacattcaaaatgtccttcttctactatgggtatttgactgcaaaataaatcatgcaagtccctaatttctcatcctgccttcaatttgtctaaaagctgtcttctttttctgtttatgtttaatcctattggcccagaatcatctccgttacgtggctttgatatgaactagctggatttaccatgcaattgcaagacaatattaatttagtttttctttgctgtatgcctttttttaggaatcagacatgcactctgccattcgtataacagcaaaaggagttacaaatatttacattttacaagaaaaacaaatgccgtgttacaactttatttcttatgttaaaaatgaaaataatcacgattcatgtcagccgaaaccacttgtgaaacatcctgaggttaaaagaggatggtttcgatagatcaaggttgtaaattagaaagtttaagagttcatggttgaaaggtagacttcttcggaagttcagggttggaaagtagacttttttctatatgttataatctttttttgggtatatttatgtctgcagaacctgctctaccgc

SEQ ID NO: 14997 - DNA, 1000 bp, Brachypodium distachyon
  Intron number 1 from transcript Bradi3g08770.1 (locus Brad i3g08770) derived from phytozome v7.0 (chr-ID Bd3; pos 689 1179 to 6892178)
ccctgtccacctgggacgcaatcgctggcttacaggtgattattctatctgttgaacctagggcttgaagatatataatcgagagaatttgttgggctggttcgatcttaatagttttctttcaagtttcaacaccacaagattttagattttagtccacataccaagaggctgtctagaataagcaaatttgccttggtaccaccatcaataagatgatgtgtgtggaggtaagttaaatacgatgtcagatgttacttgattacacattgtttcttagctaacattggtaagagaaaatgagagaggttgtgtatagatgcttcgtgagagtatttgttgttccagtcccagattttgactcttcgttctccactatagaatttttaaatctgagttgacaaattctgttattattcatccttggttcatagctagtagaagaacaagcagttataagttagagcagtgtctatgccaccataaccagtaggagtacatctttacatttagttgtacaagtcacggtgcaaacttaacatgaagtgccgccccaagtaaataaatttggtgtatggcatttcataaaatttaaatgaacgtacgtatgtttgcaattattttgcatacaagtgtagcactttgcctgtagtataacaagatgccctgataaatttgcttgtaataagtttttgtggaaaagtagcaatggggttgccatgatcatacattcatacttgggtgagtttgacacaacacaatctgctgaatacatttcacacaggcttgagggtgcaatttaggttttactcttgaaatttgctttgctatttctccagttttcttgagagatgaattattggtgtgttgtgaaaaagtaattttcttttcattattttctcccatacctcagaagtggcaaaataattttaaaatgctatatgtaaaatcatttcaaatttcaggagttagttcttagggataacaagcttacaaagat

SEQ ID NO: 14998 - DNA, 717 bp, Brachypodium distachyon
  Intron number 1 from transcript Bradi3g06150.1 (locus Brad i3g06150) derived from phytozome v7.0 (chr-ID Bd3; pos 443 0622 to 4431338 reverse strand)
cgcgactcctgctgcggggccgtctgctccctttggtaggtttgcagctcgctgtgcggttggatcgaagctttgggtctctctgtttctttctcaatgtgttcttgcgttgttgttccggggtccttgattctggtcccgtgccgccgcatttgctcgattttgtgttctggcttgcgaaatttcgaatttggagggggaattttcttctgcttgtttcttcgtccttccagaaatgttggtcgggaaacatggtggtttattgggaatggtggggggaaagatgcctcttgggatcatttatcttccaaggttgactggcagcatagctttaatcacattctggatattgcggtgaacttcgatgaatttaaacaactctttcttctggaatgccaaaacaaacataattactattgcgtttggggtctcattaaacttgtcaaaatcttcgaagaagtaattcacggatcctgctaagatcttgcaacaaaatttagtaaaagatttgttgagttaatctttgtgtgtgtatttttgagggtgccccaacgtttagcttcactctgctgatattactacctgcaaacgtccaattaaacattcctcagtgactattttttttttgaccaagcattcctcagtgactaatctcccctcccaattcgtctctgtgttgcagtgctcacagtggaggggggacgccaccctttacgc

SEQ ID NO: 14999 - DNA, 852 bp, Brachypodium distachyon
  Intron number 2 from transcript Bradi2g54390.1 (locus Brad i2g54390) derived from phytozome v7.0 (chr-ID Bd2; pos 533 31423 to 53332274)
tggcgctcggtatctcgcaggagctgggcagcaaggtctgcaccaccaatttctcccttttcacccagaaattactagtcttttgggtattgctggtggtactgacagatgtgtggctgtaatgtactggatttagattagttagtgtaaatttggaggtaatgttactggacacagtgcttgatcatattgtagtctatcttgtgaaagttcagtttgatgcttgtgaattagctcgtcccatgaatatgcagacctgcatttacacgggctcatctagctcaagtaagacaagcgaccaaattagctcgcagggagctccaagcattagagcatccataccttctcattttgttttggctgagattttactagagtgtctgacctaactaaattattgtcgtgaattatcactttagctagtaatgttttgctctctgtgttccaagtcggtaataatttctctgagtttcagtttgtagtctttgtactgctagccggttcaggatatttgagtatgcctattctgtccagtgaattggatctctgttatatacttatatgcagtcagtgtggtggattaatagcatttgctagtaatttttcaggtactcttcttcattacagtttatggaaacatggatgccctgatgtgtgctgtttattatgctttatttccaacagttttatgtgaaattttgttttgtagtgaaatatatatttctgttcttaaatgtaccacatcgacttattttcagtagaagctccaaatctaagtagtatttgtgttgttttcatctaatgctttcccccttgtcttgctattctgtaatgcaggttcctttctgtcct

SEQ ID NO: 15000 - DNA, 1001 bp, Brachypodium distachyon
  Intron number 2 from transcript Bradi2g48220.1 (locus Brad i2g48220) derived from phytozome v7.0 (chr-ID Bd2; pos 485 01067 to 48502067 reverse strand)
agggtatgcttaaaccatgtttgatgtaatgcctgactatatatagcagcgttttgcttttgtatgatcgatctcgtgctacctgagctgctcatttcagccaaatatgaattgattaggctgggttagtacttgaacggtgacttgcatgccacattgccatgttgaatcagtattatctgctaatgtacacatcatcttctagtgttcaattaaaagaggccttgtagggcctacggggatgcaatatgaattagtgtgaatttagatgagccatcatataaaattacctatgccaggactaacgtaaccaattttacaagttctttgtatattgactggcatgtaaatgcttgattgtttgtttttatttctcctagagaaggaacctgatggtttaattactgaattgtattgaggatgaggctgtaccaattatgcttcaaagttgtaaaaataagagagtatgcttcaaagtttaagttagttgcgctcatatttatcattagtgtattgcactttccattacctaatttaatatcatttgggcaaaacatctggtcttggttctctttgcacatatgcaaagtaagttgactctgcattgcaatttccaccagtcttttcaatcaaacgtgatcatatctgtgccctgatagatttttctggctttagacgtcacacaagctggtgatgtggctggcctgtctgtggcggcacaggtctgatcagtctcatgttcaaaagcaatgcattacgatgtgttctatgcaatggaaccaaaccctgatgtttttttttttggagatgtgatcgaattaggcagtgaaaagtgcgtttaactctaccctcagaagattagtgtcacatttctgggcatggaatgaccacatttctaatgcattgtctaaatgttttcttcaaaactgtgatggcctaattttccatgctgcaatttacaaacaggtatagggattgaagtgacaactgaattacctcag

SEQ ID NO: 15001 - DNA, 1007 bp, Brachypodium distachyon
  Intron number 1 from transcript Bradi2g52140.1 (locus Brad i2g52140) derived from phytozome v7.0 (chr-ID Bd2; pos 516 19360 to 51620366)
gcgccaccactttcaactcggccaccctaggtatgcttctcgctactagctctgtcgtctttttctctctttaattactttgatctgcctttctgagattcgcactgatttcccatgtatgactgcaattgcacaaacggccgcacctttaatatgttccatcctactttagttccgtgacttcgtcctttctatcacgaaaaatcttaccgatccagtggtttttcctgttcggccggacttgaaatcccgttgccaaatttgctctgtcaaattcaagtgctatagagacgaacgatattctctggcatcacaacatataaagttaggacttactactagatcaatagccttttgtaaagaaggtgcatacatgcaggatgttgcgtccatttgggtcaatgaatacattgattgctggctttaaagcagtcatcgaaattgagctggataagtgcggtacctgtgtatacgagatgcggtacgtacgtaaacagagcacgaatttaagccaagctgccggccagcgctaggcgtgtcatacagttagcaccaacttctgattaccggaaagaatcgacaacgcgggatctagatgacaaatcaatcgttgcgaatgatggaacggataaaagttgcaaccgcccatatatatgcactagcagcactcggttctcctaacatataaaggactgaagactgaagttgtttgctaaaaacgacggtttcgtaatgcatcggattattgcactcatttaattttgcacatgtacgttacgtactgaaaggtcgttatggatgctaattcagtctatgctcggaagcaagcgtgtgaaatattactactgcttgtgcctgtgcgtgggtgttgtcaggttgatgcacgagcacatgtcaaatgacctctcaaattaagcgaatagccaagaattaacggtcgctcacggtgtttccaacatacttacggtgcagccgtggcgggcgacgggatcatcctgcaggacctg

SEQ ID NO: 15002 - DNA, 497 bp, Brachypodium distachyon
  Intron number 1 from transcript Bradi3g20100.1 (locus Brad i3g20100) derived from phytozome v7.0 (chr-ID Bd3; pos 191 33760 to 19134256)
aaagcctggctccgccactgttcacaagggtaatttttttctagggaaaatgagctttattgctcataaacatggttacaatcatgactaacaagttgtgccgcatgatcaaaccatgcatggatgttgctactagctttagcaaaataacctaatgcatgagctacgatcctgatgcactcaattaagtttgatctctcttctttaatctccaagactccaattagggcatcttcaacaggctgttactagaatcggtacttaacattccatgtcatcacttctctcctatctatcatttctttttttaattaaaaagtatatttttactaggacccgcttgtcatacttcaacttttcttggtacccgtgaggtagcagtatcttgcagaagtaattagtactatacttttttctactttctctattccacctaagcaaaaatctgacacatggcgctaaagctctgtttgtttgggctttcagaacagctttca

SEQ ID NO: 15003 - DNA, 855 bp, Brachypodium distachyon
  Intron number 2 from transcript Bradi3g23310.2 (locus Brad i3g23310) derived from phytozome v7.0 (chr-ID Bd3; pos 228 23986 to 22824840 reverse strand)
tcgtcagggagctcgagaagaagttcagcggcaaggttggtgaattgctggttgacttgttagaccccttttttctgcgtgtttgatcttcggacttgaccgaggagggtgccctgtttgtagatttgtgagaagggcattcgctttattgagtcttctctaactaatgcatagtgaacctattttttggatttgtgctttctttacactagataaattgcagagatctcaatttcatggttgctatccaccaagtgtaccacgtggtatgcatagtggaccttaatgtggaagtttggtccttgttagaaataagggtaatccaatcttatagtagaacagtgtgatataatcggtgcttagcatagtaagacagaaggatttgttatgttttgtacacttggtggacaatgatatgtttttcctggagcaggcaactgtcatatcaaaatgtttcctagagcagggaactgtggtatcaaaatgtacgaagcgctgcattttatttaattgctggctgctcattgctatctttatgtacctaaagattgttgtgctccatggcataacttatgagtttggtagaggttgcatttattcaaatgcagtctggctggaatttcttgcttccccccatctgcagctataagcaagaattagtgtgtcagtaacatttcccataattgctagaaatattttggaattaagtaattcttaatagttgtatgactatcctttggcatatgaagtatgcccaaactttcctgattttctgaagcaatttcttgccaaattccttgccctcattcatgaatgtttgttgaaatgtgtggttcactttgactcaaatgcagg

SEQ ID NO: 15004 - DNA, 583 bp, Brachypodium distachyon
  Intron number 1 from transcript Bradi2g49030.1 (locus Brad i2g49030) derived from phytozome v7.0 (chr-ID Bd2; pos 491 83387 to 49183969)
tcgtcttactcctcgcgcgagcgcctccaccgcaggtatttatatccccttcaattctctcgttcccgaccgtttctcctcccatcaccccacgaacagatccagccctttacctccccgtttcatctccttaatcttccccaattcgtaactgaggcaaaaatcaaggtagggcggccgccctaccttgccctaccgtgtcctccgcccttgatcctgttgtcatccctaggcggggattgtcatacctaggcggggatgttcatgttgaataaatgttctgggtacatgttgtagcacatttatattactatatgacatcatggattacgagttgcagacctaataagagatggaatgcattttgaattatggtggtcgtgcaatgtttttgtgtgaggtgcacatgaatttgatgtaccatatgcttttttccccgaagggttctgtgttggacagggggcttaagcagttaattgcttctagtttcttaatgaaaatcgtaaagctttcttctagttaagtatcttttgcaatttttgtttcagattgcaggaaaggggtgacagcatctagtttattc

SEQ ID NO: 15005 - DNA, 615 bp, Brachypodium distachyon
  Intron number 3 from transcript Bradi3g08930.1 (locus Brad i3g08930) derived from phytozome v7.0 (chr-ID Bd3; pos 704 1422 to 7042036 reverse strand)
ggtgcaaccatcctgctcaacgtgctaatcgctgggtaaataaattactcctcatgccttccatcattgatattccaagcgtataaattccataagagaattttttgcactgaaaagaatggtaaactatttgtagtggcaagaaagactaattaaccgtataataaacggagatactcctgctaggactgctcctactagtaccatgtttgatatatgtttgagtcaaaaagaaagaaatggatcgagatccttaatttagatgtggctgtccttttcggtagctagcagcgtttttatggagagccataaagaccgtcatgttattaagtgagctgcgtcctggcgcgcggccttgaagaaggagtgcccgctgccgccgcggtgggtgtagaccagcgcaccaccattaatgtgaacataaatcagccagcatactgtactgtacttttattactgacatctactacacctccctttgtgaacacctggccaatggagacttctgactcgtgtggaaggaaatttagcattactgcaagaagattctctgtttttttttgtgtgacaagtgtgagtttctggtttgtttgcaggccgatctcgggagcgtcg

SEQ ID NO: 15006 - DNA, 640 bp, Brachypodium distachyon; identical to SEQ ID NO: 14968
  Intron number 4 from transcript Bradi3g00230.1 (locus Brad i3g00230) derived from phytozome v7.0 (chr-ID Bd3; pos 263 04 to 26943 reverse strand)

SEQ ID NO: 15007 - DNA, 865 bp, Brachypodium distachyon
  Intron number 1 from transcript Bradi3g40560.3 (locus Brad i3g40560) derived from phytozome v7.0 (chr-ID Bd3; pos 427 15032 to 42715896)
gctggcgcagctcagggagaagatctccgagttaggtcagtccggtgccctgtttctcggttcgaaaatccatcttcaaagatttctattttgtgagggtgaggggattggcgttgatactggattcgtgcgcgggaacctggactggctgggttaatctgtcgtcacgcttcaccggattgacggtggaacgagggggtttactaggagttagtgttaggggaattcgacgcgatgaggtaagatttggtgacaaagctgcccgggattctgtgtcagctacgagtttagtgtctacgtggtgagttggtcggtggttaatttgaggtgcccctggtttcacagggcttaacggatcaaattggcttgttgcggctgtttttttaccccggtggttactgtgctgattttgatccgtcgtatggtgcatccttgtgagcaattctgaccaaatttgcatactttctgcctggttcagcagaagcctgcagtttcccccctttatctgtgaatgttgttttactgtacaaaagttgcttttttgggatgattgtttgactttagtgattggatatgtacagtcgtgcttttgctggtgaggtgattttttttattcttaaaattctccatattttttccccatggaattcacttcaaaaatcagcaccttggttgaaacataggcaaaactacttacatgagtttggcatgccagattagctgatttcagcaaaaagctgggcttgttggcaattatacaatttgcacaagatgaatttgaacgtcatgttccttccagtaagatgagtctgattgtctgcatactacagagtcaggcatcgcagggagatcccaggaactgaag

SEQ ID NO: 15008 - DNA, 536 bp, Brachypodium distachyon
  Intron number 4 from transcript Bradi2g41250.1 (locus Brad i2g41250) derived from phytozome v7.0 (chr-ID Bd2; pos 415 11416 to 41511951)
gtcataattgcaggtaatggtggttacttgatatttacaattggcaacataaggaagtcattgttacaacttgcaaggcataattttgtatcacacattcaaaacatcttgcttagtttctgaatgttatctcgactcaacttgtggacactgagacagtggcaatgttcatactcacccaaggtgctaactttatgacttagttttttaatacatatggaaagctttctagaatcatatgtcctataataggtccctgcatcaccaggggcttctctggtcattgtcaccaatagacattttcttactaaaagttttagtaataagttgattctgagacaatgatatcagggaatattttgttaggcatgcacattaggactatcatcattagtttattcctttcgtcttccttagtatatttctgaacatacccaagaatatgccacggcccacagtgtacaaaacatttttttgtttctctttgatttcattcatacctgacgttttattgcagattgggtagctgccattgc

SEQ ID NO: 15009 - DNA, 1034 bp, Brachypodium distachyon
  Intron number 1 from transcript Bradi3g05260.1 (locus Brad i3g05260) derived from phytozome v7.0 (chr-ID Bd3; pos 365 9732 to 3660765 reverse strand)
ttcgagtactccagccctacttccaggtccattattactctacttcgatctctctctacatctttggcttattacttacacatgccgccttcttcgtgtggatctgcatgccgcgactggctacatgcacacatctttttatgaattgattaatttgttgaagtgttgaacggtttcttgttgatttctgtaatgcaaattaagaaatactcctctttcttccaaccgtgttttaggttttgcagagaatattaccccttgtagttactagtcccccccttgcctttagatcgactggttttcctataaattttttctctctcaggtaatcaatttgctcatcctgtactgtatgagatctatttgcttgtacttcatctcaactaagttgtccctagcctccttcattttaactttatgttgcaattttgttgaacaatgtactcaacaatcgataaaaaatgcacactcaagtgtgttcaagtatagcaagatccgcatgatcctagctaagtttccagagtagctagctagatggctaggtaattaaactttttcacataaaaaaagtaggtatattaattcagtcactcgtgaatgtgtaagaagaattaatgtctgtgtttatatacaaagctctattcacatagcagctcaaagtaatgtgtaatctgtttagtgaagatgcatgccagatgatgaagggaatatgctagatcttttatactatactatatgtcattgatcaagcctttcagggtttaatttttgcttgatctgggatgatatatagtacagtacttatctatatttgaacctttcaccaaatcattcaaaccaattattagtacttttaactcaaattcaaacccatcgtactgacgaacaacgtcgaccactttttacatgaattacagagcataattcataaccaagtagatctagaaatcgacacatggtacgtttaattaaccggaaaatacacatctgatgatgcagcttgagggaactcatccagcagtaccagaacacca

SEQ ID NO: 15010 - DNA, 768 bp, Brachypodium distachyon
  Intron number 3 from transcript Bradi3g26980.1 (locus Brad i3g26980) derived from phytozome v7.0 (chr-ID Bd3; pos 277 33437 to 27734204 reverse strand)
agaagggtctactaccgcaggcatgtgagtactaatcaagatctatagtgtttagcataattttgtgattacgatcaggtatccctatgtgttttttctgggtcatttataggatttgtaacaagcttggtaagacaacacatattctcattctgattacaatcaattccttcggcatgtgagtgaaaacttgtgttctcaattggagaaaaatcaaaaggaatttttattatccttcattatatctttttttttagaaaaaggcttcattatatctttctgttaattttgttataaattatggtgcggctcctttgtttaatttgtttgcaagttgtaattctccacaataggatttgcatgttttttcttcagaaacagtatttcttttggcactgcattatttaaggtttacgggtgtgtgtccactgtccagtactaactgttacgtgcttttcatgtatgaattttgcctgccacccagttcaaattaatggttttacagaagaaaccaattactccctccgtcccatattaagttactttctattacatgtttctagacgcctttaaggcatagatacatccatatttggacaaatttgactcacttaatataggacggaggcagtatatgtttctcagtcactacggatgtgcttagatgttacatatccatacactatgcgctccttattgtctttatcaagtacccatcagttttagcttcgaaattcatgtttattcttctcgtactgcagtgcctcc

SEQ ID NO: 15011 - DNA, 941 bp, Brachypodium distachyon
  Intron number 1 from transcript Bradi3g29860.1 (locus Brad i3g29860) derived from phytozome v7.0 (chr-ID Bd3; pos 319 21485 to 31922425 reverse strand)
cccacagatcgccaccaagcgcgcgtacaagctccgtatccttgttcttgctccagaattgtttattatgcgattgggaatctccgaattggggcgctttgaatcgaattgcttggataggcgccgttaggttttggttgggttgggctcgcgtacggtgaattcgattccaggaacccttcggctgttcctgcgtacatgatggtcttcttgttcttgcaagttcatggttgggttgagttggctccaaggaactaatttaacacgttctgagtctgagtaactcgattattgtgtaattttgttggtacttcgactgttcgtccagcagatctttcttctgggtgtggatatgcgagaaatgggattattattacaacattttgcacccagaacaattttgtttccttcttaaaatcaggttggatttaagttgatattgtgtatatggtctgcagtttatttctaagctcaaatattcgtgaaagaaattaaatacagtaccttgttaggaaatttgacttttgttttgtgtaatttactaccatttcgatagttttgctttcagacacttcagtaaacatgatcataccgaagaggcatgagctcaatacagaatcttcagatttcaatttttatgaagctcatctggggtagcacatggctaatacagttacagagctaacttagtgtccccccaccccccacccaaatggtgttgttacttgtttgctgtgataatgaaatgcagaacaattccaattgatgccatgagcccatgagtagctccgggtttcagttgactgtgcacctagttgaaatgtgtattctgaataacactccaaacaggtgaattctggaataaacgtgaaagttgaattcatgccaatctacaaaagtctatcatgtttccttgacaatgccagaggagtttgtcgctc

SEQ ID NO: 15012 - DNA, 927 bp, Brachypodium distachyon
  Intron number 2 from transcript Bradi3g37620.1 (locus Brad i3g37620) derived from phytozome v7.0 (chr-ID Bd3; pos 401 23861 to 40124787)
tgttcggcgctggcgtggctgatcttgttgaaggggtatgtgtttcgtgtactgatcttgatcatttattttagatggatcggaatagtttacgagtttttctttgtagtttattgatgactcttgctagatccacgctaattatttgagttgtttgcattatcattgttgaataatattcaaagtcaatgggtcatgtactcttattgctcaagttctcagtgatatgaataacttcactagtactaaataaacgaagtgcttgcttgggtcaagtctaccgtcatgactttctattcttgtccaggatgctttactattttaatatttttcattattgggaggtaaccttgaccatcttttttttttactcctagcaagtaattggttgtactacaaaatttcgtagttaccaagtcaaagttgcccagtgttttggttttgtttctcttgattttatctgttccaacgccacaacttaggacatgtttgttgaatttaatctcaaggataggtgggaaaaataaggcctgagcatgtagttaatcatctcgttcatgtcttatacatgtcatacgtagtttacattttttgggccaaacagaaacaacagcagaagtgtggtgggtggaactgctttttcctgcccagctgttgacagtaatctgattgtgactttgtcagtaatctgatgtgtgacttcgtcagtaaatatattattcttaatttataaatttcttatgctgtgtccattgtttttttttttgctttttgtttagcaacttatttttaccatattcgactacttttggttatatctagtccataaaaagtgtgttgttgcatccggttgcaactttatgagttacaagcttactcctcctttgttcaggtctctaaattaagccacttgagcaaacttgctcg

SEQ ID NO: 15013 - DNA, 362 bp, Brachypodium distachyon
  Intron number 1 from transcript Bradi2g53170.1 (locus Brad i2g53170) derived from phytozome v7.0 (chr-ID Bd2; pos 523 52633 to 52352994 reverse strand)
ttgaagcggtgaacattgcgctggacgtcactcaggtgcctggcctattcctatctttttcttcactttttttgtaagttggctgaggccattgagcattcatatttacttatttactcgaggggaagtgagtatgggattctgttctaccactcgattggaatttgaatatctggtgttatgactgaaaatatgagttctaaatatcaatcaaagtggacgctctactggacgctgatggtgtcgtttctttactttctactatgaactatctaatcatgcgtggaggatatttggttagggtcagtttgttctgatataacattatctatcttgttgatcagctaattggaaaaacccca

SEQ ID NO: 15014 - DNA, 713 bp, Brachypodium distachyon
  Intron number 2 from transcript Bradi3g06590.1 (locus Brad i3g06590) derived from phytozome v7.0 (chr-ID Bd3; pos 478 4305 to 4785017)
ggcgtctcctgcaacggctcgggcgtcaccgaaatgtgaagatccttgcatgattctagattgattggtttgctttttttagtcggtgcttcgtgttaggtctttgatgggaaatgattaattctttcttggctggtgattattcttttttattacgttctcagtttctggaagttgatcgaaatgtgtatatttaggaagaatctgctttgatgccgcgaacttgattgatttccggggtaggtgtaggagttccaaaatcattacccagtataaaagagacatccatgctgtgtggaaagcgactgccaggggtgtttttcctggttttcaccaatccattcaacccgtgaaaatgactagtaccattttagtgaatttacaagctcctatataaaagtattactgcatcttttgttccagcggtttggctgagccgcccaaatcgggtctgaacagcctagcaatcaggctgtttcatagcggttgttatttagctcacaacatacagtagcagtttgtttcattagcctctcaactccttactgggaaatagtggcaaaaattatgtttcaaaacatgcttttatccttaattgtgtttcctttatttacttgtgtgactatggggaatttacaagatgctgtcagcactcttactacgttattcttctcgtctcatattcaacagcaagcttgctgggacagggctga

SEQ ID NO: 15015 - DNA, 994 bp, Brachypodium distachyon
  Intron number 3 from transcript Bradi3g15120.2 (locus Brad i3g15120) derived from phytozome v7.0 (chr-ID Bd3; pos 134 44215 to 13445208)
cctccgtatcttattgatttatcttctttctgatttacatttaagttttgtgacagcactgattcttgagtaccttatttcttaggtgataaccatcacctatggatgaaatgtatgtcattctatattgatactactgcaagcctgcaagttcgtttgtcgaagtaatgccaatttgatacgttgaagaaatgcgagcaatctgatcttgccattggtgatgatacatggtgtaatacacatagtagaaattaagatacggagtacaagatattgaaactccaacttttaccaacacactacttctaagtttagatgaacagaaacagttcatgaatggttgttctgatgtatttctttccttccttaagtatataacagtaacacctatggctacttttattattatgaatcactattttaaatgttagcttaccccaaatttggtcaaatgattaatcatgcagtgctggctggctaatctgcgatatttaagcattgcttttgttttccggagatctagccatgcggcaatccggtgactgctctcatagagtattggatgtgttgagattcagatatgatggtttggaactttggatagtagagctggattatcagcatgtatggcaagtgggcaccatgtgctagaagcaagaaattcatgacggtataaggatatttcctatgtggaaatatgttctaagaagctgacattaacaaatgaagatgtacaccctggtcaattctgctcttcagttttagttttaataatcacatctacaattagatatgacaaaaaattcatacggagtactatgattcctctcctatattctgctttgatttttttacatacagttacatccatggctgacgaatatctatggtggtcggtctgattttagtgttaattttgtatgacaccacaatttaagtaatgaaccttgtataaacagagagcagggagacagagggagtgccttaccttctt

SEQ ID NO: 15016 - DNA, 880 bp, Brachypodium distachyon
  Intron number 3 from transcript Bradi2g40810.1 (locus Brad i2g40810) derived from phytozome v7.0 (chr-ID Bd2; pos 411 14655 to 41115534)
catccaggactgcgggtttgagcatccttccgaaggcaagttcttcttttcgtttgttatccatattgaaagcctcataattgaatcgacacgaataatagaattattgaattgtcattatttggttgttgaacagatattgactttgtttgatcgttgcaatcgtaattgaactacagtaggcaatcaaagtgtattactatgtattcagaactgagatcaatatactggttgagatcattacaagaatggctattacgttctagtcaaagctgcaggaaaaaaactgagaagaggcagatagtgtgcatgagcaaaccccttgtttcatatctcgtttcttgttacgcttgtcactgactcactgtcatcttggagctatataagattttgaactgatatggtgaatggtagtttgaccagccaaattggtactgttcaaccatgtagactagtgttacatcccatactgaatcaaagatgtgaaagacaaaaaatcactttaatatttcccctgcggtgcaatttctgtgttattctgcagagctcttaggaactcagttgttcaattgatttagcaggatagttaacctgcaaagaaccaaacatgctagtgtgaaggagatggaaaatcaattaactgggcatgttcaagaaattgttgccgatgacctaatctttttaatacaaaatggaattcctgttagcatgtcccaatgtgtttttaaaattcctgttttgctgatgtgcaggtataatttcttctggcattttctcttggaggagaagatctggtaaaactttccattaatggtccagaaggttaaattttctcactggggtgctgctccaattttctttgcttccacatcagtccaac

SEQ ID NO: 15017 - DNA, 632 bp, Brachypodium distachyon
  Intron number 1 from transcript Bradi3g19490.2 (locus Brad i3g19490) derived from phytozome v7.0 (chr-ID Bd3; pos 183 13345 to 18313976 reverse strand)
cctgacgccgcatcggagaaggaacaggtcgggatagctactgaaataagtagcaaattccttttctttttttatttgctgtgaaattaagcgcctgctcctgatatacatgtttttcccccaatggtttcttttgtttttttgctataaaattaagctccaactcctgatatacatgtccccccccaatggttctgtttgtagggtaatgagtatttcaagcagaaaaagtttgctgaagcgatcgagtgctactcgagaagtattgcgctgtcaccgacagcggtagcttttgcaaatcgagccatgacgtatcttaaactaaggaggcaagtcaccactacactatgcttgtgtttcctagcttgggatgctcatcgatgtgatattgcttgttgctacaatcgattcacccagttcaccttatttggttctttaacatacattttttaattttgatagatagctatatgttaagcaaaagcttcagaccgctgatagtcttctctgctactatttgtgatatatctcgtatgtttcctgttgtggaatttgaaagcatgttttatgaccgctctctggtttagtcttatatttttatgtggtattcattagatttgaggaggcagaga

SEQ ID NO: 15018 - DNA, 937 bp, Brachypodium distachyon
  Intron number 5 from transcript Bradi2g48690.1 (locus Brad i2g48690) derived from phytozome v7.0 (chr-ID Bd2; pos 489 26015 to 48926951 reverse strand)
gaaaacaagcggagcgctacggtttgtgcgacaaggtgaacgaacattttactattccgtatcaaacagggccttaatcggtctgcggtaccgttcaatttacgcccctagttcttcatgttcaccatgctaatatgtgcagtagtgttgctaaatgaaccgataaactgatatccaactaaaacccttgaactcaaagcctgaattatcgttcatttctaggttgattttactagttcaacttcaatgctttattctagtgtttctgaattagatgcccacaaacaagcaaacagctggttcaaagtaagtactaggggcaaaccatgtaccgtttctccaatagtagcccagaaactgtaacaagatctgtgttagttttcttttcctgccgggactgtttcgaagaataggaactggtatagatggctctggatatacacagatcgcaaccaaaataggcgtttctttctccgatctagaaaaaataggatccggataaaagtagacgaggaaataggagcctctccattgagaggaggcgtgcttggcctactcatggtagtgcgcagtaaatgggcacgaggagtgctccattgcaaggcacgaagtgacacaaagcctagcaacctacaacacgtagacccgttcattgcaacttctttaccttgggggtggaataacttttcacttcctgcaagcaacggcgtgtggctatacgcagggcagactgctggagcctagcttaagctagtggacagctagtcttttttggcgtatgtaagcaagatgaaccatttcagtatttcacttgcttcctcagcttcaccttttgctcgttctttctttcaagtaatcttttactaagagcctctttcgcacaactgatcagtgtgtgatatagttatgtttctgtaattttgggaacagcttgctc

SEQ ID NO: 15019 - DNA, 853 bp, Brachypodium distachyon
  Intron number 2 from transcript Bradi2g40550.1 (locus Brad i2g40550) derived from phytozome v7.0 (chr-ID Bd2; pos 407 77904 to 40778756 reverse strand)
ctcgacaagttccactaccagctccagctcctgtcggtaatctctctttcactaactcgcgagtcgccacacaggcttcgttacgtcacggattccccatacttgcgatgatttcgagggaagcacaatgctcagtgcctcagtagttatgtgcctttactaacttaccagtgtcgtctgatttagagtaatgtggaggacgggctagtgtgctggtggtgctctttagctttaggcgctttgggcataccaataaaccaaaatcgagcgcttattaggagccgactcaagtggaatagtgtggcagcatgtagttctcgggaaggatcagaactaattttgtactccctccgttgcaaagtgtagggcttctttgactgtccgaattcatgctttcttcaaacaatcaagccaataatatgctggtgatgttatctgaacttgataccattggatttgtaatcaaactcacttaattgtgctttgggcataacaataaacacactttatgggaaaaatttaaaatcagaaagtcaaaaaacgctctagcaacgtcgggagtagaaagttgtgctctgtattcagtatagcaaatgcacctcattttcttgttatctcctgtcattttagtaaggacatgcaacattatatactgtaataaaaggggtgtttttttgtgtggttactgctgcattgaacttttggccgaaatgattctgataccctgaacctgaagaagttgcaacgcctcttcaagaattactattggcagctttctaatttcttgtattaatttgaggatttcaatgcatatgcagtgagctcgatcatccagggttggcaaagctaattg

SEQ ID NO: 15020 - DNA, 687 bp, Brachypodium distachyon
  Intron number 1 from transcript Bradi3g17700.1 (locus Brad i3g17700) derived from phytozome v7.0 (chr-ID Bd3; pos 160 65980 to 16066666 reverse strand)
caggccgtcgtcgccggaaccgccgcctcaggtcccctcccctttctgctgcttgtttccttagttttgagttttatagttcttgaattgttctctaaaaccgtgtttaggcgttcgttcacaaatctggcacccaatttacatatggattgacttattcttaaactacttcttcgaaatatctcgcatcggatattagtttaaatggtccattccggcttgcaatttgtgagattagaaactggagcagaatatgtggtcgtgtctcatgtgcgtattgaactggagcagaaattatggcatagcgttaagtagttctgaagttatttttcgagtaacaactactgggtatgtcttttaacacgatgaaatggagggcagaccaatgtatctggataacttctgaacagacgttgatctagaaaaaacttctgaacagacaagagctagagggtagaaactgaaaatgcaggtactctaagagtaagaaccaataggcaatttcaagattcaaaggggcaggggctgtgcttcagcatcttcatgccacgccttaccaatcacttatatggtgcaatttttggtcgatatgtagaggaagcaactaggatttatttgatggatagatgctaaatctagatgcattgtgtccatgggttgcattctgcaggtgtacttgtgtcagca

SEQ ID NO: 15021 - DNA, 880 bp, Brachypodium distachyon
  Intron number 1 from transcript Bradi2g51510.2 (locus Brad i2g51510) derived from phytozome v7.0 (chr-ID Bd2; pos 510 96582 to 51097461)
cgtgcgcgctcgctaattctccgatcgaacgcaaggttctgattatatcctttctttgcctttttcctgtcctggataactcgtgatctgagcttaattagcttgttgggacagttccgttgtctatgcttcttttatgagattcttgctcgattatgtgatcatcctagtaatctcgtggggtgcttgattttgtggggatggtagaatttcaccccagatttcagggaaagaggggactcttgttactccataatggttatcccgatatgctgaatagaatagtgctagcttgctttgggttttcttgcccgattttgttgcgctgttggcagggtttgtttggtgagctttggacaaatttcaacttacacctgggatcactcatcctgcataaccgtgctcatgcttattggattcctccccctttttttgtcattttcgtttggtttctgttcatgtggatgcccttttcagactaattatttcaacattctcatggtcctgggtatctgccagttgctagttagcaattatggttggtgcaggacactttcttttctgttacttatagtgcttttccaacctggtgttcgggcttcctgtcttttctccagctaagcttgggtttagttcgccaaacctgtatatatctctgcaataacactgccatcattatttctcgttcatcttctcaatgatagcttaaaggcgtactgatctggtgtctctaggctatggctccaatgaaattatgttaattctatgacttggcagattttttttattaaatataacagtgaactcacactttgttgatttaactttgcttcgactccttgtagcaatcctacttcaaagtcaaccacctttgaccaat

SEQ ID NO: 15022 - DNA, 349 bp, Brachypodium distachyon
  Intron number 4 from transcript Bradi2g51510.2 (locus Brad i2g51510) derived from phytozome v7.0 (chr-ID Bd2; pos 510 98726 to 51099074)
ctttttcaggggacaaaaacataaaaggtaagatatcttgattataattcataaccaaatgagaatggcatcaggtttctgttcttctaaaacacatgaaacattgttagataatctggaagaagcttgcggttcagaaatcactgttatatcaagtggtgtgtttcaccagagaagcgcattaactaatgatctagatacaagtgaaccagtagaccaggactcccaacatagtgcttcagaagatagatatctaaaaggtttcttagttttgactattttactgtagcattcttgtaccatattttgctggacctcagtatttttgttatgttttctctttcagata

SEQ ID NO: 15023 - DNA, 627 bp, Brachypodium distachyon
  Intron number 2 from transcript Bradi2g62730.1 (locus Brad i2g62730) derived from phytozome v7.0 (chr-ID Bd2; pos 592 37200 to 59237826)
caggtactccgtccgtcagacttttcttcttgctcactcttttttcagtttacaaggcctatctcaaaaatctcaaattttaagtatatcactcttttttcagtttataagcccatttgtcctggaaacaaacaaagattaatgtaactttgattcccaaaagcaaccaatatataaagagattggtgtgcatgcatgcttcagtaataattaatctagcatctaactaggcattccttcgttagtgtgaattaggaattgggccttataatcttaatttcttttcgggtaccatactgcccatactttagtacaaaagatggcgtctagaatctactacatcttccaaatgttcctcgctggtatggtagcctagtttattatggttcacagcgaactggcatttttcccacttctatttgaaattgaaataagataggcatcgttccttccatatcttatcgtatcataattttgtttctcctctctcggtgtgggaaaatatacctcctaatgccattccggcattgtctatttcaatttttctttattccttcctcacatgtctaatgtgttttttcctaaagtctagatacaaggaagctgagagtgattataacaaatatc

SEQ ID NO: 15024 - DNA, 295 bp, Brachypodium distachyon
  Intron number 3 from transcript Bradi3g01600.1 (locus Brad i3g01600) derived from phytozome v7.0 (chr-ID Bd3; pos 995 734 to 996028 reverse strand)
gggctggcagaggctttacccttgaggagctcaaggtgattatttgattattattttccctccatctttgaatagcctcttgtttatgctacatcattttgatcccctaattggtataccgttggacatggacaaagttcaaattttagaaaaataaaattcactttatgaattccatggtttcttgtatcagttttgttttgctggcattacataacattctgtatccatcttctgacattgataccatgtaactgcaggcagcgggcatcccaaagaagctcgctcctaccat

SEQ ID NO: 15025 - DNA, 595 bp, Brachypodium distachyon
  Intron number 1 from transcript Bradi2g61990.2 (locus Brad i2g61990) derived from phytozome v7.0 (chr-ID Bd2; pos 588 36776 to 58837370)
cccctcatcctccccatcctccaggtaggttccttcaactgttgtctggcttcttcttttttccaagaagagattaagttgccagaaggtttatgaactgaattcctccatctctttactgatttattggggtcttgttcatgcttgctctcaagaaaaacttgttcttggccagttttactgtcctgtggcgtgttcttgcatttgcctccctgtttatgaggagtgcagctatagctgttcatggatctctgttaaccttttgatttatgttacttttgttttgtggtgtgcttacaagctttttagaaccattgcttatggtcatgtcttgatcgactgtatcaaggaaaagtaaggtcttgccttttagttttgttggcctatggtagaacgactaaagctgtatgctttagtcgttctagctcataaagggtgctgttgcattgcaactttgcagggttgaaaggtgactgggacacctctctattcatcaatacaataagagaccgtgtaaattaaacacacaaggattaaattagattatggattcgcttacaacacagctgttttttttgttgatgttactcagaag

SEQ ID NO: 15026 - DNA, 586 bp, Brachypodium distachyon
  Intron number 3 from transcript Bradi3g33870.1 (locus Brad i3g33870) derived from phytozome v7.0 (chr-ID Bd3; pos 363 12469 to 36313054 reverse strand)
agcagggcaagcataggctccaccagcctacttgggtaaggacaacaagtacactataaatagtactccctccgctccataattcttgtctcaaatttacccaaaaattgatatatctatttctaaaaagtatctagatacatgtaatatttcgacaagaattatgaaacgaagggagtacaaatgttatgaaaacattttgacttgtagctatataccgacatggaaagagagaaaataccagaaacgataactgaatcttcgaaaagaattaactaagaattgacctatgcagatgcatgctctaggtacaattactttgtgtatattattgattagtggtcagagttttagaacaaatttgcacattccaaaatgacatgaataaataaacaaagcttttgttctcgtgaaaacaaaacaaatctaatcaagtacagtacagtgattggttgtcggatttgtcaagagtgtgttttcatttgcatcttcgaagaatgttcagaccaacttctaattctaactactacttttttttttgtgccaaacagtgcctaggagcatcactggaagaccgtcaggaagc

SEQ ID NO: 15027 - DNA, 622 bp, Brachypodium distachyon
  Intron number 5 from transcript Bradi3g34840.1 (locus Brad i3g34840) derived from phytozome v7.0 (chr-ID Bd3; pos 372 13422 to 37214043)
attccacagagggcttttttgggtttgtagcttcttatcttcttcactgtactctgtgtgttctgccattgccatttaaggactcattgattttaaactgttgttttttcacatactctgtatttccaaagcaagataattagtgtaggatcgttaatagattctttatagcggggttcttatggcctttgaatatttgcatcttagaattatgggtgcctgaaggactaaattattaaaggtttagcaatgataagctctattttcctaccacaagaacagacaatgcctcatggaccaagttactaaaggtttagcaattacaatttcttttttcttcctaccacaagaatagcaactaaaaaaaaaacagtttctctcaataagcaaagatggttaggttctgaagctgcctatccatgaattggattgctaccgctggcacctttggcagtttagctcaagtaatttcgtgctctgctactcatgtagggcatataccagagaaactgttaactgctctatgatatataatgtttatttctgttgttctccttcactttgataagcttctctcttgcctgcagtccacaacacggcactagagtatttgatatcatcg

SEQ ID NO: 15028 - DNA, 403 bp, Brachypodium distachyon
  Intron number 4 from transcript Bradi2g57330.1 (locus Brad i2g57330) derived from phytozome v7.0 (chr-ID Bd2; pos 554 89152 to 55489554 reverse strand)
ggttggtcgtcagattggtgttggaaaggaatcaggtaattgatggttgactcatgttttatctttattctcggtttacggctcttgtgatgtattttaaaagttctgggagaaggaaattgttaaaaaatgtataagactgtagcaatgcacatgcatttacctagtaacatatattccgcaacgcaataacatatgcattactttgtaatttgattaaagaaaagaaatagctacccaaacacccaagcatctaagaatggttcaacaaactggattgtcatagttcacagcaatgccatatggagccttgggttgtagcaagcaattgtcaagtgctttatgtttaatgtttccgttatttgtagatatatttgaggttgccacagaggacggagaagtg

SEQ ID NO: 15029 - DNA, 754 bp, Brachypodium distachyon
  Intron number 2 from transcript Bradi3g16670.1 (locus Brad i3g16670) derived from phytozome v7.0 (chr-ID Bd3; pos 148 59248 to 14860001)
tcaccatcgccatcttcaccgccatccaggcatccgtgagtacatacaactgctccctcttttactctactctcgtgttgccagctcctggccggccggccgtgaaagctgcagactcgtgcttaagattttaaaagattcgttttaatttattgttgttgttgattgattctgtctcttgagctagagcataggaaggtggttactagtactactactgctactactagttgttagttattttagctaaataagggaaatatctgggcgtttttaaatttactttttacggtgtacataattagttaacgaagatgctcttgtgaaaaagaacgggcaacagaagaacagtgtttacttactatgtttactcatcatgggcacgttcatcctgattattcacgagcctaatacctccaagaaaacggatggatcgatccatccatgccggccgtatgggtccatacagcatgacacacagttgcaatttgcaaagcatttaaatctctctacccaaaagtaaatttgttcgtctgttttttgagagttattaccaattcagataagatcgatcaggcccagatatttttgctcattttattaagctttgattaatccgttcatccctcaaaaacagttttgaatcggtcgaagtggtggcagtagcaaataaggaaactgtaaaattttctaaacaaatatgtccatctcccatgcagggcgtgacgatcctgacgatctcgacggcggcgcc

SEQ ID NO: 15030 - DNA, 1069 bp, Brachypodium distachyon
  Intron number 1 from transcript Bradi3g23270.1 (locus Brad i3g23270) derived from phytozome v7.0 (chr-ID Bd3; pos 227 39060 to 22740128 reverse strand)
ctctccccaggcgacacgagcgttagcttgcagaggtgaatggtctttggtatcaccttatcacgtacagtgatgcataagatcatcccgaacactgtcatcccctatatgcattggcaaccaagaaactttttaggatacccgaggggtaaaaatactagctcgtacgtgatctcttcggacgttgcgatatatactctcaggtcattagagatctcacaacccgaatttaaccaggttcaggtaccatgggattgatctctaaactgcatttagggctctctccaaatttcggggtcccaaaaagtacaagtgtttttagcaatgacccctattccatagacctattctacttactacatgcggggcctacttatcgatgagttgccttttcttttccttttcctttctttttcttcttcactggagcaaacgggggaggtgcgggacaaggtggcacaactagcccgaagggcgcgtgggtgagccgtaggggcacacggctgcactcggtgagcaggaggggcgtgcggcagcggtgtcgagggagacgagctagctacacagccaggggcagcgcgccctagtcgcagaacgtcggaagaaagtctggagggctcacggcgaggctccggactacgccatgaattgagttagtctaatattccctccgtttttaaatttaagaagttttaactttgctctaagtcaaaaatttaaactttaacaaaaaatgtagaaaaattaatcaacatctatgactctaaattagtttttattaaatccacatgatatgtactttcatactcatttaatgtgagattgttttatgaaattggtcaaaatttaaaagtttgatacaaagttacgacttcctggaaacagagctagcagtattggtcaggcctcgagacccatgggccttacgttggtctaggccttcaactcataggctacttgtttctcttcgtcccctcaaagaaaaaacttgtttctcttcgtcccctcaaagaaaaaacttatttctcttctaggttagatattgtgcagagtgcagacccgctaagca

SEQ ID NO: 15031 - DNA, 767 bp, Brachypodium distachyon
  Intron number 1 from transcript Bradi3g25910.2 (locus Brad i3g25910) derived from phytozome v7.0 (chr-ID Bd3; pos 265 23163 to 26523929)
tctctgcctgtgcctgcatcataggtcgagcacaggttcgtttctcgcaattcattcaggggtgattccgctttgttgttccttcggtgttaggtacacctatgtatttactatgtaggaacaattgtggtgtgacctgtagcatgtatgagaaaaaaaatccgtgaatcttcccttatattcaagtttcagggggaaaaagctggacttttttttatctctattcttcagtttttattgcaatgaaaaagcagctctagagtctagtactctagtccccttctgatttattttttctgctgcttttgtacgagttcttacaaatactgcagtttcacacatgttgtactctagtccacttgttcagaaataaggaggacgaaaatcttgtgcaggttatttttgcctctgtagtagcggaatgttcaaatcagactttttctcctcacgctcctgtgatgagaaaacgtctgattagtctggagctgtgtttagttttgttgtttcttggtgcctaaggatgttctgtctttgataagctgtgaactgcgccgtaaaacgctggagcatgtgtttcattcatagtaatggaacagagcggggcccttttgatctaaaaaaagttcaagtttatttaaaaattaattaatagttcaaattgctgctggaaaaactgtcaatgcttgatttaatgatttactcttttttttaccatcatctgttactgatggcaacatggaactggaacctgtctgacagggctgtgc

SEQ ID NO: 15032 - DNA, 884 bp, Brachypodium distachyon
  Intron number 3 from transcript Bradi2g41730.1 (locus Brad i2g41730) derived from phytozome v7.0 (chr-ID Bd2; pos 421 61805 to 42162688)
gctgctccatcatcgacgacggactcatccacaaggtaatcgcttcagttcttacatctgacgtgttcttgggattggttgattctcgctgttattcaaataaacgggctactgcttatttttatgttttgaatgttagtccacccatgttgtttaatcatgtatacctcagtgtcttccatccgtcctcgctgttttaggttttcaatctgaaagaaattagcgtgcttgggctcatcaacagtcacgaatttgatagatgcgatgtccaactgaactaaccggatggactgcatgtggtagatactttcctcaccggatggactcaagggacactgccaagcgagcaatagtataaaatttggcccaacagcctacagaattatttgcctgtatttttccatgtcagcttgtcgtgtggcctccatgtgcagtgcgacctagcatagtcactgcatctctgtatgtttcattgtcacgtactcacactcctctttgttggccctctttatcaaaaaaataaacagtcctctttgtgctatccgaagtgaccggacatgaatttgattgatgttattttattaagctaatgctgtagtagttttacattttactttgacatctgtgcaagtcaatgtctgcataagaaaattaattttataatctcagcaatatctgttctgcatgcacaaaaaatgtgtgggaatgaaaaatttagtcgatttaaaaacacagaaggaaccggtagagccgtagaggtttggatgcccttttctgtatgtacactatgattggagtgtcagagatatttttttttcttatctgttttgtctgttgagttttatttaggaagaacttcagctagcattattcaagactcctag

SEQ ID NO: 15033 - DNA, 972 bp, Brachypodium distachyon
  Intron number 2 from transcript Bradi2g53480.1 (locus Brad i2g53480) derived from phytozome v7.0 (chr-ID Bd2; pos 526 22093 to 52623064)
atcaggggcaatatattcccaaggtgcgtgctgcatgttatccagttacctgcatagattgtactattaccgattataatttaggtcgtactgttagggaattaataggtattgtaccttcccaagatactctgatgttatttctgtacagtatcagaaatatatttcagaaaactgacgtgacaagattcacactgctgctctctgaaacttgtcgttgttttggatacgaatgctcgaacattttaactttgaatatctatatttgttctgaaaattttagatatatgttccgactttagctaggttagtatgtagtaaaaactaacaagtggtggtcaaaactgtgtattactccgtacaagagaacgtctcaccgacctctgcatccagacacacacacacacacacacacacacacatcccaattattacacatcatcctttctatcatatagacccacacaagtcaaagattacagaccctattgctaagccgccaaccagaacatgttggatataaactccctggtaacagaattgatgctctaggctgcagtattgaccaaggccgcaactagttgatggacagaagatagccctgcaagagattgaaaaaattgatcttttgtttcaaaaaaacaacattgcgataaatccaacaagttttagaaaaaaaacccgaagtgaatacatgctcacaaagtgtacacctgaaaaaacaacaggatcaaacatatgcgtgcacattctttaagtctggggtctttgcaaaagcttcaaaaatgacacgcaactctaaccaaacatagagataagacgttaatatcgagccagcaccactgacacgcaacatagcggatgcttccgtattggttaagtgcgtgcatgtgattgatcgatcgggtttgaaggctttcccatgttagttaagtacagcacgtttttggtttgatcgtttcagggttttaa

SEQ ID NO: 15034 - DNA, 739 bp, Brachypodium distachyon
  Intron number 2 from transcript Bradi2g59330.1 (locus Brad i2g59330) derived from phytozome v7.0 (chr-ID Bd2; pos 570 58033 to 57058771 reverse strand)
gttgcagcggttgtattcacagcatacgtgagtaccattcctacccctttcagataacctcttcattgagtaccatatttgtgttgcactcattacattctatttttgggacagtaggtggaaccttaattagctgcagcctgcaatttttcaacttcaaattaatctattctggccttcttcttttgttattatatttccattcaatagaatgttagaaacattgagtgggagtagagactgtcatgttagccttgattatgaatggttcagtaattagccaatgtgttccagataatagagatatgaactaatatttgctatactgaactgtgataccttccttcattatgcatgatatgtttattggccaaatgatcttgattctataactgcaatcaagtttgatatcaaggaagaggacgatccaacttggtatgtttattgaccaaatgaccttgatttaactgcaatcaagtttgatatcaaggaagaggaccatccaacttgctgcacggttgaacctgctagctactagaactattatattttggtgcttctatccctgatatcttgtgaactggatacatacacaatgttgttgtttgtgattgtgtgctgatcaatcgaaaatgtatatatttcaatccatagtatctcctctcttactgctttaggcatttctgtgattctgtcacttgcaggatttgagtcttctgcttctcacttctgggaggga

SEQ ID NO: 15035 - DNA, 965 bp, Brachypodium distachyon
  Intron number 1 from transcript Bradi3g34170.1 (locus Brad i3g34170) derived from phytozome v7.0 (chr-ID Bd3; pos 365 89235 to 36590199 reverse strand)
cccagccccacgtatgtcatctggtgcctgctgctcagagcttccgctgtcgctgccgcatctctcactcgccctcgcggaggtctgccgtctcccgtctaatgagtccaaccgacgggattttgggagcggcggccggcagggagagctcaccgaaacccctcaaaactgaggccgcacacactcgagaaaactccatgggacagctcaagggacaggtgtcaacgcgcatgcgccccctccgcacaacgtacaccgacagtgggccaaatcaaatcgggcgacagcggaagggctggaaaaaaaaaggcatcgagggagatttgcgtcgacgtggccgatcgatcctatgggtggtttcttcgccctttcataggggtaaagatatctatggaagatatagaagaaatatagacgatgaagacgtagctagctagggaagagattctcattccccttctgttcctatcggtcctactattcccatggagcatttgtccgaattccgattcccaatcaacacccttctaattcctgccttgccggccgatttggtttatcaccatccatccatatataaaatttagcagctacccacattgaacaaccccagctatatactcattgaactatacttgatttaattcgtttgtcttcatttattatactccgtataagctaagctagcttgattaactatcgacagacagcccaaccaatggccaggacagattcccagcctgcctgcccaccgtactcctgagttatatcttctatgttatttcctccgatccctaattttgtactaaatccaagacacttattatggatcggaaagagtactatgtaaggatgtaaatcctagagccatgtagtcacgttttagtgatcaagtctcctgtccaccattaattcatcaaatttctgataattaactcgcagtagctggtctactaccggaaaag

SEQ ID NO: 15036 - DNA, 1031 bp, Brachypodium distachyon
  Intron number 2 from transcript Bradi2g56390.1 (locus Brad i2g56390) derived from phytozome v7.0 (chr-ID Bd2; pos 547 30045 to 54731075)
gcaccatagtctgcacctccctcctctacatcctggtacgtagcatcaccgtctcgctgccagtagcatatatagtctggatcacccaactgctacattgaatattgaacatctgaaagtgttgagcatctgccactctcgtttgtttctgtctccaaaaggcaaaaggattgcccgaatatattaatagagcagaatcagaatgtgcaaaccgccgaagtagcaggattacattaggtcttaacatcaggaactgcagagtattttaagctggaagattaaaatatataatgaccatcgatcttgataaatggaagtctgactttttcttcttcggtgcttagatgcaaagctaattttgaacatggacatccatgtccttgaattctcattctgggaactactatttgatactagtagaacaattcgtgcataatcttctatatgaagcacagaaacacattcttgtgacatgttactaactactaagagtgaggatcctgtggagtcaacccttgatgtgggtcgtggagttcaattagcccgtctctgtcagtgttttggatctaagagtcaggtttacttacccctgttataacatgaaaaactccacttaccccctagtgttaacctactgtcctcctggaataaactctaggtataaacaaatttaccagttcctgaactccacccaactactacttgattctggagtggattctaaaatccactatatgcaattatggccctggcctcaaaggatctggataatggcactacattactcttcttgaatgaatcaaattatgcaaaacatatccaaagatacaatgtgtgtttacatctgaagcaaagaggatttccagctatttcagctaatttttttggtgcaatacaatacatactcaggcattgtggtggcacagcctggaaaatttcatgttttagattagtttgaaatgaatttaattgacacaatatgcatcgctgctctaagcatttctttcacatacaccatccagggccttggc

SEQ ID NO: 15037 - DNA, 949 bp, Brachypodium distachyon
  Intron number 1 from transcript Bradi2g57510.2 (locus Brad i2g57510) derived from phytozome v7.0 (chr-ID Bd2; pos 556 53057 to 55654005)
ctgcaccgcccttgccgagttcgtcaaggaccaaggtacgcacagattcggcctgtatccactccgctcgtcatgtgatggtggtatgattagggatctgagccgagcaaggcctaggagtatagtagtaattcgtatgtgatttctctctcccgattcgattgatttatagtgccaaatctgttagggttcgaccgtaatgttagctatatcgcggtttgcagccgggaaactggctcttggtaacctaaggaagcccaattatagtagaaatgcatttgtagaccacataccagtggcctctttataataaaaatatcaaattactataggaagacatgattagcgtacctgaatttatttgtttcagatttcccggtgatgagttactcaagcaacctgggaaagaactatgccccttttgtaatagaagaaccatctccaaaactttgattttgataattaggggtctgtggctggggggagactttatgaattgaggagctcattcaacacatcccatactgatttttctaggaaatttgaggtttgtatgcagttgtagaacagaccaacagggtggtgtttgaagtgtgggttaataaatctcattcctctctacatctcacaaaaggtcagggtggtgtttattatggaaattccctatttttctgtatgttgtgtcggttcgttcatttaggagcactctcaagctagctggatttataagttgattagttttgccaatttatcttgtaattcggagaattcaactttatcaagttttctcattgcttgtcttgaatgaaaacttttggtcaattaggactcagtagctgtctcttgaaaaccccgactacgatgggttccgttttcttcagtgacatttgctggttggtccagtcaccgtcttaacaatgtattgattttgtggttgcagagctagttg

SEQ ID NO: 15038 - DNA, 916 bp, Brachypodium distachyon
  Intron number 3 from transcript Bradi3g04500.2 (locus Brad i3g04500) derived from phytozome v7.0 (chr-ID Bd3; pos 307 5467 to 3076382)
atcgtgaagcagctcaacaatctgcagaaacagaggtatctctgatgcttatgagattattgccaaaggatatgtgagcaacttctggtttggatcattttactgccatatgcttcatttgattaaaatgcagacacatgctctacatttgtttgcgtgttcatggtaggaactaggaaaagaaaaatggaaacagtgtataacctccaccttaattgtcatgactttgatttccaccctaaaatatccatgtagtatgatggcttagatatctccattttttttgtgccaaagacagctccctttaaatgtgtgtctttgtgtttttccttgcttgcccgtgatgatgcaatgtttcaaagttcttgcttatagttaacaacaatgacttgactccctgaatcattttctgcattatgcatgccatactccagttctgtcatgtgcttgtctcctctggatgcacattggctgcacaatgcatggcacactccagaatctaaaatgatgcaaatttagtaatgtagctaatcaagcaagagtagagtagttttgccttagctttagctttctttgcctcgcttttggtttgcttttgccttttagtttgctgttagcttttaggtttggctcagataaaaaaaagcttttaggtttggctagtttagttagccttttgtttcttcttcttttcgtttttgctggttttgtttgggtttgctttgtaaacctgagcagggagtagaatgtattaccaaaatttcatgatagatgagtcttttttatgttttctatatcagtggaatgtgtacctcttacaggagttgggaataattctgttcgcatacaattaatattacgtaaattcgtttattatgtaattgataagtaatctgggatggtctatttacagtga

SEQ ID NO: 15039 - DNA, 822 bp, Brachypodium distachyon
  Intron number 3 from transcript Bradi3g36840.2 (locus Brad i3g36840) derived from phytozome v7.0 (chr-ID Bd3; pos 392 04484 to 39205305 reverse strand)
actgagcaacaacggcaggtttgtgctttaggatttcctggtgccttcttgttttatgacacatgatggaatgtctggaccatatcatcaaataaatgcagaaacaactgtttacatctgctaatgataaatttcagtatccccaacttgctttcatcctgtgataattccaagacattctttctcagatttcatttatgtcaatataggctgtggcgccatagggattatgttcttgcaactggactgctgttaaaagggacacctcatgtggttcctggaagtagttatgcggccataactgtctgatcgttccagcactctctaatttccaggaaaatctaccgatatatgccataatagtaaatttatgcatgcttggttggctgattggtggaaatcaattgagaattctacctgtgagttaatctctaataattcataatggcatttatgtcaaaaacttagtacttctggatatcattttccttgtaactatggttctgtccagccttttccgcaatttacttattattaacaaccatcaaggctttttttgtgtttcatacatgtccatcatgcatgaggccatgatttactgtcttaaggtgaagttattcggcctgacatagctatcaacaatatttccattccatggcagtacaatagccagttgagctttcagaatttacattttgaatatggtttaggtttatttatgtaattttggtttcaatattaatgtttttcttatggttttttttcttcttctgtgctggcatgatggcatttcgtgtatgccttatcagaaagttctgactc

SEQ ID NO: 15040 - DNA, 793 bp, Brachypodium distachyon
  Intron number 2 from transcript Bradi2g45800.1 (locus Brad i2g45800) derived from phytozome v7.0 (chr-ID Bd2; pos 462 28218 to 46229010 reverse strand)
caacgccggtcagtccaagacgtataagaagagcttgtgccatgagccttcctactaatatcttctcgagctcaatattgtttacgttgtgtttatttttggcaatcggtgttatatttctaatttatctgcctagctactatcagtaattattattgtcacaagttttttattatctcaattacgcatgaatggaaactaagtttactttcttaccgatgttcttgtacaactgaaacttcctgatgttacatctaagacagaaaatatgtatgcaggtattgatggggtgttcagccataataactgtcattggtacatatgtcttggttttctggaattatcgtcattgctgattactgtgtctctggttacaaagaagttgctctttcaacatttattcagctcttttgcagtcagtacattatttcaaccgtgacagatttggaatttaaaactaataacatagaagatttttgtggtaggctgtaggcaaaaaattcgccgttaagaaacttgcatgtttgctaagagtgcagcttacctcttttgtagagtgtgcttaaggagaattaataacccaccacctttatttagaagagtaaaaaaaaaatcaagtatctcttccggttatccttgagagaggtgtggcataacatgctgtaatccctaacacaatgttcatgtattgtcttcagttagaatccaggcaagcaaaatgtctttgtttattaaattgtagcaatcaaatttagttcatggatataatcatttgaccccttggcaggaaaac

SEQ ID NO: 15041 - DNA, 951 bp, Brachypodium distachyon
  Intron number 1 from transcript Bradi2g60670.2 (locus Brad i2g60670) derived from phytozome v7.0 (chr-ID Bd2; pos 579 65845 to 57966795)
gcctccggaccgccctcgccccgcatccctcgcaggttcatctctttctgcttccctctctgcggctctgcgcccccctctcgaggtctgcatccatgtcgcagatcggttcctcctgcaatctagtagtacggagtactattctactccagttacggtcatgtagctcaaggaaggaggccggtcgtttttaagcttagctgcatgctagtggttggtgctaggctgcctttcaggtcatttgggtctgcgaatcggatgcgcctgcttcggtaaagctcggtgcgtatatgacaggagcaaaatcgtagtgttggattagctgctatgctggatttttggtgcttttggtaacctgacactactgagcctagtttagaccaaatctcttgtaaacactgacccaagcaaaagccttgtgtccacagatgcaaacaagttcgtgtgacgtaggcttaattttttgtggttatggtcttttttttcctgactctactgggtctaatttagaccaaagattttgtaaacattgaccgaagcaaaagccttgcttccgcagatgcaaacaagtgattgcacttggttgttttctaattagtggtgttttggacgaagtagccttttctcaataatggaagctttattgccccctaatgattctcagaagagaaaaaaatgtgggagaacccactaggacctgaggttattggtctaatagagagttgagatgactctctctatgaccctattatagaccggcgaagaagcatgctgctattgttatgcgactgtcgatctagaatatgactggcccttcatgaatcctgtaatatcagccagccccagtcacgctcctttgttttttcacctgctatcaaatatttctttctcgttgcaatagatgattttgtcctggatcctaccaggaaaagttcaagtgcataaaagcca

SEQ ID NO: 15042 - DNA, 485 bp, Brachypodium distachyon
  Intron number 2 from transcript Bradi3g01570.1 (locus Brad i3g01570) derived from phytozome v7.0 (chr-ID Bd3; pos 972 341 to 972825 reverse strand)
gcctccgtcagatccgacgcccgcagtgagcatgcatcctgcaccccccatctcctgccgctgctttatcggccgcctgcgttaattgctcgatttgggacaaaatttgtctctgactgtactacttttcttcagtggagtattccagtcacctgcattcatggttatttattgtattcgcatcacattcttcttaattcctctctggttgttgggtgagtctgacatgaactaaaaaatgattaaaattttgagcttgcattcagcaaatttgtcctgtcctctggagtccattcattagtactgcaagggggaaatggtactcctgcttttcattactgaattaggggtctgagaggactgtcaaggtgcagaaaatggggcatgtgcctttaatgggtacttgctgagttaagttcaagagacaatggttgcatgaaagttgttgttttttcttattgatttcagagagtgaaaactgtggc

SEQ ID NO: 15043 - DNA, 932 bp, Brachypodium distachyon
  Intron number 1 from transcript Bradi2g48960.2 (locus Brad i2g48960) derived from phytozome v7.0 (chr-ID Bd2; pos 491 16162 to 49117093)
ccgcaagcgtctcgcgctcacctccaagaagcctggtaggttgcgctcacattatttttgttgtacttatttatgtgcttgcattgcaattggggtttagggtttaatgtccaagattggacctcgttcctagttgcgaggaggcacttccctagttaatatgctggctttctggagctggtagaagtgactatgctgcgatttgagtgcccaattgtgttcataggaggcaccttttacggacatgattgacttcgttttgggttttggtgcttatctctaaagcttcaccttatgtgtttccgtcctaaattagtttgttcaacagcatttatacatgtgaatgctgatggtcctttcccctaggtggttcgtttttacttatattggtcatgcgcactataatgtggtcatcggctatacttcttgctgtaatgttgggcttccagaagatatggtactatggtctttgtggtgctttttggtggccacaagtttacgttctataagagcctgtctgcccgtgcaaatggaatctgagaatgcctggctagaaagtatcctaataggctaggggaaattccatgaaactgaggctgtctagttctgcgtccttttttttgcccaactgttcagatcaatcaccccatgtcagaaactacaattttctgtttttttatcacaagaacttactgaaatcacatggatctatggtgtctagcatcaatacttctctggaaatatgttccgatttccgagactcgtaacaatagaacaaaacattttcatggctgcacattcttgtcatcttgtgtctttcatttttataatttacatatatactgcagcaaagcttaaataggatgaatcaaattctcatatctagatatcattaatctcagtgattgttttgttactgcaggcaagaccca

SEQ ID NO: 15044 - DNA, 342 bp, Brachypodium distachyon
  Intron number 1 from transcript Bradi3g44820.2 (locus Brad i3g44820) derived from phytozome v7.0 (chr-ID Bd3; pos 467 56033 to 46756374 reverse strand)
gcctccgaggtaccatctccttccctccctcctgattctctattctaatgcttttgaattgaccaaatcaagaagataaacatatatatgaaaaaagtagtaggagagatggatatgatttctgctcccatccttttgtttttgttattgctgaacttcagaattcagaaatgacaagaaggtacgggccatggagttacggtccctttgttgtgcataaatccccatatcagttgactcgaaataagcttagatgagatgatctttgtttggtgtgttgagtttaacgaaagcaaaatcattttatcttgctatgcgcagactgttgtcctcaaggttgcc

SEQ ID NO: 15045 - DNA, 608 bp, Brachypodium distachyon
  Intron number 1 from transcript Bradi2g57090.1 (locus Brad i2g57090) derived from phytozome v7.0 (chr-ID Bd2; pos 553 17982 to 55318589 reverse strand)
ctcggaatcggagctcagctcccccggccggcgaggtacgaatctacctcctctgcattgctcccctctttctctcttttctcccccctgtgtccgtctgcaggaggggatctagctaaagcttgttcgttcatgttcattcgagatttgctagttgatttagcgcgcttctcgtggttctggagcctgctagtagattgcgcccgtcggtacccagctcggaacaagctcaggccatagatccggtggcgatttgtcgaagggatggagtctgccagatttttggtcagtcgaggtgttttaatgcacgcgctttttgtagttttgtttccatgtttgttgatattatgagatgtccctggctctttccatggcttttcttcttggaaagagctgccttagcagggaaggagaaacggatagtatagtaataaaaggagcgtgtttgagttggtattgttctggcagatccgatttttaccttctgtttttagaaaatatttacttatttagatctagtgatcgataaaacttctagttctctgagttctgacggtttgtagtttgctctaggtgcgcgcctgtgtgaccaagctgcaacctttggg

SEQ ID NO: 15046 - DNA, 729 bp, Brachypodium distachyon
  Intron number 1 from transcript Bradi2g46900.1 (locus Brad i2g46900) derived from phytozome v7.0 (chr-ID Bd2; pos 473 02491 to 47303219 reverse strand)
ctcttcaaccgatcctctccattcggcaccaagttcgctttcctcccagatcctatcactgcctcgctttcgctataatttctcttctcggttagtgatcctaagatcggcggattccactgtgcctatttagagttctaggtttaggttctgctcaggaaggggtagttgggggatgacctgtatggcgatggggaaaaaggtagcgcccatctcggttgacaaaggaggtgcctttttctccgcctgcttgggtggcaaattgcgaatttgcgactgctcgatgtggtatattagagcttgatgggaaacttcatgtatgcaatgattttgatttttgaagatgtaagatgattcaaatcaggcttagtattgaaaaatcggattactacttctcttcttctttgtatatagatgacatctgatttcaagagtgacagtgttaacaaaactgaactagtacaagcattgctgtttgttattccaagtggatcgaaagcagccgacaatattatgaaacagtctacagttactgtattagagtaatggaagaaccatcaacaatcagctaccagtcaatgcttacccaaaccataagcatttcatgtttaatatagtccttacagttctcttcacagattcacttgcgttcatgtgtagacctggagagacagtcttgctttattatgctcataattaacagaagtttcctgctttgtgtagcaaaac

SEQ ID NO: 15047 - DNA, 904 bp, Brachypodium distachyon
  Intron number 2 from transcript Bradi2g56310.2 (locus Brad i2g56310) derived from phytozome v7.0 (chr-ID Bd2; pos 546 86754 to 54687657)
atttctgggaggccaccttcattcacctacaagaggttagactcttcgtatggacatgagctagtacgagtgcattacgatcttgtacattgtactatttgattataatgtccctttgcaaaatttagtacagtctatgctacgaattattttcttacattgtacttcagaaatttaagtacaccctggactgtaggttgatgcttatagttctatcaaaaagaagaaaaaaatagcttctgtgatttatgactacggttcagttctgcttgaccgcttccattgctcttctttggacgtcaatgtattctcggaaaacaataatggaaacaacacttgtgtgggaaatacagagcgtgaagctggctgaaaatatatttctcgaccagctcgaatgaaccctgaaagaacttctgtgcagacttgtgttttcttatttagtttcagaaattaatgtcttgatgtgtcactagttgcactggtaatttttagggaaatttatgtaatgatagttaagtattggatcttgttttttggggagaaaaggaaagaagaagaacattactcctaatgcattccaaccgggctttcacccctttctattatgcaaaacacaacggaaatacaaagttttactgacaataccttagaaaggataagggggacaaagggggaaagcaaggtttaaactacggtgggcaggaaacccgctgaatattactgctaatgcatgtgttgttaccaatgatgtggtgtagattaatgcctcgaatgcctcgactcattttattcatggtatatgcctatttcttttggaggagcacgtaaagcacttttcttacttcttgattggcaatggattgattacattctctgtactgcaggcagttgtacacagttcgtg

SEQ ID NO: 15048 - DNA, 654 bp, Brachypodium distachyon
  Intron number 3 from transcript Bradi3g37910.2 (locus Brad i3g37910) derived from phytozome v7.0 (chr-ID Bd3; pos 404 39692 to 40440345 reverse strand)
cacttgcggtatttggggtaagtgcagaacttgcagttatcagagctcttttaaaaaaagaagaagataaagccagcaaatagatatatatacctgcagcttactcaaatcctggttaggttttaaatagcctagattgtcttaagtttcgttctgaaacaccttggcgatctaacaagttggatgcatctttttgttgttttcttcaccttttgctgatgatttttgcacataagctcatataaaactataaagcaagtgaatggcttatgcaatgtgacaatgttgaaattttatagcccatttggataaatctatatatatccaggaatcattcatatccatccttattctgtgttataggcttatcgcctctataggtggttgtagtttggaaatgctggtcaggaacatgtttaagttgtgcaatatttataatgcacaatcgtactaatttgtagtggaagtaacctgagatgcgaatgagaggatgtcccacgattattttgtttcttggttttgtcgtaccaagtatttattttgctttcgttcctttctttaggttccaaactggattgatgtaggtaggcataagcagtagcataacttgagtgttttttcatttcgtttacgatgtttctgcaggctggagca

SEQ ID NO: 15049 - DNA, 826 bp, Brachypodium distachyon
  Intron number 1 from transcript Bradi3g30670.3 (locus Brad i3g30670) derived from phytozome v7.0 (chr-ID Bd3; pos 328 71364 to 32872189 reverse strand)
tcggtgcggctcctcctaaggcagcttatttccaggtctgcgttctggtagcttttcttattgctctactgtttctcggagtagtgtgggtgagtggatcccttggggaatacaagtgctttagccactccgtgagatattagatttctccagtcttgtgcttagttgtcccctcttatcttgtagcttccactgagtcctttcgctttgaatctttactgtttagctcctttcccctttatcccatcatcttttcgtgtcttcagcaagaagcatgcgtctatgcttctgtacagttttctcctctttcctggagctgaattattttgatattttgtcttcatggcctgaggatcttgttggtaatgttttttcctcctgctgcttccttggatgctatttgtacatgcttttacgtggtgtgggatctcatcatctcaagttgcttatgcactgacaaaatgctcaggttttgtaagcattgtgttcttgttaagggttcggattgattcattgatatctgttaccttccttcccatggctagatttgacatacagtaaaacatgctgaactgcaaatcttcgtagttcgttagtaagataacttctcgtagcgaaataaatctgttctgctatgcaagccttgcatataatttctacttcccttttcagctcaaaccccaaaacatgatatgtagcttaaattcgtcaatttaatccatttagtcgtgaactatgggatgccttgttaaattggtacatttctgctgcacttcgttaaacccctgtactgacacctcactagttcatcatacttgcaggagcc

SEQ ID NO: 15050 - DNA, 845 bp, Brachypodium distachyon
  Intron number 1 from transcript Bradi3g22050.2 (locus Brad i3g22050) derived from phytozome v7.0 (chr-ID Bd3; pos 211 74204 to 21175048)
tcgtgctcgaatccaaggagcggccattgctggtggtaagacgatctccggtctccttcgatttgagccttgttttgatgtgatctgagctttgatcggtgtgattctttttcatcaattattggctggttatttcagattccgtttgattctttctgtacgatttctgattgttgttcttcgctttggtctgttcatcttttgggggattttggtttcttcggccgagtggctaatgtttggtttctagcttcgattcaggttagttcttgcttggtttcttggttgatgctcgcttgtaagttgtaactgaaatggagtttgatctgccacttggttttggataaagatacgattcttttcatttgtgaccgaaattaggcaaatatacatttgagggaagacaaagaagttctgggtgacttgtacatgattggtcaacttcaataatattctctaaaataatgttcgcaagttgttgtcgttgtggttgatcatgcagtttaaaagataattaagtaattgggggcgtacgattgttgcgtactgcattattttatcatgccatgctaaagtaatgagaaatatatagtgacttctgaagctatgaggaaaaggatttgatattttcatcacgttgtattggggcatgggagcaaagaatttatttgtgcattagcatttcaccactatcctgtcatagatgtagtcagtatgtgtttttggcaggggcggctaagaagatgcagagttatttgtgaattgaaatttccacccagactagtctcccattgtgattaaacttcctcattcattgttttgatttttgttatgtaggcagtttg

SEQ ID NO: 15051 - DNA, 454 bp, Brachypodium distachyon
  Intron number 1 from transcript Bradi3g14330.1 (locus Brad i3g14330) derived from phytozome v7.0 (chr-ID Bd3; pos 127 67907 to 12768360 reverse strand)
cccggcgacgtcgtcgccgtcgtcggcttcaacaggtacacatccgtccatggacagaccattgcaacctatcgcctcgttccctttacttgctctctgtccaatccaatcttgcgtctctacattaaaaaagtcaaccgtctgttcttggatccctttcaagttaaccataccatctgccagtctcaggacacaaattaactgaatccacagataataaacaaaatcttaacaaaaaggaagcatgagtctgagcattctggagacgaatgcaaaatgctggagacgaatttgagcatcgagctttgagctttgtagtctgcatgactgaagctgtactactgctgtactgcattgagaacaagtctgaacatgccatttttttcagaattttgtggatcattctatcgtcaacttcttcatgtgattataatacatctgcagcattgagtac

SEQ ID NO: 15052 - DNA, 839 bp, Brachypodium distachyon
  Intron number 1 from transcript Bradi3g29120.1 (locus Brad i3g29120) derived from phytozome v7.0 (chr-ID Bd3; pos 310 32295 to 31033133)
tgcaaccgtagacctgacgccatacttgagctcaggtgagttcacttcgtctgcggatcgtattatattcataaattttttccttggatttttaacctagctaggctagcttcattagttgctttgagaagtttttgtagcgttctgttgtattggggccatgtgtgcccatgtttgttgttggcacgactggtactgatttattgactagctcgcaaagtctcgttcctgtagcaaatcctctttaactttctttctctttgtcgaagttcattagtgaagttttgtcctaaactattagccggacgttagcgatttagcaagatttatcattttcccgcttctcgaaaccaatgattatgcttttgttgcggggatgtttcattttcaaccaagtaaaaataataatattagaaacatgttgctatattgatggggatggactgtatgtgaaaatcttggttgtagaagcatcaagtttaaaacgtcatggacaactagtagttctgtagtgcactagtgctggtgaaaataggtcaggacatctgtttagggctctggattatattttttgtacattagaattttagaacccaatgtttcagcctaccaggtgagaactctgaagttctctctttcatcagcaagttaagatctgtatatttgctacagggaacattttgcttgaagtttgatgtcaagtgtattgctgtaacaagttacagaaataaagtcagtgaaatttatttctccagctcaaagctcatcttcagttcagagttcacaatccatgttttgatacaggggaatcaagccagaaaggagccattataggagga

SEQ ID NO: 15053 - DNA, 880 bp, Brachypodium distachyon
  Intron number 2 from transcript Bradi3g13090.1 (locus Brad i3g13090) derived from phytozome v7.0 (chr-ID Bd3; pos 116 91651 to 11692530 reverse strand)
caattccagttgttaccattgtcctcacagttcatgtgagtaagcattctttgcctattactaaagagttatgttgagctgcttgcataggatttgtgttgtcaccaaaaatcatgtatttgcttcttctttagttggacaaaatttctaatgtgattaaaaatggcatatgatacacaactaacaatcatatagttctgaaaggtcctgtactttcttagatcttcaaattacaaatgatttcgagcacgagtttttgtgtgacaaactgagttaattagacatacatgtcattccgcaagctatagtttttccaaggttcagaggtaatttggcatcattgtgatcatgaaacagtggttagtagttacactgccctaaggcattgctgtgcctttattgcacttaacagttgggaaagtgctaaaaactgaacctcgtattcagtttcaaagttgcataaatgatacatcgtcggaattttgattgtaactgtagaatataatttctctcgtcagataataaaaccttaatctttacttagcagagttctactggtcaattcattagttgatcttttgatattcttattatttactttcagttatcttcttttccacttgcacatgcttcatgtttggttatatacttctaatagacttggaaatttcatttttcgtttttttagtttgatatattgcccagtcattagtaattttatccatattctgctcttgcaaattaatgtctgttttcgcttagttagttttgttaatttatttcctgctactttgtatacaaccaccaaatcatagtatgctctctctgcaaaatctgattgttaggtactgttactgctcttctttacctcatctcaaga

SEQ ID NO: 15054 - DNA, 758 bp, Brachypodium distachyon
  Intron number 6 from transcript Bradi3g35650.2 (locus Brad i3g35650) derived from phytozome v7.0 (chr-ID Bd3; pos 379 65638 to 37966395 reverse strand)
ccaaattgtaatcactctgcaactatgctgcctattcaattgaagtacttggttctgtttgtgttgtgttcctctttagacaggaaatgtgactgtagttttcaccactaaatgaggtcaatttgatttatagtcgagcaaatgctgtttatgttgtgttcctcttttatggaatattctttatagttatatgcttcccctataggctatagacactcatttaaaattacccaggatacttgtttttgcagctgtttgcacaccatttcatttgttccactatatatgaataagtctgtcagaaatatatatgaataggcacagtgagcaatataggcatagggtaataggagtcaaacacgaatgcccaaaacaaaatccatgacgaaggtttgattatgatgataagaataggcaaggcaataatagaatgttgtcagagtaatatgaacatgctttatgctatgtgtatatgatctactgaatcaataagtgcacgaatctagtatggttgctactttgtaacctgttagtactagcgaagtaattgtgtttgatgtgcttcatgtaattcggttggttcttacacccttgtacttgctcattgtggagcttgtaatagtcaatacagcactacagttttgtttcgatgtactgtgtactgtactgatatagctgtacatggttgtttttctcgccttttgataaaaaatagcaaaattcttatggtctatgattttcacttgtgtcacttctag

SEQ ID NO: 15055 - DNA, 781 bp, Brachypodium distachyon
  Intron number 1 from transcript Bradi3g07060.2 (locus Brad i3g07060) derived from phytozome v7.0 (chr-ID Bd3; pos 523 1308 to 5232088 reverse strand)
ccttgtgcccagccgccgccgccgccgcgcacagggttagggttctctcccttcctccctctctctccttgcctggtttgatctgttgggttaggcgctttgattccgcgtccccggtcgatccgtttgggttttgttcctgggatgggacttttgggtggtcctgttgggtgattatttcgccccgcgcagggatcggcgggagggcggtgcgcagcggggcgtgtttccgtggttcgatttggtggttgggtccggttccggcagaaatctctgggcgtcggtttttttcctttcggtctgtgcgaaatgattagatttgcgttttgtcgagtcgtggttgttgggattagtcgaatcacgcggcagatttggtgcgtggtgtgttcgatttacaatccctcggcataaattcgcagtttttgtgattcgaattcggtgccctgttcttcgtgtaactgtcggcgaaatgaaaataatttgtccgtctgattattagcagtttgtcaggaaaaagtcgcttttgaggtattgattgtgtccatcttcctggaaatcaggatctcgtttcatagcggtgagctccctgcaacgattgttgattatagtatggaaatatacaagccgtagtataattttagcctggaagtttaactacctgatgcctgttagatggttgcgtggcttgatttggtttggcgcttgttctatgaagattataattcttccttactctgtgtagtgatttttcttttgtgtctgcagcttacagtcattcaaa

SEQ ID NO: 15056 - DNA, 994 bp, Brachypodium distachyon
  Intron number 2 from transcript Bradi3g17550.1 (locus Brad i3g17550) derived from phytozome v7.0 (chr-ID Bd3; pos 158 67916 to 15868909 reverse strand)
agcctctgtgcacaacggtacaggactgtcagaaggtgaggtcaagttctagtcagcctttattcattataactgctgtaaaaatacctttttggtagatgaggagaaactccggtataatttgaggaaaccattacaggaactgaaaagtaataaacagaaatgttttgtgtcacaaagcctgcttaagcatatagcaaaaacctcttaaaagcaaacggaacatggagccaagaagattatgtgctgctgataattataactctgctaccgttttatggatattatctcaatgctatttatatgctatatctatagtttcttgtcttcctatcatcctagcaagagaggccagtggccatactctggaaaattgtagatgggtattatgttgcctctgattaagtcagatcatgatgtacagttatgttttgttgagtaaaatcaaattatcttcaggcctacatgcttttatatatcctaacccaagaaattatcaggaatccttcttatccaatccaatttttttttatcaggaatcctaatagactcattgccagtactttttcggaatctctttttccttctacaagaaacatctcttattaccttgtaagactatgctccgcctaaaatctttcacttttgttaacttctttgtgacatcttaggcatttattgaataacttaattgggattcttgagaaactaaggtaacagaaaggattgttattctcaaagaaacaaaagagaaagtaggctagcaaggttattggaaccaatttcgttgtaattggtcttgattccaccaggtttgatctgatgcatttgtttatctgtcatgaagtgctaccgaccttagaggatgttcatgtgttctcttgtcaataaatgatttgtcagttctgtaaatatctgcaaccttattcatttggatgtatttctatgttcccatataggtcatagaagctgctaaacagagaccggacatact

SEQ ID NO: 15057 - DNA, 842 bp, Brachypodium distachyon
  Intron number 1 from transcript Bradi3g43100.1 (locus Brad i3g43100) derived from phytozome v7.0 (chr-ID Bd3; pos 444 00996 to 44401837)
atttgctcgcgtgttccaagaagccccgcgtgttcacctccctcatcgctgccaaatccatacccaagccactccattgcctcgctgtccacctcaccaccaagaaagagagtgaagagctgacgggggagaatggagaaagagacaggattttttttttagcaaaaggacatccagcttgtcacatgacatgtggaccaaatagccacgtcaacagatcacaccgcccaaaaccacattagctatgctccctacctatatgcattttgtaaattagtatatgcctgcttatgcacacatgaatacagttattcccaatttagtaaaacttgataaatattattatttttcgcgatattgagtcaaagctaacataatgtacttttggaagaaaaaaaaattacatgagtctgcagtggaagaggagataagttgctttcccaaaccaaatatatatccgaagttcccagtaaaatgtggaaagtgcgttttgtctagaattggcttgtaatctggttgcgtctagggacttttggtggggagatgaagagaataagaaatgtgttcattggctcgcttgggagaaaatcatgaaaccgaaaaccatgtggtttaaaagagttttgcctgtgtgcggcgtctgtgggaatgagaacgaggatacgtatcacgcgcgccttgatgaactgcaccaaagcaagggccctccgcaatgagatgcgccgggtgtggtccttaccaccggacagtaagcttcgccaatccggggatgattggttactaaccttgctggacagtcttgacagagatgctagataaaaaatgctgctcttgtggtggag

SEQ ID NO: 15058 - DNA, 713 bp, Brachypodium distachyon
  Intron number 2 from transcript Bradi3g36750.1 (locus Brad i3g36750) derived from phytozome v7.0 (chr-ID Bd3; pos 391 31495 to 39132207 reverse strand)
ccacgggtttggtgaatttcagctgcgtgaaagtatgtcaaatcagcacagcatttcaccatcatccagtttaatgtcagtctcattgtttgatattagtcaactagaaccttcatcgtgctcgatcatgcctttgattatgcattgtctcgaacatttaattggtggtgtacatcactgatcgctagtttctgtttcatcttctctcctgttatactatttttatctattgtttatactatttttgttgattgtacttaggtctctagatggctcagggttccccatttcccatgtatcgaatattgaccagttgcagcacactaaacttgtctctataacctacaactttacattgcactgattacaagagagccgtggaatcacatatcatgcaagtaaaaaaatctaattttcgttgaaacatatagttgttatttcaaagtttaaacatcctctgtcaatatgttatagtccttttgtatttacgtattgttttgcaaggattctcaaagcaattgaatgggtcattttctactagttctattgatactatgtctatttagcatatctcattccaaatttgaaattatattcctaaaagattgatcctggatctggtatatgaatttgaatgaatacttggggatgccagtaatgttcttgctctgcatattttttgaagactaaacttgtcttaatatttgcagact

SEQ ID NO: 15059 - DNA, 657 bp, Brachypodium distachyon
  Intron number 4 from transcript Bradi3g38350.2 (locus Brad i3g38350) derived from phytozome v7.0 (chr-ID Bd3; pos 408 83017 to 40883673)
gaatttgaagtatgcacatcttctatctcataactcatgaggatgctgataggggatgagcagaaaactcactgaactgaagtaaccaaaccaaacaagctgaattgatgcatgtataattgtatataattttcacaataatttgatagattttataaatataatatgtattcatgataagaagtcatcagaattgtatttaatcataatatgctttgtagtaactattataacatactgataccaataccacagttcaaacttcacacatattgtaggattgtacaggcaaagcatccattttattgtattaatcattttgtagtttggttaacagttttttttattaccaaaattgccatgttaaccaaatactcaccctgtttcactacttttgtgctgctgttagtaggtttataaatgattcgggttacttgtttaatctactttggttttgtagcttccaagagaattactccctccgatccataataacttactttgtactaaattcccgacacttattatggatcgcagggagtagtttcttatatctttgaaggaaacatgaatgatatccctaatccttgtgatatttctcatatgagctcatcgtatgtagattctgaaggaagaaaataagactgccagggaagc

SEQ ID NO: 15060 - DNA, 1008 bp, Brachypodium distachyon
  Intron number 1 from transcript Bradi2g54820.1 (locus Brad i2g54820) derived from phytozome v7.0 (chr-ID Bd2; pos 536 23395 to 53624402)
cgcagatacccagatccggctgctactttctccaggtaaatcccctccctgattcgcatcggccagtccccactgtcttcggtattgatatctagattgattggttccggggtaggccctccgcgctgttctgattaagcaatgcatcatgtttcgagggtcaatacatggaggcaataggcatgccaacatgcagcactaattgttgtgcaattggccgaattaagctactttgatactctgacgtggtgctattgcatggtgaattgccaaagttgtactcaggttttacctttgcgtggatgagcacacgctgcaatgttgagaaaaaaaaaaacaatgaaaacaaaaatacgcctgtgaggcgacaattactcccagcttgggaaggaaaatttggtaaacgcaaacacggtaggacatgtacaaaagggttccgttccttcccttgtccgatgatgcttccctcatgccatagttacccaattgtggcaggaaattttcataatacaccattccaagttcaatttgagggtctcactccgaaagtctcattggcatctagctcctggaccatgtgtcaatgacataatggaatgccatatcccgaaagtcgactgaggggagtcacagatactgaaaatccccattatgttaaatgccgtagcactgcacttaaatttattgttttctcactaggaaagtactgattttttgtttgtggtttccatgcttttagagaggtgaagatgttatctcagagcatgtagttaactcaaaggctagttatacttcatagagaacatggctcctacattctgttctcagaaattctgtaccgaagaaaaatagggcaattatggacttactgttcttctaatttttaattggaacttagattgttttcatttggttccaagagtttagcaacgctactccaaacccataaaattccctttttcatccttgcttgaccatatatttctccttgggcttcagtatttcagc

SEQ ID NO: 15061 - DNA, 580 bp, Brachypodium distachyon
  Intron number 2 from transcript Bradi3g30480.2 (locus Brad i3g30480) derived from phytozome v7.0 (chr-ID Bd3; pos 326 39902 to 32640481 reverse strand)
agctcatcccgaagtggaggcaagaggatgtatgcccttctgtactttgcactggataatttctgtgcttttgattccacactctgattcatggagcaatcattctttgtttgtcaatgattcagctggtcataagttactgacaccatagattcagctgatcatatgttaatcaccatatggcttagattcagccgatcgtaagaaatcatagagataactcataactgtacgaggattttttttttaatatcccatttcatagaaatgcaataagatggagtaatttgttaattctctgtaatagttatgaacttgtgatggcatgataagaaattacaatgaagaaaacctatacccttgtgagaattttgacataccagatggagtacattacctacgcatgatatctctgttactatgttgtgttccattaaccatgttcttgttagaaatgctctgcacaaaagtcagattgtcaagtactgaatacaaaagagtaatcagggtgccatttttcatgtggccatgatatgttttgacaggccccaatcagagtccctgtctcatctgacaagtt

SEQ ID NO: 15062 - DNA, 921 bp, Brachypodium distachyon
  Intron number 1 from transcript Bradi3g44940.1 (locus Brad i3g44940) derived from phytozome v7.0 (chr-ID Bd3; pos 468 71313 to 46872233)
tgattctggtatgtgttctatggtactgcattctgtaatgcatcattgatgttgcacagtagtagttgattactgtcatccatgtgcagtagcacaacttttgtcttccattctcccaaactttttaaccttttaattatttttttacccagtgggccatcccaccgatttcatttaaagaaaccgccaactgttctacagagttcaaaacaaaacagaaaacaaaacgacttaacaagtagtccaacagtagaaaaggaaaactatcctcacaggacacacagagaatcatagcattacagacaaagccagcagcactacagtttttcaccagtttgcaattcgcctgacagtgggagcccatccattcttgatcgcatacgcttttaaccttttaattacgctccctttgtctcttaagctactttgtcgttcagctgcttttatggtggtccttttctaatttagtcgaacgatcatttgccaatcatctatgctaaaactgaaaatctataaaggtcattgccatatttctgggttcttttcttttgcttatcagttattccttcgcattgccaaaagggtactcttttgatattattgttgaatggaggagcagagcttaaatgttaaaaatgtacatcaagctagaatgtttcccggtttcttccaaaattattataaattaaatatattcggagggaggacgagaaccaaatagtgagaaactttgagaataagaatggtgccatcactcatcagtggtttttcataaagtgaaaacggaccaagcatgtcacagaacttgggaaaacagaagaatgagagagcaaactttttacctattattcatatatagtttgcacgaaattcctggtgcatataggatttctgacctaccctttctcactcaaagacact

SEQ ID NO: 15063 - DNA, 905 bp, Brachypodium distachyon
  Intron number 1 from transcript Bradi2g55540.1 (locus Brad i2g55540) derived from phytozome v7.0 (chr-ID Bd2; pos 541 50562 to 54151466 reverse strand)
caggtaagttaatgatgttcccatggtcttacaatgatcgattattgatatacgccttgatcgatcggaaattgtcattttaccagagattagttgcccttttaattacctagctagctcctagtatattttgcatgatttgattattaattgtcgcgttgatcttggacacgagacaaggagtactacacgagcagcgaaacctgcagaactaattaagctcgccaaacttcaccatggatgaccatacatctgaatctctgattgtgccttggtttccaggcccaaatctgtactaattcttgtcactaaattcgttttggtctcatggccaggcccctgcaaagaccacatcgtctagctgacaattaggtcaatgatctagagacccccggtaggtcacgatgcacctagctaggttatataccagactactgcagtgctactgctgcgaggatcgcgatgcatgccatggatctgccactcgcacagatctcacgcgtttgagatcctcgatctacgtgcagggtgcggtgatttcctttgggtaataataacaggagcacctcgatcgatcgtgtgtgtcagtttttaaaaggccatatgaacgacatgaccgtgatcacacatgttttcagtttatgtcatcgtccaggtagggaattaactttccgcaaagaacatatctgaaacccctgcatgtacatattcggcggggtggagccacaaaagcaagacattcagaatctcctcgagtgtacatttcatgcaaaccatcattacaccacaaggatatgattcagattcattcacactgaaaacgcaaatcaacaagtgtcctgtctcgatcaataaactagcattaaacatgtaacgaaaatctcgttgatcgatgctcattgcag

SEQ ID NO: 15064 - DNA, 997 bp, Brachypodium distachyon
  Intron number 2 from transcript Bradi2g50540.1 (locus Brad i2g50540) derived from phytozome v7.0 (chr-ID Bd2; pos 503 94805 to 50395801 reverse strand)
tttgaagttgtaagtcagattttaggtgtcttatcttgagaacattgcaataatctgtttgttgtgaataaatacatgtttttttctcttacaaatgttagatatccatcacatacttctctagaagtgatcaaatatgtggaattttctcctgaatgactcttttctggatagtgtcggatccagtaaggtttatgtgattctttaaaaatacaagggaatacacacagtggaaattatcttgagttttttttttcatgcataaaaatcttacaatagacatgcatggtttttggaccttcctttttgaaaaaggttgatgacaatagcattttgctgtgaaacttgacaaataacaattgtgatgacaccacatatttgatcttctgatgtggttagtattagacttgtagccagtgaaatagtaatgcctttactttaaaggagctgacatggcaactatcaagctaattatgaagcatttatctttggagttggaatcacttatgctttagtgttggctttaccattttaagtttctcgttggatccaatgggagctatcaagctagagactggtccaaatgggggtttgtgtttgatactttgatgtaatgtgttgaaaatgaaaccgtacttttgtgtgttgtttttctgttatattagaagcatgtacatgtaggttagatgaataatgatagtaaagaataattgagagtatcctcctaacattcatatcctaaatccggtaaggacaaaaaaacattcatatcctaaaatttatgcttctacctacatacatcttctcaagtctgtatagtttgttgttgtatggatcttcacatagaaaatttctagaagtatgaaaggatatgctttgatagctcagtacctttttattttcattttttggtcatcatttcagttttaagtctttgtgcactgacatttgatgcttcgatctgcgttcttatggtttctatgcttaggtactgcga

SEQ ID NO: 15065 - DNA, 936 bp, Brachypodium distachyon
  Intron number 1 from transcript Bradi2g54170.2 (locus Brad i2g54170) derived from phytozome v7.0 (chr-ID Bd2; pos 531 10239 to 53111174 reverse strand)
gttaggttcttggcgccttcagtggggtgcggaaggtgaggacggctttcggcggttgcttgcttcgaggtgaaagctcacctttctcgttgtaaaaatcgggatcttttattttctgttttttgggggggtgctttgcgtccccgccaccatgtttcgttcatcctggccgcccgcgctcttctctggtttcatttgaggcgccgctgagttggtttttgcggtgattgcggaagagttggccttcaggcgacgttcaggtgcgagggtttatgtggggggcgaaattcagtctgtttcagttcgtgtgcttgattctttcaggttttgtgttttcgctgcccgatttatcgaggtacaagggtaacgcgcgaaacagtgctgatttgtgaaccattgtagtttatggtgaagaattatgccctcgtggcggcgaaaatatgtttttctgacgctaatcgtctagccctacacctgggaggctgggagttcagttccttctcgtttctctactagattcggttaaggctttggcttgctcacgattttatagatgcagttacaggattttatgattatctaaaaattacaggattttatgcataactgatagctccgcacctctttgttgatttcgcagccgatttttggtggagatgctgatttggtatagcttttttttggtgtcaaaacgttgtttctttctttccgattcttccacctgtaattcctgcttcatcagggaacggcagcaacagaacattttgatctctagaaatatagtatttttggaacaactatccttgtgctgatcgtggatgtgctatggttaaggttgaaaacccttggattttcttgtttcttttgtatcattactgtactgaagatttgatctgctgtacttttaggtgaaggcgaagaaaaggaacactaaga

SEQ ID NO: 15066 - DNA, 748 bp, Brachypodium distachyon
  Intron number 2 from transcript Bradi3g02230.1 (locus Brad i3g02230) derived from phytozome v7.0 (chr-ID Bd3; pos 132 4780 to 1325527 reverse strand)
tcgcggccggcgccaccgtcgtcgccgtcgagaaggtcggttgctcatttcagtcagttccacaatccacaatctagtactattgctcaatcagtggccatgccgttgatgcctcgaagttgaatttgctcaagttgatcatcttgctgcgaaattttcaatattttgtaaatctgattttgctagatcaagttcagtgagaaatgggtttgcttgattttgagacaattctgggatggcaggaaagcaatgatggagtttcttcttcatttctgagagtattaaaagttagggagtgtctatttctcggtcgcccaagaaatacttctttctcagtcaacaattgtagccatccaatcaggattttcttatccatgggaccaacattaatctttcacgaatctcaatgattgaatcaaaaggttgttatcatcgactaagaaatatttatttctcagtcgcctaagaaatagcaaaaccgtaaaagttaatggcgggctttgtcataagctagtactccctccgatcctaaattcttgtcgttgttttagttcaaatttacactgaaacagcgacaagaatttaggatcggaggaatagcagctatcagttatagtacccaagtaattaggctttggcatgtgcgataaaaacagcgaactaaagtcttgtactttctgctgactgattgtgttgataatctgcaataacatcttgttttatgtcctttcggttacaggataagcaa

SEQ ID NO: 15067 - DNA, 909 bp, Brachypodium distachyon
  Intron number 5 from transcript Bradi3g04860.2 (locus Brad i3g04860) derived from phytozome v7.0 (chr-ID Bd3; pos 333 3557 to 3334465)
aaagggatcataattcgttttgtcattggccacaggtatggtgtggatggatcttttttatgtgtgaatgttgagaacttctggatttatttatttctttaatcaggattccttttttttcaacggcttcaatcaggattcataaaagataaactatcatgtatttttagatcaacagggtgaaacagatagttcttatcttttttcagacaattgaaaagaagcctcaactcacaagaatgtcggaacttaaattacacatagttcttatcttttgtcacaactatattttttccaattgcaactgtatatattcagtagttatttcagttaactttactatttagaaacatatattttgtacaacctcagatcttaatgtagttgaatgattcttccaaaggtaattcctgtagactgcaaataaacgatctttgtaaatctgttgaaggatttctacgtaggtttgaatcctgcctttcatatgcttctagacatgctgagatccccaaatttttgtagccgagttagtgactgcaattaaggatctatggaaaaagaatctgaaaaagggtgagacaataaaaaatttagaggaaaagttagttcatgagtatcagccacactgatttctaagggtcaacgagtctgtgaaatagtgggttgtgaagtgacgtggcctcaatttcgccctttaatacaagatattctgttaaaataattttgttctgagatactacaaaagataagtcatttcatgcaatgcgtgtcaaagcataacatcaatgtcttcttagtcatgtctctttcttcttccttttgttagctgtttaaggaaagacaggcataacatcattttccacatattgtgcagtgctatatcaggtggaattattgatagagcaattg

SEQ ID NO: 15068 - DNA, 972 bp, Brachypodium distachyon
  Intron number 1 from transcript Bradi2g62170.2 (locus Brad i2g62170) derived from phytozome v7.0 (chr-ID Bd2; pos 589 41211 to 58942182)
tcttccgtccgccgatccaggaggaaactgcaagggtatggcatatggcaacaacgggagagagagatcaaaggggggcgagaaagaaaattcgagatttttatttcttttcgccaatcttcatcacgagttcttcttggatcctcttgtttgtttgtttggttgggttcttggtggtctgcttgatctggtggctgtccctgaattccacacgaatcgagcggttttccctggattccgccggttgccgctggggagttgcggttttgcttcccgatttggaattggagccgcgagtctcccgtctcttggggttgttcgatttccgtggggtttaggggattgtggccggaattgtttcctccgtctagatatgtggtctccggatgctatccggatcaagaggtttgttggcgcggcgtctcccttatttgggttcttgattcgttttgaggagatctgtgtggcagtttcggcaagaaccgatcgaattatgccccaagagtttatttttgggggcaattcattggttatgtttaacggagcttcttaattgcatcagatttattcaagcctgtgcttatatgaacacaaaacttgccatttcagtcttctctgagttgaattctgtaattattctcagatgttggctggctgtctcttcagttcgattggtgccagtgttgttccatcgatttgcatctttcagcaaaagattgctgccgctctcctcaatcggtggtgtggctttccttatttgatgttgttgggatttgggtttcctgattgagaattggctttactacgattcattcagtcatgtgttatctgctttggatctgcaaacttgccttgttgattcccgtgcaactgtcctctgtcttcttcaccagagaattttaatgcatccttttgtttcttgcagttgaataaaatctgtacctcttttctttaatttgtttacagaaaccg

SEQ ID NO: 15069 - DNA, 718 bp, Brachypodium distachyon
  Intron number 1 from transcript Bradi3g40550.1 (locus Brad i3g40550) derived from phytozome v7.0 (chr-ID Bd3; pos 427 09909 to 42710626 reverse strand)
caggtgagaattatagcaagttgtagtctcccttgtatggtttcatgtagttttggcatgttgagttgaatgtgtgacttgataaacccttgctatgttagtcttgaacagagttctcggttatcgcttgtcgtttgtttcaactacattatttggcccattcagctgcgtgcattattgtttccatgggatagattctagaaatcactactgttatgctacatacatagatataggatcatataattaataggtaggttcttatggtaattgacagtttcatttggtataataataataataagtaatgtgtcttccgcagtttgttgcgaccgatttctcagatttcacctttttgagttgggttcagcttaaaaccatataacttttgtcgtcttgatccttgagcttgaagagtttgtcgtgtttccacaactctttgcaatgccaataaatcacaatattttctctgtactagttttctcttctgcatatgccactgcttattggattgttctttggggacttgaaggttccatgtctttttctctggtgtagtactgcttctcctatgcatgtaatataaatctcatcatattgtttttttggctattctatagagtgcagataattgattaaccatgtctttgatctttctaatgtttgataaacaaaattcccagggtcattcaacatctcaaaaaagtcacctagatca

SEQ ID NO: 15070 - DNA, 537 bp, Brachypodium distachyon
  Intron number 1 from transcript Bradi3g28250.1 (locus Brad i3g28250) derived from phytozome v7.0 (chr-ID Bd3; pos 295 74420 to 29574956 reverse strand)
aattgcagattgttgcagagaaaggaccggtattttttcctttccattttgatacatagaatttattttctgcatatcaccatagaggcagtaccttgttatgttggacagttggaagatagagatgaatgctggtgtatgacaaccttgtgctgatttcatgaatgtgtatatgcactttagaatcgagttgcagatgttgtttacagagcttatattaatttagtatcatgtacttactgctgctggacatgcattttgattcaaataatatgaaagtggttaaagatccattattcaactcgcaacaaggaagtagtttgctcaagtgcatatatcattccatgtctacttgttcatatccctataagtatttgttgtttctaatccatgttgaatttcaaatgataatttaggagtttttcatagaactacagtgtacctgtaggctttagttgcattccattactatttaccttgacaaatgtctattcttctgcaggtagcgtgcagggacttccctcattcacgccatct

SEQ ID NO: 15071 - DNA, 542 bp, Brachypodium distachyon
  Intron number 1 from transcript Bradi3g32480.3 (locus Brad i3g32480) derived from phytozome v7.0 (chr-ID Bd3; pos 348 47825 to 34848366)
accacctcttcaaccatctgaggggtgagaccacaactgcttatgaggccctcacgtttaagatcaaatgccaatctagctatgccatgtgattttgtagttgattcctccaattgctatgacttgcaagtgcaagtgtctgagttgatgctgattgctccgaaccaaaaaagttcctatttaagtagatagttattgtatgcttgcgttacacaggatatggctacacttgcagtactacagaaaaccgactaatgcaatttaaagaccggtttgtttatactggtggccatgtttacactagtttcaatctttagttcatttattttgttccaaatagcatggaagcaaaccattgtgtttagtgtggtaactgaagaagtaattaatgactgtaaatgatagtatcttctactcacctctggtcatattctgttatgaatacactagtttcaatctttatttgatctgggaagtaattgatctccatttgttcctttgctgacgaacttccttttttcaggatttgcatctgagcaaaa

SEQ ID NO: 15072 - DNA, 852 bp, Brachypodium distachyon
  Intron number 1 from transcript Bradi3g15330.1 (locus Brad i3g15330) derived from phytozome v7.0 (chr-ID Bd3; pos 136 27104 to 13627955 reverse strand)
cgtacgggtcgccgtccgcgctttctctcagccaggtatatgcatataagagaaaatcctttcgaatggtcgttaaagaggttgtgtttcttgggttgattgttccatcttgcggctttaatttgtgcagaagaagccggaagagaaataaaatccttcattttacaaaaaaattataatgcttttctgtttgttgggtgtgtgtccttggcgttcatgttgttcttgctcttcattgtgctttgttatcccctttcggatgattaatcgccgtccacgcatgtaattaattatatgagacgatcaagcctgcaactgagagacacactgggaatgacgaattaattagacatttaatgtgatatgagtagaatcaaactttttttaaacggagaaaaaaagagagagaaatgttgagtttgtgtgaaatattttacattaatttgaacatggaaatgtaagtggatgtgttccagtatactgttcgcccaatcttgttagtaacaaatttcgttgtcatcttgctataattgcttgtttcccagtacatcatcatgcatcatgctcctccatttgtaacacaaaatatcccttttatacttagctaattatgcatactctccatatagctggacgtttttcctcatgcttcttgctaatttctcgtgctggcagtacaaatatatatgtaaaaaaacaagtaatttaaggcaaccatatctgaattaattacggagcatatcttcatattctttcgtgcagtaatgagaacttgccgaaattaatttctacaccccctccaactataaattcgcaggccgacttgctggacagccaccatctgcaacaggc

SEQ ID NO: 15073 - DNA, 608 bp, Brachypodium distachyon
  Intron number 2 from transcript Bradi3g13500.1 (locus Brad i3g13500) derived from phytozome v7.0 (chr-ID Bd3; pos 120 35012 to 12035619 reverse strand)
tagagctgatcatactcccaaccagcaagtacaaggtaagtagatataacatagtcaaaatggttcccccatgtttttttgtcccaacacaaactctgtttcttctcgcaaaaaaaaaaaaaactctgtttcacttccaaacttatttaaatggcagacgttgtctctctggaaacacacattatttgtggcctacgaggcaaaaattaacctagaactcaacttattatgtctaagtcaatgatcctggttgttgatttttttttctaaccaacaaatatattggtaaacttcaacttagaggtaaataatttatgtatattcatgaaatatcagttgccttaataaatatgcactccgtgctaggtgttgaattactaaaaaaataattaaaaattgatctcaagaacgcaccgcactaatcatatataaagacgtatactacttatccatccagaaacataaggccaaaacgtcgccggccttgttgtcatccctcacgtgctttttcagttaatctgaatcaacttattttctttcttggactcaatgtaattgtttccccccctccaaaaacgtccatctcatcctccgctacggtattctag

SEQ ID NO: 15074 - DNA, 822 bp, Brachypodium distachyon
  Intron number 1 from transcript Bradi3g13500.1 (locus Brad i3g13500) derived from phytozome v7.0 (chr-ID Bd3; pos 120 35604 to 12036425 reverse strand)
gagggatcatccagctcctaccgagcagagcagaggtaagaaagttatagccctttgtcctggaaaagtatataagaagctagcagaaggagcgtaccattttgattgtaatattcatgaaaactttatagtccagattggatacgttttttatcgcagttatctttccaaaagaagcatacaaacgcttctcacatgtacagtacaaaagaagcatacaatgtatgcaacgtcagtcgtttttctacacattaatttctgtccatcaccaccacacacacacccggttttttttttttgcgtcttacaacgacagtaaataaactaagttagattatgtggagccagtttttcaaccaaaacacgtacaggacgtaatttgcatgtggagacaccttttttttttctttggagttaattcatacagtttgctcaagttattaaatacgggtcagcaataggtggtggtagccataatccagtactgtacaccttttagtgcattttttgaactaaaacgaacgagtggatctgcatccaaataatccagattggatacaatcctttgacttttcctatatatcttaatgaaaattggaagaccgcctgcattttcctaaaaaaaaagattatatacggtttttattgctatattatcttttccaaaacaagatcaacggttcgcatatgtatgtgattacaattaacattcttcacatgtccgtttttttgtatctgaatttacttttttttttgtctcttttgggattctacttttctcatgaagcaaatccatcaacggttgttagagctgatcatact

SEQ ID NO: 15075 - DNA, 1050 bp, Brachypodium distachyon
  Intron number 2 from transcript Bradi3g20700.1 (locus Brad i3g20700) derived from phytozome v7.0 (chr-ID Bd3; pos 197 18621 to 19719670)
cttcatcggcgggctctccaaggagacaagcttgggtacgtgcatatgcttgccttcccccccttgcgtcacttgttggtctgctttaagattctagagtttgttaggttttgttctcgttccgtcagatcgggttgttgtttgccctccatggcgattgaacttgtgctggatcttctatcctagtcgatccagtggagatcaattggtttgttgtagaaaatcataggatttgcatgtttagcatccgtgcaactgtgcaagtttagtcctagtttgggtccgcacttctctcttcgtcgatgtaagtactgttagttcagtttgggagtatggttttgcgaattggttgtttagtcgggactgcaatcaagtcttcgtgtggctggcttgctgtggatttggttagatcatagtttgtctagataaattgttatgatgcacggcattgctgttggttctgaacggaggaagacttgaaattcattaagaagtctatttagtggaagcaagtggattatttgtggggatataatcaaacgatacaatacaaggtgcatatgcattcgggacaaaattttaaagcaacgtcctgcagaaagtccatgccttgccaattctagtcttatcaggcatttaccctatagtttaccgagatgtgatctttcacatcacctcatatcagattaaagtcaattggttcagaaatagttactgtcagaataaaatgcttactgtcagaataaatgcacatttactatgcaattttctgctgatgtcttgttaggacataaaatgcttactgtcagaataaatgcaaactgaataggcatgtaatttcggtgcttgatgaattggcatactaaggtaataaccacgaggccacaagaatcagtggaccagttagctgtagcttaaagtgtacaagtttaagaagtaccaataaggatgtttggatgttttatgttttattcttgcaccctcaactagcactaactgcgttggtttattctatacatgcaggtacattcaaagaatactttgggaagt

SEQ ID NO: 15076 - DNA, 894 bp, Brachypodium distachyon
  Intron number 3 from transcript Bradi2g50630.1 (locus Brad i2g50630) derived from phytozome v7.0 (chr-ID Bd2; pos 504 52874 to 50453767 reverse strand)
gcttattctgaagctttgaaaggtaggggctacggcacattccttccttatttgtactgttacctgttgaacatgaattaattgccacttatcgtgcacatattttcttcatccatccttcactctgttcaattgctttgaatataagctttgacactgtctagacagccttgggcagtttttctccacatcagtgaataaccacatctcttcactctaagaattcatcaatataatgtatatgccttaaaataaaggtagacagtaagaatccctagacagtaggtttccagtatatcacaaatattcatagttgaaaatactgcactatacccaagtgtaaagcagctagtgaacacgtttttttattaacaggagcttgcatggtgtgctaattgtagcaaacttatcattagatggtatgccagtgtcaagttacaaagggcatgtttcattggtaataaaattggtagctaaaattcaatttaatctgactgtaaattaatgcctgatattgtctgtatctgcatattctagatttctctgttcaagtgcatatctcagggaagcagcatgacataagcatattgattaacctgagaagctagttgaggctcttcagttgacatcttcctctactgcaaactatttgttaactgtctgctttcttatgttgcttgtttgttgagtcgttgcttctttttgctcgcctctgtttggcactgcagtgatttttcattcacacctctttatttcctttttaggatctaacagttagttggtagtggtaacatattttgaaggtgtaacatcaaaatcttagtagataaagccttggtaaaagctgtatgttatattctgcagttcctgttgctgctattgagctatacttgg

SEQ ID NO: 15077 - DNA, 437 bp, Brachypodium distachyon
  Intron number 3 from transcript Bradi2g41830.1 (locus Brad i2g41830) derived from phytozome v7.0 (chr-ID Bd2; pos 422 34861 to 42235297)
attggcccctacgtctgcgccgagtggaactttgggtatgcaagaactacttttaactaccctggtttttctcgcattttgctctggagattttgtcaacatttttctgccaaatttttttggtttgcatgatgcttaaacagccggcattcgtatttctcctagtgtgcgtggattttttttagtgacgagaagtggacaagaatagaaaaaatgtggttgttaatttgctatttgaaggtagtttccattatcttctagctgatggattgaccgattgactgttggtgtgaaatcattagtttttgtggggtgcaatttgagtcatgaggaaatatgtagaacatgactcttgacgttgatttgatttgaaacatgccaacttatgctccatttccccccttttggctgcagtggtttccccatttggctgaagt

SEQ ID NO: 15078 - DNA, 1033 bp, Brachypodium distachyon
  Intron number 1 from transcript Bradi3g10190.1 (locus Brad i3g10190) derived from phytozome v7.0 (chr-ID Bd3; pos 834 0506 to 8341538 reverse strand)
gtgccgaggccgtggcccgtggccttcaccccgatgtgagcaagctccctgcttagaattttaactccgttttggtgtatttgcatgtggatttgttcttttcttccagtcaaggatatagttcagtttacgttttccaaatcgtgttgcttgtggtatcgttctgtttaaatgagttggtggcatcggaattcaattcttttaactgaatttgaggactgataagtatacgttcaattatctcatatgtagtaacactctttgttattgatttttttgagaaatatgttattgttattataagaatttctaagctgataagagaataattagcttagattaaattttagagttggatactctggcatggctcaccatgttgtgtaatctatacagatatgcatgtacataattatattaatcttgtgaaaggtaagtgagactgatttagttgtaggctattgcactttgcacttggtgagtattgaagcttagcattttcatacgtgaagctgtggatgtgttgttggaaatgtatgttatttatcatagtttcgcatgttaattctgtcggttgttatcagcgaaacaatggagtttctgtaggtttcttaattggatcttacacctcagatcacaattgaaagggcatatccggtttaaaagatagaatagataatggtgttctgctacaatactgtcatactcctagttcccctttatttgtgatctgattattttttcaataatttgttccatccaccattcatttttgtttcgacaactggttgtttgacatttttcctggaacttgttaattgttagagacacttcggttaccaaaaaacaattttcagctctttttcaaaataaattactattactcattgtctatataacaaaagaacaagtttgtccctcatgtatgattcttctgccttggaaagaaaatcaggagtgtatacttggaagatgtttcttactaaccaagtgtacttttatttgcccaggaagcctgctgctgaagtaaaga

SEQ ID NO: 15079 - DNA, 616 bp, Brachypodium distachyon
  Intron number 3 from transcript Bradi3g43060.1 (locus Brad i3g43060) derived from phytozome v7.0 (chr-ID Bd3; pos 443 84482 to 44385097)
ccctttggctctggcccgccgggtgatcgccccaggtgagccttttttatctttctgtttgtttcgagtatgttgctatctgttgctgtgtgaatgaacctcttcatctagctatttatttacttattgctgtatagatttcaatgaccgttggttctactccagcattctgttagccaaattcaaattcaaattatgcgatcaactgtgttctatttattgcaatcccccacttgcaaacttgctatgatggcctgtaccaattctctgccaccaccttctatccaattttgtaatgggcgtgtagtttcttttttgagaaccaaacctttgagttacttctgcattatttatgtatccatgaatcgtaccatttcacttttcatttcttctagaatgctgtgtagttaaaactggctgtagttttctggcacatgaagttaacaatgggaggctgagatgcaattgcccaatgatatccaatttgtccgttcctgtttcagccatattttcttgtggctctgtatgcaccaaagaactggtatatttgccgtcacttacttttgtcgtatatttggcaggggcccacctcgtttcgagggtgacaggccgaggt

SEQ ID NO: 15080 - DNA, 822 bp, Brachypodium distachyon
  Intron number 1 from transcript Bradi3g01420.1 (locus Brad i3g01420) derived from phytozome v7.0 (chr-ID Bd3; pos 897 879 to 898700 reverse strand)
tcctccgccgttgtcatcacctagactatcaagtggtaactttctgttgcatcctactccccctttccttcattgatatcacacattttgaaagatgcttcgtagttcgttattgtgattgctaattatgtttacactgtctggtagttgtggccttttttgttcttgtggcaaaggtgatcaagtttaggaacatatttgtgttttaattgccatttttaaggtatttaaaaaagtaaaagaaaggatctagctgtcatgagtagccttcttgaggccccatggaatctcaagaaaaactagacctttttgttcacctttggattgcttcaacttggaaacatttattcgtgtcaagcaggacttatcttacccacttcttttttgattagatataaggattcagaaaactcttatctggttattgtttgttttgtacacctttaattcatctcattctgttgatttcagatcgatataaagaggcttagctggtatggttgcaagtaaaacctgagcaattgctaccactaatgcatctcctgtatatgatacaagcaaatagcaagaatagcttgtactcagaaactgtttgctttgaaataagcttctcaaaataaattatgcagggcaaccatgtgttttttattctgcttcttcccattcttctcgtgtaagcattttaccgagtgctgcccaatgttaagacctaggctttgttccttttcatgcacaagctcctgaatatctactacttgaatatggataattttgaggtatcgtgcaggtattgaggaggagatactgggacaaggctcggag

SEQ ID NO: 15081 - DNA, 399 bp, Brachypodium distachyon
  Intron number 1 from transcript Bradi3g32610.1 (locus Brad i3g32610) derived from phytozome v7.0 (chr-ID Bd3; pos 349 91737 to 34992135 reverse strand)
ccgtgagacctgctcgatccaatctacggttatgactagctgttgttccttgcagtttctgcttagtaagacaattggttcctgatgctgcctctgttgaagacaattggttccatcaaaattcaaaatcacagtgtaaaccattccttccaggaatagtctctgcaaagaaaaaattggggaaaggataaaatcttggatgtaggagttggttggttgtgtcctttgattcttgccaagtttagaacccagttggttctgcaaagatgaggcaccaattcagctagttcagttcttgctgacagctcaagaaagcagtccatgtctttcttacttgacctgttgaccataaatatactaaggcactcatgtttgctaattggttaatcaatcaggagg

SEQ ID NO: 15082 - DNA, 800 bp, Brachypodium distachyon
  Intron number 2 from transcript Bradi2g43210.1 (locus Brad i2g43210) derived from phytozome v7.0 (chr-ID Bd2; pos 437 16316 to 43717115 reverse strand)
tgcagaagcctcaaccgcgacaagctggtagcatctcaatgcttagcatttatgtttttttgtacaaactagccaagtactcttttgttgctatggattaacatattaaagtagcaaattggattacccttatatgttgaaccactatcgatgtgcttcatgccatctttgattttatctaaactctcagctgggcttgattgaggcaaaattaggagttgtttgtcacaaacgatactttgattagacttcaagttttaaatttggaaccaatgttgaggatgacatttcgtatctctatgtaggcatatatgttttgccataaaatgaagttcgacacgtaagaagggaagaagaaaagtaacgcagtgctgttaccggttgaaatatttacaagagtaaagatgcgttgcaaaaccgttgatggagcattgctcttgattcaaataatatactgggtttattattattattttaaattcctcttttcttaaacttataattgcaagtttaattgataatgaatgcaactgccacttaaatctagacacctttaaatttgtgagtcggcagttcgacttcatgtgctaagagacattaaatgtatcgttctatctgtgatatgattggaaagataatttacttgtggtgtttttcaaacttagcatcagacttgacgcttgagtaagcattacgtgtgtaagatcctcattttgtgtacgagcttgccttctgtattttgactatggacttatgattctgcagaaaggtttaaggttctgtcatacaatatactggcg

SEQ ID NO: 15083 - DNA, 1020 bp, Brachypodium distachyon
  Intron number 1 from transcript Bradi3g22350.3 (locus Brad i3g22350) derived from phytozome v7.0 (chr-ID Bd3; pos 214 06894 to 21407913 reverse strand)
actacgtcttccagctcgcgcccaaccagacgccggtacgtatggctgggtgggtatattcacaatcctttgttcctccatgggaatttatcgagtgtctgagtgtcagttgcttgctttacactttggtgaatttgagtccttggttgtagtggcatcggtgacaatcctaggcgacagtcgcacgtgttgtgacatctttactcgttaggatcctgtgctgagtcttgaccacagtatgctaatttgtccagtcgcacaacctttggagttcggagttaattttgaacccagtcacaatgtttttttggaaaacaaatcctggtgaatcactgaacgtctttatcaatcacttatactttcgtcaaattactgacgcctgatgccatagttggctttctaaattgtgccttcttcaggaagggtctcactctcaagttgttatagataactagcacaattctggtgtgttgctgcggattagaggaaaaatcatacccgtctaagaagagtatattatgatttgtgcgatcaaatcactcatacacgctctaatccaaacatttgtgtgagatccagcatttagcttgtctcggatttgacggactgtcgccaccaatttacatttttatagtattaacgacccgcatagtacccgtgcatgcgttgctatggagtaaaaaaaaatacactgcatgtttaaagaggacacctctaaatatgctgtaatatcatttattacctcagatcaaataatccatatcagctctcgtctcaatgatttgtgcaaaatcaatgagtgacatagtctgaagttgatggaccgctaccacaaatttagatctttataggagtaaagaaaatctcccatttcattcggtgactgcttgtgttttcagctcgaggaacacaggcactctttgcatgactagtgttacagcacgtgacaatggctcactagttcttcaccccattttggttgcagtacagagacacatacttcttgcaaaagcttctttc

SEQ ID NO: 15084 - DNA, 845 bp, Brachypodium distachyon
  Intron number 1 from transcript Bradi2g43580.1 (locus Brad i2g43580) derived from phytozome v7.0 (chr-ID Bd2; pos 440 34664 to 44035508)
acgtgggcaaggtgcccaaggagctcaagggcgtacgcataacatccacactgatgtttcatttctaccatggcagcctagatgttcagctttggaccttcgtactcaagtagatgctatagaggctagagttttggaaatcggcgatttgcttgaaggatagtggcagtatcagtgtgggcatggttactatactcactagtagttacttgtgactactcaccaccagctagcgagttgtggcgatcattgtttgatttcatattagttagagtggagaactgaataggctgtccaatttggtccattagttagcatcactgagaacataggacaccgtttctaatttagcatattgcaatatcatatccaggagcacttatggtttgataagttcaccagcacttatcgtttgataactttcacaacaagccttccttcatattaatttcttttactgggccaatccattgaaattcgcaaagcccctggcaggtgtatagtcattacttcttatacacagaaaatctcatgggttcattttacctcagggtgactccaccactgatgtttggtaggaccatgcaagataaacatgattgacttcactaatggtcggtttgggtcagattctggtggttttttccattgtaaaattcttaattcttcgtgggagttggattgctattgactaagcttgtcgaccaatttactcgtaaatgctatctgtgattaagtgcttctagactttagcttccttggagctctgtaggttcagtactgcaggacaactaattggatttcacttctactatggttcttatttgttgtttgtgttccaggaa

SEQ ID NO: 15085 - DNA, 814 bp, Brachypodium distachyon
  Intron number 3 from transcript Bradi2g47860.1 (locus Brad i2g47860) derived from phytozome v7.0 (chr-ID Bd2; pos 482 19958 to 48220771 reverse strand)
ccccttgaggtgcgtagcaaattgatctttcttggtttccttttgttgtatgtgtggaaataatgattgctactacgtcgttgttaattggaaagaaggttctatttacgccgtgaggaaattctctgcttgaatcaaagtttgttacggaatttcggaacgctcgctgacagatgggtcatgtgaattccatccttttgtctggccccacctatcgatatcatgagttttccccattacctagcaagtatttagtagtgctatctatctctagtggtcaccctgtccacccactcaccatttgattcctgtgtcctgttggtccagactgattcacctttgcttgtggggttagaaattggtgatcattgaggaattaggactaaaaaaaagaatagggctaaaattatatatagaacgtcagttcacacttatttccttgaaaaaatgaacggtcagtttagacttttgggcggtggatgtaataatagtcttcaatttgccacgaggacatcacaagttgagagagaaaggtaagaagtaggggttgagttgcaatgtttaacatacataatctctggtcgccatcgattgcgatcaaacgactgattaatgaacatagtccttttcctcgcaaaagagtatttgatgggtaagtgctattgtcaacacatgtttgtactttagagagtggggatcaatcaaaggaatctgaaaattatgttcctgaaattagcctacttcattcccttaatgaactaccgaaaattctcttccagatatctggtgctagtgttggagaagtaaagatcgt

SEQ ID NO: 15086 - DNA, 592 bp, Brachypodium distachyon
  Intron number 1 from transcript Bradi3g34450.2 (locus Brad i3g34450) derived from phytozome v7.0 (chr-ID Bd3; pos 368 30594 to 36831185)
gcttagcctcggtctcctccctcaattatacaggagtacgtgtcaaccagttccacccgtagcgaagaattagtgagatttcaaacacgttaacaagttcggaatacattatatttgtatttgtaggattacaaaagatgaaggttgtgatatctcatatggtcgtgccattccagcgcgaggatgattatttctggaagaaagtgccagaacgattgtcgatatcgtatcttcctggaaagaaaaagcaatagtgcatagtcttttctctgcaccattgtttttgcgtcgagaaagaatttgatttgattatctatgacaagttgacaacggagcgaactagtcgactcagctcttcttgtggtcttgcctgccacgatacgagtgcgacgatgattttatcagggccgtgaaaaaaccgagatcggaacgcagtactagtacaacatctcccaacaaaagcacaaaattcgataaacaaaagccaaaatcaaatcaacagaaaatctcaatcagacgccgacgaaaggacaaccaatttctcaatctccgaccaggtctccggcgatcggcggaacggccagcccggaac

SEQ ID NO: 15087 - DNA, 524 bp, Brachypodium distachyon
  Intron number 2 from transcript Bradi2g55740.1 (locus Brad i2g55740) derived from phytozome v7.0 (chr-ID Bd2; pos 542 60273 to 54260796 reverse strand)
gagaatctgctgctcttcccaaacaggtgcagagagttattttagtttttgcatgattgggtctaacatattagttcttctgaataaattgtttgattttgtaagttaatgtccgtgcagagaatcctcccaatcttatcatacataatgtttatttacataagttgatgtggaaaatcctactgttacataaaaagtgtgtcatggaaagaagaatgtagttctatatgtgtagcacactgagttgtgtaccgtgaataatctagcatcacagtacagacactggaaggtttatatttattgcgtttcttctgtcagaatggtaatttcttgattcttgtacttagcagttaattgcttggccccccttttataccctgctcatttcaattggccgtgtctagttatctactgcgtactgcacattactggggcaaggggataaataatatgtataaccgtgttatgttttcctttgatgcagaacagctctgggtgctcgattctgtccctggacaagtaaa

SEQ ID NO: 15088 - DNA, 1005 bp, Brachypodium distachyon
  Intron number 1 from transcript Bradi3g14960.3 (locus Brad i3g14960) derived from phytozome v7.0 (chr-ID Bd3; pos 132 75559 to 13276563)
atcgaacccgaatcgaatcaaggagtcgcgtcgcggccggcggccgagtttccgaggtgaaggtctccaaaacccgtccacccccctcgtgatttcacgcgcggggattcatggccgcatagcatggtctctgatttcttcgggggggggggggggggggggggtttgtgtgtggcgaatttcggattaatctgttcgttgttcatcccctttgatcatcctgttcctcgctggatgtatgggaagtaatttgattcgatcgatctgttccaacttccaactcgctgttttgtgccttgacatgaggcgcgcgaaaaaaagtaagaaagtataaacgcggtttaccggggaggggaacgagcgccggagaagggtgacttcgggagatcgagcggttcccaaaccctagcgggcctgccggggccggcggcggcggttggaggcagggcgagtagagtagtgctctccctctcccgtgccgtgcatctagtcccctcccaaacgtagcacggagtggtgtgttaccgccggcgtgctcgcgaggctggtcggtgcgggatctggtggctcgctccgacggcgaacggcatggcgctcttggtgcctgggctacagagcgaggtggtatggagagcccagccagcagtcagtgtttctcccggcgtcctttttgttggcagtgaggctaccacgcccttgagccctgctgtttactcgtgaggaaaacagcgatttgttttgtaggagtaatgtttctgataagcagtgtcggtgttagactaaatttttgttttcgaaacaacagaattgactcgctgaatagtcaacagagacatgccttcttgactgacatgcttctgaagtattctgattttctttctttttctcatgattaaccctgttacatgtttccttgctctgatcatcaaacacacaactttgacggcagggatggcgaccggtagtgaagccgcaaagtcggcagaggctgtgctggagtggcct

SEQ ID NO: 15089 - DNA, 829 bp, Brachypodium distachyon
  Intron number 2 from transcript Bradi3g02650.1 (locus Brad i3g02650) derived from phytozome v7.0 (chr-ID Bd3; pos 159 4258 to 1595086)
cctctccaagcagtttccaggcagcactcgcgttggtaagttcttttggaccatacacatgcaatttgcagcttttagttacactatcacactttatgagtaacaaaactataccttaaatcttgtattcgaatgccacatagattagtgaaaaacaagaaccatgtggcggaacaaagctaaacctttcatcctttcctaaaatggtttaatattttttagatgaaaaaaagagtttgttcaaagaacaaagatgtgactaaactctgacatgaaaaattcaaaccatcaagcctgtttcataaacttatgcaaagttatgattcatctttacgatagctcgccttgtcaacagcctgagaagactattactttataaattatgatactgtgaaatgtgcacgattgctcataatacaagccagatcaaatcatgtaggtgggtgtggcttgaataaatatacctgcgccctagtttagtatatctatatcaagccaaaatgataatgtggtgaattggagcttacgaatgctacaaccctgggaattgtttggtttaaagtacgatggcaaagtgtacctggagagcgaaggtgtgcgcgacatgtttgttaacgtagaactggtttcctaaatcctggcatgcccagaagtgttatacacacctaagatcgggaccccttgttttttaatcaagtatgaaaaaactggtatttatcaagtcatataacgctggctgttacaccatctttctgtttatgctgatgccgaaaatgcctcgctctaaaatgcaggccgtctggaagccctgctgtttgaggcaaagggt

SEQ ID NO: 15090 - DNA, 940 bp, Brachypodium distachyon
  Intron number 3 from transcript Bradi3g42410.1 (locus Brad i3g42410) derived from phytozome v7.0 (chr-ID Bd3; pos 440 37827 to 44038766 reverse strand)
ccgaagaaggggatagcgcacaggtgacgattcatcccattgcatttgtttggaactctcatgtccaatccactattattaattcagcatatcgcagtcatgaagtggataacttctctaccaagataaggactttaggcttgtaatgtatgcagggtcagggataacttaaacattttagtttctaaccaaaagaccggcactagtttgtccctccagtcttcagcatgtgtagctgaatgtttagaacatattgccgctaattgttcatgtcaagatatacatgctctcttcgcaatttccatctggtcaccattttgaagttgtttagagtaatcatgttaatgcgactattaggttcaggggttggtggctagaacttgaaacgctctacttgtactagaaagaacgcagattttgtcaacacagtgacatgtatatcattttaaaagactgacatagatttcagaattaaatctaccgtacatcattttaaaactttgtaaatacagaaaagactgacatagatttcagaattaaatctacctattcctgactatctgattcttgtaaataagcatactcttgctgacatgtgaaattgcttgttcgacatcgtatcttatactatctgggaattgggatatatttttttgagaacgtggcaggaacactgcctttcagttagaaaaaaaatgaacgcaatttacagagtggcttatttagggaacaagaccataaaccccacagatttagggggaaatgttataagcctataataatttgcatcccctgaaccattcagtttaaaaaatcacctgaacagtttgtatatctgtgaatttcatggtctttatcttcttgttaacgtcataaagttcttccaagaatgaagctgggatctgacatttcaatactcatgcttatgtcaaactttagg

SEQ ID NO: 15091 - DNA, 1036 bp, Brachypodium distachyon
  Intron number 1 from transcript Bradi3g09740.1 (locus Brad i3g09740) derived from phytozome v7.0 (chr-ID Bd3; pos 792 7091 to 7928126)
gcgtaccccccgcaccaccctccacaccccgcgctgtaagcagcctttgcctttttcttcccctgttgtgccatggatgttttactggcttgttctgattgaggtctccaactcaatagcattagcacgagccataggaagaattgtcatcagctagtgaatgtttggggcctgtacgagtgactgactcacagtacaaaatcgcgcgaagaaatgaaactgggtttcatcgaaactgtcaaatatgggcttaatattttacttcatttgttttcttgaccgctataatcgacgaggggttgtggcttacttggcttgctgccattttttcgcaaagcgtgaattggggaaaataacacgggcgtcaccatgtgaaacaggcgaactgacaatcaatgtacaagtgttgaatagtttcttcttagtaacaaacacaacattggttgccaccctgctaattctttttagccaaattctccatagtaagcacaaaccttctagtagaattccctgcaggtattgaagttgatctgcaattccatcattccctttcaatccccaccggggtgggattaacggaacggtgccctcaatgggatttttaaaccgcgataagctgctttgttgtatcactttgagatcaataaagtcattatcgaaataagccaaagagagaaatagaagccattttccagtttatatgatgccagattttacttgcctcgattttggcaagctaggcaaataatataggaataatttagcatggcgaatgccgaatggttttgcagagtacgtaagttttgtagaactcggtaggtgggattgacaatgtgaaatgagacgtcataaaacggggattgttgttcgtgttcagtcacaatgttgatacattattgcaggtgacctagtttgcattagcttttgaactactttattgtcatacaaattcgcatcatgtacagcatgaaactaatcagtatttgtcttcctttgtgcaggtatcacagacacgcgtaacctgatcagcaagttt

SEQ ID NO: 15092 - DNA, 998 bp, Brachypodium distachyon
  Intron number 1 from transcript Bradi3g39760.1 (locus Brad i3g39760) derived from phytozome v7.0 (chr-ID Bd3; pos 419 89808 to 41990805)
cgtggggcggcgtccgcgaagcccaagaaggaaaggtaatgcttcctgcacttcgttcctcgtcattttttttcctcccctttcgcgctagggtttggatgagatgatgtttcggttaggtgcccctgctagcgtgtgcttcctatgacttctgcacgaagctataatccaaagcctgtagactacatgttctgttaactcctttctcagatttgattggtcgattgtggttaggttaagtgtaaaagcctacatttttggtggtcgcggaatatcttgtgtgcgtgcttaggagttaggggttggggctttcattctttctagtggacgttgatacgttatcacgattactgtgagtaattagtgggttggtggtgtaaactgcaaggaaatggtttcccgagcgtttcaattggttcgtgccagcttgtactagatttttaatgaccacggactcttgtggaatcacttcttgcgtacttaagctaatctttgaatactgccgtagttatgtcaaccttacctgcagaatttaaagcctctggacgtgtaataatggatttggccatccccatcaacatggttgctttgaaaataaacctcttgtagaactaagaagcttatccataatgttcattgtgctgaacaaatggatatgttggtgcactcctttttttttctgcctggaactcgatagaaatcattaacagtcattagacccaattatatgtttactggactttgttaatctcattatatttactttgtacgaaacaatatttagcacacactggcctgtttgtttggaagaatattcttgatatgaaatccggaggggtacttctcctatgactacagcagatatagatgtgtcccttctcttgttctcaactgtcagctattttctacggttgtccagtctgttcactgaatttattgtttctcgttgtctctgtgaatcagtgctagtactggagtaaaacgaagaggtggtccag

SEQ ID NO: 15093 - DNA, 794 bp, Brachypodium distachyon
  Intron number 1 from transcript Bradi3g06080.1 (locus Brad i3g06080) derived from phytozome v7.0 (chr-ID Bd3; pos 436 7390 to 4368183)
cggctgcccgacgaccggtgcataggtatttccaggtaaccctcgacccagcttctctgcctcccctaaccccttggccgatgccaatcaattctcccggtacctgcacccgattccggtcgtgctcctgtccgtgctccgatgggatgaccggatcgtcaatctaatctaatattctaagcggaggcatgtgtactataatcatacgcttgcgtgctgccggtgttcgtcccacaagtgcgggaaaaggaatcacttttatgcgtttgattgatgacgcgcaacctcttccgctgagtcggtgtagtaattttagttgaagtaccgcatgagcatcggttgtgttatactcagactctgcatcctgaacaggagttttgtttgtttgtttgtctaccactagacctcgcttccagttacccaagggctgtgctatgccatcttcatagagctagagaacctatgaacttttagcaggatctactattccaactgcatctagtaacccctgaagatttagtttcatcacaccatggcctagcacttttgcctagtcctgagaagctattatggcttatcagtatcgagcatctgcaaattagagtaggacttaggtctcctttcttgattgtcgcaaaacttcatctgtgagtaaagttcaattctgttgtgattatttgcgaatgtgtagtattgtattatctgcttttcttttcttcatcaccgtttaactatgtgttctcgttcctcgtatgctagggttcaaaaggggttgaccttctggtttgcaatat

SEQ ID NO: 15094 - DNA, 688 bp, Brachypodium distachyon
  Intron number 2 from transcript Bradi2g50870.1 (locus Brad i2g50870) derived from phytozome v7.0 (chr-ID Bd2; pos 505 91719 to 50592406 reverse strand)
tttcggccgagcggtccaaggatcctaaccggcaggtgaagtacatctcttttgatgcctgtcaaaacattcacacggaagtctaaatatctgtttgcgttcttcatgttcgaagaaatgcctgaacggaaactggtaatgtgtaggagcagcttgaaggttatattttgttatggtcaatgcttatatgtgtcatcaacacacaaccagaaaagcaacccacgtatggtgtagaacaaggatgttaggagtacagtactttttttggcgtctcgtaggctgatatacagcacatgctgattctcatatgagaatgtggtagccgaactgtctttaccaattgtaacgaatattgactaatttgatcactcttttcaaattaaactgctagagttcttaaaagcttttcacacaagcagcaaatatcagggatctgtgcctctgtggcagtttcattgatggtactgaaaaaagcagattgtttattcactctccaactttgtttatagattctctctgtgctgttttgtgcttgatagacttacaaatgaaagaggaatgagaagtttgttttggcatctatttattcaacgagataaaaattatcttaacaattccttactttggcagttttgttagtgaaaatttatgtttttctacctaaaatccattttatgcaggttggagc

SEQ ID NO: 15095 - DNA, 1030 bp, Brachypodium distachyon
  Intron number 1 from transcript Bradi3g04630.1 (locus Brad i3g04630) derived from phytozome v7.0 (chr-ID Bd3; pos 318 0993 to 3182022 reverse strand)
cgcgcagggctcctcgtcggccggttctccatcaggtaactcccgtttggtgctcctttgctagcacggagagatctgctgctgctgcttccgccggccgacctagtttttcttggcggcttcccctcccctgcgcagtttcttgactagtagttgtgaccatcagaaatggttctgttaggtttcgctgatgtggtgtcccctgttcggtggagagggagagattttccccgctctgtgatgttccactgttgctctgacgccggaggaaattgatggttcgattcaaatttttttttgttaatttcttctactggagaaacgtggactcctgaagcatcacatcgaatgttgtgtgatcgaccttcttgtggtgtctaattttataccgctagctggccaagccgattagcctctcccaactattgtcatttcagagtacgctttagctggtactggtaagatcgggtttcctttccaataatgccggatatgccatttttaggccaagtacttggatgcctgggctagctgatacgctttagcctaggtaggcctacaaactcacaatgacataggcaaggcaagccggttcctgaacgaaaagaattgtcctggattttcttaatgttctcttggacttctgaatcttcctgtacatctataatcacttcacttgatgtccatttcagttacttgttgatccatatttgcatcacatgtttgtactaatcaagtttgttatttattttgctttacagttcacaaccagtgacatcggaagagatttatctcagaaaagtttgattgtgtgcttgcacaccggggtgcttcgccctgagttatcctgttgagtttatcataagagtgtttgctctatagtggttcggtatttattttagttctgccctttggagcactggagtgaagagtgagggattttgtcattgcaggccacgacctttaaataggctgttgtaaaagtagtgcatagttgccacattcatctttctaaatatagattgctata

SEQ ID NO: 15096 - DNA, 855 bp, Brachypodium distachyon
  Intron number 1 from transcript Bradi3g00400.1 (locus Brad i3g00400) derived from phytozome v7.0 (chr-ID Bd3; pos 151 157 to 152011)
tccacgtcgcctcccgcaagggagacctcaaggaggtacgcatctctctccttttccttttttgtcgcacaatttaatttctgtctacaaaacttgtatacccaatagcacggttgagatgaaccttgtatgtttccaaatggatgtgagttaccggtttgatagaagaggattgcagcctttgaaaaatactccctccatttcacaaagaatggcacgcacgcacttcaagattttactttgaccaacaattagactaatgatttgagatttatgtgttacaaaaattatatcattggattcgtatttcaaaaacgtttccaatgatattaaatttgtaacatataatctacatatattggtctaatcgttggtcaaagttcgaccttgaaaagcgtgggcaccattctttgtgaaaaggagggagtatctcacttaaaagagaacacatttggacaaattaaggccaaattatgtgattgttagaccttgtggatcacctattttagttcattaatccaaaaaaacaagaacctttggatgtcctttagggcttgtctatgttgaaattttccatccagctctgccacaatatccaaaatggagtttgaaacacccgagactatttagttgttctcattcctaggtcttcccagctcttgtctattcatttgtagtatcatgtacccatcattcttgtcaattcttggggccaccataaactaaatctgtatgagtgaatagttaagccagttataaagcaaacatatagttttttattagtcttaacccattggcatgctgactgatcaagcccacatcaattcttaggtgagacgtctcctgactgaaggt

SEQ ID NO: 15097 - DNA, 1016 bp, Brachypodium distachyon
  Intron number 1 from transcript Bradi3g13830.1 (locus Brad i3g13830) derived from phytozome v7.0 (chr-ID Bd3; pos 123 29445 to 12330460)
ccccgtcgagctcggccgcctccgctgcctccaaggtcagccagcgagctcagttctagctatgcgtgtttcctgttcctgaatttgacgacatttggttgtgggcgtttcagaatttttgaattagtatattgcacaggatttgaattgggcaagtactcctgttagcagtagtgatgattttaattcaagtaggagtacctattagtagtacacagaatttgtattcggcaagtgcatttggtttgttcttgctgtattcgtctgccagtttacttcctgctgattacctgtatgggcctatgaaaggacgaaaactttgaatattttctgaccacagtttggcccatgtgtggcggactcgcttccacggctacctgatgagatgtgcattcctcctcttaaatccgatctacatttattccccgtgaatgaactgttcctaatcctacagctcacagtagccttttaattaattgtctgttcaccaccaggattaaataaagaggattatacatttagactcccgaaaggttgatttgattagtgcatctacctatcaattattatcaaacttaatttgcatcactgatttatccttgcactcaaatttctaatggctgaaaagtttgtgttctttgttgcagtgctgcagcttggctacaaccagctctcagggagcataccaactcagctgggtcagctcaagaagctcactgttcttgcccttcagtccaaccagctcaccggggcgataccggcgtctctcggagacttgccggagatgactcggctggacctgagttccaatcgcctatttggctcgatcccttccaagcttgccgatatcccgaacctcaaaacattggacctccggaacaatacgctttcgggaagtgttccttcaggtaggtagtcttcatgggttacaatgtgtgagcttctgctgccatctgaattgtcaccgtttaactgttgtaggactgaagaaactgcaccgaggatttcgatttgag

SEQ ID NO: 15098 - DNA, 850 bp, Brachypodium distachyon
  Intron number 3 from transcript Bradi2g50970.1 (locus Brad i2g50970) derived from phytozome v7.0 (chr-ID Bd2; pos 506 51430 to 50652279 reverse strand)
ttagactctgctttgtggacattatcaaatcaaaggtatggacatcatcagatcatcttgttggcatattccagttctgcattatataaagcatgacatttttgaaatttagttctcttataaggacactttgtttaggttcatccttttcttgctcttcagaatattttagctgctttctgtggataatggattattatgacaagatgcatcggcgagatgaatgttttttcccccatgaagcaccagtaggatgtacattcgcaagtttttcccatcaaaaaatgtttacaaatttagtaaaatcataccgttacactgtcatataagtttattctgcttgaagtttagtaaaatcatggagcatacaatccagtaccaaaccaattatcggtccgctaagaaaattggcttctagagactgaatgagtagttccttttgtggcttggcccttgcctgattccaccatgttccttcacaattcaggacatgcttcaggtcagacaaggggaaacggtcctgtttggtgtattcctttatatgcaactggctattgcttattcactttactctttccctttactaaattctgttagttccgaggcttgcattttatgtgttacctactcattttttaatttcagttaaaaaatactaatattttgaacactgtaatgaagtttagcctgcaaataaaccggtcgagtgcaaatttaccaacacacaattttattatcaacatgcttttctttctttgtcctttttttatgtatcatttcactggcaatgacgttgcatatctcttctgctgcagattgggttttggaagaagttcaacctcatattcct

SEQ ID NO: 15099 - DNA, 662 bp, Brachypodium distachyon
  Intron number 2 from transcript Bradi3g24960.1 (locus Brad i3g24960) derived from phytozome v7.0 (chr-ID Bd3; pos 246 98568 to 24699229 reverse strand)
ctcaggtcgagtctggcatcgcagccctcctccaggtcctccacccacctctcgtctctcgctttgttttgataattccaagattcaagtatgcatgccaacctgttaaatattgtcttcactctctggccttctgccctcttcatggcttacaatcaccttcttgttgagcttcagtctaatcccccatggaagagtgcctaactcagagcgtgtttctttatgcttaatacaatgtgcagagctccagccgccttctaaaatgacctatagtttactcatctcattgttcctcttgatgaagattatgtccaaatcttttaatttaatgaaatagggacaaagttgtgataatccctatgtttgccgagtgtggcacacctctatttgatcaccaggtgtcactattatccatgccttaagactattactttggagctttgtcaaatgataatattgtagttacattggcttgggtaaatcattatcctttttgctgagtttaactttgactggtttctcatgttgagatgagtaaaatctggcaagagtaacaccttagaaaaccatctggagtggatgtacagctttctaacttttttctcactgtaattgatatagattactaaaaatatagctctcttcgttttgaaaggttggtg

SEQ ID NO: 15100 - DNA, 943 bp, Brachypodium distachyon
  Intron number 1 from transcript Bradi3g08370.1 (locus Brad i3g08370) derived from phytozome v7.0 (chr-ID Bd3; pos 654 5881 to 6546823 reverse strand)
gtacgagaggcccagctgggcctggaggttcgacggtacgtacggatgtatggtcagctcttaacatcccagtttggatctttgtagcgagacatgtgcctacttcgaaaaaaaagttagtttcttgggagatacagatacttgtactgatgcgacgatagctgactaacatattgaagtgatgcgtttgatgttgagttgtagttgaattccctttatatagaaatgtaaccttaaaaaatgaaaaattaatgcggctattgcctgtttttctaagataatgaagtcatttacacagcgtctccatgcctgacgtgtactcttaggtcttagccaatcgtccaaagttactgttttgagggaacctttatatttttcctgtgatggaatactggatcattgtgctcttttgggcttttcagtataagctgggctatatgcctttctctaagaatatagtcacaaattgaccctatttcaattcatctgttaggaatgatattctattcagtgttattcctgatgagtgccaatgtagcatgttaaaagtgtaagaaaatctagtacatatcatccaaagtttgttatgtgtggttgttttttatcacaccaaataactcttcttgtgcattttgcaagctatctttgcatttttttcgatgtcttgcctgggtacctagtcaacttagaacattcattatctatccctactgaacaaagttttgcatatagatcagcctgaatagtattcagtttctcatatggattagcaaagtcatatctcacactgaaagggaaaaaaataggtgtgcgtactaagctcattacaaaaatgacaaaacaaatcctccaatgccatgctcttctattaccaaatgatcacatctatgccttaatgatgtgagcactgaactccatatatgtccagataataactcaacca

SEQ ID NO: 15101 - DNA, 1053 bp, Brachypodium distachyon
  Intron number 2 from transcript Bradi3g33890.1 (locus Brad i3g33890) derived from phytozome v7.0 (chr-ID Bd3; pos 363 23127 to 36324179)
acttcctgtcgactcctattgggagagctttatctgtgagttcactagtagcttgaaatccttttttggtttgtattagtagcttgaaatcgatcaggttaacttactgaatcagttctagcttctgtgcttcgtaatcagtcgcatgcttgcatagatcatcacggcttcgattttgcttatgacatgtcaacatgttttgcaaccgatacaacctgctgctccttactccggatagtagtaacgtgcaagtctatataacatagaaaagcaggttgtccatgacgagtacgtgtggggtgaaccaaattctcattgaatgggatttttccattcgaaggggatcatactagtttgttcctaagctctgatcagttccgggatttagtttcctgtagtatactgtgtgccaactgtgcaggaagaattagttgttcgtaacacaagatcaattaatctgcaggcttactactctgactgtgggttgcggtgactttggtattgatcggaattagttgttcccagcagttgattgatattctcaagcctgatacttcttgtgaggctcttggattcctttccaaaactacatggctaagttaaccaaagcatgatcataactcatgaaacccctataaggttaagagtgtgaagatgacatgttaaaatgccatcaaagattgctgctgttgaaatcattctcggatgcctcataagaagaatgaaaaaccaggaaaggagagagataatcaaatatgtcaattcatttctctctctagatttcattgagaagtttatcctaaacaaaatttctgttagtccatcttccagtcagaaatcatgctaaccgagttgtgcatgcacttaatatattgtttatgatccgagcattatttataaatagtgctaacttcgagtagcttctcatgtccgcttttatgtctacttcaatattatcttctgaaaacaattatataccacctgagtacattgtagtgctaactatcttcttgtgcagacactctttttcgtttggtttgcactatcggggtg

SEQ ID NO: 15102 - DNA, 633 bp, Brachypodium distachyon
  Intron number 3 from transcript Bradi3g06190.1 (locus Brad i3g06190) derived from phytozome v7.0 (chr-ID Bd3; pos 446 4301 to 4464933 reverse strand)
aagagccttacttctactgctctctggattgcaaggtgatttattagaactagtggtctacgttattccatgtgattaactgaagtccgatggctgagaaaatagtgttattatatgcgatagaattatggtgactgaccaaatgatgtgattatatccaattgaattatgatgactgagaaaatcacagaacacaattcatgctaaatgagagaagcagcacaattgtgatgtactccctccgttccataattcttgtcgaaatgttacatgtatctagacgccttttaggaatagatacatctatttttgggaaaattgagacaagaattatggaacggaggaagtagattatagaaggtatagttagagcactatctgaccttgtttctcaatatccatatcaaagtatgtagctaccggaagtatctgattagacaatcaactcatagcactacaaaaaccaaactgaaaaataattagcaaatctaaagaagtatgctcagataaaaactaaatgcaattgtagctcactgtaagtttctggaagtacatatgaaactatatgtcaggttcactcatctgtatttcttttcaggttgaatacatattacggaagaagaaagacttgtc

SEQ ID NO: 15103 - DNA, 666 bp, Brachypodium distachyon
  Intron number 1 from transcript Bradi2g59400.1 (locus Brad i2g59400) derived from phytozome v7.0 (chr-ID Bd2; pos 571 11654 to 57112319 reverse strand)
ctccgtcagcgcgcaggacaccgagaggatcgaaggtatgctctttgttttttcgtgtgtgtgcgcgccgcagctgcagccaacagaaaaaaagaaaccccctttgatctgttttctgcttctcgtgttggggtctttttctcctccttgctcgctgatgtctttgcgcgctgtagactgctagctggctgctgtgccgccgggttcggtcgatctgccaagtccgtgccgtggtgtcctggatctgattcggccgcatcatgccgattgatttgaggctctagagggagatctggagcaaaagcgttccaagatcttgaaatggaaccagccccgatagatgcggtttttattatgcggtcgcatgttccaaccgtggtcaccgacaggcaccgcgtgtctggcttcgttaataagcaagcaaaggccaaagggcgcgcctcaactagccaaaagttagcaaataatctgtagcaattaaacctccatgtaattctggactaggctctgcaaatttgcgtgtttcttgtcatgcttttggcaacagcttactcaagtgtttttagctgagcctgtgattgactgattgtgctgtggcagtgctccatcctcacgttttgttcatgtggttttgatttgatttcactatttcagggagtgctggtg

SEQ ID NO: 15104 - DNA, 760 bp, Brachypodium distachyon
  Intron number 2 from transcript Bradi3g16170.2 (locus Brad i3g16170) derived from phytozome v7.0 (chr-ID Bd3; pos 143 29638 to 14330397)
caaccagcccgcccgcaagcaacgccgccgcattggtgagcgaaacccttgtgattttaattttagtgtttatcagccgtgcatatgtaattataccatgttatgtgtcgcctgattataatagcgatgtccgatgtttgcagtgattgtggtttttaagttgtgacatcagaacatttgctaactaggatgactgcagtatatatgttgtgttgatgttagccggatcaccttagctatgtcgagggacttgttttgtctcaactagaatgcatatttgctgtaatctgaaaggaatgactggtatatgctgtattgtctagtgaaagaaatcttgcttatctggcactggaatgtctctgcataatcttcctttttctgtaactatttccagttaattgtttgctgtaaacctacctgaactcttataactgaatgcgaggtagctgttagatgtctatattgtgtccttttagtgtcacggtggatgcgtttccgtttcacaatgggaatacttctaatgccaggcattgaacaagccgttaatactgtttgctctacatccgtttgttgtttagttggacatttgatctttgacaatgtcatgatgtagcagcatcagtaaacagctatcagcatatttgggactttgtctcatctttcaagttttttatcgtgctaaactattttaaaacaaccatcttacgttttgtattctaatacagcccgccaaaagaaggctgtgaagatcttcccccgc

SEQ ID NO: 15105 - DNA, 1034 bp, Brachypodium distachyon
  Intron number 1 from transcript Bradi3g05370.1 (locus Brad i3g05370) derived from phytozome v7.0 (chr-ID Bd3; pos 377 6747 to 3777780 reverse strand)
gcagtgtaaccaacttcttcgtcgtctgccgcaaggttagatgttttcagttcaacgggaacgggaaggattcagattgcttgcattgcgaacaagttaatagtagtgcttatttgtcccgcagaacaacaagtagatgaccaactggtatgaaatcttagcaatgcggcaatgcctatctctcaaatttcttagctgcaattctgattggcactacggcatttgatatttctattctgtagtggttttccatgttgtcatttttttttttacaaatgatctcgcgatctgcttccattatcgaaataacggaaaaggagtccacccaaaacgcgccaagtgaagtaccaggctgcaaacgcagtcccgaacacacgctgaacaaactgaaaaaaggaaacagcaacgaaacctagttacagacgatacccaggattgtcagcaagttctccaggccctttcatccaaaaacaagtagagaaaccccctgacggactagagcaaacaagttttttatccccttcgtgcatcctctggaccttgaatcctcgcagcgtccaccttcgcctgccctgggtgatgcgcaaatgcctctttctgcatgatcatcgcgccctctcggagttgctccccatcgccagcattctgtagacctgcccagtatttcatgaaggcacaagcaagacaaataatttcagctggggatcgaatcaacttcttctcaaagcattttccatgtcgtcataataatgacagttcaattgattaagggaccttcacgtctttcttcgcgttaactttaagatggtgaaataataagtaataaccaatgatctttatacttggcaaatccaatggctgtgttagcatttatcttactctcatatattttttccagtgaagctattattttgatttatttactctgccttttaaagataatcagttctgttatttaggtgatttgttttttatcataattttttaacatgtctgcaggaggaacatctgtcaagtgaaccattgtctgttca

SEQ ID NO: 15106 - DNA, 594 bp, Brachypodium distachyon
  Intron number 3 from transcript Bradi2g49560.1 (locus Brad i2g49560) derived from phytozome v7.0 (chr-ID Bd2; pos 496 18933 to 49619526)
cagcagttaaaaggcagctgttccaggtagttcaacaattgcttgtagatatgtttgacactagcatatgatgagaaaaaacatgcagtgtgaaagattgacgaaagtaggcctttggctcattgttaccataacatgagaactggcgggactatgagatcagctaagcatgtagggaagctgacacacccttaaaagaaccattttttttgttcttcagatgaaggctggcagtgaattttgtctttacttctccatcttaagcactgttagtttttgtgaaacacctcagttgaatgcctttctactaaaaggacccacatgcatgtaaaacaattacttgcttcaaggaggcattattatgcaagaaactcatcttgctttatttggataattgaccactaaatgtgcatgccattccgaaccaaaagctcaaagtgtgtagccatcaacatttcacaaaatctcaagtttatgagatcatttggcatgatacaagaaagcatgactgtgaagtctgaacagttaaatttttatgtgtatttgatttatcattgatatttcacaacttgatgcagtatcggtgcttctagg

SEQ ID NO: 15107 - DNA, 859 bp, Brachypodium distachyon
  Intron number 2 from transcript Bradi2g57660.1 (locus Brad i2g57660) derived from phytozome v7.0 (chr-ID Bd2; pos 557 58391 to 55759249 reverse strand)
tttactgctactggtagacttgcagaggcaatcaggttaagaaaagctaatagaatactggcagcttcctggttcctatggctctaggttgtgactaatgtttatgctatggcctaaggctaataataaacctttctacttggagtactccttgccgttttagtctccctttttttgtgctccctccatcccaaaataagtgacgtggatttgtacacgagtctatagaaatccacgtcatttattttgggacggagggagtatgaggttatcatcgctataccagtacagaaggatgacttttctaagctgttccgtttttattgttattaatacgtagtcacgtcagctgtcttggcttaattagtgaagaacccaacctctatgtgtgactcagataaacatagctcaaatcttcgttaagtgtagcatctgatttgattgccttctgatgcttcttaggtgtgttaaacacattaaacggcaggagcgctatatgacacatatgctacataaatactcccatgaaagagtgctataattacaattgagctaacaggagaaagtgtattcctttttcaagttcatggtcatacaatgttgtaaccacttcattgagattctgtggtattagccacaacttgtgtgtctgcataaaagagtaactaaaatcaaatggatgatgtgttggataagtgtatcttattcacactgcataagtagccacatcaccatgcagatcatgtttgaaccatatacacataaagagttttttaacacctgccattttttttactgattgttatttatcgttattcctgcagattcaatcatattccccgaggttccgattgcacta

SEQ ID NO: 15108 - DNA, 827 bp, Brachypodium distachyon
  Intron number 1 from transcript Bradi2g57880.2 (locus Brad i2g57880) derived from phytozome v7.0 (chr-ID Bd2; pos 559 31098 to 55931924 reverse strand)
gccatcgcgcagaccatcaagttcttcgtcacgcggtaatcgaaaatcctcctcctcctttgaccttcatttgcttcctccttctccctcgtttttgctttgtgtgggaatttgttgaggtattggagatccggcgttccgattctcctttctgattctgctcgaagcgatgctaggtaggggacgtatttgactcttaataaatttagttctattttttttaagaaaatctgagataggaatttggccgtgatgcgcgataacccttcgagttaagcggaagagatggtggttctgtgtggatttcttcagcttgaatgcatcattacactaaaattcgcagaatcacatgtaaagcaatttctcaaattgcacgtttcatccggagatccttatcatccaagtcactaagtcagaaatttattttattctcttccaagtggttataggtagatttgagtttctcacctgccttgattccgattgtcaacttccagttagatgatcatgaagctccgaatgatactctcatttgaggcaatggtactggatttcatacagttttttttacaggagatttcatactacagtgtttgtgatccttatatgccaaaaagtcctttatagtcttaataatcaaagatgttcatttgggccttagcctgataagtagcttagcagtagcataatctcagatagacaataatttttgtgctaatcattgtatttcctgcttgttaatgtcgccagtaagtttttttagaagcaatgcttcattaggtttgatgtgcactagttctgaaatgatttaggtataaggagaacag

SEQ ID NO: 15109 - DNA, 704 bp, Brachypodium distachyon
  Intron number 2 from transcript Bradi2g49890.2 (locus Brad i2g49890) derived from phytozome v7.0 (chr-ID Bd2; pos 498 93927 to 49894630)
gaaagattactttcttcgaggttgtttcaaagttattttgcttgattctttacattagtagttagaaattggatagcttggtgcttctgattagtaaaaccaacgttcttatttatggtagtgtaaatagctgttttttggaaaatttggtatggctgacataaaaatgaaggatatgtttcagttagctcgagattaggttcaaaagcacagaacatggacagttatagactatgtttttgtggtgggaacaggggaggggttgaaatggtgaaccccattggccaattggtagaacaaacaacataagatatcaacttaagggtaaagattgaagtgtaattcaactgttgtgttgcatgttattcaagctgctagagatccacgtaggctcgaaatcaagagtttatttctacacctcttgctggatgtacatactttataaacttcaattaagttggacgataacctttaacatttcttactggttatcagtgtttcattagattattctatttaagcaagaagattaggatagactagatttttactctacttcaattatgtcagaattttttcattcttattgtgcttatcatttctaagacctaattgtttaagttatgatatataagaatttgattatttcttctgcagttgtcccaacagctttggctactgctcttgatataaatttgagcaac

SEQ ID NO: 15110 - DNA, 985 bp, Brachypodium distachyon
  Intron number 1 from transcript Bradi2g41890.1 (locus Brad i2g41890) derived from phytozome v7.0 (chr-ID Bd2; pos 423 15463 to 42316447)
gaaagccagtctaagatcgcctcgaaggtgctgtgctcctctctatgactcttatccttttcggtactaccagtagtatccggttctttgttttcttcctttatttaattgttgatttctatgcatgtttcggtgatcttcagtataccaaagattccttcccttattagcattttgcttaatttattggtacgttgtactatatctgaacctaaatttttgactcacatatgtccaaatatgaattattttttaaaagcgtctagatacatatacatgtaatacaacaatttaggatgggagggagtatttgcttacattggtctgtttcaaagaaaaattccatgaacattgtgcaagtgcacgtcatactatgaatctatgatataccacggcaccacggcgttacgtccttttaacaaatcaaagcaagaacccaggttgcccatgctgtcataacagttcctgccttcctggcagggcaaggccacggttgtctttggacgtgtgctgatgaattgcacctttggaaaaaaaatcatttttgttggaccagacactcggggcatgtccatcccaatgtcacgcctttgactttcttttattgactgatcaagtgaacacatatacatctccccaaaatcatgccatttttctgcgacctgcctaggacacactcggattgtgttctaatagttacgaagctcctagaatctacaacttttaagtgaactgtttgcacagtaaatatctttactgtactactgcagtgaggatgatcgtagagctgctgcacgtttgtaaaaaaaaaaagatgttcggcgtcggtccttctttactgaaactttgttcagtttatccttatctaaagtctaaggtttaaatttagatggcattgcgtaaacaaaatttgtgtttaagtagcatacctgatgtagttttttttgtgttctgaatatttctttgcagctgtcccccatagctg

SEQ ID NO: 15111 - DNA, 920 bp, Brachypodium distachyon
  Intron number 1 from transcript Bradi3g39900.2 (locus Brad i3g39900) derived from phytozome v7.0 (chr-ID Bd3; pos 421 38586 to 42139505)
atttatcgcttcccgtaattcgctctgattcagcggtactatgcaatttcatttttatatcatctgcttgttgttattgctctgtagtgtttcacggaatgatggatgttctgtaaagagggtggagattctagccgtgttctcccaaatttgtttgctgcatttgtgagcagagcggtggctggtctggaccaagttggcgcaactcgtatcgtgcaattttccatttaggatccggttctgaatcatttcgtgcatctcttcgcggtggataagctcagaatgggatagcatctgaatgttgcccgataatcctttgctttccatgtctttgttgtttgagggatgctaatttagtttccatgtttttcgtcaagatggcatggattaacttgtctggagctaccgtagaatatgggtgttgagttgttcagcaggcaacctctctagaagtctatatttagttctttactaccgtgccttgtctagtgtacaactttgttattcttaatttcctctgcatatgttcagctaccttaaatacttgtctcggatagtgtttcggctgaacatcgttagggtctctttgtgttaagattctaaaaatgcagaaagaggaaaccgactaggattaagatgccatgcgttgttcaaatctacagtaagtcaaaacaaaagaatttgcaaaagtagttgtttggatgctccacaggaaatcgccaagagtgctgtccatgctaaaacttcttagttcccaatttcaattgttgcctattagagtattcataactagatgccaactggactaggatcgaccaacttcagtcttcatggtaatcttattttaaggctgtattatgttccaccaattcctatatggcagttatccatatatgtgcaggtgaaactacttgaactgg

SEQ ID NO: 15112 - DNA, 964 bp, Brachypodium distachyon
  Intron number 1 from transcript Bradi3g23160.1 (locus Brad i3g23160) derived from phytozome v7.0 (chr-ID Bd3; pos 225 16362 to 22517325)
cttccagcgtcgccgtggagaacctaaaccccaaggtgaggggcgcgccgtctcttcccttgtcctatccgtttcctgattttctttggggaggctgggtgcgcttgtgtgatctcgatttggcgcttcctggggtttgtgctccggttcccttcctgtttagttcgagatggcgtagtcgcggtggaagttgcccccctccggttctcgttggttttgttttgggggattatataagtgatgccgaggcagactgcaaatctgatttgtactagctcctatgattgacgtgtgcaagtgtgctactactatgctcgggtcgtcagaatttgtaaattcaaacatttgaaagtgaggaattatcggaaggggagtctcagctaaagaggttttgattttaatgtgatccgcaatatgtagttattcagcagtttgactatagaactgcagtgttttacctcgatgttgcgaattctttctcctcttagctaaccgcgatgtagatctaactagtgttgatctgctgaagcaccgtattgttgtttctgtgagtgcagaggtgctgctcagctgccagttttgtcttgtgaagatgttcacatgctagttggtggcaagggaaaaagcttgcggatttttttaaacatctatagtttgtgacagggcatacgaagaactgagcacttctctgtgtgcatatattcttccacttgtagttcttatttacagttacatgatcatttcatccatgtctctgccatagcaagacaaaatggaaacccttataagttcatttcatttccggtttcaatatgtacttgcaatcccagaacttgcattctgtgttatatttgtctgatcgactgaccaagtctgtcctggacttgagtaaatgtgtgcattttctaaggcttaggcaagtacctaattctgctatcactggtgcaggttttaaagtgtgagt

SEQ ID NO: 15113 - DNA, 687 bp, Brachypodium distachyon
  Intron number 4 from transcript Bradi3g34260.1 (locus Brad i3g34260) derived from phytozome v7.0 (chr-ID Bd3; pos 366 84632 to 36685318)
ggtcagaactacattaggccactggtagattttaggtaatgcaaatctgagctgagaaaatctaggggctctgtttgattcaaataatttcgtacaatgcttgctgcacttatatatattttccgtgtgaactgggatggacaacacgctacattatgcctcagcagaccccttcattataatctcttactgctttcatgcggtgcataataattatcccgcatatagactggcaaaggccttattttgtcattcatgggatgcactcttcacagtgtgttggacaaatgcatttgaatattgatgagccccaaaggaaatttttgaatgcttttacacatatatttccatcatgttagtgaagaatttattttgaagaataataataaatctatgcttaaatttccatgcacaatatcttacaatttccagttccggaagatgtgtgtgccattctcttgcagcaaatagttttttttttaactaatgttttagtcagagtatatcttctgtcaacagaacaggggtatttttgttaacatgcttaggtttattttattaccatcaggtgaacgggccttcctactccaatttgatctttaacacactgttatggtttcctcatcatcctcacattgttaccatgcatgcacaggaactcttacgttggtaatatttctgtttttg

SEQ ID NO: 15114 - DNA, 937 bp, Brachypodium distachyon
  Intron number 2 from transcript Bradi2g46310.2 (locus Brad i2g46310) derived from phytozome v7.0 (chr-ID Bd2; pos 467 11041 to 46711977 reverse strand)
ccagaattgctgctagagagggacaatctagttctgtaagttgccaccgtggtttgatgcatccgttaatggggatctgttactcaaaaatgttgcaacaatcatcatgtcatcttttatgaatattgacatggtttcaaattataacttatgaactgacatgttaaagttctggtaaacaatagctattcgttttgtttcatcgatcgaatcttggcacttgcaagtcggtacttgaaatcccaattacattgtgccaactaaagatagcctggcataatatctgcctgtgagcgcttaaaacctgtttgctgggtaacttgacaccatactcagaactaaaaataagctacttccttttcttcacaaaaaaaaaaagctacttcctccgtccaacaaaagatgtctcaagtttgtcatgtatctagacatgacttagtgtatagatatgcattcaaatttggtcaaagttgagacatcctttgttggacggagggagtatatggattagcaaaagcttaaaatttaattatcccctgttgttcttactcttgagctttgtgttcttgacttgcatttcaacttcgtagttatgcatttccttggtgtcacctattttctatggcattgcatgtctcgattcctttcctcatttttctgaaatcttcatcctccattttataagaagtgcattattgtcctcctcagagccaaagggactgttcaatggcacacttgtattcatatggccggcactcgccagctgaaaattttacttcatggacagttaatcacactcaggctccaatatcaaacagaaggtggttgccaagaaactccaatggcccggaatttgagaaacggaatgtgcgactccttaataagcttatttttctgaccttcacttaattgtgcactgacaatttctcgttcacag

SEQ ID NO: 15115 - DNA, 592 bp, Brachypodium distachyon
  Intron number 1 from transcript Bradi3g23240.2 (locus Brad i3g23240) derived from phytozome v7.0 (chr-ID Bd3; pos 226 94578 to 22695169 reverse strand)
aggaagaaacctctgctttgcttcgtctccaagtacgcgattgctcgataacctgatgaatatttacttgtgattgccgaattttaggaattccgcctttgtgttctagctcgctgttggctcatcttccctgttcgttactaggctaatgataggagtagctagacttgaggaaaaacggatgattcccccccttaagtatcctattgtacttctttttgcaagtcttgagatgattctcccataggcaatctacttccgatgaagtactttctgcttgagtaaatttagcttccagttgtaggtcatttgagtgcttggttgatcctgaaggaactagtaataagtagtctctctacacatggtaagattctagaataatttgtctctttcttttttggataataaatgtcaaaaatgttatcttggtagtactagttgaaatcagatgatatatactccatttttcatcggaagctagaaaatctgccaaggagacaggagagtggcatttgaacaaaaaccgcagttgctgagctctgaattctggcatgtaggcgacctctttcaggggctacgacgagtctccttc

SEQ ID NO: 15116 - DNA, 624 bp, Brachypodium distachyon
  Intron number 1 from transcript Bradi2g41310.1 (locus Brad i2g41310) derived from phytozome v7.0 (chr-ID Bd2; pos 415 74700 to 41575323 reverse strand)
ggcagtgcgtgaccgaactgaaagtgccaagagtggtgcggcgtcgatttcgatggccagcgatcaacagcattggaagcaattgtggaaaatggatgtcttaccaagggtctgggtcttctggtggtgagtgttgcgaggtatcttacccgattatgcaactctagcccggcggcatgtcaaggttttaagcacctgtcatttgtgtaaatcttcagtagaaacacttttgcatgcaatgatggaatgtccccatgcacgtcaattctgggcagcggcgaggaatatgcttcacttacagactccacggctgcatctggatacatgggcaactgatattatgtgtctccagaactttgatcagggaagagggagttgatcatctctattatggcagggatctgggattctagaaatcgatgggcgcatgaagatattggttttgatgcgattaagtccattgaatcaattacagagtcgtgatctctgttggagaagaaggtggctgggagctcggggaagcaacctaggccggcatgtacctagcatggaccgccaatgggaactatcaaagtaaatggtgatggtgcgatcaatgaatctgatgaccgggcggcaggtggg

SEQ ID NO: 15117 - DNA, 837 bp, Brachypodium distachyon
  Intron number 2 from transcript Bradi2g48150.1 (locus Brad i2g48150) derived from phytozome v7.0 (chr-ID Bd2; pos 484 55496 to 48456332)
gtgagcagggaaggtaaagtatgttcctaatgttcttcttctttttatctggggatggggaggagtgatttgtgcattatgaagagggatagatgggatgtgattagtctggcaagtttgcccacgttatcagtgaggttttgcttgcaatatcaacgcagcgtcactgacgcaggttgaccccttcgcgaaaggtacaacatgcattgtttggtttggctttagattcgtttatgcaaagattcattaaaagaacatgttgccatgcagttgttcctacacagttctcaatgaaaacggggccggcataggaactactccgtttttccaatggttctcactttggaccaatcgtcaatgctttaaaagcacatgctagttaataaatgcatgtttgcaaaattggctggagatgttcgcatagttcgttagtaatgtttgtgtgttatgtctccttgtctttggttcctttattttctgcgattgcagtccgacagtatatagacacggactatatataatataaattttacaaagtcaggcatcaaagtgtgacctttgaggatcgaactctggtgggctgccagcatacctcgctggctgaccacccaagctatgcttggttctctcgtctttggtgtgatcttgatagtaataatttgtcatggcatatttactaaagattttggatttttttctgtatgtattcaagcttgcgcttcaatccttacatctccttacaaaaaacggaaaatggcaatcatttccttcaggtcccacctcgacaaaagaatttgtataaccaattcatcttatcctctttatctattgcagaga

SEQ ID NO: 15118 - DNA, 940 bp, Brachypodium distachyon
  Intron number 1 from transcript Bradi2g58020.1 (locus Brad i2g58020) derived from phytozome v7.0 (chr-ID Bd2; pos 560 47382 to 56048321 reverse strand)
ctcaggaagtgttcctacgaaggttggaatctttgctttcctcttctggtttccttctcgagctgtgtgtgcggccgtcgcctatgctatgcatgtttactgttcgcttaaattactcagtgaaaggatttgagaagactcgttcatgtatgttctggaaagcagtctgcttttgtgaagtactattgccgattaaaacttggtttggaacttgtcgactgaaattttgtttggggtatttccttttaaatatttgttatgccagcaattttcctgccttttgacttctttctgtgttccttcctgcttgtggatggaagtagtaactgttcggtgtgaactgtgactctgtgattggaagctacaggcctggtccatcaactcccttttttgctaaaatttcctatagggcaacatgaaagaacatgttcaattgttgtaatcactattaggtgatgattgttcaattatttagatggatggctccttctccacaaagctgttcatttcattgctgctagtttacttttgaggcaactctgaacaatttactagcagctaatcattaaagatcagaaaacttagttcctgccctatctttgcagtcttgaataccatttaggtattttcatggcaccaacaactggtttctgactcggtaaagttttcgggcaattagctagcaagcgtatcatatttggaatttacggagtatgtaaatttaatttgaacacacttactggttcttttggctgacttggtgccaattatcactactgactggtcagtgtttttaactaacttaactgccaatctgataatgtcatctctctgtgtgattcgtgtgcacgtgaaaactgttttgtttgtgttcatatttatgattaatagtcatgagctatctgatatactaaactagttatctacctgcagtcaccac

SEQ ID NO: 15119 - DNA, 859 bp, Brachypodium distachyon
  Intron number 1 from transcript Bradi2g54940.1 (locus Brad i2g54940) derived from phytozome v7.0 (chr-ID Bd2; pos 537 14878 to 53715736 reverse strand)
gaagaggtgagtgagcgatagctttgctcccgttcgtggcttgctccaaaattaatttctccatccaaatttcgtgtggcctccgatttttttttccaaccccgtttcgttgtttagcattctcgctagctcgtcgcctcctggcctagctgggaagggaagaatcttgcacatagtggtcatatcagcgatgcagttctggcttgcttttatttactgtggttccgtggttgcatgtgcttttgatttgatgatcatttccatcgctgttggcacatttgtttggatttaccttttctcctttttcctacagtgttcaactattcatgctacgcaattgctcgtttcccttctctcaccaaagaataattagtttcatacagagtcctggtttcgtatctctaaatgattagtttcatacagaatgaaacaaaaactgatcagtgtcttcagttcttcacatgctttggcgatgagatggtagaagctaactcttttcgcataaagatggttttgaccctatcgcagtcgcagcgtcctctttgaacccgggcaacatatgagaatgagatccacgtacgatgtggaaggcttctatttatggaaccccgggagccgattttgttgggcagagttctttaatagcgtcttacttctatagttgggaagtaggctttgctctgttgatgtcaatgtcatgtccacatgaaaacaaaagaaagctgcttcctcctgccatcacgaaatctttttacttcagccgtcattagtactcctgtctacacctctaatcatggtctaatccaatcgcattaaccttgtaggtttgcaagaggtaccggcagtactaccagcaggt

SEQ ID NO: 15120 - DNA, 913 bp, Brachypodium distachyon
  Intron number 1 from transcript Bradi3g05010.1 (locus Brad i3g05010) derived from phytozome v7.0 (chr-ID Bd3; pos 347 2423 to 3473335)
ccgcaaggaggccgagaactgcgactgcctgcaaggtataaccctccgactggatctagacggtttttttttctggaaatgttcccgagatcccgtatgcttctggggcctgtggatctggtggtccttccgtgttaaatgattagttcgaatgctacgattttagggttcttagctcgtagatctgggctttgcccccattttgcgtaggaggatgtggttgccctggttctggactagcagatctgggttccagtacttgagcgattgggatccatcctatttgtgctcttgttatggtagccattttggatggttttatgctgttctaactgccgagatccggcgaatagacaattgatgaggtagttgtcaacaactttgtttttttgtgcgtgtaatttgtaagtggatatgagagatccagtgcatcccgtttggcctgcgtagctgcaaatgtgcaaccctgctttgctctatattgcaacttcttcagttacaacggcattggttcacagtagaactgaataagacatgcatctgttggtatgcaaaatttgatgctacggcgagtagtttgggctttagttttctaccatagcttgagatttttttattttttcacagcactcggtgggttgatgttggttctgttgcatcctttgcttccaaacattagtgtgggttatatattaatggtagctgttcccctctccaagtaaattcttgaagatgagcaaagcatcatttatgtacctcatttgtgtagatgtgctgcacatttcaacacatacacaattgcaatcatttttcattaccttctatctttgtcaactaaaatgacatccaagctaaagtatgattgtcatgtatcacaggatttcaagtctgccactctctgggaggaggaact

SEQ ID NO: 15121 - DNA, 553 bp, Brachypodium distachyon
  Intron number 2 from transcript Bradi2g47350.1 (locus Brad i2g47350) derived from phytozome v7.0 (chr-ID Bd2; pos 477 11788 to 47712340 reverse strand)
tctgggcattggaacagcagttgcctcctttcttcgtaagtataatttccattctatttttcaaatacacattacctgtaattctgtcaatgaaacattagttagttatacattcggtcggtatataacatttgtaaccgaactaaacagcagaagataattaaccaagttatttatagggtattctataagcttgtgaaagaggatactcaaagcagttactcttattattagtttcacctatttcttcattagattccaaagcatgacataatacccctttttataaacaaacatcaaaacgtcaatcacttctatttgtattagaagcaaaatcccaaatggcgcaaaagctacacaaccaccatgggtggtgctggtcagaaacagagaaaaaaacaaaacagaaagttattctcgcatgaatggtaaacctagagatacagtaatcagaatagaccaatcattagtaatggtcatgcattcatctcctgagaactacaaactttatttcccaatgatctactaatatacttagttaacttgcatactg

SEQ ID NO: 15122 - DNA, 966 bp, Brachypodium distachyon
  Intron number 1 from transcript Bradi2g46510.1 (locus Brad i2g46510) derived from phytozome v7.0 (chr-ID Bd2; pos 469 51180 to 46952145 reverse strand)
accgttaccagaaggctgccgctctcgtcgacctcgtcggttcccactctctctctcgcgcacctccatcctctgctctactttctctgtttcattaagcgaatagcatagcgtagtcgggaatcgacaatcgagatgttcgtggggcgttggctctactggctggtgactggcgagtgagaatgcgtaggagaagtgcttgatgaattgtctgcccaagctcggcatgctgagatttggcgcagagctcttgtggttgttgcgcgtagacggtttggagcttgcgctctattcggtgtgacgataggaagcagtggcactgcttgatgtgccgtttaagtaattttgggcatcgttcacggcccaatgccgatattcatgtggttctagatgtcctcttcttcttttgagctaatgtgttatggtgttctagacttcaattcgagaagctcatcaattcaaccagaatattagatgtcagcaagtgatttttttagtgacttgaagttttaattgcctctggagtggagtgctgatttgagtggtttcatatattttctgcttggttagagttcatgcgaagttgaggctgttgatctatctatgtggtatgatttgttccacttgttaggtagtgtgcttgtgtttcacgagtggtatctgatgaagtgccaaaaattttagtaattgatcacgatctattatgccattttgtttgaagctttgagtttaacatatctcctagacaacattagaataagggccttagtgtagcaagtgccatttccttctgcaagacattatggggcaattgtgttgtggcttcttttgtgctgcaaaatcttctttttggaagaatatgtgttctggcttcttttgtgatctggaactaacccttcatctgtgtttttcattgcaattgttgagttgctcgagagtctaattaccataccttgcaggcagaag

SEQ ID NO: 15123 - DNA, 951 bp, Brachypodium distachyon
  Intron number 4 from transcript Bradi3g09030.1 (locus Brad i3g09030) derived from phytozome v7.0 (chr-ID Bd3; pos 713 0159 to 7131109 reverse strand)
aagtaagaccatctttcctgactatgaattcatagtcctatttgcatagtggactaggatgtggttacggcaatgatgcatcttgcatagtgggtgtggtactttggttacagcaatgatgcatctttgtttccatttattgtatttgctttgttaagatgccttgtggtattattatttattacactaattatgcatctttcttagaagcttaagatgttttgagtattacattttggagttgtgccgttatgtttaacatttttagggcactctgtatcagctagggtagtgtctcgaggacatgttttgagtcaccacattgaatggatagatagcgttttagttctatgatgataatgtttaagcatgtttttctagtaatacttccctgcataaagtacagatgataatacctgggccgtggcatggttattgttatttctggttatatcggtaatgacaataaacacataaggttgcagtaaagctttaaatcatggaacagtagtgacttcaacaattatcattgcaaagtgcaataccggtttttggttattcttatttgtgtagtttgtttatacacctaacggttcaatctagtaaagaaacatcagagcatatttatttatggtgacactgttgatgaaactatctattttaaacctcaattattggctcttgacggtactgattccttgattgattgttgttgtatgaaaagctatttaaagactgtaactgggagctcacttgaatcccaacaccagcagtgcattgctgttgatggagataactaccttgtcgtcttttttttcagtgtgctagttatacacctaaagaaagctttcttttcgacaaaacaatctttcattctgctgtgcctttcagttcatgatttcagcccaacctcatggctaagtgcctaaacctctattgtcttctacaggt

SEQ ID NO: 15124 - DNA, 850 bp, Brachypodium distachyon
  Intron number 3 from transcript Bradi2g48610.1 (locus Brad i2g48610) derived from phytozome v7.0 (chr-ID Bd2; pos 488 58012 to 48858861 reverse strand)
acgcatccctcatccaggaggtcctcagcgagaaggtaattagctactcctcaacccaagcaaaccataacttgggtggttaattactttgttcaacaaggaccttaatcaattaataaaggtgctggtctttcacagatcatccaggagcattttgtaactattgtttggccatagccatagatttaccttggaaagctggaacatcctcccttgtgattcatgcgtgctttatactactagtgtgctttgttcctttgcgacggtggcatacctactttgctttgctgactctagatcgtcactgaatcagcgctgagtcaaacagtttgactaataaatgatactcaatcatagaatcgggagggagagatttccctcacttgatcttgttttgggatctagctagactgcatgcatgttttatctgtcaaccactgccgaaggacatgcaaataaaaaatgcccccaacatattcatgtgattttccttacaccttaattccttaaaggtaggcctacagagggaatatgggagcacgtcaggagctcctaatgaggcaaaggaatgttagagatacttccccaaaaaaacgtcttcattaaataagtggagtgcagtatcttagttccactgctactgaagttgataactgaatactggagtgtgttgatctgaacttgacaagttttcagtaagtgacatggtgactgatgaaacactgacgtgataaaaacaaattttggaagaaagaagtataagaaaaaacctttgagatgcaagaagaaacaacagtatagctgaatgctcttcttgattctttatcttgaacaggttcctctgtttctg

SEQ ID NO: 15125 - DNA, 816 bp, Brachypodium distachyon
  Intron number 3 from transcript Bradi3g28090.1 (locus Brad i3g28090) derived from phytozome v7.0 (chr-ID Bd3; pos 294 62204 to 29463019)
aaagacgattcttttttttttttggtagtgcagaggtagcaggatctcgctaatgttccgtttctaggccattgaggactagctagtgtgatttttctttgtcaaaatttgaatcaacatttggtggttggcctacaggggggacatgtgcggcatcccgttgttttaacttttcaagtgcagctaagctaaactcaaattgctaatcatgggttgttgtgttgtatatttattttccacaagaaatgttgtactctctccgatcggtattacttgtctcacattcgcccaaatacggatgcatctatgtgtaaaaagcggctagatacatgtaatatttcgacaagtaatttcggtcggagggagtagcatatcttgtgttcttctatgcttcatattattactggtctgatggagagggctccagtacgaattcggattgatctacgtggatacaattgtagtttgggtagtctcctgcagaactgtctgtaataggtttagcttgtgtacaacgatccgtagaaaagccctttagttgtcgaatccttttcatgggatggaattgacatgtttcttcatgctcttcgttttgttaaatttgctgcctgttaagattttgtagggttaaacttggatgatgctatctttgataatggaacctggagcattttgcttagcaaggagatttgttctattgttttaacgacatgattttgataatacttgagataatacaccatgcaagtttattatagcattgcacctatcagtttaatttgatttctattctcaggtacttaaagtgcctgggat

SEQ ID NO: 15126 - DNA, 776 bp, Brachypodium distachyon
  Intron number 2 from transcript Bradi3g20950.1 (locus Brad i3g20950) derived from phytozome v7.0 (chr-ID Bd3; pos 199 47230 to 19948005 reverse strand)
cacagcttgtggacccatttgagtgggtatcgctggtgttgatttggttgatatttctagatagaaatcaatattctgcgaataacaaaatacggattctccagcttcactgagaagccaccaatttggccttgtctattgtaagttgtaaccgccaaaagtcactacttaactggccccaaaccagagcaatacatgggtgtaccaagattaacgttaatactagatacgatctaccagcttcagttttctttactcctataatgatgtcaatcggtggcggcgatccatccatcttcaggacaccacttggatctggcacaaacgtttgggtcgcgagacgtacaaatgtgatagtgcagtaatcaaacatctgacacagttttcttatccttaatccgtaagaacacatgtgtactgcgctagttttgttagttattaactaaaaatgtactagccagtagtcatggtttaacataactatattagggtaagtaggtatagatatcaatcaaagtaggcctggtattcttcatcttcattgtgcatgcgatgacatgctcttgtgtgaaatgtgtttatatgcaatggatctacttgcaaagtgcactaccatctgtgagtgtatatatatatattcctctatcagttattagctagtactatttttgttgcattttgtgcacagctttgtgatgttacagctttgaatcgctctgatatagctttgttattttgcaggcagctgatttgacggtttcttggctggaagaaag

SEQ ID NO: 15127 - DNA, 345 bp, Brachypodium distachyon
  Intron number 2 from transcript Bradi2g44860.3 (locus Brad i2g44860) derived from phytozome v7.0 (chr-ID Bd2; pos 452 64340 to 45264684)
accctccaccacctcctccaccctccagcagcaaggtccgtctccgtccatctcctgttcatatccccgtaccatccacaaactgctacatccatctcttctttttcccctctttattgccccccctctttggatttgattcagttcgtagctgccttccaacttttttttttgatgtaaagcgtattatcctctcgaatctacttttgattgccttttgtgcatgctcttcgttggcagagttctctcttctcgaaattcattctcgtcttgcatattaagggtgttttctctcgctgtgtgtggcggcgactaatttaatttggcgatccttttcccttgcag

SEQ ID NO: 15128 - DNA, 879 bp, Brachypodium distachyon
  Intron number 3 from transcript Bradi2g57070.1 (locus Brad i2g57070) derived from phytozome v7.0 (chr-ID Bd2; pos 552 96849 to 55297727)
cgggacacatttcaccatttcttcagaaccataaggtacggaacatatttctgtttttctagttttccttttctatagtttatgttgaatatgggagatgccaaatgcattaggaagagataagttgttttcatctttactttcaaaggagtgtggattttgtcaaatgaatttggactagggagaggacatagcgaagttgtgatcttgactttgagagatccctaggaatgactgcgtctctcataatgcattgctcatatgacatgattagattttataatgattaaattttttacggcattgtattttcctttgatgttattgcttgcgacattttagagatatgtctgtatcagtaacttgtatcctgataacaaattagtgattacatctgcctacctaggattttcggaatttcttcatttcccccaatgtttagcttctccaaatcacttgttcgaagaactcaggtccagttgagctcgctgcataaaatatgacagactcctccatcaaatgttatttccttttttgctctcccttcttttgtttggaatttgtttcatttttctctgaaaaagtagtgtacaaagtgcacatgattatttcaactggtgcaagttgatagttgatacagtgtatcagtggttttgttgataaattgacaaattattttgaaatgggaattcagtaactcacgacagatttctatttcaagaaatcccactacttgcctgtccattagtatatttcctctatgtatgtgcacggttgcgttgtgtgtagtttagccgtgttagttttgttgactatatttttgtttctcatctcattcatttactttcttaatttatttcagcccaacacatcaagaaa

SEQ ID NO: 15129 - DNA, 856 bp, Brachypodium distachyon
  Intron number 2 from transcript Bradi2g51050.1 (locus Brad i2g51050) derived from phytozome v7.0 (chr-ID Bd2; pos 507 16794 to 50717649)
tgcaaggtaacgtttgtcctctcttagttttgacattaacgatcatcacacctgtgaatttagtttgttttgacataacgttatagttctagtatgagttgtgtaattagtcagctaaatttatgatacttagtagaagacttctaagtcaagtacgtgttgatttagcaaacatatatcacctaatcctaccagttttagcccccttttatctacagtgtttagcagccatgggaaacaaaagttgcatcacaacgtataatttgtttaatcttctcataatagatcgcctttagtttattaccatatttgtttgatactgcaatattttgtttttgtttttcccttttttggatgtgtgggtaagtgggggagaaggggacatagttcaattaacatcaggatccctgtcagtaccttatctatttttgattttgtgaagtcatcttgcctcttgaatccatagtggtccaataaaagttatgagctattctgcaatgtaattagatagcacatgcagatactgatcctaagttctggcattgtttctagagttagacttttcaaaccctttcaactgcacatgtttttctcttgtttctattgcatatttatgtaaaccctgacaatattgcatggaacttgttatgattaatctctatggaccagaattctagagatttaattttgaacaaagattctaagtttaccaacatcacacacttagtaatctcggagatcataagtttgaatattttactgacaattttgtagactttcctgcttcccagtttcttgactacactttaccatttctgtaacggaaacacactttacccttttgtttggcaggtct

SEQ ID NO: 15130 - DNA, 800 bp, Brachypodium distachyon
  Intron number 1 from transcript Bradi2g55500.1 (locus Brad i2g55500) derived from phytozome v7.0 (chr-ID Bd2; pos 541 24088 to 54124887 reverse strand)
aactacttgcacaggtatgctgcgcccgtgcttcctgaaatgcaacgtgaaaggaggtgcaatattatacaatgctattgttatactttcatggatactaatttttaaatttttcatacatctcattctcacctaatgtgattaaggcgcaagttaatgtgttattctggtttcaaaatatttccttttgcgcgtctatgtaccatgcatatttttctcttttctgcctacatattaaacatcatcttttcttagctttctgcatggctgcatcatggaagacatgctaacgaacaattggaaagtaaagttatccttcaataaactccaaaattagaataactgggttcttttaattagcaatgacaaaaaaaatatattaacatgcagacattataatcgacccatgtggatggaatcaaaagacaccataaattgacatacttgttctatattatgcatagttcaaggaccgagtaatattgattcaactgcttatcatgacatgtgcaaaatcttttgtccagtgatacttgaacagatatacgtgacttctagtagaacaatctttactcctctggatactgatgaagacattgctattgaatttatgctgctcagtcggagctctgaagaatcattaacgtcaccgagctgatggctttacccatttaattgactcccttgctggttttctgcagttatggatttttgtttttatgttgtagtacaagttccaggctctctcataatttgttcacacagatcgacccttcagaaaggctggatcctgaagttga

SEQ ID NO: 15131 - DNA, 590 bp, Brachypodium distachyon
  Intron number 1 from transcript Bradi2g49030.2 (locus Brad i2g49030) derived from phytozome v7.0 (chr-ID Bd2; pos 491 83387 to 49183976)
tcgtcttactcctcgcgcgagcgcctccaccgcaggtatttatatccccttcaattctctcgttcccgaccgtttctcctcccatcaccccacgaacagatccagccctttacctccccgtttcatctccttaatcttccccaattcgtaactgaggcaaaaatcaaggtagggcggccgccctaccttgccctaccgtgtcctccgcccttgatcctgttgtcatccctaggcggggattgtcatacctaggcggggatgttcatgttgaataaatgttctgggtacatgttgtagcacatttatattactatatgacatcatggattacgagttgcagacctaataagagatggaatgcattttgaattatggtggtcgtgcaatgtttttgtgtgaggtgcacatgaatttgatgtaccatatgcttttttccccgaagggttctgtgttggacagggggcttaagcagttaattgcttctagtttcttaatgaaaatcgtaaagctttcttctagttaagtatcttttgcaatttttgtttcagattgcaggaaaggggtgacagcatctagtttattctgttaac

SEQ ID NO: 15132 - DNA, 759 bp, Brachypodium distachyon
  Intron number 1 from transcript Bradi2g59010.1 (locus Brad i2g59010) derived from phytozome v7.0 (chr-ID Bd2; pos 567 65592 to 56766350)
cgcaagaacaagaggtactccgtaataaagaatgtctgaatatgcgtgtgcatgctatgttcaggcgatacgtacgtagtacgcgctcatttagcacatatccagttttgtttactcgatcgttgtgagttggcgactgagaattttcaggttgtatagttcgttcgtgtatatgctgagagaagaactagctagctagcctacgaactttgaagtcgtctcaaccgatcggtgacggcgttgactagccattaattgtcttcttttccttcatttttttttactttgacagagaaataatttttaataactcacaatcacagttacatcattaaccaaaaatgtactagtgggaggaggattaaacccagactggacaggagaagactttgcttaatgctgagctcttttgaaaggcacattaattcttttgaaaggccgttatatacactcagatgggcctttatgacaacaagatgaactcatcatctaaggtttccaggtttcgctaaaaaaaagaatctaaggtttcgaggttgatgtgcccgttctattgtactttgacatccttgtactttaccaggcttcacaaagcccacggtaaatactcaaaacactagattattcaataaaaaaacactttactccatgatatttttttaaagaaaagttgattattccacctccattcaaggatttgtaactaatcccattccgtccgcaggagaaatttccaggcctaactcagctgctaccgag

SEQ ID NO: 15133 - DNA, 1065 bp, Brachypodium distachyon
  Intron number 1 from transcript Bradi3g19180.1 (locus Brad i3g19180) derived from phytozome v7.0 (chr-ID Bd3; pos 178 25351 to 17826415)
tctacgagtacgcccgcgaaaccgtcggcgccgaggtgatcgatcgacctctccattcgcatctctatctcttcccccctgctcgtttgttctgtgagcggtttgtacttcctagtgaggaaggaatggccgcaagatctgggatttcggttggaaaacgaccgacaaatgtggcaagatgatgtgaactgttggtttgcaaaattggtccaggcttctgacaagggtggatatagatccatctgtgattataatggaaagttccagttttgcaattgcacctttcttttctttgtgttctattgaagtcagtagtaaagtcaattggcattcaataaggttacagccttacaggttgttagatatataggagtgactaggtatcagtaatagtagcaagaagaccgcacgcccaatactagccgagtaggagttcaacctggtagtcaagttcccagggtcacaggataaaaatcttttctaaatactaggttctgtcatgaatgaaatttggtagcagagtccaattcattcgggtgttgccatcttttcaatttttttaatagctcatcatatgttaatttttgacgaattcacccccttgtcaagattttttgggggttcatttgacatacaccactgcaattttggcgatttcgaaaaatgccactgcaattgaaaaatgacattgcaaatctgcggatttttcgaaaaatgccattgtaaatctgcagattcttcgaaaaatgtgactacaatgctgcagtggcatttttcaaaggatgagattgcagtggcatttttcgaaatctccaaaattgcagtgtcatatatcaaattaaccatacccaacctagttgcaagacggtgccaccttattgaaagtttcaaactatgttttccttaaatgtttttagtattcctccttctgtagtttccatgaattttcctctttttttttctctggatggacctttgaaccatcataatgatttgttaataattttatttacttatttttcaagttctattaggatcacagaaaagctctggcagagagggaat

SEQ ID NO: 15134 - DNA, 821 bp, Brachypodium distachyon
  Intron number 1 from transcript Bradi3g16940.1 (locus Brad i3g16940) derived from phytozome v7.0 (chr-ID Bd3; pos 150 96573 to 15097393)
acggtggcgccgctcggcgtctcgcagaaggtttttactcactctctctgttcgtgttcttcgatttcttctacggacatgatgtccttttgcggtttctactcccccgcaggtttcgggtccggcgagctcttgaaattccggccaaaaaaagagacacttttaccgagttttttttttgaattattccccttccctttttttcttgttctaacgtgtgcggttaattccgaacgcacgatctcgtcgtggcagcttcgatcggttcgtcttgcagcgtggatcgttttttggtttgtcttaacgattacttttgtactgatcttttttatcagggttgattttgttgtcttaatgatttttaatggcaccgtaacggccttaaatctgctaggttgcgttttttttgttgttgcatttttcttgtctactgatcttttttgcgttgttttattggtcgatctttcgagggttggatctcttgagggttttttctaaagtttttttttgaggaaagattttttctaaagtatttgggagcattttatccagagaaaaaacaaatcgtgtttcacaaagaaatttgcaacatatatacttactatatggacgtcccatattgtgcacatcaagtttatttacccattttttgtcattccaagtaaaaacaattttgcgtgaataattgacttgttatgatctaccaagttttttgctgtatgaggtgaaattttcaggaagcaaaattagtggatgattaattaattgattatttgattttctcaggtgattgcgatcaacaaccagtttcctggcccact

SEQ ID NO: 15135 - DNA, 945 bp, Brachypodium distachyon
  Intron number 1 from transcript Bradi3g17140.1 (locus Brad i3g17140) derived from phytozome v7.0 (chr-ID Bd3; pos 152 35302 to 15236246 reverse strand)
gcgtgttggttcgccgacgatcagcgacttcggtgagctgatcaaaattcgacgacattagctgtttcatcttactgattaggacgacctacacggctacagaggaagtagctttgatacaggaacaattgtagcaacaacaaaggcatactttgatggtctctacatgtgtggacttctcttccaattcgtgtgttatggatggagtagtggtttggtttagaattttggtgcatattatgaagtctatgaatgatttgtttctgcattggctaatatagtctgtgatttgtttctgccttggctaatatggtctgtgatttgtttctgctaatataggattatatattggatattatgagttagaaagagcatatcaagtggcatattgtataatcttgccgtgtgcacacttgacactttagtccttcaaaattagatcaagatggtgttattatattatgagattggctaatgttgcgaccaggacggcattcactttgctaccatgctcaaatcataaggttttggaacttggtatcaagaattacattcttagtttaggtccacttcccagtcactcttcatatgtatgttcttcatagcatttcctcccatgattcatgccaggtaattgataagctggtacaagagatctgtcatatgtcctaggtgccatggttttgtggttcttcttgttgtttcagataatcagacttctttattgcaatttaaggttacaagacactgagaaattatggcgaattgttccgacatttgctctcctgtctattactggtgttgtctttgactttttgctttggcacttttacgcttccttcagttgaaacaatatgcttcggacgagtcccagtttgttttttattgaacgcctaaattcctgttaattattcatatatggatctgcttgacaggctacgggtg

SEQ ID NO: 15136 - DNA, 425 bp, Brachypodium distachyon
  Intron number 1 from transcript Bradi3g29760.1 (locus Brad i3g29760) derived from phytozome v7.0 (chr-ID Bd3; pos 318 03172 to 31803596 reverse strand)
ctggagaccggcgacgtggaggccatcgcgaagaagtgagtttcgatctcccctttataattgctgcattggtttttgcgcttcagtggcttgtactttgtagtagtactggcatccgtttcactatctcaattctcaagcttttgttgtgataataagcatcttcttacgctcgcaatgtcgtctcttaaaatatctaatgagtagggtgctgtgctgtgccaaaaatattggtgtatacttttttcagtcaaagatgaaagtataatttggggacttatagttaatcatgtacggaagagctagagttctgtcctggtgatgtgatttgtatacttgtataatcatacctgttaaacttagcattgaaatatttgatgtgtcgctctttctccattatcttatcattttattttgttctagat

SEQ ID NO: 15137 - DNA, 419 bp, Brachypodium distachyon
  Intron number 1 from transcript Bradi2g57840.1 (locus Brad i2g57840) derived from phytozome v7.0 (chr-ID Bd2; pos 559 04493 to 55904911)
agcagcatcctgctacggcgtttccgaggtatttcgagctctctttttttcttctgaaatttctattttgtttttgtgctcttagtcaagtagtactccatgatctagatacgatggacgctcgaactgagttttatttttaccatgatggataattcaattgcttttgaaactctgaattgagataaaccccaatgctgcccggttgtggagtggaataatctaactttgattcttgggctagagctgtcttcgccacagtattattgcagtttactttacttgaattggaatactgctgaacgctgtggaagttgaaacaattagctctggaacttgttaccattgtttcgtatactgcagggagtttgtgatgtttgtgtggtttgacactgctggcagttgaaacaaaagcaggc

SEQ ID NO: 15138 - DNA, 957 bp, Brachypodium distachyon
  Intron number 1 from transcript Bradi3g19410.2 (locus Brad i3g19410) derived from phytozome v7.0 (chr-ID Bd3; pos 182 40084 to 18241040 reverse strand)
aaccatttcattgaggtatgtgccctactcgtctcctctgctctccttgctaagaagcccttgctccttaggtgctccctgattttggtcctagccatggtgctcacaaaagttttgatggattagttttaatctggtgctcttctagaggttttcaagtttaattccctcccaattttgttttgctcccttcactttttagtccgtcgaatgtaataagagcaatttgtcccgctgagacaatgctgaagaagacacgttcagagtaatttgaccaagtgaattcacaagtggcactggaatttgtcactgaatattgaggcactgtaatggagcatgcatttggaataaacactttacagcctttactttaaccatttgttcaggaagaaacactcgagaacagttattgtccaaattcatcgatgttgcttgtaagaggcgcatatatttgccaatgtgtgaggcgctgtaattttttttctccttttcattcttcctgaaaatctcagcgtgaaatgcgtgcttgtttgctactgcaaaccatcatggattgcgtcaacgagcaaaacgtaattcaataaagagtttttttgttcctcctttttcttttctttccggtgtcaatctcatttttctgctatattgggtaagagtttcttttgaattatcttaacaggcgatgatgtacataccgtgagaccagtgaaggcctagatgccatttaattggttttggagattgatgggttgactaaagattgctatgccatttaattggttttggagattgatgggttcactaaagattgctgatttgttatgttttctttgtcaccgtcgccttctctcggcgaagatgatgtttacatagaaaacacaagtagtgttttgattttattggcgtgcttttcaaaaagcaaagtgtgctgatattgttagttttactgtacaggtg

SEQ ID NO: 15139 - DNA, 692 bp, Brachypodium distachyon
  Intron number 2 from transcript Bradi2g49890.1 (locus Brad i2g49890) derived from phytozome v7.0 (chr-ID Bd2; pos 498 93927 to 49894618)
gaaagattactttcttcgaggttgtttcaaagttattttgcttgattctttacattagtagttagaaattggatagcttggtgcttctgattagtaaaaccaacgttcttatttatggtagtgtaaatagctgttttttggaaaatttggtatggctgacataaaaatgaaggatatgtttcagttagctcgagattaggttcaaaagcacagaacatggacagttatagactatgtttttgtggtgggaacaggggaggggttgaaatggtgaaccccattggccaattggtagaacaaacaacataagatatcaacttaagggtaaagattgaagtgtaattcaactgttgtgttgcatgttattcaagctgctagagatccacgtaggctcgaaatcaagagtttatttctacacctcttgctggatgtacatactttataaacttcaattaagttggacgataacctttaacatttcttactggttatcagtgtttcattagattattctatttaagcaagaagattaggatagactagatttttactctacttcaattatgtcagaattttttcattcttattgtgcttatcatttctaagacctaattgtttaagttatgatatataagaatttgattatttcttctgcagttgtcccaacagctttggctactgctcttgatata

SEQ ID NO: 15140 - DNA, 822 bp, Brachypodium distachyon
  Intron number 3 from transcript Bradi2g46380.1 (locus Brad i2g46380) derived from phytozome v7.0 (chr-ID Bd2; pos 468 34402 to 46835223 reverse strand)
agatcctgcttgtcagcggtatgcttccagcatttatttatctttcccatcatgttctgaaagtagctattggcagaaaactgcatatcggatattttgagctttcagtgttctctgcataatggtaaggtagctccattgtaattaacattgaaagatcagttcatgttttttgaatgcctgcattattgaatgttttttgaaaagaaaacagccaagtcctaagagatgcctgattttgactgctcaatgagttacattaacacacaagtatatcttgtactagaacgataattttttcgcaagattactagacaggtatttgttatgccatattatacacattccaagatttaacttggctaccaattagacaatcaatatgagttattggctataaaaaattataacatggaaaacttttttcagatacgaaatcaatgttaataattttgtggcacgtaacccacgttttattggtcagattgatggtaaaagttgaatctcgaaatacgagtgcgcgctataatagagtagtaattttatcagacagaccctgtgtacctatatatcattgttttaatgtggctagaataccgcatagagacatctagaacctgtgttttttagcactttagtatacatgtttaaccaagttctgctctgagacactggcacctattcttttcttatggtaccttctgtcctcatacatagatgatagatcgacacactatatccccttttcgcatatagtcttgacctaagcaaagccagaataacactgaattcactcactatcctagtatgattttgcagtca

SEQ ID NO: 15141 - DNA, 473 bp, Brachypodium distachyon
  Intron number 1 from transcript Bradi2g46380.1 (locus Brad i2g46380) derived from phytozome v7.0 (chr-ID Bd2; pos 468 35585 to 46836057 reverse strand)
ttcggcgtccctggggccttcacccccacctgcaggtctcgtccttcggtccttcccccagttcttttttcttctttgatttgaaattgtgagtattcaacagatcgacgaaaaacgatgtgagcgtttgactgttcgtaactgagcggttgcaacaggatccgccatgttttatttagatgtagtcgttgcggagcgcggacctggaccctgcaaatttgtggatagggtctctggaattgctttttgccaggatcccctcttcctccggacttgatttactttcgtggaagtataggtgaaaaaaaaactgttttgaggaaagatatttggaggatttcgtttaatggacagcgttgcgttattgattttcaccagtgaaagagattttgtaaacctggatgcatccgactgaacttcaggaatgctgttttgcagaacttgttcacggcgggtgctctaaactgtcaact

SEQ ID NO: 15142 - DNA, 801 bp, Brachypodium distachyon
  Intron number 1 from transcript Bradi2g53350.1 (locus Brad i2g53350) derived from phytozome v7.0 (chr-ID Bd2; pos 524 85245 to 52486045 reverse strand)
aattgtgggaatagttggaaccaagctcaggggatgtgagctacgagggctatggtgaggaggaacgttggcctttggtcaattttttaggagaaaccgagaaagtcaattttgaaaataacgatttgttttctttaatcatgcactggcttcactttggttaagtaattgggtgttggactacatagtgtaattacatcagtagtggtgtactggaagatactaagaggacaaaaagggtagtttttgttgatgtattcatttgttgattctttggatgatcatcattgggataatttggtttgttggaagaaaaatgttttgaattctagtctctagagcataacttatggtcggatgaaatggataatatgaacttggtgcaatgtgttatcaccgcttcatatttaaatttcccagccttgaaaacgaatgaaaactctgttaaactctgagaacatgaagtcatgaactatgaatatatatgtcatgatctacatttcaacgattgattcagttagtccatttacttcctctttttagagattcaaacttggctagttaactttatctcattccccactcagttgtttagcacttaattaattctggtcgagttgcttggtggtgcaaatagtattccttattataaaatcctttcctgtattttcccttctccctttcttcccatgtatttttccctttcaatctgctgacatgcctcataccatctggggttcttatttcttaatgaaacttattttagttttcttactctttaagggagaatttgatactcat

SEQ ID NO: 15143 - DNA, 923 bp, Brachypodium distachyon
  Intron number 2 from transcript Bradi2g47140.1 (locus Brad i2g47140) derived from phytozome v7.0 (chr-ID Bd2; pos 474 91889 to 47492811)
ccactaacgcgattggattcgacctgtcccctggggtgagtttatatagtgacgctattgctgttgataaatctctctacttagatatatagtttcaccttagttcttttactgttgttcatattatgaaatattgatcccagtaaagtgcacaagtaggacatgtgatggggatagagcaatcggcacaccttgagtactaattatttttcaaacacatcacatatattacctccgttcataaatgtaagatgtctagctttgtcctaagtcaaacttcttaaagtttgaccaagtttatatgaaaatgtactagcatctacaatatcaaacaaatatactatgaagatatatatcatgaaggatttaacaaaactaatttagagttacagatgtcggtaaaacttggtcaactttagtttgacttaggacaaagctagaacatcttatatttagaaacggagggagcagtcgttattaaatttggttagaacaaaattagcatctaatcgcattggtgatagttacgaagttcatacattgctatatggattatggtattttattagaaccacggtgtttctttccatagtgaagtatgtgctaagcttgcagttaaaaatatgcctgcccattcttcttcaagagtcaaatgaaagatgtagttgctgtaatgcttggaattcaagagtcaaactatttaaaaaaaatctggtatttcttttgggtttttattcgatgcatcgttccctgtcttgttttgtaccatatgaaacactcgacccaacaaagataaaaatatgcaccggctttcttccttgttaccctggttcatgattataggcctttatttttatggctttcatttcgtcgtagacttccattgacacatgaaatactgtcaggcttcctttgcccgtcat

SEQ ID NO: 15144 - DNA, 602 bp, Brachypodium distachyon
  Intron number 2 from transcript Bradi3g29390.1 (locus Brad i3g29390) derived from phytozome v7.0 (chr-ID Bd3; pos 314 23819 to 31424420)
ctgcgccgccgggacgtacaaggtcggtcgaaaaggtacgcccttttggccctcctctcccttgcgtttcccgtggtagcttcggtttgttggttttggtccggttttgattttgcttgctattgttgaccagtaatgcagttgtgctagtggtccaaacgttccgttccaggaaacactcagaagagaggaaacaatgttttggaattcagataacttaaatttgtgtcctgtttttgttgtacgaaattcagtctagtgaagccttcatcctttctactccctccgtcccataattcttgtcgttgttttcaactaaaacaactacgagaattatgggacggagggagattttaccaagcaatcaaaggacaagggccatattcttctattcagtaaatttgatgtcatctccatttaagcatgttctagaactgatggaatggcaatataatagcaggcaaattagtagcacaagtttatagtgaatatccttatatgaattattattttttgaacggcttcttatatgaaattgtggattaacactggtgatttctgacataggttgtgatatccttgtaccaacggacacatcgata

SEQ ID NO: 15145 - DNA, 1037 bp, Brachypodium distachyon
  Intron number 2 from transcript Bradi2g44160.1 (locus Brad i2g44160) derived from phytozome v7.0 (chr-ID Bd2; pos 446 54123 to 44655159 reverse strand)
gccagcgttaagaagattatcatccccggttacatgtgagtcacacctagcactagttaacttcattaattagcacgtgcatatgcaactttcccccaaacagaattttgccactatgtattctagattcgtactctgttcttccagtatgctcttatgatagattaacgatcatattgaatttctcaaagcttgtaccaaattataccagagtaaatacaccactaatccatgaattcggaaaaaatgaacactttagtccacgaactcgaaaaacgcacacttaaacccttaaactggaacaactgtgtcagtttagtccaaaaacggttgggcaaggcttaaacacgtcacgtgggcgccacgtcggcttcggcgaccccttcaccggcgtcctctcgtcaaaattgagcgttatgggcttgatagtgaccttagacgaggcagcggcatcaacgacgtggttctcagggcctcagaatccccgtctgggcgcggccgccttgcccctcacgggcggctcgagcatggtgattttgcaaaaaaaaatctgaaaaaatcgagtagcagcccacggtcctagccgaagccgacgtgacgcccacgtggcgtgtttaaacctcgcccaaccatttttggactaaagtgacacagttgtcccagtttaggggtttaagtgtgcgtttttcgagttcgtggactaaagtgttcatttttgccaagttcatggactagtggtttattttactcattataccattctccataaatgtcctaactttgttgataaatgtagactgtacatgtaatttactaatgtggcgatctttccccaatacaactagtttatctctagctatcagatgcatttataagagttacttgggttatttgggcactaacttcatcggtttattaagtttcttaaatttttttgttaagctagcatacattcagcgttaatcaaattagtttggccgtgctaacataatgtggcattaattttcaggtccttgcctaccagaaacaacagaagg

SEQ ID NO: 15146 - DNA, 696 bp, Brachypodium distachyon
  Intron number 4 from transcript Bradi2g48030.1 (locus Brad i2g48030) derived from phytozome v7.0 (chr-ID Bd2; pos 483 66239 to 48366934 reverse strand)
aagacgagctgaaaaagaatacggtacctcacgctaactaaatcactgtcgttttgtatgtacatttggttgcaaccattatgaaatgaaccacacttaattcatttggacatcaatgaagatgagctgaaaaaggatatgctactgcatgcctactaaattagtgttattttttacatccgatctgctaaattttttcagtgataagctgatagcagcaatccagcattacggattgagcaataattgactcgtttggtgagttatgctgtattttgattcacctgagactgtttgcggtagtattcactatctgtattgctacaaaacaaacaattcttcagaaaatgaaaccttccgtgctgtttatatataggaggaaaataagagctatgcaccttcaactgtctttgtctctaactggataaatagcgaacgattggatactatctactatcttcatttccttcaaagccttgacagctgttattgttgttaaataattcagtaacattgagtttcattggttgctctacaatgtggtcagggcaaagaattctaaatacttcttacaataaatgactttgtactagtattaacatgtcttgcaacatgcaccagttcttattcttacaaatcctatgttcttacaataaatcttggttgttctgttgtgataataggttttgacagaat

SEQ ID NO: 15147 - DNA, 1010 bp, Brachypodium distachyon
  Intron number 1 from transcript Bradi3g17520.1 (locus Brad i3g17520) derived from phytozome v7.0 (chr-ID Bd3; pos 157 67044 to 15768053 reverse strand)
aggcggcgctgggcaggtcaccggctgcgggcaaggtagagaggaagagaagctccatggcagttggtggggtgaaggagagtttgtgaatagagcaaaggcaaggggtctatgtgaataaatgagatgcacaaaaactgccaatgtggcggctgacctgtgggccgtctctctgttggtttcactgtcaaatagcctaatccgggtcatttgggttttctgaaaagattagacacaaaaccacaggttttgtgttgcaaatcacaaaactcgcccctatgtgaaagtcgaaccccaacacctgtggttttgtgaaatttactcggagcattaagaagtcatagataaaaagttaatctaaacccgcaacttaacacaacgaaaaaagaaaaacggttttgctattagacgaattatttcttagtcgatgataacaaccttttattcaaacattgagattcgtataagattaattaagattggatggataaaaaaatctttattggatgggttccattgtcgaccgaaaataactatattttagggcacggatagacactctcaaagaaaaaaaatgtcggcagtttccgtcgttatccccatcccgcatctcttggccgattcacttcgcacgagcagctctactccgccgtcgccgctgcttctgcagaccgcctcacgagctccctcctccgccgcctttggtgctggaggcgacgcggcggcctcgacggctcgcttatttccttgctacagcagcagtttaattctttcagtttacttctgaactctaagattttggattgagttcctcactacactggtgccaccgttacattaatgacgattattcctattcggatcacacttcgtcatgtatcatggttcagaaaaatgaacaatcaaacaaacaaattatgcttgaaagaaagctcggacgtagttaattaaaacatggtaagctccgactcaataaacatggttgccaggagaaggcagcgccagagaag

SEQ ID NO: 15148 - DNA, 998 bp, Brachypodium distachyon
  Intron number 5 from transcript Bradi2g60350.1 (locus Brad i2g60350) derived from phytozome v7.0 (chr-ID Bd2; pos 577 13234 to 57714231)
tcatatccccagataatcaggtatgtacatcctattttgtttcgaaaataaagttacatatgggcataaacatccatatctctgccatgggtttacagccctatgggaggcacaccaaggattagggcagcaggttattatggacagcatctctttatgatttgttattattacattcttttagacaagattaattaccttatgttaaaaatagctttctaaggggctaagccgacctgtctacaaaaggaagagcatgtatcccacatgaattagtcagaaataaccaatctatctccagtctccttctgcctgccgttgaggcgctgctgccggcaaggtgccatcacacttcttggctccatggctgccttgaattaggcttaaatagcccctatctaccccacacgtgtcaatctgacaacaaatttggtctgtaactactgaagaaataggctatactcaaacctgttcagactttgcacttgcaattagctctgccgcattattttgttttattgtggcattcataagtgcaaggatatgtattgaactgttataatttagccaaatggaacatatatataatgatttctagcttgtcctcctttgattttccacaaatatatcttctactagatgggaataaatactctacattgttattatacttgatttcttcagacaagaagattaactcggtaattgttcgtcggctcaaataattgtccttttgaatgttgattgtttatatttgagcactttgagggcttgacagtttaccttgtttgatggttctgatactaattccttgttaagtattgccttctttttatacaagatagtggtcaccagctttatattattatttgactggattgccagctttatatcgcacaccttacaaaatcaatgagattataaagtgtgtttctttagagtggcatgctatcctaatttcaggagattggagaaaaaatatcagaaatcggtggcag

SEQ ID NO: 15149 - DNA, 797 bp, Brachypodium distachyon
  Intron number 2 from transcript Bradi2g51880.1 (locus Brad i2g51880) derived from phytozome v7.0 (chr-ID Bd2; pos 514 39695 to 51440491 reverse strand)
tcaacttccctccacgccgcgtcgtcgctgagcaggtcagatttgcttcgatccttgtgatgattgtgccaataatggccctgtcgatgcgatagtgttactttattgtaagggtggtggcgactgaaatgttctatgctagcaagattagtcggggtggatcttgataaatgtcctcgtcccgtgatcccattcttgcagtgaaggtatccagaatgagcagatagacttatatgcggcagtggtcaatagcagcttttacactcctatgtgtttattcattaaacaactcataattagtatttgcataagaaatgggcacatcttgttaatgccactcaaagcaaaatgtcagaatcaaatgtgaaaaccaatgtgtgtacatcatttctaaagatgcatcatcaagaggctggagactaaccattcagcaatttagatgtcccagttgctattttactgaaaatagggtgatgctagtgagtacaaactagagttgtagtggactgtacatacagaagagtaggcacattggtctgtacattggtctgtacaatgcatactatgatagactgtacaatgcataagttccctcctgaatggactgtacatacagaagagtaatttatacaaaaggtgtcccggccagcttatatggaaagcccaatcaaagcaagtttgctggtgttgccagcttgcaactttatgcgctcataatgctatgttggttcttctatactaatcttttcttagttttgaggtgcagatagttaatattatccaggctcatcctgatc

SEQ ID NO: 15150 - DNA, 361 bp, Brachypodium distachyon
  Intron number 1 from transcript Bradi3g17800.1 (locus Brad i3g17800) derived from phytozome v7.0 (chr-ID Bd3; pos 161 84613 to 16184973 reverse strand)
tggctccaaaccagagaaaaaaataggaggacgctgtaattatgtgtaagcaaaagcaaaaaaaaattgatatgtatttacatataactactccaggtgcaaatggatatgataatacattagttgtgtaattgtgtctagttatttgaattttcagggaagttaattgtgtctgttttttaggaaagttagttcttttaattgtggttttaatattttcttcgtgcttctcatagaaaaaaattaaggagtttatctactcgttgaaagatatacttagcatcatgttttacggaaccctgtttaaattaccaacatatgacaagttctcccgttatgttccaggttaagacataagtgc

SEQ ID NO: 15151 - DNA, 964 bp, Brachypodium distachyon
  Intron number 1 from transcript Bradi3g38460.1 (locus Brad i3g38460) derived from phytozome v7.0 (chr-ID Bd3; pos 409 86925 to 40987888)
gccgccgtcgtctccaaggaggagtggcaccgaaggtacgtcaattcaaatcctggatgaccagttaggtattccatgattcgggggccgctagcaattgaacccaaatgggtggggatgagtagtcttgcttccacgagtatgcccatttgtgcctaggttgcacatttttaattgccattgttctgtaatgagacccctccatttcaaattgggctacatgtctctcactatgtaatgcacgtatcaactaatacatgggaaattggtgtgagaatagccaaatgattggaataattttaaattagtggggttgatttgtaaataattatctccacacaaaaataatttttaattaactgagggttctgagaattgattgaaagctttacgaattagtcactatgtgaaactaatgggattgacttataagtaattgggtttccataattgatggagtcagggcggcagagtatacctccagtattggtgggtaattaaaatgtgatgtatatcatagaacattgaagtgatgtgagatgtttgattcagccgattggatgtacgggatgttttggtttccgccatgactcgtacttctaacagcagtagagataaagagaagaagttgcaccctataactccctgtgatcatttctagtgacaacttgggcccttttcttaaatttcctttgacaatgtgcttccactggcatgtgaatcccacctatctcagtgattagtgggctgcccttgccccaatggttggtgcctagagggaatcaacataggtctgtgttgtgcaatgaactgcttatgtaccaaggctaaccaagttacagaacttgcagttttttaattttttggcaaaatgtgaatctttcttcagatgcctgaggttctgcttccttaaaaaaatttgatggcaggattgtagattattgtgtacgaaaacgattgccat

SEQ ID NO: 15152 - DNA, 981 bp, Brachypodium distachyon
  Intron number 1 from transcript Bradi3g22350.1 (locus Brad i3g22350) derived from phytozome v7.0 (chr-ID Bd3; pos 214 06889 to 21407869 reverse strand)
gctgggtgggtatattcacaatcctttgttcctccatgggaatttatcgagtgtctgagtgtcagttgcttgctttacactttggtgaatttgagtccttggttgtagtggcatcggtgacaatcctaggcgacagtcgcacgtgttgtgacatctttactcgttaggatcctgtgctgagtcttgaccacagtatgctaatttgtccagtcgcacaacctttggagttcggagttaattttgaacccagtcacaatgtttttttggaaaacaaatcctggtgaatcactgaacgtctttatcaatcacttatactttcgtcaaattactgacgcctgatgccatagttggctttctaaattgtgccttcttcaggaagggtctcactctcaagttgttatagataactagcacaattctggtgtgttgctgcggattagaggaaaaatcatacccgtctaagaagagtatattatgatttgtgcgatcaaatcactcatacacgctctaatccaaacatttgtgtgagatccagcatttagcttgtctcggatttgacggactgtcgccaccaatttacatttttatagtattaacgacccgcatagtacccgtgcatgcgttgctatggagtaaaaaaaaatacactgcatgtttaaagaggacacctctaaatatgctgtaatatcatttattacctcagatcaaataatccatatcagctctcgtctcaatgatttgtgcaaaatcaatgagtgacatagtctgaagttgatggaccgctaccacaaatttagatctttataggagtaaagaaaatctcccatttcattcggtgactgcttgtgttttcagctcgaggaacacaggcactctttgcatgactagtgttacagcacgtgacaatggctcactagttcttcaccccattttggttgcagtacagagacacatacttcttgcaaaagcttctttctctta

SEQ ID NO: 15153 - DNA, 1015 bp, Brachypodium distachyon
  Intron number 2 from transcript Bradi3g18310.1 (locus Brad i3g18310) derived from phytozome v7.0 (chr-ID Bd3; pos 167 12625 to 16713639 reverse strand)
gacatcaaccagatccgcgagatcctgccccacaggtgagccactgtcggctaccttgctagtagcaagaggtagcacttgcttgctgcatcataacttctcgaggctttgcttatgtgttccgttgtgtgcgcagttaattgaactggcttgcaagttacccgcattgcatttttgctgtccaaaattccagatcacttccgggggggctcttgtagatgtgcatctgcattcccattgaactgattcggtgggtaacgggatcgctgcgcgaaataatgagaaaacttactcactctttttccataaaagtggtcattctggatatagacaaactgaaccttccaaactttgactaccagtttccgatatctttaaaaaatttagatcagttgcttcaagaacatatgtgtatatttgtctcaaaaggtacttttcaaaatcttttattgggatttgcaaacatactctagtagaaattaattgtcaaagttgtgttttggtgactgcgtcaatgttgaaaacgacaaacgtgagggagtaattgcttactgttacctttccatgccagcacaaaagatgacattctagatattggcatggtctcccaaaataactttcacgcctacctaattttatctattgtaagtcctgacagtaatttagagttgtcggcactttctgtaaggccgatttatatgtgcagaaatgatttgttatccgaagaaaaaatgtttttttcattgtgagaaaaagcaaaaatagtttgacttcatgcaccataatatcacttttttttctgttgactggagaaagtagcaatgtaacatggattagcagttatttcaatatttgcgtaagggtaaatgcattacattattgttgcctagtgtcaagaggagcaaggtgaatgatgcttcatgagtatacaattgtctcctactctctttctaacttctgaattttgatgtgcttgttaggttcccattcctttttgttgatagagtgatcgagt

SEQ ID NO: 15154 - DNA, 1023 bp, Brachypodium distachyon
  Intron number 3 from transcript Bradi3g29420.1 (locus Brad i3g29420) derived from phytozome v7.0 (chr-ID Bd3; pos 314 58571 to 31459593)
gcaacctaggccatattgagcaggatctgatccaagtacgtgtttctgcaagcttagctatgtcatcaccagcgatttgataaaaatacagttggagtagcagctcacatgtgtcttccaaaagtgatgggtattggattgttttatggtgtcgccgactgtttctttagactagtaagattctacatttcccttcagttatattccattgaaagaaaaggaattgaaatattcaatggttatgtcagcaaactcaagagtcaggacagatattattcataacaatatcccagctatatttatatactgtcggagtctcctacagttttcggtcaaaataaaataaaatcccagcagtttttatttgagcatgatcaaacttatttttttagtgcccctttgttgttctgtttggttgctacaagctaagtatagagtttgtgcttagcttcattcacccagatattattttgaactaaagacattgtgaatggtgtcttctctgtccaaacaaaacatatcgtaaacaagattcctcttatccccttatgaatatgactgttatgttgctcaacaactcaattcaaggctctaccagatagacatggaccataagaaaattcccaaatctgaaatcataggaatttttgtgaaacagacctaagggactaggatactattttttatttgcgctattgcttgcacatgtcatgattccagtttttactctttagagggcattaattctgagacttagtctggagtctgggtcttgcaatgtgactgctaacttatacttgattcctaagaatgtaggtatgaaataaccaagaaagatcttttgcatagtttggtacgttaatgtcagcatgttgttggatcttcagtataactgtgttgtgatattttgcttatttcaatcaattcgtttctgaacttttatgtacaaatataaataatgaaagtatccctctggatcttaacaggatgtttctttatgccgacaggattatattgaagaca

SEQ ID NO: 15155 - DNA, 702 bp, Brachypodium distachyon
  Intron number 1 from transcript Bradi3g44200.1 (locus Brad i3g44200) derived from phytozome v7.0 (chr-ID Bd3; pos 458 87338 to 45888039)
agcgccggcttggctggctcctcaccttctcccccgtgagttccctctctatctcgcccttgttctttccttgcaattgctctagcttgagttggggccgaccatgttgtgcaatcagcagtagaattatgtagatgctgcgacatacttctgacatgaagtgcaattattctagaaattgacagatccattggttatacagaccagggagataatgctggcttgaaatcacacaaggaattgcttgcttgaaatcgatagtgttgagtggtgactttactgctagtacgggtttagtgaaatatcgtctcgattgcaactggtagctacagtgaaagtacttcaaggtatagatttttcaggattctttgtggatgtgcaacttttttcaatagtgaaaagctgtgcgctatataagtgaactaactgataaaaatctcttaagaacacgaggaattctgctgccatatagagttgtaccaggaaatttgctgaaaccatccaccctggttaaaatcatttgaatctacatcggggatgaatcaaagaactggcagtaaacaattagagaagcttaagttcaaggtcaagagccatcgccttaggcaatttgcaaaatctaatgaagaaacggttatcctagacacccctacttatgtcagtttcttacacctcaataacacctgcagtcatcgtgggagg

SEQ ID NO: 15156 - DNA, 923 bp, Brachypodium distachyon
  Intron number 1 from transcript Bradi3g18850.1 (locus Brad i3g18850) derived from phytozome v7.0 (chr-ID Bd3; pos 174 48188 to 17449110)
gcacgcagaccggcaccgccgaggggttcgctaaggttgtactgccagccggtctccatctctctcctttacttctctctaaattttcctcttttttcaagtttgttgcgctgttcatgagctctagctgtctagcatcgttgtggtagctgaattgcttctgctgttcatgtcatgtgggcaaaaaaaacaattccagcttccatccaatggggcaggggagacttttacgaagaaaacatttgtttattttagatggaaataataagggatgcttagttctcgatatcattgatgaatgatgatggagacgggcaggacttctaaatctttcacatcattttcatgccggccttggcatccagcttcatgggagcgagaattccccggctgcaagagtccaggaaaatgactgcaatatttgaggaactcagcaatgagaataccattagattggggttgtttaatccagatatgtcatttgcttacccgagcatagaagagtataacttgttctatgtgctagcagccagaacgtgtgacagcgaaatcttaaccaaatataaaatacacgggcatcccagttgagagaatttttttgggtgtccagtactccagtgtcaactgtcaaggagttggtgggctaaacaaccttttaaccttctttatgtgtcccactagtcagatcattttctttgatttgtgtatcaccagaagctcatgccataagaacaaggattgaggggcgaaacaatataaattgtttggtatatctgtagatgggagggaaaaaagcaactgtcttttgtattgtgatgccttgttacaaatcataatgtgagagtctcttgaatgttattatcttctaattattattgttcaccctaacttacaggcactcgctgaggaggcaaaagcaagat

SEQ ID NO: 15157 - DNA, 926 bp, Brachypodium distachyon
  Intron number 1 from transcript Bradi3g02100.1 (locus Brad i3g02100) derived from phytozome v7.0 (chr-ID Bd3; pos 124 0767 to 1241692)
cgtgatcggggccgttgcttgccgcgggaggaaaggtattccgtgtttcgtctctctctactgcccctcctttgcttcgattcggtgttttctagcagcagcagcgccgccctcgccggtttcatctctgcttgggggactgccccgccgtgcacgctacgaatatgctagtcttaggttgttctcggggtaaggattgggctgttgttgcgtccagtttagtttggggtgtcgttcgacggcttcaatcctgcaaccccgctgtgggaggccgcgtcggaccgagctgtttgcgtttcagaggggttcgcgagccggatgtagcgattgctctgtgccgtgctgattttatagctctaggtgggccgagggctccggtgattctagttgattttgctcggaatcagtactggctgctcgtttgatttggttttctgccttcttccggttaatcatgttggttggtccttcccgaaccgtgtttgattggtcatttttcttatcgcaaaggagggggcaccccctggtatcatatattggaattggtttgacctgtgccagaacggttaatcgtttgggtttccccaattccatgtagtctttgttgtaacgaattcgaacttctagcaaaactgggttcacctgagtaatgctagcttgatttaataattccttttaaacgcgtaacagctcaattactgagcaagataaatgcttaatctgggataagtatagcagtcttcgactatttgtgttttgttttgctgatggcgaggagcttgtagcgctatagttttctggcatattttctcctatcgatttggtgctcaagcctcaacaggccagcaagatttatcactggtatttttggctgttgaaaatgaaaatgtatctaatggatgtttctgtgctatagggctctcaag

SEQ ID NO: 15158 - DNA, 1028 bp, Brachypodium distachyon
  Intron number 1 from transcript Bradi2g49290.1 (locus Brad i2g49290) derived from phytozome v7.0 (chr-ID Bd2; pos 493 95452 to 49396479 reverse strand)
tgtaccgtatcgggagccacctccgctctctcaaggtacgtccccctccccctcccccccacgatccttcccgcagcaaatcctcagcggttcgtcagaccggctcgaatcgtctaggtagtaggtactgatagtgcttgtgggtcgcggcctattcatgcgtcgtagtttataggttcgatttttctagctttcaccatttaaaaaaccggcgctactgggcgctggagtgtttgctgttgtgttgtgttggttgtcactttattagagaagaaagaagggtgcttctcatttcacgttagtacattcaacattgttcacttcgaccagtgcaaacatcgccccctttgtcaaggaggcctaaacctatctattctaaacgctgtttcaatttacgaacacatcagtacgtttgttatcccttctcaaggaggcctaaacctatctaaacaccattctttgtgttcattgcttccttttgttttcgtcctcacacattacatttatcagatcgatatgtaaccttaacgctgtagtcgagactcaatgggggagatgtaagttactagctacattttgttgttgtaacttggaaatttacgtaaggtgttttttgttttgccatttggtcctattggttctggttttcaatgttgcctgccttcagcttctaatgtaactagatgatgccccgcacgttgttgcggaaatttttagttaacataaagagtattcaaaattgaaaacatataataaaattgtacgttcttcacttagtgggaataacttgatggaagtaacatgctatgagttttccactaaataggtgtgaacaaattaattatgtgatgatgtggcatgcttgcatgtttagagaaatcaagtagtgggttgcttctacttagatatagaagatttctacagtttcttacatttttgagcttttcagtttcaaccttcatttttagcgctgttacctgatgttctcgctgccagacaatttatcttgtttttgtgcttgcagcaac

SEQ ID NO: 15159 - DNA, 937 bp, Brachypodium distachyon
  Intron number 2 from transcript Bradi3g00430.1 (locus Brad i3g00430) derived from phytozome v7.0 (chr-ID Bd3; pos 160 276 to 161212)
gccaagtgagtctttagtttgctagccgtttctccctgggtgttgaatgatctcgctgtagatgttctactcaaggattctaagaaaacgaagactaatgaccaatcgaacggtaaccaataatccattcttaactcaagcatttcgcacatcgtagagaaatatttttacatgtcctatcacacatttggaaattcaacgaaatttccagaatacttttcaaagcttcgaagtttcaaactcaaacgagtgggtacaccaaacagccctgtaacaagagcgcgaggcattaaccatctacctgcctgcttagcttaattaaccccaagtacattccacatcgacaagagcaaatgcagatcactaaataagataagcacatggaaattcaatacccaaaggctacggcattacaacataagcctacagaacattttatctctctcaaacaaaaaaaaagagaaagcctaaggaacattagctagttcaaagcaagtcccaattgcttggggaggtcggtgaataacagaatcacaatgtagtcaactcaaaacacctcgtggaccgcaacaccccaaagcaaaacatggcaacatacatagttctgcatctgaacacacggctcgcgagatcatcacattctgtcctctctcctgcgcggcgcacaagttatgatctcatcgaccctgagaatcatctctgcagcctcggttgccgacaggataatggcttgcttcaccttgaacgcttcgcatatcccctgcttttgcatgtctccgacctgcagaacaacaaaaccatagtgcttagtttcaaaccatagtgcccaataggtcctttctttgggctctgcggcccaccccaaaagatgtatttacatttttcttcatctattctcattttctcatcccctttggattattttcttctctctcag

SEQ ID NO: 15160 - DNA, 474 bp, Brachypodium distachyon
  Intron number 1 from transcript Bradi3g34880.3 (locus Brad i3g34880) derived from phytozome v7.0 (chr-ID Bd3; pos 372 40845 to 37241318 reverse strand)
ttgctggtttcccatctggaattcggtttctcctggtgagtttttctcgatccttccatttattttgtttttgtggagaaaatcggtgagattttgcttcgggactccgccttgtccgaattagtgtttgggatttcgctccgtatcttagggcactctgctcgaactctggtggtgttttattggatagtttggtcgattttcggtgaatagtgtggagtttaatcttttcccccacgatttttattttattattaagccttgatttcttggttccatccataggccagggaatccttttcactgctcccgttttgattattctttcgcaatttgatactgctttgaattctttggctccctatgtgaatgcttagtagctgttcaaccataatttgacttcaggatttctgtttcttcattaatgcagtgattatgtttgttgtaacctagactagaaaaaatcagctgccg

SEQ ID NO: 15161 - DNA, 1030 bp, Brachypodium distachyon
  Intron number 1 from transcript Bradi3g09890.1 (locus Brad i3g09890) derived from phytozome v7.0 (chr-ID Bd3; pos 809 0108 to 8091137 reverse strand)
agaaccccgccctcctcaacgacaagaaccctgtggtccgtgcttctcgcgctccctccttccttgcatttctttagcttcagaatgcgatctttgctccttcctgcggttcttgacacatgtagtgtggagtgagcatacgagattcgtcagaaaagtgacctttgttggggttgtgaagatgtgattttggcggcttgtttttctcgagctggttcttggttttcgttcagagtttctgctgctttcttggaatttggacatttttagttgtgacgccgttaccttgcatcgccgcctggtcttcttggttctcttcatgtgcttctttgccccttctttcttgcattttggtgcatagacaagttccttcccgagctcgttctcaatgactcccaaatttgtttgcattttagagttctaatccagccgtgttggatttttcttgttactgtttttctttcctttctttagcgtattgctggctgtcctgcttaattcgatttgtccgccttgattcgttttaatgcaatattgatttgccttatttattttgatcctttaattgcatgcttgtttttgggtttgatcctttaagaaatggtatgtgaccagttgggtcgctttcgtatgtacgttatgacagggcattttgaggccatttatgtttggtgaactgattagatttgaacatcctctcttgtgccctgtgacaagagccttgacatgttgacaacctgcaaaataaattagcaagggatcttctcatatattagtacgccaatgttttaattatacctcaagggtaatttgacctcccaattcaactaatttccttgatgtgctcagtaagggtgtggtcatgtgcaaagcttcctcgaaaatgtgctaatagttttttttctggtagcaccgtataaaggagaacctgcagatatgataaaattacaataataaacattttccgaaatgccatgtctttcgactttcgctgtgactgaatatacagcttttatacggtattatgcag

SEQ ID NO: 15162 - DNA, 761 bp, Brachypodium distachyon
  Intron number 3 from transcript Bradi2g60110.2 (locus Brad i2g60110) derived from phytozome v7.0 (chr-ID Bd2; pos 575 26029 to 57526789)
gctgtgcggcttgctcgtggtttgctccgggagaggtgaatgactactagccctcctcctagtcctgcgcttgatcctgctcgcatttcgagctgttcggtgtgcttgactggtttggtactccgtattagtttgcttctaaaaatgggatgcttccaaaaatatgcaaccatacatgcgttggattaatttgaccctctttttcttccttcagatatgatgggacgagctgcagaaaaattatcatgttagcaaagggaatttttatattttgtaaaacacattcatctacatggatacttttctccatctgtattgagaccctaataacgaaattcggttgaaatatgctcatgtttttttttctctctttcttggtagtacaggactaccttgatcttgcaatgcaggtttcaaatgtcttgttgggaccctaatagcctgcccagaatcagaaaactgtgttactttaacaaggagcatcatttcagattccttatgacaaaacaaaaggcaataaaataggaacacagtaattcatgcgtgtgcatttgattcagaactatcatgtttttcctcttgaaccttgaactcaaaagttatactgttgtgattattctcttattgtcacataatccttttgcttcactaggttgtgtattttcagcacgtatttagcacgtcccgtgttactcttgatgttcattctttatttttgtgatacagaaccttcaattaaacaccacccgtccacaaccata

SEQ ID NO: 15163 - DNA, 695 bp, Brachypodium distachyon
  Intron number 1 from transcript Bradi3g25610.1 (locus Brad i3g25610) derived from phytozome v7.0 (chr-ID Bd3; pos 259 63147 to 25963841)
cgttgacccggattctcgccacctgcgcgtcccaggtgcctatcgcccgccccctaactaatcatctcctcggtgacggttcagtcggcttggtgttcgagtgctgtattagttagtaccgatcttctttttcagttgccttgcatcctggcgcctttggttgtagctttgccgcagcaggcttgcagatccgatcgttcctgttgtagttttttcttggttagcaacatgtcactgatgagtctagtggtagacttttgcgaggattcccgtggcagatggcgtatttaaccttggtttggtgcggctgcggatcatgtggggtgttaatttgttgttaccggatcgtttgaagccttttatactgtactccgtataattcgatccatggaactcagcatagtctttgatttcctcagtacaaggaagatgctgttgcttacttattcgcgttgctgccattgggatgattacatcgaagaactgaacttcaatttactttccttattaaactgaagggttttggattttttttctactagtaaaacaaatgccatctatggaatattcaagtggctagtgccaacttgcctgttgaatatgagtgaattatcaatgaccttatgatccggtctcggtttgattttgttttgttaatgttctatttctctgctctggtatgcaggcaaaagatt

SEQ ID NO: 15164 - DNA, 979 bp, Brachypodium distachyon
  Intron number 1 from transcript Bradi3g05690.1 (locus Brad i3g05690) derived from phytozome v7.0 (chr-ID Bd3; pos 401 2094 to 4013072 reverse strand)
ggccgccaaccaagtcggcggcgaccgcgcgcacggtgagtcagagaccgcatctcctttcctcttcctctctcttctatcggaagaaacgaatcattatttcgtataggacactcaggttgctgcactttcctaaattttgagacatattttagggtgtttctagctgggggtttgggttcggtgccttggacagccagacaggaatcagttggggtttatttcgccgagacatctaatagtagttcgtatttggggggtgaaaattttcactggcacatgcgtattagattgctggaatatagacaaagcggacttaaaattgtttgatcgtgaccatagtaatctgtagaagagattttggatgtgcatgacatgctcttgcatttggtgagtggtttctgctttgcaaatggaattgggtgtcaggggccaaacagtaggtgtccagtcgcatgaagcagttgggctggtacaattcattgtataccagatgacatgagcatggattttaatttatgtatgcaaaccagcgatgtttgcctggggaatcaatgggtatggggtagtataaaatttcctgtgagtgcagctctgcgatatttttacggataatagtttaggcgcagaaaaaaacattcatgtcacctctaatgtactccctccgatcgataataagtgtctcagatttagtacaaagttataatatggtatgagggagtatgtgaatatgtgattgtggtataactttatgctatgaggtcagctataatatggtataaatgtgtagaactgaaaaatataataagatgtgagacttgcgtggatgctgtttcacactcttttaaaatatcgatggactatcgtttttttcagtaccactcatgaagaaatccatcttgcaaaataagatgtgatgttgagctatttccttacggaacctttgcaactctcttttgttggaacaggaatcttcttc

SEQ ID NO: 15165 - DNA, 711 bp, Brachypodium distachyon
  Intron number 2 from transcript Bradi3g15490.1 (locus Brad i3g15490) derived from phytozome v7.0 (chr-ID Bd3; pos 137 86414 to 13787124)
agtaagtttgaactccttcctttcctgagaatcctccggcaattgttcttgtatatatatgagcacttgagaactgcaagtaccatttcacttgcacaaaaaagaacaaattttaaacggtgttagtagtacagtaatcctgtagcattactataattttgagtgacagctatggaagtatcagatcgatttgctataggaatagttaagtagccacacatcaggggaaaatagaatgggaggtgactgaagtcactgaactgatgtacaagtctgagtgaaaggtcttcaaaggttttagtgttacgaaattcctactggagacatcatcatcatgagatagctttgcttgcgttgtcgttgagtgccatcatatgatgcttggaacgctcttcaatcccactggtgttgtagtcacatatctaccttttttcatcaagtttctgagtccagtggcatctggacattggtgatcacaagtggcaagttatgtggaacgacgtaaatctataattaagttctagtcctttgaactgtgaaaatatttggcgtgtatatgctgtgatttaacatatacaagtagtaggtagtttctgaacttgagagatttttatcggcaccttttctgaaaaaaataaaaatagagaaagcaaaccagttcaatgctggatgaagttgctgatcattacttcttttgctatgcagcttttc

SEQ ID NO: 15166 - DNA, 898 bp, Brachypodium distachyon
  Intron number 1 from transcript Bradi2g58750.1 (locus Brad i2g58750) derived from phytozome v7.0 (chr-ID Bd2; pos 565 54178 to 56555075)
cacgcccgcctccccgctcgcctcgtgccccacaggtaaccccacccccttcttcttcctcctcctactaggccctagctagccgccgcacctctaaactaaaccaatgcctctcttttctttcccttgcttgcgtctgcgtctccttccctgtggatttgttcggtcctgcaagtaactattgcggagtcattagggctaagatctgcgccgaagagcggggcccgccgcccacccacgcggcggcgctgggcggattcgtcggtggtggtggtggggaagctgttgctgccggtgatgattagccataatgcggctgattagcagatcgaaattcaactgtagtggggtttctgtttggtagttgggagtatgtgcaatcttgcttgtaatgatgaccatcacaaggtagttagtagtacaacaacaaggtggtgctttgtggagttggaaagtttaagcttcgtagtgtactgttctaccggcagttggaagaagtgccattgctattaggcaagacaaggacatataattaatgtaattttgggcagctgtaagagttagttgaatttccggttcttttcatatctggaaaagtttttgaaggacatgacacccatgaaaagttgtggcacaggcaggcaataagtggttcatcataaaaagcagcaaacttggggtcatgaaaagttcaaagtgttaattttttattttgtgtcaggtcagatgaactttgctgtgcagtgaaaaacggattttctgcacactacttcatgaatttatttttccaaatgtctgcttgtttatttcattttgctgttcctaacttttccctacttgcattgtttctgaaatgcctgcaggttcttcattacgagctcgattctggaccttacca

SEQ ID NO: 15167 - DNA, 916 bp, Brachypodium distachyon
  Intron number 1 from transcript Bradi3g04240.1 (locus Brad i3g04240) derived from phytozome v7.0 (chr-ID Bd3; pos 291 2818 to 2913733 reverse strand)
tggccacgattgctgcagctgggaagggatcacctgtaatgccaaaatgatgatcattggcatctcgctggcttctaggggccttgaggggaacatctcagtgtccctgggcaatctcaccgccctgaagctccttaccctctcccgcaactcgctctccagtggcggaattggtgtcgtctcgcagcatcgccgttctcgatgtcagctttaaccgcctcaccggagcgctgcgggaactgccaccatccccagcccccggtcgtcctctgcaggtactcaggatggcaacggatcgggtctggacgggtcgaccaaatccatatccatatccatatccatcgccggaccaattatccatccacgaaaatatccgtggatacaaaacaatatccatatccatatccaccgggtatccatagattatctatatccatgcaatattctctttccgtccaatattaagtgactctaatttgtgacggagtttagacggcaaaaaattatatgcataactatgcgaaagctcattagattactaagatatatatatatatatatatgtatatatatatatattactttgtgttcaacaaaaataataataatccaaaaatgagatattgctattatctcaatagatgaaacttacggaagagtacatctatcgagcagtggatccacgtctcggtaatttatttattttaataaacaccaggtatccacgaatcaaatatgatatccatacccgctccacgaattggcgggtatccatacgtggatatccatggatcgaaaacccgatccatatccacgatccatggactggatatccatggatggatatccgcattttgactatccattgccatcttgagcaggtactggacatctctagcaacttatttgcaggaga

SEQ ID NO: 15168 - DNA, 656 bp, Brachypodium distachyon
  Intron number 1 from transcript Bradi3g15610.1 (locus Brad i3g15610) derived from phytozome v7.0 (chr-ID Bd3; pos 138 96369 to 13897024 reverse strand)
ggcatcaaaagttgttgcgaattgtatttggcttggtgagcttgggcagtctaaaaaaacaataatgcagtcaatgaagacaaaagaataagtcagaaccggtaagattaaaaatgaaaatggcgtgaaaattttcagctgatctgagtgaaggcagagatgcaaacagaatcttcaaattacattctgagcagtaaaataaactaacaagtcaattaaacagtacgatgtcatgttttatcctgcttgtatctctaagtgtgtatatagagacgaaaacaaaatcccaatttcgctaacatcacctgtgttcttcgccctacaccgagctatggtttggcacgtttcatgcaacaaattgttttccgactttgagaaagacgagtaagtgtatgtttggttcatgtccagtattgcccaaccaaatctaggcaaaagttggcgacccaaaattttgagcccgcacttgacaaaaaaatacaagaatatgcgagaagggtcggtggatactcattggcaatcaatattttggctacacagaaaaaaaaacaaattttcatgtattttggcacagaaccaaacatgtatcagctctagtgtgatacgtgttattaaacttgatctgtaggttcaagcagcaccggatccgtggcgca

SEQ ID NO: 15169 - DNA, 800 bp, Brachypodium distachyon
  Intron number 1 from transcript Bradi2g56100.1 (locus Brad i2g56100) derived from phytozome v7.0 (chr-ID Bd2; pos 545 10050 to 54510849)
ggttcccttccttgcggctggaaggttcgcttcgagattttgtttttgttctatgcccggttgtcttgctatgcaaggatttagcatgtgtccagatgctgtttttgagtttcgtaaagttcagtatcactgtcaatgcaaatgtgtgataaattgggcagttacgttctggaaaaaggggctgcttttaagcgttagcctagttaattcaccttcgaatcttgaaggggtgttcagggcaggcacaggtgtagtgttcaatgtgtcagtgtaagtgcaaccctgcaaggattggatattgagaacttgcggcgcagtttgctgctcttggtattctaattcggctcttgctatagataaccagacgattggttatcattacattgcctagaatttgatttctgtagtttcatcctagccatgtcctctctttataattatcaattaagtatgtgtcttaagttattgtgatttcattcttaaaagagtttattatggtttgaatgaaactgcccagattaccatgcaaaaatctgagtttcaatgttaatattgcaaccttgattccaattgcatcaggtgtgtcaactgataacgccactttgcactctatttggaattaaatcatttctctagtaaaaatatctggaaaatcgacttgatagaataatagaaatacatcagagttatggtagctggttttgtacgtgtatttctgcttgggaacatcattatttacagcactattattctgttcttcttcaggattcgggcatagcaagtccacaaccgctacttct

SEQ ID NO: 15170 - DNA, 899 bp, Brachypodium distachyon
  Intron number 5 from transcript Bradi3g41030.1 (locus Brad i3g41030) derived from phytozome v7.0 (chr-ID Bd3; pos 430 69408 to 43070306 reverse strand)
gatatcaaggaagcacactaacagcgcggcaactggtatgactgaactgattgtttgttgacgtagcatgaccatgaatggtccttacacattgataaatggttttcacttgtaacatcaacattgttgagtgtttatccttgcaagcaccttaaatgtgcactagattatcagcattgtctaaacaccaatgtttcagtttcacatcttatcagatgaaagtaccatttgctgtttgtatcatctgttcgttgctcttcccaaaacggttcttgttgatgtagaagattagtttaaaaggcacaccagttgggtgggacctgcgagattgtattatcttccaccaccatgctgtttctagtaaatcatagtgtgccagggtgcactggcaaaaccaaatcacaatgttgataatatcatgtcatctgtaaaagtaaatattctcctcatgctgtatgttcatattcatataaaagcaatttcaatatttagtcactaaaatttgttggcaaacatcaaggacaattggttctcatatcgctagtagtagggctgtccaaatcatgcaaaaccaccaaccaaactattatttgccttttgatcagacacctaatgcaaaagtagtggaccaacttggagtttaaggatatccgactgcactggttatgcatagggctgagcaaactgggattgaacagccatggcagtgagcttccgttggtcttgtcacgatatagtctacagatgcttatgcatatgtactgagtagaatatgtatattttctcagatttatatcactagcgagtaattaattcaccagttcctataatatctaacatcctcctttgtgttttgtgcttcagtcctttacgcattctttgggctgcggctgctttac

SEQ ID NO: 15171 - DNA, 590 bp, Brachypodium distachyon
  Intron number 2 from transcript Bradi2g46520.1 (locus Brad i2g46520) derived from phytozome v7.0 (chr-ID Bd2; pos 469 54936 to 46955525)
aagaaggtatataatgactgatggagggcgctttcttttctccttgcttacggtttcttccacttgaagtgtatttcaaattgaggagccaccgcttcctttttttggcagtctagtaccccttattgtcaatgtatatgtatttgatgcaatgttaagctataaatggattctctttggttggacggtgggtgattaattggatagcgcaagtgggtttactacggaatatcgtcaacagaatagtctgaaaagggacagaagtaatagatcaacagatttaatctccttggaatctttcatatagaattatagttatgttaataaatcttatggcatgaaaaaaaatctggttgcgtgtatgaaagtggtttcatttgtacaaacatccttttatttactccctccgatcctaaattcttgccgttgttttagttcaaatttgtactaaaataacgacaagaatttaggatcggaggaatatttatgaagctctatatcagaagcttctttttgtacgaaatcaaatttcataattatttgctctttgattaggttttcagagcccttgaaaagctcaggaagaaagc

SEQ ID NO: 15172 - DNA, 864 bp, Brachypodium distachyon
  Intron number 2 from transcript Bradi3g26900.2 (locus Brad i3g26900) derived from phytozome v7.0 (chr-ID Bd3; pos 276 85194 to 27686057)
ggccgcacaccaacgagattctgcttggaaaggtcaagtctcctttttctctccaaatttcaatctgtgtgtctgtgcttgcttcggttgggggctgtgaaattgtaaaatgctggattggaaaggtgggaatcttaaggttggtcatatgtgggattgatttaatattactccattgaaaactaagtgcattgtccgaagatctggtgatgtttatatattcatatggtgaaggtgaaaaggtccatatttatccaaggaatccactttgagttgttagggtgtcacttcatgatattattccacctattttttgtcaatttgtttgcaattttagtttataactggataaattagatgacttagggttctgatatattggcaaattagatggaatgatgcatctgtttatccaagtattgctttcctcagcccaaaaacataaaacacgtgttcccttgacctcatccaggccatatgagatcgtctagaaagatgatatgattgtttgcattttgttcttgcttcttagtatctggtcgtcaccatgctctgcagttttaccagcgcaaaagaagaaaaaatagtgatatgttcctccataatcattttaatcgagccatgagctcacaaccctaactcttgtacagatcaagggtaatgattccctacacagcttatccacaactttatcttgttatcagtttctgagatgaccccatataagctaagatgacccaccaagtcagagctcagtgatcagttgatatatgaattgcatttcttttctagtaactaatgagttattttgagtaattgtctcgagcaggcactaaagcaggtccctagacaaagcgtgcaagt

SEQ ID NO: 15173 - DNA, 824 bp, Brachypodium distachyon
  Intron number 1 from transcript Bradi2g46700.1 (locus Brad i2g46700) derived from phytozome v7.0 (chr-ID Bd2; pos 471 27252 to 47128075)
atcttcttcgaaggcgccatcgcccagatcaacaagtgagctccctagtccccagcccccctgcaccctcctcgtggattcgctatcgattaggaatctatggagtatggtgatccggttagattcataattcgggatggtggacccatgggggtctgtgcatttgacctcacggtttcggatttgtccggtgaggatccattttattgctccggtccagtgagagtcctggcgattaggttatttaggtttgagaaaccatcgtctgtatgcaccgatctgccctcatatggctctaattaggtaatcctgcttgaatttagccacacacaaaaaacaagatagctaggcatggtttgttttgagatctagaattgtcgaaagcgtcatagtaactgatgtttatgatttgggtgcttcagaataacaagcgatgtatgtaaatctgctgtggatttgaagtcatcagtgaaggcacctttgttattgtaggagtggtaatgagctttgcatggttatgaagtttgatgctttatttgatctttttaaatttcgaaagagcaatgatgtgttttcactagatgcactcgcattagaatacagcctttcgctgatcaaatttgagttgcactgtgcggctgtgccataggaaaagggcttttcttcttgttcagttaataattaactacatatttgaaggcaaaatgtttgatatggaagctattttaatactgaaagcttaacaaatgcattttagctattgttcttcatgttatgataaatacaccttgatcatgattcacgcaggtatctaagtactttgg

SEQ ID NO: 15174 - DNA, 762 bp, Brachypodium distachyon
  Intron number 3 from transcript Bradi3g12790.2 (locus Brad i3g12790) derived from phytozome v7.0 (chr-ID Bd3; pos 114 44844 to 11445605)
tcctgttgccaagcatctcaataccagctcttcaggtatacagagttcttctgagtgcattatctcaccatcccagtcaatactctgccaaggctagaggtattcatgcttttgtttatgaacatgctttagttctagctgcaatagcatatcacacagatgtttgtatgctccggaaatcaaactgaaatttttgctatgctactaccaaattgtataagcgcatacggctgtttccattgcaatatgcctatgggttagtttactttaaacttagcttgttctgtttgttcccttttatagctggatacgcagttctaatagtcgctttgttcaaccataatttgtgacaagtttctgtttgtaatgttatcgttctgattttggtctgtcatatttgcaaaataataataatctttactaggtgggaagaacatgttaattaaacattctaaaacaagggaggtgttgggatctggtgctgatgaggttggatatcctgttcaaaatactcctcagacaccttctgttgaacttgatttagcttcgtccactatgggtgaggtgaagatgtcattgaaatgcaagtttgacccttcaaaggtccgcattagtttggacaaagtcttgaaaatggtcgaggataaatgtcttcgctcatacaagattctaccacctgatttttctattggcaagctgatgaatgaggtctgccaatatgttgcagaatcaggtgctgtgcattctgaagctcagagcaaa

SEQ ID NO: 15175 - DNA, 825 bp, Brachypodium distachyon
  Intron number 1 from transcript Bradi3g17650.1 (locus Brad i3g17650) derived from phytozome v7.0 (chr-ID Bd3; pos 160 21676 to 16022500 reverse strand)
cggtacgtggagttcttctagctctaatgacatgatgtccgtgtccaaccaatatgcgttagtacgtacacatacattagaacatttatttatgtttttgataattcttttcttttgcagaaatttttttggagcatgcgaacattctagtttatactgaagttatactcaaatgaaagtcgactttgctatccccattcaagggttcttaatctagagaattgtcataacataaacaaattttctaatgtatcttgagtgtttgttttcttcagcataaactagagtatttgcatgctccacaatgctttctgcaaatgaaaagaattatcataacataaataaattttctaattgatctgtactaacgcatattggttggacttggacatcttgtcattagagctagaagaactccgcgtatggcatttcccaaatttatactccaaggacaaaagcagtagcaccctggtagcatctcttatctcatgttctgatgcgatgtataaatgagttttgagctcttattggagggaggcatttgtgaaaaggaagttgatctctttcttgctgcagactgttatcttatatatactgaacacgagaatctgccgaagtgcagtttgataaaatttcttaattgtcctagtgtacaacaactctcttgagatatatagacatatattagatctcaagaacaacatatgcttatacatggttatagcatgctatttgtccttttccttctcatttctgaagagacatttttctaatatctttgtcttgaattaatttattatgttcgtcagagtgttcttcatcagc

SEQ ID NO: 15176 - DNA, 492 bp, Brachypodium distachyon
  Intron number 2 from transcript Bradi3g39640.2 (locus Brad i3g39640) derived from phytozome v7.0 (chr-ID Bd3; pos 418 67894 to 41868385)
ctcttaggttggttctgttgattcttctctgggccatggttctcagtttgtagtttcatgctcattttacagagaaaacatataataatgttgcagagattttttttattatttattgataattccctttctgtacctcacatatcatggtttgattcattcagtggactgacattacttgaaattcttacaaatgtgccatgtctgtttgtattgtctgtaaactttgttaatattgctatctcatttggatggctggaagtttttcctatccactagcgatacatgattaagtttctttgctgatctctcaaggaaacctaatgtacaccgatttttttactctgtgctgccaaaagtggccacatgtgtgcctctcaagagtctagaactcaggattgtatttcacatcgcacacattaggtcttaacttatgcttatgtctactgttgatcaggaatctcaaggtagacctcattctacttgctggtt

SEQ ID NO: 15177 - DNA, 1001 bp, Brachypodium distachyon
  Intron number 1 from transcript Bradi3g07040.3 (locus Brad i3g07040) derived from phytozome v7.0 (chr-ID Bd3; pos 522 0987 to 5221987 reverse strand)
cgccgtcttcctcgcggcgccgcggatccaacgaggtaattctcggcgcgtcgccgcgcgcgcgggtctcctccattcccctaaccctcccctctctccactcccccctcctcctctcgccgcccgtggatctcggtgcgaatctgcgccgattcctcacgaggggggatttgatttcccccacgggttcgcgtctccttccaccgcggattgtgtccgaaccgcccgtgtgttgtgtgtttcggtggtttcttaagcgattcggcgtctgcttggctgagggacgcagtgttggattgcgaggcggattcctggtctgaaactttatatagttagatgcgatgatgccttgtacgcggtagagagcatatggcgtacctgcattgaacgtcccggaggtcaggcaaatttcttccagatctgcctcgattaggtgcgttcctgtgcagacgtcgtcgttttttttgctgtcctcgatatatggtgtggctacgcctggatatgatgatacattgatctggggaatgctactcgtagtgtataaatgaaaatcctcatctcctggggcttttatttccatccttatggtcctgttatgtttttttgtgtaaggaaaaggtgaacgtcaactttaaatgtgtgcttgtgagtctagtttcataatccgcaactcttctttgacagttctcaattctggccatagtttctgaattgatactgtcaaactattgtgttgtgtatatgcgccaaatgcctccatgttgttgctatgctttatccaaattccaaactagtgggtttatttgctttgttctgtgcttgcatcaagttttatccaaataagtgagcatgtgatgcttaatatgctgaaagccactcttttgccattaattgtgaaatgtccctcatacgtcaaatttcttaggatatgctgactttggttactgttaaatatttttggtgcaggcatctctcagtgtcaactaataaagtatcagtaa

SEQ ID NO: 15178 - DNA, 546 bp, Brachypodium distachyon
  Intron number 3 from transcript Bradi3g15310.1 (locus Brad i3g15310) derived from phytozome v7.0 (chr-ID Bd3; pos 136 04402 to 13604947 reverse strand)
gttggtaagtataaacaagtagatagcatattaattgtttcttcagcatcctctcccgaatgttgtttttgaatttcagtgcttgttttgctttgtatcatcacagatttatagtcaccatattaatttttttgtaaaccagctgtaaaggtgagttaaccgagatggatgatttataattgctttagattcttttggatgcaaaaagtactttttaaatgattatttgctgtatctggatttagatgatttccaagaatgacatgcttcagatttcaaacttatggaaaccaatagaagcaacagaatgatagataaaatctgttaaccttgtctagtttaagtgaatagttacataaagaaaagttagaatagtatatgatccttcttgaagtgttgggtctaaatttaagaaccaaatgaataggggtcattggcaactttgtacttgttttagatggtctttctctgttttggtgaggcagctattatcctgtactccttttgtggctttaatagttactatttttcctctcgacaggattt

SEQ ID NO: 15179 - DNA, 738 bp, Brachypodium distachyon
  Intron number 1 from transcript Bradi3g28600.1 (locus Brad i3g28600) derived from phytozome v7.0 (chr-ID Bd3; pos 300 13462 to 30014199 reverse strand)
taccccgcgaggtcactgacggcgctaacaccgtgagccggtcaacccgacacgtgtgcccgaggtgtcagaaacacgcttatacgccgtaatcgacagaatcagtgctatgtgcaacaagttaactgaattgcggtggttctgtgcgaaaattagcaaaatcggtggttttcgcaacaagtcaccgaaatgtggtggttctgcgcaatttactctagcttctgggatttgattttgacttgaagcgccttcgtatccttaatttgtccaagtttgatgataattccatcattgaattattcttggagcttgaacagtaaataggagtaagtacaatgtattatgtctaaaaggctatcagagcatttgttctgcagtgaggatgtttggagtatttcttggctatatttttgtaacatattcatttcagcattggtccttttatgaccaatatttttaaaatgctaatacatttttgttgaatgtttcgtatttatgctgtgaattaccatgttattagttaacaacttaacatatcatgttacctagttagtatgacatgcatgtgccatatctattctaagcatttcattacctgattcctatttttctcttattccattttagtacatgtactctatatttttttactttctcactgattcacgtgttttgtttacaaatactgtaaaatgcttaccagttgcctaaaagtgctgtccacaagatcctgtcagc

SEQ ID NO: 15180 - DNA, 563 bp, Brachypodium distachyon
  Intron number 3 from transcript Bradi3g34290.1 (locus Brad i3g34290) derived from phytozome v7.0 (chr-ID Bd3; pos 367 18056 to 36718618 reverse strand)
aaaagaagcgcaagcaggaggttttaccaaatccggtatgcaaccttagtattccattttgctttatgtattcgacaactgttattagaatgacttgttagttgttacctgttagttgctgaacttagtgtggactgtggagctactgtttgaatgtaactgcctcttgccataagacaccaaatgacaaaatgttttgcaacagttgttttaccagttctcgtacttgtgtaaaaaacaatgctatagcaaaatctttcagagtatactgttgctgcttcatgagggatatattcttgacattgaacctaatgatttcagtccctcactggtattgcatgattaataatagaatcatttgcacttgcataccagagtgaaattcgaagatgttaaatgactcgcttgcaataaaaaggctcctttgtttgccttttcctgtttggttcctgcatgttactggtttggaatggttataatggcatgagtcttactattgccatcatttgttgagttttgttcttataggtactagaagtcaaaagggcagctaccaatcttca

SEQ ID NO: 15181 - DNA, 812 bp, Brachypodium distachyon
  Intron number 1 from transcript Bradi3g44840.1 (locus Brad i3g44840) derived from phytozome v7.0 (chr-ID Bd3; pos 467 80367 to 46781178 reverse strand)
ccctccgtctcctcgctctccggccaccgtatgctcttgtgtctctcatctcatccatccagtctatacatgacacattgttgcaaattagcacttaacattgttctgtactcattgatgtcttccattttgctcgcgcctgtttctttgatcctctggtgtttgtgactgggattgcaaaaaagtacttagtttgggagtggtgggtaatctagtactgtggtgctgcttgctagattgagtgattgaccaagaatggtttgtctattgatggcaaatatcgataacatgccgttggttgtaccattgattctgaaatgccctcatgtctgatggatttaagttaatttaacatccttttgaaattatgacgagcctcttgttccaccaatcatgaccatgaatatgacaattttttgtgtttcaactgcggaatagccactacgcactgctttgcatgtacctgccttgaggatgcaaacatagtacttgtacctggtaccttctttgtttgttaaaactttgctactcgtatggggaagggattgaactccagtagaacttagtgttgtggatcttgctcggttactcgagttggagaaaactgatcatttcctttgtttgttttttagaatcatttcccttgtttttgcatgatgtatgcagtttaactttttaaattgcccatgctggatcatggctaatatatgtcgcttgtcccgcttaatatcttttcctagtatttttatgtggctcaccagattgtgtaatgttgatgcccatgtaggtacacgagacaagatcacggacgc

SEQ ID NO: 15182 - DNA, 551 bp, Brachypodium distachyon
  Intron number 3 from transcript Bradi3g30210.1 (locus Brad i3g30210) derived from phytozome v7.0 (chr-ID Bd3; pos 322 68638 to 32269188 reverse strand)
tgaaggtggtccacgttgcagggaccaaagggaaggtgagtgcagccggcggtgctgggttacaccgattttaactgattttgatgcgcgtggggtttcagtacatatttgtctgtaaccaagcatatcagttgttataacataattgaccaatggcagctgcgttgtttgcatttcacccatgtttcaacatggaataatgaaatggggactggccttttgtttttgtgcttgtgttctttgacccgaaatgggagtgatagtttacttcagaaacttccatacttggtggagcagcccttgcatgagaaatgaaaatagcatctgccttgattattaatgaagtttagactttagaatgtttgttctgtttgctatttgtttcaatggttagtgacagagtgctgcctaaccaatctgtacacattacacttcactagttcactgttttggtgcattgtcaaaactgtatgatattcttgcaaagaaaaaaaaatgcagtatagtctctgttgatagctctgaccattttctatcctttagggttcaac

SEQ ID NO: 15183 - DNA, 908 bp, Brachypodium distachyon
  Intron number 1 from transcript Bradi3g15180.2 (locus Brad i3g15180) derived from phytozome v7.0 (chr-ID Bd3; pos 134 96612 to 13497519)
actacgtctacgggtgcttcgcgcacaccggcgaggtatgctcctgttaccaatttctcggaatttgtggtatattcgtgaggtgtgacgatctgtcgttgtggattttggtcgtgcttgttcgttatccccgtggatgggcgtttgctgtagaagacgttagttagttatttcaccaccgcatggatagacatggattgatgcaaaacgtgatgcttcattgctttgtcgatacaggactgtcagggtttgatgcaatatgagttagatgaaattcgcaatgttgcttgtcttgttgatatatgtgaattgtattttggtatggactgcaataattgggcaccttttcggatttctatgtatgacctctgatgtgggctgtgcatactggaacgaggtgagaggaatctatttttcgatagatagggtccatttgggtctattctgtgccatgtgttgggggtgtcttagcatctgtctgattgtcggtcttgggggtgatgttgttgatttctgtaatattttgtcgtttcacttactatatgatctctatcgtcccagtcccatgcccagtcctgtaagatattgtaatgggaaatatgtcataggtaacacccgtacattgttctcagtaggtttgtttgagatttcatcgattattttgttagtggtttcacatgcttatcaatttcatagtttgctaaaacaaaattataccaacagctgttaccatgatattttgcacaaccgacttgcatttctgttctaccgagttgattgattcaaagtttggagtgttgtcataatatgctcttcaaattgtgctctcagtcagcataatgatttttttttcatgttcttctttattcttaggtacaatctgtgaagttgattcgtgacaagcaaac

SEQ ID NO: 15184 - DNA, 800 bp, Brachypodium distachyon
  Intron number 1 from transcript Bradi3g03740.1 (locus Brad i3g03740) derived from phytozome v7.0 (chr-ID Bd3; pos 248 5169 to 2485968)
aagaaggcgaccccgactggctcactgcgttccaggtgcccaccccatccccgctgcttaagccactgcttcccctgccttgccttgcgcccccgcagatgggttgttcaggccgggggtaaacctgcttgaagatttcctgtaaaatgaaatgcagtagtagtagtaggttgttggtaggtggcggtgctgttcgggtcactgaatctagtgagcggtgctactgggctaaactctgtgatgcatacgtttgttgctgttatgtggattgtcaggttggggatatagccctgcagctgagtgcttacgactgattgcgccgtagtgattgaaccgtgtcatgcggctgtcggctgccatttctgtcacacagaatacttgctttcgtgttgttcttgaggatctctgtcgttttctgtcctccctaagcctatgtagagttcatgtttttgtaccaaagcttgtttatgctcatgtttttggttaatcattcgttgtctacggttgcaatcaccaattcatatcatgaaagatagcctcaatttgatgcggatgcattgttcttgctctacctatgtgcggcagatttgatcatttgccccactgctgctcatccatttctctttatattaacttccgctttacttccatattttttgacttattcttgccaggatgaccatttaattggatgatgctattgtttggcaattacatggttagtggtcactactataactcttgcatggatttgaatatgctttttttttttgttataggcaccaagtttggcaccggtg

SEQ ID NO: 15185 - DNA, 692 bp, Brachypodium distachyon
  Intron number 3 from transcript Bradi2g45880.1 (locus Brad i2g45880) derived from phytozome v7.0 (chr-ID Bd2; pos 463 13295 to 46313986 reverse strand)
ctgtacttggaggaacatctattgatctgctcaaggttctgggacacgtttgatctcttctcagactcattgataaaataatttacacataactttgtgtttaatcattagggttcaatactttcgtttggtggtctcttgatcaattgccgaaggaccacattcctttccctgtttgtactattgacacttgcgtcattattaggtgtttgcgttaatgatgctgtgttgtcatctcaactgatgatggcgtggcacactcgacgaccttattacaggattttgaatttcatttcattttgcttgtaaatatgtttggatgattgctttcttagtgtcttgacaaattccatgtccggtgaaaaagagtgcaacttctaaccggcaacgtttgataatagattctgtaatttacctcctgcatgttgtcattgcaccttgctcttcaactttttacggttaaatgataaagtttctttaatggtacttgtaaaggatacaaggcatcacctttgtttggtattattatgatctgaataaatgtgtaggcagtttgtacagtgctttgttacttttgtgtattctctcatgttcagtcttgtagaagtcaaaacacttcatatcagcatcgttatgttgttatcatttggaagcatctcttgcaaagtataattgttcgattgatttacagg

SEQ ID NO: 15186 - DNA, 827 bp, Brachypodium distachyon
  Intron number 1 from transcript Bradi2g46620.2 (locus Brad i2g46620) derived from phytozome v7.0 (chr-ID Bd2; pos 470 44986 to 47045812 reverse strand)
aggtagccggcagatctctgcgctctctcctcttgttcttctcgtggttcttcgtttcttccgtgcctgttttgtgttcagatcgaaggtgctctactttttatcttgtgtgcgtttgatttttcgtttggtcttccgtgttgcttcggttggtgagtgatttccatcgatttggccgcctgccggaactggccggccgcttgcgttgcaaattttccagcttttctgcgtttgctttgttaatctgtctgatgcgtcccctctccaccgtccgtctctgttcttccctggtttggttgatctgtgctatggtatttcgataacgagttttcccaattcgggcggttgcgtttgactctggattcggtgctcttgccctctgtatttcgcagtctctctgctcgtaatctcaatcgtctcctcaatttccgtgtttccaatgcttttccagttgttccgaatggatgacaaagcatcctgccgtttctcctttgtttgcatccttgggttctcttctcctgaagatatgttgtggccatgggagttcatggttcacggccgaagtatttccttgttctctttcgttcatcttacttgcgtttcgaaagagctaagtggttgttggaattttacgttcatttctgttctcgatccttttgagtcttatcgtgttcgatcgatccgtgcgcttcttcgtttcatttcgtcacccactccccgatttgttcctcgcattctgcagcagatccctttagtccggtccaaaatcgctaatccgcgtcgccgttgcaggtaccaaagactcagcccggactgcctcccgctcg

SEQ ID NO: 15187 - DNA, 474 bp, Brachypodium distachyon; identical to SEQ ID NO: 15160
  Intron number 1 from transcript Bradi3g34880.1 (locus Brad i3g34880) derived from phytozome v7.0 (chr-ID Bd3; pos 372 40845 to 37241318 reverse strand)

SEQ ID NO: 15188 - DNA, 823 bp, Brachypodium distachyon
  Intron number 1 from transcript Bradi2g44420.2 (locus Brad i2g44420) derived from phytozome v7.0 (chr-ID Bd2; pos 449 11961 to 44912783)
tccattttacttcgaatcggctcttcccgaaccaggtgagtactctctagtagtctagtcccaatccctatatactaggctcaaaaaaaatccctatatactcggttaatcccttcaatttgatatgcaaagttagaaaaatggttctccgatgcgagccgtgcagttctaatcacaaactacggcggtttcatgaaaaggaacactgcattagtgattagattgcttcttctgttcgtcgcttcctctcctcaattttcccattctgacgccgtttcaggatgcggtttctggcgaatgtggagctgttagtgtctctgtggcttcctgtgatgcattggctctaattttgttcctgcgttctggattggggcttcttgtttgaaactttgaatggcatatttgtttgtctccaaccatgtctcagagccttttggagtaacatccaaccatgtcgtaacctaaaaatttaaaactgtggtaacatttcactaaaattgcacacattcagagagtgcaattttaagcgaccaagattttcttttccttaaagaagccagctgagaattagctaaagcattttttatacttttgtttgtgctaatgctaatcagttttgtcaacagtagagttgttatcgctgttaaaaaatagggttttccatgtatatgcaatatggattcttacgtgctcaataaattcatagcaacccacaaattcggctttgcagtattcataccattttcctgttactccaggacaatttttcacgcgtttggctgattaaatttctcgcctgcttacatcttcagcggttatcaga

SEQ ID NO: 15189 - DNA, 424 bp, Brachypodium distachyon
  Intron number 3 from transcript Bradi2g44420.2 (locus Brad i2g44420) derived from phytozome v7.0 (chr-ID Bd2; pos 449 13428 to 44913851)
gtccagcacttacaaggagagtatgcttcttctctaagacatcgacttatttattagctatgcgcaaaaaaaagacttatttattagcacattgttggtatcatggtatgtactactgctcaaatttgcaatgctatatggcgatgaaatttcaataagcgattaatatttgtttagaggagctgagatttgagttgtgaagactgaagaaactagtttgttttcgaacattgaagaggctagttttttggccctatgaattcctaatacttatcacatgggcatattttctctagatttgcatgttcgcaagtccaaaatgatgactgatcccttaatgatccaatactcttaggactacggctagattatggttgatctttccattattgctgctatgcaggtacacctgcttccattcact

SEQ ID NO: 15190 - DNA, 682 bp, Brachypodium distachyon
  Intron number 1 from transcript Bradi3g19410.3 (locus Brad i3g19410) derived from phytozome v7.0 (chr-ID Bd3; pos 182 40359 to 18241040 reverse strand)
aaccatttcattgaggtatgtgccctactcgtctcctctgctctccttgctaagaagcccttgctccttaggtgctccctgattttggtcctagccatggtgctcacaaaagttttgatggattagttttaatctggtgctcttctagaggttttcaagtttaattccctcccaattttgttttgctcccttcactttttagtccgtcgaatgtaataagagcaatttgtcccgctgagacaatgctgaagaagacacgttcagagtaatttgaccaagtgaattcacaagtggcactggaatttgtcactgaatattgaggcactgtaatggagcatgcatttggaataaacactttacagcctttactttaaccatttgttcaggaagaaacactcgagaacagttattgtccaaattcatcgatgttgcttgtaagaggcgcatatatttgccaatgtgtgaggcgctgtaattttttttctccttttcattcttcctgaaaatctcagcgtgaaatgcgtgcttgtttgctactgcaaaccatcatggattgcgtcaacgagcaaaacgtaattcaataaagagtttttttgttcctcctttttcttttctttccggtgtcaatctcatttttctgctatattgggtaagagtttcttttgaattatcttaacaggcg

SEQ ID NO: 15191 - DNA, 760 bp, Brachypodium distachyon
  Intron number 1 from transcript Bradi3g06990.1 (locus Brad i3g06990) derived from phytozome v7.0 (chr-ID Bd3; pos 515 5446 to 5156205)
ttcctccgccacatcgttcaccgatccctccggtacgttttctcgtccagcagctcacccacgaggccacgatatgtgaggttggagctcttacctcgtgagtcgtgattcgtgacgcccccactccgtttgcgcgtgtgagcgcacttcttctctgtggctttgtgagcgcgcgtgcggttatggtttgttgatctccgtcccatgcgcacacgtgtgggctcgtttgcatctcagtgagggcgcttgcgcgagcttgactattggtgcgcgttcatgctatgctgacttgcgtgagcttgtgcttgtgcctgtcttttctagcacatacatttaggtctggtggataaggttgcgtgatggtttacatacaccaatttgggagttgggaataataatagtgtctttacttttggtccttgccattgtgatagtgtgcatgtttgtgggctggtaaagtactacctccattcctaaatataagatgctctagctttgtcctaactcaagcttcaaagtttgaccaagtttattatatagaaaaatgtacacaaagggagtacatgcatttgtgttcactaaaaaaggtacttccctctgtgcaatggctgcgtgtgataccattcttttgtctttgtatgtatcttgctgctcttagattggcaaacagtgggttctaacaggttcactgtttgttttgttactgttctttggttactgcacagccatcgggatttgggcattatatcgtgcactggag

SEQ ID NO: 15192 - DNA, 791 bp, Brachypodium distachyon
  Intron number 1 from transcript Bradi3g33390.1 (locus Brad i3g33390) derived from phytozome v7.0 (chr-ID Bd3; pos 357 57506 to 35758296)
acctcggcatctccggttcggccatcttctactccgcgacactgtatttattgtgctatcaacatctgtattctactctcttcagctcaagcttgagaaattagaaagcagaagaattaaaaaacgaaaataattctctgcaatcatgccaacacttgccatatttacttgcagtgcgtgcttcaatgcatcgtctcttcttggtccagtgaccgagagaattcgtcttaaattattagaaaaataataattataggttcgacatgctttcccttgttcctttattccattcgggtcaaacgggagtacttgggcaatgagcagcgtgatctggatgcatgactatagattcacaccaagtgttgtggtccaagttctgcagagttgttttcatggaaaagaactgcacatctagtaaaagaggagcatggcacttctttttcatttttttgagttcactgacatagtgacatgttaactgttttattagttgggtatgtatctctatctgactcaaagacggaccggagaagctagcaataccaaacaaacaaaatctatttcttgcaactaaatatatactccctccgatccatagtaagtgtcgctgatcgacacttattatggatcggagggagtatatatatttatttattttgttcaagtcaaagaaaaggtaaacagacaatgaacttcgccataaaaggaaaagagaatgaacttagttctatttgcagcccaaattcccgtagaattcatgtgctgcaaaatttctaggtggtctcacctca

SEQ ID NO: 15193 - DNA, 763 bp, Brachypodium distachyon
  Intron number 1 from transcript Bradi3g15780.1 (locus Brad i3g15780) derived from phytozome v7.0 (chr-ID Bd3; pos 140 07317 to 14008079 reverse strand)
cgccggctggtgcagacggaggcggcaagacttccgtaagtacaacaaggcatatgaaccgatgctcggacctgatcttttagaagttatacaacttcctcagttccgaattggatttttatagattcgaattaactaacgtggatttttatagaatctatacaaatccacaaatccgggacggagggaatatatggttgtccaagttcaagttttaaacgtaacttttgtcaactaataaagatgcaaatcaaaaaccaaaaaactttttgttagtacgaaattaacagtatcaattttgtgccaaactagctagcacacatgcagatggaggcggccaagatttttgtaagtagtacaacgcatacacaagcaggagtagcaaaaacaacacgtttggatctaattttgctcaaaatacagttgcaaggctttcctgaaacgcgaaattctaagacataactataaaaaggaagatttgaatgtcttgagttgtacaagaaaccaaaacaaaaacaattgcctcgagagaatatttcgcaggattgtaaaaaagacaagacatgctcgcaagacgaagcaaaattttacataacctcttgataactaaagaatactccggattacagcattataagacagtaatacatggcatatttttcatgcaaacataattaactcctatatacattttcctgttctgaaactaactgattttctgtgagcaggaggatttgcggatcaacagtgagttgttgcagac

SEQ ID NO: 15194 - DNA, 596 bp, Brachypodium distachyon
  Intron number 1 from transcript Bradi3g26170.1 (locus Brad i3g26170) derived from phytozome v7.0 (chr-ID Bd3; pos 268 94628 to 26895223)
ctgcactcgtcgttgctcctaaggtgagagagaaaaaaaaatctcttcttcactaattcagtttgctttgtcctgcttcatcgttcatcattcttgttcacatgtaaactgattttgttgttttttccattatggttcatgtgcgtagttgtttcactgtatataacagaatgtggttgggagtatcaccgcaaactgttttgtagaatattcaatcacccctcaaccacatgactatgacttggttttattatcactagaatatggctctaaactgggttgtgtcaaacactgtttacttggaaaacaaaagaaaatccacctccaaatagctcttaaatttggttatgttgtacttttagttgcacgaagaggaagaggctcaaaaaatattaaacagaaaaaaaattatgcatggtttcgagtgtatcattttatttggttgttctattgcaacacggacatttcattttgttcggacatttcgactagctgcggtagcacagcgagcaagcttttctcccttcgtatattattattattattattattattatgcataaaataaaatgattttattaaaatagaagcaaaac

SEQ ID NO: 15195 - DNA, 890 bp, Brachypodium distachyon
  Intron number 3 from transcript Bradi3g27240.1 (locus Brad i3g27240) derived from phytozome v7.0 (chr-ID Bd3; pos 281 65877 to 28166766)
ccgcggcctccccaccgccttcaagctcttcaccggtacgtaacgtgataagccatgaatctctccgtgaacctgcagaaaaaatggcaatagaaatgtgccattgcgtttttcgtcaacgcttgttgatcggagatacggggcccgtgtccgggtccgtactacggtactactaggcccgattggtttgggtagttgttcgttttgaattcgtcctcggtagcaataggagacgtcagctggactgagagacgtacggcggatatagtagagaacatgtggcttgatcagtacgtgtaaccaccaatctggcatggaaaataatattacggagtatctgtctttcaaaaaaaaaaaaacttatctcgaacggcaatctagtcaacggagtaggagcccgagtgccacaaggcattttgcagagagactagctagttatgcttgcgctaatcgatttggtagatctggatcagtggtgatcagtctattttaatgttggtttatgctctggaattatgcaaaacccagcagatcgaccaaccaatgcgctgttctgcgctgtgctgttgtattggcaaacaaaagcaaaagcaaaagcaaacctttagttttgatccaccgattgcttccaagaaacggcaggtatgccggcgacgttccatcgtacgtgtcggcatcacaaggcaatctccagaaaccgtactcttcctagctggagtagcactagaagcagcagtgtcgcaaaaaccaaagatttcattgttattgattgagctgtacaaacaacaaaaaagtctgagttcatatcagcagtactactgtatttgatttggacgaacaacaaaagactaaaatgtgtgaagcgatggattgcagggtcggcgtggacg

SEQ ID NO: 15196 - DNA, 703 bp, Brachypodium distachyon
  Intron number 1 from transcript Bradi2g55650.1 (locus Brad i2g55650) derived from phytozome v7.0 (chr-ID Bd2; pos 542 09337 to 54210039)
tttccacaagacgcagcctctcttcgtatctggaggtacgctaccaacatccctctttctctccattgatccctgccttttctagccttggttctggcagccttatgtatgcttccgcactttactacagtactactccctccgatcctaaatttttgtggtggttttagttcaaagagtagttgttaccactgcttcgatcaaatcaaaacggctcgcttcactccgagcgagctgttaaatggcgccaaccaatctgaccttgtcatccatatgaagccacagacactgacttgtacttgcagtaatatctccagtatgtaatgactaaacgagaacagtaatagatctgcttggtcattggtgtggtttctacttggcagcgttgcaacttgtaacataatttgaaatatagttcatgcgattctaagtcatcatataatgaacccagaaacaccccaattgcacttgcctcagtttttaagcaagaaaagaacaatagatcttcatgtctgtagatttggtttgtacatttagcagtgttgcaacttgcaagcaagttttgctatttttcatgcgattcagattctatcaagtatgaacaagttcctgttcaatcctaatatttgactgtagttgtgcatgccatctaataggtaatcgatacattctaagatagtgctcttttgatgtgtcacaggtg

SEQ ID NO: 15197 - DNA, 917 bp, Brachypodium distachyon
  Intron number 2 from transcript Bradi3g42160.1 (locus Brad i3g42160) derived from phytozome v7.0 (chr-ID Bd3; pos 438 71867 to 43872783)
ggttgctctctaaggtactctcctctaggtagccttctgatgaattgttaggtggttgagagttgggagacattgcggaaatgggatcatgatggtcgtctgagtggtaggaattggatatgtggatgttttgtgtagatgatgatacatattctgcgttgtttatggatgatgatactgtcgatgttcggttcttcgcgttgcaatttgtatggtgaatagtttgtgcaaatttagaacactatgttaacttgaattaaacctagccgcacatttctgtgctgaatctactgtcgcattgtacttttggtggtgtactctctgccgtagaatgaaaatgattatagcattcgtggagaaagaatactggagagaaaatatcacacctgttgtatcttatctttttgttatagctttcagtaagtagaaaactatagttcatttgtttgtgtttgatttaagttaaatctagaagccaaggggaatggaatggtccgaaactgagaatttgtgaatttgatcagtgtgttgtgttgccattcgaatacgttttcttgggtactcatatttagaagatacgattagctttggtgacacacattacagccattgagttatcttcctggaatttcgactatttattcataaagaatatgtgtatgcactatgtaaattaaaacagcacatcacatcatttttgtactttatacagttgaattcaacttgacctcatctacatgtgtagcataatttgtgaacattcatatttgtatatcattatactgagatgacacatagtcatcatgctctcaacaagaatgttttacttttcaaagaatgatggaattatactcagtttttcttattcttctgtatgtccaatgtaggtgccgattcctgctaaccaagtttacgcc

SEQ ID NO: 15198 - DNA, 817 bp, Brachypodium distachyon
  Intron number 1 from transcript Bradi2g42160.1 (locus Brad i2g42160) derived from phytozome v7.0 (chr-ID Bd2; pos 426 48171 to 42648987)
agttcaactcgcgcaaggaggactgcatcggcgaggtacgcataagccgcggcgcctccgttctttcgcaaaacctagacttagattttcagccctagcgccacgttgcgctcgaattgcacaaaattgcgttgattcgcgctcggattagtgaggaattgtgccggttttgccgcgttgtttgcattttttatgattgttctgatatgtgccaaaagcttttactcgcagcttgtcaggttcataacattgcgtagcatagcttaactccgtgaccattttttgtatataagaaactggcgacagtttcctacagtcaaagaagccattcaaatcagaccctctggaatatcaaactgtctacttcagcatgcagcagaaaattcatgtttattatatgaactttaaaacatattaaacgcggcactacagagttacaaactactccctccgttcctaaatacttgtcgctgttttagtgcaaacatttaatctccatgctctctgcactatcttctaatcaagatgcagttttgctgtagttagaagactgttcaattgaattttacaaccatgattggcatccagtgttcatcacatgagttgaatttacaaccatgattggcgtccagcgttcatcattatattgcaaagcataatcttttatttggtcattgcttgtcttggaaacgtagacttttatatctgtattaattagtgtggaatttggtcactgactttgattctaactcatgctaatatgattcctttcttgtgtgtagacatacttgggaatacaaatatttaggttttactt

SEQ ID NO: 15199 - DNA, 800 bp, Brachypodium distachyon
  Intron number 1 from transcript Bradi2g41130.1 (locus Brad i2g41130) derived from phytozome v7.0 (chr-ID Bd2; pos 414 14731 to 41415530)
ccgatctacgtcaaaggttggtggtgttccctgagatcctgtaattatgctgtgggtttgtttgtagatctttgtgtgctaacgagttgtttgctggctagatatttaggcaaacatccattaaaaaatatacaaggaaaatttgaggattgagggaaccaagaaaaatttatcccaagggcgttgaagtctacgagttatattcctgagtaaatttcgaactacgccaaccacagtgcaatgctaagtagaggtgcaattaggaatcaatttggtaacgagtaacaaggacaaagggacatatgatgggagctcaaagatcaattgtccttgtatttttggatttctgagattacgatttgtccttttatttttaggtggagacagtatgttatactccctccgtcctaaaataagtgacgtgatacaaatccacgtcagttattttgggacggagggagtattaaggtgcagtattaagttctagttatgatatttgttactttgatcccgtgccaccagtacaccattggaacttggaagtattcctgtgctttggtacaagaaaatgaacataggctgaagcagattataagatgaagggctaactacaagaagtccgccaaacacttagtgattatgtatgcttagttgttagaagcttttcaatccactccattttctatcagactgaagctacttaacaatagtattacttatcttcaaatttcaaggttttatctgaattgtgtatttcgggttcagctttgtcaaagacagcagcttcaatacttgaatct

SEQ ID NO: 15200 - DNA, 894 bp, Brachypodium distachyon
  Intron number 1 from transcript Bradi2g58660.1 (locus Brad i2g58660) derived from phytozome v7.0 (chr-ID Bd2; pos 564 77707 to 56478600 reverse strand)
catccgtctcccacctcgtctccaacttccgcaaggtccaaacatttcacctctccttctctctgctctaattcgacctttccctagctgcaatataagtataatagcctgtatttgtcatgccttagcttctcaaccttcaaattttatctcaaatgcgcatgcactactgaaatttgtctcaaaggtgcatgcgctactgttaatttttcttactcaaagatgcatgttttactgttaatcctactaaagcttgatagtactttgtttgtgctcaatgcatatctgtctgtcaatgtgtattttgagttacatcgactagctactgtctctaatcgtggttacttggcttgaaccgtgtgatattagatgtttagtattccatccttttctttatatctatatatgcagccccaacagattttctcaaattatctgtacatttggactccaaagcatacttaattttcctagccaaacgattttaatgttgtcatcctattgggtgaggcaacgtggagatgaagagagagtagcggaggattgaatgaatgatccaattagcatgtggaatgcgaggagaaggccaaacaacaatttgtctctcttccttataaggctgcatgtttagatatttagaaatggagggagtacatctcttgcctatcttatgttacattttgcctcaaagatttgggtttcattagttaacactaaagatgcacttttttctctattagatgcattttaccttgttgggaggctatgacatagagggagttctatactcagtgcctcgttgggatttttaggaattcttgggttaaatgcattattatttctggctgaggttctgagtagtgctgcttattcttctgcagagactctgtgata

SEQ ID NO: 15201 - DNA, 458 bp, Brachypodium distachyon
  Intron number 2 from transcript Bradi3g29260.1 (locus Brad i3g29260) derived from phytozome v7.0 (chr-ID Bd3; pos 311 66057 to 31166514 reverse strand)
tggtggcccttcatcaaaaaatcacacagagagttagtcagctgtgcatcttgacatcttctgctgatgattcatccaactttgatgtattctcctgctgcttttttgacaaggtgtttcacagaataaacagcttatcttttgggcacccacccatcttgattaaggttaataataaataaatgatttttaatatgccacatgcacatatggtgtgagatgatgaaatatatccacaactggaatcttggatggtgcagtttttggctttctgctttactatttcaaacttacctacgcttgtcatcgtccatttgattctcaacatgctcaatgttctctttgtcataaaacttctgaatggatggtaattcatttcaactccactctattttgatgcctataataattgatatcatacagttggcatttctgggaagacacaaaccagacaatca

SEQ ID NO: 15202 - DNA, 750 bp, Brachypodium distachyon
  Intron number 1 from transcript Bradi2g48390.1 (locus Brad i2g48390) derived from phytozome v7.0 (chr-ID Bd2; pos 486 91556 to 48692305)
gataatctggtattgcatccattccctttgcacagcgaagcttgatccattgctttaatattttgtctttattgttgtgctaaaatcaagtactttctggtactattactaattgagttgagggaatgaaactcaacgcaatgatgcatcaaagatactcgtgatctggaagtttctgtaccctctttcatacataattttttaacagttatttcttgcatggcctggtcctatggtagtcttgaagtaagtaacgatagtgctcctgtggttacacctcttcgcatatagtaggataaaccttttgaattattagaaatttcccaaatttcttagttagaaatggttttcgagagatgagaataggaagacactgataatggaggtttcttattacatgggattccattttcctcctgtcttcccatctctgtgctataatatgattttttttccgttcaccaactttgctagatgggtgtgatgtcaagtggtgttgtttaggtgggattcatagtcataagtagatactaactgcttgaacttaaaagaaagatcctattaccgaattgtagtcaagcataacaaagtatcttttcagtagtaaagaataattacataaaatcagtatagtagttatgtgtgtttgtcttttattttttgtgatgatagcacctctagtccttgtttcctagcataattatgtttgtcctttaattttctgtacgaactgcattttgcaggaaaaat

SEQ ID NO: 15203 - DNA, 845 bp, Brachypodium distachyon
  Intron number 1 from transcript Bradi3g23070.1 (locus Brad i3g23070) derived from phytozome v7.0 (chr-ID Bd3; pos 223 61969 to 22362813)
gcgcccttcgcgctctggttcgagaggtttgttaattactcatgccgtccttgtgcctagctagcttcatgcggatagcatgtaggcgtatgtttctggtgcttaactatatatggttaagtcaactttaattggttacttagctaacgagttattgtagtttttggaagttctttgatttaattggttctaaatttgtaatccaagttgtgtttaccaaatgggggaatcagttgattgtttagccaaattaatagtctgtccacaggtgggtggacatagttctaggtttaggattagtgcttggtttcaccggaaacaacaataactaagtttcctaacaggtcatgcaactacattatcttgtctccttctcaaaggctttttatgtcgatcttaattagcataggttctcataagttcttttttaattcatcacataaatggtgttgactagtgcaattgagtggggccttgaaatacttgaaatgggtagtaacaacttattcaaacctttcatgcattacctttcggttcatactgaccgacaacacaaaagttaagtactctgtgagtgagattggttaaataaaatgcaagcaatgaaaacttttattgatcggtaccggcggaggtcatcaatattaatttttcgttctatcagttagtagcactaccgaccattcagacacgcagctaaaacaacactagcactgcacttccccttttccgtatcgatcattgtcaacttttcttttctttgataaatcaagcaaagggaagcagtatcttaacagaaaatctgctcctgttttgtcatatatggcaggaaaacaaggccgaaa

SEQ ID NO: 15204 - DNA, 835 bp, Brachypodium distachyon
  Intron number 1 from transcript Bradi3g13450.1 (locus Brad i3g13450) derived from phytozome v7.0 (chr-ID Bd3; pos 119 03172 to 11904006 reverse strand)
cttccccgttctacggccgccagatccccagcgaggtaaacttactaccaccattcattatctcctactcctagcatatattgttactctcttctttgagttctttctttggtaatttgctttacctcattgattgattgatcgatcggcattgcgttgttaagaagacagactctgtgtgtgaactgcgtgttcgcaatcatagaatgatgcatcgaggcacgaattgtggcgaattggtagttgaaaaatttgtgttgcttgattgattagctagctagctggtgccttggtggagtgaaccggacaaccgttgcccgcgccagttggtagtgcttgccatgtgctcaacttgattgaggattgggatatgtgtgcaaaggagaataggggtggaggatttgctctagtaggagggaatatgcttgctcgcccccacgctaggctggtgggtaaactactcaatcgactagtggcgctcacgaatatcgtgctaataatgtcatgattcagaggtgcttgattgacaatattcttgattggttatccactaaataactagtcaagacattcgggctgtcttatggttgggaatttaattttagcgtctgcttttcttccttatttttttgggggttgctaaaaagtatcaacttcgaatttcgatgcgctgctaccgaaattctgcactgtgtggatgaatttaatagtttacccaacaagtgctctccatgtgctgtttcagactctgattaacggctagttttgttgcctattctgatttgttttttcttgccaatgcaggaagtgtcttggggatcaatatcccttgtgg

SEQ ID NO: 15205 - DNA, 885 bp, Brachypodium distachyon
  Intron number 2 from transcript Bradi3g06540.1 (locus Brad i3g06540) derived from phytozome v7.0 (chr-ID Bd3; pos 472 4167 to 4725051 reverse strand)
aaggtacccccatcaatccaccctcaccgctctcagatctgtttgtcccttgctcgtggatagaaaaagaggggagagtgaggaatttgggaagttggaacctacgacagataaaaaatggatggggaattctggtgtagctgtttagggctcattgattgctatgacatatctttttttttaatccattgctataacatatcgatgttacactattagcataacgacatggatgactacatattaggagtttgttttcatctgcttgctcgtagataattcttccttagccatgggaagccctgctttgtgaggtatcatgccaatgtagatagaacgcgagctgaacattttagtaccatataaattttctgttgttactttgtgtgtctcgcatatttgtttgattcaaacttgttgccttttgattacattctgaactgtaatcggtaagtcgcttttgctaattctgcttttagattccgtaaaaacattgctccatgttgtttgagatgctcaactgttatttttcatgtctatgttgcaccaaaaagttggaacctgtgctgaccgaaacaattgcttccgatttccaaaattattgttctggtttaatgatgtctgcctgtgtggactgctcatttggttgtcgtaaaatcaggatggaaacggattgttaaaggtgtcctgtacaattgttcccattgtttcatcctttccaccaaaatactgcccagatatgtgaaccaattaatcaattacattactgtgaccttttcgatatcggtttttgtttagacacactattttccatgaatcacgtgataattatgtactgtggctggagcaggaaattcaaacaacattgcgagaggaaataaaaag

SEQ ID NO: 15206 - DNA, 532 bp, Brachypodium distachyon
  Intron number 1 from transcript Bradi3g32160.1 (locus Brad i3g32160) derived from phytozome v7.0 (chr-ID Bd3; pos 344 39762 to 34440293 reverse strand)
accaaatcctcaacaaggacctgctccgagataaggtaaggatccttacctccttcactccctccctatcgattcactatctagctatttggtgtgggttgcgaatgatccgcgtggatctgaagaaacgtgcgactttcgacaacccaattagtacgacttatcccggattcctggtgtattttttaccactatgtagcctttttgggtacttgccttgtgcataggtggataattttgcgtgggactggtaatcatgccaggtacttgaaaattgtacctttcacgcgcttcaatattagagtatttcacctattaggagagcataacagaaaattattttgttaccagaggggaaaatgtagtaggactgcaagaaatcaaaatgttcaactatttgacaaaagaagccaagttggtataatgcttcgtagatatgtaaactgtattttgccaattgccaaatgaaaaaatgtattcatggaagcaaatgttgttacaggtgtcgaagatcccagatacatttcacagc

SEQ ID NO: 15207 - DNA, 1033 bp, Brachypodium distachyon
  Intron number 1 from transcript Bradi2g45740.1 (locus Brad i2g45740) derived from phytozome v7.0 (chr-ID Bd2; pos 461 73588 to 46174620 reverse strand)
cgggtgcggctccgccatcgcgtcgtcctccgtcggtgagccaccaaaccgcttcgtcccgtttcccaacttttctgcggtgtgatttggcagtagacttggtcctctgttcgatgaaatcttaggtcgaggtggtgagcttcctgtgaattgaattgctgaatagtaacttgtcaatttgtttttatagtggtgcttttgtttcgaatagggaatcccttttgaaggatgagaaatttagctagttgcgaacggtattatggaatcccagcatagatgattgggtatatgtgaggatagttttgagtgaaaattgggtttagttgatgcctaagctgattaggcttgaagacaaatatcggtatcgctaacttttctctatgtttttattaattggagattgccctttctcatggtctactttcgctgccggattactgaatttgttcaattttgtatgatgtttactgcaagaatgtatttaatttggtcagtggtgcctttctgtatgacaggaattgtatgcatatggggttgtggctcatgttaagaacttgattagtcgagacttgtggatactatgcttatgcttaaattttggttgtaatactcatttttgttctttcaacggcctgtttcacagtgttctatcttatagaaaatggcgggcatagcatttttcataaatagttaatggtgccattcatagattcagatgttttcaggttgtacacaattgatagttgccaaatcaaattagaaacaagtgtcctttcatgccgaacaaacactttgaaagtactgtgtattcttgttgatctgctgagttatcatagataatgcccaaaaaagaaaatggcttcacatttttttcctggatagttgataggctgacaattgtgtttaggcagtccttactcatagttctcatgtttagtgcatttatttctttgcaacatgctgatatttatgttaacaaatctgagggcatgaagtcaactattgatcgtacctttgtcattgcagctactga

SEQ ID NO: 15208 - DNA, 898 bp, Brachypodium distachyon
  Intron number 2 from transcript Bradi3g06970.1 (locus Brad i3g06970) derived from phytozome v7.0 (chr-ID Bd3; pos 514 2828 to 5143725 reverse strand)
catcatcacgcaggtggagagcctgcacgagcttggtatgatcacgaatcttcgagccgcgatattgtttcctcaaatagatggatgatttgggggctaggaataaagaaagaagcatttaactctttttaacttggtttgccactctgtctaaattgggttgttgcagttagaagttgtagtctgcaacaagtgaaactgagaaagtttctagtttgtaaattgtaatagattcggatacttaaaccttactgtatcaaattggcaacttctctagacaccaaatgggtaaaggattcagatagtagatatggtatctacgatcctatccatgtttccttactactgtttttttttaattattagaccaacctaatgatactatcttaaggttcatgcgcttctcatagaatgtgtatccagaacatacgccttactttattttagagttttctgaagtatcgttttatttctgcatcacacagtaggatggagttgaatatagcaatgcgcatcataaatggacagtggagtttgactctgctggttgttcttgcatgctcccgtggaacacatgttcgttcatcttgttgcttaatgcttgtctgtttgtctgcacgattacatttctaggtgaatttttcttcatcattggcataccaatactagagctcaggggtgttcagatgagggggcttttggaaattttgggattagactaaatccaaaggactgaatccaaatccctcttgcctatctgaataggcccttacagccaaatgatgcctttttatgctatgttttactagttataacttcaaatattgatgctatatgaaaacacaaaatgaggtgtccttctacactgcagtgcagaggcctagggagcaaatagctg

SEQ ID NO: 15209 - DNA, 813 bp, Brachypodium distachyon
  Intron number 1 from transcript Bradi3g22360.1 (locus Brad i3g22360) derived from phytozome v7.0 (chr-ID Bd3; pos 214 12447 to 21413259 reverse strand)
tggggcggctgtgagcctgtgacgcgagaggcggggtacataaatttgcgatgatttgagcgacgtggtggaggaggcgacggctgccgctgtgtggcggggccagaggatggctgcaggggaagtgaaggaggaggcggtgttggaaaaatcggtcgggttaggagataacgaaagaaataaacggttcagattttctgcggctggaattttaggtatttgctaagcgcacacgattagtaagtaatccacggttattgcgtctgactgtgagattattagtactcagtgtgggtttagtagattgaatgttgggatgaacatgttggttcgtttaacagagacagaactactcgcacgtacaaagcaacaaccaagctggacgggccgtcgcgcagtagcgctgtccttgattaattagtctaataaagcaaaggtactgctgctttaccccgtgactctctgacaacttcctgccattctctctctgccttttgtttttgctttgaccacttttttgctttttgcatgtgtgatgccaattctttttggatcatttttcttctaggcatgacctaagtgcatagtcatgtttataagtattttataattcttgtctcaaatttacttaaaaaaagatgtatttattcataaaaggtctcgagatatatgtaagatttcgacaagaattatgaaacgaaggaagtacattacaagtaccttattaattcatagtatgtgaagcaaatcatgaaggatacatcaaactacatgacagattatgacgggtagatcaatgtacatgacagatcc

SEQ ID NO: 15210 - DNA, 521 bp, Brachypodium distachyon
  Intron number 2 from transcript Bradi3g20690.1 (locus Brad i3g20690) derived from phytozome v7.0 (chr-ID Bd3; pos 197 11523 to 19712043)
ccggctctgaacgccattcccagctcgaggaagaggtgggctctactgttttggtccttttaagagatggttcctgacttaggatgaggccaattactgaatgattatgccgttttcaccatgacaccagaatacatggttttggctaacgaattactccaggttacagaataaagactgatttaatgttgtcatgggctttgggttcctggtgtgacttgtcctaaccattatatctttcctaccttcatgatatatattttatcatagataacatgggtcatgccatcatcgatactggatcaatccccatttagcttcttacaaatctgatactcaagcataagtgataagtgagtgcttctgccgatcatatcccaataggatatcctaatcaaagcttgtatacatacgagtaatttcttatgaggatttggagaataatagcaatttaaatctaaataaacgaagagaagaatgtgactcgtttattacattggaacaggttattgaaagagtgg

SEQ ID NO: 15211 - DNA, 834 bp, Brachypodium distachyon
  Intron number 1 from transcript Bradi3g32870.1 (locus Brad i3g32870) derived from phytozome v7.0 (chr-ID Bd3; pos 352 62312 to 35263145)
gctgcagcgttgatctggttcccggcgactcaaaggtaatggctgcagtttttggattccttaatgggagtggcgccctcggtggattcgaatcgaagttctcttgcaacgcttgggggcggtcggttgtgtagatttgggcgaacggaggttcgaccatagggatggcaggtcttcggatgcgtttcttcaataaaatgtggcttggattcggtgcagatgtgaggagcgggaagggttgtgcctcttctgtggcgggatttgacttgcatgtggggaactgttcatctcttcctaaaatttcggtggatgcgtgaaactgtttgtgttactgtattattcatttataggaaatggatatattctgatttgattcggtgataatttgaacagagtagatttggagatttattttgctcttgttttagttaggtccattgcgctgctcttcttgaaactaagctagctgtctgtgtcactgtgtgtggtggactttccttgctcttttggaagtatacagtatgtactactccctctgatcctaattcttgacttaaatttgcccaaatatggatgtatctattcttaaaaagcgtctagatacatgtaatatttcaacaacaatttaggatcggagggagtactctttttttcctttttaggggatttggtcatatggagtttgaagcttggaaaattgatatctaagatttgctacatatttatactactagccttttatgattgttcttggcttatggctgattccactgtcctccttatcctgttctgatgagagtattgtttttatggtttgtaatgcagatttcctac

SEQ ID NO: 15212 - DNA, 624 bp, Brachypodium distachyon
  Intron number 1 from transcript Bradi3g42910.1 (locus Brad i3g42910) derived from phytozome v7.0 (chr-ID Bd3; pos 442 91246 to 44291869)
acaaagacgaagggcacctggttgaggctgcagaggtatggagcaaggttcattatgtgcattacctcttctgtttgtaggctttctgattcttgcaaactgtgaattgtttcacagaagaaacagtcttcttttgtgttagtatgtttgcctaagtttgagattgttgcaagttaactagtctctatggtatgaacttctctttaacccaagttaagtccaaattaacctagccatcatcgcttcatgagtatagtataactcctgtgtgatggaattaatgtcttgctgatgggatagaacactctgggtgcttggtgaactatggcgggtggcaactgcgactaaagaaattagattaaaatttctatggcttctattcaccctttgagaatgttaacccctggtatttattgtaataaatactaaccaatctaacatgttagattaaaatattagacgtccaaaactattactagatgccacaaaaaatgctcttacgtttttctgctattagcctgttagtgtatttcttgtctcctacattttgaatgttttaatttaatggaggaaaaaaaatctggagcaggcctatcaaaaagctcgaagtgcagatccttccta

SEQ ID NO: 15213 - DNA, 746 bp, Brachypodium distachyon
  Intron number 1 from transcript Bradi2g57730.1 (locus Brad i2g57730) derived from phytozome v7.0 (chr-ID Bd2; pos 558 20608 to 55821353 reverse strand)
ttttgcggccgcctgttggtgaggtgagtactgctattccaagcttagtttggttgcaatcagcgtgtgatgtgtgcttggctcgtctggtcctagggtggcggcgttggcaaacaactgatcaggactcaggaggagttattttttcctctgtttttttgctgtcgttcgaggaacatgaggggagcacacggctgttccttgatcagggcaactgtttgctgcgtgagtgttcactgcagctcttggtttaggttgtaggattcagccgaatcacttccctactggttcggtagagattggagtgtgcgattttatgctgagtccggtgtagctgcctcagtgttgacagtattcttgatccaccgggcgtatgggccccaccagaatgcaaggtgtttagggctattggattataggtgttagatttttggtgttgcacttgtttctgtgtgctatcgatgaggatgcatggcaatttgcataattcaaagtgcctggtcttcattttgcccggccaacccaaaggaattacccttttgcttacttgtttcagtctcctattgttccatttccaatgtatgttggtaattaatcgcacatttccttttgtcaaacaaaccccatgtgtgcgctggatcatctttgatttgcatcgtgttcgtgttttcatggtgttcatctcggttaacatttcgtttcttttcgcagagcataatttggttgtcttttgctagagtttacca

SEQ ID NO: 15214 - DNA, 375 bp, Brachypodium distachyon
  Intron number 1 from transcript Bradi3g39710.1 (locus Brad i3g39710) derived from phytozome v7.0 (chr-ID Bd3; pos 419 37179 to 41937553 reverse strand)
ccaaggagggcaaaatcgccgtctagcagctggtaagtgtacacatgaaattattaagcattattagttcatctgtcaatgagtgattcaatcacttgtaacttctggattcgaaaaacagaagatttttctgtgctagaattttgaattttgataagtcaaattcgaaatgttcattttcctcaaatcaattttttctttcgaaaaggaggataacccctggcatttatgcaaatcaaataggttctacaaaatttgcaagcatattctctgaacttgcaatttctgctatactttacatattgatctttttgacaatgctgtttatacctttcggcaggaataattttcagtataggagttggcagtggcata

SEQ ID NO: 15215 - DNA, 902 bp, Brachypodium distachyon
  Intron number 1 from transcript Bradi2g43240.1 (locus Brad i2g43240) derived from phytozome v7.0 (chr-ID Bd2; pos 437 36335 to 43737236)
cttcaagctcgtcctcatcggcgacggcggcactggtcagtattacggatcacgaccccttgcccctctctcgtagaaatcttaatagtacaaaactccatctgtttgtttgtgggggttacatcatattcacgtaccgtatttaattagtgtgcgatcctgatcgtgttgtctatactaaatcaaaacctaggtagagaggaatgtggttattaaggtttgattggccatctatgaatgctggaggtgaatgaagataatatgaaggtcaaagaagatagaatcacgggaataataagaagggaaaagtgccacgaataaagtaagaaacagcaagcagagcaccctgctcatactagtctgatccgagaacctatcgtcttggtctggagtttttattttattttattcaattctaggagtctttaatgtgatgaaattctatgttttaaggaaagaagaaggtcttatgacccatgacatacattgtgaaagtgaatcatcaagattttttattcggacccatccatattatcattgctagtccaaaaacaaataaaatataatagatgagttacataattatctatgacatgtggatcggaggaagtcatatatctcaaagttcatatgtctttgataaaactctcaagacccattcagtttcctagttccctgtcggtatgtcggtattgaaggggattggagaaaaattaaactacaatcccaacattcctcctcgatccccgtcgggctgggactaaccgaagaggccctaagttggtcatgtataggtttcctttcacgtggtcctgccttctcttggactagttgtgtcttaaaccaagcaacgcttctatgttctaggcaagaccaccttcgtgaagaggcatcttacaggc

SEQ ID NO: 15216 - DNA, 927 bp, Brachypodium distachyon
  Intron number 1 from transcript Bradi2g46040.1 (locus Brad i2g46040) derived from phytozome v7.0 (chr-ID Bd2; pos 464 63442 to 46464368 reverse strand)
tcgccgacgtcggcgaccccgacaagcccgccgtggtgagctcgagttcttgaccctggtagggtggtgctggctgtatttttggtttgtggattcggtgttttgcttgggtgtggttgtgaatgagtaggttcatttgattaggatgccaaatcggggatacagtaacagaagtgcagaactgttctggcggcgtctgttgaactgaacttctatagaatgtagacacgaacaaaagttgggcaattgctccaaataggttcaagcagagaataaatgaccgagttacctgagcctttttaaatcttttatcaattaacccacagcgatagtctttgttcttttactgtccagttagtttaatttgtgtcagtaacctcaattatccagttagggatctgtatttattgtgagatgataaattgtgcaggctcatgaagttactgatgtttattctagtggattacatgaatttttggacttaactccgaatggcatcaattgcggatctcctatcctacttgattgaagaattgtgcatttatattacttgattggtctcaaggcttatccaatttcccatggttagctaagagaacagttaaagatgtgcatgtgttcaaattatcgaatcaattgaatcgaaggtaaagtaaatttagcaaaatatgtcttgaataatacaaagggaacttcaggctggtgaaaagatatggctgagcgggataagctcttggctagatcagaagcattcatttttctcgaaaaataatcagggcaggagtagttattgccttcgttttgagccatgctactgtggtggattcaattttctctatagttgtgtacatcttgtcgatcacctccctaacctgtttgattttggtatcagttgattgaccccgtggacagaacagttgatagaga

SEQ ID NO: 15217 - DNA, 737 bp, Brachypodium distachyon
  Intron number 1 from transcript Bradi3g08190.1 (locus Brad i3g08190) derived from phytozome v7.0 (chr-ID Bd3; pos 638 6930 to 6387666 reverse strand)
cacctcccgcttctggtgagccctcccttgtcctttcagcgccatgaactcagctctctgttcgctgctcgcctagtcgactcatcgttagcattcgctgggcatctatttgctgtggaacaatgcgactgactacaatttagtgcgttcaggttcaccgtgccaaatgatgtagtagttgggtgtttagagaagctagggttttgctgcaagtgctaactagttcgcgcggttcatacaagggcctattaacttgtctgtgtatttacgagtttatggtttactgattcctgtttgctaactagtatatcagtttatagagcgatttgattttgtctcagtggctggtgtcctatttgtgcttttcctcttctgattgcaacgtgttttaatttttccggtatggcttgagatctgagtgagtgtaaattgattagcacccatccattttctctaacactgatggcttaaccatagaatgcaagtacagcaagaacaagtgtcttcaaacaaatgtttgtgtgtgaacggatgcacattcgttaagtcgtgttaacgaaggctcgttttgaaagagcgttcggtttgaggcgcaagattgcttctccaactatcaatagcatgttactgactgataatcgtatattatctggtagacattgggttctcctgcttatccctttgatcgtttgattctgacattattgctaatgttctgcaggtttaattatcgacat

SEQ ID NO: 15218 - DNA, 889 bp, Brachypodium distachyon
  Intron number 1 from transcript Bradi3g10450.1 (locus Brad i3g10450) derived from phytozome v7.0 (chr-ID Bd3; pos 863 5426 to 8636314)
tgccaaaattgcatagaaaaaaggtatcacctgaacatctctctgtactgtttctgtgcattcgccagttaataatataattctagtggcaacccatgggacacaagagctagttatatgatgttaaatatcatggtttatggagtatgtatcataaacattttttttatttagtgcctcatcggaatacacaaatttatatgtatttggtagatatctgaagcagatagttcaggaataacactactatgtgagcttattcacctattggcatgagtttcgtttccacagtaggcaatcatcacatctctacagcgacatgtatagagtgatttaataatcttgtagcactgcccccaaacgaaattaatctatagtgatttaataaccaattttgcatataataaccggcattgccgtcaatgtaatcattagatctcccatcatgactgttatgcactttctgttgtttcagccagaaaaagaatccgtttcaagaactattagtcgcctcagtctttgttttgtttgactggaataaataattctcaactagagcgattaatattatgtagattaaatatgtcatttttctattccgtgagtcatactacatttaaacagcttaatcggaacccatgtatccgggcctgtggattctccttcccatttaatcacgagtcttgtatgtgggattaagctcatttttttcttcttatgtgagttaatctgagccattctaacttggtcccactagatagataggctgtcagatagttctctttttcctcagattaatgtgagaatttgtaggaagataaatttacagttatgacaaatatacagtggttgtgtttcacacgtaattgtattgcaggccagtaaaaat

SEQ ID NO: 15219 - DNA, 792 bp, Brachypodium distachyon
  Intron number 1 from transcript Bradi2g50060.1 (locus Brad i2g50060) derived from phytozome v7.0 (chr-ID Bd2; pos 500 21391 to 50022182 reverse strand)
tggccgccgcaacttctccacgccggaggagatcggtaaggacccttactcctgttcgattcggttcagttatagtgaaattcggtgccatcctcgggagctttttctgccgccgccgtctagcagactgcttgatctgagagtgtggcgaggaggctatttttggcttggctgggggtgtgctagtaggataagagtgctaggactagcttgtagtgtcaccaagacgcctggttttcctagggggcacgggctagcgtacaacgatttgattacatggtgttctgggtcgctgatgatgggtgattcgttgatctattctcggtgtcctctgggttaacgtttttctggcttggatgctcgtggaatacgctgcacattttgcgtatctttttttccgaaggtcagatgctgcttctgtacgatggtataacagcttgattctcatgtgctcttgatttattgacaagttttccattcattttcactctatcagagcttcacagaaaagtttttttgtgaggtttaaacgcggtgagaaatcaatagcaccctgtatgtttatctagtctcagacaaggaaggttttttgaggcaggaaacaggaaatatgctatatttgaatttctttgcatacatctgacatcatttcttggttttttttgttatattgaaacatctgactgttctctttttcatatcctttcatgtgagattttgacatatttctgatatttctccattcaaataaatgcagctgctggaacttcagggcgcccacgctcatttaag

SEQ ID NO: 15220 - DNA, 734 bp, Brachypodium distachyon
  Intron number 1 from transcript Bradi3g41880.1 (locus Brad i3g41880) derived from phytozome v7.0 (chr-ID Bd3; pos 436 84946 to 43685679)
tcgcggcgaagcagggccatctcggtgagagctgatctctttccttactcatcagtaaaattgttctggtgatttatcatccatttcgatctcaacaagttgcatcaagccgtcaagtctatgaaatgattcttgcaggcttatggaattaaaattttggcatgtgttgaaggttgaagcagtgggttaatttgtcttgtaaaaaaaatggctgttcttatctgattgacctggtaacataacatactaatgctcactacaagaacaatgatttcttcatattctttcgattcagaagaagtgcaatactaattattctgtggctatccttttccaattaatggctgaaaagaatgtgtagctgatttgatttagaccaggctctaatcttgaatattttatctaggtggaaactgacaagttgggtttctcgtagcactagctgtcttgatttatgaggggttgaaaaaagggatataatgcaactatgagtatgagtaaaggcacttggtagacttatctcattccggtttattgtagtactgaagaacatatcattttgatcattgactttctagctagtggacctaaaaaattagagtcattagttatagctgtaattgcttgcatgatatatggtttgaagttaatttatgaaacgttttgggcttattgtctttctatttcttggttttgcagaagttttgaaggagcttttgcaggcttttcctgct

SEQ ID NO: 15221 - DNA, 773 bp, Brachypodium distachyon
  Intron number 1 from transcript Bradi3g22330.1 (locus Brad i3g22330) derived from phytozome v7.0 (chr-ID Bd3; pos 213 71599 to 21372371)
gctcccagacctgcctcgaccccgacgctagcacggtacgcacgcgccaaacgccgacacgcctcgcgccaggagtgggaaatgcggcgctttacgctcgctagcctgatcccgtgatccgttgtgtccttgcctttcctgatgagagtctgatacgcgcgggaaaaatattgctatctcctttaccgattcgtcggtgattagacgcccaaatgtgccttctgttttcatgtcggcaattaaaaggaatgagaacgggacatgaatcatttggacgttttcatggtttcggcttttctttttgtactaggatccaataaatatggaaattgcagggtgtgaatagtttagagcctcatttaataattagctgtggctgtgattgtgtgagcccggaagaaaatgattaagaacttgtcatggtccatcagtccatgccatgcggctcttaaacactaccgggcaatcagatcgaagacttgaatcatactttctcatttactcaatttttttccttaaactgttttagttgttggtttttgattcatggtttgcaatgatccatatcatggctattgaatgttctttgttacttaatcattctgtggtttcatatgctgttcctttctcgagagtgcctaacttaaaattcagaactgtcttcttcctttgctctactcattatttgtcgcactaactccgctataagctattgatgtgcttcttttgtttgtgcagagtgttcttgggatcattcttggaggtggtgcggg

SEQ ID NO: 15222 - DNA, 481 bp, Brachypodium distachyon
  Intron number 1 from transcript Bradi2g58280.1 (locus Brad i2g58280) derived from phytozome v7.0 (chr-ID Bd2; pos 562 32846 to 56233326)
tcgcgttccgccagaaggtaaattcagatctcgctccgttcgtgcatacgtgtcatcttttctcgtttcgagtacgcatctctttatcaaacttttgaattctgtactcttcttcgatcaattcacgaatcacgactctgtttgttttgtcatttctgtgaaagagaatttgcacacaaaaaaggaagaaaaaaagctgagcaccttcaatgggccaagctcagcaccttcagtaggctttcagcctgcacttataaggcccatacggcaatacagtgcggcattagtggcctagttacaatgaaattactggcccggtttcgtaaccacgtcgtcaaagtttcgccgcccactgacgccgtcggcagcaataccgccgcgccccgcgccgccagttccaccggagaccggactaagctaacactcttcctcctgcgtgcgtgcaggcaccggcagctgagcggcatcggggacgagatcc

SEQ ID NO: 15223 - DNA, 861 bp, Brachypodium distachyon
  Intron number 1 from transcript Bradi2g57160.1 (locus Brad i2g57160) derived from phytozome v7.0 (chr-ID Bd2; pos 553 78942 to 55379802 reverse strand)
ccacaccgtcgagaaaggcgccggccacaagcaaggtgagcgccagaactgaccgctgaacgtacgtcaattgcgctccccttcgtttcacgagatgcgcgtgttggggtagcaggacgatatgatcggtgccctcccggttggggattggttatacgattggtgggcattggtacggtggtgatctgcctggcgcgaggtgttgcaggcttgcagcgtggcggctgcggttccccttggcacgcgcgaatcagtgtgattggtctaattcgtgattccttttgatcgtttcgcgtttggatcccgtttagacgtacctgtgtcctttttgcatatagatgtattttattcatcaggaacaaaagccattttccaccgttagcaagcgacttaatttggtcagttctcatgtttggtttgtttatcgaaggttcttcatcattttctgatgaaatattgatgtaatccagagttgcaattagctaccgcggaacatgatgattagttcgaaaacatgccatgtcatacttttttctatatccacttatccagatggcgtagcagcacagtttttgcagttgttaaagacaatgcagtgcgtgcaccaattatggccagcctcgaagataatttggccttttgtgaatatttgtgttgcagtttccaataaggttttcagtttgtgaaatcgtctgagaaacaacacttattttgttctgcatagcacaaactggttttaaactacatacgaagtacacctttttgttgcttgttgagttatgaagtaggcccttgtctaacaaatgtcaaggtgtagttagtgatgtcaatcatgctgatctgatgcagggcctaacctga

SEQ ID NO: 15224 - DNA, 631 bp, Brachypodium distachyon
  Intron number 1 from transcript Bradi3g40320.1 (locus Brad i3g40320) derived from phytozome v7.0 (chr-ID Bd3; pos 425 03250 to 42503880)
cgccttccttggccacataggcgcaaagacatcgtgtacgcttctctatgctcttcagtcttcctcactctagttcagcttgatgtgctgggatctaaaagaaatagggatctgttagttacacttttagccgtaggctccatgaatcctaagccggggtggaaccatgtgcgggattccgaatgcagtgagatgtcgataagaatacttagtttccatccgcctagtgtttgtgtttcatctgaatagttccttgtccagattttaaactcggaatctgcaattctgcatctgaatatgggcgttttaacagcagtatgacatatttgtagaacttatctatggctttgttaatgaagctgggggagttcccctttgataaaaaacaaatctgaatatgggccatgtaaggaaagaaactatgcatttttgtttgatttcatgtccgtcagggagtagtattaattttgtacaagtgatccaaaatcttcagcagattattataatcgtattgtatgttccctgggagttaactcaacgttacatgtatgaaaagcctaaagatgatagtcgatagtagcatctgataaatctagcatggttactcctacaggtggacatttggattcgg

SEQ ID NO: 15225 - DNA, 245 bp, Brachypodium distachyon
  Intron number 1 from transcript Bradi3g43000.1 (locus Brad i3g43000) derived from phytozome v7.0 (chr-ID Bd3; pos 443 43613 to 44343857 reverse strand)
gctcccaccgccactcctcccaccgcgtcatccaggtattatacatctcattccccaatgcacatccaccgagagattaatctgcaatgcttctcctccttcttccttcttctcgattgattgattgattgggggagaagaaacggaaacggaaacggaaaggaaaaaggttgcgttttgattcggtttcctctctgtttttggttgcagatacggcggtcgtcgtaccacgacgtggtgcgggt

SEQ ID NO: 15226 - DNA, 820 bp, Brachypodium distachyon
  Intron number 2 from transcript Bradi3g39500.1 (locus Brad i3g39500) derived from phytozome v7.0 (chr-ID Bd3; pos 417 66225 to 41767044 reverse strand)
ctaatccacaaggctgtgagtacttcggatcttctgtttatgttcctaatcctaatccttggtactggcaatgtgcctgttgttcggtcttgtgttacaaaaagaagtatgtgtgatttaatgtttcgacgtggaggatatgatcttctatctaatgctgtgcataccacgattttgttgtttggaagtgttcgtcagtggtgccgcgggctactgcattacatttgttcacttgcaaaatgtgggaatgccattgcttaatgcctatggaaggttggaagttctttcattgtagtatcatagttagaatgggtggtgaagcaaatggtaggtactgattgctatttaccaacaaagaatgagaccctttatgcttcttgtaaggttcagttttgctttaggatagttgtttacacagataagtttgtgtgagtcttttgttcaaattgcatattgcacatgttctcaaataaagtactcaaacatagactacaacggtaattctacatgcaagaacaatcattacctttgaaactgaatcatgttaacagcggatgcaaaatattctctcataacgttgtatgccaaaacggtgcatctcccgtgccatggcctgcaacagcagatattacatatgttgagatgataaacagctgttctcgaactctaatactctagtgagcttttattcaagtatgtgacggaagtaccagagaccatattggaaattttattttggcaggaatagatgcttttcaacatgctttatataatatttattcgcctgttttgtaacacagttttttcttttacccagctg

SEQ ID NO: 15227 - DNA, 1060 bp, Brachypodium distachyon
  Intron number 1 from transcript Bradi3g36880.1 (locus Brad i3g36880) derived from phytozome v7.0 (chr-ID Bd3; pos 392 24719 to 39225778 reverse strand)
tcttcgtccgggagtccgaggcggtccaggcaaaggtactgccggatcgtcttccatatggcatttacattcctcgtgtgttcttcgggtctgaactctgaagtagaagtatcgttcagttaatctaccttttttttcccggatggtgtgctcttttgcaagccaattggggttgttaagatgttttgactttcgtgtatgaaaaccttggtcgaacgtttacaggatccagagaaagtgttgacccacaagctacaactaacaactaactgccaattttccccattgtcaaaattataattccgaggccacccttggctttcttaacttgagacgcttttctaactaagattttgaataaacgttcaaaaatgatattgaaatttgaatcaacgttcagccatcctcgtctccacctcacttcatatgacctattgagtaccgagtattgacagaacattcaagtaacgccttgcaaaaagtgcagtctgttcaaactgcaagtttagttcagtaatgtgcaaacttagacgattggggtttaagaaaagggaatgtctatttctcagtcgcctaagaaatactagttatttctcagtcaataatcgtagtcatccaataaaaatattttttatcgatcggacctacattaatcttacacgaatctcaatgattgaaccaaaatgttgttatcatcgactaagaaataactacttcttagttgcataagaaataacaaaaccgttaagaaaatcctggcagctgagaattagcaaagcagtttacgttaagcagagaaaaagtgtaatgtaagtttcttgcataggattcagttcacaatgtggtaaagctatataggtagcagtagcacccgtcaagttctaacctgtgagttaaggcacgttaccatcttgccagtactctccttaagcaggcatcgcgtgaactgttaccaaagacatcaactgaaattaaactgatttttagccactaatcctgacctgatatttgacgtttttccacaggcaggaaggtacgaaagccagcaggagatcccttt

SEQ ID NO: 15228 - DNA, 710 bp, Brachypodium distachyon
  Intron number 2 from transcript Bradi2g61850.1 (locus Brad i2g61850) derived from phytozome v7.0 (chr-ID Bd2; pos 587 73825 to 58774534)
gttggcctcttcggctgctggccttgcgtgtctaggtaaagtctcctatacagtccaaatgggttgtatgagtagtttcttgtaactttgttcccttcccaatgtcatctgcgggctttcgctgctgaggggggcttcatgtctttggaactagtagtggagtcattgttgtcctgtcaaagaggtgttggttctagccaaggaataattttgacaatttaggtgtttttatagttgtacttttctgtacaccttcgtatgctattaaataattataggacaatatactggctcctcggtcttctcatctaagatactctctgatctcgatgttttgtcttattggagcttgtttggattaaattaatagttatgtatttggttatctaaagacatcaaaagtaggaaaattttcttggtgctgaactgctggccaactctattaggctggctgatcttacaagttctagtatcttggttgccatgatttacaagcactgttcaacatgattcttttgtatgaaatatcgattacttctatttatatcttgaactttgatagtgctatacaagacgaaaggatggctcactatgatttatcttatttgcacataaacattctaattccagcattgctttcataaaccatgtatcgcagcaaatcatatctattgtgtattttatttgcagttttcaccctcggaaagctg

SEQ ID NO: 15229 - DNA, 900 bp, Brachypodium distachyon
  Intron number 1 from transcript Bradi3g40790.1 (locus Brad i3g40790) derived from phytozome v7.0 (chr-ID Bd3; pos 428 94277 to 42895176 reverse strand)
cgtggtcgccgtcacgattctggtgctcctcgcaggtgatgtgctcagacctaagctaggcgttctccccgcagtgcctccttgctcccggggtcctcttgaggtgctgcgttcgatcctgtatctgtgactcccgctgccctaaggtacttgataactggctcgcgtgtggttccgtttttcgactgagagcgtcgtaattgtttgaagttgtgcgtttcatgtgtatctgctgttttttgaagaatgaactagctgtggatgtggaggagcggtttgctgtagcttgatgtcactaggttcaaataattgagtccatatctagaatcaaactgggggctgctctgtaggtagtacaatttagctcataccggggcagcaagtactagcagttactgtttaattactggataaacaacataatctatagtatggatgcagtagtatgtctgtattatatgcatgctgtgatgaattggcaagtttgggattgtgcacatccttacttctttttattctgttgactcagaatggaaacagggatgttgagactgtcacttaaatttcacactttggatgatctagagtttatgctttgcaatggcccataagttgtagcaaggcagtggtgtggagttctgtcgaaaatgtgtgtgtgtgtgtgtgttcagacttaaaacgcagaagggaccggtcctttttatttacagttattcaaatgtgtcatgttagcacttcttagtttatatatcatggttcaccaaaagatgtaaatatgtaggtttctgctcttgtgattataattctggcggtgctatgtatgctgtaattgacgagaagtgcatatttgattttgttttaacagcttcttgtctgaaatcctcaaaatcaaacaccata

SEQ ID NO: 15230 - DNA, 807 bp, Brachypodium distachyon
  Intron number 1 from transcript Bradi2g50730.1 (locus Brad i2g50730) derived from phytozome v7.0 (chr-ID Bd2; pos 505 12553 to 50513359)
actggtggaagaactctggcctaatccgttaagaggtaaatattggacgaacctcttctctactgtaccattttagatgctgttatagtctatttcaagaaatccaatccttttgtagcttatcatttgttggcacttttttttttggaaaagccactatgtcccaattggcagcatacttaacgtcctatggggatgctaaaaaaaggtgttccaaaaatacagacgaatcatctttttttttttgcgggtggaattatctgttttttgtggttgatgtgagacgaattaccttgatgaatcattcaaagctcaaagttgataagctgtttcatttggggagcaagtgacaagttgtgtccctattaatagccttcgtggcatattatctaatcaaatccaaccttgaaattaagtatattcaagttttcaacttattttcataagagataaagagaatcaagcgtttaaaagccagcaaggagaaaagggagaatttgttttattattgatgttttattataagcttaaactgtgaggtcacagtcacacgctactgctaccatgctagtaaccgtgttatgacttcactgtgtatcagtttctcgatgtactctaatgaatctgttttgttaatttagctcacagtccctactttgtttgttcattaacgtttcccatgtcttagatacttttcatgatttgatcttcattaacttttaagtgttcttcattttaagtttttcatatttggagttgaacttgacctttgtataaacatgtgaagcaggcatataaatctacaca

SEQ ID NO: 15231 - DNA, 943 bp, Brachypodium distachyon
  Intron number 1 from transcript Bradi2g58950.1 (locus Brad i2g58950) derived from phytozome v7.0 (chr-ID Bd2; pos 567 24888 to 56725830)
ggcagggttcggcggctccaagagccctgattcgggtacgacggttgatctcccctttctccggtctttttctgaaacggacttcagatttttgtttgcttgatcggtttgcagttaccagtcaagttattaattaatcttttcaaggtgaaaagaatcagatggccggcctgttctttatgtggaaaggggcctttaaggggtttctttattgattcggggatttcaaagcgcaggacgttaattctacagtattaataatctgtttggaagatcaagatcatacacgctgcttgattcagttagtactgaactactgatgatcttaacagaaaacaatttctgtcaacgccgactgcttctggattcagtggttatatgaagttcttgtatttccatctctagttccaactcttagaaaaaagagaggctttttacagtttatcagacacttgcccaaatcaggatgccatattaatggaactatggaaagactgtacctaagttgctgaccgagtcctgaaattccccatgcaaagtttttgtctagtattccctgcgctgttgctccaaatcaggagcttgcttttatagccatttgaataccctgggtgctctgggcttgcctctaatattgttttgtccatagctattgagtcactaatctttcgacaagcacacaaactggtagctttgtgtattatgatacacttttatcagttataaactagctgaattttctgtcttgttgatatgttttttttcagtaatgtgatatcttacaacataacttaatttgacatttttttaatcggattcagttctgttagctaggacaagccagtcaaatttctgccttttattaaacacatttctcctaactaaacccgataattcttgtatgaggcgcggaactaactaaactgacctgcaggtagcaagg

SEQ ID NO: 15232 - DNA, 807 bp, Brachypodium distachyon
  Intron number 2 from transcript Bradi2g61780.1 (locus Brad i2g61780) derived from phytozome v7.0 (chr-ID Bd2; pos 587 33018 to 58733824)
acagagcaaggccggaaccttttgtcttcaagaaggtgtgctgatcacaacacatatttgtaaattcggttaatcaatcgtatagttcttgtcttacgcttctttccatacgctcccaggaaaacacttgtaattgtttctggtgcactacttgccggtggaactttaacatatgcccagtcatgtcgacggaagaaataccgggaagaaaattctcgtggtgacgcaagtacacataccaggaataaagagagcaatggtcaaaatggtgttgatggcaaattggtaaaaccaaggaagaagaaaaatctattgaaatccttacattttctggctgctattttacttaagaagattggcccgagcggaacaaattaccttcttggcttgatgttaacagcagtaagttctacaattttctcaagtgtgctcatttcatttgttcgacctattgatgatggtttcccaaattcagagtttgtatggttctctaggtgctattcgagaatattagttgtacttcattccccaaacaagttttgattatttattgcatttctcactcgaagtcctttaccttttgtactagactagattttatgtttgtggtaacttactgggttgccgagttgattgctgactagttatgataagctgtatcagagtttgatcattaaggagcttatctgtataatcaatgtgatagtgataccatatccaggcttgtccaactacatgtacatctttctaaccaattattaattttctacaggtgatacgtacagccatcggccacagattagcaaa

SEQ ID NO: 15233 - DNA, 780 bp, Brachypodium distachyon
  Intron number 1 from transcript Bradi2g46380.2 (locus Brad i2g46380) derived from phytozome v7.0 (chr-ID Bd2; pos 468 35278 to 46836057 reverse strand)
ttcggcgtccctggggccttcacccccacctgcaggtctcgtccttcggtccttcccccagttcttttttcttctttgatttgaaattgtgagtattcaacagatcgacgaaaaacgatgtgagcgtttgactgttcgtaactgagcggttgcaacaggatccgccatgttttatttagatgtagtcgttgcggagcgcggacctggaccctgcaaatttgtggatagggtctctggaattgctttttgccaggatcccctcttcctccggacttgatttactttcgtggaagtataggtgaaaaaaaaactgttttgaggaaagatatttggaggatttcgtttaatggacagcgttgcgttattgattttcaccagtgaaagagattttgtaaacctggatgcatccgactgaacttcaggaatgctgttttgcagaacttgttcacggcgggtgctctaaactgtcaacttgagtcgatacctagtagagcttactcgagcagtacttcagtagatttttttacttgagatgttcgaaatttggtaaatttggaagtagtttgagatattcaagtggttcttcactcatcatcaccctatgttggtaactccacgtcgtctgtatatgacattgttaatattttttccgggaaaaagggattctgttgctctttggtatccgatttgcagatttctgttttcgtattactgaaagaaactccagcatagtcacattgtgtcctccctgtgttttcttctttggatgcagcaatcagc

SEQ ID NO: 15234 - DNA, 888 bp, Brachypodium distachyon
  Intron number 1 from transcript Bradi3g44510.1 (locus Brad i3g44510) derived from phytozome v7.0 (chr-ID Bd3; pos 464 77386 to 46478273)
agaaggtttccgtggacaagcaccacggctccggggtcagcagcacatgaccatatctccacgtgtagtcgtttgtttttttataaatttcacagaaccacaggttttgaggcagccttctcacggagcactggtagatgctaatctgtccacagacccacaacttttgtgtccaattgtctcaatccacccaaaacacgggtttaacctcgattgacactatttcttacaggtggggcccgcacgtcaggtgacacatctttttcatgagacccctcgtctttttctttttttccctcattgctcttcttcttctacgatgggaattttcttgaactggccatggaaattgacccaggcggtggcgcgagcagcgaggcagcaggcggaccatccccgtgcgtggcagcaggccagcggggcgggcggcggtgggggcgggcgctcggcgggcagcaaggcggcgaggcgggccgtcacggcgggcggccgggcgaggcagcagcgcggcgcggcggagggcacggtgggcaacatccatgaccagttcaagaaaactcccaccgtagaagaagaagagcaatgatggaagaaaaagaaaaagacgaggggtctcatgaaaaagatgtgacgcctgacgtgcgggccccacctgtaagaaatagtgtcaaacgaggttaaacccgtgttttgggtggactgagacaattggacacaaaatttgtggttccgtgaacagattagcatctaccggtgctccgtgagaaggataactcaaaaccggtggttcttgagtacgtacgtgacgacatccatccatccggtttaattttcctatcgtccgactacgcaggcaagctggagccagacgctgcacctcgcgttcca

SEQ ID NO: 15235 - DNA, 759 bp, Brachypodium distachyon
  Intron number 2 from transcript Bradi2g58770.1 (locus Brad i2g58770) derived from phytozome v7.0 (chr-ID Bd2; pos 565 64615 to 56565373 reverse strand)
gctgcaggttcaatcatcccccggataggaatttggtgaataccttcttctctcagctgctgttatgttaccatattgctctgtatcacactcatgctgcttgacagggctgtcattcaggaagcaggcacatcagggttacaatttgcatattttcttatatattcttctcatgtacataaagcagcattattaaactgaatgtgcaattggaacagaaacatattgtgttggtttgttctcattgaaccatcgaaataaatgcgagaattaatgtataaaatgccccatatcttgatttgtttacatgaccgcctttagagatttgattactctctcatttagaggcatctaaagatcctataatcagtttgctgataaaagttttttttagctcggtgactgtcaaatgtggctcttttctccaggaatgccatgcttctattcttctctgtttgcattggctagctgctatttgttactcaagtgccacactagatagatgcatccttcctgtcctataattttcaccagcatgtttgtctttcttttgcataattcataattcataattcccactggtggactgcatatcgttcctgttatcttgtgagtcgttacagcactgaccacagaaccttctgcaaaactatttcttatttttctgaagttatttcttgacatattggttgttgttactttatcttttattttgttctcagttgatctgtttattgttaggctattgcctctgccaga

SEQ ID NO: 15236 - DNA, 976 bp, Brachypodium distachyon
  Intron number 2 from transcript Bradi2g46610.1 (locus Brad i2g46610) derived from phytozome v7.0 (chr-ID Bd2; pos 470 25961 to 47026936)
aaaaaggtatggccctgttccatatttcactgaagttaacttgaataatttaaattgaagaatctgatacatctatcatgcacacctgtctcaatttgtctcattgtttgcatttatataaggtatctatataatgttatgttcatattataatcttgctgggcttgtcttaagtcttaagcctatcccatgtctctgttttcctgttacagaacactttatttcccgacatgtttcctttcctttgtgaaaggtcgttttggaattataccagtagtaaatagtactccctccgtttctaaatgtaagaagttctagcattctcctaagtcaaactttttaaactttgatcaaatttataaaaaaatctaccaacatctatggctctaaatgagttttattaaatccatcatgacgtatatttttgcaatatatttatttgatagtatttatgttgatattttctataaacttgatcacattgtaaaaagtttgacttaggacaaagctagaacttcttatatttaggaatggaggtagtacatgtcttgaatttgtcaaattgtagatgaaacttcattagtgcttgctttcaccctggttggaccctgtttgttttctcattgcatatcgttagcatttgtctttactgattaactctgcacttccctcaaaattgaagaaaagactggcaacatatctgtttgtgctagtaagttataggaggctacaagggattcttgtagaaccattctgcaggttgatttagttttcttgctaatattttgtaaagtggacgatggccttgtgtctggagccatcaggtctaaaacgctccactggtggcagggacaaatggcttcatgcatttgctgttcagtgattcagtcgagtgtgtgcatagattttagacttgaccttttatctcttgtttttgccagctattggcgagtattactggaagtcagaagatatc

SEQ ID NO: 15237 - DNA, 249 bp, Brachypodium distachyon
  Intron number 1 from transcript Bradi3g38630.1 (locus Brad i3g38630) derived from phytozome v7.0 (chr-ID Bd3; pos 411 37360 to 41137608 reverse strand)
ttctctttcaagtccaggtagattatttagtttcttcctcagtttttttgttccaatcctaggatcatggtttttttgtggaagggcggggatcatggttgtgacaaggcaggttccattgagtttcggtttcttttgaattccttgtgttttcctcttctcgttccgattacttccatcaatccatgaaccaacataagctccgttctttcttttccttgtacagcgtcaaatcgtcttctagtggta

SEQ ID NO: 15238 - DNA, 710 bp, Brachypodium distachyon
  Intron number 1 from transcript Bradi3g13200.1 (locus Brad i3g13200) derived from phytozome v7.0 (chr-ID Bd3; pos 117 47565 to 11748274 reverse strand)
gatcttccaggtccgtctcgcggccgctcttctccctccgtcccattctgcttacaacttttctttcaatatatattctcgatttcctcgtcttccggaggatttgttcatgtttatgggttgatctgcgcaatcaggggagcagattagctggcttttgatttatcatgttgttaggaatatgaagggattgtcctttttcatggctgtaaattgttggaattaggtttctccacaaaaggattaggtttggagttaagacgaagatatttgtgggaagaagaatcagaaacatgaaggattggaaatatttgggatggtaattattggttttaatgtagattacaatccgcaaaatggattggagatgggagccatttcgttagtgagctgaaaaatgtcccaaggttcagacttcggagttaacattgattatgtgctaatatgtttttgtggactagtaccataatatttgagaacatacttaatcgcaaatgacatgtagaagagtcgatatgactgatgtttctcatgggcttctgccaccatctttctcttggaatgaacatttttttgctttcaagtttaaactgacaattagttcatggcagtggcactattgcagcctcctcagcagaaaagcatgaacttgattttttttttcttgggatgcagaaactggagttcaaatttcctctgaccgtgtcgtg

SEQ ID NO: 15239 - DNA, 411 bp, Brachypodium distachyon
  Intron number 1 from transcript Bradi3g04080.1 (locus Brad i3g04080) derived from phytozome v7.0 (chr-ID Bd3; pos 275 6760 to 2757170 reverse strand)
actacgcccacctgcttcttcaccacgcgctgcaggtaaacaaatttacatttgtttgtcgctcaccggtcaattccattcccataaagaaataaaataaagcaaaaaggagacgatgcaaagaaaattcaaagcataaattgcaccttgcttaatttccctttaagctttgctctccttccccacttaattttcctttaatataaaaccatatgtgacactcgatccactggcaatgcaattgctggtaacgtgacagcgagcagctcaccgtccatcgtacacacacacacagacacaatttgaagaatataaaatacagtattttaatgcggtgtataatgatgtttatacgtgtatttttttgtttgtgtagttgtttgagtttgcggacaagttcagggggcggta

SEQ ID NO: 15240 - DNA, 688 bp, Brachypodium distachyon
  Intron number 1 from transcript Bradi3g00970.1 (locus Brad i3g00970) derived from phytozome v7.0 (chr-ID Bd3; pos 567 367 to 568054 reverse strand)
cctcgtcgccctccgagcatactccgacgaccacggtattatattgttcattaaattcccccctttattaattagaaatttgaaatgtatttgttctggcctgtagctttgactctaagcaaagctgtttgctggctgtgccgatggttgaagcaagtaaaacttcctttttttacctttttacacgctggtagcttactagtactaatgaagggtttaattacttgtcattgctgacaaagcgtttgctttgattactgcctacctaacaatggagaaaaaacgtcgtcaactcgttgtattttttcttcggctttttcagtataagataacaacatgttgattatttcgtcagtcttaaacaattgaaggatcgtgccagcacgacgctcctctttgtgtcttttactacaggacgccttttggttccttgaccggcgtaatcctctaattacttgctccctccgatccatgttagtagttagaatttgtaagattataatgttatggattggagggagtacatttcactacaaatagtcagaatttgtaagattataatgttatgggaatcttttcattgacactattttcactcatccaactttgatatcattgactgattgtggcatgttgtttcttaattgttgcagaggaaggaggcgcgctggtgctggaatacatcgcc

SEQ ID NO: 15241 - DNA, 567 bp, Brachypodium distachyon; identical to SEQ ID NO: 14952
  Intron number 2 from transcript Bradi3g12820.1 (locus Brad i3g12820) derived from phytozome v7.0 (chr-ID Bd3; pos 114 78422 to 11478988)

SEQ ID NO: 15242 - DNA, 898 bp, Brachypodium distachyon
  Intron number 1 from transcript Bradi3g25930.1 (locus Brad i3g25930) derived from phytozome v7.0 (chr-ID Bd3; pos 266 47754 to 26648651 reverse strand)
ggacaccgtgcagcaggtggatatcaacaccacatgtgagtgtgccctttggtcttctttcttaatcagcagcggtttactcttgctctgtgtttgcgtggtggatctgctttggggatgcttggattcttctctttcttgtcgatttgctgcagagttcttgtttggttcttgcgagttctgaatggatgcttcggtgtttgtttttgtgacacaagtgtttttcagatgttcaccttttcgcttcaatggtgcttgggaatgggagttatactagttcttgcttctattattttgctattattgtgcttgctccttaaatgcgctccttttgttctttatcctcatttgtttacctcctacaggatgggacatgcatttgtttcataaaagaagaaactccttccacctgattaaattcgtattgatgtttgcacagacatggcatagaaataggtttatgtctttataggtaattgcagcggctgttggtttggttgcttatcgttacatcatgttctggaatgatgaaatttttggggacctaatgtaggttgcctcgaccactggttgggctcattactaacctgcttaacttgcagaactcgggatcagagtttaattcaatagcaatttgcatatcattaccagagtttgtcaatttgtgagatggcagagtttcagtctgactgatagaactacaatttttgtcacctagttgcttcttgactgaattatttcttagaaaggacttccacaaattattgcgatttgctagaattggcaataacatcttgcaactgaattaattcaaaaatgtccgcactgttcttatgcatttttctcttctgttgagagatcagatccatcaaaaggaggtagcagaacaaatttatcg

SEQ ID NO: 15243 - DNA, 631 bp, Brachypodium distachyon
  Intron number 3 from transcript Bradi3g12940.1 (locus Brad i3g12940) derived from phytozome v7.0 (chr-ID Bd3; pos 116 05747 to 11606377 reverse strand)
ccttcaaagcaacttctcctgctgttttatcacaggtactaacaatgttcgaaataatcatgactgttaatgaacttttagcccacattttaccattcatacagtagatgggtttcgtttttcatactgcggttgatacctgcatcttcttagagataggatcagactctcctcccagctattgtccatgacacaatacaaatgagaagattttatacgctaaatgctccgaactaaatgtcccatgctatactttgtggtgggaaacagctaatgtccagctattgtaaaacgtccctagaagatggttaatgcccgttaaatcaaatagacagccttttgttggcactacttcaattttaaaaagactttcacaatgccatgacgaccttatttaggacacgtggcaacttcttgtttgaataattttatatattttggggtgggtgcggcttctgctgtcatgtgttttagtttgtttgtgtttgcccttgtgacattttaggcatatacaatgatttcttgatattttggatgattcttgtactaggtcatggcatcgtacaagtaaatattatcaactgatgtttttccaggttattagagtggtttctcaggcagttccttggta

SEQ ID NO: 15244 - DNA, 643 bp, Brachypodium distachyon
  Intron number 1 from transcript Bradi2g50100.1 (locus Brad i2g50100) derived from phytozome v7.0 (chr-ID Bd2; pos 500 42098 to 50042740 reverse strand)
ctcggcatcggacgacgcagggcggagagaaccttgtgaggcccctttctttgctattccccccttgatttcttggttggattatataagctcacgcaataatcccctggtgccggctcgagtttttcggtctggttgggattttcccgtcctcgggcgtcccttcaaggtttcagcagctttgggggttaattttgtttgtcgggtgtgagttcttagcatgaacatattacatatagatatggaattgaatagtgcagatttggtgaatatgcgcttgtgtgatggcatatgatcatagacaactcgcctaacttgcagaaaacctatataatagttagatggatcatggatgtgagtgaggtttactaggagttggttgcttatgagcctaactccatttgtgaacctttactgtggcacttgagttttgctgttgctatagagtgcctatgtgagtaataatttttgcaaaagttagaatgttcttcatgattgcagctttgactgaagctaatatttttccatcgaaaagcagaaatacaaccatttgcttttctcagaataccacatattcgtttctcaaaaatagaatacaacatattcagtgcaggccttcaaattgcagcctacaacttgaaca

SEQ ID NO: 15245 - DNA, 723 bp, Brachypodium distachyon
  Intron number 2 from transcript Bradi2g57020.1 (locus Brad i2g57020) derived from phytozome v7.0 (chr-ID Bd2; pos 552 21448 to 55222170)
ttcactagttacagggtaacttttttctccagtttcttctgtccctgcttggattctcgtattttttgtgtgagggctggtatttagttgaacttagaagttgaactgcaagagagaagaatccaagcagccctgtaggatttcgtgaaaaaaggggtccctgaaggacctaaactagtgaacaccattaaggagaagaatgcacagaactgatagccaaaaggctcatgctgtaatttccacacactttggttccaactatagcatgaatttttaggttttatcatgtcctgttccttttcgaacacctgttgccaagtaaggtagagaggcatggaacagtaattcagaatgtacagggacatggctaccaaaagaaaaataaatagaaaagaagaaagcaaagaacatttaatttgctcctattgttttgttaggagcttaggattactatttattttccacctatataacactttgtctcacattattaatggtagtaaacttttgctatctaccaatgtgagtatttactcagctagctattagaaacttacaaccttccaaccttatttcaaaaaatgatgcttttgttgaactagaaaatttaattaagagtattgaagttatcatggctttgctatcttgaatataccatgaaaaatagattatcaagcctcttatgtacaactatctaatgctttataattttgcagaaccctc

SEQ ID NO: 15246 - DNA, 965 bp, Brachypodium distachyon
  Intron number 2 from transcript Bradi2g45840.1 (locus Brad i2g45840) derived from phytozome v7.0 (chr-ID Bd2; pos 462 67271 to 46268235)
aggttatctttctctttctcattctaatatatacaggttttctctacctgcaatctgtttgtgatacaatagcttcttaattggttacaattgaatatcctgctgtattctctcaaaaaatagaaaaataaataccctgccgtccctgcagcctgtaatgtatgcacattttctgcccgcagttctatacttgatataactatactgattcccttgatttttgaagtgaatgcagtgttcaacatttttttgagctaactattaagttctgattttttgttgacataacaatcaaactgtcgcctaattgggtggctcagtccagctgtgatatagctaaagaactcattctagatttttcaggatcacaggagacaagtaaagaacacttggatcgaattacatcacaactaaggttgcattgtgtcccacctactatgccgaacccagtctgcaaatagcttgagatctgtgttcaacaagtggtcttcactataaaataaaagcttacagtagtggctcgaattcaagtaattttagcttttttcacaggtttccatttgtagtaggttctatcaaactagcagtctatatttgaaaatattgccaatacatgtaacattatgaattctatgcatctggtcttctgaaaactgtccatagacaatcttggggaaaggcaaattcacatgttttggtcaaactgttccacgttgttttcttcccaagttctaatggctgatgtcaaaattagtactttgctgaactatattgacaatgctgttttcaatatatttaatccacttcatcatatgttacaaagaagagtgttactctgatgaggatgtgtttaatagttcaatgtctagaatatcctatgttgatatgctgaatataagatttattgtataaattctgtttgctattcaggtcccagttagagttgcaggaggactgttatttga

SEQ ID NO: 15247 - DNA, 894 bp, Brachypodium distachyon
  Intron number 1 from transcript Bradi3g10630.2 (locus Brad i3g10630) derived from phytozome v7.0 (chr-ID Bd3; pos 882 9690 to 8830583)
ctcgtgctggcattgtcgtccctctcccctccggggtccgtaacttcccttcaaccttctgctattagttcactgcacgacttactccagtccaccgctcatcatgaccgatattattgtgcaagtttttctttcgagaaggaatactatgatgtggcaaaattgtttcattgggctcttgtggttttcagttttcactacagttcatctctctcttcagaggttgcccagtctttcgacaccactggaggcttcacgtatatgctacattaaaacatggatgggttgtagatatctttgagacgtgtctgtaagaatttcaggagggggagggggtgtcttcaaatcaatatttagtgtggaaaataattttgataagaatactttgatgattcatcgcactaaactcgatagcattgtgttcatcatattcttctttctacagatattaattgctgtaatgttgatctgccttactatattgtcaaatacagtttctcatcattgtttaacaatgttcttttttttatacttaggtactttcagtttccggaatccttttctttttttactttcagtttccagaatccttttctttttctcagataaccatttattagattataatttgttacttaggtcactgatgtttctgattgtaatcattgtttcttttctgctgaagcttggcaaccatgttgtttgcttccgtcgatggtttgtttagcaccgttgtgcctttatcatacatatcatcatgttgctatagtttttgaagcttttgaaaatctttgcacatctccaaaaattctacgtttcataacagacacatgagtttattttgtccttttttcaataggtttacttccaggatttatctggctcggaaccagt

SEQ ID NO: 15248 - DNA, 766 bp, Brachypodium distachyon
  Intron number 3 from transcript Bradi2g57480.1 (locus Brad i2g57480) derived from phytozome v7.0 (chr-ID Bd2; pos 556 30015 to 55630780)
tattgcagagaccttggacgcgagacagattccaggtgagcgcagatgtggttttgttcgaattaaagttctgtttcgccacttaattttctctctatgatggtggaaaggatggatcataggaggagatatatctcgtgtgtatggagctgaattgtattcgatcagctcttttctgtgtgtttataatcatttcatcagctcaaatttgagatccttctagctgttcttgttttcttgttgccgcggactggagttcttatgattcatgaactgccctcagaattcggaaacaatcttctttgtttcttcttttctgggactcatgagatgtttctattggaaaggaaattctcagaactaccctcggattttgggaacgaaaacatgaatatgattatgtgtatatatttttcagctcatcattatagctatttttagcagctgggacatgcttatttttccgtctaaaattggttcgcacaatcttatttatggaaacaaagtaaatgagaaatacgcccattgattgtttgcttaagatgggcgaaaatgccaagtaatcaataatgaatcacttgccttgctttatatcttcggtttcttgttctatctatttattacaacatcatcttcaggcttgagccttaaacaaagtactacttgcactgccatatgagaaatgtgtaatctttagagtacaaatcttgtgttttgagctttctttttgcctgttatttgcatccagagtcagagcagggggcac

SEQ ID NO: 15249 - DNA, 773 bp, Brachypodium distachyon
  Intron number 1 from transcript Bradi2g43080.2 (locus Brad i2g43080) derived from phytozome v7.0 (chr-ID Bd2; pos 435 61818 to 43562590 reverse strand)
agcaccgacaagatcaaaggggtggtagtgagcaacaagaatgggtgtcgagataaagcaacatggatatagagcgttgtgtaggagcacgaagcatcggttcatgagatgttcgcaagtcactaagaataaggtcgattaaatcaacaccaccgccaatgagattggttttgattgcgacgaggtcgagttcagcggcgcaacctagagaacggagtccatgaacagcaaagccacccgagtcaaagaacgtggaggtgcttggctgaatggttgccctaacttggttgtgggtgtgtagggattcaatggtcttctgtagactatttgtcaggcgtcggatcaattcttttaaatctgatggttttgaagaggactgatgctccgactaccggcagggagagttctcttatcagtctgtacgtggggcccctggcgtttctattccttctcttttcttctccctttccgctcccttcctctcctgcacacctcctcgcgccgctgcaactgcaaattccaatctgttctcgcctctagtcagctcacatctctcgccgccgcctcccttcccctcccagccgagctgcctctcgggtttcgcgttgagttcccacctctgcctcactcggctggggcaactcgcccgttcgttcactacaccggggcagcgtaaggcgtcggtggcggcggcggcccagctgtagccggaggcaactcttttggcgggtgcttcagggattcataggaagggagccccgtcggcgcgccac

SEQ ID NO: 15250 - DNA, 987 bp, Brachypodium distachyon
  Intron number 1 from transcript Bradi2g41710.1 (locus Brad i2g41710) derived from phytozome v7.0 (chr-ID Bd2; pos 421 05173 to 42106159 reverse strand)
aaaaggagcggaggaacctagcggtgttctcagaggtaaaattactccttatctgatgccacttcttggctattgcttataaaatgcattttgatttcaatcgtcttgttttgttggacatgggtaaggtgacttcgaatgtgtgacaatgatatgttctatataatttgtatttcatgttctactcttaaggttcttagatgttcttacggatttatttgaggtagaaatatttcatcaaactttcttcaatgccctttatttaaccgttttaactgctgagcaattcattttagaaaatttgcgaatttctttctctatatatgtggttttccctactgcaatagggcatacaatttaatagctgtgagaactactgcacctgttactcttacgcctctgccctttttcattgtaaatttggaagagagcaaagaaacattggaaccacatggtcctgataacatggtatataatatctgagcaatagaatgcagcaacacaggtgcaacattcacaaagtatgtcctgccgtaaaggagaaatgcatgtatcaaccatttatggggtgatataattacaggtgatgtttaatagtatgcatatgcatgtaggtgaggatgattagcccccccccccccccccccccccaaactaaaaatacactcaagccaagcaggcccttaggggtgaaggggaggtccttctctgcaattaggtatgcccaacatctggggtttatgattcactggtacttactcaagggcgagaagactctgttctagatagtactacttccttatgactccttctacctgtttcttgaaaaaaagcattcttctgtgtcacctaaaagaagcagttaattgaaaatttgaagtggttgatgtcctgttggtttccttgctgtttcatattcctttgatatgacaatgggtcgtaacactactgcttgtcactcattcaaatacatcacaggagcccaaa

SEQ ID NO: 15251 - DNA, 693 bp, Brachypodium distachyon
  Intron number 4 from transcript Bradi2g60730.1 (locus Brad i2g60730) derived from phytozome v7.0 (chr-ID Bd2; pos 580 20343 to 58021035)
aaacacaccctcagctgtcggacaagcagcgtcaggtagcatatatggtgctcttatcctgtacactctgctttatgacttgtagtctatcaattacacactgtcagctaatctttcttatcaagttatcagtcagacgagttatgtgctgatctctctttagtgataagactttataaacaccacaaactgttgtttgtttgtgtgttacaagtctctaggcagtctctcatggatttgttccatttttatgcttaatgactgattgtaataaatttgtctgtccaacatttcactctttcttttgtgcatcttctattttaaacgtgtactgacatagaaggtttatcttactagatagtgtccaaagctaattgaaaaatatgtaacttaaaattcctacgaagctgctctgccttgtaatgaaatacaaggtttacctatctagatagtaagtagcatgtacttactgtaaatttgtaacagacaacactttctacttttgtttcttgttgtgaaaggttaccattctataatgacattgaattttgatgcttggtaggtagacattttgttatgctagtgaaatttgataatgtaggtagtatgtctagacacttccgtgccatttgtatgcttctttgctccaataaggggtagagtaattgctgacgttcttgcatctacttagtg

SEQ ID NO: 15252 - DNA, 930 bp, Brachypodium distachyon
  Intron number 1 from transcript Bradi3g14960.1 (locus Brad i3g14960) derived from phytozome v7.0 (chr-ID Bd3; pos 132 75580 to 13276509)
ggagtcgcgtcgcggccggcggccgagtttccgaggtgaaggtctccaaaacccgtccacccccctcgtgatttcacgcgcggggattcatggccgcatagcatggtctctgatttcttcgggggggggggggggggggggggtttgtgtgtggcgaatttcggattaatctgttcgttgttcatcccctttgatcatcctgttcctcgctggatgtatgggaagtaatttgattcgatcgatctgttccaacttccaactcgctgttttgtgccttgacatgaggcgcgcgaaaaaaagtaagaaagtataaacgcggtttaccggggaggggaacgagcgccggagaagggtgacttcgggagatcgagcggttcccaaaccctagcgggcctgccggggccggcggcggcggttggaggcagggcgagtagagtagtgctctccctctcccgtgccgtgcatctagtcccctcccaaacgtagcacggagtggtgtgttaccgccggcgtgctcgcgaggctggtcggtgcgggatctggtggctcgctccgacggcgaacggcatggcgctcttggtgcctgggctacagagcgaggtggtatggagagcccagccagcagtcagtgtttctcccggcgtcctttttgttggcagtgaggctaccacgcccttgagccctgctgtttactcgtgaggaaaacagcgatttgttttgtaggagtaatgtttctgataagcagtgtcggtgttagactaaatttttgttttcgaaacaacagaattgactcgctgaatagtcaacagagacatgccttcttgactgacatgcttctgaagtattctgattttctttctttttctcatgattaaccctgttacatgtttccttgctctgatcatcaaacacacaactttgacggcaggg

SEQ ID NO: 15253 - DNA, 698 bp, Brachypodium distachyon
  Intron number 1 from transcript Bradi3g15170.1 (locus Brad i3g15170) derived from phytozome v7.0 (chr-ID Bd3; pos 134 86462 to 13487159)
ggcgcctcatcccaaatccaggtgctcccgtcgcttaattcgatcgatcgggctatctgcagcttcaactcaacctctgatcctataattccgtttttctaactatgaattgtgattggctacgtaggttgtcaatgttcatggattgctggctgacttgaagataaaaaattctctcttttttttttctaagatggcgcgccttttaagatagcagcttccttaaacagagcgatttgcctatctatcgtgtgtcaacgactgcttggatcaccggaatcttgtttcttttacggagagtgtctcaatcgggcgggcggtactagaaattaacagcggctacatgcctgcaactgtcatctcccaagatcgaccggtttttctcctggcgcagcggcctagctacatcagtaaacaattaattcagtacaatcaaatccttatcgatcatatactttcaaaaagagaaaaatcgttatcaatcactgctgtcagcaaagatcagcatattaatactaacaaccgattaatcaatcttcaggttaactggatcctctgactctcaacactgcacgtctggattacttgcatcttacatgcagctggatatcatatcatattcttgattttgccatgatcgatctccggtaattaattcttcaggttcggggaggtggcgcagctggtgagctgcacgg

SEQ ID NO: 15254 - DNA, 825 bp, Brachypodium distachyon
  Intron number 1 from transcript Bradi3g19810.1 (locus Brad i3g19810) derived from phytozome v7.0 (chr-ID Bd3; pos 187 50628 to 18751452)
caaggccgccaacttcttcaagctctcaaagaactgtgagttcctcgacggctctgttgctcctccccgcgcgccgccgctgatcggcggatttatttacccccagttcttattacgggctcttccgattcatggcggtcttctccctttttcctgggggcaagatctgccggtcgatcggggcaggatcgtgacggcggacccgctgaggttagaaagggatctttgggttgtcgatctaatggaccttcttcccaatctggtgctgctattaggttaccaagcgctgtgtttagatcattgacggataattctatcgacgtgatttggaatttggacatattagaagctttcatagttttggacgaattagtgctggagtacatatgattgcatggcgaggtttgattttgaactgttggaaggtgccatggactggatctggtggtgggcttgttccatcactatacagatgcatttctctttctagttcagatcagaatggtttgttgactactctgtgcattggttccaagtagaggtctctgctaggaaggttcgaacctggaattcactgtaagagtttagcctagcctgtaaaattggttgtcttgtccccgttgtccgttgggccagctctgatccgtctccaaggataagttgtgtcattgaaaacatcggagcatgactactgcattttttatctgcatttatgagtttgttcagtcagtttaatgtctaagcactcatccttattctctcaatgattgctatcaacttggggttgcagggaatagagctgcatccgtgtacaccaagattgct

SEQ ID NO: 15255 - DNA, 959 bp, Brachypodium distachyon
  Intron number 1 from transcript Bradi3g18490.1 (locus Brad i3g18490) derived from phytozome v7.0 (chr-ID Bd3; pos 168 93127 to 16894085)
gccgtcagcctagtaactttgagtgacgctaactcgatcatcttgccatgcattatggatatcgtgtccagtggatcgaggtcggcaatccacgtttgtataggttcttaaggtcactaatgatgaggaatagtaaggtcagggtgggattagaaggtggagggttcaatttctactggctctacaagctcaagggttaaaacataaatttacacattaatctgttgtgcccgtttcatgtttggcccctccattgactagatacagccattttgttaattgctttgctatatggcgtttgatggttacgtgttccttcttttcattgaaataaccaaggagtagtttaataatgtggtcatactattatatacattatgtaccttagcccggttacatacggaggtcaaaattggctggatacatgtttctttgtgattgagatatttgtgttttctggttatgcatctgttaatttaactcaattaattgttttttcttactagtatgggtgctcactggccacttcatgctgctacgaaataatgtaacttaactaattgatatttagtctctctaattgcaatattgctttgttgctcacatgtttgtgtaccatcattatgtaatatagatgtgagttggaatatgaattcttttcttgaattcaagtgtccttttgacatattccattatctggatgttccttcgagttgtctatgtaatttacaaacctgtggttattgttgttaatttgtatctacaccataagaatgaaaggtcgtattttcttgtatacttctagaacaagtgttttggtaaagaggcttgtgcatatactagataataagccatgtatccttattactcgatcttgttcttgcctgaagatgccaactatcacagttgtgacatgtgtttcctgcctttccaggtgcaaatagttcaagagataaatc

SEQ ID NO: 15256 - DNA, 867 bp, Brachypodium distachyon
  Intron number 1 from transcript Bradi3g01970.1 (locus Brad i3g01970) derived from phytozome v7.0 (chr-ID Bd3; pos 118 5524 to 1186390 reverse strand)
cgcgtgctcctcctccacgaccacgggatcagctggtgcgtgcagccttttcttcccctgaaccctattccattctcggttgcttcacttcggctgtatcgaactagatgaggtggtcatttcgtctatgaggtgttgtgctgctggagaattgcaagggcactcctgaattcagctaactggggttgggcgcatccagtttcagtcacgtgtaatctgacacacctgtcgtttgctaaaataaaacattcatgatctacaaaagatcattgtatctagccttgcataacagtatatcgtgaagttcctttgcataggagaaaaaacggaacaatgtgcgaaaagggctgtggaatgaagttctttgctgtattttcgcaacgcttagcatcataagcaatgccattgggaacttctgcagaaagtagccgttcatcaatctaaagaatcatgcttaatgtacacatcacatgccataactaggtgtccttactcttcactttggtcatgctgaactgcggcattgcaaaccatatgttatgtatgtcattgtcttgttaatttgccgtcccgtgcaaaatcgagcctcttatcgtttctgtttgacacttcaatatatattatacatgatttttgcaagagtaagtaaattatttgatataggagacttgttaaatcaaagttcaattagatatcctttgagaaaagagttgtcagctctcatatttgtaaaaatacgagtcactttattttgaaaaaatattgaagtttgtatgtcgcacacagtccttgtttgttctttgctaattgtcatgatttaatatgtgagcatgatatatatcgctgttactgtcaggtggattccag

SEQ ID NO: 15257 - DNA, 903 bp, Brachypodium distachyon
  Intron number 1 from transcript Bradi2g44130.1 (locus Brad i2g44130) derived from phytozome v7.0 (chr-ID Bd2; pos 446 02660 to 44603562 reverse strand)
cgccagattttggtagcttgagccatctgaagattgtaagtataaaaattaaggttctatgctatcatcaaatgaaccattttttaaccctaatactgtaggatatgtacctacaggctacagtgtgcagatttttatattgaagggtacccaggagatcccacaaagagcggtacagaaaagaaaaggaaaaaacactaatacccttacagaagaacttaaacgaacagggattgtagccaatcgcaagcagttgtttgtaaccaagcaacaaactctaaatgcaccatttgttgcttttagtgatagaagtgctctggaaattgtgtgagaactgatcaagaactaatacactagcttcattgcctaacaaaaatacatttaggaatgaaaatcagaagctcagaagcatttctatttctgaaacttgttcatatgcataaagacatgagtgaggatgcaggtatttccaaaatgctttcttttctttacttattgttttcttttcttttacttggttttcttctacttccaaatatgatttgacggtttgagtttcataaagttgatccctttataccattaaaattgaattcatggctcagtaccctgagtacaaatgccaaatatacgacagcaacatgctgaaactctggaaaatgttctttgatgctaaagcaatcatactattttcatcttacgcttggttgaggcattgcactgcacatttttgtgaaagaaatattctaatcattatgtaaaaagtgattttgattggtgacgaacagctagacttaatctcgatttttgaaaacaactatgattttgaacattctgatcattatgtatggagtacattttgttctaatcttgattttttttcttttgtttttgcaggtaaaa

SEQ ID NO: 15258 - DNA, 384 bp, Brachypodium distachyon
  Intron number 4 from transcript Bradi3g05300.1 (locus Brad i3g05300) derived from phytozome v7.0 (chr-ID Bd3; pos 371 5350 to 3715733)
ttcaagtggagagaagacgaaggttggcatcagtgagcatctcgtgtacaaaactggtgcagaaactgtgcaatctagatgggacatattaatccttgcatttttgtcttggattcccaggccatgtatttttcttttctgatatacgagtacaatattggcaaaacgaaatagtttagttatcatcttataaaggtcttgggattgtatcttaagttctcagtcctgtaagctggtcacgccaggcctactgaggtagttaaacactttggtacccaacagtcaaaagcacattcagtaagacatatgcaattttattgatgttagccctttgtttttgttatcacagggtttgggcggattgggagattggttttgcgaatt

SEQ ID NO: 15259 - DNA, 589 bp, Brachypodium distachyon
  Intron number 2 from transcript Bradi2g42320.1 (locus Brad i2g42320) derived from phytozome v7.0 (chr-ID Bd2; pos 427 99713 to 42800301)
tgtgtttgacctcggcgagaacttgacccgccggtgtaagcacccgtctgttaggcctattgttaattcatatctagcatacgtatttgttttatgtatacgtgatttatcaatgcaaacatatttcagcgaaaaagggtggataatttttttttctatgtgcacacttttaaggtggatgaatatttgttttatgcatacgtaatttgtgactaatggtggtctttatttgtactttgtttgagtgatcttaaatccttcttggcactggtaattccttattttagttggttatcttttttgttctattatgtaattacctggctaagttcacctccgcaattgaatgaatgattggattttttttaatcttgttgtatagaacttattttgttttaggtcagtgataagcaaagttctattctaatctggcactgctgtggttatattagtacacaaaattgattggattaatgtgctttgctttgtccttggtatttattgacaataactcttttagttgtgggagttctgcataatagtttgttcacagtctcctttttgcaatgcagacaaaatcttgagcaaa

SEQ ID NO: 15260 - DNA, 758 bp, Brachypodium distachyon
  Intron number 1 from transcript Bradi2g55720.1 (locus Brad i2g55720) derived from phytozome v7.0 (chr-ID Bd2; pos 542 48777 to 54249534)
gctatttcccgatatccagagggcatcgtttccaggttaatttcagcttctacttatttccgcttgtttcagcattttcgcatttcgtagctaaattttgctgttcgtgagtgtctcgctttgggatttatgaggagggtttggcgcataaggtgcatttgcatttggatggttccttcactgtgttctgcctttcctattcgtttgttttttttgtactgatgcattcactgtctataggcagcgcaactggtccgtttccctagtgctggtggtgtactcgtgccggtgaattttgatgtgtttggataatttgttgtgataagaggggataaagatggagtgttcttttcctttttctactatgtttcccttgatcaaaaggcatgtgcagggcctttgtagctgtacatggccatttgctgtcttccagttggtaaacgaagaaggtaaaaaaagatagtgatgtcgtgtagtagagcaaaagctagtggtagaaaatagcaaaccatttggcatttcccaagtggaaaacagacaaaactggggcgttgcgagaatcgaactcatgacctcccgcacccgaagcgggaatcataccactagaccaaacgccctctcatctgactcctcgatccaagagattagttggagagtagtttaatcgcgccgatatgattgagtaatttcagtctgatataatcctcggtattttatatgcaggggtgtgcgataaggtccaggagcagcacgggaag

SEQ ID NO: 15261 - DNA, 812 bp, Brachypodium distachyon
  Intron number 1 from transcript Bradi3g16350.1 (locus Brad i3g16350) derived from phytozome v7.0 (chr-ID Bd3; pos 145 53174 to 14553985)
tactctccacggaattccggcgtccgcagaaaagagtgagagcctctccctgctcactctttgatacggagtagtttagtcttctagtcctactaccttctgtactcgcggtaatcatacgcctcgaattttgtttttagggtacagttcattcattcattcgagtattcgacccgatttcatgcaatagaaatacgtagtacaaggcatccaaacacactaggacctgttttaggagggtgtaatgaattttaagtccggtttgtcattgttttgaccggaatcaaaacagtgaaattgggatcagttatttcatatttgggggcctgcatgtagctttgcccactgaaaattgttatcttcatgctcaaaattgtttttatttaattggaattgtttgacttgactaagctgcaccagagatttgtgggttgggaacctagcttaatttcatgtctttggctcagattgggtttcagcctgttagcaggcctacccacctggttttttctttctctctcagggcttctattttcttaaggcgctgcgagaacatatcttcatgtggaaaacttgcatgcatgtagatgtaggttaatcgaatttacggtcctacgtgtgcaaaacattttgagctttctacatttatggctttctgttcgttcatgtgcatttccgactttccatatagttgaattaaccgacttgtaaataatagtcaactcaaaacagctggattatttgattcatgagtaatatggtttcttttgttcatagcactgtgctgatttcagttgttcgatccctcaaat

SEQ ID NO: 15262 - DNA, 460 bp, Brachypodium distachyon
  Intron number 2 from transcript Bradi3g16350.1 (locus Brad i3g16350) derived from phytozome v7.0 (chr-ID Bd3; pos 145 54584 to 14555043)
tggtgagtttatgatcgacattattatgtgtacttccaaaattttgcttctccttgactatataagattgaccataggacgccaatctaaatagttgttctatgtagggtaaacttcgatacttttccaagctctgttttccactatacaaaataatcttcaggaaggatcagcctgattaattagtacatatgacaaatttctgaattttgcatcagcactcaccaacttgtgggtgtttgatgtattcatatggctgaacattcatttatctgtagcttcaaaactgaaagggtaaatccccgcaaaataagagcaattgaaaatttaaaacataaaagtagatttgttgttcttaataatcaaattgtgcaccttactgccttgcttgaagcctcaacatatttatatggctgaattcctgatcttgccatacatgttacaggttgaggaactgcaa

SEQ ID NO: 15263 - DNA, 918 bp, Brachypodium distachyon
  Intron number 1 from transcript Bradi3g02770.1 (locus Brad i3g02770) derived from phytozome v7.0 (chr-ID Bd3; pos 169 7734 to 1698651 reverse strand)
cggccgcctatacttcaggtatgtgtactgatgcttgtcttgaccctagtcccccagcagaggcagattctttgacaattttgcaaatgacattctgttagttttcgtttactcagttttgggttggaatttagagaaaaagctgtgcctgtcccatgactttgcatacttcacttaaattgccttttgatatgtaaggcataaatgctgcgaattttgtgccaacataggacatgtagctactaaggtgttctaagtttgaactaataacaagtttacatgttgtcatgctaagtcgattgtttttcattttgtgttcattgtatttcccatgttacggcactggcttgttgatcttcaaagtcatccatatcttccacatgttgaagaaacaataggaatgtctgagatcagtttcttggtttgatcagtatgcttgtggcgtgcatgcatagttaggttcgcatgcttctgtattccttttcccatgcatgatctcaagtctcaacaagcacataagttttctgccctttcatgaaagctgttcttagtctgctttatctgctggctcttctgtagtttgctttatattctggcacttctgtagttatgtgtgtagtatgttatgtttattttaccaatttttcatttcagactcagcattgtaaaatatgattttttttatttaacctatcatgatcatccacttccacaactttgttacttgttccacccttattttatgtcactgaagtcaaaagagttgcaaactgattgtgttagtttaactcttaaatcatggcagttagaacaatgttttctaattatgatttatatagtgagaaagatgatgatctacttattattaatgctcttcttgcagtgcccaaacggtcacacaatttgctccagctgtaa

SEQ ID NO: 15264 - DNA, 981 bp, Brachypodium distachyon
  Intron number 1 from transcript Bradi2g51200.1 (locus Brad i2g51200) derived from phytozome v7.0 (chr-ID Bd2; pos 508 55810 to 50856790 reverse strand)
gccccaacggctgcggcaagtccacgctcctcaaggtctatcttttctgaactactactaagaatcaggtgtttgctttcaccagcatttgtatctgtgcaccgataactgtgatcattaggccattgacccgttttttttcagactaatgtatgcaaatgatcaatcccaagacttgtgattcagtacttgttctgtttttaatttgatttagtgaacgggagagaaatttcttctttagtgtgtacaaccaactcatggagtgaatacaatatctcaaacgctgtctggtcgtctgattcatgctcacatgaagctaatttggaggattaggaaaaggataacgtgtttttattggaactgaaaatgttgaatatgagcagttgaatctttggatggccccggcttttcctccaagtgctgaaagaggtatatagagactatgggcggctcaaaaatttctgtgtttgtggcggccatactatgacattttgcttgacgaaaaatgtcagctgccatcaggaagcagtgtgtaatttgatggttcatagtaaatatatcctgtatcataaatactggaatcttacatgtaattgagcaatcattcatcttatatgaaaagttgtgcatcaaattagacatggtatttcacattttcttggatacatgttcaacctgaatcaaaaggtaataggaactatgacgtaatcaagagaagtcatggttttattagaatgtatcacctctgttcctaaataccgataacgtcttatatttaggaacagaggtagtattccatgaagcacacttaaacaaaatttggttcccgaatctgtccctattacttgtatgtctttgttcctctttgcttaattagactgaaaaactttgagagagtttcttagtaccagtatcttaattggatactgacttcatgtttttgtaggttttggcaggttttctaaatccttctgctggagc

SEQ ID NO: 15265 - DNA, 995 bp, Brachypodium distachyon
  Intron number 1 from transcript Bradi3g04050.1 (locus Brad i3g04050) derived from phytozome v7.0 (chr-ID Bd3; pos 273 7968 to 2738962 reverse strand)
cctctgctgctgcttcttcttcttcggcggcggcggtgcgtctctctctcgtactccttctcgcctccgcaatcagctctcccttcccctgatcccttcccctttctgctgattttggggattttcgagtggttcgcgttgacggctccggcggatccgcgctgttctctgaattatttttgtacggactttttttaccttttcttttctttacttgtgttctttcggcgaagtttaatttaattaattttgggttcagggacttgctgttctgtctttttctcttcttttatggtagaggctgtatgttgtttggggttttaggttagttgccacatagatttcggttaatttcgccctgcaaagtccgtatttacgtctggattatttgctactctacctgatctgtcatggcgctgcttattttattttgtttgtttgccgaaagtgttagtttgtgataagtatgttcaaatgtgttgggaactgacggtgggatgttcatataaaattccatagtactgcacaagatgatcggttttatacttgaattatacctgatgggctgatggctatagcgaattaattcctgaatggtactttacttcccaagcacatggtatgaaatgttattatgtagcaaaagcaaaaccattatgatccatgacttctcttcttcacaaattgcgtcccgaactacaccggggcagttgggtttttttaggttcatcattgcttgatcaagctagatgctagtagatgagaggacaatttaattggatccgtgtctggttaaactaggctggtctggaaagttgccattgtactatgttgtagcctcgttggcttatgatgatatttctttgtggtggtggaaatgccaagtcttgttgctttattgcttacgaaaattgatatgatgggttcaattatgggagtgagactgtgagagactagattgacatgcttcttttatgacatgcaggccggctgtc

SEQ ID NO: 15266 - DNA, 974 bp, Brachypodium distachyon
  Intron number 1 from transcript Bradi3g10840.1 (locus Brad i3g10840) derived from phytozome v7.0 (chr-ID Bd3; pos 909 2987 to 9093960 reverse strand)
gccagtgccgtcgtcactcgctgctcccggtaatgtcctcaacaatcgggcgttggtgggaagaggaaatggttcctctgggatgctgtaatttattcctcgcttaggttgtggggtttagagaatgtcgttcacgaagcttctcgggattattttgtgcggaattggcatgagccttttttttgttatggagttagatcactgggaaaacccaagctagctcttcatctgttcttccttttctagggaattggtagcactactgctgtctaaattagaggcatggcgatggaggtgacaattctcaggaaatcttcaaatagtattaggttacatattcctactctgtaccggagtccatggagctggattttcagggcaaaaaatgggtattgtggtctgaaatgagtttttaggtctgaaatgggtttagtttactcgtaagtagtaactgatgtgtgcgatgtgtctactgcatgcattgtgcttcttggtacaagtaagggtcttatgcgaaccatccataggatcacataggttagaacgggaactacatacaattgtgtgaaactggacattttgagcaatagggcgacaataatggttcatgttccatgaattaggctttctttcagatatttggatgtttgccattttagagttaaggaaacatgctttctgaacttatatagttttaactctgttgaattattgtagtcgaacagtttacttgattgggaacctattgtgcatcctatagacgccctatgtttcgtgaaccaccttaatacgttttgtttttcccctatttttggggcacaattaatctggcatggcttgtactgtggtaatttattctaaaattggtatgcagtataaccaaattttccttaccttagttacataacgtcaattttgcttccacaagatgttgagctgttgccttttgtgctaattaccttccagagttctcg

SEQ ID NO: 15267 - DNA, 1006 bp, Brachypodium distachyon
  Intron number 2 from transcript Bradi3g29330.1 (locus Brad i3g29330) derived from phytozome v7.0 (chr-ID Bd3; pos 313 42694 to 31343699 reverse strand)
accgccaggatccaaaaatgtaaagtttgccaacttctagattttcaatcctacggtttaatttgtgtgcatgcttgcaattgattacattaaaacagagctatgttgccacgtgcttctgtgatgtactccatggaagataatcaatgtttttatgatatctatcaggaaaatgaggaatagtcctaagttagagtagagaaaagctgacaagttgataggaaaagaagtaccagcctacattgtttcttacgttcccattttgagaccttctaaagttgaaaaacatgcatttttgtaactgtatatgtgagaaaagctaccacactgtatttatatctgtatattttttatctcaatcataaactgtacaattgcttagcttttaaccaggcacacccacacaactctgtttcatcgtgcactaaactgtactggtacccagaacaataagtcccattgactaatcggtaaacagtgtggtaatagcacaccgggttaggggtttgaaatgaaggatgggtacctttttcttaacaagtcgatgtatatgaattgacaacttgtaggcatgtaaatagttcagttttatttttgttcattatgccatggttttcacagcgtccaggtgctttaaggcgttgggggggcgcctcgacgcctagttgctcaaagcgcgaagcgaggtgacgccttagtcaatttttgcaaagcgctaggggaactaatatggcagacatgagtagacagaaaacctgattcataccttgaatttcctggttgttgagcccatatagcatccattcctcccgtcttgtttcccatttctttcttccacaatagaaatctgcataagatctttgattgctgttcaacaacattttgtggaccgtgctcatgacattgaaagagttcttagtgtcactttgtattgtatgtacttatgagaaagtgtaatgtactaatctatagaatgttatgatgtaaactaggtttacagaggata

SEQ ID NO: 15268 - DNA, 575 bp, Brachypodium distachyon
  Intron number 2 from transcript Bradi2g53150.1 (locus Brad i2g53150) derived from phytozome v7.0 (chr-ID Bd2; pos 523 42128 to 52342702 reverse strand)
gaaattcttcaacaaatgtaagtatttgtttgcagtagaaaatatggagacttgcttattcggcatatcttgccagtcaatcttaatataccaaatcagtatagagcaatatctatatgcagctcttcaaataaaaaaaggtttgatgcttaattttgacatgttgatctgccctcttaatacatactattacttgttcttcagaatttcggatagttaattccaatcttagattttttttaatctggtaggatgtgttatcgttgcctatctttatttgggtaaattgttgtgttgatgcaagttatcatgtcatgttcaatattttctataattgatccaagaactacactgtccgttctttctcttagtttgtttatatcattttttgtttactgtacattgcttatctgaaatgtgtaaataagtacttggcctcatagggctgttctccaccagtcttgtattgattatataaatattttattctctacatggattttgactatattgtgttttttgaatgacgtgtatgatctctatatatgcagggaactccgttgctggtttctgca

SEQ ID NO: 15269 - DNA, 827 bp, Brachypodium distachyon
  Intron number 4 from transcript Bradi3g06180.1 (locus Brad i3g06180) derived from phytozome v7.0 (chr-ID Bd3; pos 445 8588 to 4459414 reverse strand)
ctcagccgagcagcctacctgcccagtgtgtctaggtatgtggaggtggtttggagtactctagctatctatgaaaatttagaatataatactctgttccagttgttagcaagatgttttgaattccttgtgaagttttgtcctttatagaacaactatagaatgtttacctacccatgccttttgaattataacgtaggttaccaagtatggtaaagagaacactgattggattgtaagaatgtttaagatgtataccacattattgacctttgcatcatctaataaaggcagggcacttaagtgaaacttgattttgaagcatgtttcttcgctagctctttgttacattgatgaacttaggccacattaagttgcacctactggtattcctgttggacatttaactactatttgatccgcataactacgcattcttttagcttggtatgtcttatctcgttgttaatcctgtacgtgcaattttgtgattctcaatttctcatacatatcacttaattgcatccaaatatacgacgctagaaacataagtggtttattcacctatgctatactgtcatgaaatagttcaattgctttggcagtggctgtcatatgcatctttacaactgttacatactcttctatgttcaacttatgttatagaggccagattccatgcctatttatttgctttgtggcacatttgttttcttaatttttgccaaacccaagcaataacttttgagttcatgttgattacattgtttattcgtttctattttcaaacagaacgacttgaccaagatcctggaggcattcttact

SEQ ID NO: 15270 - DNA, 965 bp, Brachypodium distachyon
  Intron number 2 from transcript Bradi3g19970.1 (locus Brad i3g19970) derived from phytozome v7.0 (chr-ID Bd3; pos 190 13538 to 19014502 reverse strand)
tgcttgtccgacagttgcaattgaaattagctctagtaagcaaagaaatatatgtaaagtagttactatactctaatgccccttcatatactgatatacacaacgccactcgtattttgaaaagtgaaattagtgtgcatgccatcaagaacaaatcaggataatgtagtagagataaccaaaataaaggggcatgccaaataaaggtgtcgaatgaatcgcaacaacaaaggaaagatttggaaaaactaattctctaagcaccacctcaaagagtgattgctgttttctcccaaccctctcaaaccatgatccttgcctacacaaaatctagtgttgaggaataatccagcctctagccctcttctgcaccccttattgcttttaccttgatttgtatgagatcttggctcttcggattagtatggttatgcttcatggtttcctcgtgattcctttaaaggttgtatgaatccttatgagagtttgattattataggatccttagcatcgtctctctatgccctaatacaattcgatttttaataggatagccgatgatattctgctcgatcttaactgagctgtcctgaggccattggcaaaggcggtgcttgatgtgtgtatgttgctgtgtggtatcttccttccattatctaaaataaattgacctatatttttcagttcaaataacaaaatttaaacttcagcttagtctctattaaggtgatccctgcgctctgcttggtgctgactacagctgaattttctctatattgatgttgttgtgctccgtgaaatctaattttctattttgtttgttttggtcctgtcccatcatgtgatactgagatactgatctcatttgcatcagtgagtactgatagagagacggttctaattctagcatttcccatttatgatgaacagataaaaaggaagaacttcaagagcagcaacccgtt

SEQ ID NO: 15271 - DNA, 938 bp, Brachypodium distachyon
  Intron number 1 from transcript Bradi3g10800.1 (locus Brad i3g10800) derived from phytozome v7.0 (chr-ID Bd3; pos 903 3662 to 9034599)
gtcgcaggaattccatatcagcgacccaaggcattgtgagctgctgcaagagcttatgagcagcagcggtggtcataaggaggccaaacaggcaaccttgtcgctgggatccctgcatatgggttatcccgccttcagcatcgacgatgatgttgtttacctgtcgtgcaaggctgccaggaggggtctgatggggttagtggctgctgttgacgtgaggaagaaggagctgcgaggagtggccaagcttgacatcaaaaggaacacctgcttcatgcgtagctacattgccaccgagatctccaaatatctcaagactacaggtacttgtgcagtactattccttgccatgatgagtgctctggttgtcaattatgtttatgacatagtttaaaataccaaatattcttaggtcctacgagtcaaggcaaataaccatagttagctaattaaacctgaaatttgttgaaatgaattacatttggtgcagcaattgttcttctggtgagcaacaaaactgttgtaagcagagctagggtaacgtctctagttttgtttgctggtttataaagtgtttggaaatgattgattggtcttctagcgaacaaaaaaactgttgtgagtagagctacggcacatgttctgtttgatgctttataaaatgcatggtgttgcctttaacaattaactggtagagtgtgtgcactcaggaaatggtattgaacgagttgccagctgaatgcagcactgtttgtctttgaaatgcctttctatggcccaaactttctattatttcacttaaaggcacctccattcccatgtctacagttcaacacatacaaaaaattgccacctggaaatattttaaccataccttttagtaactctgcattgtatagtcattgtttatgaactgaaattcgatgcacattatgcag

SEQ ID NO: 15272 - DNA, 780 bp, Brachypodium distachyon
  Intron number 1 from transcript Bradi2g47170.1 (locus Brad i2g47170) derived from phytozome v7.0 (chr-ID Bd2; pos 475 21624 to 47522403 reverse strand)
tgttgccgcctcgtctgatacgaggatccgaacatgtaagagaacacacacccggaaagctctctctgtctctccatccatagtgattgtgtttgttggatgctggccgttttgtatctgggtgtagtcacgtactaatcacggtcatccgatcttgttttgagatatgtgtcattgcaatgttctagggcaaatgtaattgcaatacgttgacacctactcgtcgtggtgccattaaaaagttttgcattggttttgagaaatttaatatatgttcaatcccatcgtagcctatattaaacctacaccaggtgattctcaaaaaaaatgtttctttctccaggcagcagtattaagtttgattagcatgcaaaacataaatgcatagattttgtcaaccagtcgaaactaagtcgtggaaaccaccctagccaaccctattaaaaaagaaattggttgctatggcgtgatgtttagagacttacgttgtaaatttattataataagtgttcttcgtcactaacctgatttttcaatacagtgttcaacagatcatatatactcatcttgattcctaccatcttttcagatgtaatagctgggtcctcaagcctggttggcgtgtgcttatttctcctcacgttcttttattggtataagaaatactatggtatttttccctgccaagggggatcaaagaacacacctaggattgaatccttcctacaaaagcaagcaacttcacatcccaaaaggtacagttacccagaagtgagaaga

SEQ ID NO: 15273 - DNA, 637 bp, Brachypodium distachyon
  Intron number 1 from transcript Bradi3g42700.1 (locus Brad i3g42700) derived from phytozome v7.0 (chr-ID Bd3; pos 441 79206 to 44179842 reverse strand)
tgttcgaccaggccggcgtcgtcgaggtcgccgaggtgagtctaaaccgctcgcagcaccgaacgtacagtaatactgtaaaagcgaagaaacttgataagagcaatgcggaaatgcggttccaattagtttttcttccctttaatctgcacctgcgtcgattggtttgagtgtgtttatgttacccgtgcttaacccgttaaccgtagtatgtgctagatagagctagttatgcaaaaatgctaggacccagctttgtggaaaggttattgttttgctggggaaaccagcttacaagccgttcaaaacctgaggtacagctacagccgttgcagagtaaacgtgaggcagctcgaaggctgtaacacaatcaataggaagcgaacccatttgttgataattgatgcatatcttagctagttgcaagacatgggttgtttcttctcgtaagtgcgagtcatgttttttatgccgtctattgttgaatgttttttacattgcattatttgctaaggcttgcgtttgcagtttactcatctgtagaaattgtgtgctttgctcgatcatttctgttatcttgatgttgctttgctcaactccaggtcatttacaacagagagtcaggccagagccgtgg

SEQ ID NO: 15274 - DNA, 946 bp, Brachypodium distachyon
  Intron number 1 from transcript Bradi2g42830.1 (locus Brad i2g42830) derived from phytozome v7.0 (chr-ID Bd2; pos 432 80310 to 43281255 reverse strand)
gcgtcggccgcgggcgccccacgccttcttctccggtgagtttctcttcttccccttcggtgccgtcaggccccggctagcgtttttccttttttgcgtcggttcggattcgagaggccggaaacgggaagctctgactggacaatatttcctgtatatagaatagatattcatttgtggaaggtaatgcgagtcaaatatctcctcgggagatctactcgctggcttagcatttttgggaatggggaaatttctgtagaaattggctcggcttttgtcccacttgcggaggccaatttcgaggcggagagcgcggcgagatctgcgaagattcgaacaatttttcaataatttggggattcctacggcgtgctgggaatcgtgcaggctaggaggacgaggcggcactgtgcaatctggccaagggagagctgaggcggggtctcgtcgtctcgtctcagacagcggtatcgagctcgctcgctcgccagcctcgggctctccccttccccgtgtccctatcccggctacagttgtgacgaggacattcacaggagaggcagtggtgccccctctgcggccagccataaagtggcgatctttctctcaatccgcagcagctcggtcatcgggaatttgggacccattggagggccggggaaaggtcgcctccttttaccgcgatctttactggtctttagctgccttttggttctgtgaacagagtttggtgtcgaactctgctggcaactgtcagtcgctcggtactcgctcctcctatcccaatttgcatttaagcactcggggtggttgttggcgttgtttgtactaggcgttgccactccaactatagtttgctttcgttgcttcttctagagttctagttccctcgggcagctgcttagaggcaggttctgaaattgttgtaggcattgctggagaggag

SEQ ID NO: 15275 - DNA, 837 bp, Brachypodium distachyon
  Intron number 1 from transcript Bradi3g22810.1 (locus Brad i3g22810) derived from phytozome v7.0 (chr-ID Bd3; pos 220 65928 to 22066764 reverse strand)
caggtctcggccggtgatcgatatttcttttaatttgcgctgttttttctttagcacatgcactcttgatgatcgatatagtagctcggccctgatgcttaattatgcttggttcggccctcatgtctgggattttcttttttaatacggagtaaaacttttggctatatatgtatccgggaaggcaatggctgggatattttgttcttcgtcctcttagatcgagaactatgtggaccagcccagagggggcattgacacgtagttggattagcctttgaaacaaatttcaaaacatcagaattgagaaaagaaaaaaaaatactagaatcacgattttaatatagtggattggacacatgttgcaagatagacgtcatgcatctttcatgcaagtggagagactaggtctcttggggttttctgcctaccaggtctaaatactacttctgtttttaaatataagatgttctatttttatcctaagtcaagaaagtccttaaagtttgaccaaatttatataaaatgtactcatatttacaatatcaaataagtataatatgaaaatatataccatgacagtctaataaaactaacttggagttctaaatgttggtagacttttttataaacttgttcaaattgtaagaagtagtatatataacttaagacaaagttggaacatcttatatccagaagcggagtgagtagtaaataatataatttgtaggtcttgttgataaaaaaagtcagttctgataaaacatggatacctaacatcttatatttaattttgatatagtttgtaggtcatataacaattgtgtgcctccgacc

SEQ ID NO: 15276 - DNA, 691 bp, Brachypodium distachyon
  Intron number 1 from transcript Bradi3g39730.1 (locus Brad i3g39730) derived from phytozome v7.0 (chr-ID Bd3; pos 419 57836 to 41958526 reverse strand)
gtggtgaaattgcaaggtacatgtccatttgttttgtgttttatctgctttgaacaaagtgtaactaaataatatcagtttagttcctgcatcaaggaagctaccagcatataatacagtattttagcatttatggattcagcccatttgttacagaaaattctgaaattttggttttcgatccatagcaaaattattgcttttgaaactataccttttccttgaaacaaagtatagcgatcgttaatctaagtatagaacttagcatgccctagttatgggtagaaatggatttcgtatagagcatagttgcaccatgtttcgtaactgtaggccaggtataatatgttgatgcagtctaccaagaatgaaatgccttggcttataaatttacctgttgttttgtgttgcttcaatcatgcctggttgtatgcgtgtgatatttagatggtttattctagtttctgcttgcatggtttaatttgttattttgttattaaacataacgggtgttatggtgttgcttttgtgttacattgctccttaccatagaatatgtgctatcatccttagtttttatgtaaaaatactcctctcttctatattcctccataattcctcatttgcgatacacacttctgctgatctacttgcagctgtgaaggcaagtgtctgaggtcgtttcacgcga

SEQ ID NO: 15277 - DNA, 966 bp, Brachypodium distachyon
  Intron number 1 from transcript Bradi3g20490.1 (locus Brad i3g20490) derived from phytozome v7.0 (chr-ID Bd3; pos 195 00667 to 19501632 reverse strand)
agcatacaggtgaactccctaagaaactgtctctcattttccctctttctttctctctctctttcgtaacttgaatatagactgaagcaatttttaaagatgtgttattcatgttagcccaaagtaggggcaggaagcaatggaataggtcatagaagtggcagttatgtgaaattcgcctaactttaattatttaggttgtttgcgtttgagatgggaaggatatgtgctggattcatcgtacaactttgggttaggtatggtggcggcactgaacaatttttggtgtgaggaagtttaaacatgtacgaatttagttccacccgattggaattgaagagcctgaacccattgttttgagtgttcactcagcgaacgagttttggatgtgggtcaattttatatgttgattgcacgccaaagaataagatcatgtgttcacttgtaattgaattgtatgctaaatgataattttgtctgtttataattcttagctttatcgtgctcacaaataattttaacacgtgcgactgtctggaaatgaaaatctggtagttttgtttagtcatacctgtcaggctgtcacctttaaggtgcatacaaatgagctgaacacccgcaaaaaactctcgctaaattctaagcttccttggaaccttgttccaaatttgaggatgtttctgtggaaatggatgacaagatgtgtcaacttttgattctggtccaagaaaagcggatttttgtctcttatggttaggcgagaacttggagtaatgggtgcatgacttccttgtgttatgtgagctcttatctggaaaaacatgtgattgctttacaaatagctctgttgtatgtgacatttgtgcagaaagttcaggtgcaagtaaattttctctcaataaaatatctctaatacaaattattcttgctttcagtttattgaaaaggctctagaagaatctggaa

SEQ ID NO: 15278 - DNA, 1016 bp, Brachypodium distachyon
  Intron number 2 from transcript Bradi2g59510.1 (locus Brad i2g59510) derived from phytozome v7.0 (chr-ID Bd2; pos 571 94232 to 57195247 reverse strand)
gtggagcctccagtggatcgcagttggcagaaaaggtacacacagtgagatatccccggatctgtagactatgctttgtgctatgtatactaacaagtaacagcatgccagcgtgaacttctacagtatgaatgcatgatacttatgcccatgcaaatggagcaatgatgagtgattttttactgctcgtgccattttttagttgccagaataattgactaccctagcttactgcattaatcagctcttgctatggacttagtttgactggacttgtgattaggtcttttacaagtcgcatctaatggaattgtgatagggttaatagactagtatttacttattttgactcaacatgtaggcatcaatgaataaacctgtacaaataaataaaccaccctgttaacatatgatcaagagcaaatgaataaacctgtacaaaaaaatgagacatactgtagcgcttctaggctgccacttataaagaatgacatggctgcttcggtatcataatgtggaaggaactaacacctcacacagcagcagagagcttctaatcatctaccttacagaattgaagcttggatccactaggtacaacgatggttaccatgtgaccgaaatcttaacatctcatcaaaatggtgaatgagatcttagtatgtctcatgccaatttggcattactgtgctgaactgttatgcatcatctatttcattgtggagaattttaccagttctagcaaatattttcttcacattttaaaagggtggttatcgtctatttaataacttaatctattttaaattagcaaatcatgagttccttaatttccctgccgtgttaaactcattctttatgatttcatgggcactgcatttcttgtcgtattcatgcattggaaatttggaataatcacattattgatttttttttggagcttgagttacttttgcatccctttgacctttttcacttcaggtttgatacagggtcccttaactctagagattcag

SEQ ID NO: 15279 - DNA, 917 bp, Brachypodium distachyon
  Intron number 4 from transcript Bradi2g56120.2 (locus Brad i2g56120) derived from phytozome v7.0 (chr-ID Bd2; pos 545 34218 to 54535134)
gacggaaccctgaccaggtacacattcatccagctgcactttgggttctccctgctattctagagcatacgattatttctgttattaattggcatttttgtgcattgatgttttcaccgatctctgcatttaacatcttgtcctatgttcccctttctgtttgagctgatggttgctcttctctaatatacattctgtgtgtgattgtgcaccaacctaatgatcaagttttcgaaatgaataccacatgcacagtgtaatcagctattggttgaagaaaaattccttcattgtttttcttaaaagagatacccagactttagcacgtttgttggttcttgtgcctaagtatgaaacctaagctcgtacccaactgcatatgagggtttacttccatctttttatttgttagtgtatcttctgggccttgactagttggtttatagttctttgattttaagttgtttgttatgatacccaaactttgtgataatgtgtctagttgttcatgatgcaagtgctaggttgctcaattttttttttcttttttaactgttagggacttccacaatgtgcttgaaagaattaattttcctatctggcctggaaccatgtattctactccctccgttcctaaatacttgtcgctgttttagtgcaacttgcactaaaacagcgacaagtatttaggaacggagggagtattacataataaataaaaagagaagtgaaataggttgtcaaaatgtcttaatttttcatattgttgctattttcacctgtgtggtcatttactggatttagtttacatgctctctctgctctcttctattccaattagatgcctattcttctctattcattcttctctctctcctctattctttctcggtactcgattgctgctgggactcagg

SEQ ID NO: 15280 - DNA, 826 bp, Brachypodium distachyon; identical to SEQ ID NO: 15049
  Intron number 1 from transcript Bradi3g30670.2 (locus Brad i3g30670) derived from phytozome v7.0 (chr-ID Bd3; pos 328 71364 to 32872189 reverse strand)

SEQ ID NO: 15281 - DNA, 819 bp, Brachypodium distachyon
  Intron number 1 from transcript Bradi2g45820.1 (locus Brad i2g45820) derived from phytozome v7.0 (chr-ID Bd2; pos 462 51253 to 46252071 reverse strand)
cagattttattgacctgtacttagggcctaacaacgtaaacccttgtcctactagggtagggggaatccatgataacaaaaatggttaacatttaacaacatctgaaaacaagactgccatgcaggttgccaagcttggatctccttgaatcatgacagtttttcagaaagtttgacgagttcacttagatttgcatatcatttaaactatttggttccactcttcgatgttttctgtcccgtaattccatatctttcacctcatccagaatttagatgaacttgcacaggtctttttgtctcagttttctttttggaatgaaacatattgtgggtcttgtggttagtcttgtacttcaacaccagaagttcatattttcattaaggtgttcaagtttcctctgtttatgttgcacacaaagcttatacatgcccgtaacctggccaaaacagaaccagaattgtggataaatatttaagtttcttgtctgctcccttgtttggtctttttctttgctgctgagaggctaaagtgacatatggtttgagacttccgtccagttaatccattggtgcatcttgtgtcaatgttgtaataacagactgatagttaccacaatttttttaattttgttgaaatattgacatcaccaaatctttgataatgcaagagtatgaccggacattgaaaatgtattgagagcaaattgttgtctgatctagttcatgttttaaattacatgaacaatcttctttgatttacctggcatgttttggatggtataatttttttttatgcaggcagtgaaatttgaaaac

SEQ ID NO: 15282 - DNA, 1068 bp, Brachypodium distachyon
  Intron number 1 from transcript Bradi2g43050.1 (locus Brad i2g43050) derived from phytozome v7.0 (chr-ID Bd2; pos 435 03464 to 43504531 reverse strand)
cgaggccgaggccctcttcgccgacaagtgccgaggtgacaaagtccgtcctcccttcctgctgatatgctccccatacatgttcgtgtgatatgtatgcttcgatcgattctcgttctcgctatatatgcgcgtgttcttcgctcttgattaccgctccacttaaaagttacttcacgatccatctccatagttcctgtgctcgaaatccttgtggaaccacatttgtaattaatagttggtgggagatgcggagtatcgacgagctctagatgttattgggatgttattatttgtgcattgagaagttaatcagttagtttgctcgtaccaattctgttattaatatagttctcgtttattagacaagaatttcataaatattgggtgatctttgataattatttatttaaggtgtcatttcttggtggtctcttttaagaagttcatggaagtaaaatgctagaaaaatcagtggcacaggtgttactattctctaattcgaattgcaaattgaagcagagctcaagtcactgcctgagatgcatttgtcacctccatcaccacctcctgcgccaaaactttctccaggtaaacattttttctgcttgtctaatgattcgttaatctgtgtccagtaatcccattcagaggcacaaaaaggaattggtacttcggctcatgcgccgtatgatttctcgcaaacttaatttgttaaactctgcaatgttctatccatttcgtgttgtatgaagataactgcagaagtacagattcaaacttaactgtatcagtttaaaaaaaaaacttaactctatggtaaaccaaatagtttggctactagttgctgcatcgagtccctctgttatgttcagttgcactgctctgcaacgttgtagctttccagtttgtcaacctgagtaatcgctgatcgatcatccattcaggtcatttgaacgctgcaatgtctttttggaatcgtcagtcatgtacttcgtgtgcacttgttaatctgctgtgcatgtctctgcagctgccgtcccaggaccagcgtcgtccccgaaggtg

SEQ ID NO: 15283 - DNA, 1031 bp, Brachypodium distachyon
  Intron number 4 from transcript Bradi3g34760.1 (locus Brad i3g34760) derived from phytozome v7.0 (chr-ID Bd3; pos 371 42100 to 37143130 reverse strand)
tttggatagcattccttgtgcttcaaatcaccaaggtgagaaatcaagaaaagatgtcgacctagtatactttatgttttcaataatcagttgctttgtttttttttcgaaaaggaggataactcccaatcagttgctttgtttagatatgtgaacttaacttttcatttcggtattcctttttataacatgatgctccacacttatgtgtttagttttccatatcctatccataagagtattgaataaccaactgaagctactgagaaatccatgtactccctccgtccaatattagttgtctcaaatttgttcaaatatggatgtatctgtgcctgaaaagcatctagatacatgtaatatttcgacaattaatatgggacggagagagtagttcattcaaatcgagagatgtgggccaaccacgcgcgtccttgatcttagtatcgtgtgttgagtctctgcaacattaatgtatctcaaccattgttagcagtaaaaccttgaaaatcagtgagaggcattggcaatgtgtaacgccctagcaatgagactggtaaatcggaatttaaaactgattggggtgcacaaattggttagtaagagttacagaaagagaaatgagtggctggaaatcgcttcggctatttttttaatcggatgaagaagaaaaaagtaagaagggtagtactttgcgacatgttgtttgccaaacataggtgatatttatttatttcccagttcaaatctgatgctttataattcagcttcactagatggatgtcttctactagagttgtccgatgaatgtaagatgttttacagagcaagtaattagtatagtaacataataatgatttagttaaagagaaattttctagtccttggttttagatcatagttttttagaacccccaaaatcatgatattaatagaattacatggtgacatcccgagaaattataacacaaacaataacatacgtctcatgttgattctttcatgcaggactacgtggcaacttgctccac

SEQ ID NO: 15284 - DNA, 919 bp, Brachypodium distachyon
  Intron number 1 from transcript Bradi3g34760.1 (locus Brad i3g34760) derived from phytozome v7.0 (chr-ID Bd3; pos 371 43907 to 37144825 reverse strand)
tccaaagagaggtactcctactatgaatggtatccttacatggtgataggcattttctccaatatcttcagtacaaggccctttgccctggccaaaaatgtactacatcgactaatgaggaactcgatcaatatcaacaaatacatatttgaactaggttcagaaagtaacctggtcgagagttctcataacccgccaacattagcaatgtttcaacaacgcaagctttatcagttttaccttaccatcttttcaaaaatgtgcacactgtagatattgaagtctttttttttttttctgaaacaaccagcctcctagctttttcttttacagtagctgatttcaattaaagaaaaaccaccaacataatagagagttccaaaagcaaagaaacgcaaaataaggttccagttgccaacctagctatacaatatagcaagcataactggcaaggaagattgtttttaggagagaacaaaagcagttgaaccagaacaaattggcagaacatagaccaacctgtagaacataagattcagcaatcacgccttctctagcaccttgagccccacttcgagttttctttgatttgactctctgcaaaattgtccaagcagtaatgtgattacgatgcctaaaacaagcatcatcgcctgatcaagctgacaagctatcagaaagaaagtggaaatgtttaaatggtttacagcttggattatgcactcacattagtatggattacgttgaagtgcaatttacacgttaaatatattccattgcttatgcttggatttattccaaacatttagcatcataaataaagtgaaaatagagaatgatccccaaaaaaaaccatgcgaatggtttgctagatttttgattgctctaaataattgagaagtgtactctctatgcaggc

SEQ ID NO: 15285 - DNA, 789 bp, Brachypodium distachyon
  Intron number 1 from transcript Bradi3g44770.1 (locus Brad i3g44770) derived from phytozome v7.0 (chr-ID Bd3; pos 467 34168 to 46734956)
tgcgcaatttcattctacacacccttcagcttcaggtactggttgcgccttgccggtttaggattatttatgtttttcttatattcatgtggcatatctgttatgataaatgttagtggggtattctgtattcagataatgtacaattgtacattaaccaatcgaagttctaacaagtaagctagtcatggttatcgagaaataacatgtgttgattatcttaagcatgttgcttgtagttgtatttggtacggcacatgattgtttgatgcatttggcaagtgtgaccaaaagtaaagaacatcacctaaattggattgcatgctcccagtcacatgtgcaaaagagactacctcagagtcactttatgttgttgtagaatctgtgcaaatcaaacattattaggtttgaccattgctatggaatctacaacaccaaattgatattactagatatatgcttctataatattgaagctgcatagtccgtagaaattgctggtcaaagttccaccttggagactgtgtcatcaatatctgaagcaacctatcttatgctttaaagggactattatcagaaaattagattgcatgctctctcaccccacataaaatctgtagtggcagtggtgaattgctactagtatttattctgtatatgtatcaggagcctcttaagaagttaatctcttctagaaataactgttacattggtacaattcatacaaccaccatgatctatactgttctgtatgacaccttgaatggactgcagagctgggagaagaca

SEQ ID NO: 15286 - DNA, 1028 bp, Brachypodium distachyon
  Intron number 2 from transcript Bradi3g32010.1 (locus Brad i3g32010) derived from phytozome v7.0 (chr-ID Bd3; pos 342 15164 to 34216191)
gctctgcgacaggctcggcgtccccaagctcccaggtaaggaagggggtgatacatgcggctttgttcttctgattagccactggacttgcaataaggatattttgtggaatgtaaatctggcccctaatctggatgggtgaatctcaacattgctgatatggagcggaggattccagtttagttacagaagttagactggctagaaaaaacctgaaactagcctgactagggaaataaactgaaggtggacactagtcaaagcctagaacatacagtttggtgttgttgctacacttctagcaaggattggtgatgttcaagggtggtggtgtcgattaagctgaagggattgctttagcttggtgttaattgtctcagtaggagaagggatgtagctggagggtaggctatagggagttttttagctatcacttgaaggtgttaattgacttagaagtagaagggattcacctgaagtagatcggagtggtgccaatgccatcggcctcatgggcccatgatgagctacctatcttgagctccaagtgtatattagcttgtataccttgtaacttgtaagtatggtaattagaggtttgatgattctggagctggggaatgatggtaagtcgcgataggtttctttcaccattcggtgatgaagggttagaagcaccccacttacatgtaccagtggagtcaattttgctaaggtgggtggttctagtttgagctcaacttaaatcactcttgaggcaagtatggaaatttgaaagataagctggtattcccttacacccgaagctttagtgtaagatgagttgtatgaagatctctaggataagatgattactgtgtaaaaactatatagctagaagtagaactgattagttaatttcagtaagcttgatttatgcacggaattttaagctgggccagatatgccccaaaggtgatggtagatgttcatttttgtctggctaaccttgtatattaaacttgcagggtgggttaatcgttttgcca

SEQ ID NO: 15287 - DNA, 798 bp, Brachypodium distachyon
  Intron number 1 from transcript Bradi3g37890.1 (locus Brad i3g37890) derived from phytozome v7.0 (chr-ID Bd3; pos 404 23986 to 40424783)
ggccactcctgcgactgcggccgcgtcttctcccggtccgtccctccaaatcacacttgattaattcttgcacctcctacgttaatttctttctcatcagttcattcttaattagtactgcaagcttggcgtattttgatgtatgctacgtacgtacatttcgtatccatcttttgctttcttttgcgagatttggcaaaatgtgggcagaaaggcgtcatgatttattgggagaatttgttgttgtttttcaccaccctgctgctggagtgctggggccactttgtcgtctctgactacactccctgtaggtgtagggccttcccagcatcttttttgtgtacatgttgtgtcatcaataaggggagatgggaagggacgagcagacaggcacaattcccgagggctgtactactgcgtgtgtgtgcatacagcatacgtacgttggttgctttcgcatttgtttctgccggggctccatttactgcacgttgctccctgtccgttcacagagaaatttcacacctgacagagaatcgcaaaacctcctgatcgcatcgatcgccatccctttggcttctctccgtcatgggtaggctttggtctctctcaaccctccgactagctccgtccattcttgagtcttgactagctccgtcttcttgatctggtctcttttgctgtacgctgaatgtaaattaacgcgcgctgtacgctgaaagtaacatggcatgagacatgacgcgtgtactcccgtttgtgtgctgcagggtggagagcttcatcgagcaccaggac

SEQ ID NO: 15288 - DNA, 855 bp, Brachypodium distachyon
  Intron number 1 from transcript Bradi3g08410.1 (locus Brad i3g08410) derived from phytozome v7.0 (chr-ID Bd3; pos 660 2718 to 6603572)
cggcggtctcggcttctcgtcctcggccggtggtggtgagtatctgagttatctcgtgaacccccctgttagatcgggagatctggtgttctgtgcttctagttcgcggttactattatgttgtttagttaggttgttcccttatagtcacgctttgatttggcttctggatcgaaagatatgtaagcgtgagatgcgatgctctcaatgacttgtatgtgattcagaagattttactttttcatgttaggcctgtttatgaagtctagatgtagatctactttagttacaagctatgcaggtagagtggcttactaatttgcaagcgcccgtggcatctcgtttattaacactttctgcttggttgattgcccaaagcaatttcttcttgtagacgaagctattagtatcgaaagttcagttctgctggtgctgctcttgtcatactcttccgtcctatgtttttgatgaagccattgttctagtgtggtgggagtgactaaagcaatgtcttctgtaaacgagtactctcatttcctggtcgttggatggagctaatgttatcatgtgttgaaccgtcatacaaaaatgaatggctacttcattcatgccctcccactgtactatagaccgagtccagtgccaaatatccctttctacttattctgttcatgttaggatgctcagttttgctctaatagttttgatcaactgtgaattttatgaatttgttcctagtgtgtattgaaaatggatccattgtcttgcttgtgcttgtctagaagcttgtcttctctcacttcacagatgtgcagctctcgctaatatcataaatggttgtttcgttttcagggc

SEQ ID NO: 15289 - DNA, 246 bp, Brachypodium distachyon
  Intron number 3 from transcript Bradi3g06090.1 (locus Brad i3g06090) derived from phytozome v7.0 (chr-ID Bd3; pos 437 6603 to 4376848)
aatacaggtatgacttcttctcatgaatgttaaattatatcgtttgacaatatcatgtaaagaaaacattacgtcgaacaactgtgtaaatacccttgtaaatggagatgctgttttgaattgcatggacactattcttcctttttgaaagatctccattcatttgtgtggataataataccagtttcgtatatttctgtttgctttgcagttttattttcaaagaggcaacagaattctatcaaa

SEQ ID NO: 15290 - DNA, 596 bp, Brachypodium distachyon
  Intron number 4 from transcript Bradi3g28720.1 (locus Brad i3g28720) derived from phytozome v7.0 (chr-ID Bd3; pos 301 49885 to 30150480)
cttgctgatcaactagtaagttttttttttctagaacatgtcaactacttcgtagtaagtttgttactctgaattggttggccagtggtgcccgcctggagttataactcaagttcatttgcttgactttgatctcagccatttcgtccaatatgtttgaaagttttgcaaagattttggaataaaaaaatcttacttggtggagttaattctgaagtgttagaacataattcatgaattgatgatggaaatcatgtgaaatccacaaactccactggagattaactttgcaggatttctctgtcaacctctctgaccacatattaacttaacatgaaagcaagaaattattgaataatcttctgtggaaaataatcatgataaaaagaaaacattggttagccgaacggcaaaataggcaaaagcttgttgcaaaacaggattatcataatcgacagaccatagtaacgcttaatgcaaccttaagttttctttttattgaggaatatgagcttaatgtaagtttttgtgagttttcatttggtgtaatcctgctttggttatcctttgttttttagataacccgagtggaatac

SEQ ID NO: 15291 - DNA, 513 bp, Brachypodium distachyon
  Intron number 1 from transcript Bradi2g47930.1 (locus Brad i2g47930) derived from phytozome v7.0 (chr-ID Bd2; pos 482 87142 to 48287654 reverse strand)
agcagctcctccaccaacagatctctaaatcagtaagcaaaatctccatatttggccatgtttgtgtgttaatcaccatgcttgtgtggtctagaagaagcatataaaatcagggggaatcatgataaatatatattctgttttgtctttggatactatatttgttattgccaaaactgaactcagaagggaattcatatttgggttcagttacaatttcagttcgtaagtttctgatccagtgaatgaaagttaattccttacaaataatcaaatcgtatatgagtttagtgttgtcttgatttaccttacttgaataaattgatggcaatgcacaatccgaattaagaaaatggtgaacttataagtaatttatgtacagtaatctttggagacaagtgaattgctttgtatgttgctatctttggagacaagtgcagttagtcataatttacctcattttaatcgtagcttctgtagttgcctcactactttgttgtaaatttcaggcca

SEQ ID NO: 15292 - DNA, 832 bp, Brachypodium distachyon
  Intron number 2 from transcript Bradi3g08900.1 (locus Brad i3g08900) derived from phytozome v7.0 (chr-ID Bd3; pos 701 2850 to 7013681 reverse strand)
caagcagctcaagtccgggctgctcctcatcactggtaatacacgttgcttcccgtgctatgacaatgtgaatcagtggatgtggttgtcttccctgatacgagactgtcactcattaggctaaatctgttgatcgatctatcgggttctgattgctgaactaagttgtaggttgacatatgctagttgtagattgttgcattttggttgctttactctagcttgctagttgctaagtctagtaagagaggaatcaaagaaaaaaattgacagtttactctggtgaattgtcaagtttccatagggaggtgattttagaattgcacaaaggatgttgcttttgttttcatggtttgttatatacttacattgtctgccatagtaaggaactaaggatgtccttgaattggtgtcgagaattccttagtggactctagaacgcgtgtgtaagttagcaatttgtctgtccggttggtattacatgacgtagaatcatgtaaatagcctgtggtgtttatatagaaagtcaattttgcatagatagcctttttcgttcaaggggcttcttttggactcttatttgataattcagattgggagttgtttcatgtgaatattttgctatgcagtacatacttaatttaagctttaaggtggatgttaagggtactaatgatggagaatttttggattttcaatgcacactatttaatttaagctttaaggtggatgatagccttttcttgttcttaatagttataatgttgtctaagttttagtgttgctattctcttcaggaccgttcaagatcaacggagtaccaatccgccgt

SEQ ID NO: 15293 - DNA, 690 bp, Brachypodium distachyon
  Intron number 2 from transcript Bradi3g17690.1 (locus Brad i3g17690) derived from phytozome v7.0 (chr-ID Bd3; pos 160 63028 to 16063717 reverse strand)
ttgccaatttacaagtggagctacaaggaagaaaggtgatggattgacagcttgttgcgaatcaattctcaaccatgccaattcttgttcaattttaattataccttttcagatcccgtgtcatattcatcactttgactgaagatatccgctttcatattcatcactttgctttcacatagtgaacacccttatcattccctagttgtggtgtcagaattccgaaatttattcagatattctaggtaaaactgggattaaatttgtttacatatcagatatgcatatgttggttattatgcagatcccttattccatttcatttttcatctctcggtagtggtaggtgctcaatgttcacacttaactatatatccataacctgatgtttgaagaataagtcaaaacgttcaactatacttaagtgcttaggctaaatcttttaactggttgaagtatcatgtaatttatgtttatgccctattaatatgtgattaataacaagtagatgtgctgatttatgttagatccatgactcataaagtgtggtattttcctcagtagaaaacacaatctgctatttgtcatttctaaatgattggatattcattataatgtcgttcaagggctcgtgactcgtgtctctatgttttctcattgaatatattgatgacttttggttatcgcagg

SEQ ID NO: 15294 - DNA, 848 bp, Brachypodium distachyon
  Intron number 2 from transcript Bradi3g39530.1 (locus Brad i3g39530) derived from phytozome v7.0 (chr-ID Bd3; pos 417 85091 to 41785938)
ctgcccctgccgcctcctcttatgtaagtagtatgttgtttatataccaaataaggcatagttcaagagtcaaaaaatctaaaggttctgttggcaccaagttgaggacttgaagtggatatatatcacaagaattgagaaagaaatcaatcaccaaaatttaggcatatatgaatagtggcaagttgactaattaattatgcctaaggtggggactacgatggtggcttagggcatgtacaatggagtgacgtcagccttctcttagcgatgccacataagataaaatctgacgtagaagagagagaaatgaagaaaagacataagccttttcttaattaagagatgatctcttcacaagaatgataaggcaaaaataaggcaaatttaccattgtactatatttcacgttttcttagcatttatttagttatatttattcatctaaacattaattttaagatagaacactaagagataacccattgtacaacatgtttttttgtcttttcaaattgacgtggaatgactaagataagacagtcttatcaaccattgtacatgttcttaggggcttaaacctttttctctgtgctagcaagctaggggtttgaacctcgaagagactgatatcatgcatatttctcaaaatagatggaaatgaccatttgatcaaatatgttggttttgtaatgttgtttttaaaggatttttttaaacctactgccatacaagtagaaccataactagtggtgtataccaacttaaaaatacttgcacattttatttgacaggttgtgttatatggaacagatcaggagcaggaatactacgggatcgaaatctac

SEQ ID NO: 15295 - DNA, 646 bp, Brachypodium distachyon
  Intron number 2 from transcript Bradi3g30550.1 (locus Brad i3g30550) derived from phytozome v7.0 (chr-ID Bd3; pos 327 03838 to 32704483)
cttgtaagtagctacgcttcagttgcttcttcgctcaattcggaatgcaggttgtgggattggtgattttctgtgattctcaggccatggttcggaaaatttgagggtgccataattggttcggctgttggatgcaattcttttttgcagggtacattgatgggcctcaatgatcagtttctacttgataattgatcagttttttcttccttttttttagatagagtttttggaccttcaacagctactgaggctgtctatgatgttgctgcccggcctgttgttaaaggtgctatggagggcataaatggtatggcatttttacttatttaggtcaattttcacatccctaatatttatttcaatataattaccacatgtcatgggacttccgcctatcaacatttaccctatgcccatatgtaatgtattgtcatgatttcacagtccgttccaaactatccgacctttaccaagtttttcttgtcactttgagcgatttgatttttaagggggactattgcagcattggcatttatttcgtccacagttcatgttttaccatgtttagcgaattgttaccttatcaaagtaactgcgtttctgaattcaactttgtactaacttgtaggtacggtttttgctt

SEQ ID NO: 15296 - DNA, 816 bp, Brachypodium distachyon
  Intron number 1 from transcript Bradi3g18970.1 (locus Brad i3g18970) derived from phytozome v7.0 (chr-ID Bd3; pos 175 34520 to 17535335 reverse strand)
ggcccgtcaggcacgctgcagtgcgatctctaccggtgcgttccgatgcttcttcaaccctcaaatatgctactgtattttatttattcaatatttgtgaattgcatactgtatgtgtattgcggctttgcggttgtctacttagtctgaattaattcaggaagtgaaatgatgtgcaaatttagcataatgcaattagtgcgatatacacccattttaaaactctttttggttgagttagttaatgtggtgtttgttcttcatccatattcacaatcacaagagatctcaatgccaccaaagttcattaggccattacaaggaaatcagtatagacggaaggatcagcatgcaacttggcacaagtacataataatgatggttaatgagcacacgaactgtgattaacagttcgccgctttgatttttttttttgaggttttatgttggataccatgttgagttgctgagttatgaagtggagcagtttgtgtgtttgattctacgagtgctggaaacaatcacatatattggcgaccattcgtaactatttctgatgtatggctaccatctcttcttttgacacgttttcatttcttgggaacttagcacctgtggtgatcttacgaaatatttcagggcatcactcaactatgcttgaattgtttacatttatttatactacttcacgtcctattagctgttgacgcaaacttcattaaaggtcattatactagattgatttgcattgccacagtttttgattacttgaaactcttgacaggccctttaggttgcctactattcttgttggag

SEQ ID NO: 15297 - DNA, 400 bp, Brachypodium distachyon; identical to SEQ ID NO: 14948
  Intron number 3 from transcript Bradi3g29740.1 (locus Brad i3g29740) derived from phytozome v7.0 (chr-ID Bd3; pos 317 85308 to 31785707)

SEQ ID NO: 15298 - DNA, 487 bp, Brachypodium distachyon
  Intron number 3 from transcript Bradi3g08080.1 (locus Brad i3g08080) derived from phytozome v7.0 (chr-ID Bd3; pos 628 3166 to 6283652)
ccgcggcgcagggaggcgatttggaggcctcacaggtgactcctctcatttcattctgtttagcaattattcttcctattgttcgataggtaagataaggctctgtagaaatgccatgttctttttaatccacaagtttgttttctcgtctcattattaatctacttgtcaacctgtttgttttgcaatttttgttgcgtgtggtaggtttatatcatagaaatggagaagctatgtgtaaataacatgatacttgactttaaaacctgtctgcaatgctttattgctatctgaacaaatagattgctatataatccaggtgaacagtaccctgcagcaatgttattttgattcaatatgtgttggaattcaggaatcattgtgaaaaaggctgctaccagttgttaagcttcatattgagtcagtgaattttgctactcttggtgatttagggacccagagtgattgttgtggggccgaccgattc

SEQ ID NO: 15299 - DNA, 588 bp, Brachypodium distachyon
  Intron number 1 from transcript Bradi3g44370.6 (locus Brad i3g44370) derived from phytozome v7.0 (chr-ID Bd3; pos 461 84355 to 46184942 reverse strand)
atccccgccggcggttgtcgccttgccgatatccggtgagctgccctttgattcttaattggtgttaaaattacgagtcctcttgtcgcgaaattgggctcttcttccttgattgtgaattcgggtatcagaggttttgctgcttctgggtgtttttcttctcttccaaaacagagctttccgttgaccgatttgtgcttgcctgttcattggaggtaaaaaacgcgggaagctttttactactgtagttcatatccgtggtaaatttgagttattgattcttactgctcgtaaaaacgcgagctagtttcttccgggttccatgctaaatagcttaactgaagtaattggcactgcactgctacctcgttaattttgagatcgatgcaccgtgtcctctttgcgttatactagtaattcgaatcgtcgtaagtctcaagtgtaatgcactaggagtttgtggagaaactgaagttttgaggcttgagtaatctgcctgattcttctactcggttcatcgattaattcgtgttgtttttccgtctcagagaagtcggaagcatcaaggcaacagagcactgagcaagg

SEQ ID NO: 15300 - DNA, 883 bp, Brachypodium distachyon
  Intron number 4 from transcript Bradi3g42850.1 (locus Brad i3g42850) derived from phytozome v7.0 (chr-ID Bd3; pos 442 55214 to 44256096 reverse strand)
gacaacattgagaaggtatgtattcgaatgaacatgctgtttccagaaataagcactgtctgagtgaggtttctcagttctctcaatctttttttcttcttctgaaatatgctttatttattctgtttaagtcaagtgtaaagccatcaacgcatctgtcgactatcagtctgtcatgtgcactttgttcaacatgggttcaatactgcaatataaacatgttatttgatatttttagcacatgttaacactgcaaatctcctttgatggttgaaagttaacttaatagtaacgtggcgcttggtgtagacctattactctgtgccagagtttatgcgcattcacatgcaaataagtacttttaaactaggccataaacatgtagtggtgagatttggtacaatttgaacaagcgactattagatcttgtaaaacctgtattgttcattcaagatacaccacttcctttcaaggaatgcatagtttaacacaactgccattgctctgtgatgtcatccgtgctactgtattctttcgctttatccaccgattttttatatgaatttattggatggctgtgtaacttttgttccagaagttttcactctgctagtaaattgcaatatcccggagcatatatgattagctgtagttatgcagaaatctaagtctagtgcctgatgaagttaccatttttgcaacaaaacaagctatgcgaagtgcaacttatagccagaaacatcatatcatttaattgaagtcgtcaattcaacagttatttattttattttttgtttgccatctttcatctaatcgagtttactctgactgtgctggacattgcttagatattggatcgtggtgagaagattgaactcttggt

SEQ ID NO: 15301 - DNA, 372 bp, Brachypodium distachyon
  Intron number 4 from transcript Bradi2g56070.1 (locus Brad i2g56070) derived from phytozome v7.0 (chr-ID Bd2; pos 544 91833 to 54492204)
atccacctatcaactctacctgtgccttagcagtatgttatgcttcccacatctgtactaataatgctcataagttttaaccttttttgtgtgtatgcaaggttattttagttcactgagatatacctaaggatcaatcattcttatatagagtattttgccttgtttgagtgcttaattcactcttctacctcaaattatgtagaccttttcaattctgtttttggttgtagatttagtttctgcattcatgtgaaatatgtttctttacaaaatgatcaaatacctgtattatattcacttactcaaatatgtaaaacttttttcttttgagcagttgttactgcagaaactgggaagttcctcttatct

SEQ ID NO: 15302 - DNA, 823 bp, Brachypodium distachyon; identical to SEQ ID NO: 14928
  Intron number 2 from transcript Bradi3g40390.4 (locus Brad i3g40390) derived from phytozome v7.0 (chr-ID Bd3; pos 425 91057 to 42591879 reverse strand)

SEQ ID NO: 15303 - DNA, 966 bp, Brachypodium distachyon
  Intron number 1 from transcript Bradi3g10610.1 (locus Brad i3g10610) derived from phytozome v7.0 (chr-ID Bd3; pos 880 2125 to 8803090)
agagggcctgcctcgaggtcggcaaagtcggcaaggtacgctagtgcagactctggtccaagcaatgaacttttttttccgatactgttgaatgattaattctgcattggaggttaaggctcgaatttaggcgttgaaaattttgttggagtctgatttctccacgtgtagtattaacttacgaggaatagaaaacgtggaacaaagttactgtcttttcagaagttcaaatttggctatcggctatcctatagctttcattcatgtacaagatcaatgcaataacgatgcagaaacaagttatgtccttatttctgttggatgtgatggcaatacactgctgcaggttttcttgccctggcatattgcaatcagacaatcatttctggcaaaaggacttttgcttccccagttagaattctgatgttaatgtgagatatcaatcacttcaccatagactgacataggttgtttttatgttctatggtgtgaactcgtcatgtgtagaatcttgaacatcattaccaattctgtcttcagtgcatcaatcttactagaaaataataaagcaagatgtttctatggtctatgttgttgctgaacttgtaaaatctttgatatcacaattccatggatttgaaatttggattaattcaaggatactgacattgtttttcagttcattattgtttggaccttatcatgtcatgcatgaggtccggtgggagggtgtgcgagtgggtatgcatgtatgatggataattagtgcctgttccaatttaaagagcaagtgctcctttatattaatttgataatggaaaaggctgtgttaactaacatgccagaataatctgttttgccttctaatttccggtgattaactagatctataccttttatgctaaacaaatgtatatcttacgtttatggtagttttgattattctgttcataatttgtgtaggct

SEQ ID NO: 15304 - DNA, 777 bp, Brachypodium distachyon
  Intron number 1 from transcript Bradi3g41270.1 (locus Brad i3g41270) derived from phytozome v7.0 (chr-ID Bd3; pos 432 18993 to 43219769)
tccagaagtccgaggagatcttcaacgccgccaaggtgccgcttcctccttctctctcccggtttggaaactccagtacctcgtctgagatatcgcctccttcggcttagcagttcgatgagcggggtttcaggcagtaatgttttgaatacagttgtgtgggttctcggccaattggaactggtctcgtgtagagattgggggcaaaatgagtgcaattcgtatctgtttttatgcgaatggaatccaatctgtgagattagaggtgaatttcaatgtgcgaggtctagatgagcaatgtgagattttagcaagtcgaaggtcaactgtgtgctcagactagattggtacatttagacagacatataggatagccacaacactgatgttcaaacacgaagctattttcgacagtacatggtccctcgcaactgtgcatatgttgattctgcaactgaattttacatcaatgtgttaaaaccgaaatgagaatataatgtgaaatggtcgccatacgtagctagactgaagaaatgcaaactggccagcgcattgaatggttctcttggtttggtcatgttctctagttggcatgtcgcgttgacagaatttgtgcaaccctgtttggatgcaaaacttgcattcttctgttatctgagatcctagtcgcatttgatgttcattgttgttgttgttgttgttattattattattattattattattattatctgttgtgagtgtttacttattgatgttttcactccacaggaattg

SEQ ID NO: 15305 - DNA, 1002 bp, Brachypodium distachyon
  Intron number 1 from transcript Bradi3g17940.1 (locus Brad i3g17940) derived from phytozome v7.0 (chr-ID Bd3; pos 163 23315 to 16324316)
gaaaggtatgacatgtggtttttattattttacttctttttttaatattattctatctatagactcatgtgcatattatgggatcggagggagtagtcattattaagatttttcatagttagaagaacacaaggttagtgacataaagtactagatgcaagttttgtgatatgcttctttcctttccttgagagtatgtagttgacataagggagttgatactggtgcggagcgcaaacgcgcacttgtttaagactgcctgtgcagaaattagatttcatgttgaaagtgttgcattttgtttcgttaaaagattaattaatctatgttcttctagtcctgactttcttgctgtaaatatttgctgtgcactgctatggtctttttctttgtcttgcttgataaatgataataccttatgtccttatcccacttgtttccttatctctgtataaacactttgttctttgacattgttttccaatcttaatgcttccctattctctttctatataagcaaatggtaagctgtgcatttttgttctagttatgggaaagacaattatggtagcttaggttcttacttaatctctcatttctgtgctaattgattgcttgatttctcaggtagcatgattgtgtaatttgttgcctatttggtttattttgcaagtcatggtattataacaagatactagaaggccattttctagttccggtaacgggaaggattcctgctgatcatatatgcaacacagtaaaaataattacattacaacctgcagctaatacattactagtcaaaatatagttcttctttgttacatgaatattacgaatgtttattgctttgaatcccctttgcaacatccgggatattatctagtttcatagagcaataagataccaaaaaggcaaagtaatttacttgtctttgccataaaaaataattatagtaccttttttcgtgctaagttgatttttcaatttatttcattgcag

SEQ ID NO: 15306 - DNA, 506 bp, Brachypodium distachyon
  Intron number 1 from transcript Bradi2g49700.1 (locus Brad i2g49700) derived from phytozome v7.0 (chr-ID Bd2; pos 497 43260 to 49743765 reverse strand)
gcttcggtttggattcggctgtttcttccgatcgggtaagccgctgttaacggttcttggtttcggattattaggaagagcagctccttttcgatttcgatacctgttgcgtcaaggagagtgcttgtgtgtggcgtgcaaacggaattcgaattctggggtttcccgattgcttcctgcctcggattcacgtctcttgctttggctccccctttcttccctgcatgtgatggttcttgcacgcctctgtttttcttttccgccctttatactttacctgcacggtttgccgtttgatcctatccttcttccgtttcaaaaccgtggctttgagtccgggggagacgttctcttgcattatctgaaaaataaaaacgtggctttgaccaatccgaagcgttgttttgttcacgtttggcgacttgagaattccagattgatttcagagtgtttgcttttgaattgattcaggtgtttgcgggtctgcaatctgacccggactacgc

SEQ ID NO: 15307 - DNA, 726 bp, Brachypodium distachyon
  Intron number 1 from transcript Bradi3g14320.1 (locus Brad i3g14320) derived from phytozome v7.0 (chr-ID Bd3; pos 127 58241 to 12758966)
agagttgaatcccccaaagaagtgaggaacaagaggtattcgatgcatgtgttggccgtaatcggccagtcactatagtattacccatctcccagatagtcccctctgttctgaaatataacatgttttggttttgtttaaataaagtaaaactttttgatgtttgacaaaattcctataactctaaattaattttattaaatgtgtcatggtatatattttcatagtatatttatttgatttttttagatttcggtatacatttttctataaatttgggtaaaacttgaagaagtttgagtttggacaaaggcagaacatcttatattttgcctttgcacagttttttctttcggttttcatttgctcgttgggctgttttcttttctatgtttttgggttgagttgtattgttactcttgcaccttcttggtgttttcttctaatgaaaatgatccacccttaagggtgggttcgaggaaaaaataattgtaatggaggtaaactaggtagtaactaatataataccaactgtgatatggagaaaaaaaaaacttggaagtggtgctatttatcctactatgtatttctacgctcctgaatagagaatttacctagctatctgtaaatttgatccgttcatggtgcctagctatgaatattgatttcatgagttatatcgctgtcgcaggatcttcagtagttcctggtatcaggaactagagt

SEQ ID NO: 15308 - DNA, 904 bp, Brachypodium distachyon
  Intron number 1 from transcript Bradi3g33340.1 (locus Brad i3g33340) derived from phytozome v7.0 (chr-ID Bd3; pos 357 04922 to 35705825 reverse strand)
ccgccggcaaccccgtgacgtccggcgccgcaatcgtgagtggttcggttctccacccttgaccccttgaaaaaaactcattggtgtgcatgtgtacagattgactaattagtgatgtgtatgtcgcagattcttaatgaccgatcgattagaactcaaattctcccagttagttctttttaggatctaattagttcacgagcggacgagcagtgcatcatttaagttctacaggaatactttgtcttgtcttctttctccggcaactatgggtttttttccttcaaaaatagtttaaaccccggtgtttccatcaccattgctaaaaagtgtgtcaagtcaatacaaaaacggtatgctccaactccctattatcggaaaaataaatacaaaaatagtgagcacgtaagaaaacccgatacgaaacatgcatcacataatttactgttaacacactatctgaataaaaggtgaataaatcctgagctgccatctccaatatatagatgaaaagaggcaactagaagtatatcacagatatgtatccgtcattgacttttctactttacatgaacaatcacgaatggtgatatttttcttctgaagttaagaattgtctactattgtttacatatatgtaggagacaattctcattacaatgtggcctatcacaccaaatgcaagcttgagattataattatcggttttagatagccagactctgattatctaccacggacaaatcacaatgagtcccaatcaattgcaacgaaagaatcatttaatttgtttatgctcgttagcataaccatacacacgtacatgcacatatacactcgtcagtatttttttttacataagtcgaatattttcaaattattcctgaaagccattaattttcag

SEQ ID NO: 15309 - DNA, 947 bp, Brachypodium distachyon
  Intron number 1 from transcript Bradi3g10150.1 (locus Brad i3g10150) derived from phytozome v7.0 (chr-ID Bd3; pos 829 3585 to 8294531)
ctggagatctgcgacaccctcaaccgcgaccctgggtgaggacgcaagcacaacgattctcctatctcttttctgcgttttcaattaattttactgttgtattggctacttctgttttaaaaacttccattttgcttttgcggctgacctttttttaattgggggcatgagttaatctctgttatgttgcgtattgaagaaactgcgtttgtaattaattttcaaaaataatactgtaatttcgatgacctccgggttcatgctgatttgggcacatggataaatgttcgtgatgggtctcgttctgaattatgctaggataacttttatatcagtaaaaacgtgcacaaaggtgtgtccactcaactccctctgggtttataggggacgttgtgggttttcagggttgtgaattttctgtggttaaggatttgaggcatgcaagtgtatctgtgaatcttgaatcgtgttatatacagctgttgagatttttggttgaaatctccggcctctacatcaaaatgatgtacacagccacatacaactgttgagatgtgatgttgttcacatcaaaatggaagttttgtgattggttttgcgttgaaaagcttcgttgaaagattcaatattcgcaagtcttgctatttaattttgttgttcacattttcaagtaattttaaatttatcaaactcttgatttagagattattatcaaaccatttaattaaacgtaagcccttttcagaacagaactgttgcatcgatgttagttctatttgagttttttccaaatcttcatcatagctagagttcctgcttaacttttagtcagctcagcatttctacaaagtacttccgatgtgctgttatcagtttgttctaaatatctttgtgttgttattatattcataggaaagccaaagacgctgtgaagtctctgaaaaaac

SEQ ID NO: 15310 - DNA, 630 bp, Brachypodium distachyon
  Intron number 1 from transcript Bradi2g49590.1 (locus Brad i2g49590) derived from phytozome v7.0 (chr-ID Bd2; pos 496 37814 to 49638443 reverse strand)
agactctcgaggataccagtccaatccctgaagtgagatgctcctactgcgtgtagattcggtacaattatgccgcctttttgtcatagtgaagcgagtatttgcctatttggttttaacttagaattggtttctggctgctgacttgtgtaatctatcttgcgttgaacttatttttataatctgccgattgtaaatagccacgaaagcaaaataagagtcatcagctaaaaggtaaaatatgcaaaagctgtctattggattttcataatccactgcaatgcacagccttgcagtgagaatttttaaggctaagtgggttgttagttgggacttcttctttttaggttacttggtagattttgattggattgtcaaggacatgtggattggggaagtgctaggagggccctatttcctcagccttaggtttggatcttctgtgttttagctcgcagactgcagtcatgtccagtttgttttacctccaaatgtgttatatagcttgccccaaatgtgttagcttgcatattgcctccaatcgacccaaatgttttttctgggggtttaatctttgtatatttgttgtatacaggtccaggtgagcaattcgccaaagtatagagttga

SEQ ID NO: 15311 - DNA, 1038 bp, Brachypodium distachyon
  Intron number 1 from transcript Bradi3g06530.1 (locus Brad i3g06530) derived from phytozome v7.0 (chr-ID Bd3; pos 472 0985 to 4722022 reverse strand)
aaggcccgtgaggccggccgccgcaaccgccgcaggtaaaacctcgccatatttgacgctgcctttctcttcatccatgctataggaagattggacctgtgggcttactctcatgagcctcggttgaagggaccatgagccatttttgggtgtagtagaagcagaacacacaaatgtaatatgttgtgcaacatgcagaatttagccatgttttcattttatagtgttacaaacatataagtagccgtgccacgaaaatttagggcctctttgatttgcgggatttcaaaatcgcaggagtaggaaaaacataggatttgaatgtcatggcatgttgaatcctatggaaattcaaaatacaggaatgtgtagtagaagttgtttgattgcatcacagaaaaaatgtatgatttgcttaaaagattatgtgatactcattgttgtcagagagacaaaggaaattttccatgagattggacctcatggaaatttttctttggaattgcatgcaaactagtccataggaattattcccgtggtttcaaatcctgtaaatcaaacgagttataaagtaaaaattccttaggaataaaacccttcaaatttcctatgaaattcctttgaatcaaaggagcccttagcaggcaagacggcaggaagcccaggatttcatattgcggacctctatttctgtcgagtgttgacaatgaaaaagaagttttgggttcagttagacagtgtttctgatgccaggcggatttgggtttgttcattgctgatggaaacttgcgcagggagagacacagagagcagttgcattaggattgcattggccatcagaatagtttcgttactgttgtactataatccttaggaaccaaaggcttgccatggatgaaaaaccaggtcgactgatctgcgttaaaatactacaatcttcaactttcagacattatttttatgggtgacatgtagttttaaacttccttttttattgatccgcttataaactgtgcatgtcaaaatttctgtaggcgt

SEQ ID NO: 15312 - DNA, 962 bp, Brachypodium distachyon
  Intron number 1 from transcript Bradi3g32460.1 (locus Brad i3g32460) derived from phytozome v7.0 (chr-ID Bd3; pos 348 07089 to 34808050 reverse strand)
ttatacatatccatttacaagtttctgtgctgcaggtaatagcatctgcagttaaaactaaatcttactccctccgatccaaaataagcgtgtcagtttgaactaagcctagttcaagactgcaattttgcatcttattttggatcggaggtaggagttgtttttgataatttgttttccggagtgttgcttggactagcaatttaaataccatcatgttagttttttctttggctgcttgatcaaatactacttctgtattcttcagaataacacaactcaatcataatgttgctcacttgcttgtctatttttatgtagaattaatatttgcgtaggtgtagtactggtacagatcatttcggcatgcatttggaaagtggtatgaactatgtaagcagctaatctttattggttgaaaatgtatgatgttgtaactgaacaagataacataagacctgcattgcgactctctcaaaagtctcagatctcaacatgaagacactggaacccaaatgggcactcctaaccatctaaatcgtgtataatgtaggtcgtctgttctataaatatttatcagctaacaatcacacaaacgcgacaagttttgaattgttcactaacccagctcttggcagcaattagtggaacgaaaggctctcttagcctgaatacgaaactgcagatttttaactatctaagttattacaaatggggtctgcattcaaaacggaggtatcaaacaatatttgtcagccaaaattccacacatacacaccacaggtgttgcattatccaataatcctgctcatagcagcaattagtggaacaagacgatcagaacaaaatgctctcttagcctgaatacagaacaacagattattacaaataatgcactgcaattacatggctgaatatgaattgcaggcaacactctcgggcgccgtttcactctttgtaaa

SEQ ID NO: 15313 - DNA, 826 bp, Brachypodium distachyon
  Intron number 1 from transcript Bradi2g44890.1 (locus Brad i2g44890) derived from phytozome v7.0 (chr-ID Bd2; pos 452 82718 to 45283543 reverse strand)
gacggcgacttctacggccgctacgtgcaatacaggttggcgatcaattgcttgcttacatgttttttctttcattttttttggaaaaacaaattctactccatattcggatatgtccaggttctgacggtttattatagggagttggtacttactgtatcatactagcagttagtattatttttggaattttcaatttttacaaggtaggattgatctttcagctgtgggaatgaattctttgattaagcgtttcgctgtttagttcgtactaattgttttctgattattgcatagaatttttgtcgggtcaactgtttgtttcttcgtttgttttgtggcgccgtcggtactctgcttgtttgtttcccctcctgtgattagcgttcgtgcaattacaaacacgtcacatcaacgcgcaacaacattaacaaagcaccaccagcattcctcgccccgaatgtagaattcaccggggaatttagcatagacaacgttgcttaagacttgttctttttattttgtagacaggggacccatgcacagaaacaacggattttttttcaccaaaatttgtgcgtgccaattgctgttcaaatgagactgcggcttgtcctaaaactgaaacagcacccattcctggtataggttcagtagccagtacaactgctatccaaaaccctgaattcagaatcctgtcttatgtaaacagagtatccgtttcgaaagaaaaaaacagagttcgacgtttggggagaaaaataatttctcttgttctcgaatgcatgcaggtacgccatcggggtcaacgtgatcgtctgcgtct

SEQ ID NO: 15314 - DNA, 998 bp, Brachypodium distachyon
  Intron number 1 from transcript Bradi2g46750.1 (locus Brad i2g46750) derived from phytozome v7.0 (chr-ID Bd2; pos 471 91146 to 47192143 reverse strand)
cctccctcgcctccgtctccggcttcagcctcctcgtccgtacaccactcgaaacttatcccgtcctttccgatcgtgtccgcatatgtttctttgctgtttgcggtctcccttttttagccccctccttcatttttgcatgccgtgcattcctcgatcgtctctggtcgtctagttcgatttggccacggtcgtcttttgtgttcttggcttgtcgagatcgctcccggcccggaaagagcccttccgattccccatcttgaaaaacaaacatgaaaaccaaaaggttcacaacttcttttcttttctttttttgatcgggtcacaacttcttttctttaataacattgaggctcacgagttctttattgctctggtttttaggactgtagggtggttgaccttgttacggttagatactaatcatactcggtggccacgtgactttgcgactgaagtggtgggtgccatcttatttctgattgatctactagtactagtagtctgctaagggcactgtgacaccgcaggaaaaatatgcatcaagtcgcagtcaattttgaggaatcgttcaaactagtactccgtatctctttctgtaactcattttacacaactttgtcagattacattccttccattacttaaaggttgtttacttggaagttagtttatggcactccctccaaaggtcgttttcctttgtgtgatcacgcgattagcggtatgaccataccatgagagagttgattttcaggcgacctatcagcgtctctgattttagtcagtcaactgtcatatttttactgaagtattaacatcgacgtcccgctgacatgagcttgcttaattttcacagtagatcccaaatagaaactttcaaactgtgctgggccatggagtacgaggatactgaaactatattccatttcggcgattttcacccagcaatcaacaccaaaacactgaatcataatttgtgaaaaacacagatcggg

SEQ ID NO: 15315 - DNA, 566 bp, Brachypodium distachyon
  Intron number 2 from transcript Bradi3g36170.1 (locus Brad i3g36170) derived from phytozome v7.0 (chr-ID Bd3; pos 384 07767 to 38408332)
gcctgatcggccaccccgtgctagtgagtacaatttttttccccgcatgtttgctttaggaatgttaagtttctctctccggtattttgggtcttgttgaagaacttggtggtgagtgacggggcctccattccttccgaacagtgtggacatatttccggcatggcctatagtcgctaacttttcttacagctgaactttcagatgctgctcataataaggacatgaatgaaacacacaaaaaaagtggtaaataaattgaaatcgggaagtatttagaaggtaataagtacagctatgaggcagtgagcactgggcttattaggagagggtctaatctttgtccacaatcattggatggatagttataaaactgaattaaaaaagtctttcagaaaactgtattaaattttaggacgtcacagatgaagattatccatcctaactagtgctttcttatattagtatagagatagtttatgttaatttcatgtaaattatattttccatgaaagaatttagtgatttacgcaaactttaattatgaatatagcctacaggggaga

SEQ ID NO: 15316 - DNA, 944 bp, Brachypodium distachyon
  Intron number 1 from transcript Bradi3g04200.1 (locus Brad i3g04200) derived from phytozome v7.0 (chr-ID Bd3; pos 287 6129 to 2877072 reverse strand)
tttgaggccgtatcaaagtccatcccgtatctgttgaatgagtctatcccctttgttctttttaactcaacgtccccagcaatccacaacaccataggcaacatggcaaaaccaaaaaagaatatatttgataactagagttagtatttgaccaggatatgtttgaaacattatgtagttttttcccaaaagaaacaaataatttcccaaaaaagatgttatacaatgcaacactgaagataaaagttcagcaatccaagaaacctgcagtagacaatttgtaaaccgcacacactgcaggagaccatgactgcaactttttgaagaatatatggccttctcagaataatctttccatgtactatcctgtccaccaaaggatgcatcatgaaatgatatttattttcagtattagtgggaagatgtaagagttatttaattaatgaagctggtaagagaagtggtgtcaggttaagtaaattaaggaatgctgcatgaaataggtaaggattgagtcaacggtgtctctgaaagcaattttaaggctagcaattgacttttcagaagattatagcagacatacaatagtgacactcaaacgtcagtatgaactaggaagctgctggtggactggtggcagttctgtaaaatttaactttgttagccacaattttcctttgtggtggctacgactacaagagataaaacaaaatggcagcaagatatgacttagtcaagcattgatgctttatccagtcagggcacaactcaagctcgagtttccatgttagtttcaccagaaaaccttgcagacactccatttttccatccagacagaccacaagaaattgagcatgccttcccttggcctcgttcttgtgctgctgatctcctttgcctctcgtacagttcctgcacaccacaggagaagggtttccttctcc

SEQ ID NO: 15317 - DNA, 366 bp, Brachypodium distachyon
  Intron number 2 from transcript Bradi3g25600.1 (locus Brad i3g25600) derived from phytozome v7.0 (chr-ID Bd3; pos 259 12352 to 25912717 reverse strand)
accactctcacagccggggtcatcgccaacagattgtaagttaattcctaacactagccggtttaccggtgtagagtatatccaataagcattacttgattcaatctcttctatcatgcctggatgcatgcatgcatgcatgcatgcatgcatgaaccactgctcacagttcaaacttcagatctgtgatgtttgatggggatcgaatccgatccaacatgcatgtcatccggtgcatccttgcatgatcaaataactggaaaatggtctaatgtctttgcgtaattgtatgtatttctcatcaatccaatggagggagtaatattgtttattttgttttgtggattttttttccagggccatttc

SEQ ID NO: 15318 - DNA, 567 bp, Brachypodium distachyon
  Intron number 1 from transcript Bradi3g13790.1 (locus Brad i3g13790) derived from phytozome v7.0 (chr-ID Bd3; pos 123 13162 to 12313728)
tcttccagccctacggcaccgtcctctcggtcgaggtaacacacaggcgcacacacactcccacactctttcctgcattgccgaattcgtactgttgcagaagagtattgttatccctgaagaattgctatgctctgctctaggttcttgtttcttgtttccacgtctagaaaatccctgccggcagctcttgccgtgcgtttacgcttccgtgatactagtactatcttactcaaaagtcaaaaccatgggttatcatgaggggtttagataaaataaaatgcctcggcacattatttttgctactattggagcgacacatgaacttggtgccatttagctagtgtttgctggattggtgacctggttcagttctgtgtaaaattccattttccattttctgccttgtatgtatacttacctgtctaaagacatgacggagtcaaaatccttggggcaatactatttcgctgcttccgattaagactacagaggcgtggttatgatgttaatatttgaagcccgcatgcaggtttcacgcgaccctgagaccggaattagtcgagg

SEQ ID NO: 15319 - DNA, 1056 bp, Brachypodium distachyon
  Intron number 1 from transcript Bradi2g59340.1 (locus Brad i2g59340) derived from phytozome v7.0 (chr-ID Bd2; pos 570 74641 to 57075696 reverse strand)
cccgctccgccgaagccttccagaagctcgagaaggtgagcaagcaaggaagctctctggtggcttctctgattctctgctgttgctgctgctgttgcctgcctcccgccgcctaacgcgtccggccttctttggtgggtgccggagaaagttttggctttctattgaaaacctcgaagcggttggcggggttggggaaagctttctctggtttcgttttcgatttctatgcgtggtttggtccctgattttattcctgatttgctaaaaaaggaggtactctgcggaatctgataactttgcaatttgagttcttgctgatattttgtttttcaaagataaaaaaaatctcaatcttagtgtctttgcgagttgccaaggagtaacgaacaagggtgagaggacaaaaagtaatcattgatgatgcgtcttcccacactccagttcaacacataaacaaagctccgaattccaagggtcgagccgctttaaagaaaacatagatgaacacatcccaagctttcatggagttttaagaaaccaacaacttcgctttcctccatcttttcttgttagtactgtcggcatcacaagaataatccgtaattgggaagggaaagaaaacggcaaagtcaacttgcactattcgtagtatttgctagagtgcttgtttaattgttatggttatcctcgccccttcaaagaaaaaaaaagagtcgaagaagaattccattctatactatttgctcatcttctattcttgattcggaaatccgggtgaaatagtcagcaaggattcctacagttatttttaaaaagaagctgagaaactaagctaatctatccatgatatgattgaagctgagaataaggcttaattctttatggctctacggacaagcatgtcatggcatagtcagtgagttttgaagggggaaaacagaactatcaaaatttctggggaaacaatttgcaaagctgtaatcaattaagcaatttgtggtggtgtggatggatgcagattgggtcggggacgtacagcaacgtgtacaaggc

SEQ ID NO: 15320 - DNA, 696 bp, Brachypodium distachyon
  Intron number 3 from transcript Bradi2g61010.1 (locus Brad i2g61010) derived from phytozome v7.0 (chr-ID Bd2; pos 582 10019 to 58210714)
tcgaaaggtttttcacatcccaaaagagtggaaaggtatgctatctattatgatgctgaaagctagttgttactttgtaatttgtagacctgttttcaattctgacaaaaatcaaaactttacatatgacaccagatcttcctctgtattgtgaatttccgttgattgcattgcaacttgcatagttaaccttaatactaaaaacaattctatatcaattgatgatctccattcaagttagttagattgtgccagttgtcatgaaaattatatggttcatggaattgaaatgtgactcaaagatttcgtggtagctgcttattccaaagtgcgaaatcttactgatgattttcgtttgtctgtctcggattccctaattttattgtacagttgttcaagagtttatggttgggtatggttattccatatcttcttaatcacacagatctaacttgcttatggagtgtataattttcctgttcttttcattataatatgtatgtatgtgctgtctccttttatgctaattatggcatgttgtgaactttgttctttttccacatgcataatattgttgtctaatgttcacatggatgcagcacttatgttatcatatcacatgtccattccattttaaacaattctgagctgattgtaataggtcggaggatcttgttgcactttgaagctgttgac

SEQ ID NO: 15321 - DNA, 1018 bp, Brachypodium distachyon
  Intron number 2 from transcript Bradi3g29900.1 (locus Brad i3g29900) derived from phytozome v7.0 (chr-ID Bd3; pos 319 48735 to 31949752 reverse strand)
cgccgggccagaggattcctcgcaggcgctgccaggtttctagcctcctcccctctctacggccttgaatcgctgggctgtgccattgcctcatttggggtactagtatcagcatgtgctggttgcaacattgcattgggatggcaatggcatgtagtttgacgaaatgtgaaatttatggaccacggcgaattcctttgaacctgcagtgttgctggtgctaatactctgccagttagatgatttttgataatcagatgacgcagtaatcaaactattgtgccaacccttcatttcactatagaccagaagataggatttcaacttccattcattcggtttaactactttgatggattgttggcttataatagttgtttctacctgcatgaaagatttctttacaataactaggttaatttcagagggagaactggtagctgttaagccaacagaaactttaatgactgccaagggcatctccaagtgattgtggacatgtggggaggaaatgggtgtactccatggagatgccccaatgcccgcgttgtgttccatgaaatttaagtccctatttactactccctccatttctacatagttgtacgtttaggtttgttttaagtcaaatttagtgaagttttactagaaatatatcaatatttacgatactaaatgaatacaatatgaacacatattttcatgacggatgcaatgaaattaatttggtgttgtaaatattggtatatttttctataaagtacttagagaagtttgacttaggacatacctagagatggagggagtacaatatttgctgtattataaaatcatgactctgtatggtacagttattgtgtgggtaaaaatgaaattatgtaaattgacaaactgaaaagattttttctaataacaaaatgcaagagattcatgtcagatgcggagctggatttcgttgtgctcacttctagttatttaaccagacctgcagctggtttcaaggatcagaggtgtcttc

SEQ ID NO: 15322 - DNA, 947 bp, Brachypodium distachyon
  Intron number 2 from transcript Bradi2g50130.1 (locus Brad i2g50130) derived from phytozome v7.0 (chr-ID Bd2; pos 500 59139 to 50060085)
cccggctcgcacggggtttggctggctgtcagaaggtgatttcccttgtatttatgtttttcttctgtttctgcaatgatttttttagcacaactgtttctgcaatgttagatgacttcagttatgaagcatatttgtttgtggctatggagtatggactgcagagtagatttgtttgtgagtactaatcaggccgatgtacaggtcgagtgctgagtgataataggatttagctgtgtattaagtgcgcatttaagcatgtctcattatttgtcgccaagtgaacacaataactcaaatgagttcgttgtctgcccaggccagaatgctattctgttctgttcgtatgttatttgagctctcacattgtgtgaaaccccaatctaattttgcctcctgcacctaagtttcggcccaacttgaacaatgagcccccattgcctctgaacagactaccaagcaaattagtaaaagctgggtgcatatcagtctccaactctccacccatttgtatgtgtcatacatctttgccagaaccaacatgtttttcatggattttatttatgtgttgttttaatccttattgtcaactcctctagatctgataggaagaaaagcccatttttatgcatccgtgtttacaaggatactcatcgttggcaatattctagttatacaaacagtttgaaacatttcaaatgaacctaaagcttaattgcactagactggctagtgttacatctcatgcaggtcttacatttcttgaccttatttctgaagtgtctcatatccatcatgtataattatatttagggagagttttgtcagacttatataaatgttgtcgatttttctctagataaaaatagaaatcatcatgaaatttcccgattgaaaccagtcttatacttccacgtggtccttgttgtaggtcaagacaaaactag

SEQ ID NO: 15323 - DNA, 530 bp, Brachypodium distachyon
  Intron number 2 from transcript Bradi3g18290.1 (locus Brad i3g18290) derived from phytozome v7.0 (chr-ID Bd3; pos 167 05447 to 16705976)
gaagagaggtactacaaatgctagtttcctcttcctatgaaatgcactattcttttcccacaaagcatgctggtattgttagcagtaggattgcaaagttaactggaaagcttgttgagccatttatgtttctgtgatattgcctgaaatttatccaaatatttgaatttcctgtcctccgttgttacttgaacttttattggaaattaactataagagcagggaaaatgatctgaaagggtgcatgctacaaaaactgctgaattccttttgtgccaacgctcaaatatgttgttgatgaagtcatgatttttctaccaattcctcaaaggatcaacttcagactttcatcctaatgaagaaaattagggatggtctaatcctatcttatctgtaccataactgtagattattcttttttttgtttgtaaacgcacaagctctctgtttctgtttgaactgacattttctgtatgtgcatacgttgtcgctttttaggttgacacttgttagtggactgaagtgggtgg

SEQ ID NO: 15324 - DNA, 1009 bp, Brachypodium distachyon
  Intron number 1 from transcript Bradi3g15360.1 (locus Brad i3g15360) derived from phytozome v7.0 (chr-ID Bd3; pos 136 99171 to 13700179 reverse strand)
tctgagcgagctacaggatacagactttccttgtggtatgttactcttttttttgatgtgtcatgctttagttaccttttagcttgatttttcccatttgcctgcgcaggctagtcatgttaaagttttagcagtttgtaaattttgtactgtctcgggttctgtttgcattgccatggagtgttgaaccgcgtttgcatatttggctacctacttttgtcgaagtcgctacacttcgagtttaggataacttttggctaacaaacatgtaaaagggaaagagagatattcatgtgcttgtatttaaaaaaatgtctgaacaagcatgtgatcaactgcaaaacgacacttattgttgtctgcttgcttatgaagatttggatgcttatcaacttaagatgtcacatatgtattaagcattcaaacttccctggccactagagattttaattaaggaacttgctaataatgtcacaatttcaacaactgagggcatgccctccagccagtatggtcagaatggtctactggtgttcgcatggtcctcttccttttcaaggttaagcacagtttgtcaggcaatcatgctgatcttagaagctaagttacaccattcttatccagctctagaatctagatgtttgttggcaatctacaattagattacacgtaagattcttttgcatgataatataagcaaggggacgaattagaatataaatgtttaaatcttagatcctgcataatggatctttaagtttttttgttagtgccctccagattaaggattagatctagtatttttttttctcttatctaagctagaatggggatgtttggaccttttgtcatcaggtatgagtcacatgttgtgctttattttagtgattctcttgtttgccggtttagtgtaaattcagggtgcaagcagcagctttcttcatgataagttatgtatgttatcttttctgcatattctgactaaactatgcataatttatgcatagac

SEQ ID NO: 15325 - DNA, 891 bp, Brachypodium distachyon
  Intron number 2 from transcript Bradi3g06940.1 (locus Brad i3g06940) derived from phytozome v7.0 (chr-ID Bd3; pos 512 4625 to 5125515)
caccaaatttttcaggttataggccaacttaaaatgaactgcaactggtaacctttattctgcatagctattattttattgaaactttacttttattcatggaagaatgtcttgttgctaacaaatgggttaagcaagattatgtacaggttctccctaatccaagcttaacaacttctactggagtaaaattggaatgtgcatggttgtgcaaaaccactttgaatctgtgaaagctcaactacagtataatgatatttaactgcttttctgatgaacaaccagtcagtaatattgcgatgcagcctcatctgataatattgagaacagaagattgaatatatgacctgggaatttgaaacttgaaattctaccacctataccctatactgtttaattgtttattcttatatttgttacatgcaggcacaatttaactgtccatcagcagttgtttgttatcacaagcttgtgatttttacctgtgaggcagcaatgaaattaatgcttataatctagaacaattattactgacagacattattaagttcaagatttgaaatgtagtttagttccattgtattgcagaatgtgttgttattatagaacatttcttcagtccattatgatagtagaccagattgcatcttatgttcaccaaattcaccctagaatattttttgttcttcagatgctattgaaacttgtagttacattctctagacttttagcttccttttcacatgtctgatcttgtgagttctgcgcatgtaattacttgttgtgttggtcttcaattaggacaacttatattgttaattcagttgcttacccacatgatattctcgctgtgcagtaccgctggttgcccctttggtgagggttgccatt

SEQ ID NO: 15326 - DNA, 940 bp, Brachypodium distachyon
  Intron number 3 from transcript Bradi3g10690.1 (locus Brad i3g10690) derived from phytozome v7.0 (chr-ID Bd3; pos 889 9467 to 8900406)
gcgaggaagctggaccagggcatcctggttataaggttaggttcctgtggaatgttaccctgttttcatatatggtgatcttccatgacatgccgacatgaagctaaaaatgtattccctccgttccataattcttatcgaaatattacatgtatctagatgccttttaggaatagatacatccatttttgggcaaatttgagacaagaattatggaacggagggagtatatgctaaacttaagctcttttgtctatggaggattaatgtgtggatggctggggctgggattcttgagcagtagagtgtagcgagttatattggttgacagggttgtaagatgttggcatacagattgcacgttgccaattatgctgtcgtagattataggggggatagctaaagagtttatgtgactaaacattttagtccatgcttcggtaatttacagatggtgcaactgtgtacattataacatcttatgttaccgactgtactgatgtgatagagcgactgtactgatttgatagatacatctcaaacatacctgcaatcttgcaattcattataatttgtttcatggtcataaaccaattagtcaaacaacggatgttgacaattgtgcaacaccttttgaatatggcttatgttctggtttacttgattggcctcgcgaattgatgggcacaggcagccctgattttatacaggaccatgtatgaagtcattctatcaagtgcggcatatattatctgtatattttttttcttgaaatagatataccagtgtatgatagagtgattattcatttgatacattccaatgtttttgttagcttaatgcctatttttgcatggtactaggattttttttttgccgaagtgtatctaaccttgactcaattggcttgttttgtgatgttctgttcttcagatttgag

SEQ ID NO: 15327 - DNA, 836 bp, Brachypodium distachyon
  Intron number 2 from transcript Bradi3g15430.1 (locus Brad i3g15430) derived from phytozome v7.0 (chr-ID Bd3; pos 137 52320 to 13753155 reverse strand)
ctttcacgttgttgaaatcaagctcggaagctcaggtctgtaaatatattattttgctgtggttatggttgagctctttcagtggcaatgatcatctacgtatgctgctaactttgtttatctcgtaataatatttttgtaactgtccttcggaagagatgccatccaaacgacatgtatctaaattctgaactgaatgcacagtcatcactgaagatctgttcagttgatgtatgttctacagtcatcaaccaattatgatcttatgacatgtcttcgataactctagtagcatgcatgcttctgctaaatacggtttcatctgaaaccgtgaaacccgcaagtcactatttgtactagtttgactgcgatgattggaagtattgaagaaaaattgaactaaactaggattcgacagtttccacggtttgtattagaatcagatttgaaacccctacttttaatttattatgagtgtactgtagtgctaatgaatcctttatggcagtatttttattttattttagctattccagaagcatggcacccaatatttacacaatgtctgtttagatggttgataattggtttgaggcagttaatttatgtatgttgtatagcaacatttaattcaacttgcttttctctgggtttccagaagcatggcacccgagctttgcataatttatgttaggcaattggtttttggcagtcgattgtatgtggtattgcaagatttaattcaatttgattggctctggtggctcatgtttcactaatattgtttttcttaatctccagagtgtcgttgcctcccttgcatcagataagaacgt

SEQ ID NO: 15328 - DNA, 578 bp, Brachypodium distachyon
  Intron number 1 from transcript Bradi2g47150.1 (locus Brad i2g47150) derived from phytozome v7.0 (chr-ID Bd2; pos 475 00369 to 47500946 reverse strand)
cacagagaggtgcgccgatggcttctttcctttgatcctttctgctccttggcgactccggtccttgtttggatctgttcgtgctcacagtttgttcatttccaaggattgcttgttctttgcggtagtttaatttcgctttactaatcttatttctcatgtctggccgtttctgtgcctttctttactcctttttgtctgttattgattgtcttttcacgtttttttttcgatttttctggccatttcaaagcgtcgatcttttatttcagtttcacatttacggacgctcttgaaatttcgatctttgctgttttatttcacccttttgtcctgacaaccagctgtcttcaatgccagtcataattagctctttaaacatccgtaacagtactccgctgcgtttgatgatgttattattatctcttcaagttcgtgccaatactgaagtctctccttgtgcaagtggaatctattgccatgttctgccagccacacacaaacacagatgagctttcaagctgacacgagtacgtttctcacatcttcagaggccgtgcttgtctcgaagatcggcc

SEQ ID NO: 15329 - DNA, 466 bp, Brachypodium distachyon
  Intron number 3 from transcript Bradi3g08030.1 (locus Brad i3g08030) derived from phytozome v7.0 (chr-ID Bd3; pos 622 6570 to 6227035)
tgttaaaggcaaaaattcttgtggtagaggtatttcctattataaatttatttacagtacatttgttgttattgctagtttgctagtactatgcagcctgagaaaagtgtgaatgtttctttgaagcctgtatcaatgtctaaccaactttttcagtgtattaaaagtagcaagcggtgcttctcttcaagtatctatacatcattaaatctcactgtttgctgactaccattattttgaactattttgaaacagaactttccatgcctatcaaaaaatctaaacttattctgacaccagttagcagcaattagttgagtcatcatgatggttaaaagcattcgcttcttgtgctgaaagttcttttgatatttttcctctcatgagttacgacttattcctatatttgggtgtgtttaataagttcactgagctgtattttataaatttcagagtacctttcttg

SEQ ID NO: 15330 - DNA, 854 bp, Brachypodium distachyon
  Intron number 1 from transcript Bradi3g20960.1 (locus Brad i3g20960) derived from phytozome v7.0 (chr-ID Bd3; pos 199 56247 to 19957100 reverse strand)
gacacgtggaggtaaagatctatttgactccccaaatagtaggatgcatgtgtgtgcagaaggaaagaacagattttaaataggtggtggtctgtgccgtgtggtttggtcgcggccggatgtactcaccaacatgtggccttgtaatgaccgttggtccttctcatcaaaataatatggtaggaaaaaagtgattggtagcagtataaaaatttctaaatatagtgataatcgtatcatctaactagtcttagtatttttatgttcactagacaaagttagagaattttgattaccccattttgtaaaacataatttattcattcggcagtgaagctagaattttcttataccgatgcatcgagtcatttttatttccatagtgaagccctttatcccgaggagtataaaattacaaatttaatttgagctgcttgtacaggaaacaatgttatttaataggggttgcctgtttattgatgactttaaaaaaacaaaaaagcttcggtcacacctttagattaatattcaaacacctctatccatggacaacttacaaactaaatattgcacctatcgctaaagttgcacattatcgaagagtgcatgcatattctttccaaacggagaaagactacaattttaggctctttaatgctcaatttcaggtgactgaaatttttattaaaaaacaaaaggcaaccgaaaatcacagcatatttatttatttgttctttgaaaaggagcataacgcccggcctccgcatcgacagttgcacacagccataaaagcatatttaattagcataattcacataactcggtatatattttttcccttctgcagacacacg

SEQ ID NO: 15331 - DNA, 1014 bp, Brachypodium distachyon
  Intron number 2 from transcript Bradi2g56620.1 (locus Brad i2g56620) derived from phytozome v7.0 (chr-ID Bd2; pos 549 32797 to 54933810)
gtcaagttcacccgcgacgtcgtcaccaagaacgggtattgttctttttctctctttccccatgaacgcggttaccggttacacctaatccatgaacaaggctgattgatcggaactttctcacctgaattctgaccaacaaacgcttgtcatggtttctttaatggaaatcgatgggagggccccttgtttcaaaaacaaaacaaaaacgctcgtcatctgtttattttagagatttcctatattttattgaacacgatagtagtaacggaaagtaattcgtgcggaatagctaggctcgatgtgatttataaacatgagatttctgtgatggatgctctgaaatttcaggataggcaagaattcagaacctgttctgatggtgacatccgttccactttgtgctcgccacccaattcccggcactgcttgcaaatgctcgatcaaatagtaaaccagcacgatcgcttccctctttccaggctatgtcgcacaccttttttacagtggggtgtctgctttatagcctgcatttgtcaggggaatacctagcttactttggaacataaccttgaaacctttaggcaattgctctttgatgatgcatgaccttttaccttgagggtatctatcctatccttgcaagattatcctacctaacttgagacatgataatagtactcttaaaaggggtttagtgtcaggggcctatcttaagcagacaattctaaggcttcaagttgctttctttgccacatatgtgtagtacatgtttgttgagggctttgagtaccctacttttggatctataatctagcaaataagtggtccttttgatcaataagcagtattcataattctgtttacatgtgagggtgggggcctaggagggatcagagacagtgactcctgagctcccttcatctttggactcccttggagtattgttggaccgatccccttcactggattaatgccttggacaggtcaatagttaagaaggaggtgagccag

SEQ ID NO: 15332 - DNA, 707 bp, Brachypodium distachyon
  Intron number 1 from transcript Bradi2g45070.1 (locus Brad i2g45070) derived from phytozome v7.0 (chr-ID Bd2; pos 454 35975 to 45436681)
tggaccgtatgtgccaggaaatttatctcttgtattgcgtaaattttcatacatattctctggttgaattctttgtagcttgttcatgtttgtgtattattttctaagaacagctgtttagattcgtttaatattttattgcacaacatggcttgtttacaattctgttgtcagattttatttcatctcaaaaaatcagtccatctgaccttttgaatagagagtccctgccttcaacattgttggcatggtaacctaaaatgctactgtattagtaaattttctgttcctttcatttagaggatctgatcctcatatgaagtctacttacatgttttttgaagtagatgggtgtcattattttaatatgtatgcttttgtaatttgcatcactgtagcatgtgaatttatgtaacctaatccaagtagaatatctatgctctccaagcctgttttgcgaagtccgtttgtttttgttttgatcttgttaatccctgaaagttcccaagacttttggcctgaccttttttctatgtcgacattctgattgtggcctctaatttgtagaattctgatgctgtgtttcttcttgaatattaagagtgtgcgctgtaattacattaatttttctctgctctttcctgactgggtggtcttatttactcatcgcaggcaagtctacgcttacagattcccttgtggctgct

SEQ ID NO: 15333 - DNA, 936 bp, Brachypodium distachyon; identical to SEQ ID NO: 15065
  Intron number 1 from transcript Bradi2g54170.1 (locus Brad i2g54170) derived from phytozome v7.0 (chr-ID Bd2; pos 531 10239 to 53111174 reverse strand)

SEQ ID NO: 15334 - DNA, 620 bp, Brachypodium distachyon
  Intron number 1 from transcript Bradi2g45440.1 (locus Brad i2g45440) derived from phytozome v7.0 (chr-ID Bd2; pos 458 17090 to 45817709 reverse strand)
gagatcagtaaggtaactctgaatgaagtgatcctgacaatgctgatgatatcctgctacctatgctaatgtttagtcatgcacgtttactaatttgcataacttgatacttggtctaatcattttacttataccgctgtgctccatcaccagtaacttttggtttgtcattttccacgtcattgtgctgcacaatgtcttctttaacagttaaagagttcaagtataaaaatcataatgaccttattatgattatatttacttggtgttgcgagaatttaaacaaaacttctccaacaaactgatcgttttattattattcatacaattaaactttgcctttctcatttgctgactttacagtgagtagcttgttatattttcttaagtaattgcttttccacgtctggtctagtacttttgaaagtgtaagcatgcgtaactgtgaattatgaagttgtgatcaaaataccgatctagataaattagtttacttgttttgttttttcattcctgactgcctctatatgttttgtttggttcttccataatgtttgtcctttcttttaccatgtgtttctaaagtggatcttttgaacacagaaactccagctaaagag

SEQ ID NO: 15335 - DNA, 754 bp, Brachypodium distachyon
  Intron number 2 from transcript Bradi2g46150.1 (locus Brad i2g46150) derived from phytozome v7.0 (chr-ID Bd2; pos 465 83460 to 46584213)
atccggattaccattggcttgatcgcattgaccaggtgaattttgtgctcctacttatctctgtccatttctattggaaaatattctctctctacgttgaggaacagcaaggcacgggggagcaatcagaggaaacaaatgcttgcagattatgttgaggaacaatttaacaagtacctgacccatgagttccataaaattgcagggggcagacatatttcacaacaataaacattgggattttgctaccaccattggtttccattgcccatagcattgtatccccatacatcttgatgcaatatgcactatactcgatcttgaatcttaataccagataccactgctccaataatgcataccaccatgcaatattggttagacaaaaacattgaaattgctactaggacgttacaccagctgcacactgtccagcaacagtacttcaatgttaccctgtttagcaccttgatcaatctcatgatcagctcgtagggtattttgcatttgtgatccaagatggtgcagtttccaatggaagggcttcttaagccgcaccatgaaattgacaccgaagaatagtagaaataaattgccattgaaatacggattaacttacaagtaatattgcgagctttttatttgagaaaaaaacagtgcaagttttttagttaactttgacttttgatgactaattgtatttatgtaccaatctccaggatatttttctaggggcagtccctcttcctggtaa

SEQ ID NO: 15336 - DNA, 595 bp, Brachypodium distachyon; identical to SEQ ID NO: 15025
  Intron number 1 from transcript Bradi2g61990.1 (locus Brad i2g61990) derived from phytozome v7.0 (chr-ID Bd2; pos 588 36776 to 58837370)

SEQ ID NO: 15337 - DNA, 821 bp, Brachypodium distachyon
  Intron number 1 from transcript Bradi2g54120.1 (locus Brad i2g54120) derived from phytozome v7.0 (chr-ID Bd2; pos 530 82279 to 53083099 reverse strand)
cggcgcctccgcccgcgcccctcgagagactcacggtacgaaagattttggtattcattggatttgtctgagctatttgtgtatcggacagggggaaatggagattttgggagggagttccaatccaatagaaagtggatggaggagtagtgtatctatttaattgtagtctgtgtcggtctttgggagtaatttgggattaggcggaatgattgaatggagttaattgggcgttttgcctgcttcgttcagttagcttgcttgatttgttctttgcagctgaattagtatgtgtgctatagcctatagagtaggtcttttgcggcgttggatggtaaaaaggtaccagcaggaacagtttcgttgtgctgcaattccaaaacaaagggcttagtggtgttggtagtcaacaactgcattaatctcatctctaaaatagaaatttcttcagaatttgcaggatcattgagccaggcaatatgttgtttgtttgcagtgaaactgtgaaagctgattttttaaaaccgcatgtgccaatgtttgattttagatatttgagcgtagcattgatattagcatcgtaattggagctgaattatgagatgatgcatttttctgatgatggttgaacttgggtctcttactaatgaacttatagcttcacataaatagagacaactgaaataatatttgcagtaaagctaacattactacctattagttactgacccacatttgaagtgaagtcatctttaacaatttcctaagaaatttattcatcattccttaaaacatatctattcaggtagtgcttgacttgg

SEQ ID NO: 15338 - DNA, 771 bp, Brachypodium distachyon
  Intron number 3 from transcript Bradi3g19880.1 (locus Brad i3g19880) derived from phytozome v7.0 (chr-ID Bd3; pos 188 70210 to 18870980)
tcaggtaccattggagagactagagtagtacttcctccgatccacaaaagggtcgccgtactaagttagtacaaattttgtactaagtgggtgacactttttatgtatcggaggaagtacattctagtgatgattcgatggccaggatgatattgcttccaccttctgtgtggaagccactcgcgttgcagatctgcagccgctattgttttcacattctactattgaagatctgcggctcttgtatgttttttgaattcaaaccgtaggagagacgtgatttccactcgacactatacatatatagtttaattttcgcaaggtgagacactagaatgcgacattggaaggtcgaaccctggtgcgcagcctgcatgcctctctggctgaccacccaagctgagagaggcattgatccattctacccataggagagacgtgatttccacccgacagtatacatatatagtttaatttttgcaaggtgagacaccagaatgcgacattgggaggtcgaaccctagtgcgcagcctccatgcctctctgactgaccacccgagctgatccgttctacaaagaattcaaagcaatatacttttattataatacatatatacgaagctctcatgttcatattattcccctttgagtatttattcttctcttaatttcaatgccagtcctttccgggatccgacaaataggctgccataggcagtcatgcgagagcttgtctacgggttttttatgattctctttgtttaacaggt

SEQ ID NO: 15339 - DNA, 841 bp, Brachypodium distachyon
  Intron number 3 from transcript Bradi3g37290.1 (locus Brad i3g37290) derived from phytozome v7.0 (chr-ID Bd3; pos 396 36695 to 39637535)
gcagagttctacagcaataaggtatgtcgctctactccaaattgcaattacaagtttcgaagtaaaatgtccgtagtgcggtgccaatcccggactcgggatggagatttttttttaataataatacaatagtactagggattgaagctgtatattaaaccaagttcagtaagaagttaatgtttgtgctgtcaaaagaaaacaagaagacaatgtttgtccattgcccacaaataaattgaaggaaaaagcatatgtttcatgttgaaagcaaaatcaaattgaggtaaaaaattcaaaacaatcggcatattgcttaaacttgttaagttttgaggaaggagcaaatgattttcttgtattgacttgaggcccaaagggctacatatactactccctctgttcctaaatttgcactaaaaccacgacaagtatttaggaatagagggagtacaagtgaagacatggtcctaaactaagtgtggaataccacaaacacctctaagacacacaaaccacaattggggcactacctcaatactttcggggtatctacccttacatattcggtcaccaccctcgtacactcgggtgctatcctaacatgagaggtgtcaccctcacacagtctggtaccaccctcaaatacccttaacagaactaacaccacaaaaacaaaatttaccttcgttcgatgattaattgtagtagacttgatttcttaagggaaaaatatatgctgtgtttgaagcatgaatgtgattacactctctggtattaactagatgcaaataacacatcgttaggtgcttgtggagtacaaaaataaggaccctgatca

SEQ ID NO: 15340 - DNA, 1000 bp, Brachypodium distachyon
  Intron number 1 from transcript Bradi2g45140.1 (locus Brad i2g45140) derived from phytozome v7.0 (chr-ID Bd2; pos 454 97851 to 45498850 reverse strand)
tcgtctcagtcctcttctggggctttgctaaccaggtgagtcatggctttggatatttcgctcaaccttggaatatgcaaaatgtcaatcatgtcgttaatttccagtcaaattttagttttgatcgtccgtagtcaatattttgaccggtttgttggttatcagaaaacaaaacatagaaatggaaaactcttctctccttcagaaaatggttagataattggtgatgacctgatgtgctctttctagtagtatttgtaggctctgccttgtagtagtattttgcattgcattgtatagcgaaaactgttggatgggatgtaggtgctcgttgctttctgctatgaatgtgatcagctgcatgcttgctagctttctaacgtgaattatgtttgagttgttttcagtcatgaactagtagttgtgaatatctattctgtgtaatacttggctggaagctggataatgtgcacacatgtaactccttttgatataaatactgacagccgatgtaatcttgagaaaactaatatgttttgcactgtggatacatttcttcctagtgaggagcccatatgttgatatttcatacatacacacatattttagtgactgcaatttatcttgagagaaaaaatcagggaagaattactgacaattgataaaaagaagtgaacagtatagagaagtacaagagaaggagaaggcaaattttgcggatcgacattcttcttcaacgcaacaaatttgtattatatatatacgcgaatatatgcagttgtgcgccgaaaggttggcctcgatgttttgctgtccattggagagcagacaactaaagactcataccttaaaagggttttatttgatcatgccattttagtgcccttcatttggaaatttgagtttcaatgtttatttcatatttgtgagctttttcatcatctggtaacctttcatgctccaactgagtggctcaatctttttcagatcaccacagttg

SEQ ID NO: 15341 - DNA, 433 bp, Brachypodium distachyon
  Intron number 2 from transcript Bradi2g53460.1 (locus Brad i2g53460) derived from phytozome v7.0 (chr-ID Bd2; pos 525 80673 to 52581105 reverse strand)
gtgtcaagagattgcgaacagtaagctactcatttgacctttaagattcttggtgactattaatatttaatactactacttaaagaaacatattagagcgagataagtcgtggtaaaacatagtcttaaaaaataatatggcggaaactaaaataaaaaataactacaaagagcatatttaataacaatggctctatatctcagcattgcacatttgcacatgatattatattcttcaatgcttcaacgtttttgtatttattttggacgactctgccatgttcttcttactttaggagccatttctattgtattggaggattttttgttggtttgactaaacttcttttcctcttttagacaattgctaagtcagtccagtgttgttcttattgcaggtgcgccatccaaatatcctatcctttcttcacag

SEQ ID NO: 15342 - DNA, 590 bp, Brachypodium distachyon
  Intron number 2 from transcript Bradi3g10370.1 (locus Brad i3g10370) derived from phytozome v7.0 (chr-ID Bd3; pos 856 2165 to 8562754)
ataaagtttgggtctaaaggcattgatagaaaaaggtatttataagtccaaaaacgggccgagacaattgaatactcaaaacaagacgacgtccaatggtcgcaagtcaaaacatcacaattagcaccaccaaacaacctaagacctagatgccaaccacacaaacgtaccggatgcaaaaaaaaaaaaacccactaagactttgctgaaggaaacgagaatccaactgtgaaaagaggcaaagttgtgacactcctgctttggagacggcaagttgatgccttgtgttttaggattttgtatgacagtttctttggcaataaataacccatcgatggttgtttcgtcttaaaaagaagagttcatgatccttccgtatgttctctaacttgctgatgaacaatttattgtgattaattttatgggaaatatcttttgttggaacatatctagaacaaataagtaatacaatagctggattcttatatacctaaccaaaattttagttcgataatgttgattgcgtctacaatgctaattgtgtccaattctctcgcagaacgaaactaatcttccagactccagttagc

SEQ ID NO: 15343 - DNA, 898 bp, Brachypodium distachyon
  Intron number 2 from transcript Bradi3g08760.1 (locus Brad i3g08760) derived from phytozome v7.0 (chr-ID Bd3; pos 688 9442 to 6890339 reverse strand)
gcttggggcggaggtggcgcgggccgtgtcgcagggtacgctctgcagctcctacccgggagtctgagtctgatatgatctaatctttgcgtcctacctgtgagttgtcacagcctggttgcttgtgtgcttgtttattttagttcatgtgttgtatggaagtccttatggcacaatttagggcttccatttggcaggttcaatcaatgttatgtactccctccgtcccataattcttgtcgttgttttagttcaaatttgttcattttgatcattggactattattgttgttggactattatggaattttgttcattttgttcatttgtcattgatccttagccaaaacccagtttctgtaagcaaaatgataggcaaattgcacataacgatagctgtttatgtgtgttctgcgactcttctaatgggtagtatacctaattaatactgaatgcaatatagaaacatccgtagatccagctaatatcaatgtgtaaggtaagtcttgttgtttaggatatcatttttttgtataacaaattaaaagggaaacttccttgattttttttccagtttgtttgctaatatatcctaaagcacacatttgagatagatactatttgttatgttaatgacttcctaattaggtgccaaaattaagttcaaattttactgttgaatgtaaagagggtgattccttagccgctaggtgccaggcactacctctcagtatagcagattttaagatagcaaagtcgagatggaaacaaaaaaaatcaaatcactcagtagcctagacaaggcccaagaagactctaggatggctctaagttgtaactttatttatttggtgtgttctcagtgaccactaaggagctgaaggtaaaaaggggggtt

SEQ ID NO: 15344 - DNA, 874 bp, Brachypodium distachyon
  Intron number 2 from transcript Bradi3g19280.1 (locus Brad i3g19280) derived from phytozome v7.0 (chr-ID Bd3; pos 179 35122 to 17935995)
gttctctctcccttgttaaaggagttcctgctctggtgaggaaggagccttctttctctctctgtgctgcaaataccagatctttcttcagaaatccttgtttttcccggtttcctcgcggggattcttgattcgttcgttactcccaaatgtttgggagtcacaattttctggatttaggactgctcccaccgttttggagcttctctacccttcagctcttcttgttcaagaattcggtgatctctcgcttttcgattccggagtggatatgggggcaaaatatttcatcttgctatttcggtttcctggttgattgattgggatgtcgtgttttttggtcaattttagccgagttctttgtctcgctggccaatttttgaaggcttccgttttgcattcctttgacttaaaaacaactaatgaggaatgtttctagcttttttgcaaagaagaaaaagaaagttttaagcttcttttggattctgtggacttatagaagcaattaacacctgctgtcaaaataagatgaagcaattaacactggaagtttaaggttatttttaatttattgggcttggaaagcggctgatgtgtagcaggagtaggtgcatttcacttcattactggccaccttttccaggtcattttcctataaacctttttaccctagcagattccaaagcacatgctcgctccctatcagtttacttttgaggttttattgttcatttaacatgagtttcgggtgttcagcacatggtcagtagtaatatcctatattaggagatgcccccaatagtttttcttaatgtattcttgttttgctacgattgcaggtttcataaccttgcctgttgagtttcccgagaaa

SEQ ID NO: 15345 - DNA, 760 bp, Brachypodium distachyon
  Intron number 1 from transcript Bradi3g32690.1 (locus Brad i3g32690) derived from phytozome v7.0 (chr-ID Bd3; pos 351 19113 to 35119872)
ccgggttcgccatcgccgagggagcgctctggacggtgctctctctctctctctctctctctctctctctctctcgtttcgacctcaaaattggtggtgtttctgagcgactggggtagtggatggtcgtgattatattgttctgtgaagtgtcggagaaattgcataaatatctagtactctctccgatcataaattcttgtcgttttagtacaaatttgaactaaaacaatgacaagaatttagaattggaggaataatacggaatagtattgtttttgtgcatgttttcgggatttggtgatgaattgttatgaggtactcaactgaggttcccgaagtgaagtgtaagacacacgggaaatttgcttcgttcgaagcaacaatttaccaaatcgtataccggttgtgatattttgtatgatcaagattacttttgggtgtatagaacaagactcataactgtagtggatctaacagaacatgactcaatctgacttgttttcttcattgttataccatttgtgaattataccctattagacttcactgaaactcagaactcaggttgatgtttgtgcattctgaaggcgtactgtatctaatcacatgaattgcatttgaagttttctttccctccctccctttgttcgaccccttaccttttagtatgctttatcatttatactttcttcaactgactagtaatttgtcatctattttaggtgagacgaagagcagttgtaccatctttacacaa

SEQ ID NO: 15346 - DNA, 796 bp, Brachypodium distachyon
  Intron number 1 from transcript Bradi3g09340.1 (locus Brad i3g09340) derived from phytozome v7.0 (chr-ID Bd3; pos 746 0177 to 7460972)
gaaggaggatacggtgaccccaagagggttaaaaggtcagcttcgttttttagcacagttcataattaccgtggtgaaacagtaaaagcacacaatttttttactttcaacatacatttgtttactgtatcgctggagcccacaattatctactcctaaattctcttttttttgccggtagtctactgcattctcagtgaaccggtaatttgggtgttcactgttcaccgctcgcaagaaagaagaaaaaaaatgtaattttggcgttaactacgagtagctgttcaaattaacgaccatacatacagttagcagactcgagtaatagctaaagtggattttagctaggaaaatttaccacaacaaatttgtaaatttcatttctgaattcttactgagcacaattcctgcagtgaccagactagactgaatgtgtggtacaacaacattgcacacctgatccttcagaaataaaaataacatacattttaggtttgaatctgtaatttcagaattgaaaattgaataaaacattgttgagaactagatgtagtgcagtaagtatacttccttctcaattttatttacggaattgcgcattctcgttatactgtatgcgaaagtagcctgaaacatactccctccatttcatcataataagtgcctcagacttattataaatttgagacgtactatggatcgggaggagtaccaaagaccatgaatctgactggcaaattggttggttgtttttgcttcaggatattggcaaacaggcagtcagcgcaaaggtcaa

SEQ ID NO: 15347 - DNA, 957 bp, Brachypodium distachyon
  Intron number 1 from transcript Bradi3g14620.1 (locus Brad i3g14620) derived from phytozome v7.0 (chr-ID Bd3; pos 129 70780 to 12971736 reverse strand)
ccgcagacccccttctcctcccgcgcgcattcgaggtaccccgcgctctctcgtgcgttttctaggccgggattcggtttctcgtttgatctttgtgttggcgtacgctcggtttcgtgttcgtttcgtcggttcagaggatccgttttcctggttttgtctagttttttccgccttgctattctcgcgctcctcttcgttcgtatgttggatcgtttagtgcctggactgggaaaggctttttttctctctctctctcccgaagtttgttgatgttgtaaggtgtttaggttcaaaagtgttcctgattatgaagtggaaggtggcatctttgcgattcgtatgaaggattgtagtgtttgggggagataggtgttggggacagcaggcgacagtttcggagttcttgcgacgaacagttccgcaaatcgctagtatttctcttgctataagaatacagtaatttgtttccttattatgagacacatttatttggttgtttggcatgagcaaacaggggcttttctgtgtgtattttttagtgctgttagtgacaaattagctcacgacaaaaaggtaccacttcccttttcaaaagaaattgtatatgagaaagtaatttctcactttggaggtttgttcaccaataatatctaactcgtttctgtctagggacgtgttggcgtaaataaattactagttcttaactctgcatcttatcttatcagtggtgtcaccgtgcttcttaaagatctgatattttgatgtgacatcagttcagacttcagatggcaaagttttgtatagaggattacgtttccgtttctagatgttgactcaggaagccacctaatgcgtggagccacatgctgttactgttcagggcttccaatttactattctccattgtacttattggcaggacaggtacagctgttggtcttgttcctcgtcaga

SEQ ID NO: 15348 - DNA, 447 bp, Brachypodium distachyon
  Intron number 1 from transcript Bradi2g50940.1 (locus Brad i2g50940) derived from phytozome v7.0 (chr-ID Bd2; pos 506 26502 to 50626948 reverse strand)
gcgtggccgacggcgctatcttagcgtggatttgggtaaattcttcctgatgacttttgttcgatcgctgcttcgtcgttgatcaccggatccgtttcgtttaccaggtgtgcgctcttctttgatctatgcgcgcgtgtagtgaatcgctattatttttacttcaaaaaaaaatgaatcgttattatcctcggagaattgcaattttgccggaattttttgggagtaagcggccgggcataattttctcccattggttagagacttttacagtgattgggccacgcaactggaaatgtcggatcgatcctgtgccggagaaaaagaattcccaaatccggaattaacctcgtcctattattgtgctgtgtctgtcggatgaatcacggattcatgtctctagtgcgtccccctcattttgcagatcggaatccaggagggtgcgcc

SEQ ID NO: 15349 - DNA, 833 bp, Brachypodium distachyon
  Intron number 3 from transcript Bradi3g06900.1 (locus Brad i3g06900) derived from phytozome v7.0 (chr-ID Bd3; pos 508 1136 to 5081968 reverse strand)
ttttccagcatctggttagttttactctcactttgtctgaataattaaagctgagttacttttgttgtgtcattctcacagaaaaccttattagtggcttaagaggaattattaggcaagtttatttggttttcatatcctgaatttgagtacatggaattataaaattggtttccttgttatttaatatggacaatcattcttcatgaattggcgagtatcagtttattttagtaaaaagatgataaaatgcaaaagtgaggttatcagctaactttccagcatgttgtttccatcctttgttcacaaacgggttggatgctaaatgctcctcgtctcagctttagttttgtagtcgagattatgagctgctaatggttgttcaacatgttgagtattagtcccctgatatgtttttgtttgcttcttgatttcttctttaagaggttttttgactttctctcctgccatccctgattcctttttgctgggtatactaagagctatatttgttgtgtatttgagcatgtagatatatcaagtcagttctaaccttctgttatatcaaatggcaatgataacctccacaaattcttcccatttgttaaccagtctgtagattttcatgtttgattatctttatctgaggagatgcaacatcaaactctgttgcagttgtactctcgaagtctttctccttgcaatgctattttgcagcatgttaatgcttttggtgttgtattggacaaataatctctgttctcacatggatacagggttacaaacatttttttttccttccatttactatgcaggcttcatctttggcaaag

SEQ ID NO: 15350 - DNA, 510 bp, Brachypodium distachyon
  Intron number 2 from transcript Bradi2g54760.1 (locus Brad i2g54760) derived from phytozome v7.0 (chr-ID Bd2; pos 535 72753 to 53573262)
tattgcaccttcagatagccttccttttgttggtatgcagttgtgcagttatccgcatgttgtctcagctaaacgtagttctctgtaacttcttcttcttctgtgtaattatttacctgtgcagccaaatagaggcgttatattccatccctggttcatttatctggttaaaaagtaccgttctcttttgacgaaacactgaaatgctgtgaactcagacttcgtccttcatgttaaaaaatgttatctcttgatgaaacgcttaaataatacaaaatcagtctttgatataccatctcaaggcactttgtttttgaagaaaaaccctaggtgaattacctactgatctcaaggcactttgatcatacaacggaatgaaatgctactaaaatcagcagtttctgacagttaaaatagagggcacgtttgttatgaatagctgaattatactggcgttataatcagtttctatcttgtatatagttcattacgaaggcacacttgttgaga

SEQ ID NO: 15351 - DNA, 557 bp, Brachypodium distachyon
  Intron number 1 from transcript Bradi2g59140.1 (locus Brad i2g59140) derived from phytozome v7.0 (chr-ID Bd2; pos 569 16663 to 56917219 reverse strand)
cagcagcaaggtaagggcaaatttccgcacctcctcgttcttccgaagttgcaatcttttcgccgttccttgtgcgatttctgcggttaattctcgttacggaccgccggacgggtgggggtgccgttgagagtagcactgcttttgataggggaacgaaactaatcgcccctttttttgtgagtgtatgtttgttcttctctggcactgggcaaggtttgtagagttagtaagtgggtgtatgatctggtgccaaatactaccatctatgctacataactcattgttcatgattagttcaatgctttgtccctatgatccgttgagtacccacttgttcttttttcctttttttctgcttcttctcctgtaattaactgctatggtttctgaaaatggaaatctggggatctcctccttgttaaagaaagacatcccttgagttgttatgtgttatggatgctgtcattgtctctgctcagtgagaagactgttccattttgttttgttctttcgattcaggtttcgatatacaaaaactacagcaggaagtgaag

SEQ ID NO: 15352 - DNA, 943 bp, Brachypodium distachyon
  Intron number 1 from transcript Bradi2g43360.1 (locus Brad i2g43360) derived from phytozome v7.0 (chr-ID Bd2; pos 438 58579 to 43859521 reverse strand)
gggtcgggtaagagaatggatgcacggggagggctcggaagtggccgtacttggccggcggcgagctggcgcggcggtgcagcgagagcaggcgacgcggaaacgaggtgaagagcgacagttattttcgcgcttgtgcttgttcgcgtttagggaacaggacttggttccttacatttggaagagaatttagggaaatttcttaaaaatttagggatagggaatccagcttcttttttacaagtttgaaggaacggtggcggttattttaggggatgaaacattttaggaacccgctggagatgcttcacatcatttcggggcatgtataatggttgataagactgcttatcttaggtgttccacatcatttagaaaagacaacaaaatatgttgtacaatgagttatttcttagtgttacgtcttaaaattaatgtttagatgaataaaattaattaattaaatgctaagaaaatgtgaaagctggtacattgggaaaattgtcttatgtttgacttatcattcttgtgaaaaaatcatctcttaattaagagaaggtttgtgcattttttttcgtttctctatcttttacgtcagattttatcttatatggcatcgctaagggaagggctgacatcatcctagtgtacacgcgacatccaagtaaggattggacaacgatgaataagaacatcttcagcagtagcccttaaaatagggtacctaaacaacatccagggctcctcaaattttagggtctcaaaaaatacaaaaaaatacaaaggtcttcagcaatggtccctgttccacagcccctcatatacaaaggtcttgtgttttattctttcttttttttcttttcttctccattgctctttcttccccaccgcttgtccacgagactgctctgtccgactagatcggcaacgccgctgggctagg

SEQ ID NO: 15353 - DNA, 378 bp, Brachypodium distachyon
  Intron number 2 from transcript Bradi2g46910.1 (locus Brad i2g46910) derived from phytozome v7.0 (chr-ID Bd2; pos 473 10432 to 47310809 reverse strand)
gaggaggtaagcacatgacggggttctgaattgaccttcccttctatttggttcaagtagttccctggcataaatgcaatctatccatgacacaagtatccttttctgttgtaaaagatggtatgctgacatccatcaaaacacaggtagcttaagccagtaataccaggcacaaggtcgtggtatatcaaggaaactaaataatttataaagattggcatggatatgttatgtgcagttagcctcaaaaggaaactaacattagctggcactttgaatcttgatgaacatttttgtagcttcttttcctttgtgtgacaagtgacatcacttgtttctgtagaattttgagaccaattcaaagggggttgaaatatt

SEQ ID NO: 15354 - DNA, 996 bp, Brachypodium distachyon
  Intron number 1 from transcript Bradi3g22760.1 (locus Brad i3g22760) derived from phytozome v7.0 (chr-ID Bd3; pos 219 86318 to 21987313)
ggagctcctcacccaggtataggatccttctcttctcgatcgcgcgtgttagtaggcatatactgctgtactgtacgaatctgatgtagcgctgcttcaagtctattttgaatgaacaattggttctgtttcgtctgagtttcttttgaacagcagattaatgatcaataaataagtgaaagtgggcttatgtgctgattcggtggctttgatgatgatataattgacatttagcagggaatgatgatgatagtttgtgattcatgccgtgatattgtagttttgatctaaagatttgattgtttgagggttattcttcctcgattttttttgttctagagttatttgtgagaaattagaaaggacttttttaattcgtgtgccagtttggagttattcctgatgaagttcggtgtttagagatcaatttgcacaggtatcactaatttagaaactgtcagtgttattatttaaacttttaagttttgaaatgctctatagggtttggaaattttatttacgccttcacgaaaagcactctaaaacatatttccttaaatttccccttgtgcatatatgaagcggaactatttgatgttacactgatttcaattttaattttgttgtctggtacaatcaattaatctgatgtctttgatgcttcattccttgactatgccctaatgatttcccatttaaaaggtaacgtaactatgtcaaaggtatggggaagggccatgtttggacagccctaagtactgaattgttgttgaaattaaactgcatgttggacgaatttttctggtcagtctgtatgttgcgtttttgtgatgtagggcatctggacacaaacaaaaataagaaaattttgtgaaaaaaccctttcgtgtacaaattgcccactgatttgtctaaacaatggtgaccttcttattgcttactgatttcaatttatatacaggtgtacaaattgcctactgatagaatttacgcaac

SEQ ID NO: 15355 - DNA, 1032 bp, Brachypodium distachyon
  Intron number 2 from transcript Bradi2g56500.1 (locus Brad i2g56500) derived from phytozome v7.0 (chr-ID Bd2; pos 548 26724 to 54827755 reverse strand)
gcgaaagctggtgctgccaaggcaagtgccctgcccatgttcttaagtgccttactttgcggtttaacatgtgcacaatgcagcttaattcatgtggtgtcgtctcatcggttaaaatcgatttgcagatttgttttatcaattcaatttgttcttgctgccgaggttgagagagatcagcacattattacatgcactgtagaattacttttttgaggctatctttgcatatttgcagaaaatcagtttgttgcttcactttgaatgatcagtaattagggatttgttgttccctgctgaccctgttctgcctaggaattattatgtgaacccaatatagccctcttaaaatgttctctatggaacattagctaagggagggaattactttgcacttgtcagtgcacatcgttcaagtgggatgctgcattgaccgtgcatacctataagtttgccaagtacattcgtgtttgtttttgctgcgcatcagtctgttttgattcatttttcccgttaggtgatctcatgctattatttccgcactaaaactcggactgtggactagcaaaattgatacagctttttatacagttattatttatagctgtctgagtgcatgaatgtgatggtccagtcacactgcagctaagtaaattgatacagtgcgtacactatgttgtgtatttacaacccaccacgcagggaaaactggaaattggcttcttctttatcccgtgagatgtctaatattctcagctgtcgaatctcatgatgtgctaattactagtttaccacatctagtcatctactgtgattgagcaattgcaatcccacaattgaattatgatcttaaaattttggagtttttacccttgctaaagagatctctattctctccactatatccttgatgtttgttactctaatgttctagaatgttgtgtctgtgtgagagtttgttttattccactaatcgttgtttgccatgctgaaacaggtttctgaagtaagctcaattctgggtcgggctgg

SEQ ID NO: 15356 - DNA, 938 bp, Brachypodium distachyon
  Intron number 2 from transcript Bradi3g15950.1 (locus Brad i3g15950) derived from phytozome v7.0 (chr-ID Bd3; pos 141 65271 to 14166208 reverse strand)
cgacctccgaggcggcctccaccgccgccatccgcgtgcaccactcctttggcgacgcatcacgctcctcatcgcctccacccgcagcgctgccgacccgacaaagctgccggccatgttgtcggtgcccacacgcaagggcgccatctacgcgcgcccacggccaccaaagtccgcgggcgccttggcgttcctgctcacgtgggtttgttcgtaacttgtgctcgcgtggcataccctcgtggacgtcttgtccttcattgcgaccatcgtgttcttgcgagagcggcgcacgctcttcatgcgtgctgccagcgacgacagccgcagcaagacccgtcagacgcgcttcgtgcaccggagcctttgtctcgacgatgtcaagtttctcaagaatgctatgaactgcgtacgtatttaattaaaccgacctagcttgcaacaaaaatataaagtaccaaacatacatctaaaatgacattatttcttaatcggattttctacaccaaacaaagaatcttatatgaatccaatttcatttcagtattaatttcatatcagctgactgctattgttttaaaatattactccgtattcattaacatatcattatttcgttggtatatcattaaagttttcattgacatatgattgtttcattaattacaatatcaacagtatttcactcaatttcattactctatcaatcaaatttcattacaatatcagtttttcattcgtatatcattttcatatatgaggatgcatgtcacatgtcggcatgtgtggtatgatagagtagactggctccagtaataagtaccactactacagaatacccgtaccggattctgtagtagtgtacccgtaccggtaaaaatgattttgcccattatctttctatatacctttcatgtgttttgatccgcagactgtca

SEQ ID NO: 15357 - DNA, 864 bp, Brachypodium distachyon
  Intron number 2 from transcript Bradi2g45790.1 (locus Brad i2g45790) derived from phytozome v7.0 (chr-ID Bd2; pos 462 23235 to 46224098)
tcaaggtaaacatgaataaattaatcctgagtaatttccaacgggtcgttagatataaattggcaccctactagtgatttatcgtatcttggctaggaccattacgagagtgagtttctatcttcctttgtcaaagaaaagaaaagctggcagaaattataagattagctccacaattggaatacgagctttgatcttgggaactgtgctggcaaaatattcaattacagtaatacggagtactgcacgatggcattgctcgaggtcgcgataacggggagacatataaaaaactggtctttcaaatggcgcgtgatgatgcgcaggcgccgctaaaaacagttcacaagaaactttcagaaaatatggtattcttatttcttatccagactccaatgcagctgctttgagttgtaccagtgctttttttttgtgcggacagaacacggtcacagtgttcgtcggtgcacagaatgaacagtgcaaggggtgtgggggtaccagtaccacgctgcaaacctagctagtacccccacaccacggtaccaattgttgtaaatttctttctgagaacgttccacaccacacgctagtactttgtttcgaaaaaaaaaatgttggatgcgtctggagtctggagtctgtatctcgctgacgactagtcaaacatcactggttgggtcagcggttcagcaccgtcaggtgctctactgtcgcggcgacaccatgttacgctatctctgaactttatcgaccctcccggcaggctcatgacaactttgctctgcttctgacttttatgtttctctttcgcatcatggaaccgaagaccgtgctgacccgggtgaacacgctgaccggggt

SEQ ID NO: 15358 - DNA, 663 bp, Brachypodium distachyon
  Intron number 2 from transcript Bradi3g32490.1 (locus Brad i3g32490) derived from phytozome v7.0 (chr-ID Bd3; pos 348 52392 to 34853054 reverse strand)
gtgaccttacccgattgctagcccgtgtgcagaaggtatcaataacgagatagatatacctgtgaagtccctttaatctatctctaatttaaatatttaactgccacaattctatttgtttgtttgttaccatttgcaccttaaattttgatgtcaaaaaaaacaattatgcagttctgttagtagttgagtgcttttagaccgtttcatataagcaacagctgaggtataagttatatctgaagttttagtgaccattagtaggttttcagctgagttataagttgtatgcagcaatcatatgcagatttaacttacaccatctatcgcctctcaccattagtatgtttttatggttgtgcacgtagtcaccaactgaagtttgttcttgttcttatgtatccctgaggacatgtaggaataactatttgcggacacccagagagatagatagaacaaatatggtcataggcagttattttttccttattcttgttgttgagtttcagttttctcttatttttaattaagcttgttggttgtattgtgttactgctagatattgttattgtggttttgacaaccttgatgataacacatatgcagctccaaaccgaatattctgaaactatttatcttcgctgttatatgtttaggtcagag

SEQ ID NO: 15359 - DNA, 862 bp, Brachypodium distachyon
  Intron number 1 from transcript Bradi2g57830.1 (locus Brad i2g57830) derived from phytozome v7.0 (chr-ID Bd2; pos 559 02851 to 55903712 reverse strand)
ccatcgccgccgtcgcctcttccccctgccctgaggttgaaaccgtctgttctctccactgttttttgaacgttctgtgtgcgtgtatgtgttttgggggtagggagaagggcggagtggtcggagtgttgagctttaaatgcttctgctatactgatcggaagttagaacacctatttcttttcttttttctttttttggcgggtggttagaacccctatttcagtttgatatgagtatgaaatcgttccttttgggcctctaatttctccaatttttttcaatctcgtttccggctgtgcaaacctgcgtcagcttgctatatttcgttaaatggcgtcttttaatcattttagtagatccattcgtgaagttatcatcccctgttttgcatggcgagcctaaaatcacaaacgcttactctggtcatatattatttgcttaatttaaattgacatgtgactgaatgctgaaaataccttgactgccattccatcgctagataagtcctgcacaacattgcaggttgcaaccgtgttattggcctgaagagttgtttgcagcggttttactgtatgatggtttgcattagggaagaaatgagtcacatgcaataggatttaaagtagtactaaatttgttgcatacattaggattcaaatgtagtactgcaagaaatgtgatagtgcactagagttccttactagtgagttataaaaggatgctgattggtggtacaatttcatatgaaccaatggtatgcaaacagttgaagtgtcgaaaactgatatgccgttgctatgctaatatggtaatgtttcttgcagagctataggcaggtgatctgtggctcaacttttca

SEQ ID NO: 15360 - DNA, 934 bp, Brachypodium distachyon
  Intron number 1 from transcript Bradi3g39460.1 (locus Brad i3g39460) derived from phytozome v7.0 (chr-ID Bd3; pos 417 26033 to 41726966)
acattgcaggtactagtctcgtgggtactacatacttgtagatctggccatattttgtttctaccatgtacatctgttgctgtccaagaactgtttttggtgacccctttgttttgtgtcgaagcagtagtgcagtctggtttgattgatgagatataatttgtgttctatttctctgtatgaattgtgtttatagtttcctcttatgaacttcggtgcgtcagtcgtgattgaattctagggcaatgttagctcagtggatctgtgcagtaatgagatgcgaatttgcggaggcgatttgtttgttgctggttcccggtggttgatgcgaaaacattagtccagcaaaattcgcatggattagaactctggggttaaaagtggtgtgcaacttcgatgccctagccgatttgcatcagttctagcatgtcttggaattgtgtggttcaaaattattgtgcaatttggatggttcgactattggcatttgttcccaagtaataatcgtttgtgttgatgtgtttgttttgcggaaaaaggtcaaatgccccccaatagatcatgttgattgtataagttgcagacaaaatttgggtacatctgactcgatcaatttggttcttggcctattgggaatacaatgctgtactcctgttctgtttgggtactccccctgcgcgaattaattggaagcacatccaatcatgttgtaccttttccagttaagtaaaatattaattcggaactttcgactattctttcttaggacctctgctcatcaaggagttgtgaggaggatggtggcggaactgcaactgtatacccttgaaaagtttcaacttgatcagcacaaagctctcatttccgatcccctgcatttatattaattattaattttcttgtctccttttctttcgttttatggaacagaccc

SEQ ID NO: 15361 - DNA, 473 bp, Brachypodium distachyon
  Intron number 1 from transcript Bradi3g07200.1 (locus Brad i3g07200) derived from phytozome v7.0 (chr-ID Bd3; pos 533 0953 to 5331425 reverse strand)
acgttgaaggtctgataatgaaaaatatagttacatgcttccgcatttcagtatataggatctcgttgttttcaagtctgaattttgtcttgttggcctatcctccacggctctacctataacagcttgtcttctggattgcttttcaagccatctcaataaatatgtaccataaaggaatagctttatgtattttcattaaattaatttgaattgtgcactaaatactgaaagggaataaagtaatgaagttggaaccttccaacctccaataacaaataaaatagaacatgacttcaaatataccaggtctttttttaaacaacataacaatgcaaattgattccaagttaccatgtttctattcctttgcaatattgttttatgcacaatctatggttcagagtgatacgcctgacctgtgacagtactctacaggagtactgaagaaattgcttgagcctggtataaaa

SEQ ID NO: 15362 - DNA, 927 bp, Brachypodium distachyon
  Intron number 1 from transcript Bradi2g42050.1 (locus Brad i2g42050) derived from phytozome v7.0 (chr-ID Bd2; pos 425 36760 to 42537686)
ttcaccgcgccccaccacctcaacctcatcgtcgcgtaagcacctcgaatgcatttctccgactccgggcgattgttgctctattggtttctgaggtcgctagccttgtgaggatagcttggcggggttagggttttagtttgctcggctaaaaccctagccgccccatcgatgctctctgcaatgatcgatcggtcatcggtgcttatttgctcaggaactaacatgatcgtattccagagaggtgggtgtgctctcaatttagttctcgttttcgagaaatattatttgtttttggatgccacattttggatagggtgatactttttggatgaaaatttacaagcgtgaaaaaataaaatccaagcctctcatggagtcattggtttgttccggtattctgaactccccaagagatccgagctataggattggccgtggattggtacgaaattcgtgatcggtgggctgctttaggtttttttgggttactctttttttatttcctgaaattgcgacggatcttgggtttacaaaatcgtcaagtttgtaagtttctcttaatcatcctgggatgcaaggcattatcctgtcttctttccttgtttgcaattgttagtttgccaaagtggtagccactggctagtaatagcatcccaattcagaggcgattgatgtcttcataacaacaagctccttgttatggtgacattgatgctgtaaattgtaatgcctctcaagaagattacaagatcgtgaactctaattagacgagatattgaaaagtgtgggtgtacggtaactttttagcttgtggttgatttggttaagggattttccttctttaaaatgaaatcaaaacaaaatcatctggcatgttttatttaaattttgctgatgcttatctgcacaacaaactttcaggaa

SEQ ID NO: 15363 - DNA, 956 bp, Brachypodium distachyon
  Intron number 1 from transcript Bradi2g59420.1 (locus Brad i2g59420) derived from phytozome v7.0 (chr-ID Bd2; pos 571 28316 to 57129271)
tcaaggtaccgtacaatttgctcttacatcgataactctgattcctctgcttctttacggtcgtcgatcgttcttgtcatccacccttaattcttatactccgtacttcttcatctgtggacgcttggaggaattctgctaggcatcttactcgttaattacgtgtgattagattaaccgatctccgcgttctagtgagcttcttttccccctgtggatctgtttcttcatgcccgaattgcctggtgctccggtcttctcccggcctatgggagaacgtgttctgtacttctgttaattatactttaaggtatggaccgtaactagcttgtcactaataatatattgtcacgtaatcaacatcgatctttggcagttgattaaagtaatctagctaactgatgatatggggttcatattagaaagaagaagaggttgctcgatcgttgaccaaagtaattaggaagtgacagggtgtactattgatcacctcgcatctagttatatccgtagacttcgcatctagttacacccgtagctagccacgtgaagcatggcccttgtatttctttgcttttcccaatcgtatcgcaagcaacggaatatgctcgatcaaagaggcacacggtatacacgggatgggcagcacgttagcacaatcagattcagactaaagttcagcacgtacagtaccggattgattaatcaatcgagcgagtaaaattcgaacacgggagagggcaggcagtagaacaaaattcagcggtttccaatctatctggatgtctgaatcatcaatgagtaaattcgagagacaatataaaggaatcagaattgattcacagggtaggccggcagtaaaagaaaaaaagaagaagggagaaagggttctcacagtcagtcagtcagtcagttgggttaatttgtgttgcacatacatacaggaagtggacaac

SEQ ID NO: 15364 - DNA, 537 bp, Brachypodium distachyon
  Intron number 1 from transcript Bradi3g07060.1 (locus Brad i3g07060) derived from phytozome v7.0 (chr-ID Bd3; pos 523 1552 to 5232088 reverse strand)
ccttgtgcccagccgccgccgccgccgcgcacagggttagggttctctcccttcctccctctctctccttgcctggtttgatctgttgggttaggcgctttgattccgcgtccccggtcgatccgtttgggttttgttcctgggatgggacttttgggtggtcctgttgggtgattatttcgccccgcgcagggatcggcgggagggcggtgcgcagcggggcgtgtttccgtggttcgatttggtggttgggtccggttccggcagaaatctctgggcgtcggtttttttcctttcggtctgtgcgaaatgattagatttgcgttttgtcgagtcgtggttgttgggattagtcgaatcacgcggcagatttggtgcgtggtgtgttcgatttacaatccctcggcataaattcgcagtttttgtgattcgaattcggtgccctgttcttcgtgtaactgtcggcgaaatgaaaataatttgtccgtctgattattagcagtttgtcaggaaaaagtcgcttttgaggtattgatt

SEQ ID NO: 15365 - DNA, 802 bp, Brachypodium distachyon
  Intron number 2 from transcript Bradi3g16400.3 (locus Brad i3g16400) derived from phytozome v7.0 (chr-ID Bd3; pos 145 99885 to 14600686)
caggtatggtctccctgggcactgccaagaaagccagctttgcaactcttcccttgatgcttttttttagaagtcatttcatgtttcttgtcttgggcaaccagaaaatgctttagtatttgccaaaagtatcagacactcaatctttaacaagatgaatatggcataaagttcaggcttcttcatgatttttttactagaaataaagctcagatggtttcttctgtttattttattttctctctgaagatctgatagaacagattaggctcaagatatgctcagttgagttacagacgtttgtctgctgttgcaatgcatctctgaaacgaagctgctagtaatcagtatgtgagatccagacactgagctcaagtggcgtggttgtgcaatttcaggggctcaaagccagcttgtctgctccgggtgccggaatctgctcatgtaccctgccggcgcgacgtcggtatgctgcgcagtttgcagtaccgtgaccgctgtgccggctcccggtatgcatatgaatcaaactcattttgcccctcgaggatttgtaagtaatgtggcagccgaacatcgagttccatctatatgcaagactagtatagcagacagaaaaatgttcttttctgcggcttgcttcctttctaagtacagaaatgcagttgcagattacacagtagcgtagacagatcaaagggtttaaatacttctcccttgaaccaattcaaagggctttccgctagctggcaattgtcctgaagttcagttttcatctggatttgttggtgcagggacggag

SEQ ID NO: 15366 - DNA, 881 bp, Brachypodium distachyon
  Intron number 2 from transcript Bradi3g02340.1 (locus Brad i3g02340) derived from phytozome v7.0 (chr-ID Bd3; pos 139 6996 to 1397876 reverse strand)
ttgtaaagagggaggatcttttcatcacgaccaaggttattgttagaaatgattattttgtcagacgctgttaaaccactttgggcaagcttattcggatgagaatataggcaccgactgcccctctggacaaggacctgattcgtcagaaattacgccctatgagcagactgaaaataggctttgtatagagaaagacaaagtagcatagaaagtcaaaaacttttttatagggaaactcaaaaactatatggttattaaatcacttgatggtagtgctgattatcttgtggtatttgaagcaaagctagagagtgaaatcatatggttgatctagctttttgaagaaaaaagtgctgcatcagtcacgctaggcgaggctgctaaagcagatcccatctcttaaccatccacctatcgacttttacctattaagtactggatgaatcactaaaaaagcttggaggtggccctgtcaatgtgactcagctggtataagttttttttatagtcatgaactgacttgtgggtgtcatgtggttgactaactcagcagaagatgcagtaaaatgtatctaaaaagctgtcctaaactaacccgctggcttaaaaggcagcaaggatggcttgtaacttgtcggtgctgatattcaaatatgattcaccttaaattccagttttatttatcaattgttacatttcctaattttagaactgttattggcttattgctgtaactaagtctgtctttttacacccgttttcactctcaacattcagatgataatgatgtggcaatcttttttctctcacatctattatgttattactgaaagctccatgtctgttgttattgtagttgtggaactcagatcacgggc

SEQ ID NO: 15367 - DNA, 893 bp, Brachypodium distachyon
  Intron number 1 from transcript Bradi3g09770.1 (locus Brad i3g09770) derived from phytozome v7.0 (chr-ID Bd3; pos 795 2965 to 7953857)
caagcgccgccgcgaggagctccggaaggagaaaggtaaccttatggttctggtttaaattttctcttccctcacgcgattagactggatcttttttccgtgattttctttttggcctatttgcagtttttgggttaattttgttcatttcggtagctgaccattttagatttgtgattagggaaagggaggagcactagaatggaattcataagttatttgagtccgatgtgttgtggtgcaaatataagagtgatgtggcactgaaatttgtgtgcgactgaattagtatcagatttattgagacgaagcaatcaataaattatgtactctatacgtccaaataaaatgcagaaaatctttagtcacatatttgaatgtaaccgtggtgttcacagtaccgaaccaggccaattgagaatagccacggacatcaaatggcaactaagaaaatttggaataatttgcatgtgatgtgtcttattggtgtgatacattcaagatggtaggtatgattcatgcagcatgcagtttggtgtgattcttgcagcatagttctgccttagccctcaggtaagggacaaggtgatcaattgtttgacagaaaatgtaggatgcacgagaagataggttgttggttcatacatagcgcaaggatgacatcactataattctgtttttctgtgtccattggaagtgggtctgttgaattgaatgctgctgtatcttgaaatgtagaccttctggtattcatatgctataatcagaaatgttggcatgttgcattgtgttatgttctgatcaagtgcttagcttgttgttatctatgtatgatgtgaatgttcttctttctataactaattaaatctttatctgcagagtgtgcaacacac

SEQ ID NO: 15368 - DNA, 763 bp, Brachypodium distachyon
  Intron number 1 from transcript Bradi3g09900.1 (locus Brad i3g09900) derived from phytozome v7.0 (chr-ID Bd3; pos 810 1373 to 8102135)
tataaggtgatctcatctcatgctatttggaataagtaattcattttagcagtggaggcttgatttatataataaaaaatgcacattcttcttattagtcactttggtccctggacttgaggacaacatcatttcagtccatcaattggtataagtggaccaacaagctccaactcctattcttccgtaataagggatggcatgatactcgggctaaatcaaaacttgatcatgagatcaaaatttgataccaatggaaaattgttatattttattttgagtatttgattgaacttttgacagctattatgagcttctgaatacccttattgataatccatgtagtatcatatgaatatgatcattagtcgcgaacaaaatatttaggcctttattgacacatttatataaattttggaggtttaaatgtgcagttctcaagtttacagacctagttaacaaggtaacacaaatttaggaatatccacaggtacacattatgaaaaaaatcagagtgaaactttcatctttagacaaacattttacaaagcttctgatttccggagtttattttgtcagcctatcttttttgaatttcataaatacttgaagtaaaatggtaccttagtaattttagaagggaactaaaacttcttctccgcgttgaaaacataaaccttgtttgcatcaaatcgagctttcagttgttttaaaatgacagcttttatgtttgtttctaattggtacctcataatccacagat

SEQ ID NO: 15369 - DNA, 743 bp, Brachypodium distachyon
  Intron number 1 from transcript Bradi3g42660.1 (locus Brad i3g42660) derived from phytozome v7.0 (chr-ID Bd3; pos 441 39464 to 44140206)
gcaactcccagcacacacattccaggtgcgattttccgttggcatattcctcttcttccttgccgttctttatgggatgcagtgtctagggtcacatctaaatactgggagagtttagttccttgcaagaaagtggcggcctttgcctcccctgtgtagatcagtaggaagaatttcaagtaactgtgagtttttattctgaaactgccgtcctgtgtgtgtgcttgaggggggggggggggggggggggggagggtatttgcctaacgtagtgattacagaactaatctgtaggaggtaagaatgattctggaggcaacattttattattattattttgcaaaagggaattttctgacatgtttaagatttgagcgaattatgcgttctggaaaaagagggtgaggaaaaacaaatggagatttcgggtgatatctctttaggtggcaatatatatcaaatttgtgccatgtcagaaagtaatgcatataaaattttcaaattggtcgatgcattttgaaaagttctgctatcgatcagtagtcatatgcagttatttttcacctacacatgtttttttattgcccctgcctttctcagttcgccctagcagctaggctgttagaaattccaaattcgtctcgaagtagccaacttcaataatttgagcaggggggatgacaatgttcgtactctcttattaaacagatcgttgcaattacggtgttcttccttttggtgat

SEQ ID NO: 15370 - DNA, 1027 bp, Brachypodium distachyon
  Intron number 2 from transcript Bradi3g34670.1 (locus Brad i3g34670) derived from phytozome v7.0 (chr-ID Bd3; pos 370 37403 to 37038429 reverse strand)
aactgcaagtgcaaaaactcgaagtgtctgaagctgtaggttccctttttgaagtaatactgtaggttcctttataatattcttctaaatgatgtgtagcataggaaaactgttgcaattgcagttgccattttggttaccatttagtgcttattttacactatattgtttattgtgaaaatctcagtggctgtacatgcatcacatgtgcgtctgcttcctttctaccaaccaatcaccaaatgctaataataaagggggtgcctgattgatactgaatttaagattcctactcgctcttgttatagctttggtcctatttgagtttgctttccaaaaattccaaaaaataccctgtcagtggaataggaaaatgaatgactgcaacaacctgcaaatgcatttttcatacttccatattccaattactataaatatgaagcctagagcagacccttcagaattatagaacacaaactctagcatgaaattctgaaagatgacactactaagaagataactctagcgactagagtggatcaccagggagtttatgtcccggtttgggtggcgtgctagctctagacttcttagtttgtagatcggttctccgtgtggcctgtcacacttgtggatgtggtcatgttttttcaattgttgagaataatgtacgactttaggctgtatgcattctgaatgcagaggccggaggtaataaagcttccattatctaaaaaaaatgtgcctgttttcatttgaaggttgattttagaagctctagcttgtttgctgcgtgcgttcttttattccgtgaacagattatcctagagttgtacagcaatgagatgctgtattttgactttgtgaacgcttgcattactgatgaactctttccattctctcaagtctcacagttggtggcccctactattttttaataacaagccctttagaagtctactgattggtcttttgattgaatgcatatctaggtattgtgactgttttgcatcaggcagatactgca

SEQ ID NO: 15371 - DNA, 929 bp, Brachypodium distachyon
  Intron number 5 from transcript Bradi3g55810.4 (locus Brad i3g55810) derived from phytozome v7.0 (chr-ID Bd3; pos 559 17575 to 55918503)
ttgcgcaacctgaccaggtatacatattatatacattctgtaaagtagttccttctgtgtgcattgctcttcatgagtttttggtggcttagcaaacgatgagcttcactcggattccccttcaggacatcaaaatggatgatgcaaaatcgagtctctgatgcctttatgcctaattctggttctttgttcattttgctgcattttctgtttgttttaattattgctgtattttgataggttaacatcggatccgatataattacaatctattacttttatggaacagtcggctcttagtttatgaaagtgcaatgcctttggttttctgtggctattgtggggcttagcagatgatgagctaactcggattccccttcaggacatcaaattggatgatgcaaaatcgagtttctgatgctcatatgtccacttgccatttctgtgacaatgtgtcttgtatgtttattgacagtatgttctgccttaagtttggatggttgatgataagtaaccttgcaagttgcaaccttcccactgcaccatcactttagatatttggtttggtctcttctttcttgttttttttgcctaacataggaaagaagctttgaaaacagctgtttgtattggttttcaaattgaagggggttaggttggacatctcctacatgtaataatgctgttcacttgtctatttttttccccagtaaatttgtgatttcctttttgattttcaataaagtgaaggtgttgggtcagcaaacatttagttacactggtgtttcctttttgatttcatgtttgtacaaaccgaccgtgcatctgaatcctgaaaaatactagcacaaggcaacttgtgaatactgtgattaaacatttctaaaccctgtcaccttgtataccacaggctaggatcttagccctta

SEQ ID NO: 15372 - DNA, 698 bp, Brachypodium distachyon
  Intron number 2 from transcript Bradi5g13090.1 (locus Brad i5g13090) derived from phytozome v7.0 (chr-ID Bd5; pos 166 41730 to 16642427 reverse strand)
aaggtgagcagccatttgaaattgtttatttatggtaccagtccttgcactgattttttgaaaggaaattatagccatcatgtgggttttatgcttgcaatcaaattcacactgataatgtactagtttcttcacgtttttttttaaatgtactagtttcttcaaactgttgtgggcgccgtaatcttacttatttaaacagtctttttatggctagttaatggatgctggctagtaatcctggtaccgcccttttaaccattatcgttgatacatattggagtaagtgtaaagagtacagataaccctgggaagattcaggcttctgttgtaatctgttgaaactggataaataagggagtttcatgtgcattctgtcagaactttgcactgaattaactctccttttctgccgaaacctcttgaattattagtactccgcagtaagctctgaagtgaatatgttgcttacgaattgcttttctccattatacttgctgcctcctgtggttgatgatatcatattgccatgatcataaattttgaatatttcctcacccctagtgtgatgcacctcttcaatggtcagttgtaatctctgaaatgaatgattttgctgcttacgaattggtactctgcattacttactgcctttgctttcaggaaactttacccagcaaccagcatccgtcattacc

SEQ ID NO: 15373 - DNA, 1011 bp, Brachypodium distachyon
  Intron number 2 from transcript Bradi4g16980.2 (locus Brad i4g16980) derived from phytozome v7.0 (chr-ID Bd4; pos 178 13627 to 17814637)
gcggcagtttatttctgggttcactgggagcgctggtaagtacggactcaatgcatgcatcgtctgatccctttgtgacttgtgatgagttcagatcaccattgtctagtagctagtcagcactaagtttccttgtctttgtatggttttacttgcgatgagttcagatcaccattgcctagctagtcagtattaagatttgctgcctttatatggttttattagctgtttcggcaattgcatactacagcaatcgcacgtggcaacagtgaggttgctaaaggttgcatatatcctaacacggcttggttgacagttgatcaaacccactgagtgtcagcttcgtgttgtgttgtttctgtttggttagcttttacacgattacaaactaggaatttggggttcatatggggttattaaattgtagactgctatttgacttgacccacggctgcaggaattgctaccttcatgtaatcatgttaagtaatttttgaagctcttctgttcttggacaaatgttcaaagttgcacttgaaatgctgtgccatttgtgaggctggttcttttccatgtcagtggtaccttaactgtgtcattagtaggcttgcgttccctctctggtctggctctcctcctgtgttttattgtgcatcacgaatatgttccagtgtccgtcctaaatggacccaagcatgaaagaacctcatttatatcaaataagggctaaattgttttgtagtccctccgttccatagttcttgtctcaaatttgcccaaaatagatgtatctattcctaaaaagtgtctagatacatgtaatattttgacaagaattatggaacggagggagtattagatattggtatgcagaaaacgtgagttcaccaacatatggcgctgttatgttaatttctttatttttattgttgttagttggtttcttagtcagtgagtatcctgaattcctgtatagggttggctcttatcactacaaaggaggcattattg

SEQ ID NO: 15374 - DNA, 1051 bp, Brachypodium distachyon
  Intron number 1 from transcript Bradi5g15330.1 (locus Brad i5g15330) derived from phytozome v7.0 (chr-ID Bd5; pos 186 92477 to 18693527)
cgacgacgtgaggcgcaagcccaactgcccaaggagtatgtgggctacgttgcgcctccacgcgtcgtgctttgcatgaccacgttcggtgtcaggcacgaccaacacggggaaccgcaactactgtcaccgctcgcgcgcaggtgcaacgtgttcaagcgacctcatggcgtgccggatacaatcacggaccctctagcattctggatctaactaacacaatcatggactattctttctcgatgtaagctagtcatgggaacaaaaatttggatgcactaagacattttttattgtccggaggaagtatgtcatcatatcggtaataccattggtttgaaggattgcactttataaaaaatgagtcttgaaactctagaacacaatcctttaacaaaacattgccatcctatcctggttcaggagtacagaagaaaccggaagttttgaatcagggactatcatcatgcatgcatgcacattagttcactattttttatttgttgccaagatcacattagttcactataataatgggaaattgcaaaggaaataattagtgggagcagttaggaggtggatatcggagaaacgggagctaggattgcggatcggaagaaaaagagaaacgacgcttgaggcggaaaggcagagagcttaggtgtcattcataggtgagcagtttcctcggccgtagtaatgctttgattactcaacgtattcaaccttaattagcagtactaataagcacaaaatcgggggccctgcagatttgggggcctttgcacgcgcacagcctgcacaggtgcccccgtatgaacctatactgaactgcacccaaacaccattacagacttgcaattgccgccaaattccattcacatggagttgaattcagaatagtttgagaccgatttagttgtatagaccaaacataccctaacatcatttctcgggggagggcagtgcatgcagccgcacaatgtaataggaggtagaacgataagtagcaggtgttgttgtcaattgtcaggtgtagaggtagaacgac

SEQ ID NO: 15375 - DNA, 985 bp, Brachypodium distachyon
  Intron number 2 from transcript Bradi3g58290.1 (locus Brad i3g58290) derived from phytozome v7.0 (chr-ID Bd3; pos 578 58326 to 57859310 reverse strand)
aggaggacgggagcgtggacgacatactgagcaaggtatagccgtgccttaacgtttgctgtattgctttgcagagagagttcaagtttgagggagtaatacagctcgtccaaattggatgcaattcctcaatcttccgtctggaaagatgggggtagtgtagaatttaccaacatatacgtatcacagactgcaactaaatgtcccccttaagtttaatcgcaagttggcattatgtgggattacatcaaactaaaatgatgttagcgtgccagccattggtagacgcaggaaacaaatgacacttttgagcaggaaatatgttactccctccgatcctaaattgttgtcgttgttttagtttaaatttgcactaaaacaacgacaataatttaggatcagagggagcagtatgttcgccggtttccatgtaaccgagcatattgtggtagtaatgataactgtgtagtctcctaaatatcaatgagaaatcaatagtagcaacatgtttctctaaggcagttaacataacgaaagagtaaccaggggaaaatgtgagtttgctgatctttggctcagcatggctgttcaagctaatgatagatcttaacatagcaagctgaactctatcaccatgcgtacttaatctgagaatcagtaagctgagctctatcgccgacataagactagtgtatatcaccaacataagactagagaacaatttgctgaaagttggagcttcgattgagcaattgtttgtttttatgaggttgcactgtattaaatcagtcatatgccatgccatagaaatgtacaacttaatatgttgctgcattgaaggctatatcatgtacactttcatagtttcatgaggatgttatgcttatgcacctcttgtttgttctttaatggatttttctgtcttggatgatcacatttattttgggcttctcatttcagttggacatcgaagtgacacccactt

SEQ ID NO: 15376 - DNA, 911 bp, Brachypodium distachyon
  Intron number 2 from transcript Bradi4g14800.1 (locus Brad i4g14800) derived from phytozome v7.0 (chr-ID Bd4; pos 154 37849 to 15438759 reverse strand)
ggagagttgttctcgcagcacgagattcacgtgtgtgatcggacggcatgcatgcgttcatcaaatggctctcgaggcggtgcagtggattttatcccataacggacacctactattttccatttctaaaagtacaaaccatatataatggccgataatggacttattatttctaattaaaaatcagacaacttttatatagcggaacagaaaaacaaaacgtactaacctttcattgggcaccggtcttcggtgatttaagctcgtcggcgacgaatctgacgacaccgcctccgaccgcggcggcgagtaggagaggaaaggcaggtggtggggaatcgtaggtggtggtgcggctccctccctgccgaggtaactgctctcatgattcccgcatgaatctttgtgctttggttagttggtagttaatggctgcaagcaaacaaagcactccttccatcccatattaagtgacgaaatataacatgtatatagacgttttttgggtatagatacatccatatttgggcaaatttgagtcacttaatatgggacggagggagtatcttattacgtggaagagagatttgcaaatgagagtgttgtaacttgtactccctctgtccaacaaatgatgtcttaactttgactaaatttgaatgcatctatatattaagtcatgtgtagatatattcaagttttgacaaacttgagacatcttttgttggacggagggagtaacagatatcgttgaggaaccacatgtgagaaaaaaaaagatatgcagcctgcggtgggacagatatacgtgatagatggtgagaagatagacggcaacaacaaacggtaaacggcagcaacagataccccgcattccgcgaaaactttttcagcacgctccacgcttaggg

SEQ ID NO: 15377 - DNA, 703 bp, Brachypodium distachyon
  Intron number 4 from transcript Bradi3g55560.4 (locus Brad i3g55560) derived from phytozome v7.0 (chr-ID Bd3; pos 557 79814 to 55780516 reverse strand)
gtcccagttccggtgagtcttttaatcctttaagtcagtttattaagaaatactagtattgtttagctatgtttgattttgcgtccttagtaaccataataattaagttttgcctccaaggaagcttggaaaaatccaatcatttgttgcattcactgaagtaggtaagatgattgatagaatatccatatatgattaacattcagctaacatctcgtcaaaaaatcacaccaaatctctgtcaattggaccattgaccttaaatgccattttacttcaataaacgatgggatggaaaattcttttggaagtctttagatataatgtgagataaattacatgtggaatttcggttagtctgaatctttgtttttcttgaatagtttctttactcttcgctagttcttctcttttttcttttttttgtaatatcagattgaaactttggctaccaagtctcattcgtagggttttgcttacagagctgtgattaccgccttcaccataccatcataggcatacattagtactcttaccttcagtattatctgcaccattgatcttagagtgtttgcttctttttccaatttctcttttgttcagaaggaaagaacccactcgaaatggctgctacatctggtattggcttccattccactacatttgcatctctgatgaaagagtttcttttttcttccccagc

SEQ ID NO: 15378 - DNA, 951 bp, Brachypodium distachyon
  Intron number 1 from transcript Bradi4g33450.1 (locus Brad i4g33450) derived from phytozome v7.0 (chr-ID Bd4; pos 391 27298 to 39128248 reverse strand)
cttcgattcaggtataaccgggaatcttcatccattacattggttttttacttcctgatagaggtgtctagctaataggtggctctgttgtaatcaaatccaaaaatggttgccaacgaagcatcattgaatgttaatgctcagaagtaaagttaattgcattctcatggaaaaataagaagtaaaattagttaactgagaactaactcaatacttatcagttttacgagatgtatatacattgtggagaaggaagtttcctctgttatgtaagtagatgggtacctcaagcaaaggcaaaaccgtagagctgaccaatggactgattgcctatgtgcatattcttcaatctccagtacaattgtcttattgaattatgatatcttgattgttttatgtaagcttcagtcgaggctatagatatcttggctacctattagtaccaacatggttgtctttgtcttaaacctcaactgaagatgattttaatgaacttttacacacagcctccaggatcagtaaggtcacgtctgcatcagtttagcttgatgaggtttattaactagatctagtgtctaggtcgtataatccattagaactaggtcttgggttatcctccttttcgaaagaaaataatccattagaactaggtcttgggttatcctctttttcgaaagaaaataataattacaactaggtcttgctaaagcctaatacctagatagatgaaagcaagcaaacagatgtaagtttttcatttgcttagaagtattcgtagcaccttatctaaccttactatccgtctacatttgttttatccagttcagggcttgcatatgttataggtacacatgttttacttgtttactttttagtagtagacacccttgacatgtatatgcacgaaggtacaaggtatattcatgaatccttttaactaaggttgaagga

SEQ ID NO: 15379 - DNA, 565 bp, Brachypodium distachyon
  Intron number 1 from transcript Bradi3g59130.2 (locus Brad i3g59130) derived from phytozome v7.0 (chr-ID Bd3; pos 583 69298 to 58369862 reverse strand)
ctttaggtccttcatttttctgccgtccctgctactatacctgcccttctgtaccattatctgatggagtgttaaaatacataatgacttgattcctgcattggtgttgtgtttgtagttgtgtccatcttttgtcaagttcagaggagaaagttgtgtactgtatccaaaagatctgcaaattagactggaactgagaccaaggagaaatggggagaagcttttgattgccgtggcaacacaaactttattgctatctgtagagtcaaagtccatgtagatgaacgcattgcatagccttgttgatcgaagagcaaagtggctactacatgtgtttaggcattgtaatttgcagagcatctctttagaaatcagatagaccacaagagaaattcatccacattaacacaagtctcaaatgcctagcttgagccttaactcccaatcggtcattttaaattaggtgaattgcctgtttattttgtttataccatcaatctaatctgtgatgggttctcatccttttgcagtaattactgtcacacggatttgcagcactcagcaa

SEQ ID NO: 15380 - DNA, 916 bp, Brachypodium distachyon
  Intron number 2 from transcript Bradi4g35120.1 (locus Brad i4g35120) derived from phytozome v7.0 (chr-ID Bd4; pos 406 03710 to 40604625)
ctgaggccattcacttcaaccctggcaactacactgtaagtctgttaataatctctcttttcttagttttagtcaagctgatgaaatttattttgggatggcaacgtggaattttaccatggagtttcaattgtttggtaatactcggtttgttaagtaaaaagtataactgtgatgctggggttgaggttaactggatatgatggaaattggaaacagtctctgatccagtacaattccagtccttaattatgatacatgaggcttcgaattagtaaaggagcaatagttcttgtatatggtcgagcttatgcggagggccattgtaacactccagccaccccgggcccgtagcagttattcctggcagctctgtaggctctatactggccccacagaccaacacaagtcttccccgcgcactttgttctcactcgtgtgcacccaggtaaactctctaggaggtcacccatcccaatattgctcccggccaagcatgcttaaccaagaggttctatcgagatgagcttctggaaaagaagatgcatcttgttaatatggatagtctatcaatcctattaagcttgggccaggatgtcacagcgatccagctatgggcatgtagcattgtcttagagaaaacggtggagctgaatttagaaagaagattctgactaaatgtttagccatttgagtcttgcagctcctgatatagtttaggatagaaaggggaatgtgattagagttttatttcgatcagaaaggctcaatctgtatactttgccgtggttttgtagctagtgcagcggattttctttttaagttctgatgctggtcaatcctcttttttgttaactccatgtactgttttggtttgataggtgtggcatttcaggcgtcttgttctggaggcact

SEQ ID NO: 15381 - DNA, 980 bp, Brachypodium distachyon
  Intron number 2 from transcript Bradi4g45390.2 (locus Brad i4g45390) derived from phytozome v7.0 (chr-ID Bd4; pos 484 86246 to 48487225)
atcgccaactatcccgacaggatccccgtatgtatctgcccccttccttccttcttttagtttgatttctctcggcttaatttcagatcaaatcggatcaatttcgattgtgcacgcaacatcacgacgcaaaatagctagggttccaacaactgaatctacactttaccactcgtagaatacgaacactagttaggaagagggttcctgtgctgagcatactaacttgaaggaattgaattcagccgtggaccaacctcaagctggtaatgctacgcccccaaatgagtttgacaagcgagaaatatgcattgtgtctagcaaattactactgcagctttttatttaagcttgattccacgcactttgtagttgggaaaagacaaacatagtgaatatacacatattctgtttatgcgccttggttaaggacagaaaacataaaaactttagaaactggtgatagctgaacaaacatataaccccacaaatattatttgttctggtgactgtccactgtgtgtccttgttcttcttcttcttaattcgtgttcttgctgacttttccaatcgaggccaaaattgcatacaggggaaagctaggcagaagaatgtgtaaatttgatatcttctttgctggttgttaggatttagctcccctttgtgtggcgtagtatttttttcccttttgtccgcatcggtcagcctgtccatgcgaatgtgcttttgtgaatatactgaatagaccttaaaagagatgaatcctgataactaaaaccaatttgtcacccaaacaacctagttaggcattctgctctccagaaattaaccaggtttgtggctagattatcaaaactatatcctgcatttcccctagccaaaggtcttatctgtttgtatatatgcacgttgcgtcagccattaagttcacatctgtatttgcaggtcattgtcgaaaggttttcgaggagcagtcttcc

SEQ ID NO: 15382 - DNA, 719 bp, Brachypodium distachyon
  Intron number 1 from transcript Bradi4g27420.1 (locus Brad i4g27420) derived from phytozome v7.0 (chr-ID Bd4; pos 325 58982 to 32559700)
aggtgcaggctcctttttttcttcttcattaatacctccgttgtccgcgtgaatgcgtgcggccattgcgctcccgtttgagaggttttggctttgcttttaccggtatattttcttagactacctctttttccgtccttcctatttgaggggctcatcgtcgggagaggtttagatgctcgcccttctttttcactcggtaaatatttgttttggaaagggagccagagccaaaaagggacaatatttccttcggatttctcactacgtggaagattatggttcttgatttgacgattcaaagtataggataactgaagagataatcattcaccgatttgatgatttattcgccaatgccaatcaggaatgatgcggtttttttttgtgaacaactgagcaaacattgctcatccaattaattgcggaatgattgccatcttatgatttttcaattgccgaatgatcgtcatctcatgatttttttcaacaaattgtaacattgccaacaccacccaattgaatttcagcattcttgtaccaatgttgggaaaacatacttaataatgtattgttcatagttcagatttgtggttttatattatgctatcttttgtgtcttgtacagattttgattgtcgtttagggttgagctttgattgaattatttctgtttgcgaataggagactgtggataatcaagtttttgagggtctgaa

SEQ ID NO: 15383 - DNA, 1000 bp, Brachypodium distachyon
  Intron number 1 from transcript Bradi4g02610.1 (locus Brad i4g02610) derived from phytozome v7.0 (chr-ID Bd4; pos 187 5484 to 1876483 reverse strand)
accgccggcccatcttcgccggctcgcctcgcctcgtaagcgcccgatccccttctgtggcctctctctcgattagggtaattctgcaccgcaaatcaggtgggggatcagacagttgattgctttctttccgaggcttaaagccttaaacccagatcgaccatcgttgagtacactgtctggtgtaatcaccgattcctgccgcattctctgtagatttatcgcatccgatgctgcagttcttgcaggttatctgcagcttgttgacctgttctggtcagttgttagggcatgtacatatcttagtcatttcacgtcaattagaaaagacaacaaaacatgttgtacaatgggttatttcttagtgttctatcttagaattaatgtttagatgaataaaattaactaaataaatgataagaaaaggcgaaatctagtacaatggtaaatttgccttatcattcttatgaagagatcatctcttaattaagaaaaggtttgtgacttttcttcatttctctctcttccacatcagattttatcctacgtggcatcgctaagagaaggctgacgtcacctcattgtacatgcccttagttagcagagcttaatttgactgatgtaagtaacaagggtcacctgccgtagtttttttgtttgtttgaaggaacacctgccgtagttcttatgcttggttttcattcctaactagtagcatgtggtggcacttgctttgattgctatccagcgtctagtttcatgcacaatttctttgttttgtttaaatggctgcagtgcaaaagtgagagaagtttactttacttccgcctggttgccaactgatgttctctctttctgttccaacgaatgcatctagtatatgttttgtatgtgcagtaatatatatatatatatatggtgttttcaccggatataccaaatgtgtaatttccacgcctcttcaggatacatatcctgtaggagtttcgctgtgcgaaac

SEQ ID NO: 15384 - DNA, 986 bp, Brachypodium distachyon
  Intron number 1 from transcript Bradi3g56080.1 (locus Brad i3g56080) derived from phytozome v7.0 (chr-ID Bd3; pos 560 92557 to 56093542 reverse strand)
ggcctcaggtgcgtgctgcctccccgcttctcgcccggatctctttttttttcgaggttgtacttaccaattcacgaataggaaagggcgatttgatggataacctttatgttatgtaaagtttctaggacctgaaatgtgaattcacacccaatccgtgctctgaagacgatctaggtgttatcagtgctgaggaaagaccgtatatgcttagttataactcttgtgatggacgactgtctagctctgcaattttagtaatctttgaccaaagagttaacacttctggttgtcgtctgcaaggtttgcatggatgatgggttgggcttaccatgggatgatgcagcaaaggccactccaaactgaagagtggcatttcctgacatctcattctttggtgaagacccttcccaaaatcatcttctcgtgagaaaccagaggatgcaagacatgagcttatgccctgaaataagagcaacttaaaacaaagagtgagagtgaaatcacaaaacgtgtctggaattataagagaggtcttttacttgacttctctgttcaacttctatttcatcagagatgacaaattatatggttgggaacttgctttcccagcagtttatggtggtgataatatctgattagttttcttgaaataacttaatggcattaactcacatcccctgtgttacttgcaagcactaaccttgttgattctttgtatttgatgaattgatcttaaagtgatgtttgtatttgatggcttgatctaaaaatgatgtttgttcccttggtacttgagaacaataacgttgtgcatattattgtgtaggatcctttttttttgtaaaattactggattgcttctttgataatctattttagcatatatttgtgacttgtcccatattttaacttcttttttttttgcaggattgcatgtatttgtctatttgatgtttattaccttctgagttcgcaggatttgc

SEQ ID NO: 15385 - DNA, 437 bp, Brachypodium distachyon
  Intron number 3 from transcript Bradi4g30260.1 (locus Brad i4g30260) derived from phytozome v7.0 (chr-ID Bd4; pos 359 62842 to 35963278)
accgggcacttctaaaggtcaatattgagaacatatgatctgacctaattattttcttaggatttctacaataatacataaaacaaggctagtctcgagatgtacctcatgataactaatggagagagttggctatgtagtgaggcagctagtgatactatgtatcattaatcattacattactttgccatctggccacttctgaactggaatgaatcctgtcaatttattttgcgaggttgcatctactgactttgatctgatgcaaactatttggtcttttcgtaaactgctgaatataactttagataacaccaacaatacagataatatcagtaggtgctcagttaaaatgtgaatcttcaactaaagaagttttcccctgtactgatttgtatttatacactcacgtagtatgtttctacaggtgattaaat

SEQ ID NO: 15386 - DNA, 899 bp, Brachypodium distachyon
  Intron number 1 from transcript Bradi3g56480.1 (locus Brad i3g56480) derived from phytozome v7.0 (chr-ID Bd3; pos 563 45896 to 56346794 reverse strand)
catcaagcgcaaggacagcgacgccggcgagaccggttcgttctaacttctaacttcttcttcttcacttcgcccggtcaattcctgccttttgatgatatgcatggttgattacttgcagttttgattgcattttgctctccagaatccaagagattttctagaccagtttggcgccgcggctttttcgcaaaaaaaataaacaactgctccggccttctcgcatttgcggttacgatttttttttgttatactgcacggctttgtggcggattttggtgcgcggggaacggcacgaaagctggccccttttcgtggtttgttggtgaccatttcctcgcgaacggcaaagctcttgtttggctttgttgttctgctcggctcgacatgtaccgtttggattcttttctgtcgctgggttccggggccagtcaacaaagtgtgacgttttttccccttgtttcggatcggcacttcttcatctttctttttttttttgcggataagcacttcttcatcttcaccggtgatgaagctttatcttcgtatgtttgttaccatggggcgagttctgcatcaacacgattaggaagattcgtaacgtcccagtgcatgacctacactgacgaacaaaaatacggtccatgtctggcatggcgtcccagtccattcgttcccatgcttctgctgcagcccatctcgctcgctacaaaacccctatttgaaggtccaaaccccatggacgtgcacagggtggaaaattaatgcacaaactcaccagtgatcaagaagaagaagaagaagttttatttttcttcaggattaattcagccgctgacttgctgtgggtcctacgtagtacaggtcgggcgctggaggagctgcgaagctccctgtac

SEQ ID NO: 15387 - DNA, 1058 bp, Brachypodium distachyon
  Intron number 2 from transcript Bradi4g32480.3 (locus Brad i4g32480) derived from phytozome v7.0 (chr-ID Bd4; pos 381 36108 to 38137165 reverse strand)
cgcagcgctaccctgagggtgggaggatctaaccggtgagttatttcatccggggcatgaaatttgtagctttgttagtttggaagagtgaccagaccatgaaattatctgcgtctctctgaattctgctttgatatgttttttttttgtactcttgggtggcgatgtggtgcacaaatagtagttttagtgcaatctgggttaactgttctggttttttattggccagctcccttggaagtgttctgacgcgtcaattttgctgatctctcagttcttacttctcatcagtgcccgtaattaatgtccatgcctctgttctgtgcgtgtgttcaattttatagaaggattgaagaaggattcaaatttggggcctaataattcttcgcatgtactccctccgttcctgttttagtgcactaaaacaacgacaagtatttaggaacggagggagtataaattttcaagagatagtgacataaatatacaactgtaattaatgtttcgtgtcacactgatagtatgatttgaattgtgtatattccatcggtgtgatgcaccatttccagtggaacactatggtaaatgggtgaacatagtgctctgttttaacacaatacaagggctgtactgtactacactactactaatcacgaattcctattgtcaatgttcatgattgtaagtatagtttgtagaaataacatctctctttaactcaactattcattttcagtgggtttgtactgttatgtcgagaattttgggcaggttgatggattatggttaccactgtgtgttcttcttcaaagagaactgctgaaatattaacaatgcagtagaccttaaatgatcttttttgtcaactttaccatgctcccatattttttatatttgcatatgttaatgctagaaagccaaatcttaggatgtcctacttgataccaaatcctctcttttttttcccttctaatcagcaatatttttctgttgtaacataatgtgtatcaaaaaaataaagtttttcatttgcaggagagacttctcatatattacat

SEQ ID NO: 15388 - DNA, 1059 bp, Brachypodium distachyon
  Intron number 1 from transcript Bradi4g08660.1 (locus Brad i4g08660) derived from phytozome v7.0 (chr-ID Bd4; pos 776 5129 to 7766187 reverse strand)
gcgacccttacgtcgtcgtccgcctcgcagatagggtcagtaactagcctgaatcttggccgagtacatttaatttttatacgcactcctcctgcttcttgagttgatagcctgctaggattccttccagtggctgctgattttgggttggttccaggtctggggagacgtttctcttccattatctgaaaaaaaagtggctgctgtttctttgtgattcagccttttcacatgtgcaagcaactgtgttttggtcccaaattgaacatttttcttggcatgtaggcatctacatattatgtacagttgtgttaaaccattcgtaggtataattagttgacctatttactacggaaaggaaatgatttttccatccgtgctcttggttacagcttcctgaggagggagcaagtgtttgtcaattctaagcagagcacctgcctgaaacattccgtcaaagatgacatggagcactaaagctgtttacgacctggtccttttttctatacccattatgcttttgattttcatagtgggttgccaaatctactccctcatttttttttatcatgtcatgatgagagtcagtcttgtttctttatcaatgggagcaccattggaatattctctaagcccctcctggaggttaatttcatcattccttaccgataattagttgtctattccttcaactcctggagcaatttgacctcaacttgggtccccttttgggataatccatacttctcatattgagatgctagcaaacacaaaaattctcaatttcatcaggaaatcatagttttatacttttatatatatctttcgctgccggttggaaaactgagagctctcaatcttatacttgatagtgttgtattttcagaaaacatttctcactttgacctagcaatttgatttggttgaaatctgtcaagctcatgtgcatttgtttatgggcggagaagttcttcactgaaggctaacgctattcgttgttcgttattttttcttcacctgacagaacgcaaaaacaaaagtaatcaacagttgcctcaa

SEQ ID NO: 15389 - DNA, 756 bp, Brachypodium distachyon
  Intron number 2 from transcript Bradi4g05810.1 (locus Brad i4g05810) derived from phytozome v7.0 (chr-ID Bd4; pos 482 5831 to 4826586 reverse strand)
tgttacccgactgtggtgagtattagctgacagtggaagagtagcactccgttatttgactaaatagccgacggttgaaggtgacacactcggctatttagctagataaccgacagttagggtggaacacttggttatttgtctagttaaccgacgggttcaccaaccactagggcatttgattttatagctgacagtggaagagtagcactcggttattggactacatagtcgacagttgagggtgacacactcagctatttgtctagataaccgacagttagggtggaacactcggttatttctctagttaaccgacgggttcaccaaccactagggcatttgacttcatagctgacagtgaaagagtagcactcggttattggactacgtagccaacggttgaaggtgacacactcggctatttagctacataaccgacagttagggtggaacacttggttatttggttcatgagtcctgactattgcaatatttagtttgcatgttcgttgggagaaaatcatagagaatctagaagcactctttcttttgcgactcgccatacttatttttatccattaatttagttatatggtaaattatgctatgccaattccatttatcattactgtttttccaattaatcatgttactaacataacaatgttctctggtattaaaaaaaacacagctatgttcaatacactaacttacagaatattttcctttggaaaggaacgatttgagactgga

SEQ ID NO: 15390 - DNA, 850 bp, Brachypodium distachyon
  Intron number 1 from transcript Bradi5g15970.1 (locus Brad i5g15970) derived from phytozome v7.0 (chr-ID Bd5; pos 194 02469 to 19403318)
accccaagcgcagcgcccgtgactcccacgtccccgtaagtaaattaagctaccgccttcgcctagcttgcctcggcctctcctatcacatcatatatatgcatcatgccatcattttgattcatgcatgttgtctgatttaagttcttgcgtccatgaactagtactagagctgcatggaaaactggaaatacacttgatgcagggtctctgaatattcgctagtggagtagttcgtcaatcgtcagtggtcactactcagtactagtgatcctataggactataggccggcaggcaggtagccagtttggtacagtatatatttacagcaactgtgaggtggcaaaccggtggtgattaacattaaacaagtattttctcttgatagggacatatatagtgagaaagtccaacagaaattttttgtgatatgatttttttgcatgtacttttattgctaagatttggtgaaccatctctttccaggacatcatatgaatatgatttcggaaaacaaaggcggtttgttcttgggtactgtagtaactgtatggttgttatggtgaaagctaattaaccttaattaaggtactataggatgctactgtcagtactaataagttcttgggtactgtagctctagagttcaatcagcaactaattagttgacctttcttggaatattagctagcatgcatgcatgtaaacacatattaattcgtgtgagagtactggatacataatcgtcttatttatattatttcttcaatgctcttgattgctcatgacatgcgtactgtgacgatttggtcaggtcctggctcctctgccaatcgggttcgcggtgtt

SEQ ID NO: 15391 - DNA, 674 bp, Brachypodium distachyon
  Intron number 2 from transcript Bradi4g36490.2 (locus Brad i4g36490) derived from phytozome v7.0 (chr-ID Bd4; pos 417 07986 to 41708659 reverse strand)
tcaaggtggggaattttctttgatcgaacctcttttttcttactttctattatcattgccttgatgtatgtggatctaacccatgacttaagtattctattgtttgatttttgtgttttcaaacactacctttccctgatactctatgtatgcatgtacatttgatacattgtatacttgaatagattggggccacggtgtttgcctcccaagtcccatgcatggcaacatatggtgttgtcgcataagttaactgtatccccaaaatcaataatgtagcagtcactgttgtaaactcgaaaactacctcattttggcaacttttgtggctccatgaatgatccaaggatctctgttcagtaaaaccatctgttctctagattataaaatatcagaacctgtgaagaatacgttggtctattttgagtttgctggatatggtcatctttatcatgttgcagcttttgggtttgagtaatacgtgcatctttcaaaggatgtaaatcttcattattttagtggttagtctgctttgttttcaaattctgcctaatttcatatgttttccttttctcaaacacatccgttctccacttgcttataactgatatgtgatgtttattatgttcaaactcagtattacattgtggtaaattttcttattaccattcagg

SEQ ID NO: 15392 - DNA, 788 bp, Brachypodium distachyon
  Intron number 2 from transcript Bradi4g44120.1 (locus Brad i4g44120) derived from phytozome v7.0 (chr-ID Bd4; pos 476 37660 to 47638447)
ctcgccgtcgcagattcccagctttcgctgcgcaggcaagtggggatttttcttctacctttcccctccttcacctaaaaccggggttggtttctgtctgtgggcggctctttccgcggaaaggaagataagttcgacggctgttaatcgagaaagagaccatgggatacgaaattcagaacatcatcttttagtggtatggactatggagagtttgtagcgattaaaggtacacatcatcttttagcgaaaggccaggttagcccagcacagatgatatggcaagttagctagctttcattgttgctctcgcgtaggcagagaacggcagctcaactactgcgcctaaaagagcatgaactgataggtgtagggttcagcagacaggtgaagaatgtcgccatgagctatgtatgcacctagtgtcttagtctcaactaaccatatgaatggtgaacgcagcagcacgacgctgaacctaatccacttgcctgctacagttttatttgcttatatgctcaaaaagtgttgtttgtgtcatgcttactgttgatttcatccttaaatagatataagaaattcaaaaccagaaagtggtcacaagtaggaggcaaactgtcaaacatggggatgggctgtttatcctcagattgtgatctcactgaaagtgccattctttccttttcataagctgagaatcttttgtcacatgataatggccgtgtatgcctttctcttcatactattctccaggaccaggaccaggaccaggagccacctttcccctc

SEQ ID NO: 15393 - DNA, 973 bp, Brachypodium distachyon
  Intron number 1 from transcript Bradi4g09250.1 (locus Brad i4g09250) derived from phytozome v7.0 (chr-ID Bd4; pos 855 3624 to 8554596)
tcagctgcgcaccaagtataactagttccacatcggtaagaagtacatgggagagcagtacttccaacacagattgggcttactctctaggtcttggttcatcttgcagtgagtttgtggccaacgacgataaactcatggcgtgcagcatctggcaagaaataaaggggacgagagggaaggtagaagatagagctgacaggcgggccccatgtacatctcagtatgtcccattgtcagtttttctgtcaatccacgctcaatatgctaattagtgctcggggtaaccgttatccccaaaacggtggcgatttgaaaaaaaaattagaaaaaggaggttttcctagaaggttgccccaattgctatggttttgaatagttttctctatactaaatccttaacacttattatagactggagaggcagtagtatatactttttttttaaaaggtatatactttggggattcctcctcacatttgcttgcatggttccggctgttcattaacacgcctcggtcttgcatgtcaatcacatggcgctgcctgcatcgaggcatcacttttttttaattgaattgaatcgaggcattaattatttttgaattgaaagcgaggaatcctttgtcaggactcaggactaattatggccacttgtgcaaagtgattccaaattgctgctaattcaatttattccaacttgtttacttgactaattcagttttttcgtcaaaaaaatacttgactaattcggtgtcagaaacaaaattgtcacatggcactgcctgcatcgagtcatagcttttaaaaaaaaattgaatcgaggcatcgcttttgtttttacaattgaatctacgcagatcactttagttttttaagttgaatcgaggcatcacatttctttttaaaattgaatctagccatcacttttgttttttaaatttagtcgaggcctcatttgtcaggattagtt

SEQ ID NO: 15394 - DNA, 895 bp, Brachypodium distachyon
  Intron number 1 from transcript Bradi4g06840.1 (locus Brad i4g06840) derived from phytozome v7.0 (chr-ID Bd4; pos 571 2903 to 5713797 reverse strand)
cattcgccgccgccttcctccttaacccctctcaggtaaacccttaagccctagctttgatgttttctttgatctgcttttccttcgctagaattttttgcttggtttgatgtgatccctcgcgggatatgttgccgcgtttgttctgctgtcttttttttttattgcgtacggatatatagtttttcctgcggtggatggttcctcgtgttagggtttggctgggtggtgagggttgttcggggagagttggagtgtttgggtttggttactttgtccacgttgtggttgcgtagcaatttgttcagtgttaacaagttggcggcctgcagattgggatcccttggttgattcttggaaggtttggttatgcgcggagtttttgaattctgtctgaaatcttgtttggcactaagttcacacaaaaacttttttgtaaatacccgcaagatgttaatttctcactaccgtgataggaaaaaattgttggtatatacactatagaagtcaaggttattccagtttgatgaaaagccttacagatacttgctatcttgtctcatgccaaatttctaattttctgttgttaatcattactccctccgatcctaaattgttgtcgagatattacatgtatctacacgccttttaagagtagatacatccatatttgagacaagaatttaggatcggagggagtagtcaatacaaatgtcctgtaggaaataggatgcctgcttgagcgctccttggatgatagcatacctatgtgtcttcgtgtaactgggtaaaagttagggagaattagtcattgcagtatgttagcatttgttgctgctgctcttctttcttgcattctgtgattaacaatcttgttgcattgcagattggaact

SEQ ID NO: 15395 - DNA, 1040 bp, Brachypodium distachyon
  Intron number 3 from transcript Bradi3g49420.3 (locus Brad i3g49420) derived from phytozome v7.0 (chr-ID Bd3; pos 507 78408 to 50779447 reverse strand)
ccagtggatagcagttagtaccctgttcatcttatctactcttaaaggatttaactgatattttccccttatattcgcaaattgtctgcagatccttatttaaatctgaactctgaaatttaaaaaaatatgcaacgtgtttatccattctctaaataatgttttcaacgtaaaggaatatgtggtcccgtaacagcttgtggaagggactaacagtagtttatactctatggctggtaggatgcttatcactgtaattccactaaaccagtgctgcatatatgaaagtagatcatgcatagatacacttcgatataaatactatggtggtctattatggtctataaaggtagtgtgttctgaactggtgcttctattctatatatcattttgtgctgttgtcccacagatttgcctttgtatttgtctagtgtgtactagaataatattaatagggctgcaaaggttctgtttctgacatataggtagcaacacttgtttatctactaatgttggcaaaaggctatccaatcaaaagttggccttcttgtgtttcacgacaaaagcatgcatatctattggaagtaccccctctgttgcaaaatgtaaggcgtattttgactgtccaaatccatgctttggaccaacaattaatccaataaaacatgtgttatgttatataaattttacatcagggttgacattattttactgtcaaaaaatacctaatctggtatcactgccaaactgacattattttgtacagtaaatagattgatgtcatgtattttctataaataaagaaagaaataaattgtggagcgttcaagaaatattccaaattgtgttgaaaagggatagctgaacattggggttgagcttttcttcagtaattatgtacctataaaaacaagtgtgttttattctgatgacatgtaagcatgtatgcaaatgatgttaacctttttcattatttataataccaataactggatatgcttacagaaaaaggaaaatacaagacggaggaagactgaaga

SEQ ID NO: 15396 - DNA, 1034 bp, Brachypodium distachyon
  Intron number 4 from transcript Bradi4g37350.1 (locus Brad i4g37350) derived from phytozome v7.0 (chr-ID Bd4; pos 425 10808 to 42511841)
ggctgcactggtcccaagtgagcacagcaccctgatcagttagattagcttgcatatgtctggatgatccccgttttagtttgattcgtccgtaaagtgtagaacactgtaggctcacaccaaattacatgtcatgttgttttatcgcaggatcctgcttatggtggttatgtgttgcttttgtttgttagtttcccggttctgccgttgttttagtaaacctttttgccagctgtgatagcccttaccgttggttgtaggctgagttacccatatttctgttaattttatttccacttgtcattttttagatcaacatgctattataacgatgcctgttgtattggtgttctccaagttcatgatctcaaaagggaccaaaaaaatcatcctgtcactttcatggctccttacttttctgttccttaacttgatgcattgtggctccagtacgtatagatcaactcctctgctttcaagtccagtgatgaactattcataaaattgactatgcatgcttattcttgttgtgatatccttaccaattaaatctgttctctgatcaataataacaagtacggaatattaaggtatcaatgctctgcctttgtttttttttctgggcatccaccaggagctctggctattcattaagcagaaaaagagtcggtccagtttttaaggaaaaactggattgaaaacctcacatgccctgcctttatttttcatttatattttggtgcaccatttgcaattagtgaacagctgcgagcttgcagtgttgaagatgaccttatatttatttttcggactctgttctaacggggacgacgggatattgatcttttgaaaatggtgttgtggttgagtatgcacaaaacatgatttactccagtacctgtttgacatgttaatacagggcaggttttgaaccttacagtttgtgctccaatttttagatgtaccacatgaaacaagtaagcttaccgtctcctgcaggtctgtcattgaagttcgcaacgggtttacatttc

SEQ ID NO: 15397 - DNA, 645 bp, Brachypodium distachyon
  Intron number 4 from transcript Bradi3g46100.3 (locus Brad i3g46100) derived from phytozome v7.0 (chr-ID Bd3; pos 480 12208 to 48012852 reverse strand)
cgcaagaccttaaaaagaaggccttgaataatcaggtaataatagatcccacacacttttggtcatgatggtgagcagaagctttactctgtatctgccatatctagaatgaattatgtgattaatatactgcacaacattgttttttaagaaaaaatgaataatattaatatcccaatctctttgatctggaatgttttgcaaccattgtgtgtagtgtgcttactggtgtttattgcacacaaaagaagaaaccgttcgtggatttattttagctcacccacaaaaaactccacctgccatgcttgaatttatgttaggaggctcagatcatgtacgaagcaccgcgaagaggacaaaataataaataaatagaagatcaacaaagagaaatgcatattttgggatgactgggctgttgagcaaacagaacaaaataggtcataatctagaaaatactccctccaatcctaaattcttgtcgtcttagttcaaacgacaacaagaatttaggatcggcggggagtactgtttactgtatgttcaaattttttccccaactcatatataacgcctaatgtgaatgctcctctgctaacttctatggcagatagcaagcattgtgggttctggtattcaacctct

SEQ ID NO: 15398 - DNA, 598 bp, Brachypodium distachyon
  Intron number 3 from transcript Bradi3g53590.2 (locus Brad i3g53590) derived from phytozome v7.0 (chr-ID Bd3; pos 542 30798 to 54231395)
gaaagaccggcgaccacaggtgctactgacagaaggtaatttcgtatgcttgccaatcaacccgtcataatttttttatctgaatcagtaatagggaaattggtgtgagaagataaattggactaccctctttagttattgagagatgtgttgtcgttgaattatatcattggtagtagttatatatagtgaaatggacttggtaagaaatttgactgccctattaattaataaacagatgtcttatcattgaatgaatcaaatgttttcaggagctaggtttatagtatgtcattaacattctcattgcaagttggccggaggagcttatggatgacatttatgcagattattacttatgtttccttaattttggcatgtcggagagtaaatttagctattctttttctcatgaagtcattgtcattcttgttaatgaaaaaaaaagacaattaagcagttgagtaattatgccctttttgcattttcaaatagtattatggaccgatttgttggtgctgcaatccaattgtgttaggattaccataagataatcgtaacctcttttttacagcttctcagggtctacttgttgagt

SEQ ID NO: 15399 - DNA, 660 bp, Brachypodium distachyon
  Intron number 2 from transcript Bradi3g46810.1 (locus Brad i3g46810) derived from phytozome v7.0 (chr-ID Bd3; pos 485 77535 to 48578194 reverse strand)
tcgaaagcccctgcgcttgcagcggcagcctaaaggtgcatgcttccttcgccgaacaagggtttctgcttgcagttcatgttgctaatgttgttttatccaaataatagtattattgttggtagataatgatgaatttaagcttgtcaaacaacgtgagatgtcaacatgtgtacagcgcattgcaatgcagtttgactagaagatgactggtagctcgttccatataaacatgatgcatctatacgtttgatggggtggctcttgagtgtgtataatatcatcttctttgttgctgtgactattaatatttccaggacaaagtagttctgtaaagtgatgctacttcgagtgaatagctgcctgtttgagctgtcatcattgttgcttaaagagccaggcattcttttttctgcatgttgatagctacttgcaacaagcttatggatgaagtcatcagggttagttatcttgtgtggtgacctttaactgaagacactgacagtgattgccattttacaagtgatataactgcttacccaaaaatacgtcttaaatccttgaaagcattttatgtgattgagtctgtatatgtttatgtagatccttacactgccagtttcatgtgttggctaaacactgttcattttattgcacagt

SEQ ID NO: 15400 - DNA, 690 bp, Brachypodium distachyon
  Intron number 1 from transcript Bradi4g25680.1 (locus Brad i4g25680) derived from phytozome v7.0 (chr-ID Bd4; pos 310 52532 to 31053221 reverse strand)
acctcgcccgcgtcgacttccccatcctcgaccaggtctctctctccccctctacctctctccgtcgcctcggagtcggagagttcgaataaagggtctctttcttctactggtccggtgaccatttggggaccaatttttgaatttgatctgcgagaagggtgtttacagtcgcgcatcggattacagttgttccatgatgaagcattgcacgtccttctagttctgactttctgattgcttaactgatcgatcaattgctccatggacatggatagaagccttgttcttcttgctactaattcctgagctgctccatcaaagcttttcgccggtgattgtcattgtaatggtgaatttagttaccctgattagaacatttatgtagttttgatctgctgcagcgtagaaacattgtgattttttggttggtccagccaggcatgtgaaaggttgatttttcggttgctctttttagagagctccttggaaaagttcctttattcactgtgggttgactggttgagttactgcaaaattgagtgatcttcggtttgcatgttttggacactatggttgttgctatagtattacaaatcttagcattaccgtcttttgtataccagattttggtgttcgagtgagctgactattatttcatttgtggccactgaaacttgcaggaatttg

SEQ ID NO: 15401 - DNA, 842 bp, Brachypodium distachyon
  Intron number 1 from transcript Bradi4g34000.3 (locus Brad i4g34000) derived from phytozome v7.0 (chr-ID Bd4; pos 396 70366 to 39671207)
agctcttgcagtgcaagcccctggccgagcccgaggtcctgctcttgtctttgcgcacttgtttcgatttgtggctgttcgtttcttggagtttcttgtacggttccgggcggactccggcggatcggcggccgcaggtagtccggaaggatccgtcatccgtggggtaactggggttgcgcgtggcgtctgttgcttgttattatgcatgccttttctattgaaagaaaaatgtagttttgatgttttattaggttggtactgattgaatgtttcacttgatgtacgaattgtttggtttgctactggtttcaatgtagtagaaaattctgaatgattactagtgggaaatgtgtaatatcgtaccgtgttcatctcctcaatggtcagtgcgtttgtaggagtttttttttgtaagactagcataatacccttctgttgctacggacttgaaaatacactgcaaattgaaaagaatgtttacgattatttattgtcttggatcaaatacgccacatccattttcatctcaatagtctgtcaagtcaacaagtaacatggtaggaaaggtgagaggccgccaccaccaatttagatctttattggagtaaagaagatagtataaaagagaggcatatggaagaggttctcaatactagcacctgttccttatggattctgatatggatggcctttgcttgaattcttggccctcacaaataagaaacaagtgtgtactgatatttttcttggtgcttagaagaattgtcatgagttacaatcatcttataaacacttattttgcagctgagagcactgtgtgggaaagctaaagaggtttt

SEQ ID NO: 15402 - DNA, 693 bp, Brachypodium distachyon
  Intron number 2 from transcript Bradi4g34000.3 (locus Brad i4g34000) derived from phytozome v7.0 (chr-ID Bd4; pos 396 71225 to 39671917)
ttcaggtatgccactgtgccttttcctagccaagctagtcagcatttagtttttgttacatggatttatccttttcccatcctatcaaaatattgttagtttagttgacgcagaaagaaatttggctagatatattgtaatgcatgccttggtactttgacaaaggataccgagtattggtccataacttattattgaatgtccgaggagtgagaattaaaattgctgaaagctgaacaatatgtttgtctggaaattgtggggggttgttttgcatgctcaaagtcattagaatatgcagctgctgtggtggatgtcgcacaactttttggtagttaattgaagttttctgtttaggttccagttgaatacaagttgcactactatactacatttcagtgttgtaagtaaatgatgtttggtattggtcgaaatttaggtcatgatacaaatcttcttttaattttgtcttagtggaattgacctaggaagtgaagattgaatatatcggggaatggatacctgtgtttctgtcctagaggagcatgcaactattttttttttgaggcaaagcatgcaactattgcattccagatgtcatgatttgtttttgctattgcgttatttctagttgatcattgcattcattttaaaatttacttcctttcagcctgtgagaagtcctgtcacaat

SEQ ID NO: 15403 - DNA, 666 bp, Brachypodium distachyon
  Intron number 4 from transcript Bradi4g42850.2 (locus Brad i4g42850) derived from phytozome v7.0 (chr-ID Bd4; pos 467 19732 to 46720397)
aaggtatatatttattatgctgtaacttgcattttcattaccaccatttaatgtttctcctaagcatgagccgttgttcttttcagaatttattttttgtgtgaccacgacagttttttgggtgcttgtgaatttgcccaagcttagagcagtctaggccattcatactcaacagtcaatacattatatactcagcagttgatacattttttgtaagtaggtctgaactcgaagcccaacattatgtagtccacctcttttatgtgagatattagcaaggatattaggataacataatattgttactttgagaaagcaaaataactgcagccaatagttaaaaaactacagatacaaaatatgcacagtagccaggttaattggacttctgtaattgtaatatatatattctctttaatcatgcctttctcagttcggtctcgcgtgtgtgtggcgagcctgaacttgctgaaaattctttgccttgccctttcagtgagcacaatggctgtataagaacaattgacagccgacaaatcatgctttagctataaagttcattaaaagttctctgctattatatgcaacatgattcatgctgctcgccatgatccgactaggctgacagaaaaacccggatctttgtgtctccaggaagtttcaggg

SEQ ID NO: 15404 - DNA, 828 bp, Brachypodium distachyon
  Intron number 3 from transcript Bradi3g55780.5 (locus Brad i3g55780) derived from phytozome v7.0 (chr-ID Bd3; pos 559 03594 to 55904421 reverse strand)
gatctgaagcagatagagcaccggttcatatctatgtatgtatcctgtattatcatattatatgaattcacagtgttctctgatttggatgccactgtaaactaccaaacaacctgcaattaatgtcaggatggtctctaccatcttccttttccagtcgaaaaattacgcagagttatcactgttcttgtccatgccattaacttctctactccttccgatccataataagtgtctcatgtttagtacaactttgtactaactttgtactaaagttgagacacttattatggatcggagggagtagatgatatgccattagctgcaatgtagtttgcattgttttctgaatgccaaatcagatcatatgcagtcatgataattatatttttgtattgtagctgctgtatgtaatacattctgctcatttaatgatctatcttatgtggccccttcaggatgctgttattttacttgcacatgtttacaacagcagcatgctacaagtttgactgccttctttgcagtttcgaattacaaattttgttatttacaatgggcatctcctgtttgttgtcctcagtcttcaatgattccgcatttaaactctgaacctctagacagtatctccttgcagtaatataggttatgtgataaaataacgttttgcaaaaaaagccgccaccgcttctttttggcaatttgcctgaattgtcttaaagaatattatgtctttgagtaagtttcaggcttttgcattattaatcacttgatttggctgagagtttttggttttgtgttcccagcatcagcaaaatcttgaggagc

SEQ ID NO: 15405 - DNA, 994 bp, Brachypodium distachyon
  Intron number 2 from transcript Bradi4g28850.1 (locus Brad i4g28850) derived from phytozome v7.0 (chr-ID Bd4; pos 342 54949 to 34255942 reverse strand)
ggagcaccattccagttctcacaggaaggagggtggtaatttactttaagttgatgctattttgcctactttaacttagacaaagtatttctgcctgttatgtaccttgagttgaactcacaatgaacagtaggagttgaaaataaaaattactgtagatgggaaggaaaaaagatgggtaggtaggctaagaggaatagcagcggtgccacacagggaaaattcacatctgtgtgctattttacctatcgcacttgtcccatcgagagtgattataccacttcaaattgttcatagttcaagtgagtctacctaagtcacgaccttagccacttaccagtttccagtagtaccaacatatgcgcaattttcagcttttgaattcttgtcagctgatagggtttcatgttttgaatgccacctaccgaggaaattctttgggagaaagtagtgcgtctttcatgcatatccagttcacttgttgacaatgatggactattaagttgccgtatgcttctgtaggatctatttcaccttgttgaggaatagcagtgttttgtgtgccagagttttctgagatatatgcagactgagaacataaggattttcagctttgctaagttataatggagacttcttgagcgtatgattttacggtttgtaacttaaacatgcccaaattttgaaacagtagaactttgtggacaaaacttcaggtataaaaagtgtttttgagatattgtgtctctagaagctactgtacatagcaggtcttccattactcacagaaggaaggacataaagtatatacgagaatgaaacagaggacaacagtgcatgatctgaaacatagtgttcaataccattagttccaattctttgtactgtcatcatgtatggtggtgttgtgttcttttattagtgctctgtttaaaagctcttcttgattattgtgcaccactctgaattacctgcagaattgcacaaggactct

SEQ ID NO: 15406 - DNA, 942 bp, Brachypodium distachyon
  Intron number 2 from transcript Bradi4g20060.1 (locus Brad i4g20060) derived from phytozome v7.0 (chr-ID Bd4; pos 230 23765 to 23024706)
tgtataggttcctaacaagcccgtcttgcaatcaggtacggatccttctgaaattactagctgagaatcctattagttgactaaatccattacaagcagttgagaagcgtgagcggagccattgcaaaccatgtagaatgaattcagtgcctggttgttcaacatcaaccatgtgtagcaacaggtgtcccaatcggtttttcatttcttaatacaatgcttacaaaaaaaaaggtgtgcatctattgcatttcactggattgcatatatttttgtgtcgatgagataagcaaattacatcaatgcattgcacagaaaatcttttctgatctaattcagaaaaggcacaaagaaaatgctagaactcatttgactgaagggtgactacacctatttgctcatgagagcagatcatcaaagtgaaaatgagtgtagattttagagctgtccgcctccttgatcttctgcatgcatgtattatattctgtactaaaatctgattgccttccatatttgaagaacaaacataaaagaaatagctctgagaaaatatgtagctccagcttctctacatagctcccccatgattactctagaataacgtcagcaataagtgaggttaaacatagtgaaattatttacattgatgcttgctagatacctgattccaaaatttagaaactgcttctggacgacatcataccgttgagctactttcaataaataactcactgttttgataattcctttctagaagagagctgatgcaactccgattaattatgttgtaatcgtagatagtagcattcactccatatttaatacagcataactgattctttgtgtctcatttacaatatgtgattcaaggactgctttgatcactgctgattctcttatgtaacagatagccgtagattctctttctctagggcttccgaa

SEQ ID NO: 15407 - DNA, 547 bp, Brachypodium distachyon
  Intron number 3 from transcript Bradi4g22620.2 (locus Brad i4g22620) derived from phytozome v7.0 (chr-ID Bd4; pos 270 13499 to 27014045)
aagctggggggtatgtatcagtatcacctttcctccctgtcttgttctttattagtttgttgccttgtggaatcttcaatcatgttcctgaatgttagtttattggacggcttctaattatagtcatactgaatcctgatttgtcagtggcactagattgataagctacatagagcaagtgttcatattttattgccatggtccatgggagcaagtgttcatagtttattgccttgggagcaagtgtccgtattttattgccatgggtggaaacatattgtataaaataagtgtcctttctctgattcgattttttttggcacattaataaccgaaagaagcaagcgcaattgtaaagtagtttcgcttaccaatttgataatttccatgaccgctatcaaagtgtcaattccactgatgaagcggactctgttttgcatttcactgaatactattggcaatagtattttcttctaacaaagtccctttcctgaattgctctttcctcacagcattgttgaaagtgtcggagaaggcgtgaccgagc

SEQ ID NO: 15408 - DNA, 783 bp, Brachypodium distachyon
  Intron number 2 from transcript Bradi4g40600.1 (locus Brad i4g40600) derived from phytozome v7.0 (chr-ID Bd4; pos 449 55975 to 44956757)
cgaagggtaaattaaatcctttctgtgcgtaaattgtatcctacacatgcatctgtgcagatggagcttaatattacgagttgattacttttgggttttggtggtaatggtatactgcaatttgatgcacatatgtaatagtatagtataattgtacttagcagcattaggtgaatgtcgtccttgagttgagggaatggttttggattttgtcatttatgattatggcacatgtgactttaccttaaccaggaatacaaggaccattatactgtttcttttgaagataacttatattggtagtttggttcgatcttcttttctttcctgctgcattggttttcatgctttcagtttatgtggttctgttggatctgcctgtggcatatggtgggtaagagggtgttcattccactatctgcttttgattcctaggaccaggcacagtttgtcatctttaatctaagtacacacacgagcatgcatgtcaaatggaacaaaatgtgcccgagtccaagtggaaccttcaatattttctatgttaatgtgctggtcaggttgtgtgcgtggtgcttgttttctcttcttgtattctctcaaaaagtccgcgtggttctctttgttactaatattaagctgatgttctgtaaaacagcataggcacaaagtggttttattcttattaaaccaatccttaaagaaatctggttttcatgggtacccttttcttatgttgcgcttaccataggaacgtgaagaaagacgaagaaagttaaagagaga

SEQ ID NO: 15409 - DNA, 997 bp, Brachypodium distachyon
  Intron number 1 from transcript Bradi4g24620.3 (locus Brad i4g24620) derived from phytozome v7.0 (chr-ID Bd4; pos 298 87361 to 29888357)
agcccaagcgccagcgccagacctccaccaaaggggtatgttctatcccgcttcgccagcaatctcccaagatccgaaacttgatcgctagtttacgtttctgtacttgttcgtcaggatttttgctcatgtaacaaggataactatatatttactgtgaaattttggttttagtttgttaaacaatttgggagaattggtctggctaggctagaaatgcgattgcatatttgcatcttggacaggttcatggacaattgtggcattttgtatgatgccaggtccaatatttaggcctatgtcaagatgtggtcgtgttgcctgaaggatactgtattatgtgcaaattgctaggctttctattctagtttaattactagcaatcagcctccatcaggatttaaatgtgttagtagaaggaggatcaggttatgcaaattggtctggtttggctagaaatgtgattctatatttgcaactttgagaggttcaaggacaattttggcgttttgtaggatgttcgctggcaggtccaagtttttaagctgtcacagtgtgctagtgttgcatgaatgattctgtattatatgcaaattgctaggctttctattctaatttagttattatcaatcagcctccatcaggagttaaatgagttagttggatttgcatgttatatcatgcagttgctcaaaaattctttgcttggcatgactttgttccatgctactgtatataattagaagagccaactgatattttactactgcgtaggcccaaaaatcttgtgtattgtgttgtagtatgacctgcattttgtttcttttggatttttggtgcctccttttgctttgtaattgtctgcattaagaatttataccagacttttgaagttttttctgtcaaaatggtgttcttactgattctttcctatgtattaggttttgttatgtttgtctgcttatgctaacagatcaatcatctgtatttttcttag

SEQ ID NO: 15410 - DNA, 494 bp, Brachypodium distachyon
  Intron number 2 from transcript Bradi4g36690.1 (locus Brad i4g36690) derived from phytozome v7.0 (chr-ID Bd4; pos 418 51399 to 41851892)
accgtaacccttacctttcagaaggcacaagacaggtctgttttctcagcaaaatacttttttgagtagttacttaaggaagtatataatgcgctagattggtactatggagaaatcgaaatcctgggaaatttgcaagtgcagtttgattatcaccattacttacaatagtgtttctgtcctagtgcaatccgttgtgtttttaatttcttgttttccttgtgcacaaatcttgctgcaccgtaactaccaataatggcttgcccatagagaccgagtgatagcttgattttagtcttgctgttgtgcagaccgcccgcccagggtcgaccctccgtggtcgcatcactgggtgcctcactcctttattaaaacacaccgacaggcttctcctccttatgccattaattcttcttctttttaagtgccgcttacccatacagttgtatgatatatcaggctgcggcaacaaccacttctcttgcaaagaagta

SEQ ID NO: 15411 - DNA, 758 bp, Brachypodium distachyon
  Intron number 1 from transcript Bradi5g01960.1 (locus Brad i5g01960) derived from phytozome v7.0 (chr-ID Bd5; pos 204 3918 to 2044675)
gtggctcccgcgcgccggggactggatctgcaacggtacacccccaaaaccattaccatgcatgatgctaccttatacgaagcactatccgtttttcattcatcacatcgctgctgtactgctagaaggctgccgcatcatgatgtgctttggtatccatggattcagttttttcttcaccgtctattaagtaaagctgatatcaaatgaaaggggaacaagggtagtactggagcttatgacagtgccgtttatgttaatttttaattatctcgttgaggtttatttggacttatggcaactgagaatcgtagtgcttcaagtattaagtctttagcataacataatatgtggttaagtgtggatgtctgggtaagaagttggttctcaaaacattttattgacacatcatctgtttggtggttcaagtatagaatacacatttgtcatcaggcgtacatgaaagatttgtagaaagtaggggccatgcttgtagttgcatatccttcccgtttgaatttaacaattactgcagctgtttattttcttcattgaatgtttattttttctagatgagattagaaaactaccagtatgtttactgagtaaatgactagtgtgtgtgttgcttattcctttctttgggtttgtgcgggatggctggttggtgtgcgtgtacttcggtgcgttgtcttgctgcctgctgtggtggttggtttatgcggcaaatggatgaataggttgcagtaacaataatt

SEQ ID NO: 15412 - DNA, 550 bp, Brachypodium distachyon
  Intron number 2 from transcript Bradi4g11840.1 (locus Brad i4g11840) derived from phytozome v7.0 (chr-ID Bd4; pos 117 13653 to 11714202 reverse strand)
gactaacaatccattggtaagagctattaaatttggtaaaccctctaccggtatatcttcgttctgccgaatgctagttatcccgaaattaatgctgactcgttcgttcatttttggcttgtcaatcttttttagagctttggcatagtacaaattcatctgtagtgttactaacgatctttgatctttactcttataaaagactcagttggtccaggcgatgtgtcatctttgttctttcagaaagcaccacttgttttctgtgttattaatttgttagaatgaatatgtattatataacataagatcgagaatataggtgatggtaaaacatttcttaaaacacatatttcttctagccaatacattcatgatacaaacaaaattgcgcgccattccgcggccgtggtctttccccggcaatgtttttcaagtaaaatttaatacctccatttgatctactttcctttaactgctggtctcgatttctaacactcgatagtgattatgtgcaggcacggggtcaagcaacggttaaactgctgggcag

SEQ ID NO: 15413 - DNA, 327 bp, Brachypodium distachyon
  Intron number 1 from transcript Bradi5g16360.1 (locus Brad i5g16360) derived from phytozome v7.0 (chr-ID Bd5; pos 197 38905 to 19739231 reverse strand)
ggcgcgcttctgcttctcctccgcctccaagaagggtcggtgctctccgccctccaactttcgctcctttatattttgtttactctcggatgatctgaatctccatcccaagaacgccatttgtttttatttatttaacaaatgcttattttctttgcactaattattggtttgtggcgggatatgttaatcttgggagttcgaaagttctgcattcatactttgatagccgtggaattatcttgcttgcttttagggttctgattctgctgtttttacctcccttttccagtcattgctgacgtttcttacaccgttgcacggtct

SEQ ID NO: 15414 - DNA, 703 bp, Brachypodium distachyon
  Intron number 1 from transcript Bradi5g05140.1 (locus Brad i5g05140) derived from phytozome v7.0 (chr-ID Bd5; pos 661 0430 to 6611132 reverse strand)
cggcgctcgccgtgctgctcctcttccactttctggtgcgtgtcgcgtaaattgagggcgtcaggtttgcaagatatcattgattgggtggaaaatatgcaaattgcagcaggattgagtatcattagatgttaatcttagctctttgggaagcaatgttgggtagatccgttggtaggcctaaaatctcgattttgacctttatgctggaggttgggagctatgatgtttaacatgctatattcttgaattcttggtgccaggtgtgctgctttgtagggcattttcgtttcgttatgttagtttcttgttgactgttgcttcccttggtggtatttcttggtatgtagtatgaaatactaggagtgattgtattctattctacttgatagcactgtacactcattggtgtgattgaactgctgtgcccacggtttaatcattgctttcctcatatgctttgtgagagtagcagagtctagagtagatctctgtacgatgtgcaccctatgtgaccagagaagttcagaaaaaaatgaggtgttgcgctgtttaaatgcattttaatgctattgattggtgcgcacaattcaaactgtttctttgcattccgaatcagttgactgtaaacagcatcatattatccctgttttttgttataatgtgtattaaggaaatagttcttttggctttgcagctcggt

SEQ ID NO: 15415 - DNA, 1007 bp, Brachypodium distachyon
  Intron number 2 from transcript Bradi4g31830.1 (locus Brad i4g31830) derived from phytozome v7.0 (chr-ID Bd4; pos 376 09721 to 37610727)
cgctcgacgctgacgcgcacaaggagctcgcgcaggtgagcatggcctcttgtttccttttgacttgcttacactccgcatttgcgttctgatctgctcgtttcctggtgtgttctcggcatcagttcccgcaatttcacagtaattcgactgtattaggggatagtaactgctctactggtgcacggggcgagtaaatttgtggattataggaattgggtagcactaacaacttcaattcccaaatagtgcacatcaaactcttgtagtgggatatggtagtttcgcacttttaatgtgagtaaagtgatttgaattcttctgaagaaagacacaatttaataaggcttatcagggttctgtcttttgctaatactgttcaaggatcacctagttgactagtagattagttttggtttttagtttctgttgaatttgacaactggtttaaatggatattatatacaaagggtgaaagctaatggtttgtgcaactttatggtactctgatgacattctggcacagtggcatttgctagaatttgtttctcggtgctcagtgatatcacttattagttttagtgtcagaaattatacattttgtaccaagttactcttactgcaatcgtaattgctcatgaattgaatagcactgacaaaagatggtggaagcaccttccgcaagagaatgcaatcagggaattacttgtgaaatggcgtacctttattgttatacctaaaatatagtgaattcggtatattttgagacaaacttagattgggttgggatgaataatgtggtcaaagttctatttcagtagcatgcctatggactacctttagcttttctgtatagtacttatatggccatgtagcacatcttctgttgaacatatctaaacaggtataaataacaaccaaatagatgtggcttccatgtttaccacttatatttttggatgccattagtttggtttatgatgcattatgtcattttctgcagcaat

SEQ ID NO: 15416 - DNA, 920 bp, Brachypodium distachyon
  Intron number 1 from transcript Bradi3g59970.1 (locus Brad i3g59970) derived from phytozome v7.0 (chr-ID Bd3; pos 590 40233 to 59041152)
gactccaccgagaagatcatcgccgagtacatgtacgccgccccccttccccgtttggccactgctgtatatatcactcttgttgtttcggtggggatcgatcgatccttttttgtttctgtatggccgtttctccttggcgtgtacatcggccgctgccgccgggaggagagtgtttggaggagaagagggatcgctccggccggactgttactcttggatgatgatgatgataaatccgagggattcattatcgggaggccggtttttctgttgttgtgtgtacctcgcttcttcgcggcagattcattactaggagtttttttttccttttcttttaccgtcctcttccttttgcttttacgatcgatccgtgtgagcggcgccggcggcggtgctcgtggttgtcaccacctttttcttcttctttcttcctctttctgctctgttcattcatggagaggagaaaaaggtttttgattcgtgcgtgagaggggaggagggtttttggttgggcgattgatttcgccacggttctggatatgccgatatgcttattaggatgcagctgtagtagtaccagaggccgtggtaccctcgtagtacgtctgctcggtggttttgtcctgttgggtggaggatctctcgagtggcagcctctgtctggccctgatcctattcctctcccctgggcgatacagagagtctctctgtgccatttggacacggccagatgctttgttttcatctcctaatcgggcgctcccctttttttctttccttcttttaatcgtcagccatgcatggtggtttctgtaaacaggggatcataaatgaattccctgggactgtttctggtattcatcctttaataattaattaattaattattttttgtatgcaggattggtggatctggc

SEQ ID NO: 15417 - DNA, 506 bp, Brachypodium distachyon
  Intron number 2 from transcript Bradi4g15350.1 (locus Brad i4g15350) derived from phytozome v7.0 (chr-ID Bd4; pos 160 09689 to 16010194 reverse strand)
aatcagtgagcgcttctgcctctccaaatctaaataattgtcttggttacaatgatgggcgcccatgacgatataattgtggactttagagccaggtttagttgccatctgagtgatttccttctgtcggactttgcttggattggtttgttggagctagcaatttatctcatgaatctgaagacatttgagttcttttgagctaagtttggcggataggttgtccattcacagttgaaaatgttgtggtggaagcatggcactgctatttaaacttgttccataataaggtgcaacttttcatatatttaaacttgttccataataaggtgcaacttttcatatgtcggatggttttttcttttgagaaactgtctgatggtttgttggtacctccagtattgggttctgagctcagaattttcgcttctgaatttgtgacatatttgtgctgcatatcttataagtttgcaatctctgtgcctctgtagtatttctcggtcaag

SEQ ID NO: 15418 - DNA, 528 bp, Brachypodium distachyon
  Intron number 3 from transcript Bradi5g10580.2 (locus Brad i5g10580) derived from phytozome v7.0 (chr-ID Bd5; pos 138 71533 to 13872060)
actctctgctcccgcaaaagattcaagctttcgaggtagagtgttgctcttagattttcttttcgatctttgatatttgtatgtgacaacaatctttgattgcatcatgttatggtaaagaagaatgccatttgaaaatcaccgttatgatttctagaattcaatagagcctagtgcaagtcttttctattcatataccttgtaacagctaaagtaatcacgagatgtattgtagaggtggaccctctcaggttattggaacgattaaccgtcttatgcataggtaccattttcggatacaaacacagtagtgagtaacaaggcgttactgaaaacaaaataaccttcaagtatatttatcagctcttcaggaattatgatttttctattcagttttcatagtttagcatgtaatacacatcgtgttccctatgtaatgataatgtggacactctggcccatgtattagatgatgtgcaatgttattaagagctaatgcctaaatgcttgtagggtatttgtgtgaaa

SEQ ID NO: 15419 - DNA, 742 bp, Brachypodium distachyon
  Intron number 1 from transcript Bradi4g16710.1 (locus Brad i4g16710) derived from phytozome v7.0 (chr-ID Bd4; pos 175 40541 to 17541282 reverse strand)
gtcaagcgggaggccaaaggtattgcctgcaggcttcttgtcattctttgtcggcgtcctagtcctagctccacacactatcgtgtttatgtgttttgcacattcggtcgaagagccttcttcatcccaaaagaccagtctaatggaaggatgattactttcccttgtataagttgtcagtgttgtgtttagacgttttgtgcactctccatctccaatccttcatgtaagacccgtagcccccttccactggcgaggtgggactaaagtcactgatgacgtctagtatcgtaacaatttttaaaatctacttgtcccatctgttcctaatttaatctttgtcgtaagtcaaccttttaaattttgaccaaacttttagaaaaacatatgaacatttacaactgtaaattacttttattaaatccattgtgatttattttcatattccatagttaaatgatatttcaaatattagtacatttttctattaacttgatcaaagttgaagaaatttgaattaggacaaagataggacttgttatatttaggaacggaggcagtagtaggtaggaaatacaccgctccgaccgtgtagaaatgcaagcattatctctctgaccaacgatttcgtcaatacttctgttttttttaaaaaaatttgtgaagggcagtagtatgttgttgtttattatttcgtcaaaattaatggatatttttcctgtgtttgcatcaggtgtggaag

SEQ ID NO: 15420 - DNA, 450 bp, Brachypodium distachyon
  Intron number 1 from transcript Bradi3g48580.1 (locus Brad i3g48580) derived from phytozome v7.0 (chr-ID Bd3; pos 499 95581 to 49996030 reverse strand)
ccgacgacgccgacggcctgctcaagctcctcgccgtgagccttctctcccaacttcctgtgtttacttttgttcttatgctttctcagttgtttgtgggatttctatctctggttgtatcccctttggatgattgtttgttttggattgctttaggtttatttcgtcgcttattctcttgattttgcccaattcttcgttctagcagaaaaacggagtattttaactgtttttagggtagtttccatggtggattattgatgtacagagccaccgaggtgttagcttccttgatatgcatacctctgctgtctagtattcatgtagatgtttcttcagtctaatcatggcagcggttattctagcttaaagtcgctcgtttgatttcatcaaaatcgatctcgttttcatgcaggaggtcgaggattatttgacgcgagtggaacaatc

SEQ ID NO: 15421 - DNA, 924 bp, Brachypodium distachyon
  Intron number 2 from transcript Bradi3g47040.1 (locus Brad i3g47040) derived from phytozome v7.0 (chr-ID Bd3; pos 487 61370 to 48762293)
gggtttctacgaggatccaagtgccgtcacaaaaggtgcgatgtctcagttctaattctagtgtacctctactggctcttagtattcttcatgttcagctacgatattggttgaatggtcgttggtgcttacctccgacctgaatcccttcagttagttcgggttactgccaactacataacccgaatactcgcacttcgcttgcaatctatatattgtgattctgtttgttgctaatcttggttattttccttagctgtagaagttctctgagcattttggttatagctagtgttcaattatggatgtttctggataggggcaagaacagattaagtaccatgatgataccttgtattaaaacaaaatctaacatggacatgtaatattctagaatactggatttggtttctgtatgctaaatccaacaaggggttccttgccagctaacagaactttggagtgatatgtgtgcatcagggtgcggttgcttgactagtgtggatggtacttgttcccgcacatacaatgtgttagaaaacattgtgctagaatgttacattgttgcttagaaaaatgtatattactattgcacagagtctgggtggtacttgttcccacttcgcgcaatccactgacgtaagggccacatacatgtactggaccacgtgctagtgacttccatgagagtatgctttaaatggtaggagtgtaggatttacaacatgcacttgattaacaagaattaacaaacatcgaatattgtactatcccctgatgacctgctatggcttgtagtggaaattttaggtgtaatgcacttgatagataaatttaggaagtgatggctcgttcaaactgcaccgatctttattttttttgcttcagcgatgctcacaaatcttgtttttgctgtagtacagg

SEQ ID NO: 15422 - DNA, 405 bp, Brachypodium distachyon
  Intron number 4 from transcript Bradi4g19090.3 (locus Brad i4g19090) derived from phytozome v7.0 (chr-ID Bd4; pos 216 97758 to 21698162)
acggtgagatctcggagatcgatacatgtcttcaacaaattcagattaattacatcttggacattacaagtcaactatgaaggacctgacacagccagtggttattatgtttctgctaactaattaattttgtagtttgagtttttttcttttactacatgtaggtagagaaatgaattatgcgatgttgtattgtttagtcgaggcaggcactgtccatatttttaatatgtgctatgattttggaccataagtgctgatggtattcatgtttagtacccttaatgctaggatgctagctacataattttgttaaccttagcagacgctacaaaagcctctctgttttgctaacatatttcttcttaaggtactgtcaacgggacttggtagaatagtgcccaa

SEQ ID NO: 15423 - DNA, 547 bp, Brachypodium distachyon
  Intron number 2 from transcript Bradi4g01070.1 (locus Brad i4g01070) derived from phytozome v7.0 (chr-ID Bd4; pos 651 430 to 651976 reverse strand)
ttacagtcgatttggacaagcctcttgtatttcaggtaacgtgtcccatacatacgttccattttttcttccaagtttacccattttgcatatttattgtttttattatataaaaactttgtagaataagtggattttccaaagaaatgattcatggcaagtcactatctcaccattgtagagagtacatatgaagaagagtttggcggctactagtgttttggttctaaaagcatatctttggcacatctcccagacatatggaggacatacttttaataatttcctgtttaaaaaaaaatcaaactacgatgcagttattagtttccttggttccaccaccactgtgtatcattagtcttgttctatgaaggtatcactagtcttgttggatgaaagtgtcagtagtctttgattcttgacttcacctaatttcatgtgtctggatggatttgaaaatgtaggtcagctctttgattattgtattcaaatatttggctgtaattttgtaggttggccatctagaggaacagtatcaggactgggt

SEQ ID NO: 15424 - DNA, 773 bp, Brachypodium distachyon
  Intron number 1 from transcript Bradi3g57670.1 (locus Brad i3g57670) derived from phytozome v7.0 (chr-ID Bd3; pos 573 55127 to 57355899)
aagcgcagctctaccccaacttcctcctcgacaaggttcgctgcttccctttcgctttagtagtcactactgctgtcccgaggcctccagtcctcggttgtttcatgtgctatcggctgtccgtcgctgagaggttcccgcggcctgatttgggttcccgtggtgaggttcccagtgtggcaaaaccagcaggattttctcgacgctacaggagtagtttgaaaacttagcgctgttaattgatgccatttgcttggatttgggtgtgatttgggctgttgtcaggcgagtagagctgctttcaacagaatgtgtataatgctctttgagttttttagcatgcagtataaatcaccagattcttgccttttgggagcaactagtgaatagtatcaagtgtttgtgatgattttgtttaccacattacgtttcgtggtacttctgtagatatttggcaagagtcctggtcaaatagttcggtttatttcgcttacatgatacattgcagtttattgtagtcaggtttgttcacaagtgaacttgcattactcttctgttagttcagcttgttatgtaatagtccatgctatggctacgatgtttccttagttttgttaagatagtctgtcctggtatatgttgaatggatccatggtgcacatttaagagcatctcttcatgcttattggttagttgttattgataccagcattacagaaaggaatcacaaacttttattttccgcccttatgcctacataggtcgtgaagaaa

SEQ ID NO: 15425 - DNA, 781 bp, Brachypodium distachyon
  Intron number 1 from transcript Bradi4g27290.1 (locus Brad i4g27290) derived from phytozome v7.0 (chr-ID Bd4; pos 324 12793 to 32413573 reverse strand)
aactcactgcagcttctacagccactgacggcgaggtaattttattattatcattaactgataacgtttgaattgagccgcaattctgagaaaagttgctgtttggtagctcgtggagtttgctttataggttagttgtttgggtcttgttgacagtaagcgtccaactagcaggttcgattcagctttactccatccttgaagaaccatttcgtgctctgtctgtgtgttatccatgggaaagccattattttggggtactaggttaattataagtgttgtgtaactgcaattcctcatataaattgtgttgagagtatctacttctatctttcaaccaaagtaaatggctgtctgcatcatctgagcctggcgagtaataaagctcttctttttccaagaaaagaaaaacaagccagttcctaaaaatttatggagtacatgtaacttgagttgtacaaatttattagttactattgctaaatgttttggaagatttatatacgcctgattttttatatcaattggctagcctagcaaagcaagcatagtcctgagagggcttctctatgtgtttctcaatcgtataagcgtacatccaatatgtaggtggtatgctagttgtatcgttagttcattactatggatttaacaaaatgttgggggtggagcacccactctttggagggccatattagttttttaggggttgttatttctgctgttcaaagaaatgatccgtacttgactttgcagggaatttcagctcccagtaagaaga

SEQ ID NO: 15426 - DNA, 1045 bp, Brachypodium distachyon
  Intron number 3 from transcript Bradi4g36920.4 (locus Brad i4g36920) derived from phytozome v7.0 (chr-ID Bd4; pos 420 90361 to 42091405 reverse strand)
tcgtgcaccatagagacgggcagcgacacattaaggtcctcccctcggttaatccactctcgttttgtttggtgcgaattggctgctgtgacgctctagttgcaacgaatcagctcttgaaattgatttggggattaattcgtacgcattgcttacatgcaactggactaaaattatcgatagtcttaatagaactgtgctatgtccatatgaagaacacactaggatgtgatgtagctcgtagttaaggaaggtgggaatgggattgatgcaagcaatcctttcactttctcaaattgccaattgatactccaattttatccaattccggtatactgtgcactgtgaccagtgagggtcttatgatcttatcttacttgtgagcttaggctagagattattccagaactgagctttatcgactttaggttaattattaattagcttgacagctcattctggttcttataccgacctttggtgtcaattaggtgtcccaggtaaactagataaacaaggagttgcgtgttcacgagtcctggcttttgagaataatgttttgtttctatgagcttcctgtgaagaaagaatgttaattcgagttgttgatcgaatcatcaagcttccaattctttatgaaagtgattttttaattcatctcattttggtcctgggatatcaatcaaataaacaatacaattgttggacatcacttcgtgattgtgaatgacttgagaatgaaattgatccaactgtatagctaaaaaattgaaagcaactgtactcaggattcaggaattgtgttgagtcagaaatctcattactccggcatttgtttcacatgtatattcatgttacttttaagttgacacatcactctggcatctgttgcacatgtcatccataaatcctgtgtgaaaatgtttaaaagatagtcgtaatcactatgttgaaagcaatgttctggcagactgacggtcatgattttttttctttctattaaattgcaggctcttcctacatttgcttctttatttcctaacaa

SEQ ID NO: 15427 - DNA, 934 bp, Brachypodium distachyon
  Intron number 3 from transcript Bradi5g07170.1 (locus Brad i5g07170) derived from phytozome v7.0 (chr-ID Bd5; pos 961 7349 to 9618282 reverse strand)
cccgtgccatccgcaggcgtcttaccaagcaccaggtaaacccatgctccgttccatgattgaactcttgcttgtctgttgcgccaattatcaattgtgtagggtgagatgctgacattagtctaattgctgttctaaatcatgcctcttttatgtttactactccgtacatcggtagtagagcagatggcatcagttagcgcaacaaattatattgacacgctgttcaattgttgttggatggtgatggagtttatgtattcttgcatttactgtttggcatgttattggttgctgtagctattggttggagaacgctgttgtttttgttgtaaattgctatggtcaaactacgagcataataggttatgtctgacaaaagaacttgcctagcttgactaaatacgacatatttttttgtctaatgttttgcaagaactgggatgtcagtatactgtgcctaaccaaatgcaatcttgagccttgagttgtttttaccgtttgtgcttggtcaatgtcaagtttttaactcccatgttgcattgctatttctgtttttgtggagtaactataagcaacttgtgcttttgtacaagattgtttagaagtgactcgctgtatgtacttgttcaggacaaatgattacttcattttgtatagcttttaggttttttttatttcttctgttacattgcatgcctggactatgcctacttgttttgatgtatgtgggtataatcttctacttgaaaaactagtttgctcgtaggtttatgttttatttatgaggaattcaagtttctcacctatcaatgcagtattctatgaggctaattgaactatgcatgatgacattcaaattaattactgattgattggttttcttcataattgcgcagctctctttgaagactgagagggagaagaagcgcga

SEQ ID NO: 15428 - DNA, 399 bp, Brachypodium distachyon
  Intron number 3 from transcript Bradi3g49310.4 (locus Brad i3g49310) derived from phytozome v7.0 (chr-ID Bd3; pos 506 82451 to 50682849)
ctgttggaaacaatcttcctgaagaaaagattcaggtaattaatgaaatttgattaggccataacaatgatgaatattacatagagcatatactaacacgtacatgtaaatttcaaattcaactacaactgaaatttatgtgtatccagtgtagcatttattcatcaaaccaaatgcgaagaaaaatattagagccgaactagatgaaatgtcccttgaaaatgaaaactagatgaactgaaactatgcttagttttgttttttttggtcctctatggctcattaagtgtttttcttttcagcaaccagtccgtttccttttatttcttgctacgctaacgccagtcgaactaccaatgtgcagtgagagcatcaagttttctctgctggtcttgctgc

SEQ ID NO: 15429 - DNA, 764 bp, Brachypodium distachyon
  Intron number 3 from transcript Bradi4g16590.1 (locus Brad i4g16590) derived from phytozome v7.0 (chr-ID Bd4; pos 173 49794 to 17350557 reverse strand)
ttgggtcaatcaattcctactgactcaactcacaggtatgacctaccggttgttcatctccttatgagttatgacccacgcgtcttctttgcgtgtgttctccacaacgtttgattgcttcccagtgttagaaatctaagactatgaatattgtttagcgaatacacatatttttgcaacagttgtacttttcggtttgcaagtctttacttagaaagatctgagttggttgtagtccgttcactgcactaaaactattccttatattattgggaaatggatgtagttgcaacaattcaatatggtacatataggtatcacgatcttttaactactccctcagtcccgaattaactgacatggatttgtataagaatctatacaaatccacttctgttaattcggcacggagggagtataattgatctgattgatgtagtatatattttgagatagttgttattcagcaaattttttgggaacatacaggaagagtgcatttacgcaacttatgtgaaacaacaacaacaataataataattccttagtaacgcacgtgcatttagctagtatgtatcaaagctgttagcattgcatgtatctaaccacccaatcatgcatgggaatccaactagtattcaatactatttacactagccatcggtccttatttagacaaaaataggacggcctgcagtacctctcattataatcacaaactgatgagcatattaccgtgctcgttttggtcagggtcgaggagc

SEQ ID NO: 15430 - DNA, 629 bp, Brachypodium distachyon
  Intron number 1 from transcript Bradi4g21940.1 (locus Brad i4g21940) derived from phytozome v7.0 (chr-ID Bd4; pos 258 53180 to 25853808 reverse strand)
accttgaacttcaggtgatctcggtgtgtgggacagccggcgatctcaggtcgacttatcatcacaaaagcctacaatgacccgaaaacaagcaccttccgagatacctgaataacacctttatgatcacctagttacgagatgacggttgatgtccacaaagtattcttctggtactagagagtggcatgatttaatggcctaaggaactgatacttgacataataaaagcattagcaatttaaatttaagtgacacgatcaaaagctatgcttaagtttgggtttgcttatcacatcattcttctaatgatatgacctcgttattaaatgacaacacatgtctatggttagaaaaccttaaccatcttttaatcaacgagctaatctagtagaggcgtattagggacacggtatttgtttatttatccacacatatatttactttcctgttaatacaattatagcatggataataaacatttatcaagaacaaaaaaatatggtaataacatatttattattgcttctaagacatattttcaacgagcctatcaagaactatcagtgccttgtcgttatcgatgatctgcagtccactgacgactgggacttgataaaggctcaact

SEQ ID NO: 15431 - DNA, 687 bp, Brachypodium distachyon
  Intron number 2 from transcript Bradi4g36170.1 (locus Brad i4g36170) derived from phytozome v7.0 (chr-ID Bd4; pos 414 33653 to 41434339)
cggcaccagcgccccgctggcgctgcattcccgtacaaccaatcgatcttgttcctgccttcgcttgcttgatgtcacagccaagagttagtaagatggagtgtttctgttcttgtgtgatggatcctcctgtcaattccgttttttttattttttgctgtaatcttggcttcttgttcatttcaccgctgttttcttctactgttatcaactgatctgattttgatttttgaactttggaaagtgcaatgcaagcattaggacacgctcgctggtttggttgtggtggaataatgatgttctattgcgtatggcagttactatgcgttcttttatcagaatctttcttcatgtgttttcttgttttcagcatgatatgatgcaggacaattaagtatttggtcttataagtgtgcaattttggtgttccttaaccagttcgatacttcgatatagtttatccatgagaaactctgaagctgggtgtaaaaatttgcacctagtagtagaatgacttgatgtaccatgtcacagcacctggaggccaagagtacaattgcaaaacggtcgaaattctgttaacgttttctgcacgttttgtctccctgactcagtttgaggatcagaccaaatgtactaaatgtttctttgttaaaattttcctgcagcgtccaagcctagtgtttg

SEQ ID NO: 15432 - DNA, 865 bp, Brachypodium distachyon
  Intron number 4 from transcript Bradi3g48150.1 (locus Brad i3g48150) derived from phytozome v7.0 (chr-ID Bd3; pos 496 58664 to 49659528 reverse strand)
caatatttgatcctgtggtgtttccagctaaggtaagctacccacgtccatattgttttgactttctgaatgtggataacctggcaaacttacatcatggtagtagtgttattaaacaggaagaatgtatctcagtatgccctgatatctacttcactcagctttccttcgtcatacaatgcattattgagctactatgttttccctcaccccataaacatagatcctaaaactgacatggtaatttaccactgtttctttttgctaatatgggcaaataagtcaatcagaagagcttaatgtacaatatgatcttctacctgttcttgttaaaacttactatatcacgtcttctaccacacaaaaaagcatatttagtttattgattggcaagcttgttcacattatctgtatcctagcgaaaacttcttaagttgagaagcatattgtgcaccctactaccttagtgtatttgaattaagaaccagttaatgtacagaatcttccctttgctaattgctagtagcagtgaaggaaattgctttcactggttccctccagttgcttttttcgcatttatccctaacgattgcatggatactagtattatcaatgttgtctattttgtgcttctgttttatgtaaatgtacctccgagtattcattggctaagaacatatgaaccaacagccattccttaatttgtatggtgtgttgttgtcggtatatgtctgtgtctgtcatttgtttgtgctcaagttatcaacattgctggtttctgtagattttttccgctaataatgcattatattgataccaaaatgcaatatctttttgttgatgattcagacaattgcaacatttt

SEQ ID NO: 15433 - DNA, 275 bp, Brachypodium distachyon
  Intron number 1 from transcript Bradi4g37450.2 (locus Brad i4g37450) derived from phytozome v7.0 (chr-ID Bd4; pos 425 68454 to 42568728)
cgcgttttgggatcggatcgggtcctagcctccaggtcagcttaacttagcttcttctacatatgtttcctggaagttagctagctcgtgtttttgtttctcttttgggagctcaatctccttatttgattgccatggcgatctcgggattacgtatgcaaggaccaacggaggtgatcccgaaacttttggaggattacttcttctcattaattattcttctgcttcttttctttacaggtttctctgaatcttgaccttggaatcatcacacg

SEQ ID NO: 15434 - DNA, 335 bp, Brachypodium distachyon
  Intron number 5 from transcript Bradi4g16280.1 (locus Brad i4g16280) derived from phytozome v7.0 (chr-ID Bd4; pos 170 43428 to 17043762 reverse strand)
tcccactgtacgacacccttggtaaagtctttatgcttgtctccacaaacactcactgagaaaggcatgtcaaaccaggaatttgttatatcccactgtgaatgcataaaggttcaagaaaaaaacacatttctaagaagaacaacagtttgagttaccatggatgtctgaaaagtccgaggtggcaaagaacaacatcaatgaaaaaacatatcttaaaaacaatcattacttgcattagtccatggattgatgtctggatttctatcaatgttttcctctgcacctcacggtgtagtattgactggacaagttgcaactcaatgcaggaccaa

SEQ ID NO: 15435 - DNA, 861 bp, Brachypodium distachyon
  Intron number 1 from transcript Bradi5g12440.1 (locus Brad i5g12440) derived from phytozome v7.0 (chr-ID Bd5; pos 159 04978 to 15905838)
agtactccagcagcaggtcaatggattccattattccgttacttcagcttcaatactctctattttttcctttttttggcagattaactagctactctagttatcaactccattcttctttatttgattagcttcgggtgtgtgtgaattttacctttggaagcttctctttctttttgcgaaattaatcttgatgaaagtttatttatgtatcaccgtgacagtaacttaagccgccaatcgttcagttccatactacgtaacattgctagcgatcctgtgatgaacggtttgcatgccttttggcatcgtttgaactttttgcagaattttgttgacctctttcttctctctctctctctctctatatatatatatatctagccagtcccttctgtgtttaattactaattcatcatgaagtttcttaattagcgcaatgctagctatgcactggaatgaagaaatacagatctccttgcaaaaatgaggaagcaatatatatatctacagtttttcctctgttataaagagatacatatggccgagtcaaggagtcaaagttgctcttatgtacagaaaatatgattttacatctttttcaaagttgctcttatatctttaacggtttgtcatagttgctcttatatctggaaaacaacggtcaaagttgcaaattggcgattgtaattaatcatgtccaaaacgacatgtattaacgaacgcatggagtatcatttttgtcttagtcagtctttgtacaaatgcatgaaaacgctttagctcgtaattatttcagatcaaaccatattacgcagtactcttatctgattggtgtgttatatggtcctttcttgcagc

SEQ ID NO: 15436 - DNA, 983 bp, Brachypodium distachyon
  Intron number 2 from transcript Bradi5g10810.1 (locus Brad i5g10810) derived from phytozome v7.0 (chr-ID Bd5; pos 141 38783 to 14139765 reverse strand)
ctcgccccaagatacaggccaaggtcgttcgccaggtaattctccaccctgcataatctcaacttttttggatccttcatgtattcttaattgggtgcgctgcagattgtaacacaatgaagggtagtgtttctccagcttattttccatgtccttcactcctgtttcatagtgcctgatgatgcggggaagtcagattctaattttgtttggagcaaaatttcaggttatttcttttgtgtagtctgatgggaagaaacctcgcatgacagatagttatttgtgcaattgacatacatgttggtgtttcgtgacagaagtttgctagatgtctagatatatgtttgaaacacaactttatttactcgaaaggtagagatctatctacatttgttttaaggctagacctggagtttataggcagctaactgaaattgtcctatatgggtggcacatgagatgcttttaagaatgttcatagttcttatttgatttgggaggtatagttggttcagttaaatatgtagtagggactgcaaaggcaacatgtcccactactaatctttattgcaaaaatacagctaaactggacagatatttgaaggaaatcttgtgatagataagatttattatatgcttcctattttatgtgctgggcttcttcagtgggtcttacacatataagcatatttttagtgggatgaatagctgatataaatccctggggttaggttttctgctggttaggcacccgttgtatccttcattttgtgctctgcttttggttcatccatcaatctggactcggagagtaactcatcattgctgcaccaagtcagactggtgaagccggctagctgactagtcgtggactagttgccgacttaaaaacaacggtagcgtccaactgtctacatgttttctgatgccatgtttttgtttttgcagtcgaagtacattgaagcacttaaagagaaagcaga

SEQ ID NO: 15437 - DNA, 464 bp, Brachypodium distachyon
  Intron number 2 from transcript Bradi3g60640.1 (locus Brad i3g60640) derived from phytozome v7.0 (chr-ID Bd3; pos 595 43415 to 59543878)
ccattgcacttgcacaaaagtggtctcctttgaaggttggtatcacttctcgtcagatcaaattgattgtggtaaaactgataaaattcttccagcaaagctcaggggcactttggtctcatcagatcaaattcaacagtcaaacgcctttgacttgatttgagatgaacggaatggcaaaattgataaatccactaacggagcagtaacatggttgaggattcgcttagtcaagtgttttttcttgatatttcgtttggtcatagtgacaaaactgataaaaacctttctttcaattatgaccaaaaaaaaagagagggacaatcacttgattagtatttgggccaattgtcattgaatcaaattagttttctgtcatcgacaatagcttaacagtccagccatttattcttaggattttctcagaaaaccaagctgatcgttgtttgtttctttgaaggtct

SEQ ID NO: 15438 - DNA, 807 bp, Brachypodium distachyon
  Intron number 2 from transcript Bradi3g55600.1 (locus Brad i3g55600) derived from phytozome v7.0 (chr-ID Bd3; pos 558 02573 to 55803379 reverse strand)
gttttttttgtcagcactggtgtgatcgcatacaagtgagtaaaaaactcaaaaattaagtacgcaagactaggctgtgctactgctggctgcaaattactgctccgtatttgaattgctgtatgattttaagatgatgatgcaatccattttcttcgcatatccacgggtacgtgcatgtcctatgatatcgctcgcttaaattgatcccgtctgtatggatcaaacaaggaggacctggccctgtgcaagcgccaagcggcagcgtgcacatatatagatgactcctcctgaacatgggacttgactcgcaaagtcggaacagatcgcaattaaatcagatcagccgccaagagaaatgatggtgcatccctttgttttttgcctcttggacatggtacgttctccttttttatctaaaaaaaatggtacgtacgttctccttttttgttattgcttttgttttgcctattcggaacataaataaatctttttttttttgcgggtgcggaacataaataaatcatctgcgggaaaaccagggagagcgtgatggtgtggatgctgcaaaggcggaatcgacgactcatcgccggcgttgcctctagcccgagtgtatgtgttctccgataacaccccgaaacgaggaggcggaaggcaagggaatgagaagaggcggaaaaatgaagaataagcgtatgcaacatggatgtcaggaggaagattatgaccatggcttcggctgagggtacgaattaacttcaacatgattccgtgaacgaaggttaggaggcgggggagaagctc

SEQ ID NO: 15439 - DNA, 934 bp, Brachypodium distachyon
  Intron number 1 from transcript Bradi5g02850.3 (locus Brad i5g02850) derived from phytozome v7.0 (chr-ID Bd5; pos 311 3447 to 3114380 reverse strand)
acattacaacatcaacaaggaggtgcttggcatatgtaaggttgtcaatagtcttcccatgtttgattgatatataagcttgtgttgtttaattattagcagtgtagcaaagttacttatatttcaaggtttagtaggttttacatatttactttgacttggaaagtaatatattgtcatgacactgcaaaactatttactaacaaagtagaggatatcgttccttgattggaaacaaagcatttatatatgtgtacgctcatggatactaagagttctgtttaggatattcttgcataaaaggcaccatgcaccaatttgggaattagtggtggagaggaatctatttgaaatttgtttatgtatacttaattatttttgtctcacaacattcatggtgatctaatgaataccataggttagcatcataggtgaaatagttgtcactctatggaaattgttgttctattttgttgggagcatataaaatagacaacagaatccaacttgtgaaaaattactgtgaaccaacattctcaaaatttatttccatagatctataggaccatcacttccctttaatatgtggtctagaatttcaccgtcaggccagaacaagaaaataattcaagatataattttagaaagcacataaaactatctccaaattatggctgatttagaaacaactatactcttatactcacctttctttattataccaaaataatcatttacatttgtgcacacacgtatacactcatctcttggagttctatcagttctcatgatcttctaccatgactactttgatttctgctctcgatgttcttgcagcttatatatatagtatgtgttgatttttagctataggtctgtgcatatcatataattcttccaaaacgtactgtctcattttttttcagcagaaaca

SEQ ID NO: 15440 - DNA, 571 bp, Brachypodium distachyon
  Intron number 2 from transcript Bradi3g50150.1 (locus Brad i3g50150) derived from phytozome v7.0 (chr-ID Bd3; pos 513 51572 to 51352142 reverse strand)
agacagaccgacggccccaactgcatatacatttggtcagtacaccgttccactcttttgatgctacatctttcgtgatttgtcaattgctctgatatttatatatgattaatttgattgtattgttttttgacattaacataaacttgatgtcatccaatgactctaggtaacacatgtccttttacatcttcatatatgtatttgatgccttatgattcaggcccatggcattagatgatcattgcataatgacctttatttgttattgtgtaatccaatgactctcggtaacacatgcccttttacattttcatgtatatttgatgtgttatggttcaggccagtggcattgaatgatcactgccataatgatttgactttatttattattgcattttgatgtactcagttgccatgtaaaaaaaaagtttccatgtgaggatgtcagatgatttgggttcttttttcagtaagattcatgtagttcaattatattttcctcctgtttatggtgtacctttgttaacaatagatctcttgtaatttcagatagggtatttcattctga

SEQ ID NO: 15441 - DNA, 949 bp, Brachypodium distachyon
  Intron number 1 from transcript Bradi4g17160.1 (locus Brad i4g17160) derived from phytozome v7.0 (chr-ID Bd4; pos 181 25442 to 18126390 reverse strand)
ctctaccgatacaacctgtatgcccccgcgattaacccaacccacctcttcccgtttcatatctatgttatgcagctcttctaatttctaactcgtggcaaaatctaaggcaaaccccaagtggttccgtatctcattctccacagtcttatttggggattacaccccaaaaatcgattccaacagataacctatcccgttccccattccccatatcctgctcggatttgatgctaatgctgatgctgaggctaatccctattgtgtgctaatatggatccctatccctaatgctaatcattatcgtgtgctaatctatgtgaaggattgtgttgcgtgctatgattgtattctaattagtgatactttggtgctaatcatttttatgcgctaatcatgtaatttgatgctagttatttttattagtagttcttatgttacatgtaattactaattacgatgttgcttggtgttttcaacgtagataaagtaccatgagcatgcttaattttcttatatatgtgttgttacttataatattaataaaatacaggagagttgaatatggggaatccggagagaacaaaaatatggtggacaaatcttttatagggatcacctatatagggatatggggtcaattttggggaagctgttggatactgtccaattccatgctttgaccaacaattaatgaactaatgcatgggttgtgttataggaacttcccacaacagttccttggaagctgaatttcaatcttttagaaccagaaaaccccactgagtatactgaaatgtgcttaagcaagcactgtagttgcacctcttctttcgctggtgttgcttgcagtttgatttatgttatattgtggtctggtcccttgagtttgttggaaattaaaattcatgttgaccatttatccagtttgatgttttatgcaggcctc

SEQ ID NO: 15442 - DNA, 696 bp, Brachypodium distachyon
  Intron number 2 from transcript Bradi5g15760.1 (locus Brad i5g15760) derived from phytozome v7.0 (chr-ID Bd5; pos 191 76362 to 19177057 reverse strand)
acaatcatccagctccacgagctgcttggcaacaggtacggactacggatccaccttccctgttctcacctctcctttcctcctccataattgattgcatcgtttaattgtggcatatatttcttgctaaatcggagcgatcagctcattaatgcttgcttcaaatgcaaagaagggagatttactttcgttttctttttcttagtgctaatctggatcaatttcgtacttatctttttggctactaaatcggagcaataattagtgcttgcttcaaatgcaaagaaaggaggcttattctcttttcgcttgtggggggcatacaatatgttatctccatgggcccctcttcgaggcaaataaaagaaaagaaaaatcacaagtgtagacaccactttgttacttctaaattgcaattgcatcactgatgatgcgcgagatcttgaaagattccatctcgtttggccgttccgctccccggctgtgcgcctccttgatttcggtgccgcacaaacttgcgatcgccattaaacaacggcaattggccccgttgggggaatcaatcagatcacatcgtagggtgggaatcaaaacataaaactatattcatctcatctccccgtccaatcagttttcgcgttgtcaaaaagaaaaaccgtgtgctgatcagctcgtttgtttgtttgtgtgcaacag

SEQ ID NO: 15443 - DNA, 850 bp, Brachypodium distachyon
  Intron number 1 from transcript Bradi3g51390.1 (locus Brad i3g51390) derived from phytozome v7.0 (chr-ID Bd3; pos 524 45151 to 52446000 reverse strand)
cttcgcgctcgtctactgcaccgccggcatctcaggtttaatttagccgctttcttttcccttcttgcttgcttgccttgcatgtgaacctaattaatcagctgaaacctgttccttttcttgcttgcctagagacgtactcctagaacataatattagttccgctatattacaagctaagcttcttattagtgctcttgatgtcatatttatggttcttacgttttgttcttgtaccaatacgtacctcctttccacctagagttttgtcctattgtaatttactactccagctatttggcatttcgtcggcacactgcactgctttagtatgtgaaagttgtttgtatgccaaggcagtcacagctattgataaaggataaaactcatttttttcacccagcgcttctgtagtgccccaaatctggatactcaaacctgtaaagtgcacacggaaaacttcattttaatcacttgatcctgattacgtttcacttggaggtaaacgatatgcagtaatattttttttacaaaatcggcttacttaatctttactacgggcagcacagcatttagtggtagttaataagcatctttcattgtcaacgtgtacaatgtctctctgtaaactgctaccaagttaattttgtggtccaaccttcagtagtactgcttctgattctcagattctgcttggttaaatatcaaagtttgagaggacttgagagaacggcaagatgtcctaggttaagaatcataacaacaaaaacacaagttaagggctcgctaatctctattatctgctactgtaacaggaggacacatcaaccctgcagtgacttttgggctg

SEQ ID NO: 15444 - DNA, 966 bp, Brachypodium distachyon
  Intron number 1 from transcript Bradi3g56930.2 (locus Brad i3g56930) derived from phytozome v7.0 (chr-ID Bd3; pos 566 40775 to 56641740)
gggctctgggactcgctcctcaactggctccgaaggtttcccgtctagctcctctcccctccgccccctttatgtttcaccgtctttcgcggttcagacggacctcttcccggcggagccccccaatcggccgatttcggcggtactattggttttcctgggataggtctggatcggaatttccctgtatatggcgagatgacgatgctgggttcgttgttgattggagttggctgtgtgctctgtctggtgtagtttagatccagggtaggtcaagctaacgtgaagcatacgcgttcataggccgcctttgttgtttactaacacatcaatagattttgatgcagttaggatatctgaaagcctaaagcgtgcataatcgtgaactggataatgttgtaagagcatacaacaattcattgcaattcaaacaaattacggtctatgttggccagaaaaaacaaagaaacctggctttatggagattggagatgttcaagctccctctgttgaggacaattacccggagtagaattttcaggtttgttagtgaaggctgcaccgtcgccttctgaaggtttagtttgccatgatccccaaataatggttacggctatagggtatgcatgaatgtgtgaattttcattattgttaggatgcaatcctgacctgttgttctttaagtgcttaatcatgagttaggctggctgaactcatgttgatgaattagcttaaaacttgtcactaaggcaccgagttaaacttatcccatctttgtccaatatattaaaacaaaaacttgaagatgtttcaataataagttaacgacactgagttaaactgcaatggtataaaattagaagatgtgggtgttgtgtagtgtcttgttgtcttgaaagcatgaccaatgaaaactctactcatggcagcaacattttttgtttcagcttgttctttaagcaggag

SEQ ID NO: 15445 - DNA, 712 bp, Brachypodium distachyon
  Intron number 2 from transcript Bradi4g41530.2 (locus Brad i4g41530) derived from phytozome v7.0 (chr-ID Bd4; pos 455 92344 to 45593055)
cccaaggcctcctatctggcatagtcaccgacaaggtgaaatctttttcttactccttgtgtttggaatgtgttgtgtacttttatagtggtcgtagctatggaaatgtatagattttcatgtaatgtttcgacgaatcaagataggaatcacttctttctcacttttcttttgaaaagattgatgtatgggttggattctttggtttggaccttagcaagtggccttttctgtttaaaacgaaagctctctgcgctttgctatctgtaggtccttggtgatttcccctactggaagccaatttttgtgaccattgggtttgtacagtatgttgcttgattaggtgtttgattggattgggggaaagtgcaaatttatgctgaaaaaaatcggatgccttttcttttccttctgttatgatactagaaagtgcaaggtgatgttactgtgcatttaagaaggagcaaattagttaaggcagcccaagtatggttgcgtttgacttctgttggctaattgtgcactgtactgtacttttaactaaaatgtggcacaacctagcaaattgtaaatacagtactaaaaatagtagtagtattatgccaagtggctcatggtctactcttactgcgttcgagctgaaggcactttttctttggatgcaaattgtggtgtaggatatatccacaagagtgattgcagaggggctgcg

SEQ ID NO: 15446 - DNA, 327 bp, Brachypodium distachyon
  Intron number 4 from transcript Bradi3g47830.1 (locus Brad i3g47830) derived from phytozome v7.0 (chr-ID Bd3; pos 494 13964 to 49414290)
cacctcctggtggaacgccatttgagataaggtttgacttcttcttttgtttctatgtctcctcagcctgagaaattaacaaatttctcggtgttagcttttccatcttatgcttggacaaactttcagcaaaaagcacagactaaggatacgaggaagtttgtttcgtcaaatgaagtccccaatgctataattcctaatttgatgctattctacatacctatgtcgttcttgtttttcttaaagaattctgtataacaaaatcaaacataattaaccctgcatcttccagagtgcttgacattcctggtgcagtatttgctgccg

SEQ ID NO: 15447 - DNA, 800 bp, Brachypodium distachyon
  Intron number 1 from transcript Bradi5g14130.1 (locus Brad i5g14130) derived from phytozome v7.0 (chr-ID Bd5; pos 175 75081 to 17575880)
ttgggtttactgcaacgtctcgaaggttaggtcacacaatgtatcttttttttgtctgcaaaaacctgaattagttacacatcatgtacttagacgtatgaaaacatgttagtaatgtacacggtttattcttaagtagttcagtactaaggaagtactataggacattgtactaacctgacttttgaaatgtgtggattacttaattggaaattaactgtacaggaaataacagttaagttcaacgctaaatttaatatctttcatcactacgaaccataagcaaggagtgtatagaaatgtaccaacaatatttctgaaacgttcgaagtactgaattgaaaatcaagtgtacatgaaacaacaatgtacttttttcaagtgcttattctgttgttatgatggtaacctaatgcctgtcaattggttggatgtagtaacggtagttatgtaaaaacaattaagtgttgctgaagtacttaatcatcagtcccataggtacgttaatttgttggaagtacgacctttaattatgcaggaagaattaggtactgctgtagtacttaatcatgtgataagccacaattttgagatttaataacttctatcgattatatttgaacgtaggaaaaagtttgatgctggaccagaagcacgtgtttctgtgcctggtagaccttgtcctcttgagaatgcattgcgtggttttgcacagaggagcactgaagaaattctgtaacccaaattggtctttgctttgactcattagctgaggcttacgagtacatcaatctatattc

SEQ ID NO: 15448 - DNA, 785 bp, Brachypodium distachyon
  Intron number 1 from transcript Bradi4g05450.1 (locus Brad i4g05450) derived from phytozome v7.0 (chr-ID Bd4; pos 451 1832 to 4512616)
ccggcgtcaccctcgtcaaggtcagcgctcagcagccgccgccgtattctcttctactagtactctgttctgagagtacttattgtattcctctgttctttgttctggtcaaaatgacagcggaaacaatgataagaaattcgctggactggttcatcacctattttgcattagttctgattccttttctcttcttcccatgtgcgctgcactactaacagaagacagggtgagctcatcaatcaacatcactgaaatcaaagaaatgttgtggttatcaaaaagaatttgggaaattagcttggactaaccaatgagataacaagtaaaattaggtgattccaataagtaaagaaagtagattcccgttcaactattagcttggatcatgtacagaaacaaattcgcagcatgtctgctaggattcttcagtgttgaatccccaaagttgtcagcaattatattatatgaccggtttgtggttaggttctacactacagaattcaacttctttgtaatcagctagttgacaaactttcctgatgttgctactgctagaaacaaagttatgtttcattacacggttcctctgctttttgacaagtttttcatgacagtctttttgaaaaggccgaagaaaaccaataatctttcacacaaatcaagaagaaacaacaatggcttaatctgtcggtaattataaggttatgtataactgtcggtaattagaaggttatgtataactgtatctgtaacattactgttggaataccagggtgatattt

SEQ ID NO: 15449 - DNA, 693 bp, Brachypodium distachyon
  Intron number 1 from transcript Bradi4g00920.1 (locus Brad i4g00920) derived from phytozome v7.0 (chr-ID Bd4; pos 486 234 to 486926 reverse strand)
tcgagctctccaccgtcatccccggactgaagaaggtgaatgatttttctttaattaatccatccattatattaccacgtcgatcgatcttcttcttcttgtatgctcctagctagtcctcaatttcattccatgcttcttcttgtgttaatcttctccttttcattggggaaaatataaaactgcaatcaattaagattgcatgcgttaagtccaagcatttcttgttcggccatatataattaagcgtgttcttacttctcagtggtacccgccgattatcaggccttgccttccacaaaagatacaacaataatccaaaccggttcttaattagatccttccgtttttttaatttccttttcatattggactgaattttactgctcaatttgatctgtgctatcacattttcgccagccactgcagctcattaacgttttgaattttgctcgtgttatttccgttacgaaagtgccaaaaggtcatttcgggtcgcttaccgtggtgtttttttttctttcgccgtgcctttttacggcgttgtaaaactctttctttcttaatgaatatacatgcaactcttatggtgatcagttggcccgtcgctaaaaaaacatgtgcaagcattctgattaattcaactcatgtcttatccataaactaatattgtaaatatgatgagatgtgtag

SEQ ID NO: 15450 - DNA, 811 bp, Brachypodium distachyon
  Intron number 1 from transcript Bradi5g10670.2 (locus Brad i5g10670) derived from phytozome v7.0 (chr-ID Bd5; pos 139 93937 to 13994747 reverse strand)
tgtctaggtaatcagatgatcctggaactgttgcttcccgtttagggtttaattgcagagtttgctggcctgatcaccagcctaacttactttcacgtttggggtgaagtcgaagctgactttgtgttcatagtgcgattaaatttaagaaattggcttgttataatggtagaggcattaggtctcatgcattattttccctctagcttcgtgtgaatgatcagtcgggttagctgcttgttttaagcgaattccactcaagtgcagagttggagacttgggagtgaacagtcaacggtgtagtttctcaccaactacagctgttgacctcttccatcgtcattccagttctacatacctgagccactttatttttctcttgtaaatgtgtaccttagtctggatagctaggaataccaaggtgtactttatggttctcttgaagaagttttctcgagaaaggctgaataactgcttattttgttgctttagaactgtcattctgttggagtgcagatttctcgcttctgctaactcattattatatccttggaagaaaataatgccgggtgagattatctttatgtttggcactcaattgtgttttgggaacatttgattttgttcctgcgtcaagttcacatgttccgatttggttacttgaatttagtgtgtcgtttacacttccttgttatggtattgatattttcacttcaaaatgatatcgaattattgatatgtacttatggttcttagttgcttggtgtaatctctaggtctatcgatccggttgcctttgccaagggaagaa

SEQ ID NO: 15451 - DNA, 997 bp, Brachypodium distachyon
  Intron number 2 from transcript Bradi5g08930.1 (locus Brad i5g08930) derived from phytozome v7.0 (chr-ID Bd5; pos 120 53504 to 12054500 reverse strand)
tccagggcaggtaatcattcataagttcttgtttgtagttatgtaaatgtctgcaactaaacagagatccaacacatcacgcagaacagctgagcttattctgttcacataagatgttttccttcccgtagccactcgtgaattgcttatcagctggctaggatataaccaatttacatttcctaaggctgtgtttggttctgagaacaaagtggaatgtaatggagcggtttaaaaaaacatgatgttatgtaagccatttaaaaaaaactagtcataaaccccacacagctcatgtaatcttgaaaaaagaatcgcttaaaaggtcaaacagttaaattatatctatgcaaaatcattatctggtagtgttacttcaaagttatgaattaaatgcccctgtattgcaacggaatcacaatacataagataaaataccaatacaattgcaacactactgggaaatttactctccttttttttggtaaaaggcaaagagaacatatcataaccaccacccactcgattcttttcagtagtaaaggtaatgcattaatgtagtgtaagctcctacaactatgtatggcctgtaaatattctttgctaatgaaaatgttgtatgcggagtttctagatttattggtcacctgtgcactgataaataagacagggtgtgataattgtgacatgttagctagttcttaattcttctctacattatgggtttcatatggttgcttgaatatgctcataattatttgctgagctataaacagaaatataacaacaattgcaaagataaacttggtatacttatgacttgagcgaatagtaaactttgtacaaggaaaacacaaagtggaatcacacccttcatcttctcttcagttaaccatgaaaggctttacaaatttagggggctgattgttaacaatacgaacatattttgctataagttttctcacctacatggttgatgagctttcttttgtatagc

SEQ ID NO: 15452 - DNA, 523 bp, Brachypodium distachyon
  Intron number 1 from transcript Bradi5g08930.1 (locus Brad i5g08930) derived from phytozome v7.0 (chr-ID Bd5; pos 120 54572 to 12055094 reverse strand)
gccaccttcaagcaagcgcaggtatcctcttagtcctcccgtcgttacagatttacacggagaccctcaattttttgttgctaatttcctgggatatatgtttagtatgcaaagcaatttagcgcttgcccataaacagtagatcatcgacatcgtgaaggttgtttgttcttacttcagacttagattagttgctttatctttttgaatcaaccgaactttatcaaagagcaaatcaagatatctgctttttattctcatgtgatggcttttcctttttcgtcttttaaagcaatcactcttcctttgattttagtgcagcaaagtctttttgatccttatgccttaaggctgtctggcatgcaggaactaagaatattgttgcccaacgattgcattgtgctaatacgtacaacgttatcatggttcatctaaatctaataatcctctaagccgtcagattaaatagtttctttttattattataggctttggcaggagggccattggtgcaagctcgaaa

SEQ ID NO: 15453 - DNA, 912 bp, Brachypodium distachyon
  Intron number 1 from transcript Bradi4g38240.1 (locus Brad i4g38240) derived from phytozome v7.0 (chr-ID Bd4; pos 432 48900 to 43249811 reverse strand)
gacaagcagagcaaggagggcggcaaggtgtgctgcttctacaggctcggcgacggccggctccccgctgctcgtcgtcgacccgatcaccgggtagctgctcgccaagtggtgcggcctcgtccaggaccccggcgatttcctcaccagcatcggcaagtacaccgagtccaagcccagcatgatgtccagacccaaaaagatcgtcgacaaaagtactgaacctcaaccgcccgtggtgcaagaaccagcaatgcttgagaaccctgcttgcctctggtgcacaagatttaccggcattggtacccaagattgagacgcctgtagcggttgaagaagacgagcagcctgtggaaggagagacggtctacaagctgagagtacggttccctaatggtaatacggtcaccaaggagtttgggagcaagcggagagtcgcgacgctcttcgcgtactgcagatcggttgttgatggccagaaggggacggagcaggccttccggatcatgaggctggctgccgggcgggcgtttgagcagctgcgcgacgacggtgcctcgtttgaagatttgaagctgaaccgcgatactgtcacggttgttctggatacttgatcagcctttggggagaacattacaatctgtgatttggttatgtactgcttcaaaaatgcatctttacgtattgtgctgtttcttataatgtgatgtttgtgaggtctgggaaaagcccagaataacttttttgatttctgagatcgaatgaatggatcaatagatcattgatggtccacataattaagacttgtcctcctgtccatggactaatcgagaatcgtaagacattgggattccaaatctaaaccgtactatcacagattggattccttgcccagcgcatcgccgcgggcca

SEQ ID NO: 15454 - DNA, 578 bp, Brachypodium distachyon
  Intron number 1 from transcript Bradi5g09110.1 (locus Brad i5g09110) derived from phytozome v7.0 (chr-ID Bd5; pos 122 92117 to 12292694)
tggtggcgatcccgcatccctggagcgcatacaaggtgtttgcgaaaatgataagacctgctgcatacctttgtttacatgtttttccttttggctttttgggttttgagtggtaattgttctgcactttgctagttccgcagtatgttggcccactagatttagtattcggtatttctcactcccagacttgtatttgcactgcacacgttgtgaatttcttttcatgcttaaaagtttaaatcacactttcaaaagaaaaaatgaaagcagtgttcactttgctcgtagcatatgctccctgatgaatgttggttgctctatattatatttgtactgtagaggcatgatatgatatttgcagtacatgcttaccaagaagtcgtgaataagttttttttttacatatgcaaatacgtatcatccaatatatcatttgatatccaacatctgatatgcaaagacagtttgatatgaaacagttatctgctataagaagtttgctgcactttgcacactgcattcattgtattgcatatattaatatctatatataggtcagagacaaactggaaacg

SEQ ID NO: 15455 - DNA, 552 bp, Brachypodium distachyon
  Intron number 1 from transcript Bradi4g00330.3 (locus Brad i4g00330) derived from phytozome v7.0 (chr-ID Bd4; pos 147 011 to 147562 reverse strand)
cggcgcacgacctccccgtccggggacacctcccggtatctgcaatgcaaacccttttccttcccatatcatcgtctctctgctaatttaatctcggatgttggaggtttagcgattacgtgtcgatgtttaggactactcgttgttaatttgtaaatgtcagagggatgtcaatgggagacatcaaagaaattaaaaagaaagaaaaggaaaggggatggggcaagtcccaaagcccccagcttcttcctcacaaaatcctctcactccagctctcttgttcattgactccttgttgattctacctcagattagagtcattttcttaacagacagacaaaaaaaaaataaacattggagttgactcttactagaagcatattacatttgtttccagcattctcctctatgctaatttgctgaaaaataatggcatacacttttcttcgagaaactggttattccacagttccttcaaaaacttcgcttgctacgtatcctctccttttctcataccgttccttttttttggctgtctacaggagtgcttga

SEQ ID NO: 15456 - DNA, 992 bp, Brachypodium distachyon
  Intron number 3 from transcript Bradi3g54070.1 (locus Brad i3g54070) derived from phytozome v7.0 (chr-ID Bd3; pos 546 17833 to 54618824)
aggcattgcaggagctggtcccaagcgccaacaaggtgaccgaaacttcttgccttttctcattccccttttgccttttccactcttctttccactccctttcaacaaagcaggaagctttccttgaaatgtggtgaaaaatgcatccatgtttcctgcattattgccttgggggcaaagctggtttatcatagtatagcttgtgatgctatcttgtttttgtggttttgtaaaatatcgagtgcttgacggaataggaaagcagggtaagttggagctatatggttgattactctttaactaattgaggggataaggttacgtgtcagccctcaattggaggatcaatttggcttactagtttagtaacttgtggttggtgctagcaacgcaggcagcagtaggaaaagggggatcagacatgtaattgccctgattagtcagggccataggggcaaaaactgacatctgcaactacagataaccagatacaccaaattgaggggaatgaatatcaaatttgggacttgatgatcatttcattgaacactatgttcttgaaacctagaatattgaacatattatacgtttgatccacatgtttgaactttgagacatacccgatgaattagggttccatgactgcaaaacactagggccagagagaggggcattttctagtgctccagcttctgatattctctatgaaccagatggacaggggcacgccccaccacctcatgccatggttgatatttctggagcttccgatggcacatcacatatcttgttttgcacagtttgtagtagtcactgtttagagtatctgaagcaataacgaatgctgtttgcttggctttggaataaaaactgatatcagttgtcgtgtcttagctgacaagacgggcatataacacaaaactggagattgcacagattgctggcactggaataacaatatggaatttttgttgcagaccgacaaggcatcg

SEQ ID NO: 15457 - DNA, 766 bp, Brachypodium distachyon
  Intron number 1 from transcript Bradi3g52610.1 (locus Brad i3g52610) derived from phytozome v7.0 (chr-ID Bd3; pos 534 88795 to 53489560 reverse strand)
ggtcaagcaatctccgcgccgtcaggaagaggcctgtacgtttcttacaccttcccctctcacggggctaccaatagatgcttgctttctggagccattctcgggctcaccgtgctgaactgtcaattggattgagctatggtagtgtgtgtcgtagctggaataattcgaatgaaactgctcgtaagaaaccaatacatcttaaactttgctgacttcgaactattcaaatcaacaccgttgatgctgctgtctttttcctgttgcttgcacgcaccgtgcaggcatctatagtttgaccaattacagcagtgagttcaaatttcccttcgattcttctgactcaaacttcgtttgtgactgctatcagtattcccagccatccagcgcccctatgttttctgcaaaattcattcagtgttgaatttggtacatactagttttgtttgcttgcactttctgtttcaatccatcattagtgtcatgagatcctaattactcgttataagtgattgggagatattacacaagtgcacaattcaaagcgcgccaggatcctaattggtgtttctttttagaagaacatcctttacaccattgctctatgacaaaaaagatgacgggatatctacatttcaattcgttttcattgttcttttgtattatatgtgcatctcatgctcatataattgtgacgttccactctgaatttcaactatttattcctgcagcttgttgcaagattaaccagagatatcatccaaac

SEQ ID NO: 15458 - DNA, 1048 bp, Brachypodium distachyon
  Intron number 1 from transcript Bradi4g00580.1 (locus Brad i4g00580) derived from phytozome v7.0 (chr-ID Bd4; pos 269 179 to 270226)
tgcccttcaagttcggcctcatcggtatgttaattcttcttcttgttcttcttgccgtttcagttctgaattctcagttttttggacggggattattcagtgagttcttcagagtccagacaaacaagagaatgggtccgtcggtaggatctaggacgagatcgagaatgccgagggagaaacgcaaggagagctgcccccagctttgttgttatgacttgctgcatcacattcaagtcatgacaaaaatgatgggcggtgcttgtggtagcagctgacaaagctaaatggaagtgcaaaatgacaaattcaattccattatttttttccattaaggtcctgacaaaagctagaacaagctagctacaacaatagttaataagatagatggggttcaaatgttcaatagaagacgcattaggcaaaaaatgatagcacagagctgtctgtctgtctgtcgtctaccttgcctgaacctgaaacaccaaaatttctgaccctcatgcctgaaactctgactttctaatcccatttatctgaagaacttggctatggtctcaagtctcaacgatggctggaacacgaaattgccaatccccctttccgaacaatggcccctagaaacgtcgagatccgcatcatccggatgccatttgtcgtttcgaatttttgacaattgggtcgtattactagcatccaatgtcctcatcaagactttaaattagctgcacaactcagccggcatcgttgtaacttggaagtccaagttgcaggagtacttaatttcctagcaagtttcaatcaagaagaaaaaacagattggctccctgttgactagctggcactactaggaagacaatgtgcacagctgacagctgccactccagtgtgcactgtaaatgctgtcagaaaggggaattgagtttactgaaatgtaacaacccaatttgattactgatggatgcagtctgtgtatactctgaatttctgatgatttgcaacaaaacaaacaggcgacctggggcagacattcgactcgaacagcacg

SEQ ID NO: 15459 - DNA, 672 bp, Brachypodium distachyon
  Intron number 3 from transcript Bradi4g34140.2 (locus Brad i4g34140) derived from phytozome v7.0 (chr-ID Bd4; pos 398 02282 to 39802953 reverse strand)
gcaccatcattggtgagttttttgtgtcacaacatgtcagtcctgacagtccaagcatggaatttttttactagcttcaataccagcatatttttagtgttgggtgatcatgatcaaaatcatttttcaaagttaaaacaaaatggcagtgtgctacaaaaccatgtcaagtagaggagattgtggtgttagtatgtatcttgcattattaagaataaatattggagaatataggcttgttaatgagaagtaatgattcattttagttgcatggcacattgaggttcttgatggattgtttgtgatcataggaggtatttttgctctagtcaatacaaatctaggcagattttcaagaaaattaattggcaagctatatattaaccaactcgttagcaactgggttgtttgaagattatgcatcctctaatggtagaacagaaacatcacttgaaattcgctgctgcatccagtggaaagcttggtaaagtgtgcaatacttgtttaatgaaatgttaatatacgataaggttcatgtatgcttcatgtcaacgattgctggtagtggactagtggtatccatgtatatgttcacgtcgaatcagcattgcctcctaatcttctgacttctgtgcagatcagttcattgcttgtggtaggacaggagaaaag

SEQ ID NO: 15460 - DNA, 943 bp, Brachypodium distachyon
  Intron number 2 from transcript Bradi4g11580.4 (locus Brad i4g11580) derived from phytozome v7.0 (chr-ID Bd4; pos 114 15401 to 11416343)
tacgcgccctccttcggcttccccgccgcgcgcaggtgagttaattgttgaattcggctaatgtgatggcagcgcttccttaaatccaaaattccaaattcgacattttaattaaccttcagaaggcaatattttctgaattttgagacgatggcttccctccttttgaaaaaaaaaaatctcatggtgccacttgatttcgttgcaaagtactctcatggtggagtactttcacgtatgttgttttgattgatttctgtattgcaaattgattaatggtgttccaagaaaatttgggaagagaagttggctttgatgttggacatgatgattgatggggtatagctacagtagtttccctttctacaacagcgccatcacatggaggttccagtttggtcttaaggaccacttggcttcagaaggagatattatcacatacgtggtacaaatgcctacgtggccggcttaacgccacgtggactaccaatacctttctgaaaactctgaagtgcaagtcagttttgtacactgacagctgaccaccacatatagaatagatacaaagatatgccgctctggttttggtatacagaattacagagcagacgttcaaaaaagctaacaattccaaacctctcatttcaactgatacaccttttctgagcaatccctttcagtttgcgtttttttcataattgtgcataaatttaaagggaaacgtgtaaatttagacgcattggaaaatttgcgcattttaaacatgctgaaaaaaagatgtttcggctactatgctcataccttgtaattccaaagattgatttctcttgacgtgatctcaccaagcttgatgacatctttggggaatgttctgactaattactgtggagggatcttctttgtgacagtgcggtcgctgactacctgtctgccggtgcgcgcc

SEQ ID NO: 15461 - DNA, 879 bp, Brachypodium distachyon
  Intron number 2 from transcript Bradi4g07820.1 (locus Brad i4g07820) derived from phytozome v7.0 (chr-ID Bd4; pos 673 1435 to 6732313)
tgctgcgatgtaagtttaatttaacttctgtttgagtttcctttttcgtgcatgtgctttcgtgttccagttttatcattttattccccttctttttaaaaaaatagtatgctcgtcactgcgcaatttcatagttttgaagaattctctataaatctacccaaaataagcatcgtccagtagacgaaatcacagaaaagttgggaattttttgcactgatacacctatttggaggatacggttaattaatttgctgaatattagaattctttttttgcctgctttccaacgattggtcacacagcaagcatctcggtgcatgctgcaggccgtgccttgcccgtctttctgccatccagcaatgatcctcacaagccagccagatgaagaatttcacccatcggggaggccctggacttctagaacagcttcccaaatcctgaagagtggagactgttatgtagcaggatcagaagaagaatttgtgttttgaagtctaaatatgtatgatgatgagggagaaggagagttgggcacatttcattatgtaatactccttccgatccataataagtgttgatgatttagtattatggatcagagggagtagtatattgtgcgccaattatttatttttcagcacttctcgtgaccaatatcatatgtttgaacaaattagtttcagcggcaggtagtgtactgatgtatttctagtcattgtgtcggagattggcttcctcagttatatcatgttgacgtttgcactttcttcccagaaattatttctgcaattgcattctccttattgtgttcctaataatataaggtatgaatgtgttgcaggcattttgcacacgatattctttcatcgaacactt

SEQ ID NO: 15462 - DNA, 520 bp, Brachypodium distachyon
  Intron number 1 from transcript Bradi3g49570.2 (locus Brad i3g49570) derived from phytozome v7.0 (chr-ID Bd3; pos 509 00641 to 50901160)
aaggctgcccacaaaggtgaaacctttctcgagcccggtggctatgttgtttgttgttagatctaagttttgatttcttaatacgacagcaggttgttattctggtcgccgaggcctacagcttcttccctgttgttttaattgcctaaattcagctactgatgatatatttattgcaactcgtaaatggaatttcattcctttgatacctataaaacgataatcgggtgaatatgtgttacatacgatgaattttatggcatgccgttcaaaatcagttcttcattgcttcggcataaattatcttctgttttgtgtcgattacaaattagttctatgatgttgttttttatatcagtttgtcgtggtcatttagtaagaagttcttcgatatgcatcagttgccattcttctctggtctgtttaggtctgtaccccatgacaatggctatttgtaatcttctgattcactataagttttccagacccactcaggagtcctcaacagaagtatagttta

SEQ ID NO: 15463 - DNA, 537 bp, Brachypodium distachyon
  Intron number 4 from transcript Bradi4g38690.1 (locus Brad i4g38690) derived from phytozome v7.0 (chr-ID Bd4; pos 435 23384 to 43523920)
ggaacatcttccgtctcagtgtacgtccaaatgcaatattccagctttacaatgaggtttcattaataaacatagtatatcaaaattattcttaactgacctgcttctgtagaagaaagttccacatgtggtaaacacgaaaaccccacagaataacacgagtcatgtaattacatgctcgcctctagtataagtaaatttattatttgctgcaaatgtttgtgtcactgtaacaagaggaaacaaggcagcacgaccaactagtcaatatttctcttaaacaatagccgttctagcacaatcaaacatttgtctgtcttttgtatttcttgcttagagaatgacaatccttaaatcccaagttgacattaaactctcctttaatggttttaatagttatcaattcatctctccctttgtctaaagtctaaagtagaagtcaaatattctaattaatatagaatctaattctttatgttgattatgaatcttccatgaacaggaagaggaacataccaaaatcaaaagttgcagcca

SEQ ID NO: 15464 - DNA, 500 bp, Brachypodium distachyon
  Intron number 1 from transcript Bradi5g09060.1 (locus Brad i5g09060) derived from phytozome v7.0 (chr-ID Bd5; pos 121 97858 to 12198357)
tacgacagccgccacctcccatcggcaaggatacggtgagttccggcttcttgtagctagtatcttgggtgatcttttcaccggaataccatgtgttttgtgcaatttggtgcgcctggatgtcctgtatttcgttctcgatctgtttccgagtctttcttttgcccagttcatgggggatcggtgatttcttggctataggatctgacggctgacgcgggcggtggtagtttattattattgttcctattttgttgggtcggttctttgaattagtgcaagttgtttttttttgcggggagaagtaattccattaatctggggaaaaattaaagtctgaaattacataatccatcaactcacttggcccatgcccaatccagcatgaggttttgaactttgttctccccaagttcgcaagcgcgtcactgacacagttttgagctctgttgatcttgtgcacagcagtgcccctttgggccagcagcctcttgatttcc

SEQ ID NO: 15465 - DNA, 793 bp, Brachypodium distachyon
  Intron number 1 from transcript Bradi4g14140.1 (locus Brad i4g14140) derived from phytozome v7.0 (chr-ID Bd4; pos 145 89769 to 14590561 reverse strand)
accccaacctcggatccgcccgcgtcgtcttccaggtcctcccctgcccccaacatcatctcgttcactgcttcctgttcctgctcttacggtcgtgagatctgctccccggccggttggttgtttggttggttggcctgaaattcgtgataagggagcgtttctttcctaccgtattggggaggaaatgggccgttaatggctctaggtttgtacacggattagaaatcgtgaggcgtaaatgaggatttatgggagaatttcgacgttgttgctctctgtgagattgtcggaggattggcttggtagggacgatgtgatcagaatatatagaaattgagaactgggaagagcgcaagagtgaggaatctagaattttttgagtgttgcatttctcttcaaaatactgagtttgtaaattattcttgccaggccattacgctgtgactctgaattctgttccgagcaggttcagcgtgtcataggttatacagaattgaaaaactaacttctacaactgataatatatggcacaaaatggagcaaatagtttatctgcattgtcatgctgcaataccaagttctacttccttttctttgtgcttttcttcttattattatacttgtatttattgattcctggatccttacattactcggtgcttgaatgaagtacagcaatgtcagcaatacatatttcatgataagtatctggtgtagcacttgtttgaagttttgcaccgaagacagttgaaccacatacttgttatgcaattgcacctgcagacaaatc

SEQ ID NO: 15466 - DNA, 655 bp, Brachypodium distachyon
  Intron number 1 from transcript Bradi4g12920.1 (locus Brad i4g12920) derived from phytozome v7.0 (chr-ID Bd4; pos 131 31293 to 13131947 reverse strand)
gcctcaggtgttttacccagcagctgatcaacgcggtacgtcgtctctctcctgcgcgttgcttcattggggttggtgtgggaatgattggttggttttttgctgccttcaaattagctctcctggattatcatgccaatacacttttaacatgccaatacacttttatgttctctgttaagtataacctgatggtatctattggcacatagtccaaggaaaagcaatcaccagtggctatttgtccatataatccttgtacgaaaatagtcaagcacttgtattggatatagttatactgattttgaaggtaagaacttgctcttccttccacttatttggagtcttggacatgatttatcaaaaacaaagaaagtatctaattcactactgttccctgcttatatattactcatagtgttctagtaacttaaccttttgtgagttctcgatgtgaatgattgctggtagaaactaaaaccatgagacagccactacaaattatttctctaccacttatgtactgaattcaaatacgtaatctctcctgtaatgagttactttaacatggatttatctcatacatgtagaaaatcattagattttgtctcttttctttttcagtacactgttttattccgagttggaactgtcc

SEQ ID NO: 15467 - DNA, 190 bp, Brachypodium distachyon
  Intron number 1 from transcript Bradi4g01690.3 (locus Brad i4g01690) derived from phytozome v7.0 (chr-ID Bd4; pos 109 9493 to 1099682)
caagacacgatttagaaccgctcgtcgaggaagaggtatgttcttgaatcttgatcgatcatgaagtttcaaaaccacagggctgatcatgaagtagtcactctctttttttcttgttttttctttgcttttcgtcgatccatagctagctcacttgcaatatttgtttgattattatcagctccagagg

SEQ ID NO: 15468 - DNA, 942 bp, Brachypodium distachyon
  Intron number 2 from transcript Bradi4g31680.2 (locus Brad i4g31680) derived from phytozome v7.0 (chr-ID Bd4; pos 374 09452 to 37410393)
tctgccaggcactgggggcgtttcttgacaaaaaggtgagattttctcagttattttcgtttgtcgatcacagacgaaggaatttgcttcttcgttagagcaaaatctgctaattggtgtaagaactttgtcttgggaaaataatcatgtcgaggtaaacgaattgctgtctggcacgacattggtaggattggaaattatttgatgtaaacttggactggattacaatcttttgcttctgtcgcttggttagtaacatatgtgtactattatcacaaatttcagcgtgtgtgtgccagtttgattgatatatttgtcaaattatgttgacttgaactcctttagagctgtagaattgtcagagcttatgatagaactacatctttatgactattggcgcttgagaaagcaaaatctcttcttttttttcatttaccatatatttgtgtagagaacatggtacaatgatgtgggctatctgttatgtataatcctgatactctgataggctgcttctttgttggaagaaccatctgtgcacatatattatttcaagtatcgaagacacaacatagccacatagaaggtgaacttgtgatgtggaatacacattacacaatccggaatatatggaaatgattgttgtgtatttgatgtatgtttattctaattcatggctacacaaattgactagtaaagaaaacaagacaacttacaaatactggaaccataaaagcaatcagttgacatattttgcaagccctaaaacaagatggtgaaattgtggagatatgacacccgccaatcaggattgctgacagaccagcaccaccaactcaaatatttataggggtgcaaattatgattcgtatggtttgctaatttaatttctgtgttgtggttataggttgtcacttgcgtccgtcaaccatcacaaggacc

SEQ ID NO: 15469 - DNA, 994 bp, Brachypodium distachyon
  Intron number 1 from transcript Bradi5g11370.2 (locus Brad i5g11370) derived from phytozome v7.0 (chr-ID Bd5; pos 149 40390 to 14941383 reverse strand)
tcaacgcctccaaataacagcttttttctgctgaggtacgtacgtagtacgtttgtgtcttctatcgattctgtttgcttcagagtaaaagatcttgcggaagttttaggctgtgtgtggttggacttctgaggtagattttctgtgctgttcgtctaaatttttggtgggcttgctgttcaatttgtgaggacggactgtttggggtaagccagagggtcaaagtggattcggtaagaaaaaagagaggtgcaggtagctttatccagcatatcgataagaacctcggaacggctgttgcttctttggagaaagagagctccgatcggttctaaagaagccttttgagcttagtaccaaccgtcacattccttggcaatggtgctagacaacttctctcatctttagtgtcttcttagggacatggatgatcttcgaaggcaacactgaatggggcctaaatgtttttgaagcaataaagtgccaacaataatttcaaggctatatgttttcctccaaattaatgtacaggacagggacagctgtattctgcagtgtgataagtgcgttatataattcttagataatgatggggctttgtgaaacaaatgcagtcatggggcttaatgctacacattctactcaatgttccaattcatgtactgtaactttttttttctaaatctgaaattttaaacaagtgcaaatattcccaaatattcagagctactactaaactactacttcagcgttgcttgtactaatatgatctagcgacatgtattaatctaactaaaccttgttatgaaattttataaatggtaaaaagggatcatgttgtttttcgatttatttattgtaagtgatatgttctgtttcatttttttgccacttttgaagtgagtttttgagaaggttgtattagattaagtgagttgacatatttgcccacattataggaaagcatcggtggatttcttgattgattgaagga

SEQ ID NO: 15470 - DNA, 844 bp, Brachypodium distachyon
  Intron number 2 from transcript Bradi4g21780.1 (locus Brad i4g21780) derived from phytozome v7.0 (chr-ID Bd4; pos 254 71649 to 25472492 reverse strand)
gaatacaaaatccaagaaggtatactcaaatggctctgtcgtcacttctgattaatttctttatcaatgaatcaagtttctgtgtccagttggatccttgtgccatcaaggaaaaaatggctcccttttggccatttgtcactaatttggcagctcacagctttatcattaccttagtttcagtagtttcaatctggacacactaactaggcataactaatacatgttggtttcttgacagaaatatttttctcctactgagcagatattgttattatgcagtggtgtatggcatctagtttccattttgattatctatttttatgcagactaagtaaaaattcaataaatacatgccttgttgagacactgagcctgaatgtctatttctattattcccagtcacccggtgtgttaacaaattgtgctacttctctatgcatatcatgtgaatcttacttagtggatgatagcaaacgagagagataagatttggtcctaccactcttagccataggttatatgaacggctaatcttagcttctcaaataaaaaagtaatcttatattttgtttgatctgggaccatttatatgacaatctcattgcctcatatccatgctgtccgctgatcttctctatggatgctcatcacaatctctaatcggtttcctgctaactcattatacatatttttgttggggatcctagcctaggtgcaggcatgcacatagtccatttacaggttatgatttgtttgaggtgcctgattgatgatttcctggtcggtttcaatttgttaatctgcagaggtttctttttagtgcacgtgaggtgtgaaggaa

SEQ ID NO: 15471 - DNA, 551 bp, Brachypodium distachyon
  Intron number 1 from transcript Bradi5g10780.1 (locus Brad i5g10780) derived from phytozome v7.0 (chr-ID Bd5; pos 141 08813 to 14109363 reverse strand)
gtcaaggcagcaggcgacgtgtgtgtctggatctaggcgcgtcaaccatgctgtgaaaaatgatgatgaagatagctgacacatgcgacctatgatcggagaccatcaaatccgcttcaggatgtcttttcgacaagtgatgaggtgacattagagcgatactctaggaggttttgtttttttaccgtattttctttgagttgaaactgagatgaacactatgtgtgatctcaataataagaaacggtgtatatcgattgatgaaagaccgggggtaagctttgctctacgaaaacagaagtatagatggcaggatcattagacgcagcaaagttttatagtgagtccgaaaaaaggagcaaatattgagattgtccgagaaaccgtccgttcctttggccacatcaaaccgctataattttcttaaatataaaaaaacgcaaaaaattccttcgagcgagggagccgctcgctcgttcgttcttctcttccccattcggcttctgttgttcgcagctcgaaaactcgagcgccaaaaccccaccgcgccg

SEQ ID NO: 15472 - DNA, 616 bp, Brachypodium distachyon
  Intron number 4 from transcript Bradi4g27880.2 (locus Brad i4g27880) derived from phytozome v7.0 (chr-ID Bd4; pos 331 87907 to 33188522 reverse strand)
ttaaagtggcaaagaaggccattattgaaggtatgtggtacatgaaattctttgcttgtgtaaacccttgaacaggatcaggctaatcctaactggaagagccccttctactactctcatcatcttcctttacatttttacatatggatacaatacatatttaacctagtatatttatgtttctttgataatcttgcactagcaaaatccactatcgacatgcaaaacagccttgacaatgaatccttgagcatgtcacatgcttcttttatcatgagttaattgtataattatcaaattatttctctgctgtgttactctagaatgaatttattgtttctggaaatggcaatggggatcaccatcttgcatgtggtgttgagcttctgagtggacatgatttaaactcaaaatattccatctttacacgtgtttcctttacactagcattttgacaatatttatattttctttcttgtgtgcctcttttgtgtctttttctctatgattattgttcacatcgctcatacttgccgttcgtagtttttttgttatttgtataccgctgaattaaacttttcctgttgctcattatctgcaggttttcgtaaaactg

SEQ ID NO: 15473 - DNA, 616 bp, Brachypodium distachyon
  Intron number 3 from transcript Bradi4g27880.2 (locus Brad i4g27880) derived from phytozome v7.0 (chr-ID Bd4; pos 331 88530 to 33189145 reverse strand)
tttacatcagaacgttatcgctgcaggattaccacgtgagttggtctgtttacattgtctgcccatgtgcaatgttttcatttacgatccattataatgtattcttctgtcttcagttgctcatacagatgttttttttatcatttattatattttcatttcgtattgctacttagatagtttcttcgtgtccacatttgcctattcaactaatatctctctagagtaactttttactatgttttgggagcaatcaacacagattttcatgctaacttccatttatgttaacgcattttgcatcttcaccttttcccggtgaatgaagcattcacgagattctacaccacctgatcatttattgcttcttgatatccacttcctcactaaggctgctactttctagacttcactacaaaattaagtaccttccattttttgttttattttgattatgtgaccatttcatcattagattaatgttttacattaacttccataattcatatatataaattatatttagatggagatgtccttgactcctcgcatttggaagaaaaaataatgattctgttgttggccagttaattaatactgataaattgttttgcag

SEQ ID NO: 15474 - DNA, 842 bp, Brachypodium distachyon
  Intron number 2 from transcript Bradi3g51580.2 (locus Brad i3g51580) derived from phytozome v7.0 (chr-ID Bd3; pos 526 28290 to 52629131)
gctgcgatactgtaagttctgtatcttgatagttaagttgcattgttggatgataataatgcttttctcgtgttttgtttaagaagttgtagattttaaagcagactggcgttccctctttttgatcacacagttaactatgcataccactttaaagagttgtgcaatctagtacgtaggataatatataaacactatatcagcaatttagtatttattcattggccaaaaaaaatcggtagtttttgattatctgtatgcataatgcatacagtttccccattggttatgagggtttgtgaaattaccttattgatcactttatggtgatgtgatgtcaaaaccatgcacgtgtaaattatgcactcttacatattactccctccgttcctaaatgtaagctattctagccttgtcctaagtcaaactttttaaagattgaccatgtttatagaaaaatctaccaacatctataactctaaattagttttattaaatccgtcatgatatatcttcatagtatacttatttgatattgtagatattagtacatttttctgtaaacttgatcatacttgaagaatattgacttaggataacgctagaacatcttatatttaaggaggaggtagcagtatatattacatcttcaaaattctcttcttgatcttctgtttgggatttatttttgtgctaaatatggtatgacagtttgttttcatgcaaatgctataattgaagtactgtactttggtacttgtataacgtattgaattctacacattcaagctgtgctgttatcagttgcatgagactaaattttcatggctccattgtttcag

SEQ ID NO: 15475 - DNA, 900 bp, Brachypodium distachyon
  Intron number 1 from transcript Bradi5g00520.1 (locus Brad i5g00520) derived from phytozome v7.0 (chr-ID Bd5; pos 499 246 to 500145 reverse strand)
tatcgcacgctcataactttgtatagtctgtacgctggcaccctacgcttgcgagtagtactactctgtagtatatggtttggtactaagtgtcgcaataagtagtagcatatctggaagtcatataattaaatgaaaaattgtatttttgttatcggcaaacacaattttaaggcttcattttagatttcgcacgggggcctcaaatttctaggtacggccctggtccttgctcctccgccgccagggccaggaggtctagagtttgctggggaaagaactgagagagatagagaagaggcacatgagatagaagagagaaggggcagcaacccacccctttgccagcttggaggtcagaggctggtcaaagtgccagcgaggcaatcaaaaccagccaagactaaggggaaacagccggggggtccttgtggatggtttcaagagttcaggggggtaatttgcccggttttagagtttagggttaaatttgaactttcccaagagttgagtggggtaaaatggacttactaccaaggaaagcctcaaaatcatcttacctccagagatgaggcttctaaagtatctattctggaggttagatcgcctttattttctgtgtattaattttaacccattttctgaccaccatcgcataatactaaagactcaagtttgaattattgccctctaaattttgtttttactatttatatggttaatttttgttttttggtcttctatgttgagcactaatataaattgttgtcgaggtgtatatattttggccttcttatgatggtggagggtagataatttggtttctcctttctcttagaatgctatattaactgaattttctattatttcttcttcaggatacacgaatcctttggggca

SEQ ID NO: 15476 - DNA, 928 bp, Brachypodium distachyon
  Intron number 1 from transcript Bradi3g55140.1 (locus Brad i3g55140) derived from phytozome v7.0 (chr-ID Bd3; pos 554 65804 to 55466731)
tcgaaacgaggtaacttcctcctccaacttcttcttctccgagatgttcttccgttgtaatcccgagctctggctagatcgtgccttagatgcttcggtttggatgtgcatgcccgtcgctagtaatcgcgatttatgtgctatatatagcttcactctttggttcggatctcgtcgtaggggggcgtagctgatcttttttagtccgctccttactaacaggtcgtggatgccttattaatggcgacttggcgttttgtttttggtgcggattgggtttacctcagtttcatcagtggtttcgtatgatgcagaaaatatttaggagtggagtgatatttagctatttgttagttttgggttgtgagatccgggtagttgcttatgtactggtgttggaaatgtatgattgcgttctcagcatttagatccactcaggaaccttcgaacacctttgaaatgatcatatttgttttgtatgctctcatgtctgttatattgcgactgaagcttagtaaaaattggcttgctggattgtatgagcccagatgttgtaaattgctgttctgttttacttgttaaatgttctcttcagtatatgatctatcttgctggtgctttttgcctgtcatatcatgactgaagcactccctagttgcatttctcaggtcaagtgattgtatgatggttaatttcggaaattgctcctgttgctttctttgctccatataaatagatatatagctttttttactttgaaggaaccttgataatttcatgtagtcatcaaacaagggctcctcttgaaatgtggctgtcatgcattagtgtactggaaatattttggattcttttatctaaatatgttcttgctggtgctcatccttgaaccgtagggcgcggaggttccgctggtaacaagttccgc

SEQ ID NO: 15477 - DNA, 610 bp, Brachypodium distachyon
  Intron number 1 from transcript Bradi4g44270.1 (locus Brad i4g44270) derived from phytozome v7.0 (chr-ID Bd4; pos 477 44764 to 47745373 reverse strand)
gttcccttacctcatccactggagcagagtttgtatgttgagaaacttgtgattagttttcagtaagaaagcaatttcacttgggaattgtttagttgttgaatttctagtgacatgtttatagagaggagtgttttattgactttgttttgaaagagaaatttctttttcttgcacagttttgtggttcctctatggggaatgcgaacttgcaaccgaatttatttatttttgagttcttttgtactttcaggatgatactggatactgaaagcctgaaacaactaatatagatatcgaaaattattttattaggatctgtttatagatactcatattatctcctagaatccataggtgtatttgtctcagcattgtcggccagtcactcccttttttcgagatagtactaaattaatgtgaactttgctttgtacctctgcaattgagtaattaggtcctacttaagtagaggtgtgtattggtctactgttatggatcttcattggacaacaggttttgatcttacagatatttgtcttctgcatttcatagtcaatacttgcgagttcctgtaaatttgacgccgtgtcaggttccatctacttgt

SEQ ID NO: 15478 - DNA, 709 bp, Brachypodium distachyon
  Intron number 4 from transcript Bradi4g07620.1 (locus Brad i4g07620) derived from phytozome v7.0 (chr-ID Bd4; pos 653 8743 to 6539451 reverse strand)
cactctaaaggaggcatcaaagttatttgtacctggtaaattctatcatcttggcttcaaagctgcatcaattttgtaaagaacttgtgcttttgaaatgaaaattatcctgaaatattcacagctttcaaatatcagacaacttattaaataagaacttagtacataacttagcttattgtggggatgtcactctagatgtggtgattcatggtctgatcaacacattgttttgcaattaaaatttatttattatcattatagtattagtgcgatgtaaagttctattttagtgtgcaacaagcatttcaatcataatagcatcgtgtgatgtaaagttctgttttagtgtgcatcagaactgggagctaaatgctttatgagttctgcaatgtggttacattattctattttatattctgtttggtattacatgtccctaattttctaatgcagtagtttccgcgaaatatttttgttctttgctgatatttgaattgaaaacctttggttaacaatttagtctgtacatttacaatgttttgtaaaaaaagatatgaagtgaatctgtgagcataaagttttaacatgaaatatttgttgggaaaagtcttctttagactgtcctaactcctaagtcctaacttgttaaatctttttgtttcatttcgtaggtggtgcaaaaatacactcagctcgaacaattaaa

SEQ ID NO: 15479 - DNA, 551 bp, Brachypodium distachyon
  Intron number 3 from transcript Bradi4g09810.1 (locus Brad i4g09810) derived from phytozome v7.0 (chr-ID Bd4; pos 921 6674 to 9217224)
tcacggtactgcaatctgtggttcgaccgttccaggtacattccaaaggattcatgttacatcttaaatatgctttggacacttccgatatgtttctgaaatcaacttttgacttgaactgcaaagcattctagccctgcattcaataattagaactttcttgtttcagaattactgtacctagcttatctgtatgaataattaagtagagaaagttaagcgctctctaatgttggtcgaatggatttgttttttgaagaacttaattttctctgggatgccctgttcgaattgcatagcactcactatttaacatttcaattcattattacttagtattcttgtatcaatttgtaaactcatcagcatgcttgtatgatatatcaatttctactcgagtcacatagaaacctattttagttagactaattgatgatgcgatttagtttaacgcatgatagtataataatattttaataaaacaaatgtttgtttttaaccatgtttattttacagtatttcttgaatccaaaagttgtaaaagagcctgt

SEQ ID NO: 15480 - DNA, 853 bp, Brachypodium distachyon
  Intron number 1 from transcript Bradi4g07290.1 (locus Brad i4g07290) derived from phytozome v7.0 (chr-ID Bd4; pos 619 8352 to 6199204)
ctcctcctcccgctcgctttcccctgcctcgggtcagtactaacttcaccgcattctccctccaaacccccctttcccaagaacagatcatactgttagctagctactgccgcgcgccgagctacatttgctcgttcattcccctttgtcaacttttgttgtcttggattttttattttttttgaagaaacgtcctggtctttgctgatgtagcacatgtttggttctaacttctatttgaacgcgctttagagtttagactgaagctcttttccagaatatttgaaggggatggaaagctctctttcttttagtttagatatttgtttttcaggttggagcagcttatacgacttctctattgttcgtaaataacttgttttttgacaagttactggtagaatcttagttactttgcaaacttaaaacaccaaagagaatgttcagcacttcagcacagaaactctgagagttgcaaatatttcacaaacctacaattgggaaatttgattttcatgggtggatttttcacttcaatttataggtcaagtgttgtaaaaatatacaactgcctctaaaaaagacatgtactattctgggaaggaaaaaatataaattactatatgttatattcatacagtgaacatacaagtgtgaaatgtcattcctctgtaacataatttcatatattttccttggagtaatagttactggcaaatatgttctgaaaaaaattactagcatgagactagatctaggttggtttcagaagggtacaaccatttccattctaaacagatggttctcttatactgtaggagctggggaataatatcattgactgttgcttatt

SEQ ID NO: 15481 - DNA, 511 bp, Brachypodium distachyon
  Intron number 1 from transcript Bradi4g20530.1 (locus Brad i4g20530) derived from phytozome v7.0 (chr-ID Bd4; pos 235 85165 to 23585675 reverse strand)
acaggctgtattgatacccctctccgatcttaaatgtaagaattcctcattttgtcttaagtcaaacttgaccaagtttatagaaaaagatatcaacatctagaatatcaaataagtatagcatgaaaaatatatcatgatggatctaataaaactaatttgaagtcgtagatgttgccatgttggtacatttttttgtaaacttcgtcaaatttcaaaaaaaatttgacttaggacaaagttatgactttttacatttaaggacggagagagtactgataaccagagatatagttaccatcaaaatgctcggtgatgaacacctgagaaaaaacctagattcttgttcaggttcattggggcttgcctatattcttcttattgttttttaaataagagaataattttcatatcgatttccaaaactacgagcatcactgcatcactctgtttacattcttgatttcttcttatgttctgcattatattcaactgaaatagttcatttcag

SEQ ID NO: 15482 - DNA, 384 bp, Brachypodium distachyon
  Intron number 3 from transcript Bradi4g27210.2 (locus Brad i4g27210) derived from phytozome v7.0 (chr-ID Bd4; pos 322 95150 to 32295533 reverse strand)
gtcggtgctactgttggaggtatgatcttgtgttcacatattcaaagtcattatttatgtatgaagaaaatgtgtatgtagtctacggttagatcattagttaaaaaagcatcaactgcaagaagtcattttttcagcatggtgcagttttcttttgcccgtaaaggttttatgccaatgcagtttcttttgtgatggaagtttgccatgctggtcttgtttgtattaataataagatactccagtctgtagttcatacaacttatcccccctttagttagttggttattgggtaatttctgtaataatcgaagaggtcctactttatactgaacaagaaatcatgtagggctccttgcgagacaaaggaaaggggagcttaaa

SEQ ID NO: 15483 - DNA, 617 bp, Brachypodium distachyon
  Intron number 4 from transcript Bradi4g16260.1 (locus Brad i4g16260) derived from phytozome v7.0 (chr-ID Bd4; pos 170 28727 to 17029343)
caagttgaggactgtttggagaagaggccgcccaggtaacctcacccaaggcatgacttcaagttaattcggcatgttagtcactattttgctgtattatcttgcgttcctataatgaaccttttcagattctgtactccttttatttgcattttggaatgactagatatgttccactggatatacaggctgtgcttaagaactgtaactgatttagttacgttctcatattgtgccatatggaaaacggtgtaacaaccttgtgtgcataatcattttggtaacacaagcaaaacaccacttcaggactataccaacatacctggttataccatttcagtcttcagtgttacttcccctgcaaccacaacataatcctttttaacttactcaccttgtgtcttatgtagaaatatcctaacttgtaagatctcttactgcagaacaaaggcaagatagtaatcactaatcattttttagcactgtaaaatcggagtatttgattttcatgttagatatacattatgtttgttttcttcgtttattcatgtgttaaccaaaagcaacacttgttttctgcaggatttctcctgggatcgctgatttgattaagaaat

SEQ ID NO: 15484 - DNA, 691 bp, Brachypodium distachyon
  Intron number 1 from transcript Bradi5g16560.2 (locus Brad i5g16560) derived from phytozome v7.0 (chr-ID Bd5; pos 199 03573 to 19904263 reverse strand)
ccaaggtgaagtgtttgctcatatgaatgtgttggtcttctgttatagtgaagctcattttggttttcgcagagtattcagcttattggccttgtttgctgtcaacttcactattattttgacagcgctgtcaacttcattaattatgcagaacgtaactaatagcccgtcattgggcagctgactttttcaaacggttttgctatttttggggtaaccggggataactatttctaagtcgacgctaaaaaccattcaatctgatcattgagaattgtgtatgtacaaagaaatggaaatattgagaattgtgtatgtacaaagaaatggaaatatcttcaccggacggctatggatgttggccgagaaataacttccagtaacatttagggactactagacaattggacataacattagcacactactttaccagtccatgacttgatgtgcagagaaacaaataggagtactacctacagtttcacttactacatgcttagccccagagattgtatcagtgactgagaaatatttgattgttgtattattgcttcaagtgaccattaatattgtaattttatcaatatattcaatcaaagaataatatgaagtactaatgaaatctgttgaataattgttttgaacttctaatgcgaatggtaagagcaaatccactattggcaggtca

SEQ ID NO: 15485 - DNA, 700 bp, Brachypodium distachyon
  Intron number 2 from transcript Bradi4g26860.1 (locus Brad i4g26860) derived from phytozome v7.0 (chr-ID Bd4; pos 318 90214 to 31890913 reverse strand)
ttactgcgtcgaagaaagcacaggttaagtaggtagcacttcgaaaaggctctcacagttgagctctttttgttttaataattagtgcatttggtgtttcgggttattgattgcaaagtttgtttggttcctctaagctcaattgatttaaggcctatggctgttaacaaaataagaagggctggtactgacttatattttgtaagttcgtgtcgttttcacaatggctttttttacttttcttacgataaggtgttccatacctatccaaacatgtgctttgaaatgatgaaaaaggagagtaaacagaacaaaactacaagcagattggtgtcttggtgaggtcaatctagtctctgtattggtgtacttttgtgtcaatcttcagaaatttcaggctgaattgtatatcatccatgattagatgagtggatcacattcaggcttcatttttgtccttactttagttcagtgacaattctctaatatttatgctttgccacaaagaagaattattaaaagggatatggaaagatgtcaaggaaagaaagagcaacaaaggatggtagttggtagttttaactggcagatccaattagaaataattagcgtatcaaattaacactaactaagatttacaccgaatagaaataatgcgatgcttttgatcttttgatttgcacaaaacaggtatcagaat

SEQ ID NO: 15486 - DNA, 583 bp, Brachypodium distachyon
  Intron number 1 from transcript Bradi4g26860.1 (locus Brad i4g26860) derived from phytozome v7.0 (chr-ID Bd4; pos 318 90920 to 31891502 reverse strand)
aagacctcctcaactttgagtcaacagcgtccgtaactttatctgctgcattttgcattcatcttctttgtgtatgtaatctgtctgatcatcaaatcttcctcctagatgcatacatactgctgctgtaattgatcctgcatgcatggttaaatgacagatcgattgtgcagattaactgactgtacctgattgcacagttaagccacgggcatcttcttctttccccaccccaacctggcaaagagaaagatgaagataaacaaccttcccactctgaaataaatttattttaattattgatcttttattgtaatttgacaagttaatttaccagaatgattgggtcattttggcattgcaaacttcattttaggtccctttcagttgcatttggcaaatggatgaacgttcatcgatttgtattggaactgaagtatgatgctagattgcaaccgctagcatttctacaaacacatcattgcaatttgaatttcctccctttcttttggccgaattgttgcctcctatctaaggatattttgttttccatattgttaggttcctgaggggctcaggcagc

SEQ ID NO: 15487 - DNA, 551 bp, Brachypodium distachyon
  Intron number 3 from transcript Bradi4g42110.1 (locus Brad i4g42110) derived from phytozome v7.0 (chr-ID Bd4; pos 461 78489 to 46179039)
gggtcaccttcgagggtttgatcatctccaaagtaggtacccttttctccgacctcctgactctgattcgattaccattttgttattcaatgaatttggtggtattagcttattctcaatggatttgtaacgcgatgcaagtttaatgtttcaatttagtatgctacctgtgttgattttgcactgggaagggaaaatgtgttgccgtggcatatgttgtttgaagtttggctagatgttgggactgaattcacttgatattttctgaaccgattgctctgttagcttggtttgatacatgaacacactgcttcgattcggtaacatcgtaattcataattttgttattcttcagttgctatactaatttagtatgatgaacttgatatacttgatttatgcaatacaaacttatgatgctcacttcccaatgctaagaaataagaatgccatatgtcattctagtttttttttcgtcaaaaatatgtcattctaggttttctctcttgttcctgtttgacatccatttctttgtaacatgtaggcaacat

SEQ ID NO: 15488 - DNA, 908 bp, Brachypodium distachyon
  Intron number 1 from transcript Bradi4g32860.1 (locus Brad i4g32860) derived from phytozome v7.0 (chr-ID Bd4; pos 386 83787 to 38684694 reverse strand)
ttggcaaaagtatcaattgatttattcaaccacactctctctctccatctctcttttcaatgacatgtagggtcatccatcaactttattagtttggatcggttcatccatatgagtttgcaccgcctactattcttgtctctaatgacatgaaccgaagcaaacaacgaaaagtgaagtataaaccgatacatcggaaagaaatacgattcttctcctcctgtctgccagacttagagaagacgatgtcttttttttttggaggagagaagacgatgtcttttccgtcgaggaaagccgtgggctgtgctagtcatgcgggaccaagacgtgggcttaattagttgttctcaaaataccctatatactgctccttttagctcaacagtatcatactgctctatttaatccagaagtatgctatctactgggtactgtaaactgctcgaattctagctcaagagcgtgttgaacttttggttctctttgtatataagcaacactagggacttggtgtcgtttgacaccaatgaaattgaaactttatgccaacatgagtaacattagttttgcagcatggaactcctccggtgccaccatgctttatgttggctgcaagacataaagttccttctggagaacccacggacaaaattgttacacaagtaagtctctgcgctctgttctctcaacgctgctgttccaagagcagggtgcaccggaaaacgattcagagaatgtttagaggagaaggagaaggagaaggaaaaccattactattgttgatttgattattttcaaattgctcctccgggtgatcatattcattatttttgagttagcaatttaatgtaatcttttgtttgtcactagtcagctgcgtgggtgacacgaccagaaaaatacca

SEQ ID NO: 15489 - DNA, 537 bp, Brachypodium distachyon
  Intron number 3 from transcript Bradi4g14910.1 (locus Brad i4g14910) derived from phytozome v7.0 (chr-ID Bd4; pos 155 35286 to 15535822)
aagaggtaaatttgcaagatatgcttgcctgattggttgcattggcgtttttagacaacgctcaaattgcattggtgtgtatagcaactaattaatttttgtttgaatttgtatacccacttagttaggtcgggtgtggttgtagattgggaagtttagtagtagctgatcatttcacttcgtgctgaggcagagtaggtacagtgccaaattttcatgctctgtgatctagcataacatgagatggaaaacaactgcccaggaaacacctcggctttcgtcaggcaaaattaaagtagggggtatttttttctgccttttgatagcttggttgcttaggatgttcctgtttgactcgtttcttggcccgcgatacagatatctcggttttctttgatttgatcccttctgtgagataattgttcttctatgtatgtttccgaaataattaacgtagtttccttgactgggtttcaagtccaaaattccatgttcttaagagaaatttacatcttctgcagatagaagggcaagccg

SEQ ID NO: 15490 - DNA, 445 bp, Brachypodium distachyon
  Intron number 1 from transcript Bradi3g57960.1 (locus Brad i3g57960) derived from phytozome v7.0 (chr-ID Bd3; pos 575 79104 to 57579548)
gggagtctgcagcgaggtcgcgccagaggaagcaggtgaaaattctgtcgccagagtgctgttattatccatcacaagttgtcatgcttttttcttactcacagtgacacgtgttgcttatatactttttttatcttataaaaattgttttacttctgacatcattgagaaagttatatcatccatctgttttctgtagttctttgattagaccaaaattaggatcttctttttgtccgcatacttagtttatgctaaattggtgcacggatgctaaattgttttatgagaaaatgaaaagcttacgtctctctgcactgaaataatgatacaaaggagacacaagaaaaatctcatttgctgaaaactattcaaaggtaaatatattatccttgttgttgggcttctataaccattggatttgtgtttgacgcaacagagttat

SEQ ID NO: 15491 - DNA, 988 bp, Brachypodium distachyon
  Intron number 1 from transcript Bradi3g47240.3 (locus Brad i3g47240) derived from phytozome v7.0 (chr-ID Bd3; pos 489 06680 to 48907667)
acaacaagcccattaagctccagatttgggacacggtgcgtgctctgtttattgcaatattgctagttaccttgcttgcttgcttccgtatgctgtgccgttcctgttccttgcgagttggaactaaggtggtatgcgctgtaggaatccctgaacctttgtgtctaggcaagaaacgtcttgaattttgctgagttctggtcagcaattcacaatggtggttattttttcctgctactgcttacggttttgagctgatgattctatggttgtgtattgtagtactattgtctttctctccgggagtcaaacattctgtgctcaatcgtgttgtccttcccactgaagaaaaagaaagttttgtccttgctaattcactttttttttagttatctcggttagatgttattctttcctgtcaacatatggattactacctccagtcacacagtgagtcctgatttggggattgctgcattggcgcacattctaaatgcaacattgatctgtatatgtaaacatgacatttatcacctatttcaatgtcatatacatgtaaagcctaataagattcaagcaatagtgtttctccgacaaacctgctagtatgatctttatgagacaatctaaatattcaaaaagatactttttattagagttctaatgtttgactgaacgtatcccatggtgaaactgttttgtggacggagggggtacttatatagccacttgactttatgagttaatcatgtttttattttgttcattgtaccgtatgtcctcatttgcttttgcttatttacacaataaggtttggtagtggagactgctcaactaaatcaccatctgattatgctgagtgcctgtttctgtagtccaggatataccatgcttgttgagtttgatgtcaccaatcacatccgtctcatactatcatctcttaaaaattacaggctggccaagaatcattcagatctataactcgatc

SEQ ID NO: 15492 - DNA, 772 bp, Brachypodium distachyon
  Intron number 2 from transcript Bradi4g16680.1 (locus Brad i4g16680) derived from phytozome v7.0 (chr-ID Bd4; pos 174 83838 to 17484609 reverse strand)
cagacgtcgtacgagccatctcagttggcgtcgaggtaccgtcgtacgtcacgttttggaacaacttgcgtactatttggaacatcttctttaccaacaaaaatctggtcattggcaaacgaaaaatgataggttattatgtagcaaatttagcttaatggatatgctacataatactggtactccctccgttccataataagaggcacgcacgcgtctctagatcattaatttagctaattaaatataaattaaataattaaaaaatcatatcattagaaagttttttcaataacgaatctaatgatgtacttttgttaagtaacatgcatatttaattaatcaaattgaaaatctagtgatgcgtgcgcgcctcatatcatgcgatggaggaagtaattattttttttgccaatatccagatttctggttagaaaaaaattatttccttcatggtaaaaataaaattagtacatctctaggcattagatgaagaaatgttccatctttaagaccaatattcttcttaaaaaaagtgtttcatgttcataaatattagttataaaaaatgtttcttattcataaaaaatgtttcatctgaattatacaagcaaatcttcattggaaatatattctttctgcatacaaaactattacctcttagcaaaaactgttccatctttgtcggaaaaaatgttccaaaaatctgaatattgaataaaaaaataaccgcttgttaaatagactcttttgctagcttaacaaggccagc

SEQ ID NO: 15493 - DNA, 901 bp, Brachypodium distachyon
  Intron number 2 from transcript Bradi4g02760.4 (locus Brad i4g02760) derived from phytozome v7.0 (chr-ID Bd4; pos 204 7525 to 2048425 reverse strand)
ttggtgtgagttctcctcgatttccttggtgttaggtcgattcaaactgctttcttttcctttcagaagcttaatttgctttgcttccgtttgggcatgtagaatttgatattggactattggattccgatcaaattgatcaagcgaaaaagacagtccagctgattgccagaccttgtgatatggggaaagtttcccttgtgtaatcacaatacaccttttgccaccgctgatatggaaatatgggatcattggttgataggaatcttgcctaataatttgtttgtcacttccagtgatgactgtatggtcccaatgccctattcttagacaagtgctactctctcttgtatgaatgtatgacccttggttacactcagagccctcttgagatgagcaagaatatttttttgcgtcattaaataatatctcatcctgttaggtgccttgtgataaaaaatattaggtcatcacctagagtggttggagtatgatgtgggttggcctccactagttcactgattgccaggcagccgaaatagctgcttaagtatagcagagttttgctgaatccagagttctcagaggtttccaggtatctgaaatgtggctgatatagagttgctttgctgcattggctttgtttttcttcttgtttcttcactgaaagtcagagtgaaactgatcactggatatgtgattggacatgtggtgtgttttgttccttgatcacctctgttccttgtgattcatatgatggtgcagaaatgccaaccttgtcctgaactgaagatctatcactgcaatacaacactgtgcatgtctctagaagttctgtttctgaactcattctgttcccattgcaggctcaaagaaatttgatctcaaataagctcaaggc

SEQ ID NO: 15494 - DNA, 786 bp, Brachypodium distachyon
  Intron number 1 from transcript Bradi4g44880.1 (locus Brad i4g44880) derived from phytozome v7.0 (chr-ID Bd4; pos 481 40399 to 48141184)
cgtctctggcctccagggcctcggcgccgagatcggtacgttactgctgcccacgaccagctcctctagtagagatgagatggtttcgcttgtgatcggtatagcaattactccttgctcaatctgatgtagcatagcgaactagcagattagtcctctgcttgtgatcggtatctcgacggtatgcacctgatctggattttgtttgattcttcaaccttcaatggctacgtgtgctctaattgctgtgtcctatgattgccttcgaaccatcaatcaagccaaaacatctgtcctcccatgtcctgttagtaatgctgttcgtcacaatatggatgcaatggtggcaggttttgttcaagttctcctttttctttgtgtcttgacaggagagttaatttttgtgttacagtagcaggcccccttgcttaagaactagtctttgcattacgatggcaacacgcaattactaatatcagtaggtgattcgtagttgacagtggcaccttaaaggcaaaatccatatgttttgtgccgctggtcaatttgattattgtatgtatgcttgagatccagcatcaacactctatgaatattgggtataaaaacaaattataagctcttctagatgttcgccattcagtttatcatgattaaattttgaaacttgaagaggtattgaggaatttcagttattggatggtaaaatgttttagcttacacttgatttaatatctacttattcctgcagctaagaatcttgtccttgctggtgtcaagtctgta

SEQ ID NO: 15495 - DNA, 904 bp, Brachypodium distachyon
  Intron number 3 from transcript Bradi4g06750.1 (locus Brad i4g06750) derived from phytozome v7.0 (chr-ID Bd4; pos 567 5211 to 5676114)
gttgttgtgataggtaagttgatctcctctgctaattaaagtgcaagaaacattctcatgtttcttctggttatacttatgatgcatgtgaaataaagttcattcttgatcacatctgtccttgttaaccatttaaaaggaggggttcagttattatgttaacacttagcactagttggcttaggttagacttctaaaaataacactggttatctgacagctcatgttgcttatgaaaattggcccgctaatcttaaaaaaaaaattggcctgcaaattgtagtcatctcatcatgtaacctacagttcattcttgatgacaactgtcttaatttgttaagcattaaaggaggggtccaattattaagttggtagctctgtacagtttgttttgtttcttttcttttcgcagagcctgcctttctttccttttgttttggtttgcctttggcttttgtagcgcttcttctaatgaaacaacacgcacttaggtacgggttcgagaaaaaaattaagttggcagttagcactagttagcttaagttagtcttttaaaacatggataacactgacagctcatgttgcttgacaaaaattggcatgttaattgtagtcagctcattaccaaggcaatgttgtctagatttgaacagttcaaataaatatcaactgtatgtaaaaaaacagcttttttatatatatgtacaacatatttgatctctgaactaggagaacatcaccagttaattcagttaactgctcaagattaactgttggctgttggctctactacagtcttatgtcataatccaagaagttgacaaaattattggatattttttccattaagtcgggtgttctgttttcaggtacaacactgaattacttcctggacaaccgcatc

SEQ ID NO: 15496 - DNA, 835 bp, Brachypodium distachyon
  Intron number 1 from transcript Bradi4g08430.2 (locus Brad i4g08430) derived from phytozome v7.0 (chr-ID Bd4; pos 750 0979 to 7501813 reverse strand)
ctacgcctacgtcaactataacacccccgccgacggtgagctaagcccgtcccgattccccgccccggccgattaggttattttgcatggatagggttccgaccgaattaagccttttccgcattcagggtttggagctgccgaatggttagggtttcgatgcggtttcctcgattaggtagtaaatgacggtgattttttcttcttcttgtatgatgcatttagggattgggcggtcgaaaactgttgcactatgtcacacttgatttggaaggttgcactgcagttaatttatcgtgcaccataggactatatttgattatctatgcactgtttttttttcctgttttgatgtttcattcaggtttgtggtgttctcctcgagttcattgcctaaatttgaagcatacattagaatagaaaatgttaatttgttcctatagctgtttgacgtactgtgtttccttttttcatatattataacatcatcttgttttctctgtccttgagtgcattgctttaattgtgaagcatacagtagaatagaataagtttatttaccaattttgtctttgtttagctaatgcatatgtttgttagcgctgctcccatgtagattatatcgaatatgctctggataataattccatgttagtggatgcatatgtttggtagcgttgtccccatgatgacacggtgaaggatctggattatactatgtaaatgatttatatttgatgatttatgtgataattatttcatgcttattttttcagggccttttattacttttatactgattttgaaatatctttcagctgcacgggctcttgag

SEQ ID NO: 15497 - DNA, 679 bp, Brachypodium distachyon
  Intron number 1 from transcript Bradi3g56130.1 (locus Brad i3g56130) derived from phytozome v7.0 (chr-ID Bd3; pos 561 64931 to 56165609 reverse strand)
ccagcctgtatgctggattcccaccatccttgtctgcaccaacaatttgatacggtaagcttgctcgcagtctttccttatttgtactttgcgttgcagtatgataagtctatttgtttgtgctttgtgattgtacttattagtgatgatgtctatgtgctaaactgaaatgttcactcatcggtacaaatttgcagtctataactgcgtatgaaccctctgactggacaccaattctggcaggaagttagtccagttaaatgcttgagatccacgtcaagaggacggttttccacaaattccaaggggatgaaaacaaatttgaatttcggaagttcatcgccacaaatgcaagggagacgcagtctttgctggttgttccacacgaagtaaagttttctttgacagtgttcaccgtttcgagtacgggcctctaaagtgttgctggtgtcgcctgaagtgaattatgtttggaccttcttcaagttatttgataagtatctctgtggacccatggtagtatatgtaagtaagagttaaagcgagcagaactagtgatgtagtgtaattcatcatgtgtgttatctacttgtctgttacgtaatgtccatgtgttagtgacgactccctccgaatcctaatttaggatcagagtaattaacaacgcccgctttgcagc

SEQ ID NO: 15498 - DNA, 690 bp, Brachypodium distachyon
  Intron number 1 from transcript Bradi4g41050.1 (locus Brad i4g41050) derived from phytozome v7.0 (chr-ID Bd4; pos 452 86102 to 45286791 reverse strand)
gcgtcgaggtatatcttcatggatgcgactttgagccgtctctctgtgtccgctttggcggctagttggtttgctagatctgatggttaggccgtagttgttgtgatgatttgatgatttattgcttcagtttgttggtatatttccaatatctgtatggagttccaggcagctgtgatttggatcaatagttcatctgtccactggccccgttaatcgttagttttgtgttcaaatctgcatgggcatattgtatggtcaagagcttgtaggagttcgttggttgatgccacatttcttggttggttatttgggcgatttaagattgtagaagtatgattcttaggaacgtagtttataaatttaaatcgtaggcttcagagttcttacgccagcgagaatggctcaaattattcctcttgtgtgaagagtgtagctatttattttatttgttctatttggaagatctcagcatttttcgtataaattattagtgctactgcacaaatttcaaattatcgttgaatatccaggtctactttaaggcaatgattgctaaattctgttgttatatttatttgaaagttctgtatcatggattcttcctttggaattgcggtaaattttgttgttattaccatctcatggatttttcttttttctttgcgcaggtccaggacatttcactca

SEQ ID NO: 15499 - DNA, 375 bp, Brachypodium distachyon
  Intron number 3 from transcript Bradi3g60960.1 (locus Brad i3g60960) derived from phytozome v7.0 (chr-ID Bd3; pos 596 92042 to 59692416)
atattattacggtaagctggatgaagccattcattcctttgaaaactctctgtttttccttgttttaaaacggaatgcattattatttcagactaggaaggagagaaaaagggggtaaacagaatgaacaaatcctaaggcaaataaaggggcgagaatctcgaatccactgttgcatctgtctttcttttcactatactattatttatacccaaacaatgggaaaaactggattactcatatgctaggaaaacgctagagatggactataaatgaaactagatttgtcatagactcaaatagacctgaaattttgtttaccgattaagtttaatgtgtcactttctttgttttgtttatttgagatactgaaca

SEQ ID NO: 15500 - DNA, 970 bp, Brachypodium distachyon
  Intron number 1 from transcript Bradi3g59820.1 (locus Brad i3g59820) derived from phytozome v7.0 (chr-ID Bd3; pos 589 40075 to 58941044 reverse strand)
tccacttcgagaagaacccctccgccatcgaccaggtcagcacataactcagtgcctgccacagaggtgttttttttccatcttcttttgcttcttcctcttccgattgatgcatttctgtgctcccgatcccgcggcaatggcggactcctccaatcctaaacaaagcaaagattgcattattttaacagaaggatagttcctcgtggtgtgtcttgatgcttacagagttgcaggctagtcgtttagcgcccacattattgttttggctggttcgttgtgggcctattgatctttgaatatgtggcattcttggaagcggttgcgtgtttttttcctcgctcggagacacagtcagagacgtctctgaaccactaggttggtagcgcattgctttgtctatagatttctagaggaaaagtctataaagtggttaatgccgggatttaagcaatgcttgattcttttgtttatgctgagaaatgccaccagcgtagcaaagatttgctggccacggttgtccagtgatgggttcttgatcctacttttttgctagccaatggtttttgttccctaaaggtgtccacttttgggaattcctagtcttgtgcttttgttgagacttttgcaagtaccttgatgcaatttggtgttcggaggcacattttggttgttgcaacatgcaacaatgagtaatgacctaatttggttggtggccctagttgatttctggttagttgatgactgtacgcttgctataatatttcccatggaaaaaagaaagaattcttgctacaataagaatcacatggattaggtgcagctttaaccagaccatttcttactttcttggactctcttggtctttcaatccgaatcgatcagttcactgccagtgtgttttactttacaatttaacaaaatgtttgctgcaggatacatttgccaaatatacagcaaggacatcatt

SEQ ID NO: 15501 - DNA, 1015 bp, Brachypodium distachyon
  Intron number 1 from transcript Bradi4g03720.1 (locus Brad i4g03720) derived from phytozome v7.0 (chr-ID Bd4; pos 298 4896 to 2985910)
ggatcggctcctcgagatcgcagaccgcgtctacggtaacccaccagcctcatccttttgtcttgaaatgctgtgggaaattcgccgagaacccacgggcaatctcgggggtcggggcgtgggattggtcgcaatgttgttgcttctgttgatttgtagctcttttagctttcgaaataacgtagctgctttttctatatataataatgacctgcttggcgctgaagaaattgctagtggaagattttgcttttgcccacatttgatcacagatatatacactgtacacgctgcattagctagatttttggtatcgccgatataataataacttgctttatgcggggaactgtatgttttagtccatgcctaatagctaggataactgtggtgcatcagttcctcccaagtgtttgcatgtgtagatatttgtctgttaacctaacatcacagtctgtttggcatgaatggcggtttactatcatttttctcgaacacgcttgtcatctgtgttagaagaaagctgagaagctgcaagaatttacagacaccaatggtgtgcatgaccctgatcccccaaaaacaaaaaacaaagaatgaaaaaaaactacgctaatctaacctacataaaagatttagcagtagaaccaaggcaaaacagggacacattagcatcacacaggtatcatgtgaaaactggaacaagactgaagtgtgggacaagacaacaacatgaacatgctgatccttttcaaatcgcaagacttaaattttgtgtattctataggtttccaatatgtttctgaactgtgcaatgcatacaaagacttcaaaattaacatgcagtgctgttattttcatatctgattgttttaaacaagcagtgcctgctagccttgcaccatgctgccaaaatgtttctgaacatgcttgtaaaatccaatttgacatgaagagaaaatgattggcctgttccatgcgtgcagtattcgactgttgcttctcgacagaaacc

SEQ ID NO: 15502 - DNA, 640 bp, Brachypodium distachyon
  Intron number 5 from transcript Bradi4g35710.2 (locus Brad i4g35710) derived from phytozome v7.0 (chr-ID Bd4; pos 410 46797 to 41047436 reverse strand)
tcatacgaggtatgctgtttttcttttgtggaaggaattatagttgaaggtttagagagaacccattttctgaagacatgttgtgaatattttgtgtaagttcctctgaagaaactaagtagcagtttgtagtgttgattaaccatttctggggaagtggcttacttgtgttgattggagaggaaattccctatgacacaggcacaagttctcatatcctaaggatgtagcaaagagttaaatactaaaactatgtgacggtttagagagaacaaataaatatatactgaaaatgttgtatgtagtttccttgtgagaaactatgatcagttttgttatacttactgctaagattaaccatctcttgggaggctgcttgcctgtattgattggaatggttcctgcggttgacacatagacatgcgttctgacgttcagttctaccacttactctcatataaaaatttgtcgattctactttgtgtgtgtgatttgatatcaaaatcagttgtacataaatatgagacactttgattgaccttcttgtgtcacataacaatctcatttctggacaactttctactgctattttggtatttttgtagcaactacaagcattcggtgaagcagtaggaaccca

SEQ ID NO: 15503 - DNA, 1063 bp, Brachypodium distachyon
  Intron number 1 from transcript Bradi3g55700.1 (locus Brad i3g55700) derived from phytozome v7.0 (chr-ID Bd3; pos 558 59458 to 55860520 reverse strand)
ccgcggggacgcccctcgctgcgccctcctccaaggtatcatcgattcgccccctgtttattgacggttgctacgctcctgtggttagtggctttcttccttaggttctgctgcagggaagtagtaaagtttcagtagctttcatgcttagtttcagcgagaaaaaattcgggatctccagtatcgcctggaactaattaagtacagatcgtggctataattctgtagttcactaattttatgctagaagtactgacacttgctcaacatggttgccttgttttttttttgttttttttttacaagagttgccttgttttttgcccagttgagtgctatttagttttggacctcagctgttggttgtgctgaacttcaatcttttagttgcttgcttagtattgaacttaatctgttagtagctccatagtgaactttatctgttcatagcttcttcccgccgattggttatagatgtggtgagcctgtgttagttgattctgtgctaatataggttgttttggatcatcctccatgaaatttggtactccagttcatttgactagttgatattttttttgaaagaattcatgtttccattaatttagttatatgaagcttctgacaatgttgtgtggtgctaattttggttggccctatttattaagtttagacctgggaggttctgcttgttaatttcctggggctagcacatgcctttttaatgaatcactgatcctaggctgttgcctgtccttagattttgtctagctttctatctctaggttatttatctattgccatgtatacatgatgatttgctcaaggttccatgtagtacgttggggtttactcgatcattttgcttaattgttagattattataatttacttcaggtttcttttagaaccagctggtccgacgaagctcctagctctaatcgtgtattaatgttttgttaatctattactgacaaatctgtactggaaaaaagggcttaagaaaatctgacttattttcctcaatgctcagctgcaagggattcttctaacttgcttgccc

SEQ ID NO: 15504 - DNA, 1017 bp, Brachypodium distachyon
  Intron number 2 from transcript Bradi3g57220.1 (locus Brad i3g57220) derived from phytozome v7.0 (chr-ID Bd3; pos 568 72739 to 56873755 reverse strand)
gcggctaagaaggccgcgcagggtgagcggttcctcgcgcttgctgttggtgtgccattgggggttcagggagttgttgggaatcgatggccgtctgtttggtattgcactggtggattgcttccacagctgcatccagtgctagagacacaacggttatataatttggcgaactgggtgcagttttatcttccatgagatttggatcaattgttaaggtttttgagcgaattttgtctgttatattggttggaactgaagctgtgtccgatgaatgcgtgtaacttaaccttaatctgcccgctttagcttgaacgatcttacagtgacttcgacattttcttatttgtagtcattacacatgctgggtcatttcattgtgattaggtcattaggtacgctgtccatcagtaaaagcttgaatgtggtgggcttatactagatgctggatggcgcaagcaattcccaaactgcggagcttatgcttgtgatgatgcaagctgacaagcttattactccctccgattcatatcacttgtcgcagctttctctagataggcatgtacctacacaatgaaatgcgtatctagacaaagatgccacaagtaatatggatcggagggtgtatgattaatgagttatgtacacctattcggctgttatcagaatttggatatttgattgattttagaataacttgctatacttagaattttatggttaaaatttataataagtcttgatgttgatatagctgaatgtagttgtgggaatataagtattttttgtcaaagtaaaaaagacctcccatttactagcaggtggtttaactgagccactgatgctcttaacggtacaagtagtctggtatggcatacttcgaaatgaaaagctcttaatgtaccaagtaatttgatctggagagcttcaaaattaaaagaagcagacacaatgttagaacatggaggtggttgaattatttaggttgttgaatcttgataggtgcaaaacaagaag

SEQ ID NO: 15505 - DNA, 777 bp, Brachypodium distachyon
  Intron number 1 from transcript Bradi4g42380.1 (locus Brad i4g42380) derived from phytozome v7.0 (chr-ID Bd4; pos 463 95951 to 46396727 reverse strand)
gaggctaggaaaggtaaattggaggcattttagttttggtggaaggacgatgtgtcttcttcccactaatgggctagaatgccttttgggctttgtcttttcttttattgacttttccttttattcttgtactgcatttcttcggacgtcttggctttagactttgccgtcccccctttgtggggcagatttttatccctagcaacacccttatatggacccgtactatacatacggagtagaagatcagattctgagtcatcactgacatctcactattgacgtactccctccgctccataaagattggcacgactttgcactagagctagttcaaaaccgtgccaatctttatagaacggaggaagtaccagttaacgcataatccgcctggtgagacacaaacaccgactaactacctcaagcaagcttggttctgattcaagttatcttcctctcctaaactagtgaaacattttgaattaatcagttgtttcatgtaaccgcgccgttactatcacgggtactccattaaaatttacagcacattatttctttatagttctatagcaaacattacaccagtgatgaaaaacatacacacacattaattgtgtaccgtatccatttctatataatttttctctgactgtttctatatatatatatatagcaattcccattttaaagtatgcattctcctaacttatttcttatgtggttgtcaatctacttggagcagtttaccagcccaatcccaaagggaaaaattgcaag

SEQ ID NO: 15506 - DNA, 463 bp, Brachypodium distachyon
  Intron number 2 from transcript Bradi4g11900.1 (locus Brad i4g11900) derived from phytozome v7.0 (chr-ID Bd4; pos 117 85654 to 11786116 reverse strand)
agaattgtaagaatttgacttctttggatatcgaggtaatgtcttgctaccttctctgtaccatttgatctgtttttgatttgtgagctccatgttctgtcatgtgtgttttcagaagacttaaaaaaatgtctctgtgtatttccctgtataaatggtaaatgcccgacgtagagtttacatgcaatgcggtcattgaatgtaatgatatgtgtgaattgacagcaagcaggtattctggttgattattgctttatattaatgaaagggaaatatttttgcactacaaatttgtagttgataaagtctagttatatacttgaagttccctcacatttgttgacaaaatacatctatttctttcctcgagcagtctcagtagtcaatggctaattttgaacaaaatatgaagtgatatttatctgcaggcttgctatattggagatccaggacttgttgctat

SEQ ID NO: 15507 - DNA, 871 bp, Brachypodium distachyon
  Intron number 1 from transcript Bradi4g06050.1 (locus Brad i4g06050) derived from phytozome v7.0 (chr-ID Bd4; pos 499 9692 to 5000562)
cgcatccatcctctcctggttctccaactctaagggtacttaattactcctcctgctcttccgcatcctcagagaattttcttctgcaagaaacggaattccggccatggtacggtacagattcggtgttaagttagcctccgcaacagtttcttcttgtcggggattagggccggattcggtggcagagaaacgactatttgatttgtagtcctggttcaaatcgaatagttctatggagtatagattctattccatgccaatagtctcaccagcaatgtggcatattcatggtatagaccgattaaacaatttaatttaggttagaaaactaccgagctttgtttaaccaataggaaaaatatctacctttctaatgatttgcaccgcagcttctttattctgttcagcatttactttagtggtctataatattgaattttctattctcatgtacttgtatttatgcttcattcaatttattgatattcatacacttctcttaattaagaatgtttttttattaggaaaaccaatatcttttgcattatcagtttattaggtagtccatgggcggatctagcacgtatcctatggggctaatgcccccactcaattttgatataccattacaaattttagattttcaccattgatgcctccactaatttaagttataccttcttgagaatgtttaagtgccccctctcaagttttctcctggctccgcccatgaggtagtcagttgatttcatctagaccataggttggaaaagtacatgtttcgacagtgtgcttgtcgcttgtcggttcgaatttattattacatctaatattggtcatgtttctgttccaggtccattttattttg

SEQ ID NO: 15508 - DNA, 884 bp, Brachypodium distachyon
  Intron number 2 from transcript Bradi5g15570.3 (locus Brad i5g15570) derived from phytozome v7.0 (chr-ID Bd5; pos 189 31224 to 18932107 reverse strand)
tcgtcgaccagaacagggtattttagatcttccatctcactgccttttatctttgtcgatctgttttggcctgcggataagaatgtagttttaagatcgtgcgttaatttcaggttgtttctagcctctctgttcccggtgtgctgttgctaattgttatagattttagctgttcaattgatctcgcttctgtgcggttgcagtagagacttaactacactgattgccttctcgatggaatgttgattaggcctctagaattccttcatatgactcttttacaaccattttttgtactccctccagtcacttaatatgggacggagggagtaattgtttgcattgtgtgatgtacatgatgatttgtgaatgtcgatcgagttttagttttcaagtgcagtttcttgctgttgtcagcagaattgctttgcaatcacctgttttgttcattcatttttaatgataatgaacacgtgtaactgtatctacccattctgtgcttcagttggatattatttggtttcctcacctgatcacccagatatctggttgcttattgaatcaaacagctattctgtgtttgtatgtgaatttggtgatcaatatttgtcagtctcctgtatacaatttaactccagtattttgagcatcattgcttcatttatttgcttagagttgtatagataatttcttattcatcttttgtttggagtcgtttgttatagccagcatatcatgctttgcaattggtaatattgctgcaatattttcgaagtgttatataccatgtttttattgttattaattaactttatttctataagtgaatcatatatctgaaattattcattgtctccctcttttctgtgaccaggcacttgtgg

SEQ ID NO: 15509 - DNA, 934 bp, Brachypodium distachyon
  Intron number 1 from transcript Bradi4g43910.1 (locus Brad i4g43910) derived from phytozome v7.0 (chr-ID Bd4; pos 474 80678 to 47481611)
gctcggcgagatcgtcaccaccatcccaaccatcggtacccgtgctctgctgcttcctgctttgctcctacgctccttgatgtatcttccctcttttgcatctgccgtcgccgcgctcactagctagctcgcgcgcccggctagctgtgaacggaatcgatgcaggctagctgcaggttccactgctagtggtggattatgaacatggatatgtttgcttccactttctgtccaatctagtgcactagattcttgtaattgcaccaattggatcatgtgctagcttacactggatctgtttgattatgtgctaagcttgcaatttttgtattccttccgtcccataattcttgtcgctgttttagtacaaaattgaactaaaacagcgacaagaattatggaacggagggagtactgtatatcgtttcgattggagctgttttcagctggtcccgttcagttggagctattttgttaggttgagaagcccaagtcactactagcataagctgtccttggatccgtgtgggccaaacatgcataggttttgagcttaatgagtagagaaaagtagcagtctgcatttgcgagtattggcagcaggttcatttaggcccttctattgtaatatggcttcagtgcatcagtctcatcaaactgtctgttgttttaagatgttagtacttcttgttaattgttacaagtgagatacctgcagatccatagttgtttctcattttactttcactttgtcaacccagtaacccacttattacggtgggggttactattgtggatttgtggttgcttacttgtcttgttttcatttggttgggaggcataagtaggattacatcactagtaatggcattttttgacattttgtttacatgatgcagggttcaacgtggagacagtagagtataagaacatc

SEQ ID NO: 15510 - DNA, 883 bp, Brachypodium distachyon
  Intron number 1 from transcript Bradi3g46000.4 (locus Brad i3g46000) derived from phytozome v7.0 (chr-ID Bd3; pos 479 36506 to 47937388 reverse strand)
ccgtgagggaggagcgtgtgcggatcagcgagtaggtgaggcgtcagcgtccgatttttcggcttcccgtcctctcgttggagggtggctgttgttctagccggtgggttctttgatttatctgcccctttcttgtactgtacggttcggttcttgatggcttcgcttggtgcggatgcggtactgctgttaggttcgttgaccttttcccgtcctagtcggcgacggtgtgatgtgcttcgctagctagatgctttgctccctctacatttttgtgtttcttggttccctgcttacggttctctgagcgccacgggttcttgatttcaaattaagcgataggttgctgtttacttccaaggattatctgctgcatctcggtacgtctagttgtttccttttattggtgttgccagatgcgttttgtagtgtggatttacgaattgttggagttgattttcagttgccgtttccagtttccatccaagagatcgccattcttggttaattttttccctgttcacttatcaagtcgtgggttccaagtgattacagctgagaagcaaaatttccattttacgtgctcaatcatccgctgcctagcccatgaaaattaggtggtttattttcgagattaggctgtttcttagtgggtttatttatactccgtatttctctaaacatcccgagtgttgtttatgtgggtttaataatgttaatgtttgcttctaggaaattcttcttccttttttcttaaaataccgcacactttcttttatttttcctgaaattttcacggggacggatcgtgacaatgtgcctatccgttggtatatttaactctgcaggtagatctaagcagcagggtggtcaaggttttctt

SEQ ID NO: 15511 - DNA, 821 bp, Brachypodium distachyon
  Intron number 1 from transcript Bradi3g56360.1 (locus Brad i3g56360) derived from phytozome v7.0 (chr-ID Bd3; pos 562 78850 to 56279670 reverse strand)
gcccgtcgcggagaagcccgcgttgccgccgcagagtaagtgctagtactactgctctgcttcgcattgtcgtttttggggggtcacaattagcaaacattcagtggttttgatcataaaatgctttacgcgttctggcctgtttccaggctctgatcatcatgttccctcttcatggttttggaattcaacactttttttaatgaaatgttgagctgtacttttgattcctctaacggtaattggttaatcattgcctgtggatggaaaggaacatgtacccacaattggttgctcaagcacgatatttatgagtcggcttttgcctttctggtaccagttgtagtgcatttaggaattcacatgggtgaccacaagcttcgaatctgatcaaatgtctattttcaagaaagagaacattgtattacgttttagtcctaagaattaatggcacaatttgacaattttctgtgctgtacgagactgtcttacatggcatgctttagtatttcaattctatatctgttgaaatagctaattctacaattattacaaacaccgactaagtgttacaaaaatttgttcagttactcaaatgttaacaggaactgaatgcacactatgacgtacttgggtgtgtgttcaagtttttttttttttaccatttcaccacttcaactacatcaaaatatgtgattcatagaaactaatgtacggagtattacacaaaccgtgcttgatgcacattgtccttgtatattctttagttgttcttgatttccctaatcttatccattttccttcaggagtttataggaaca

SEQ ID NO: 15512 - DNA, 1005 bp, Brachypodium distachyon
  Intron number 3 from transcript Bradi3g45230.1 (locus Brad i3g45230) derived from phytozome v7.0 (chr-ID Bd3; pos 471 82978 to 47183982)
aagatcacattggtgcgttgccttgggtaaataattcttctgttactctaatctaccattcatcatgctcgtcttgctgtaacccactgctcacctagtcatatgcaaactaacaatccggtatcactttttaagtcacaaatcattttagatagtgcgaaggaactcagataccctgtcgacaagttagagtctttgtgtacgggctggttgtttgagtgcatagaatgtgcctttttactctccttagttttatttactaagtaatgttggaacttgaaaaatagttgtacaacaccgacatcctctccctatttacacatcaatcatcactcatcagatcaataggctactagttcttagttgattcatttgtaatagatttgttcttatgcggaaatcatgtggcaccactattggtaagcgagaccttctaatttggagaagacagtcttgatcatttcttctagaaccaatattcaggtagggataaatcataaaaatattttgtcaataataatgttggcattaaaagggtagctcaattttgaattatcacagcttgcaatgtatgacttgacttgaagtcataccttctgtagtggattccttaattttcgtatgatgtttagttgtactttgaatcgctttgtgcatggtctgtccaaatggaacatacccaaattatacagggctgcgcgagtgcttgtcttctactccctccgtcccaaaataagtgacgttgatttgtatagatttttatacaaatccacgtcacttatttgggacggagggagtagttagctattcatctgtacttttttgtttgtacaattcataccttgattttcatccacactgcttaatttggtatgtgaatattatatatccgaactttctctgcttccaattgcagtttatcttttgaattaccttatgctcacctttcccctcgtcttgttgatcataggttatcccagcacttgattcgaacacaccgatttt

SEQ ID NO: 15513 - DNA, 682 bp, Brachypodium distachyon
  Intron number 4 from transcript Bradi3g54700.2 (locus Brad i3g54700) derived from phytozome v7.0 (chr-ID Bd3; pos 550 99975 to 55100656 reverse strand)
tgcagttagagaagtaaacttctgggctccaaccacgttatgatttgcagtttctgtcaagcacattgcacttgtagcaaagtactgatgttgttagatattgctggatagtcattttttggtttgctgatcataaagtccttcttttcccagattagttttccacgatttaagtttcaaagctccagatattctatggcatccctgcacttcacattcttgagttaacgtttgaatctttttcattgttcatcacaatgtgaatctgtaatttgtactccctccgtcccataattcttgtcgaaatattacatgtatctagatgctttttaggaatagatacatccatttttgggcaaatttgactatttgaaacaagaattatgggacggagggggtatcatttttcacaatgaaagtaaagggtaccatgcttgatcaatttattgtattcttaatgtgttctttgctagatgggagtgtcaagctccctacttttccaccctacttttgtagaacggtacaatttagcatcagttagccgtattgttgcaaaattagttctctgcataaatcacttcaagatctgcaggtgatcatggtttatcactttacataactgattttccctaagtggcatttatttgcataatgatgcaggttctggaggaaactgggtgtg

SEQ ID NO: 15514 - DNA, 769 bp, Brachypodium distachyon
  Intron number 2 from transcript Bradi4g34340.2 (locus Brad i4g34340) derived from phytozome v7.0 (chr-ID Bd4; pos 399 83820 to 39984588)
agagggcgcacagcgaccgctacatcggactcaaggtggcccaagcctttctattcttggcctggattcgcaagctcttggcctgtgctgttagtttgatcctgtagcgttcgctaatctggcggatctgccaaggtcatagtgctcagttttgtagtccgtatttgttgatccaattttagtccaagaggatcctactagcagatcgttaacttgtagattcagaagctgttacttgcagtcgaaaatgttagcaagacatcgagtcggtctgatttttttttaattgttcattcagtttgatttgagctatattgtttgtaggcatgtcactgatgttttgcttatttaggatgttcccttatgttatgacaacatagtcttaacgcactagttaattattttgggagatatagtgataaactattgctggttacgcgactgacggttgataagctctacagctgtactgtaggaatttgaaagaatgaaaatatgcatatatgcgtaaattcaacttattctactgaagtataaccttgccatgtttcttcccatgctgtatctggagatgacccatcatccttaaatgtgtcgatataacctgtagtgcagagaacactgacataaacttatattttctcgtgcgattgagtcgcttcatgtggcatcgttattatctgttgcttggcttgttgaaaaggctcattttttagtcattttgttttctgtagacaagctggcgcaggccgaagggtatcgactcccg

SEQ ID NO: 15515 - DNA, 896 bp, Brachypodium distachyon
  Intron number 1 from transcript Bradi3g58780.1 (locus Brad i3g58780) derived from phytozome v7.0 (chr-ID Bd3; pos 581 67175 to 58168070 reverse strand)
cgcaagagggtataccacttaattaccccctatgcttgagtattggactggataggctgtattgtttggggaactagcatctttatggtggaaatgtagtgacttgtgtgctactcttttgccaattgggcgcttggacttgggttggggtgtcatattgtttgctagacacatgttcagcttacaaaaaaattcatcgaattctattccgtggtaaaatgctaatgatctgaaatgattcgtctgctgactagatcagtgaccctgatactttagtgggtagtgcaagtgcagtcacatgccaatttgccagtggaatgtttcctgatagtttaaacttcaaagctaaatgattctcagttgcattgtgtggctaagttcatgccaaatcttgtcatgtaccgatggtttgtgctggttcccggacaactcctgtctcgaaaccgcatttcttcttgtggatgcaagttttttcccccctctatgtaagtggatttgaaggagagccaacatgagtctttgatctttttaggcttctatttcaactaaattgtctatatcattgtttgttatatacagtcaacaatgtaatataatgttcgtctttgggccttatgatacactaattaacaattatacccatcacctgcttgaaccttcatccctgcacggggagaacataggaaaaacagttggcagtgaagtaacttgtattttagaacctcagatatggcctgtaatcaataggtttatgatatttagaaatgaatttgtcaagttattatactattctttcacttgcatcagtagcagcatgtctctaaaattgattggcgactaatattatcatctctacactagattgctcgtctgctgactgtaagaagagaaaggga

SEQ ID NO: 15516 - DNA, 620 bp, Brachypodium distachyon
  Intron number 2 from transcript Bradi4g24320.2 (locus Brad i4g24320) derived from phytozome v7.0 (chr-ID Bd4; pos 294 86168 to 29486787 reverse strand)
ccaacggcctcctctcaggcattgtcacagacaaggtgacctctttttctgtctggggatcctcgttgcctgttgttgtctagtggttttcgagctcgaatggaatggtagggtatttctaggtactaacagtgggctgtcttcaactgtactctacgtgccctaataaagattgcttgtgtctgtaactctgcatgcaatgagtggctagagtaatggcttgtctagggtactttgattgttatttaatagtacagctttagtttatgactggactatgtttgtgttcctttgttcttgtttaatgagtaatgcttcgaatttcaaactgatgctgtatgcttgttttcacttattttggatttaaaagggggatgtttaggaacagtggttttagtctatatctggtaaaggtctgtaagctgatttgattcattgatgcatgaatgtgtgcaaccatatttctggaactggttcagcagtctctgtgactgctacatgtgaaatggttactgccagtttagaatttctgagatgaatgacatgctctgctttttcttctttttcttctgtattctgatataggacgtagccacaagggttattgccgaggggctgcg

SEQ ID NO: 15517 - DNA, 659 bp, Brachypodium distachyon
  Intron number 1 from transcript Bradi3g45900.1 (locus Brad i3g45900) derived from phytozome v7.0 (chr-ID Bd3; pos 478 61296 to 47861954)
aggcgagggctcccgagacttcctcacgcattaaggtcctcattttaacccaattccttagcttcttctaaactctaatgagctactaaatcagaatcggagtatttggttatttgcttgcttagttaaatattagaataggtagttgctccgtttctatcgtgacgagccttgtacgcctgattcgaatgaacagtaatctgcagtttgtggatggtttgatgcgtcacatgcgtatgttatttcgttgacattaacaccgcagtagaattttctacttgatgaaatggccgcaaattttggggacaatctgagcattgagggaaatgaaagaccaatgtctttgctctaatctggtggatccccttgagctgtctttgatttagtaatacttatatgcttccacaattttcagcatccacggcatgaagatattcttactatccattggatctgtttatttgcatcctcttgatacacaatgtatgcatgttgtttggcaactcaatccagttactgtgcgtgtgggtgagtgagagggtggtcatcacaaaaaatactactaggtggtgtaatgttttcaaaactaccttcgatatacattctaatgggaactatgattttgtctttgcaattgcagtttaaaggtgaccacccag

SEQ ID NO: 15518 - DNA, 581 bp, Brachypodium distachyon
  Intron number 1 from transcript Bradi5g10940.1 (locus Brad i5g10940) derived from phytozome v7.0 (chr-ID Bd5; pos 143 84683 to 14385263)
ttgcgtgcaaaagacccaaagtggtcggtatgtgttgcaaaaactaacgggtatcgggtcatatgtgttgctactctttgcaacgaagtttgtcaaatctaaaaaagtttgacttagaaaaaaactagatgtacacttatttgtgaacggagagagtaataatcatactttgaccgtttcaaattatagaaaccacaagatgtcaaatagacattccctaatatcggaggaattcaaaataaatgagataaataaatgatggagaatgtaaaccaggtagatattaatgaatattgatggaacaatttatgtatatccctgctttagagaagataaccatcaaatgaccattcattggatgcagttaaatgttggcattatgcaatttatggttctactttatgtattgttttctaaacgtcatatatgaggaaggactcacatcatttcgagcttcattgaaggaactctctgtctctctctctctcttacaaatgggttgtggttatgttgtcgtatcaatcttattgtgcatttcctttgcagcttgctaccttacttttgttgaatcaatagataca

SEQ ID NO: 15519 - DNA, 691 bp, Brachypodium distachyon
  Intron number 3 from transcript Bradi5g09230.1 (locus Brad i5g09230) derived from phytozome v7.0 (chr-ID Bd5; pos 124 53986 to 12454676)
ggtaagggcgtgctggctctcttactgttgccctttttattctctgtcttgactggtctcaattttggtggtaaattgtggtttacatcgaattagcattttgggatgtattttatgtagcttcgattccaaggcactttactttaggctgccaaattgccaatgcttgatggatgcaccctcgtggcatgtgttatctctgaagtgagcgtaactgatgttggatgcaggacctacagctctgaagaatcaatttgtgaaatcaaatcagggtttgagttgtacaaatgaaaaaaatgtggaacacctcacagatcatgttgtggcatatttgaacaattattttgtttgttactgaaaataattaaaaatgaaaaaaaaaataaagctctgggttatagagggatgctccattttgctatgttttgtgagaagcagctatatgctctcaactctaacaaacaagggaggtataatcagaatctcaaattttgtgagaaccagctatatgctctcaacgctaacaaacaagggaagtaaacaatcagaatctcaagtttctaattggtatcacaaaagcattacttacacaccagggaagacggttttggtttggagctatgtatagctgctgcttttgcttatttgtgaatgtggtgcctatcttttaacagttgataaacaagaaacg

SEQ ID NO: 15520 - DNA, 881 bp, Brachypodium distachyon
  Intron number 1 from transcript Bradi4g39460.1 (locus Brad i4g39460) derived from phytozome v7.0 (chr-ID Bd4; pos 440 72900 to 44073780)
ttcatcttcttaatcttccccaattcgtaactgaggtaaaaatcaaggtacggcggacgccctaccttgcgctactgggtcctccgcccgtgcttataagccttcttcctccacgccgcagccatgtctattttattttgtttcattttgctctaccttagtctgtgctcgatctgtttagtgcgtgctgcttggtgcttccacagtttcactgaatagggagaggaatggcaacaatggttagcacttagcagtagcggctcgataatggtaggcatgtggatgactacatgatgatgtatttggttatggtgctatgagagataggggatgaagaactcaaaagagtggagcaaaaaaaaattcagtagcagcagcttttcttatcctctgtaatagtactgttcaattcttgtgttttttctcagtgtactaaataaacgatgggacgttatattatatccaaggatcatcttcaatcctttttagttcatgtgttcagtagagcagaaaaaagtgtctcaagcctgatgacaacagtaataatttcaaaataagttgcagcgaacacttggaagcagaattacaagctttacattacacatgtagcttccaaagctgcagctcgctacattacagtataaagttagtggcagaaacaagctgtagcaaatacctaaaagtgatttttctaccatacactcctatatagtcaacatactcctttgacatctatgtactcacgttgtctttccagttaaatgactaacttgtttttcagattctaaactttgttcagaattgttgttgttttctgttttatatgttgacagttcgttctggtgattgatttgtgcagttaaaaaatcatcaacacagga

SEQ ID NO: 15521 - DNA, 923 bp, Brachypodium distachyon
  Intron number 1 from transcript Bradi4g27580.2 (locus Brad i4g27580) derived from phytozome v7.0 (chr-ID Bd4; pos 327 42507 to 32743429)
tggtgtccagggaatactacagccacaagaagaaggtacctttttctacgcgccccccccccccgccccccctgaagaattgcagcgcgacaattatttctctgctcctaaaaccccaaaaatcccgggagaaagaaggccaaaaatttccaatattgcatatttccttggtgtggataaccctagcttcacaacttacaagaaaaacaagaggataaagataggaagttccaatatttgggtcgtccgatttcgtttctgtagaagtgtggtggcgttcttctttggtttctcgcgttaagcgtgtagtttgtgatttcgtttgttacatggtgaaacagggaaactttagagttaattattagagcatgctgacaatctaatcttttttcttagaaataaaggagaatcctgatcataacacttttttggtggtttgattctttccgattgataaagaaattttgtgttaacaatttagacaccgagaatgagaatcccattttgagtcaggtgcttatttagttttgtactccctccgatcctaaattgttgttgttgttttaatacaaatttgaactaaaacaatgacaagaatttaggaccggagggagtagattttactggcaaaagagatgtaagaggaaaacaacatctttcttgagaagaaggaaatcattgtattgtgaggatttcttgagtgctttcttgcattctgttgcttgtttttctaaatcttcctcctgatgatcttcaggaaaaactcctttctagactatactttcatgcaaaagtcagttggttttgttgccttttgttcttcctttatgtggtatttcatatcaatgcaaacttttgtatgatcatggtcttctgtatgattgttaggtgcactctgtagcctggaactgcataggaacaaa

SEQ ID NO: 15522 - DNA, 843 bp, Brachypodium distachyon
  Intron number 2 from transcript Bradi4g07300.5 (locus Brad i4g07300) derived from phytozome v7.0 (chr-ID Bd4; pos 620 2704 to 6203546)
ctggtatgctgatgtcctctgtaagatcttgatgtggaaaatgattcttgttttcttggtttagtatccatgttgaggcatatgtaaactatacggttactctttggtgaacacagttccgcttgcatgcttcctaaaaaattagtttgatgcacgattctcacagttgatcatagaagtatcagctggagggcataaaatcaatcttgatgcacttcttgtcatggttttatttcgacaagaatttaggatcagagggagtaatttgcatgctgaggttcacatattctttctagttatggctgatacaattcgataggacttccccatctgaacatattgtttctacttattggctttatctttcttacagttaagatttggctttccagcgtttaagtgaactttccaggaatgtaatattttatggttcttttggtagaaatttgtgacatgtgcaattaagtatttaaaatgtttccattgtatctattagtcgataagtgaaggatgaattgcttgagcctgtaacagtctctgtatccgtgtttgtttagaattctacctctgtattgaccatatgagtgacatgttgctagctataattcagatattcaaacattgaccctcattgtagttaccgtcttaccgaggtggtgtttcattatgttaatagaaatatttgtttggcagcaacacatagtctgtagtgcctatcatggcaatcaaaacatggacctaaaagggcttgtgtgctattaacttggaacctacttgtccaatcagtttgcacgtgcacgtcctactgtgttaagtgtaaacagctaagtgatgatttttcag

SEQ ID NO: 15523 - DNA, 1014 bp, Brachypodium distachyon
  Intron number 1 from transcript Bradi5g02920.1 (locus Brad i5g02920) derived from phytozome v7.0 (chr-ID Bd5; pos 321 0046 to 3211059 reverse strand)
gccgcaaagctacaggtgcgtccatattagcaggctcgctccattgtctaagactaatttaatttccctgtcaattgcgcatgcaaacactaatggagaattggagatattgcaacattttccatcaaactactgtaacttttatgcaaatataagtatgctcgtgtatgatacggagtatactaatacatagaaataagaagtttgaatttgtttttgtaataaagaaaactcttagtgcaaaaaggatttttttcctggactgcagtaattaggattaaaaaagggaactcttttttcagaaggagaaaaagagatccaaaaagaaactgatccatgcatgtttttttttccggaagaaaagaaattgcgttttgttttcttggggaggcccacgtgcatgaacatgtggatgggctgtacgggtcaaagtctagttctgcagtactcatttacaggtgggacctcctgctctctgtgcatgtggacctgtgaggtccattggttcgccgacgtggcaaattcagctggtcatcagtcactcgactcgtccgttctgctttgttcaaagtttcaaactttcaaaaaactttatttttacttatttttctcaaaggaaggtgtgttcagacattaagcaacgggggataaatttggtcatcgtgggacatcagatgagcctgagggctcaatattccagcataatttctttaatttattgggcaccgatttattttttcactaaacttgagaatctaaattcaaatttagtactccctttattgacaggtgggccctactgctctctgtgcatgtgggacccatttacagaaatttggtcatcttgggacatcagaatcaaatgagggctcaatattccagcataatttctgtaatttatcgggcacagatttgtttttcacctaaacttcagaatctaaatttagtactcggacaaaaaaagatcaaaattcaatgatactccctttatataaaatgaactgcaggcagtcg

SEQ ID NO: 15524 - DNA, 637 bp, Brachypodium distachyon
  Intron number 1 from transcript Bradi4g04640.1 (locus Brad i4g04640) derived from phytozome v7.0 (chr-ID Bd4; pos 381 2624 to 3813260)
cgggcgggctcgggcacttgtctcttgttgttcaggtaaaggattcctaagcttgctttgatggataatggactctctttcaattcaattcgtctgggtcaaaactcaaaagaggctgagagatgtgggggggaaggataatagatggaggaggaagaacgccattgtagctcggtccctccgtccgtcgcttgctgctgcagttcctggccgccctatgactatgagcttgcctgtcagaaagacggaaaaagttgtgattcttaaattcatgactcgcccccaagaacatcgcagtgcgccagtggcagtaagaaagttacagctaagaataatcttgtttttacagaaaccaattgctgagaagtaaatgagtattgtgaagtgtagactagtttcagatagcgccatcatctagaaccttgtgttattaatgtgaaaaccaacgatctgaagcctttcttgtgctaatatgcatcgcccatcattagtttgccaaatttgtaaagtactatagcagcaaatatgcagttttagtgttcatcattgtcaaaatcagtagcactgcatgccaccagactattccatttgttgcaaattacaagtaagctaaagatttttgcagttcccaggagga

SEQ ID NO: 15525 - DNA, 727 bp, Brachypodium distachyon
  Intron number 2 from transcript Bradi5g07290.1 (locus Brad i5g07290) derived from phytozome v7.0 (chr-ID Bd5; pos 974 0155 to 9740881 reverse strand)
gttatcaccggtaagcctcgaaaatgattgagcatgctgcccatatttgtagttgtctttacgctgttgtaatatgttcctttcatctggtttcctgaaagttgttaaatagaccaggaagaaacaccaccctgacttgttaacaagtgtgtgagtccttgaacccacggacaatcccattgctatctgggagacttctctttttctacaaataaaatgtcttcatagaaagcaacatcatatgaacctccttggcatataatctatttgattaatgcacaccttgtgtctcttggtgaactcaagcatatccatcatgacaaacttttgcagcaagatgcttgtttattgaatcttgagcagcataacataattgccgaggctacgctttcataacattaagatatttggcaatgtggagatgtggaagctcagtgtttcaatttccaaagaagctaatgaattatcgagcattccagctggcttcttgctttagatcaacttagtctcctaaatagacagcaatactttatgaccgagaagctttggtgaaacatgttagaatgaacacttcagagatctcaggaactgttttccttatgtgcttaacctttgtttgaatcatgatgtttttgctatataccgaaatagaacatttcctgtaggacggtttaatctagtaaactttgtaggtcattgtgggtggcgtagcagctggcatctgggc

SEQ ID NO: 15526 - DNA, 739 bp, Brachypodium distachyon
  Intron number 1 from transcript Bradi5g07290.1 (locus Brad i5g07290) derived from phytozome v7.0 (chr-ID Bd5; pos 974 0994 to 9741732 reverse strand)
tggcaattctgctcagaaaggtacattttcgttctatatagtagctctgagtggttaagttagctgtcaacaactcaacatttcggtaggagaactgttactgttgatcaaagcaagctatcagattttctgatgtatgtcttttttcatctttccacagcatgcaacatttgctttgttcatcctatggtctaaaccaaaagtaaaactgatttttgaaattgcatttagctgcggtgccatttgcacttgaaagtgaaacttgtagtgatgaataatgatggaaaataaaagttgtttctatgttccatttgattcaaaatggattggccattttgttagaagtcaagatttttactggcacccaatgtttgtttagaagggcattctcgattgaaacttcatatgaagactgcaatatgctgcttttctatactagatgcatcttttatttacttgatttgtttttctcttaaaaaatttgtactagcatatcttctatgttttcttaaatttaacaatacctttttgtgtctgccagaacaatgcggtctggtgcacaagtatgtaccatgtgctacgtctagtataactgatctctatacatgtactcaatataatgccggcatagacaaatggtcttgttgatttgtaacgccaggcaatcagtgccaatgtcattagaaactttattaccgattatttagtactctgatatggattttgcagctaattcatt

SEQ ID NO: 15527 - DNA, 942 bp, Brachypodium distachyon
  Intron number 1 from transcript Bradi5g11810.1 (locus Brad i5g11810) derived from phytozome v7.0 (chr-ID Bd5; pos 153 03910 to 15304851)
actacctccacagctgcttcggtccaagcggagaggttcgcgttccctccccgatccggacttatctgtaccagatctcacgaatacatttagatttgtctcatttctatgttttgattgtcgtcaaattgccataaaagtataaattcgtgcctagttgttgcttgatgcgaacaaatgtccgttatttgtagaattagccgtgtaaagtagcttaagccgccaactttgaggtcattcaatgcagtacggatgggtgcgcttgcccgtttggtcatttatatccctcgactcattaattagtgccgtaactgcaagatatttcttttttttttcttttctcgtttgttgtttgtaaattgtaaataagggatgatttctattagaaatattgtttgctcttcgagcagccaaagttgccgactttgtggtgtgatttgtgtatagaacttgtttggcgagcagtttggaggaactggtcttggcgcgtgataatttagtaatcatgttggatgtggcaagctagctattgcaatttggtgattatggaataagtaaaaaacagttgagaggggcgaaagggagccataatgacagccttggccgattatctttcttttggaggcagtgtgctcactgatgttgacaggatgggaaaaagatggcaacctataaggtgcttcgtcaggaagatggttagcagacaacgcaagttgcgcgctctcattttttgtgcaatttgcaaggatcgaatgttctagacctactaatagcaactgtaataggtttattaatataaagaatggatgttaacaactcatcatttcttgttctcttttcattttgttattgtctatctgttctcttgtctaattttctcaccttttgctactcctctattttgtaggtggtaacaataaaagttatccgcaataggcaaac

SEQ ID NO: 15528 - DNA, 417 bp, Brachypodium distachyon
  Intron number 2 from transcript Bradi3g48660.2 (locus Brad i3g48660) derived from phytozome v7.0 (chr-ID Bd3; pos 500 44612 to 50045028)
taactgctggtcatatcctttgaatacctatatgtagtgtatttactagagatccaaagcggcgtgaatcaatcttaggataagaagaaactaaatgtgagaagttagatagggataattctacctgcactcttctaatcagaattatcattatttcatgtctgctacctgcactcttctaatcagaattatcattatttcatgtctgctacctgcactcttctaattagaattattattattttcctgtctgcaaatgacttaagtatggctataacaggcaaatttggtttgtctttattttctgtgaggggcataactcataaccgggattggcctttctatctttctgttttcattctttcaacatcgtagtaaactgtttccttaacggtcagttcgccacatacgagattt

SEQ ID NO: 15529 - DNA, 691 bp, Brachypodium distachyon
  Intron number 3 from transcript Bradi3g48660.2 (locus Brad i3g48660) derived from phytozome v7.0 (chr-ID Bd3; pos 500 45090 to 50045780)
aactttacatcaaggtaaactgttagctagttatatatagtgagaaagctacatgaatttattttgattgctatggtaaagtatgacagagatttaaataccatctttaaaactatgtcatatgttcccgatgttctctgtccaaattttactattcgcagtgggatgaaaaacctccaatagtttctcatatgttctctttatgtattaatttatctataacattgtcttccatcaaagagatggagctaacttgtctctactttgtatggtatgctaactgtttctgctgataacttatcctgttttccagtaacttgcataagaaggttctcatgcaatccagcattcttcttgcttgttctagaaataagcccctttactattctagaaaaagaaataagccccttttgctccctccaagtatctcactggttcatgttgcagctttgacctgagtccaactcagtaaaccagcctagtaaactcacttagggtgatttgtgaacggcattggatagattagagggttaactgaaccattttgtacttcaaggggttatgtgaaccagtgagatacttcatcggagtaaaatggacttactcccttggtctataatcgagctctacatattcctcctttgatgtgtgtgcagatatttctcaatccactctacttacctggttctcg

SEQ ID NO: 15530 - DNA, 904 bp, Brachypodium distachyon
  Intron number 2 from transcript Bradi5g06640.1 (locus Brad i5g06640) derived from phytozome v7.0 (chr-ID Bd5; pos 869 6504 to 8697407 reverse strand)
cggtcgctgacgcggcctccacgcaggtgaggttgggatgaaattgggggcttacagctttttgtgtggggcaaaggtttttggcaggctcgtacggattaggggttaggtaaaattttggtggttttcagtgggttttgcacattcgcggttactgtttgactctgatgaacctttgctgaactttggggttattttgtgtttatcggtggcagtaacatctgagaccgttgatgcttgatatcacagttatgtagttgggctagtccattggttggagatataagccagaaaattgatttatttgttggttttatcatgtctttagggtgatttagttaagttagcactattacaggcagggtctcgttgtacttatttgacatttacttaggttagttgtttacagatgtaaatagtttctactccctccgatccataaaaagtgtcgcccacttagtactccctccgttccataattcttgtctcaaatttgaccaaaaatggatgtatctattcctaaaatgtgtctagatacatgtaatatttcaacaagaattatggaacggagggaggacaaaatttgtactaacttagtacaaaatgagcgacactttttattggatcagagggagtatttgttttgctttctgtatttgaatgaaataccgtaatatttttataactgggtgcaagtttgtaaaccttagattttgttatttgatggattttttgcttgtagattataattgtatttggttctgcaatgttgtactaaacttttccttagctgtggctatttttattttgatgctctgccagtgaatggtttgattgaagagttgttgtttgctgtggtgaaggtttagttctacatatttaatctgtttggaattataggaag

SEQ ID NO: 15531 - DNA, 523 bp, Brachypodium distachyon
  Intron number 1 from transcript Bradi4g45290.1 (locus Brad i4g45290) derived from phytozome v7.0 (chr-ID Bd4; pos 484 18469 to 48418991)
cacgcgcaaggggaaaaggtaagttattagcacttttaaattgcactgttaaattaacatgttctgtcgtggctgctcaatcttaaccaagcttcaaaattcagctaaaaattgtataatttcgtagagaaaaaaaaaagcatgcatctgattgatctagcaaagttctgtactttgatcttccattccctcttcacaagggttttctaaatctctatggtttcatatgcacatatacctgtaatttccagcacgcatctgttgatttgtttgtgcacataagttattgcaaccccaacatctttctttaactcggttgatatcttgctatttgttttaccattttcagcacaaaataattcctcgttactagctcaggatcaacttctccaaaatataacctagccttattccatcctatcattgtttccccttaaaagaaaagacccaaaaccatttgtttttatgattgattaggttgaacggttgatgaattgccctctacttgttttgtcagtggaag

SEQ ID NO: 15532 - DNA, 795 bp, Brachypodium distachyon
  Intron number 2 from transcript Bradi4g05770.1 (locus Brad i4g05770) derived from phytozome v7.0 (chr-ID Bd4; pos 479 1009 to 4791803 reverse strand)
gcacgagagaagattgccagacgctcactgcagaggtacctcctctcttcaggcactccccctctattgttttcccttcagtgtcactgaattttgcattttgttttcctgtgtgtgtctgtgtgagtgctccacaaaattgtaattttacattcaatgttatcaattcttggaactatttaggttagctgaattggatgtccatgtgatactctgaagtctgaacagttttgtgtgttaaagtccctaaaattcttatagcattaagtttcttccaacattctaaggtgatcaacaattcgtttaccaaaaattaaactagagtgttgataacttgatatatataaaaaggagaccatgctggcatatcaagtgtggattcgatagtcaattgccaccatgcaaggacatctaaaaaggtgtgttgtattacaatttaggaacttggctacccaaagacactaaatttgtaccattttgtctgtcaaactctaaatctttggatttgctagatcacacatttgaaaatgtggctctttgatagaacacactgcaccattattgtaatattatttggcactttgacagaacacactgttttccaaaagttaaactaaagtcttcatatctaaagtgtacccttataagatatatctaaatgccgctgtggaagacttgccctccttcaacagtggcagttagataagtggtagatggtatatcttatatcaaatattcctgtcgcaaatcatgtaatggttgtttgcagcattcatctctggtccttacaggccc

SEQ ID NO: 15533 - DNA, 813 bp, Brachypodium distachyon
  Intron number 1 from transcript Bradi4g20470.1 (locus Brad i4g20470) derived from phytozome v7.0 (chr-ID Bd4; pos 235 44595 to 23545407)
gatcgagttttccgctgaggaatcccgccagctaggtatgtatcatatgccggtcatccaaagaagtggttcttgcggtcattggttatgtttggctatcatttcaagttatttgatttaatgagtatgcacacaccaatttatcagcacaaacgacttaactaaggtctgtgccggtggccacaaattgccatggctttgtattttcaccaaatttccagaattaccgacatttcggtaggtgccacaaaatttgcattagggccatgacatttcactgatgtgtgaatttgagctaattcaaggtggacctttttgtcgttcacccaaattgaaagctcgaataacaatgtcggcgatttcaataatgtcctaatctgaatttgaaccctcataatgcatcccatagtggcagaagtagtacagtatgtcattttcattagaagaaacgtcgaggaggagaaagtacaaaagccaaaggcaaaaccgaaacagcgaggaacgaataaggaggtctcaactactagtgcagcaccacccaggaagaccaaaaagaagagcaaaaaacaaaaggaggaaaactatacagtatgtcattgttcatggacaactgtaatgtctcgtggcagaatattattagcgcactcataagcatggtgactatttcagttatgtcatatatccttgttctttattacctttgctactggacttaagaaaagaagaacttaggtagttcgttatttttcttgcattaaattcccttacaattgtccaggacataattacattggatcggaacacttgcttctt

SEQ ID NO: 15534 - DNA, 655 bp, Brachypodium distachyon
  Intron number 1 from transcript Bradi4g25780.1 (locus Brad i4g25780) derived from phytozome v7.0 (chr-ID Bd4; pos 311 07942 to 31108596)
tctgccaacacggaccacacggaccctgtatcgtacgtactaattaccaactatacttattatctgatatgcacgtattctaggacgcaatatatgaagagagtaaattgaccattacaaatttacaggtttgtttgatgttgatttacgaacacttcaactttgtttcaggttgtttcttacttgttggtactagtaacatggccatttcctgtccaacaaaatacatgccggccactaattttgtgattcaaattcaatgtgtttttttagagatgacttgactaccaacaaagaaataaaaacaatttctatcttcccattgttaatccaaattaagttttagcaatatgactactaactgaaattcaaatttacattcgtgttcaccacaaattgatctagttttatgctgcaaatctaataagtatatcaggaaaatgttataggcaaaaaaaaaactgtagctagcaacatgtgtttctgaccgtatagcactgcatcaaacatctttttgtagtatgcaatcatttaagtcaattaatcttttcttcttttgtgtgaaaagaaggcgatttggttatattgatccggtaataatgacagtacttaatgaacagggaggaactacagaaggtcgtgggctttgagaagg

SEQ ID NO: 15535 - DNA, 903 bp, Brachypodium distachyon
  Intron number 2 from transcript Bradi4g00740.2 (locus Brad i4g00740) derived from phytozome v7.0 (chr-ID Bd4; pos 363 191 to 364093)
agcgtctttgaggagtcttatattggttcaacgaggtactcctgacacatgatcagcactcacttgataatcgtttgttcaaactcaaattgtccattcaaccctgtcaaaaaagattatccattcgatttcctttttcattagaccgtggtttctacagtaacaaggttttgttatgtgttttttgaaagaagaaaaagtactggtgcaattgcttgatttgagtttcttgtgttttccgattattcaacgttgcataaacaagaggagttcacaagcatatattcttgttatcttgatagcaaaggaggagcacaaagcccaaaactttcttgatccaatctgaaagctgaaggaccacttgtgcctttagcctgcaaatccgcacgtcacattgtcatttcctttctgatcccacttctcgagcaaaatttggcagggggctgcatttcaatcagacatgcttaaatcctgctagaactgatcctgaacctcagtttttatttctggcctgttactgacctctgagtgctactgctgcccccacagaacaagttgtttttactactccctccgtcccaaattaagtgactcaaatttacccaaatatggatgtatctatacccaaaaaatgtttagatatatgtaatatttcatcacttaatatgggacagagggagtgttaagaatatatgttcagaatgttgccaagatctttcattcaacaactccagttttatttctttacatcagtgtgtttttccatctgacatctcagcataaaattaatccttagttcctttcaaattctctgaagttggttggagtttcttatcaataaaatttcatttctgccaattgcatgcaggttgtaagaggaagattttaatctggtctgtcttg

SEQ ID NO: 15536 - DNA, 959 bp, Brachypodium distachyon
  Intron number 1 from transcript Bradi5g08830.1 (locus Brad i5g08830) derived from phytozome v7.0 (chr-ID Bd5; pos 118 58227 to 11859185 reverse strand)
gctgcttaaagagaaataacccattcccacttcaggttattgttctcttcctaatcggtttttgaggttgttatccttgtgttcctctccagagttctggggtcgttcttgattgatttggttagagtgcgaggagaaaaaaaatgcaagactagatcttatggttcctctccagagatgtagtactacctccgatcctaattaattgtctcaaatttgcccaaatatagatgtatctatgcctaaaaagcgtctacatgtaatatttcgacaactaatatggatcggagtatttgttttttcaggaactttgtaacatgtgtcttatcttgtgtagtatcttaaaaggacataattgacaaagattaaatcacaccatctgtttttggtaagaaggcagcgttcttgtacagttcaactcaaatggaggttgtttgtaattctaagtcatactgtaacaaatactcatggaactggaaaaaaatagtaacacgtgatgcagatgtcaaactggtgcttcctaattgatggacagcatgtaatgggagattaagttccatcccttgaatttggattttggatggaagatagtcaaacaacatgccgataatgttacaggggactaaaatactgctcaaccacagtggccatgatatcaccaagatactagaagtagccttgcacacacaccatcagttataacttgacacttgctaaagaaaaatacatatgattcttacaccattggagagcaggttaagaatgtaataaaataataatctaatctttgctgaacgcaagagctggaattttgtttatagatatatttgtttacagatgttttatcatgtttatgccaaatacaatcttttcactcagtatcatggctcagtatttagctaatgccttggcttaatattacaggtttggtttgcgtttccatttaagtataacagaag

SEQ ID NO: 15537 - DNA, 985 bp, Brachypodium distachyon
  Intron number 1 from transcript Bradi4g13600.1 (locus Brad i4g13600) derived from phytozome v7.0 (chr-ID Bd4; pos 139 73393 to 13974377 reverse strand)
ggccgggggaggaggtgggagaggacctccagacggtgcgccgccgctggctacctcatcaacctcgtgcggggtgctcaggagggagcgcgaggagaggaatcgggaaaaaagaaacatcgcttctgttacgcggggcagagggtcgaacgccggtctcggtcgaagacgtcgaacggttccgaatgcctagcaacgtcgaggtttacccctcggaattcggaattggcccatcgcgattttgtactaccagaccaatcgctcgatatcgagcctgaatgccttgcgcgaatgtgttggccacccaaacagcccaaatcgtgatattagggcctttcccaataccaatgtccaatgtcaggccccaatgcatacatccaaacacagtgttagatattgtccatgaaaattgatgccaggccaacggaatataatcactaagtcaaagcgaccaatatttgtgaaactaattaatgcaataatacaagcttagcgaacaactgtaacatgtctagagtcaatttaagacaaaagaagttggatggcaaccctctaatcatttttttcggacaaccatgataaactattgcgtggttctatttattcataatttctatcatgtgcgaacacacgggttgatgaatgatgactagtgtaattaaatacgagttggcatggccatttcatttaacacgtgttagatttagtgttctatttgttttggcacttctgaaaatcttctgcaagtcaaggtaagctgccgcgtttcctgtcggcatcatggcatcatgagcatagaaagcaggtaaacaatctctctctgatagttccattttgaattattgacttgcttgccagcctgatgctcctaagaccttgcttggccggctggtttggaaaaccacaaagaacaatgcattttgtaaccccaatatcctccatggatgcagctgcagcctgttgcctcttgctaattctagccacc

SEQ ID NO: 15538 - DNA, 964 bp, Brachypodium distachyon
  Intron number 2 from transcript Bradi3g48210.1 (locus Brad i3g48210) derived from phytozome v7.0 (chr-ID Bd3; pos 496 95954 to 49696917)
tccaaggcgacttggttcgtaacacttgaacttcagtgcttaggctttgcctcttcaacatggatgcttaacaataattgtacagcttttaatatacgcttgcctgtcttggcgagagtgaacacttcttaaggagaagtgatgtgagtttgttaactgcatttgttgttgcaaagccttttgcttatcttaatcgcttatttgatgcagtagctatatctgaatgttccagaagctgcatatacatgtttgatccaatgttggaacgcacccccatttgatttccttgtatatgtttctgacacggtatgaaaattcatgtcacccaaccaaatcaatatatcctaccaccaaatctgtgatagtttaatgggctactgaaaattccttgattgagatttgagatgttattttcactagctaaatacccgtgcgtgatacagataaacaaattagactgctcgttttcgataaattagactaaaaaccctatgtattgatggcatttgctaataatttcatctccaacttcggtggcaaacatcattatcatcccattatatttcaaaagatttattatttgcattagaaggaggtgaggatttttttttaacaatagaaggaggtgatgaccgccaccaccaattgactcttttataggagtaaattattgttataacataggtgcttgtattctatgcatccatagtgaaataatattgatgcacccccaagcagggattccaattacttagcccttgggacctcttagatttgtgcggtttttgttgctaacatggtacataatatgggctagctgtgcacttgaggttaaaacaagtttatgttgaaccagtccgagcgatctttcatcttctaatttaatttggcctcagtttgggaatggtagaatgtgatgcattcagttgacagtgtatgttatgttgactaaattcacaggcca

SEQ ID NO: 15539 - DNA, 716 bp, Brachypodium distachyon
  Intron number 1 from transcript Bradi4g38260.1 (locus Brad i4g38260) derived from phytozome v7.0 (chr-ID Bd4; pos 432 53930 to 43254645 reverse strand)
tcttcgagcaggccggcgtcgtcgaggtctccgaggtgagcaatcccgtttttctaccccctcgttgtccatgtccgcgtcgtcatgaagaaaacacatcaaaaatccctgactccttgctaatgcgctttgttggtgaagaaaacacctcaaatccctcactccttaattgttttccatttataaacaactgaaactggcactgcaacggttcgaccactgaacttcccgtgcaattgtgtagctgtgcactgttgcttacagggtggagctgccaaaatctggtttgctgctattcaagcctttgtgtgatatgtttaggttgcagttggttgcttctgggatgttatttcaatgaattgctgtttggtttgtgaaaaggctgatgattagaaatctcattaaattttgtcttgggttggtcgttaacttgttaggcttgcaattgtagctttttcagaaactgtgaaataaccagggtctaactctaatgtggcttctattgtgaggttagggtccacaaaactgagaatttaaatgtgtttcttattaagaatggctgactattcacttgttttgcgatatctgtttcatgcactgttggtggggtagttagtcaatagttgcttggggcattttatctttgttctaaaatacagtttctactttgtggatatgcaggtcatttacaacagagaaacagaccaaagccgtgg

SEQ ID NO: 15540 - DNA, 917 bp, Brachypodium distachyon
  Intron number 1 from transcript Bradi4g34850.1 (locus Brad i4g34850) derived from phytozome v7.0 (chr-ID Bd4; pos 403 54822 to 40355738 reverse strand)
cgtccccggcgcgccgacgctgctctacttgcccggtacgcacgcaccgttcttctggcttgcgtgggttgcgttgaagacaacacttccacgtttgaatattctcctgctcctggatgctgacaaagcatggacttggatattcttttttataagtaaacttgggtgtatttcaaagtggtggtgcgctgtcttattgcaatttctcttagtgtgcgcatgcacttgtgatgtcaaaaaataccaggaaatcaaaagtgctcgatcttactcagcatacttggtagttttactagcttatagaattaggaccaaccaccggcaatagtagtatctaagcatatcaagaacagtgtagcgtcaccagaataagagctaggcatgggatcaaagattaattaggtgggttacctgatcatgccagccgacgatgttgacctgcttggccactttcagatcctgccgaatccatataaccaacaaaaccagtttgaaaaacctcatgcacaagcctcggtgcacggaccacgtgctggcataatttctcactaatagcatgggacaagttggctttcttgggcagctggtggccattggaagaggaagcaggatcagatggatagagaccctatgtactgtttgcccgtgcgaagcctgggttcagttgtagcaccacttgtttttttttttggctagatttagatgtgttaacctattttttactgtttccaccttcattatggctggatggttggaactttgggacattttctcgttgcttgaattacgttgtttcacgccatttcaaaacggagtgtattctagaaccaaaaaaaaaaagggaggaatggagtaaccatctttgccattttggtattgcaggaattgatggagtttttttttaccaacaggaattg

SEQ ID NO: 15541 - DNA, 924 bp, Brachypodium distachyon
  Intron number 1 from transcript Bradi4g30710.1 (locus Brad i4g30710) derived from phytozome v7.0 (chr-ID Bd4; pos 364 66952 to 36467875)
acgaattcatccgcaccgatctctcccccatcgaggttagcactgattcattaatcttatgccaaccacatattcatcaccgtccatatttgccactaattcccataagtatctgataatatcactcgaaaaacgaaagaaaatttggtcctggataagttgaatatggtaagtaattaattttccgcggattatttcttttccttaaacatgagtttcttccttaggcgtcgataatgtccttgcaaagatatacaaaaagatcctagcgtcgtctaagtcaacaagttaatgttactactagtagtactacttatctaggggtgatgttacgtgtatggttgtgccagagcccagaggtaaacatcatcagcataatggcgtccaaacttatccgtggacgacttctagtcagatacagtattagatataaatcgtttgaatagtcatgtttgatatgatcctcccaaatatcaaggggcgaggaaggttcctgattgagttccgcatcgatctgtggtgattttgtcaacgtattaatcgatctgtggagtacgtaccgggctttccttcgactcaaagcaatggtcatgcacgcccggcctgcttgcttttaaagtttgacactttcttcaaatgttttgaccgttacaatattgaaacgaagaggaggaaataataataattatagacaggtcttcaattcaacggttcggtgcccttccaaggaatttgttactaattgagtcgtaaaattcaaccctgcatgaacaaattgtacttttataattctatcctgtgcatgtctaggttctctttttgtagggcaccaaaatgataattctattgcaaccgaggctgatcaattttttgcttcttatgcgatcagtccggttgctgcaagcctccgagcagctgcggttt

SEQ ID NO: 15542 - DNA, 871 bp, Brachypodium distachyon
  Intron number 1 from transcript Bradi5g02440.1 (locus Brad i5g02440) derived from phytozome v7.0 (chr-ID Bd5; pos 259 7893 to 2598763)
tcgcgctcttcaaggcctccatcctccccaccaaggtactactccccatcttctccggtgatgatgcgatggaaggaaaatgcagtagcagtccgatgattggttgtctgcttcttccccagtggacgggacggatcatcaatcattagtaccactgcccttccttctctgttttgtcctaatccccatccttctctcttgagattcgattctccccgcttgtgattatccaattattataactgcagctttccgatccccacttttgtttcttcttttttcctttaccttttgccaccttcttctccctttctatcattccgtgagcgagatcttcttcgacacactccaaatttggctagattacaaatccaccgagggagggatctaatcgatctgcaagtgggaggagaaatggaggccgagacaagcccaaatccggaatagaatcatcaatcatatgggagaacgtagtagtagcaggaggatgcaatcgtgcgagtgaagaagataaaggttgctgctgttcccctttatgtgaggtgaaagaaagctgggggagcctggagttgagtgttggaaaagttggatcggatcaaatcagatcgggggccagctttaccgtgattttgatttgagtatactcctcaaatgatccaaaatccccatcctaaatcctactgcccaaaaagactatgtttcctcattccaatgttgcttttgtttttcccttttttcgccatctcctctgttcttcttcttcttcttcctcgtcgtcgtcttggagttttgatcgattgagcgattgattgatcgattggttggtgcttttgcaggctcggtgcggcgtgtgcacccgcggcgtcaagaa

SEQ ID NO: 15543 - DNA, 978 bp, Brachypodium distachyon
  Intron number 1 from transcript Bradi5g10820.2 (locus Brad i5g10820) derived from phytozome v7.0 (chr-ID Bd5; pos 141 48602 to 14149579 reverse strand)
ccaggtcagcgttttctctccctcgctccatgagtccctatgcttgcgttggtgcgtctgtgttgttcggcgctcgttagatatggattgggagtgtctgtttttaacctaggagttatgggtggccaaattttccgtagattcgtttgccggcttagtgatgtaattttgatatatcagcaattagcatgttcatttgtgtagttgagatgtacagcttaaactgttgccattgtctggtgcagtatgttattcctacagagttgtagacctatagttctccgtgatcgtggggacctttacaattttgtgccacttgcagtccccagcagtctttacttggaaccagaatagccttgcctggtgttaaaactgtagttccacaaatatataatttagttaatgctttaaaattaatactccctccgaaaatcaacgacaagtaatatgggtcggagggagcagatcattttgcctgaagtaacttaaattattggtgccttactagttatgcaactgtgcaggttttcttgtcaattgcatctctttagtttgtcatggacccttgctgaggttcttatggtagttaataaaaaaggcctaatttatcagttagtaaaatgttcaatttccgtttctcttatgttgaatacaggagcagatgttcttgttatggaataagttccctagaagaaacagaaacagttaaattttataactgcctcggcctttctacttgctagttttaacttaattgtagctgtcgacttgattagcactttgtttatttaatttggatgtccgtgaaattcatttactcaaactatagtccttattaatacatacatactccgtagcacatagcaatggaagctaaaggatagaacattcttgttttgtcaacatcatttttctaattggctgacataatttttctgttcagccaaaagaatcatagatattctcgtctctacctta

SEQ ID NO: 15544 - DNA, 805 bp, Brachypodium distachyon
  Intron number 2 from transcript Bradi3g47880.2 (locus Brad i3g47880) derived from phytozome v7.0 (chr-ID Bd3; pos 494 52654 to 49453458)
agaagtgagtgggatcttcctctcgttttgcttattttgtgcgtagagcctagcagcaaatttgggtgctagatgagacatacacagtagatcttgttagtataaattgcttcgccctggaagctcaccttgtgaaagcactctgtggttaggatgaaaggaagtgaatgttacagaaactgcctataacttttaccctcctcaattgactgctgagcgaatctaaatatcccccaattttgtgtgagaatatcgaagttggtatttctgtgtgcactacgatctagtagttgatatctgtgataggttactaggattacaattgatttccaatccttaggaaactggttcttttagaatgtacaattggacctggagaagagtaataagaatgtcaaaggactagaatattctgcactttggtgctcgacgttgcaaatatccaatcatcttttgcatcctgaaaactggagaaaaacgttgtgggatagcttgtgattatgttgactggtccgtttttaaggagtaatgcagtaagtggacttaatttagtgacacaataggatctggatgaaaaaggaagaacgagccattaattacttcactagaagtgtaaacaggctattctgaagtttcaataatgaaaacatgttctcttctgattatgtaattctgctttgctttttgttattcattatactcttctcagttattatgtatctaatgtttccattcctggcaagttcaatatgcactagtttgattcctctaaattaaactttattttgtgtataaagaattgctg

SEQ ID NO: 15545 - DNA, 944 bp, Brachypodium distachyon
  Intron number 1 from transcript Bradi5g03510.1 (locus Brad i5g03510) derived from phytozome v7.0 (chr-ID Bd5; pos 411 4314 to 4115257 reverse strand)
cagcaagctagaagctgctgctgccagggaacttggtaagggcgcacttcctctttcgttttctcccagcatctgatgatggggtgctccagttaggctgtggtaagaagatgaactttagtacttgcgaggctcgttgagtatttgcaaccattgtggtgctttgttgaataagttcctattctgcctatactcaatcgtggatgcagggatctagatttgagtattgaaaacttgtattctgcatcacttttgttggtaaattttgaaaactgctgtcagcgattacctatgtactgtgtgattaactggttgccgattttaataaatatggagtacttttttagtagtgtaacaactaactaagtactcaggtaattttagttgttactgaggaagatattaattactgtattatctcttgagtatcaggtaatgttttgatttttctagactaacaggatcatggaatacttacctgtctggcaccacacggttttttagctacttcaaaacaaactcaagacagaacatttcagctcatcagtttcacaaaatctggcaaaagctgtgcgggagcataagtgcatagcacaaccacatcggtgtccttcttgccatttgtttctgtgtgcatctagatcaagcattccattggtgtttaaaaccctcaccaccaacatttacttggtgaatattcagtaccttagccatgaggctccaattatgttatatctttaggagaaataaggtctttgtagtgtgcaaaaagtttaagttccaaataattgtaccagatgatcggtaacttccattctgatcctttgaatcatcggcagaaatgagaatttaaaaagacttttttttccttttttattacagttcacttttataatgagattttgaaatcatattttgcagacagtggcagggagaatcacaaa

SEQ ID NO: 15546 - DNA, 839 bp, Brachypodium distachyon
  Intron number 1 from transcript Bradi4g12600.1 (locus Brad i4g12600) derived from phytozome v7.0 (chr-ID Bd4; pos 126 16657 to 12617495 reverse strand)
cagggaattttggctgctggaaagcatatacagaggtgagcagaaacttcttctgatctcttccttgtcttgtttcttcttccatggaacatttgtggcaagcttcagagttcagagtatgcagatctttgtcttgtaaagttctgtcttcttgcgatgatgtgtttttttctgaaggcttcatggtatgtgccagtctgaaagggcgtttttagctagtccattctctgtctccttcgtgcctctgttttgctactctgtcatagaaagaacaatttacagtcgttcttagaagcgataaggcatgctgtttcaaacgtgtggagggaatcaatgcctgcaactgcaagaataagattgtgttagttcaattagttagagaaggataatatttgatcagttgtattatcaaggcataggttatggctgcaaaacttgccaatatacagaataacagagtcatactttctcagagaagaatagagtcatactttagttaatatcttaatctgataaatcatattatttggtatttagttttgttttctggtgtgtatctattcaagcgataccatataattgttcctccaagtttagttgcacaaaataattggtttctacaagtgataaatctagaagaagaaaaatttacaatgatatttactcatcagaacatagcctaggaaaataacgtcaccaatttatggaacaaggaactttgatagatattttgataatgaaatgcagatcatattgctattcatggtcccaagccgtactcattgtgatattcttatgaaacagataggagataggcataaaaaaggagacttgcagct

SEQ ID NO: 15547 - DNA, 666 bp, Brachypodium distachyon
  Intron number 2 from transcript Bradi4g05820.2 (locus Brad i4g05820) derived from phytozome v7.0 (chr-ID Bd4; pos 483 4176 to 4834841 reverse strand)
caggtattatactacacgttacagtaaacattatctttgtgtaagctcgatctgaattaattctgatgtgcttgaaacatcgacacaatcataatttaacatgaatccaggttagtcaatacataaactacataattcgcaatgtgaatgcaaaaggcctggcccaagatgttaccttttcattgtttgacttcatcaatgagtatttgagtactggcacaaaattattgaaggcatattattcatttattggaagatgccttacctgcatgacagtgtatcttgttcttagagcaggagtgacagagtgtgtttgctatttggtacatttgccacattaccatttcattattgattgcacaactcgccgatagtcttaatcaacattctattgtattctgaagtcactcatttgttttcttaacatggagctatattcgtgttatgtgtgctattactagattacttcaaatcggacatgcagctatatactaaaatttaaatctttaacggggttttttgcctattttttgttcgaactccttattactcatttgatgggtgtgatttgcaatcagttacaatttccttcttcattccttaagaggggagtccatggagtagatctcgaacttcatacacatttattttgacttctgcagagcg

SEQ ID NO: 15548 - DNA, 779 bp, Brachypodium distachyon
  Intron number 1 from transcript Bradi5g10050.1 (locus Brad i5g10050) derived from phytozome v7.0 (chr-ID Bd5; pos 132 91611 to 13292389 reverse strand)
gcggctttgttattcggctttcatctcggtgtcaagttgagtaaagctcaccttctcaagcacttcctttttgtagcgagggtttggtgactgggggcataaagtagccttggattccgccagccggtagagtttcctctttctaattcatagggatctcgagtgtttctactcttcttttttgttgccccaaaattaactggttgggcagaggcactggacgaagaaaatcggtataattttttggtgtagttgtaagacagtaagagcaaccgatcatgtacacagaatagcgaggtctgccatatactatgtactaatataaatggacggagagctgatggattattatgttgtggggaaatcttacagctcgtttggcaaccgagaattcatttcatttgatcaaaatgaaatgaaatccaatttttgatagaatttcatttggttgaatttgaattccgggttgaaaaatcatgtttgtctaccacatggaattgaagagtgagagacaattctagagaaatgatggcttttagagaggaattgaggctagttatagtgtgattccatggaatttgagattgaattcctgtggttaattccgtgccaaccaaataagttgttttttggaattcaaaatgaattctacaattctatgcccaaatgatgggtgccaaaccatttcttagtccaattttgctgagcattggataatctagtcaagtcctgaactcctgattttgttctatgcaaaacagaactttgcaataggactc

SEQ ID NO: 15549 - DNA, 858 bp, Brachypodium distachyon
  Intron number 5 from transcript Bradi5g07400.1 (locus Brad i5g07400) derived from phytozome v7.0 (chr-ID Bd5; pos 988 3106 to 9883963)
ctgacattcaagcactggagcgttcactggttacaactgaggttgtgcttaattctggaccctttattaaactttaattcatttttagatgacttttcgacaaccagctaaattataattgtgaagaaagagttcctgcattcaaaccagctaaactggatttggtcccacagtgtttacttttgtctctttgtagtttttcttggattatatctcatgtaggagccatgctgttttaaccactacttatcaagtagtgcatgccttcacttcatgctgttagtgttttcaactttgcagatcacatcagatagtttagttttcatatgaaatttgccacacaaaaatgaataaggatgcagacaagtatcaggtttaccaaatagattctgtgactttgatctgataaattactagtaggaagataatttgcagaaacagagttgacatgcggaagtcagtgatatcagagactcaaaggatgaaagttaagcatagcctgcatgtttcaaaatttcatgaaactaagtttgaagaacaagattgtttgcaaaaaaaaagttcaaagaagatactccctccgatccataataagtgtctcaggtttagtacaactttgtactaagttagtacaaaatctgagacacttattatggatcggagggagtaatttactctgcccattcaaaatttaaaaaggttttcttattgttaggatcttaaacatcagttatcatgcttatgtaatattttcgcatgtaatctgatctgcattaattaacttcttacattgtttctggctttctttttctcaaaaaccacttgatttagggcttggaacattcagaagcaagttcc

SEQ ID NO: 15550 - DNA, 1028 bp, Brachypodium distachyon
  Intron number 2 from transcript Bradi5g13800.1 (locus Brad i5g13800) derived from phytozome v7.0 (chr-ID Bd5; pos 172 75575 to 17276602)
aggatcgaggaggaaacccggaagcttgacgagaagtgagtggatctcgctgattttatcctttccctgctcgaattttaggctaggtcctaggatttcgacttctgaaaagtcatggctgatgcatgtgttgtgtgatgtgcagttcgcaattgaccactcgagatagatttaactattactttattacttggtcctgaaaatccaaaaggttgcgagcttaggctctactccctccgttccataattcttgtctcaaatttgcccccaaatggatgtatctattactaaaagatgtctagatacgtgtaagatttggacaagaattatggaacggaggtagtagtttgtagctagtgctggacttcgttatttgtttttgctgcctctgtttaaaactcacagatgctggcctgctccagaacatctgaactgaacacatttactaccagagtccctattttgagatacttttttttactggtattttgagaaaaaaaatttgtccctattggatgcaataagcactatttcttgcactgttctggttgctcttgagcactttgctaggttcatactgattcccctcctccccccatgcatttcaatatgccattttaattaaaaaaaatacagtaatagattttcgaccttctgatctaaccaaatttgtcattcctacgttgtttgccataaccaatagcaagggcatactaaagtggccttgtttaggttatttacaaccatctaaaacacaagtttagcaatggctgatagtaaaatgcagaattggtgtatgcaaaaacaatcgctgatctcgaggaagggctgcaatttaagcattccgaaattttgctgcaaacatcattccgtttggtccaagtgaaaatctgtgctcttggtatatagattctgaagtgtagtgccttttcccctccatattctgtttcatctgagctgccattatgatatttttgttgttagcttctcttcattaagatcacttatttatgcataaaggatcgctg

SEQ ID NO: 15551 - DNA, 696 bp, Brachypodium distachyon
  Intron number 1 from transcript Bradi4g09340.2 (locus Brad i4g09340) derived from phytozome v7.0 (chr-ID Bd4; pos 865 2397 to 8653092)
gagcttcatcttcggcaagcggaagaccccagctggttcgtcgaatctcgtcttcctccagcttcatcgttcctagatttgattgtgggatcctacttgtttctttcccctgttgtgctaatccgaagaggacgtcaaattcggtgcctctttttacctcgctgtgtaaacagtcgagaaatttgagctttggcggccctgttgatgatccgaagttgaggtttgtaaggtcgttgattttgtctctggattacccatcaaaccctagttctcgtcgtacctcgggacacagaaaaaaacacatcctttgtggatatccttttcctttttggctgttaatcttgtcttagttatgggttcagtttttcacctgttactgttctatgggaagatgcagtcaagagccaagaaatgcaaggggcataaatattggttcgaggggtttgttctggttcattccttattgatgattcactgaggagatcacgcaacataagaagctgtagccttgtaaattgtaatgctactgctatatgtcgattcaattaggagtcatcctggtgtcgatttctctgaatgctgatatatagtgtgacacagtcctgagtttaactctcttaaggatttataatacagactagagagtttcattgttttttgtttgggatgacagagctgctgcgggagaacaagcgc

SEQ ID NO: 15552 - DNA, 618 bp, Brachypodium distachyon
  Intron number 3 from transcript Bradi4g01080.1 (locus Brad i4g01080) derived from phytozome v7.0 (chr-ID Bd4; pos 660 461 to 661078)
gctatctatcagaggtatgttttgtctgtcgtttgcagtgtcttttgttcatctgtcgacaagaaagaaaagacatttagtttccacagtcatttcagatttgaagtaacatttcttctatgtcaaccttacacatacggaaaattactattatccaccacagttagttcgtgctcaactcacagcccttgagtttcatgttgtccattctgttaatggggcttctaattttgtacaaaacttcctttcatcaatctactttgagggttctttcctttctgattcggtaattttaaaagtagctctggaagttcagggatcttttgattaacatttccaaccaagtggattttctaaaaggattagtgtaaaagagacagaggaatatccaaggatgattgtatagtttctgttggaaagaggtgacaagtttgttttatgtgattatgttatactcttgacttttgtacatcgcataactgttgattattattttcaaaataaatcatgtggttgtatctgttgtttgtgaagcaactgcttagtggcccttataagctgctgtttgatgcttgaaatacaggatccagagtgtctgtactattctgacagtgagga

SEQ ID NO: 15553 - DNA, 668 bp, Brachypodium distachyon
  Intron number 1 from transcript Bradi4g11480.1 (locus Brad i4g11480) derived from phytozome v7.0 (chr-ID Bd4; pos 112 52406 to 11253073 reverse strand)
ctgaacgtcagtgtagttagatcggacggttcacggtgagtggatggtgagccatggataaactgtgtgtttatagtagtagagataaaatgacaccatgccaaaaaattgttcttttctgacaatgttttagtattttttttcatttttccctactaaacggatctagaaattgataaataattattttaaataaaaattatgattttaattcacattgctcaccatcattgccaaattaaactacaataaaaatttcaactcaaaaagaggtggtttagatcataatttaaaacaaaagagaaatgggatagaaaagaaaaatacgaaaagaatatctttgccgtaagcccggccgccggcaaaggccggtgctgttttctcgccgttactacaacgtcaagtccacgtggccaccttctttgccggaggtcttttttattctttgccggggattttttgttttctttgccggcggcttttttattttgccgccggcaaagccttctttgccagaggcccgagaaaaagccgccggccctccggcaaaaaacgtttttcccgtaatgcctgttaggcttagatttcttgcttgctgaatgctgttgaccatatggggcatgctttgcttagggaggagctgcggcgttcagccaaggagtacagag

SEQ ID NO: 15554 - DNA, 608 bp, Brachypodium distachyon
  Intron number 1 from transcript Bradi5g08920.1 (locus Brad i5g08920) derived from phytozome v7.0 (chr-ID Bd5; pos 120 45513 to 12046120)
ctggacgatccgacaaccaacagcgtcctcaagaggttggtggccgtgttctcctgttccatgtttccccaagagctcgcgttttgttggttaatgtcagctaaaataacaatgcgtcaactatctcgtgatcgcctaagcagccagcaacatttgatcttttgaacctgttaaaatatgaactagtcacagttaacaattagagccaaccagcagaaaggctcgtcgaaaagaaaattttatgtgtactacccaatgaaatgggaattcaataaagtgagcattaaatgaaatgctggcatctcacatttctaattagttattccatccgttcctaaatgtaagaaatcctagctttgttctaagtcaaacttcttaaactttgaccaagtttatagaaaagtctaccaacatttgtgactctaaattagttttattaaatccatcatggtatatgttttcatagtatacttatttgatattctagatgttaatacatttttctatcaaaactaggacttcttacatttagaaacagagttagtgctaactaatttatgatgttcattgtagcttaggattggatccacgtcagctagcaaagcagg

SEQ ID NO: 15555 - DNA, 779 bp, Brachypodium distachyon
  Intron number 2 from transcript Bradi4g34140.1 (locus Brad i4g34140) derived from phytozome v7.0 (chr-ID Bd4; pos 398 03698 to 39804476 reverse strand)
gggctaggtaattcttgatcaattttttgctcatttgtgtatgaacaacatgaatcctttcgaatttggtcaatttgatgcttcgatcgattgatggcgcataagattccttttgctcggatgtgttcattttatgcgtccgtgtaactgtacagtatttatagtacacactacacaaccaccattcgatcactgtgttgatgataaaggggagttcctttctgcaatataacagggacccgtttctgggctacttaagcatagatttgacaggcgaattgtacacttcattttgtaagctaattttgtttaaaggttccacaagagctgaagatcgtttttccccatggcatggatatggaacgtctactacagagggcatttctattttcaattgttaggaacttaggaaggcttttagcaaaggagattcacaagaaattgcatattcttctgtataccgtttatccgaaacgtcccatttttgtatcaaataatagactctacaagtcaacagtttctttgctctctggggaatctgtttctctgattcgatcatctttagtagtttgtatacttgtgtgctattgtaatttagcactcaatggattcttactgagaagcagaactttatttccagtgtttgtttatgcactttcgtgggcagttatcacaatctcactgttcaggtctatgagatcattctgctgtttcgaagagcaatatgttgttatattcctgatgatgcacttaccctttgttctttctctgatagcctt

SEQ ID NO: 15556 - DNA, 816 bp, Brachypodium distachyon
  Intron number 2 from transcript Bradi3g53670.1 (locus Brad i3g53670) derived from phytozome v7.0 (chr-ID Bd3; pos 542 71360 to 54272175 reverse strand)
tgcaccgtgagtttatactagttgctgcaatttaaatttgcttgctgtggatgtacttttttggggcagtgctactgccatatactcacttcgttccaaaatataaggtgtataacttttgttgattgtcaaactttctagactttacttagcttataacagacggtattaatgtccactatttcagaggaagacagtatgaatatgggttatatatttcatgatagatctagcaatcttgatttggcactctaaatgttgatggtttcttctataacttatacgacttatattttggaatggagggagtatgtcatttgaatctcgtggggtgctatgctagaaaacagtgaggtgcattacacacaactgacatgtaggagagaagatgtttgaagtatgtaatgaagaagtagaccttccaaaagagaaagtaaaacctcaaaggagtcaggacgactgtaaaggcactaaacttgagagtgtgcaggatttaactcccagtgtcatcattgttatgctgaatgcttgattgtagtttgaacttctgataatattgaaaagaagtgctacacccgacgtgatgaagctgagtgccccagacacttgagacacaactgcaatgacccctttcagatgctacaacgtagttaaaaacttgtgttgcctgttccgtgtttgctacatggttaattgatcgttgacctgactacgccatgacgtgcactactttctggtgcaccaggtagaaattgatacacgggtcttattaatttgtctgagcaggtagtgagtgcaatcattcgaagttaacat

SEQ ID NO: 15557 - DNA, 587 bp, Brachypodium distachyon
  Intron number 1 from transcript Bradi4g26270.2 (locus Brad i4g26270) derived from phytozome v7.0 (chr-ID Bd4; pos 315 44852 to 31545438)
cctcctggtgctggtgcctgggtgggggatttgtgagaattaatctcgatcttttccacggactgattgattcgtgttctttttttggctgtgcttgctaattgttcgatgaaatgcgcaacgagttaaggggagactttttgttaatttggaacccgtacgaaggggagagtttgttagttagctggttggttagttagcctctccctgcggagctcatgtccagaggatcatctgaaattcagctctcttttccattttcgcacgcccgcttcgttgtataaagcttacaaacacgtttttctttttcttctgaaattcagcttgtatgtataactgaatgcaaattaattaagcaactgggtggcttatagtcgtcgttggtttggccacctctttgtttatccatgtgtttattttcttttgattttctaactgtattttagtgtcaggttgcaaactagcttgtgcttacacattttttccagcttagctagctcgatcagttggcatctcatgtttcatatcatctgttttctgttattcattcagcagacacgcgggcggcattagtactgttttggcaa

SEQ ID NO: 15558 - DNA, 941 bp, Brachypodium distachyon
  Intron number 4 from transcript Bradi4g11520.1 (locus Brad i4g11520) derived from phytozome v7.0 (chr-ID Bd4; pos 113 01225 to 11302165)
aacttgtttctattctacttgcacatccggaggtaacacaactggtgatttagtgactatttaattccatggctcgatcctgaagaagctgtgaactaaaagcattgaagtaacctccagatttgtttcagattttattgtagatctggcccctattttgtattgcttttggtttctgaacttccggattttatcggttttcatcctcagtcctcacactaccagcttttgtttataacatattgtgcaatgttaactttattcttagggttctaatcaaaattcttttcagttattctggtgatttgtggttcaatcagatcagtaacaaactaacaactgactactgtagctgccaggctaacctgaatgggaatttgcagtatctttattaatctttaaaatgtgttcaattctttggttgctctattgtcattagaggcttgtatctgtggcatcatcttatgatatcataagatatcatgttagcatattactttcttcagttattctactgttttatgtaaaccctagctggcaacaaagttttgttgactattgcccattgtatgtctatcccactgtatgtttttatgtgatgtgatagtaattatttgaatcatgtttcttgtatatatactccctccgttccataattcttgtctaaaatttgcccaaaaatgaatgtatctattcctaaaaagtgtctagatacatgtaatatttcgacaagaattatggaacggagggagtatgtcacttagaaagatcgttcagaaaaagaaacatacaaacaccttccttctcctagttggtttctttgtgtgctccctggctcactatggcatcctttgaaatgaatgttatgtcagcagttagcacttcgtgttcattattcatctctgtaatatccaatgtttcatggtcaggttgatatcttt

SEQ ID NO: 15559 - DNA, 664 bp, Brachypodium distachyon
  Intron number 1 from transcript Bradi4g01820.4 (locus Brad i4g01820) derived from phytozome v7.0 (chr-ID Bd4; pos 119 2148 to 1192811)
ccccttctccgtcggtgacagcaacacgctacaaggtttcgggctgacgctgacaaaactgctgctgaaacactgaatatgtccatgctcgtgcatttgttgttcggtcactttggttaagaaccgacaactggacaaccaaaattccggttctcctttttctacattaatttcggttcctatttttgaagaacctatttttttaaaacaccgaggaaccgaacgcctcgcctggtctatgccccccctttactaagtacagtgagttctggtgtgggatattatatctctgtgcttcgttaggcggaatccctagtagttttgcggataatcatggttgatttcttcagctttggtgctttgacgttctgataatagcaatatcgaatttaatgtttccatattgtataatgagatgcttgtggataatagattgatcttcctaaatatttgatgtaggagtgtttctatcttcttgatgtgttcctaatttgctatcgattccctccgttgttgtagttctaattgcttaattactgtttggatcatcaatagcgcacttattccttgccaggaaaaaaaaaggcgcagtaaaatcttaccaagcgctcatttttttggcttttcaggacagcacttgcagtcgctttcataatatatatat

SEQ ID NO: 15560 - DNA, 737 bp, Brachypodium distachyon
  Intron number 2 from transcript Bradi3g53930.1 (locus Brad i3g53930) derived from phytozome v7.0 (chr-ID Bd3; pos 545 26264 to 54527000)
acctctgcaaatattacgttcattttgtatgttttgactgcttaaaagttaaagtcatgattggttatcttcaatatggagtgcaagtctgaggcatggtgtgttgtgtccttttcaagtttcttttgctccaattttgcaaactctgtgatagggtgccttttgactgtataacatgagaaatatgcatgtaattcttgaccttagtctctgtgtaaaatactgcatggcagatctacgagtctattggtgcagttaattgctaggcattgctcaagaaccaaagatgcagtcatacattggcaacttgtatgggttcaatccccttggggaactcgtggggaaatttgcgtatgtgcctatgtgggctatgtttttgtagacattttcatgcccatggttcactacctggctttagtttgggtggcgagaaaggagagggcgtgaatgcatatgaaaactaaaataatactaactaaaatactgtctgaaagtaatgaaatgctaaaaactcatgaaccaaaccttttttggacagtcgcattcatcagttgctaggtactttggcacgcgttattgttctaaggtgtttgtggaaatgtatttccgtgattaattaatcattattttatttgattgagttatagtttgatctgtttgttcatttagcaaggcatatcccttttattatcagtactctgagtacaggcatgctgttttgcaggacacatatagcg

SEQ ID NO: 15561 - DNA, 544 bp, Brachypodium distachyon
  Intron number 1 from transcript Bradi4g01470.1 (locus Brad i4g01470) derived from phytozome v7.0 (chr-ID Bd4; pos 975 877 to 976420 reverse strand)
aattggttgaccgtaagtcacaaaccatatgtggttgtgttcaagaaaaaaacataatgattagtgagtgtttgatgtgtgtgcaaactcatagtaccaatgctcatgctcatgtttatatatgtgctgtactatcatgaacaagtttcgaattatgcatgccttgacgactaaaccatcatcagatgcaatgtacccgtgcagattctctgacttaaggcacttgcctttttgaggctgacaagtggcactaccggaaaacgtggcgttgccggcggcaaagaatcctttgtcggtggggctccgtgcggacggtctttgccggcggccctgacgaaaagtcgtcaacaaaggctttaccgggggcaatatataatgcctttgccagcggccgtttccagtagtgtgggttccacaacaagctggtccacttgccgaactcggaaaggcaggtgccttaagtcaaagaatctgcactggcattgtagcgcttccaagcctgtaaattaatccttgactagagccaaagccttgcttaccgcca

SEQ ID NO: 15562 - DNA, 661 bp, Brachypodium distachyon
  Intron number 1 from transcript Bradi3g52420.1 (locus Brad i3g52420) derived from phytozome v7.0 (chr-ID Bd3; pos 533 17472 to 53318132)
ggcacccgtacgtcgttagcttgctagctgtcacctgtcagtcagtcagtcagatctacacagattaattcatgatcactgccatgaacatgtcttgattgatttgatttctagatatatatacacagctttccatctcccgacaagtgtaattaagcatggagctccatgtcgtggaggaactgttcaagattcgtaatttagggaaagcttgcagttccattttcctgctgccgtgcctagtttttcctcattctgcaactcccaagaatgtaaggatcgagagttctcggttgtgacaaagccagcaatattttgtagctatgggtaaacaaagaaaaagttaaattaatttgtgtagaaactttctttactatgcctatatgtgcgtgggagtatatataagactgtgtataacaatcatgcgtacaattttgtcctctagcctctagggaaccaggccaaagacctatcatctttatcattatagcaaaccctaggtagttttcttttcagaattgagatgatcaacaaacacatgcatgcatgtggttgctattgctcaaattagttaagttctgtgtggacaggggattattgcttagttaaggaggtggccggttttgtgtttatgcaggaagaaccaatcaaggaaggtggt

SEQ ID NO: 15563 - DNA, 445 bp, Brachypodium distachyon
  Intron number 2 from transcript Bradi3g59650.1 (locus Brad i3g59650) derived from phytozome v7.0 (chr-ID Bd3; pos 587 78126 to 58778570 reverse strand)
acaccgggaaggctgatcgtgctacagttgaacaggtttctacatttttctttgttgggtgatgctcattgctcattgcattatctgctttggaatcaaacctttgcacttgtgggttcccgtagcaaattaagcatgaactctgttcccctgtcaccccttttgctctcctgtcaaattctcattcggtcattcctgctcctgtttcacctcctggttcttacctcgttgtatgccttcacagaacttccagtggttataggcagggcatgtttgttcctttttccacgtagagtttatgatcaactcgaagagagagaacacgttttaactgtaccttgtgaataatatttcagtgaagtagttttctgaatactagacattttttgttcaagatttttaacgtacattttttgttatgcaggctattgacccaaggacacgc

SEQ ID NO: 15564 - DNA, 1020 bp, Brachypodium distachyon
  Intron number 3 from transcript Bradi4g11100.1 (locus Brad i4g11100) derived from phytozome v7.0 (chr-ID Bd4; pos 108 63565 to 10864584 reverse strand)
aactgcaggaagctggagagcttagaagtatgttgtctcaactactaaatttatttatcaagacatttttgcttagcgaagtaagttttagatgagctgaccagactgtttttgttctcaaaaggccctaaagaagactttcaaaaaactggaccatgatgtcaatattcaagacttcttaggctccgggtaattctgctactatttatatggtctatcaggagagatacatagtagcagaactgcattgttgtaaagaaagattatcactctacacttattttgatctattgcaggggtcagacggtcgaggtacatttcgacatatgcacagctagaacgatgaacagctcatggaatttcttctttctgttctttggtacctgaggctcattgtttcaattattttacaggaattagcgagccatcttggcgctttgcaatgtcaaatggcagatgttcaaaagcgtctcaggtatttaattagcatcaattcacttaatcagcaccactatttggctgcattattgattcaatgtaataagtagaggaatatttgttgcttgtctaaaataagagcatatctgctgaaatcttctcattcagtgctgtctatagtattgttttcatggcacatgatcttcataaggggccttctttacacatattttgcattcatggtagagttaattgtagcccttcacaaagaaaagtgaggatgtaatcggtgtggcatactgtttcatcagttattggagcgaacctgagaaggttgagaatattgaccacataagagcgatggagcagtctctcaaagaatctcttaatcgcatcggcattcataaggtagagatgtccctaaacctttctaattaactctgctccatcttaatatgcaattagcatgatgtttagcctccaaagtataacccatagtaaaatcatgtaattgaactaagaatctaatctcataatgcaatgtttggatatgtttaggaaaactttgcaaagcagcatcta

SEQ ID NO: 15565 - DNA, 1031 bp, Brachypodium distachyon
  Intron number 2 from transcript Bradi3g54360.1 (locus Brad i3g54360) derived from phytozome v7.0 (chr-ID Bd3; pos 548 42250 to 54843280)
atccgcaaggatctcgacgcccaaatcctctccaggtagtagtagttcactgacccctcctttgcccacccggaaaattaggttacttttggctgtttgattgtttcactggttgtatttggtgagaagttagcggtttcatctagttgttggacttgtttgtccggattggagttttgggtgaatttgaccatgttcggagcagaaaatgtgttaatatctttgtggtcggtagtgatatgtgtgccttcccgtgttagatagcctatttactcatgctaggttatgttcatgctggaactaggtagcaattgagctggtgtggtcgtgcctgccttacaaatataggtgttgttttcatgggtttttgcaagctgtcctttacaacaaaaaagtaatgcgaaacttgttaatcttcttctttaacttcaaatccattgctcctattgtcgtttgcattcaattcgagttgttatgctggggatcatcagctctattgtggtaacagctagtctgcacaatgttgttttctccttgtgccatacatgcactaataatataataaccagacattctgtttgttattgctatgcatggttgattgtatctaaaattttgtgtatgtcaatgaattatcacaatttataaattttgtgatcatcaagtacagttgttactttaagatggtatttattatactgttcaatttgaatgggtcactttgaatgcctgtatctcctgctgtttttgagtgcacaatcatatcttgaattttttttcgtgttcacatgtcccttctaacaataagtagttaagtacaacaatgcgaggacaaaagtaagcagaataagcatgcacttgagcctactgttcttttgaacaatctgcgcacttgtttccaattggctttcctaaacatttaagttgataagtgccttttgacttttcagtctaacactgaaaatatttgactgagggatttctttgttgccacaggttccagaggcccccaggtgcattaccatcatcta

SEQ ID NO: 15566 - DNA, 772 bp, Brachypodium distachyon
  Intron number 4 from transcript Bradi4g11440.1 (locus Brad i4g11440) derived from phytozome v7.0 (chr-ID Bd4; pos 111 50718 to 11151489 reverse strand)
gtctgaggtaactgacatctttatgattattgattttatcctagcattgttgtgagctgtctatgacaaaacagaattgtggattagtacatgcatatggatcttctaaattcactacattgtttgtagatgcatacagtatcttgtacattaatttggtttgtttctctttatatgtgagttggtatctttactctaatgaaggtttcaattggtggtggcaccccatcactttgacaccacaccacctgttaatttggcacaaaccatttagattagaaagtgtccagattatttgatacaagttgagaaatgatattacatcattttcttaaatcatgtactccctccgatccataataagtgtcgctgatttagtacaattttgtactaaagttgtactaaagccacgacatttattatggatcggagggagtaatatattactgtaatttttattctatagcaatgtacgggtattgtgctagttaatgcttgctcagttgtatgcttgttacaacttaaataattcaggttgtcagccgcatttcaatggatacccactcgtttgtttcaggaacccgtacccatatactatttgcatgtactacctggatgtgttttgctgcataggaaatgcttttgaaatggattttctatgttgcacttggcatgaagataatttttattttgtaaaggaaaagattctaatgatagtgttgctttcgtttaacctaaatgcagatcgaagtaaatatccataatttttttg

SEQ ID NO: 15567 - DNA, 631 bp, Brachypodium distachyon
  Intron number 1 from transcript Bradi3g47320.1 (locus Brad i3g47320) derived from phytozome v7.0 (chr-ID Bd3; pos 489 52786 to 48953416 reverse strand)
tggaggagcaaccgaaaatttccgcacaggacaaggtacgcatacgctatattccctatggcgggttcaatatgttgaagctgggtattcatttttgagatttttctttctaaaaaggtttagttctagtcctatgactattacggaagtttagaatttgtgctcaccttcaatacacaacttaattttggcccctcaaataccaaaaccatagtcgtggtttctttgcccccccccccccccccccccattgaaagttgttttggtgatgacgtggttccgcacaggtgggcaaccttatcagcacaaatgaataaagttctttttgcaataaataaaactttaactttttaacaaactaaaatatgtatacaataaatatgattatgattggcaaggatagtctttcaaattagaaaacttgaacgaacaaaaaggaaaaaaaaaactgaagattttaggaaaatcatgaataatcgataaaagatactgaaaatctcagaaatttaaataagaaattaacccttttaaatttaccgagctcactgttctttcgtctactccttctgattctaaattcttgtgctgattgaatgtcagctgtgcgaacaaactaccacgccatcgagca

SEQ ID NO: 15568 - DNA, 546 bp, Brachypodium distachyon
  Intron number 2 from transcript Bradi3g56240.1 (locus Brad i3g56240) derived from phytozome v7.0 (chr-ID Bd3; pos 562 07915 to 56208460)
gaggttgtcaagagcatccgccgtgggagcaaagggtttgtatctcaagttcttctcgtttactatcgttttgtgcttgcttggtaatttgtacgggtaatgtgaggttttactgtcttcgggaatgtttggtttaattcctctgttaggactggttgctagctgtgtgcggtaatacttggttgtaagcaatcaacacataacagatattttcactggcgtgtgccatatgtccagtagtttagtgcatagtgtataacgtgtcacagaaaacatgcataattacacgcaacacacatacgtactgaaaactgtagtgttgctattgttgatgatggaattgtccatttgccgcagcatgaatttagtaaatattgcaaatagttgtctgcttattttgatttttcttgttgcctgatatattggcatattggtgttgtgtttttacaatctaatcattcatttgcttcacttgcataatgttattggcatgtggttttggtctatgtaggttgtgcgtaatcgctggaaacatctctcctattg

SEQ ID NO: 15569 - DNA, 935 bp, Brachypodium distachyon
  Intron number 3 from transcript Bradi3g56240.1 (locus Brad i3g56240) derived from phytozome v7.0 (chr-ID Bd3; pos 562 08518 to 56209452)
tgacatcgaaagaggtgtgttgcattttcactgcattatttatgtttatttctcttgcaatcataagagtcgtatcattatcagaaaaaatcttagatcagtcagagtgttctgtttctttcttaataacatgaaggggttgaaattttccccagttgaaaaccatcttttccctctacttttcatgcattgtaatgaagtcactgaacagggagaaatggttccctctgtgaggacgtaaaaactaaggagcatcacatagttgtcatttgcttttctagtgttctgttcaattagctgtgctgcaactaatcaagaaaagacacctcttgacattgtgtttgtttgctttactagggctgcatttgcaccttatctagtcttatcttcttaatcttgtgtttgtacctaaaattatcttgagttgacatatctaagatggttgatgtacttgccagcttatcagtctggagcagagaggtctgcattgggcttaaaacgatcatttgagtcacccgttctccccagcatgcctgatgattctgttttggtatcattttttattattgaatgaagcggaatttaagtttcttgcactttgtccccactcccattgatttggcatgcattcaggataggtgtgtatggtttccttgaaaggtctgtattgtacttgtacataataacaagaaagcatgtaatggtaaactctcatatttggcattacatacgccggctaccagtatatttgcctttatatcgcccccaaaagaaggaaaaacagcaaataaggtagtaacgtagtgacattgatcacttaccattgtgattatgtctgaatggtcaaatggtcaagataccgtaagaccttagctgattgtggttgccctccctttacaggagcttgcaactgcgggaaccaccaagaggcctac

SEQ ID NO: 15570 - DNA, 693 bp, Brachypodium distachyon
  Intron number 3 from transcript Bradi4g07190.1 (locus Brad i4g07190) derived from phytozome v7.0 (chr-ID Bd4; pos 610 4909 to 6105601)
cggtatagctaggctttctcttgctgatctttcaggtgttctttggttatgctatttttgctagctgatgcaaaccaaggcatgtagttgtaaacttgtaatataacaagtgatagttcggtgcatcatgaaatggaagcggctttgtatggtgcgtgtgctattggttgtttaacgctatcacagtttaactcaacattgtccaaattcagggccaactctgacttattaataaaataagtcagcaaatagacctgaatattagcaattttgcatcgcgtaagtttcaagaaattgttttttttctcttttccattgagtacttgtataaatatttactggtttatcttttaagagatttaagttatccataaattgaattttactattgcttgtgaatgcatgtatagatttgcattcaaaagcgtttggggaaatgttttggtgccgctactggtttcctgaaactactcacctaacgaccctcaactgtctcaatgatccttctagtaaaattttacatcatcacaaatgcatttatctgtttgtctagggaatttgagagaacattatgatgttagattaatctgtttgcaaatgattagcacaatttgttttgttgggtcaccttcatcttcttaatctcgtaggttaagatgtcattaatctaatttgtttctttctccattgcag

SEQ ID NO: 15571 - DNA, 1002 bp, Brachypodium distachyon
  Intron number 1 from transcript Bradi3g51020.1 (locus Brad i3g51020) derived from phytozome v7.0 (chr-ID Bd3; pos 521 28420 to 52129421)
gtacgacggccgcggcgcgctgatcgccatcttcggtgagtgcacctcctctctgcttctccgaccaagccgatgcgtgtcgctgcactcagggttggctgtagttgacttcaccgttaagctggatactggatttcgccgaggcggtagcatttctgttcgatccgtaggccatactttgatctgtgaaggtttgagatgcggccgaattctcttacatcatggcgtcaagtggatagtgggcgactacattgagctgtgtagcttcagttttctctatgacaacaggcttttgggatttttttttgagtcattacttgagggctgtgggtttctcctagttcagtcccacagctactgccaattgtttacccggaaaaaaaagctattgccaattgtgtagaacacatctgtattttttcttttgatacttgcagtttatgcccatgtttgtaatgtttgtctcatgtgggacattgatggtccatgaaagggctaaattgacttatatgggagctgaattgatgtttaatataatcctgtttgcagcttatggggatgacttcgcttgctagttatctggtccgttcgattgtaacagcactttcttggtttgcatgattgtagtataacatctcattgcatgttgccatgttggagcacagaacttagttgcctcttttcactatagaaacacaacccttttttattacaaatgacctgctccagcgagtagtcatgtaaggttaagatagcatgctgagtaagctcacagttaagaggttagtaaaaatttacaattcaagtggatggtactttggaagttttctcattttgttacatggttatagcgagtcttggttcttggatgatctgtgatggatctgactctggcatgcgattaaataaattttaggatttggttgtcttcgttgttttctgctgatttgacttgcatgtgcaatagattctggagttgatccggcagcagctggattgcag

SEQ ID NO: 15572 - DNA, 612 bp, Brachypodium distachyon
  Intron number 1 from transcript Bradi5g04080.1 (locus Brad i5g04080) derived from phytozome v7.0 (chr-ID Bd5; pos 528 0380 to 5280991)
caggtatgcatggacattagatttaggatcaggtgtacccccgcagcactgcccgttacattaacgcaaagcaaaggaaacaagttgcttacatttcacggttcacacaacgtggataaaaaatcaacccaaccaaatgaacatactatgactatgcatcttgaaggcaggtacatcctgaaacagtatcctcccaccgcgtctccggcagaaggtaggaccatagacggattgaaacagtaaacatgcagacaacctcaaaatataaacaacgacattgtagtaaacatgcagacaacctcaaaatataaacaacgacattgtatccgttaaaaataacatcatttcaaatctttcaaatagtccaaaaaaaataaactcccacctgaacgtgagttttattaatgtttttttgttatatccccatccaacgttcagagacgaaggtaagttgaaagaaaatactccttctgtttcataattcttgtcgaaatattacatattctagacgctttttaaacataaatacatccatatttggacaaatttgagttaagcatgtgctatatgtattcaggtgtggccgatcgagggcatcaagaagttcgagac

SEQ ID NO: 15573 - DNA, 359 bp, Brachypodium distachyon
  Intron number 4 from transcript Bradi3g54470.1 (locus Brad i3g54470) derived from phytozome v7.0 (chr-ID Bd3; pos 549 42239 to 54942597 reverse strand)
ggtaagtggtcatccttccctaccttacctggtagccagtgttgcttcattcttaaccacaattgtaaaaaaacagaacacatttttactcccaaagatattcctgaccttagtggcacaaattgcaacttttaccgttctcaaattatgcatagttttctgacaaaggtcctgagtccatcatttgatttcaatccatggctaatttattacagaaaacattccttattacatgtcttaaattcttctgatctggcaaagttaatcgatgttcatgcatttctaatgttcatgtgttgtgaacttgtgataccacatctgcaggtgggtgaacttcacaaagttcctgacgggcgcgt

SEQ ID NO: 15574 - DNA, 810 bp, Brachypodium distachyon
  Intron number 1 from transcript Bradi3g54470.1 (locus Brad i3g54470) derived from phytozome v7.0 (chr-ID Bd3; pos 549 42989 to 54943798 reverse strand)
ccgcgggtgctgttttcttctgcacgcacttcccggtcagtactcgcatccacctcccccccctcccctcccccgctccctgcctccgccttcgtcgaatcgattagaatttagaaatactctgttaggacctatctatccgatctggatcacgcttcgtgattaattggagaactggagagggggtgttgctttgggctgttctgtaggtatcgtgatcgaattgttagatgcgtggctgctgtcccgtaccagaattcggtagccaattatgttttcgttccctcttccagggggagaatttactttgggatgcgcgtgaaaaatcatggaatgaaatcattctttctttacaagcaattcttcgagtcagcactcagcacagtacgccgatcacaaaattcgatcctgcccagtgcctacagcccacttgctctggatgactttgcttttgctgcattaaatatggctgttgtttcgccagctgccgcctccaagcctgcaatcaagtgtggatctgatggagctagcaattcatttgtccaaggcacactaaaaacagggactggttgtgtgtttgtttatacatgtcgtgagcattaatctagatagattattgtgcagtaacaaatgatatggttttgattcagtcattattctctttccgcctcgacaaatcatatggagctggcaattcattagttcgagatcatgctgttttgttacagactagtatgcctgtaatgtacttttgctcatctgcctttcttccattccagaaattgtatctgaagaacaacaaagagaact

SEQ ID NO: 15575 - DNA, 824 bp, Brachypodium distachyon
  Intron number 1 from transcript Bradi4g40470.1 (locus Brad i4g40470) derived from phytozome v7.0 (chr-ID Bd4; pos 448 71340 to 44872163)
cttcaactccacacttcctcccaagaaacacacaggtatgtccgtatgtagtacgtttattcattagaaataaatacaaccaatatttattatctaccagcacaaggaattacgctaattgctagaatttaatttaaaccaagtgtgatttgatttgcctaatcttaagtttataacttcttctctgtatatttctttcctatccccttagtgctcgaatctccactcgtagcatagggatcactgcaccatatataacaagtatgaattggtttaagtgttgtcgacagaacacatctcatacagacttgcgagagtcaccacaactgctgtgccagccgcaaaagctctcggcaaaaggctaggccggtatagcgttatcaagacggcatggggcttattaggctcggtttgacattgctcaaccgtgctgcattaaacttattttattatttgctacgaaaaaatacacacaaaagtagaaaaaagttggttagccaaacacgaaaacagtgaaaaacgagtgaaaaaaaataggagtatggtaattcaccgcaatgccaaacgagccttgaatttattttgcaagggcacaaagcaaccgtagatagtatcatactctcgttatattacagaaaactctcgttcttattggatcacactttcccctcgcaccaacttacaacctctcatgtacagcaatgcaaataagtttcactgaagctgtgcatcttgagcagagtgcataaattaaaagcaatactccattaattatttcataacctgcagcttcgacaggtgggggcctaatcataacagcgata

SEQ ID NO: 15576 - DNA, 453 bp, Brachypodium distachyon
  Intron number 2 from transcript Bradi3g53040.1 (locus Brad i3g53040) derived from phytozome v7.0 (chr-ID Bd3; pos 538 20473 to 53820925 reverse strand)
tgcgcctctacttgcagctgggcgctctgttcctggtgaggcaatctacatcacactgagttatgaatagttctccatacatgtatggtagggctggaaaatactatttatagtagccgaattgtcactgtttaactgctgtgacgaaccgttggggatggccaatgagcaatggtgttattaaacagactacatgctggttggtttatattgtatctttgcttattattaagtgctcttgttccacacgcaatcgacagcatgctactgtttctgcttgcttttccacgctatattatcctttgcatattggatattaggatctgatacatatcagtagttgctacttgatatacacttttgttgtttatgtgagctattcttaagttgcataatttttctttttcttctgctaatgcctctttgatctatgttaacagagttgggagccaa

SEQ ID NO: 15577 - DNA, 683 bp, Brachypodium distachyon
  Intron number 2 from transcript Bradi4g26380.2 (locus Brad i4g26380) derived from phytozome v7.0 (chr-ID Bd4; pos 315 99628 to 31600310)
caatatcatcactctatcccttcttgtatttcgtatgtatatatgttaaccatctctctcaccttatagcttggtttattcaaacttacttgcatgtgaatttgttcataccgaattttaaaaagaataatattgtagatagaaatggtaatccattactgtatatgcaaatatcttgccaccatattagttaccttgaactgggctctaatccatagaaatggtgaaacatgaggcatattcaacagaatcagatccgcacagtcttaatcttgaggtcccttcagatttgaaacgtgaaacctggtgtttattaatccagagtgcatcagtgcaagagagataccataaaacagtgaaaccttaatttgctacaaaacattagtaataatgatacaatagagtcatggctccatgcaagtcagatcattgaagtaaattgtatttgatccctttccatgaagctccttaacaagaaccattactatttgggaaactcgatgcatgtcctattattcatatatcaatatcgatgagaaaaaactttgatttaacgtcccagattattaaatggtatatgtgtgacccttaaggattgatacttttaagggtttcttcagctctcagtgaaacagagttggagtaagctcagttttgacctttcttgaaaacagatagaagac

SEQ ID NO: 15578 - DNA, 737 bp, Brachypodium distachyon
  Intron number 1 from transcript Bradi3g55370.1 (locus Brad i3g55370) derived from phytozome v7.0 (chr-ID Bd3; pos 556 27830 to 55628566 reverse strand)
cccccatcttccgtaaagtaacagcaaggaaaaaggtctttccgtctgttccatcttctgaggcactcgaagttgcgtttttctttttttttacatgctcaagcttgcgattgtactgatgtgcctgtgatgttaataatcctgaccactttgcttgttaatttacaccatttttaaagggttctaaataaataacatgtagctgataaataataaaaacatgtgctaaaacttggctgttatacagaagagaagagaaaagtggaaaccagctcaaaaatttatttctatgcaacttgctagaagttcaccatgggacccctgtgttcaaatgcacctatatatccctcctgaaaaaaagtacctatatatgtacccatgcattcaaatccatcacatatccgcaagtgctgtttaaatacacaaaataggtgaaaattttctagtagcaatctgcttgctgttgtatttctccaaatcttcgtaagaagcagagacatagacactcactctttgagtaatactctttcccctttatgtgtaaactttcttctgtttgtccagtcagatggttttggaaaattacagatatttctcttcctgattgagttatgttcactcaattttctgtcactttctgtgtaaatcttgtcccattttcaattttggatcagaaaccgacagttcttttacttgtactagatcatcacctgcttggtgcacagcgactggacggc

SEQ ID NO: 15579 - DNA, 562 bp, Brachypodium distachyon
  Intron number 1 from transcript Bradi4g35020.1 (locus Brad i4g35020) derived from phytozome v7.0 (chr-ID Bd4; pos 405 44522 to 40545083 reverse strand)
caccggcttctcctcctccgaactcgcccgccgaggtacagccgccgtctgcgctactctgtgatgtgctctgtgcagtgctattttgcttccttctgtatgagtccttggtattttaccgtaattaggggcttatggccttagcttgttaatgaactgcttatgtttcttttattaattttgtgacactgaattctagcgctgctactattgagcaagaaaaacaaactcacaagcggaagtattgtttgccccggttctctggtgtcgggctcaaccgaaccggataattgtgatctaccgcaatgctgtcagacattgccatttgactcatgcttgtttgcttcttttctttcttcgagaaaaaaaaagtgttgcagaaatacagagcatgtcatgctcagataaggcagatggctgctgttcttttctctttttttctcttcttactttgagcaaaattggcaaatggttgcatgtgagtggaggtttttgcaagattgtcatgatgggtcgtcatagcctcataggagtgaattttgatatttgctttcaggcgtca

SEQ ID NO: 15580 - DNA, 497 bp, Brachypodium distachyon
  Intron number 2 from transcript Bradi4g04820.1 (locus Brad i4g04820) derived from phytozome v7.0 (chr-ID Bd4; pos 393 0724 to 3931220 reverse strand)
tgctcctcttcgcctgcaggaactgcgaccaccaggtttctgcttcttctcttctcagtccatccaaagattccacttcttctcttcctggaatgttaccatgcatatatgcgtctggaacaggatgaaaagagcagcaaacttgggtaaagttgaacaaaaaagcatgattattcattccagaagggaaaaagtggctgaattaatgtggcatgtaaaactgttaaatctttgggtagcattaaggagtgctgtgatgtgcccaggaagaagtgagcttgagcagattggatttaaatagaaatgcatatataggctgtcaagtgtcaacataagtaagatttgctcagtttaatgtattgccaatttgtgatatcaaacagaattgcttgttgcttcacttgtacaacgtactgtcgttaaattcgatggtatatagcaattaatcaaaaacctgaaattgcaggaggtcgcagacaacaactgcgtctaccgga

SEQ ID NO: 15581 - DNA, 997 bp, Brachypodium distachyon
  Intron number 1 from transcript Bradi4g06710.2 (locus Brad i4g06710) derived from phytozome v7.0 (chr-ID Bd4; pos 559 9189 to 5600185 reverse strand)
gtcctcgtcggcctcaccgcctaccaggcaagctcggcttcttattcgttaaaactttatgcttcgaaacgcgactttactttggtcaagatctagagcgggtttggcgaaattcctggccagattgtgctgcagtttgtcaattttatgattatggtgaagagaatttgggcgggctttggtcaactgtgcagttcttggcgtctttccttgccttattagatggtcaactggaggtgctaggatagctcgtagtaggtcagcttgactgggagctagatttttttttcctcccacacaatctcagttatttggatactagaatctgtcgaacatacacccagaaattcaacattgtgtagaagaccgagatatttggttaaatcattcaaagttgctgggcttctcagttttgcttcacttccatgttagttagacgagaaaaaggtatttcctttcctatgttctttggtatcgtaaacttaatttgcaagcagattattcgtccggttagaatgttaacacaaggctcttggtagcagtgatcatatatggcacaagtttgttcctttagtaagcgagatcagcctggtcagggatggcatatggattgttgtagctttagcgccccaaacccccatgattgatggatgatgcttcaggctgtaacaattcttattttttaactgaataagtagaaattatggtcatggcatgctgtattgcttcaatgattatctggtgttatgcattaatgcaaccagtcttctgatcccagtatagaacaaacttgggtctattaatttagatgttaccgctgtaacaactgctcataattggtagaggttctagtctgtagagtgacatttacgaaactgatgtttggtttagtttcctggacaatatattatcttcttgttgatttactccactgattttttttctttgtatttttgtatcagcttatctgtttatccgatctggagtttgactatat

SEQ ID NO: 15582 - DNA, 828 bp, Brachypodium distachyon
  Intron number 2 from transcript Bradi4g14950.3 (locus Brad i4g14950) derived from phytozome v7.0 (chr-ID Bd4; pos 155 68784 to 15569611)
tcttcttcctcctcgcacgagcgcctccaccgcaggttgatccccccttcgattctctcgctcccgaccgtttctcctcccatcacaccacgaacggattccgccctttagctccccgtttcataatcttccccaatccgtaactgaggcaaaaatcacgccctactgggtcctccgcccatgctggatttgtccagttgagtcgattatttactgtatcttcgtgccgtggtgattcactcactggagcatatcgcgtccccaaagggggtcttttttgttaggcgagggaacagggcgtccaattttctttgtttgtctcttcttagaatgaaggggatctgcacgtggggtctattattgttttcgttaagcagcctgcaggctattgatctatttttgctacgccctccgatcctttcagtgcaaaaatttgcactcaaacaacgacaacaatttaggatcggagggagtatttgttaagcagtctgctggtcatggatgaactatgtttggtaacattaatgctgtatgcttattggagattttgtatggttgaagttgatttcatcacgtggtctgtcaatctgtgcaattattaaaaagttggctgatttggtcggttagctgatttgtcttattttgaatagaacatgattagatctcatggtatgagtagttacttgcatcttgtaccaaacatgtcctgattttgtgccttttcaaagtaggctgtttgatataataagatggtactcctacaatcatatgcatctggtattctggttatcatattaatacttgaacttgcatttttgttggttcaga

SEQ ID NO: 15583 - DNA, 1031 bp, Brachypodium distachyon
  Intron number 1 from transcript Bradi3g60130.1 (locus Brad i3g60130) derived from phytozome v7.0 (chr-ID Bd3; pos 591 56487 to 59157517)
gcctcggccacttccccgaggccctcacctaccaggttacaaccatcgccacgcatctccccctctatcaaggccacaacacctgcatttgatctgatcggatgcgtcatctgcttagcggcatgcttgggttaagttgtataatttgaaatttcggttgagttctggaatgggctttattggggggtttcattgtatcggatttgccttttgaatcaatcgaaaaaaaaaggttttacttttgaattccacgatgcatatgtacatcaaacattgatctgaccatgtatttgaaatgttcagtgcccaacattagattatgttgtactagtttggtattactagagccccgcacgttgttgcggaaatttttagttaacataaagagtattcaaaattgaaaacatataataaaattgtacattcttcacttagtgggaataacttgatggaagtaacatgcatgcatgtgcaaaaatatgagttttccactaaataggtgtgaacaaattaattatgtgatgatgtggcatgcttgcatgtttagagaaatcaagtagtgggttgcttctacttaaatatagaagattcgctaaactgtcacaattgggatggagcgttacctgtttcagtatgcactgtagcttggtccatttgccggccgcttattgtttgctgcgaatttgttaaattataacaatccaaacttgacactttgtggcttgttagttgctgatgtgaatgtaacacctttggccctgatgcaagttggcccatgtgtgtctggctgcttctgctaggtttaatcccacattgttagtttaattgcattaaatttccatggtagacttttctgtaaccatccatacacaaccaggtttaaccctttttggtgaattgaagctaccttgttaacccaaaatatctggtttggtttctaattcacgaactcatgatctcatgtttccttttccttgatgttttcatgcttcacagaagaagcacctacaaattgccaaggaatctgataa

SEQ ID NO: 15584 - DNA, 791 bp, Brachypodium distachyon
  Intron number 3 from transcript Bradi4g04920.2 (locus Brad i4g04920) derived from phytozome v7.0 (chr-ID Bd4; pos 401 6436 to 4017226 reverse strand)
tttaggtaagaattacccttgcttacagttagtgatatgcctctcttatggcagtaaggttatcttttgaagcaaaaggaaaaaaaagtaaaagtaggcctttttctatgttctgtgtaggatttttgtttgtaagacacagattttttatgtaggttgttctcaccactgctcgagaagcacattttggaccatctactaagaagcgtctactgttttgttattaccaaaatttatgcatgaaggagcagtcatttcttttctccttaaattttggttttggattttcaggcatctttcctttataaaataaagctctactatgtaatgctactccctctgatccatattaattgtctcaaatttgcccaaatatggatgtatctacccctaaaaagcgtctagatacatgtaatatttcgacaactaatatggatcggagggagtagtataatttagcaggcaattttccttgtgttatctgtatcccctcttgttatatcttccctattcttcgattgtagttttttactaacaaatccaagggagatatattcttcaactgtaaatacctgagattcacgtactgacgtactaagattagtcattgtttggctggaagtcctttcagcaactgttggtaggttgagaacatgtttcttacctactccatgtagttaggttcgagattacgtgcctaatgaggattctgttttgcatcaaagcaaatctgttcgcattatgtaatatttgtagaagaattttgggtaacagcttcactcttggatttg

SEQ ID NO: 15585 - DNA, 928 bp, Brachypodium distachyon
  Intron number 1 from transcript Bradi4g20960.2 (locus Brad i4g20960) derived from phytozome v7.0 (chr-ID Bd4; pos 241 10202 to 24111129 reverse strand)
cctcttcagcaacccccacttcgctccctggcaaggttcggttaatttgttgactcgtttcgctagcttgttgtttgtcacatagtactgcgtatgaacaggccgagccatggattttcgattctcgattatcagtattaccaaatgcattgttggtgcgtgtcaagggtgttgcgccaccgtgatgcagtgctatactagttcttgctagacctaaggatttcctgatgtcttgtagcaaattctttctccgcgcacagctgtgtctaaaccaatgtgctgagtgtttcactgtgtttactattgggtcttagggacgtaagtctattttatttttctctgattaatataagaatttttgggagtgtataattcgtgtagtggtagatagatacttcctccattccaaaatataagatgttttagctttgtcccaagtcaaatttcttaaagtttgaccaactttatagaacagtccaccaacacctacaactctaaactagtttcattaaatccatcatgattaatatcttcataatatataatatacttatttgatattgtagatattagtagattttctatatattggtcaaattttaagaaggttaacttagaacaaagctagaacatcttatattttggaaaggagggagtagattatagacgtgcaatttgtctaaatgagttgttcaattaaattgaggcgtgtttctggactctggattctaccgtgtttatgtggatattagaacataggaatgtgagtccatacatcataggaatgtgtgtctgtgttgcactgtgattttgccaataatttatctccatatcttcgttgctaagagcttacttccagaagatcttactgttctcagattttttgtgtataggagggttccctgtactgaattcctttgtgtctgca

SEQ ID NO: 15586 - DNA, 1001 bp, Brachypodium distachyon
  Intron number 1 from transcript Bradi3g56880.1 (locus Brad i3g56880) derived from phytozome v7.0 (chr-ID Bd3; pos 566 11702 to 56612702)
tcgagcccaagcgcctcgcgctcgcgctcaagaaggtaatttcgacaaacagtcaccgtgcaccacgttactgtaggagctggttccgtcgtttcctcccacaaaatgtgccttctgttctgctattttagccgcggattagaattcaggccaccgtgatcgttcagcgactgcgagtgcgacatcttgcttgctaagactaagctaggaacacgtctaacgtctgtcgagcaattcttgttcttggagtactgcattgtatcagaggttacctagatggattgagtcagagtcactagttgcccctgcagctgtctcaatgcatccttaaccaaaataggcttgttgttttgtttgtcatcattggcagttgaagtatcagcttctcaacacctaggcaatggggtcgagttgaaatgacaactataatttcgcgtagctaaccaccaattagagcatttaatacattgaacaatcagactgtcttgtcatcatgcggctgtcactgtcattgcacaaaagggtaacccaagtttgaccacaattatgcgcatggaccgtaagttctgggaattgaaattagcattcaaatgctcagcttcttccaatgtcacagttcctttacaatttaatttatataaactgtgtcgagtatcaccatgcaaaattatcgctgcttttatgagattgctatccatgttgtttatatgcttagagaagtgctctctcaaaaagtcaaaatagagaagcatccaatacagaatctcttaatttagttcatcctacaatactgaatataatctcacacgcctgaatcttgggctgtcgcgtggtccacaaatacttcatttccatttttaaccagacaatcacattatacttgttcggaaatccccaaacttcgcattttttctgtttctgttgctctatgttcaaatgcattgaatgtacatatgatgggagcttattatccttttgctgacaggagttcgacactgctt

SEQ ID NO: 15587 - DNA, 742 bp, Brachypodium distachyon
  Intron number 1 from transcript Bradi4g25830.1 (locus Brad i4g25830) derived from phytozome v7.0 (chr-ID Bd4; pos 311 44854 to 31145595 reverse strand)
acacaccaccgagctccccggccgctggcgacgaggtaagtgcattgttgcggctccttagggttagggattagggttaattagtgtttttttctcatgaagcttactgttgttgctggttagggttagggattagggttagttttttttctcatgaagctattgttgttgctgcttagggttagggattagggattagggttaactagatgatgccccgcatgttgttgcagaaatttttaattaacataaaaagtattcaaatttgaaaacatataataagattgtacatttttcacttagtgggaatagcttgatggaagtaacattcatgcatgtgcaaaagtataagttttccactaaataggtgggaacaaattaattatgtgatgatgtggcatgtttgcatgtttagagaaatcaagtagtgggttgcttctacttagatatagaagattatgtaagattgttgaatagtgttctttggtcatgctgctgctgttgatatgggcccagccatcgtgccgaggccgttgaaaattaaggggccggccatcgcaccgagggggtatatgtgggtgggttaagttttgcaggtttgattatcgggtagaccaattcgctagctttatagcacgggtcatgccgaatttttctagttttaccgtatgggtcatgctgaattttttaattttttaaagtaatccatacaagggcattgtataggaacctcagggtcgcg

SEQ ID NO: 15588 - DNA, 623 bp, Brachypodium distachyon
  Intron number 1 from transcript Bradi3g59090.2 (locus Brad i3g59090) derived from phytozome v7.0 (chr-ID Bd3; pos 583 52990 to 58353612 reverse strand)
ggagtttggtatgcacccttttctgaacagtgataccatgttaaggtctacattttccattgacctagtagtacaaattcaggcgcacaggtacccataagtaaaagtttagaacatgtcattataggttgaaaacccaatacatgccatgtctgctttctgtgaatttattagcattcttttgaacttacagaaaattgcagctaaaattgttctatgaatttgtaaaattgttcccacttcgcccttaggtctgtttcggtgttaaatcagctaaaattgcttatgtgcttggaaatagaggcgcaaagctttgatcattttctgcaagtcagcaaaggcatcatccaactacgaaataatatggatttcacatctccgctcaactgccatgtcccccaccaccaccacacacacacatcggtcctccacaacaccacccacacacactaactcatggttcttcgaagaaactcatagatgatccatatcagtttcgcacttgataccactgccatctttagcttattgaatagtcacaataacctatcgagtagcgacatgtttagtgacctctggtgcaaatttctctcaatgattgattgacaggtgctccgtcatat

SEQ ID NO: 15589 - DNA, 883 bp, Brachypodium distachyon
  Intron number 1 from transcript Bradi4g04670.1 (locus Brad i4g04670) derived from phytozome v7.0 (chr-ID Bd4; pos 385 0664 to 3851546)
ctgaggcccgcctccccctgcgtcagcgcgctcaggtgactgctcgctggcctgctgctacgtacccttgggtctctttggtgtgcgctactgtgtgaagaagaagttcgcttcttttagaatcctgacgcgggtgcccgcccgcgaggtgctggaaatttagcatgacagatttgagctggggaatttttttttagaaggatgctactttcattgggattcttagtctgttgttggtagtgaagagataggtggtcaggtagaggttggggcagatttctgcttctctggacgcttggcataggaagctaggaaatgctggtgatgttgctagttgctacttcagttttattggttgatttgttgtcaggcaggctttttagataatgcaacggattttgcgccatggcctctgcatcctagatgcagacaacgtaaatttattaccgcatcattacagcattcacgccatatggcgaaaaaggaagcggcgaaactacattattggccttatgtgttgatttgttttgttcaaatgacaaatgaatttgtaagaaaaagaggaaattagttaaatcaagtgttgttgttgtcagcatgttttcgcttgagcatgcatgctggttcaaaaaaaaaaagataatgatgcgtgctgatgcatggatccagtcatccaatagtgtcatcaagaaagaataattgaatttgtaaagccctagcaagttgatatgtgtgaagttactggattgagcttgtgaagtttttgctacttctctttcatttcagtgcttagatttacctggaaattccgaaagatttgctcttgaaatgtgttagtttttggacagattaaacaagtttgtccgaaggtgttacatagcaa

SEQ ID NO: 15590 - DNA, 603 bp, Brachypodium distachyon
  Intron number 3 from transcript Bradi4g07420.2 (locus Brad i4g07420) derived from phytozome v7.0 (chr-ID Bd4; pos 628 4679 to 6285281 reverse strand)
tggagggcacatctcaactttgcaacgacctgttggtaaggaacagttaattttatcttttaatcttcatttggtattagctcatttgatttgcatatgtaagcatgtatggtacacacttggcaatttaataaatcttttcttatacattggatactccttatgacattagctgaatcttttttctgttgttgcaagtgttatagtttgtctagcaagtgacaaaggatggattttactagttagcaggatgttggtttagttttgattttaggcatttgggatggcttctagaacatctattagcaaatttagcttccctgtgcattgttgggttatcatattgtgcttctcctggccagtaaccaggcgcaacagttttactgcccatttaccttggtatatgcaggggaatcttctcctcttataggggcaacattatagtgctgttatttttgtgttccattgtatacttcgttttgtcttaggatagatgctcctaaagttctactggtctatgctttttactgagttagccatattatatttgactagttttctaatgtatatgttatttgtttgttttccaggtggatcctcagg

SEQ ID NO: 15591 - DNA, 842 bp, Brachypodium distachyon
  Intron number 1 from transcript Bradi4g07420.2 (locus Brad i4g07420) derived from phytozome v7.0 (chr-ID Bd4; pos 628 6473 to 6287314 reverse strand)
gtgggcgccctaccccacggtcctccgtaaccgtaactcctcccgcctctcctctctatgcattttctccctacctgcgcaccatcgccggcgaaatttgggctgcaaatagactagggcaaactgaaaatggattcctttttgaacgctaggtttttctgttgtagattggataagttggggttgctagattttagactgtgagtctctatttgaaagctaggcttttcgctgctgttttactgccaggatcatatttaaggtgccttttccatgtctcaagcttatattgtgtcagtgtagcatagacatatagaaaaacacactccctcggtcccatattaagtgccgaaatattactccctccgtccgcgaataagtgtacatttgcatttgtcctaagtcaaagtttttaaagtttgaacaactttgtagaaaatagtagcaacatatatgatgtcaaagttgtaatatttgaagatggatctactgatactaatttgatgtcataaatgctgccaccttttttagaaagttggtcaaactttaaaaactttgacttaggacaaaagcaaatgcacacttattcgcggacggagggagtacatgtatctagatgtattttagtatatagatacgtccatatgtagacagatttgagtcacttaatatgggacggagggagtatcatatatcagaatatgttcaaaatatatatggcctgtcaccattttcttgtgtgagaaaaatgcgcaaacctaggctgtgggattttgtttgactcctttagttttcttgttgttgcagcataagcttgggagaggaagccgtgaaaaggtgca

SEQ ID NO: 15592 - DNA, 699 bp, Brachypodium distachyon
  Intron number 1 from transcript Bradi5g13140.1 (locus Brad i5g13140) derived from phytozome v7.0 (chr-ID Bd5; pos 166 84787 to 16685485)
agagaggcagagaggaggacacacggccaatcaaggttaaggctctctatgtcacattgtctatttgtctaaattttgcaacattgatggcatgcattttctgttgtttctatgttatatgttagtcatatcatgaatcatgtagtcccgtgttaataaaactaatattttggcatatgctttctgcaaccttgaaagtatactagacaaatcttctaacaaactaacttaatgcccacttgattggcgttcttctctggttacaacacgaacattttgttggtcaataagttattcaataggaatgtaatttgaagaacctgcttgtgtgctacttttgtttgggcatcatcattgattttttatcattatgttttatagacttatagaaccctgatgtctctgtctaatcctgttatcggatttgtattttgcttttagtagtcacgatatttaggaagccccaaactaacatgaaatcctatgttcacctcgactgtgaaacctgatatttaacaccctaaacttccaaactagattgacttcaaccatagtagatgtgtatggtttatttttatcaccatcttatatggtttctgaactgctgtaacgcttttttttcaatgattgatcatcctggtaatattattttatatctttccagagaacatcccatcaagtcatcagtgcaccacgccg

SEQ ID NO: 15593 - DNA, 745 bp, Brachypodium distachyon
  Intron number 2 from transcript Bradi4g41600.1 (locus Brad i4g41600) derived from phytozome v7.0 (chr-ID Bd4; pos 456 44613 to 45645357 reverse strand)
gtgtatgttttttattaacttgtctaagttaagacttaggatatgcattattggttgaacataactcaatcaaatttctggggatcctgtttattccaagatgttaccatgccagaatggtgaacatgaaccgggacccagatcacataagttaataaatctggcatgttctattaataaatatgacatgttatttgacatgccatcatatgtttccgttagtttacttattgtgcagaaatgcactataacttgatcaataatcttggcaactatgtctagctgctggattgcttgtttccttcaggttgatagccataaactctttgggaaattttaaatttcaggctagagcagggcaaatcattactcaagttccaaacaaccgcttcttctagactgaacagtttttttcctcaaaaataaataagaaaaacaccgaaaactttttgggctactaaaaaactacttgatgaagctcagcttatggagcttatgagagaagataatcctccatcacagactctatgtctagagcatcaacttcttgtgatattctctactggcatgatcactggtcagacacttgttgcatgcatgcatgctaccttagtcttgatatctgggtgtcattgatcaacaattgtcatgaacttctttttaatctgttagctcattaaatcttagcataaccggccatgcttcttcagcttgcaaagaagttccaccctgataccaataaaga

SEQ ID NO: 15594 - DNA, 995 bp, Brachypodium distachyon
  Intron number 4 from transcript Bradi5g07310.1 (locus Brad i5g07310) derived from phytozome v7.0 (chr-ID Bd5; pos 975 6925 to 9757919 reverse strand)
ccccgcgaagaccgattcatctttctggacgataggtatggttcaattctaacccacctgcaattcttggtcataacattgtttcatttcctctgttgtggcctgaactctgtggtgtgctgcacaaatatggtgccaacttgtagcctgttcttttcggacgtctagactatcgttttggtagctttgcctcttctttttttctttcttgaagttgggttcgggcaatttgcttttagaagaaatgagaagacgtctgggttcaagcccaggtgggtggggcgttcagcaacatcctcccaactaagtagcccccagttttccttgcttgtctctttggaggcacattatttatgtacttgcagcagcgcttgttggttcattgattcgtatttctgacatcatatttgtgtttctgaaattgttgcagttatattcatctctagtagtacaactatcaaatttacgcaatgttaactaattcaacttagtgtgtagttgatgaatgcactctcctaccgctggtaatgcaaacatggaagatgtctcttttggctttgagttactttgctgaaaattacatgttgttgtcagctgcttttagttattatttggaatattgcggagcaagatagttgaagaagcttatttggcaactcgtcttatgaattgctactagatttaactcttctctaatggtgcagtcacaaaatatcctaaaactgaatggggaaagctatgctagatttagtcaatgcactcatgtgctggtgatggttttgtacgattgccactaatttacgtgttaatgataaactgatagtgtaagattgattgatattctataactgcatatggatatgctggcaaggatcagacgtcactcatacgaggttcagcattagggagatctctatattacagtattcaagttattagcaccttctgctgctctatattttttaacatggaaagtggtgatcacaatacagagg

SEQ ID NO: 15595 - DNA, 713 bp, Brachypodium distachyon
  Intron number 3 from transcript Bradi4g20090.2 (locus Brad i4g20090) derived from phytozome v7.0 (chr-ID Bd4; pos 230 58261 to 23058973 reverse strand)
gaggtcggattggcctttcgggactatgtaaggacactgattcatttctcttaggtgctaattggaaccatctgcttgatcctttctctaaaagcaagaagctcatgttggtaaatcattgtctcattactgcagcgacttccaagcgtttgcacatcttttggtttagtccttttgctaacaactcagttaatcgaaatgatgaagataattgtcggtttagtttagattactgataaaaaaagatcttggtttagtttactgcaagaattcaaatccaagggctatcaatgtacattagatatactgcctaatgagttattttctttagcagttgtattttttgtttttcaattgccacactagttcatcatatgtgaagcgggtagagctcttaaggaatatatgctagtcggagatcataacgttcgtggagaattatgctagacacgcaggggttttgaactaacaatgaacaaatctttgagcttagaacataacagcagccaactatgaggcatgggctcgtaattctcctattggaaaagttctctttcaactaaacatgcatatgataaaaggtttaaggatttgtggtgcggcatagtgcaggttctgcttttattcttccatgcatttttttcagatgcactacatatttcactttagatatagtaatttgattttttgctataccataattgtatgacaga

SEQ ID NO: 15596 - DNA, 532 bp, Brachypodium distachyon
  Intron number 1 from transcript Bradi4g09300.1 (locus Brad i4g09300) derived from phytozome v7.0 (chr-ID Bd4; pos 861 9026 to 8619557 reverse strand)
ccaagacggcgcgtggaggcgccgccgccggagcggtgggcggcgaccggcgagaaacaacatttgggggaaagaaaagactgtccgaaagagaatgagacgaaggcgatggcccatcacggcccatattaactaactggccaaaatcctttgggccgtccgtgcggtgcccacacaactttgggccctcttaaacccacgcacccgtcgtcgttataaaaaaagaagaaaaggaaacattgtattgctgtagttgttcttatctggaggcagtcatctctgttctgattcgcaccggtcgtcgttataaaaaaagaagaaaaagaaacctcgccgtgttcgtcaagctctccctcgtgtcagccgtcatggtctgggtcggtataaatttgattttccaattcagtaaacaacattactgattaattaattaactaaactcttcgaaacatgttttttcattcgatttccaattttgtgttgtgaaatatatacagtttggagttttggtactacgctgcattgctgattt

SEQ ID NO: 15597 - DNA, 830 bp, Brachypodium distachyon
  Intron number 1 from transcript Bradi3g61080.3 (locus Brad i3g61080) derived from phytozome v7.0 (chr-ID Bd3; pos 597 97657 to 59798486 reverse strand)
ttctcttccaatccaatcccctgcggcctggtctggtgagttcttgccttgctctcagcctcgcccttgttcgctgtctttgcttaccttagtgaatattttgattttatgtataaatcttgtcaactgcctgtccttagtgaatgtttgttggctgcatttgtctgttagctaacttcataggctttataacgatgtcaagcacgaccaatgctcaataattcactgaaattgcagttgctccatattaccagatgcacaatttgtactctgcaattcatttgtttatacattgaaattccaatttgttttttatgcttgttaatttctgattgagagaaacagggtttaaagactgaaacaccatagatttgcctcaaaactgtgatttagtgctatataacccaatagcgcaactgacattttgcttaagtgcaattgcagtgttgacttccattaatcgcactttgcaatttctctgtcccaactagatgggttttttacgcctaacttagaacaattttgtagtcttatatgaagtgccaaactgtaacgcaacttcttctctgagtgcaattgcactgtttacttttagttattgcaatgttttatgtcgcaactaggaggtttatgtgccctattttgaacattttgttatcttttttgatgcactaccaaaacagtaccgtaatttacattttgtataagcgcaattgcactttttactctcggtaattgagatttttcctgtcgcaactttcgactgtccgggatcttattgaaggttggtctccggatgaaggtgtgacggatggtagagagtgtggaag

SEQ ID NO: 15598 - DNA, 901 bp, Brachypodium distachyon
  Intron number 1 from transcript Bradi3g51500.1 (locus Brad i3g51500) derived from phytozome v7.0 (chr-ID Bd3; pos 525 28934 to 52529834)
gaccgtcgtcaacctcttccacttcgcggtaactacgctgtggatggtgaggggtcattaatgtggcttgttgtaagctctctactcggctaggcagtaggcaccgtattttgttccccgtagtgagtgattggttgacagtgaaatcaacacgcggtataatttaggtccgcgtaactaatccacacttttggacgcccagttgtgtgtactggaacaataacccttgaacggtcacatcaatgttggcatcgatggtagcttatgtcagtctcagggcacctctccccacttcaatagaaatttattttgttacgttagaatgagtgtgtagtcaaaagaagaaaaggcctctgtttttgtcttggacatgttcacaggctaaatgtcaaatcatattgcttcatatgtttaccacccatttccagttcaagagaaatttacccctgtgatgagtaccctatcctctgaagctctgaagcctaagtggtaaaaatattcagattagtgacaatgccatttcaatacaagtgactgcaagtgtaacttgtatatctgtcttcttcacgagcacccacatggtgatgataaatcaaatgactttgcatttccgttttgccttgcatggttatttttattaaaaagttaatccagtgtttcagaaaatgttggaaatcgatctgattgggactactcctttagttcacatatatattgaacctgcttgacttctgctttttatatacatgcaagtcaaaccatgtatatatatttggtacttgttattagtggaggtggtttgtttcctgagttcctctccacacacttaccacacctaataatgtcctactgaatcttatgttcagatcacataccactttttccattggaagaagggaac

SEQ ID NO: 15599 - DNA, 994 bp, Brachypodium distachyon
  Intron number 1 from transcript Bradi3g46700.1 (locus Brad i3g46700) derived from phytozome v7.0 (chr-ID Bd3; pos 484 96365 to 48497358)
ctacctgcgtccactcatccgtcgattccctcgcggtaagcttcgattgatcccaattccccgcttgaatcgtgatcaggtccaattcgttcggtagtaatagtgccctggatgccttgctaccccgtaggattcccaattcgccgcttgaatgttcggtggccgtcgtagttaggtctggtctgtttagatttgggtcaaaggctcaaagttgaggcctgtagaggggaattcgttgtggcacaagggtgtataatttctgctcagaagattcacaagctcttgtccgtcggctgggaggttaatcttgctttgcttgctgtttgagaatagctgctgctcgttttggaacttggtctgtaatatgcttgtttgtggccgatgatgccttaactgatactgttctgccgtaggttagtttctgaggttgcgtccgtaggtttttgtcccagagtggctggactgagatggccaggtcgcagttcgtttcctacagaagcaccagcccgctagttcctcccgctttgctctcttctgatgtaaaagacaatgtaatttccgtttcgttgaaatggaaaatggggctagtcaggttaaaaagggttttgatcaaattttgtgccctttgatgttggatcgtagaaattccagaagaatttcagtcttggttgaggtttctcccttttttgcactagattaatgatcctaaactcatggttgggactctggggattaaattgactaatgtatttcgcttgcacactttcagttttagattttttaaatcttttttgttcttattaagtgttttaccacttagatggaacctgttactgttcagttagtactccagtaaaatttgaatgcatgattttagctgtattggagcttctgtcccctgctatcatgtgtttctggtatgacaaacccatataactccatttttccttccaaatcagatttggtgccagccagtggttagaggtgtttcact

SEQ ID NO: 15600 - DNA, 448 bp, Brachypodium distachyon
  Intron number 2 from transcript Bradi5g14750.3 (locus Brad i5g14750) derived from phytozome v7.0 (chr-ID Bd5; pos 181 73936 to 18174383 reverse strand)
gctcccaaaggtacatgtcacaggacgctatatgctactcttattgaaaattctgatgccaacatatcatatacaatttgaactaaaacaacgacaacaatttaggatcagagggagtactttagactggggttcatgtgtagttctttgattgctttgcttgctgtagtgttgtggtgccacttctgggtcgaacaagtttcttacaatcatgacaattgaatgttgtagtcactgcttgatgtataaagtttgtgaactgtggcaatttattttgttcttcaatgtttagtgatatactgcactagtggtttgtgcagtaccgggaactggactcatactgaaatcgtcctataggattcatgaacatactccaatctgtctttaattatgtctcgctctgataatttaatcaacttgtccctagttgctgttgccaagaagggcg

SEQ ID NO: 15601 - DNA, 564 bp, Brachypodium distachyon
  Intron number 1 from transcript Bradi3g50540.4 (locus Brad i3g50540) derived from phytozome v7.0 (chr-ID Bd3; pos 517 15757 to 51716320 reverse strand)
gtccacgggatcgtcgggaggtacgggctactacgcttgcgggcctcgtgaggggcgatctagcatcaaattttgcgttctgtttattctcgtaatttggatttcccaatccttgtgggggcctgtcggttgtttcgagaactctgcggatttgcgatggctatcttagttttcgtgcttctgttttcgaattcggtttagggaaaggattgtggggcaatagtattggtgtcccagttggtcacacgcgagacaaagaaaatcgaattgtttgatctttgatgataaacgtcacatagcaaactgagttaagatggagtatctcttcacgctacgtggctcacgcagattcagcatttctagccaagcacgcaaaattaggtttgcattaagagtacctaactagctgactttacgtttatatatttttccaatggagccacacatgcatattgtagctatgagtgatcgagctgtgctaacttgctattttccccttgtactgatctttctctcttcacttctacagtgcggcagattggaaatttggagctgagcaatttg

SEQ ID NO: 15602 - DNA, 726 bp, Brachypodium distachyon
  Intron number 1 from transcript Bradi4g27570.3 (locus Brad i4g27570) derived from phytozome v7.0 (chr-ID Bd4; pos 327 38580 to 32739305 reverse strand)
gctcgcagacgtgcctcgatccggacgccagcacggtgcgcgatctcgccgccccccggccccgccgataaaaaatggggccggcattggggttcctcccttccatgcatcttctttgcacttgacttgatgcggcttttaggtgtcctttttcgtgattagagtaattattacgtgaaaagggtggagacttttattttgatgattccgaactgtgatttttttttcgatgcggcgccatttatatttatttattggtgcatttggatgagcaaacgtgttgtgttcttcttgcgctgtttcgttgaccggaaggtgatcgatttccgtttttactgagtttttatgtcgatctcccgatggttctgtcggctgttgcatgcgttggccgggtttacgccatgaccaacggagtgtgggaagacatactttaaccatgatactgctactagttggtgggaggcttacatataattaattggtcgaggatctatcatggtccttgccttgcatcaaatcagtaagctagttggctcaagatctgaagaatgtactgctaattttgcacaagtatagaacccggggtgccagagcagttcatctctgtacctagccagctaacgtttggaatcttttttgcagaattttgacataacacattcagttaaatgatccatttttattcctgcagagtgttcttgggatcatccttgggggtggcgcagg

SEQ ID NO: 15603 - DNA, 808 bp, Brachypodium distachyon
  Intron number 2 from transcript Bradi4g44360.1 (locus Brad i4g44360) derived from phytozome v7.0 (chr-ID Bd4; pos 477 98427 to 47799234)
caacaccctaggtatacatatatagattttgttaaactcagattgctaactcatagtgaccatgcaccaccctgataaaggcctcatcgtgggtacgtgtaccactgggataatggttttgaattccccctgtaatattctgttaacctcccatttgtagatatcagcctagtgtaaaatggaatttcttctcatgtattgagcttgtgattcaagtcaaaactatgtttaaatagtttcttttatttcaaaatggcttgtttttgtgtggcttttcggagttctactgaatgtatcgtgccaagattgcataaatattcattgtataatgctttagacattctaagaaacaacatggataaaaagtttatagtgaaaacttatatgcgttttgtaaaaaaaaaacttatatgtagtattcgaatttaagatggaaaccttgaacaaaaaaggaaaaaaattaatcagttgatttaggaaaaatccataaaattaaggcaacatgcatgcggcggattcccttacagtatttccataaaaaaacatacatgggatcatttgttggtatagacacaagtacatgatctagaatattcaaactaagtttgggtgtgtttttagtgtcgttatatgagttcagtttatctgaaattttctggaggatttttccacgatcaaaagaccgacctttcctagaaatagctagagctgcatcctttaaatcaatcgtcataattacgcattattacaccatcgattcaaatgtaattaataattttgtattatgttatgacaggagctattacag

SEQ ID NO: 15604 - DNA, 744 bp, Brachypodium distachyon
  Intron number 1 from transcript Bradi3g56840.1 (locus Brad i3g56840) derived from phytozome v7.0 (chr-ID Bd3; pos 565 91244 to 56591987 reverse strand)
cagctcgccgaccaagtccccggtaacggtcgttccctcgattgattacattctagaaataatgcggcaactcaagcggtgatatggttgtgaaaaatgaatgcatgttctttagttcttgtaggttgtaatgttgtatcttatggttcagtcatggcctaagcaaaataatttttccaaagtatgctctgaattattgatgtttgctgttggaagttgcgggttgtgaaatcactacctgaaaattcataactagacttggctgaatttattaggccccatcttattgatgtagtgtatagaagctgagaagagtgcagtgcctagcatcatgtttcagtttgaattgaccagtctttcagtttcagtctttagctgaaaatgtaaaaggcagaggtagtgatactgaatatcacatcacttgcatgcctcggtctcgagtttctagagactccctattcttcttgcatgttgaattgttcaagcttgggatcgtggttttcgtttgtgtacttgttgttaactcatctttctgtgtaactgatgctgcctcatggttgaatagctccaatgtccaaaatttatacatacgagctctaacatactaccttttgttagtatatggggtggtttctattttgtactggcttttgattaaacattcgattctgcaaaattagccgaattatctttttattaagtagtaaattcaatcctgtgtggaaagcttatgacagaggaact

SEQ ID NO: 15605 - DNA, 865 bp, Brachypodium distachyon
  Intron number 1 from transcript Bradi4g27320.1 (locus Brad i4g27320) derived from phytozome v7.0 (chr-ID Bd4; pos 324 47711 to 32448575 reverse strand)
gggtatcaattctgtcccgcaattttggtttggaggtatgaacatattttcgtctcacgcctgttcgaatatattgatattgtttggatgcgttatagatcgattttcttgtttatatatgctttttgtttctgaaatttgcttgtagagtatgtcctatactactccgcccttgttgtgatgggcttcaaataacggttttgctagtgagcggtcgcctgttttttagttagagatcaatcgacatgttagtcattggattttaatccaacgatagtaagtgagagatgagaaaatgtgaatgaccctcagatcttaattcaacagttcgaaaatgtcgattgatatttaaggctcatttcttaaatatcgggcgacttagaaatagccacacccttcaaataattacacaacgtgtgatcatcatataatcagaatgaaacagtaggcgaatttcgtgagaactatgctcatgggaaactaatctaggaaaatgtagaggaaacttcgatataccagcactaggcagttcaaacaaggatataaagtacatgagaagaagagaaaatagagcaagtaactttgaaaggtccaaagtttggcgaataaaatcgtatgcaatataagcaaagactagataagtcaaactcttcatccgttgttattttaaaatttgaacatataacccccactgctggtgactatctatgcatgccttctatttatttattatctttcttgctccccttcttcttgcaggtgtctatcttgctattttgtcttgctctttagcatgtgactgtttcgtctgagttggtaataacgtgagaatgcgtggaggccttgagttattacgccttatgtg

SEQ ID NO: 15606 - DNA, 995 bp, Brachypodium distachyon
  Intron number 2 from transcript Bradi4g35270.1 (locus Brad i4g35270) derived from phytozome v7.0 (chr-ID Bd4; pos 407 18496 to 40719490 reverse strand)
tgacaagcgtctcttcgtcgctgcaaattgagcttgtgagtgcactgaaactcctgagaatttaggttatccattatcgcagttctgccaattgctattgaaacttcgtgtggatgttgtagatgtttgcttaccagttcaccttctagttgctaatttacatgacaggcaggacgtgggccggggtggataactatgcatacactcaatcattccggggattagttttgtttttagagcctgggggggctagtctgttgactgtttgcttggggaggcaattctcagaacttgtttgtcgaggggggctaattataaccatgagtttctcatgattgcgtggcatctcttgtggcattattttggaatgaaactaagggccattctcaataaggaaatcattcgtgtccatgaaaagatgcttcccatattcttctaacacttaatcacttattgctttattctgcctcacttttcattttgttctctgcccttttacctaactaccatgatatatgttagacaccgtggactgtatctttgctgccaaaccctatcagcctatcaagtatcaagtttactatggtgggccagatgatgcgcagtcatgtttacattgcaaatgatccttcatgtttgcagtttctctcagacagttgctcttcagaccatatttgagcagcatgacttgtgtttctcaaaagacaccagctctgagtatatataggtttttcatcttaagtcgaatatcatgacttgcacattatatcatttggaacaaacaaaaattgtagctatcacaaaatatagggggaaccacacactctaagaccatatagatgaactgaacacaaaaacctcagttatctgtacatttcacgtaacctcatttcagtagatgtataccatttgtcatccatactattaaacttccctccggtatttgttaactatattaccctatcctctctaggtaccctgtcttcaagataact

SEQ ID NO: 15607 - DNA, 934 bp, Brachypodium distachyon
  Intron number 1 from transcript Bradi5g07690.1 (locus Brad i5g07690) derived from phytozome v7.0 (chr-ID Bd5; pos 101 59295 to 10160228 reverse strand)
tccacgatttcgaacacatcaagcgcgagatccaggtctggttctctttaattgctgtagctttgcttgtttggttcgtgttggcaatatgtttgctgctgctggagacttcaaaagaatgcctcaatctcagtgatcgctgtagctctgattgcttgctgagcgtaggcaatgtgtttgctgtaacgctagagacttaaaaagagtgcctatcctagtgatacatgtagctttgctttttgcttcctgcatcgtatatgcgatatttttgccgattccatgacttgagggatcctaacataatcactacaacgatatataatttgcagtttgtgttatgtggatggagcaactagtgtgctgatatggtttgttacctgcacctagcattggccaatattgttggctacctttttaaatttgatcaaggttataaaaaaatgtactaatatttacaatatcaaataagtatacactaggaagttatatatcaagaaggattttaataaaactaatttagagttgtagatgttggtacattttcctgtaaacttggtcaaacattacataggacaaagttagatcatcttataatttgcagagggagtacactctagcaaatctaactagttaatgtttattttcacattagtttttcttgtcaatagcagataatttgaatgatgcacatttatatcattgtactaaacatctaagttctgaacatctaactttgttcctcctgttttatttatgtttgtcttatgcgtgctcaatttgtctatcatcttattctaacctttctgttggtagcatctttgaataatacttgaattgtatcattgacttttatggcttcataatcttctctcgagatgacatatatttactgctttcagtccgaaacggacaaggaagctggaggtaacaaggg

SEQ ID NO: 15608 - DNA, 998 bp, Brachypodium distachyon
  Intron number 3 from transcript Bradi4g08450.1 (locus Brad i4g08450) derived from phytozome v7.0 (chr-ID Bd4; pos 750 7994 to 7508991 reverse strand)
acaactggaaattggttagtgccatttagttttcacccactcgtttctattttcccaattcatgattataaaaacatagctaacctcagaagataacaggccatctttggaacaagggaattttagaggaaaattacagggttgcaacccaaaggaaaattttcttacccgtgttttttggatcatagggttgcatcaaatggttttcatacgataggaatatttcctacagatttttggagaaaaccaaatatgagcttcaagctcatgggaaattccctttcatagttccaatccatcttctctctcccttctctctctaattatgtcattccaaggcatccaaatacctcttccaaacactttttgtcgatcctgtgggattcagcatacttacatgccatgacattcaaaatcctgcatttttcttatccgtacagttttagatgtttgcgttccgaaaatggccaaaataaaggttcttttggtggaaaagaactgtggaattttgaactaaagttttggttcctgagatggctacttctaggttgacttattcagatattttgcaacagtgattattccagtccatgatgaatgaatttcttcacttgacaaagataattttggtttcatactatgatgggattgatatttcttggatctatgcatgttttttttgcggggctatgcgtgttaatttagtctagtttttaagtccacaccaagggtttacaaatctttgaatgctcactccgagtgcgacaccgcttcagaaaatggtttccctgtcatgctaaacatgttacaggcctttttgttgttctgttcatggctgccttaggaagcattaaattgcaatgatgattgtgtcgactttctcatgctttcttcttgacttttttgtggttttggttgcaccatttgtttcttttgatcccaatactctcctacaacacaactttatttccacctgcaggttggcgttgtttcagatt

SEQ ID NO: 15609 - DNA, 948 bp, Brachypodium distachyon
  Intron number 3 from transcript Bradi5g12750.1 (locus Brad i5g12750) derived from phytozome v7.0 (chr-ID Bd5; pos 162 58118 to 16259065)
atcacgcggacgagtaccctcctagccaggagcatgtacagatccaacaaccacaaatcgttgacggaagcaaaccagaaggcatgtgtggattattgcctaaggcatcttgagccatgtaccttagaggatgatcccaccttcaaggctgatatgaatatggttcatatcaatgagaagtggttctaccgcacgcggaagaaccagaagatgtatttgagttatacagaaagggcaccacaacatgaatgtaagcataaaagtcacattcagaagatcatgttcttgtcggcaatggcaaggccaaggtatgacgcggaaggcaactgtgtgttcgatggcaagatcggggtttgggcttatgttgattgggttcaagctcagaagacgagtcataataggtttgttctttttcatgtcaataattttagtgaactcttttccatgttcatttttatttactatttgtgtttctgcttgggagtatatgcataggttaaggggggcatgggagctgaagccatccagatctgttgacagggccaaaagtcaggagtacttagtaaaatatgtactcccggctattaaggtaaagtggtctgagagggataggtggaacaccatctacgtacaacaggacaatgctaaaactcacattatgccgaatgatcctatttttttgaaggaagcagcaaggggtggttgggacattaggatggtatttcaaccacctaattcacccgacacaaacatattagatcttggatggtttgcgtccattcaagcaatgttccataggaagatgccaaagaccctccatgagattgtccaaaaggtattgtaaactttttctcactaatttttgtccagctagctaatttgtgatgtactgatttgattacttgtctaataggttcaggaatcccttgcccagtatccccatcaaaa

SEQ ID NO: 15610 - DNA, 463 bp, Brachypodium distachyon
  Intron number 1 from transcript Bradi5g03970.1 (locus Brad i5g03970) derived from phytozome v7.0 (chr-ID Bd5; pos 507 5892 to 5076354 reverse strand)
gagcgtgaagatccagcggctcctcaagcctacaggtaagccgtaagcgtaagacccgataagcagtacagtagttgtgattttctggaggaaaaagaagaatatggaactttatttgaatttgttaagaacgtctaaataacattacattcagtttgaatttaaatttcgatttatatagtgtaagtatagttttaggagttttctttcgattaacaggccagctccatttatatataaaggaaaccacatgcgacatgtctgcaatggagtattgaactcagtctgagctcaaaaacgaaaaacaattacagacgcaaaatcatacgacagatgaaacaagtctaaaagactagagagatcagcttgagtcaacaccagcttcaggccagcttctcaaattaaattggtctcaagcagcaagttcctcatttgaatctagcttcgccggacgtccccatca

SEQ ID NO: 15611 - DNA, 986 bp, Brachypodium distachyon
  Intron number 2 from transcript Bradi3g58140.1 (locus Brad i3g58140) derived from phytozome v7.0 (chr-ID Bd3; pos 576 92347 to 57693332)
ccctcttcaataggaggtgtgcgccccgatcgccagtgccatatgcttcctttgcgtcctgattgttggatagtgagaacagttaattaattagatgcgaactgtccttcccggggaaatagagctttatcaatgaacacataatgtccttatcagtcctgattgcagctatttgagtagaatgaaatacatttttttaaaaatattttagattgccctccaaattgtagctgtagctgaaatggaggtttattgcttgtcaatctctgactctaagtacacaacatacgggaaacacaacttggtgcattgaccacataggcgattcaccaagtttacttttctgctctccacaatagtaggatattcttgtcctggccatccaatctgactgactacttcctttccggaaacattaatttgatgctttcatttccaggggaaagaatgttagtacttgtattagaattaggcaaaacaacatttgcagtagtgttatataaaccgggtttgaacacctatgaatttgccaaccttatagaacacagactacctacatgtactattggtggaaatcatggtacgcgttgtgccgtgccttttacatatttctgtataagagtaatttatgggtgataaactatttttgcagtagagttagataaactgggtttgaatttctataaacgtaccaaccttatggaatctgcatctaaaaccttatggagtacgtatggtgcttttatgtgtatggtgaaattcacgtcatacattatgcagtactgtataggagtttatggatgcagtcagggataatgtagaatattgtttaattggtctacggctctgtactttttccatagtttgtagggcatatgatattttcaccattatatggagcataaatctagattcacatctgagtttattctattttttggacttccacagaagtcgggacgactcactggaaaataaccgtagac

SEQ ID NO: 15612 - DNA, 786 bp, Brachypodium distachyon
  Intron number 3 from transcript Bradi4g01200.2 (locus Brad i4g01200) derived from phytozome v7.0 (chr-ID Bd4; pos 758 931 to 759716 reverse strand)
acaaggctatcaacgaatacaaggaggctaaggcggtatgatactagaatcatatgttagctggcttcgactattttttgaaattaccccatttctgtgttagttggtttttcttgattatatgttaagagttggtaatatgatgatctagatctattaagtcacatctgtttagcatgtttccatttctaatcaattatcaagttttagtactgttaaagtatttcttgttcctacatttttcttgataatggagctgctatgcatgttgaggagcaatttaaccttgatattttggaagattgtcactcttgtctggtcaaattggttgtaaatgataaataaactaggcaactttgaaattcattgtttattgtacactatttagttgccactccatgactagacataatttcgtctcttggtttggactatgaaggctatattaaggaccaggagagttccgtaagagattgaaaggccaatcttacactctgaaggcaccattgtgctgtatttttaataggtttttaatgtactctatttgatgtttgattggagggttgagatggaaagggttgcaattaatagttattcactttatattccgttgcgtgttggaacagtatgctgctagaattttggagtttagcagtgatttctgaattttgcgatgttcactcgaaagttgatctgtttgctatcttttgaaggttatgtcttatgttgtgtgtacttgcttctcatgcagcttggcattgacaccgtaccagtgcttgtcggacc

SEQ ID NO: 15613 - DNA, 886 bp, Brachypodium distachyon
  Intron number 1 from transcript Bradi4g38090.1 (locus Brad i4g38090) derived from phytozome v7.0 (chr-ID Bd4; pos 430 84955 to 43085840)
cgccgacgccgtcgcggtcactctcggccccaaaggtaggttcttttgttggcgttgtcattgggaccagatgtatcaccataattgagtctctgttagaatttttgctacactgcatttagataattgttgctacctaggaatacagcgtggtaacggattgtcacatatggatttcttttccctttgtagttaaaaactgatcaaggtgggaactttagtgcaatttggatgcaaaatgttgggttaactgtacgcgatggttcatgcgttgaatccatttgtgctaatattttagagtcgtgaattggatgttatattttaatcggactcaggatgtttcactagaagttactatttgaagattcagttatggtaattagtccggtaattttacaataggactagatactttatgtttacctgtcccgttctgttgaaatacgtgtcttagtccccacttggaagcaacagtctgaactctgaagtcttaaatctgaaactgttttctcagtatctttcctgctactatgcaattgctctattcttctgcaaattgtgacagtgtaattcagtgcatgtaagttctaaagcttataagggattgtttaccctctgtataagatataaatttgatgaagctgtcagccttaaatccagcgtatattagaaattgacctaacgcactgttagcttagacataggatgaccaaatgatgccttttgcgttcttactcttcctggttaaatctgttacctctggcacataggtttatatgatgttcctgttgtttgaatcatatttgcctgaagccatgaacaatttttttgattgtcttgtagtgctattgattgttgaaaacataaaagtttgctgcagggagga

SEQ ID NO: 15614 - DNA, 1030 bp, Brachypodium distachyon
  Intron number 1 from transcript Bradi4g33110.1 (locus Brad i4g33110) derived from phytozome v7.0 (chr-ID Bd4; pos 388 85715 to 38886744)
ccgccctggccacttatcggtcctagcaagcaaaggtactgccttcccagcccagaaggctgtctgatttggtcgatcgattagggcgtcattttcctcaggtggatgtggatgttcgttcttgatctgccggccgctttaacgccgcctcccatcactctccagatccaatccaccatgttggcccgcttgttctataataaaaaaatcgtttcttcttcttcttcttcttccgttgcttgcattcaatggccactggagttagtgcccccatgccctgatgtggatgtggcagtgtgggggtggggtgtacgcgcggtcgactcgacaccgcatgtgtgcgtgccgcgctgttgctcatatgatccatggcgtgctccatcatacctgcttcttcctttgggggaaaggtggggtggggggcaaagggatgtgtgtgccttgtgagcttgcagctgtgccaggttgcaatgttccttcgttcccctttccttcttcctctttggggatatcttaaagattcccttttgttattaatctcccttgttctggcccactccgccctatttttgtgggagatgctgggggtaggggcttgtgcgattcttaggcatccgttcttctccttttcggtggggagtgttgatgcgacggtgtatgagcgactggttggatggatctgctgagtgcgtagttttgtagcttgtgtgtgagtttgcaggtgatttctttgattcatgtctcccgttctgaaaagattcccccctattcttgtttttggctcggctcgttcggtttaggttgatgttttagtattgctgtcgattggtggtttagatgtcttggaacatatctgattctccttgtgttttgatgagtaggctgttgggcaattgtgtgtatggattggaacagatgattgcaacttgtgttgaacaaaccctaattgttcagttggtatgctaatgcgatgttcggggtaaattgcttttcaggtcacaagttgggaattgcttagtcagtccgatac

SEQ ID NO: 15615 - DNA, 714 bp, Brachypodium distachyon
  Intron number 1 from transcript Bradi3g48000.1 (locus Brad i3g48000) derived from phytozome v7.0 (chr-ID Bd3; pos 495 63100 to 49563813)
tcccgcgattctcttccacatcgactaccgacgaggtactgttctatccttatccccttccataccgtggaagcttcttctagatgtttcaatcagcgcacacgcccccgcgcgggcgaccgcagttgtactttcccggctcaatccctagattccctcacaatttggcacaggcgcacagccatgtgcgaggttacttgcctgctgttgtcgtctcaaactctcaatgtgtccgttcccaattgcgaggttactttagcacggcagcagatttggtagaatcgccagcgcgcgggcatgcacttgggttttttattttcggttaccatggcgaatcaaaagatcgctcaggatttttcttgcgtctgttccgcccctttgcgtccttaactggtagtctggtaccatctttgattgatgcgggaatcagtgtgaaaaacgaacaaacaaaactataatgtccattatcttaatcgaatggtgccaattcatggtgtacagatttgtctgtgagacgtttggttttgattaatatcttctgcctcatctgtcctttttgtgttatagtttacattttgtggatatggtttttagcagatagagatgttcggaaactatggttcacgaccaagcaagccttaatactcagcatgttgataaatcgttattttgagatgttcacctggtaagactgcaggttctcaagtgttgtcg

SEQ ID NO: 15616 - DNA, 758 bp, Brachypodium distachyon
  Intron number 4 from transcript Bradi3g48000.1 (locus Brad i3g48000) derived from phytozome v7.0 (chr-ID Bd3; pos 495 64378 to 49565135)
tggcattgaagaacaagccataaatcaaggcaaaggtttgtaatctgcaaaagaattcgcattgacaatttgttcagatatatatttcccttctaccttatccttttcatgagtatctaatatttttaggcttgctataactcatacaaataaaaaacagaaaaggaaagggataaatcagtattttgcctacatggttgatcaattaatcggataccatgatatacaaatattatgttaaatgtcaacttccagttgatttaaattgcaaattcagaagctattaacacagagaaaattcaccttgttaccaacttagtatacttgtcaatcaattgtcatgtagtataatactatctatttaagtttacgcctttctttagcctggttgcttttgtgttcactccaatcatgtttcttttcattcaattctctagtactaatggtatcaaaagcataaactgaatcgtctgcttttggttgaaacataaataagtgaggagctattttggtgtatttactaggttatagtgcttgaataattgcaaattgagaaaagttcttttttcctgacaagttaagtttttacacggatagttgccaatggcaagatcgtttcaagctgcaatgagttttgctatcagtttcaagtactgtttgacccttgccttttttcattatcttttgattataagaacgtttttctttctaaaaaacatgctcatttgtagattttgaagaacaccggaaggctcact

SEQ ID NO: 15617 - DNA, 1056 bp, Brachypodium distachyon
  Intron number 1 from transcript Bradi3g47450.1 (locus Brad i3g47450) derived from phytozome v7.0 (chr-ID Bd3; pos 490 76419 to 49077474 reverse strand)
ttctcccgtctcctcctcaacaccctcctcgaaaggtgaaacagtaatgatactgtacataatttgcttaattgttatttcttcttctaaatttactgtgtgctgaagaagtcctgcgtactgcattttcccccaatcctcttttggtcgcggtctcttctgtttgacagtaaaacaagtaaatgcggttattatcgactaatgcgagtactcgacggcttcttctcaagtcataagctgaaaataaatttgagttatattttgctcggaatttgggatgggtggtgctttgataaatttatgtaaggttctgggtgatcgctgcggtactcgactactcgtacagaggggactcctatttgctagctttctggctagtaagatggaatcaatgtgctctgttcgagtgggttgattgaatttccctttttttgcatagggccataatttgcttgtaggttgtaaaaatctgcggatagatagaattgatgcattaggatggtcaaacatagtagtcatattagcataagctcaaacaatcattgcatttttgtttatttagtaaacgggatttgtcaaaatgtttcatgcataatctgaatatctatttccgtgcgcttcaaatttagttgacatgccgtctgtatttagcatttatattgaaaatcaatctgcatctttcccctaaaaaagaaaagaaaatcaatctgcatttgaaaaaaaggtaacggggagttagttactcaacgattcatttattcgaccccttgcaaggtagctaattgctcataatttcttagttggtcttgtgatttttagaagtgtgagtgagtacgtagtttttgtggtcagcactagttagatgcctgtacttaatctagaaattatatgcaagactagactggtttgactggtagttgacgcaagtttgtatgattgagcaattcaggattgttagatttaccttttgtatttcctattagcttctgtactgtcatatcaattcttgattctttcatacaaaaaggtatcagacggtggcatacttggatactg

SEQ ID NO: 15618 - DNA, 800 bp, Brachypodium distachyon
  Intron number 1 from transcript Bradi4g40720.1 (locus Brad i4g40720) derived from phytozome v7.0 (chr-ID Bd4; pos 450 39686 to 45040485 reverse strand)
gcgtcgacctccccagcccgtacccgcccctccaggcccgtttctcgacgccttcccctttacttccgttcctggtcgctctgtacttctttgctacagtttccccgcccaaatccttgcgttagccttccgtagctgttgcaatgcagtcgctatttgcgcaaatttctctaggtctaggtctgtgtgccccccgcggacaatttctgctgtattttatggccccctgtgctgagcgttcggcatggtacttgtggtagagaaggatgaagcattcaattattcatagcgttctcgaaactaaaggttgaaatgttgtggctaagagaaagctaaatgctgtggctagagaaaccatctatgcatcccgggagtgttgagccaacgaatcttgtgcatcatttgattgccatgagttagatggttgttcttatttcacttccccttttcagcgaaaaagttgaatacagggtgagacaagtgttttgactgacgattctgcatatgttttcaagaaatatagcgcttctgcaatgctaaatattccatgtaaattgctagttattggatgtttattatctattttctagatgatcttggatggttctttataccaaattaccttacatatacagatggcatattatcagacatagcttcttagacatccaaaattgctacatgtactggccagacattatctgcaaattaaactaatattgtgtttgtgtagtcatggtttgttgtttatcaattgaatgattgttaaacggaagtgataattgatgttcaggtgtcaa

SEQ ID NO: 15619 - DNA, 933 bp, Brachypodium distachyon
  Intron number 2 from transcript Bradi4g02760.2 (locus Brad i4g02760) derived from phytozome v7.0 (chr-ID Bd4; pos 204 7525 to 2048457 reverse strand)
gagaggactttgatcttgtgcacgagctttgattggtgtgagttctcctcgatttccttggtgttaggtcgattcaaactgctttcttttcctttcagaagcttaatttgctttgcttccgtttgggcatgtagaatttgatattggactattggattccgatcaaattgatcaagcgaaaaagacagtccagctgattgccagaccttgtgatatggggaaagtttcccttgtgtaatcacaatacaccttttgccaccgctgatatggaaatatgggatcattggttgataggaatcttgcctaataatttgtttgtcacttccagtgatgactgtatggtcccaatgccctattcttagacaagtgctactctctcttgtatgaatgtatgacccttggttacactcagagccctcttgagatgagcaagaatatttttttgcgtcattaaataatatctcatcctgttaggtgccttgtgataaaaaatattaggtcatcacctagagtggttggagtatgatgtgggttggcctccactagttcactgattgccaggcagccgaaatagctgcttaagtatagcagagttttgctgaatccagagttctcagaggtttccaggtatctgaaatgtggctgatatagagttgctttgctgcattggctttgtttttcttcttgtttcttcactgaaagtcagagtgaaactgatcactggatatgtgattggacatgtggtgtgttttgttccttgatcacctctgttccttgtgattcatatgatggtgcagaaatgccaaccttgtcctgaactgaagatctatcactgcaatacaacactgtgcatgtctctagaagttctgtttctgaactcattctgttcccattgcaggctcaaagaaatttgatctcaaataagctcaaggc

SEQ ID NO: 15620 - DNA, 1056 bp, Brachypodium distachyon
  Intron number 1 from transcript Bradi4g18170.1 (locus Brad i4g18170) derived from phytozome v7.0 (chr-ID Bd4; pos 200 25606 to 20026661)
ttgggtgcgcggcgctgccttccctgagcttgaaggtagctcaagggctttaaactctatggctttgtgcgcccatgtcacttgctagttgctacctaagtaaataactttttctctgttcttgtgctcctttgtagcgttttagcttgtttctcgtgctgcttttggttaaaaaattcctttaatttctagtggtactagagtgcgccgcttgcagttttgtagctgcgacttgtagggacttctgtaagaggaaccaaatgtgaggtgtttttgtgtggccagattgggttaagtacaagctcgaatcagcgacgggcatgttcttatatattgccctattccactgagacatatttaaacttttagctaggagcctaggaaaggaattgaattagctgcactacagttagttaaccaatccgtatagtatatgcgaatgacccatcacaccaactgtttgatagcatttttccgtcaaaactattgaattagttagtcttcgagaccaagtaacaactccagggagtagctttcgacctttggtggccgcaatttgggtgtcctcatccttatttatcaaaagaacgacctttgtatcaggacttcaggtcatcaccatgacagagtcttttctaccattttggtatcaagctaagaggactaggtatctgatcttgcggacctggactctgggtatttgattcaaatatatcctaaatttttggtttatttcagacttttgaaaggtatgcatttcatttaaattattataatcagctctatgtatgtttaaaaactgaatgcttgaaaaatatatccaaatatggcctgaatatctagttacctttactttctttactgtcaaaacggcaccgcgaattgattttggaaggatcccatgccctccttccgaatagcactgtgcatttgattggtgaagcccgtacgtttagtggcaactcacctgaaatgcgttctgaatctcgatctggtttccgcctgttgactgaacttgcagggaagcagaattgtcggccggaagaatctgatctc

SEQ ID NO: 15621 - DNA, 902 bp, Brachypodium distachyon
  Intron number 3 from transcript Bradi4g15700.2 (locus Brad i4g15700) derived from phytozome v7.0 (chr-ID Bd4; pos 163 25487 to 16326388 reverse strand)
gattgttcggacacattgcaaagcagtgcacacaggttggtctccctggttatgaggatttgtcgctcggtgacttgggtatgttcactcatgcctttgacgagcacattctatgcacgagcacattctatgcacatgtactgttgctgtgttggaggttatttcggttcttgcttacaaagggtctgtcttctttaatttccagtttatgcaatcatgcaaatgtagtcttaggctttctgctggaagcatggcttaatacctgctttctgttgagtgctgcctacatcttggtcaatttctcattcggcatattttagtggacaaattgtaggacagccatgccatattcaacttcagtgtcctgttaatcttggtttaaacaactcttttctacccatcatgccagttaatatttttcttccagatctatttgttcattgttgctcctctgtcttgctatatcattcgagggggagtggggtttatatgtttctttttttatatgtaatgatttttggagtcacccactttttgggcttgtgcatgcatgtgtattcaagccttaagggtaaattttggatttaactaaattacttgctgtgttatttgtcatgcacatattctggtactccctccatccaacaaaggatgtctcaactttgactaaatttgaatgcatctacatactaagtcatgtctagatacatacacattttgacaaacttgagacatcctttgttggacagagggagtagtattttctgcattttcctgcaagtgtagtttatctcgtgttgatttacaaatggttatttcttgtggtcgtcatcatcagcaatcaaatatttcttaatacttttgtagggtcaagattgtttcatctgcaaaaaaggaggtca

SEQ ID NO: 15622 - DNA, 817 bp, Brachypodium distachyon
  Intron number 2 from transcript Bradi5g13930.2 (locus Brad i5g13930) derived from phytozome v7.0 (chr-ID Bd5; pos 173 54687 to 17355503)
ctggaaagcaggcagaggtttgtcaccctagtccttaaatgtcttggacttgtggttaaatagtaccatgccctggcaaaggaggtttctgcatattagctcctctgctctgattataagctaataagcataatcttttctatttataacctgctacatgttcatgctgccagaaacaacactaacaagacctgtcacctctatatataaaattacagcaaaattgttatcagagattgagatcgtgctgttcttttttcttttcagacacgcaccaaaatacgtgtcattttgtattagaagaagacgccaagatggcacaaagtacaaccaaaacaaagtaaacatcaaaaggcaaaactgcaaggacccgactaaactagctaaaagaaaaaataagctaaattaaggctaaggtcgcagattgttctgttgttgtctgtgccagtatcatatggctaaaagtaccttgaacatttgattagttgttggcaaatatcagccaatttgtttagcctgaactgtgtgaacatgaaatttagataataacgaactgtatgtttttaaagaccccagttgaaataataacaaaagtaccatggaagcatttttttgtgagcggatattttttcttgtttactactcccactgttgtctatgtcgaattatttaattattgacttggataagacagtatagattcaccatgcgtgatcttttcagcttttatgtggcactaaagcaaagatggacactaatattgctgacgcaaatcttatcaggtgctgaatcaaattgtctacgagcttcctctaga

SEQ ID NO: 15623 - DNA, 671 bp, Brachypodium distachyon
  Intron number 2 from transcript Bradi4g24960.1 (locus Brad i4g24960) derived from phytozome v7.0 (chr-ID Bd4; pos 301 98501 to 30199171 reverse strand)
acgccatcttatcccagttcgaccttgcccgccgggtacgtgcactgagctgccgtgaaattgcccacattttatctggatttggcggttaaattggtatctttattgttggaagaggttgtggcattgtatggatccggaggtggggactgaaatgtgccaaatgtgtgccgggtggccgcactgatttattccgtgttcttcaagttttgtgctgaataggaacatataattagcgtgggttaaaatgtgtagcggtagattatatgttccgtgtggggcatgcgaggtaaaataagttcggcgtgggcgtcattgaaacaaatatgtttttactcggtgccaaagataataccaccgatataattttgtgctttggaatatccagcaagtgatacagtcgggcacttttaggccattagtttgggtcactattaaatggttgtttcatttcttgtcaagatatttttcattctaggtaatcttgtttcatgaaattgacagttattttcatgcagaaagagaaagaattaaaatgatagctatttaaactcattgcgaatataaattgcttgcaaattggctttgagttttgagggcttcactaagtattttatgtctaaatgttgcttttgagctttaggccgaggcaacgatattgaggggtcccc

SEQ ID NO: 15624 - DNA, 786 bp, Brachypodium distachyon
  Intron number 2 from transcript Bradi3g56640.1 (locus Brad i3g56640) derived from phytozome v7.0 (chr-ID Bd3; pos 564 53518 to 56454303)
gccagtcggtatgtccaatagctattttgtattttgcattgttgcagcattgtaattggattcaagtctacgcaacactcttttaaatgcagttcttattgagttggcagtgtttagaagtagaaaattattccagtgattaatagggacctgaagtgtagatacttggatgctgtggatatgattcggttactaagcctgcatgctacttgtcgtatgcttgatgctaacatggagtaggcctggctcatttatacgactctaggagtggcttgactggggtattgattgtccattcccttatttatagggttatctggatcaacaaaacgacaacgatctcactcactagcctgataaatttgtgtcttgtttactgtgttgcctggatcaatcaagcttgtcctcttccacagtttaagaatgtcatttgtcttctaccagtttgatatcacacttcctttagcgacatagctatttgttgcaagactacctctcttctcatgatatctacgtggcatgctatataaaaaaatgcttccgttgttgttttctactctgtcttccaattataaaccactgtcgattttctgtaattcttcacgtaggataaagaaagaagttatttctcttgctcggttcttgaattgatataccaatcttgaaatttaccatcgcgattttccataagtatggttttgtttctgttgttgctatctactataattttaactacataaacgacatagcaatgcgctaaatggttcttctccttctctgtttaga

SEQ ID NO: 15625 - DNA, 967 bp, Brachypodium distachyon
  Intron number 1 from transcript Bradi3g47760.1 (locus Brad i3g47760) derived from phytozome v7.0 (chr-ID Bd3; pos 493 61116 to 49362082 reverse strand)
cgcagcgccgcaagctcgcgcagttccagcagcaggtctcctgctcccgccctaccctatccgatgatccctctccggcgcccggtcctattaagccgtcgaattcttgtagtttgtgttgttattcttatttgagattcaattcccgtaatctgctgatctccgaattctgcccccggggatttgttaatatcagatttgctgcccataccgccaatctcgagacttgcgggcgtaattaagattaggttttgcataaagctgtttccacaactgaatgaagaggacttgttgccacgttgttatttttgtcaggatgacccaattttgacgtctcctgctcttcttagattagtttgttgtttgtcctaggggattctcaatagtgaccagatcactttctttttttttgacagcgtgaccagatcactttgttgtttgtcctttcggattcagagtagcgaccagatttagaatgtctggccgtgtaatcaagagtggaggttttgagtcaccaattagaaagatgaatgtcagtaagagacatttgggttatcaaatcaggaagggattactttccgtggcgtattgcaaaaaccagattggcttctagtgcatgcattatgtaccatccatgatcttgtccttttaatgctatctcctatcggtatgtcaatcatttgccagtgcaaacaatctgatttgtgtaatagtatgttggttaaaaaaaaattgtttcgctgtttgaggttttgagtttgcacccatgagttaagctttaggtgaatgtactttgtggtgttgtaatgaagtgtttgattatcttgactggactaattggcttgtcttgcatcaagtcactgtaaaaagcctttttctgccccagttaagggggtcctgatgagttctgtttatgtgtggttcacttccagcttgagaaggtgattgaagcagaaaaggaagctgc

SEQ ID NO: 15626 - DNA, 859 bp, Brachypodium distachyon
  Intron number 2 from transcript Bradi3g49650.1 (locus Brad i3g49650) derived from phytozome v7.0 (chr-ID Bd3; pos 509 46671 to 50947529)
gcgtgttttactaccttgtgcctggattcccagaggtaatctattgatgcttcacattgggtcaactcagcgagacggctcttacactacaagatgagcatttatcacataatcttggagcattcgatctaggatgtttttacttttaggccttgcagttatagttttcataatggtgaaacctgaagaagctgtatctggctatctgttactagtagttgtctgccatcgtgttacacaattataggacaattgctaccgtttgattaattcactcagaattgtaagggatacttcttcataaatatgtttagtaaaaagttggtttacaacattataacgttaggaatacatgtgactatgtgagtaaacccttttcaagggactccttgtagggctcacagtgatcgcatcataatggaattttctaccgtatagtttctttgaagaggactactatgtgcaggtgaccacttgagttgttcctgaaagtttcatttcttaatttggctttacatgtttgagagaaacactcgtggaggtggaagccgctcttctctataacatgttgtctgatttgttcgaacaagaacaagaatccatatatgcaaaagacctggaggtctaatttagtataatttgtttattaatgctctgatcaattgttgtgtgctgtgagatccaaaacatgaatatctctgaaagcataatgatgttgtcttattgtgcatgatgctcagaaataccttattttgtaactgctgcttcaaactattttcctattatttgtaattctggttattcaactttagactggttattaagtagatttttcgacggtttttgctgttgtacaggc

SEQ ID NO: 15627 - DNA, 1014 bp, Brachypodium distachyon
  Intron number 1 from transcript Bradi5g11360.1 (locus Brad i5g11360) derived from phytozome v7.0 (chr-ID Bd5; pos 149 36745 to 14937758 reverse strand)
gcgcttccgcacctcgccgccgtctccgccgtcacgtgagtatccactctcgtcgctcccgtagcgccggcccgggcccggccgaaactctctgagcccttatctgagcgtttcgatcaatttctgcgctttgatagcgaaattctgttctttgatcgtggaaccctcgtatagcgatacaggtagttctgccagctctacatagtttgagtagcacactctacgcgaaccaacaagtttgaggggaatccttcattcctttgctcttggatttgttccacttgacgtgaacagacaggaagattaggtttatagtgaggttgatttgatctagcttcgatcaaaacatgcccgtgtcaccagttattttgttgtttctgtcaaaaaaaaaattggcaccaagcagataatgacattattaaatcggtactccctctgttcctgaatgtaacaagtcctaactttgtcctaagtcaaacttctgaaactttgaccaaatttacagaaaaatctaccaacatttatgactccaaattagtttaattacatccatcatgatatatattatcatagtatacctaattgatattctagatgttgataaattgttttataaagttggtcaaattttaagaagtttgacttaggacaaagtttggacttcgtacatttagaaacggaggaagtaatatgtaagaatgtgagtgccgtttcctcaaaaaatatgcaggtgccaattcatccatttaagtgtcgacactcttatgaacacgggcttcattaagcatgagagaaatgaatcacatattacaaactgcaatcagtcatttgtcgaactccattgtctgagtttagaaattatatccattctgaatgtatggtaacctccttctctgactattccttgtcctgtataatttttcttatctcgtgccaaattatattaccaaacccaggcttcttcaatctatccttgcaggggtattcgccttgcaacctgggttttcaaagttc

SEQ ID NO: 15628 - DNA, 796 bp, Brachypodium distachyon
  Intron number 3 from transcript Bradi4g24480.1 (locus Brad i4g24480) derived from phytozome v7.0 (chr-ID Bd4; pos 296 26696 to 29627491)
tgggagccaaattgtcccaggaccccagaaagaaggtaatatactaatgtattttcagtttgttctacacagattggcggcactgcatgttctacatgaaaaattgtttttttcctgcctttatgaaactgaacaaatgtctgcacgttgtttaatgtgcattctttgagccattttgcactattatgtagttaaggtataacattctgtgtaaggtaggtagtttctgctgggtttacaaattgaaactgaaacggaaacatgtatctgctagaatttgacatctacttgggtgttccctgagtctccgaagaactcaaagtcaatagaatatactccctccgtcccataattcttgttgaaatattacatgtatctagacgccttttaggaatagatacatccacttttgggcaaattggagacaagaattatgggatggagagagtatttgatatttgcagagatatcactatcatttgttattactaagtatatcctgacatcatttagattctctgaatactttcttggcccacaacctagaatttcctcattatctgcagacctaccactcatattctgaggatgtttgtcaaacctgcaaggctgtagccacattgaatgaataatacggagtcctcgtagttatgcaccaaaacatcttcacgattcaggagggctcttcttttctagtcatgaaacagaagaacttgggttatattgtaacacatttttcatgttattcatttttcttccagggcatttagtgtatacctttgatataacagctgca

SEQ ID NO: 15629 - DNA, 458 bp, Brachypodium distachyon
  Intron number 1 from transcript Bradi4g42190.1 (locus Brad i4g42190) derived from phytozome v7.0 (chr-ID Bd4; pos 462 65143 to 46265600 reverse strand)
ttgacattgtaagcaatgtcgatgcatcggtaccttgaacaagcttcgatctaagtcttgtgatgctaacccccgtcgcgtgatcgctctcttcatctttgttttctacttcctcttcttcttcaggagagtcacaaaggcatcatgctttatctatatgttgtagattttaataacataggaattctcaaaatgaactagtttcttcaaaggacgcgactaagttaagtcgacgtctattctaaattttttctcaaaataaagtactttatccgatccaaattaattgtatagatacgaatgtacctacataatgaaatacgtctagatacatatgtatttagataaaactgcgacaattaatttggatacgagggaggcacttgtaattagagagggttctaaaatatatttcatgaacaggtaaggaccgagccgcaaaagaggaaaccaaacaa

SEQ ID NO: 15630 - DNA, 728 bp, Brachypodium distachyon
  Intron number 1 from transcript Bradi4g36050.1 (locus Brad i4g36050) derived from phytozome v7.0 (chr-ID Bd4; pos 413 27305 to 41328032 reverse strand)
cgctcgcagcggcgtccaggtccacgtggcctccggtccgtcccgcctcctttccttatcagtgatgtgccggtgccatcgattcttaatttcgggtccccgttgcgcgactagtagcacctaggtggctaggttaggttcatcctcgctcgattttttctccagactgcagtttgaagcgtttctcgggtttaattttgacgagggtactgtgtgagtggaatctgtttatattgatttgagtgatcgaggatcgttattaagagattgaggtgctggaggtactggctagggttggatgggagttgtaggcttgtagctgcgacgcgttgttccgttgtaaaaccaacaggtgttcaatggaatttggaaggattatgagtttgagggaggcaggtggacgttcttatccaagtgatctggatatggttctcccattgctctctctgtgtcagttcttatgcgtttctaggctatatgtaagtggctgctgttaagagaagccaaaatgcataaggatgacattgttctagtgatataacaagtcaaacctactatcatctgtgcaagcagaacaatgaggtggagtaaaggataagttctcttatgcatgatgagcttgctatggctttatcatcgaccaaaactagattttatttttttaggctttaatgagcttgagatatataagtaatggcacactttgtttatctgcagatcctaagggt

SEQ ID NO: 15631 - DNA, 1055 bp, Brachypodium distachyon
  Intron number 4 from transcript Bradi5g12340.2 (locus Brad i5g12340) derived from phytozome v7.0 (chr-ID Bd5; pos 158 19891 to 15820945 reverse strand)
catctgcagtggctggaactgcaattggcaagctggtgagctaattgtcatgtgcatatccagattaccctcctccttgtcttcagtcgatgtccagtcaattagttttcagtttttcacctgggcttccctggatatgatagcatcattaagtcggcccaaaccatactttagactagtactgcacattacagagatggagtacttttcagtggacattgccatccatccttgaaaacaaacaacaagggattttcgttgtctgaacatcatttgtcgttggttgtgttgttcgtattgcgggaaggtttaacattcttacatggttcctgtccctttgccctttggtacaagttaacttgcatatgcttatttcttcaataaaaaggtaatgggatgacttagtgggagacatagtactctcattgtgagagaactgatgatcaagtaaatattaggatttatgaaacattgtcggaatgtgcatcatgattaaattaacttcgacacttctttgtttctagagtacacacctaattgcacttcttgttgtgttctagggaacacacagaaattgcacaaagattacatcattgcagaaccaaagccaccaatggttattggttagtgcaatcaaactagcaacatggctgcaaccacaaagaaacaaactaggtctgatcgaaaaaacaaaaggaaaacaaaaaggataaaatgttgcttcttctctgatgacctggcatgagatggcagcttccaagctccatggcaccagtcggcttccacagctcagcctcattaatttgatactcctacttcagttcgttggtatccatttatatggtgggcgcttagctctgaatgggcgatgagtgaataaaatcgccgcgtgttgtaattatgaacttttttctataattatatatatactgtcggaatctctcctacagtttttcggtcaaaaaaaagtgaataaaatgcacttttaaatctcatgcctggtattcgtcatttctgtaggcagtttcaaaagggagacaaggcagagaagcaca

SEQ ID NO: 15632 - DNA, 876 bp, Brachypodium distachyon
  Intron number 1 from transcript Bradi5g08400.1 (locus Brad i5g08400) derived from phytozome v7.0 (chr-ID Bd5; pos 111 09339 to 11110214)
ccacgcagttcagcagcacagcgaacgcatctcaggtcctagtcttatctccaaattccttcgttcttacttctgctcccaaaagttagatattttcagttgttaagaacctaggatatcgtcccacatgttcctcctgtcgacgctcttaagctgtgcggtagtatgattgctaatttggttctgatcgatgaagattattggtctaggctgttgcttggagttgtggactaggtaatctttcaggactgttgaatccagattgttcagttgaatttttttctttcttttctgcctttcgttttggatatcggtatctcttaaaaaaatattgttgcgggatgctttcacttgtcaggtttacagttgcaagattaaaaattgtaggtttcatggttgtagggtttgtattgagatgcttctttttagggactacggctggccaagggcagcctgcgccatttcattaaatcaaaagcaactgttatttacaattgagatgcaagccaaacaaaaatacagataagtgatttcaacacctttgctaaatgggagagcataacaccccaatcaaaaaattgtgttggggtgctattccccatttccttttccagaatgtcttgcttgtagttcattcattgtttccaagatgatgtttgtgctgttgtataccagtattatcgtgattttgggttagtgtatcatggatcaaatctaatttcaaggttcagtttctcatgatagtttcacaattttagttagagatgtatgccttcttttgttgctgtacaacttagttacttcatattttggcagataacttgcttatgtgtctgctctaactcttcgattattgaactgtagggagtgctggcg

SEQ ID NO: 15633 - DNA, 696 bp, Brachypodium distachyon
  Intron number 2 from transcript Bradi3g53760.2 (locus Brad i3g53760) derived from phytozome v7.0 (chr-ID Bd3; pos 543 66082 to 54366777 reverse strand)
agtttcgtgtgtttggagctctgcgaaggttagtttctggttactctgttatcctttaccttttataataatatgtgtttggttttgcctttgttgcattggatatatgacgtttttatgatacatgcattacagagaggactattatgcatgtcagtaccttttaagggctttgggttctttcaagcaattatgatgtttaccattgaagctgctatttatttaattgcatatatgtttgagtggactataattaatcctgatgtagttcattttgcaaccttttaactaagtaaatctgcccttgtgaaatgatatctacttctagagttgcttgttgatgggtatgttcgtttttcagtgaacatcaatacataacatgcctagcaactattttttttgttgctattcagtacatagttttaaattgagcttttgggccactgagagttacttctttcagtgtgtttgagcacttcttccttccaaaaatgtggctctgatcctttgagaaggagatttgcatcaatatttgtttagacatttggctgatggaatgaccagttatatgtttctaactatttaaaatgcacagtagtctgggtttaatgttttgtatctatctcttgacatcttcagctgattgttctgttcaatgcagtgtctgggttgcacgtaagccacctggttttgcat

SEQ ID NO: 15634 - DNA, 915 bp, Brachypodium distachyon
  Intron number 2 from transcript Bradi5g15540.5 (locus Brad i5g15540) derived from phytozome v7.0 (chr-ID Bd5; pos 189 01421 to 18902335 reverse strand)
tcttcacccacacccggcgtaagtgatcctacaaaccccatgaatttcctggttcattggcttactctgatcgattccccgtctctggttaggatagagctggaagtctgaaaccgagttattctttcctccctgctccgtgaaacagagagatggttgtagttccataaatagcaattcaggtcgttgatgaaatttgaagtagatgatccggtaatttttttcgtaccatgtacgcggatcatgcatctggattagtttactgttgccaaattatcagcatgatagtcgatagagacataaaaccatttcctacctactacagctaagaccggggtccaaaagaagttagcgttagagattaagtgctgcatgcctttaatattaccgctgagcagtgagatcccgatgccgaacaatacaaaagattcagaggctggcaccggggacccatttcatcgtcgtggatgcagctgggtttaacttactgacaaggaaaagagagagattttgagttataatttcttttccccaaggggattttggttatttgagttgtccatgtcgatcttactagtctccacaaaccacaacaaccttccgctaatgattgcgggagtggtcacggaattgttcttatccttttctctatatcgtatgattgcattgtactattctcctcaaacttaacggctttatccttgcactttatgaaatataatcagtctaattgctgcgattctgtccaagtaaaacgagacagagcaattctctcacatgcagttcccctgcacgttcttaagaaaaacaaagaaaaagacagtccgcgaccagatgcgcatgtctatcttataagtttaaactcctgatattgtcacaaaaagatttgattctccacagctggaggaataaggg

SEQ ID NO: 15635 - DNA, 788 bp, Brachypodium distachyon
  Intron number 1 from transcript Bradi4g35050.1 (locus Brad i4g35050) derived from phytozome v7.0 (chr-ID Bd4; pos 405 64027 to 40564814)
agaaagaaggtacttcctcttatttagtgcctttcttgttgtctcatgtttatccagcatttcagcctgtacttaagttgattgattcgaggcctctgttctcgaatcactggggaataggtttgaaactcccatggagacttgagatttagtttccggatttaaatgttatggttttgggtcctccagaatcatatcatctactctctttaattttaaatggagaccagagggggatggacaccttggcttttcaaagaagaagcaagaaactccgttgagatcactttctgtaattttatttgctgtatccatgcgaccatggcatcaggatgtgctgtgaaacattacatgctagtgttccttcaacaataaaagttctagtaagtctaaatccatgtagaaaatagtgagcatctccacctagcatctgttcatggtcctttgagaattgatgtagtgcaagttgtggcgtgagcaacaaaatggatctttgatttttaatgttaaaacatggatacaaaggtaaaaccatgctcatttactgcaaggtagtgcgttttcagcatagttgtcagcacttcagattattttcttgacatctgaactatgtaacgatttattacaggctaggtatttatgttttattttcttcaattctgaaagaatgtctatcacaagggattttatcgtgcaatttttttattctttctagttattctctcttttcctgttgtactgttgttgctggggcctaaagctctttgtaaacacatggttaccaggaa

SEQ ID NO: 15636 - DNA, 757 bp, Brachypodium distachyon
  Intron number 3 from transcript Bradi4g27040.1 (locus Brad i4g27040) derived from phytozome v7.0 (chr-ID Bd4; pos 320 56114 to 32056870)
gccaagttgctgctcgtctgccaggaaggcctcaggtaatactactctagtaagtgtatatattaattagagtaaaatacaccactggtccatgaactcggcaaaaataaacattttagtccacgaactcaaaaaacgcacacttaaacccagaaactgggactactgtgtcattttagtccaaaaacagtccggcgaggcttaaacacgctaagtggccgccatgtcggcttcggcgaccacttcaccggcatcatctcgtcaaaattgagcgttgtggacttgatagcaaccttaggcgaggcggctgcggcaacgacgtggttctcaggccccaggatctttgtctgggcgcggccgccttgcctctcgcgggcacactcatggcatagtgatttggaaaaaaaaaaatcctaagaaaatggagcagcagcccgcagtcctggccgacgtggtggccacagtaaacaacaacgaccaccaggactactaatgccaccacaccacacagtagtcccagtttaggggtttaagtgtgcgttttccgaattcgtgaactaaaatgttcatttttgccgagttcatgtaccagtggtttcatgtactagtggtgcattttactctattaattaacctctccttttctagtaagtaatgtccacaacaaaatgtactagttagagtgccagccagcagcttaattatctgccattttcttttcctcttcatctttgctcaaggtccacagcagctgcag

SEQ ID NO: 15637 - DNA, 786 bp, Brachypodium distachyon
  Intron number 2 from transcript Bradi4g35070.1 (locus Brad i4g35070) derived from phytozome v7.0 (chr-ID Bd4; pos 405 71369 to 40572154)
gacaagaagctacaaagtaagtgaaataatcttaccaaaagtttcaagttaattcatctcctgtatattacatggacttttgtttttgttctatgtattcagtcgtacagttgcttagacggtgaattcacttgtattccgagaatcatgttcagacttcgagatgccctatttcgttctatctattttgtcaggcatttaggttccttttttaatcttagtttgttctgactcctgacgtgagcggaatattaaagctatggatttatgtccaaatggagctacttgtcatagctgctctaatatggcacttgttggttcatttcctatctatcatgtgggccaagttaagtgtcactgaatttgctgtcgtgtttaccactcatcttttagcgaaatgtcgttttcttcaaaattcttatttaacggctgctctaagtgatgataatatgaagaagctatggattaatttccacatgaggctcttttgtcatagttactctgataggctgccgtatgaagccctttgcaattttatcttgtcttttgatatgttactctgacatgttatgttgaagcattgaaaatcagagcctcaatttcttgtgtgcacagtattgttggagaatacaccctgcacatttagacatggccgtagcgtagcatttaaggattggtttctgtctttgttgtttctgctgccattgctacagttttgttctcttttaaatttgttgtggtggttcgtctttggtaatgaacagtttgatttgttttccagtcaag

SEQ ID NO: 15638 - DNA, 959 bp, Brachypodium distachyon
  Intron number 1 from transcript Bradi4g26410.1 (locus Brad i4g26410) derived from phytozome v7.0 (chr-ID Bd4; pos 316 15382 to 31616340 reverse strand)
ttcgccaagacagcagtagaaggagctacctagctgtaagtcatgtctcttcttctcttctctgcaattctttctatctgatgcaactgccctgccctgctatgctaccgtgccctctgaatcatcatactggcgactgctgtgtggtcaaattgttctttcgaggtaaatggtagccaaaatttcagttacatggtcccaatttcttgtgtgattacttcatttcaacaagaatcttcttcctcttcttcttattccctggtcgaggaatctgaccagccgtcacctcccgtgtattctttgatctgatggtgccactgctggaagatgcccttttttgttctttccacagccccttgttccatcctgcagcagcttcctgcatgcgaatattcctttttcgtgcccaatttcacaacagatatccctgcctagatccacaccagaaggatggtcttattccttttgacctccactggattattaattctagtatcagggaaacaattatctctgaatttttcctccaggattctctctgacactaaacaactcccctgattgacctccttggctacgcatcttattgtgtggcttcactgccatctaatattctatccgatgattataaatcctagatgactgactgctcagcagcatttgcatgtggccattctctgcaccacaaagatgagatttttctactttccccgagattcgagtttcttttttcctcttcagagtttagtcagacagaaaaaacatcatcctgtcatcttcattcctttccatgtatggactgtaaattttccactggtcgacagtgaaacaacagtttgactgtgcgtggaaacttgcttaaactagcatcattcattcctttccatgcatcaactgtagatttatcattttccatttgtacaggtgacagtgaaacaatttgacaacagtgcttcgtt

SEQ ID NO: 15639 - DNA, 929 bp, Brachypodium distachyon
  Intron number 1 from transcript Bradi5g16060.2 (locus Brad i5g16060) derived from phytozome v7.0 (chr-ID Bd5; pos 194 53825 to 19454753 reverse strand)
gttcctctgcaaccagatcggatttaattagacctgtaagttccttggcagcaatttggtcccgttacccgtgcctctgttgggattcttgcctttgtttccaggttgatttgggttctgccgttctggtaggatcgggggctagctcttcttcctttccgagcgttttcttgatgtcgttctctcgtaggaaacatcaaacatgcacgttcagatatcttgggtacgaaaaatctagacttcgaaagtctgttccttgacggcgctctgcatgcatgtctgtgttcgtgtgtctgcgccccgtggttttgattggtctggctcaggtctggctttacgtaatcatttctacaggtttctctcttagtaggtctctgtctatatgacttatgaactgcaggagcagactggctgggtccttgtccatgggttactttgttgatttgattcttttcatggagttgttgattttttttgtgatttgttatgggggttttgcacttcctgtgttttgcatgcattgacagacactgactgtcgacgctgttatgtctgtcaatttgatcctatctcaagaaagtcctctacggactacggcggactacttcgtagatcgagcaagtttgtttggctgaattctgaactctttcgaggattacgttgggggaaaaagaagagacgagattctgcctaaaggatttttgtttctgaagtgtaccattctatctttgtgtcagagtatatatagctctttctgttgatcatagttctcttctgaggcaattttgattttggttttgagttttctgtttgtcgtcaaacattacttgatactgtttcctgtattgagttttgaagattctaaattctttgactgcccaattgcatctgcagggactgttgccagcaatccatacttggagggatta

SEQ ID NO: 15640 - DNA, 998 bp, Brachypodium distachyon
  Intron number 1 from transcript Bradi4g10710.1 (locus Brad i4g10710) derived from phytozome v7.0 (chr-ID Bd4; pos 104 29620 to 10430617 reverse strand)
ccggggttcgctagcaccagcccgcccaagagtaggtgagcaagctctagcttagatctgcattgggcgtgggtgtttattcttgtagatcggagctctaggtaatggtagattgaactaaaatgtatgaactaggaccaaattctagtgatagttgcaggttttacacaaagtgagagcttccatggtatcggtaactaaggctcatttagcggttgctggactgtgctgcggcaaacttattttataatctgctgtgaaaatatcaacacggaagctggaaaaagttgattggccaaaaggaaaaataggtaaaagctggttgaaaaagctggattatcataatccacctcaattccaaactcagactaagttgagcaaaattagcagggatctccttttcccatgcaatatgctgatgctttctgtacattcgtgagctttcgttcgtaaattaaatctgttgattataggcaatgtatgcactatattgaattgagcctaacattgttcaactccactgatgccacttgaaaatcttcttttttcgtattggtaggtcagagaaatctataattcgaagaaggtaactgccaccataaaatttgatttataaatatatttacagaatagataagaagtttgtgaaataggaagtgttacttgccagaaacctcccacttttatgcgaagtactaccagtctttactactataaaagactcaatcactcaattggtggcggcggtccgtcactattggaccgcatcacttgatttcttttcatcatttgttgatttggcacaaatcattaaagtgtaaatgacttgtatgaagatgaaaatacaacattctttttaaacatggtaatttttaatctgtagcagcacagaacgattgtgctagttcttataagttctctcaaaggtgtgttatctcttcacaatgatgacactgtcagtttcataacattcattataattttcaggaagattgacg

SEQ ID NO: 15641 - DNA, 569 bp, Brachypodium distachyon
  Intron number 1 from transcript Bradi4g27970.1 (locus Brad i4g27970) derived from phytozome v7.0 (chr-ID Bd4; pos 333 20840 to 33321408)
cggaggccgtcagcttgactgataattgcgtccgtgtaggtctatactcgtctcttcatttcagtaactatactccacatttactgcttgagggattattttttggagaaatttggggatatgttttttattttctacggagcaattataatcattttcttattaaaattaaccatgaaatcatgtactccctccaacaactttgtactaaattcaagacacttattatggatcgaagggagtatttgtgttttgtaactttatttgtgaaataacggtgcaaattcagcgagttgatcatttttttcgaggaacggggttaacatttagggaggataatttgagtttgtatttttttatgtagcctgcaagattgcaagtaatacgtatttatagtgtgcatgcttaaaatgatctaaatattattataaggaaaaaggtgtcatttctgatattatttattttctgtgttgtagttctgcagttaagttgttatattcttcggtgtgtgctcatgggctttgcttgctgcagagattgaaagagttacactccaaagaatcgtccgc

SEQ ID NO: 15642 - DNA, 951 bp, Brachypodium distachyon
  Intron number 1 from transcript Bradi4g05300.1 (locus Brad i4g05300) derived from phytozome v7.0 (chr-ID Bd4; pos 437 3580 to 4374530 reverse strand)
ctcgcgtcagcccccgccgcatcgtcgcgtcctcggttggtttcctcggacttttctcccccaattacttgctcctgctcgatgattcaaataagggaaggaacataattttgctgttgttctttggcgttggaggattagggccggctaggagcgcaattcgatttgatgttgtggtagtttatgttactgttgtattggctgagctcgattttggagtaactgaaaagatgggctactagtttgtccagtgtttaatactggtgactatgcatcataatgtgttaaatcccacatttcgctcggtctaacctgaaactgtagtgcctgtctcaggtgttccatatgatattttgtgataggaacaaaaaattaagtgaaattaagatgcttaggactgacaatgttgacaatgcataacacttcacatgctacattgtgtaaattgttgttagaagtccttttggtcagggtgatggatatccttgatgcatcttttggcctgaatctaaacaggatgtgtcttctgtttagtaggtactgcagtactggtactgctagctggtttccttttttactctgctatggaactttcagtggattcctgggaatttagtgatctgaactgtagagttatcaggattccaaatatttgagttctctcatttgatagctctgtggtgcgattgtgagattatttgacttggttttgtggtatttacgttactgttgtattggctgagttcaattttggagtaactgaaaaatatgggctactagttagtcaagtgttaattactggtgattatgcacctaatgtgccaaatcccatattttgctcgttcgaacctgtaattgcagtacctgtctcaggtgtctatataatatttgtgatactaagaaacttttaagtgaaataaatattcctaactggaattttttttctgcagg

SEQ ID NO: 15643 - DNA, 747 bp, Brachypodium distachyon
  Intron number 2 from transcript Bradi3g57940.1 (locus Brad i3g57940) derived from phytozome v7.0 (chr-ID Bd3; pos 575 58820 to 57559566)
ctcaagcgtctcaactttgagctcgtccaggttgtctactgtgatcagttgccgcccggatgggagctttaattgttgtcaaataaattgccgtgatttgttaattcctgtctaaagtaactgcatctgaatggaaatggtatccagggtttcatagatgcatagtgtatatttatctgaatagagaagtgcacgataagttgcataatgtctttaggttggggaacttgtttggaaggattacgaaaataattggaaaaactaaccatgttgtgacttgtgagccaagctgcctgttcataaactcttaaagcctttttaacttgtatacaagattgattcaaaataaattttcatataagtactagggtctagaaaggttcttgctgcttggtattgtcgccttcgaattattagttggttgggcatactgcagtgtttactagaatacggtcctgtgctctgaactctgtttaggcttaggattatgggacaataggccaattcgtgcaccattaccaattatatatgcggactctcttttttaactactttaatttgattcaagagggcttgcagatagattcttgatcctcctcaaattgcttacccgtctctagtgttatgaacctgtgtgtgtttgctagtcaaatgtccatttgcgctggtctgctcttacttgtcttcttcaggatttggtttctggtatctaaaatttgttttaattatgacacagcgtaaagaact

SEQ ID NO: 15644 - DNA, 1006 bp, Brachypodium distachyon
  Intron number 2 from transcript Bradi3g49100.2 (locus Brad i3g49100) derived from phytozome v7.0 (chr-ID Bd3; pos 504 73610 to 50474615)
acatacagaacagcgaggaggtggctatcaagttggtatgtgatgaagaattcgattcttttgttcatatacatatgcatttctgtatgtggcattgttttatatgtatgcagtttcttagtcagcattggttagcttgtctcgtgccgatgtgaataaatttttggtccactaccagtagaaagagttaggttttttttgaaactttcagtagatgtgctgttgggaagtatagatattctggcattaatcagcaatgtctgggacattttatttcatgtcatgctcttttcatatgtctagtaactaggatttctgaacatttttagttgtctccaaggaaactggcctattggatataggcagaactagggatgcaagaaaaagggcaaagattccactgctcccagatggaagctttcctttccaagtaaaagttgtggcctttttgaagtatccctctgtgtttagggctattgttgggtagttcaaaaaatgcatctaatgctgtttgtttcaatctttgaaagacccatctgatgaaactcagattctacactttctgttgtttcaattattttagtactagaggcggttgtttggtagaatctcctgtgaagtaacattcctcaaaaaaattgacagttgctactttttaccatctgaactaaaagtccctcactatcagtggcgacaagcactgtagaattaaactctggtggtttattatagaacctcatataatttgtgtgtctttaagttcttaattcctacctctacgtgccttggattgtgggcataattgaagcaagatttatgttctgagaaagtgtaggtaatactcaaatagtaacagcattttcagaacttgagcatataatttactgagtgttagggcaggttacttcccctgcaacttcttgcatctggatatggctactgactgttcctttcatctcacaatttgataggagtctgttaaatcaaggcatcctcagcttcatta

SEQ ID NO: 15645 - DNA, 1056 bp, Brachypodium distachyon
  Intron number 1 from transcript Bradi4g31470.1 (locus Brad i4g31470) derived from phytozome v7.0 (chr-ID Bd4; pos 372 45503 to 37246558)
cgagccccatccgctgctctcaaggctcaggcgaggtagcgaatcctcttttcatccatcatttctaatcaaattgtaatgtatgtgcatgggttttgttttctcttgactggattggggaaactctatcagctgttccatggtgaaatctaggaagtgaactatagttgttcttaaccatgagtgtttgctcgacaagatggtttctagtttgtaccttgttcgttcgtttagggaccaattgttcgcaagaagaattcctggttgtttggacagcataatatccgcttaataatgatggaataatttcaatttcatgtttcaagacatattaacagtatccttgtgcctcatatggaaaattaacctgctttgtttttaagaaagtatgtgcatattctaccattggtgaaaatttgtaaaagtgtggtgtttaactgttagttgttttcctgctaccagaaaataaaaattctgaaacgctgaatttaaaatggacttttagtgtgagagtggtaagaatcagccaatcatggtctttctctattctcaaaatcacaaaattacatgcttttgttgtacagtgaaatgcatatctggaattcatacatattcctgaaattcatattgcactcttgggaatgtaattgatggaaggcttgagattttgtgaatcttcataggtggtgactgttagcataggtgcacccgtgtgaaaaaataattttaaccaatgcaaaaaaaacactaaaaaaaactacacgtatcaatgttcaagtcttctatgtgcatgtaaatttttcatgcaaaaccaattagttttgatatccgtgtaaaaagacaagttcagtgagtgtctgcttattagtgcactgattttcttccctggacataaaaatgttcctattgacatgaaatgtacaggcacatgcttaattgttttaaatattaaaacatgtacaggagccaaaacgttccttttcccatttgatgtttatgcttatctgcatttcctttctaggttgacgcggttaatattgaagaagccaaacaggc

SEQ ID NO: 15646 - DNA, 898 bp, Brachypodium distachyon
  Intron number 1 from transcript Bradi5g02850.2 (locus Brad i5g02850) derived from phytozome v7.0 (chr-ID Bd5; pos 311 3447 to 3114344 reverse strand)
taaggttgtcaatagtcttcccatgtttgattgatatataagcttgtgttgtttaattattagcagtgtagcaaagttacttatatttcaaggtttagtaggttttacatatttactttgacttggaaagtaatatattgtcatgacactgcaaaactatttactaacaaagtagaggatatcgttccttgattggaaacaaagcatttatatatgtgtacgctcatggatactaagagttctgtttaggatattcttgcataaaaggcaccatgcaccaatttgggaattagtggtggagaggaatctatttgaaatttgtttatgtatacttaattatttttgtctcacaacattcatggtgatctaatgaataccataggttagcatcataggtgaaatagttgtcactctatggaaattgttgttctattttgttgggagcatataaaatagacaacagaatccaacttgtgaaaaattactgtgaaccaacattctcaaaatttatttccatagatctataggaccatcacttccctttaatatgtggtctagaatttcaccgtcaggccagaacaagaaaataattcaagatataattttagaaagcacataaaactatctccaaattatggctgatttagaaacaactatactcttatactcacctttctttattataccaaaataatcatttacatttgtgcacacacgtatacactcatctcttggagttctatcagttctcatgatcttctaccatgactactttgatttctgctctcgatgttcttgcagcttatatatatagtatgtgttgatttttagctataggtctgtgcatatcatataattcttccaaaacgtactgtctcattttttttcagcagaaaca

SEQ ID NO: 15647 - DNA, 620 bp, Brachypodium distachyon
  Intron number 1 from transcript Bradi4g27720.1 (locus Brad i4g27720) derived from phytozome v7.0 (chr-ID Bd4; pos 328 93148 to 32893767)
ggaagcaacaacaccttgacgacctctcctcgcaggttatactcttacaaaaatatgctacttatgtgattagcaattaaaaatgcaatcaaatagaagtataaatttctatatcaaattttattgtttgcttcatgtattctaatttatatttatgagatgttgcactcatgcgcaggtgaaaagtaaagctgatgaaaacaaaggaccatttgaaatatctgttcagacaaaactcaattattgtgatgccttcctccacatgccccaccagttgcctcctacctaatactttcaacaacaccaaaattcattcatcaccatgagtagttatttagtttatcatatataggacgagttttcactaaacttaattgcagaatcaatcgatgcagaggctggggttatcctcctttcgaaaaaaacttgcagcatctcgtcttgttttttcaagaatggaagctatattgactcaaagtcgcatcaagcgatacaacaaaatgagaactcacgtcttctgcatgaaaaagaaaacaatttatacatgttttgctcggaagaagattaattgtgttataaaaacaggtggatcagctgaagaaccagaagcaacaactcgg

SEQ ID NO: 15648 - DNA, 566 bp, Brachypodium distachyon
  Intron number 1 from transcript Bradi4g16930.1 (locus Brad i4g16930) derived from phytozome v7.0 (chr-ID Bd4; pos 177 41208 to 17741773 reverse strand)
agaggctcgtcgccgtcgagagtggaaaacctccggtaattaattgattaattaatcaatgccacgtattagtacattgatttcttgtttgggagatattattttttgccgttcgtcaaataaaatgtcgtagtcgtttgccagcatgtcaactaagttctcttctctaggctctctttagttttttttttatcgggaaaaaagaatctaggctctctttagtttgtgcttttgctttctccgtgcatggcaagcaaagcaaagctacggtgtgcatttgacctcttgcacttttgcagtagtagcatcatcttacaactatggatcgttattgtttgacccgctctaggctactagcgttcttgctagatttataactttgcctgtgaagcaacatcctattgccccagactaaatcgatattccctctgatgcataataagtgtctttgatttagtacgactttatactaaatccgcgacacttatcatggatcgaagaagtaattaatgtgcgtacgtatatcttcaattttgactaaacatttgaatgcttgcatggccaga

SEQ ID NO: 15649 - DNA, 687 bp, Brachypodium distachyon
  Intron number 1 from transcript Bradi4g11080.1 (locus Brad i4g11080) derived from phytozome v7.0 (chr-ID Bd4; pos 108 43457 to 10844143 reverse strand)
cgcctccaggtgatttgattttgcacacccaatttgtctctgctctagtgctctcgtggagatttacaggtacgtggtagcagtgccatttttgcttgcttatctctagccagtaaaaaaatgtttgatttaggaaactgtgctcatgatttctggaattagaccgatgcatgatgcatcattttttcgaattaaggggctcagctcccgatttcattaatgaaaccgcagtagtatgtgtgacatagaggtccaacagaaagcaaatgacaatagctgggcattatgaaccaatactccagcatttatgatgcatcatggattcatgcaagttaattgcttagctgactgttccttccaattttgtttttacttagctgactgtaaaaggagtactagtatggattattatgatgagtaagggctgcttgagtgatctcttaattttgtttgctcctgatagaactactgaaaaaaaaatctatatatatggaaagtagtattatagaaaggaaaacataatttgttgtctgtgggggcattgtacggttattgctactctaaatgctttgttactcagtatgaagacatcacagtgttagccagttaatttggttcacattatttggtgaagatccgttgcttcttctctgatcattttcatttttcttcagggtaatctgcagc

SEQ ID NO: 15650 - DNA, 506 bp, Brachypodium distachyon
  Intron number 2 from transcript Bradi5g02170.2 (locus Brad i5g02170) derived from phytozome v7.0 (chr-ID Bd5; pos 226 0519 to 2261024)
tcggcccgagaggtacgttctagtattttctttctgctcttgtctcatgtcgcaagtttgtgttttctgaaccgcgggtaagttttgatacaagcttttgtctacgataacgttaataatgagctcattattagcagttcagacttcataatcatcagtttttttttggcgcaattatcgatctccgtcgagaggcacgactctgactttaaaagcaatttttttgatctaatacattcctaggtgccgattggttgtttgcggtttgagtctaaaacctctgcctgtgatcttggattttctgaatcattgtgtcacccttgaattatgttctcaagtgtcttgcaataatcattgcaaaaggtgaaattaaggggaggatcagttacagagtaatctggcatctactgggttaccttggccatcaccactcttctagctaggagagctagtctagatgctgtgcaatatgctgcaatgtgtaaccttttcttcctgaatgacag

SEQ ID NO: 15651 - DNA, 589 bp, Brachypodium distachyon
  Intron number 1 from transcript Bradi3g51620.1 (locus Brad i3g51620) derived from phytozome v7.0 (chr-ID Bd3; pos 526 80098 to 52680686 reverse strand)
cgcagactgacgaaggtttgctctttctcaacgggagcgtttgtttgatttcttgtgtgggtgaatgtgtacaagatgttattgctagataatgttgtgttaagcccaggttataatgctttcaattcggtaaggtaagctatgggctgtttgatccatgcactcaagatgtctggaaattgccttatctagcttagtctcatttgttgcctgcctcaaaatgttctaatgttctgaactttctaagacatgacctacagggttgacgtggaggttaactatagtctgagcctagactcagtgaagatttttctttgacaatttgacctgatttttgtttgcaaagtttaatggagtagtttctatgtcttttgggatgtcgagcacatgaaccaagtagtgcattgaagactagtaactttttttcgatgaaatttatgtgtttgtttgcttacagtaggcaagcaatcgtaccaggttgttctgtgaggcattgcaatgtaaatatcttgatttttgggggatttgggatgggggttatacagttgatgtgcttaattaagttattcctgtgatgtttgttcagaat

SEQ ID NO: 15652 - DNA, 763 bp, Brachypodium distachyon
  Intron number 1 from transcript Bradi5g11990.3 (locus Brad i5g11990) derived from phytozome v7.0 (chr-ID Bd5; pos 154 52400 to 15453162)
cggcgccacgcacctcttcttcaaccatctctacggtttggttcctttcggttgaatatgcttgtgtcagctagtatgcgtgttttccgagcaaaaagaatatcttctccgccgagaccctccttctggctaagttttctttgcagtcgttgatgatcaggttttgtgacaacttcatgctttagggccgctgttttgcttgaacttaacttggctagatgaaacagaggaagttactattaaattcgttatgaatttgattcacttttctttttccgtaaccatccgacttactctaagttgaaccagatccaccttactatattatcctaccatatcttaacatgttttaattgtatttcccactaaagcagtgatgctctcgagtcttaacaagcctgcagaggccaattggagtagtaattcccaatttagcaatctgtctttacgctttcctcattaagtaagcatttcggcaactccctccttaattgccaaaagttcttgctggcaccaacatattcagtgagggggtaaccatatttagctatattctgtaccatttaggtgcttgcactgcctactacagtcccaatcaattctttgtcctgagactaagataaatgcgttcaagccttgacagtaggcatcatatggactgttcctgtacagaaggtttcatgatccgatctaactcaaaaatcactgtgtcatggacatcttttcagacccgatctcgctggtcagggaccaccggctgaag

SEQ ID NO: 15653 - DNA, 421 bp, Brachypodium distachyon
  Intron number 1 from transcript Bradi3g48610.1 (locus Brad i3g48610) derived from phytozome v7.0 (chr-ID Bd3; pos 500 09090 to 50009510)
ggagcgcgaggagaagggcaagttcctgttcggaggtgcatgcctttgcttttgatctttcgattcggggtgctgtattcatgcatgttcgattttattttgcgaaggctcgataactatttctacgtgccttctcgtctagtttctggttggaattttgcgttggaagtttcggtttggaattttgtgagtgggccgggcgaacatttttaatcgactaatcgcgctattcgatcatttatgccgggcgaacatttctagctatttattgttttgaatccttctgctcatatgatgggttccttcttctttttttgacgaaaatatgatggattcctggaaacggagcaattgctcacggtccttttcgtgtctttgttatgcagactcataccgcagaagggtgttcttcaactacgag

SEQ ID NO: 15654 - DNA, 950 bp, Brachypodium distachyon
  Intron number 4 from transcript Bradi4g13310.1 (locus Brad i4g13310) derived from phytozome v7.0 (chr-ID Bd4; pos 135 78522 to 13579471 reverse strand)
tttcaggtgagaatgttgctattagcttcaaagatttcattttattgttttcagctcaagatggttaattcagaaggtgtattgagtaactagatatggttacgaacttcttgagtagataaatatgtagttctaactgcatctgacagtatgaaaatacaaagtactctatatttggaaagttattatgggttgaactggagatagataatgccgttcgatccatcatgcgaagctgtttcctcgctatggtccatctagccagtggcggaaccaggtggaccagcaggagactagatctctcatatcttatactatgaactatgtattttttgtgttttgcccccccataaaataatttcctgggtccgcccatgcatgccaagacaaggataagggaggagctggagaagaaaaagatcttggaagtcagaaatcactttagtttctgcttgcctccgaagcccctaatagtatatagtaaggaaagcctgaaagatataaacaattagtgggtatctggagggggggggggctgtaacgggactttttcaggctaaggattcaaattcaacccccctatcctaacatgcaacttgacagctaggaatttgaaaaaggaaactaattctatgcgttatactggctttaaaactgacaaagtaggagttcctaatcatttgcagttgacacaatagttaaaaccatttgacaatgaaatgtgtatggtaatgatacagtggctggcagagactcaaatgttcataaaacaagacttgaaaaagtagcaatggaggttcattcacttatcatgccactaacatatggcatgttgttctcaacaatcctgatgactatttgtgttatatatttttcactgcttgatttgaagaagcataaatgaatcatgacatcccatagatctgcaggtgaaatagctcttattgcgg

SEQ ID NO: 15655 - DNA, 683 bp, Brachypodium distachyon
  Intron number 2 from transcript Bradi4g13310.1 (locus Brad i4g13310) derived from phytozome v7.0 (chr-ID Bd4; pos 135 80269 to 13580951 reverse strand)
ctgggtgcgattctttgtcttgtacctcttcagtttcttacttgaatatccttggttcactgctgaacttatccaaatgctaacagaaacaagaagtcagttgatagttactctgttcgagtagcttgttgaatggtaatgaaaagcacccattgctggcaattacagtctgttcagcttgtattatgttttctcacagatgctcctctgagactgttcccaatattcagaaagattctttccctagagatgggttcataggttgtaattattcttgtcagcatacttcaaatgtgaaatgagaggcatatctgctagattgctatgaccatgtaaaacttgatgtaaatatcacttctcttctaaaagttaaggcaaatctattcatctcaactattttctcatgacaattagattgaaccaactttaatatatattatatgagggctatcattttgctaattgggccagcaaactaatattagttgcttgtgtctttcaatacccttgccagcttttgacaggtgtattatctttaggccatgaaactgtacaagtactttacgtaaaaatggttatttcaggaagcagaagttcggtttgattgatttttaagccagtatttctcacaagtgtccatattttcaggtaaacaaaatattttggaagtgctatagtacttg

SEQ ID NO: 15656 - DNA, 453 bp, Brachypodium distachyon
  Intron number 3 from transcript Bradi4g35470.2 (locus Brad i4g35470) derived from phytozome v7.0 (chr-ID Bd4; pos 408 73640 to 40874092 reverse strand)
cgtggcatttcttctacaattcagagtctctcgaggtaagatattgcagcctgaaatcaaaatagttgtttgccactaatcgatgccatctagttgtcccaaaccttgtaactgtttctcacttgtcactcatcattgtgcgtgcgcctggcctaccctgaagctttaagcgccccatttccttaaccacaatgcacttgatacttagaagaccagcgagtagtattgctattttcagcaatttccttgcgcaaactttatactcgttgagttttttggcagaaattatgaatacctggtagccctcgagttattatattatcactaaaataggccaaaaataataatccaagtagccttttctctgccctggttcttttttgctttgcgaccgatgttttcctatcaaaatcttcaggtgcttgtggcgcttcaaggtgctcttacagtgac

SEQ ID NO: 15657 - DNA, 724 bp, Brachypodium distachyon
  Intron number 2 from transcript Bradi4g21820.1 (locus Brad i4g21820) derived from phytozome v7.0 (chr-ID Bd4; pos 256 53067 to 25653790)
tgataagtataatatcccaaccgctaaggtactttcttttgcatctgcgctgagctatataatctatctagcactacattgatttgcttccatgatatgctatccatgtttaaggtacaccaacttaggtataatcaccccattcttttgtctcgatacaatgttacgaaccatgctcatattcaactgaattgacattactactagttacagataatataagtatggtaaccagcttcgactttccaccagaatatcttcgagtatatcactactccctccgatccatgttaattgtctcaaatttgcccaaatatggatgtatctatgcctaaaaagcgtctagatacacataatatttcgacaattaatatggatcggatggagtattagttttaactattgttcattcataattcttgacatttccttgaaataaacctctctgaaatgaagtcatcttgttgctacagaaaatggactatagaattactttagcaaaaacggagaaaatatacacctccccgtttgataattatttgtagtgaagacatacaaattaagctactccctccgttccataattcttgtcgaaatattacatgtatgtagacgttttttaggaatagatacatccattttttttgcaaatttgagacaagaattatggaacgaagggagtaatacagttacctttttctctctcatgtagtatcgcactttc

SEQ ID NO: 15658 - DNA, 656 bp, Brachypodium distachyon
  Intron number 2 from transcript Bradi4g03310.1 (locus Brad i4g03310) derived from phytozome v7.0 (chr-ID Bd4; pos 267 1896 to 2672551)
ttgtgttatcggtgggcctcttagttggcgcaaaggtaaatgttggtacatgtttagtaaatgtgaactataatgtttggtttgtgtggctcttttagttggcattttgggttgttatctcaaggctacctaacttgctttggggttggggctaaaggcatgctgtcgttgttgtttcagaattatgaaattgtacgattttctctgtggacctaagaaaagtaatgcaacagattttcattatccaactcttctgctttctattcaagtcattaatgatgggcaaagtgcaatattttggcagccccattcaggttgcaatttttgtcataaaaaagctaccttaaccatcataatgtaggctcaagagtcaagatcaatagtctccgtacttctgcgtcaacatcctccttttcctttctttatcgaaaggatcctttagacataatctgacacaaatcaatttagatacaacaacaaaggcgagtaggccacaactagtcaaccatcttcactacggatcaatgaaagaatatctcccttctcgttatgaaagatggcaatggcatgattatcttaaaaagaggaaattaccatgtgaagcttttgactctgttacctgaccttttctgtatctaatgaacaccaggttataa

SEQ ID NO: 15659 - DNA, 767 bp, Brachypodium distachyon
  Intron number 1 from transcript Bradi4g12220.1 (locus Brad i4g12220) derived from phytozome v7.0 (chr-ID Bd4; pos 122 20616 to 12221382 reverse strand)
agcggagagacccgccaccggtccgccggggtagttcggaagttgacctttggagaaaggaggagattttttttttgtttttttgagaacggaggagatttttttttagagaaaaaacgaagctcgcctccagattggagcccagatccggcccaacacggcgcgagtcgggccgggctacgccgctacggaatcaagcagatccggcctaatgtttggaaggcgtactgctagagatacgttgaccggcctcggttcaagtgcccatacgaaaactgcgcgttcatgacctcccagccagtggcccatttagagcggagtccggcagcccaggcagacaaacgctttgttggcacacagaaaaagttgcagggtatgtttggacagtgaccgaattttgttgcagtaccagaattttgtttattggaaatcatttttttggcaagtcaatgcctcgttccaaactctagttaattttttttgactaaaattgaccaacttttctcatcccctgcactgcactgcatgcatagggttctctagcgctcggctgtttcttccggcagtaagatttgccttcttcacgtctggtcttctagtggggttgtgattcagacgagcgcgtgtagttcctccataggtactacaatcattttggtggtggcggcgtgtgaagagaagaggagatctggcggggcagaagggtggggtacaagaattcatcttaattcttgtactcccgactctcccccatcatgctcccacag

SEQ ID NO: 15660 - DNA, 544 bp, Brachypodium distachyon
  Intron number 1 from transcript Bradi4g44550.2 (locus Brad i4g44550) derived from phytozome v7.0 (chr-ID Bd4; pos 479 04727 to 47905270 reverse strand)
aactccgggaattgctcgagaacaagaggtacatccatccatcctaatgtagggttatgttcttgtaatgaacagaaaatatgaaatgaacaaacatggcaaagacggaaggttcatcttcgaggttaggatttgcaattttggattgtgataggcatgcatgttaattcttatatgaaaatttccatgatttacactccttttatagatctaggccctaggcgatcggctactaccaaactatctcatacatccatatatttttgcatcaattaatttggaataattttttgttagagtcagaaatcacaaaagttgttagtcaaattaaccacaaatgaattagattgaactgtgaatcaaacccctggcatgtttttgtctagtaaaaaccctgcctccttcatttaccttctccttcctcggattcaacatcgtgttggtcgccatacttcttttcttcttcttctacgctcagacatattctttaactaatgcatggctctcatgactgccatattcaacaggtacctcatcgtcattg

SEQ ID NO: 15661 - DNA, 804 bp, Brachypodium distachyon
  Intron number 1 from transcript Bradi4g05960.1 (locus Brad i4g05960) derived from phytozome v7.0 (chr-ID Bd4; pos 492 0614 to 4921417 reverse strand)
cctccccgcgtccccagcgccaggtacccttcttctctgtcccgaattaggtcccaacattctggcgaagaagaagaaaaaattccatggagcttgctgatttggggcactgtctgtcttcagcagcgctgagttgttggctgcttgcttcaagtgggatctgcagatgctgtcaattttttttgttactgattcctcgcctattgaagcaaacttcacttcctgatagatagatctagaaaagagacaggagtttcagttggttttaattcgacagtttgaacaacagtagatgcctttaatagattcccttataaaaccccaaggatttaactgaggtaaaatgtattttggtcctagtaacgtaggattcactcatgggatgatagagcaacatttttggaaatgtagttaggatctttgatttttagacagctatacttttttccgtttcagaatgtttgttgtcataaattcgccctctgcttgctgcaagttcagtatgcacatagaataatttggaagtctaaaacttatatttaaacgtgattctgtacaagattctgtatgcagatggaattaactgaaggacaaaaactgatattttaaagtcactttgtggaattaactaaaagactaaaactggcatttttaaaggtgactttgtcgaagattcagtacgcaaatgtaatttactgactttgtacaagatttctacatatgaactgaatcaccgacaatgtttgatcaaagatgcttattatttactgcagtgcgagtgtttttggcgtctcagctgaatcg

SEQ ID NO: 15662 - DNA, 898 bp, Brachypodium distachyon
  Intron number 1 from transcript Bradi4g34880.2 (locus Brad i4g34880) derived from phytozome v7.0 (chr-ID Bd4; pos 404 49347 to 40450244 reverse strand)
ttcaggaagcaggtgagccaactagttggatctcgattcccggggattgaggactaccgtttggtggctgggagggggtgggtgttgcctggtgagtgaggagctagagaagtttacaactttgggtgtaatgcttgccgctggtggcttacggattgggctgcgcctaattggttggatctatccttgttttcgggatgcaccggtgggaatgggtggaggaagtctgatccctctcggtttaattgctgtcgaatgattcgaaattgtagaagctatgtggcagtgcagggcaggtctcttatttgttgtttgggtggtctcagaggtgaatttgttgcaattaacctgttgtgatgtgaacgtgggaggactgtttctgtctgtgttcctgagagcaacagtatattttgcatgctgttagatgttactacttcgcttgtcatgcgtgtgtttggtaggtcaatcttctgatgcaaatgagatagcaatgcttacttgtttatgcataaatttggttgaattgttggtgtaggacttgtttgtcatgcaggggtttgactggaaacagtcaattcccgccttccaaactggtctgtataggattgtttgattcttgttggtttgaattgttgctgctcaccgagaaaagaaggatggcttattttatgcaatgttacgaggaataataagttaaaattgtacgctgttcgtccataggaggtgcatttgatacaacatgcactttactacaaaatgttcaattttagtgtgattgacttggtacaaatttgctgcacatttagccttttttaatggttggtgatcgtgtggtttaccaaaaaaatcagcagttgccttgttggttgatgagcactgtttacattgttcttcttag

SEQ ID NO: 15663 - DNA, 583 bp, Brachypodium distachyon
  Intron number 2 from transcript Bradi4g11310.1 (locus Brad i4g11310) derived from phytozome v7.0 (chr-ID Bd4; pos 110 88476 to 11089058 reverse strand)
aagctgggaaggtgaaatttttacctgtgcccctacggtttgagccaataaatttagcccctcacctctttattatccatttacgtcctgaatcttggtggttgttggttttttggggggcttttggttggtagatatgtgcgcagattccattttaggaggtaacttaattagctttcttcagttgattggtactcactggcccatttagatgatttaatttaatggtttatatgttagaagagttgggctttgttcatctcaaggataagcaaaatgttcttttggtcaagagatttgggttacaatgagctccaaacatcttggttgggaaaaagagctgctaattaaaatgttgagctgttgtgtagatttgtttttactttggctaccttagtgttcctgttctttcatacaattcctgtttcgcaagagaaaggttgaattttttgttaatgtggtgaagtaaaaccatttattccccagctttatttgcctatttcaatgtctctttgtaaattcattctgtttgctctcaccttttcatggtcttgtgatttctgtaggttgaagggccatctac

SEQ ID NO: 15664 - DNA, 749 bp, Brachypodium distachyon
  Intron number 1 from transcript Bradi4g44430.1 (locus Brad i4g44430) derived from phytozome v7.0 (chr-ID Bd4; pos 478 36220 to 47836968)
acgtcgagaccgaccccaccggtcgctacggccgggtaagctctcctccccacggatctaaattcttcaggtaacctaactaagcaaaaaagggtcaacaagataactggagtagttagcacttagcagcatatgcatgcatccaattgttcaagcttcatgttcttgtgattttatttttcttccttttcttggaggatcatgcatgttgttggcctcttgggagttgtttgggatgtaggctagctaccggtcggtagttaattagattccaagacatatatgcttacaacttaaccatgattggttaagattgcaggctttcatcatacaaaaaagagtttgaattaaatcaaaacattgttcggagtccaacattgtttagcttaattattaaagctggatcgattccatggtgatgtgcacatcggagctacctctaaatcaggccacaattattgtgcctttttctttctccatctccatttgtgatttgttggctcttgctgccttgctaggggccggctaagctagctgcatacatatcttctcgttgtttcttctctaaccgaagtcttatgttttaacataattgatggcacgatttgttattgtattgagtaatatttataataaaaatactgaagaactgatttgtagttgtatagtccttggttgctaattaactgggaataatattcggtgtcaaaaaagaaccttgcactggaatacaccaccaataacttaac

SEQ ID NO: 15665 - DNA, 943 bp, Brachypodium distachyon
  Intron number 2 from transcript Bradi4g22150.1 (locus Brad i4g22150) derived from phytozome v7.0 (chr-ID Bd4; pos 262 32235 to 26233177 reverse strand)
ggtgagcgttcgttgtttctcctttctcaaacctgctagtttttttagtattaggatattttcagtggcggcggccggacactcgtaaattcatcagggtttaatacataacctgactagcaagaacacgatgtggtgggcgtttgctttgaaggtttaccgatgagaataatggggatcgagtgattcggcactcagattgaagataggatgggaagggagggatttgtggcggcggggctagtgctgctgcgttagggcgttgttgtcagaacatgacagtgtgagtctgcttccaggtgggagtctcagcagatggttgagctggattgaaaacttgaaatgtgctagatggggaaaaaataaacatccgaaatcagacaagcgaaaaaccaaaactgataattggtctaaataaggaaaactgcgaattttttgtctgtttttatatttaaataattgctgagaatttacaaggctggaatgtgagttcaattcaatcactataagtattcatgaaaattttgaacttgaacgaaacaaattcaacatgattagagtatttcttcaccatttttgtagtaatatttcacttgcagccatagaatttattttatatttttctggctattatgaacctttatgtttatattgaagtaaataattcgcatttaaaccttgaaattccatgtccgttgttggtacttctatactgaatttataatctgcaaagttgtatcttttttaattgacactgaagaaatcatattatgttctatgtaaatgtaacaacagtaaataatatagtaaatgtttcaacaatttgatgtatgcctcatatagcaatataccaattaaagcgtgtctactgaataagaataggaccaccgtttgtattcttctagttcctgttgagcattcaactcctttacactttgcagga

SEQ ID NO: 15666 - DNA, 628 bp, Brachypodium distachyon
  Intron number 1 from transcript Bradi3g58030.1 (locus Brad i3g58030) derived from phytozome v7.0 (chr-ID Bd3; pos 576 14733 to 57615360 reverse strand)
tgatctgcgccttcttcgtcgtcctcgaggtacgtaagacaaacgatcggatactctgcgctcgatcgtctgttcccgtttctgtctttcgttgctcctggtctcctggaccaccgtttttgtgtcagttctgaattccctgagtactactacactagtactggaatctatcaatgtcggcgttgcgtttctgggatggcatgggtaacgcctttaatgtctgggctccatggcttgttcgctcatgccactgcatttctgccgtagcatttttagcttttggactttgaaattttgcaacttgcaagctgctaggctcttctgtttttttttctttcgaaacagagactgctaggttctgattaaagcggaccctacttgcataagaagaaaagctatgaattgagggaccaacgacactgcaatatgtggtttaggtgcaatggaaaaaaaaacctgaaaaacttacagcattaactgaaggtgcattacgattgtcgtttttgtttctcggtgtgtggatcgaatttggacttcagatcatgttgacaaggatttttatttgacttctgtagttaactcatgtatgtactggtatactgatacaatatatttttctgttgttaag

SEQ ID NO: 15667 - DNA, 764 bp, Brachypodium distachyon
  Intron number 1 from transcript Bradi3g55950.1 (locus Brad i3g55950) derived from phytozome v7.0 (chr-ID Bd3; pos 560 10247 to 56011010 reverse strand)
cagcagttggcttcgcttggtaagcatttgcagccctgtaggatatgtgatcaggtcatgtggtgtgctttatggtactccctccgatctggcctatgtatgtaatcattttatcgcactgagaaaactgcacttcatagatttctggcatgtatgtgttagttggttgaatcttcagaattatctaatgctgtgctgctagcactttgcctgataaatttgctccatagatagggaaacgatctggctcatatattgggttgattaggtagttcaaatcaggaaaccatgtttgtattatgcctctactttaagttttttctccccaatcaccgttacctgcccatgattagttggttgtcactcaccttttttttattgtcatgtgaatatataactgttgatgaggacacctctactgttgatgcaattcctgctgctacatgcctctatgatcttgttgggacctttctcgaaatgacttttttcccccttaatttggttggttcttaatactgtcaaagtaaacaaagcagctatactcctaaaatcctgttcagcatcccttgaactgacaacttgcctaatgttgtgttttgacttggttctgttgagcaagcaccctgcatctacttttcttccaaaaaaagaaaaggaaataaaatggtgtactagaccatgtgcattactacctttttctttcctttctcagagcttgctaattatgttatctgatcatgttttattttgttttcatcaggaac

SEQ ID NO: 15668 - DNA, 901 bp, Brachypodium distachyon
  Intron number 1 from transcript Bradi4g00450.2 (locus Brad i4g00450) derived from phytozome v7.0 (chr-ID Bd4; pos 188 910 to 189810 reverse strand)
tgctaagtctcttcttggggtctcatcgtctgtcggtatgtagcacatccaatttgcaccaacccggcctcttagtctcagttttaggattaactagctacatgaccatatgtgaggctagatttactatactacctctgttagtaaatacatatcctcaaacaaatagtaaaaaacttttctgtcagtaaatacagtgctataattcacaaaatacatatctgtcagaaaatacagtgctatgctcataaacttttcaggtaggatgcgtgaaaggtttatgacttttaatctgtatctctataatctagaacaaaaaaaaacactcatgtatatgcttttagcctatgtgaacatccggacccaccaaatatcaaaggtggaaatgttcagcctacggaagaaatgtgatcattttgttttaacctgcctacatatccaacccagtgatctttttattaaaactgattgaaattgctgattttctttatttccaaggttaggtccacatatgtatgtatatacccatgttgttagtaaatttctcttcttcctgttcaatcccatatagtattactgttgtacttgctttggaactttatttgtttacttgtacaacttcatctcggtttgtaatttgactacttgcaattgtatacaagtgtgcatgtagaattcatgtccacctaaagtatattgcttgaacatatccttcttttcttaccatatgtctcctattggtctctttttctattgtttatgtctagttaatgctagccatttctttttctaatttagtgatacaaaaaattgaccaatcgtcacgcaacttgatgtatattttgtatgaatctggatggatgcaggtggcaaacctctaaaacggtgctccggtttttgg

SEQ ID NO: 15669 - DNA, 1011 bp, Brachypodium distachyon
  Intron number 1 from transcript Bradi3g47550.1 (locus Brad i3g47550) derived from phytozome v7.0 (chr-ID Bd3; pos 491 75120 to 49176130)
gttgcaggtacgttcaatcactgataacccttccgaggtttgctataccatgccaatcagatgaggcagtcccttagttccgttatcatcacagaattactgaggatccccagtttcagtctgcaaaaacagaagatgtaaggcatcttcagtggcatatttctgatactagaatagcatcatgtatcttactacaagaaataaggcttgaccttaagatgttaattgatgaagcaccggtaagtttatagcacatctctgattctatggaacctactacatgggattataagagaatattttagtctatgaagaaaaatcacaactcaacaaagggaaagaaacataacagatttttaacagttaaataaataaatcaaggttttagcctggttgatacggaaattttggatgtacattttgatttgggctccagttataggcaggctctcaatgatcagtgcaaacttcatgtgcatcccaattccaattcgcataggtatctagaacttcaaatgactattcaactaggggaggtacacagatgaccaattaagctaactgagcagacaacaactattacaaggaacaaatatatgcaattttgccttagaatgtgcataaatacataattatgctggagtaagacaatgttggtggatcaatgattgtgtattattaggtaatatatgtttcatctatttatgcaacggagttactatattaacatatgcaatggagttactatattaattaacatgacagggtgaaaatcagtggcaaagccacgtacaagcgggaatagtgctcagagtcctggcaccaccactggcgataatccatttgcaaatagcatgcggccagatatatctttcatcaatcatcatcaccaaatctaatgcatccaggaatagtgcaattggctttacagtcttgaaatgtagcatattaacattcataagcatctatctgaatttacctttttctttctttcttaggtcgcttcctcat

SEQ ID NO: 15670 - DNA, 396 bp, Brachypodium distachyon
  Intron number 2 from transcript Bradi4g21790.1 (locus Brad i4g21790) derived from phytozome v7.0 (chr-ID Bd4; pos 255 17812 to 25518207)
ctcatcttcggcttcgtcgagctctccgtaagcttaagctgcctcttcttccccaaaacccccaaaaatcttaacaacccattctcaaaaacacaaattgtgcacataatgaaagtaaaaaaggcacggaaaaggattcagggcaagtgagaaatgtggagaagatagataacgagcaagtaaaggtgaaagaagataatgccattgtgggagcaaatcaaatcaaatcatcacggcctgcactgcagtctgcaactactgctagtgcgcctaattcagacttcagtgcgcggccggccaaaacatatctgcctttctatctaaaaaaaaagttctctcctttttttcctctatgtcgcaggggttcatactgctggcggtgcaggcgcacctgcc

SEQ ID NO: 15671 - DNA, 664 bp, Brachypodium distachyon
  Intron number 1 from transcript Bradi5g15220.1 (locus Brad i5g15220) derived from phytozome v7.0 (chr-ID Bd5; pos 185 80704 to 18581367)
gagatcgtcgcgtccgctcccgtcgtcgtcttcaggtctttccctctctctctctcgcatcgagaacaagtacactaattccgaggactaggaacttggttcgaaactgaagaggggaaggggatgatctccatctcttacccttagtcttcctttctccccttctacgagttcagcatattctttattttttattccctgttctttccgataatattccttctcggtggagacggaagctgttaggaatatttaatttatatatacgttttgaatctatgttcatcctattggttttgggttgggtgatttaagggtgaaatcattagaacttcggcaaggaattttgttctctccgcgtatgggatttttggggatattttccctggatctgctaggtttcgtggcgtcctgaatatttcgttgcgctgctgttacctgttggtagctactacggagtaccatctgtttttatgttgaacttaaaacgacttgttgcagtgaaagagttgtttctgttcacgcttctccatgttgaagtaatatgctactgtttcctgtacatgtttgattcccaaattcccctgtgccttgttcatgctaactctgattctgtgggctatctgcagcaagtcttactgccctttctgcgtaaaggtgaagc

SEQ ID NO: 15672 - DNA, 757 bp, Brachypodium distachyon
  Intron number 1 from transcript Bradi3g45950.1 (locus Brad i3g45950) derived from phytozome v7.0 (chr-ID Bd3; pos 479 10575 to 47911331 reverse strand)
agtcaccgacgacagcctggagaagtggagagaaggtaatttatttacggcacattgaaaatgaaaatgttacattgcattcaagacttaatgttgagaaaagaaattgtgatgcatcatctatagatctccatccctaccagcagtttttactatcaatcaatttgtattccttggaaatatgtagtatatatatcatctcttgttttactcctcggtcttgaaatttttgaaataaactttagttgaactacaaaaacaaatctttcagtatttagtatttagtgtgcaaggctttaagcatttggtaaaacaagattttatgggggaaaggaagacagaactcacttagctagatagagaagccagcgagaaaatgtctaaacactatattggtctacttaatgtaatatcactgcttaagagtatgttcgcgcctgccaacattactaacaagtcctcagagaacatggacatgaagtacaatagtactcttgttatgagtttctccaatagttatggaatctgctgtgatttttggttgcaactttttaattcaccaacaaaatagtatttaccttttttgtttagcatgatcaccaacaatttgtgagagtttgacatgaggttctttagtagttagtactcctgaattctcaaaagtttcgcatttgtaacttaagaataatttgttgctgtttctcttttttccttaaccacagtgtctggggcattcaatattggtattttccattgg

SEQ ID NO: 15673 - DNA, 564 bp, Brachypodium distachyon
  Intron number 2 from transcript Bradi4g11470.1 (locus Brad i4g11470) derived from phytozome v7.0 (chr-ID Bd4; pos 112 48814 to 11249377 reverse strand)
tagaaagacacagatattactgcttgctggtattatacaacattgtcttttgttttcatatattgcattagttagaagcatctgggaagattttatttactgctcttcttaggaggcctacatgcaaatactaatttgtaatctccactgaagtaaagcgggttgttttttacttcaaattgtctctagtgatattgaaatttaagaaagacgtcagattacgaaagcaaattttcagaaaattgatgtttttccttatgataaatcaaaatgattttacattttctcgagctctgtgagaatacagagtttggcttctgcaacccacacggtgcacttctcattatatttatagcacaggtggttacaagatcaacatgtaattaatactcctttcaacatggaaataaggcatggttattacaatctacaggatcctaactatacaggagagtttaagttaacaagctcaaagttttgaagactactcacgacatgacttcacatttcatatttttctatcttgtaatgttcttatttatgtagttcgtttacctcaggaat

SEQ ID NO: 15674 - DNA, 986 bp, Brachypodium distachyon
  Intron number 2 from transcript Bradi4g43260.1 (locus Brad i4g43260) derived from phytozome v7.0 (chr-ID Bd4; pos 470 22560 to 47023545 reverse strand)
gagagtaagcttgattgcttctttcgctgctctacacttattaattgccaccagtggcaagagttatataggtgccacactctgtacgttatcggcacctcacgtgtaacatctgtacgttttttttgcaagattttgctccatgatttcccttttgtcaaagtcatattgaaatcgagggccggagccaaatcctatcaattagcttaattacatcgcagacaattactctgcatgttctcctttttttttcgattccaccgtttaataactgcctcagctagcatttttcttcttctttccagctcttcttccccatatttgtatatccctatttttcttcaaggctgtaagcggttttattctactttctacgtgcaatgtttcttaaccacaaaataaaataaaatggagagcatagctcgtccagggcaccaacttgagaagctgtaattcggtggagggattgtgcatttccatgatagaggcgctgaatggtatgctcctgggatgatttttttttaatacttcaagtgttcaaataattctgaaaaaatccacgtataaacattcatgcacctacgatcctgtaaatttttattttgacagaaagtcatttttgcatctctataaaaaagatatttgctcccgaaaaagcaaaaattaaagagctaaaggcttaaggaaagaacgcaaaatcttttataatactgtcccatgcagtactttaaatcagggttttgctttctctatgtcatatattctactctctctgatccataataaatgtctcggatttagcacaaagttagtacaaaattgtactaaattaaatccgagacacttattatggatcagagaaagtacatttctatagcatgacaacatttgccacactgatatcatctaatgttattagtggtacactattatggagtttttatatttagttatatttaatctctcaggtgtggatttagtggttc

SEQ ID NO: 15675 - DNA, 732 bp, Brachypodium distachyon
  Intron number 1 from transcript Bradi4g32440.1 (locus Brad i4g32440) derived from phytozome v7.0 (chr-ID Bd4; pos 380 95450 to 38096181)
cgcacggtgcgaaggcattcccaaagggcgacagggtaggcttcgatctctccgtcttctcggcatgctctgtttttcttctctgcagttggttgttcagaaagaatgacgctccttttcctagtggaattgagcgcgcaggaggtgacaatgtgcggttatttttcggttttcgtgacggattcttggatcctttgagctctcggtactcggcgtccgtgggatcggcgaggttgcgacttttttttttattgcggtggttgctctctgtttgaggctggtcgttcgaactccgcgtactgctgcattttctcttccatttttggttctcgaggtacgagcttctgtggttgtttggcattggtggccatttgggcagtggttgttgttaatttgttgcaccgtcgattttggtttttgtccgatggattatttattgtgcaagagtacaacggcgggcactgttgtttgatgttcgtgcaagttaaacaattaagtagtatatgggctcgttggtttctacggcttttgttgcttcagagaccagctcgaattgggtacctcctctcctcttgatcgctactgagccccggtttcttctttaatccgctttgcttgctttatatctttcatcatcaggggcagaggaatctgtcgctttgcttttgttagtttctttgacagctaaatagggctcttttcgctctttttcttcatgtcatttgtgttcag

SEQ ID NO: 15676 - DNA, 827 bp, Brachypodium distachyon
  Intron number 1 from transcript Bradi4g40940.1 (locus Brad i4g40940) derived from phytozome v7.0 (chr-ID Bd4; pos 452 14264 to 45215090 reverse strand)
ggtgcgtttccaaaatccattctacatagtgattttctaagtctatgacttcaactctgagatgttttccttttgttcacaaaatgcaagaaacatgcaaagcttgatagggaggtaccagagtgatgtggtaggaagtcaaatgcaaaacagagctacaaagccaggtctgcctatttaccttgtaaagcttgaaaacattgtaatatttgtaacaacttgaaaggggtgtatctagtaaaaactcatatgtgggaagtgggaactaacatattaactatccaagtgagccaccagacggggctcagggtggctcacattttgacgcaactgagaggagcacaccagtagtccagtacacacttttgttggaaaaagagatgggttgttaagtaaacaaacaacatatttttattcttacactaaataactgatttttagcttgatggcgataccaaagatacctgatgcagttttgcaccatataacaggtagcagaacctgagattttattggtaagggaagagataggtcacctacagcacggtctaaggtaatcttccactttaagatggatggttacatatcttgcattaagaatgaattgcagtagcctagtgataagtgaaggaaagcaggtccacgtatggaggaggagcaggggacatgacgctagataaattgcacaagctagaaaaaggtcttgagcaatggatttgtcatatgcgatccacaaaggtaggacatctgttctccacttttttgttcttcttattcattcggtgtgcaattaactaatatgaaatacctccaatcagatgcagatc

SEQ ID NO: 15677 - DNA, 222 bp, Brachypodium distachyon
  Intron number 1 from transcript Bradi5g14040.2 (locus Brad i5g14040) derived from phytozome v7.0 (chr-ID Bd5; pos 175 00958 to 17501179 reverse strand)
cgaatctgctgttccttagcctctgcaacctgaaggttagttctgcttccccggcgaatctgctgttcctctagcctctgcaacctgaaggttttgtttttcttccttttttttggatctttggaatttccatcaggtttatagttaatgcttcacagttttgaccttagatatttgaagttgtattgcctgctctacttattgtgtttgttgtgcctacag

SEQ ID NO: 15678 - DNA, 632 bp, Brachypodium distachyon
  Intron number 3 from transcript Bradi4g39570.1 (locus Brad i4g39570) derived from phytozome v7.0 (chr-ID Bd4; pos 442 13182 to 44213813)
tgtgccttaaccgcttaaatcaggtgagtgtaactatgtttgtgtcactgaattttgcttctttttttgtaactgataaaattccactatcacacagtatgctgaaacttgagtttcttgcctgtttgcctgtttgtactatctgggtggcttgctttaattgcatggctagatataaaggtgctttacaataatgtgcaggatatttaggtgttttttcgtaaagcatttgagatggtatgtgaagtttaaagcgacaattcatccttcttatgaaaaagttcgctaagcataataatgtttctgtttccaaatagtcgcacaaaagctagtagtagtgatgaaattacagtatgcttacccctaagaggtgacatacttcaaccactgagcatttgtttcctgtcatccatgatgtgctcctacgcaacatcgttgtttgacaatgttcaatttgtcgtgaggtgtcttcttttgcaggcttcttggtaattaatagataaattatagtattagtacaataaaagatggacatgaagtaatcaaacaataaaaacatgtgatttaatcttttatccatgtttttatttcatacagaccccgaattctcctgtttctgccgaaagttctgc

SEQ ID NO: 15679 - DNA, 909 bp, Brachypodium distachyon
  Intron number 1 from transcript Bradi4g40790.1 (locus Brad i4g40790) derived from phytozome v7.0 (chr-ID Bd4; pos 450 86129 to 45087037 reverse strand)
gccccgacgtacgtgctttctccccttctttttttcttattttgcggggtaaaatagggtttcagagtggtagaactggccgagtattcgatcatctagaactttgttagtctactgctaggaaagaatatttgttttggacttgcttttggcccattgttggaaaagattgcagtttcttactggggaatcggagcctactggtgttttggagttttagttcattattttgagtgtaagttctgctaggatcgtaatcgaggggcatggaattgcaaaattagatcgtaatgtgatcccctgtgcatataattttattgtgattcattgtgaagatggcaattttcgtctgaggtgttggtaatggagctggactccctactgttatgtgtgtgtatggagattctagtgatgttttgggagtacctactgatcgggttatggtacaagtacagcacatatctattcgaccgtgccattgacctgccttcagcttggaaccaaactttgtcgaggaaataaactggactgatggcattgttagtagattagtggggttcctctgcaaattaacaatcaaagcactccacttggaactgaggaatactattttaacttttttttatctgagtttgctattaatactagaaaccatctatgttagctttgtgatcaaccttttacatcatatagatggactctttcgtgaagaagtgatgtaactttgttctatgtaatgatttatcgcacatatttactagttggatagctggctatttgttcagttattggtcaagagtaatctttgtgctgccgactttgctgattaacataacgaacccatcctttgtttcttacactgaactaattctctgactgttcttttacattctatccaggccaaacctg

SEQ ID NO: 15680 - DNA, 1021 bp, Brachypodium distachyon
  Intron number 4 from transcript Bradi4g21870.1 (locus Brad i4g21870) derived from phytozome v7.0 (chr-ID Bd4; pos 257 52858 to 25753878 reverse strand)
tgaagatcagcgagccacctacaaatatccaataggtacacatgccttggctcttaatatgtcctcatacagttgttatgtccgttaaaagaacttactagtccctcctatccatattaattgtctcagtttgtccaaatatggatttatttatacgtaaaaagcgtgtagatacatgtaatatttcgacaattaatatggatcagaaggagtacctccgttctaaattccaatatgtattttgttttagagtttcacaagtcaaactttccaaattaatactatgagatttattatgaaatatatgtacttttatgaagtcttattatttcctttgtgaggcaaacctttctgcatgcaaatgatggttagcatatcaccttgaatactgcatcatgtcaagaacgtgcattttgcatagaagaaagtaccatttcataattcttgtctcaaatttgtctaaaaatggatgcatctatttctaaaaaatgtctagatacatgtaacatttcgacaagaattatgaaacggagggagtaactcttgtttcaacgatcctaatataagttcctaattatttgctgcctggatatatcaaatgagaatgatacacgtatataccaggcaaataaacagatcttttccactaaaagagaaactattaccaataattggttcaaacaggaactttggctacaggaaatgggccattggggcatcctaagaatccattaataaggttgttggtaagaaaagggagatagtaacaactcctccaacaaatagtttcttcaccttgttgctaagacttcaaaatatctactgtttattatgcttggtcccacaaaaaacatggttctaagtaacaactcttctactagtgaatttagctgttacttcctctactacttccaatccagaaaagtgataatcgttttgtatttctagtttctactttcatgattgtatacttgagtcatttgggagctggtcctcagaaatgctgcactttcttgcagga

SEQ ID NO: 15681 - DNA, 881 bp, Brachypodium distachyon
  Intron number 1 from transcript Bradi4g08770.1 (locus Brad i4g08770) derived from phytozome v7.0 (chr-ID Bd4; pos 788 9867 to 7890747)
ggggaattctccaaggtacgcggattcttcttcccctgcttctgttacttcttataccatacatgttggctatgtatttaaccttcgaacgccccctgcattgtacgggtgtcatcttgcgcaactaaatttgggtacgcaaacccaataccggaccgatcgatctgtcagattgaaatgtttaagtcttgcactaatcgagaaaaaaaaactgggatcgtctggcttctgatgtctaatgtaccagcggtgaagctatgataactgaaaaagaatatgagagccagtgagctgaaactactgtcgttctggaagtctatgaaggctttgccctgatgtcttgtgaattggctgttacatcgtttacatcatggcactagaagatcgtgtaaattgggcaaccaattgtggttatgcgagtgtaaactgaaactatattatgatttatgattagcacaacgctttctgtaaaacaagtccaatccacatagactaggggatggtctttgtaaaaccaccttcccagttcatgtatcataatttaacaacttttaattccaaaaggagatttacaattgatagtaatgtcaaagaaaagaaataggtgacaaaaccatggtatatttagtctgtaataagtaaaactttgattgttgacatatcatgcattttgtatttactatttatactcttcattattttactacttcgtagcatttatatttattcccttcttcacagtggttactttgtttttctatatctaaaaaaatggtgtttgtgttgatgaatattcttatgcctctaatggagctcctgcaatgattggccattaccgttacacaggaatcttgcccttctgtgaagaacattttgctact

SEQ ID NO: 15682 - DNA, 934 bp, Brachypodium distachyon
  Intron number 1 from transcript Bradi4g07770.1 (locus Brad i4g07770) derived from phytozome v7.0 (chr-ID Bd4; pos 667 7295 to 6678228)
gaccgcgcagtggtaagggactcttcttgcgctccccctccctagcgtttttgggctgtgcgtcttgctcccgtagtgatcaccctgcggtttcggtcgaacctttcgcctctctcccgttcttggaccgtaggtcgcttctttcttgctttcttgctgcgaaatcgttggtggggaggaaaggatttcgcgttcgtgggaggttagggcatttcgggtgtggttcgttagcagcgtatgggttaatttcataaaaggcgtcattttccaagagaaaggagttcgattggacaaacgacacaaattggcctgttaaagttttttgtagtttcaactacagagcctctgagttgtagctgatctctcctcacattagttcaggccaggaggttgtttgctcttgtggtttttgtagaattaggagacctctagaatgtttgcttgacgaagtagcatatgtgtattgacaaagaacagggaattggcaagtgcgtggtcatttttccaacaattttttcgcaatctattaccagccataacctgtgtgtacatgtgaaattctcatccgtagttcagtcagaaacttactagcaaagaaaggtttctggccgttatttttttttactttgcttacatgttcagctctattaatgcttaacagagtaggttttgtgtaatgatcacaatagacaagtgcttctggaatgaatacgttgcatacacgtttcttcagatgttgaaatgaaccctctttatttgaagttagtgcatttttttatctgtttcttattgtcggttacattttctttctttctccggttctatctccgagttctgtgcaacagaatttgtggacatgagaatctatgcaaatttcctacataacaattttgattgcactgcaggaagaggcacacactgcagtgtgtgagat

SEQ ID NO: 15683 - DNA, 511 bp, Brachypodium distachyon
  Intron number 1 from transcript Bradi3g45910.1 (locus Brad i3g45910) derived from phytozome v7.0 (chr-ID Bd3; pos 478 72969 to 47873479 reverse strand)
ttaacgaagcctctctccctccatctctcgccctggtgtctgctcgtaatcttgattctttgcctttttttttccttcacttgtttgttttaatcttagcccgtttccgagaagcttgcaaatatgtcccgtgctccctccaacctagaagatggtgtagatggtcaggtgtaggaggttgctgctgattgaaaggaaaagctagtatttttcactattgaccagtttgggaattgggggcattgattcataggatgatgatttgtttaagtagcattaggggctgttgaggtgaaaaataagttgaactctgttagaagtcccctatgtgttactttccctgctcttcaaaagtattaatgcgacaggctgactgtttcctcaatattctcagttgcttagtttttcatgtatgtatgtatgtaccaatctagttgtatttgtttcatttggatgacctgtttgatttggttatttgcagcttggattcttgttcgttaaccgataaacc

SEQ ID NO: 15684 - DNA, 797 bp, Brachypodium distachyon
  Intron number 1 from transcript Bradi3g46530.2 (locus Brad i3g46530) derived from phytozome v7.0 (chr-ID Bd3; pos 483 47865 to 48348661 reverse strand)
ccgccttcgtccgtcgccgcgctccgccgccacccgtaagctcctcgcctccgctggctaccccctcttgattcctgtcttagtgtgttggcacctcgagaatctaaatcaacccgcgcaagggcaaacgcttctgtaaatttgatggatgtcacctatgctctactttcttttagtgtctctgtggattgatgagttgtagtaagttgatgcatgaacagggatggtgcagttgtaactctgtcgtaagattacaaaactaacggtttatgacatcaacataaaaaaataaccttcgcaaccgcagaactgaacccctttttttttagcgaatggggaggagagacccctaccaaaattttataaaaccagatgagagttaattaaaagcttgccggatttctggaagagtgggagggcatggaaattaatgcaattgtaatgattttattgttgaaacctttcctgttaggagtcgaccaaatgttccacaaaagtgcaatcaaagttgactcccaagctggttgttttccgggtgtcagattaagtttgtgcacattgaacagaccatccaaactttggaagtcccttacagcaatacctagtgagtgaaagatctcgatcgaggtgttaaactgtgcaggcactgaactcgagaagcgtgacttaaaaatgatgaagtttacttgtgctgattttcaacctaatcaatctatgaaatagaatgggagagactgatttctttgttacatactcctgtttgtgcaaatgcagggtgcagttcttgagaggcagtg

SEQ ID NO: 15685 - DNA, 408 bp, Brachypodium distachyon
  Intron number 3 from transcript Bradi5g14880.3 (locus Brad i5g14880) derived from phytozome v7.0 (chr-ID Bd5; pos 182 97036 to 18297443)
tgaagatcctgttcttgcaagaggtgcaacttcctgtaagtgaaaataacgaatgttaactcatgcagtgtcagagctttaacgaaaaaatagtcggtgcccaaaaaaaatggaaagctagaatcttggaagaatagaagcaaaagtccacaaactgagtaaaactataaattaataaggttttataattacaaataatatgtagtatatgtgcctaaatactccaatatatatagttattcaagaaaacacactgaagtgatgcctaaggtgtttgtggcaaaactgcagaccaaaaaaaaaaggagactgctgctaacttttgggggtataaacccttgcaaccaattgacatatccctttgttttttcagcaagttcttttgaactgaggtcaatttctgacaga

SEQ ID NO: 15686 - DNA, 994 bp, Brachypodium distachyon
  Intron number 2 from transcript Bradi4g18830.1 (locus Brad i4g18830) derived from phytozome v7.0 (chr-ID Bd4; pos 212 68138 to 21269131 reverse strand)
tggcaagcgtgaggtggttaatgatctttggatgtcatttactggtcatggcgatttgtttttagattatacatcatatcatttcttgtcattttgtatgtgctgatgttactgtgctagtgacctataaccaggataatatttgcaattgccttaagtctttttctgttgtccatttcacaacaccagacttacccttctctcatatagaggaggttcaacattaatctgatagtgagaggcaaattgaaattggttattcaaatcaacaagggcccttgccgtgcgagcaatttctcatctatccacaaaattagtgtgattctgcattgcttcgctcagaaggctacatggaaattgtaagccatatgatggaactgggtgacgttggattagaatagaagataatcatgtggagctatttggtatattttgatttctatcctatataggtactccacaatacagttctgacaggtatgagtcgtctcatatgcactgcaatatctactggatatagaaaaatctagttaaactaacactatattcttgtcttcattatgactgtgtcttgtagatcaaaaatggaatgtgtgcattatatatctatttatttgcatgtcagacacataaattcgttgcgtgcaataattgtaaatgtttgagcaaatgacaattgggcatctacaaacttaactctcctaggttcataccccctccgatccataaaaagtgtcgctcacttagtacaaaatttatacttagtacaaaatgggcgacactttttatggatcggagggagtacttcacaattcctcaaaaaaaaaaggttcatacttcacaatgataggtgtgtgttttatcctgatagctgctaatactgcagttcctgtcttcatgttatgaactatatttggtattgttcctttgattcatcacgtgtgtaaaaattcctgcagcacggtgtgttgtccaattgctggttgcggtgccc

SEQ ID NO: 15687 - DNA, 424 bp, Brachypodium distachyon
  Intron number 1 from transcript Bradi4g10230.1 (locus Brad i4g10230) derived from phytozome v7.0 (chr-ID Bd4; pos 986 2630 to 9863053)
gagggaatacctgcacagatactgagttatgatgaggacactaatgtgattcttctatctatgggagtcggtcatgtgatgattcaacttgattcaatgaagttgaaaaatatttctaaaatagaccacaagaggcacgaaggctttatctactatcctacacaaatttctttattgcaggtaatacttgatctctacattgtgagagtaacacactcaaatatacttcttttttccagactaaatctagttaattttccttgttttttttgtaaatttttgttcacaagcttaatggtttgccagatattgattgtgtagtttgtttattctgctataaatgttaagcctgctcgttcgaccttagaaattttattggtatattggacttatttgcttgtaggcaggggaattggtggtggag

SEQ ID NO: 15688 - DNA, 1022 bp, Brachypodium distachyon
  Intron number 3 from transcript Bradi4g16000.2 (locus Brad i4g16000) derived from phytozome v7.0 (chr-ID Bd4; pos 165 69152 to 16570173 reverse strand)
cattcttgagtatgattctggctctaatttgcacctcaccacttgccgacaccttatatttttgttgtgctctgtacctatttccatctagaactcatatgttttgtgaatctagtggttattggaactataaattagcttgacttctgttagactcatggtaccagtttaaagtggacttaactcttttcccttgttatgaaccactaacctatatatcactaaattgacccagtaggttaccaaatcgtagacatgcattcaagatgaggcaggcaggccttcaattgttttctcccacgctttagctcagttttttagtttgcagttgctagattgactagcttgagtttgttggtaggctggccagatcaattgttctgttccctctaaaatcatgtttttgttgagttattggtcatagcattctgctgatcgatggtttcagtacctttttctcctgggtgcaaatcccgtaggatttgtttgtgatggcaatagtatttaatgaattattgggtggttggcctgttcctaaatgcacatcttcactatttttacgggcatttataagttaccaaactaaaaaaaatactagtattttttaagcacttttgagttttgactaccaatctagtgatatcattttcagtgtggccaatttcaatcattacatatttgtcatccaacatgaagagcatatactgcatccatgccatagcttcataattgttttcattaatggaaggaccatgccgcattgtggctcctcttaacacaaaaatcaaatgtaagggctactctacagtggaaccttgcctttcacgtattttaaattctttttcaactggataactatttcacttggaaagttctcttgggatattctacagtttatttggacgtgtatagaactgcattcccacagcaattacttggtccattcgttttctatttagaatattttacggtaatgactggtggcctttttccataggtgtcaaagaagctctcagtgcccc

SEQ ID NO: 15689 - DNA, 706 bp, Brachypodium distachyon
  Intron number 2 from transcript Bradi4g16450.2 (locus Brad i4g16450) derived from phytozome v7.0 (chr-ID Bd4; pos 171 79128 to 17179833 reverse strand)
actcctccccatcaaaagaagcctcaatccgtggggtaatttttggatacatctcctgtaattagtatttctcttgtcctatttatgttgtcaacatttcaagacaaggcataaagaaacagccatttttaaaacatgaaaggagcaagtagatgtcatatggttgtggttatctatgtccagtagtccgttatgtagtttggaatataaaagcttatctggcattgggattctttcatgttttatttgtattctgtgtcttctagggacaggttgctgttgcacaattagtttgttggggataccggtaatcgaggttccctttgggtactaaatttgtagtttgaattattatatttatgtttccaagaaggcactgtaatgatctcaatgattgcattagagtaatgttactcatgtggtaatgtttactgctaccaatgtgcttctacacaatttaaacaaaaaagatgtaaaactctcactcacattggattccactgtatattttttatcgtataatctcttcagcaacaagatattgaaatgccgtccttagtatgctgaagttcatgttactcgagtgccttttctgtgtactacccagttattatgtgctaaatgttgccgaatcagtgtcaagaacatatcatttttgtggtggtttatggaattctcatatgaaaaatgactattttgcagttgg

SEQ ID NO: 15690 - DNA, 507 bp, Brachypodium distachyon
  Intron number 1 from transcript Bradi3g52630.1 (locus Brad i3g52630) derived from phytozome v7.0 (chr-ID Bd3; pos 535 03177 to 53503683)
cgcgcctcgagcagatctgaatcgccccgctaccggtaacatcgattccttctctaattgtcgtggatctagtcatctggcggctcgttgtccccttctgctttgtgaaagatgtggtagatctggtcatcttgccgctacttgccaagtatttcttccttggaatttgtgtcttctatgtgtgcttttcaatcgaagggtcaggggttctattacaatcatgataccacctttgctaaacagttgaaggatcgttctagtagcattgtgatttctatgatttctggggtggcttctaaatctgagattgaggttgagtttaataatttttttgcttcggggtgacgttgcactgcacgtctcattggtcccaatcagtatgtcatgcactttccttccgctagataggttgagaaggcttgttatcatggtacctttcgtatgcatgactgtaatgctactttgagtttgtctccttggaccgcttccgttggggctaaagctgag

SEQ ID NO: 15691 - DNA, 942 bp, Brachypodium distachyon
  Intron number 1 from transcript Bradi5g14630.2 (locus Brad i5g14630) derived from phytozome v7.0 (chr-ID Bd5; pos 180 62465 to 18063406 reverse strand)
gccgaggtgagggaaccttctagaatcttgttctgtttcgttcgatcggatctccgtagggtcgttccggaacattcgcttcccctacagtatactgtattcgttgtttcgtcgatcgcggcgcggttatagtttgttcctcgtcgcgtggatctgattctgatccgtagggtatgtatcttcgcgtgatctgggttgcgataagcagatacccgtgtttgttctgaaccctaggtcctttttttttggcgctggaggtccttatatttctgccctattcctcgtgagcgattggtgtgttttgtgccattccctttcgtgcgattagcgcctatctctattaggagttttacagaatttgctggttagatcggactagctcagcagaacgattggacggtgaattgctaagatttattttgaacgaaggtgaattctttaggctggttggttctgtaatgctgatgtatgcattttaagtgttgaatttgggacgatactcagaaccacctgcttggggggtttcactgacgtcctgtattaaaggtagtggcaccaatgttagatgtgatggcaattgggtgcttcattttcaggagaatcgttggtttggtctggttatagtgtgtacccactccatacaacaatgttggtgttttaacgacttgtacgggatctaccattttacttgtacatgccatcatcaaactgtgaactccaagatatatttgctggaaaatttatccatgttttattctagaaaacttccatcatggttactgtttgattgatgggatgttttatcggtcactaattttgtctagttgattgtcactggttagctttatttctgttctccatgcacgctgtactgtccttacgggttcatattttgctcacttaccagattgagattaaaacagcacctgctgacttccgctt

SEQ ID NO: 15692 - DNA, 705 bp, Brachypodium distachyon
  Intron number 2 from transcript Bradi5g01990.1 (locus Brad i5g01990) derived from phytozome v7.0 (chr-ID Bd5; pos 208 0247 to 2080951)
ctataagcaggtatttttctagttgcacactgattgttgaatatacgtgtcagttgtacattgattttttacatagttatttgtgtgtgtgtgtatatgtgtgtgtgtgtgtgcttttgattgtatgtacaatgtcgctacaatgtcaatatctatataggaagtatgtttcgtactactttgtcgtacattaattcttcatctttggtttggatttagctcagctcagaattctgaatgatttaaatgtgaaggatatatctagtttagttcttacttgttatgttgacactgtatctctgctaaattgtctggccatgaaaaattgaaaagtacaacccgtacccagttgctgacaatggaatagttgactttgctattaacgctgaaatgaaacaattcaatctagatgacatagtttagttcttgccatatacgaattctggtctgcgttaacatggaaatatccctaatactgagtgttgttttcttattgcgacttgattttccgtgaccttctgctgctggacataatcaatgctatcttcacttgcatgtatttggtctggtatttacatccagtatactattacctcagctatttgtacgagtgctttggttgatttaatatattttattttctgaattcagttcactgttctctgattgtctgccagatatctttgctaagtggtggtgcctcac

SEQ ID NO: 15693 - DNA, 694 bp, Brachypodium distachyon
  Intron number 5 from transcript Bradi4g27620.1 (locus Brad i4g27620) derived from phytozome v7.0 (chr-ID Bd4; pos 328 02233 to 32802926)
gttcctcgtatgtattcacatatgaccagttatattttccttttgcagtatctttttatgctgctactggtatttcatgagatgcaagtactccaatgtatgctggattctacaatgtactaagaaattcatctatcatactcaactgttttattttgttagccttgatgtttgcatgctgttcaaaacatattgcatgctagctgtggtttgttagtagttaaaaccatcaagcaatgacaggctgcaatcataatctaactgaaaccactcatatttacatgagtgagtattttctgcaagatcaaagtgttgattattttggccttgaatatcctcaggtacacaaaagctacttgctaaaaagaatacattgaacagcttcaaactgatcaatatgcacttgtcttcttttgatggaaagatctgctgtttgctattgaaatgtccaatttctctgttattatatttcattactttttgttaaattatccataccatcctctctgcaaggggcgagtcttctgaaatgtatgacaggcttttaacaaacacttccatttcacttttgttaagtgcagtaccttttggttgattaggtctccccatttttttttcagtttgaggatctctgatttttaaaccctttttctttacagtgggttgcagatatctgaagccctcaagcttcaga

SEQ ID NO: 15694 - DNA, 787 bp, Brachypodium distachyon
  Intron number 1 from transcript Bradi3g51420.1 (locus Brad i3g51420) derived from phytozome v7.0 (chr-ID Bd3; pos 524 79781 to 52480567 reverse strand)
ctcccactccggcttcctcatcacctgccccatcagtgcgtgccctctttcatgctagagtctgctgcgctatccaccgagtttgttttattggagggatacatgggggcttggggagtaaagactttacggtgatgtatctgactactgtatgcgcctggatttatgcgagttcctttattgcaacacacaccaagtagcaccatttagttgctatctggaggcgccaaagttggttcggttttcttagcattggttgtaagagtagaaacttgtaatgaccagtatgattcttaatggagatctgcgggccttgtttctagcgtaacaaattcttgcatgagattagtgggcatacatcggctaattagtagttcaattgatgtattattgccaagctgctactgctaagtaaatccagattaccaatgttggcgaagtaatttgtagttgtgaatcagctgcagctgttatatgataaactcagttctttgtccccttattgtcgcattattactatataagaacaaataaataaagagctgatggtaaattagaaggaaagtaaatagaagatgatgatgtaagacagtacgttacttttggcatcatttgaatgattataatgaaaagaaacaatgttcaaatgtaccttcttgacccggaagggggggggggtagttttacttatacacttgatttttatccaccgttgcaaattttaatgtgattgtcatgatgtcatctcacagaacgagagaaaagtgctaccaaggaagccatttcg

SEQ ID NO: 15695 - DNA, 876 bp, Brachypodium distachyon
  Intron number 1 from transcript Bradi3g57580.1 (locus Brad i3g57580) derived from phytozome v7.0 (chr-ID Bd3; pos 573 03277 to 57304152 reverse strand)
gcggcggcgtggagaggaggtcgagtaggaaggaggtactgccccatatttctctccttcccttcttcttctgcctgattggggtggtatttgcccagcccttttccgctgccgatggccagtttcttctggcgttatccctgtgttttggcgacaatatagttaatctacaggtaaaaagttggccatcggcagcgggtaaccccagattaactatatctggaacctcatactccgtataaggttctggaacctcgtactccctccgtccaatattagtggtcgaaatattacatgtatctatacgatttttagacatggatatattcatattttaacaaatttgaggcaaataatattggacggagagagtacaaggttctggatataaattagaagataataaatgggtccgtgggaagattttgtttgactgttaactgatagaacttccgtatgtccacattcacctatgttacgagttgtaaattgaaaaaatgtttgacggttggtaaagaataaatatcataagtcataacgatgcgtttgtaagaacatgtgttcttgcacaggttgtaaatagtctgaaattgtcagcctgtagtggttgtaaacatttttgcaacatttgcttctttttttagctttcagggttctgtagttctctcttcttttattaagcacagggaacacttgactctttggtcagctttgttttatgtaacaacaatcatgccctcaaccaggttttctagatagcaataatcatatccttaatcagcttggtctaatagagttgtctaagtatatcgagagagggctcatgcagataatttcatgattttggctagatattggggaagaagaaggcgattg

SEQ ID NO: 15696 - DNA, 774 bp, Brachypodium distachyon
  Intron number 1 from transcript Bradi4g17270.1 (locus Brad i4g17270) derived from phytozome v7.0 (chr-ID Bd4; pos 183 36942 to 18337715)
aagctcgcctacctcatcggtatcatgtcctatctatcaatccgcgcccgtctcttgggtttgctttgatcgttgcgcgcgtcgcattggcctgcctgctgccccggaggcattgcgttccttgataatgggacgggaaatcgttgattttggttgcgattacggtgatcaggttgattgtaccatagaggaatgatctctctccgtatcttgtattatccatcgtttacttgtttttcatttccaattgccatgaccggaccaagaggcgataattggaacgatatctttggaacattgggagaatgttagttagatagattgttgttctctctgctaaaaataccatttggggttttttactagctcattcttcccctttccaaaaaaaaggaaaaaaaaaacaagctgattgcccaaaggaaatgcgcaaaaaagaaaacagttcggcactgatgcgttctagcacgaatcacggacagggtggattccacttcatttaagtgaggctctaatccaatatctttatgtcgtcttgtagttctatgagttggttttatatgaattttattggtactgtttacttgaaatggtgtggttttgtttacattcacatagctgatataattttgcaattatgtgtttctgtaaaaaaaatggctgtgtgcattgtttcgatgcagaggccggagagttcacccttttccgaaaaaacatagctgattcatgttcctgaattactcttcagagcaagacaaggaccgtgccgagttt

SEQ ID NO: 15697 - DNA, 929 bp, Brachypodium distachyon
  Intron number 1 from transcript Bradi5g02940.3 (locus Brad i5g02940) derived from phytozome v7.0 (chr-ID Bd5; pos 323 2951 to 3233879 reverse strand)
tttgattcccccgaactcctccagaagaaggttgattttttgcctacttatatatatttttccctttaagtctgtgggtgtggtgcttcaacaatttaatgtggaaaagttagaagataattaatcttgtgaactaaatcatgattgtaaattggagcttcctgttgcttttccttccaaaacgttttacagttggtacaccttagtttctattttcgaactagtactttctattgtttgctcaggctgtaagtgacctattgtccatgcttattttgttagaactttggtggaatcaccgatcacatcattgttacttaagtgtaaaactttgtgcatttttacaattagctaagaatatatactaaacatgatgaactcagaaaaagaaaaatatttgtttgtttctttgagttttttgtggtttgtgtaatcaagacccacgctcttataaaatcaatagtgttcggaaaggtttggttagttaagttgtaagaaagaatatcaaatttgaaatggttatagagttaaataaatgaaggaaccaattttgtggatgtataaaactcatgtggcctatgattaggttggttgcttggtttccaacttcatgttgcaatttaaggcagaacatctgaacatgcctccagtatggtctgttctgcatgatagcaggtcctcatgctgaatagttgtttttaggcaaattcaggagtctaagcaaaccttacatcttgttgttattttgacaagtgaattttgtgatgtagggctagttgtggcgatcagtagatttgcaggcatttatcctgttcaattgtaaaactcggaggcagttattttactacttaacattatttcctgaagaaaaacattgtttaaatgttccttttgttggatgaatggtgcagatagaagagcttgcggtt

SEQ ID NO: 15698 - DNA, 707 bp, Brachypodium distachyon
  Intron number 4 from transcript Bradi4g31790.1 (locus Brad i4g31790) derived from phytozome v7.0 (chr-ID Bd4; pos 375 57020 to 37557726)
tgaagcacctggagtggccaggatttcagaatacggtagcccacatcccctcttgcatataaagttgatttctaggttgggtgttgttcatgttttgcattgtggccttatcagcctacagttgaggtgttgctagaggtgttttttctcttgagaaaacacaaaagctttgcgtctctatgcattgacagaggaagagttatgtacattgcccgagagcgggcaaacatctgaaagtacaactcaacacgcctaagtgctaagcaccaccgagagcagccatgcggcccatcatccccgcccttgcccacagcctggcttcgtcctggagccagatgtgccgatcaggcgcgtgatgtgttgagtgtaatcctgccaagatgtgttgatcttgcaccataaatgtgctggcttgtatgctgtgattccgagtgatgctttaggttggttttaatgagtataatccattgtccaagtttataatagcaaaaaaaattcaaactctgattcttattaccttaaaccaagaagaagctcgttggggttacatactatagtgggtcattttgtgatgattttactcctttaggccttcaagctttgttaagtttccacatcattcaagttatattttcccatgcctatgcttaatcaaatcatcatcattgacagttgaggacggctacacttactctcatacttgttgc

SEQ ID NO: 15699 - DNA, 1025 bp, Brachypodium distachyon
  Intron number 1 from transcript Bradi4g08810.1 (locus Brad i4g08810) derived from phytozome v7.0 (chr-ID Bd4; pos 794 7794 to 7948818 reverse strand)
gccgcgctctccatcgtcgtcttcgcctgctgcctgtataatcctcctccttcgttattacttccctatttgtgtctgtgtccgttgtgttaaaaagcgactgcgaaacaatctgccccatgtgctagcgactgaacgaaccaagatggaggccatattttcctgggatgcagacatgtgcgaccgctatggagaaggatggggtcatggggctaggagatacccgggaattttatggttagctgctatggtcctctgaagatcctctcaacaattttcaggatgaaggaaccgactacatctctgtgcattgcttatctgctggaatgcgtgaaataaaaaacaaacactggggagagaggatttgtgtggatcatgtggcgcagcgaattacatggcaggccatgggcttcaggaggttttttggaagtgataagaaagagaaggaagaggttgaggtgaagtgggagtgtccgatggacgatgtgctgaagattaacgttaatgcaatcatgcaagctttgatgtggcgacaagaacaggaggttgggtttttgtggtaagagaccgtcagggaggggtgcagtaggctcgggagcatggcgtctaaaccacatgcaggacccattgcatggtgaggctgaggcgtgtattcaggccttgatgatggcacagtgacggggcatgacaaaagttcaggtcgagacagattctctcctcttggttcaagctgtcaatagccatcatggtatttctccaaacagcgtccttttcagggagattaaagcgttgatgtttttaaacttttcattttctagtttattctattgtaagtgttcttgtaattgagttgtggatgcccttgcggcagctaatgtgaaaatggagcacgagccccaagccgtatggcagggtggtgtccctactttcgcacaagaccttgttgcgagcgatcttgcttggcacgttcagtattggaagctcctttccatctaaaaaactgctgccatctgtgcaggtaccgg

SEQ ID NO: 15700 - DNA, 470 bp, Brachypodium distachyon
  Intron number 1 from transcript Bradi4g32040.1 (locus Brad i4g32040) derived from phytozome v7.0 (chr-ID Bd4; pos 377 73866 to 37774335)
acggtgaaggtgacgaggttgatggtgatggtgacgatgacgatgaggaacaggcaaatgttgatagtgatgttgatgcggctcttctagttgatcccgatgacgaagactacattccacatgcccatacttagttgtttcttttgtttacatcgagttttaatccgtcctacttaattagttagttcttttgtttacatcaagttgtaatccgtcctacttaattagttggtgtttttctatttacatcaagatgttgtttcatttgattacatctacttgtataatccatcgtacttaattagttagttcgttgaatctcaattttacttgtattgtacatcaagttgtttcatttgtttacatcaagttgttgttcatttatttacatctacttgtataatccgtactaacttgttcgctgaccatgccaaggttataggctacgcggaggtgtttgagggctgccc

SEQ ID NO: 15701 - DNA, 951 bp, Brachypodium distachyon
  Intron number 2 from transcript Bradi4g40900.1 (locus Brad i4g40900) derived from phytozome v7.0 (chr-ID Bd4; pos 451 38170 to 45139120 reverse strand)
cgctccatttccagatcataaggttgtctaaacaggtactactactctgcaaggtttcatcctaacttttttttttctcaaggtgctcacagtgttaattttcatgactctccaagcaaactaatgttgcataaaattctgaagcgtgaaccgcgattggtggcttcttgtttctaaagttctgtttggttgtgcatcaattaaaaaatcgcatcaactgtgttgaactcgtgaaaattggctaatagacgaattgcttggtttttgtcctcacttactgcctttggcttctcgatcaaattttgcatcaaaatatcactgaagcaaagacatctggagtaggattttgtacaggacaagtctgacaccaattagcttgttaatgagctttgtcgtgtgcgaaattcaagaagttaagaatgaatccgcctgtcgaggggcgaagaaaaagtgaaaaacatgtcaaaaaactatggaaggatgatgccctactactaccagatgggtaactcagtctgttgaagtcagtaggttgcagagaaaaaaaacatatcatgaagctaccatagatgttctactagatgtctatgtttagtttcattcagtaaagcaagaatgttttaatatgaagttctgaacttcttaagcattttattacatgaagcatgctggtataagcatttatcattatccctgtccaagttaatcttgcttcagatagttttgacttttgatgatatatgttaggattacaatagagaatacttatggcacttctttcatttcgacagaaaacttggaacatgacactgttcccagtgttagccatgttctggacaaacattttttttaattcaccatatttatacacagtacattatgatctccattttgctctttgttaaatgtttgtttgttatctgttttgagccattttttgtatgcagatct

SEQ ID NO: 15702 - DNA, 990 bp, Brachypodium distachyon
  Intron number 1 from transcript Bradi4g14610.1 (locus Brad i4g14610) derived from phytozome v7.0 (chr-ID Bd4; pos 151 36874 to 15137863 reverse strand)
gggacggtacatttggtcattcctgagcccataaggttagtagttgaactcaattatttgacttcgctctcctgcgtaagagccccatgcccccatgttagcctgacttcctggtgctgccgaccgcttggcgctgaccagtgtccgtgccaatttttttgtgcgtaacttttagtaatggtgcacaatattgatttaccatcctaggtacagtaagaatagttggtcaagccattagcatttaacactatggtcacatggttttttgttgggaggaggaatcgggatggtgtttttctgcacctccaaccacttatccagagtgcatgattggtggggacactaaactaatcttatttgtatggggatcttagttaagtaattgttcattgattggatttgttgtcgggatgtatccctttattccctgtgcctagcacccggattcggctatgatagtttgtagcttgtgttgttatgtacttgtctacttgagtcattatgattttttggtgaagctactaaagcttttgaatacaaacaccatttgtgtccctgtatacttccatcaaaattggtgttattgcaagaactataaaaaaaatgctgtttggtggatcatactccctcattttcacaaaggttggcgtatttagtttcgttaagacaagtctttgaccaatgatagctttattaatatgcaatttatatgataggaaaccacaattaccagaaagaacttttgaagaccaatatattgatataatttcatgttttaaaatcacatattaataaagtaattcttggttgtcttgtcttaacgaaaccaaatacgccaacctttgtgaaaaggagggagtagttgtaaactcccatcttatgagcagtaatctgatttttggacctcactctaatggagaagtaacctcacacgattatatcctttgtttctaattcattacccaggaacttattgcctggaactggaga

SEQ ID NO: 15703 - DNA, 492 bp, Brachypodium distachyon
  Intron number 4 from transcript Bradi4g39630.1 (locus Brad i4g39630) derived from phytozome v7.0 (chr-ID Bd4; pos 442 85987 to 44286478)
tggggagctcaggtaacgtttttacattgtcttttatggtagttaagtatatcagcatgtttttccctattctgtgtcgataatattatcttgaaaggcataatgcctaaagtcaaagcgttggtcaaagaaaacttaacatgccctgtatttttgtatggaggtagtagtttccaactatatttatggttgaagatctgcctgctggatgtttatttagttaggaggcaaaaatttagaactcattttggtgaatcttaggtccccagcaaaatgtgcagccttttctttattatgtttgatcatttgagaagtgcatctacatcactagttctactgattgcacggcaattggtacccatgtgatttttgaaggtgaatttgatggttcagtcaactagttttttgctagtgaatctgcagtagatgtttctgcactttaaggtgtaatttttcttgcccatggttttcttacttaattattttcagcct

SEQ ID NO: 15704 - DNA, 683 bp, Brachypodium distachyon
  Intron number 4 from transcript Bradi5g11840.1 (locus Brad i5g11840) derived from phytozome v7.0 (chr-ID Bd5; pos 153 30578 to 15331260)
caacaagatcaaaatcccctcgcttcacttcctcggtacttcaacctcttcttcacagattagtcaactacgattgcaatgttggttggttgtagctaccgtgtcttctcagttgcttttaaggcggtgctttgtgtatggttgtctcgtctttttttattttcgacccaacatgtctacttcatgtgtagttttgttctagtgtttttgcattttaggcaacgtgctcaaagtactcacaccaactgtgtgcttcttcctgtcatacgttcattaatagattattagaaagctctatgcattctaattttttttccggggtctatgcattctaatgataataattagcagctgaatagatgcaaatatacagatggacaagtaatctaatgatgaaaaacttccacaagcttgatcatggtggtaaatagcagcagattaatagctcataatttacgaatgaacaatatattgtgagatcatttcagaaataatttaacaatcttattgcgcgagataaagtttgaaatattatttgatgacatcatttctgggtttattttgacatagcatcatttactttagctacttagcttgatggacaaagcccttgtaggttagccgagtggttagctagcaggaaaggaacatgaaacgcctgtgtatttgatgtgcaggtgaca

SEQ ID NO: 15705 - DNA, 603 bp, Brachypodium distachyon
  Intron number 2 from transcript Bradi4g38310.2 (locus Brad i4g38310) derived from phytozome v7.0 (chr-ID Bd4; pos 432 89489 to 43290091 reverse strand)
cgtatttgctgttggagagaatttgacctctcgctgtaattacacttgaccatcattattgtagtataatcactgtatttgtgatcattagcctgctgaagcttcattttccattttctcatgtactttcaaagaaaaatgttttactcaatctagagaattagagatgtgggtttatgtttttgtaatgcaaacatacagtactcttttaaacttcttttattcttgaaaatcaccttgaaatgcatgatacattttttacaaaagaaggtttgtataattagtttcatatgttgactaattttgttttttcttcattggctctccccctttctcctgtagggttttgctattttactttatctctttggttttgggtgatctatagtttgcaaggttctccatattggcttatttaatagctcaaaaaaatgatgttaggttttagtgttaacacaaacatgtctatttgcaaagtgcatgtcagacatctattatacaattatctttatatgcagaaattctctgaaattacggaattcattaaaggctcttttctcatatccctttttcactatttttgcagacaaaatattcagaaag

SEQ ID NO: 15706 - DNA, 596 bp, Brachypodium distachyon
  Intron number 1 from transcript Bradi4g40740.1 (locus Brad i4g40740) derived from phytozome v7.0 (chr-ID Bd4; pos 450 56062 to 45056657)
cgggaagaactgcctcggggattgctgcttgcctggtgacccctcctttcttttccttcccagatgcgaatcagattcctccgttcatggtcatagattatgtttattttgtcccctgcgaattttctctgctcttttagtagatgcttacggaatacgcaaatttggtgccaatttatgtatgtgaagctttgtttcatggtgattttgtgggaaaatgaaatctcttcgttttccaaggaagctgggatgggatctttacatctaaacaattgctttagccacttgtagtaaggatattcttcttaaaagaatttcactattttactccggttatagaactgtcaccctgggtggttttctgtttgaccagatgtagtttgttttctcgagctcggtagataaaaataggagctgcaggttccgcttgcatgtttgcggattttaggggattgtgcagggtggtggtggtggtgggggggggggtattatattgaacttctattatttgtcagctgcagaatcaaagttgattttttattggtaaagattaacatttggttgcattttctgagcagtttccgagcttccggtct

SEQ ID NO: 15707 - DNA, 1024 bp, Brachypodium distachyon
  Intron number 2 from transcript Bradi4g40740.1 (locus Brad i4g40740) derived from phytozome v7.0 (chr-ID Bd4; pos 450 56721 to 45057744)
tcttcatcgatctcctccttggccaggtaaatacaagcttatcattagtaatcttgctcatgacaagagaagtttgaagagtaaataaatcgtttggttaggagaggtgctgagatagttagtgaaggtatctgccatgtgtagtaagattgattggctaagttctggatacacctaaactatgctcgagcagtaacaactgcttacatatgactagtaagctgcatatgagttgttacactgaagagtaatattgttctataagcagcttgttgtaactgttttgtcaaaaaacaaaattatttaactgtgaacatccaacatgcatgcgtaaccgtatattcacttgttacatttgtttccatgctgttagaccattcttcaaagtcacatatctgtatttttgtctcaacttctttattaatatttgcgcggaagcttttgtcggttttgaaaaaaaagtcatatatttatgagttattactcctgtaatgaagatgctactgtttatctagctggcagatatctgccaaatatcatctatggtgagatattacgtaagcaagtaacttataaccataactaaaaatccaaaagtagtaagccaataagcagatttagctttcgcgagttcgccagcctccttccagaaggtgtctgattggtgggatggtcttgcttaccaccccgcagcaaaggaccttaggtgtttgtaggagcatctgtctattacacatgttgtggaatgtctggaaggagtggaaccgccacatcttttctggcgcttcttgaggtggcctttgaggacatcaggcagcggggtctacgtgggttcagtgctacccttgtttggggcgtagtctgtttttgctttctaggggttcaggcttgttccctaaaaacatccaatttctgtaatcttcttctctttccacactcctaaatgccaatttgagttttgctagtgcactgcaatcttagtaaatttaatattttgtttcgtatgttgcagtgggaggacagg

SEQ ID NO: 15708 - DNA, 687 bp, Brachypodium distachyon
  Intron number 1 from transcript Bradi4g41850.1 (locus Brad i4g41850) derived from phytozome v7.0 (chr-ID Bd4; pos 458 10978 to 45811664 reverse strand)
ggtcttcaggcgggcaggttcccctagatcccagggtaagcgcctccgtaccagtccgcgccttctcttcccctgattcgtcgcgctaaatttggccgtggaacccgtgtttttctcaccgcgagtagtttgttcgtggttcgaccctgacggtttctctcgagaaccgtagatccggctcacgggcgtggtagatctgaacgggttgtccgggaatctgaaaaccccgtctaatcctttgctgtgtcatttttttgttctctcggtgtatgggtttacgagttcggacttggaactgatggactttgatgtggggtttagattgtgttggactggagtagaggagaacggcctatgggtaggtcgtaggttcagtggacgtgttagtgttcttgatcagaatgatgattcggtcgtcgattgattcgttgatgggtttacttgcttattttgtaaatcatcatggagtataaatttgctagtattatggaaatggaagaacacaaaaagagagagtagagttacagcatgtacagataatgtagcctgtagagtctagatggtaaacattgttgctgcgctgtagtaaggttgagatttaccatggtggattatttatgtattttgtgttgggatctgctaataatagccttcctgtgaaatttgtgcaacagagtcacttatcaa

SEQ ID NO: 15709 - DNA, 803 bp, Brachypodium distachyon
  Intron number 1 from transcript Bradi4g21180.1 (locus Brad i4g21180) derived from phytozome v7.0 (chr-ID Bd4; pos 244 61219 to 24462021 reverse strand)
ctgcggcgtgggcgccggagtcggcttcttcggcggtaaatccctccttcactttgagttcctgttgtgtttttcgtttttcttccctgctccttgtttccgcattgctcttcgctcttgacgagctgcttgacaacatgatgagtatttgaaggttagtcagggtggggtttagtggagtcaacgaggtagggtttgctctaagactcatctagtcaaagcagcctaatagctcgtaaggggaggggtattcacagattggattgttgcacatgctgatatgtgctgctcggtgtcttggttggagggtttcggttttggtaattttgcaattgttatcctccctccctccaacaaaagatgtctcaactttgtcaaaatttggatgtatctagacatgacttaatgtatagatgcattcaaatttagtcaaagttgagacattctttgtcggactgaggaagtagttgactttttatatggaaaattgttatatttggttggtaccattgatgggatagaatcaacttgtgaacccaatatcattacaattgggcgcatgagaggaggccaattgtctgcatctgtaaactttctggcagatgtgttgcagaatgaacagcattcttgccacttgtaaactattttttccaatactaccgttccatcattttgtaatttgtatactgttttttgatcctctgggatctcgcttccttttcctgatattttgtgttaacttctgtaataaatgatgtataactttatatgttgcatgaataatgcaggttcaggattaggtt

SEQ ID NO: 15710 - DNA, 515 bp, Brachypodium distachyon
  Intron number 1 from transcript Bradi4g28330.1 (locus Brad i4g28330) derived from phytozome v7.0 (chr-ID Bd4; pos 337 15167 to 33715681 reverse strand)
tgaagaagtatgtgtagacaagcgagccgtacaacatgagtagaaacatggagacacatctgcaggtaacataattagttgtttacttattctttcctcttgttggttccatctgctagagcatgaatatattttctactgcttcattcgcttgcaggatctatcagtggatgacgaagaataggtcgtagctcctggagcggaaaggagacaaacatactcaaaacatgcgtatgtgtgcttactccccttcatgcttttgagtattgtcaccatcatcatctcagcaccgctatctttatgttctgttgttatatttccttttgaaaagcagatgagtgattttaatctgtggtcaagggtgaaagaaggtcatggatgtcattgcaagtccttttcccgattatttgaggaaaagaaactccgataatgaactgtaaggaagtatgtaagcttcatcatttcatcttgtagtattattttatttttccttccaagggggtttataactttat

SEQ ID NO: 15711 - DNA, 507 bp, Brachypodium distachyon
  Intron number 1 from transcript Bradi3g59080.1 (locus Brad i3g59080) derived from phytozome v7.0 (chr-ID Bd3; pos 583 48821 to 58349327 reverse strand)
gcgccaggtcaagaaggccctcgccggaatcacaggtgctttgctactagtctccaatcagttgccggcctgtgcgcattgcggtcaggtcacattgctttgttttctcttctgctcattaccattgtgcacggccatgacttgcttttgtaccatgtccctagactagatgatcctactagcactctgttgacagtaccagtgctctgaataatggccattgtgtcatgtccgattaagctttttttttccctcaggcctcagcacggaccacgctttgccgcgtaaactctgcacaggagcatttgctcggaaaatatagcacttcttggcaagaaaagtaactcatttttgtttgttagattgacttcatggtcaattaattagcaacaactcttggcatttaaagcctctctcgtgtttcagctcagggtccattagcctgtttgattttgttaggaacaagttctttactccactacatttctgaagctgcaggggtggagc

SEQ ID NO: 15712 - DNA, 773 bp, Brachypodium distachyon
  Intron number 1 from transcript Bradi4g26590.1 (locus Brad i4g26590) derived from phytozome v7.0 (chr-ID Bd4; pos 317 00003 to 31700775 reverse strand)
gcgcgccggaagtgagtccccccgcccgccccgcctaccttcagttaccttttctgttctcgattccttcctcgcagtatacccaatacggttggttgaacttataatgaggaattcatgttttatgcttctgtggtatttcctggtgcgtgccattggtgtggaagaggtgtcgtagaaagttgcaggcttggatggatagtatcgttagtggtgtttttgtatcatgaggtggaatgaggggctgggagctatcgtttttttttgcacagcttaacctttataatcacctagttgagcggctgcaatgcgccggacttcattgctgcgatggttctggtatcggatatctgcctgccattatatgtgtgcctgtaataaccgagtaatcttgtctgccgtaatctcctagtataaatttgacattggctgacgcagaagcggaaccacgttttgagtagataaagctctgaatccagggagtccagcatatctgtatgatgcgtactcttcaacgcagttttgggggttgtggtcaatagtcactgctacctggatccgtggtagtcatgccgtcacagtcagcataactcggacactttatgtaccgatcatgtaaaaacacaaagtggtcatgatgaagtagatgcttgcttcaactacctccggtgtacctttcctgctgttaagtctcgcaggcttcagcaaatctaattatcttttgattttcccatgaagagaggagaacaaaaaggaagaaccagagacgccca

SEQ ID NO: 15713 - DNA, 885 bp, Brachypodium distachyon
  Intron number 1 from transcript Bradi4g36090.1 (locus Brad i4g36090) derived from phytozome v7.0 (chr-ID Bd4; pos 413 54742 to 41355626 reverse strand)
tatctgcatcagcaggtgctcgtgtttgtacctatcgggcgcaagagacaaagaggaccaaggctctctcagttgttctgtatgcggacaccatcagcttctgtcacttcgtcaacgaaacaaccggtctcagcactcatatctctctctctctctctctctctctctctctctatatatatatatatatatatatatatatatatatatataatccgagggtagctccacttgattagctaagaagtagaattcagttcaacaaggcaaatacaaatatggatgtcagatgagatgccaactctggaggttaagtcagtgttttggattttcactacgtgcccgcggtaacttttctatcttggctaacatgtcaattggttgtcgtgtgttctgtatagacatagttggcatcttgaaggtaatgcaatgagtaaccatttgtctgtcattgacaggatgtagtatgatgacccttttactatacacaattcactgagtctcaagttccagtgttacttcaatgttttaatttcaaagttataactcctgcaatattttcgtcttcgttaatacgcatctctgtcatttcatcagagtatcaccaaatttgattagcatggaaatggtctaaatgtggcagttgccccttaaacaaatttctggccattttattgaatattataacacaagttgaaacatccaaaacgctttctaaatgtatagcgcgtatcccacagcaacgctctgagcataatctagcaaataataggaagttaggatatgtatcatttgtgtgcaagaggactgccggagcctctcctacagtttcgtttccaaaaaacaacaagactcatgacctctttactgctgttttttttaggt

SEQ ID NO: 15714 - DNA, 400 bp, Brachypodium distachyon
  Intron number 1 from transcript Bradi3g55540.1 (locus Brad i3g55540) derived from phytozome v7.0 (chr-ID Bd3; pos 557 61263 to 55761662)
ccttgcaggttgaaaatctctacttattggttttgcttttgctatgatcatgcttttaccttcaatagtaaatgctttatatgaacggaaatttattgctcgtctagttatagctgttggtcgattgatgtcgtgttcttattttgagattgatgttgtgttattttgattggtcacaagcaacacttagccttctgacccagcaaaatatatgttcataccttaatttgatgcatggaagaggtgactttttttttgtacctaataatacaatgttggtacttcgcacacatgcttataggccactaccactacaacggatcacattcatgtctacagtagcatgcaagtttctgtttgtttgttttctgatttagaatggtttccatgacaggaaaat

SEQ ID NO: 15715 - DNA, 1005 bp, Brachypodium distachyon
  Intron number 1 from transcript Bradi4g18350.1 (locus Brad i4g18350) derived from phytozome v7.0 (chr-ID Bd4; pos 204 44289 to 20445293)
tcagcacccctgggcctttgcctttggcctcctaggtattttggtgtctctctcgatagatccttgtccgaataattgagatctttccttttaatcttctcgttgctctctttttcccttttcctttttttgctgctttggcaaaaacaatagatttttttttgtcagcatgccccatgaagtgatcatcctacctatacacgtacatagctagttagtgggttttgcactatgggataatgcatgcaattttaggttgtttaccgaagcaaagagcttgccaaaacaagatttctcttggtgcaccttaatgatccttcctcttctgtcccctcctttattctttttatgtggaaactaagactggtcataatgaggagtaacatgaggtagtaacctgcatatgttactagtctatgttactacttcaatagtgggtagtaacatatttgtggtaacataaaagtctcatttactagttttatagactcattatatcttggaaagtgtgctgtgatggtaacatatctagttactccaacactctctttctttattaataacatgacacatcatcaaaattgtttaattgtcactttagttaccatctttgttagtctcactatgactagtctaaaagaaggctaattaatcgttataaggagcatatttaattcattcgtcatgggagccgaggagatatacaaacatgcattgtgaattgcgatcgcaaatgatcgaatgaactaaagatggcgtgtgaagaaaaaaaagagtagataaagggctccaataatatgtcgagctttgcctatggttgtggagtgacctcacctgacgcacacggcacacaagttacgggtccccctggctagtcattattgaaagacgatggaccggccggccttttgtgtaacgtactggctagcgtgtctccctgtttctcgcagctggctaactgactcgcttgaactttgtttctctgcaggcaacgtcatctccttc

SEQ ID NO: 15716 - DNA, 1014 bp, Brachypodium distachyon
  Intron number 1 from transcript Bradi5g09160.1 (locus Brad i5g09160) derived from phytozome v7.0 (chr-ID Bd5; pos 123 55630 to 12356643)
gtggtggtcgaggtggaagccgtagagcagagcaggtacgggacttgcaattcctacttcataccatgtcgtcgggcttggttcgatgctgtaatttggtgcacttttatcatcgtgtcatggtagatcgggtcagatagatgtttgagagtctttgtttctgttctacttgcaatgtggtgactggtggatccgagcagacgattgctgctattaacaccttttgtgcactagaagttctttcagggtttgatcctgtcagcactattcatgtacttagcagcacgcagccagacacgacactttattatattttatagtagcccacttattgaacaaagcgaaattgtttattacacttgatctaggtagatagccatgcaccttacaatgcacatggaaagtggaaagccatccattctgctgtggtatgcaagttttctgtatctgtgaagtgccaatcagcctaatttcattgccgagcacggcttataatctgaaactaggacaagtcatgtagattattttgtggcttatcataaaatgaagcttgagattcagattaggcactgcatttgcgtattgggtttgtattgtttggttgaaataaggttggcttagcctccatcatccaaacaggcacaggtaggatccatggaattagggttactagttgctcttctgctgtttaatatctatcctgatttcgtttaatcgtttattcgcaaaaaatagttgaagtcaaatgttatactgataggattaagtgagcaggtacaagaatacggaggtagaaagttttataaaaatcattcattcggaaaaatgctacatccaatggattagatgcagttgttgatgaaggattctaatactttagtaataggagggaacatgaggcaataatataagatgacgttgtattgagaaagaactaatcatgattatctgactgatgtcaaccccatgaaaaatgcagtacaaaaaggcgtaaagtgattgaacaagtccaag

SEQ ID NO: 15717 - DNA, 658 bp, Brachypodium distachyon
  Intron number 4 from transcript Bradi3g52500.1 (locus Brad i3g52500) derived from phytozome v7.0 (chr-ID Bd3; pos 533 91826 to 53392483)
gggtgagtacataggttcatgtctattttgcatcttaacaacatgatgaccagcatatataaagtagaaataagtagcagcatcgttcgtttagttgacagggcacaaaacaaaagctatatataactactgatcgtactatcacccatttgtatgttctatactcttacagactaacaaaacctgtttagtttatacacaaaaccatgtttactcgacggcgatggcttccaatgatttggaagatgaggacatataatagggacattgacgtgttaactgttcaaggcatataatgtaggtcttcagatcaggtgttgataattctgttcataaacggactatcgtattgatattgcacgcctaaagtactccacaaaacagcctaaaaacagacgagtgaataaattgccggatcttccctcaaaaaatatataaactgccggatcagtttggtattcacttgctggttcaagagtatcgctcaaccgaagcgactagcatacaaaatgccaccagcctgattaaacttctaaatactgcttgtttttacggtttttatgaccattattattcacgtcaattttctcgaacactttcggtttggcttaccattttctttacattttggcatgtaatagagaaacgccactcgcgg

SEQ ID NO: 15718 - DNA, 915 bp, Brachypodium distachyon
  Intron number 1 from transcript Bradi3g56600.1 (locus Brad i3g56600) derived from phytozome v7.0 (chr-ID Bd3; pos 564 34987 to 56435901 reverse strand)
gcctcacctccttggctccgtgatccagatccaaggtgagctcctctcccgcttctcctccccgcttcgctccccccattatcttccctcaagccctccattttgtacgggacggcctagaggaggtaattctccttcacggggtaaggggatttcgtctgggcttgaggagttgctgactccgtggcgtcgttcgtaggtgagagttctccgctgcatgtttctctcccgatttcccccagattttttgggtcggaattctggtcggtgggggcgggggcggttggctgcacagatcacccctggtcggatttgcggcgatttttttcttctcccggtgcaattctcatattcgtgataatttagggtttgtgcgagtaaatcctagtcccggatacccttttcatggggatcagttagtgtgaaattgggtttgcttggaactgggatccgagagcctagatgcggtagtggcttcgatgccgcttgtttgtatattacacaacagtttttttttgcggcaatattatatgtcgaaattaacctgggtgttgaaatccgctctgccatgataaatccatgcgattaggtttatgttttatgtactcctgacgtgaaagtgctatgcggatctgatgaagtttcagttcagaattcgttgattttgtcatggattttgttattcagttgttcatatcggtttgtctatcagtcagtagtgttccgggggtgccgtgaactgcactaggtccaagacattgttgtttcggagtcaagtactgaattaagatgctgcaatcgttatggcaaatgtttatttatttttcttatggactgaattaatgatgtttcttgcgtgcaatttgattacaggtggaattctcgattgattggtcataacgagttgtggccata

SEQ ID NO: 15719 - DNA, 932 bp, Brachypodium distachyon
  Intron number 1 from transcript Bradi5g12180.1 (locus Brad i5g12180) derived from phytozome v7.0 (chr-ID Bd5; pos 156 57667 to 15658598 reverse strand)
tctgtaagctagctataagatttgtttatttattttctaggattgtctgcactgtctatttggtagctcgcgagtagattcgccattaagattcacggagaactaaatccgttgtttcttagatctacctacggccgtctcgccgtgaaggaagagaagatacaaactcgggattgactctgttttttttttttcgtggggacgctagcttctgatttatgcagaacaccagcagatatggcagtagtaagtagtgtgctatcagtatctagcttagccgatgaagtttaagaagaaaatctcattccactgagaacaaattggttgagataaattgaaaatcattctcgagtagcctaattgtgcattacaacaagatccattacaggatccctacagcttgatttacaatgtgaagagaacaggtgagtgtttacccgtaatttgcaaatatatagctggatatgctgcatcgtctcaagtcagtggtctctcggagaatctatctcgccccagcagcagaactcatgctaaagaattatgacccccataagaagagtggtgcgctgttgctgatgctgggatgttgattggggtgtggaattctgaaatctgtctggttggagcccacgaattaaacctgtaataagcaagtcttaactcaatttatacaagtaactgggcgcacaacccggcatggccaacaggtagcttcacctctaccactgtctgtcatctgaaagcttagtggaatgaactgaactttacacttcaacctgtttgaacttttgatctcttagtgcattggatggttcataccgtaacatctctttttcaaaactaacattttactatttttctagattatactatgtgggcctgcatttcacgatgtctaaatgacattacatgtcttttcacctgcaggagca

SEQ ID NO: 15720 - DNA, 757 bp, Brachypodium distachyon
  Intron number 2 from transcript Bradi4g00650.1 (locus Brad i4g00650) derived from phytozome v7.0 (chr-ID Bd4; pos 302 527 to 303283)
agcttggtacacttgcctggtgcgttgcagatgtgtcagatccgcatgtgttttgctcactctcagcccacaatttctgaccattgtaagctctaaattttgtctaacggcttgtttcatttttagttgtgttatcgttccttggctggcaaacagtggaactcaaaagtgcacattagtttttagttgcttgttgaaacctgagacaggaagctcacccaaagatgtcatataaagatgttcttgtattagaaatttacaattgacgcctatcacgatttattcttagcaagtgataacgacctcactccacctcctccttgtggtgatgttagggcaggtcgacatggatgaagcctcgatcgcgtccgccgccgccaccgtgctgcctccttgggcggcggtaggtggtacatgggcatgtctgccgatgacattgaaatcattgatcttttctgtttggtgttacttctgtggaatttcttctcattattgtttgtagtcaggatttacctaaatgtttcaaatgactggcacactgcagttgcctatcaaggcagatttcacagtgcagatttcgaacttcttaatttacctaaatgtttcattccttcacttgattttattgacgggtatgggccctcatactctattgtttcattagagatgaattatgttttacttcttttttggacaatggcatgcaccctaatcttgtgtaggcacgttaagcctgttgttgggagaaagatcaacc

SEQ ID NO: 15721 - DNA, 940 bp, Brachypodium distachyon
  Intron number 1 from transcript Bradi4g27490.2 (locus Brad i4g27490) derived from phytozome v7.0 (chr-ID Bd4; pos 326 68467 to 32669406)
tcggcagagttctcgggaaagagcggttccacgaggtgagtaccgttggctccctttgccgtttcatattctaatctgtttattcgttcctttcgagggcggatcattgatccgggtggaggtgtttggtggatttaggcggggtttcagttttcttctgccgggctgtcgcaatcacatagaattttcgtgattattctgctgtagtttacctatgtaaaataaaattaaagataggattagcctgtgatgccaccgtacagtcgaaaccgaatacaattacaaaaagtaatgaatttatgcacttgctagactgttccttttcctgggtttaaaaacttgtaacgaatcttggagtaaattaattgtttggatctcctgaaaaactagtaacgacaacagtttatcatttctgaacatctgtctaacaggacacgtttcagcatatttattatggagtaagatgactggaaatctaaatggcttatttgagaacaggctgtcatatgttatggccttgtgggttttatggctcaaatggtttgcaaaagtgcctagagtcctcatagttttcttggaaatttgattccaaaagtagttaatgtcttgttgattatatagaacacacaagctcatgaatttaaaaggtacgattgcttatatatatttggtcagttactgagttatattgcttgaagaaatttgctgtcagtagagattttgaagtgagttcatgataaattttgtccacagtgttgttgatagattaatatagcttctgatagctttttttgatacatgctgaagctatagtcatatgacatttcacctggagaaagacattgtaacttttgtttattatccatgaagacctgtatcttactacattcctttgttgattgtgttccgattgacaggtcctgtggtaaagccagttgtt

SEQ ID NO: 15722 - DNA, 796 bp, Brachypodium distachyon
  Intron number 1 from transcript Bradi3g61080.1 (locus Brad i3g61080) derived from phytozome v7.0 (chr-ID Bd3; pos 597 97691 to 59798486 reverse strand)
ttctcttccaatccaatcccctgcggcctggtctggtgagttcttgccttgctctcagcctcgcccttgttcgctgtctttgcttaccttagtgaatattttgattttatgtataaatcttgtcaactgcctgtccttagtgaatgtttgttggctgcatttgtctgttagctaacttcataggctttataacgatgtcaagcacgaccaatgctcaataattcactgaaattgcagttgctccatattaccagatgcacaatttgtactctgcaattcatttgtttatacattgaaattccaatttgttttttatgcttgttaatttctgattgagagaaacagggtttaaagactgaaacaccatagatttgcctcaaaactgtgatttagtgctatataacccaatagcgcaactgacattttgcttaagtgcaattgcagtgttgacttccattaatcgcactttgcaatttctctgtcccaactagatgggttttttacgcctaacttagaacaattttgtagtcttatatgaagtgccaaactgtaacgcaacttcttctctgagtgcaattgcactgtttacttttagttattgcaatgttttatgtcgcaactaggaggtttatgtgccctattttgaacattttgttatcttttttgatgcactaccaaaacagtaccgtaatttacattttgtataagcgcaattgcactttttactctcggtaattgagatttttcctgtcgcaactttcgactgtccgggatcttattgaaggttggtctccgg

SEQ ID NO: 15723 - DNA, 879 bp, Brachypodium distachyon
  Intron number 1 from transcript Bradi5g09100.1 (locus Brad i5g09100) derived from phytozome v7.0 (chr-ID Bd5; pos 122 85786 to 12286664)
tttctaccatccatttgaaagtttctactctccaggtcatgacttttacataattattcttcgagcttctaagaatttcatatacaagaattaaaagttgaagagaacctacgtgagtggataatgaaaactgaccgtaaatcaatcaatctaactaaatggtcgatcaatcaatatcatttccatttgaagtgttgaggaacattgaatgtcagtctcaactgtagcatcctttatgctgttgtaatgcctttcctacttactgtattggagttctttttaatctggactataactacagataaatctggagggtggcgggtggcggttttatgttttgctgcgggttactagcagtaggcggtaattcagaattcagttcttttttgtcgtgttggttaatgttgttttcagtcgttgacaggatccgaaacttgtttattctggtcgaacccagcttaaagccagattcaaaaattatgggtattttactttggctcaggaatattttaattcagaccacttgacacttcacatggaacatgcttgcttaaagtgattttaatcttccatataatttcttcttttcttcgttgttctgataatccagatagtctgtgcattaaaaaatttaatcgctatatattgggtaagttattttgaggagtaccagaatgagttccttttttctgagcgcaagtgtccctcagtggatgcagttttattaacctatattcctgatctcaaaccataatgacttcttgtcccatagtttggtaactatgtgttggtcatctagatatgctgttgtgattctctgttatcattggcctttcatggaaatttgcactgttgactgacttattatgcttgtaggta

SEQ ID NO: 15724 - DNA, 962 bp, Brachypodium distachyon
  Intron number 1 from transcript Bradi4g28470.1 (locus Brad i4g28470) derived from phytozome v7.0 (chr-ID Bd4; pos 338 84739 to 33885700)
gctccaactcaaacaacccgtctgcgaaatactacgtgagttgccacgaaaacccccttttcttggcttctcccccagtccgcctggtccttggttgctttgtttgttggattccttgagggattcggtgcactcgctcgttcttgaacggaacacgtgcccgcgcccgcgccccagttatccatgcttaagtagttattaacgaaatatttggcaatttctgaaagaaatacgacctcgtgttccagttcttcattatttaccggttcttgatattgctagaacaaatggcctgattagtcgctaaaacttggctgtattgtgttgattaatgaaatttgtgtttacgaaatatgtgattgcatcccagctatggctgagctagcagttctaaatttcaagaaactttgtttttctgttatgggttaggagttgatcgtaagatttataatgttgattgtaagatggtctaactggttaaacatagtatcatcacactagtgctgcatccgtgagaagtttgattcgtccttttgaaccaagctattggtgattatacagttcctgctcggtgcttttgttgaaaggattaatacttcctgaatgtgagacacgaagcattgcgacttaaaattttcaaagctcggcatatttttaaagtccagcatgatttcttgattttttttcctagttttcgttagccccatttggtgttttgcccgtatttaaaattgaatatttccttctaggtctcattattgttagtgttatccacaataatctattgaatgtgtatgaatagttgatcgcaggacgttacacataccaatgctttcttcggccattgattgtacattcagttgcgaatgaactatccatcataaactttaatttgctgttgacatctcagaattgcattttctgtgccagttccctcagtttactgcagttcttgctatctc

SEQ ID NO: 15725 - DNA, 986 bp, Brachypodium distachyon
  Intron number 1 from transcript Bradi5g12050.1 (locus Brad i5g12050) derived from phytozome v7.0 (chr-ID Bd5; pos 155 56028 to 15557013)
cggcctcatctacggctacgacactggggtcacaggtccgttacgtattatgtgttctttattgagcttagttcaaacttcaaagaaatagtttggttcactgaaaagaaaaatactccctccgtccaataccatgtgactcaaatctgttcaaatatgtatgtatctatacctaaaaagcgtctagatgtacctgtaatttggattttgctaaattagctaaacactggtatgtttctctttttagaggttttccaaacgctagaaggattctttttctagaataaacgctagaaggattcagaagagtcaagtccaatccatgtactgatgcaggattcagctaatcctatgcctggaaggctaactgattatgagtacagtagattgttttgcctgcacaaacattaatttgaattccatttcattattcaagaggtgagaatttagggaatctacatacaaaaagaatctcacctccatccaaatatccaatgcttctgatacgggcattacccgtcacgatatatgacatatgcgttacattttgaaattttaaatttatggtagatgcttccgtaagacctgggagcacatggtctttagagaacaaactcacatgacacatgatccgacaaagagaggtatctcttgccttgcaagctgcagctcctctgtttttcttctctgtttcttgaacgaagctctgtttctctgtttcttgaacgaagctctgcttctctgttgccttcatgcgctcctgcgacctgcgtcaggtcatggcttctctaaagtcgccatgagaccataactgataactccatggatgtttttatcagaacgaagaacaatctcttcattagtcacaacttcacaagggattcgaatcatgccgcaaagcagagaatgcatgttgcaagaagtcaagaactctttgcgcttacacatacgtgaacttttggtaactcacaggtggggtgactcag

SEQ ID NO: 15726 - DNA, 726 bp, Brachypodium distachyon
  Intron number 2 from transcript Bradi4g43870.1 (locus Brad i4g43870) derived from phytozome v7.0 (chr-ID Bd4; pos 474 55718 to 47456443)
ggaggagtcctgattcaactccaggctcatcgcaggtatctgttaatgcaagttcttctttatttatagacctttagattggagtgcatggcatcatttttcttttctagaaaacggcttttcagccctgctttatattgaaagcaaagatggtcatactagggtcgctaggttacaagtttgaatcagagcaaagcaaccaacaaaactaagctataggaggtagaaaacagaatagctagaaatgaagcacctcttccccagcaagtcgaaacaaacgaagataaagagtacatggcatcttcaacaatgcattggtcccaaactttacacattggctgatctatgctggcgcgtactgtgtcgttactgtacaagagtagtgccaggtggtgctgattacccaccggaggatggaagaattgaaacattttatagggaaaatttgcacaatatctgcactatatgagataataggtagaagaatcagattcgatctttgatttagtggataaaggtcttgcttattctgtaagagaactaagtctcaaatggggttctttggtttgggaaacaatagaaactggccaaggagctcacatgctgatgtttatagaaaattagtaatttgagttactttttatactcttctaagctgttcatggtgctactgttattatttcatcaataggccatttcacaaaggagccattcaactgccccagt

SEQ ID NO: 15727 - DNA, 733 bp, Brachypodium distachyon
  Intron number 2 from transcript Bradi3g46180.1 (locus Brad i3g46180) derived from phytozome v7.0 (chr-ID Bd3; pos 481 13234 to 48113966 reverse strand)
cttggctgccggtttgacgtgcactttcttggtgagtttacctgctgtaccgctgttcttatgtgcactttcccctttttcttatcgcacatccggctccgcgtgattgctgtttccctctttggtagttacttcgtggacgctgttaaccatgcatgctgttaactgaagtcggataggaaacagtgcaatcacactctctgtaaccattttgatgcttcatccttgcagtgcgttctttacattatcatgccttcgcattttgggtctcaattttggacaacgttgttatgattaagagttctcattgctttctattcagtagccatccacgctgtttcactaattagcaagaccaatcttataaatgttattcaggggctcaggccaaatagttaatacgagtatttggtactatccccaaagctcattttaggaaagaacatttgtctaagcttcattattatatgtatgatgtgttccgtctagagttcaggtaaaataaacaattgagaagttattgtaagacatggtatattaatcatgatatagcattcttgcatcacatgatacaccatgaataacatagtcagggtcactcgtgggctgtgattgaatttttaatccatctgtcaatactgattacacttcgtgctatgtattatgcctgcctaggtttttttgcaattgttaatctttacacctgactattctgcctctgtcattgcagtcg

SEQ ID NO: 15728 - DNA, 1014 bp, Brachypodium distachyon
  Intron number 1 from transcript Bradi4g22760.1 (locus Brad i4g22760) derived from phytozome v7.0 (chr-ID Bd4; pos 272 33239 to 27234252 reverse strand)
gcctccgacgagcagctggatctcgggatttacaggtgaggttgagatttgagaagcagcggcagagacgtgatgcagaatagtttgttgggtccggttgttggctgagtttatggtttggaaggttttcttttttttttgctgctgttttagtgttcccgtgctgaattcggtgtaaagttttccccttttttgggggagccagccaagtgtgccgcccccgttgttgttgttgttatcttcattcatggttgggagtgatctgtgcatcccctttttgaggatttattagtgggcaattggaggttgaattttgtgctcttcgcgtctgtttggggtctcaagatttgatgattttgtggttgctttcatgtttccctggtttagctcctgaaagttgtgcttgtggtgtgattagttcaatgattacttggcggagtggatccaattggaacctgattcgagagtcaaatagatctccctatcattcctctcttttataaaattctggctatttttgggctttgtttgatgggcttggttttgctgttaacggagctgaaaaattgttctctttgatgcaacttccaaaccattttgtttgaatctcttttcgtactggattactgctgtttttgtggtgattttttttgttataactggtgtctggtgttcgtattaattttcgaaggtagttcaatctgctgatttccaatctcggctgactttttttttggttgtgcaaattattctgaacaacttatagccgtgtggtacaagcataggagacaatacttgttgaccttttcttctcctttagaataaagaatattacaaaaggacattctttcagtcccaattattgtttcaggattttttatagataatgaatcattttttaaagatatgatagctctaggatggttaaagaaactactgctatcaagtgattggttcatagctgtgaatttcaactgagacttgcttttcatgcctaattcaataggataccag

SEQ ID NO: 15729 - DNA, 1016 bp, Brachypodium distachyon
  Intron number 1 from transcript Bradi4g07510.3 (locus Brad i4g07510) derived from phytozome v7.0 (chr-ID Bd4; pos 639 7352 to 6398367 reverse strand)
gcggcgcgagtcatcctcgagcaacaggaggaaaggtcagtccaaaagcaccacgtttcctttcaccctttctcttgctacttgatctttccgagtcagggcttagtgctgttgtaccagtccctttcccgttctcgttacaggtgattccgattcatagggtgaaacggttgcttggatcttaggttctatgcctagtgtgcaacagtaaggttctgcgaaaaccctaggttctgatttctattttaagattcgtgatgcggctggtcttgtgagtatccaagcattgaaacggaactatgacctttcccagtacctttccgatggcatatttatatacaatacactctagatgtcaatttttggattgtcagcttgagaacttcaagccatcttgtgtatagaaggagctgacctatattgtacttcatgaatgcatttctgtgatgcatttgccaagaaggcctgccatgtgattagaaaaacaaagcaataacaaaaaacgcttggtctctcatctcgagataaaagagcagtattacaaagtcagttcatgagtaaaggaatgaggatcagatgcttaagtaaccgcaggcaattttgtaccgttctatagtacactagctggatttaactcttgtaggaatttcctgataaaactttaggaaatgcttagtttagaatgatacatgtagttgtgagtggtgacaattctgagatgtattataaagattgtcagaaattctagtctgtgtgtttcagttctcagttcaaatgaataatattgtctcggtattgtgctgtttttccttagggaagaaaacacttgcttgaataacatcaatttggtgaatatgttgataattatgtaactcattgtcaggcaggacattttctcattgtcaagatggatggatagagcactaaagattatgtagtaccactgtccactagaattttcagttgctcataattatgtaactcattttctggcaggacatttgctcattatcaag

SEQ ID NO: 15730 - DNA, 691 bp, Brachypodium distachyon
  Intron number 2 from transcript Bradi5g03050.3 (locus Brad i5g03050) derived from phytozome v7.0 (chr-ID Bd5; pos 337 4695 to 3375385)
tcgacccgcggcctcgcctctagctctgattcgtggtgagtgctatgccttctctccgtgctttgattttttcatgtgctgaggactgattcgctatacctagtactatgatctatctaggggtcattctatggttttgcaatgtgcttattgctcgagatgatttgtacggaaataagaaattttgttctgaaaacatatgtatgcatacgtaatgctacctgccgggatcgatacatgcagtatgacaacctattttctgctaaagacaatttccatgtttctggaatatcttctccccctgtaaaataactcaattaaatacctttcgagtgcctcatctcaatgaattatctgtacaccaccatcagatggattccgttccactaaacaccagaaatgctttgtcccgccaaaaagcttagtaaaaacgccgaaaaccttaggtcatgtaagaaaggggtgtttttttctttcaaaaactagataagtatatgaggcaatagatacatggaactcaaggagtaataagttaataattattactaataccgctaataaaatcatctagctgctgcattacttcgaatggaaaggagttccatcagaacccatttgtttctttcttctatcattctatgcattacttttcaaaaaaaaattaatcagtgaaattttcaattcagcagac

SEQ ID NO: 15731 - DNA, 1050 bp, Brachypodium distachyon
  Intron number 1 from transcript Bradi4g40550.1 (locus Brad i4g40550) derived from phytozome v7.0 (chr-ID Bd4; pos 449 23820 to 44924869 reverse strand)
ctcgccaactccgtcagattcgtcctcaaccaggagtgagtaaaattccttcttctccagagtccatccactgcctgatcgactggaaattggttttgttgcgtatgggggatatatttcgttttgtcgcgctattttcaggaaactgatgtcgccgatggagaaacagtgaggtggttatatgttgtttgatttcagatttttcagacaaccggatttagttgataatctgttttaactggagcagctttaatttagattattcttgccggtagtgtgtttaacaggaatgtaaattgtattagactcctctggactagcacctgcagttgtgttcggtttgtttttgctagtatttggtgttatttgttgcttcagcaattgaccagtcgactaggacctattgcagggcatcattgatcagtttagctaaggaaaattgtactactccctccatccaacaaaagatgtctcaagtttgtcaaaatttggatgtatctagacatgacttagtgtatagatgcattcaaatttagtcaaagttgagacattctttgttggacggagggagtacgtaaaactaagcatgtttagtgttagaagatggtagctgagaacttatcagttttagcattcaacggctcagtttgtttattcatgtgatgataatgccagtaagccagtgtgttcttctgatggtataaggtggctgctgatatcttcttggctttatcattcaatggctcagtttggttcgtcatgtgtgaataatgcagggcacacttattctagttatataggctacctgcatcttatgatagtggttcagatgataaaattataattgcacttgttgtaagcaacttgccattttgtatcagttttgcatatggcaacagaaattcctcaaatgcattttcttacattacaggaactcaaaaattcatttatcgggtgagcatgatttgcattttaggaatacatctcctaataattgaactttgtgttgttacagcccaagggtggcattctgtgggtatagcatccctc

SEQ ID NO: 15732 - DNA, 796 bp, Brachypodium distachyon
  Intron number 2 from transcript Bradi4g26870.1 (locus Brad i4g26870) derived from phytozome v7.0 (chr-ID Bd4; pos 318 92649 to 31893444 reverse strand)
aaccctgccaacgtacagcgctctacactctgctcaaaagcattaaatcaagctttatatcttcactcttttctgccatagtgaaatgaacagcaaggttggtcaaggcagatagatgcaaaccttaccagtcaaccgaatttcgatgctttgttgatgtcacacctaggcttattatcttgaacaactgtactcttgaaatgtcacaccttagccataagtaaataactgaatgagagctgggaatgatagtgcaacagcacatatagacacatctatgcatttaatcattcactggttgaaccactgcagagttcttaactagtgttacaatcaatgcaaagacttagtttttgctccatttatggaactcttgagaaactcaaacattttccgactctagatcttttttttcagttgttaactttcactggataggattctattctgttgcataatgtacatggaaaattactcgctgctttcgttattgtgtttagttgtatgctacttcaattactttatattactatgggagagtgaccttatcgtttccagaacttgatgcaatgtcagatcttagtagatttgatgctcttcgctaaatagtacgtactgaaatttggattcatgccgctacacgacattgctcttctgatataatctgattttggactttctgctccttttgaacggcatggacagccttctgttttcagttagatacaacgactctttacaattttccggtaactaatttcagtgaaatattatgtgcaggcgtttggctgggcgt

SEQ ID NO: 15733 - DNA, 960 bp, Brachypodium distachyon
  Intron number 3 from transcript Bradi5g05630.2 (locus Brad i5g05630) derived from phytozome v7.0 (chr-ID Bd5; pos 715 6259 to 7157218 reverse strand)
atcaggaggcagcagttcttcggcttggatacgtaagttctgatattatttaaaacttgagccgtatgtcttatccattattttgttgaaatctggacttctcttttgacttacattcccgcatccttttttcttttgtgggaaaataatattgcaacctttttcttttgcgggcaaataatctggcagccttatccctaatggcttcattaatttactatatgttcatggattgagaataaaacttgaaactcacgattaaaatgggtaactcgttacttggttcgttcggcccctaacgagtcgagttgaagtttgatcttgttaacaaaagaagttaaatgagccaagtaacgagttactcgttaagcatgttaaactcatattgtttaagattttgtaagtagtatggatatagattttgatctggaagtgtaaattgcattttcttgctggttgcattcttttgttttgcggtatttgtttctaccatttaataaaaatggcctagtataattctaagttctcaacaccatatgtggatacatttattacatttaacaagatgttgatcatgagcaatatattggataacagtggtggaatgtcaagcctgatggctcctctatcgattatgccagtatatatttagaaatagaaagtaggaaacctgtaaagattgacttcgaatatgggtttagaatcttctgaaatgcttatgttacacttccttttaaggttgtaattctctggtttttaccagtatccgtgcatgatttaggcaccatatatgcataatttggtatgataatttttacatttttctatcagctttggcaagcttcattcagttcatacccaaactgaaaattccagagcacatttttctcttactctaagcaaatctatgtgtttacaaatgcaggtgaagcctgaagttatcagctggacgccccgaat

SEQ ID NO: 15734 - DNA, 340 bp, Brachypodium distachyon
  Intron number 2 from transcript Bradi5g05630.2 (locus Brad i5g05630) derived from phytozome v7.0 (chr-ID Bd5; pos 715 7221 to 7157560 reverse strand)
accaccccagtatgtatatcctcctgtacttgttgcatttccaataaaatgtatgcgcattttctcttatcactgtatatgttatagttggaacagccttataattatgttctgtggcattgtgtttctttttcttcaatcatttttcttacgttatgaagtacctccccttaaaaaaaatgtcaaatcagatacctgtttatcccaggtactggcttggcatattgtttctgagtaagtcgagttccataatgaaaggaatatgccttactctgtaagtatatgcatgtctaatcaaaccttaggtgttctgcacggcagatacggtgcatttggataa

SEQ ID NO: 15735 - DNA, 817 bp, Brachypodium distachyon
  Intron number 3 from transcript Bradi3g45070.1 (locus Brad i3g45070) derived from phytozome v7.0 (chr-ID Bd3; pos 470 09043 to 47009859 reverse strand)
atttcgcagcagagcagaatttcctgagttcatcggtacttcatcctcctcttcatctaagtgaacagctcgagttgttcttttcatgaaatcagtatcagactgttgaccaacataatttaattgacttgtttgaacttgacttaaagaagcaacatgaagctaactcctggaaagacacaaatgggtagccacttcttttggaagttctgtcagagtcaaccaaggaatatcatggcctataaagccatatacatagtcattaacacatacaacaccaagattttttcttttctttcccttcgagccaatctcagattttgccagtgtcctaaaacattggggtaggcaacttcgtgagccctatgcttgaacatgaaatgattttcgatgccatatcctgtcagattttagctacatctaatacttatatctgcaatacatttctgtgtttgggagtgtctagttttaatgcttgtattgatatgagacggtgattgcacaacaaagttgttcacgttaacttcaattgcttgatatcaatccagttggcaatgctaaacccataaaattattacaagaaatgaacatcggagtcaggagatgcatgggaatgttatttttgtttgaccatatatatacataagcgagcgtcgttggagttaaatcttgtaatacacccaggatggttgtactttgttagcgtgaaaatttgttatgcattagtaatgtttattgctttgatcttgctttatttcatctcttttcatttaatgtcatggattattctgaaggaagcatgtaactgctgttgcag

SEQ ID NO: 15736 - DNA, 758 bp, Brachypodium distachyon
  Intron number 2 from transcript Bradi3g45070.1 (locus Brad i3g45070) derived from phytozome v7.0 (chr-ID Bd3; pos 470 09886 to 47010643 reverse strand)
ctgaaggctttgctgaatcgcctggtcaccacaaggtaaaaaaaataattttcctgttctcacgttcaggtgttgcgatgtgatatttatgtcctagcatttggcactggatttgttggaatacgcctgcatcattgtgcctataggaacatatatggttgcagaatttgtaatcctgaacatctatgtttttcttttcatgtgttgtctgttttgtgccatttgtattgttgcatgatgtgttcaattgcaggggatttgttgggatttgggaccacagttgcatgtagacatgaatgtaggtggtatttctgtttgaagtaatagatggagctgcaatatagtgtttcttgactcttcaatcgaagcatcaatttgaggatggtgttcagtaagtagtacaactattaggtacacctatcttgatttcagaggtactttaactatgtactggtgcaatttatgatttttttgcatttgggctgcattaaataaggaatgtttatttgttaagagctatttcatgtttgggggcagctttgcagtggcacatttaggtatcttgatgctgtagcgggtgataaggaaatattagaaagtgtagcatcatttgtttatacaacgcagatcaaattcatcacttgtactatgcctttcctttgtttatagaaggtctatatctgttgctcatcttattgttcaagatcatattttctgctacagctgtcttacacagaaaatctttttggatatcgtgg

SEQ ID NO: 15737 - DNA, 745 bp, Brachypodium distachyon
  Intron number 3 from transcript Bradi4g07950.1 (locus Brad i4g07950) derived from phytozome v7.0 (chr-ID Bd4; pos 685 1123 to 6851867 reverse strand)
ttggtcactgtgctgaagttgcacttggaatccaggttataacaaaatcgttgaatgaacaactaaacttcatgcatcactttgtttgaactttttcctctagctttaaaatacgatccttcttcaaatcttttgtctggtataaataaacttaatgcatcaccaaaataaatatctgatacataccaagctaatcagttctatattttatttttattactgacggaatacagcaacatattttgcattaccattgtcgagtatatgatactatatggtttattgcatatacgcttgttttctggagcaccaatttttactcttcagattttcagtgattattggcagttcgaaactcagattaggaatagtcatttgaagttacttgttccttttgaatttacatgttataattattagggcaatttccctctcaaggaagaaagcacatccgtgagtccgaaccttgttaaaccagaaccagggacaggctacatttgatggatgacgtgagtgccttttttacaattttgtttattccagcttgtttgtttcatctatgatcagatatttttttcaagcggtgtatgcccagtctgtttttgttctttacttgtattttcttgttgtgattgattttatttcaaatcgtgttggtcaattcaacctacataccatatctctttgaatttttactgcaaatctaattccgtggaaatcgtttgaattaaccagcttgtgtctg

SEQ ID NO: 15738 - DNA, 734 bp, Brachypodium distachyon
  Intron number 1 from transcript Bradi4g33490.2 (locus Brad i4g33490) derived from phytozome v7.0 (chr-ID Bd4; pos 391 65007 to 39165740 reverse strand)
ctctcttcttgtctcaccttccctgccctgctcaggtttgctccccttgaattctcctctgcatttgcaatgcagtatcattaactcattatgcagcttgaaagttttttcatgatttcatatggggttaatcagttcagttctattagttaatggcgcgccttagttaattagctggtagcttggtagttcttgatccctgggccatgagatttcggtgcttatgtggaatatgatgacgtttatttttcgttaagtcgagacaataaagtgttcagcacgtacctcagcctagtggttaatttttgccttttgtttttctgctgagatctacagggcttcctttttgttcaagcaagtactactttatatggtatcatgatttggtaggtaacacttaaattactataatgcggcacctaactggatctattgatcctgatgcctgaaatgtttttttttctgtattttcattctcagcgacagtgactagtgagtggttgaatcaccaaatgtttaaattgttcgtgtgagttctgaaatataaactcacatagattatagatcttggcgttttttctccttcttggtaccaatatcattcctatcaaaagtaaactattactgtacaaactgcattcaggttttgagttgtaaagatctctgaaactttgcgcatgatccctcccaaggatttggatcaggggagaagaagccgagcaaacagtgtcgtg

SEQ ID NO: 15739 - DNA, 802 bp, Brachypodium distachyon
  Intron number 1 from transcript Bradi5g12850.1 (locus Brad i5g12850) derived from phytozome v7.0 (chr-ID Bd5; pos 164 06966 to 16407767 reverse strand)
tgggaccccgccaagtctgccttcgtcgcccacccgtgcgtcacacttgttttctcggccccctccaccagagacgcgtttacacttggccacccgttctgcagcttgttcatcgccgattggtcctagacattcactagttgtttgtgttagagaacggccaattttgatgcgttatgctgagtatgatctgatgcccgcaatgcgtttggcatagggcctgcttaactccgaatgatctgttgagggggaggtgacattttgagctagcctgtatttatagttatggggttgggatgagaaataggatttggggtttaggattgaattggctaccctcttttttgccttgtttgtttacatgctggtgaagagctgggatttcgagttttatggaaaatcagtacctcagaaccgtcatatcaaaaactttgatgatacagttgatacttagcagaaaattagtatttacgactttgttttggactggcaatatttttcgttttatttcaaatacagattagtaggtgtatcgcagattattgccactctagaacacttggtctcaacacccaagaacatctttgctgtagaatgattcttcttgcataaatttcttgtatgtaaaactataatgttccctcctgtttagagttggtaacttggtatagctgatctgctaccgatagtttgttcacgatttcatttcttgatcagttctgcatttagccttttcctggacttgagttttttcttcttctctgcaggcataacttctttatcttccctcgcaaggagcttc

SEQ ID NO: 15740 - DNA, 515 bp, Brachypodium distachyon
  Intron number 1 from transcript Bradi3g57720.1 (locus Brad i3g57720) derived from phytozome v7.0 (chr-ID Bd3; pos 574 01974 to 57402488)
tccttcgcggcggttctcgcgcaggtcagcgtttcctcgggtttttggcttgtcccttctttcttggttgttggttcgcggccgaagattcgttttttacggccgctcgtgcgattttgccgattattgccttgtatagatggtgctttgggtcaataatttaccgtggtgagatcagggaaggttgccttggaactaaattagttctgcttgggcttggagtcggaaccctccttttgcgatcaattggatgttaatgactaaattgagtgagattttataattttatttaggatgtttgcattaggagttcctctgtcttttccgaagtatagtactagttctttttggtaaacctttgatacggtgggaatttcctgttctactgtggggaaaacatgttcttctttacttgcaatttgttcaaaattcaaatggtctccgtactgtgtagttgatgaaatttcgaataacatgcccattttgggttgccatttagagcaggccattcaaac

SEQ ID NO: 15741 - DNA, 816 bp, Brachypodium distachyon
  Intron number 1 from transcript Bradi3g45790.1 (locus Brad i3g45790) derived from phytozome v7.0 (chr-ID Bd3; pos 477 73207 to 47774022 reverse strand)
tcgttcgaatacgacgaggagcgactaatttacaggtaattcggccacgtgatgatcttttctgatttggttaagcaagattgccacctttttcatgtgctgaattcgatatgattgtgactgattgttgcttatgtttgtcgagctgacttttacggtactcgtgaatgtctgtagtgtaatctagagggtttgaggtttagtgcgaactccagggtgtctgtaagtgacgcttcacgcttcagaccaactacggccgttgacgacctcatccctgcttcttctgcttagtctgtccagaaccattatctttgtttagtacatgccgtgggcatggggtgtcaggctcccaaatcacgcgaacctgttgttaaccatccttcttttatttgaacgctagattgtacattgcattttgattccatcctaatgagaaaggcagactggattgtttaatcttgcaacaaatgatgaatttgaattcgattatttaaatgcatcgaaagtccatctatttggcatgtggtgcactttataattcacagccttgctgcattgactggaaccactaatttggcgaagatgttcacaatcagtccaacccagtgagtccacacagacaaaagaacaccattgtggcaggcgggaggtttaggcggggtttttgggcactcgcaattcacgtacttatttaaggaaattaaactctgtttgctagattgcacgtgttgcactccttatgtattctctgatatttaatgttgtttggtgcaatctctaggtacgctgatctagttgtctcctccagaggaaggc

SEQ ID NO: 15742 - DNA, 706 bp, Brachypodium distachyon
  Intron number 2 from transcript Bradi4g02590.1 (locus Brad i4g02590) derived from phytozome v7.0 (chr-ID Bd4; pos 186 3842 to 1864547 reverse strand)
agtccactgttgtgaaagctatttctggagttcaggtatcattgttatttctgccacattttctttccatgttctcaatctggattgtgtaggtttgacaagtatttcatcacattcatcagtaaccacttgtgagtttcccatattagttaaatatgtcatgcctatatgtgcacttttcggtatatgaaactacacgcggaactttgaattttatgctatgagtacattcagatgtaataaacctaattcagagaagtttcgtctgggaattcattttatagtagctaaatgcgcgtattgctgtggatgctttgtgctatgatattctcctactctaagcaaaataatgaattatctcaaagtatacatcaatcaagctaactaggcgctaactaatcaaaagatcgtgatccatatgtctactacatacaacatatgataattgtggtaactaatttcttgtgaatttgtgaatggacaactcagatctgtgtaagagtaaacataactttgaactaataaaaatgcactttagtttgcaggtaacagcattacggcacttcatgctttgatttctagaatggttaaatagccgctggatgttgcagtgctcatccttttccatggttgtgctccatatgcaattaatttcgtataatattctgatgtcttccttttgatatgtagactgttcgcttcaaga

SEQ ID NO: 15743 - DNA, 1020 bp, Brachypodium distachyon
  Intron number 1 from transcript Bradi4g38660.1 (locus Brad i4g38660) derived from phytozome v7.0 (chr-ID Bd4; pos 434 94550 to 43495569 reverse strand)
cactgcgacccctccctcctccagcccctcgccaggtaagctcgctacccgacctacccccggaagctgctgctccttcagtcattccgtcccctgcgagcttgcttgtctccatgctggcgccagtgttcgctggcgaggctgccttgccggacgtatgccacctgctcgacgaattgtgtcaactagggcgaggcattctctcggaatctcggatggaagtgcagccatgcgcaccacctgctcgatcaattacctgcattgatggggaggacagcgagtactttacgcctgcccaactaaatggggttaggacgctaggtatatagtggcttggtacgtcataaggttttgtttgctgcaatggttgagatctttggactgtttacaaaactgactagttgaactaaatcatatgtttaggtgtgtcaatgtccatcaactcatcctcatttttgtgggtgtgggcatgtgtaatcaatccatatcatggagtgtcgcatgtatatttcgtgtgccaaaaatgtagcccaagttgatgcgctgtacttggtttttgtgtgctttagttcatgtgtgtttcctgtaagaggatgcaagtacatgcatgcttttactccattttacagagcgaatatatttgttgtcctcatttttgttgactgatgtgatgatgctacataaatatagcagccattctttagttgattttatatgtgcagctttagtcaagtgaaaattttcccgttaggcttttaaatgtccatagatgacaaactagattgtttgcattgcataaatttttaatgtagactttggcgtgtttctttctgaaagccccatacagtatactaattaaatggagactttgttttgctgcatatatagcattagcatgcttattttagtccaaactgcagcaaaacaaagtgtccattttttattcaaacatattgaagatatgtttgacttatgcagataaagaatatttaatatctttcagggttgcgccaacaatag

SEQ ID NO: 15744 - DNA, 521 bp, Brachypodium distachyon
  Intron number 1 from transcript Bradi5g01350.1 (locus Brad i5g01350) derived from phytozome v7.0 (chr-ID Bd5; pos 127 0276 to 1270796)
agatctgacgcctccttcccctgcggccggcgagggtgagctctcctccgcccgccttttgtcctccctttcttcgtttacccctcttccccgtctgcccacgcggcgaagctccggccgccggaggaccctccgctagtcaacgtgctcgtggggggcatatatttgtataattcattcggttggttgcggatttgcttgcttcgtggttgagtagcaatgcaagaatccgtttattcaagaaaaaatcgagattaggtccgcccctgattatttttttgaacttttctgcccccattgaacccatatgaaggggtgtttagattgttcaaatctgaccatgacttcgttgcgctaatcaaacttcgatgtgcctgttattgcgactgtttatgtggtttccgttgattattagtaaatactggtagtatatggccagacggttttacagctactgcctactgcagcttgtatttcatacagatatttatagattattactggctttacaggcagcaaag

SEQ ID NO: 15745 - DNA, 856 bp, Brachypodium distachyon
  Intron number 1 from transcript Bradi3g52860.1 (locus Brad i3g52860) derived from phytozome v7.0 (chr-ID Bd3; pos 536 87078 to 53687933 reverse strand)
cccgcggcgagctctgcatcatctccgaagaggccgtgagcgcttccctcgcttccttgtttgattcctttcctgagctcgcctttccgtattttgtcagctcgagaactcccctccctctataatcgaattcgagtggtttggttgttggatggaactgtgccactggtgcttctgattgcttgtttccttacttcgaactgtgctagaaatagttgccccaaaagatgaactgttttttgttgcttgagccgtcaagccatgaatgctacaatatcttttcacgggccaagcaggatgttatttaggttgtcgtggataagtctgcagtttcgtaactgaaatttgatactaggtgagattgtagtggcaagatatttcttcttcaggattggctcctctattacacctccaaggaatacatgtatgttccaagaatgcatttgtgtgcctagttaaattcagttatagggatttttcttcaaggagcaagaaacggtgctacatcttctgtgtgtgaccttaagattcagcgcatcaaaagaaaaaccacctcacaaacgggagtaaatagcccatacggcatatggattcatctgtggttgaatatacaataaaacaataccatgctaaaaaggagacgaagttttctcatggaagatgggaaagctggtgggggcgggatgaaagcaaaaacgtcacacctttatctagaaagcagagaattttgtttgtggagcataatccattgttgtgtgccctatgattctattgttgaacacatacctctatggtgatgatttctcttgtattgttgccaggttgctccttacgaacgtcctgcattaagcaaagg

SEQ ID NO: 15746 - DNA, 682 bp, Brachypodium distachyon
  Intron number 3 from transcript Bradi4g06780.1 (locus Brad i4g06780) derived from phytozome v7.0 (chr-ID Bd4; pos 568 5913 to 5686594)
cgggtctctcgctcactgaggttatagtttcaagcatgattgttgtagtaggcaagttctcgtcatcccgccctctctactaattcaagtgctatatgcaatattcttgttatccttttatgtctatgcttcgatctgagatgacgcatgtgacaagcgcacttcattcttgatcacggcctgtcattttaaccatttacatggaagacacaactaatagggtcgcacttgttggttcattttcctttatttctgcaaccttttcgaaaaaaaaaattctgcaaataaccactggttagtagttatctcaatctgacaccatgggagtaacgtaaagtcctgttgctaaggctggctcatcttggccgcctttttgtttcttttattttccttcctgcttgaaataaggcatgtgtagaactctgtttctgtttccctttcatcaatgaaaagcaactaagctatctttcagtcaaaattgatgtgtcaatattagtcgtaatcagctcattatcaaggaaatattgtatatagatttgaacatcacaaggaatatcaaacccttagatgtcaatggtagaattcaggtatatgctacctctttcattcttggatttatttcattaactcgcatggtatattttcaggcacaacactaaattacttcctggacaacaagata

SEQ ID NO: 15747 - DNA, 751 bp, Brachypodium distachyon
  Intron number 2 from transcript Bradi3g50280.1 (locus Brad i3g50280) derived from phytozome v7.0 (chr-ID Bd3; pos 515 24448 to 51525198 reverse strand)
acggactagaagttcaggtatcagcttggcaactctccaagtctccagaaagaattatccgtcttgtacacgtactgcattatatcaaacatgaattaggctcaatgaagtatgatcattttcttcgaactattttgcaaacattaaagatacttgatatgcaacttgctgggaatgaaagatgcataaattcttgtagtaacagatgacagatcctatctataattggttgaaccttttgtaatccagaactaccgaaggtataaagatatttcatttattttattgatagatctgtcatcgatatgatcataaaaacatggatgggtacaacactcattccattccatgttgcttcaactactgttgcaactaaaaaacttgaaaatttgtgttaagcgacaattccatgctgcctcaactatgtctttacattctaagccttgggttacagaccttgattttggatggatcatgttgttcagcgatcataccaattgaaccaaataaatgggaaaaaatgatcaccatgaatattctttcctgtttgttaagggctcaaggtttttaataaaagtgatttcttcaaccgtcatgattttaattttcgaaatggaaataagaatacaaatgcttatttcttatgacttaaattcatggaattttttgcaggtcatatatcgtgatttaaagcttctaatgtactgctggatgaggagtttagaccaaaactttcagactttgggttagc

SEQ ID NO: 15748 - DNA, 707 bp, Brachypodium distachyon
  Intron number 1 from transcript Bradi4g26610.1 (locus Brad i4g26610) derived from phytozome v7.0 (chr-ID Bd4; pos 317 17140 to 31717846 reverse strand)
cgccgccagtcccaccgcaggggagtacgcccacggtacgcctccccctttctccctgtcttctcctaccataccctgcgccgccgttgacctcgtccgcatacccccaatcaagcacagcagagcagagaagaggagcaccgcgccccaaatttggaactttcccgttcccaaggttaatttcgctgcctcgataattactacacgctgacagcacgcagttgccgatcgatgaatcagcctactacccacgccacgaattttcagacactgtacacctgcaacctcgaacttttgaacccacacacgcactttcggattccaaaagatccaggcagctctcgttgctttgattcttctatgtagtgtgtgacccccaaaatgtggtcgcggcggaattggcgtagtagtagcagctcagcacatgccttatgctgttactacatgttcttaccagagcccataccagtaacatccaggcacacacagacagaatgcctaatctcactggaatcgaccaaacatatggtctctcttagtttcagctgtgcatgcatgttgagttacatccgaacatgctggagaggaaaactttcctttgtttgaagtatagcttattgccttatttagaacaaactatcgccagcaactcactttacttggtttcttcagtgctgggatacagtgttgttctccctgagaagttg

SEQ ID NO: 15749 - DNA, 849 bp, Brachypodium distachyon
  Intron number 2 from transcript Bradi4g20930.1 (locus Brad i4g20930) derived from phytozome v7.0 (chr-ID Bd4; pos 240 42870 to 24043718)
gcggtgaaatccaaaaaaatccagctccccaagaagtaagtttccagatttcttctctttctttctttattatattcagctctatgaaaggagttgaaactgtaagtgcttttcgggtcatggctaacgccgaatgagttgaagcctgcaaaatggaataccatgtagttctgctgctgctgctgtcctcggttccagattaacagttgtctggatgttcctgaatctgtggatttggaacccatttgggaacatgggaaatcttgtgctgctagaagttcctgcgttcccagctgttcgctatgtgtcgaggtgtacaatttatttagttctgtctggcggatctcaaaatggcaccattttttgtttgtttttgcagtatgttgggtgatataacatagaaaactgatttagtacttgctattgagttgtagcacattgaaaggttgtccagtgtatgactcatctgcattctttatctagttatctgtctatttatctaggatgattgtggtggcagtatatttataacatcaattagctagttactgcgacaacagttagatccttgatttcgaggtgtttatggagaaatatgttgggataagataatttcagcctcaagatggttctaggtatcatttattaatttgctatgtttgtttgaacctggtaacttcgtttttgcttcttactaagtgatgattatctcaattttgtcacgatacggacacagtttttgtgaaaatggatgtcaataggatgatgattttcaatcccttcggacaattttgttctactaatattttctcacatttttgttcttctcattcaggaaacggcgcttgg

SEQ ID NO: 15750 - DNA, 883 bp, Brachypodium distachyon
  Intron number 3 from transcript Bradi4g33860.1 (locus Brad i4g33860) derived from phytozome v7.0 (chr-ID Bd4; pos 395 42485 to 39543367 reverse strand)
gttaagaggccttattttgggttgctgttctgctggtaactagagtacttctctacctttttcgtctaaattgtcagggaacactaaatatacttccaattgccagcaaacatagtacacagctttcacatattatttattttgaggtactgatcaagtcccaatggcttagggtggcaccaagctgggagttgtcccttgcactcctttctgtacaagtgaaaagtactgtgatcagttaactatgaatataatgacagtagctaggttatttacttagtaaagatatatattttgttcgggaagagatccatttagttagaaaataaagatctggtcagtaatagaagcacccaaagtccaaggcagttattgcctgacaataacggaaaggcctttctcataaagtttcagccggtacagataaggtgtacccataaccacaacggcccaccttgtaccattccacagaaacaaactaaggtgagagtatccctcgaaaaaaaaaagtaaggtatgagaccatgatattatataccgatcctaattttaaacaatttaagcaattaaattggtgtcaagaaatttcaatcacttgctagactctcaaagttgatcttcattctctaactgtgattgtgacacgcctcagataactgatcaaacttgagtgcctccactatattttttcgagatagttttttaagatcgaaaggctcctcgcgctattccactttcatttcttctattttgtttaagataatggaagaggaacctccctttgttttgttctttccacgcggaaagttcgtcaaaaatctccagttgacttggttggacggatgcaggcaatcttggaaatattttcctgatcatcattcca

SEQ ID NO: 15751 - DNA, 419 bp, Brachypodium distachyon
  Intron number 1 from transcript Bradi4g10720.2 (locus Brad i4g10720) derived from phytozome v7.0 (chr-ID Bd4; pos 104 40656 to 10441074 reverse strand)
gccgtactgagaagcgggcttttgccgcttttaagatatcctatctttaatggaacatcatagattgcattttacaaaatactatttgatcaatatgattcaagtggtcctgcagctcctgctatgcaatttgcgattttgcatatttattatttcgtttctgttctttatgtgcaatttgatttcctttccattagttgggatagcactatagaggcaggcctagctaggggtggtttctaatttaatttatcttgcaattttgcacatatttgttatttgatttcttttcattggttagaatagcagaacagagtaacatgcccagccagctcatttcgatgcaagttatattctgtttgatttctttaaccctggccttacaaagcagcaattttagctgattccacacctgcagt

SEQ ID NO: 15752 - DNA, 484 bp, Brachypodium distachyon
  Intron number 1 from transcript Bradi3g48600.1 (locus Brad i3g48600) derived from phytozome v7.0 (chr-ID Bd3; pos 500 06002 to 50006485 reverse strand)
gcggagcaggtcagccatctcccttctcccactgcgcaggctctcttcttcttttgtttgccaaatcggagacgacgcagctggagctctcggggtttcagtcaattcctataattttcactcgtttgtctgatcaaagatttagatctagcacaaccacgtaggtgcttatcggtgttaatagagcagtattaaatccatgcatcggtatcgctagtaactattatttcagctggatttgaacttgatcaatccgaaatagtgacatgtattcgtttgatcattggatccttataattgctaattttggtaagtgggtttatttatttctgtgatagatgctgtgaggctctgctaagttacgaaaaaatatgggttgttaagccacaaagtctgtcactcttaggattgaaccaaacatacactgaaaattcttttgttatttgcagactgagaagtcttttctgaagcagccaaaggtgtt

SEQ ID NO: 15753 - DNA, 794 bp, Brachypodium distachyon
  Intron number 1 from transcript Bradi5g12510.2 (locus Brad i5g12510) derived from phytozome v7.0 (chr-ID Bd5; pos 159 61142 to 15961935)
acgagacaagcggcgacgcaagcagccaagcataggtatcgctcgcttcgcccggccgagatttcggccctcaaatcttgttctccgtgttaattttcttcccttccctttgttgttcgtttagatcttcactcgtaggcctcctcactcgccccggatctgttgtgtttgacggggattttcccatctagtacttgttttttctccctgtaataaacccgttgtttcgtacgaaattgtgctgtgcttagttagtggtactatcgtgggatcgttgcgatctgtgtgcggttggttagatgtgtttttcacttttcagaacgctcggatcccgtcaaagcctgcgttttgtggggaggtcgttttattctggtttatgtttgcttatgggaatttgccgtctttatttttctctcgttttgatttagcatagccggatccgaggctttgtactgttagtgggagatgtagtttcacttggattcgccccgagcagattaccacttgaaaaatgttcttcgaaaggtactagtgtacagtacataattcaaaaaccagttcagcccttttcaggaaacgggggagaaatatttgctcaattatgtgtacctttagaaatttagtttcttaatttgtttctttatgtgtggatcgctgattacccagtgttgtattgtatatttgtaaatatcgatcttcagagaaaaagatttgggtccagcgattaactgatcggttgttttatgtatgatcttgcagatttgaccatttgaaaagtttccaattgtaaactt

SEQ ID NO: 15754 - DNA, 1030 bp, Brachypodium distachyon
  Intron number 4 from transcript Bradi5g12510.2 (locus Brad i5g12510) derived from phytozome v7.0 (chr-ID Bd5; pos 159 62754 to 15963783)
actcccctgatcgtgcttgcaatcttgcaaagcaggttagtttttctgcatcagttagatgctcttttttattgtgcccttctgaatatgcaatatatgtgttctgaatggatgaatcaattttattattttatgaatgatacttacatgtttgatgtggtgaactgttaatacggaatacgggtattatttgatccagatggcatattcattttcttagctttacattcccaccttccatgttggtttaaccgctcaagataaatgggtgcagtatacaacccgagaaagaaagcaatctgatcttctgctactggaatcgttacttatcactaagaacccatttgcgtagcagttgtgaatttgatacccatccttgctttatgtttgtgaccacttttgcttgtgatcatgggcagagcacgctgcactttggattagttgatttctttactatttggccattgacttgtgaaagcaatggatcttccataacctttagcagttgtttgggtgacaacaaaatctttgcgttgttcgtcaactgtgacgctgagtgtgtccacaaaaagaaatgtgtggctggtgtacctaatctctgattattattaatcattataagtctccctcttattattggttgacagtgtttctatgagctgtcgtgactttgaatctgcacttgacctgttctcagaatgccttttacattagccatcgaagtgcatatattacggtatactggataaagaaaaaattggccaactgttcatcacgaagtgttcttgaaagcacccaaattaatcttctcatcgcagcaaaatttgagtatttagcaacatgtttttacatccaacttttcatagctaataccgtttcagtaagtaattcgattggtgcatttgggactaaagtctccagttattttttaaaattctttaaaagcgtgcatcttccttgagacataagtatgttgcaagttggcatcataatgatgttcctagctcacttttcaatttacaggcttttg

SEQ ID NO: 15755 - DNA, 462 bp, Brachypodium distachyon
  Intron number 2 from transcript Bradi4g01340.1 (locus Brad i4g01340) derived from phytozome v7.0 (chr-ID Bd4; pos 865 563 to 866024)
aagccttcacccgcctctcccccctccttcccaaggtattctcagtacaccacttatgcctgaatctgatggccaaatcaaaggattatgacatgcggctgtatgtctattttgtttgtattggctgcgtaaggacgcaatatatctttctggattgcctggcttaattattacaagaaaatgggaactcaatagtatagattgcctttgcaaagcaactattactgcatggtgatgcaatgcaagccttgagtaacattatgttttgtaattgagtttcactattcaagtttatgccataccaggttccatctcttctgttgcttaatttatacttgataatcttgggagtcggtgtgtggaagttaaaacttgtttcgtttggtgttgtatatgtcaaaaaaataaactggatatgttcagatttttttgacattcctacggtatttcttttttaggaag

SEQ ID NO: 15756 - DNA, 899 bp, Brachypodium distachyon
  Intron number 1 from transcript Bradi4g31280.1 (locus Brad i4g31280) derived from phytozome v7.0 (chr-ID Bd4; pos 370 65477 to 37066375 reverse strand)
gtcaacgtttgcatcgcattgattgatcgtttgaggtgatattagcactatatctggattaaagatcagatctcctgccacctgctaatctctaactgagatgactgatcatacgcgatatacatatgtcgcatctgtacacaaaattaaggaccacatgtctgaattggtcgatcggttgtttgcactgatatatcgtatgcagaccaagttatattagtaggtaggatttccgtgataacgaatcataatgtgaaattaaatttttacgtgattattctatcgatacttggattaaagtttagatcacaagttagtcggtttttttaatttgtagtgatattgattagtaagtgtttcgtttgccagctagttggtcgcttgtacataatattaattagtagcctgagttaaaatttggggtcgcatgtagctcagtttttttcttaacaataatatcttgctgcatagatttataattcttcaaacgccttcttcatatatcctttagtaactcacttttgctagaaagatcgatatagatatagattatgatgaatggagctaggcttgctaaatattctcatgattcgtgaaaaaaaaatgaaaaaaaaagttcagaggccgtaacatattcggccttaaccatttgatgtttcactgctagcccatcaaatatgcccgcgtaattaaatcttgaccgttaaagataagatctagtggtctaaataatttggatgacgtggattaatgtgtcttgacttgggaatcctgcattgtgcttttagtgtgcatatgcgttttgaactcactatgattagatgcttagcttgtaagcttgaattttatatctccgccacttttcaggtttgacaagattacttttaggagaccagagg

SEQ ID NO: 15757 - DNA, 883 bp, Brachypodium distachyon
  Intron number 2 from transcript Bradi3g48700.1 (locus Brad i3g48700) derived from phytozome v7.0 (chr-ID Bd3; pos 500 81239 to 50082121)
gggcaaaggacctccatatatcgaggtgtaacaaggttagaacaagctagctaattccatatgaagttttgttagaaaatgacattgtccttgatgagtgcttgagcgcgatcgaccaatctatgtatctagaacataaacaatcatcatatctgtagtaactactactaattgttgcaattgttcgagacaatggttagtagttaatttgtgagtgatgccctggaaaccttaagcgattatttgagtatatagattgatcttcattgaccagtcttacaatttgaaatgaaaggagtagtataatatagttcatctatattataaggaacaggccggagtcaaaactgaaatactcgttcatatgccatgattaacaatagtgtttttttgcaagagattaacaattaatagtgttaattagttcatttgccaatgatgagtaaacggagtcacagttgaaatacttgtttatatgccatgattaacaaataattccatcaatgatgatgataaacacaatagccatatttatgtatatatgcacacattttttttctcagaactgcacaaacatacattgacctgtacactaatagtactaaggcgttttgactaacatcgtcagagtgcaaggtgttcttcatttcatatagacggagaaaataaaatagtaaagatgttggcctgctttttatgaggaaattagagtactagaaatgaagtatattggagaaaaaaaacagaaaaaaatatacattaaggtactttgtccgagtatttcagcttttcgtcatgtgattttttgatgtagaaaaaaacatgcccatgagagcttttgttatgtgcttattaatggccgtcttgtgtttttcagacatag

SEQ ID NO: 15758 - DNA, 1022 bp, Brachypodium distachyon
  Intron number 2 from transcript Bradi5g12010.1 (locus Brad i5g12010) derived from phytozome v7.0 (chr-ID Bd5; pos 154 65109 to 15466130)
gcggtatattcctgaacattgtgcaatattatgcgacctgtcaggcacttaactgaacggattcctatcattcaattgtatggactgcgaattgtttctgaaatttagcagacgtcatgtcatcatgtcactatataggtttgcactagtacctgtctaggtggtgctaatagaagaagactggtcttctgattgaccaatgtcaaaatttcacagttgtatcattctgctcatataacacaaggatagtttctcaaacacacaagaatagttttctatatctggttttgccttggaatcctgtggcgtttttttttgggcgattaggattactatgtgtgcagaacaaacgaacttcagcatacttcttaaaccactgtgtaaccatgtatgcagcatcaacacggcagtgaagtgttaaaccagcataagcaccacagaacataaaatcttagtgttctggggatgcacatgttatagctagtctgaatctcatactttactgtctctctgtggtgtttaaattccctactattcccccatatattttgttagaaaatatccatccgtgacatgttataggccaacaaaggtacactaggtgtcctcctggaagtatgcatcctttaaaatgctgaacttttcatgtgaaagagctcacttcggaaatagagtatatgcactcttacttcaatggtcttctttctgtatgattataaagacggctaaccctgaagttaattaaaaacaaacttatcctttagaatcattaccgtgttacaatatgtgacttctatgcttcaccaaattgagaacgtcacatgtatggttgattactgcatcatttttcgtggtttagatgttccagtgctgtggtggatacatgccaaattttaccacaatgtagctgcattttttcatggaaacatcttaatttgatttctcaaaagatattatcaccgatacatattctttatgtgactttagcataccaagctgagaagagcaacagaacagataaa

SEQ ID NO: 15759 - DNA, 953 bp, Brachypodium distachyon
  Intron number 2 from transcript Bradi4g38540.1 (locus Brad i4g38540) derived from phytozome v7.0 (chr-ID Bd4; pos 434 24501 to 43425453)
atctgccgcaagtaattatccgttcttttaacaccaattacttcaatccatacttggaacttgagattattatcctatatgcatgtgtagatcaatgatgaaacgcccctctattcattgtttgttttatttagtcgttttggttgataaacccgcctatactttgtcttctgcctcgtccaattcagcagttgattttcaatggtgggaaaatttactagccgcctatactttgtctcctgccttgtatacctcagcagctgattttcaacggcggggagatttacaaactcgtaattgttaggcttctggttactacattggctggagtgatgaatcaattagatgcgcgaagtcaccttatgagcttaaccatttgaggcatatttattggtctgaccagccaatgtactaattagctgtagctttgttctgaatcttgttatgaatttatgccttgcccattatatgtagtagcttgtttcagtgtcgtgtgcttatattatatttggtgggagtgatgattcaattagatgcgctaagttaccttatgagctaaacattttgaggcataattttatctgacctaccaagaagcaccattttctgatatgtgttttggtttgatacttctttttttttatggttagttttgtgtttgtattgctttaaaccatagttgattggcaggaatgatgaaccaattagatgtacgaagtcaccttatgagctacaaccttttgaggcataaattctgtctgaccaagccaatcttctgatcagaatttcactacatgttgttgtgcttgttttgttctgattcttgcctgttatttttagatcttactaagagtctgtttctcttgctcgtgacttgtcacggtaaggcatgtggccttcaatctcctttgttagttcatatagtctaaattttccttaccattttcgtgcag

SEQ ID NO: 15760 - DNA, 489 bp, Brachypodium distachyon
  Intron number 1 from transcript Bradi3g54100.1 (locus Brad i3g54100) derived from phytozome v7.0 (chr-ID Bd3; pos 546 29910 to 54630398)
tccggcgcgcgcgccgctacgaccacgccctcgaggtgagcgtttccttcagctagcagtgtgctcgatgctctgtttttagtttaggctgttcgcctatctacttgccaaaaatccttgtatttactgaatcaatgccgccattcctcagtcgacatcttattacgaaggagcactacaaactgtttcacctttgttttcttgctgttattaactggcatcaagtattggggtgggattgctgcaaaagaagaactaattaatccgttctatttagacagttcacaccctttgtaactgtttgattgcaaaaggagaactgatcattcaaatttcaaactcttcgtaatgttcggtcaaaactctcaagtttaaattatgacgctttcaccggttggctgctcatgattgctttaatctcttttagtctagagttataaattacaattggtacagactaaacgaaattattgtgatgcagattttatc

SEQ ID NO: 15761 - DNA, 923 bp, Brachypodium distachyon
  Intron number 1 from transcript Bradi5g10800.1 (locus Brad i5g10800) derived from phytozome v7.0 (chr-ID Bd5; pos 141 29179 to 14130101 reverse strand)
tgtcgtctccgccgcggctcgcggatctaggaacggtgaggggctccctgttcggttggccgccgtgattgtgctctgtttagattcgaccccgatgggctgtttgactaagagcgaaggggcgagagcgtgaccattcaagtagcttcaaagctctgctatgtgagattgttcggagcttgattggactctatctcagctggatccacggctgtacttcacttgtagaatcgaactattcgccgttgctgcatcatgcactcttgacagaattatccatgtgtgtatatagtggagagaaagctttagaatgatcaccttatccatccatgcttgtgtagttttctccataagtagtattgtgggagatgagtgcttcaccttattgcttattcatccgtatttgtatttgtttgtttttttggttgataagtaggaattatccagcgtatctgtatttcactgacaattatagtaggattcattttcttgggttttccccattttaatatttttaatagttcccgtggtttcacggtgaggtcttagctacagctatcgcttgccatcatcgaagctatttacgctagtgttttcatacaaaaaataaaaattgtcaaataaaagtaatcaagtaatttagaagtactttaatcttatattattgatgtatttcttagtttcagtaaaattatacttcaaaactattatacttgtgataaatgtacctatattagtggaggtatcactagctacaagctacgtcaaatagtggggctatagcactagtcgctagtatggtcgaacattgactagttgcttagcttttggggcccaaaaacaagatatggctatttaaaactgcggtatcttctttgttctggtattcatactaaaaaaagtgttttctgcatcagttttgg

SEQ ID NO: 15762 - DNA, 833 bp, Brachypodium distachyon
  Intron number 1 from transcript Bradi4g20000.1 (locus Brad i4g20000) derived from phytozome v7.0 (chr-ID Bd4; pos 229 57421 to 22958253)
ggggaagactatccgtggccgccccccgcattcaggtcagagatttctcgtttctctgcaatgtaatctcaaaatgttgttggtactactgccttcccctgtctctctgctattttctcgccctgttttctgtgtgtgatttggactggaatttgcgtcagggtataataaaattcttgccttactgggagtctgtggcctttgcttccattttgagtttaccgcatttcttccccgctacagcaattttgttttcccttcaagtttactgcgtttctcggtaggttttttcaacctttttcatttcgagctcagatttgtactccgtatgtaattactacctacctgttcggctgttcgtcggtcattccccccttcaggtttcttgctgcaagaagagttctgtacaaacaaatactagggttttaatccttcaaatgttaaccgacaagcttcagatatttccatttggagtactgtaggtctagttgtgctcttattgcaaattaaagcttcggtctgaagatgcttcagtgtgtcattttcttggtcgggtcccaacagatttataggactgcaccttcaaatatatatatttttgttccaaatggaaactattccctctgttcttctgtttcaaatttcgtgcgacccgtccccaaaatagaataatttatagtaagaccggtaatatgaatgtggtttttggcaaagattttctctctttttatgaaggcaaaattgtttctggccttcattattagtcttcctcactgtttggctgaaaattaatcaatttttgtaggaaactgggccgtgagagaaagaaagcc

SEQ ID NO: 15763 - DNA, 833 bp, Brachypodium distachyon
  Intron number 1 from transcript Bradi4g09530.1 (locus Brad i4g09530) derived from phytozome v7.0 (chr-ID Bd4; pos 877 1741 to 8772573 reverse strand)
ggagtcaaatattagccgctctactgtatttcaaggtaaaattgaaaatacaagctttgtcttcatttatttgggcgctctatcagtttagttcttttcatttggctcttaccattcatcagtatatcctaacgactgaatgtattccatatgtaccttttgtttctcttgagtgcgtcatttcctacaaaatataaacatggttgtactagacatgccacttcagttttagctagctctagttgtatgtcttgttggtttcatgccctaggatcacccgcgcacacatgcaccaactcgacacaactcgtcgagctcctattgaactcgccggaaaccttagatggaaacacaacccacatgtacacaatcacccagggccttttctcctttatttgtagatgcataagcttacagtgtctagctcgtaaacaacttggaaatgaacccaaccaatttattattttcctaaacaaaaccatcttttgaagccaactatatatgatatggaagccacatgttccggacacaaacacagctatatatatgcaagttggattattcccagcatgtgtaggttgtttatgggctactttctgatttggctgcactccctcaaattgctaattatttgattttacttgttctcctagtttgcgttgaattgaataaatctagagtaatatgttattctagtaataaattccaaatcatgaatgtacattgcagtaagtgaacactgttggactacagcccttgcctcgcaagtccagatgcatcatgtaaccagttttgtatttttttctttccatgcagaaacattatcgtcttct

SEQ ID NO: 15764 - DNA, 875 bp, Brachypodium distachyon
  Intron number 3 from transcript Bradi4g17220.2 (locus Brad i4g17220) derived from phytozome v7.0 (chr-ID Bd4; pos 181 77925 to 18178799 reverse strand)
ccttcgaggaagccggcgtcaagggcaatataaacgtaggtgcctgctctctctatacatatatctgatatctctttctctctcctagttacgtggcatataaaatattaggagtactagtttatcagggtttcagagcaaattgttcaggataaaatatactagtaatatattaatgaaaatgaaaacatgtgtattgtgggtctgtctatcatggcagcaatgtgtccttttggatgtgatgggtagaagatgttccatgttaagtggccggtaacattagaaaaggcagtcagtgtgcatagatggatgtagaggccgaagaaacaccctctttttgaagagaaaaacagttattggcaaggaaatggtggtttttatagtggtttggtatattgcaaggagctgttttatttttacatgcagtaacttgataatgagaagaaataaaatgtttcgcacaaaactaaaaataattgccaaaaacctgcgcatgcatcatgggcataccgaatcttgtcattttcttgcctcaagtggcaacaacaaatacaccaatccttggtttggtagttagccgacaagtcctaagctgcacaactactgccatgctagttttgaattaatctaagaatattagatacatctctttcacacgaactccatgaggtggcatacaaatgggccatcaatattgaatttctggtgtcgatgtggtcaaggaaaggtgtacttgtgcttcaagttgttgggtgttaaaaaagatcaggtgactgataattaccaaacctattaggcaaaacattggacatggataaagattactaacaactgaagatatgacatggatatattcaggtggttccactaggaga

SEQ ID NO: 15765 - DNA, 977 bp, Brachypodium distachyon
  Intron number 1 from transcript Bradi4g28180.1 (locus Brad i4g28180) derived from phytozome v7.0 (chr-ID Bd4; pos 335 18374 to 33519350 reverse strand)
ctcagaaggtaaacggcctgtatcaattttgttctggttaaataacttgttgtgtgatctcaaccagattttaagaattagtatggcggagtacagaatagctataaatctgtcttatttcaattatttttaccatgagttgtaatttcgcctaagaatttctgcaataatttcaactgagtggtgcttaagagaaacggagtaaaattttgttaatcgtgtttgataaatatacttgatttttctatcaaaattcataagatgtcttaggttccctcaaaaaaaagatgtgtttgtaggccaatgaatctagatgcatgcgccagcaaaattggttgatatatacttgaaatacttccctttcttttcaaagcgagtagtagtgcttctctgctccgtcaagaagtgaaaacacaaaatttagagcatgttgaagacctgatttgttgccacccacagttcgaacgctaataaaagttttttaggatttgtgtaaattaatctgagagttaaccatctttcacttttgaagcactgggaaacaagttctttgtttcacatggtaaaatacagcccaattgcttatcaagggttgctaatttgttacgcaattactattttaacccaccattttggatttttattttgttggggcatgtatacacaagtatttcttcagctaccttttgctactcacactgtgatcacacttctcaagcttgcagattttgttatgacaccaaagattttgattttttgctaaatttgctggtaaattttcagggatcattattctgctcgttttctaatccagtgctttcgaaagctagcatggtttataagatgaaatccaagagagaattgttacagacacgacaacacttacctactcaatatcatttcatttcacttattaactccgtggtggattttgatgagaagcaaacaacatcatacagaaatagtgacatcacaat

SEQ ID NO: 15766 - DNA, 1010 bp, Brachypodium distachyon
  Intron number 1 from transcript Bradi4g09610.1 (locus Brad i4g09610) derived from phytozome v7.0 (chr-ID Bd4; pos 894 7356 to 8948365)
gtgcaagacgggaagcgcgtcgtcgtggaagcttggtgagttcgttcgcgtgacggttacaggttttacctcttgggattctggacgaatttaaggaatttagggttcgatttagtggggttttgggtatgattaataataattgataaaagaggcgaagttttaagattgttttgtagattagattggggcaaaaggtgccaattttggggtgtaagatgaactgactgaactgtagtaggtatccgatctattggggtttacctgaagcaggtatctgactttctgtttgcaagtgttgagtgatgcatgaatcatgatcaattgaagtaggtatagcatgtgctccaacttgtaaagaaatccaacaggagtcgcaagctgcaaaccacgactaaaaattagttccatccagtagtttccatcttcaagttggagcctgggtgtcgattaagctgccctggagaatcaccgatatttcaagggtaacgcacctgctgaaatagtaccatttccttttgtggacctaaaatttgctctccagcggagtttgaaggtttgcaagattaaattattttgggtaactagagatgtagagaacctcatttgcacaatatttattcgcacctcttttccattttggaaattaacaaatgggaaactactaggaacaagcaaaacatgttatttattgtttgctggagataagagttactttttcttatgattacttatgtaggaaacttggagttttttgttacataaacgccgaacattgttctgcactgtaaatttcaaaatgtttcagagatgaccccatttgatgcaaacttatttcttcattgcacatatgaaagtactatttgaatctacctggcaagttgaatgctctgcagcccatccctttgtaaacttgatatgatcttgtatttgttttgtcaactctggctggaattatggttgtagtttcctcttaccactttcttgtttgttcaactctccagcaccca

SEQ ID NO: 15767 - DNA, 743 bp, Brachypodium distachyon
  Intron number 3 from transcript Bradi5g16610.1 (locus Brad i5g16610) derived from phytozome v7.0 (chr-ID Bd5; pos 199 33188 to 19933930)
gagatccagttctagttgccaaagttaaggaacaggtaactaaagcgaactgttatcatgtcctcatttgcagtttgtcagcagttaatatctacttctatttcataatcaggcaaagtcaacaaaataagagttgtttctgtagttgtttgttgctatccatcaatcgcagcatagacataagatcatcattgtttaactgtactgcctactggagcatagtttagtacaggaaaacacatcatactgatgtcgtggtacaggatgaacttaaagttcggattgttagaaatcaattgttgaagttgaaaatcctgaaattttgcatcgcagacaccatgtttctatagtgaattatgttttggatgtttttcttagtgttttcttcctttaaaagacattactattttaatgatgtccacattgcatactgaagtacattaatatatttccgaatcaaactaggtaaataagatgtatgggtgcaagtgggtcgtcatgggcccaacaattttctttttaatgaaatacctactcccagttccaactcgaccaaatttctggatctgtccctgctaactcggcttctaattttatcggtggtttacttgtgtacactgatttgaacttttacaaatgaactaggatgggtctatgggttctcctgacataacccacttgcatctctaataagaagctgcaaaacaaacaattaactgtctatgtatggataggttgaaagc

SEQ ID NO: 15768 - DNA, 714 bp, Brachypodium distachyon; identical to SEQ ID NO: 15615
  Intron number 1 from transcript Bradi3g48000.3 (locus Brad i3g48000) derived from phytozome v7.0 (chr-ID Bd3; pos 495 63100 to 49563813)

SEQ ID NO: 15769 - DNA, 747 bp, Brachypodium distachyon
  Intron number 1 from transcript Bradi3g51850.1 (locus Brad i3g51850) derived from phytozome v7.0 (chr-ID Bd3; pos 528 58179 to 52858925)
ccgccctctacggcctcgtcgctgcctcctccttcgtaagcatcgaatcctcggaataaacctgtagagtactcccactaggttaggttggtgccttgatttgtgtgcctatttggttggagtaccgataaattcgtgaaatcactatcagcgatctcatctcacttgggaataaaggcgatttcgttagctttgtggcttgtgaagttgtgagcataatattgttttgcatccgaaccttgtaaaagctgatgatgaggagtagattacagacctttagatcaatcaaaccgaaaactgcaatttggagtagggatagtttggacaaaggcttgcgtttgttttcttgcttatgtttctgatcaatcaagaccttgctggataaacagcatacaggaaaagaatatctggatagaatccaaattatggataaccttactatctgaggcctgcctgtatggaaaggacatgctgatgcgttgctacccgcccgtgttcaagcctccacagtccatatgctcgcaactgctgagtcgatgcgccactcttcttaatagttaatatataaatgccgagggactcttgctcctcaggcgtcaatttttgaactgtcaatggcctctacttttcgtggactgcctatgctcacagttggatggacaaatttatttgaggaatagtaggcaatattaataatgtgccttacatgcagatccaagttgccagaatacagcaaagagttcctga

SEQ ID NO: 15770 - DNA, 799 bp, Brachypodium distachyon
  Intron number 1 from transcript Bradi4g40960.1 (locus Brad i4g40960) derived from phytozome v7.0 (chr-ID Bd4; pos 452 28317 to 45229115 reverse strand)
gcggctttggataccatcccatcagactcttggaggtaggtgtaaatacacccggtttgttcatcgctcgccgatccatgtttcttcgtgctgccatgtgatcatcgtgatgcctaccacctgcttgtggaaatgatcatgtgaactttaagtctggttttttttcgtcctggtttgagcaatcaagctgaaccgaattagtaagccatcatatgacttactaacttggatgtgtgcgtctttgtggtattgtctcgattataagatgttgcacgtacatataaattatgagttggcatttcgctggcttatggtttgttcatgtactaatggagtactagattatagtgggtgtggttttatttattttattttcgtgaggaggtaggctatgatgtttgattgggtttttgggagaatagcagaaaaagactgaacaatgggttgtttcacaattggttttatgatatgttgttggctgccatggtaatgctggtccttttgtttctctgcattgatttttcgctaaatgattacctattaactgatgtttgaatgaacggcatttagacaagagtatatcttatatactatttgacttctgcaatccacactttgataaattataatttctggcaaaaatatgtcttgcatcaggatttaataatttatgttctagttggataaaatctattttcttcatgctttggttatttctctatataatttgtcttcagttaacaaatgttgcagtgacaatctgtgtactgtattaaggagcttcaccttttcaggtaga

SEQ ID NO: 15771 - DNA, 888 bp, Brachypodium distachyon
  Intron number 1 from transcript Bradi4g29720.1 (locus Brad i4g29720) derived from phytozome v7.0 (chr-ID Bd4; pos 352 97043 to 35297930)
gggctcggagggtaaggggagaaaaacaatccatacccttttttttttgttgttgcctattttgtgtgtatgttttccttttttgtttaaggaaacttgtttgtttcctttcatggcatttgtttctactgcgatcactggccagcatgcattctggtgtgccggatagttagctcattccggatttcttgtctttttcctgggtttgatgcatgtagatgttaaaagagttcgactttattgtttatctttctcggtttgaggttaatgagagtagctcacagttcttgatgccaagaatggagaacaccttttcaaattgtcttttttcttttcaatctgagattaatgagagtagactaaacaattgtactcctaatacccaactgtaattcttaaataaaaaaggtcatacatgcgactagttatcaaaacatgtatgggggtgttggaaatatttgtcataattgcctttttgtattctttccagcattttctgtatcctggttggagcatttaatctctttgtacaaccagttggcttggaatatttgttgtgttttcttgtgtcagtaacaattacttactccaggataaaacaataggcacccacactcacaaagatacaaatttctggaccagagctgatgtaaataaatgtatttgatattcaaaatcttgcagcaataatctcaggaaagcttaacccatatatggttagtagtttctcttgggcctaactgcgtgtaccaaatttagcccatacaaacggggcccagtttctgccgggcctggccaaacggaagccttttggtttgagccaggtaagctgaccacacgcaatatctgccaggtacctcgccgcgaagagcgacgccgaccactacc

SEQ ID NO: 15772 - DNA, 906 bp, Brachypodium distachyon
  Intron number 2 from transcript Bradi3g49120.1 (locus Brad i3g49120) derived from phytozome v7.0 (chr-ID Bd3; pos 504 86661 to 50487566)
tctgcaagcaaatcttgcctgtcttgggtaactcccctccgctagtattttgctatgaattcagttgtttgtcacatgttggttcactgttggtcagcatgaggttcatttcagtagccatgctgctttattcaatttgtgaaaattatccctaactgtgtttacttcagtagtggggtacagcagtgactatcctggatagacccccaatttttacagcctgagtaaatttttcatgagttcgagattagctttctccaatgaacaactgtttgcactgcttttgaacgtgtgcaagtctaaataaggctaagataagaagacttgagggtctttagcatttgaatccgatttaagcggatcactatcttggtttatgcttttgcccctgttgtttttgctgggaacttaatatttctctgacatgttagttgttgaatcattgaacattcaagcaaatgccgaacttttggggattgaaatatcaggtgctgttaagtccatgcttggttgctctaaaatattttcttgtacatgtagtcccacttggttttatacatctgtcacctgagcagaattgatttgtgactttgcgtggcaaaactttgttaggtttgttgtggttcagtaaagtcgactatctcattttgcaaggttttgtttttctggatatgatgggaaatgtttgatctaataatctgtgttgtgctcttgtaatttcttaaaccagaacttttgtatttgcttaaactatacgcatgccatatcatccaatctaacaaatgtggctaacttttacttttggctgaaccttgctggtgttttttaaacaagaaagtccttcaggatgttgttaatttcccctttgttccttgcttttgaataccagataaatttggagctgca

SEQ ID NO: 15773 - DNA, 663 bp, Brachypodium distachyon
  Intron number 2 from transcript Bradi4g44080.1 (locus Brad i4g44080) derived from phytozome v7.0 (chr-ID Bd4; pos 476 06777 to 47607439 reverse strand)
gtgaaacggtgagaactcctaagattggatttaagtattttactgagatgagaggcaagtatcgctgcagctttaggaaaacaacatataatcgagatgtagatggacttcactgttgttaatcaaaccacaatgtggagtaggaagtaagaggtttccattaacagtccataaacactgtgctcttcagtcactggtcatcggtcagaactagaagaccataggatgctctctctctaaatcaagaaaaggggattgttgtattccttttgaaggtgacgtgcactcgacttaaaacatctaagcatccacctgatatgaactttattactttgttctttgagttgtgggctataaagtcacaaaaccttaaatctatccacaaggactgactgcgtgattagtttgagactgtttctgttgctttctgctgctgtgaagcaacatttgtatgtcctcttttagatgacgaccagtcagttacacatggttaacataccgacgtgtttgacaagattcaaagatttttattattatgtatacaagatgccacaaatgcagccttgatgtgtgaagtaaaactttctgtctgaaggtttatcaatgtatcgttcaccattttttacaggttgtggatctggttagaagagccgtgccgcttgc

SEQ ID NO: 15774 - DNA, 744 bp, Brachypodium distachyon
  Intron number 2 from transcript Bradi4g25790.1 (locus Brad i4g25790) derived from phytozome v7.0 (chr-ID Bd4; pos 311 12506 to 31113249 reverse strand)
attgaggagaactgtcaagttagtaaccacactgagctcgttaatttgttgacacagcagacctgagattgccttgttaagctgaaagttgcctgttttaagatggcatggtgttccgagttctgaaaatcctgtaaagcttcacttcctttcattcaaactacttatttgagttctactccctccgttcctaaatacttgtcgttgttttagtgcaagttccgttcctaaatacttatcgctgttttagtgcaaactttagtcaaaaataaaacagcgacaagtatttaggaacagagggagtagatttcgaggagtcaaaaataaaatattccgtggcagagtcactgcagttttggaagattttgcgtaccaacaacccaaacaaaaactagcattatggtgggtgtaacctttatttactgaacttgcttggtctgacgccgaagtatttttacttgtttggttccataaaatcagcgcattggttccgtgctctagtaatttatcagaatttttgtaaatttatcccttattctctatttttttgacacatgcatcagacctttttccctgtttatttgttccacgattttgattttgattcattcctcatttctccgtacagatttatgggctggacccttatttgtttattcatctgaccatgtcagcattcataaatttttgggtactcacctctccactgcttttctgtttgacagcaagcagtatcagctggtg

SEQ ID NO: 15775 - DNA, 868 bp, Brachypodium distachyon
  Intron number 2 from transcript Bradi4g35290.1 (locus Brad i4g35290) derived from phytozome v7.0 (chr-ID Bd4; pos 407 49254 to 40750121 reverse strand)
tatatcggacagctcgcaaggataaagctatcaacgtaagcatccagcacaatgtcagctatttcagactggaacttttgtccttttgtactccgtagtacacatggttgaagttttcccacgaaataacattattttgttcccagcgattcatggatttgttggacattccagaaactgctttcctcaaaactgttgatgtggttgttgaacccagtaaatagaatagtaatactcactccaatacatattaattgtcttaaatttgttcaaatatggatgtatctatgtctaaaaacgtctagatatatgtaatatttcaacaagtaatatggatcggagggagtactaaattggcaaaatgtaggcttgttgccatttttctcgagaacatcattactattacttttaatttatatcgtataacattttccctggatattgtcttttaagtgttccccattttcatgtaagttggacattcttactgcaattcttccaggcaatctgcgtgatttcatggtactgccctggttcaaccagttacgttctgagttttcaaaactccgaggtttacataatttccagttaagtttgcacatgttatatgctagtctagacggatccgtacaaaactgtatatgtgtattaatgtattatccgtcgttcatgcatgtttctgcaattagtaagcttccacattccgagttctgtgctacttaatgataatcgctggatctgctagaaatgacaactacagtgttctctgtcctttatttgccgaccggttaattgaactgttaaggcagtaggttcttttgagttgacactagtctgactaaaaataccgctttatgcagctgggaca

SEQ ID NO: 15776 - DNA, 698 bp, Brachypodium distachyon
  Intron number 3 from transcript Bradi5g16490.1 (locus Brad i5g16490) derived from phytozome v7.0 (chr-ID Bd5; pos 198 38832 to 19839529 reverse strand)
ccccgtatatactctctgtaagttggtttttctctgtgtctgcaggttacaggtacaaatagacatcagactctggtgtctatctaataataagatgcggtggctccaaattttgaaatttgctatctctataccattgatatcaagaaagagtttgcttgagatttggttatgtcagaaatgttcaaatccaaacaaagtttaaggcattttttttgtttaaagtgaatatgaaactgtaggctgtgtgctgattatctaagatgttttttgccattagtatgctactacctgctacatgaagggacaagatattgtttcttgtgtttggaacaatttttcttccaatttttttggttgctatggtcaatggataccattatcagacacaaaatcctgcgtagtgtgcgtctatgcctctatggtagattcaaagagaaaatctaggtataattatgtcaggagatgctagtctgtcagcatgtctgcaactcatttagctttttgatgcctatgtgtggttccttgattcatggatggaaaaggtcaatgctatctttgcctgatgtttagtgattgacttattttcttatatgacatatctgcataattttgtttaccgcctttatgtgcacttcactaagtttttgtaatgtttttcagggtttggatacattgactccttccttggtagtagg

SEQ ID NO: 15777 - DNA, 781 bp, Brachypodium distachyon
  Intron number 1 from transcript Bradi4g19950.1 (locus Brad i4g19950) derived from phytozome v7.0 (chr-ID Bd4; pos 229 03716 to 22904496)
tttttcgtgcaaaccactttcttaggcgtacggaggtgtgtgtgttcattggtccatgatggcctattacaatttatttttttaagtaatgctgcttccgtgcggaaataaataacctcgatttgtataagaatctatacaaattcaaattacttattttaaaatggagagagtatatgaaaaaatttggattgtacaaacaaggcgtcgctgtaggataaaccctcctcttagtggcacgagcttggctagtccttatcaacaaaaaagattgtgtgcgcttttttagaaagatagtacaaacacgtgcgtacactcacctttatgaacgcacatactacccttatgagtatcttcgagaaactgtgctcacagatgatgggtacgtcacctaccaccgaaagaatagcctaatttcatcaaaagggaccagatcacctgagttagtctcaattcacgaatacatgtcagtttggtttggtggtaaaatgcactgggccgatttttggtcatttaccaaaataacatggggcccaaataacatttgtttggatggctgccaagtaccaattattttctccgatcctaaattcttgtcgtgattttaggtagtatttagcacgacaacatctctagccaactatacttcaaacaattttttgacaaaatttgaccgaagccatatccaataatctggttagcgggtggatcaaaacaaacatatgcctcgttttttcggcttctaggagcggcttccgctgaaagttgtcctccagtttgc

SEQ ID NO: 15778 - DNA, 612 bp, Brachypodium distachyon
  Intron number 3 from transcript Bradi3g60530.2 (locus Brad i3g60530) derived from phytozome v7.0 (chr-ID Bd3; pos 594 21363 to 59421974)
aagtatgtctcctactcaccttatattaaactgtatttttatcgttgaacattggttttagaagtgagttgagacatttggagaaaattatttatcagaaaaactgagataccatagcagaacttttacatgttcagttacaggcttacagctagctattgacctactgacatgatttaagtgtcatcttgtagtatgttctgcttgcaaaactcctatctgtaatgttggaatggatcaaattctatgtgctgccctctctctcttttatgaattatgagcaggcgcagagttttatgacatgcaattttttgttggcaacatgtttaagtttgaattaagtccttttggttctttttttttgtgtaaagtttctgacatatgcgttctccagtcataataagctaattggatgttatttgccttcccatagagattatcccaaactgttggggcgattcataattttgtaggctgctgtttaatgttcaccaactttttttatttgacaatactttggacatcatttcttaagttcggaactttattacctcttttttttcttctgtatttgtaggttgacaaagaaggacctgttgtgcttaatcctga

SEQ ID NO: 15779 - DNA, 881 bp, Brachypodium distachyon
  Intron number 2 from transcript Bradi4g29190.2 (locus Brad i4g29190) derived from phytozome v7.0 (chr-ID Bd4; pos 346 07348 to 34608228)
cgctacaaggtattcactgttgctcttcctcagagttgcttcagacttcagagggctttctttttctgtcgattgtatagctaagattcttatgcaagtgattataaccttcaaatcatgtgtcagaatttacaacatgtgcctccacgcccatatgggtagcacagctggacatatgaaataggggtttataggtgaaattgttgctgctatagtatgttgtcttgactttcttctatgcattgtttctattgcttttaatgcacttttcgtttgtttgtggtgagggtgcaaccaataaagtatggtagtgtttggatgtgagaatgaggtggaatgtaatggaatgttatttatggacataatgcggtaacttgccaacttgggagaactgtctagtaacatagaatggttccatatggtttctgaaggacttgctggaaaattgcaatcctagggcattaaagatcaaaattgggaagtttctttttttgcattatgtgtgctccgctaaacttctgatgaaaacagaataataggaccaaacatcaaacagaaaaatgtagtggtgtatacaaggcctctgcaaaatggtttagtatatatggttgtaaagtgaacttgattattttattatgcttttcaccttacgactaaatattatgtcgctttgttttcctttgttttgttcatcataaaaaggctagtgattatgacttcgcctttccctttttcatattctgaattccaagtccgacgcaatatttatttcctgcagttttccctgcttatcattgaaagcatatgaatattaggcataagtatgaagctaaccactttgttatcattgtcagataacacagactttgatgttcaacagg

SEQ ID NO: 15780 - DNA, 938 bp, Brachypodium distachyon
  Intron number 2 from transcript Bradi5g01880.2 (locus Brad i5g01880) derived from phytozome v7.0 (chr-ID Bd5; pos 190 5862 to 1906799 reverse strand)
gtggaagggcaagggtctcggcaagaacgagcaaggtttcattaactcccttgtacactacacctcctcgtcgataatcattgttttaatttgctttgtcataatatccgaaattcacaagttaatcaatatagcttgatgaatggaatcagtaaattggttctgattggcagagcgtgttgttgatgccacagacccacagcaacaggtctgcagcataatgttgtctctgttggtttagttagttgacttaccagtgaacaccatgttaatttttccgtagttgtgattgtgattgattttaaacttgtctagggacaaatttatgcaagttatgagttttcggttttgaatagggggctgtcatctgtagatacagtagtccgagattgatgccatacaagttgacttcttgccctctttgacgtcttcttcaactgaattgttctgctgctgacaaattgaaagaagtttgcaactatgtagttaccacaaaaggtctttgcagaagcctattgtaggtgactgttaagtttctttgatgcatatgggatgacctgagatctacaagatttatgtaaatcaagaagcttcgtttagattttaatatctcactcgtttaatgctgtaaagaatgtgacattttgttgagtcttaacaccatccaactccactctggacttttcgcagtagcttgattgttaactcaggtaaccagagcatatctgatactccatgtgactgaaatttaatgccttattttatttgtgctgcacttcttgtttagtttcatcgaattctttctatcccattcatctaccaaagatggttcaagatttagcatttccttctagttcctgcacaccttcacctttagcaacttagttgtttattttgatgcaggtatactagagccaataaaagctggcatcagggac

SEQ ID NO: 15781 - DNA, 1002 bp, Brachypodium distachyon
  Intron number 1 from transcript Bradi5g01150.1 (locus Brad i5g01150) derived from phytozome v7.0 (chr-ID Bd5; pos 103 6360 to 1037361)
cccgctcccgctgcaggcgcttgcccagtgctcatgtaagtgttttcagccaataactccttattcccatctgtatttaactaccactgtttttatgcgtttacgtcagaaccttattgacccctttttaatgtaccgccattgagggctcctgcggcacctccatctccaagtaatcaattctttcttctcccttgtggtcgagtttgattgtgttgtgatctttacattcagtgctctgaactctgtttggttttccgcagagtcgtcaccatgaaaggcaacaagatgcacacaagtttcttcgtttagaattctcatgattgtcttgttgaggtttgtatggattgttggtgtctttgacgtaactcatgaaatgcagaatttaccatgcacatggatatagctctataaggtttgtgatttttggactgaaagctcaaaattctagcatttacatttgattccttccagaaatttgtagtctcttgaattgctaggttcttggaatagtagggagtagtcaagtgtggtgccagatttttataaaagggtccagttcttgtggcatttggtgttccttggtgaaagtcactgaacatcagctcccctggttgttgtcatattttctacgattacatttccttgtgtcatatttaggacaaaaatgcccttctgagctaaagaagtttgcgcgttgtggattgaagaaaacagaaataatatatgtttgcgtagctgtgagagaacagtcagcaaagatttctatgtggaagtgctaattcacataatatggtggagatgaaatgcatccttaataatcttcatctgatatgttgtccaaggagaaatgaataatgatgagttaattgcagatgtttttttttcatgattttaacacgtatgttccgtacctaagtttggtgttttgtgttaatgttctatatagcatgacctgtctgagttactaattggatatctgatttgtgtgacggaagacac

SEQ ID NO: 15782 - DNA, 861 bp, Brachypodium distachyon
  Intron number 2 from transcript Bradi4g45050.1 (locus Brad i4g45050) derived from phytozome v7.0 (chr-ID Bd4; pos 482 42913 to 48243773 reverse strand)
ttggtgatcagcttcaggtgaaccctgtggccaagttacctatttgtttaaaaaaatatcaatttgacgcaatatgtaactctattgtattgtctaaagtagtaatgtcctcactacatccaaccactatttgtgctcatgaagctaacatgtgaaattaatgtcatgttgtttgcatctagaagtcagtaaggagctatatatagtgtgttcttgcaaataaatggaatacaatgcataaaaaatagaattaacagcgtgctgtatgcatgcagtttattagttcttttatgtcgaatatgttagcagctgttatgttgaaataattttattattttattctagaaaatttggccaccatgcatgccttgaatgtgcacctaattatcgtaatgaactatgggtagcagctgttacatgtaggtttttctatgtcacgtatgaacactactgctcaaatgaatttatggcatactttgaacttggggcagtggttaaaggggagtcaaaacaaaaaattcatagttttagccttccagatctagcttgtatatatttttggaatgacaagatacattctgaactgtctggctctagatagctgaactaagttcagcttgttggcatcaatggcatccatgacctggacatatcacatgtgcatcaaaagatgacaattacacacagtagcatgcatgcaattggcaaaggtagcagcaatatacgtcttcatatattaaaaatatgataagcatagaaaagtttgtggaaaatggttgacctgaagcttttgacatattttggtcacatggatttgatttttcagatcctgagcaacgggcggtaccggagcgcggagca

SEQ ID NO: 15783 - DNA, 673 bp, Brachypodium distachyon
  Intron number 2 from transcript Bradi4g10200.1 (locus Brad i4g10200) derived from phytozome v7.0 (chr-ID Bd4; pos 982 2764 to 9823436)
gaaccttcagatactgaacttgcaaaggtgcaaaggtttgcacaaccttcctctggcgatcactaaattaattaatttaaggcgccttggtatggattatacacccataaatcaggttccaaaaggtattggtaaattagtgtccttcaacgatttggaatgatttcctattggtggtgaaactgatagtcctgaaacacaagacggatggaatttggaagaattgaggcatctctcaaagtaaggcgtcttgacctgatcaaattggaaagagcaactccttgctgtatagactcattgctaaaagacaaaaagcatctcaaagatttgaatctacgctgtacaaaacgtagggatggagcttattcagaaaaaggtgttagcaaaattgagatgatcttggagcagttaatccctccacacaacctggaagatctaactattgttgatttctttggtcgaaggcttcccaactgccttggtaccacccatttggtttctgtcaaatacttgatcctcataggctgcaattcctgcgtgcatcttcccccactcgggcaactacctaacctcaaatacctaagaattaatggagcagcagcagttacctagattggacccaaatttatgggctgcagggagcctaatcccagatccacggaggcagttgctt

SEQ ID NO: 15784 - DNA, 696 bp, Brachypodium distachyon
  Intron number 1 from transcript Bradi4g12590.1 (locus Brad i4g12590) derived from phytozome v7.0 (chr-ID Bd4; pos 125 65870 to 12566565)
gcgctgcggtgagctcgagtacaagtgatgaatagtgcggccgtgagctccgacgatttcctcggcaaggctcttccatccaaatcccctctctggtgagtatcctgtccagcggagccgtggtctccattcataggtatcgttgtgattcctacttcagttcgaatccatgttaagaatgcgattgtatcgttcctagattctgtggttgtgtcctttcctctgaattttttttggcaactccccgaggattattgattgctgaatgctgatggggacaagattctgcacttcgaatagttttttcagtgttctgctctgtttatcaaatgtgttgttctgttttgttacgaatatgccaagaaaaactgaataagcacctaaagtgtttggcgctagctgagtaagactatggtcatgttgacatgtcgaacatagaaactttgttctgaatcgtgtacagattgaattctttctgtccctgtcaaataagcggcagatttgtttctccgggagaacaagcttgcagatttgattactgttagaagttatgcatgcaccatatgttccaaaaggatattctttttgaagaaccataaactatgttatttcctagttcgtaatttttgttcctagcttgctgaaacaataatgatccttttatctagtttgtacttgttcattgcagatacttat

SEQ ID NO: 15785 - DNA, 1005 bp, Brachypodium distachyon
  Intron number 1 from transcript Bradi4g19980.1 (locus Brad i4g19980) derived from phytozome v7.0 (chr-ID Bd4; pos 229 28833 to 22929837)
tggcgctcgaggaacgcgaggggaaagaggcggcggtacgcctcgacctccatctctcccgcgagcccgccggaggcggtcgtgtcggtctccgcggcggccattctcacggtcggaaagggtcgcggcgtaccgaagctccgggaggtggtgtctgggttttgtgttgaagagccacggcttcctagggtttttgcctcgtgggccagaaagatacgctagcatctggcggaaccggagggaatcgcagaaaacactcaacattcatccggtcgttgccagcgtggatcgggtcgggtgtgaagcgaggcctatcgggtatggtatggttccggttgaataaaagaataaagagcccgattcccagccacaccaagtacttctcttcgtcttctcaccccgaacggaagcaggaggcggcggctgcaggtggagcggcggctgggcgctcgccgacgatgtacccgggagagggatcatccgccagcgtcgggtaaaccctttgcccccagctatttcattctccattcgattgagcagctgcgcgtttggtttacccgcctggaacctagtttgcgtggtttttgtttttgcaatcgatcgacatatatttgctttagattcttgaaattaggtgtgtgcttatgctattgatgcaattatgtgctcgattaatccctttgtttagaaccgggtccattagatttgggcgaaattgaggatttaggatctgcgtggccaagttcttatttctctgtagataccgtggggtcaattaggtattatttttgaaacatttttgggctaaagagcactcaatttggtgtctttatgttcgcaggaaggagagcaacacacagttcaacatggagtggccatttgactgttttctagatgaaccagggccagttcatcaagaatggccaatgaatagtcaattcgatctgaacttagatttgtgttttgacagtcagttgatccgaatctggactgcaatttccaggg

SEQ ID NO: 15786 - DNA, 651 bp, Brachypodium distachyon
  Intron number 2 from transcript Bradi4g09440.1 (locus Brad i4g09440) derived from phytozome v7.0 (chr-ID Bd4; pos 869 2447 to 8693097 reverse strand)
ggtgttgactctccgagtcggagaactccagcgaggtactcactcaaacctgtgacatgcgagaatgctcttcatttgttctgtgataatcgcagcacgctgcttgtgtgtgtcgtgtatgtcaaagtagttcttgttagattaaactcttcatgtttagatagcgaaatctctgaagggtgcagtgttattttctttctttcattacattcaagggtgacctttgagtatgtttgctgtacattttgggggaaatagtgaagcagctgcccaagtccttggctaattccactacattgtttctgatagatatctgatgatttttagaagatatccaaccatatattgttttattcggttatagcagtaaggcagtattttagtacgcataatacttgctgcacttggacgtcgtgtggacaaatgttactacttactatctgaccaagatttggaatggaagatgatttttcttattttctcatacttcggactgctgctcccatggatgatggcaacatgttctgttttctcaaagctgctcacatggactaattgtttagaaaatatttatatttttcattcttgtgaactttttttgtggcattggtgtgtgcattgattgaaagattatttgtttggcagaacgcg

SEQ ID NO: 15787 - DNA, 959 bp, Brachypodium distachyon
  Intron number 2 from transcript Bradi4g29180.1 (locus Brad i4g29180) derived from phytozome v7.0 (chr-ID Bd4; pos 346 01294 to 34602252)
tcgtgcagtgtgttcctgatccctactttgctaaggtatttcgattttttcttttcttcctctatccagattcctagtgcggaatttgatgctaatgtgagattgtgcttagtaatagtaacatcttgcatgattatatatgtagttgtttctaaaaggtactcaaccataagcagagatcttgttttttattgtgtttcgttcgtgaacccttaccatatagggtagtttcatatcaagttgtttctttcttgttagagtaaggttagcaaggcaatgttgtttttctgccttataatggtaaaacgggtatatacatgcatgccttcgaaaataacaattccttaaaataccataagacggtcataataactatttagtggtccacaacatctcagcatctgaaaagtgcccatattgtagagctaaatttggctcttctacatgctatgattaaagcttcaagtaaaatgaggtttattagccctacaaacatatttcttggacaagcaacggaaccaaacatgcatttgactttcgttctgcgcttggttatatatagttttttcaactaaattccaattcttctgtagaccataatacacttcccctctcatgttgtgccatgttaatttgatattgataaagtgacaccaattaagaggtccagacatgaatttaggtctaaagtttttagttctaatctggatggttatgttctgctgaaccatattttactattttatcttctttatctttgctaactctgttgcaacagttcataaatcatctctcaaatgttcttgtgagggctgagaacaaggccatattacagaattttttcacatgtttacttgcagtttaaattgctattttccctcctgctgtggccaggattcctcttatttcattgtttcatactttgacacttactgttatatattggcagttcatttttg

SEQ ID NO: 15788 - DNA, 639 bp, Brachypodium distachyon
  Intron number 1 from transcript Bradi5g12510.1 (locus Brad i5g12510) derived from phytozome v7.0 (chr-ID Bd5; pos 159 61297 to 15961935)
ggatctgttgtgtttgacggggattttcccatctagtacttgttttttctccctgtaataaacccgttgtttcgtacgaaattgtgctgtgcttagttagtggtactatcgtgggatcgttgcgatctgtgtgcggttggttagatgtgtttttcacttttcagaacgctcggatcccgtcaaagcctgcgttttgtggggaggtcgttttattctggtttatgtttgcttatgggaatttgccgtctttatttttctctcgttttgatttagcatagccggatccgaggctttgtactgttagtgggagatgtagtttcacttggattcgccccgagcagattaccacttgaaaaatgttcttcgaaaggtactagtgtacagtacataattcaaaaaccagttcagcccttttcaggaaacgggggagaaatatttgctcaattatgtgtacctttagaaatttagtttcttaatttgtttctttatgtgtggatcgctgattacccagtgttgtattgtatatttgtaaatatcgatcttcagagaaaaagatttgggtccagcgattaactgatcggttgttttatgtatgatcttgcagatttgaccatttgaaaagtttccaattgtaaactt

SEQ ID NO: 15789 - DNA, 754 bp, Brachypodium distachyon
  Intron number 1 from transcript Bradi4g42520.1 (locus Brad i4g42520) derived from phytozome v7.0 (chr-ID Bd4; pos 464 69203 to 46469956)
tgccgcacgacaagccggcggcgcatcctcagcaggtaaaaaactatctgcagtgtttcgttctggactctgaagttgcgtttgctgcagagttgtttgattcttgagctgttccttttcgttttgccagagaaatgttcgtatatatctgcattagttgttactacacgtttcttcagagaaattcagtggcagaaagagaaaaggttccacgtttagctgctcagtttgaggtttcagttagctgcttaatttgaggtttcagttagcttcttctgtatttgagtttcagttagtccttggaattgacttcaatgcaaatcttattttacaacgtttctactgaataagaaagcacttcttgatttcttgacatctgcaaaaagatgttaattatgtgcaaatttgtacggagtaatcaatcctatctactcccaactagtcaactgtacctactgtacaaagaaagtggcatcatcagtacgaaaagtagttgcatttaacaagacaaaatgtcatctgaagaatgcaatttttttaatggggaactcacatttcaaagaaaattgtattattttctatacgtacgaactaaagtctacttggtgagtcgtgttactaggaaaacattgttttgtcaatttctcaggcacctgagaaaaaaaataccaaatagatctgttaattctcatcatggtatatttcacatggcaacaaccatcaggtgcacatttcgatcgtcggaacaaaccac

SEQ ID NO: 15790 - DNA, 1046 bp, Brachypodium distachyon
  Intron number 1 from transcript Bradi3g59540.3 (locus Brad i3g59540) derived from phytozome v7.0 (chr-ID Bd3; pos 586 85563 to 58686608)
caccgtccttgccataggcacggagtgtgatattggtgcgcatgctctccattctctggcaccacctgcattgcttgttcctgtgtttcttacagtgcaacaatatatatctctttctttgaagcttaattgcgtcatagagctttctcatgtaaacatgaaggaggtgaatcattgtgcagtcttcttcgatgcccccctggttagcatgatagcatggcatgggaagtgttcaaacgtagcactccccggtactttcataagtgcagcactatggttcgtttggcttctaactgtgccgcagtggcctttgacaatgtgccacgctggcagcagatgaactgaactggatggcatttgtgcttttaggcccctgtgctgattagaatccccactggccactggacccctgcatctcttccccctctacttttcacgcaacagcggcagcgattccgttcctcttcagtgcctagaccgctaagaagggaagggacatgcctctaaagtttcccatagaagcactgtagaaaaaaactcacatgaaggggccgtcctgggccataaaaaactcacacagagatgcttttgtgtggaaaatttatgtgcatgtgcctgccgcaccttcccttcttagccattgacgcactggaagagagcagaattgctaccaactttgtcgctgccttcccgtagccatcactcattggaagaggagcagaatcgctactgtcatttcgccgccattgcgtgatttggaccatttgttttgttaaaaaaaggatatccatgtttgctttttgtttgcctaacattagctcttggaaatattacaggcttaaatttacaaattttaatgccgttgttaaagggatggagcagagttttttttgtatcttcttgtttgggtatcctcgatctgggaacagattacatgtgacccctagttgtatttcttgggtgtgtgcagaagggttctttccctataattgttgtggcctaactttgaattattccatgcatctcagcgttgttaactgtcagtg

SEQ ID NO: 15791 - DNA, 597 bp, Brachypodium distachyon
  Intron number 2 from transcript Bradi3g59540.3 (locus Brad i3g59540) derived from phytozome v7.0 (chr-ID Bd3; pos 586 87079 to 58687675)
aaaaatctggagaatatacaggtaaattgtcctattcgataattgtatggaagatatatttgcttctcttgttattaccaatgatctcattctgcttgtgtcgagcacaccaaattctgttttgacattctttcgtactagttaacctggttattagaactttttgaagatatgtatgatgtagtctgatgattgagattggtccaacgttcgttttcggttgggttgtttatcatgacagtaccaataatgtaatgccatggtcttgcagttttgttcagtgttttccctcttcttatattagtttctgtaatggccaatcatttgtttagtcctttctttcagttcgtccgatgcactgtccagcattctacactgcacatatattgtccttattgatttctacagaataaaagatattgtgttgattgactggtctgttttccttattaattttttgatgcatcatgttagccccaatctaatgattaatatatgttgttcactgctatatcctgcatctgagatttgattcgtttattgtcttattgtgatattgtttcaggtttccctataatcgggatagagtggcagaaa

SEQ ID NO: 15792 - DNA, 751 bp, Brachypodium distachyon
  Intron number 1 from transcript Bradi4g16140.1 (locus Brad i4g16140) derived from phytozome v7.0 (chr-ID Bd4; pos 168 32526 to 16833276 reverse strand)
gattctgcagtcgtctctgcctggctctggtatgtatttaattttacttcctgactcctgtgtggtcatttttcggtagctagcttattaatgtagtctggtcataactgtaactagtgtttctctaggttgtatgccatgaagaaaggtgtgagattttagtgtttttatatgtaaacattccctagtgatattgacctgccgtatgtgtacttaaattgctgatggaagcttcaaaatctggtgaaattttatgggtttaatctgtaagattccctagtgacatcgacatgccatatgtgtaatcaaactgcttgatgatctattgttaggattgagtcttgccaggtcaactgtagtgcatgcttctgctatgttcttggggacatgcatgtgctctgagtctctaggtggttgtagttagggaatacgagttggtattctcattaattatgtacttccccaatggtcgatgagacgatgacaacacttggcatgtcaagagataggttgttgcctatcaaaatctagtgcgtactcttgagtgagaaacagcaaagagaattgccaagatgcttgagttttcgcctagtgcgtttgactgcagagagaggagctgcggcactgtggctccaacctctgtagttgttactcgttgtagagcttggatgtctcatttataggggcctacctgcttatatgtctattctgtatttttcaattttggttttgttgactttaggcactatcg

SEQ ID NO: 15793 - DNA, 966 bp, Brachypodium distachyon
  Intron number 1 from transcript Bradi4g32280.1 (locus Brad i4g32280) derived from phytozome v7.0 (chr-ID Bd4; pos 379 90040 to 37991005)
ccctccggtttcctgcggtactgtagtatccgcaggtgagccacctcctcagtcctcacttctctactacctctgcttgccgctcctacctttttcctttttctcaaggagatgctgtctggggagatctagggttcgtcttgtttaggtgcgaaacattttggtcttctgtaggcgcggtgggttgccggtaatcaacgaaatttcgaatattttacggtggttttgtcatagaacaaactggaatgaaccctcactagtttgtggcacaaggcacaatccgggggaaacggtgcgtgtaggaaaaaaatgacttctctatgtaaaccgatgcaactagttgagagttttggttatgttgggtgtttgtgctgcaggtcgccacagcgcacatttggttatttatttggcactcgtgtaaaaagatcttgtgatcgtgcggctacttggagctcatttttgtacgcagtgtagagatatcacgagtgattgatattgcgagttgctcgaagcgatggagcattgtgagctaagctagcaattgtgtaatgctatatttctgcttgattctcgaagttgtatgatcaggctggagctcataagtgtaaaggaagtattcaaataaattagtttgttttgatcctgtattggacattaaacattggttacattagctttgtttactgaaatttagcaatgtgccagcaacttagttttggtgaaatgggttaactaggaaagtgcaatactgtagcttataggtatagaataaccattgcatcagatgtagtattttagcagattggattgggtgactggcatccttttgcaatatctttctgcgctgttttttcctttatggtctttgttctctattcgcacttgcttatgctcactaacttttcacttattattaacttgaattttgcaggttgggtatcgttttaattgtggaagcccgacata

SEQ ID NO: 15794 - DNA, 528 bp, Brachypodium distachyon
  Intron number 2 from transcript Bradi3g48710.1 (locus Brad i3g48710) derived from phytozome v7.0 (chr-ID Bd3; pos 500 91593 to 50092120)
acaagaaaatcctccccttgacaggtactgattttcttttatgggtattttattgtagtgatgcacgaagcttttctagatggaaacaaccaaatattctagtctagtacagttaaaagttgcacagtatagtgaagacaattctacaaatacatacattgacaagatctgatctgcaggtcatgtcatatcatattgttttgattgttataacatgaagttacaagcaaaataattcatattaactaacttgcaataagtattctgaaatttcactttcaatacaagtatagttattgtgcatataactttcgcattgcagagtattttctctttccttaacagtgatttacatttgctaatgttacctgcgatatttaggaaactgaattagtattaagccataaaacatactttgcaaaatgatcttggatagttggaactcaaatacatctttgacaccataccttaacaaaacatttctttctttcagcttctgtggatttttcctcttgtgcggtatctccg

SEQ ID NO: 15795 - DNA, 1057 bp, Brachypodium distachyon
  Intron number 1 from transcript Bradi5g00670.1 (locus Brad i5g00670) derived from phytozome v7.0 (chr-ID Bd5; pos 604 294 to 605350 reverse strand)
gctgatcgagtccttgagagcaccctttgccggtgagaggatagcagttgatcgagcccatcaaaacaccctgtgcttagtctaagggtagtagatgatcgaatccaagggagcactctgtgccatgtgggctacgcagaagggaaaggatttggttcatggtctccagagcttggtcacaccggaacagctaaggcgtgttgtttgtggcccttgcgcacgatagcttctccttggcccaatatctttgctggcaagacagcctgatgaagaagttgccactcaaaagattacaagtcttatggttgagcttcagagactatgagataattaatgcttccctagaaaagagtgtcataatagcacaaaattttgggtacatatattgccctaggccatgcaaaatatctgggccataaatgcatacatcgggattgcaccaatttggtcgaaccaagcatcccaaaaccttattgcatttagaccgagacggccctaggcccggacgataagtgcaacagcccatggttcatgtagccttaccacaatttgatgggcccatttatgcattttgccctaggccatgcaaaatatctgggccgcccctacattcaaacagtttgttgcatttgagttttttatttgccaaatccaatgttaatatgcactcctcgcttggcataatatctttggttgtatatttatacttgtgccaggacggcaataaaaaatatattttagggttaaactctaacaagtgtttaattacattgggatctggtcgattaaggaccctagcttcgccaataggtgtgtgggctcaaatacggaacagatacaaatgggctgggtaggcatctttggcccacagacgaccaaatgcctaaaaatgatgatttttcaaccattttcttttcgtggtggccggtttgacaatggcaatgccaacttgacaaggtcctgaaacataaatgcctaatcgatctaactcgtatatgtttttgaactttttgtgattgcagggcacaggatcctgaagcctgaagtgatctgcgac

SEQ ID NO: 15796 - DNA, 856 bp, Brachypodium distachyon
  Intron number 2 from transcript Bradi5g02870.1 (locus Brad i5g02870) derived from phytozome v7.0 (chr-ID Bd5; pos 313 1020 to 3131875 reverse strand)
cagcttcgtgcagcggtgcctcgccgagaccagaggtaccaagacgcgtcccgtttcctgcagttcatgtgcttgtttaatttcttcctctttgcttgcgtgatttgggttgggttgattgatgatgagtagttcttgttcccttcaggcgatttactcccctttcttgattttttaatattctgcgttgaagatcctcttttgctacagttgagtctgtttgatttaattagttgctcctgacggctaaccgagattcatctgaaccttgagtcaacaaaagctctttatttatataacaaacgagtttgatcatttgactggaatgcacccaagtgctccagtccaatgtacccagcttgcctgataatattatcaacatatggtgttaaaatcatcggtctcctgcttttttcagaggttgacagggcttctgatagagacttggtgtcacccattcatgacaagtggaatttccgagattataattatttgttaaatcatacctgaatgtgactccaacaccactgagtttgacatggtcaactctaaataatgttgtgatcatttgtgtgatcgcaacgagttagccactttgatttttgaccatgtctgataaatcttcccttcttattctgttttacgttttcagtttctttttgcagtagtaataaaataatatcccaactgaaaatcccttaaatatgaaaaagcttgttatcattattatgtcatgttcttttagttaggtatcgattcatatccttcatatttcacactgtatcgactagtttcacattataaataaggtgtctgatgtgagaaagatgcttccaggtgatctggcgcagcgttt

SEQ ID NO: 15797 - DNA, 791 bp, Brachypodium distachyon
  Intron number 1 from transcript Bradi4g31800.1 (locus Brad i4g31800) derived from phytozome v7.0 (chr-ID Bd4; pos 375 63385 to 37564175 reverse strand)
ctactggctgtggcgctttgctcagagagcttcaggtactgacaactgttgaccttcctcatgctctcgctctgaagaaaattgcattgtacgtttttgcctggaatttttcgttgtgttctgttaaattgctgctgctatcgttcttgttttcatccagaagttcagtttccatctctttttcttggtgaaactttgtagtccaaagtgatttccttagtgcctctgtgcttaagtttcctctgtgatttgagactagagagtgttcttggggtttacacaatttacagaaaagtcggggcttattatttgggttatgcataagcgggtattccttgcgagctgtattctttttctcggtggtgagctgctcggcaggtgaactgcttgcctcagcgcggtggcttttgtggaaacttctccccttttcacctttctgtttctttagcgcctcaaaaagcaattccttgattctgtttggcttggtgcgcctggtagttttaatgtgacaatttatctgccaagcaaatatttcatttttacttaaaatgtgcttagttggttatgacttcagtggcatcctttcaaaataagatgcctggggagcacatgaatcagtccctaatgatcaaaatatactcttagttgtctctattgtcctaactgtagcatgtttagtttccaaaacaaattaccataaagttgaagcaccatcaaccaagtcataactcctgccctattctttctggcactcagcaaatctgggcagaggtaggggaaagtgagggtga

SEQ ID NO: 15798 - DNA, 1050 bp, Brachypodium distachyon
  Intron number 1 from transcript Bradi4g38180.3 (locus Brad i4g38180) derived from phytozome v7.0 (chr-ID Bd4; pos 431 83536 to 43184585)
gcggctagtcgccggtgagtctccagtatcaccaggtctatttcccctctcgctagagccttgagttttattcccctctgattttggtgggatttggcctctccgatctgtttccctcttcgaatcgggccagcattggtttcgttttgtcgatttgattgaccacggcttcggagcacacgagtgctcttttcctaggtatagaaaggatgcagcggagggagccgctcggaagaagaatctgtatgatcgatgtgctgcaacatttggatttggagttgagggatgtgcagtatcaaaaccatcttccgtaaggagcgtattagacgccagcttgctagcagaatttgggggaggtcctaaaagtgcacctggatgatgaagggttctgaatatcgatcgcgaccaataaaagttcgaacttttcttagtaaaatacgagaaattcgccaaggtttgtgcaaaattgttcatgaggagaaagaggatattatgttgatgggaaaaaggaattgcaacatggggatttgtcgatcgcgtcacccgatcggcatggcccgggtacgagcacgtggtaattatttgaaagtccatcaggaagctcctagggtccagcttgaggaacttttttttcctcagaaaacaataatgatgccggcttgttattagtgccggaaccataggagttggatggtgcggcttgttgatggggaaaaggaattataatctagctgattattgttgcatgcggagaatttaagtggtgactggctgcctggtggcggtgaagaatttcactgaggatgcgagatgcacatgcatgataattctccaggatacacacagaaggttggactgttttatcatgtccatgaaaataaggaaaccaatagatatggtcataaacctgctaaacattcttgtaatttggaacttctataatattgtatatttaagtatattatgtaacttcgaatactgatagctgaaatcatgtgccgcaactgcatttcaggtgtccaacgaccttgccaactgtgtcggactccg

SEQ ID NO: 15799 - DNA, 1000 bp, Brachypodium distachyon
  Intron number 4 from transcript Bradi3g49060.1 (locus Brad i3g49060) derived from phytozome v7.0 (chr-ID Bd3; pos 504 55631 to 50456630)
gcaatttcaaagtgtgcttgtttggctagttgcattacttcaatgacagagcatttctgtgctggttgcattactttgccaacgagttgacttatattgctgtcctagttctctctggatctgttttacttcgaattttcactcgagaaaactgctaatagcatgactcatttgggttttgatgaacaaacccagcaattaattgcgatttcaatacgccgaatagcttctggtcactgtttttcctgaattgtacctttttcagcatcaaactaaacttgatttagagccatccaaatttcagacagttgtgatggcagcatgctttcctgattttttttatctatcattgaaagatgacctgctgtatttaatagttaaagttttttaggagatttaatagttgaagttaatctatgatgttccaagcactgcttttaagtaaatatgcataactcaatctgtgtcggtgtgtgataatccaatttcatatataggtactacattttcttttcttttttaattgtcgatctattccaacccagatcccactgcgagatatcctagagaattacggacttgtcaaacaaaacaactttttttgtataaaaacatcatttgatctaaacatggtccagatgagagactcgactggcctaactcatgtgctcaagtgtgtcatgtcttgggtctgaaagtgaaagatgaattaggttcttggcgacaggttctgtcatgagtcatctaccaagctatgctgcagaaatcatgctccagtggttcaatgtagcattctggaagtcgattgttattccatgtgtatattcaagaagctaaatcttcctctgtatttatatttcttatacgcgtcgattataatgagcataagagatatggatcttctatgcaaactgtatactcagtaataaaaataaaaatgagtacaagtatcctgacttctccaggtgagcttgacagagctcattcattctggggttga

SEQ ID NO: 15800 - DNA, 587 bp, Brachypodium distachyon
  Intron number 1 from transcript Bradi4g44380.1 (locus Brad i4g44380) derived from phytozome v7.0 (chr-ID Bd4; pos 478 09139 to 47809725)
ttccttccccaccttcttgctcgttgacaggggaggtgagcagatcgctgcaaattttgcttcttttttttggcctggaaaaacagaattgcgtccccgggttgttcgcttttgttggcttgctatatatggctagatcggctgcagccgaaacattgactagaattgggacggcctttgtttaatcgtgtggtctttcatgtttccaaaattagatcttgtcatgtgatgatgatagtgattgagctgaatgttagttgatccccccaagttggtgcaacgaccaaatccatgacttgatgtgtggagcagtttaatctgagatggttttacagtttaatccatgaccaaacccctagtccagttttatagtagtacctaggtcgctgtctttgatctttgacctttccatgatgttccactgatttagtcttcagccagttgttaacttactgttattatatgtaatcacattcttatttgtcttctccgtgatgtcgtattctagttgcttaattaatacataccgtggattgcttaacatggttgttgctgttgtgtgtagattgcttctttacaaagaaggc

SEQ ID NO: 15801 - DNA, 674 bp, Brachypodium distachyon
  Intron number 1 from transcript Bradi4g12600.3 (locus Brad i4g12600) derived from phytozome v7.0 (chr-ID Bd4; pos 126 16657 to 12617330 reverse strand)
tgtttttttctgaaggcttcgtatgtgccagtctgaaagggcgtttttagctagtccattctctgtctccttcgtgcctctgttttgctactctgtcatagaaagaacaatttacagtcgttcttagaagcgataaggcatgctgtttcaaacgtgtggagggaatcaatgcctgcaactgcaagaataagattgtgttagttcaattagttagagaaggataatatttgatcagttgtattatcaaggcataggttatggctgcaaaacttgccaatatacagaataacagagtcatactttctcagagaagaatagagtcatactttagttaatatcttaatctgataaatcatattatttggtatttagttttgttttctggtgtgtatctattcaagcgataccatataattgttcctccaagtttagttgcacaaaataattggtttctacaagtgataaatctagaagaagaaaaatttacaatgatatttactcatcagaacatagcctaggaaaataacgtcaccaatttatggaacaaggaactttgatagatattttgataatgaaatgcagatcatattgctattcatggtcccaagccgtactcattgtgatattcttatgaaacagataggagataggcataaaaaaggagacttgcagct

SEQ ID NO: 15802 - DNA, 853 bp, Brachypodium distachyon
  Intron number 1 from transcript Bradi3g60310.1 (locus Brad i3g60310) derived from phytozome v7.0 (chr-ID Bd3; pos 592 75801 to 59276653)
ggaggaacacccacaattggccagtttaccgaaaggttgtacttctccattgtacctagccatctcactggaaaataaaaccatcgctgaaacactccatgagaagagtggcggggctctttcatactctggaccaaatggacaaaatgcattgcatgccgctgttctccgaagcaaaggtacccgtggaacctttcttttcaacttctaatctcggtttcaacctacccatttttctatctatacacatttttgtaagataattaaatattttatgtgcatctatatactaatatagaaggtgtgagttagggtttgacacaagaccatcttgcctatctaatttcttattacaaagttatgaaatggttggggatggtttatctatatttgtgtgttactatacaggtcgttctaagacatttttttccagccacaaccaagagagtggagattgatttgtttcttaggaagaagttaagccagatttgtctccccacatttgagaggagcttacctcgccagcatcctagttttagtcttcatttgactttctttaatccatataccaatatatcattcatatatcatataccaataaaatataccatacttataccatatagcaatgatgtgagtacagattggcaccgcttgagaggcttgcattccaccggtaggtggcgcggcggcggagcctaaacatgtagtgcacatctccttggctttttgtactgatgcgtgtaggcgtttagtttggcatttattccttttttcgtagttgttgctttttttgcctctcatgttgattggtttaactgatagacgtgtgccacttgcagatcttacaaag

SEQ ID NO: 15803 - DNA, 825 bp, Brachypodium distachyon
  Intron number 1 from transcript Bradi4g06060.1 (locus Brad i4g06060) derived from phytozome v7.0 (chr-ID Bd4; pos 502 3785 to 5024609)
cgaatccatcctctcctggttctgcaactccaagggtacttgctcctcctcctattccgcatcctctgagaattttcttctagaagaaacggaattccggccatggtacgatagtaaaggcgtatctcccttctatcggtgttaatttagcctccgcaacagtttcttcttgtcggggatttagggattcggtggcagaaaaaaagggctatttgatttgtagttctggttcaaactgaatagtttatagttctatggattatagattatattctatgccattagtctcaccaacatccaaaaaatggcatatccatggtatggaccgatgaaacaatttaatttaggttcgagctaccgagttgttttaccaataggaaaaatatctacctttgtaatgatttgcatctcagcttactaattctgttcatcctttacttagtggtcgataatattgatctttctgttctcaagtacttatattatgcataattcaatttattcgtacacttttttaattaagaatgtactccctccgtcccataattcttgtgttgttttagtacaaatttgaactaaaacaacgacacgaattatgggacggagggagtatttttgtaaggaaaatcaaatatcttctacgttatcagtttattttaggtagtctggtgatttcatctagaccataggttggaaaagtgattttggcatggtttacatgttttgaccatatgcttgtgggtttgaatttatttgcgtcattcttttttgtgtttgcatttacatcaaatattgttcatgtttcttttccaggtccatattatt

SEQ ID NO: 15804 - DNA, 301 bp, Brachypodium distachyon
  Intron number 1 from transcript Bradi4g40480.1 (locus Brad i4g40480) derived from phytozome v7.0 (chr-ID Bd4; pos 448 77185 to 44877485)
cctaaaaagacgttttctttccccttgttatccaggtttccggtttcttggccggattatttcactctgggttaatcaagaggtcgttaattgttgccccgaagtctgtcctaacccattgggtgaaagagctttcagctgtgggactcgaagacaagatcagggagtatgatatgctgcaaatctgcaatatatttttactatctcaaactgatatgaaccaatttctgttaattaggtgtgtttgattttgtctctctcttttcttttcatgtgaacagctacacagggactagcataa

SEQ ID NO: 15805 - DNA, 560 bp, Brachypodium distachyon
  Intron number 1 from transcript Bradi3g49570.1 (locus Brad i3g49570) derived from phytozome v7.0 (chr-ID Bd3; pos 509 00641 to 50901200)
aaggctgcccacaaaggtgaaacctttctcgagcccggtggctatgttgtttgttgttagatctaagttttgatttcttaatacgacagcaggttgttattctggtcgccgaggcctacagcttcttccctgttgttttaattgcctaaattcagctactgatgatatatttattgcaactcgtaaatggaatttcattcctttgatacctataaaacgataatcgggtgaatatgtgttacatacgatgaattttatggcatgccgttcaaaatcagttcttcattgcttcggcataaattatcttctgttttgtgtcgattacaaattagttctatgatgttgttttttatatcagtttgtcgtggtcatttagtaagaagttcttcgatatgcatcagttgccattcttctctggtctgtttaggtctgtaccccatgacaatggctatttgtaatcttctgattcactataagttttccagacccactcaggagtcctcaacagaagtatagtttatgcaggggtatttgtctagtctgtattgggagctcagact

SEQ ID NO: 15806 - DNA, 391 bp, Brachypodium distachyon
  Intron number 2 from transcript Bradi4g31430.1 (locus Brad i4g31430) derived from phytozome v7.0 (chr-ID Bd4; pos 371 93326 to 37193716 reverse strand)
gagtgccgggagcctggagaaccacctcttcaaaagtgagttattctctactttctgctgtcaatattgattccagcacgataacgaaaaaatgttattttggaaatttgagcacgtacgtgtgtcatctggtccacgagcgatgagctgttcttgtcccctgcttttattctctgtttcttttctgtaagtcaataggatagctgagctgcattctgccttccaaaggaacatttctctttctcctttttaattatatatgactgtacatagtggattattagatattttgatttaaaaaattatttatcctaccaacttcttggagcttacaactgttggtcagcgtggaggaaactgacctgaaacaccctattttcttcaggtatta

SEQ ID NO: 15807 - DNA, 584 bp, Brachypodium distachyon
  Intron number 1 from transcript Bradi4g26730.1 (locus Brad i4g26730) derived from phytozome v7.0 (chr-ID Bd4; pos 318 18822 to 31819405 reverse strand)
attaaggtacagttctcacgacaagtatgactgtgactgcttggtttctttctcatcacctacaaccagttcaataggacctccaaaatccttccattaatcatgttaaatctacagatcctatgctgaattatcaagcagttcattttggcattttgcatattctggaaattcaaagcaacgattttttaaagatattctgaaacttcaaagcagctaattactatgcattatttctgtttagaagcttgtgtagtcctgaatatcactattataaagtgcattttaagtgtttatttattccatcgtttctttttttcgagaaagcacaaaaacattgcgtctcgttgtattgaaaaggtagaagaatatttacaagcctagagaggccgtgtacaaacacacgctagagcaggcgctttaggattgcgtgtgttgctgcccaaatcctgggatgtgcactaattgtgtctattccatcgttcatgtattgtagcattctgtaattttgtacttgacaggttcccttgcttttatttccctttgaaatttgtttttggtccttttcagtgtgataacccaca

SEQ ID NO: 15808 - DNA, 891 bp, Brachypodium distachyon
  Intron number 1 from transcript Bradi4g00320.1 (locus Brad i4g00320) derived from phytozome v7.0 (chr-ID Bd4; pos 123 012 to 123902 reverse strand)
ggggccctgcagagccttcctcgcagacctcaccggtcagttactagttactcaattttgattctttgcttctgtagcaaagcaaaatcatcgcttgttctactcctgattgcttcaattttagttcctcgcaaggaacaaattgtttgttagtaattggggatcccaattttgcgacggcaaaggggataaactgcagaacgaacggttctgactagtattttaattttccgtgcgtgtcaaagggaggagaaagaagaagagaagagcaatgtcgctttcccctttaggccaagattctcgcttcgatgcgatgctgctcggccctcaattccttcttctccttgccagctgctcccctctgctagtagcaacggggttagtagacacactgcctgctcctcctactagccttgccaaaccaaataacgacgtggcactccattacaaaaccatgcaaatctttgaataatcacggttggtgcaaatgtcgccaccacatgtgtcctctctacgctagtttctcatttatttatctgtctattttctttatgtgggatcgatgatgagtgtgtgggagctcactcaaggcatcgctttccgattgagctaggcgtgttgcacacagacggagatatttctcactcccattgccgacctagaatcatacgacttaggaaggaagggcatcttttgtcagcagccatgtattctctgggggccctgcttgcttaataattgcaaggctgccaatgatttctggccgtggccttgcaattgtcatcaggtgtcatgccacacatcacactgtatatctgtattatatgctaaaaaaaaatctggtttctggtttcgaatataactcgtttctgttccttcgtattgcagaga

SEQ ID NO: 15809 - DNA, 756 bp, Brachypodium distachyon
  Intron number 2 from transcript Bradi3g58730.1 (locus Brad i3g58730) derived from phytozome v7.0 (chr-ID Bd3; pos 581 35782 to 58136537)
aggctggggtgagtgttttcaattcccttgtttttacgattttgtaatgtcgtagctggtgattgggactagctacttgaactaaaccagtgacatttctgtttatggggaattttgttggtcgaaaagacaagcttgctagtgttctctgtcaatatctaataattctgatgacaaaaaaaatattccatctgattttattgtacctagatatttgtagtgattccataagaaacctttgactttaactctttgaattttggaagagtgggagcaatgtttattcagattctttggataattgtatttatttatttttatggtaggatctgtgttcagcagcattggtccattgtggtctttccattaaacattcctttacggattttgcattgtgagtgggtttggaaagtgctagtcgattccacttaatctgacctttgaaaaccatgtatagtcaatgcgttggaaagtgtgtatcagggtttcctgtactgtgctgcaaaagtttcttggtagggcagtcaggaacatatgatccatcatgcaaaacatagtggagatatcttgcattatcactttcttttcgagttggtatgatgttttcccctgttgctgtttactacggagtactccacttcctagttaaactgctagtatgatgccatggttcttggggtaattcttgagttcacatcagttctgatagttctccttggcatgccatttgcaggttcggactgtccttgatataga

SEQ ID NO: 15810 - DNA, 542 bp, Brachypodium distachyon
  Intron number 1 from transcript Bradi3g47840.1 (locus Brad i3g47840) derived from phytozome v7.0 (chr-ID Bd3; pos 494 17941 to 49418482 reverse strand)
gatccactctactccgtctacgccgccaccaaagcgtgagttctcttctctcgccttgttcttctgaaattagtagtactacttaatttgctctctgcgtactatgggtcttgcttgtagatggcggcagtggaagcaacactgcaagctaagagcactcctttcttaactacttgtacttgatttagcagttcagatgtttgttaggatctggaaatgttctaggaaaacaaaggatatggaatcaaacgaagcactttcggtgtgactagttagttctcctgtcatactcatcgtctgagaattcagattctggtgccagcctagttgtgtggtatatattggagactggggctctataaaaaagttaggattttgcttcgtatgtcttcaacgtgttcagatctgttgtgaaactatgtacattagcgaattgaattgatatatcattcacaaattgtgactagattgatagcagagaggttactaacttgcttttttttttcttctcaggtacgttgaccagttttcaaggtgcctct

SEQ ID NO: 15811 - DNA, 746 bp, Brachypodium distachyon
  Intron number 1 from transcript Bradi5g09330.1 (locus Brad i5g09330) derived from phytozome v7.0 (chr-ID Bd5; pos 125 55180 to 12555925)
cctcttcgtcctcacgatcttcctcacagccacaggtgagccccgtgcaatccgttgacctcctaatatgggattttggagcctgagccgatgtgtcagtgcagatgataaattaattagcgactgaattagcttgagcacatgatcattgaatgaagctccgacgaatctaggcatctgtgattcacccgggagggctagcctagccggttttgatttaggctcaaagtgaatatttcttgattttttgctctgaatgcttttgccattcttcttgtgcttacttgtccttgtttacaatcaatttctcaaacttgcacggcatcgctaatcttggagtgaagtgagtgccaatggcttcttctgattactttattttgttttgctctgattttttcttcttcttaaggcatccttttctatataatgttatttgtctcgataagtgaaagcttattagtccatactcgttatttttgttcttaaaagaattgtatgacgctgtttctatctacctttcatattagatagtggaagaatcaaattctggcctctgcatcataccaccaactcaaaatgcacacaaccaggttattacaagaccacaaagctcggcgaaaaaagaaaagaaaagaaatgacatgtcatgcaagaaagaatacattccaaagacaatccagctactgatagttggttattaggtgtgtacttgctgagattatcttatttgcattgttaatgaatag

SEQ ID NO: 15812 - DNA, 757 bp, Brachypodium distachyon
  Intron number 2 from transcript Bradi5g09330.1 (locus Brad i5g09330) derived from phytozome v7.0 (chr-ID Bd5; pos 125 55971 to 12556727)
gcgtaaggcagctgcccactagatagcatctccaaaacccagttttactaaatataagcaatctgtgcgttctatattgctgagaaacgagtctatttgttacctgtcccccctctgcttttcgtcccaacttgacgtggatctgatctggtccagactccagagctgcgaagactttctccgaaaagtttgcattgtctgaaagggtggccaagtggcttgcttatcacagttcgtagttgccagctaaacctgatgtactttttgatcacttgtggccactcggcactcggacagaaataaaataaaacatgtaggctagctaaaaggtgtttgacgacgtactacgtgcgtgggattttattagcttgattcttggtatgatgctccaatcacatgcccacatgtggacccgagctatcgctggaccgcgtaattaaaaagactgtgtgcagagttggtccaaccgtccaggtgcagcttagtacgtattcatgttattctaaacctttgatgatttcttaccgttaccggcgttcttccgggcgaaattgatgttctctgaagtttcgtataatgatccaaataaccaaacaaatcaaaacaaagtcactgaatcatactcataattagcgatcgaacaatgtcgtcgattatccaattagtgatcgatctggattccctttttggttgtggccttgccggagaatgcggtttctattgaacttgatgacgctgatacacatgcacacagatc

SEQ ID NO: 15813 - DNA, 710 bp, Brachypodium distachyon
  Intron number 4 from transcript Bradi3g59550.1 (locus Brad i3g59550) derived from phytozome v7.0 (chr-ID Bd3; pos 586 96314 to 58697023)
tggtgtgcctgttgtgttggtaggcacaaaattgggtgagttgtcttgataacgaaatcttattttttttcttaattgcgtataggtgggcaggtggtgggatttgtagtatgattgtgtattttatcctgttatatggtcactggttagcatttctttatcacagcattgtttgaatttggttaggttttcagtccactgatagtgatccttgtagtgtagacaggttatcatccatgtggttggtgaccaagtagtttgtagtctaactcatccacatagctggcaaccaaatactttgtctagtgaagcttagtaaatgtggtaagctaaaaggttgtttatggactggactgcatggaatattgtgttgtacaacttgtacgcaataatgagaaactcagctataattgatctgaaacatgaagatgcgtattaaaaaaattcctaatgtttagttccttattagccacgttccgtgaaattaatcataagttcataaaccagattatagtaactgtcagaaccacttaattgctgctggaattacagaccctaatacgctatcaagaactcctggtttaataccaccttaccttatgtatagttttgtttgacaagtattccatcactgaaatgcggtttcatattcacaaatcataatgttccttccagatcttcgtgaagacaagcactacttgctggaccat

SEQ ID NO: 15814 - DNA, 990 bp, Brachypodium distachyon
  Intron number 1 from transcript Bradi3g48330.1 (locus Brad i3g48330) derived from phytozome v7.0 (chr-ID Bd3; pos 497 88226 to 49789215)
cccgccgcccccgccgccgcgacctcaacgcactggttcgtcccgatcgatcccatatgttactcttggagtttgtatcttcgttagcgaccttgtgatcctgagcaattgatgtgtggaagtgtgtggggaagggagtaatattcttcgtgagatttgctattcctgagggttttaggtgtaaccaggagactaaaacttcgaatttcatggggttttagggtttttacatgagtgcagctgtgtgtttttgatggttccgggcccgtttggtttctgccccagcccaccacgccaaagagttggcgaatgatttcgccgcccgtaccaagcaatagccgtgggagcattgcggtgccaaatattggcgaggcgcacatgggcgctaaaccaaacagcccctcagacccccagacagaatttggatattgggttcggagctgacattttttggttcttgttgctaatgactcgtatttagactcccgtgttctgtgaattggagtggcattttttggttttcttgagggagcagtttagttccacccttaattatgttcatacttgaagcctcggtgttccaagttggggaaccattttagctctttcaatacgtcactccattaatataccataaaattgatatcattgtatttcgtattcaaaagtacttgcttatgattatgatttagatcacattagtcacatattaatgaagtatttttttgggtcaaaggaaacgtaataactcttgttttgtcggacggaggtagcactacattaggatggctctacttagatgttcgcttgagtatttcacaataggccaaacaaaatgttggtgccacactattctgaagtcctaaatttagagtgttctatatgtgcaaagttactgatgccattttgacgctgagaaggttatctttgcgatttaagtggtttcctgatggaagtttattattcaggatcctaatttagtggagtctg

SEQ ID NO: 15815 - DNA, 618 bp, Brachypodium distachyon
  Intron number 4 from transcript Bradi4g34990.3 (locus Brad i4g34990) derived from phytozome v7.0 (chr-ID Bd4; pos 405 29504 to 40530121)
cggaggtaattgcgttaaatagtggctacaggtctctacatcttatcggtttctcatgtaatttgatttgcccattctgtcggtatttatccatgtcagtttcttcccaactatgctcagctatgcttcttagcagttaccctgtacctgtatatttaccactatgccaccattttttggtttacaaggcatgtccctccatttaagcacattaagtttgatttatgtgactagagcgatgcttttacatcataattaggcttcttgtgcttatagcttacgagcagcatgcttattagtggattagtgtttaaacttcaaaggcagctcacaaattagccttaaactggtgtggatcctgaaaatggctccatcctcagatgattgttgttctttgcactaaatcattctggttgagtgcatttctcattggatatcacagctattgttctctttctgaatcgacatttccctgaactatgcattggatatgttttctactgtcaccggtctaatattttggcccgaggaaatctttacaaaattgttgtaatttatattttttaagtgctgcattgacaagtgaaatagcacaacagggtctgaaaaaggctttag

SEQ ID NO: 15816 - DNA, 706 bp, Brachypodium distachyon
  Intron number 2 from transcript Bradi4g12190.1 (locus Brad i4g12190) derived from phytozome v7.0 (chr-ID Bd4; pos 121 65975 to 12166680)
gcttgtagactggtgggcaggcgttaaggtatgaagtccaatgacatgcctgttttgtttttctcatgtttgtatccagtaaccagtttttccgctaccggtgccatatttattctaggcatttaggacgagcgttgtgttgattgcagtccttaccaatcttgtttcttcccacatgtaaagaatcatcaaataaaataaaatatccaaaacagttcaaagaaattacttttctgatacagtagatacataaatgcagccacatccttttaataagacgacagtattgctaggaccattgatagggatcgataagataacccatcttcttggttacagttgaataggatgccctggcgcttgacaggttttaataacaagcgtgagacactttggtagtttgatagaaatgaatgtttgagtgcgctggggttgggtcgttggccaccatcaattccaagtctggatgtacgtacacgattatgctgaatgaacaattgctactacaacctcccaattggtcccatccataagctgttgcaaaacttttcagcagttagtatgaatgaacaactgcttaagtgcttaaatgctcattatggaaacttgcatattagattttatgtttatgcagcaaactgttttatcctttgttttatgtccttcaccaaaataattttacctcatgttctgcagatacaactac

SEQ ID NO: 15817 - DNA, 829 bp, Brachypodium distachyon
  Intron number 2 from transcript Bradi4g35730.1 (locus Brad i4g35730) derived from phytozome v7.0 (chr-ID Bd4; pos 410 81020 to 41081848 reverse strand)
ccacctacgccgtctacgccctcaactacatcagggtaagccctgccctttgcttacgctcccctaacatgggcggactctggtttctacagtaacaagttgctactgtaacatgtactcagtatacacttgtgcttttatcagacagttggattagtttttctttttctattttcacctctggcctctagccaccctgcaatattgtcctggattgtatgcagatgataattgtgctgtaggtaggttttggattagctgattgtcttagttgtttatgtgcattccttaatgagaaatttaggtgtggtactcgatcagaaggaagcattttcatgctcttggtagcgccctgattcatttgctatcgtaaaatataaattcattgttccagaatcaagttatttctgatttcaatagaaatttctcttccgcttccatcacttgcagccctaatgccctattgtctcgtgttgtattgtttggaatgggaacaccatagaaatatttttgtggcaataaatacgaagctgagtatgtgggtttccaacaatttaaagcttcaaaagtattggaattccatcaatatgcactgatatcatttgatggtctcagttttcagaaaattgatgtgttcgacttggcgttgttttttatggcagtctcatgtgcatgtgatattgttatcagcattttgttgtctgatttttattttgatatgcagattgttgcaaaaaagtttttcaaatcaccactatcaactgttaatattcactaacaaataatgtgaatcaagacctgatttattttccctgctcgtctcttcagg

SEQ ID NO: 15818 - DNA, 927 bp, Brachypodium distachyon
  Intron number 3 from transcript Bradi5g14790.1 (locus Brad i5g14790) derived from phytozome v7.0 (chr-ID Bd5; pos 182 24191 to 18225117 reverse strand)
cgggacacatttcaccatttcttcagaaccataaggtacggaacatatttctgtttttctagttttccttttctatagtttatgttgaatatgggagatgccaaatgcattaggaagagataagttgttttcatctttactttcaaaggagtgtggatgttgtcaaatgaatttggattagggagaggacatagcgaagttgtgatcttgactttgagagatccctaggaatgactgcgcctctcataatgcattgctcatatgacatgattagattttatagtgattaaattttttacggcattgtattttcctttgatgttcttgcttgcgacagtttagagatatgtctctatcagtaacttgtatcctgataacaaattagtgattacatctgcttacctaggattttcggaatttcttcatttcccccaatgtttagcttctccaaatcacttgttcgaagaactcaggtccagttgagctcgctgcataaaatatgacacactcctccatcaaatgttatttcctttttagctctcccttcttttgtttggaatttgtttcatttttctctgaaaaagtagtgtacatagtgcacatgattatttcaactggtgcaagttgatagttgatacagtgtatcagtggacgttccggcgcgaatctccgcaattacttgttcggattttacatattgattgttgataaattgacaaattattttgaaatgggaactcagtaactcacgacagatttctatttcaagaaatcacactatttgcctgtccattagtatatttcctctatgtatgtgcacggttgtgttgtgtgtagtttagccgtgttagttttgttgactatatttttgtttctcatctcattcatttactttcttaatttatttcagctcaacacatcaagaaa

SEQ ID NO: 15819 - DNA, 607 bp, Brachypodium distachyon
  Intron number 1 from transcript Bradi5g09050.1 (locus Brad i5g09050) derived from phytozome v7.0 (chr-ID Bd5; pos 121 89698 to 12190304)
tacggcagccgccgccttccgccggcaaggatacggtgagttccggcttcttgtagctagtacctgattctcggcgatctttcaccggaatcccattcgtcttgtgcaatttggtgcgatgctttcttggctatataggattctgatgtggtcgtattttattgttattattttcttggctttgttctttgaattagttcaagtcttgacgtgtattgtttgcatactgacgatcccttctgcaagttcttcatatcccatgtaatttctgaatggcagagaagaggttgggattttctaatttgtctaaaattgagttccttcgatagtatgctgccacttcttggtccaatcgggtatttcactggacgagaaggatgtttcgtcgtagtgttggatttccctctgccgtatggattgggtctaaaattgagttcaagtcttgacgtattagtttcattaatcacttcatttatattttcttaagaaccatatgtattccatcaaagagagaaaggaggtccagtacgaacaacacaaaaaggaccaacttacactttatttgtatctgtactttttaacaaataatgctctgcaatgttctaga

SEQ ID NO: 15820 - DNA, 650 bp, Brachypodium distachyon
  Intron number 1 from transcript Bradi3g60650.1 (locus Brad i3g60650) derived from phytozome v7.0 (chr-ID Bd3; pos 595 49884 to 59550533)
acgtgtctgctcatttggccctcacgggtggtcaagtattcatatgaagttcttcgcaaaaaaaaaagtattcatatgaagtactcctcttgacgtctttcgtggttgttactgtgcacagattacatcgagctaggcatcaatggagaacttactgggatgcaactgtagaaattgcggctccagttatgccaagctggaaaccatatataagtaaaggaagaaggactacggctgaaagattccccgaacctacagatgttttaaagaaaatgataacagaatcatcaggttgaaagaagggagatatttgacatctgataactgtctgcaacgtcacaaatcaaatgaaagttgcttgccaagcgtgaatgattaactatccactagctttggcatgaaagagtcaatgtatacaaaaaagttagtacttgtgtatcactgcaaggacagtacaccatcatctgcatcaaaagataatttacactcacaagtcacaactagtgaagaaccaggccagtatttgtttgtagttacctatatatattacgggagtcttggtatccttgaatccacgaaagataccctgcattgctagcataattacatttgcaggtgctcccaaggctctcagcgaaagaaagagttgt

SEQ ID NO: 15821 - DNA, 933 bp, Brachypodium distachyon
  Intron number 1 from transcript Bradi3g54320.1 (locus Brad i3g54320) derived from phytozome v7.0 (chr-ID Bd3; pos 548 11499 to 54812431)
tcgcgagttccgcacggcgctccactcgggttcaggttgtctgttgccctccttcccgtttcttgtttccactgcaaaaaccgcacgatttgttacagagaaatcgtcttcttcatttatgtttgaatgattttgttgtgtcgtattttttttttcacttcatcgttgcgtgtcttacttttaggccggttctttaaaatatctgggtatgattcagtggagtcggatttgtgatgtggaaatactcccccaattttttagtctcctgtggtcctcaggttattgcccagatgtttctcgtcctcttcttttcttcctaatttttttatctgaaaaatgagatccatgtaccattttgatttctgggtttatagggttgttcgtcataaatcagcgcctctttgtgaagaacaacaaaaacaaacttctgcacagttgcacgtcccttctctgcatccccgctgacggacgttacatgaatttaggagtattttttcttgcttcagcaagacagtttttccaggtttctgtacttgggtttcaacaatgctatttccatttctttccgtgccccagatggattctggtccagtcttgcgtccctttcgatgcgtgcatccttccttctctccccttattatccacaagtggttttcagttggctgcccttttgcatcattagtcatccgagagcagtaatgttcttggagttactttccatggccatttcgtgttacgggtgggccgttccccacaaatttagatttatgggtgccaagttcttatttgttaaaaagaaatcaagctataaattgacaaggtggatatttatcatgccgttatgcctgttgtattgtaatcatatgattttatacgagttacctatgttatcctggttgtgacaagaattctcattgtaaacagcaactgagc

SEQ ID NO: 15822 - DNA, 829 bp, Brachypodium distachyon
  Intron number 1 from transcript Bradi4g30820.1 (locus Brad i4g30820) derived from phytozome v7.0 (chr-ID Bd4; pos 365 96355 to 36597183 reverse strand)
ttcaggctgcatcagcaggtatttattcttgagtatgaaaaaagaacctttttttgtttcttcctatttgtaaaatcatattaaaaaatcgtattcagcatttcaccccttaaactagaggcacacatagattagcgcctgatcttatagttggaaaaagcgaatggtattaggccaaagcaggatctatggaaatcacagatgcagaaaaaaaatactccctccgtcctatattaagtgaccttttattacatgtatctagacgttttttaggcatagatacatacatatttggtaaattcaagtcacttaatatgagacggagggagtatgtttgtttccaattgcaaatcatacatacaaactgacgtagttgtccaaatggtcatatcaaatcagatcccttttgatagtattatggataaaaaagagagaacacgcagacaaaatcggaacatcatttatgaaaagcagtttttttataggtatgagaagcagttgcagttacaagatgtactccctccgtcccatattaaatgactttcggttacatgtatctagacactttttaggcatagatatgtatatttaggcaaatttgagtcacttaatatcggacggagggagtacaagacttacacaaaaagaaaccaaatgaccgacccaagagaaaacgcaaacaacgcaaacacacaaaagtgtactctgaccccttttgattcctgctatgattatgtttctacactataacgcccgtactatctgactgaagttttcttgtgcaatttcaaaagctattgaattactggagaatcacaaagtgcaagcc

SEQ ID NO: 15823 - DNA, 899 bp, Brachypodium distachyon
  Intron number 2 from transcript Bradi5g11340.1 (locus Brad i5g11340) derived from phytozome v7.0 (chr-ID Bd5; pos 148 96687 to 14897585)
gccaacgtcttccccatcgagagcctcgactacgagtaagcgccgccacacgaaccctctcttcagtcttcccttacacgctactgttaatttccttggtctctcgagtctttgggagctctgtttattatctctgggatggtcttgatgaatcgtccgtttggttagtttattgtttgacttggcacaagaaaattagcatcttctggcgtctttggaagatgaaaacgtgatccttcagaaaaggggggaaagcgtgatccttgatatgcctttttgttaaacatttttttaaggagctcagatgctggcatcgaggataatataaaagtggggtttgtctttgtactgtctcgtaagtgctgaatggattactattaggatttggcagaatggcaggttcaaacaaggctaacggattactattaggatttttacttgtccaatgccaggttttttcttaagacttgctataaagtatcatgtgcaaaccttagtacgcagaactgcaattagatgtcttaacacaacaaacaaacaaacaaacaaacaaacagtaatttgtttgtatgttgtactagtaaatactccctctgatcctaaattgttgtcatggttctagttcagatttgaactaaaaccaagaatttaggatcggattgagtataattttttgatgatttttactgtccatgaattgactgaaacatatgtaaaagtaagatgtcgagaaaaggtaaaagagagcaccagcatagattctacggaagcactgacttttgaagcaaggcaatggttgaattctgaagagaaacaagtactgtatttaatcttcagtaggtttgtttcatcagttacactcttgtaattttgtgcggtgtgtttcagaattgtggaga

SEQ ID NO: 15824 - DNA, 981 bp, Brachypodium distachyon
  Intron number 2 from transcript Bradi4g04330.1 (locus Brad i4g04330) derived from phytozome v7.0 (chr-ID Bd4; pos 354 2749 to 3543729)
cttctggtggatcgggcatcctcaacatcactgtatgtatccatatatttatctagcaatgtacgtagtacatttattgttttgctttgcggatagcacaaatataccgctctacctagctagttaatgcattcaatcatgatatcctttttcttgacagtaaggtgcattttgtttccttccagccagctttttctcccacaatatgattcgtgactaagtgtatcatgcaaacttcactatactgatattccacttttattttgaaggaactgtggacattatcttgtcatagtgtcttctacatccataagtttattttatgtttttttttcattttttgagtattgcacaattttataacgaagacacaaaagttgcaagaagccggtaaatttggaataattttttttaggagagagcaatatataaaaactagataacctaaatattttggaattgctattgtaaaaacaaggaattcaagcaaagtcaaaaacactattttccattgtgtccgaacaatccaaattttcctattttttatggttgggccgccacgtgggcgaaactgctgccatgtcatcagtcatactgtttgactgggttcagggacaagatatcttcattattttcagttataagggtcagttttgttcaatttttcaacttgtgcaccaaaattaaacttaaccaatagttgagggaccaattttctgttcagtactttgaactatgtggatctatatatgagatgcaaatgtatgtcacagaggtgaatttcttaccttttatttgctacatatatacattagctatcaaaactagtgaaattttctcatgaaaacagagagggtgtgtggtactagttaagaaacgtggattaagcttggttagctagcttctaattaatcaactgtggcatttggcctacatattaatgcagggaaacgggacaatcacccttcaagaacaggtcca

SEQ ID NO: 15825 - DNA, 691 bp, Brachypodium distachyon
  Intron number 2 from transcript Bradi5g10920.1 (locus Brad i5g10920) derived from phytozome v7.0 (chr-ID Bd5; pos 143 55837 to 14356527 reverse strand)
ggaccatcctcaccttcggctttgtcgagctctcggtactgtactactgctgattatacatcaagaaaaatgattaattggtttttcacttcttttcccattgatgatgtcgttgaccgttatgggcttaagggagatgaacttgggatggaccatggatagggctggtaggattaggaaaggcgccaacggccaatcaccatgcttgaaccagagatgtcttgttcccggccggttccaaaaagtgttacgggaccaggttgaattcaacccagcatggcatggcatggcatggccgtcgcgtactacaatgccttttttttttgatctccttgtgaaaggaaagctacacacgcaaaggcaattttgttgttggaggcttgtctgaaaacaacatgtccaagaaagttgtgctagtagtagtatttgccgtcttagccactactttcttttagcatgtaagtagctttcgtaatcaaccttaaaaccctgcaataatggagccttctcatgttacacacaaagtaaaatcaacataccaaaaacatgaaattcttcagtttactgaaaagaacaagaagaatgctctccaagttcatcactctttttggttggactttgaattcttactttgtttctctttgttatgtcttcagggcttcatactgctgtcagtgcaagcacacctgcc

SEQ ID NO: 15826 - DNA, 499 bp, Brachypodium distachyon
  Intron number 1 from transcript Bradi4g39290.1 (locus Brad i4g39290) derived from phytozome v7.0 (chr-ID Bd4; pos 439 21780 to 43922278 reverse strand)
ggagagccagctgcagagtctgtccgagagccaaggtatgttagcttttagcccaagatccattatatgaaaaatcatactgcacatacgaccgaccatcagaagttatggccaaggacacctcacgtactatatatcttttttttctttgccatgggctgtattttgcagagtgtattctaatgattttgtagagagattttctttcccgagtgctttgaccttagtttgccttgggccgtgcctttgctgaatgcctctctcccgcccctcggtatatatgagtctttgcgagagcccgataaaaagctctcggcaaagccgccgacactcagcaaattctgtttttctggtagtgactagagctaacaatacgtagttatatactagtacgacgcagatacactttccaaactcaattttcctaacctgacatggactatatcttgattaactcaaacaaggtaaccaggaagagattaacaagatcagacaagaa

SEQ ID NO: 15827 - DNA, 742 bp, Brachypodium distachyon
  Intron number 1 from transcript Bradi5g03850.1 (locus Brad i5g03850) derived from phytozome v7.0 (chr-ID Bd5; pos 486 6381 to 4867122 reverse strand)
cgacggctcctcgcttcctccggaccgccccaactgtgagcgcctcttcctgccgcttaattcctgctctcttccagctctgttgatgtctatgagggtaatcttgcctgcaaattaattaattgtagatgtctatgagggcaatccccctttaggcctagaagattttgttggctagctattgagaattggaaatatatttcccatcaaatttttttttggaaatatattgttgacaacgccaccctagggttcccctctgggcatattcctgaacattgtgctgcttgttggtgctaacaaatactgtagcagtgattggactgccccttcttcttaaaaataaaatacaaacctacaattcgggttagatacacaaacttattctcgaaacatattttgtttttcaatttgtagagtaatttctgtagaataagagtgtgcacttgtgcttgatagaatgccatgctaatagaaatgataggctgctggttatgtgtttgatattactgccttttaaattacttagcattcacctcttatctcgttacaagtataaatctggatagtaaaaaactaacgaggcattagtgaaaataagttgttagtgtgtccagttgtctacatgtaatttcatttagtctgcactgtagtttttagagcaaattgtgccaaatataatgtttacagtattgtgttttatgcagatttgaatattcagtcacccccatccatttatcca

SEQ ID NO: 15828 - DNA, 822 bp, Brachypodium distachyon
  Intron number 2 from transcript Bradi3g47950.1 (locus Brad i3g47950) derived from phytozome v7.0 (chr-ID Bd3; pos 495 05472 to 49506293)
ctgctgcgggaagagggcagctggaggtgaggcatctgtttcttgttcattgttttacacatcttcttatgtacgtactagatccgtattggttagtatgtctttgggaaaatatcgatttaggctagatccttcatcaggaggcttacatgctttccagtctggttttataatctgtatgcttcagacaaccagactgatccttactgtccaaatagaagtgccaaacagcgccattcaaggagatcattgccctgtcttagataattatctttaaccaacattatgcaatgatacaacacccagattgtaaaaaggcttctttttttgtcaccacatctacacatcatgatcggcactgggtagtgtattaagttagataatcagtacaaactggcttgacctcttgttttcctttccttgtcaaataatactaatattgaacatggacttaagctcgtacaattcatgatcagaagttttagttacaagatgacacacaatagtgaaacatcaaagctccgatcatgagatccctttacgataatttgaggcaaaggagattgtacttccttctgtttacgttttgatagggggggaaatctaccagatacttttagatctactacttccatctatttattgatgttgctatccagccaactttcgttccgttttctgatgtagctatgcgaccaatcattcttgctgcatatcatttgattgttaggtgtgcaaaaaggtccagttatctgcaaatatatatttctctttctctgtctcaaattgtggacatgcctgatgcaggttgtcaagtacctc

SEQ ID NO: 15829 - DNA, 636 bp, Brachypodium distachyon
  Intron number 2 from transcript Bradi3g52730.1 (locus Brad i3g52730) derived from phytozome v7.0 (chr-ID Bd3; pos 535 89947 to 53590582)
gccaggctttttgctcaccaggtatgatcatgagttacgtgatcattttttcgtttgatccatttagcagcataatttgcatgtacacagattccaaatcaaatccctgcttattgaaatctgtctcttccatgacgcctattgagcgcaatcaagacaacaatgtaatttcttgttatttcgttggtgggaaagcaatatgttctgcaaattgaaatctattaagaggagcatcaaccttaataatgtgtactcataactgaaatagtaagtccattccaccctaataacctggaaatattttttatcagagaattccatgaaaaaataattttgttgcagcagttctctttctactgtgcatattcattttgtttatttgtacttttcttcaaacaatttaacatatagttgatgtttcggctggccatttaattcacttccactatatcttgcttctatccgagatagtgagatactgtttccctaaacttactcacattctgcattcattcattgatcttaagaagtttcagtgaaagtcgatttatgttcgattccatctgagcatttttcttcctaacatctcacatatgattttggcattttgacaggacattgtggacttggcaaaat

SEQ ID NO: 15830 - DNA, 852 bp, Brachypodium distachyon
  Intron number 1 from transcript Bradi4g32790.2 (locus Brad i4g32790) derived from phytozome v7.0 (chr-ID Bd4; pos 385 46120 to 38546971)
gctcgctcctcgacgaaaccaagtcggcataccccgtaagaagcttacttctcttgctgttccttttctgaattgggatgcctgagttaaataattctgggcgtttaaattcttttttgggttataacttcgggtgggaggatatgattgccctcttcactggcgaacaaataaatgtgtgtttgtttcttcggaagttgagccttcgttacttgttttgacacaagggatgcacagtgctgtttgttccagaaatatttatcgagttaggaattttgagctgggttgctattcaacatagtaatttttctttgtgcaattcagttcgagttagtgccgtcagtccttttaacttgtgtgtagtagtgttttcgcccttaggatttactcagaatatattgattacatgcagatggtggttggattttaccatatattcttaattagaggcataagataggtttggtctcacaattggaggtctaaattagtgcaattttacagagtaatattttactgctattttgcaagcactgtgcatattaggaccataaacaatatatcgttcgctaagtgctcaactgatgaactgacaacttgaatatgagttgcatcttttcaagcgtgatgaataatggatattttattcatatgctacatggaagcttggcattgtagaacttaacatggtgaactttgtttctgttttgcccacttatttaccccaactagattcccctattatctatttcaataaaccaggacattgtaaagcctgttttgcttatcatttaattctttccatgaaactacattgtgaccttgtccttcttagaaaacgaacttcaagga

SEQ ID NO: 15831 - DNA, 755 bp, Brachypodium distachyon
  Intron number 1 from transcript Bradi4g29520.1 (locus Brad i4g29520) derived from phytozome v7.0 (chr-ID Bd4; pos 349 85184 to 34985938)
acggtgccgacctcgcgaggccctcgctcgtccaggtaacgcttactccactctgcccgctgcagtgtacgtgctcgacaaaatgccagagtgcgttttgtgaagaagccttcgttgtggacattatatactgggtttgatctaaaattatgcctctacatggttgtgattagctgtgtctctatagtctatactggttacgtttggtatacgggttatgatctagcagtctgagcttgtcatgctggaccatccttcgattctcaaagtcgaataatctctcggtctattgactctctgatgtcctctctagtgcaggatttttttctgttagtttctgttaagattggagctcctgcatcatattcctaaatatctaagcagtaattagttaaataagtagccgatcatgagaaaattcagatggcgtacttgcttttaaattttgtaggattaaagagccaagatcagatcagttgcctttatttgcaaaatcgctgacatagtccttattacaaaattactggcaacaatttagctactccgtagatgaatttggattcaatattttctcgatgcctcttttcctgtcaatttgtttgtttggtgctaatgccatagtgctcctgctgggatagctgtactgtagaattccatatgttattttcctttgcttttgttagagcttggtgttgcaacaaacggatacttacagaaaatgtcaactactgcattgcaggcagcttgtataccac

SEQ ID NO: 15832 - DNA, 499 bp, Brachypodium distachyon
  Intron number 2 from transcript Bradi3g56890.1 (locus Brad i3g56890) derived from phytozome v7.0 (chr-ID Bd3; pos 566 15718 to 56616216 reverse strand)
ctctcggcggttcaggttagttcgagctttgcttcatggtggcgctgcagttaacaattattctgaaaaaaaatcaaaacaatactaataactactgagtaactggtaccagtggtagtgactagctattgtgtacctttgggcaataaactacgatgttatttgaaagctaaaaaaaaaactacgatgttatttaacgtgtatcatacgtggttagcaactctaaagaaaactactgtgttattcagacgccggcctggccgcctgggctctggacaggtaattggttgattgattgattgactctgattttttttccacatttgattgattttttttcctgaactttacttgagttggtccaatggcggttgaacatatgatgcatgttgcaggtgtgggcagtcctgattttcactctgattaatctccttttgatgtttcttttcccccttgacaatttacagggcacctgcttcaagtgtgtcccaaccttgtc

SEQ ID NO: 15833 - DNA, 1025 bp, Brachypodium distachyon
  Intron number 1 from transcript Bradi4g28720.1 (locus Brad i4g28720) derived from phytozome v7.0 (chr-ID Bd4; pos 340 94701 to 34095725 reverse strand)
ccatcaatttcgaggcccagtcatcgcacaacccggtataattacctgacagcaccctcttctctttgtgtttgaattcaagtcaataccatgaccaggagaatttctgcaatattgcagtagacatgtagcaccctatttatattggtgcatttcctgaaatgtataccatatcttgttatattgtcactgtgcgagatatcttttgcaccagcttcataagctataatagtaattgttgcaagaggcagcgtcatagggtttttgtcagaacgatatggataatatattgtgctcctgatctaccagcattataattgtcttctaattcaatatgtttggtgatacgattagggtgccataggactaccgtttgcctgcattatcattgtcttctaattcaatcagtttggtgaaatgctctggatgccataggactacgtttgcctgcatttgttaaaacatatttatattaaaattttgaaataagtttcagatagagataaggcaaggactagggatccgttactaatcctagttttccgttaaattttctttagttatgtgatttgaagcattctaggattttgattttggaaatgtttctttagttttgctacctatgtatgattgaaacagtattgttataacactattgttggtattgtggatgcatggaaacgccattgttgtttcaactttcaacactgcatatacattcatagtgtagctaacatgatatttggaaaactactgggctgtacttttaaaatgttctgatgttccggttttaggaaacactgtgagttcagcagggtgttttgaacattatcttcgatggccgttttggttttaagtacagagaataacccttttgtcattatcttatacttgaatttgcagatctgatcattgacttttaatgcatggcaagtgtattgcttgtttacctttgcaatggatgtgccactcagctagttattccttttttgtgtttctttcagttttttgtggtggtgggccac

SEQ ID NO: 15834 - DNA, 664 bp, Brachypodium distachyon
  Intron number 2 from transcript Bradi4g13440.1 (locus Brad i4g13440) derived from phytozome v7.0 (chr-ID Bd4; pos 137 39480 to 13740143 reverse strand)
ttcttgacagtgtaagctgttgcgccttgctgctacatgcgtgctttcgtccctaaaatttgtagttttgtgatttacactgggtgttgtttcttacatgaaaaaacaaagctacatttgaaattcagtacgtggttctatttgattagttggagaaacatgtgatggctataggctgtctactagatacgaagaacttgctttcgagtttcacttcgaacaaattttttgtacaattaacttaccaagaaatactctggattgttgcatgcaaatatgttgacagtttggaggaaaaatgatactgaaattgcaaatatgagacttattgcttatatgatttatcctggaagttcttaggatagctttaacaataccacctaatgatctcctaaagtaacaatttgttcttatgttgcagttgctgtcctgtacgacaaatttcatatcacgtacagtacaagagacactacttggttctttaacagctaatgctatgctaatatttataatatatttaattttgtaccatatctatgtgctcgatgcttgtctagataggttgcatgctccagctttgtcgttttctgttttcaaatactaagtaatgttaattctgcttgttatgttgtcagttaggacgtgctcctatagaaattggttc

SEQ ID NO: 15835 - DNA, 598 bp, Brachypodium distachyon
  Intron number 3 from transcript Bradi4g06140.1 (locus Brad i4g06140) derived from phytozome v7.0 (chr-ID Bd4; pos 508 3443 to 5084040)
ggtctgcccctcttgccgcagctgtgaggtcagttgtctctctatcaacattattattattattgtccttatgcatgtgtatttcccagatgttatagttttgtacaccagaaatattgtatgaattctcagtactcttaaaatttgttttcatgtgcactctggtacacaaatgaagttgaagtcattttttgagttgcaatttctgtaaactacaacaaacatatccattctttatttttgttgtttgttattgttgcaatttctccaaatgctgcacattctggtggtgtattatttgtatatgcgtcaattattgttgtggtggactggtggtcatgttcttcaacgccagcaatatttatgttttgaccatgttaattctccatgttttcttctccctacttctttatacatattttttcctttcgaatgctacagttctaaagtagcatcttggtacagtgtacaacgtttgttatacagtagctactaccgtaaaaatagaaaacccagtttcttttcctgattctatttatagtcaatgcttgtcgtatatataggtgtgtcgacggcctggtgatcccaataagctaat

SEQ ID NO: 15836 - DNA, 811 bp, Brachypodium distachyon
  Intron number 1 from transcript Bradi4g04120.2 (locus Brad i4g04120) derived from phytozome v7.0 (chr-ID Bd4; pos 335 6341 to 3357151)
gtcatcagccacaaccctgacaacggcacctcaaggtactttcagccatcatctacccttctgtctattctattcaacgcgcatgcgccagatagtggtggattgtaatagtttatgaggtgtatgaatatggttagatctggcgtgcttttaacccttcttagattttctatgacgtgattcgtggtaggaaatgatgatctccctctagggactgtatgtaatgagatatgtattgtctcttcacactgcttctggcatgcctgccttagatactgtaattattgaatattgaattgcctatgtatgcttgctccagacatttttgtaatctagcagagttgaatgttgtttaaagtttataaagacatcatattggaaacatgatgtttcttctagtcttgattatgtaatatgtaatagtcaattgatgttttcatgttttgcattttggttacatcttagttatgcaagaaattgacgtagagattgatgtttgtaaaccatgatcctggaaccatgtgatcctgtctctaattaagatcaccagttgttgtatgatcctgtttttaatgaaatcagtagtgtctgtgaattccatgaagtagtcagtttattagaataatttgattgtacatgctacatcactaggatgtcattttgtcttcctggtgagtcctttcctctgatgcttttgatgatttctttagtagtacatatatatttcagactgagtcttctgtagaggtgaattcacccatgttctatttatgcaggatcaagctcccctctggtgccaagaagattgtcc

SEQ ID NO: 15837 - DNA, 1061 bp, Brachypodium distachyon
  Intron number 1 from transcript Bradi5g16170.1 (locus Brad i5g16170) derived from phytozome v7.0 (chr-ID Bd5; pos 195 52841 to 19553901)
ctgcgtcgtcgccgcctacgacatcgccttcagcggtaagctctttcacttccagctccagtcatttctagtaattctctcgcaatcaaacatgatccaactgtgccatttttgggggttgttttgaacggctacacctgacctcgtatatccttgctgtatgccttatcgtgaacaaacagagcaacacaaatcacaatgaactgcacactttatggaccgtgaggacaagcagagtagcccaagcagctttcgcccctgttcttttgaactctggggtagctgaacctcaaaaaataacaaaaacttcaaagtagttatactaatgtgaaaaagattaggaaaggaggatcatgaaaccttcttatccatggattcaagtgtatttacacccacgctgtaacgtttcttttcggaggacaagtcttatgacaaagtaattaatagcttcgtgcatagatttgcgtttccgcgtgaataattttaaaaagtgtcgctgtatgatggcatagtggatcaataaagaaggaatgaacaccatggacaatctatccaagttgttcacctcaaaaacctttctttattgttctagttctagtatatgtacgctgatatactgctgaattacaatttagttgtgacgtagtggtcccgtctcagtgtagaatagccaagttgcagctttgcatgtcacctcgagctgaaataaaagacctcgcatggtttgatgattgatcactttgactctctatctttgagtggactcgtgatgccaaaatgtaaaccataattatgagtggtgtgcccatggatgtgacgatatagacttgacatgaacaattagttctcggatggatagagatatccggtattcgcaaaaaggaaaagaaagagatagagatacccagtgacaaatcttttgttacttactaaacattatgttaactaaacatttccgcaacaacgtattccatactctttcgttgctactcaatttcactcacgtatgctaactaactcactccaattgattaggtggatttggtaattacttgttcgcc

SEQ ID NO: 15838 - DNA, 834 bp, Brachypodium distachyon
  Intron number 1 from transcript Bradi5g12320.1 (locus Brad i5g12320) derived from phytozome v7.0 (chr-ID Bd5; pos 157 89447 to 15790280)
cttcgtaaggctcttcttctcagggccgatatctggtgagcatcccccgcattttctttgactcgcgtgcgattcgtttttcaggcacccctcgtctgtgttgtgctctgtttagggttggggagctccaatgcatgttgattctagtttttttttgtgtaggggtttgcggccaggattgcgggattgttgtcccccacttgcgcacttgtactgactaggagtagttatacttactgaagattgtttttggtttcggttctgcatgcatgttgtgagctattgcgccagctggatgatatctaagtagagattctaggtagtttttcttttttatatatgtaggcttgttggatgatgttggtctcatgtgtgtgtccccccctaagaactaccatgcttgtactgaagttagtggctgaagtttttgctctggcatgtttgtactgagaagttagttttctgaagctgtcctttctgaagatttgtgtgctctattatgctttgtgctggataaattttgcaagatttttgtcataccatctgttaaatggggtatgtaattttctgtacatactgctctagcattttccttactggctttgcaatattgtagattttctagtgtgttttaatggctatggaatttatgcatgtcattttattctagcatgagtttattttggcatgtaacttccatatttttttccttgatggtatgtaatctcttatctaattgcatataacttctaggttctgctttgcggcactgtttctagggtcttcatcatgtgttacttgcatataaactctggtccctttttttgcagcaac

SEQ ID NO: 15839 - DNA, 811 bp, Brachypodium distachyon
  Intron number 3 from transcript Bradi3g51730.2 (locus Brad i3g51730) derived from phytozome v7.0 (chr-ID Bd3; pos 527 58817 to 52759627)
gtttggtcacaggtatcaccaaattacttgtctcctttaaaaggccatatctgttaattatttttgtcctcttgtattcagctactccctccgggtggaattacttgtcgaaatattacatgtatctagacactttttaaacaaagatacatccatatttgggcaaatttgagactagtaatatgggtcggagggagtaatttaaattagcttcaagacactcaaataggattagttataactggacgcatttgttttgtttgtttgacaatttatagctttagttctcaaacaccaaatgctggatcatctgtgatgctagctgtttcaggaagtatctatgaatcaggacttaagagcatagcattgtgacaattataaactcatgtgcctttctctgctctgattttagtcctgacggatacttgtgactgtacttcctccccagcacatttttcagttttaaaatagttatgttcaatcaaagactgggaaagatattttgttttaatcatagagttaactacttgctcatatttatttcaacattttcactaaatgttataatttattgttgataacatgaggtttattttctttttgggttgattgatcagcatttcttttgaatgcgcttccgtgacatttgggcagtaaacttgaatatcgacctttgctcgtaacctatggcgatgcatgttcttctgtaaaacaccaatcggtttgccaaaaccactaatttacgtgataccctgataaatacttgcacaatgcagatcacagacttgccattctctctttattcaacttt

SEQ ID NO: 15840 - DNA, 767 bp, Brachypodium distachyon
  Intron number 1 from transcript Bradi4g04470.1 (locus Brad i4g04470) derived from phytozome v7.0 (chr-ID Bd4; pos 368 7639 to 3688405)
gaaggatcatatactggtgagttttctagctcttcatcaatgtttcttgattttgttgtgtgcgctgcacttgtgagtttgccaaatgtttgaggaaatgctgcggtggtgctgtccgtgcatccacttgagaaatatgttacaggtttttctaggaaagcaattgcttttggtgtcattgtaaccatgcacgcgatgatggaagttaaagtgtgcataattgaagaaatctgctacttgttgagttatatagaaccctaggctgtgtaatgctgaaaaagttacttatggcccatcacagtttgtattgctttgaagtgaagcttttgcatgattggacaaattgttaacgttaaaattacacaataaatcatcagggcaacttcctccattgttgtgcaagttacctagagccaagatttgagtgatacaattgtattaggtttttgaatgtttatttttgtttgtgcactgtattacttattcagttagaatctgaggcataagtgaccattgacttcttgcaaatctagagacactgttctgctgccctttacatcaaagcatcagatcatagtttgctaagtgtgtacctgcttcttaactttattaaatataagcggtaaacatcataaaatatgtttatagtctgcaattttgcatggaccttttttttctccttttgttcttgttaatgcttccttagttccttatcacaaacaactatcatttactgtgatgtaggaatcgatctgcagagaatctct

SEQ ID NO: 15841 - DNA, 784 bp, Brachypodium distachyon
  Intron number 2 from transcript Bradi3g57230.1 (locus Brad i3g57230) derived from phytozome v7.0 (chr-ID Bd3; pos 568 82781 to 56883564)
gggacttcaaggcctccaacatcctgctcgagtcggtcagtaccttatttaccctcctatgaactgaacccaaatcgtaaatcgtaatcgtatttcttgatctcttcgtatgcacgactagttccacgcccatgtgaccccgtatcgtatcgttagtccacgccaggaaggcggggactagttggtacaggccagcacgttttaaacgaaactagctagctaatactagttggcaaatctccgtcggtttgtcatacaatatttgtgttggagactacttggcaggtcccggaccaaatctttgcagtggtagtacgtaatggcgaccaactaaccactggtagaaattaacaagtccgggatatagttaaccaaacgaagaagaatcagcagcaccagcattaaaatatctgagtttgtttatgcctctcctaccgaatcagacaaggatatgtcgctgttattcgtaagcagatgagacacgcacaccaccagctgccacaacgtagatgataataacttcggagagagctggccaacatagtcgccgcctgtccaaatcactggcgcaatcaaccaaagcaccttgcttgagactccagataaccacgcagaaatggaaactcaaatcaaacagttcggcacacacacattaaaaaaaaaaacttgtgcacgcacgtcacgatgaacacgcgggacacgaaatcatcaccttgctaaatgctaacgggtatttgataataatgcaggactacacggcgaagctgtcggacttcgggctggc

SEQ ID NO: 15842 - DNA, 420 bp, Brachypodium distachyon
  Intron number 1 from transcript Bradi5g16080.1 (locus Brad i5g16080) derived from phytozome v7.0 (chr-ID Bd5; pos 194 88325 to 19488744)
acgggccgcagatcagcaacgtcctgcaaccggaagtcgtcacaggtaggggtggccataaaaaccatgaaaccgaaaccgatcaccgagaaccggaaaccgaagccgattggaccgaaaacgaagaaccgtttaaaacttcggtcaacaaactcaaagaaccgaagtttgttcggttaattcggtctcttgcctcggttaaccgaaaaacccaaagaaccgaagttcattgctgcatctttttcattgcatgttacaatatttactcattacgtgtgtttgtgtcacataagattatgtgtttatttttgtgtgtaacttaaatctattttctgttgcatgtaaaagattgaactaaatttgttttttttttgccgtaaacacaatgttcggttagttcggttagtttggctggagaga

SEQ ID NO: 15843 - DNA, 784 bp, Brachypodium distachyon
  Intron number 2 from transcript Bradi5g08360.1 (locus Brad i5g08360) derived from phytozome v7.0 (chr-ID Bd5; pos 110 44391 to 11045174)
tggacttcttgctcgaggtcagacctgagtatgacacagctttgttcaactctttaaaatcttctgaaccttctctttgtctgtggtagtagctgtaggtggttcatcggaaaggaagttgtcgttacatgcttctctttgtcttgccgcagcctgggaaaattggggcagaattgtgatgccattgacaaatgtgtagggtgtcctatttgttaccgttcatttttccttgttggtatttgattggtaggcagtgcgtactggcatgtttggaacaacagattttcacttgaaacattcagttgtcacaagagaaataacatgtgtctcgacagatcattacaatgtttacacaaaccagtgatactggcacacgttggaattgtcctacaaaagaaacacttagtgccgtttttttgtggacagatttgggaactttcagccgggggtttcttaggtctaatgatatgaatgagctatttagagcgtgtgaattttatgaggaaagaaaacacccaatgccccttccctatttttgtgtatcaacgggacctctgtttcttcgctgctaacctttctagatagtggaagagaaacaactctcccgcctccgtaccaagggattgcaaatagtaattccaatatgcattttatatttcttcatcacaccaccttttctttttttcctttaatctgttgagatttgagagtgatgaaggtaattagattgttttaaaaaaactggattattgtttttgaactttgattctccttttgctagtgt

SEQ ID NO: 15844 - DNA, 624 bp, Brachypodium distachyon
  Intron number 1 from transcript Bradi4g02260.1 (locus Brad i4g02260) derived from phytozome v7.0 (chr-ID Bd4; pos 147 0402 to 1471025)
cggaggtgtcgggcgagccgatccggtcgccccaggtcagcaacctccgccctagaccttcgatttgtttttttattctcgtccgtacctggccaaacccgtagtgccgtagcgtagcgggagaccgattcctgctcgctcgctcagattcagggtgtggttgtgatctgggggtcgattggggagttacgagggtgagttttgattaattccgtagaaaaggcgccgccttgggggaatctccgcggcgtttggtcgttttctgttggcgattcagtcgaggtttcgatgcagctgatgcatgagttcatctcaacggattgtcgtaatctctccaccccctttgcgttggatttgacctgcgtgtgatagcttatcgctgctatgtagactgctaagaaattcaagactacagggagggagcagttctagtttcagttgaatggctgaattggttgtgtaccgactgctttaggatcaggatgtcttttttctttctttctttctttccaaaatggcttttgttttaattttttcgaaataccaggttccctatagttatatgctgccttatgatgatattgccatggtttccacttgtgataacacaggtcggcgctccaa

SEQ ID NO: 15845 - DNA, 925 bp, Brachypodium distachyon
  Intron number 2 from transcript Bradi4g05050.1 (locus Brad i4g05050) derived from phytozome v7.0 (chr-ID Bd4; pos 412 4782 to 4125706 reverse strand)
tcctggagaaggacgccgtcattgtcggcaccaaggttgttcacacatttatgacactacatgacttctcattttatcagcatgagcattttgcagtgatgttgattccatgggttgatcggggatacctaccatctaccgctattggtttacattggcagtaggagtttaggatgttttgcggccaacaattgacttgttagcatgcacggagattggctggatggattattgttgcatggatgtaggtttatctgtcgttttcgacggtgctaattctgagaactgctaggaaattgggatggtcttagctgtcagctcatttgtttgttcttgcatggttggtggaagatgtctagttggaatgattttgacatatttctaggtaaaggtcatatgtgatgttttaatttacctggaaaggcatttttcttgtgagtataattattgttttggtcttgcacgtatttagaaaatatcatttaatttcttcttcctagggtctttatgtgtgtagatcgtagttaacactagctatattagtattcaactgccaatttatctttttttgtctttcctaaatcctaattataaataagggtatcagatggtgacactgagcggtccatgtgagaccagtgaccaaggaaagacaatttgggtttgcattgttttgaagtcaagctgctcccctaatcatgcctgctagtaggctgattgtggctgtttgcctagaatacacaatatttttgtgcatagtgagacatggagagcgtttttggggttgtattccgctacatacttttgaagtttgaaatgataagaaaaaggaatatatcaagtggcataaattaatataaaaggaaacaaatcgttatctgcacatattaatcaaagtaacattttcactacaggaggtgacaga

SEQ ID NO: 15846 - DNA, 1068 bp, Brachypodium distachyon
  Intron number 1 from transcript Bradi3g52970.1 (locus Brad i3g52970) derived from phytozome v7.0 (chr-ID Bd3; pos 537 68291 to 53769358 reverse strand)
cctgccggagatctcggccgccgtcagggcgaaaggttagtcggcttctagaaggctctagaacttgccgcgtggcttgtttgtcgcactatttatatgggaccgagaaatcacaccactagtggcgaaatccccgctcgcgactctagcccagcctataacatagcagcattcaatccacgaatccagtcgcagattgggctagaagatactgtgtctgtaagtcatactacagtacatcttgcggatcaacaataggtcaataactgtatcatgtaaaattatcaaagagaaaggtatcatgccatggcaaattaacgttgtttttttgcatatgtagctgcaattgatgatattattgcactcactctttaattcagttttgatcattgcttgtgattaacaactcaaaggtcaactaatatatacattgaagatttatgccattcatatactagtgttttgatcaacagtaaaccgggcgtacaagcatatagcatgctgatgacagatgataaccttgttggagggtgtaagtgtcatttggtgcagtgatctggaaatttgtcgtttcttctggagaaacatcagaataaaaaactatcacccatctgatgatgtcataaaattgtcatgtgttgttatctttgatccgagatttgcagtgatttggaatgcatttttcttaggtttgcatgtatgtatcatgatgattttgtatatgaacttcatcagttatcacttatcagagatagatgctctgctaaatgctaatttccataatccatttgcatacttcctgcgagattttgtggcaggaagattagtcgggacctaagtgtgatggaagatgagtcttttttatccagaattatcaattatcatcttaggttggatgttgcaaccaacattaagattttgtgtgttctttttatttgtttcaaatctacaacgcactttgttacctgactactttttaattaacatctggtcacaaatccaaatctaattatcgcataacatctgttaacagggcttaatctgatcgttgtgctgacttttaaaaag

SEQ ID NO: 15847 - DNA, 998 bp, Brachypodium distachyon
  Intron number 3 from transcript Bradi5g01900.1 (locus Brad i5g01900) derived from phytozome v7.0 (chr-ID Bd5; pos 191 6157 to 1917154)
gttcccctgccacgcgtccggtggagatcctcgaggtaattgattaatcattggcctactactactattggtttgccgaccgtgctgactaggcatggcccatgcagctgccagctgtaaaggaaatgtgtggccaccttgcaaaacactttacaagttcgataattaagtttgaagtttgcagagattacaagaatcatagtgctccctctgactcaaattaactgacgtcacgtcatttaattcgggacggagggagtagtagtattgcatagtctaggacacctcatgggtacattatctttagaggtatattttcttaatagataggagtagtaccaatatacagatccattcgattcatattaattgtctcaaatttgttcaaatatcgatgtaggtatacttaaaaacgtctagatacatgtaatatttcgacaattaatatggatcggagagagtaataaagaactcaaatggtggtggcgatcctttacttttgtaagtaaatcaattaacggtggcgcgtgtcacttaaatccacctattgatcacacaaactaagatgtttgtgggtatgggttatttgatctgagataataaaatgctattttaaattttatattttatttttaatccctttgtgaccgatggttgatgcgctagttttttctaggtcactgacatgctcagtcgtcaccctcaagagtgatgttacatggttttcaagttaggtgcaagatcaactaatgtcgatatatcacaatatcatgtccaagacattaacttaaatgttttttagacctcatttgctaggtaaataaaaattctgagcacgaagagcaaataaaatcaccggggccgcccttaaaaagctcccgaagcaataatacagtttcctttccaatgcaaaagctttctaaaacgagtaaacatgtttaaattacatttgaaatgtggtttttgtgcagctccagataacagaggtaggggagaag

SEQ ID NO: 15848 - DNA, 545 bp, Brachypodium distachyon
  Intron number 2 from transcript Bradi3g59750.1 (locus Brad i3g59750) derived from phytozome v7.0 (chr-ID Bd3; pos 588 68509 to 58869053)
tgcctggactgaaggtgatatcaaattacgattgcttattttgctaatagttgtgcatggattcataagggttaactagcagtatgaattttatttctctttgtggtatgtttgattgcttttggtgggtttatatggtggatttgacctcatagcctctttttttagttgcagaagagggcattacttcattaaagcatatagttggtttagtatgttattttttgcacttcttagcctttccaacttgtacaggaagaagcgtcttaaataaattactatggctacttaaatgcagttttaatttgttgtgtgttaataagtttgtggacagaagctacactgtgatcttaggagtatcatttcatttcctctagcttattgtccattgtcacttaggttttagctcaaagtatgtgatatatgcttctttgtttccttctgtttgtgattcattttctgctttgagtgcaagtgacataggcttgcattcaatgtttttgtcctaaatactgacatcatcactttatgtttgatgtaggtcg

SEQ ID NO: 15849 - DNA, 816 bp, Brachypodium distachyon
  Intron number 1 from transcript Bradi4g01240.1 (locus Brad i4g01240) derived from phytozome v7.0 (chr-ID Bd4; pos 785 387 to 786202)
cagctgatcacaatcggtgctgacctctctcagtcttcgtcttcttgtttgttgattcatgagtactttttttcttggacttctcctggtctttgttcgtggctgaaggcgaatgcttttgcggtggaaaattttggatctttgaactaataactgcggcgtgattccgtggccaaatttattgttttggatttgagctgctaaaatccaaaacatgttagatacactgaacacaagctagaactgtaacacgtagaattcttgctagaaagtgaagatgctttcattaaggaaaccagacgtactacagaatctgaggtagagttaatgaggagtttgagatttaagtagtgaaattctgagccagccatgaattcagacatacttttcttatagaaaatatcagatgcgaattccatccattcgtggatttcaagggaaggcttctgctgtgtctagtgctcttgttcttgtttggttgctgctgtgtcagtgtttggtagggtgctagggtggttggttgccccctcccctaggattccagtttctgaatcttgctgccttaatgatgtacatggactcatttttgcatacttttatgctaaatcagcaagcaagtcagtggacctactgggcgaattaccatactgcgtataatttgatgtggggattgttacatgtttctttcaatactctgtagagagctcgtgtgtgtactgattatagcatttatttcctattatgcaagttgtgctcatggaacatttgtgttatccatcaggcgttggttcgacagttggtgctggagtctacgtt

SEQ ID NO: 15850 - DNA, 813 bp, Brachypodium distachyon
  Intron number 1 from transcript Bradi4g29040.1 (locus Brad i4g29040) derived from phytozome v7.0 (chr-ID Bd4; pos 344 73277 to 34474089 reverse strand)
gtggtacgttacgttatgtacgtacgtcaaaggaagtctacccggaaaaagaaaaaaaatcattcttggaccactgcgtaactatgacaaactgcctacggtagtttgcacgaggctttctacattgatcatagatccagactgatgcgtgcgtatggattaatttcctttggaattaatagttgccaacatctaaaaagcagctgccgaactaatataccacaccagatatcaaaaacaaaacgcatacatccgtacgtgtcggatcgatcccttttcttgtagcatttggcgattccctgagaatctccgaggaaacgagtcgagacgacccagacccgaaggcagaacccagctgcgcgcgggggcgagagatcgaagcggtcgcacgtacgagggctaggggctaggagcggcatgcaagggggccagcgcatcccgcgcgtggccgggcgaaggccacgtagcgcggtgggggccacgtgtatgttctccgggcccacccagcggccgggtcccaggcgaggtggcgcggaggcgcgtgcgaggtgtccccatggggcgtgcgtggcgcgtgcatgcatgcatgcacgcattgccctgcctcccacgtacgctctcccgcccgccctgcgcaaactctgctcgccatttccctacaaacgggagcgcgcgcgcgcccagtttcggagtctcttatttaagagtggcgacatgctctccttttctcgtacatacacacacccgtctctgctttcttcttctcgcgattctgcagtccctcgtatctctctctagctttctgcttctgca

SEQ ID NO: 15851 - DNA, 331 bp, Brachypodium distachyon
  Intron number 1 from transcript Bradi5g15620.1 (locus Brad i5g15620) derived from phytozome v7.0 (chr-ID Bd5; pos 190 03199 to 19003529)
aacttctactttccaggtattagttgcatgccttctgtgatttttcagtcggcacttacattttgaaaatatgtcacttggaatcataatgatatagatgatagcttctcgtaaaaaaatatgacgcttatgcaagggctcatgaaacagagcttctcttttcatctctggagtagcaagtccatcttctcttaatgatttttctcaagtgtgactgttacttagggaagctgttgttgataaattatgttgtttgggttagtgcaacttgtcggtccttgttctgtgaggagcagctggtttgatttctgaatgttgtatttctgcagca

SEQ ID NO: 15852 - DNA, 907 bp, Brachypodium distachyon
  Intron number 1 from transcript Bradi3g54590.2 (locus Brad i3g54590) derived from phytozome v7.0 (chr-ID Bd3; pos 550 38996 to 55039902)
ccgttgcgcggattggtctcttcttcggattgctggtaaggaaccctaggctcattgggctcggttgtttcatcttggggatatttgttctcctttcttttagtggatacttactaggataaaatcattgagctgactgtttcatacagtgacaaaccatgaaacagcaggatgttttctttttcaacgaccattgccttagatgttcagcaataattcgtacttggcgacaagatatggcatctgagtaaactaaggactaacagaatctgcctctaggtctggatttttattttattttggtaattgcatcattattactccagtgggcattttgatacttgttcatgtttgttctttgagtgtcaggattagtatatggtttcatttattttattcttatatgatgcagaatattaagattttaagtggcatgcttgacttgacggtaattctttattcacctggtgtcataacgttgctaaagatcaattcactagttggggctcgttccggagaaactgggaggggagggggggaaatcggtcgcttggaggaggagaacaaacaacagggggagagatcaagagggagagtcggcggaaagtgcacaaacagaagagatagattgatccagaacctttctcccttctgattgattgtgggcaggggcgaaaagaaatccacagataaaattaattagattagtgggcttgttaataaaagttactctatgacacacacactattgcgggagcaagatggggtaatatatcaaataccccgaaaccagcaaggagatcttagttcgaataaaggggggaagtttgagttttggtataccctgcttgatgatatagacctacctcttattccatcagttctgttgtctcattgcagcatcaga

SEQ ID NO: 15853 - DNA, 522 bp, Brachypodium distachyon
  Intron number 1 from transcript Bradi5g03680.1 (locus Brad i5g03680) derived from phytozome v7.0 (chr-ID Bd5; pos 453 8496 to 4539017)
tgcgagctggtctgcgcggtggtggagctgcgcacgtgagggaggaggagaaagcagagaagactgaggcggccctttcctcttttctgtggcaagaggagacctgctcttgtgaaacagtggcaggacgagagggcagccctacaaggggcgctgaagagggggtgctgcaagaggtagtgtgatcgaagtcatggggactgaattggccactgctttggagaagctggcgcaacttctaatcgccaagaatgcagacacctcatcgtctgcgggtggtgcgatggttgtgcctcaaccagatcaagttcaaaagcttgagctcatgccgaatgatgtcaagctggaaggtgtgggtagaatcaaaaaacaaatgtatcacaagattaagttagtaaattatggtaggcactgaacataatttcctcctttgaataataatttctagtatgctaaactagttttatccttgaatttgtgctgaaagagtagcttttgattttgttatactcaaggttttta

SEQ ID NO: 15854 - DNA, 245 bp, Brachypodium distachyon
  Intron number 3 from transcript Bradi5g03680.1 (locus Brad i5g03680) derived from phytozome v7.0 (chr-ID Bd5; pos 453 9179 to 4539423)
tgatccacgtatgttcttgtttatgcatttgttttgtcactttaagtgctgacacaattttgacccgttgcagagtctatgtatttttcagttctactacgactactagctattgataggcaggtatcatggcgtacaacttaacctctcaagattattggtttggattaataattgttatcacaaaatcttctgtttggtttgcatgaatccattgatttttgtgcagggcttcataaccaacc

SEQ ID NO: 15855 - DNA, 611 bp, Brachypodium distachyon
  Intron number 1 from transcript Bradi3g52210.1 (locus Brad i3g52210) derived from phytozome v7.0 (chr-ID Bd3; pos 531 87566 to 53188176)
cagcctgccgtcccccgttcaggtgaggttcgctgcctccgtttgttggtttcggtgtttgactgttgggtctgaactccctgggtgagtctcgttattagagttggcctgcgcggtacgaacgcgatccttactttttgcttacccaggattgcgcgcggttgactttctgtgtgggtgattatttgaaggtttagtgttttaaggtgttatatcgtttttttctgttggatcgttgcggtagtttttgcccgaatctccaccagtgcgtattatgtgtgtgtgtgtgtctgagaatccagatttggttgtgctataagccgccattattactggccagcgatagttgttacacttgttactctatttagatggaagcattcctggtgacgatcgttttgttcggttaaattgttttgacgccatagtctgcccttagttaaacaaatggtcatattgaaatggtgataatttcgatctgcctctacgtgctatctatggtcaaatggttgtatcttccaaagaaggcatagttttgtaactttgtactatcatgcaaccacatatctaactgttatgattgttttgtcagggggacatctgtggagaaa

SEQ ID NO: 15856 - DNA, 1002 bp, Brachypodium distachyon
  Intron number 1 from transcript Bradi4g39460.2 (locus Brad i4g39460) derived from phytozome v7.0 (chr-ID Bd4; pos 440 72779 to 44073780)
cgtcttcctcctcagcgcgagcgcctccgccgcaggtatctatctccccttcgattccctcgctcccgaccgtttctctctccatcaccccacgaacgggtcccgccctttagctccccgtttcatcttcttaatcttccccaattcgtaactgaggtaaaaatcaaggtacggcggacgccctaccttgcgctactgggtcctccgcccgtgcttataagccttcttcctccacgccgcagccatgtctattttattttgtttcattttgctctaccttagtctgtgctcgatctgtttagtgcgtgctgcttggtgcttccacagtttcactgaatagggagaggaatggcaacaatggttagcacttagcagtagcggctcgataatggtaggcatgtggatgactacatgatgatgtatttggttatggtgctatgagagataggggatgaagaactcaaaagagtggagcaaaaaaaaattcagtagcagcagcttttcttatcctctgtaatagtactgttcaattcttgtgttttttctcagtgtactaaataaacgatgggacgttatattatatccaaggatcatcttcaatcctttttagttcatgtgttcagtagagcagaaaaaagtgtctcaagcctgatgacaacagtaataatttcaaaataagttgcagcgaacacttggaagcagaattacaagctttacattacacatgtagcttccaaagctgcagctcgctacattacagtataaagttagtggcagaaacaagctgtagcaaatacctaaaagtgatttttctaccatacactcctatatagtcaacatactcctttgacatctatgtactcacgttgtctttccagttaaatgactaacttgtttttcagattctaaactttgttcagaattgttgttgttttctgttttatatgttgacagttcgttctggtgattgatttgtgcagttaaaaaatcatcaacacagga

SEQ ID NO: 15857 - DNA, 576 bp, Brachypodium distachyon
  Intron number 1 from transcript Bradi4g12950.1 (locus Brad i4g12950) derived from phytozome v7.0 (chr-ID Bd4; pos 131 85172 to 13185747 reverse strand)
gcagagaaggtgagctctgtttctctctgttttggtttgcaaattgcaagatagatggcatggtgtatgtgttctctaattgtgtgtttatgctacacggatcacttggattgatcttagaaaaaacccagaaaagaaaagaaaaatctcaagggaatgggagctgagaccggagggcatatattctagtctctagaactctgcatatattcctgtagatgcatatgtttcttgtagaacaaaaaccacatagatgctatctacagaaatacatgtgtctgattcagctgcactgcaactagcaaaattcaagattgaattactccctgtatatatatattaaataattgcataagctgaatgaaatttgctaattaactttgatgttgtaatccttaatttgcattcatttattcatgatgtaacataagggaagcgaaaaacaacattaatttgttgagcctcctaattctatatatgctgtatataaaagaaaggaatgtctaattacctttactaattctgctgtgtcaacatgcagagctttgtgctaatcctaacggttgatctggattg

SEQ ID NO: 15858 - DNA, 608 bp, Brachypodium distachyon
  Intron number 3 from transcript Bradi4g27880.1 (locus Brad i4g27880) derived from phytozome v7.0 (chr-ID Bd4; pos 331 88530 to 33189137 reverse strand)
agaacgttatcgctgcaggattaccacgtgagttggtctgtttacattgtctgcccatgtgcaatgttttcatttacgatccattataatgtattcttctgtcttcagttgctcatacagatgttttttttatcatttattatattttcatttcgtattgctacttagatagtttcttcgtgtccacatttgcctattcaactaatatctctctagagtaactttttactatgttttgggagcaatcaacacagattttcatgctaacttccatttatgttaacgcattttgcatcttcaccttttcccggtgaatgaagcattcacgagattctacaccacctgatcatttattgcttcttgatatccacttcctcactaaggctgctactttctagacttcactacaaaattaagtaccttccattttttgttttattttgattatgtgaccatttcatcattagattaatgttttacattaacttccataattcatatatataaattatatttagatggagatgtccttgactcctcgcatttggaagaaaaaataatgattctgttgttggccagttaattaatactgataaattgttttgcag

SEQ ID NO: 15859 - DNA, 869 bp, Brachypodium distachyon
  Intron number 1 from transcript Bradi3g55290.1 (locus Brad i3g55290) derived from phytozome v7.0 (chr-ID Bd3; pos 555 56889 to 55557757)
gtcttcttcttcttcctcgctttctcgccggtccggttggccgcgtcttctcgccgaccaggttccgccccaaaatcacgagatttccgcccgcgccattaatctatgcatcaattttctctttttattactcttattatatttttgtactgtactatacttgctttggtttcgctatgcggtttgctttggttgggggcacttttcccgtcatcgatccggcagccatttgggaaagcaaagcggaatgggggaaatgcggccgttttagctcgctcgcttgcttgccctcgtcgctttcttcccttccagcgcggatttgatttggtttgatttgattcgattcgatcgcctccccctctccggttcgggcaagaaaatcccccgcctttcgcggcgtcgtgtcgcactaccgtggaggctaccccgagctagtcccgtcaagcgccacttccatttccatgtgagagctgctgagcaggatgcagctgcacatgtatttacacacattcgtgtgtacaccggcctttgccatcttttccgttcccatctttttggccgctcctgttgcctttcggtgccggcgagtgagtgagtgaaactgtgatgatgagctccactggttgccctctctctctctctctctcgtcggggttgccgatgtgatcactttgggatggagttgttttttgttctgttcttggggcgcttgtcctgtccggttcaaaagttttcaaatgtttattcaagctcaaactgactctttcttctgtcctcaagtttcaaactttgaaaatcttttgctcgtactcgctcttctcattaaagccgtggtgggtttaccttgcgtgcagggtggtggtcgtgcc

SEQ ID NO: 15860 - DNA, 721 bp, Brachypodium distachyon
  Intron number 4 from transcript Bradi4g39590.1 (locus Brad i4g39590) derived from phytozome v7.0 (chr-ID Bd4; pos 442 35828 to 44236548)
agaatccccactttggctattcacctcgacaggttggtgtttgaaatttcttttaatacaatattgcattctggtgaagcccatgaaagttggttccaggcctacactgaattttgagtggtcgtctaacattttaaaaccttcttgctgcaactatacatatcttgggagattggatcaatttatagaataggtcatggtacgcttggaaagtagttgcaatgtgctacctggaactgaaaaacactttgcattatcacttttgtttgaaaaatatcatgaaaatgtcagtctattcttttgcatgaaaataaatttaccattattatatattttttgatatgtctgtttgtccatactgttaagttgtttctgaactccacataacgtaacgagtcaatgactggtagatgcagatgtcataaaaccatatcttgaggcaacttttgtaattagtattagtatgccagaacttgtaaatgaagagcaactttgtattgactggaagagagtatggaatgttttatgccaccatgcaagtgctttcgacaaatcatagtcacaccaagcacttactatgatgcaacctatgtggatgtaaccctgtttttttaagttgtggttcgttacaaagttacagtaatacaaaaaatgcttttcatttatcttgtttacattttgtacaggactatctcttcggaaggcctcaagattaacaatc

SEQ ID NO: 15861 - DNA, 691 bp, Brachypodium distachyon; identical to SEQ ID NO: 15730
  Intron number 2 from transcript Bradi5g03050.1 (locus Brad i5g03050) derived from phytozome v7.0 (chr-ID Bd5; pos 337 4695 to 3375385)

SEQ ID NO: 15862 - DNA, 1028 bp, Brachypodium distachyon
  Intron number 1 from transcript Bradi4g01780.1 (locus Brad i4g01780) derived from phytozome v7.0 (chr-ID Bd4; pos 116 6316 to 1167343)
aagccggacgcgttcaccaggcgaggccaagcgtatgatgccccccgcgttttatttcttttttcccccccccttgagatttctgtctcatgccgaaattaaagaattgggcgtccttgtcctgttccttgctgccggttacttttctgaagttggaaaaaagaagaggaatgtgttccaaatgggcgatttaggggcacaggaactcaaggatctttgtttcttcctttccctcttcctttgtactgtgatgttttttttttcttgctctgctgttagttgggcctccacattgctgcttcttgttcggccgcttagcttcttgtggttttggaagctctacggttcatgtgcagtgcagaccgcttttaaggttcagtgaagttgaaatgctagactgtgtgcatgttttctttatgtacttttgtacttcagtttggtagcacttgtgatatgtatccatgatggatttaggaggaacccaagatcttcttgggaagaaataagatctagcttttggaattgcgcacaaccaaaaaattatatcagagttagagttatttttatataaaaaatggaagagtagatcagtagagttatttttgtaaatcacaaatggaagagtggagttacttttaccagagtacacaacatttgggaactccaaactaatgagttcccttaatgttgcattcctctcacatgttccaacaactttgattggcagcacatactttgatgttgtccaagcaaatacgctcttaaaatgctacaaaagagttggtaccttgttttagtttttattggatcatcgtgttttagtctgagacggatagtacaaccatcttggtgtgattttcttttgtcctttagactgcagcaagcttctgattcttttacaacttaggcagaagtagtgctgctttgtttaaggagataattcatgatcaggctgtgccaaaaaatgaaacaatgtacttgtggaccttgcaggttctgtacaaccggacttcccagcgacattattg

SEQ ID NO: 15863 - DNA, 798 bp, Brachypodium distachyon
  Intron number 3 from transcript Bradi4g16830.2 (locus Brad i4g16830) derived from phytozome v7.0 (chr-ID Bd4; pos 176 36361 to 17637158)
agctgcttcattctgaatccgggagttactctcaggtttctcttgttaatcctggctaagtacatgttttttctctcgattttgtactcttgcaaagttcttgtgctattctgttatgctatatattatgactctggaagcatggaaaaaattgacacttaccacgttgcaacagtagattttctaaaccaagcattcgttaattctaaagatggagtgccaggatatctacttgagtcaaatcctccaaagcccctgcctataaagtcagaagatcaagtaatacaatgggattaggtttcttattcatttgatgccagagagaatataaataagaggaaatcacacttatctatcagtatagtctttggtttagactctgcctgtgatacagattgtaagtaccagtcccattccaactgaaattcaaatgtggcacacctccacggggcaagagcagctgaactgcatctatgtcagcatggtaatgcctttgccaaaagctaagaggccttctcaagtctgatacacaaagatgaggttgtggccatctgcagcaaggcagatacatgtgtagttatgtgaaagtattgctaaatcaagtggttacttatacctcaaatcttaagagaatcaatgatggggagaaaaataagatagagtgaattcaacatcacccaatcatttactgtttcaccataccagtaagtagtaactacaaatttgaagtgattgaccggtagtttcttttctggttggctaggttgacctaaatagggccggtgttcctttgcttga

SEQ ID NO: 15864 - DNA, 1037 bp, Brachypodium distachyon
  Intron number 1 from transcript Bradi3g60630.1 (locus Brad i3g60630) derived from phytozome v7.0 (chr-ID Bd3; pos 595 37382 to 59538418)
caggacaacaagaaagaattgcagaagctgttcaggtcagaggaacttcaacctttaactatgtcataagatacatctcctaaggccgaagagttattcgagctctcggcactccacgtatgcgcaaccgtgttttcgttttgatttgagtggttttctgccgagctggtgtcgtgggcggattgccttgtgcgctggtactgcagacgcgtgttccctgcgttgttactgcatgcatgcggacgcgtgttccctgtgccgtgtgctgtccacatagatctctccagagtagtctcgttggcgtttctgagtccatgtgtctactttctggtgcttttttctggctgtatatataggcctgggcctgtcgagtgtttgattgaccatgccctggttttttggagtctgctttcttgctgcaacgtttttggcgtcgccagtgtcatcttttcggcgagggcagaagagaccctatgccatcaaagttgagcatggaagagataaaacttgcaaaaattaatgtcttatttgctgcaggttcctgggttggttaatattgtgattttgcggatatgggatgagttatcttgtaagatgaagggtaatctttgatggcatagggtctgtgttgcagccttacaagtattacacatgaaaaatggtctaatgactgcttcgtaccccgctactgcatttgatcaatctttgattgctctctgatccttgattagttcatgtgcggtggtttagttaattttcttgtggtgatgatgtgatgcggagcctgggaggaggtgtgattctttaccagggtgctctttaatttttgttttggcatacacgatcgtgaaacatctgatttttgtgtcagatcatggcatggttttcgatagtatggacatgtgtagaatattggttggcgtggtagcgtgtaatgttccctttattagtagacgtttactgattctcgagttttctgcgctatattgattctaactgaaacttcggtggcttctctctctcaggggatctgcgtg

SEQ ID NO: 15865 - DNA, 497 bp, Brachypodium distachyon
  Intron number 1 from transcript Bradi5g05160.1 (locus Brad i5g05160) derived from phytozome v7.0 (chr-ID Bd5; pos 665 3615 to 6654111 reverse strand)
gagaatccaggtggtgttggaggcatggccgccctacctccccttgccgtgtcgcctcgcccctcgcggtgtctcccctaccttgtataagaattggggggggggggggggcacctactagtgttctccggcaaggttattaggcaaacagtcagtttcagcccagcaaaaaactagccatctccttctgggctggcatggaaaatctacctgtattttacaccttttttgtgccaaaaacctcacccaagaaggtcctcgatcttattagggtttgtgtttctggttaataattactgtgtacatttgatatttgttgaaaaccaaagtccacattttctttgtgctgctcactaagtcggaacttcttcatcttggttctattcacgctatatgttagagtgttgtttttttcttctatttgtgtggttcttccatattaatcctaagacatgacccctgctgcaggtatctaacagagcagctacaaaaggttc

SEQ ID NO: 15866 - DNA, 929 bp, Brachypodium distachyon
  Intron number 1 from transcript Bradi4g12970.1 (locus Brad i4g12970) derived from phytozome v7.0 (chr-ID Bd4; pos 132 41568 to 13242496 reverse strand)
cacctccggcaatagcaccctcgttcgtcgtggttgtaagtgatagagtatgatccttttcttattcgtgcatgcttctttttaatgtttgaaagaacatccaaatcatgtttgtttaactgaaactaaatggaaagtaaagggaaccagacaccggcaggctcaggtttgccaactaaccatggggaaagtatcgtcgaaaaattccaattgttgtgtttttcttttgatgggcaacattaggtgaagccttgtggtatttttttatctattattatgaaagaaaaggtgaccagtctaaaagaggctgtctaacctgagttctaatccaaggagacgacccatctagacaaacaaggaattttggcctcaaagataaaatccattgctctccttacaagttccaaatgttccaaagcatagatatatatataaatataatcaggacacgcggggaagacagccccgggtatttttataagaagaataagttctcacacaaacgagaaggttttttttaaactcaacttgaaattcgctacccccaaaagtcgaacccaagacctcagtgtttcacaaagacccctaaccattaggctagacacaatatgcaagcctctcatgaagtatgtctctacaaagttggtgtaagtttaccgaagggtttgagataaccgatgggcagactatgtgatgaaaagaaaagaccaagatcgctgcgcaaagctacaatcaaataggacatgaagtagctagtgcaccaagtgaaacaccttcgatccctttcaaatgcgttctacaccaagtgaaacacatttaatccctttcaagtgcgttgtgctacggtagatgtggcgacaagagatgatcctgccggcacacgaattgccatgcattctcatttgtcttttctgatcctgcaggtacct

SEQ ID NO: 15867 - DNA, 391 bp, Brachypodium distachyon
  Intron number 2 from transcript Bradi4g36300.1 (locus Brad i4g36300) derived from phytozome v7.0 (chr-ID Bd4; pos 415 45570 to 41545960)
ctgagctagcaactcgttacactaggctggagcaggtaacttctgtaatttcacacaaacttgtccatttcatctcatatgacatcttatcctgtttgtttgaatcacgatattctttgagctctctttttctttcttgtcaaatttagctaatgtatcacatcataaagtaaaataactacgtcttatttgtgttctctgatgcatgcactaatttgagttatttatgcagctcgttttgcgatgcttgcactattgtctttgtgtcttttgtccaataaagctcaacttgctcatggatttctgttttactgtgttgttaaatatgctaattgagtatatgatgagcattgagcccaaggcttgtttactttcttacagcttcttctgg

SEQ ID NO: 15868 - DNA, 867 bp, Brachypodium distachyon
  Intron number 4 from transcript Bradi4g36300.1 (locus Brad i4g36300) derived from phytozome v7.0 (chr-ID Bd4; pos 415 46223 to 41547089)
aacttgttcatattcttcttgcacattcaaaggtaacacatctggtaatttagtgaatatttaatcccatgactcgattccgaagaagctgtgaactaaaagaatagaagtaacctcaagattttttcagattttattgtggatctagcccctcttttgtattgcttttggtttctgaacttccagcttttatcagttttcatccccagtcctcactaccagcttttctttaataatttcattgccgttttgtaacatattgagaaatactccttccgatccataaaaagtgtcgcccatttgaaatgggcaaacactttttatggatcggagggagtaggctttatccttaaggttccaatcaaaattcatttctgttaactctgttgttaacttgttttgctgttcaatcagatcagtaacaagtgtagctgccagattattctgagtgaaaattcgcggtatctttaaaatgtgttaaaatctttggttgagctattatcttaaagcttgtatcagtggcatgatgttatgatatcatgttagcatattactttcttcagttattctactgcttcatgtaaatcctagtgggtgataaagacataaagttttgttgactattgtccactgtatgtttctatgtgttgagatagtaattatttgaatcatgtttcgtgtttatgtatgtcacttggacacttgtgcgtctcctaggtccttttttgtgtactcccttgctcagtatcacatcctttaaaatcaatcttatgtcagtaatacatggatgtgctacttgttagtcactttgtattcaatatccatctctgttaatattcaatgtttcatggtcaggttgatatattt

SEQ ID NO: 15869 - DNA, 531 bp, Brachypodium distachyon
  Intron number 4 from transcript Bradi3g50000.1 (locus Brad i3g50000) derived from phytozome v7.0 (chr-ID Bd3; pos 512 07991 to 51208521 reverse strand)
aggcaaacatagacgctcaactgaaaaggaaagaagtaagttggctgtttgaattcatgtttttgcaagtttttgtttcttttggatgattatgctcttcagttactctatttcgtttcattcattctcttttttctttttgccaaggaattactttattcgctgtatatgtcatacctgtagatctttgtgataatgtctgagcaggataaaaaaaacgtactccctccgttccaaaatacttgtcgttgtttgagtgcgagtttgcactcaaacaacgacaagtattttggaacggagggagtagttgtttgtatgcgcaaatttgtatactccgtagaagattactgttgtcttcaggtgacatactcgatcgataatagtttacaaactacaagcgaccggtttgtcacatatgcaacaacttttctctaaaaaggaactccatgtagcatctaacgatcagctaatgatctgcatttttacgagtgcgcaggaagagttagaaaagaagaaagccgaatacgcgga

SEQ ID NO: 15870 - DNA, 495 bp, Brachypodium distachyon
  Intron number 1 from transcript Bradi4g21140.1 (locus Brad i4g21140) derived from phytozome v7.0 (chr-ID Bd4; pos 243 98303 to 24398797 reverse strand)
gccgaatcagattacatttcttgctatactgacaggttgtgctagagcaggattgctagagcttttctttgcctttttttctcctattggttatcgctccttttcttttgctgcagacatgttcttttctgtgtttctaccaagctgtgttgctagatcgaatagcatacagatccgaaatgcaccgtataattcagtaggttgtttacctttttggtcatgcacctcataattcagtaggttgttaacctttttggtcgatagaattgtcaaagcattgctgtattttttgtccaagaaatgaaacaagcacaaatatttattggttccaaggaattccaacaggcaagataaaaatttcactcaaattgctctatattttacttttaattgcatgacgtttacatttgcaatcctagttccatccatatgcaattacagtttttaataatttgaattgcacatgtaggtttatacccaaattttgaaagttaa

SEQ ID NO: 15871 - DNA, 753 bp, Brachypodium distachyon
  Intron number 3 from transcript Bradi4g10390.1 (locus Brad i4g10390) derived from phytozome v7.0 (chr-ID Bd4; pos 999 2483 to 9993235)
tttggtatgataacacacattctcaaacgctttcttttaccttttttacgatcaatgtttacacttttttgaggtttgtttcgacaaatatctgtgggttgcccatgtttctttatcagtttgagttgataggcgaaatgattaggtgcatacaaccaacaaccaagaggtgccttttggtttcgaaacatggttacccaaataaatgagtaaatttcgcaaaaccacagtttttgggataatcgtgtcgctgaaccacagttaacgaaaaacctttcgcaaaaccatacttttttagtcaagttgtctcagtcagcccgaaacagggtggtttcacggttttgcttgattttttaccggtggggtccacctgttgtacgccacgtcggccccgaaaacttgcggaagtgagaagaggctgggggtttaatcgcaggctaagggatcaggtcgagtgggcccacctgtaagaaatccagcaaaaccgccaaatcactcgctttcggacttactgagacaacttgactcaaaatgtgtggttctgtgaacggttttccgttaactgtggttcagcgacacgactgtcacaaaaactgtggttttgtgaaatttactccaaataaataattgccgtcgtcatccgctcctgcttcagctgcaccatcccctaaatttcgtttgcatccaaaacagattgtattgatttcccaaccttttgttcttaggtgaatctcataaattggagtgggagac

SEQ ID NO: 15872 - DNA, 685 bp, Brachypodium distachyon
  Intron number 4 from transcript Bradi4g01080.2 (locus Brad i4g01080) derived from phytozome v7.0 (chr-ID Bd4; pos 661 087 to 661771)
ttctcgaaggtgtgtatgttactgtgatgcttattgatttgtgtgatgtactagtttctaagcatcacaatatttcctgcagattgtattgcagaagatgatcttgatgaacagaacaatgatatgaacctagctataaaaaagcaaaagaaaaagttgaagaagttgcttgataaggtgaaaattgcgttaggtcttgccttcttaatttctggatatatagtggctgcaggtctgtagtttatgtgtgcaatcacctcttatagaaaactatgcatagtaactgttcaatcttgagctgggcggtatagatctttctttttgtctagaactgatatattgttataatctggtaccaccaaatgagcagtatagatttttctttttttttctagattaatgagagaatttctagattttattaatctaggaattttgatccctcaaaacgaatgtggtaccttgaggtttgaatcacactagtttttatggatatacttattatgtagttaaattaatattagctatgtttaatagggccaccacatgtagatgatggttgaccagtatattagctgcattttctagacttgggcagctgcaatgtgcattttaggtgatctctattgggattgtcagtgtttgttattatacaggaccctgagtttgcaaacttccttgagaa

SEQ ID NO: 15873 - DNA, 986 bp, Brachypodium distachyon
  Intron number 1 from transcript Bradi4g11200.1 (locus Brad i4g11200) derived from phytozome v7.0 (chr-ID Bd4; pos 110 14494 to 11015479)
ttttctggtataaacaattagtgagaaatattgttgttattatttctattttgcgaattgaattcctctttctttcgatttcaactgcctatggataaagaaaatttcaaatatgtaaggtacctcgatttcattatgtcagctctttgtgccaatttaattaaggtgccacttgccaactaaaatccaaactttcttaaaaagaaagggtaaaaaactaaaatcgagatctgggtgctatccaaagtatggttttcaagagacgacattcgagtaatataatgaagtgctcttccccactgatccaacccaaatcggaagtccatcgatgcgacgactcgagcccggtcaagataagtaatgcatgtaaacattattgtactagtcctctctgcaagtcaaatttgtaacatgcatggcgcagatctcaacacatacaacttggtgtaacttaggagtacatgcatgcattgcatagataatccatctatgtactctacatgggtttagctagctaatcaagcgtggtgtagctacctaggcatcttgggagcctactaataacgtctccagcaccagttaatcttcacatctcattccctgtcttcttccaatttcatggcttcagtttcagccactctcgctctcaagacggcggccatcgccgcccttctctccatgctggtcctgccttctctaggacgatgtcctcattcaccatcgccgccgccaccaatatcacctccaccgccgccaccatcgccatcacctctgccgccgccaccatcatcattgccgccaccgccaccattgccgtcacctccactgccgccaccattaccatccccgccaccgccaccatcgccctcaccgccgccgccaccaccgccgctgccggcactgccaccggcgccattggtatcatgcgaggactgtcgctcggagtgcttcaagacgtgcagggcccccatcgtggagaagtgcaa

SEQ ID NO: 15874 - DNA, 940 bp, Brachypodium distachyon
  Intron number 1 from transcript Bradi4g42950.1 (locus Brad i4g42950) derived from phytozome v7.0 (chr-ID Bd4; pos 467 94209 to 46795148)
cgctgctaaccccaccgccggggagtacgcccacggtacgtctctgtcagcctcgccacccccggcccttttgacttgcaaataatcccgattagacctcgtgttggacgcggaacttgtttggatttcgcgtctcgattcgacgggcaggagcctcggcccgggccgggttccgcgcaattttttttgtatatctatgtcggagagcgcctggcgttaggcggcggtcgggatcgtgcggggggtttgccagtggcttgcgaatctgggggcacggcgcatctctcgctcgctcgctcgcttttttccgttgtttgttagtggatttcactttacgggaaaaggcaaatagtagattagagttcgatcggggatgttactttactactgaacaaccccttatggttggtagcttctattttagtatgttagacaccagccagttgtgatgagacgggattctgccagtatttgtgctacgaagtttgaattgcttggtgcaaccttatttgaatacctcttcccggaatgctgaagtgatgacatcctaagatcgatttacatccttaaggccttaagatcctaaccttctcttacaaatttgaggccgaccgagaagcatgtagttcactcagttgcatctgcgcataattaagtttattccgtgaaagacaacaatgccaggttttctttgtttgagaaatggcttattctgaagcaaaccatcactaatggttcactgtactcttcagtgcacggcctatggcttctcaatttctattgtacatgttttagttaacttggcattgtactcagacacacccgtgcagattttttttagttataagaaatggcttgtttcacatgaactatgatcattaactgaatgtccgtagcttcttcagtgcagggctacagtgttgttctccctgagaagttg

SEQ ID NO: 15875 - DNA, 815 bp, Brachypodium distachyon
  Intron number 3 from transcript Bradi3g47430.1 (locus Brad i3g47430) derived from phytozome v7.0 (chr-ID Bd3; pos 490 61061 to 49061875 reverse strand)
ggtccccactccgtgacataacgtcgatcatcaaggtgataaactattccattgaacttttgggggggtttctccaaatgttttggccattttgctaatagcagagttaagttgtatcatgatatgttacgttgtcttgtcctcatgattctgaaactgtgattggcattgtattcaagatctatggttaccaaaagttaggttctggtcaattttgcgtgatcgaacagcaattgtggccgtcgatccatcactagtcaaactgggacggtaggaattacaaatttattttgactctactggataatatatgtatgttgttaatactgtaagatccatgaattctgttaatcattgtctcaacgactagatttcagaagacgctagcatgcaattgttttcttttatgtttcgtgccgttatctgaagttcctaagagcataaatgaattagaaacatctctgcttcagtctagctctttggcatgttaaatttcgcagataagattacagaaacaataagtgcttaatttcacagataagtctttgagaaataataagttcaactaatggaagcgtgccattcaaccatttgttttctctgttgtattatcctttacagtgcagcttttcgctttagtactttgcttcagtacttatctgaaataaccatctgcacacgattaactgttcatgcattgtattcctactcatagttttgtttatttaagtgctgaaaatctgcttgtcaactgctcatagtataaggtttccatggcaacctgcaggctgttgagaggaaaaaccttctgcgag

SEQ ID NO: 15876 - DNA, 660 bp, Brachypodium distachyon
  Intron number 2 from transcript Bradi5g08460.1 (locus Brad i5g08460) derived from phytozome v7.0 (chr-ID Bd5; pos 111 53140 to 11153799)
cgctggaggaagccggcgttaggggcaacatcaatgtaactactctcccattcatccttccttcctttgttaggcaattaatggtgcaagcttaatatcacgcctgcctctaggtaattagctcattgattgagctccagagatcgatagatcaaaggggatatgctaaaataacctgccggtagcggcgtacacgacgacgttggattggggaaagtgaccggggaaatttatctgttgaaaaaacctgccgggagcatttggtggatcacacatacccaacaggggacaggaaaatgacatggccgttgacttggtaaagctctagaagaataagttagttaagcccttggttcattgccccttctgttcgtctttagcttgcttgtggatcgtcagaagacttgtccctaggaaggaattttcagacatgaatcaaaatatacaacaatatttcgtaggtctgaatactatgcacgtggactgtctcttgtttgcccaacaccaattcaaacaatcttcttctgttggtgacatggttatgttaattatctagtacggagtatttggttgatgaattagcagttgctgttgctgatgagttatcaccatgttttttattcagagaaactcgctggggctttgggtgttcaggagcaa

SEQ ID NO: 15877 - DNA, 876 bp, Brachypodium distachyon
  Intron number 2 from transcript Bradi3g48090.1 (locus Brad i3g48090) derived from phytozome v7.0 (chr-ID Bd3; pos 496 28379 to 49629254)
cgcggccagcctcggaacgctcggattctttgcaggtaacaaactgatggatacgtgtcctgattaattaagacgtaaactatagatgggtactctactcactcctcctgaatatggcttcctctaaaaaacagagcctgaaacagaaagttagcctatcttcttttcttgcgagagatatagaaattaagctactccctctaccccactataagagccacgcacgcatcctaagatcatcaatttaattatcaaaatataaacccaaatataaattatgttgtaaaaaatattattataaattttctttgactacgaatctaacgatatatttaaaaaaaatataatatatactattttgttagttaaatttgtgatcttgagacacatgtgtgcttcatacttactgtgggatggagagagcactgactgacaagtttgaaatgcccctctcacaaactacaaacgtcactcaagtgcatgagttgaagaaaaaaccgaatatgagtaaccagccggggtgacataattgtcaatctcaataagctacggggtaacaaaatcatgctcttgattacaagggtgcttcctccgattcatattagttgtcttaaatttgtccaaatatagatgtgtctgtgctaaaaaacatttagatacacgtataatttcgacaattaatattgattcatgtcttttcctgctcaagaccagataatggataatgaaacgtctagatacatgtaatttttcgacaattaatattgatcggaggattacatcctagcacctggactcgattcaagctccagaccagctaatggataatgaatatttcattctctccttatgcacgcagtcccgtcgatcgtgtcg

SEQ ID NO: 15878 - DNA, 779 bp, Brachypodium distachyon
  Intron number 2 from transcript Bradi4g16290.1 (locus Brad i4g16290) derived from phytozome v7.0 (chr-ID Bd4; pos 170 59502 to 17060280)
atcatcatccacctccaggcattgctcggcaacaagtgagaatccaatcatggcatatatgtgtctcatcgatcgtgattattgtcctaatatttgaaagcttaatttgatcttccttgggggctcgatcgtattactgcactctgatctgaagaaaataaatattgaccagagtgaaaggatttttgttcaaaattaaattgatcgtggttaagggacttttgttcaaatttatctatccaagaaagagcacagtaccagatacgaagttccaagaacaagctgttgtagagcctgtttgaattggatgagtggtttttcgtgtgaattttattatttagtttaaatttcaaataaataccagagccccaacatctcctgggattgtgagtaagcttcagcatctagttcaactttgaactaaaacaccaaatctcacaaaaatacccttgatccaaacaatccctacagatattgctctgcaaaatacttcactacataaaccccatattttcttacatttgtgaagtgttaacttcattaagccaaccctaactttgtgaaagactcatccgaaccttcatatctgcaacagtcaaatataaaactttccccatgcctttgttgctttgcatacaatttttcgaaaaggaggataagcactggcatctatgcacgcagccatcagtttttcactcatataagttaacaaactggtgtcttctttttcatgtgaatattcaggtgggcagcaatagcctcctacctgccccaaagaa

SEQ ID NO: 15879 - DNA, 833 bp, Brachypodium distachyon
  Intron number 1 from transcript Bradi4g24390.1 (locus Brad i4g24390) derived from phytozome v7.0 (chr-ID Bd4; pos 295 31526 to 29532358 reverse strand)
ttctacaagcctggtatgtgctatgtttccttgcttcatattgcttaattttgcagttagtgcttttttattgtgcatattggcagttcttgatgtgaagatgccctcttatgtgtagtactctgtgttctattggaatacattagaatggccatatggatctttgttggtaacattcatgatcaagttgattaaactggcaataatgttttgcatacattgttctttttgctagagtaagaatgcttgtcatgatgtggcatgtctttgatagtggaatcctcttgaactgataatcactgtgagctattgtagttgttgaccaaagcaatgccacaattcagaacagttcctagtatcagtgaatgctaagggtggtgcttctctcatcgtgtggtttatccgcttgcaaccttcaaggcatgtcaaaactagtcttctttggatacgatgatggtcgcaagatactgattaggaagtaaccatataatcctgcgatgatcctgacatttctagtatctgtaatcttctcatgggtgggaagtgaagtgtgttcatatggcctgccaagtctagttcgaacctgggaagcaagttaagatcatctgcatgttaggaagatattgaaagatgcgtggtagtatccattactaccagtatcatcaatctagttgttattcttctagtctacagtcttgatttgatattttcatctgggactcttatgctactttgtatgttctgactcttacgttttgctaaaagcttctctttgactcacactaagtttgttgaaatgtgtgtttccatttccttaggtgataaattctctg

SEQ ID NO: 15880 - DNA, 705 bp, Brachypodium distachyon
  Intron number 2 from transcript Bradi4g44690.1 (locus Brad i4g44690) derived from phytozome v7.0 (chr-ID Bd4; pos 480 45199 to 48045903 reverse strand)
gcacgagggacaacccccaaaccctcactcaacaggttacttaagtgtttgtgtagtctctaatatatgtgatcttttctattaattgtcctgtgcacacctgacctagctactttgcttataaaatgatcatgtcgctgttagcccatagagcaagtgccaaatctgattgaatttaatttagtgattcgcttctgttaatgagcttttacatgtcagagttcgtgtgctgtatacctgacaatacaactttattgcttttgacttgaaatgtacagtataatcttctcatctgtgttgcttaatcttaaacaatatagattgctcaatttatgtgaaaaaacaagtcaatcataaatcatatggcagggctctgatcacagaacactcctgtgaaaataaccatcatatatgcaggaatggccgagtgggttcaaaaaccatattaataactagagaaattcattgtgaatagtatttgtttgcttatgaaaatccaaggaacattaagttctataatgttcatgacaaataagcggccaacatggacacatataatcatgtattgcaggcagccttattttctattctgactgaagttggtgcttccatattatgtgtttgatgtattccatttcatatatgtcaacttaacccatggtgtatgcaggatccatattttctattgacaggtcctacccgtgc

SEQ ID NO: 15881 - DNA, 838 bp, Brachypodium distachyon
  Intron number 3 from transcript Bradi3g50200.1 (locus Brad i3g50200) derived from phytozome v7.0 (chr-ID Bd3; pos 514 13247 to 51414084)
tgtgcttgtattctcctgctggaatttcccattaggtgacactcacttgaatcttgttttttaccttttacgaaattcccgtagtaccgtagttgttaaattcgaaggggaatatgataaaggcaacattcggattttgctgcattgcgtctgctagttgtcctttttttaaaatctggtaagagcagtgcataaaatatctttgacttctttactattacacaacttatgtgggcatctgaaccagaccaaattcaggagatattctaagttgactccatattcattaatcatttgtagtaacacaaaccatatgtcttgtccctcaacatactactgcctgagcctaaatttgttcccttgactacaataccagaaatagacggccattctagtgtcaaaactgtctagatttggtcccttcgctccaccgaaaatagtttatacgatgatgtggctatagtttctcatccttggcaggttggtgttcaattttttgaaagcgttaaaaaaagaagaagtaaacaaatcaaataataaggaaaacataaacattgtaatgaacataaaaatgggagaagttaagggtgaaatttgtctgatttaaagtttatagacgaaatgtaaactcacacttgttgattttgagaacgagagcgggatttgaatccgttccatcaatagctctacgactagatcacactaatttgtctctgcatcatcaacaatctagtcatgttcacactagctatgtcaatgatcataggctcaaagccaaaacatatgccggtgctgtaatgcaggcttagctctagagccggtctcaggtgcgcttgcg

SEQ ID NO: 15882 - DNA, 993 bp, Brachypodium distachyon
  Intron number 1 from transcript Bradi4g37720.1 (locus Brad i4g37720) derived from phytozome v7.0 (chr-ID Bd4; pos 428 05884 to 42806876)
ccctcggggttttcctccactacggctgctgcagcgtaagcaactaatcgtcctcccctctccatcccctcccgcgatcccatcacgcgcctcctgggttgaaatccacgcggtagctaggtggctcggggattcgtcgaaggtgtatctggttggtttcaaggggggatttgagaggcgaaaatttgggtccaagcgagttggcagcaggcgaccagtgattcggaatattggggcgccgcttctgcctgtggccgggcttgcgattcctgaatctacacttgcgatacctgctgcccggcaatcatgtgcgatgtgatatgtaggtggcatattgccctgcattgggtttggactaacgtttttgctcaatgctggatatgaaaatatccccaaaatattagcctgtgacatacagtgatttattcatgctggttcttactgtaccagtgtccttaattcatggaataatgtaacccctactgccatgccaatcagagcagattgaggtttttgtctcaacttggtgtgttatagatcatttgtatgcagttcagtcatggactgttgcatttttcgcacggaggagctatgtaaggtgcatggcgatcatgtttgaactttgactatcattgtacacttgtacagatatattgctcttgaataggttacgttctgcctctttgtttcgttgccaaagtcagacagtatacaacactgcaacttttgctagaagtctagaaccgcaatttattttcagtcagaagattgaattgtcctgatatttttctcaatttatctgaaagtctggaattgaatggtgatgtacaacagcacaaactttttttgtgttggcacttgacactactgataataccatattttatttttctgctaggatatttttctcaatcttgataacatactgatagtgttgatttccctactcgcaaaaaaaaaagatagtgttgatgtcccttttatcttgaacag

SEQ ID NO: 15883 - DNA, 404 bp, Brachypodium distachyon
  Intron number 1 from transcript Bradi5g15310.2 (locus Brad i5g15310) derived from phytozome v7.0 (chr-ID Bd5; pos 186 53912 to 18654315 reverse strand)
gactcgctctcttccgctcttcgccaggtgcggattcctggtttctgccgtccctatccactcatcaacccatcatagtccggtatcggcatttagtctctggaatttggttctgttgtctccgtggtttactctcgatatgtgaagaagtttgactcccaatgaggacgcttttgttctgataattttattctcgctgtattggtaccaacctttgtatagtgtcctgaaacttatccggatctgcttttgttttcttgcattgaatttgataatttccagcaactgtgggtgagtgagactcctcattactgtttagcttccgtaagatttactggagaaactgtttgcttcatagtactgtcgcagttcacaagtgtgaatgaatgatttcttttctaggg

SEQ ID NO: 15884 - DNA, 798 bp, Brachypodium distachyon
  Intron number 4 from transcript Bradi3g55510.1 (locus Brad i3g55510) derived from phytozome v7.0 (chr-ID Bd3; pos 557 47707 to 55748504)
tgaaggccatccacgtaaggaattgtccattgttttgaattagatgttcactatacacagaaagcaatctctttcctgttgtatagaatattagttatacttactcctagctgatttaccattctattatggattgccatgctatttgttttttcagtttacatcgatatcggcactagtatgcttaatgccagaaatattatacttcatacctttttgtcatgaagctcaaaggacatttctgtccagttatattctacgataatacagtagccaaacccaagggttgattgtggtgtcagcaggacatggaccatcacatcagtcttgtactggaggttattggtgcatgtagatgtactttgacctgcccgtacaaagggaaatgattatatactcctttgctataacacttgagagagtggatatttttctgtcaccggtcttgcaagttgcgagtttgtcatggattttaactcaactgaaactgatcggtaacttcagaagccagaaaaggaaaactctggtggtaacttagttgcaggatggataacttgcagaagagccttttaggcttgtagaaatcatgtgataataatgaaaattaatggtctgctgcttttcttctatcctggtttagcaaaagcaggatggccactggcataaatatgctagttacaattgatgttcattgtgatggtaattttttgtatgattctttaactgagctgtaacattgtctggtgttgtaacaaaaatgcagatcttggccggtgttatcttattctccttgtgctt

SEQ ID NO: 15885 - DNA, 512 bp, Brachypodium distachyon
  Intron number 4 from transcript Bradi3g47330.1 (locus Brad i3g47330) derived from phytozome v7.0 (chr-ID Bd3; pos 489 58591 to 48959102 reverse strand)
ttaacattgggacacaggatctgattgaagctagagtatgtttctatgttattgttgtattaacaaagtttgttaatgcatttcatgcattatttttttgttactatggaataattcaacttgatatgactcttccttgtattcctatctaagtttgaagtttgaactagtaaaacagtatttttttttcgaaaaaaagtaaaacagtatatcatataagattgtatttcaaggaagggtaaatatgttgtaatgttgttttactaggttatgcatatcttgaaatgcaacgtaggcaactataaatttgaatgaatgtttgcggagcatttcatgtcgaggctcttaatttttttagtattaaccaattcttggacaaagaaaactgttatcacttatcagtatggtagccaatctatctcttattattactgaatcatcattttacttgtacgactgatcttttcttttttgcagcctcatctagttcttggtttattatcccaaatcat

SEQ ID NO: 15886 - DNA, 962 bp, Brachypodium distachyon
  Intron number 2 from transcript Bradi4g38590.1 (locus Brad i4g38590) derived from phytozome v7.0 (chr-ID Bd4; pos 434 45252 to 43446213)
ttttgactgtgtccaggtgtcatactctgtgttggtccgattttggttgggatatactctggttgttctgttactctgatggcttttgaaattgtgggttgctttgtttcggaaacttcctaaggtcatgtctgattattgttgtggtatgattattgtctgtaaagatctatcactaggttcaaactgccatttaagtatgatcgcgatgtatcatttttcattaagcttcctaattgcttcagttttatgttgtggttttgtgatggtatattatggagatctttacagacttcaacatttggtctgatttatttttctggtcatttagttttactgtgggggctataattgaatgtttgctgccatgggaatttgtaggtagttttctgtggagtagtgaatatggttacatcctaaaatttgcactagtgatgcttgggagttctgatgatacttttgtatggaatactacctatgctttatattccttttttatgattgaggcctcaagagccctaaatgttcatctgattgttctctgggcgtccatcactattttcttgtagagaaagtatctatgttttggagtatatttttgtgtatatctttaaaactatcatgagtttagttgggtttggtcccttttctatagttgtttaggaaaaccacttgtttttatgagtctattctgcgatttggtgatggttacactttaagatggcttttgatattttttttgaccaatacactttaagatggctcagtatactcttaaatttatgtatatgttaatttctgttttcttattatgtgctcatttggaagatgtggttggtgtgatggtgtgttattggaaaatgtttagaaacttactgccggtagctatttgttttgttgatcatgtctaatgatgtgttattgaaaaatctttagaaacttattgccggtaactatttgtt

SEQ ID NO: 15887 - DNA, 857 bp, Brachypodium distachyon
  Intron number 1 from transcript Bradi4g19960.2 (locus Brad i4g19960) derived from phytozome v7.0 (chr-ID Bd4; pos 229 21817 to 22922673)
actacagtgattggaagtgttagcatcagagatcggtaagtttttagcattgggactctggcatcattcttcattcatccacaataaacagcaaaggtccaacggacttgaaacatgggcttcatcaccaaacaacaccgagaagaattccagttggaggcacggacgcatcggagctagtgtctggcgacggggcggctagctacagcggggacagtggcctagcaggagctggggaatggggatatgaagctaggtgtccgtttgaaccatgtgtgtgtgttgcatgatgtgtaggcggaggtgttttggtcttaaatttgcctcaaatattcagttggtgtaatgacaacaatttaggatcggagagagtagttcaaagagcaagtgggcaacaaaggtggggcaaataatccattacaaggaaagaaacggcaaatcctcaaagtactgggaaaccaaggatgaacagtcaaattccccataaacaaataaataaataatgagaatgccagttgctgtgatgttcgctattccatgcttatgcgcttggtcagctgttatgcaagcatccagaacaatgctatttatccatctatgatgttgtttcaatcattttttgtccctttgttctgttgcatttagtgccttggtatgggcctagaagtggagtgattgctcagttttttcaggatgccatgtgacacctggttttggtagctatgtatgtagtttttctttttacactccaatttctgaagttaccagttaccatgtgaatttagttggatactcatcaagtttgcatttatgtgcatgcagggagctgatatttgtacctgcacaaaaattaggtt

SEQ ID NO: 15888 - DNA, 898 bp, Brachypodium distachyon; identical to SEQ ID NO: 15646
  Intron number 1 from transcript Bradi5g02850.4 (locus Brad i5g02850) derived from phytozome v7.0 (chr-ID Bd5; pos 311 3447 to 3114344 reverse strand)

SEQ ID NO: 15889 - DNA, 1013 bp, Brachypodium distachyon
  Intron number 3 from transcript Bradi5g00820.1 (locus Brad i5g00820) derived from phytozome v7.0 (chr-ID Bd5; pos 784 479 to 785491 reverse strand)
tgagagagccaacaagttctactactacacgccctgtaagctgaattgggtttatttttttacgcctgtattatgcttctctagtaatatcttttttttgtaccctttttgctttataatcctttgaataccccttaccattagagaggttccgctgttgtacctatctttggcacgtgtcatgccaagatcatgtaaaccaaaccatccaaaagtgtgcatgattctgcagaactgcagccactattagttgaatggttgcaatgcaattattcttcttggaatgatgcccttttccctaaacaaattgttaattccttgaagcgacagttgaagaaacatgcctgcgaacacatgcaatggcttttaaacttgttttttttgttaactggtattccgttttacaaaatcataatggcatcatatttagtaacaccagtttgaattatatcctgattgctttctagtaatttgatggcacataatatcctgtcataagcgaatctctcttttattctcctttttcttctgaggggataaatttcttcttttaattttttgcactttggtgcatatttgcttggcctttagtgctgttcgcaccttgacggttagcatctctagagcgtgcagattttcaggtcctgctattttcagaaagtactcagtaggcagcgaggtggtgcctagcacttattactgtctagcaaagcagaaacctaggcagcagggaatgctatgtggcagggttgcgctaagaagtgtcgggatggaattgtcaatcacattctaagacatcataagcacgaaaagattgctaagtactcaaaatgacccaacactcactgaatcctgtttggcacaatccactctcagatacgcgcccatatcctagagctgttctactagttgatcactcgatttaaatttatatggcattagttgttttaatgatatcattctctgtagggtaatctcatcggcatatgaaccttgtttaatatcttgcagac

SEQ ID NO: 15890 - DNA, 902 bp, Brachypodium distachyon
  Intron number 3 from transcript Bradi4g40290.2 (locus Brad i4g40290) derived from phytozome v7.0 (chr-ID Bd4; pos 447 09887 to 44710788 reverse strand)
tcaaccgagaccccaagttcaccaacttcgtcgaggtgagttcttgatctcgattgaggcggaggacttgtatatatgagcgatatcggcgtaaagatatttgcttttgctccgtcaggatgaattagaattcagcaatgctcatagagtagaatgagttcaaccggtgtagaattatagatactgttggatttgagtgaccccctacatcgaattacagttagagaagtctgtgccttggcctggccgttcttcagttagatgcaattatgcaaccatctacaggttgagtcttgagtgtagtagttcttctttactgcaacattgttcaagagacaggagactgagggcgatacggctgggtttagtatatccgatgaaaaggcctgtctatactctataccacgtcttttatctgttggcatgatcttcttggctgctaatttttaattcttccatacccaacttgtaactacggatgccctagaaatgataagtttagaaaggaaacactttgtgaagtttaaaaacaagatcaagtgtactcggctagctgatttataacagtgaaagaaattattaacagaatataccataaatgccttagacatctaacctagaaattctaaacctcttgaaaatagatttatttatttttctactgaattggccttattcagttttttaagcatccgtaatacactgttgcagagcaggaaaagggcaaaatatgaatttcacctttctgtttattttctaagcttcaatagctttttggtgcacaatgggagccttatagaattgcataaaaatacagtatttggtaaatctttagtggtgctgattaatttggaatttttcatgcagttccgtacacataaagttatctacaggagatacgc

SEQ ID NO: 15891 - DNA, 496 bp, Brachypodium distachyon
  Intron number 2 from transcript Bradi4g25420.1 (locus Brad i4g25420) derived from phytozome v7.0 (chr-ID Bd4; pos 307 00358 to 30700853)
aagccttcacccgcctctcccccctcctgcccaaggtattctcagtacacaacttactggagtgttcgtgcgatttggaataaacaagtaattatgcctgaatctgatggccaaatcaaaggatcatgacatgcggccgtatgtctattttgtttgtattggctgcgtaaggacgcagtatatctttctggattgcttggcttattagaagaaaatgggaactcaatagtctagattgcctttgcaaagcaactattactgcatggtgatgcaatgcaagccttgagtaacattatgttttgtaattgagtttcactattgaagtttatgccataccaggttccatctcttctgttgcttaatttatacttgataatcttgggagtcggtgtgtggaagttaaaacttgtttcgtttggtgctgtatatgtcaaaaaaataaactggatatgttcagatttttttgacattcctacggtatttcttttttaggaag

SEQ ID NO: 15892 - DNA, 675 bp, Brachypodium distachyon
  Intron number 3 from transcript Bradi5g11270.1 (locus Brad i5g11270) derived from phytozome v7.0 (chr-ID Bd5; pos 148 27910 to 14828584)
aggcaagaaattgacttacttcagaagggcttaaggtaatcagctgcattgcatctatacaatgaaacaaattcatgtcttctatctgagcaatcagtgtaactatttttaacttaagcatagaaagtgtgtagtcaaatatatgtcgtcctagaaagtgtgtagtcaaatatttgtaactctgattactaatatcctaaaaatgatcacattgcaaggtgaaaataatatcattagatttgtcatgaacaatcttttcatgatataatttttccatatttttctacaaacattatacatatagaaaacaaacattcaacggcatatatgttggagatagcatcaatgtccaaaacgacatgtatttacaaacagcgggagtactagaataacaacttaactaccccgtgcaatactaattcagaagagtccactaaaaatatcaccctctgtgagactgtgacacactgatccattaaagttagtgccttccaatttttagtttctgaaagggtgttaatagaaataactaaaatggaaggaaattaatataggctgatccatattaaactggcaagaatccagtataaaggtttcaaaagattatgaaagtgtggcatagaagtataatatcgagcagaggactgactggtaaaggtaagcacatacaggtac

SEQ ID NO: 15893 - DNA, 271 bp, Brachypodium distachyon
  Intron number 2 from transcript Bradi4g43890.1 (locus Brad i4g43890) derived from phytozome v7.0 (chr-ID Bd4; pos 474 69112 to 47469382)
atcagcaaccctggcgcttacggtatgtgcgcagttaaattgttcttcgagattatgaataattcatctctagcttctccctatggaaatggaatcggataaaaaaaatttatataattttgtttggttgaactcaaattcaaaaattgaaaaaaaacacatatatcgggcacttgtagaatgtgtgaaaatgagagaaatgacgcattttgggctttaaaacaaagggcaatttgttccgttttgcagggttcgaggaggcccgggaggc

SEQ ID NO: 15894 - DNA, 1004 bp, Brachypodium distachyon
  Intron number 1 from transcript Bradi4g31710.1 (locus Brad i4g31710) derived from phytozome v7.0 (chr-ID Bd4; pos 374 44207 to 37445210 reverse strand)
agctcagccttcagacgatcaattcatttctttcggtatgtaatcagtcgttttcatagtccgtacaaacaatagtaagtacgttgccatcttgactgttttggttatcaaaagccgttaatccatcccgtacaacgtaagtgcacacgtatcgacagtcacaaacgcacgcacattcacaggaacgtcttctcgagacttgagtcgcagagtatatatataaataaaatatttgcaaacaaactgctagttgctcgcttcatccaatccatgtacgccctcattttagatttggtactgggccttaaatttctagatacggcccgtagacatggctcaaaatttggtaggacaaattttgaacaaatctaaacaaaccctgcaagccaccgtattgccgtctcggtggactttctagttcttggaacggcacgaaattggaaagaaattaaagttggtcctagctaaaaacaacaatgtctaaactaaggaatcaaattacgggctacggattgttaggcctttagttattgatcaataacagaccaaaatagacaatggagaaaaaagccagatcgtttttctaaaaaaattaccaaaagaccaaaataggcaatggagaattccatcatacatctgacaaatcattgtcttagctacattgtttttttttaatttatactaccgccatgttaacctgtattactagctagcaactaaaatttggaagtttatatttttaacttataattttgaactcttatttttgagtttataaattggaagtattttactgatgcgatgccattagtaaaattgaacggatatctccctcatgcgagaagactgatcttttggattttatcttttcaagatgtgtgcttgagtcgttgattgaattcaatgccatttggtcaaactaccgttgacccgaaaccaaactgaccagatttttttttgcgtgtataggatctcttcgtgtcgggggcagagacgaactcgat

SEQ ID NO: 15895 - DNA, 1039 bp, Brachypodium distachyon
  Intron number 1 from transcript Bradi3g47820.1 (locus Brad i3g47820) derived from phytozome v7.0 (chr-ID Bd3; pos 494 05564 to 49406602)
tctccatcggggctacctgcacttttggtgagtagtacatgtaatctgtttaatttcgtgggagaactctaggttcttggctttttttacctatctgggttttaaggctatgtaagtgactttcgataactgatactccaccccccatgcatgccttttttttatggtcgtttaattgtgtacttaaacttgatgtcttgatttgatcatggttttctttctggaaattccatcacccatgcatgcctgtttgttcgtcagaagcgtaaagttcagaactaaaatcgcactcctttgccctttccgttagctgctttgcagagtagcataattaacaagacagagtcgctgcctattttcctctccttccttggtatcaatgagtgttgttgtttggtagatgttgccatgttggtcgatgcagtcaagaagccaccaccatacagccatacacaattttgcagtttccgtgtgaactgtgaagtgaatacttgcgaaaataccgagtagcactctccgcaaaatgcttctctggattcacatttttctacccccactagtttaaaaaaaaacattgctgtattctctgctttcttccaaacgtgctctgaaagtgggcttaaagtcaaacccctacatgcgacctttccagccagtttctgaatcctattaagaagtctgaactaaatacagtgctcatccagaacaacgcaatgctgatgcagaagagactaaaatactaaccatacacacctgacatgtacttccttaattaatatagccaccggtgcagcctatcacatcacatgcttacctccgcattgtatgcatctgccggtggccgacgacacgcatgatcgagaggcagaaagatttgcacacatgttagagccttcctactacatctcgtttcctagtagtactgtatcaattaaacggccggtgtgtacaataagatgcagtttggttttttaccaatgtgatcttatgcagcagcaaactgaaacttgtttctgaaatcgcaggggaactgaaggtg

SEQ ID NO: 15896 - DNA, 457 bp, Brachypodium distachyon
  Intron number 1 from transcript Bradi5g14110.1 (locus Brad i5g14110) derived from phytozome v7.0 (chr-ID Bd5; pos 175 59074 to 17559530)
tggactttactgttcctgacaattggaaggtaatccagttaatcccctcattcatccgaaagctactaattctgtgttgtttgtacgattggaattgtgctgttctttgtggctgtttttagatacagggacaaacattgaacacagctgcctagcctttgatgcttatgtacatatgtatataatcacctgtgctttagagaataaatcgcattcaaataaataccaccactggttcaactgtattgtatatgataagtatctcttccgtgaaaatatttcaatatcaccaaacagtaagctggcacactgtgataaagagtacagtttctttcatttcttttcttgtctttgactctgtcatcagaattagtaattttgcttattcaataatatgacatacagtactaaattttagatttatttgggattgttctttgcctatttgtgcagctgc

SEQ ID NO: 15897 - DNA, 621 bp, Brachypodium distachyon
  Intron number 1 from transcript Bradi3g51310.1 (locus Brad i3g51310) derived from phytozome v7.0 (chr-ID Bd3; pos 523 78449 to 52379069)
cggtgagccgctccttgcatctgatacattctcgcagtttgttttaattttgttcatgttttctttatttatttctgtgtatgaattctcggtgtttatagctctgcagttaactccggggtcttgtacttgtactttgaaaatttagcaacatttacgactctaaattagttttattaaatccattattggtatatcttcatattctactttatttgataatatagatattagtatatatttctataaacttggtcaaactttaagaaatttgacttaggaaaaaagctagaacatcttataaaactaaaaaggaacagagggagtagtattgatgtgaaattactaacttagaatgggtaatacattctaaggttatattcctgatgagtaaccgctgattcacttgtatatatagagtactccctccgttcctaaatacttgtcgctgttttagtgcaaacttcttttaggattatctgacacaattggctgactgtacaacatgcaagtgtcaaaggtgctataattggtgcttatatagttatatatatttataatccattcaattttgttgaattttcagtgtgacaggagtatccaaacagtgtgatcattgct

SEQ ID NO: 15898 - DNA, 1022 bp, Brachypodium distachyon
  Intron number 1 from transcript Bradi4g30270.1 (locus Brad i4g30270) derived from phytozome v7.0 (chr-ID Bd4; pos 359 73669 to 35974690 reverse strand)
cttgtccgtaatcctgctggacattgattttcaaggtacgagcttcctcttgtcatcgactgactaattaaccccgaactaacttcccgaattttgagtgtgccggtgcgtgccccgcgcactatctagatccgcccctacctattgtcacagagaaagcttgcaagcaatgcttggtgcttgatgcttcagttcttgcctgggcaattcgctgttccattttagagatctgttgtctttactattttggcaaagtttagctgctaggagacacgaatgtggtagatgaaagcaacaacctttcttgtattgtactattattgtcactatttatgatgcttcaggtgaaactgcagttgcatcatatttagtttttttcaaggaaaaaaaggtatatttagccccctcaagctcagagacattttagtcatttttatgttaacaacttaggccttagctctatttttggaccagttagtccctggagtaacaaaacctttaaacctttatccccctccaggtaggccggttttggtgacgtggcacatattctggttttagccacctaagcagccgatgtggtgacttttaacatataaatcaaagaaatagttatttttctcccactttcatgtggaccccgttgtcagactacttttggacaattttttttagaaactacttttggacttttgaagtaataaaaccgggccaaaccagactaaacacgttcaagaggtcaattttgcatggacgatgccatccatgtggtaaaaccacttcagatatgtgcccttggctaaaccacccttcaaaaccagtttaggttgtattttatccagcttttttacttttgggatcctgaaaatatgttagcaagccgcctttcaaaaccagttcagggggtatattctgccatgaggtggttaaatatatttttcctttttttatatataatgatattttacatattgttatattcagtaaagaactcttcagtgtgtgattcctcagggtaaacc

SEQ ID NO: 15899 - DNA, 626 bp, Brachypodium distachyon
  Intron number 1 from transcript Bradi4g22640.1 (locus Brad i4g22640) derived from phytozome v7.0 (chr-ID Bd4; pos 270 39707 to 27040332 reverse strand)
gtcatcgtccacctccagtccctcctcggcaacaggtatatataattatatattcgccagcttcttcgtcttgccttcatcatttgtttcaaatgatgcatgtatggtacaggttcgtaccccacaatgaatataaaccgtctattttctttgacctaagggtctagattaatcagtactttttcatgctccagcagaggtacatgagagtaccactccaaaaacaaattagaagtaaaaaacatggataaaatcataatctaacatatgtaaagatgtcttaatactgttagtttttagcacactaatagctagttgtatttacatcgtacaattgaattacagaaaagataaaaaccattaaagaagtgagttgactaaaataacctagtcgatactttttttctagtcgataagaagtactaggtagtgtaatatgcatacactcagctaagacagacaatgactgcgatcgtggtacgttgacggcgataaatttgatctaacttatgtttggacatggcaggtgggccgctattgcgtcatacctgccgaataggactgacaacgacatcaagaactattggaacacgcacctcaggaagaggctcaagaagctggaggcc

SEQ ID NO: 15900 - DNA, 796 bp, Brachypodium distachyon
  Intron number 1 from transcript Bradi3g58870.1 (locus Brad i3g58870) derived from phytozome v7.0 (chr-ID Bd3; pos 582 03994 to 58204789)
accccctggactccgtctggctcgactccaccaaggtcgagatccgtgccttgtatcacccctctcgtaatatcagattactatgctagttctagctatttctgttgatgttattgtactcactcatgttttctcccagttgatcgatagactagagtagacgagatatgtgatgatttagtacttgcttattccgtgtgatttagaattggaatagtttctgttggcctaaagttgctagacttaaacgtcctttccagaacttggtgttcaggtttgttcgtgaagtagggtggccgaattaaaccgctccattgatttctgtgtgatctcaatggtgtttaggatttatctgcggttaatttttgaagaaaattacatttacctattaatctgtgtttaattttgtaatacctcaagtatgttctgcggttctgccaattcacctactgattgggttttcaacctcacttcctgaaactgaaaattctaaaccttagttgttgtgctcggtttacaaataaatatgtactgctctaattccaacataaacatacatatttgactaatctcatcatcacaagactaggctaggttattacaacaatgtctaaccatgttcaaaagaacaagtggtgtgctgtgtagaggactagaggctattttgttccgcatagatgatttggtacagtacttgacatgatgctccagattgatattttataatcaatttaatctctataatttgatatgttcaatatgtgcagcttttctctgctgtaaattgctggcttaa

SEQ ID NO: 15901 - DNA, 820 bp, Brachypodium distachyon
  Intron number 1 from transcript Bradi4g41590.2 (locus Brad i4g41590) derived from phytozome v7.0 (chr-ID Bd4; pos 456 36933 to 45637752 reverse strand)
gcagattgcactgcaggtaatacgtttgttttttgcaactaatagatagactctgtgtgcattacgttctcttaatgtggaattatgtgaggtccatactgttgcataagtaaattggggtcactagccatttgtatctagaacacatttaaatgcagaaagcatatgtcggtggtcctacatagtacatatcatagtgaggccaaaaagaattctccagacatgttttcctctttagcaactccgtgggtcccaagtgctgttcactgctgaacatgttggtaagcaatacattgtgaacaattgatattcaggtagtacaaggatgccctgacactgtttatctttccatgtttagcccttttaaatgatatactccctccgatccataataagtgtctcagattgtacaaatttgtaacctctcccaaaacatttgagtaggggtagtgtggaaagaatgcaatagccacatcttgatttcctcaatggacaggtattctgaaatggagattccgaggttgtggaatatagtgaaacaaatggagtaataaacaaggagcacatagtcatatacaaattcaacttttttttttgagaaatcaataatactcctgtgcgcaacttgtaatttcttccatttgaccacctgtactaatatgtttgaattttcatgttgaaatttgttacttcactttttatactactccgtaatttgtaattagttcctatcagaacacattcattctggtagtattcatatcttatgccttggtaattagttctcaagttctgagtttattctttttatttgcaaggc

SEQ ID NO: 15902 - DNA, 794 bp, Brachypodium distachyon
  Intron number 1 from transcript Bradi4g33410.1 (locus Brad i4g33410) derived from phytozome v7.0 (chr-ID Bd4; pos 391 03661 to 39104454 reverse strand)
agaggtataacaacaacaaagcagagttgacacaacttctgtccctttcggtattctgtcaactgttcttaaaccgctgatccaaacagcaccaaatttggcaaacaagaagatccacgagttctcaacaaaccctccaaatttcagctcaatcggacaccgtttgcctacccaaactgtttgtctatcaaaactactctgttctgaaactgcagtcaccaagatgacaaaactactctagcttcttcttcctctcttctcacaatttgtgttttttgtgttgctctctcttattctcacaatggcagcaacaatctcttgacttgagacttcttagtggctagggttttcttcttctccttatatacaacaagaagaacaatttcagccgttagatggggctgagatcaacggttcacgtgagctggacttcttggtattcattgggctgaagctcaccaccttcatgtggagggattagcccaacataatcttacacgaatgtcaatgattaaatcaaaaggttgttatcaccgactgaaaaatagttatttctcagtcgtataagaaatagcaaaacaaaaccaacgtcgattagttacactttatccggtacaagcctggccatgccaatgaccgcaataacataatccggcattccgcagtcgaaatcgaaatggactgtagcacttgcttttgcatggaaatgcatcataccaaaacacatgctcatatattttcgttccttgtgacctgcagcggcatcaaactcctcctcggcgtcggccttcagc

SEQ ID NO: 15903 - DNA, 845 bp, Brachypodium distachyon
  Intron number 1 from transcript Bradi4g31200.1 (locus Brad i4g31200) derived from phytozome v7.0 (chr-ID Bd4; pos 369 90368 to 36991212 reverse strand)
cctccttcgacgggacgccgatcttccgctagaaggtgagcagcccgcttttgccggagttttgttttgtggttgcttgctgttttttgtcagagaatatggcaataaaataaaagaattgaaccctctgcattcagttacaccggtaaggttcgcgtgcgattgctacggatcaaaattgagatattagaagagataaaagtcattagtaattttttatcaatatctggttgcgtctagaacttgatcatcaaaatgaatcagaaaggaagcatatgcagagcagaaatattagttagcaaaaattatgaaaaggagcagaaacttttgactggaagtgcacattagattgagcactgctgcaacttgatctttaccagttgcttttttataagaaacagatatatcttagtcgcaagatgcaacttgaatgcttcttttgatatgactatgatatgactaattgactatgactgttgaatttataaattttatttttctgaattttctcaattccagatttgtgatgtgtgctatacctttttagcttaccttgtgatgttgcgattgagtgtttaaaaagtgactaatctccttaatatagatccacagttcctctgagttttgttttgttttcttaacctgtatgtactaatttcaggagggccgtttggcacaaactcttgcagtatgctctgtcattctaaaaaaaaaatagcctctgcacagatgtcatatcatttttctcaaattctcttattgcttctgtatatgtatggtgttgattacttgtttttacaccgtatgcaggtctcaaaaagttcaatttgtctgaattggaggcc

SEQ ID NO: 15904 - DNA, 638 bp, Brachypodium distachyon
  Intron number 1 from transcript Bradi5g14640.1 (locus Brad i5g14640) derived from phytozome v7.0 (chr-ID Bd5; pos 180 70303 to 18070940)
gatttgggggaaccaaacaatttttcccaggaactgtaagtttgttacgctaatccttgttactcttgttctaccgtaccctgtagatttgtgatctaggttatgttggtatgtacgatagttgtgctgttttcaggatttaggtcgggtagtttctgctttcagtacggaaattattcttttaggtagttcgcatctggatctgggatatgcggtgtttggcctatgccttgaaattttgtttactgttactgcaaaattattcaccgtaattcaattgttagatggatttgaaatcaaaatcgagcgaggaagtcgtccctagttgctgttgtataaattgtgcagtatgaaaatttatttaccccattttattttacacgattctcttagttaaaattccccattgaatattaaattgtgtaattatgaaattttgatttacccatttatgtctgcggttgattttagttgacgcgattctcttggttaatttcccatatgattctggatctggttaattctgtttgttgccactaggagtcccaaataatgtccgtcattgtttcttcattcttgaccgtgaaagtttgctagaatcctttgtctaactcctatttctcttttgcagtaagtga

SEQ ID NO: 15905 - DNA, 819 bp, Brachypodium distachyon
  Intron number 2 from transcript Bradi3g56580.1 (locus Brad i3g56580) derived from phytozome v7.0 (chr-ID Bd3; pos 564 20240 to 56421058 reverse strand)
aggtaaacaatagtgtagtactactccaacatagcaatttcacaatgtcagccttgtgtagaccacgattttatttatttctatgtgcagtcatacagaaaaataatggcaaacggcgtcattgtcatgtaaccaaggttgagcggtgtttagtctacgtagtaacaaatgatgcagtggatgggtgagtgcttaagcaaagcaagatccaaatcaaagtcatttccatatgtatggaccttgcgtgcgtgcatgaaatttattctccacttagaatatgtcaggggtttgttaccattgctcttgttaccattcaatatatatacttaattgggaatttaggactcatttgtggttgctgatatgtgctgtcatgaacttgttttgtaatccggtattgaaatgtatgcacgaacatgaaaaaaaatgtagctagacaaacaataaaaatcaaaaggaagtgtctatttttcagtcgtctaacagccatccaatgaagatttttgttatccatcagatctacattttcttatcagcgactaagaaatagttatttctcggtcacctaaaaaatagcaaaaccaaaatcaaaaacataattgcaggttattatattcatcgtaatacggaagtctggaactctagatggctgaacgtaacatttgaaaaagcgtggcctgaaaaatcacgattttgcccaaataactttttgaattttgaaagtggcttgtgcacttgccaaaacaattaattactcccctgtaacaatctttccatttcacagggcgattcaaaaagccaactgctaccacaggaaag

SEQ ID NO: 15906 - DNA, 323 bp, Brachypodium distachyon
  Intron number 1 from transcript Bradi3g50040.1 (locus Brad i3g50040) derived from phytozome v7.0 (chr-ID Bd3; pos 512 40356 to 51240678 reverse strand)
tctcggaatcgaccccagcgagctccggtttacctgtacgatttcttccctgcgtttctttggtgaatctgctggattttatcttatcattccgttgcttcgatggatttccggttgttttttttcgcgcttgagctgtttccctggaaaagtttctttgttttttgcggctgattttgatgtttctcttgcctttcgttatcttcttttgatatttcttttggcgtatctttttaatctatgatcatacttgtttgctaatgttcccccttatgttcttattgttgattcaatcatgcagtcgagttaaagaagcagatatc

SEQ ID NO: 15907 - DNA, 931 bp, Brachypodium distachyon
  Intron number 1 from transcript Bradi4g02760.7 (locus Brad i4g02760) derived from phytozome v7.0 (chr-ID Bd4; pos 204 7525 to 2048455 reverse strand)
gaggactttgatcttgtgcacgagctttgattggtgtgagttctcctcgatttccttggtgttaggtcgattcaaactgctttcttttcctttcagaagcttaatttgctttgcttccgtttgggcatgtagaatttgatattggactattggattccgatcaaattgatcaagcgaaaaagacagtccagctgattgccagaccttgtgatatggggaaagtttcccttgtgtaatcacaatacaccttttgccaccgctgatatggaaatatgggatcattggttgataggaatcttgcctaataatttgtttgtcacttccagtgatgactgtatggtcccaatgccctattcttagacaagtgctactctctcttgtatgaatgtatgacccttggttacactcagagccctcttgagatgagcaagaatatttttttgcgtcattaaataatatctcatcctgttaggtgccttgtgataaaaaatattaggtcatcacctagagtggttggagtatgatgtgggttggcctccactagttcactgattgccaggcagccgaaatagctgcttaagtatagcagagttttgctgaatccagagttctcagaggtttccaggtatctgaaatgtggctgatatagagttgctttgctgcattggctttgtttttcttcttgtttcttcactgaaagtcagagtgaaactgatcactggatatgtgattggacatgtggtgtgttttgttccttgatcacctctgttccttgtgattcatatgatggtgcagaaatgccaaccttgtcctgaactgaagatctatcactgcaatacaacactgtgcatgtctctagaagttctgtttctgaactcattctgttcccattgcaggctcaaagaaatttgatctcaaataagctcaaggc

SEQ ID NO: 15908 - DNA, 797 bp, Brachypodium distachyon
  Intron number 3 from transcript Bradi4g10980.1 (locus Brad i4g10980) derived from phytozome v7.0 (chr-ID Bd4; pos 107 08540 to 10709336)
agattacaaggtttctgctcaagcggctaataacagtatgttcttagcccttataggctcagcactctatttaccatgccaccagtggtgatcaccagtcctgttgtgtttagagtgtctattgtggcaggttgggttgatgctactgtctttccacttttctcctcagaattggtagtgtcaaaaaaaaaaaaaacggatccttgttttctatattttgcagtgaatcactagttagaactttttttgagctgcatccaacttgcactgccagaacgttgcattgtggttagtgttggaggtgaaataccgtcttatcagtccggcttacataacatcattcctcattcatagagtggtagtttacctaggctatcttgttttttgttactactatctatagttggtttatgtccttgttagttggatttatttcctttagatatattccacataattggataagtactctgctagagatggcatccctagaacagggagaatatatccatggttcactaatgaaaagtctcttctgttcaaagtcttctttggagtctatctttgcgccctccgaataccctgatctccttcaaaccacaccatccagcctctttctctattcatttgtacaaaagtacttaggaaaaacctgcactgacagattagacggtcagagtggctttgagttttgacagccccattcccattcgtatcatttttctaaataaaataaattcccattcgtataacctatttagtcttattctgataattaaactttacaatttgtgtag

SEQ ID NO: 15909 - DNA, 924 bp, Brachypodium distachyon
  Intron number 1 from transcript Bradi4g01100.1 (locus Brad i4g01100) derived from phytozome v7.0 (chr-ID Bd4; pos 686 256 to 687179 reverse strand)
ggtctgcgccgagtacgccaagaccttctacctcggtgagccctgcacacatcccctctctcgctctatctctcatttttgccatcagtgaccactgactggctgcctactggataatgaagtataacccacgggatcatctcgtttgtacaatagattgtttattcttcttgggcaaagcaaatacgcggattaaatcacacggcagggtctgctgggaatggaaattaatacagaggtggcatcgaatttctggtattgtcagttgtcactacctaaaaactcgtttaggttgtggcacaaagtttcagggttgcaagggtagcaactgagggtaaaatccatgaatagacagtgtgtaacatgatcgctcctgattttgcatgctaatacagaaagtactcgtgcttacacacgtggtcaaaatattcgtgacttttcatgagagatgattgttcagcaaactggtgtgcaagcgacgagtcaaaccagcctgatggttatctaagtccaaaactctaaacagcaactgtacatgtgcataaaaaataagtacttgccgactttgataggtaagcacgtgggtgcttggtatgtcagggggatgatcattaaaggcagtgttcttttctttgacccaagatttattgattggggtcaggatggctggactggttggtccattcagatgatgtggagatgcatgagcttgatcacaacaatctatgggcttttattcttttcctaattttcttttgtgtttctgtttccacttggatctccctctgaccttgtgagaaatcattctctatgatataaacctatgagcttacaactagcacttgcttgattgctaatgataagtttttttatagtttctcaaagattttgtttttgtggaattacctttcaggtacacaactc

SEQ ID NO: 15910 - DNA, 607 bp, Brachypodium distachyon
  Intron number 2 from transcript Bradi3g58170.1 (locus Brad i3g58170) derived from phytozome v7.0 (chr-ID Bd3; pos 577 18176 to 57718782 reverse strand)
ataggctcaaagaggtaatgaatcaatcgtagctagcctgaccgtagtaatgcatgtaattttggcatgccatggaatcaaaacgattgaaaatgacaaaactccaaccaggcactgcatgatgtggtttatttactagcaaaagcattccacgctgttgtcttctattggatagtgcttttaattatttgacctccagactcacatgcctgaaatttggatgattaagaaccaaactattcaatactccctccgttccataaagattggcacggctttgaactagctctagtacaaagccgtgccaatctttatgaaacggagggagtaactagctagattgtaaactctgttgcatacatttgagctttattcaattactcttaactaactagcttgagaaactttcttagtgaccttggaacaaaatacatacatgtgagtttttctgttatctggcactgttgaccatgattgcaaacccaaaactaagttctgttggcaaacttgaacttctcttaccatttgttgtgatctttattttaatctaacacttcattgcatgcttgcagatccgtaactaccacaggcgaaatcagtctgcccg

SEQ ID NO: 15911 - DNA, 534 bp, Brachypodium distachyon
  Intron number 1 from transcript Bradi4g43440.1 (locus Brad i4g43440) derived from phytozome v7.0 (chr-ID Bd4; pos 471 45506 to 47146039)
cagccggtgtgtgtgtgcattttttttctttaatcaccatttgttggggaattatcatataaaaatttgcattgcaatttacgaatttcaaaattgcatgtgaaattttaggtgcaattttaaaattgcaagtgaaatctggtagttattccttttgttaccttttttcttcctcgctttaaaaaaaattacggtacaattgtaaaaattaaagttgcaatcccatgcgacgtaaaaattgcagttgcaatcccagttgaaaatagaaggtataacgaaacaaaaaccaagcaaaagaaaaaaaatgaaaaaaaaacagattaaaggactgggactggcagcgctggaccacgagccagccaagcaacaatgcagagggctcgttgtttctttatttaacgtgggacgtcttcgcacgaatcttgacgcagatctaacggaccacaccgttgactgagaaaatcaaattctcaggcgactgctccctagcaaatccgtaattgtttctctgcttcgatttccaggccgacgccg

SEQ ID NO: 15912 - DNA, 672 bp, Brachypodium distachyon
  Intron number 1 from transcript Bradi4g01930.1 (locus Brad i4g01930) derived from phytozome v7.0 (chr-ID Bd4; pos 126 6137 to 1266808)
gcggaagtacccgtgagttgttcatcagactaccatcccttttatttctttatttcttcccttgtttatacgagcagtactacttagtttgcttccttccccacttccgagaagaatactcctcgattcttcagtacagcggagcctgcgctgccctggacctggagtacggcctggttggtcctccctggatttagtgcaagttcctgttctttaatattttgattaccgactagtagtagtaccagtgttgtatattcttgattttaattacggggaattgtcggagtactgagtagttataagataattaactgcttgtaagttggaattgtaaactcatgtttcaaagatggaaaatagtcaagtactcctactaatagtactactaatctcccgaaagtttgactaaaaaacctttcctgcgttcaagttcgctatactgtactgctagcctccttccgtcccaattcgccttcgccattaattttgatttcctccaatctggaagggtttgaatggctgcattttgacggacatctgttccgtccatttagttttgcaaaaaggagaagaagaaacgctctttgaattttctttgtttactaatcgtagtccttgctagagtactaaacccccatgtttctctgtaaccttttctgcagttggagg

SEQ ID NO: 15913 - DNA, 499 bp, Brachypodium distachyon
  Intron number 2 from transcript Bradi4g36700.1 (locus Brad i4g36700) derived from phytozome v7.0 (chr-ID Bd4; pos 418 55635 to 41856133 reverse strand)
aagccttcacccgcctctcccccctcctgcccaaggtattctcagtacacaacttaccggggtgttcgtgcgatctggaataaacaagtaattatgcctgaatctgatggccaaatcaaaggattatgacatgcggccttatgtctattttgtttgtattggctgtgtaaggacgcagtatatctttctggattgcttggctttttagaagaaaatgggaactcaatagtctagattgcctttgcaaagcaactattactgcatggtgatgcaatgcaagccttgagtaacattatgttttgtaattgagtttcactatatattgaagtttatgccataccaggttccatctcttctgttgcttaatttatacttgataatcttgggagtcggtgtgtggaagttagaacttgtttcgttggtgctgtatatgtcaaaaaaataaactggatattttcagatttttttgacattcctgcggtatttcttttttaggaag

SEQ ID NO: 15914 - DNA, 1031 bp, Brachypodium distachyon
  Intron number 1 from transcript Bradi5g15910.1 (locus Brad i5g15910) derived from phytozome v7.0 (chr-ID Bd5; pos 193 52187 to 19353217)
tcagcaacggcaaatccagtaacactaaatccgcggtacgtacattaccttaaattaatccattcattggccaccaaggtactacgtattagccagctcgaatcaaatgctgaactgaaaccgacattgtttgtttggggagagcaatagcaaatcacaatctaaaataattcttcactcgttcattcatgtctttggattgaaagaaatttgctctgctctattctgtatgacatcgatttagcatatgttggaatttatgcttctatatgtaactaagctttgagtttctctgtatagttaattaatcattgccaatctccttaaggagtcttatttgattataagagtggtatctgtagtctttactattataaagatctcaattagtgtcagtggtctgtcaccttggtttaaacaaaccatggacattagaacttatgtggattatttgctccgagacaataaatgatagtatcactttttaaaaacatgtagtgatttttaatagtctgtagaaacatacgaatattgtgctactactagatactagtagccattcgctgtttagcatatggcttcaattttaatgtctgtatatacaaaatacaattgaaacaacacagttcctgacatatacacttacagcgatgacaacataatgcaagtgaaactgaaaaaagaagagtgttttggtcttttcgattgaaatgaatatgatcaattagtgcccagtcttctgttcatatgctgctgtggaatcaaggttgttaccagaacatgtatattcaactaaccaacacctaaaagtagaaaaacaagcgcctttgaaaagccaccacagtgctaaattcccaaactgtcctagtattctttttcctatagtacaagacaatgttagtacattatatctttgcggaaggaaataatattagaaaggctgcaaatctaattgagtagaaaacatgtttgctgcttcttttttgtcattaataatgtcaagtttgtaattgctatagcttgacaagcgt

SEQ ID NO: 15915 - DNA, 809 bp, Brachypodium distachyon
  Intron number 2 from transcript Bradi3g56230.1 (locus Brad i3g56230) derived from phytozome v7.0 (chr-ID Bd3; pos 562 06215 to 56207023 reverse strand)
acgtgagggcgtcgctgaacgtagtgtcgtgaaaggtattggcagtgagttcggtgttgtttccaactattttgtttgggttttgttgaagactcagttgctaagctaagcttaagccaagtttgtgtgcttaaatatgtcacattcatcgccctagctaagggtaaaagcaatgaagtaatgatacagcttcaagtaggatcagtaaattaaaaaacagagtgaatatcgatttcttggccaggttgtttctcaccattgttgcttaaattcaacatgaaaataaaagtatctccagttaggattttacgacgatgtgaattctttaatttaggagagatttcatcctagcatgttcattttcatgtattgcctgattaattccttttctgccacatctattatcatcagtcagcaaagttatcagaatcttgatccttaatcaaatgagaggctccaccgtagagaatcacaaatagtaggattgatatagaatcagtcagtcaatccagggtggtagaaatgagagtcgattacggaatcaatcaagattctgacaaccttggttgcgtgcatgaagcaagcatcatgagaacaatcgcgtgccctgagcgcttattgatttcttttgttctggctctttaagttgtttattaggtcgtgtatagttgtcaagtattgttacagcatggatatgatgaaatggagcttggataatgctttacctcttgtcttcgtttcgtagataaaaaacctcttgtcttcgtttcgtagataaaaaattggttggaagcaagaaaattgtactg

SEQ ID NO: 15916 - DNA, 708 bp, Brachypodium distachyon
  Intron number 1 from transcript Bradi4g41900.1 (locus Brad i4g41900) derived from phytozome v7.0 (chr-ID Bd4; pos 458 60529 to 45861236 reverse strand)
ccacggtccaaaggtacaattggatttattacttttcatttgaaaaagagcacgttttgtttcttccttactactaaaaggcagtactaaagaattaccatctaaagcatgcatctaacaatctaggtactgggctgctgctagacatctaggctctttttatgggctgctacgcccgccagtgggctggtacggagggatgtaggctttttttttatcttcaattaatttcggttcttcaaagtttagaaccgaattagataacgagattatcttctctcataaaaaagataccgagattatcggttccggttcattcaggttctctgagttccggttctgaccttaacttcttaaatactctctctctccaatgcataataagtgtctcaggtttactacaaagttgtactaaaactgagacagttattatggatcggtcgggggagtatgttttatgagttctgatgattgcgtggctcctatttgaaatatcaccttgagattcaagcgtataatctaatgggaaaatgggaaattggtcatgcaaagcagcattgtgcggcagtgaccgtacctcttcttgtcaatttgaggttttaccatatatatgcatttcgacatctttgtttgacactctttttgacccgatttgtttgacactctaaccggcatagcattgtttcttatgaacataagaagatcagg

SEQ ID NO: 15917 - DNA, 848 bp, Brachypodium distachyon
  Intron number 2 from transcript Bradi3g52570.1 (locus Brad i3g52570) derived from phytozome v7.0 (chr-ID Bd3; pos 534 67617 to 53468464)
ccctcctgacacggagacgccaggttttgctgagggtatgtgtggacagtagatgttcaacggatttctgaaatttagtttcttgtgtactgatttctttcctgtttgaaattaagatgcaatgaaccgaatggctaatagatgctaaaaataattagctcatttcatctctgaaagattgatagaacgagaagataaattattgggcaattgaaacgctttcttggagcctaaaaatttgaaaatgtcatgcacctcacagttttcttcccggatcaagtgtttaatacagctgaaaccatttgattagttacatttactggtatattagtattgtttaagtggtgaactggtcattatgtagatagaacttaacatgcatttaagtcgcgttatttgtttcattcggtacgtgttccgaagtacgaatatcagagctatgtataattcttgcaaactgcagttgtactgatgaaagaaaaaaaatagctctgatattcgttaccacctgtaataccatgtacatttcatagttcttaactgccttcagttctgaaggcgcaatttttttttttgagagaaggtgctctttttcccaataaaaatactgtctaatatgattgttatattccaatctggaccaatgtaccagctatgcacattagtgtattcagtacaaaatcattctcactcctgatatctctcaaaaagaaaatgaaaaaaagacagtgccaattcatagattgaagccaaaggctgtttatttctcactttcggtatgtcacattagtgttattctcttactgcttgcagagctaaaaaagaggccagagattaccactatcata

SEQ ID NO: 15918 - DNA, 616 bp, Brachypodium distachyon
  Intron number 1 from transcript Bradi4g45290.2 (locus Brad i4g45290) derived from phytozome v7.0 (chr-ID Bd4; pos 484 18376 to 48418991)
cagctctggcagagtacacggctcaaggatctaaggtacgtgtgtgaaccttttattcccgcatttttttctctctcgttgaagttgctcatacacgcgcaaggggaaaaggtaagttattagcacttttaaattgcactgttaaattaacatgttctgtcgtggctgctcaatcttaaccaagcttcaaaattcagctaaaaattgtataatttcgtagagaaaaaaaaaagcatgcatctgattgatctagcaaagttctgtactttgatcttccattccctcttcacaagggttttctaaatctctatggtttcatatgcacatatacctgtaatttccagcacgcatctgttgatttgtttgtgcacataagttattgcaaccccaacatctttctttaactcggttgatatcttgctatttgttttaccattttcagcacaaaataattcctcgttactagctcaggatcaacttctccaaaatataacctagccttattccatcctatcattgtttccccttaaaagaaaagacccaaaaccatttgtttttatgattgattaggttgaacggttgatgaattgccctctacttgttttgtcagtggaag

SEQ ID NO: 15919 - DNA, 911 bp, Brachypodium distachyon
  Intron number 1 from transcript Bradi4g03230.1 (locus Brad i4g03230) derived from phytozome v7.0 (chr-ID Bd4; pos 256 7309 to 2568219 reverse strand)
gagatcttcaaggaccaaaaagtccaaggtaaccagaatcaatcaaatctccccccaaccatcttgtctcatacaaattcttccttaaaaattccttttgttcggttcctccgattctctccaatcttatgtgcaaagatttgcatctttgttgcgcatagcataataatcatccgatccgatcccccggtgcaaaaaatcgttccttcgcttcaattattgggcaccaaaaaattcagaggggaatctttgcgtgtcgtcatgtgattaggtaaagctgaggctgacgcttacgttttgctactcaccacttgttttggtcaaaattggcgctttgaccaaactcagtgctgtagtgggattggattggattgctttcgggagcatacaaccactcctggctgcctaactgaacagatcctgcgaaatttttgtccaaatctttcgtgatggtaacattattgtcttaaatcaaaatatgattaccactttatagactggttaattatgagagtatacagatctatttaattagtggagacccctgaaaacagcggagtgctagctcagatccaagtgacacactcttcttattgttccaatagtggtgtaatacagatctgatattatcgtttgtaagtacaaaggcgatcggaattcgtaacagagatgaagctaatccttttaggcttgttctagatgttaactgatctgaaattcagcatatatgttctgtcaacattttgctaatttgtttgtttctcatcatgatctgttctctagattgtgcgtgttcagtgtcgattttgtgttcttctttcatgattgtctcaagttttctatctgtggtgctgatatatgtgtttctttgtgtagcctacttcaacaatagggtcttctttgagacggtc

SEQ ID NO: 15920 - DNA, 489 bp, Brachypodium distachyon
  Intron number 1 from transcript Bradi4g22020.1 (locus Brad i4g22020) derived from phytozome v7.0 (chr-ID Bd4; pos 259 87742 to 25988230)
gctcggttgccaagaccgccgacttcaaagacaaggtctatgtcactccatcttgtaagagctgcacggtagcggtaattgcggacaatgttcatcagctgctcggtgatatgcttgcatcatgagttaatgttatgaatgtgtcaaacatctgaatttcttttgatgcttgtttgactggctgcctttttatctttgcttgaataaaattgttaatatgcataagagatcttgcatcggaggcctttcataccactattgcattgaaaagtatatagtattgctgggtagtattgctgtaagatccttttaaagagttcctctctatttattccgaatttgagcagtaagacactactaatcttttcctgtaagaaatgaaactcagtatatagtatttctttaggtgaatgctgtaattgagatgcgttttggttcatacttttggtattcttcacatactattttcttgttatttgcagccagaag

SEQ ID NO: 15921 - DNA, 305 bp, Brachypodium distachyon
  Intron number 2 from transcript Bradi3g60570.1 (locus Brad i3g60570) derived from phytozome v7.0 (chr-ID Bd3; pos 594 46386 to 59446690 reverse strand)
tccctgctctagctacactcatttacgctgccttcgtacgcttcaccagaatgcgtaattatcatcacttatcccatttcttgctttttaccttcctcgcacatctccttcgtacacttcactcttattccacatacccaatatatatgaatgatgttgctagatcaaaataatttttcctccctggtcactcaatctggagtgggaaacctgtttattaaagtttgagtagcaaaatcttcttgaaccgccagtaattacatgaatttctttacatagagaatgtgttgttgccaaataggagt

SEQ ID NO: 15922 - DNA, 1054 bp, Brachypodium distachyon
  Intron number 1 from transcript Bradi4g32250.1 (locus Brad i4g32250) derived from phytozome v7.0 (chr-ID Bd4; pos 379 36147 to 37937200)
gtcggccttcgtcaccggcggcgcctccggcatcggtgagcccctcctctcctagtctttcctctgcgcgtctgcgtccgattcgcgaattttttttttggcccggacgcgccttaagctgttcggcgtgtgtattgcgattgcgacggggtgggggatgattaattgcgcgttggcctttgatctggttttgtgcttgtttggacctgttggtgggagcttgatgtgggaactgggtaggagcggattaattacgctgggtagtacttgaactggcggtgatgaactgatgggttcctttttttttctttttttgaactgatgggttcctgtcttgaaagcccggacaattgtcttagctttgtcctaagtcaaacttcttaatgtatgcatttggagtcgtagatgttggtagatttttctataaacttggtcaaagtttaagaagtttgagttaggacaaaggtagtactttttacatttaggaacggggggagtagtaaatatgtctttcatggtgttctgaacttgtaatgtgatgtccatggaactgtaattgaaggagcgtgttgtcaccttttttattcttaactttattacagtgaaggattaaatttaaataacttcccgttgtttgttcttctgtgcctttgtaatttttcacaattaagagttctatggaacggtggcggctgtggtccctttataagatgtgtacgcatctaagatcatgccagcacttgtaaactcctagcatagagtactgaatactacaagcgcaagttcatcctgttagtgatctacagtaattgaaatggtggcagctgtgacccctctgtaagatggtatgcttgtaagatgaagtcagcactcataaagtttgatcctagcatagagctctgaatactagaagcatgagtttgtcccattttttatctagttgattgtggggaggctgaaggactacgattttagtacattgcgtttaccatattgacatttgttttaatgttttcaagggaaggcgctttgcctcgcttttgcacaaaagggt

SEQ ID NO: 15923 - DNA, 612 bp, Brachypodium distachyon
  Intron number 1 from transcript Bradi5g03370.1 (locus Brad i5g03370) derived from phytozome v7.0 (chr-ID Bd5; pos 394 2373 to 3942984 reverse strand)
tgctcgtcaactccttccgcgacctggagccaaaggtgagcaccacctgtttgttgttttgatcaactgaataaagtcagaggaacaaaccattgaaaactgatttcctctgttgctagctgaaccggaaatttcgacaatgctatgcaatgatagacgcaccaacgcttcatcatgtatggcaaaagttgttgtgttttcaatcagtcaaagtcatttagagttgtattaacatttgcctcatgtttctcaaaaaaagaacatcggcctcatgatagcaaatgtgagttttcaatcaaaggcatttagaattgtatttcaaatgtgaaatttcaaatatagtatattgccttatgtagccacatggcccacaccattatacacgaagtcaacagatcctacttagaggtccagcgagctccattgaccctgtagatgtccttgttggggatcagctagggcaacacttgttgtcttcgtgaccttttcttttgtttcttcgcatgcctgtaattatctaaactcttcttcctaatcgaatagcaatggactgacttttcttcaaaaaacaaagtcaatagttgaattccgattgagcaggaagcggattac

SEQ ID NO: 15924 - DNA, 738 bp, Brachypodium distachyon
  Intron number 1 from transcript Bradi4g27100.1 (locus Brad i4g27100) derived from phytozome v7.0 (chr-ID Bd4; pos 321 44560 to 32145297)
atcgcctcatcctccatgtaagttaggggatcctctatgtcagatgattctgcgcgttatacgttttttgctatccaattccccttttgttttagcttttctagagttctgatccctttgttgagtctccatacaacaatacactgttggttgcttaattggttgcgtagactagctaggaattcagcaattccatactactaatcctttttagtccccctgttctcatcttttggttgcttagcttcgttatatgggtttaatttgtatttctctttcatggagaagaggttgtttattctgtcatagagttttagcttagcagcaaaccgtgggctgtgccatctgttgcctcttctggattttgaatggctttaaagcagagttcagtcatggacgtacgacatatatacatacaggaagaactagagagatcattatgccagataattgtttatgtaatggttagttagggatagtagaaatagtttagggactggggttaggaagaggacatcaaaatttctagaaactaggatataattattttccttgttgctttcagcgagtagctaagatcaaaacatttttaatggatttttcacaccgactcttccatctgctccattaaagaaaacgtgtgctcctacttgcttcctaatgcattcaactactgattattgctgtttttcatcatcaaatttccattccaggagcaaggagtcgacgagctacgac

SEQ ID NO: 15925 - DNA, 828 bp, Brachypodium distachyon
  Intron number 1 from transcript Bradi3g48860.1 (locus Brad i3g48860) derived from phytozome v7.0 (chr-ID Bd3; pos 503 00662 to 50301489 reverse strand)
cctcggaccccgtccgggacttcctccctttaacagtaagaatcgtcttctctactgttgtgtgacatgtatttcagaggcttccagttatgtggcaatttaatgtgaacatacacaaacattcattcgatgcaattttaactattctccagctacagcatttgatttgtctgactgatctttttccagattttaccattagttattatgctgttcatttctgctaaattacaaatttggtactccctccgatcctaaattgttgtcgaaatattacatgtatctagacgctttttaagaatagatacatccatatttgggcaaatttgagtcaagaatttaggatcagagggagtattttgctaagagattattcaaatttaatcggatgccagttgccaatataatcatgcttgaatttggtcagagggatggtacaaaaacattgagctgtttcttacagcttctgatacgttgcagtaaattttattatatcagcaaattacacaagcagttctcacaaaataataatacttacacaagcagttaattatattgtgcagttattgagtttggagacctactgaccaccccaggcaggtttactgcatcagtacatatttttcgttttttttactaatttaactcattggatgatatggttaagtttaagccaacaggaaaaaacttattatgcatgtcttcacatttttaatgcagcactattcatctcctatgtgcatttgttttacgctaattttggtgctttgccctaacgaacatgtttgtcattgttttggctctaggttgattaccaagagaagcaat

SEQ ID NO: 15926 - DNA, 946 bp, Brachypodium distachyon
  Intron number 1 from transcript Bradi4g05780.1 (locus Brad i4g05780) derived from phytozome v7.0 (chr-ID Bd4; pos 479 4577 to 4795522 reverse strand)
cgaagtcgagacggattgagaattggatcaggcaggtaaaattggttgggtggaccgggtagaagagaaaacaccatgaaactttactccttcgctttaacttgcagccaactgctatgttagactgactaatagccagtaggatgcccgtgcgttgctaggaacaaaagaaaagactttcaaatgcattggtcggtgattctacttcatgaacacgtgcaaaattaagcatggtgctctcacgttgcgatttgatgtgtgaaaactgatatacctctctacttaaccctctctctactcgtttgcattgattctattctttctttttctagcatctatctttcttcatccaaccttattctttcactcgctttgtccctcttcatttgatcattctgcatctcagtagctttgttctagtcgagagacacctccaaggctctaaaccaccctagtattcatgccctcccaaatttcaatgtgcgcgcattgaatatcctaattccaaaaaggaaggcgcacattttttcctcctacatttttttttgcgagttccaaaaagtaagccagggtctcgtttctttggccgatctggccaaagcgcccctgatttctagcacccacctcctcaaccatgatcgcgtatttagcaaggctacaccctttagatccattgtcaagtgtggtgcattcttcttatccaacaaactgtggaagacttgccatcatttgatagttccgtgcctttatagcagttagataagtggcagatggtatatcttatactccatccgatccataataagtgtcatccaatctgtactaagttagtacagaatttgtactaagtgggcgacacttattattaataggagggagtatgtaatattcctgtctcaaatcatgttggtcttttgcagcattcatctcttgtccttactggccc

SEQ ID NO: 15927 - DNA, 815 bp, Brachypodium distachyon
  Intron number 1 from transcript Bradi3g46000.2 (locus Brad i3g46000) derived from phytozome v7.0 (chr-ID Bd3; pos 479 36506 to 47937320 reverse strand)
gtcctctcgttggagggtggctgttgttctagccggtgggttctttgatttatctgcccctttcttgtactgtacggttcggttcttgatggcttcgcttggtgcggatgcggtactgctgttaggttcgttgaccttttcccgtcctagtcggcgacggtgtgatgtgcttcgctagctagatgctttgctccctctacatttttgtgtttcttggttccctgcttacggttctctgagcgccacgggttcttgatttcaaattaagcgataggttgctgtttacttccaaggattatctgctgcatctcggtacgtctagttgtttccttttattggtgttgccagatgcgttttgtagtgtggatttacgaattgttggagttgattttcagttgccgtttccagtttccatccaagagatcgccattcttggttaattttttccctgttcacttatcaagtcgtgggttccaagtgattacagctgagaagcaaaatttccattttacgtgctcaatcatccgctgcctagcccatgaaaattaggtggtttattttcgagattaggctgtttcttagtgggtttatttatactccgtatttctctaaacatcccgagtgttgtttatgtgggtttaataatgttaatgtttgcttctaggaaattcttcttccttttttcttaaaataccgcacactttcttttatttttcctgaaattttcacggggacggatcgtgacaatgtgcctatccgttggtatatttaactctgcaggtagatctaagcagcagggtggtcaaggttttctt

SEQ ID NO: 15928 - DNA, 833 bp, Brachypodium distachyon
  Intron number 2 from transcript Bradi4g16550.1 (locus Brad i4g16550) derived from phytozome v7.0 (chr-ID Bd4; pos 173 11662 to 17312494 reverse strand)
tgcgggggctcgctcctggttcagcggattaccgggttaggctgtcggaggcatggattcttcgctgcataagctgatttgccgcttgggtctatgcttgttataggcgatgggcatgttaaattttgttattcattacccgcaaaaaaaaatgttattcattggttcctcatgctatgtttgttttagggttgctaagtttgtgctacatggtaggcaagagagatcaatttattcaacttggtggctaaagccgtttaatggtgttgtactgttgttgtcgattggattctgttttattttgatatgatttagtttttggacaagcaattcattgtgtaaacggccactcttgctgctgttcaatgggtctgtgggccttttagttggtaaggacggtgatttaagatggtgttggggcaaagtataggttgctgcttaactgtgctagatgtctgcatcaaatgagtaaaaaaagctgtttgcctgttagtgccttccttacctatttggatatgaattctaaacatcagttatgtcatatatcatcatgtgtagctgtgccttattttgaatccatacttattcgacttaattttaattttattttatatgccctgcattcagtaattaattcggcatacttctttcgaaggccactaatcagatagacggacctttctcctacctcattcttttgtggaaaacaagttgcataatatgatgtttgttttatactatgtattctataacttcagacttaccttgccatactgtatttttccttgtctgttgtaggttcacttgaggtctgcaaaaaagctacttaaact

SEQ ID NO: 15929 - DNA, 914 bp, Brachypodium distachyon
  Intron number 1 from transcript Bradi4g29060.1 (locus Brad i4g29060) derived from phytozome v7.0 (chr-ID Bd4; pos 344 98696 to 34499609 reverse strand)
cgtgcggccgaggtacccccgccgtggcagaccaggtatggctacctcgtgataccggtcctttttgcgcgcgatgctcctcctgtgcgagccacctgtttgtgctaatgccgcattggacgcttcctcgttggcgtcctcagttcgtccggttatcgtttgagttggtggtttaggtctgtatggtgctgacggtgctctatgtgggggaagaacgtgagcactctcccggtgtacgttgtggaaattgggaggatacggggcttgcagaatgttatttagtatcgtgggagttggaagtcaattacgtagcacatttagagacgaggttgacctgaagtatggttagtgagttgccaccgcacattgtgtactctgcacgctttatgtccgaccgtattcttcattcaggtgcgcaatttgtctacatgtgatcaaatggttgcttaagcatctgacaggtaggtgaattgtccaatattgctggtagttgtgtcatgcatgctctgctactctgctgcactgctgtttaacatttctagcagcaatgttaaacatattcttttgttgatggcccagacttgcataattgaccacatcattatggtatgatggcgaagtactgaagttattactacgaaaactgcagacgcagttttgtttcacaatttttttctccccctcacagattgaccttcattgggtatcattactcattaattgatcaaagcatgaaatttaatcttgaacgatctgaatgctacatgtgtctgttatcttgcaagcctgcttgaatatgtactacttgtcctacatgagcacttctgtttgtttgcttaattgggtggttcttgtaattctgacaatttggttctgcaggctatttccagtgcggggttaccagcctcgaggtt

SEQ ID NO: 15930 - DNA, 676 bp, Brachypodium distachyon
  Intron number 1 from transcript Bradi3g58740.1 (locus Brad i3g58740) derived from phytozome v7.0 (chr-ID Bd3; pos 581 41405 to 58142080)
atcgccgcctcggggacccggtcggtgtcatcgaggtgagctatttgattcgacgctatgataaaatatgcaaaaaaataattatatgcgaattggttcagaccatgtttaaattgtgctttgggattgtctggagactggcagaacgatggatggggcgaattgttgagagtgaaaagttttggggttgtgaaattaggaactctgtagggttcatacctagtctgaagggtgtttctcaggttatgtgaatagttgattctaccgttatgtttcgtatcaattagtttttgtgacatgtacatgtcgcttgctgagttaatcagaattactatgtatcctgcttcccaatttggttgcatgaacctgtatttcttagttatggatcttcaaagctaatggttcttaggacatataattttttttaaaatggatatactcttcgaccctgttttttttatgtgctcaaatgtctaaaaccaagaacataaattcgtagcatggctctctttgcattgagttaaaaaaatgtctgagaagtattgcgtagctaattctgttacggagtatgtatttctttcattttatctgcctttgttatagtctctgtttttccctctgttccttcatgaacacaaggaagtttaactcttaaactttttaacactgaagggag

SEQ ID NO: 15931 - DNA, 659 bp, Brachypodium distachyon
  Intron number 1 from transcript Bradi5g15870.1 (locus Brad i5g15870) derived from phytozome v7.0 (chr-ID Bd5; pos 193 14792 to 19315450)
cgaggacgagccgacgagggcgagcggggtgggtggtatgggcccacagcgggttccacaatagtccagcctccagcgccccaaatcagtccagagaagaaaaaaccaagggcaacgattcaacacagcaacggcagagatagaaacgcgtggacacaaaacatcaggttctccgccctttagaggagagaaatatttcttagatttcatgcttaaattttagcatactgctattagacagcgaattgaggtttattatggttctagagcagttagcttttgatttggtctttctttcacatcctcctttgttttccatgtatatgttcagttttagctactcggcttgttctgtattttatctacagtctatcctcgaaaaactcaagtctaatactgtgtgtgccgtaatatatatttcattgtcctgttgtatgtaacttttctacttaagcagtactccctccattccataattcttgtcgaaatattacatatatctagacactttttaagaatagatacattcatttttggtcaaatttgagacaagaattatgaaacggaggaagtaggtgacaacgtatgtgatgtagtatttgaaaagtgtggaagttggttcttaattaatataagtgcttgttacctattagatctag

SEQ ID NO: 15932 - DNA, 496 bp, Brachypodium distachyon
  Intron number 2 from transcript Bradi4g04410.1 (locus Brad i4g04410) derived from phytozome v7.0 (chr-ID Bd4; pos 360 5253 to 3605748)
cttaaggagggcaaagtttatcgggagtcaggtatgcatatctttttaaaatatcttattttcttgtatgtttttaacacaaagtcagcttggtctgttcttctcaattgggagtacaagctgagttttttaaaatcctaatagtgttccaggagaaccaaacatgaaacaccaatttgccccattgtcagattagattattttttgggggttactttgctttgttttcttctgatggaaaactgctccaatgaattaatgtttctctggtagtattactttaaactgatcgttgtaatatgtgaatccaaattatgcaaatcaaaatttgattttctttacacaattgtacaataaaagagaatcagttccctggtgtaggatatataaaaagcatgatgagtagaactaataagtgcatgaatccacacatatttcttagactggcttgctgtattatgtgaaccagaaacacaataccgggcttcttgtttcc

SEQ ID NO: 15933 - DNA, 717 bp, Brachypodium distachyon
  Intron number 1 from transcript Bradi4g30600.1 (locus Brad i4g30600) derived from phytozome v7.0 (chr-ID Bd4; pos 363 44037 to 36344753 reverse strand)
actaccaggttccgttcggtttagtccagcttgtctcgctctcctgtttgtgtttacgatttggtgatgcatttgtagcccttgatcgcttcatatgcttatacttccaacatacaaaatgtagcttgttgcaacttggtaggagtagttctagtaatatgctgatactattggtatggtagttgcgtgcttcagtactgtgtcgtgctaccctagctaggtctatcatctatgtggtgatgatgactaattgcgatagcgaatcatatcgctaggctatcaatgggtgtgtttaggcagctaggacagtgaggtgttcgcctgtagaaaagtcaaatagtactacttcctccagctggaattacttgtcaaaatattacatgtatctagacgctttttacatatagatacatccgtatttaggcaaatttgggacaagtaataccggtcggagtgagtacaacttttcagacatgagtcttgccagggtgtgggtgtgtgtgtgtagatatgctcatttcgttggttggtttatcatgcctccgcttttagatgaatgaatgaggctatcatgcctccgcttttagataataggatgaatgaatgaatgattggtttatatgctcattttgttgattgattgtagtactgttattctatgtatttctttatttctttataacacgtgaattctttgcaggtttttgtcactgactt

SEQ ID NO: 15934 - DNA, 747 bp, Brachypodium distachyon
  Intron number 1 from transcript Bradi5g02790.1 (locus Brad i5g02790) derived from phytozome v7.0 (chr-ID Bd5; pos 304 9246 to 3049992 reverse strand)
gaaaagagaggaggggatcgggaggagaaagaaaggtctgaggagaatcgcgggcgtgctgagttgtcgctcgttgcacgaatctcaaagcgcgccgcacgctaagacaacgctgggcacgtctgctcagtagattaacaactatactagcagaacatctatgttgaccataacaaattgcactctttcaaagtgaaagtcgattctaccggcgccggtatgtgcccgtagaagatcgacctcatcccacgcctacagtacatccgtgggcagattgacgcaaaatgagaataaaacaaaacgcaacacggatctcaaagctgacgtgaatggtggatgttgtgccggtacatagcgattccgctagaaacgccgctctcaacctctttcgagttatattatcgtgtttccgtacgcacgagcatttcaaaacatttaacctttaattttcatggtgattgcttcgttttcgcttggaagaaacgagagctggtcatcgggccgacctcggcacgtcacggcctgaccccccaattaatcaggcttagcatgggtggcccctaaagtccctttataactaggccgggttggcccctcaacgtggcctgtaggcccaagaacggcacgtgagcccgagcagggcagcccgggcccgttaatcttgatggcccaaaaatgccttccatgataattttgtacaaaaactaaaataaaaataaggattgggctggtctagaagaagagtgg

SEQ ID NO: 15935 - DNA, 948 bp, Brachypodium distachyon
  Intron number 3 from transcript Bradi4g12110.1 (locus Brad i4g12110) derived from phytozome v7.0 (chr-ID Bd4; pos 120 24227 to 12025174)
acttcgacattggtctccttgccatcctctactcggtcagtacattatcatagctacctctttttcttatgcataattactttcctaattttacattgagtgtataaattaattaggggatgcccacaattagaggccttttacggtagggacgaatgaatagaagccatccatttagcagatctaagggcttaaatctatcaatactaggagatcaaaagagtagtatttacttttactactagtaacaaaggtaaaatcctagacaaatcccccgcgatccatatgcatcaacgaggatgatttctttcctccattataatacatgaccataagtgtgaccataatatatatttttttcgtatttgatgaaaaaagagtcattgactcctacatctaaatctgaatagtactcttttattaatttgatttgttactgcgcggtaattatcgcacggggaaaatgtgtatcaagtttttctttattgaaaatgtttttttaaaccaaaattcatgtaaacctaacaaccctataaccacttttgataaaattcacgagacgaatccaactatgatctcaaatttcttacttgtttcacgatttaaaaggtcaacttttggtcaatttattcggttcacagaacaaccctatagtacatgagtcatgtgagaaattcgagatcatggttgggttcatctcctcaaattggttgaaagcatctatagattgttcggtttgttctaacttttacgtgaatttttgtttaaaagtaaatatttttgaagaaaaaatccattcgatcgtaccaaatcaattagtcgatactatccaaatttacaatccaaatttacagatagtgatcggtgagctagaccaaagcctccacaattaatccaaataacacgctgatcaaaatgttgcaggctttcttggggacaggcgcattg

SEQ ID NO: 15936 - DNA, 1038 bp, Brachypodium distachyon
  Intron number 1 from transcript Bradi3g46390.1 (locus Brad i3g46390) derived from phytozome v7.0 (chr-ID Bd3; pos 482 39714 to 48240751 reverse strand)
ctcttcacgagccggttggtctcgctccctccctctctttctctcggcgggactccttggatctcgcccaccgcttctatctctccttcgagtttttcttggtggggaatggcttggtttaatggcggctggcgcgatttccttctgtatttgaccacttgagatttgcagttgacaaaaaagtcttgttttatcctgaccctaaccaatggcatgctgctgggtgctttgaattctttggcgtgcagagatttaatttggagggagattggattttaatgtgtctctttctctttgttctttcctcttctgtgctcatggcgatctgggttggtggaaagctcgcattttcttttttagaacacgggggatcgcattttgatggggactggtgcatgttttttttcccgttttttcctgtatcttcttcgacagggtgaaccgctgcattttgcgtgcgaagaatttattctgtaaatccaagaaagactggattgatctgccatccccgatgagcttgttttcgtgaaacgcccgtctgagatctatcatgaaaagcttgtagtatttatttagttgaattttgatttgggtagcgtgctagcacgagcgcttctcgcaatggagtacattaaagcttgcatttgaattaagtacctacctgttcttgtgtcgttggaattaatggttgttccccaaagaaaagaaaatctttaacgaactccaggctatattttacttgcgggagcagttgcgttgggcaggttttacttggacagaaacttagccaaaagcttattgggatttaagatgaaagttcattgattcagttgctcttcggatagtcgaggagctgaaactgatgaaataacaaagtgcaagacaattttggttcttggtctcaaaaggacttaattatgcattttgaagttgaaatgcctattcttggtttcttttcgcctctttggcatttcttgacgaaccccttccggtgcttttacagcttctggacagcaccagataccagtaaccacatca

SEQ ID NO: 15937 - DNA, 919 bp, Brachypodium distachyon
  Intron number 1 from transcript Bradi4g21800.1 (locus Brad i4g21800) derived from phytozome v7.0 (chr-ID Bd4; pos 255 61164 to 25562082)
caggcgcgtctactgcgaccactgtaccgtcgccggtaagtgtttgtagttattcccggcctgcccgagtgtttgtgttgttccagcatgctcgggttggtatggtagatagtctgtcttgtttagggattaactcctgtttggtatttagattagctgtagatgtactagatttaatatcagtgagctgtagatgtagatttagtatgaatgagggttttctcagttgagggtgtacagtatgggagtttctagatttttgtatttttgtaatgtataaatgcatgaattggattcgatcacctagaccgagtaaaggcattgattaccatataactgggtatacctctgaagaacatgcgacttgctgttttgggatattttgattatgagttatgatgctgttttggggaatagcttagtgctcttgaagagaaaaatatccatgaaagaacggtccattcaagcaaagcgagcaaaaaaaagtgactgaaaaaagcaaaaaaaaaaaagaaagaaaagaatgatgcaaaatgaagtctggacaaaatactctctcgaccggcttattatcttttttcggagacgctccttgtatattttgcggatttgaacaacttattctcaacttgatatttgaatctgaaaaaccccaacttgcctgattgattctcatgaccactcttccaagctatcacttgattaaattgaacctgaattttttttctccgatatgtaatgtccctgaaagcttttcctccataaacataatttttttttgggttcctggaccgcatctgcgtaaatgataagctgatggtggctgtttaaattacaaattagaacgcagattaatgtcatttcattttttgaaccgccaataggctggagcagacaccctgtttgtgggaagaagtac

SEQ ID NO: 15938 - DNA, 505 bp, Brachypodium distachyon
  Intron number 1 from transcript Bradi5g04750.1 (locus Brad i5g04750) derived from phytozome v7.0 (chr-ID Bd5; pos 608 7884 to 6088388 reverse strand)
ctgcaaacgcaggtggcccagctgggtctgattcagtgagtgatcctgcgcacgtggtgttaatgtttttttttcattaaattggggcttattttggattttgtttctttgggtgggattttcttcaagggagaaaagggatcccgttttgttctttgaaaataaaagcccccgggtagaaaatttcgaaaattttaaaggactttttgttcgggttttagaaaaacttaaagatttttcatatcatccccgttagggcccccccccccccccccccgatgcagctcaaatcatgctttcacaaaaagcgaaaacgtcgcgatgctgaatgtcaccactcgaaagttagcatgcccttctcctttttgtgcctttttccatttgatacgcttcattagtttgttcctttagttgttggtcgtgccccttatttttttgaatttgaattatgcgttgtttatttgatagaggcaaaagacctatcaggctgatcagctgcatcata

SEQ ID NO: 15939 - DNA, 777 bp, Brachypodium distachyon
  Intron number 2 from transcript Bradi3g49410.1 (locus Brad i3g49410) derived from phytozome v7.0 (chr-ID Bd3; pos 507 73738 to 50774514)
aggtgatcgatcttttcttctccccaaatcagagcttgattttcttgcaggcatgtctttcttcattggtatcctaaatgataaatgtacctgtaacggaaagacgtcacgtggcagttatttcacaaattcttttttgtaggggaattattttagattttttttatcaaggcaccttacaaggtgtgagcttaaaatttatttgggcccacctatgagccaaacttagaaggaaatactacatgtatttttcacaacatacatgatagtgctcaattaacaatgttcatttttttagagttatcttcatatcatgtaatagcaaattctgtgatctctaatgtctacttcaatcttcccttgttttggcacgtttttatgccatggttatgggccactacttccactcttagtaagttcaactattcaagtaacactacatgagaataatgctattgagagttgagaaccatctcagcctcagctccccacatcatcaggtaaacaaagaccagttaaatcttcgagatgtctcattgcagatcaatgcttctgcccctgtagcaagctcctatggttcttgacttggatcacacaatagttagacgccagttgcattttactattcatgttacttcgttagcaatgtatgcagccaactattgatggtcaaatattgaaagtctcaaacttttgtggtcagctcatgttgtttgttttgtggatctgtttgatgctttgatttaaacctgattttggacaaatggcagctcggtg

SEQ ID NO: 15940 - DNA, 740 bp, Brachypodium distachyon
  Intron number 1 from transcript Bradi4g36750.1 (locus Brad i4g36750) derived from phytozome v7.0 (chr-ID Bd4; pos 419 06423 to 41907162)
gctcgaggccgccgcccgtgtccccgagctcaaaggtatggcctttatcacccctcctttaattcttcttgcctcgatttctctctctttcccactgcaacctgctcgatctttgccacaaatgtggtgcgtggatggtcgaatcccttttgctgtttgtggaaaaaaaatgtgagatctgtgtgtaaagttgcgagcctggagccctgttgtggtttggataaatctttgtcaacgaaaggtcttctgttattagctggatttggctactttttttatgctcagggtggtatggaatttagacggcactgttctttgtttaggaccggttgtgcctctggagattagacagagcacatctcttaaaaaaagtgcctttaaatattcccggctgatgtaatatccgcacacggtcaatttgctatcaccttttctactttgcagtcctatcatcgtccattttgttagcccttttgatgctactatgtgtggttcttgattgtaaagtggtccttttgtgctgcaaatggataaaggcgactgcttgatgattagcaccatgaatctgcacttttagttcagttagaactacactgaaaagactggttttgtttggtatttcaaacactagagattatgtgttgttaccagtagttgcttgtatatttgttgtgtctttgattgatgctattaacgccaatatttctctctcggtacagagaactcgtcaaaaataattc

SEQ ID NO: 15941 - DNA, 803 bp, Brachypodium distachyon
  Intron number 2 from transcript Bradi4g03300.1 (locus Brad i4g03300) derived from phytozome v7.0 (chr-ID Bd4; pos 265 8142 to 2658944)
tcagaggtatgtctccatgagcaatcgaaggttattgagaagtctttgaccatcatagccctacatttatatgtatgtgttgaccagttgtttaaccaccaaaaaacacctaagctggaagcttaatcaaccatgcaattgtattaagaactctggccattgtctcatttttgcgtggtatgcggagtagtttttatgttttcatgtccatctcaaaacacttatattttaactgtagttgtgttattgatgctatagaagttccaaccttttctttgggttgcgcattcacttttagagcttctgcttgattttgttcttcctatccactttgggttgggttgtccatgctacaagttgtgtttggtttgtttggtgctacagtccttttgacttttgggtaaacaatgaaagtagtaagatccgcaagcactttcaaggttgttcaatgcttgcttctggtctgtagttgatgctttcaatactgatgctaccatcatattttgcatacttcatgtccaaaacgcattttgtagatggtttgtttgatgcttcagtccttttgacttttgggtacacaaagaaagtagcaggatccgcaaacactttcaaagcttgtgcaatgcttgcttctggtctatactcgatgctttcaatactaatgctaccatcatattttgcatactacatgtccaaattgcattttgtagatgcggttaataccctgatagcattttgaaatgatcaatactgtttttatagttgcagataccacagagtatcattctgaccaggatcaaaga

SEQ ID NO: 15942 - DNA, 656 bp, Brachypodium distachyon
  Intron number 2 from transcript Bradi4g24610.1 (locus Brad i4g24610) derived from phytozome v7.0 (chr-ID Bd4; pos 298 82902 to 29883557 reverse strand)
ccccaggaagcgctgctctcgccaccgcggaaagggtatgcttgccttgcttgcttgccgacgatatgctgtggcttgttcgtcagtgtagctttctaggatggattcgtcattcgtgtgtgctcttctacgattcatgtcgttgcctgaatcttcaatgtgctagtgtccctgtcttgtgattcatatagtgcagatggtaattacgtttctattgctttgtgtcttagcggaaggcttatatgcttgtcatggcaagtcttgtttgcggagattgtgatatggctggctgcaataaacttaaattagttgcttcagttcgtgccgataacgtgaaaatctgtaccatgtttctttttgttgctccggttctgtttttgtagtaccatgtagactattgtgcactgacacttgcatgagtcaacctggttgtttggcagatagtttgaattgataacaaaactagtgcacttgtgcaatctatattagattactgaagttcaccaaatccacagcgttttttatttgactagcatgttactgtaattatcatgtttagatccctatttgtttgtatctttatgcagtttccaatgattccactggcattctgatgttgttttttgttgtcattgcagtgaaggccttccccagag

SEQ ID NO: 15943 - DNA, 501 bp, Brachypodium distachyon
  Intron number 1 from transcript Bradi3g45910.2 (locus Brad i3g45910) derived from phytozome v7.0 (chr-ID Bd3; pos 478 72969 to 47873469 reverse strand)
ctctctccctccatctctcgccctggtgtctgctcgtaatcttgattctttgcctttttttttccttcacttgtttgttttaatcttagcccgtttccgagaagcttgcaaatatgtcccgtgctccctccaacctagaagatggtgtagatggtcaggtgtaggaggttgctgctgattgaaaggaaaagctagtatttttcactattgaccagtttgggaattgggggcattgattcataggatgatgatttgtttaagtagcattaggggctgttgaggtgaaaaataagttgaactctgttagaagtcccctatgtgttactttccctgctcttcaaaagtattaatgcgacaggctgactgtttcctcaatattctcagttgcttagtttttcatgtatgtatgtatgtaccaatctagttgtatttgtttcatttggatgacctgtttgatttggttatttgcagcttggattcttgttcgttaaccgataaacc

SEQ ID NO: 15944 - DNA, 604 bp, Brachypodium distachyon
  Intron number 2 from transcript Bradi5g10200.1 (locus Brad i5g10200) derived from phytozome v7.0 (chr-ID Bd5; pos 134 66087 to 13466690)
gcctccggcaacgtaagcacccccgcatcctcctcatgccgatttgtttctttgtgtgcccgtttgtacgattggccggtggatccaacggaatggtaaaatctcactagattttttttacaacaagactctttttactgggtctgaatcacaatgctaaatcctaaacatggctgggaagatttctcgttagaaactagtaagatgcaaacttgaattagatattaattagcatggcaaactggaatgctagatatagcagcatcatattgcagtggcaaataattacaccctgctctggtttctggatatgaacattggagtacagctgcacacattgaccgaaacaaccatgcttcagctgtgataacgtctgccgatcgcaacacgaaagcagaggccactccattccacaccgctgacaaagcttgaacatcacaccttcatcacgggtcgccgtcatcctattcacattcgtcatttctttccctttttttcccggggtcaaagaataaataaatcaaattcacactcacccaatgtgcaaaaccatacgtaatcatcatccattcattaatgcctgatcctcacaactgccacacag

SEQ ID NO: 15945 - DNA, 783 bp, Brachypodium distachyon
  Intron number 1 from transcript Bradi4g33440.1 (locus Brad i4g33440) derived from phytozome v7.0 (chr-ID Bd4; pos 391 21468 to 39122250 reverse strand)
acctcttcatcacccacgcccacctcgaccacatcgtgagcacgggaacccttttctgatttgtctcgtctctgttctgcttggttaattggtttgcatatacgtctgtacctaagcttggatgcaccattgcgaggtagagctcttaaattttgtatggagaagaccttgtaaggaactgaggatagtgtttcagagcttgcaccttacacggggagaggtgttgcttgcagtgcattagttagcaatgccagacgtttcatgcttcattttgtgcagttcatcttttttttattgcagaattgtcttctgtgaaccgtttgtttaatgatgtattcatccggtagtcattggtaatgacaagttaatttgtggagtgagatgcagttgtgagggataagatttccatcaccaatggttggggattaagttaccctaagttagtctgcttaaactgtttagataatctcatctaggcatcttactctaccactttcattttggaaggttaggtggttagtaataaatagcattttaattatgccatcctctgctggaatgtacaatcaggtgtccgttgtttgatttttcagtgttcaactcacatatgctttagtgctagtgctgtctttactgctgcaacattataacaccttatatatctctttgtcaacaaaatagttgcaatttattcatgtgtccacatccacttgtacttgaaaaatatcactaacaaaacagttatgatgtggtaaactggtaattgttcagggtggtcttcca

SEQ ID NO: 15946 - DNA, 909 bp, Brachypodium distachyon
  Intron number 1 from transcript Bradi3g52440.1 (locus Brad i3g52440) derived from phytozome v7.0 (chr-ID Bd3; pos 533 32883 to 53333791)
cgacttcctctggcctcgcatcgagcagctgcctggtagttgccctctctatgcatacaatgttagttgccgcagtgtgcaattaggagtcatatctccatgctttcattccgtaggtgcgatagcttttactgatcgcgtcatagacaatctaaattgttttgtctaaggttgtttagactggaagtgatttgttggcttgcttgaattgtttggaggggccaccagaacctgggttaagagctaaacatagatgggacctttattgcggaatgtgggcgactaggcaagcgagtattgggatagccgggtaagattctacttccgtatggtcgcgaattcttcacgccacgacgtccaaagaagtggaagcttgttggtcctcgcgtctgattgccttaccatcattaatgctttgacatcaaagctggtgaacagacctctcttctcgcaggtgaaagtgtgccatatcagaacttcagaagggagtgtaatatagtagctcatgatttggctaagcaaacatgtcgggggagtcaatttggtgtgtggttattgcatgtactaccagtattgttcctgttgtgcttagcgattgtaatgaaactgatttccataatttataaagcattttccttctctcagtaagaaaagaataagaaatatgcaatgcagaccattttagattggatctagcagtgtaacatgatacatgataaagtagagatctggtttgatgcttattgcttagttaacattgctgctgcaatgagccaataaccaattctatgacactggtcctgcgcccatgtaagtaagatatgtattctatcttttgcctatctcatagttttgttctgctgtgtacatgcagatactcttgtatttgaaggagtggaggtgacagga

SEQ ID NO: 15947 - DNA, 782 bp, Brachypodium distachyon
  Intron number 3 from transcript Bradi4g39250.1 (locus Brad i4g39250) derived from phytozome v7.0 (chr-ID Bd4; pos 438 76585 to 43877366 reverse strand)
gatcggctacgggaggagctgtcttgcgcagtaagggcgtctcgcacatctgttcctttcgtttgaggtgtttgaatctctgattgatgtttgattttgcacagatttgtctggagatctgctttgagccgagcaccacgccttgtggtcacaggtaattctgcactgtaattgtctgtaggaagtttttctatggttcagagcatttgcaaagcaaagagccaagtgggaactttggatcagggtttgtcatattgtacccatttccactcttttggttcccaagatgtaaatgcttgatgtgtttaagtctgttagaagaactacaattcatcttactccatttaccaagaactaggagtaatttttctgcttgctgtcagaacgagattcgttacatttaatttacttgtggcaactttacctgtcaaagcttattttcagtacaagtgtgcagtttagccaattttcagttatgtgttttatgacttctgagagtctagaagagggagttaaacctaggattaacattcatattatctgtagcagacatgaattttcttattcaagctcattaatttctaacaattgaattcacctcacataaattgttactagtgctatgaccttttatttttcttctacttaaactgacgtgtttggcccggtaattcagtggtaaaaaactgaattgtgctcatctcacttaaatgcatagtgttatgccaatctatgaatttctcttaggctggtacttttggcccagtaattcagaggtcaaa

SEQ ID NO: 15948 - DNA, 606 bp, Brachypodium distachyon
  Intron number 1 from transcript Bradi5g08610.1 (locus Brad i5g08610) derived from phytozome v7.0 (chr-ID Bd5; pos 113 86964 to 11387569 reverse strand)
tttccatcggcctcgacccgactctggatcgggaggtgagaacaaataactcttgaatctatttgatttgatttcgccatttctgtacctactaatcgatgctatgttacttgtagaaattaaggtgtggattaagatagtatcgacccatttggcttaaatgttctctagtctcctaactgggtgtgccatgatctagaaaagtagctaggtagggaggattaggttattcttatgaattgttgctcacttcatgtcgtttgcttgtgattttctcttccgtttcttgcattgagacttgtccagagaaatggcgcaggggataaaaccttaagtatattccacagtttgtatagaaccttaaaggcagttagttattttgaaggcttttgctagtactagtagtacttataacccataaagtatgaatgttgtaggcttaagatgacattaacctgatgtaacactatgattattaaatctgattcttcatgatgggatttttactcttgtgtttgggatattcatctctgtgcacattgtttatgtattgttatggctttgttcttattgagtgtcttatctttcaggaagaggaggacagat

SEQ ID NO: 15949 - DNA, 905 bp, Brachypodium distachyon
  Intron number 2 from transcript Bradi4g17320.1 (locus Brad i4g17320) derived from phytozome v7.0 (chr-ID Bd4; pos 184 50542 to 18451446)
aggacaagaaccgcaagttcatctacgtcgagcaggtaaggaaatttctcatctgcacaagggccaaaaaatgcaatctcagaagcacctacattaactgtcactattttatttgtattcgtcagagtaatgtgggaactctgttccttgttgttattttcaagaatgggagctaaaatgctagatcagcaaatattagttttttctgaggtgtcgacccgaagttgtattttttttcctgaaaaagagggatcatacatctaactgcacggttttgcaaatgtggttcttttttgggtttgatgatgtgattttttttctccattagcaaccgtgtatgtatggctgcaggccttcttccagagatggtggagagagcagagtgacattattaaggatacggtgaaggggctcgtcagctctggacagctagaattcacgtgtgctgcttcttgttccaaagttttcctttttacgttgcactggcaatcatgtctctgttctatatctgataaaatgctgatgctgtttgtgatgttgaagaaatgggggcatgtgcatgcacgacgaggcggctgtacactacatcgacatgatagatcagactacattggggcacagattcatcaaggaggagtttgctcagattccaagaattggttggcagattgatccatttgggcactctgcagttcaggcttacctgcttggtgcgcaagtaagtctctgtatccattttttccatgctttcattttttcaagtgacttcaaagtttttacaggaattaataaaagtaagtcacagttccttattacactgatacacatttgcatgataagattaacttcacagtttggatgacacattctgtaccatattaatttcttggatagaatttctacta

SEQ ID NO: 15950 - DNA, 895 bp, Brachypodium distachyon
  Intron number 1 from transcript Bradi4g24310.1 (locus Brad i4g24310) derived from phytozome v7.0 (chr-ID Bd4; pos 294 60830 to 29461724 reverse strand)
cattgtcgacagggcttaattgcggtggcgggcaggtattaatgctgctgctgccccatttcgctttcgttttcctcccccctctctctcttccaatgctgctgtgccgccgctctttctttgaatccttctctctttctctctcgtgttatttttcttctgctgtggatttggtgggggggaggttgatgatgttctcttgctcgtctttcttggccctttttggcagggttctgcagattttgctctgcgttttggcccccgtgtgggatttcgaccagattctgtatgggatttaggtgtttaaggggggagggttttggccgtgctacaatctgagttcttcctttgcgaggtgattggatttggttccttggttggatttcgggggccgttgctggataaaatgcccttcgccgtctcctgcgtttttcttgaggatttgttttagctcatctgaggtactaggatttagggtttttaggcgcggattggatacaagttttgattgaaaaaagtttggatttttcttttcttttctagggcatcttgttgagctcacaggtttggatttctgtctgacaaaatctaggaatgtagtttttcctacagtggaacatatttgcttgttgcttctcatagtttttggatcctattggatttgctgatctcgtatcatttttgttcacgaattctagctaatttcagaggttcgtctttacagtggaaagttggatcctttgtcgagttgtagagtttggtaatcgcatcctttgagaattttgttcttgttctgaagttattgattaatttactgcttggctttaatgttgggtccgcagtatgcaatttgtttgtgaactgaggagatttctatctgtttcagctgtgatat

SEQ ID NO: 15951 - DNA, 721 bp, Brachypodium distachyon
  Intron number 1 from transcript Bradi3g46000.1 (locus Brad i3g46000) derived from phytozome v7.0 (chr-ID Bd3; pos 479 38642 to 47939362 reverse strand)
ctgctggacccgcccaggtggggccaggatggcagcggcggggatgcggccgagagctcacacagctggccgcagggctctctctgggatggatgctaattcagcatttcagctacgtacgcgtacgtactgctaatttccagtatgtgtttgtgtggtttgaattaattttcttgcgggtcgttaagttatgtgtacgtttggagtgaagccaatccatcagaagatgtgctgcaaaatgaggagagagaaagaagggtatttgcaattttgaatgaattaccaaggagccacaaattaaggcctccaagttcgatgttgtaaccgataatatcatatttcaggaaatcgatgtaaactcatgtgccgtgtatgtcataactcacaagatcattcctggtatgttctttatttgtccaatttaaactcacttttcaattttaaacttgtgtaaactatttggattacagcattgagttatttgagcatgttgctacgaaaaaggcagactgcaaagattgccaagtgtatttgttttgtatgggtagttcaatagggacaaaagtcgaagggggtcaaggattggctgaattctcctttgtcccacgcaaatatgtattcagatcttttgcaagaattatacatggttccacttggggaaggtgaattaatcctggatgttgatcctctaacgtactgcacctgtcagaggatacacgtt

SEQ ID NO: 15952 - DNA, 889 bp, Brachypodium distachyon
  Intron number 1 from transcript Bradi4g37670.1 (locus Brad i4g37670) derived from phytozome v7.0 (chr-ID Bd4; pos 427 74243 to 42775131 reverse strand)
ccatcacgccatccgagtcccaccccaaggcccaggtccaatccagttcccttctgcccccttatctccttcctcccagagcggaattcagtttgatcctagggggcgaaatccaatcctcaccgattaatcaccgtctcccctctaattaaaaacagaaatcatcaggatatcgtgaaatctgacgggattctctgtggccagtgaatgctgatttagttcaatcagatttgtgagatctgacgaaaaagttgcttcatcacccatacttcatttatcgtggtgcctttacagtggagtagactgggaagcaagaacgacgaagcttctgttttccctattaaacagaataacataaagtactatagataatcctggtaaacatgttgcttagctaaaactaatttagaacggagaaaagcaattttctaaggacaatctcatctctaaagcaatgtgatgatcggtcttcgtgaatataaacatactttaattaatttattaatttcatgaaatttactctgctggattgtgcaattgttcagatttgcatgtatttatccactgctttatttctgcgtcgctagcaactcgtacacctactgaattttcatttaacagctctttgttcaatttgcctactgaacattttgtcttccaaatcatgttgctattctgtactgatcagtggtacatcatcattgcattctttgcccatgcttttttacctaactcaagttttagttgcagcaaatctgaacctgaagttcgcccttaaaaaaaaatctgaacctgaagtttcaattccacaacatctgaatttcttaattttctcgctgtgctttgcttaccagaagttgctgcaacggcaattgaggaagaggggttg

SEQ ID NO: 15953 - DNA, 1030 bp, Brachypodium distachyon
  Intron number 1 from transcript Bradi5g12800.1 (locus Brad i5g12800) derived from phytozome v7.0 (chr-ID Bd5; pos 163 04439 to 16305468 reverse strand)
aagccaaggaggagcttgtcgaggtgaatatggatgctctatgcttactcgtcattgttttctgtgatgttgatgaaggtgtgaagataattgccggtagacagtaatcatagagtggaagagggaaaggtagagtagagtacattgacgtggctagtcagcaaaatgtcaatcatcaggggaagtattgcacacaattattcataggttctggcttgacctcatcttagtcgacaaaagtgttcatttgatgaatttaaaagaaacaaaagaaaaataatgaaactaattagttttagaccctccatagaaacctgtatagaaacaaaacctggatcttaggacaggtctcaacgctaagctcattgactgatatttaagaaaatctcatttgactgaaagttggccatttcattttgcatcaaaatacactacattcttgccaaataaactttacttgacttaatcttgtgggttgtgtcgttctactgaaaatgcaaatagcgagggtatgaggagggacttgagaaaataagaatgtgacattaagatccgattgaagttccgtccggctgcactttagcctgcttgcctcactgacttgttgctgctgaacagtgaaaacaattttgattaataaaaaaaaacagtgaacacaatacccgcaaaaaaaaacagtgaacacaatgtgcttcctgtgggaattcatatgtttgctccaattttgattaataaatcctcatttgaagaatatagcgacggcatgtctggaatatgaatacaaatacaaataccatagatactgaaagtcttggacaagcttaattattagtagatctgtctattcattctgcagcattggctgcagagtttttcgattatagttgtttgaactactgtcttgttttcaattctttatacaagaatttgttctgtactccaattgactgaatatttatatgaggttcatgaactttatacaatatgaaatgtagatagtgagctgcttgcgcggttcactgaattacaa

SEQ ID NO: 15954 - DNA, 358 bp, Brachypodium distachyon
  Intron number 3 from transcript Bradi4g02010.1 (locus Brad i4g02010) derived from phytozome v7.0 (chr-ID Bd4; pos 132 0117 to 1320474 reverse strand)
cttgatcacaaggtatggttcattctagttgaagtgagttatatagctgttcattttttttgcgagtagagttatatagctgatctggctttgtctacttaagttactatgcagcaacaaagggagcatgtagttaaatgtgaaaatcgtaacttttaagtgtgcttttctgcataccaactttttgcaaagtagacatgaactatgttgtattgtgcaacaatcatttgattcattgtgcaccaatgcttcagtgtaggattattttttgcatcacctaaatttgattattccttgaattattcttcagtttacatgcttatacatctgtttggtattcctttctaccaacagtctc

SEQ ID NO: 15955 - DNA, 1048 bp, Brachypodium distachyon
  Intron number 1 from transcript Bradi4g02010.1 (locus Brad i4g02010) derived from phytozome v7.0 (chr-ID Bd4; pos 132 1233 to 1322280 reverse strand)
cgccgtcgaccaccgccgccgtcgaccgtccaccggtaagcccttcctcctcctccccgccgccccttctctcctcctcttcctcctccccgtttcccaccccccgccgccgtcctcctcctcctctccaaatccacccggaagagaaggttgcttcctcctctccccgcgcttcgcttgtttcgtctccagcagcgagcaacgcagagacggttgattccgcgcatgcttttgtttgtttgtggatccgaaaatagcattctggccatttccgcggctctaaatttttttcggtggaggggaaaagaaagcccgacctcccgtacgccccaaaatagcatttagccatccgcgtgccttgctttttgaagccgcagctgtccgagctttgcgctgttcagtggtggcggcggcatgtttgctgctgctagacttcggtccggtagaaatgctctaaccaactcctgctaattcgttatgactctggttgcttctgcttgggcttgggcgtggcatcattacggaattgaataggattttgttgataagtagtagaagtttcgagctagaattaggtatgtggtatgtttttcagttgttttgctttacatgttagaattatctggagaattagccaattaggaacatgatgatttcctcctaattaaagggtgcaaggatggagttactggattgcaaacttctgtagatatcttgggttgttaagcaagggcgatgtagagttgaggaaacttgtgtttatctgggacagaactttggtgtgcttgtaggtttgcacttacagagaggtttggccatgctggcaaattcaaagtagtgtggttttagtcaactttttcttgcaaatgtaaatcctcgttgtatgttaccctgcaaagtcctctcatttagccctgtcttgctcttttctataccagtattttacagagagagattttagctggattttgcaatactcctggtagctaattctctttgccaattcccattaggtgtgcacactgaggggttacctttgtgtgggaac

SEQ ID NO: 15956 - DNA, 466 bp, Brachypodium distachyon
  Intron number 4 from transcript Bradi3g57520.2 (locus Brad i3g57520) derived from phytozome v7.0 (chr-ID Bd3; pos 571 96897 to 57197362)
ggcaaattggtagcgtggtacgctcttatccttgacgtacatttatatgtaccctatttctgctttgagtttctcatagttctctcagcccatgcgtagccaaaggcttgttcatatacacatgggtgatactccttacccatgcttgatcaattacttctgttgttaatggattattccaccaagtagctcatgctacagctccttttctgatccaaatatttagtagcatcgtcttttctctccattttaattattgattctactgctattctttggattcttgtctataaaaggctttgtggccactgttcattaaatactttcctcggtgattatctttttttaatctgagttttcttttcattatccttcaagcttacatattgcttaagaagttccgatttacatcatcgctttgtttgttacaggctttagctgacttgcttaaaaagaagcttttggc

SEQ ID NO: 15957 - DNA, 717 bp, Brachypodium distachyon
  Intron number 1 from transcript Bradi4g39720.1 (locus Brad i4g39720) derived from phytozome v7.0 (chr-ID Bd4; pos 443 46354 to 44347070 reverse strand)
tgcccctggactgggagcagtgcctggacctccaagtgagcccctttttcccaccttcactagttgttctaaataatactctatatattcatctgaatttgcaagaagagcctctggtcccctctttcatcgttttgtatggattagtcatggtctctggttctcgattgttctgggcagcgtctcaaagttctcacaggctcgcagcttcgggccatcttacgtttcggatttgcttaggtaaacaaaataggttctacacgtcatatatatatatagaaatcgttttcctcactccacctctctcaactaaaagaaactgtaataccatccaacctgtcgtgtggtaatatgtgcctgtctggctaccatatctatggcgcggacacatgttaataggtatagctaattaacaaaggtatttatggtattcttagaagtggaagccccgccagcgggacggggcaaggtacgtgaaactgacgacgcacatggtcattcgtggcaaaatgcatgcagctttgaacgtgcatgcagaaagctgcacttgtgatagtttccctactatttgtaacgctcacgaggcatctttgcagtaccaagttgtctggaacatccaagtatcgatatctaggatcgatgctgtcatgattgcctcgtcattttgatgctttatggtgcttaatgatatggaatgcttttttgcagtctggaagg

SEQ ID NO: 15958 - DNA, 868 bp, Brachypodium distachyon
  Intron number 2 from transcript Bradi3g46910.1 (locus Brad i3g46910) derived from phytozome v7.0 (chr-ID Bd3; pos 486 42454 to 48643321)
agcatcatccagctccacgcgctcctcgggaacaggtgatcatttcccccgtcatactggatcgtgtccgcttcatttttctccaagcaactcgatcgtgcagaggcacgcagttctgatcctaagggaatgcctgtgacgcttgcgcacgctgctctcagaatttttttgcaacaaacttggcaagaaaccacaagatcatggcattacacatccttttatttttgttcctgattagcaatgggagtatagtaaaaggtgtaaacagtccggcctaagaacagctcatcgcataccttctacccctggcaaccacaaacaagataggactagtactaatgtactacgagtagatcacagagatcacagggggtgaaaagcagagtaaaagagctggtcttgccaacattcctctggtacgtttaccagggttggttagtcacgtacgtactcacgtttgccattaaagtcgctgagcccgcaagcttcgctgtggctcaccatccatgtcagggctttggaccattgtcaccgcttgcttgtcgtcctgccattttgacttgctattcccatctctgtcggcacgtaccgcaccacgcgcgtcttcttcaatcccaatcgcaacaaacgcacctctgatctttattacctccgtttcataaaaattgacacggttttaaactagagttagtataaagccgcgtcaatctctgtggaatggaaaaagacagggagaaagatccgcgtaaaagataaaatgaaaaagacagagagaaaggttactgctatcatgctatggcatccacactgacgtagtagtatgttctccccaggtggtcggcgatcgcgacgcacctgccgaagcgca

SEQ ID NO: 15959 - DNA, 617 bp, Brachypodium distachyon
  Intron number 3 from transcript Bradi5g08820.1 (locus Brad i5g08820) derived from phytozome v7.0 (chr-ID Bd5; pos 118 51481 to 11852097)
gtcgctaaaggcattgaggttgtgagcttcagcaggtacaatctctaccttttttgtgtgtacaaatgtatgtatctatatatgtcatgtatagtcaggtacattgtctagagtctcgacttttaagctctacaattacttcctattttttaagaatatttagtttagctttcccacctcatttcttcaaccagcccccttgacatagtaaattgggtggaccaactcatctttacagtgttagctttgtaaaggtcttgcaaaatcccttgagcgagttgttcatcaattcatcaaggtccttttccagatgctaaatttcaacagtcacatgctatcggaattctccctgctcagcaaaaccttgatccttctaattttgggccagatagataatttctgggagtgtacatatacatgttttgaggggatgattatagaggcattgacgataaggggattggagcgtttgttttttaataattgggatatatcatctgtgaaaaaaacatgagacttactcattcattattctgaaaaccaaatccagatcctgctatcattttgatattctgcttcattatgcgttgatggcaggtcaggaagaccatcttcct

SEQ ID NO: 15960 - DNA, 508 bp, Brachypodium distachyon
  Intron number 4 from transcript Bradi4g21770.1 (locus Brad i4g21770) derived from phytozome v7.0 (chr-ID Bd4; pos 254 60227 to 25460734)
aagcattgcaaagtgtaagaaattgtaccattatttttttgtctggtttcaatacgacatttcctctgattcaaccttatatttgtccttgcaatgcaatacaacaagttttcaattgtgcaattcagctggatgcagcctctttaacttttataaatctttgcagttgctctgtaaaatttcaaatgtgtatatagaaacatatttgttgcataattttgtgcttgagtttgaattcaagtactggattgttacttcaacactgtactaggacaatgatattcgatctgaaacctattttctgtagtttacgattttaacgtaggattacattagtccttttgatttaccatcatagggttttgttagtttctcctagttttacatttaaaagatggtgttcttgcatgatacctgtacccatgacatgatacattttttgtttgtgtacagtgtaaatacattcttttattcttttcttatcttgaatcaggacattggtgccagg

SEQ ID NO: 15961 - DNA, 998 bp, Brachypodium distachyon
  Intron number 1 from transcript Bradi4g24760.1 (locus Brad i4g24760) derived from phytozome v7.0 (chr-ID Bd4; pos 299 65712 to 29966709)
aatctcgctccccgcgatccgtactcgcgtgtccggtacgtgcgtagcgtggctgcattgctcctttccttccgattggagctggagagagcgagcgagctacggatggcagccagtatgcgcctagtcggggtatatggcctggttggttggttggtctctagcgggtcactgtttgacaattgtcacgagcaagcttgctcggcgccggcgcgccgctggctgtaacttgtaacttagactgggattatcgcggagttcacagcttaaacttgcatgatataccccatccgcagttttatatgtgtattatcttattatttctgttggttagaaataataaccacatagttggttcagtctgtggtatttctgttggttagaagtacacggttgagataaccacatagttagatggacgattttccctacgtgtgagaagcttgatatttgcttgtacttcaagaatcaggaactcgaggctcttctaatgtgtcgatatagctgtgctgtccattctgttccaattgcatcagcaaatggcaatggatttctgctagtgttttgactgttagtagtaggctctaaactagtgcactgcaattcacgccccaaatcttcctggatgtttcatctctgggacccctttctcttgtataatcatctgatgtaagagatggtgttgcaggaacatctaggagaaaataatcagactagaatggaagaatatactgttgtgagctccctggctatgaaacaaattatgcctcatcacctctttatatgtattatgttatcgagtgacacttgctttagatgtctggcatgttgtttcatctttgagttgtagaagttaggatgttcccacattgcgaacttgagattcttttcccaccagaaagacccatgtgttgcatcctaaaatgtgatgttatgaagcagcccatcgtattcgctcaactttcatacttttctattcttattttatctcagggcag

SEQ ID NO: 15962 - DNA, 941 bp, Brachypodium distachyon
  Intron number 1 from transcript Bradi4g42690.1 (locus Brad i4g42690) derived from phytozome v7.0 (chr-ID Bd4; pos 466 11091 to 46612031)
cactctcgagaaggtccaatacgctgccagagcaggtgaagcagacggggctgcgccgtctgcatggaggattacaaggctggcgacgagctcagcgtggtgccgtgctccgggaagcacaggttccacgggagatgcctcgccgtgtggctcgcgcggaagcgcctgtgctcgctctgccgccacgcgctgcaataacaaaaacatactcactccgtccctccgtccgatgggtctttattcaaattttctcaaatataaatgtatctatgacaaaaaaacgtctagataaaaaatcaattaatatgagacggaaggaacagtatttggatttccttttggggttaatcttaagagtactacagtactagtttacaagttcatatgcctgttaaaccgattattttttttaggtaaagccacaccgacttgttcgttagtccctgaaacgtttatgcaagttcatatgttgtttccattgaaacgtgtattctatcggccggcacgcagtcttttttctttttttgagcgaaggccggtacgcagatacccgcatggccgcatctgctccctgtgaaaaactggatcattttgattcgagaggcgaggcccacgttttttttttaggggaggcgagcccacgtatatctgcttgatccaatcgcatatttatcatatgctcctgtctaactgggcctgcacacgagcccatccgaccatgggccggcccatcgccccatcccgcatcccctccagctgttccgagttcccttcatctcttcccttcctcgtaacccgaaccgaaataagaagggaggcgcacaacagaggggggagaacaaggggcgagaacagaagagagagaggcgcacacgcgtacgtgatacccgcatccgctctcaaccctttaaatctcttgcttgccgattgtagttgtagcg

SEQ ID NO: 15963 - DNA, 601 bp, Brachypodium distachyon
  Intron number 2 from transcript Bradi4g40850.1 (locus Brad i4g40850) derived from phytozome v7.0 (chr-ID Bd4; pos 451 17093 to 45117693 reverse strand)
cagaaaggtacacacctgaaataaaataaaaaaactgaaagaaaaatcaactgctcgtgcatgaattaataaggtgcttttgcagggattttttttataaggtgcttattttacacgtacgcaacgagtgcaatagctgctggctcgatgcatgcgctgtccaccccggtctctgtcagtggcgtacgagtactcgcatggtcgcatgaaacgtgtgtgcctcaggtgttctcttgctgctcgccacacacatagaatttgaacagtcgatcgtgacagggacgttgcatatacatacatggcacttgttacgaaccacaccatttcatttagtttcagtccgggagttacgtcgttagtaaaaatcttacttacgtacacatcacgtatgtataacgtaacccgtacgtacgtgcgtatggcgccacgtatacgtacggcggcacgtccaatatactatgtgaaaagaaagaatatggagtagttttcgttcacggcttcattcgtttgatttgtgttaattaattgtgtatcggacgtttggaattaatttgtgtatactgcaggaggcggcgctgtacgtggtgagcaccaagacgac

SEQ ID NO: 15964 - DNA, 908 bp, Brachypodium distachyon
  Intron number 1 from transcript Bradi4g40850.1 (locus Brad i4g40850) derived from phytozome v7.0 (chr-ID Bd4; pos 451 17697 to 45118604 reverse strand)
agacgctcacgctcgagcagctcaaatacgcaagggtatgtgccatgcaaagcgtatatatatacatgtagatctattggtaaatgtcctatgtgcacacttgcatatatgtgaatctgtttgtaattaatcagctgttttcttgtttaccgtctgaaatccgacccttcgtgtttcgttaccttctcacaagccaactagtagctctactcagtacatattagcccgcaaaattaatacaagttcatgtgcaaatcttacattttcctacagagcaccatttgtttttggaacccgcaagaaattaagaaaggtggttgaaattaggtaacgcactcttgatttacttaactatcaaataaaatatactcaaatacgggaaatggtgcgtttccctatttaatctcatttttggaccagtgtactcaaataatgtaatttaaagtacttttttagtgatgtgtatatagactcaaatatccaaacatcattaatgatttaaaatacatatatacacaaataccataatttttaatatggaaagggggtaatttagaagtattgaaaattacaaggttttttcttagagagaattttttttgaaaaatacaaggagtttaaaacgcgtgtctctctaattcattttacagctgaaaggctgaaactattcaatttggacatcttttatacgtgtaacactatccgtagtgagaagtggcctacctgcaaactgcaaagtcaagttttaactcctcttctgagtcttctccacgtacgcgacactgcaccatacttaaataaaacttttccacgagcagccggtcgattcctttctggttaaaaactggtacagctacatagtataaaactttgtatgaacagacggcagtcgcagagtcaatcaaaca

SEQ ID NO: 15965 - DNA, 710 bp, Brachypodium distachyon
  Intron number 1 from transcript Bradi4g24840.1 (locus Brad i4g24840) derived from phytozome v7.0 (chr-ID Bd4; pos 300 42738 to 30043447 reverse strand)
gcgctccaggcccacttcgcccagcttcccatcaggtgaggcttgctcgcagctcgatcgcgggatcgaaattcgaaggtagcttaggatatgttcatcgcgtttgatccggattcgaccgaatcgcttattcgcttgagtttgagtagttcacggtgatggatacacgaaattctgcacgatgtgcgttggttgatgccggtgtcgatttgccagattaatttctgagcccgccacagcataagcttttcggttcgtgcacacacatgacatgccgctggactagtttttaattttttttcctgacgaaaccatgctgcgcatgcttgaagactcatgcggtggaactgtgcgcctgtgcttactctgttctgccgatggaacagtgcttggtcgatggacaaccgtatacagtacatggttctgaacttctgattaattgttcactcttaattgtttaactatgtatgatgggcccattccatttctgggaataatatttgggttaggctttttaagcattacctggtttctttttttttattgctggatacctggtttcttgctattcttgtgattgtagattttttttttaaatgtaggttgatatttacatttggatttattactgcggttcgtttctcaatatcagcaatgactctgtcaatgtcctcatgctgctcttcacccactgtatagttatcatctgt

SEQ ID NO: 15966 - DNA, 986 bp, Brachypodium distachyon
  Intron number 1 from transcript Bradi4g35850.1 (locus Brad i4g35850) derived from phytozome v7.0 (chr-ID Bd4; pos 411 46238 to 41147223)
aggaggtccgccgcctcgagaagcgccgggacgaggtaggcaacgtcagcacgacatggtgcttcatgtaaactgtttgataatttgcccgcttggctctacaaatgatgctgccgggctgcggcgtgggtcactcacgggagagcgacctagcctgacctgcctgtactgtgcgtaccctccagctccactctgcaagtacttggtggccaactggccgagacgtagcacgaacttgaggaatgatgaatgatgcgctctaatttgccaatcaatagaaacacgcatgtgcgcgcacaaacagcgagactatgatagactagcggcagagattgtgagaagccatagttaactatattaggccaaatcttgctattgcctgagttttatgtgctcacaggcgatagaaattgtattttgggaactcgttaaatcgagaatttaaagccaacgagataggtatcacattgtcttctacctctacctggagcgactgttccactccttttgggttcaagtcttcaagatactcttagagtgcttctttggataaaagtgccaagcacgtgatgcatactgttggtaaatttgaatttgcatctaccttattcatcatgatgagttatgcatatccagcttgagatgcattgtaaacattagtatatgtaggtcaatatgataagtgtgttgatagtttggtaaactgagaaaacaagatggttccatatctttagagcaaacataaagtactggtagcatgtgccatgttcatggttccatgacaatggaggcagagtgattgttagatactttatgtgatgatacagttctgtaatcatccaaacatctcttcaatagacatggggatgaaattgagttatttgtagcttggtgctttgtgtgggttatttcttcttaataatgtgctcacaatgctgtatcgcaaaccagattcaagagtcccagcgggaattgctactggcaag

SEQ ID NO: 15967 - DNA, 905 bp, Brachypodium distachyon
  Intron number 3 from transcript Bradi4g39430.1 (locus Brad i4g39430) derived from phytozome v7.0 (chr-ID Bd4; pos 440 51708 to 44052612 reverse strand)
agggtttcgtcactagccacctgctgcgggccaaggtcagtagacatggatgcctttgcttgggtcggttaggaatctgctagtgcggtcgtgctgcttgtggcagagtgcaatgcagcttaattgcatttcatcgaaaccttatccctaagttgaaaaggcgtgctgaaacttgatgcaagcatgcaaatttgattgcctctatctgagtacatggtttcttgcaaacaatgtcagctgatttgaagataaatagtgaatgctagtgctcaatattcgaaaccaaaaaagggagaggaattatagtcttactgtgctagaaatgagttctctattgctatgctttctgaaatcacctacagtagcaaatcaaagtattatgataattcatcaaagcataaaaaatgtactgctgctcaatgagctaggtctataaatcacctaatgtacaagtcacataaagcacaagctagggagacaccacgcacacccaaaagcaggaatgtttatacctaacgcatttcgctggaaactgcttcaggtgttttgctgcacctcacctcacctcacttagctcgtaggcacatgatattgactgcattgaactctctgtgcccatctataatgccatattgtttcctcgtaggtttggagcatgtgttaatcagttttaatgacatcactcaactttgcaagtattgtttatgtgccacatctatgtccagttctccatgctagtctttaagacatcgaaagtgtaactacaatatataaccacttagttcttactcttagaaaacatagtgcaatagatcacttagcacattttcagcattgtccttgtaatagtttgtactccgtatgctgatgcagatttgttgagcttttgtggcaactctctgtac

SEQ ID NO: 15968 - DNA, 625 bp, Brachypodium distachyon
  Intron number 3 from transcript Bradi4g37580.1 (locus Brad i4g37580) derived from phytozome v7.0 (chr-ID Bd4; pos 426 67787 to 42668411 reverse strand)
acctttcgtctctattcacgtggaacacgaaacaggtaatgtgtattgctggcaccctatcccctttcccccttattgttcactgtttgtattgttgatgcctattctagaaagtataagcctataaggtagagtgtatttttttttctacgttagtgatagaaggttgaacacttgaattcataagtcagtttgggaagcaaaatgtgatttatagctattcttggatgttgcagaatgatcttgtagcagtggcaagtagaacagaaagttgatgcctataaattctttttttctagaattgaggagctcagctcctgatttcattaatgaaaccgcaactgcaaagtcttcaggttcaacagaattcaagcaggatttaaactagctggacatagcactacagccatataccagcaacagaaaaagaaacaggcagatgacttgatattacagtatagttttgtgacagtgtgcaaattcagctctgatgttttgatgctacgatgcaaccaaagttctaattccactgatgtctcattttcttgtcttggatttgatatgcttaatgaattaattgcttctcttggatggttctaggtgtttgtttttgtggcagctgagt

SEQ ID NO: 15969 - DNA, 678 bp, Brachypodium distachyon
  Intron number 2 from transcript Bradi3g59090.1 (locus Brad i3g59090) derived from phytozome v7.0 (chr-ID Bd3; pos 583 52935 to 58353612 reverse strand)
ggagtttggtatgcacccttttctgaacagtgataccatgttaaggtctacattttccattgacctagtagtacaaattcaggcgcacaggtacccataagtaaaagtttagaacatgtcattataggttgaaaacccaatacatgccatgtctgctttctgtgaatttattagcattcttttgaacttacagaaaattgcagctaaaattgttctatgaatttgtaaaattgttcccacttcgcccttaggtctgtttcggtgttaaatcagctaaaattgcttatgtgcttggaaatagaggcgcaaagctttgatcattttctgcaagtcagcaaaggcatcatccaactacgaaataatatggatttcacatctccgctcaactgccatgtcccccaccaccaccacacacacacatcggtcctccacaacaccacccacacacactaactcatggttcttcgaagaaactcatagatgatccatatcagtttcgcacttgataccactgccatctttagcttattgaatagtcacaataacctatcgagtagcgacatgtttagtgacctctggtgcaaatttctctcaatgattgattgacaggtgctccgtcatatatggagcatctattatgcaggatagagatctggggatttacaaaccagcggaatc

SEQ ID NO: 15970 - DNA, 957 bp, Brachypodium distachyon
  Intron number 1 from transcript Bradi3g52940.1 (locus Brad i3g52940) derived from phytozome v7.0 (chr-ID Bd3; pos 537 49602 to 53750558)
ctgttgcactttgggtaaaggtatgctttgtttatttcgaacacatggtggtggctttgaacggtggctttgaactatatatttgtgaattaatttgtttagagctctacttaaatttctgtcatcttcagttttgtattttgaggtagaggtgtcttttaagttgcagctcctatagataaagtatgttttttatttactcaagcaactaatgagtaccccatgtgtggagctcataaggtttttagtttatctaggaatttctgttatatgtttagtagcaacctgtacttaggagaggattttgcatcaactccttgaagcttcagaaacttgtacttttctgaatacagttccatttgttccacgtttagctgaaatgtcagtgggtagcatagtatctacaccatgctaaaatgttactacaaggttgtttgtagttagactcacaaaaaataacatagatgtaggcatgaagtttggaatatctagccatgatgaagcttcgaagagtgcttttttaaacaaaattgtgctaatatactttcatgaataagattcctcatcttgaaattttatatgtcaagttgtgaacttatgaaatgagaactaggattggaaagtctggctgttgaatgtattctctagaggtcttggagtaggtattgatagtcaacaatagggttttcgtaactgaaataaccatgttgactacgtgggaacctatatgttgcaataatatggcctcctgttactcatgcagaaaaatttgcttgcaaaatacaacaaggtgattttttgtttactgagctactcagaacatcaaacgtagaactatgtttcgcctgtgtctatgttcctatatttctacatttatgcatgctaattgcttttagtatctccaatggctgcaccctgaactgtcattacattcatttaaaagcagtgtagaggaaa

SEQ ID NO: 15971 - DNA, 1042 bp, Brachypodium distachyon
  Intron number 2 from transcript Bradi4g13940.1 (locus Brad i4g13940) derived from phytozome v7.0 (chr-ID Bd4; pos 143 97175 to 14398216 reverse strand)
tccagctctacgaccagtacctcgcgctgcagaaggtcagggaccggcccgttattgctactgctgcactttggatttgtttgagttaaagccatcggaacggatagcttccacggttccactgtccaaagaatcaggttgtagtgcatgatttactaggcattggttgctctcagattggatagttgctatcctagcctcctaggtttataacttccaggcttccagctgagatttgcaagagttgttgtttgcattgtcctataattgatggacaggcactcttttagtttgtggcgatgaaagctagtcatgaagttagaatttagattctacctcatcatatttattaatttgatgtctgcttatgtgtctccgttgtgaaatgtttgagtagccataaggttaatatgcctaggaacttgtctaggagtttcccatcaatgcaagtattatgcaagagtagtatttattctccttacaccttaggattgatgaaaaatcactcttcttaggacatctattttgcttattttttgtagcatcatactgcatttatggcaatgtattttgtggccacccatgaaagctagaagtagggtgtaggaactcatacagtcatactaatcctgagctttagtgtagcccttccagatacgccttgtgatatattacgacatttagtttctcttgccaccgtcagtattgaattatgattagcatgtctgtaatatgacaagctcactggtttaaaatcgctcactggtcaatttgttgtgtagccaaattaatctgcaaggttttaagtccccaatggacttgatccttgttcattaacatttcagtacatggtgcacattctatcactctttaaactgttccgttctataagttccaccgtgctattgaagacatgtatctttacatgcattagctgaacacaattcttgttctggactatcatatggtggtaacaaaagcatggcaacaattcctaattatggcagatggcaggaggtcgaacggctccgagctgaaagaa

SEQ ID NO: 15972 - DNA, 410 bp, Brachypodium distachyon
  Intron number 2 from transcript Bradi3g51340.1 (locus Brad i3g51340) derived from phytozome v7.0 (chr-ID Bd3; pos 523 90732 to 52391141)
agcactggtgggattagcgagtaaggaactacctgcacagtgtagttgttagctttttgtatttaacttgctgatgaatcattgatttttttcttgcaattagtctttaactttgagttgaggcatgcatctgtatgaaggcctgcatagtccatagctctccgcttccttaggaacagtctacagctaatgcgaaatgtacattctaactgaaataaagccaggaacacgaaatgttgtgaaaattattatagtaaaaaccaaaaaaatgataaatgttattttcactaatggattatatgaacttgtatgtgtggtactccttttttcttttcttatgatagaattgcaagctgtttttgcttccttttgcagatatttagaagacgtgatatacatcacagtctttg

SEQ ID NO: 15973 - DNA, 669 bp, Brachypodium distachyon
  Intron number 1 from transcript Bradi4g02020.1 (locus Brad i4g02020) derived from phytozome v7.0 (chr-ID Bd4; pos 132 6266 to 1326934)
gtttccactgagcagcaactatccctaatcctggggtgagtttgatttctcagtttattctctcctttttttggctaaatctactgaatgccctggataggtttgtcgcgagaattttcactgttcttataattatcaagtgttgcaattcatccagggttgtgtctcataaaaaccctgagctttaaattaacctgtctttgagttttgtttgcttttcctttcatcacatgttcatctgattcttttggggtggttacctaaggtcggctggaacctggaaatgcatcttttcccactgatttcgttggtcaaacaaagtgttcttggcacaagatgttctgaacaagtaaacccttcacactgataatcagtttacatatttagacattttttcctcttttaagttggttgagatttttagccgcttctttctcttcttcggcctcactggaagaagaaacatctctatctctaaattatcttatgttgttttctttcctttgatggcatgttactttttgaggacgaaaatgaaaggaagaagtattccaggagatacttagatgatttcgttttactgctcatttttctcaggttgtcatcaaactcttttttgcatgagcttctgcagacatacctggaactcctaggaagcaaatttccata

SEQ ID NO: 15974 - DNA, 937 bp, Brachypodium distachyon
  Intron number 1 from transcript Bradi5g10900.1 (locus Brad i5g10900) derived from phytozome v7.0 (chr-ID Bd5; pos 142 96850 to 14297786)
tcatcgacactcctggtaaattgtcaactcccagcttaatcgcttctgttgctagctgtctacgggttataattctgatatttcactgatataggggtaactttgcagaattcgttatgtttttttaggaaagaatttgttatgtttcgattaggctagtataggccgatttagtgccgtttcatgaggaaacctgtaggaacttaattttctgatgttgtcactatgcatgtcttgttttgtactagaggattcagtagtcataaattcactgaaaaaaagcctgaaaaatgaaccatgtcaaatcctatagctggaaaatattctcttccattccctgctttaccaatttatttcatatatcaaggtggaaatagttgttgtgtctcctgtgcaagatcatcttgcttcttcattaacatatacggagtagtacactacaacatagatacaatgttaccctcatttgagaagcagcttttggtatggtggtggagttgtaggtacacgactccaccaactagggttcaaatcttaatgctcacaatatattttaggggttatcccctacagtctttttctcaaaaaaaagtgttacccccgtttcattagaattatccttgttcttacgtgtcattgctgaataattcaatgtatttctgggttttttgcgactatcgtttgatgttgcatgtttgtgtgaagtccacgtgtgttaaatctggccttccagagtgctaagagaaagaaatatgctggattcaaagcctgtacagacacttttagacagatcacatttgtcttcatgtacctgtaactctaccatttaataaaatttagcagtgggtttataacctactatcttttctcaaaaaaaaaattaaaaaatgcgcaggaactatatataatgctctacttttttataggcttatttgac

SEQ ID NO: 15975 - DNA, 1000 bp, Brachypodium distachyon
  Intron number 2 from transcript Bradi4g03910.1 (locus Brad i4g03910) derived from phytozome v7.0 (chr-ID Bd4; pos 315 2388 to 3153387 reverse strand)
aggcacaagacggtgcgatagtgtttgcttagagagccgtgcataagcattgatcaggatacccgtctttttatctacctactgagtactgagtatgtatctaaatattgttctgtctcaaggttatgtatgatcgaactcaactatggacctactcagtgtatttaaatattgttctgtcaaggttatatataaatattgttctgtcaaggttatgtataaacctatgacagcccggtttgacgttttaaacagtcgagtatgttgttccataggttggcaaattatgacaacatcctgtctcttattacctgagacgttacaattgaactgtgtttctgggaagtagcatgaatatagcaactctgatgcatgtgcatatatttttcttggttgttacctgcaaagtagttagctatcttatttacttcattgttaatgtgggctatgatatgtaaaaaataaggcaccaattccttcattgttctgtttgcctggatgatgacatttaaatttagcccgaggtaatagcagggatcattcagctagtattaggttggtacccttacacttttattagaaagttaaaactgagtgatttgctgtagaaagatgtcatgtttgattatatgaattctattctggtttgcaacaaacctgcctattggaaactccttgtattaccacctaaaagataaacaatctttctggttctgttttaagaactcataagtggcttatcatcctctgctctatctgctgatagttcgaaggaaaactgactgtcccagtgagactcttgtgtcaatcattaatggcgaacaatgatcccagtgagaacattctctttgttctaaaaacaacatacttaatgattctgtgatgaagatctgatattatgaactatttctggtaatttgctgcatcttactcatcggctaatcatatttgaatgtatttttcagcggagactgatatacagaatctttactccataaat

SEQ ID NO: 15976 - DNA, 937 bp, Brachypodium distachyon
  Intron number 4 from transcript Bradi4g23960.1 (locus Brad i4g23960) derived from phytozome v7.0 (chr-ID Bd4; pos 289 46739 to 28947675)
atttgctgctcatgtactcatttcttatttgctacacatgtgcattattaattggtaactattgttgccagtggaccccacatcaactgcacattttaaaggagaaattcaaccaagcacccctaccaaatcttcccttggaaaagaaaaaagaaattcgcagatcttttgcggctgttgtctcactttgtcgtataagtaaattgctattgagccatggaatcaagccagcacatcagtcgattgaagctacatggagtgaagggtatttgctacaccatttctgctactccctccgacccatattacttgtctcaaatttgcccaaatttggatgtatctatgtttaaaaagcgtctagatacatgtaataagtaattccggccggagggagtacatgatttaacttgtgtgtgtgtggatagtaatgcataactaagccctaatgacttttgcgcaatattctcttgggcatggaagaagaaccttgttggatcctgttttcttaaaagcagaagtaatctcaactgctgacaacatacatgtaatttgtcgatatatagaggattcaagatgggccagtgcagcttaattagatgcgtttgagctgttccatttacagctgaacatcgatttacctatgtactctgattgatatatgtgataagtaatgcaacctccacctatcatgttcaccatcctttctgaaccaactgggcctacaagtctatctaaattccagcccgagttcctcctgattatgtaaacatcttgtgttataatgtctgatttgtctatccaaggaatcagaaccatatattgataccaaatcttcttcttgattttgtgcatcctctacttagtttcagaaataggccttttgttcctgacaccatggttcttgtttattgaagggcgtggaatttgttttcaagga

SEQ ID NO: 15977 - DNA, 823 bp, Brachypodium distachyon
  Intron number 1 from transcript Bradi4g16790.1 (locus Brad i4g16790) derived from phytozome v7.0 (chr-ID Bd4; pos 175 95828 to 17596650 reverse strand)
accgaccccgctgcccccgcctcttccttcataaagtaagcccacgactcctctcctcttccgccgcggcgccgcccctcctcctcctcctcgttctgtgcttggagaccccaatggctgctgtttctggaagctgctgcctgctgcggagcctagggcgcgggctgttcttctgcgtgacgcgttgcgtctgcacgggctgtttaggttcaaattcgtggggttggtcatggtcaggcattggcgctgcgttgctttgctcgctgaatggcaattagttggtgtctgtgatgcaacgttgacacgattgcttgtgacgtgctgatttttcgaggtggattcgggcatttcggcattcggcttgctctgacgggtctggcctttaggatatttaggaatgctaatagctgcaacccacgctgttactgtgcggttatttgtggaaggctggatagctgcagatttttttttgcctgcttttgatttcttgtactgatagtgatcgtagtgctatcatcttctcccggttcatgtcttaggattaccattttcagttgtagtgtccatggaaaccgaaaatttattgatgacaatgttatactcgagaccattttcctgtcatgaatctgatgaagctatacactctttgcttactctctgtttaggttaattatctcactgttctcttttctgaataacaagtagggttgtagactggtctagtttttttagtcaactgagctatgctcctataaaacttactcttgatggtctggaatttggtgttaactagatgactgaatattgcttttcaggtttgtga

SEQ ID NO: 15978 - DNA, 516 bp, Brachypodium distachyon
  Intron number 2 from transcript Bradi4g18990.1 (locus Brad i4g18990) derived from phytozome v7.0 (chr-ID Bd4; pos 215 73758 to 21574273 reverse strand)
atttcttttgcaaagagttcttcattacaaggtagttgacctagatattaagcataacatctcactcgaaataatcttccaaaatctcaccatgtaaccagagtgggagtagacatttattttgtatttactcaaacctttggatgctcttaatgtccttttcttcaatggatgtgttgtgtagcggggatactgttcacacgctaaaaaacatgcctgctgaacgtccacagctgaatatgctgatagacagcagatcgtctgatggtcgagtgttcttacttgttccttattatttaaactaccttttcacaggaatacgcagccattgctgcttcaacacccatgagcatctaaccttctagttttcagattatagttgatatcttcctggcattctattttgaatcttattactctgttatgatgtgaattgtgattgaatctcaacttatttattaatatttagaccatacaattaatgaatagccaccttcattttattctgcagattca

SEQ ID NO: 15979 - DNA, 752 bp, Brachypodium distachyon
  Intron number 3 from transcript Bradi4g01210.1 (locus Brad i4g01210) derived from phytozome v7.0 (chr-ID Bd4; pos 769 820 to 770571)
tagaatcagaaagtggagccttgacacattttgaggtagttttgttttttagctgcagatttagtttgtttttcctttgacaaactgatgtaaactcttgacatatttgtgtctccccaaatgagggcctacagtttcagtatatatgaacatgcaaaacttcttgtaggtacttatgtcatggcttgtccttcattagtttgcatcttgcctttctgcattaaacctcgcaggctgtgatgccattttccagttgtaaattaggccatctgattatttttcttgttcatattagcaaaaaggtaacaacctagaataaatgtgtagtctagaccagcacttattgtaacaagcaggagtacattgacattgtatgatgctagccatgggcaaatttgatggttcatgtaataatcaggaacatatggacaccacatgatgctattagtctgattctgatcccactttctgaacttttcagccacccagatagtgccaagcacaactcttctgtttattaacatatgtaagagattcatctttaattgataatgcatggtgtttacacagttgcaaacttgttacaggaatcaatagaatcaaacagaattcatttgcaaatatgtccacactaaaacactgcaggcatcaataacaatctgctgttatttcacttctggagatcatgaacttaaacactacctgtgcgatttgcaggtttttaccactctctcatttctcctattctcacg

SEQ ID NO: 15980 - DNA, 621 bp, Brachypodium distachyon
  Intron number 2 from transcript Bradi4g40060.1 (locus Brad i4g40060) derived from phytozome v7.0 (chr-ID Bd4; pos 445 53054 to 44553674)
gtggtgaattaatctggtaggtttttgcactcaagtttgagtggcttcgtctccttcaatacatgtgcagttgcggtctctgattgatcttctttccttgagagctgttctccgttgaaaatttcacagattattgagcactttgttttcttgagatgtacgtagatagtgattatataatgttgaagttagtgttcttgttgtgttttttttcaaaaatgagttaccgttattattgcaaacagagtgcatttatacatgttctgccaagcaaactaccattacaagaagattatgccgtgtttatctactgtaatggctgatcttgacatgatagttattatttccatatagcacacccactatgtccagaggcccaccattatatgccatttttaggcatcatatttgaaataaaatatatagatcttcttgaagcttgtcagcctgcccaaagcttctgagttatgatgtgccagtgttaagaatgtaggatgtattgcctcctaaatcttacatgtgttgcatgcagttttgttgaatcacttgttgccaataacgaaccatatcccatacttgatgtcgatgttcctcttaccttttatttaggtgtgagggtgg

SEQ ID NO: 15981 - DNA, 937 bp, Brachypodium distachyon
  Intron number 1 from transcript Bradi3g57290.1 (locus Brad i3g57290) derived from phytozome v7.0 (chr-ID Bd3; pos 569 43894 to 56944830)
tacgtcatcaacaacgttgggggcgggccccgaaggtttgcttacgccttccctaaccccaccactgtctgcctggatcgatgtttgactgcttgctgttgcgattagtgtgcttgcggttgccgttagggctgtttcggttagggttcgtgcctgcgccggtttgggcatgcctgctcgcgatttgtgtttggatgcggtatttctgtttgccagtgtcgaatagctggcacttgcgagttgcgtcccgttgaactggtcggggtctcgctttaggttgatactttctagtagttggaaaaattagttcgctcatactcatatgatatgtgtatatactctcataggtactagttgtgaactagttcttctttctgatatagaatactcggaagatatgagtcaatagtttcactgtttcagagtgggaacaaacccataaatagaactaatactgtgctcattttgatgattagacaagtctgtttctggtttgttcctagtctggagtgcatctgttaggttccttgttattgatagtgtgtatttgatcattgtagtctacgtcgtactctggagtcatgcccacagattcaggcgtccttatttgattgaatcatttagcgcttgtgtctttcagctgtacccacttggttcagcagcatccttgatattgcaagttggcatttaccaatttttattgttccacatggcatttaccaatttttttttattgttccatatgtgatctgtgtctcagtaaaagctgttgaagtacagttttgtcagtcagcatggcacattcaagtttggttgtcatatgccaaagtaactaatggaattataatgttgtccttttgcttagagggtatatggagttgtttcttgctgttgagctgattggttgaatatctgtaggatcattgtcgttctgaat

SEQ ID NO: 15982 - DNA, 902 bp, Brachypodium distachyon
  Intron number 3 from transcript Bradi4g44480.1 (locus Brad i4g44480) derived from phytozome v7.0 (chr-ID Bd4; pos 478 65588 to 47866489 reverse strand)
ttacccagtgtacgctcattccgctctcgtctgagtttgactgaatttatttcagctgtgaactctcttgtacagaattagttatctgtagcagaaaattgtcgtggctttggacggtgataaacaaagaatgtggtgtgtgatttagtgcctgctgctaattaacctctgagaaatttctctctgtctttgagaacatacgcccttgtatttactggaaagtatcttctcttaagaaattggaacaccaagctgctgtccttggaatgacagaaaggtgtgtgacaaggggggctcactcacttctgcaatgagcaaatccatctccgttttctgaggcttattaggatggtgtcaaccttaccttaattaagctcaccttcagggagagctggtggtagccattaaattttctgactcaaatttctatctcctgttcaaaatttctgatgaacctgcagattctattagctgggcctctggtattcctcttggcgttagtaagttagatctttctgttctggtgtaaaccattggtggcatattatccctgcttccacaccagctatctggaattcaaatttttcttctggctgttgatcattagcaaacttttgacaagagattactttggctaaacgacaactcaatattcaagtgtgttttgcacactgaaattgaatctataatacaacatcttttctgttattgcttatcacatactatgtatgatatctatcagctgttggtagctgcaccctgacaagtaatactatcatatcagattaagcataacaatggggttacatctgcatctttatatcggcttctgtaaactgcgtgatagtatacaacatctgttttcagctattgagatcttgtggtcaaagtactagtactac

SEQ ID NO: 15983 - DNA, 371 bp, Brachypodium distachyon
  Intron number 1 from transcript Bradi5g13340.1 (locus Brad i5g13340) derived from phytozome v7.0 (chr-ID Bd5; pos 169 31020 to 16931390)
tgcaatctcggggtctcctacctcgaaggtatcgcggatttttcttcctcggggaacctttttggtgggtgcgataggatttgttggcgttcgattttaggggaattattgattgctctggctcgtgcgtctgtcttttgctgggtctttttaactaaactctgggcctcttccagtttgattctaaattctaaagacttgtagttagtacctactccaactcgtagtggaaataccttctaggtttgttacatactccacttgtttgcaattaaaatcttcatctcgaagaattataaattttgaattgacaatgctgtcaaatctctttatactacagctgatccacccgaggctgaggaagctgttag

SEQ ID NO: 15984 - DNA, 592 bp, Brachypodium distachyon
  Intron number 1 from transcript Bradi4g10560.1 (locus Brad i4g10560) derived from phytozome v7.0 (chr-ID Bd4; pos 102 51257 to 10251848 reverse strand)
gatcaccgcttcctcgcccgctgccccaaattcaggtaacaaacagtagtcatgagtttggttcttgcactgtcaggagacaatcgaaaagcagagtttcagcggggcaaattatgtttcgtctagtctgaattgcagtttacgtgcctacgttttaacccccaaatgcaattatgtgttacttgcctgcactctcattataatctgaaatccaagctgtgtttgttttacccccaaattttagccaggagactatcgaaatctcaatttatggtgaaaattatgcttcttctgatgttaattgcagtttaattaggaaatgatgatttttacctccctttagatcattgatgtctgaaatctccgttgcattcaatgctgtccttgatatatatatatagccattttacaaactgtcctaagtcaaacatacagaatttggtttcaacatcttcttcgattttcagtatatgtcggttggatatttatatatttttgttttattaacctgtacatactaatctcaggaggcctcttttccaaactcttgcaagtaggagaagctttctgccacatcaggtaagatcttgta

SEQ ID NO: 15985 - DNA, 547 bp, Brachypodium distachyon
  Intron number 2 from transcript Bradi4g10920.1 (locus Brad i4g10920) derived from phytozome v7.0 (chr-ID Bd4; pos 106 09737 to 10610283)
gccatgtatgtatgctcggatttcagtactgtatgctgcgtgttaattgtacctgtataaagcctcggtcttgattttgtcttgtcgtgtgcagtagacttagcactgttttagttgtctagtgtatctctgcatagttgtcctgattactattgtttgaattatacatgctttgcaactcgctgtttctgcttttcttcttatctgtgctagggcaatatttagattgcatacaggtttctatattgatttgtggacagggtaccatgtaagcagatttctgtatttgttaacgtcgatggaagtcaatttattagaacaaggattgttcacttagtaggatgggttgtgcagcttttgaggctgggtaaattggtctccttcctagcaatactaatcctggcatatttgtagttaattgtctagtaactgtttgttacattattgttagtgtcagggtgtccagatctaatccttgattacagaacgtgcacatgtttacagtatggttttgaatgcttgcagtgggtggtccaaggggctgtgg

SEQ ID NO: 15986 - DNA, 959 bp, Brachypodium distachyon
  Intron number 1 from transcript Bradi4g31250.1 (locus Brad i4g31250) derived from phytozome v7.0 (chr-ID Bd4; pos 370 45715 to 37046673)
tccttgcttccggtgctgagatacttgggatccaggtgaggcatttatgctgcactccccggcaacttgcttaattttacagtattgatgtaggatttggtcaatcatcaatgttgtgtatgtgcgccggaggccagattgagtcgcaagtcataattgtagttgtggtatagttaaaacacattatgacttgctttatttgtagaatcagaatgatacagttctcttgcactcatgcttagcttgtcattctttgtatctgtagatctgtgttaagggtgttctgaatttcactgtagccagacagccaatggtcaatgcaccatgcccctagtatagcacaaatgatatgtagctttaacgataaatactggtaattaggattaaggagacctccatattgtggagatgggtctgtcatgttatcttgggattgaggacatatttcaacttatttggtatgtctgagattgatgggtgagggttatttcagtacataaatggtttttccctactgagggatatatctaagtatgctttcaaatgtagcgtgtacagcatgctgagctgtactttggctaaatgatcatcaaccttgtaaagtagacttcgacggtaggacaaatgtggtcggctcttccgattttataattttttataatgtacatcttatatttggtttagtcagtttcaagcttattttgggtccaatgttttggttgaactaaattttgttgctgcctctgtctacatgacctggtcatgctttacccaaaactatgtttttagccttaaatggaattagggtgatattcctttttcccaacttataccgttagctcaaccttaggaaaagatgggctaggattttgttatcatctggcttaacttctacagtttgattcatcttcttccaataagtcagcactgacagcttattacgttacttacatgtaagg

SEQ ID NO: 15987 - DNA, 787 bp, Brachypodium distachyon
  Intron number 1 from transcript Bradi4g05020.2 (locus Brad i4g05020) derived from phytozome v7.0 (chr-ID Bd4; pos 409 3830 to 4094616 reverse strand)
tcgacgacgaccacccgctggagagcaaggccggggtaattgatttgatctcagcctccggtggataagtgtactacagtagtacctcctagtttttaggtacctctagctccaaattagggcttgtggttaatgttttgtgtagcatgttggtattaaatggtgtaatgcttgttttttttttgtatgtggtgattttagttgttaatttgatatctctgtagcaaaggcaggaatttgcggcataagcttcttctgctcatatcttcttttgctagtgtagaagcagattgagttgcacattagatgtttgagctaagaatttagattgctttggcttttatatggtgcctcttttatctgcttatgactatcgatcttagggttcatgtgctaatgtagcattttcagtgtatgtatgttgcttctgcctaacctatagcttgttggaccttggcttacttttttgaacttcagttttgcttcgttcgcaaggaagtttgggtgatttaatatgatgtctctgttgggtttttagtagcggcattgttattccattcttacttgataagagttcgttaaaagacccagctatttcagcttttccatgtttagataatatatggatttgttaaaagatccagtaatgtgctaattttgggtgtaatgatgtgatctgtcataatggcagtattattgagctgttcctttacttgtaaagattagatccatctgattaatgtttaatctcatctcacctgttgtttttttatttagtttctaggag

SEQ ID NO: 15988 - DNA, 802 bp, Brachypodium distachyon
  Intron number 1 from transcript Bradi4g17130.1 (locus Brad i4g17130) derived from phytozome v7.0 (chr-ID Bd4; pos 180 42806 to 18043607 reverse strand)
acaagtaagcaagattccgacgagcggaccggaagcaggcgggaccggtgaggagcattttgttgttgggtgattgcttctctaaattagttaacttttagtgaatagtgaactagtagatgtagtaggactacgtatgtggacgaatgacgaactgcgatgatggaatgcgaaaaaccaaccctctatttatgaatttcgtgcgaaatttcaattttctcttttgttcggttttgattttcagtatgggcccgtttggtttatggccaaccctggccttaccaaattgttggcacgctcgtagtatttggttgatgcttggatggcgaccagcaaattggctaacccagcccagccccacgggtgcccgttgtttttccgccaacttgtgagcgagtcgatggcgttggaatcctgcgccaaataattggcagccaactccagccacagctaggtcagattctcctggctttgtcagcgcatcggccggccggccggccgacggaggtggtactggtggcccaaggcttgcacggggggactcgggtttcaaaactccaaatcaactgaggttgtacttcatcggagatgaggagatctgattatgttgggtggagattaagaagaacctgcaattcaggcgatgtgatcaattgatttctgaatcgatcgaggcgtcttgtaatggagatgtggagatgatccggtgagatggaattatgcagatgtgcttgaacttgagtctactttgctagatgtgaactcattacaaaattgttgatttattgtgtttacagatcac

SEQ ID NO: 15989 - DNA, 926 bp, Brachypodium distachyon
  Intron number 1 from transcript Bradi4g36250.1 (locus Brad i4g36250) derived from phytozome v7.0 (chr-ID Bd4; pos 415 17324 to 41518249 reverse strand)
aatcagattacaacaggaggctgggagttttccaggtacccttccgtagtggtccttgtcaaagtcattttacgtgatattatcacttaatttcagagcatacatggtaaacagtaagaaacaagaagttaataactgctttgatgtgcacgttcaactcccattttgcaaaatagctactgggattagaaggcatagttatggatttgaagaaatttgttctatatgtggtatcagttgagggttagtctgcggttgctgctttgtactgtgcttacttttgaagctttgtgtgtgccaaggaagttatgaaaaattcaaattctattgtactttgttctgtaaattaaactatgcaaagcctcgccaggtagggtgaattagtgaatctaaaacatatttggtgcaacagatgtagtgaatgtggtgtcatgctgccaatgttaaatggtttgagtcatctatgaagttcattaaattcatgcttttggttaagtatcatattttttgttaaaataaaattaagtatcataataaagcatgccacaatatgttttctgtgcatatatggtatgcagccagaccaaccatacatctgtaagagagatataagtcaactttccgtttttgcctaaagggtccttccattacaaaatgtatgtttctccaaccgattgtgccagacttttgaacaatgacaaggcatgtaccaacttcatgcttttgtccttaaaaattataagttgagagctcatagtatatgtatggtatgcgcaatattgctccaatcacagagcccgtcatatttagcagtatatggacactattatagattatacacaccacattggttacactgatttgtgtttccatctgatttgccttcttcctttgagttcaggtaagagcagagcttctatctgcag

SEQ ID NO: 15990 - DNA, 899 bp, Brachypodium distachyon
  Intron number 1 from transcript Bradi5g15550.1 (locus Brad i5g15550) derived from phytozome v7.0 (chr-ID Bd5; pos 189 08469 to 18909367)
caggtgagcgttgtcgcgcacctctcgttttggctaggattcgccatgcatgacctgtgtctgagctcaaagtgactaactgataacggatacgcggagggagtccatatatgagaaagctctgattcgcaaaaaagaaaaagggtccgtatatgcgggagctgtgttggcatttcgcaatgctctgtttccacatttctttctattcattgcctatgctcattgcagcttctgcaatctgacgatgctctaaaagtgcccatgaatattttatttctacttattattgcaacttttgcaatctgctgataatagctatacatcgctaggaagtggctgtaaaagtgcccgtgattcatactccctctctattccagattataagatgcggatgttctaattttgtcccaagtcaaatatcttaaagtttgacaaaaatttatactccctccatctaacaaaagatgtctcaactttgactaaatttgaatgcatctatatactaagtcatgtctagatacatccaaattttaacaaacttgagacatcttttgtcgaacggagggagtagaacaattatcaaaatctacaattctaaattagttttattaaatcctcatgatatatatcttcctatgtacttatttgatattttaggtattactatattttttctataaccttggtcaaattttaaaagtttgattttaagacaaagctagagtatctcagaatttcaaaaggagggagcatttttcagccgtaaattactaattagtccttagcatttcatgggacttccacagtttctttttatacagagtaatcagtagtaaaaatccaagtgcactgtacctcacgcaggaagctttggagaagcttggttattattcgggtga

SEQ ID NO: 15991 - DNA, 677 bp, Brachypodium distachyon
  Intron number 1 from transcript Bradi5g08400.2 (locus Brad i5g08400) derived from phytozome v7.0 (chr-ID Bd5; pos 111 09538 to 11110214)
attggtctaggctgttgcttggagttgtggactaggtaatctttcaggactgttgaatccagattgttcagttgaatttttttctttcttttctgcctttcgttttggatatcggtatctcttaaaaaaatattgttgcgggatgctttcacttgtcaggtttacagttgcaagattaaaaattgtaggtttcatggttgtagggtttgtattgagatgcttctttttagggactacggctggccaagggcagcctgcgccatttcattaaatcaaaagcaactgttatttacaattgagatgcaagccaaacaaaaatacagataagtgatttcaacacctttgctaaatgggagagcataacaccccaatcaaaaaattgtgttggggtgctattccccatttccttttccagaatgtcttgcttgtagttcattcattgtttccaagatgatgtttgtgctgttgtataccagtattatcgtgattttgggttagtgtatcatggatcaaatctaatttcaaggttcagtttctcatgatagtttcacaattttagttagagatgtatgccttcttttgttgctgtacaacttagttacttcatattttggcagataacttgcttatgtgtctgctctaactcttcgattattgaactgtagggagtgctggcg

SEQ ID NO: 15992 - DNA, 739 bp, Brachypodium distachyon
  Intron number 1 from transcript Bradi5g09080.1 (locus Brad i5g09080) derived from phytozome v7.0 (chr-ID Bd5; pos 122 05802 to 12206540)
tggagcagcccacctcaacgcccccgcttcagccggtacgacagcggccgcctcccgccggcaaggatacgttgagttccggcttcttgtagctagtatcttgggtgatgatttctcggcgatcttttcaccggaatcccattcgttttgtgcaatttggtgcgcctggatgttttgtatttcgttctcgatctgttttcgagtctttcttttgccaagtttatgggggatcggtgctttcttgtctataggatctgacggctgacgcagtgtagtttatgattattactattttcttggctcagttctttgaattagtggaagttgtttgcatactcggggcccggtgtgcaagttcttcatacctcgtgtagttctgaaagaacaaaaaaaaaaatagcagagaagactgaagaaggtggaagttgtttgtccaaaattgtgttcctttgatagtttgctgctagttcttggtccaatcgtgtgacttagtaacctatgttggatatcatcgaaagagaaggatgtttcgtcatagtattggagcagtgggtgttatgtttcattccacattcgtttttagtttcattattcacttcattgatttttttttgtatgagccatgtgtacaagtgtattccaataaagagagaaaggaggtccagtacaaacaatacaaaagtgaccaacttacacttcatttgtatttttaacaaagaattttctgcaatgttctaga

SEQ ID NO: 15993 - DNA, 775 bp, Brachypodium distachyon
  Intron number 1 from transcript Bradi4g30520.1 (locus Brad i4g30520) derived from phytozome v7.0 (chr-ID Bd4; pos 362 59296 to 36260070 reverse strand)
cgacggccaccgcttcctcaaccctccgccgcacggtatgtgccgacacactctgacttctcaccaccgccctactgtcttaggagacaaccggatagagatgggtttccccttttttccatctgtgcttgcgattggattctcggttataccttgcggtttatcttctgtgtccctgcgtgttcagggaaaggttcttccctacaacatcactagcatcgttgatttgtttgtgggggacaaatgatggtgctgggactgttctacgtaatctgcacttatcaaagggatagcagtacagggtgtgacacaattattagcagtagtttaatttgattatgggacagaagataaaaaaagattattcacaacttgttcatcttttcatcaaaagcaaaagcaatatcttcatgtttgattgaggggctttggttcatcctagcacaaagagcaccctggttgctaatcagatctagaattactgttcagaagaaaaaaaaagatgtggaactctgattcttctgttcaattgcacaatgctgttgcaggcatgggtgaaccgagtaggtagtctcgcgaccccaagatttttgcagtactttctagagcacttcatcacagtagaaaatcagcagttccaactcgctacttcaggctttatctaaaggaaaagcccaatatcatccatagtgttccacatttgatgttacgattttctttctgtaagcatgcgcactgaactgaaaaatcctgggtccaccactggttgcaggag

SEQ ID NO: 15994 - DNA, 908 bp, Brachypodium distachyon
  Intron number 5 from transcript Bradi3g52800.1 (locus Brad i3g52800) derived from phytozome v7.0 (chr-ID Bd3; pos 536 38826 to 53639733 reverse strand)
gtcccaacagtattagctaatcaggttagttgattcaatgatttggtttgataattttactctctattttattggtgtcaccaaaataattatgccatgatgtatagtatagattacagaagacattaccagttccgacatgtgcagaagttattaatcttcctaggttatcagttaactactttattatttttattttcgataatggaagctttattggttcttatcatcacatcaagccaacaaaaccaaacttattttctctaggttctcaaaacccacttgtttaaaatagtgcaatttaagtatttagcacattcttttggaaaggactatttaagtattcatcaccaggattaatgcggctaaaccgacctggactagaggactcttttgggatatgatcatcctcggtgcctggggtatctggaaggagagaaaccaaaagatttttgaaggcattgttccctccaaaaactcttgggtagctaggctcaaatctgatctggaacttctcaagtacaggcttttctaaagacacccagaaaaatcaacttgtagcatctctttagttttttgtggagcagctttgctcttcgatatttgttcatatgttgtaactctttctgtgtgtaatataattatgcagtaaggagcctctcctgctgttttacgggtcaaaatatatatttaaaaatagtctataagggcgtcaagtaaatggaaatcgatcagaactatgtgggcaaactaggataaataaatatccataggacctaacggtgttgctttatcatacagtttcaggcaatcttattgctagcatcttcactgttactttgctttacttgattatttataatattgctatttaacacagattgctgaggtccatattgatctgggag

SEQ ID NO: 15995 - DNA, 559 bp, Brachypodium distachyon
  Intron number 2 from transcript Bradi4g18900.1 (locus Brad i4g18900) derived from phytozome v7.0 (chr-ID Bd4; pos 214 65845 to 21466403)
aaccccagcagtttctttccatatcaccaaggtttgtatgtttgaaacattggtaatttggtgaccctatttactaattctgtctgtattctgtgttgcaatttatgtatgcagtcattataattgttgactctttgttgacactccctccgcccagaaaaataaggcacacggtctttctgaaatttatatttcaccaagaatgggttcagtagtgtggattacgtgatacgaaattaatatttgtcggattcgtattaaaagcacttttcgatggtatcacattggttaatgttaaatcttgggaaatgtgcgcacacggagggagtaacaaacaatatccagttttgggtaaaaaacaaactgcatccagcagattgcccacttattttgttaggggaaactgtatgtatttcttcacttagtcttgtctttttcatgttcttttgatagtgcctttcttcttgaagtgttttcacaatcaatacacaggttttctgatataacattgtcctgtcttacagtgaataaattttctgtctacccgcgaacatttcct

SEQ ID NO: 15996 - DNA, 510 bp, Brachypodium distachyon
  Intron number 2 from transcript Bradi4g32260.1 (locus Brad i4g32260) derived from phytozome v7.0 (chr-ID Bd4; pos 379 50245 to 37950754)
caggtaggagtgttttcttaagcagaaacaggtagtggcagttaatttgcttgctatagtgtataactttgaagaccacacttgtagcttgtttatgctagaacttgaggcaacagtgaacataacgtcacaactgaagtaattaatggcatccgataaatttggctggcataattcaacattcattctagataaaatatagttcattgacataatgtttgccatgatcataaaatatagttcatttgtcataagcatcatttatttttggcatagcattttttttccaaaggaattgtctaggatctttcaaaaccataatggattaacagatgtattgccttttgctttcaagaagtctcaaactgcttttcaactggtcattttgttgtggtgtcatttattatgtcaccggacatcagattagttgctttatggttttcaacctttgactaaaagttgcacagcatgtttgccatgatcttaaagtaacactggtttgatgtgtag

SEQ ID NO: 15997 - DNA, 772 bp, Brachypodium distachyon
  Intron number 3 from transcript Bradi3g52270.1 (locus Brad i3g52270) derived from phytozome v7.0 (chr-ID Bd3; pos 532 33040 to 53233811 reverse strand)
cttctgacagtatgaattcttctatcacttaacacaaacaaatttccaaatgctcatgtcaaaatgttatgtaaaaatttaaactattattgtttgagtcctttgtgtgcttatgaaatttcgttataaaaatattagttttgcaccctgtgtaaaatgacaagttcactacttattgttttttcttattctgaagagcactgaatacatgttgttctctcagtgcgcagaaatgttttttctttgatgaaaatttaaaggcacatataagacattaaatatgtgtatttttttattgtttttacacatttaaatatatttttatggatttactgtttaccctgggagcatttcggctctctccaccatttgccgctatttaatgataacggcacactcaagacctagtcaagttgagtgtcccatatgcatcctgggatccatttcgcctctctctgctgtctaatgataacggcacagttatgacttagtcaagttgagtttgccctattcactccactaagtttttctgggttcttcactaattagtgagaaaaaggtatgggctttggactttggatcttgaactctattcagtatccttctagcatgtgttttgtaccttgaaactttcatttttgtgtttacacagtttaccattatctctttgattttccttgcatcctctcactatattaattgctaatagtgtgtaattaaaaaatccgttgtgaatttatattttctggtgcagggtgcgacaatagtggat

SEQ ID NO: 15998 - DNA, 1024 bp, Brachypodium distachyon
  Intron number 2 from transcript Bradi4g26620.1 (locus Brad i4g26620) derived from phytozome v7.0 (chr-ID Bd4; pos 317 33512 to 31734535)
gaagtcttcagcgttatcttaaaggtacagagattgtgtgcaattttatttccccagctgtactcattatagaacaagtacaccagctttccaattcaaaataaattaatatatatatacattcatcaaatttttgcttactctcgggggcgtatgtgacccaagtttgaatttcacaatatgaagttggatcacactgtgaaaataagcaccatacactaagagcatctccagccgtcttcgtaaactgactcccagaaccaaaataactggctccaactgagtaattaaccaactcctcgtcctgcctgtcctcctccttggtcgaacaagcgtttctcgctcgccacaatgcaaccactgtcaggtgagctttccctgtcccacaacaagtattttcacacgtattgtttctccaaagcaagaacctagtgacattgggaatattgagcacaatgcaatagcacacactcaactaataggctaggctccctgcaagtgtaaaggatgcattgtcatatttttccatgagaaacagtgtcgaactcacagtgaagcgtggttaggtttatttcctcctaaacctaaaacgcaacttgttgggttataattactccattatatgggctgggcgacggatcctatgcaagttaattaagtctaagcctctggtttttgctcacattgcacgtgtgcgcactaatggtcctgccttgactgtgtcccacccaagtttctggaaagacaaccctatgcagtggttccttaaaaaaagaaccaccaaaaattgcaacatgttgagaaatgtactaactacttcatgtttggtgctttttgacgccttcatcagaattttggttcaggtggctctttgagccccagtgatctcttaaagagacactccagctctttgagaaaggcgactgttttgttgagtaaaaattagtcatgcaaaactcatggagattaatggaaatatcgtttccaaattaatttgaatgttcttttatgcttgtatagagaa

SEQ ID NO: 15999 - DNA, 479 bp, Brachypodium distachyon
  Intron number 2 from transcript Bradi4g34440.1 (locus Brad i4g34440) derived from phytozome v7.0 (chr-ID Bd4; pos 400 68556 to 40069034)
tcctcccgtgagctcctcctccctttccttactcgtttagtattaatgaaacatagttaggtttctctttgaatctgtagtgaataagggaggaaatagagttgctcatttcttagctcaatttgctaatggaggtgtagatgctgcgcttttgcagctagagtcacctcccggctattgcagagcttctcgctcatgattgtaagaacattattccaatctaataaaatcccctattccaccgcgagaaattaaattatgaaacatagtttagttttcttttaccgtgcaaagtttgattaccgttatgataaaattcactgtaacacaaatgttaaacaatccctatatcttagggcattggtttggagcggtcgtaatttctttcttagaagtgatttacatttattttttcttactgagtgaagcatttgctgccttcagatatttggcggttggcgcagcaggtcaaagttaga

SEQ ID NO: 16000 - DNA, 688 bp, Brachypodium distachyon
  Intron number 1 from transcript Bradi4g13610.1 (locus Brad i4g13610) derived from phytozome v7.0 (chr-ID Bd4; pos 139 77557 to 13978244 reverse strand)
gatctccaccacgaggtcttccgggagcgccggcggtgagtgccgatcctgccgccgctatctccgcgaaataatttcaagggagccggacatgactcgagtttcttccgaaattgggaccggaaggcgattgatttcggttgaagaacagaaagggtcgtcgcagccgcaatggcaatgtaagagttgcttctgctagttcccgctgttcttccttcgcgtgtcgatcatcagttcaatatccaaggatatattttgatgattttccttcctaaatgcaatgtagaaatcaactcgcaacgaagcagctgctggcaaaggagacaggattaggaagctgcctgatgacattctgctcaacatcctggagaggacagacacactcgatcgatgccctcagaatctgcattctttttatttatttttagggaaaacagtagatcaacagatctactgccaatatattaagcaaaatgaaacaaactgtacatgatgataaccaaattggttatccagcgctaaacaagaaaggaaattacaaaaatcatctagccagtcttcaaggcccacatgggacttttttttagctctatgaaatacaaaattcatctcttcaatgaaaattcttttgcatctataaagtgatggctggaacctcttgaaaatgcaatcatttctgaccttccag

SEQ ID NO: 16001 - DNA, 356 bp, Brachypodium distachyon
  Intron number 1 from transcript Bradi4g20940.1 (locus Brad i4g20940) derived from phytozome v7.0 (chr-ID Bd4; pos 240 83542 to 24083897)
caagcttcaggatcgaaggtaacatttctttgatgtgtgattgttcccagtcttgccttattttgcttgattccttgccctttcttttggttggattcatcagtttcttggtacctctcgatgcagaggccggggcataaccccttttcggaaaagaaaagaaaaataacagtttcttggttcatctcgttagtagtcgatcgtttgattttgtacaaatttgtgtgtagaagtatatgacatttcacccagtatgtcttggaatttatggtggcataaacatgattgtcttatgctttaataattttcttctttccacagatttcgtcacttgcggtgcagttctttcagagcag

SEQ ID NO: 16002 - DNA, 986 bp, Brachypodium distachyon
  Intron number 1 from transcript Bradi4g04580.1 (locus Brad i4g04580) derived from phytozome v7.0 (chr-ID Bd4; pos 377 7086 to 3778071)
tgcgattcctgcgcaagacgctgcgagcaaaccaggtacgtagatcgaagccaccagttccaatcgccgcgaactataagctgttttcctctccccttctttgtgtttcccctatctttcttccttaggtttctttcctgttagagtgatgctcgtttcttgattcgttctatgctccgagctagcttcgccggagcttggatccctggacggttttcatttttacgaaatttagtttaattttgcatatattaagttgttatcgttgtgtgttcaccaaaggcggccgcggccttgttctcttgacctcgtcccaagcatttaatcactagttcgatctgtgagggttaagaggcggacgacggggtactctgggacttgtagcttgtctgaacattcgattgggagttaagctaaaagttggtattcctcattccaaagggggaagctctacgctcaacttttgttgatgcccttagatttctacttctaggtgattagatagggtatgtacttccggtactattggattttgttgctgatgaaaatccattgtgctatgtcgatatgaggtccttcgttatttcgggtctggtttaatttgtcatttgacatgccacatcttggcatggagagaggtggttagtgctgtctgtctaactgccagttcaatcagagcgcaattgcaagtacccaaaattgtgtgtctttgatctccaattgctgctataggttggcttttgatgggaggtcatgaattcttctggcaaatcatgacctctattccagctttgtatttctgtttgattcgagcaatatggtggcatgaacataatgccaatgtctctgaatgttgatgtttataaagtacgcttgtcttaaaatgttggtttctgattcaagatttgccttattgggctctgattcaaagttttcctctaacgcctgcaggcagcatctcgtttgctatctacctctcgcagttt

SEQ ID NO: 16003 - DNA, 713 bp, Brachypodium distachyon
  Intron number 2 from transcript Bradi4g13340.1 (locus Brad i4g13340) derived from phytozome v7.0 (chr-ID Bd4; pos 135 95237 to 13595949)
accccgagaacatcgacacctccaagaccgtggtggtgagttgagtatatattggatctaataatggctgaagattggctcaaatttggtgctgttattattggggaaaaaaaagtagaatgtgttgtgcgtggtccagtgcctgacgctagagttctggattccaacctccagatgattgacatcatcttctgcaaactttggagaacataatgcatgagccggtgtggtttgttgtcctccagatatggctcttgacttcagatttccttgatttatagcaacgttggtattgtcaagtagacatgatgtcatgtcagccctaaaagcgaatcactgatggtatttttttagacaaggcatgatcaaatacctgacgagttaggatttggttgaccaaatttccatactgataagatgccgacactattactccttcaaaagatgtgtacctcttatgcttcagatgatgatctgtagcacagagtttggcttgttgatgtttgtcaaagattatctaaatgaccttcctgctctcaaagtctgaaattcttttgtttaacctcgttgcagctttagttgatgcccagttgaaagtttggttccatgctctgttttgaatttcttttcttatgcccatcctaaaatgctcttactcttgacggtgtataattataggtaccacaaggtcatatttgggtgcagggcgacaa

SEQ ID NO: 16004 - DNA, 397 bp, Brachypodium distachyon
  Intron number 1 from transcript Bradi4g19670.1 (locus Brad i4g19670) derived from phytozome v7.0 (chr-ID Bd4; pos 225 48029 to 22548425 reverse strand)
ttctcgacaagcccctcagccgtggcagacaggaggtatgggtcttccacacatcgaaaccccttcagatctgcacagtcacggcgtcgatccgtgctatattttttgtccgtgatggttacgtagcttggtacagaactctgtgacggtagggaagcagaactacccaactaaggaacggtagcttgttggcattgatccaaagcatccccatttggttcagtggaatcatttgctttgattgtctagtggcagtgttcagtttctttatgtctggaggaggatacaggagcaatcaagaaagaaaacatccatttgcttgcctattttgttttcttgataaatgttctctgtattcataggtcagtttgagtgcgtttgcattcttgttctcgga

SEQ ID NO: 16005 - DNA, 524 bp, Brachypodium distachyon
  Intron number 2 from transcript Bradi4g00270.1 (locus Brad i4g00270) derived from phytozome v7.0 (chr-ID Bd4; pos 971 55 to 97678 reverse strand)
gtggtagtgatccatctataggttctggttcacaggtcatatttttctcactgctactaatgctttgtcacacgatcacaataaaaagttgatgcactgcgcatgtcactcttaagcaatttcaaatgattatctagatttcaagttttctctctgtgggttgtctgattcataggattctgacctgtaggaagtttctttgctctatgtttatgggaaaatcaccattgactcatgcctcttgtaaagcttcccatgtttctcctacggtgcaatcaaacaacctctcaaccctgcatttttggaatcctgcatcaaagaggctcttaccatctggtgtggtttgctataatcaaacaacacaaggactaaagattctgttattttgtatttcgctattctttcccgaagatgataaatcattatttagttgtcatctctcgacatgcataccagtttcacgaattgacagtgtaacttatagttgttgttttttaatcctcaggtagctagccttgaaacat

SEQ ID NO: 16006 - DNA, 741 bp, Brachypodium distachyon
  Intron number 2 from transcript Bradi3g47280.1 (locus Brad i3g47280) derived from phytozome v7.0 (chr-ID Bd3; pos 489 35664 to 48936404)
gtgagcttgggagaatccttcctgaccaccaccaggtacgatcgttttggaattgggttgctagggagaaccgaatttatcgagcgacccaaactgtacaactcgttcgaatttatgatgggggtgtagactggagtgagctgatgcccacccaaatagagcaatgcgtttgcgtggtgaggtaaagtgaatacaaggggatttgatgatttgccccaatttagttggactttgatcaaattttcgagtcatcgatgtggaatgtacatgtagaaactttaatttccaggcatcagtaattttgtttcttctgggtagttatccttatccatcctttcctcactgattagtgcagaacgctagcatcatctgaaacaaacaaagcttcttcccacctgtgaggtgctgactgctgaacgtcttgtgccatgttctggctttaggagcacaacaaacacaaacatcagtactttcatactccctccgtccggaaatcagtcacttggatttgtatagattccgtgacttggatttgtatatctgtacaaatccaagtcactgatttccggacggagggagtacaaaacttagagggagcacttgaagagagaatcatatgcttgttcagaatgcacattcatcgcttatcggttgttttgttttcccttacattgtgtcgtagttctgctattgactgtgctttattatctgtatgtagaattcgtacctgcagaaaattgc

SEQ ID NO: 16007 - DNA, 972 bp, Brachypodium distachyon
  Intron number 2 from transcript Bradi4g29480.1 (locus Brad i4g29480) derived from phytozome v7.0 (chr-ID Bd4; pos 349 45009 to 34945980 reverse strand)
tctgcaccgaggcatgtatacagtgtgcacacttgctcttgttctagctttttggcattgcgggcggagccaggatttgactttagttgagaatctggtagatattctcttaaagaaattgttaaataattgagttcttgttgagagttctcgagttacatggtatgagaaagaaatgtgattgtgtcaacattggagaaagaaatgaaccaaatgattgtgttggagagatgactgaaaggtgaaagcatggaccaaaattgacactggaataaacaaatgtggttaggaaattaaggagccaatgagatgtcctggattggctggggaatgaacattgtcaattactgtcctagtctcttagaaatgcaaacattgtcatgatggttcgtatggactcctgcattttgtgtcagagacccgtgtagtagctgaaatagacgaaattaatggatgttgtgaagtatctttagataggttccatttggattggttggagatacaaactgccggtctaggataccatgcaatgtatacaggtaaaccgtaaacttgagtgcaacagttgtccattacgatattggatactggtaccagaatattcaggttgatcagttgtcaccagttacaacttactacttggcttagcttgaattctgtctgtgtcttaatttgttttcgaaaaggaggtcaaatccctcggtctctgtatcttaatatgctatcaactttgctagttcttgaattcgacctatgtccggcttagaagaaccttgaaacaagcctgtcactgctagagctaaggcgcggatgtcccattttgtttttccgatagttttgtgtgggcaaaaactggatgtcagatgtgttaacaataatatcgcaattgtctttcagcatgccaatagttataatctggcaaagctctaagatgtgattcccatttccaggtcttgggaaccttcttgcaac

SEQ ID NO: 16008 - DNA, 910 bp, Brachypodium distachyon
  Intron number 1 from transcript Bradi4g31520.1 (locus Brad i4g31520) derived from phytozome v7.0 (chr-ID Bd4; pos 372 78545 to 37279454 reverse strand)
tcgaggctgaagaaggtgacactgccaccacgaaggtgatttcttactattttctccgttcaacgaaaatgtcttaagtttatcaaaatttggatgtatctaaatatgacttagtgtatagaaacattcaaatttagtcaaaattgagacattttttgttgaacggaggaactatgaaaatataattgctgtcgccatgggcgcgcaatgccccaacttgctttctctcagtggccacaaaacgtcacataggactccacgaagatggtactccttccggccaaaattatttgtcgaaatcttacatgtatctagacgttttttaaatatagatacattcatattttagacaaatttgagacaggagggtatcttcaatgcgcatgcaccttgctgaaatgctgagcaagccaagcaccaccatgccgacttgagcgccgcatccatgcggtgtctagttgcctcaggacatcgacaataacatcgcagagcattttgaaaagaaaaaaaagaagaatgtgaacagaggtaatctgacggtctggccaatccttgcacaaagtaactacacacaaaatgaagaaacgagcaagaaaacacaaacacactctactctgaaaagaatggggcagaactttcagcctgcgcagctaggccagcttggcattcagcaaagtcccttatttatgcccccaaaatgttttttttttctttctttctaagaactagtcatcttgcaggccttgcgtggcccacatgtcaccaatcgcattggcgcttctactgaaaactccatagtttggtgatttcgtcaacattacattggatgaatcgctactctcgtatgcttgagtccacgcgacttgtttctgcagaaaaagtttctcaaaacggcactccgtccccacgg

SEQ ID NO: 16009 - DNA, 1029 bp, Brachypodium distachyon
  Intron number 1 from transcript Bradi3g50940.1 (locus Brad i3g50940) derived from phytozome v7.0 (chr-ID Bd3; pos 520 89931 to 52090959 reverse strand)
gccgtaacattttgatcattggcatagtatgttccaatcaaatgttaggatatagagttatagttctttaagtgcccgttaataactaatctttacaaaaaaaagattacaacaaatttacaacttaatgttgcatcatactatgttagacgataaatattttatgacggcctgtgtgtgtctcaaaccattttcatgtttagtttctagcccatcagatatattcaccttattaaatcttggccatcaaatatgagatctaacggtctagataattcagatggtgtcgatcagcgtggtgcttcccctcggtaccactcattgtgcttttagtaagatcacgtgttaggatgtagagttatatttttttaaacatacgcgatccgtgcaaaaaatatagattatgacgaattgaggcgagattactacttaataatcacgtgatccctgaaaaaataatgaaaaaagttttcatgtcgtaacatatcgtcgaacacaatatgttgcatcatactgcgtttggcagcatgcgaagaaatatttggcctacatagcatattgggcatatgtggcctcaaaccactttgatgttttgtccctagcccattagatatatccacctaattaaatcttggccatcaaatgtgagatataacggtctaaataattcagatgatgtggatcagcatggtgcctcccctcggtacccctcatattgcttttagtatataatagatttgttaaattttgcatgtctattcttgttagtagaagtagtagaagaggaattattaaaaaagttttttcatttaaatcatacaaaaatgttttcttcgtttctggtatagttataagaacaaatagaaataagatcgtgtcggattttaacatataccgaaggtttcgaagacctctgccctatccactagacaacagatgctttcattttgtatttgcatctttattttcatgttctttatgaaatcctaaatattcttgattatggattcttttttatagatagaaggg

SEQ ID NO: 16010 - DNA, 598 bp, Brachypodium distachyon
  Intron number 2 from transcript Bradi4g14820.1 (locus Brad i4g14820) derived from phytozome v7.0 (chr-ID Bd4; pos 154 48689 to 15449286)
aggagaagcagtcggaggaggagggtggagctcaggtgagctaattctctattccctttcttctttttatctcacatgtccatgtgtttggcctggcagtgtttcccattgccatcaatttgcctgtctgcttccctgcagaccaatatgtgcaacgctgtgttgtttcttagttgacaataatgctactatcccaactaccatgcaaagatcaaaagatcctgctcaatgacacttgttcatttggtattttagtggatagtataagatgataatctttatgaggtttttttaactgttataatcaattcttcatcttctttggctacgagtaaagtgaactggttcatcttataccattccacacgaatgaaaatatcaatagaaaatgaggaataaattgtttctatttttttttttgctggatcacatcatgagaccaaccatcctattattgaggtttcccttagagcaagcctgtccatggtagcttactagcttagtcttttcatgctttagtatgcatttacaaaaattgaagtggataccaaccttttatttttgttatttataaagcaccttttgcaggaggagcagc

SEQ ID NO: 16011 - DNA, 786 bp, Brachypodium distachyon
  Intron number 2 from transcript Bradi4g08590.1 (locus Brad i4g08590) derived from phytozome v7.0 (chr-ID Bd4; pos 770 9690 to 7710475 reverse strand)
gagttcactgttatcttggaggaaacttcttcaaggtatgaacgtatcttcaatcatagcaactatgcgagctggcaaattttaccaattgccaagtaattgaacactgactcattcttagtttgtccaatttccccttttgtcatttcctgaactgttttggtcaaaattcatatatccatgattgggctgatcctttttctgtttttcatttggggctgtatgctgttaatcctactttgttttttaaccttagcaattaaggaaaacctgtgccgtttgttagatgcatagtttctttacatttctacaccgtacagtctcgtttgaaattaaggagcctggtatgtcagctccaacgtttgagatcgtgaaaacatttgacagttgtagccaactgctttcatctatttagggcttggttgttttgctgtatgtgttctagtacactgaaatactggttataagcaaaacgtggaaatcgtcctatatttaacccaaagtcatacttgaaatggtcaactcacataggattgctgtgttgaaagtctagttatattggtcaagccacagagggttgttacgtagttggaaattttatgtgtgatattttttatagtttctactcatttaagatccagcagttttcagcagcagcatggataatacagtttgttaatgcttgagacatgtacattatgtaaaaatgaatgccaatatcaaactcggaaaaatgtaaactcaaaggttatcaatttttcagggctgttggtaggagtccagaac

SEQ ID NO: 16012 - DNA, 862 bp, Brachypodium distachyon
  Intron number 2 from transcript Bradi4g22680.1 (locus Brad i4g22680) derived from phytozome v7.0 (chr-ID Bd4; pos 271 31807 to 27132668 reverse strand)
ccacagccactgccaaggtaaatttaattatcattttattctaaaaaaaggtaaaattatcattttactgccaaagaacattaaggatttattgcacctgtattccagtcaaaatttccattggaaagaaaacattgaatttgagaggtgtagaagaggggaagtagaactagataatatgatcttgcaggtcccttttgttattgtgtaattaactatatatggatgtggtatatatatggtgcagctagctagggctacatgttgcatggatcatggtaccgttatctatttttagggtaaccaatgctccggagtcgagtaccgttccaaatccatgcaagtattttgaccggatcaaacaatggcggaggttggtgagattttgtaggcgatgtggatttgtcatgatgcttaaaggtgttatttgtcggaaagtaactcgtgtgcgttaacgttactcttagtcttaatgatatctcccattttgtcgccgtatagttggagtttccaactatggtctaacgacatgtatggtcaatatgcttatcttgaggtgcttttgttttggggtgtccagagttattgacattattttgttcattgaatatttttacttgtagctttgtttttttaaaggtgatagttgaatgatggaatcacgttcggccttagaattgttatgtggataatactccttatgtacatagtaacaacacatttactgggacatgaggatgagaagattacctccatcaaatatacctgagctaaaaccatatatgtactgctctttctataagaatttgttcgcctactgtcatcactatttcttaacgtcttgtgctctgcgtgcagagaa

SEQ ID NO: 16013 - DNA, 951 bp, Brachypodium distachyon
  Intron number 1 from transcript Bradi3g59070.1 (locus Brad i3g59070) derived from phytozome v7.0 (chr-ID Bd3; pos 583 42394 to 58343344 reverse strand)
gacctcggccccggcaaggacacctacatatacaggtctcgtcaccccgttctcgattatttttttactcggtcctcgcgttggaatgcctcgtgaaatcaaattgtcgtttatcctttgcatgctcgtcggttttctctttcgtgtggcttttactgtttcttgttgtttttcccccattaaattccaaccattctcctatgttgctctgcggtgtgatttcgttcggccggcgccgctcgttcggtttccacgtcaaggctggctgcgcctagatcgaatcttctttgccatgttgctggctgtttacgattctctctgcccattaatttttttgttgacgaaaatctgcgcattaattagatgcgaattttggtaatgtatctcgtggctgcgtcctcgtttttttagggaagtatttgcgatctgttttcgtttcgcttatcaaaatttggcaagtatttgtgatcttccctgtttgtgaattcagagaagcactctaccatcgatcctcattttggcagggtggattagttagtactgtagtaagaatctgagaatctagttctcgcctgaggaatagaggaatattcgacgcgacccggcgtagtatttggtgccggtatattattggtctgctttaccaagtttatactcccgtaaaaatccttttatactgtatactactgctgtactccgctaagcagagcattaaacaaaattaagcggccaatcatacgatccagctgttgtttgattatgacatgtataaactcgggtcactcgacggcaccatctaactctgatcaaccacagagttttaaataatactccgttgttagagatgtctgtctgtgccatgaatgattgattgccagctgaagtgaattcctttgttgttgtgcgtgtcgtgcaggggcgaggtggcgttctgcagccacgagtgcaggg

SEQ ID NO: 16014 - DNA, 654 bp, Brachypodium distachyon
  Intron number 2 from transcript Bradi4g04700.1 (locus Brad i4g04700) derived from phytozome v7.0 (chr-ID Bd4; pos 386 9510 to 3870163)
ctagtcaggtaaacggcaagtgatcggtgtcttttgtttcgcagtatacttgcattgcaccttataaacagaagcatcatcttgatttgagagttgaaaatttggtagcctgctgaaaccaagttctgcaaggaaaagtagctggtgttgctaggacatacacatgtactaccgccgttgctaaatataagatgttctaactttgtcctacgtcaaacttcttaaagttgaccaagtttatagaaaaatataccaagtttgactaactctatcatgtttacaggacaaatatatatcatgagtatcaaataagtataccatgaaattatatatcatgacaaatttagtaaaactaacttagagttgtagatgtgggtagatttttctacaaacttggtcaaactttaagagtttgactttggacaaagctaagacatcttataattaggaatggagggactagtttctacttatcaagattttcttttacctcaaattcttgccactataactgttcttactattatgttacaagctatgctgttacttgtgttctttgcaaatctgttccctttatttactacccataattgattgaaaaagatgaactatttttcagactgaagggacaaaagattccagtaggtcgcaaga

SEQ ID NO: 16015 - DNA, 812 bp, Brachypodium distachyon
  Intron number 1 from transcript Bradi4g23250.1 (locus Brad i4g23250) derived from phytozome v7.0 (chr-ID Bd4; pos 279 05616 to 27906427)
ctagccatctggagttgatatctcatcctaaaattgtaagcatactaactactgtttccactcctatcattgtttgttattcactggttatttggttaattttgtttgttgtatatatcaccatccattcctagacatgcataaacacaaaatttatcaactttagggattatgacaaaaatcattcttaaatgtgtggtttgtacttttcaaacttctgaacgtagtataatttgggaatttaagattgatcggcaactattaatttcattagggctagtgagttgagtgcctgtcctgtacgggcagtatatccagatgcagaggaacttcaacatgcaccacgagttatgaacagttcttgttactacttttactaaatacaacctatactttaagaagggggggagccaggtgaatagttgagagggggcactttaaacattcttaagaagttataactcaaattagagggggcatcaatggtgaaaatctacaatttgtattggtatatcaaaattgagtggatccgcccatgctttaagacagcaaactatttcatgtattttgtccaatcaagccattatttctattggagttagcaatgatccattttctgtttttctgatgtcctgacccatgctatacactgtcttcccatatacaagtggcataaacaatcctttgatgaactttctggttaccatagaatctatagttatcaatgcttgtttcttcagtttttctgattgcatgttaatagctagtctacgagttttttttaattcttgtgcaatttctttagtatatct

SEQ ID NO: 16016 - DNA, 622 bp, Brachypodium distachyon
  Intron number 2 from transcript Bradi5g14180.1 (locus Brad i5g14180) derived from phytozome v7.0 (chr-ID Bd5; pos 176 55354 to 17655975 reverse strand)
ttgtgtccggggactgcatattggtcggcctccaggtatttcaatcttgttgatgatgttttagaatatccaatcaaagattctttggatggccttgcaaaaaaaaactgttccaatgagactgaattctgtatgatattcctggaaatgtgtattatgataattggagtcaaattccatgttatgtgcttgttcttatacaatatgatcattgtttgtaccctagcgtcctaaaatgagctaaccaggagaatggattaaaaggagttatgggcagatcttcttctagtactttaggtttgcttgagctcccaatttgctagggaatgtttttccatattctcaagtatgtccaacatacacagatttcgtactctattgttttcatttgattcgaccactgtccccttaacaaatattgtcatcattttgtcaaaaagatttattggcagatctgctgtccttctatctagaataaatacaaaacatagttgtataactacctgtactggagacaggacaaacatatagccaaactgtagcatgtatctgactgtagacaaggtgcaactttgcaacttcgctaattagtttctctgttctgcagcctatcctagtcttt

SEQ ID NO: 16017 - DNA, 1036 bp, Brachypodium distachyon
  Intron number 1 from transcript Bradi5g10770.1 (locus Brad i5g10770) derived from phytozome v7.0 (chr-ID Bd5; pos 140 91065 to 14092100)
aggccaagctcaaggaggccgaccaccggaggcaggtatgtgtctctgtcgggtacctttgtttttgtttcgtgcttttattatctttctttccctttccttcttcttccttctcgtggtggattgcgaagttggggcgtgaactgtgaattcaagtcctgtataatatcttattgttctccctaagcggtgaaatgatagctgcatttcctgctgttgaagtggtattaattttggaggattttacagcaactttagactgttattaggtccgaacgggaattccgactttaccttttcggttaactggttctgtgatttatgttaatagactcgtccggggaatttgagttgtgaggttgagagtatgcgaaagaattccttttgagccttcgggtggctttcttttggttgttacgattcctgggggagtccaagtaacattctttggggatccttttagcggtaggtagtcgtgagctgaagttggattcacgtgtgcacaaattgtcgttctgttagattttgctgcggtttttgtcactttgggattttccgatgtttgactcaattaatattgcaatcggctcgtggtcctatctgtagctacgtgaaagtgttaactattggtgacgacttttatttgtctgcatcgatttatgccaagtttcctgtaaaaaagataggttctttctataatcaaataataaaactacaagttctgcgactgctagagttagcaattggtttcaggttgtttcggtggtagggaattatggtagtttggtaggatagttttcttttaccaccgactacttggttttgcttagaagtaacttaccttgcacttgtacagttgtagtactgaaagtttggttgcaacttctgtacttctgttggttcttgtaattttggtagggtctagaaactaccagacaatgatattctattttgttaaaagaaggttggcagtgaattagtgatacatgattgatcaagttagcttatgttcaaattatccttccacagcaattct

SEQ ID NO: 16018 - DNA, 1005 bp, Brachypodium distachyon
  Intron number 2 from transcript Bradi3g55890.1 (locus Brad i3g55890) derived from phytozome v7.0 (chr-ID Bd3; pos 559 62724 to 55963728)
ccccgacgtcgtcgccgccgcgccgcccatcgccggtcagaactcactcattcgttccacctcttttcttctactaatctccaatggtctgagaagaaacgaaaacgaacaaaagtggcacgtacaacaactggcaatgacaatggcctatgaatgcgatcgatcgatcactctcccatcacaaacaagaacaagaactgaccaccaaccaaattgggcaggccggcaacactacaccacacgcacatgcgacgtgggtcacgcgatagccccagcatgcagccgtgccggtggattactaggtgcaccacacacgtgacacgtccatgcaacacaaaataaaataaaaattgagctgttgttttcggcatcgacatcaaatcacgagattgataaacaagttccagagcacggttgcgacgttaataaactatgatggagtatttaccatattgggttcagaaagtttacctgtttcagacttcagagtgacgtgctttgccatacaaagccattcctagctagctcccaagattccaaatcggcaaatccatccatcctgtaccatgctaaaaagctatagaacctagaatttagcttgtttgttacttactccctccctaccataatatgagacacgtacgcatccctatatcgtcaatttagctaactaaatataaattaaataattaaaaaaatatatcattagaaagttcttttgataacgaatctaatgatatacttcttgttaagaaacatatatatttaactaatcaaattgagaatttagtaatgcgtgcgtgcctcgtattatgggacggagggagtagatccctgagagaagacatgtactccctccgtctcaaaataagtgacgtgaatttgtatagattttaaatccgcgtcacttatttctggacagagtgaatatattgttttacctgtgatggaaatgcttgcaaatgaaaaaacaaacgtacaggagtaaggcacgttggtggagac

SEQ ID NO: 16019 - DNA, 754 bp, Brachypodium distachyon
  Intron number 1 from transcript Bradi5g10420.1 (locus Brad i5g10420) derived from phytozome v7.0 (chr-ID Bd5; pos 136 89857 to 13690610)
actcgtcgtgagggcatcccccaggaagccaggcggtgagggcggcctccaggcggccacaccgtgagggcatctccaggcagccagtcagcgagcgcggcctccagtaggcgagggctgcctccatctcgcgtttccggcgcatctgccgctgacagtacgaaggtgtacgattggggagaggtggagggcgggccttcggtgcgcttgccttgtccgtcccagccaacttaattattcgggtcttcctaatctgaatttgtctcctagagtttcggtcatgtcttcgtttttccccatcttgagtggaccaatccacagcagccaaatcttgagtatgatagatgaagttcaaatttcgtatgtagtatagttctacaatgtaatttcctgtgtaaatatacttctattatatatctggccagcttcgcttcaacctcctacttgtggatacccatggtctttctacatgctaagatgttttgtttttgcagcacagaaatagatgacagaatttgtctttcaagttcggtgacatcctcatggattttgtgcgtagagttggggctggtacgttagtactcttattcttggtgagttcatgtaaagttcatgtagcttgcatccctttgatgcttatacaatatttccttcttttttttgcggatgttatgcaatgtttccttcgggcatcatgatgatgatgttgatgatctcagtgcgagcgttgagaggattggaggttgtctggaca

SEQ ID NO: 16020 - DNA, 1050 bp, Brachypodium distachyon
  Intron number 1 from transcript Bradi5g02030.1 (locus Brad i5g02030) derived from phytozome v7.0 (chr-ID Bd5; pos 214 0236 to 2141285 reverse strand)
ctctggcaaaactaccctgcttgacgccttggctggtaattactaagttaattatttgcatggtatgtggtgagtttgcgttcattcagtcagtctagttggtaaacatatcacgacaaatttaacggaactaatttagagttgtagatgttaacatatttttatatatgtaaactttaagaaatttgacttgagagaaagttggaacatcttataaaaaggatcgagagagtatagtgtattcttttttattaattgccgaaccttaacatgctccccatagcactagcgctaacactcttagtcttgtgttgttattacattttttcctcgtgtttcacgaatttttgcaagtgactagccgataaataagactcgtatcaaaactgaagtacactcactaattagccagcaagaccaaaaatatactcccacagattcaattcaaaagcaagtactcaatcagccttgtattaaaagacgttagttaaggatctggttgccgggcgccttgcatacgaactgtcgagacgtggggtggggagccgagtggaggactggacgcaagtttcttagtttgtaaatacctattctacccctgctttaatcaatgatggctaccggcactctgtggcagtaccccctcccatcgaaatattacacgtatccagacgtatttgaaaaatagatacattcatatttgaacaaatttgagtcaagaattttggatttcagagagtacctcctaagcacgctagaaatacttcaagtataaagaaatatagaactgaaaaaaaatatccaatcctatagttttgacgaagagaccatatatacgtgcgtaggtaaagttgcaaaagttgtgttatccatatcttagttaataatggccaaccataacttcatgtcaaatcatattgatggtcgtcaagacaagtcgctgccttgatttatctgccctcgagtaaactgaggcacaaatatatctgctacagctgcacatcacgttcacatccagattatgcttaaacagggcgactcggacccaac

SEQ ID NO: 16021 - DNA, 715 bp, Brachypodium distachyon
  Intron number 3 from transcript Bradi3g58830.1 (locus Brad i3g58830) derived from phytozome v7.0 (chr-ID Bd3; pos 581 88434 to 58189148)
ccaccggcgacttccgcaaggtatccgcgtgccacctacctatggatcattgggttcctgttacgtcattctgcgtgcgtgtttagttcgtaccaccagatctcgtctgcgcttgaggaaaaaaaaaacggtcttaatccgtctaaattttgtcgtctcttaaattttttaatcgatcgcagtctgcatgtctcttgaatgtcaggacagtgcatccttgttcgtaggtctcaatcggttaatatgtgtttttgtaaagttttactctcttgctctcatgattgtatagtgcactagaagctggctcgttaataagcacatgatcgtccttttcattgtaactgatacagtataacgcagtattgcctttttttcactttgttggaacattgataagataattctagatacacggttgttagatgatacgatctgagttgtctatgctactgcgactcgtcaaatttgatctctctttatacgataaatgcgatcacaattctatggttgtgaacatgtcactcttcagttaagcatggcatcacgattttcacttcagattgacgatacatatgtatatctgcacgtcgaaatgattaaaattctgaaatacttaattgcatatactcgtgctgcgagagaacactcatccaattttttcttaatgttatttcttcatctcagcttttggtgcctctggtaagtgcataccgct

SEQ ID NO: 16022 - DNA, 745 bp, Brachypodium distachyon
  Intron number 3 from transcript Bradi4g35690.1 (locus Brad i4g35690) derived from phytozome v7.0 (chr-ID Bd4; pos 410 35610 to 41036354)
caaggttcagggaggtgatacaggttccgaagaaggttagttgcttgtgcaattcagttgaaatgttgtttgtttctgggaggagtagaatttgattggattggattagtagtatttggtactcctatttgattcaattgcatgaacatgtacatataatgcatgctctgtgccttgggacgatgggttttaaaacatatattgacgttgggcatgtcttgctgcttcaattatatatgcaattcttcttgataaaatagctcgagaaatactgctgtgaagttttcatgaattcatttatattgtgtgcagcaagattttgcttttgtcgacttgacctccgctgtttcatcgtttaaagctctctgcataggtggacctcataatctactgagttccttcgagcttaatccaactaagtgatcttttgggggaaaatctatgaataaatactactttaatcaaatatgatattaatttagtttcaggtttttgttgatatacttagattttaaaataggttatcataaagtaaagagacgttaatatatgaactttccctctcacctatattatgcacttctggttgtttgatttacatttaatactttcagtgtaatttttgctctagctcggtctccagcgaggtagtaactgtgccatataatatcttttgacgattgttatatttactaaatttctgcttttctgtaggttttaagggatccaagattcgaacctgtat

SEQ ID NO: 16023 - DNA, 958 bp, Brachypodium distachyon
  Intron number 1 from transcript Bradi4g09600.1 (locus Brad i4g09600) derived from phytozome v7.0 (chr-ID Bd4; pos 893 8257 to 8939214 reverse strand)
aaaacagagttacagagttatctcaaaacaaataggtattgtgagcagccagtttttctcctttttacctttcaaacatattttgaattgatttcgtagttactagtcttatacttcatcaagcaaaaaaaactacagaaaaatattgtgtcatctagttatttttcttttgacactatgccatcaagttcttagttcttacagaacctggaaaaagtttgtaggagcgaggcaacataagtctagttggtgtaatcttttcaaaaccttgagcggttgagcatgcaacttaatataggagctacacttatccgcggagtatgggttgaataaaatgaataacaaagatatttaaagatggatacttggtggactttacaaaatggagggaacttgtcgggtggcaaaaaagttgtatgcgtgcttttcaaatttaaagtgacgactatgttgttattttggcaattttcctttaatatattagccctacgaaaaactatgttagcagttagatagcaactcaaaccaaaaaaccaacaagctgttggtaccttgacgaggggtcctttactaagtacaaacgacaacaaggacaattggtgttgatgcacatttcataatgctgaacatggcttagggctttgagatcgcaatgctgcccacaagaaatataatatcattgtggtttttatgagtagccttccaaatcacaactcaacggtactccaagtattaagtaaagttgtacatggcttaactttaagcatgagattaatttccttattctacaatatggtaaagcatgtaatgataaatgacaatgcaagacataaatttagcgaagtatcaaatttgtaggcaccagcatgagtaagacaaccccacgtggaaatatatgctaatagtcgtgtgatgtattttcttatcttattcctttgcaggtacttactgttgattg

SEQ ID NO: 16024 - DNA, 891 bp, Brachypodium distachyon
  Intron number 2 from transcript Bradi4g18210.1 (locus Brad i4g18210) derived from phytozome v7.0 (chr-ID Bd4; pos 200 58433 to 20059323 reverse strand)
atttctacgtccgccgcctttacctgcggatccaggtacggatttcacaagcttttttgtttgttcgtttgttcatcaaattttgcgccttatgtcagcacattgcgcgtttaatttgggtcgtggtcagaaatctctgaatttatcactgttacagatgattttagtatagcaggaagggccggtgtctcaaggcatttcgttgagttatcatgaatgatttattcttatgtttgctgtacggatgtatttggtggacaaggcatcccgttaggggggacacggggtgttaatgatggctattaggtatcgggtagttgtgtattttgctagtagggaagtgatggtaattactccctccgttcctaaatacttgttgctgttttagttcaagtttgcactaaaacagcgacaagtatttagaaacggagggagtagttattagaacacttgtgtattttgctcttttgttcagaaaattagatgtgcagtagctttatgaggaactttggatgtgaccacattgagctccaagcttacattccttgaattggaaacaattggcggtggatatacagtgtgcttgattctttcgtggctttgagtttgtatacctgatggcagcaaaaagtcaaatttgtacttaatatttttttagctcaaaggttttctctgctgcaatgacctgcggctagcatgtttcttgttcatgttcttctataacgagtttgacaaacagagtagtgtcacagatagtgtggggatatgtcttgaattttgtcaagcaagatggtcttcttcggttatttattgttcactgcattgtatattaacatcacattttttggttgtccaggattgcttttctagaccaatagcaagtgcaccaga

SEQ ID NO: 16025 - DNA, 553 bp, Brachypodium distachyon
  Intron number 3 from transcript Bradi4g11390.1 (locus Brad i4g11390) derived from phytozome v7.0 (chr-ID Bd4; pos 111 31689 to 11132241)
caggtgaacaacgcggcgcaggctcttggtaaggcggccgtggagtggcatctgaggagtattcgcatctcatgactaccaacctagagtcagtcttccacctcagccagctcgcgcacccgctcctccgcaatgcctccattgccggaggaggcagcatcatcaacatatcttccattgctggctcgcttggtttcccgggactcgcactttacagcgtgtcaaaaggtatattgtacatcgttccacctcggtcttgtccatagaagttttcaattttttgacaaataatatatgtgaacttggaagaaaagtatttcaatattttttaggtaaatagtgtaatacttccttggatcatgtaaaagatgtcatcttgggcaagagtgtaacttttaagattttgactatgaatatcttttacaaatattttgattgtgtaaatatataaactgaatataatcattgctgatgctcaatacaatttttttcaattaagagatgaaaatcttttgtttatcaacgaatatatttggtctggcacctaggagga

SEQ ID NO: 16026 - DNA, 663 bp, Brachypodium distachyon
  Intron number 1 from transcript Bradi4g02110.1 (locus Brad i4g02110) derived from phytozome v7.0 (chr-ID Bd4; pos 139 0072 to 1390734 reverse strand)
actctgctataatcgccacctttgttctgcttgcggtaatcatttacttgtgacattccaaaataattatttctttattgtttcatactaaatctaacttcattagctttgattaagtttatagaaatatcaataaataacagtccgtgagataaactataaaatatgttttgacaatacatttagggtgcattttttctgttcccgggagtagttacttcgatctttaaggaaccatattgcgtatgtgtgtataatcatttatcagttttgattatgtttatatactcattttaagatacttcaaatcttagtatctgaatttttttcagaagagccatattttctaatacattattataatactattataatagtgtataaaataagtataatcatatattgtacatatacttgcatacttggcatatatactatcctagatggtctagcatggtcatatgctctgtctgcatacacctcattgggtcacatatatacacatcataaatctacagaacacatgcaccctaggagttgttaggatgaggaggtgaaccaaaaataatggatagaatttttgatctttaatattaggcataggtatagataaggccaccaattttgatctatcgtgttgcgttcaggttgcacagtgtagca

SEQ ID NO: 16027 - DNA, 985 bp, Brachypodium distachyon
  Intron number 1 from transcript Bradi4g40250.1 (locus Brad i4g40250) derived from phytozome v7.0 (chr-ID Bd4; pos 446 79351 to 44680335 reverse strand)
gagacggtacacaccccgcctgcgacatctgccaggtatatacgtaatacagtatatcgcaagggaaaccagctgatagaaagacattcctgaatttctgtagtcaaatatatttggtgcactatcacccttaaggcgtattagtgcagtgagccaacgaactcgtcatttaatgttgaatttatgaattatctaaatttttaaatccaaatttgatcaaagatttttttcgaaacggaaaatttgatcaaagatcaagaaacaagaatggcatgaatagtagatgcaggcaggatcccacataattgactcggtacgtaattcaaatttcatgcttgaaatttaccttggaagatttggagtttgaactttatatgtacctagatttgtcttttataatgtcaaccaaatttggacatggaacttttgggccatgatatttttcagaacttttatgcatttaggaattaggagtgtttttgtttctatgttttagttcgccaggacaaaaactttacctatttctttatttaagatgagagttgttgaattaattaataggaaacccaacgaaaaccggaacaaggggaccaagcctagtggactctatgtgccctcccgaatcccaaagggaaaaatggttcatttggcctggtagttgccttgtctctttccctcatccaattttgtagcatagcttatcaaatggtccatttcttgaaagatacatcacatgaaaggtaaagtacaggagtgatgttgcacaaatatatctccaatcgtatctttcctcgtgagctttccaaatgtgaccatagtttgacagatggtagaatagaacaatactccatctactccaactatattaatttgaactaaaacaacgttaagaatttaagatgggagggagtatttgacaaatctgtgccactgctctgtacttactgcaggagaagacggggtacttcttctgcgtggaggaccg

SEQ ID NO: 16028 - DNA, 743 bp, Brachypodium distachyon
  Intron number 2 from transcript Bradi5g12400.1 (locus Brad i5g12400) derived from phytozome v7.0 (chr-ID Bd5; pos 158 68769 to 15869511)
ctatagcggagcttaataaggttacacatccaaaacttctcttttgataatttgttgtttgtagtctattattctccaatactgttatctagtactaccttcgttccataattcttgtcaaaatcttacatgtatctacacactttttaggaatagatacatccatttttgggcaaatttgagacaagaattatggaacggagggagtattaatcttactgaaactagacatgtctagactgtctggcatatttgttgtctgattctttggataatggataccatggaattgttgtgtacttggcatgtggcattttcaatatcttcaggttggtgtccaacatgaccatgatagcccgtttttcctctattcctgagccgtaagctggtcttgtacttctaaaatcacgccctgttgtagcgctgttgagtttggtctattcttgtccgctgtgtgccattttctttttccaagttttcctgaattagaatttactatctgaatctgtttcctttggttctgaattatagtatgcataatttctttactcctatacggatgtcaattggtggcggcggtacgaccgcctttcactgcaccacatgttataggtttctgacttggccttgtgcaatgtcctcacaaaaatgtttgtaacatgattattttgtcattcggtacttaaatgaatgataattgcagtaatagctaataagaatcttgaactttgttattacaggaa

SEQ ID NO: 16029 - DNA, 548 bp, Brachypodium distachyon
  Intron number 3 from transcript Bradi3g46660.1 (locus Brad i3g46660) derived from phytozome v7.0 (chr-ID Bd3; pos 484 76315 to 48476862 reverse strand)
caagaagcattcatacatcagttaaagtttccaatgtaagttgctggaggagtacaatgaccttcattgtatatttagttctttaattttaatgtggctatatatctttccagtagttcccaggattctagaaaggcaggaatagaaacaaatcaaacaatataggattgcaatatcttatctttttttaatcctataagatcgagatttgataatcacataaatttgtacaaatgatcatttgatgcatcacagaaaaacaaaggattttccgaagaggtgaatcaattgaaattttcctgataaaataagccaaaaccttgggaaatatttcagtacataggaaaaataatatccgaaggaactcaaatttacaatcctccaaaagtactatgaaaaatactttgaatctgatatgccgtgagtttgacacttcatctaaccgattgatcattcatcttcattaagattaccttctgatatattgccttcttaatttgcttcaacaactgatgcatgtgtagcctgccggaggtcccagcaacatc

SEQ ID NO: 16030 - DNA, 777 bp, Brachypodium distachyon
  Intron number 3 from transcript Bradi3g60190.1 (locus Brad i3g60190) derived from phytozome v7.0 (chr-ID Bd3; pos 592 01654 to 59202430)
tcgaggtgcgtatgtaagtaatgaataaatactattaatgtcttcttttgttgttccttgacattgttcatgcaaacctgatccctgatggcctcctttttataacgtgataatgggtgcgttcttttcggcttctaggaccggcttctcctagaagctgcactcacctagcttcctggagaagccacatctcagatttagctaggttttcaaagtagtttagaccaaactagtttgatagcctaatcaaatttaggtggcggcttctccaggaagctgggtgagagcagcttctcagagaagccggtccaggaagccgaaaagaactggcccaatggctctgttttcatattgaccttcatccgtggtgattcttatgtctggaactatcaagacaataagggttagctgacgctaaaaccagacacatcaacatgacatattttcaatttcttattttttttttctgttgagcaccatctctactttgcaacctatcgtaacctcattgaaaatgaatctgcaatatcaattatttacatttgattatgacgtgttagtattttttaaatagaactccttataaattctctgacagctggaatctaagtacacaacctattttatgttttgactcttctgcagcttatgttttttctgttactctttaactcgaaagaatctcacttgctatcagattatacttgttagttttattttactctacctcttttgtgcatgtataactgaagggagtgctgaactgctaattgcaga

SEQ ID NO: 16031 - DNA, 705 bp, Brachypodium distachyon
  Intron number 1 from transcript Bradi4g09310.1 (locus Brad i4g09310) derived from phytozome v7.0 (chr-ID Bd4; pos 863 3959 to 8634663)
tcaatccgtcattcctgtctagaggtaaatcattataacttatctgatttattcgccaactctgtttttcatttgtatctcggcatgcttagatttattttttaaagcgtgtgctcacgcaatgagagttcctagatgtaaagtgttaattagctagtgtgagaagcgtcctgcgggatcaagctgtcatgtgtgtacgcaagagaaaatagtgtgttcttcctttcctaatttctttgtgtgcaatatatggattaattatgtaactttgtgttagttttttttggaatttgcatccgtcattcttttctagaggtaaactgatttattcgccatcataacatatctcggcatttgtacactgtacatgggacaagaaaaggctccggctaaggttcttgtgagttaattctttgtgtgggtgtaatggtgtattcatgtgagtctaaccatggactagctagctcaacatgctcgagtgtataatcggacatgcatgtacgtagcgtcagtttttgcaattaattactagctgtacgttgtatggctgccgggctgttagatcaaaatactactttctcaatttctggacacaatctttaccctgccactagtgacacgatgttgccttgcaatatatggattaattatgtaacctattttttggaatttgtttccatgcaggaactctacctatttttgagg

SEQ ID NO: 16032 - DNA, 481 bp, Brachypodium distachyon
  Intron number 1 from transcript Bradi5g08160.1 (locus Brad i5g08160) derived from phytozome v7.0 (chr-ID Bd5; pos 107 36535 to 10737015 reverse strand)
gaaacaagtttttggacaatattcatcgtgattggtagttgacatccagggttgctgtaagtataaagcatgggataaaaagcaaaaaggacacatcagtttgctagtagctaacaagtttagaggcaaatcatgtagcattaaaaaagcacataaagcttgagccaatcccttgagtttccagcattaggctattttgggttctgatattcacacttcagccttgacagtactcaacctgtacatcaaatgtctttgcatcccttgcttctgccatatgtacaaatccatctcttcagattagcaattcctgcttaaaaaaaacaaaggatagcttagctagggaggcacaaaaatgcagaaatatgcatgtaggtacaagacaaaagaacataaaaaggccctaagaaaagcacaaaatttggttttgatctgaatcttgcctaataatagcactcttacggtctcttattaattgcag

SEQ ID NO: 16033 - DNA, 917 bp, Brachypodium distachyon
  Intron number 1 from transcript Bradi3g51560.1 (locus Brad i3g51560) derived from phytozome v7.0 (chr-ID Bd3; pos 525 98966 to 52599882 reverse strand)
gctccgtccgcaccgcgctcgacaccggctgcggggtaagtcgcccagtttcttccgcttgcctttgcttagctctccctgctttactagtattggacagaagaattgctccacaccagcttagttcttgcgacaaatgttgggtacattttccgttggagaatcgagtggccgacaggggtcaaacaggtctggcagagttagtataactacagagtagaaactgccgaatgtcgagcagattatgagtgaattcaattagtcatagcacattattcagttaagcaatatctgtattatcaggtctatttcatacggtctggcatcttgctgaattggtgaaaatttacacctaaacatgtggattatggaacaagtgaaatggaaaatctgcttgtagcttcactttcagccggaactctgctaacagagctgttgacaaacattgggtgatcttttttcaatgcatgcatagtgacataatccatcaatcaatcatgggcgccaccaccaggtctgcaacagtgacaccgttcaagcgtgaagtagatcgggttcccttttcagtaatgttaacaatgacctcctactagtatctggcatagaagtttcccctgaacaagcaaatctatgtttcccgtgtatctctaaaatatacggccattcacgtgcatacactgatgtagtactacttgcacacttgcatgtacaatcgtcgacctactgtctgaactctgaagtactagtaatttcgtactacagcaaagaccattctactactacttttgagttttgaccgtagaaccaaccgtggtcgcatggaaatgggatttctgtctttcatgtgtgctgatgcgtcggctggcccgtgtgcccgtgcaggtggcgagctggggcgcgtacctgctgtcccgcga

SEQ ID NO: 16034 - DNA, 948 bp, Brachypodium distachyon
  Intron number 1 from transcript Bradi4g37560.1 (locus Brad i4g37560) derived from phytozome v7.0 (chr-ID Bd4; pos 426 29794 to 42630741 reverse strand)
cctgtctgcgcccacctactacagagcgcctccatgtaagtaagcgcctgacgtttccattggacctttcttgtgaccgtgtcatgagtttgctgttgcgttggattatacaagcatctgcgctcacggaggaaaacttgcttttcctggaggcttggcgagcggttgatcgtgcctactacgacaagtcgttcaacgggcagagttggtttagataccgtgaaagcgccctccgcggtgaaccgatgaacacgcgggaagagacatgtatgattctaattgtgcccttaccatttctcgtatccatctggcttgtgaatgatccctggtgtacaagtctgcttaccatcaatattatgttcacagaaaaataacttgtgtggtttgcagttctgcaagttttcacaggttaccttatattttacaaaggacagccacattaaacaataacaggatcaaatgatcattaatcacatttgtttgggttagcctagggcaacatgtttttgtatcaaatacagtaattgttttagattgctcatttgattgaatcggaagtttggaaccataataaattaacagtagtgcttcagtcaagaacttaaacagacgatcgatctgtacaaaagtgagatacttaggggtttaacagttctcatgctatccaatcaaaattaacccacattgtatttcagatgcagcaataaagaaaatgctttcaaccttggacgacccattcactcgtttcttggaacccgagaaattcaagagtttgcgggtatgatactcacataaaagtcagttactgctcggttaacatgaatgctttctgatgcatgccattaccttttctgaagtaagtctggcacgcaaggtgcactcacaggtgtaggtttatccattggctacccgttggcacttaatggatcacctgcagggctttctgta

SEQ ID NO: 16035 - DNA, 646 bp, Brachypodium distachyon
  Intron number 1 from transcript Bradi3g60030.1 (locus Brad i3g60030) derived from phytozome v7.0 (chr-ID Bd3; pos 590 83544 to 59084189 reverse strand)
ctttgtgctgtgtgcacgcttaacatttttgttgagcctctacttcgttttgggattaatctcgtggatctgaaattatctcctctttctccatcgtagtatacaacgctcaagcccttggccgacagactgcttgtaaagattaagtctgctgagcagaagacgacaggtggaattttgctcccttcgacagcccaatctaaacctcaggggggtgaggtagttgccattggagagggaagaaccattgcggataacaaagttgaagtcagcattcaggtatattgtaataagaaaaattcattagatgcaggttgtgtgcatcatgtctgtttcagttttatcagtagaaaaatcaggtctgcagcacggagtgaacctagaagctgtagtattgcagttaaaacaaacccagtcagaagcatgctaaatttttgataggattaagctttcgtcttgcccgtttgcattctgtaatttcacacatgttatatgggttatgtatctggtttgatctctttatatgttcttctgatataattttcgatgcatgcaagttcttaacaattgttggtgagaaaagacatgtgtaacatgtattatctgttacttttgtaggttggagctcaggttgtatattccaagt

SEQ ID NO: 16036 - DNA, 983 bp, Brachypodium distachyon
  Intron number 3 from transcript Bradi4g26100.1 (locus Brad i4g26100) derived from phytozome v7.0 (chr-ID Bd4; pos 314 22447 to 31423429 reverse strand)
agatccaccgcgtcctgcaactgcgcctctataaggtgagattggaagaagagcattatcagtgcaggtgatatatcatgtcattttgatagttttccaatattatctgaaggtataaacactaacatccctcttgttgcgaaaacagttctttgttatattgtttgcaatatttattttggagatatatagaaatatagactagtttggagcttaatttagagatgtgaaattgttcctttcgctcacgaaatggcatcgagtcgaagcaagttatagtgttattccctaacttcatgtgttgttaatctagtgcgtcatattgtcttttgttttggaaggttataatgctcattttgttcatcacaaaatccctaaaatatattccaaatgacctatgtatggattacataatgtttaactttgcaatcagtagaagtttctatattgacatcatggaaaaaatcattgggtaaacaagtcgttaccgatcaaatcatggacgagcaccattttccgagtgtggcactcggcaatgcctatgccgagtgttttcgtgcttttacagagtaacagggacactcatctcagctaatctgtagtgtgggtggaaaaatagtgttcagaatcacacatgacatttgctgtatatatgtacgacacatataatgagtgtcagctaatgaactgaacagggcgtgtggcacgctatcgaacctatttaaaaaaaaatccgactatgacgtgtatacaggtatgcatgtacatgtatgcatgtactccacgctatgtccagcccctacataattaacgtgtaggtatagaagtgtcacacactcgtgtaaaattatatacagaggaaaaacacataacgagttggtacacacccttgtaatgccatcatctcaagcactctgttgttccgtatgataatttaatgacaatcagtggatgtatgcagtgcgtacgtgctggtgcaagac

SEQ ID NO: 16037 - DNA, 920 bp, Brachypodium distachyon
  Intron number 1 from transcript Bradi4g29570.1 (locus Brad i4g29570) derived from phytozome v7.0 (chr-ID Bd4; pos 350 62589 to 35063508 reverse strand)
ccaggtacccaatttccgacagaattaggtgctgctagcgagcacctactgtccatgtatggattagacgattctatcggagaaatggggattgaatttatgctacattatggtcttcagtttttcagcttgctaaatctacagagaaatgcatgagaatctaggacttggtatttaccaactgtcacaacttttctgaagctaaatggaaatgcatgaaaattgaaaaatctaccgatagaattgccactcctgactggagcttaatggggacaaggtttgatgtattcaaagggattttcagattgatgccacctaaaagactgacaaatagtagaaccattgcaattattggtgcagttatggccactctaagtgctgtttcatttgtaaaatggtgcagttcatggaaacaagtattggctcagttttgaccactctaaattctgtttcattagttaaatgagaacaaggtttgatgcattcaaagggattttcaaattgatgccacccaaaaaacttgcacatagcagaatgtcacaatctccatttagcaccttgcggcaattatgcactaacagggagaggtactcactcattgcattcacatagtcattgtagaaggatacatcagagatttattttatataacatatattgcataactttggcattaatctttagttcttgtaaaaacttgaaaaatgtgtagaatttcatattttcattttgttgtgctaatctaattgttgcagtgtgtccaccactctacataaacatatgattagagctaatattttttctcatgtggaattgcttcttgctccattaatttgatgttgtacaattttagtcttactgaccaacaataaaatgatgaagactccatatcttttttcaatgttaggcacaaacaagtt

SEQ ID NO: 16038 - DNA, 681 bp, Brachypodium distachyon
  Intron number 3 from transcript Bradi5g15840.1 (locus Brad i5g15840) derived from phytozome v7.0 (chr-ID Bd5; pos 192 64800 to 19265480)
cctagagaggtaaacacgcctccaccttccaacattcgtgtcattgtttaattaatacatgcaatgattcccatgaattcatcatcattatttagcaaatgcattactcgaaaaaaaattcaataacaccggcttcagcgcgtaattaaatttaattagcaatgagtactacatggctaattagttatttaatgctgttttttttctttcataatgcgtattagttatttgtatacatctagcttgtgttataaagtacgcagaaagataatattattggaaatcttgcttggtagtggaaaagaaggatgcaaccttatctgccctcttttgaagaaagatctcagatgcagggaatgttcaatgaaatcttgtattcctttcgcttggagagataccttcctgatcttgactgctgcttctagtggccacccctttgttcttaactaagaggtctttaagctgcagactttactatcaatcaaaaagaaatgcctcccatatttgctttttgtcccccacaacagtatcatgattacttctcccgaaccttgcttctagcatgcatccattccctgattacaatatactctctacagaaagttgtcccctgacccttttagtacgatgttgcttgtgggcgcagataacaggcgagacagtgggggaggtgaaggaagt

SEQ ID NO: 16039 - DNA, 605 bp, Brachypodium distachyon
  Intron number 1 from transcript Bradi4g21150.1 (locus Brad i4g21150) derived from phytozome v7.0 (chr-ID Bd4; pos 244 05226 to 24405830)
gaggagtaagagcttcaatctttatccacggtaagtaacactctctggatgacttgattcttttgatcgagttccgatcctttgctttgctcacttaagctgtcttcgcccagcccactagtcaacaatgatacacttatcctcacaaaaatttaaaacagtgatacgcttcaactgtgtatgttgagttgttgacttgctgagctataggttaggatgcaaatagaatctgcttatatcccgtttctaaatcattctccaaatacaatgtttaatcttggcttgtggactttgagattgacataaaagccagatcctacttacatctctataagatatgttttagtgtgagaacacttcgtaagtatacttggtaaataagtacatagatgcacatttgactgacatacatgaaaacaaccgatttggatttttgttgcaccctttttcttgtgctagatagctacactctcacctcactccctcttgtttcaattaggtgaatcccaacaaataaaaataatatacccaccataaaagcttaatcttttctgctgtgcttcactgcagctctggtgctgcttagcaacgctgccaacatagcc

SEQ ID NO: 16040 - DNA, 612 bp, Brachypodium distachyon
  Intron number 2 from transcript Bradi3g49890.1 (locus Brad i3g49890) derived from phytozome v7.0 (chr-ID Bd3; pos 511 32545 to 51133156)
ccgctcgcaggagcagaggagcagtattgcatcaggtggatatcctcatcgatttggtttcttttccttgtttttttttcttttttctgcgctggtaaatagtttgtggctgtaaatatcaaataagattgaataacgcatttgctagtcgagaaaatagcacattttattatcacaaatttttaccttcttttgacaaagatggcaggctggctcgaagcgaccactgacaagtttcatctaaaattttataaaagaggaaattaaaatgtatctgatgcaaatcaactgatagtttaacaaattgccactatatctgtactccctccaaccagaattacttgttactgagttagtacaactttgtactaaatgaatctgagacaagtaatatgggtcggagggagtagcaaggactaaagaatcaaaatagtgccaaatccttgtccttataggctaaaaaacatccttgtccaaggaatttaaaagacttgctattaccttacctcaccacatcctttcccaagtgccataccagttctctatccgttatgccggccgttatgtgatgctaaatcgctaatgttatgcaggcaaaggaagtaaccctga

SEQ ID NO: 16041 - DNA, 688 bp, Brachypodium distachyon
  Intron number 1 from transcript Bradi4g06650.1 (locus Brad i4g06650) derived from phytozome v7.0 (chr-ID Bd4; pos 555 8502 to 5559189 reverse strand)
ccaccatattcaccgtcgcagacctcacctcccaggtagcgttttctggtgcattccgaccgcttggagatactcgaatttttatgtgcttggggaaacgctgttggtggtgattcccctggcgctggaatcttggaatagttttagaacttgtaatcttatagtatgcttgaggaatcggaatggttcttattctgtgttacatgttcttgtttgagatgtaattacaaccatgagaaatcaaggaagtttgggaactgaaaaaagataacttttcctgttatccgttttagaaatggtgcaaatactatcattagcagtgcatggtggtgagtttctaaggtatagtacatttctcgaaatggccaaccgaataagtttgttgggattttattcaaattttaaacattagaagttacggggatgtcgatcctattagaaattggaaacatagtgtgtttggatgtatagattttggctgaagatgcagctgccagcatgtgaggttttattatttggtttcctcgtactggcagggaggactctagtagttgatggtgtttgctagcagacttgtccgtagtagggactaagctgtaattcactgccgtaaactttgttttattttgttcttaaaaggttgttgcttctcatatgttttctgttgttttttctgttgcctcttcag

SEQ ID NO: 16042 - DNA, 1022 bp, Brachypodium distachyon
  Intron number 1 from transcript Bradi4g40700.1 (locus Brad i4g40700) derived from phytozome v7.0 (chr-ID Bd4; pos 450 28153 to 45029174 reverse strand)
gcgcgtttgcctgcttcgacttcgctgccaggtgagttagccagtccacatgcatggatttgacattctggattcagttctctgttgtgtgtactaaacgttctaagctaattgacgacctagtgtaattgacgacctagtgcagagtaattaaaagcaagcatgcatgcatgactcttgcagaaaaaaacaagagagaattatagatgactttggtaattccacaccaaatgttctgttcttctctgctcctaatgtgataatgtaaataggacatataatattcatgcattccaagcgagacctttattaaagatcggccttgaaatcaacttttctttcgaaagagactatgccaccgtcgtttatttttttaacagcgttgtagttgttgatagtcgttatattatttgagaaggaaacaactgacgtaatgatcaacgaaaaattaaacaaaatttattaaatataattgtcaacacaattgttgcctcgccagcagctaggctaattttttctactcttttgcactaaacaataagacatgccaagacacacgtcgacacctgcatgcatgcagacctcatcggaataacagttcaaacacgatctttttttaattgatgcagaattcaaacatgatatcacgttgacttatgtgtacgtacagaccgagttctatatatgctgactcgtggatcttgcatttgttcgcgtacgtgttgaagtaagccacaggcacatttttctaataccaaaggaaggaaattaatacgccaaagagtccaagcgaattagcacactgtgacaacgaaatatactctgactttacgggaagccaaaacatttttaagaacatttcaaaatttccaccatcttactccgaattttctctaacactttccagaacaggccaactggtatatctcgtatgggcacatctagctagaaacattctactacagaaactgaattaattaaacgagtgccatttatgcagcggtccgtacgtgaagatcgac

SEQ ID NO: 16043 - DNA, 892 bp, Brachypodium distachyon
  Intron number 1 from transcript Bradi4g28530.1 (locus Brad i4g28530) derived from phytozome v7.0 (chr-ID Bd4; pos 339 58593 to 33959484 reverse strand)
aaatcgcacaactcgattagtgtagggccagagaagtaagattgtagtgcatcaatttcttttacatgtaccactggtgggatgatcaagcagttctatttgttgtacagaaaaaaaaatcaattttatatcaactaggatcctcccttcacctgtacttctgagtgaaaaatataaagtaggtgcccacacaggaagatttgatttgacaagtgattttctaatttacatcatggaaactaagtatatgatctttcgtgctctatatttacctttctagctcagtgattaggtcacctgatgtcaccaattatgttgcagcttgatagaacatagggatttcatgtagagtttgaaattagtgcctggctgtctatcctactatagttgataaaacattttatgggcttgtcttgcaacaacttaagtgcgtcggtacctgatttcccgcagagctgtccttgaaagaggaacctcaggtttctctcagatcatggattgatcacattactgagcttgctacctcctcttgatcttccttatgtactctcatgtcttgtaaatgttctatgatttaagaaaattactatttgggtctcccctaccttcccaattccgatcccattgaatttttttaagaagacagatttgactttaacttttaccaagccagagatgttactaaatgtcgagggtgcatgttattttccacagaaatttgtcaggcaaccgcctgaatggttcacttccagactccctctgtaaaaattagtttggatctctcgttttcaggtttggattttctcgttgatatttcctttatgtttgtaccttttcaaaattagtttcgcactaaatactctgaattttatcgtgttaagtaatttcaggt

SEQ ID NO: 16044 - DNA, 942 bp, Brachypodium distachyon
  Intron number 2 from transcript Bradi5g03250.1 (locus Brad i5g03250) derived from phytozome v7.0 (chr-ID Bd5; pos 376 4918 to 3765859)
tgccaaaaacatccatttgtggactgtggtatgtacagaacaagaaaaaaaagatcggcacagatagttgtcattcacttcgtccctttttttttgtagatagaggttataaattgacacattttgggaaaaggtctttctagtacacatctttttgcatgtagatgtatgatttgcttcgatggtttttaatacatgtatacaagtgctttattcaagttcataggaacaagtgcaccttataacacaacatcctcatctggtttagaattccttatttaggtctaataactcaaatgtgcaagatgtggagtttatgaagttagtttaagtaacaatgaacatggtaacacagtggaatgagtttatatttaatttggaattgagcatataatttgagccgtctaagtatgccatggagatcttggcatgcagaatgaagctgccttgtgaaaaactttcgagatgatcttattctactcgttgattcaaactgtgtgttccttttccatattagttttttttcgcgttgattaatttaacaaaaagacccatttgcagagcttacaagaaagctcttgaaatggaacaatgatcttactacacaaagggatgaaaatgggagtacgcccctccattttgccgcagctctgatgcggcaaagtcagcaaggaagcgtatgctggcaagtattggaagctaaccctgctgcactgtatcagtcagaccacaacggattattccctatacacgttgctgcatctgtcggagagagagggacaatcaccatgtttcttagcaagtctccgagcagtgctggtttgcaagacactaagagaaggacattccttcatgtagctgctgagaaaaagaaagtgagaatagtccattatgcttgcagaaatcaatcactctcatggattctcaatatgcaggacaacg

SEQ ID NO: 16045 - DNA, 871 bp, Brachypodium distachyon
  Intron number 1 from transcript Bradi4g35040.1 (locus Brad i4g35040) derived from phytozome v7.0 (chr-ID Bd4; pos 405 54504 to 40555374 reverse strand)
ttgaaggtcgtgaccgaacaaagctctacacacttgtaagtgacacaatatatgtaggatcatgatctgtacagtgcacaattttttttagcattgtattagattaggtgaaacataacctttgatctgaacaaagcttctactataaagattactctcacgcgagaagagataaatcctagaaaaattagataaattattatactgactcatgcaagttccttactcaaagcaactaaatttagaaaaacttgtgcacaagtctacatgatgtttcagtaaaagaaggttctctagcttgaacaaatataggttattctacaaactgtaggtgattttctataatagaaacaccagatatatataggtcacacacaatgttatagcgggaacaaaagtacactaccaccccagatagtatttgttggttttacaaaaagaatcacaaagtacactttggtaatggttaagtacatatatggtacatgccactttagaatatgtgtctatgccctatcttgtttgcatagtttcgtacaatataaggcactaagtcttctgctttgcttaaagttggagtttgaagctctctcacattaaaggtggcaactgctgtgaacatccattacacaattgaatagacacagttacatagaatctttaatcagcatgtgcctggaatatcccatatccaaatctccagccagaacccgctaaaaagtagataaaaggaaaactgaacacctctccacccactattgctctcttcttgttctttgtagagttgtgtcctggctactctataatgcatgcaactgcttctttaactatatctaaatgctaacagacaaaatttgcctcttataaggtc

SEQ ID NO: 16046 - DNA, 1011 bp, Brachypodium distachyon
  Intron number 1 from transcript Bradi3g51530.1 (locus Brad i3g51530) derived from phytozome v7.0 (chr-ID Bd3; pos 525 55439 to 52556449 reverse strand)
gccgcattggcgactgtgtcaggtaatatacatgacatgatgttgagagtgatttgtacgaatactattctcatcctttaatttgggtaattttagtatcttagtcagagtaagtgactgatgccgtaggtttcgttgttccctgtaaatttgcaccgcagttcatgaatagtccctgtcctagtgttccttgcttgaattattctgtgtggttgtaatttcatctgagtggaacagaacagggagaactatatatatgagtctcaatagatgtagaatgaactgtttggcttctactggacatacaactcaatgtaagtgttggatcaatactacctctgttcctaaatgtaagaagtcctagctttatattgtgaagacttaataaaactaatttagagttgcaaatgttggtagcttttctacgaaatctggtcaaactcgaagaagtttgacttaggacaaagctaggacttcttatatttaggaacaaaggtagtattgatttgtatgctattttctgaaactgacagttgaagtggtctctcaattactactagcgagtagctttcaagttatctagagtgagtgttagaatgggaacagtaatgagagaagttgagcaagtaccttgtcttcgaagctcattagattagatttctccgctgtttcttgtgttgcatcagttttggcaatcttcttaatatcagtcatcttccacctagttgcttttggagttttggtaatccgtgctaatttagttatgccggttttatctagctatgaggaaattgttttccaaacatgagagctactacaaaattttctgaattcatttcaccatcgttgcttctgttttgccctactgcccttaaattagtaagaaacctgtgtatacttttgcagttattgttatgttaatttcccaccatgttttatttccttactgtatcttttgtttgttatataaactgttgcagtatcgcgaaacatctggagtctggcaataca

SEQ ID NO: 16047 - DNA, 627 bp, Brachypodium distachyon
  Intron number 2 from transcript Bradi3g53020.1 (locus Brad i3g53020) derived from phytozome v7.0 (chr-ID Bd3; pos 537 92178 to 53792804)
gcaaagctcaagtatgttttctattctttgacttgattttatgacctggcatttcttttagaacttatgcacatatgttcttagtgggaagacaatttgtctgccctttctttttccgagtcctgtgtgagcatgactgctctttaaattcattaaactcctggtgagtatgatctttctctctatagaacacaaacagataaactctggcttctggctataaacattcaatattacttgaccccgatatatcggacatcgtgttggcctgccataccaaaacttcttgcagcaatacctgaccagtcacgtcaggaagcttagatactaaggaaattattgcagaacatgtttgacataaaagatggtctattttgttatattatcacaacaaaattatggctaaaacactaagacttgcataaagaggacagaggttcaaaattttgtcagcagtttcatctagaaaaagttatcagtacttgttcaatatcttttcttcactttgttttctgttggtcgtttctgctcaccgggtcaatctattatctttttgttctttccgtattaacaactgaattattcggtgcagaggctgttgcttatcttctcctactggcagtaggt

SEQ ID NO: 16048 - DNA, 1019 bp, Brachypodium distachyon
  Intron number 2 from transcript Bradi5g14560.1 (locus Brad i5g14560) derived from phytozome v7.0 (chr-ID Bd5; pos 180 15529 to 18016547 reverse strand)
ccctcacgtgggaggagttcaagaagaagcagaaggtatgtgcgaccgccacttgctccctgctagctttgttagcggatttagtttcttcgctggtcattttgtgtgtcccagccatgattttatccatgctggtgcgctgccgcttctgctatgtgatgtgttgctgccttgttggtgctctcgattatgctattcccgagttcatgtactgtatgatagatgctgaatttcaggcatacttttctctgctatgcatgatgctttaatttgctgtaacctgatatgtgctagtttgattttgggaattggaatggttagctttctagtgcatatagggacgtatgaagctctgatagcatagggggtagattagcaacctgaacttttgcagtagaagctttgtcctgcgccatctgtgtacagtcacatcttccctggtttgcagacctgagagtttttctagctgtgatttgctattagacacttaggcctgtgcagccataaaagggaaacgagttggagcatttatcagtggcacaacactcatccccagtattttattaatccagagttcatgtgatgcctttttacttgattttgattccttgacttgtttaggtttcttggataatgatatgaaattgcaacttagacagacttttttatgctgattccgaagtccaaactaatcaacctaagtcaacattggtctgcaaacgatttcttgttttctgcatttacccagcaaggttatcgcagatcagcataaggcccttcttggatcgttgtatttttgtgggagtggctagtatttagttcatctcaccccaaagttgaactaaataccagccctcccactaaaacatacaatgttccaagcagggcccgagacttttagtacttgtaagatcactttgtagctacgcttttgtattctcagtactttcacagtacattaatgatgctcttgttccttaataggacgaggagctaaagagaggtgaggttgaggctga

SEQ ID NO: 16049 - DNA, 876 bp, Brachypodium distachyon
  Intron number 1 from transcript Bradi5g03220.1 (locus Brad i5g03220) derived from phytozome v7.0 (chr-ID Bd5; pos 371 4135 to 3715010 reverse strand)
cgtggttttccttgccccgcttcagatcggcgcgggtaagctcccgattcgcatcgacgctgtaacttctaaggaccttttgtgctgattgattttttcgttctgattgggtaagacgcggttgcctccggcagatctgcggttcgatctgccgcgcgctgaggcggcggcgcatggtatgcttgcgattcaatgggttttgtgcgcagggggctcgatttggtgcgcggcccgtcgggtgactttgaatcgatgtgttcgatctctcgcgagccgtggttggggttgcttggttcgttgttgcaaggccgttagggttcttaacgttctcggttctcggttctcggcgatgtgtatataaagtcatttggaaacactcatagatttgagttattcgctttttcgttgcataggggttttatctgagaattgtggggatcgctcctgcagcctgtcatgtattccggtgatgagtgagatttatatcagctccgacatgcctgaattgatgccgggattgacaattgtgtagtgggatagtgattttaagcagggctttcgctgttactgctttaactgaagcatggatatgtttgtgtgctgaactcttcttaatctaggttagagtcattcgcttatttgtcgcataggtgtttgtatatgagaattctggggatcgctcctgcagcccgccatgtattcctgtggaaattgacgtctgtttcatctccgagatacctgaattgatatgccaggattccgcaccagcgacaattgtgtagtgggatagaactgaatcgtgcttttgctgttactgctttaactgaaatgctagttcttctatctaggcgcagcgcccggagcgggagcagaggg

SEQ ID NO: 16050 - DNA, 863 bp, Brachypodium distachyon
  Intron number 3 from transcript Bradi5g04850.1 (locus Brad i5g04850) derived from phytozome v7.0 (chr-ID Bd5; pos 622 6761 to 6227623)
attcatgtatcctttttggtacagtccattgatcaattttgatttctcatagaaaagaagtcatactttgttcatgttttatgttcatttctcctggcatgggtgatgctgattgacgttccttttttgtctctcctgggatactatggagggatgacagtaaaaaatattatgttggttaacaaagaaaacaatacaaccccactgtcctaccgtttcactcgcattctgcagtaattaattcatatacacaggaaatgttggatgtcaataattgattaatgtgcattgacaggctcatggcacaactaggtaacttgtatagttgtatgtgactaatccgtgatacaatatagtgccctgattttggtatgttattaaatctttatttttcccagattgaatgttggatgtcattacatctttgcgttgtccagattgaatgtcagttttgttatgtttcaaaggcaacacaatttcaccaagagttttcagttttctgttgggggagcaaagaatagacaaaccaaactagttctggttgcttagagcgcactggttggttttctttcttttgaatttcaaaatttcaagttattgaattatagatttgtggttgtagtataaacagaagcagtactagagttgcagtatctcggccagtaactgacttttttttctcaacccttgattcagcttttacatcgttaatgtatgaatgttcgaagttgaattatgtgtattgagtactgacaacataatatgttatgtctcaatccactatttcatggacgaggtcccaaattgttttcctatcaaatgtatcagacacaattggagaaggctttcccactggatacctt

SEQ ID NO: 16051 - DNA, 700 bp, Brachypodium distachyon
  Intron number 2 from transcript Bradi4g22700.1 (locus Brad i4g22700) derived from phytozome v7.0 (chr-ID Bd4; pos 271 51783 to 27152482)
ccgatttcttcctcaattctctcctcctgggccaggttgtccaacttcgcacatttctacttacaaaagatcatattgatgtgagaagtcacacaactagttaatgttcaacttttcctgggaagatctgagaagtttgttactagtataatttactggcttactgttgtaatattatgactaaaatttgattaatatttttgatttacatgaacatgctaaaatgagagtggtagttaaaatgcttaattcaacgactgtttcttggtttatttgctacttggacagagggtggttacatagtccagttttatgtacttcagtgtgctacaagttttgttgaagtgaaagcttatattattgttaccgacagattaagatcctataatgattatatttctttacaacggatttagaagatatttggtttgaccaagggaattagtttgtccatgaccaccttgtctgatttaaccattttcttttcttttcgaaacactcatctggtcatccgtaataactataaggctaggcataaggttagtagaaatgatgaggaatgctctcagccgcaaaaacagggtcattaaaacttctcataacaagtatcttgttagttatgttgtcccttttataattctcgtttcgttattgaacttcagtgtttttgccttttttcccctattagtgggaggacagg

SEQ ID NO: 16052 - DNA, 167 bp, Brachypodium distachyon
  Intron number 1 from transcript Bradi5g14040.4 (locus Brad i5g14040) derived from phytozome v7.0 (chr-ID Bd5; pos 175 00958 to 17501124 reverse strand)
gaatctgctgttcctctagcctctgcaacctgaaggttttgtttttcttccttttttttggatctttggaatttccatcaggtttatagttaatgcttcacagttttgaccttagatatttgaagttgtattgcctgctctacttattgtgtttgttgtgcctacag

SEQ ID NO: 16053 - DNA, 932 bp, Brachypodium distachyon
  Intron number 2 from transcript Bradi3g52740.1 (locus Brad i3g52740) derived from phytozome v7.0 (chr-ID Bd3; pos 535 95236 to 53596167 reverse strand)
ttgagttaagtaggacgtgacgccatcttgtcattattttattcctaagatcactctagctttgatttgtatactacagtccttgcatagattttttttctttctttcaaaaaggaggttgcctaactgcagctcctctgcatcaaacacagccatagtccctgcctagatgattagcctaactgcagctcctcacttgctattgtttactgatatcttgctagtgttgttctgaagctacttggaagggcggtgcactttacaattgcttttctgtgcgtgggcttgcagttactcctaatgggagatcttctctgccttttcagtttcttgaatgcgaatcaagttacttagatctgtctagatttgggatatttttccttttcctggggccattttaatttgtatgtgaattgttttcgctgactggaggataccaacgtctgaattcatttggtccttcaggtcatggatgttgtagtaatcatttttgctggatatgtacataatttgtcgctagtatatgattgtcaactatcatcatgcatttgagaccaaagtgatccatattcaggaaatacagaaactttgtaatcctgtatagtggatagaactgctctgagttttataattgtatgtaggcacgttttccattctgagttttatatagtggaaatacaggggcaggttttccattttgcctatttgtatgtaggcacgataaggatgtactccatgttttataattgaatggcagacttcctgcctctttcatccaaaaaggcaaaatggtgtatatatagtccacagtttcaatgtatgcattggttgcctaggtctctctcttaacatccctttaattcaatttgcttgttagagcttgatacatggtaagtatcaacttagcagtgtctgtttttaattatatagcc

SEQ ID NO: 16054 - DNA, 706 bp, Brachypodium distachyon
  Intron number 1 from transcript Bradi4g19160.1 (locus Brad i4g19160) derived from phytozome v7.0 (chr-ID Bd4; pos 218 19804 to 21820509)
aggtgcgggatccttttttttttgttcgttaatactttcgttgttcgcgttccccggtgaatgcgtgcggcgattgcgctcccgtttgagagggtttttggctttgcttttagcggtattttcttagactatctttcattttagttatcttcctgtttctttttcgtacttcctttttgagcttcatcgtgcggaaaggttgctctctcttctttttcacttggtaaatatttgttttggaaaggaagccagagccaaaaagggacattcttttaccgtcaagaaaagagagggacattctttccttcgattttctccctctgtggaagattacagttttgattcggtgattcgaagtataagaaattgaagatataatcattcggctgtttgacgatttattcaccagtgccaattagaaacgatgcattttttttggtggacaactgagcaaacattgctcttccaatttaatttcagcattccaacaaagtttaacatcgctcacacccaattgaatttcagcattcttgtaccaatgttgggaaacatacttaaaatgttcatagctcagatttgtggttttatattatgccatctttgtgtctagtacagattttgattgtcgtttagggtgagctttgattgaataatttctgttttgcgtataggagactggataatcaagttcttgagcgtctgaaga

SEQ ID NO: 16055 - DNA, 900 bp, Brachypodium distachyon
  Intron number 2 from transcript Bradi3g50440.1 (locus Brad i3g50440) derived from phytozome v7.0 (chr-ID Bd3; pos 516 53625 to 51654524)
tgcccaaggttttctgcgcgggcgctgacctcaaggtgccacctcgaccacttctatgctgcaagttggacgaatttctgctctagctagttacaagaatttctttctttagcttgtgattttggttcctgtagagaaactgtctaatcacatttgctagtgtggaacttcttacttcttcatataattgaacagggactggggcatttcaggctgattagtagtcatttatagtgaaatatgtgaagtgcctgttcaaaaagtaaatgataggatagctgacaagattggttagcaaaatagatgagtgacacattgccacattggtacaggtggtgacatacaattatcggaaaaatgattcagaaaaaaaaatacttgtcctggttgagttgtgacagcctatggaggtgttggcgtctcaagcaataccagatgggataatgtgaaaataatcctcatgtttgcacctcttttggagtaacaaattgagaaattatgaggtcaaaatcacggtctgacttattaggagaaatctaagtatgtttaatcagttggatcattgaaacatagcaattgttgttctgctgtgtttgtgctatttgctttgtgaagcaatttatttgaattattttcttatgtctgtgtgcatcacgtgatgcagaggccgggggatttgtcctcctttttgaaacaaaaaaatgatctccatatcttctctctctaaaaaaaagacgatttccatatcattatagaactaaaaatatcagatatgtatgttgcataaaaaaaggtgaattgcctttgttatgcttcctctatcatatcctttactttgttctgtgttgatcatgttccatacctcttcaaattatgatgtgttgacaggaaaggaggtta

SEQ ID NO: 16056 - DNA, 427 bp, Brachypodium distachyon
  Intron number 1 from transcript Bradi4g24710.1 (locus Brad i4g24710) derived from phytozome v7.0 (chr-ID Bd4; pos 299 30218 to 29930644)
gaccgcttccacaacctcgacctcttccaccaagggtaacgacaaggattctcgatgggacatttttgcttcctgcttcatttttttggccgtttgaataatgtgggaatttttttgcgatgaataatgtgggattttcttgcaattgatgaaatgcggcatggattgtgctcggtagaaattttggtttggtttgcatgtgattttccttgggtttgaaggagtcattcctgtgggcatttctacggggatcgtttaatctggctccgtgcttggtaattctttgcagtgtagttttgtttttctgtccattattctctgagaatcatcctatgcaagttcggttgttccaaaaagatattccccatcatgtggaggctgtgaattttggttcgttcttgaggaattcgcttgtgtctacgtgcag

SEQ ID NO: 16057 - DNA, 846 bp, Brachypodium distachyon
  Intron number 2 from transcript Bradi4g24710.1 (locus Brad i4g24710) derived from phytozome v7.0 (chr-ID Bd4; pos 299 30728 to 29931573)
aaggttcttgcatctccatgacctgcaaaagaaaactccatactccgttcacgttcttgcatgatcatatttttgttactatatgatttggagctgcagtgtgtggatggaatcatggtagtaaatgtccaaatttgtaatgaaaacttatgtcccaatacaggatcaatgtatctgttagataattgccagatgtgaatacctgatgatatccattgcatctgttgggaggaaaaaagtacaaaaccaacttagttaggtggacattgtgatttcggatttttcataacttcatatgtatttgtgactttgtgtgccttacttatcataggaactaggaagtgtatgttccacaaatccacattgtgcgtgggagggagggcaagagttgtgatttgtgaagatatgatcagcatgattgttcatcgttcaacaatcattttacttgcatttgtaaccagtcaggtaccatggtcagcatgcagatcagcccacaatagtcggaatgttgccctacctttgattattcaccattattagatgtgaaaaatccatggttatgtttagcgagcctggtaatgttaaagcaacaactgttagctatctagcaatgacttataatgatatgtttattactagctcgtcttgaaacaaatccatttgaaatgcagaaccattacttcttttcaatttttaacagaacaaattattaggctccattttcagtgctcgtattttttttgaccagtatccatttgaaattgtaatttttttgggtaatagataatgacatactagatgaattgtgcagctactgatattggtgcgaagcgtgcatttggcttt

SEQ ID NO: 16058 - DNA, 740 bp, Brachypodium distachyon
  Intron number 1 from transcript Bradi5g19030.5 (locus Brad i5g19030) derived from phytozome v7.0 (chr-ID Bd5; pos 220 83981 to 22084720)
actccatcgagctgactcccgtcggcgcctccttggtatttctaggttttctctcttttctccagcagatttgagtggctaggatctaggaaaaacctagtcagagtatggcatgcgatttcgttcggtgcgtgcgcgcgtgtgtggattggattcgggtctgctgcagtgcgggcttgagtaattttgatttcgtctgctcgcttagtttatttctttcgttacaatttagaaaaactatatcttcgggccggtagcatgtctggagagtgatcagattttatgaagtactacttgataaatgatcgtgcattgctacagaagttgatttattgcatgagatgtgtcatcggtccttaacactgttcaaactaaaaaatcatctcaaatttacatcactcaaaccaaccaatcataagattgtgatacatgtatgatgactgtggtcgttaatttttttgtcaacttaagaggtaatctcagtgatatccaccaccccggatctttataagagtaaaggttagcactttaggtgtttagctatcacaggcttcacgttctatgctgtggaatggttgttggtctgtttggtgatttgtggattttttacttgctgacgatttggtggagattgttggggataatgtcctttgtcaaccaagttctctgggcgaatcaatgattttgtaaccttttcttctgcagctcaaaggatagcaggtctgagagaagtagaagca

SEQ ID NO: 16059 - DNA, 777 bp, Brachypodium distachyon
  Intron number 2 from transcript Bradi5g19030.5 (locus Brad i5g19030) derived from phytozome v7.0 (chr-ID Bd5; pos 220 84712 to 22085488)
gaagtagaagcaaaggtccaagaccaatcaaagtatgtcgctcgaactgccattaaaaatttcttatgcaactcaatggcatgaatattgtctgacatttaggttctttcacatggctgtagtttgcattttgccctttctcttcctacatcgaatttctatacggatatgtgatacatccaattatgttgaaagttcttatttacgctccctacaagttcagtgataaagagtcagggaatcaagtgcggcgattgatagatggagttgaatgcaactatttaaaggattcttttgaaactcaaatgttcaagttcgccatttcttgtctgaccataacaaaaggataactgcatgggctaaactaagaatgattaccctgggaaaaatgaattttatattgaactcattttgatacactatttcctgtggttacctgtataataaagtgcccttaggtattaatcgctggaactttcagtcttgtatttataattggtcttttttacttagtattttacaaattgtttagatcttcgcaccaacaatggaactgcaaatgcctataattgcaggttaaatgtgtttgccctttttcctgtaataatcattgtgtttgtaattcttgtattgcagtcctttttcattgtcagtttccaacagtttttttttatacaagagatgccaccggtaaaattagtagtgtgtctctaatatttgatgtagtttgcatatgtttaactaatccaattttataaatgtagttttactcaggat

SEQ ID NO: 16060 - DNA, 957 bp, Brachypodium distachyon
  Intron number 1 from transcript Bradi5g27720.1 (locus Brad i5g27720) derived from phytozome v7.0 (chr-ID Bd5; pos 284 31029 to 28431985 reverse strand)
cccaccaagccaataacctcatcgactgcgtcctggtaactcccggtgatcaagaacttctgctcccgcctcttctcccttgcctccccattttttgcgcaatactgggcctcctcgtatgctcacgaagatcaagggaaacagattattcctcgcgtgattctttgatttcgcttcttctgatatttcatttgataccgtttcttgggggtgtctttcccaccgcgccaccgcgcccaccagcgcatatgcatgctccagttcaatcctccgcggattcaagaacggagcggcgattgagacgagtgccccttctcccctctccattaatttgatgcccgcgatttcttggatctttgtatgtcttctagaatatcaaccctcaggttggattgttaaaatggacgggatatgcgggggctgaattcgggaactgaatcatataagatctgacacggaaaacagtcccaagggattcatgagtgagcattttggagatttcttgattggattttaggtaaagcagtcttgttgtccggcctgattttttatctgtgcttcttggtgtgatgcagttgctgattcttggattgctgtttactaagctgcacatgtattactgtgaaaactgattgctatcggtgaagttgtgcatgcatctcgacacaaaatttagtctgtttgcatagctgtgccattacgttcgttctttaaaatatgcagcccgtgcctacatatccgtttgtgtgtcagtgtatattttctaaaccctttcgtttcctttcgttgcttagtttcttcggtagtcatgcttctggcttaggctggaaattgtcgattttgtgttgatgtcaacatgtagaggtttgctgctcccctcagtatgctttgatgctcttattctttttgtgattgtttcaagaaccatcgcactcatttgctgggatttatctgctg

SEQ ID NO: 16061 - DNA, 881 bp, Brachypodium distachyon
  Intron number 2 from transcript Bradi5g20940.1 (locus Brad i5g20940) derived from phytozome v7.0 (chr-ID Bd5; pos 237 20540 to 23721420 reverse strand)
taaaggttacaggggtatgtgcaatgcttctgatcttctttgatctgttgctgttatcttccctttgatcaattgccgtttaatagggagcaactagtataaaatccaaccgttaggtctatgttcaatctagtcaactgatatgtctataagtcaccaaaattattgtttttacctattatatcacaaaatttcaaaattccaaatttgctatgcacatcacataataagagagattcagatgtgaaatagtatgaattgaatttcttactattcacagctaatttcccgtttttgtttctagatgcacagatcaaattggggtatttattagataatagatgaatattgtgtctttgctgtcaaaataatcggagtccgtctgactagattgaatggattgcatgctagttgtttcccatttaatatcagtatatcctattctgctaagcatatgatagctctattgcaatgttggctaatgacaccgactttagcatatttgagtacaatgtttttcttgtttcggtttatgcaatatctgtatcatcagatgctatgttacttatctttcatgtttctttctgtcacatgtgctttgggcctctatatcagcatgtaatgtagccatgtatcaccaaattactgtatttcgttttacagttcaatattctcatggtaaaattttcctactagtttgtattcttataatcactttaattccacataaagcgtaaccatttttccagttctggagatctgcatatgttgatccatagattgacagctgttctgagaacatactgcaacaatcatttgcttgttccattatcagttagcattcagtaacgatcagtatgccaaacttcacaggttgttac

SEQ ID NO: 16062 - DNA, 567 bp, Brachypodium distachyon
  Intron number 1 from transcript Bradi5g20940.1 (locus Brad i5g20940) derived from phytozome v7.0 (chr-ID Bd5; pos 237 22424 to 23722990 reverse strand)
gagcaagtccgggccattgcgcgagagattcagaggttgggaggtgaggcgttcgtgtttttttcttttcttttacaaactgttttcacaagtttggcaccggcgcaagcaagtactaggtgttcgttcgtgttcccatctcttgcgatttggcaacggggttggcagtagtgctgggcaccggtagtaccatatgccgaaatatggatctggcatcgctgtttggccacattgtggagggatgccttactagcgctaaatcttccacttaatgtatttgctttctctagctgccactgctgtagtaataaggctttggtactcaaaactttttcattctgtgctgctttgaattttctgcttagatgaagctggtaaacttgaagtggtaaaacaaacgtgtggtagactaaattttctttgaaatagtttgttctgtttctagtatgcttttgttgcgttgtcccatgcatcaaattgccaattagctcatattttactatacttaagctactactcctagtatctgatatgtgttagtttttttatgccccttttcaggagctg

SEQ ID NO: 16063 - DNA, 813 bp, Brachypodium distachyon
  Intron number 2 from transcript Bradi5g26260.2 (locus Brad i5g26260) derived from phytozome v7.0 (chr-ID Bd5; pos 273 24481 to 27325293)
aggtcacaacgttcacattttgtgcgtgtctctgggtaagactgctgctaccctttggtcctgaaagtccctgttttgtgtgtatgtccaggagcaatcatgtgtccatccatccattcattcgaccaaaatacaacgtacgcatcatccaaggactgatttctgtggagaaaaactttgtgaagtactggcattactgccgtctgttgggagggacgcaccatctatttttccaccctagagtatataggaaactgcgatccattttctctgcgcgggagcacttagacaaggatatatctgcatcacctgagtaacttattcgaccatccaatttcaaagtagcatgtactatttccgatcctaaattgttgtcattgttttagtttaaatttgcactaaaacaacgacaagaatttgggatcggagggagtatctgttatgcattgacaacaatagacatggtgatggtggctgatcacaagcaacggttattggcaaattaccggcaacatatctctgggagcacagttttcgtttatgtacgcctgataggtccctttgagtaacagatcatcaaaataggctacattctggtatcaaatggttattattatttctagcttactctaatgctgcacaatgcgccgcacattttgccactagaaataggtttctctagcttataaattataatgcaaatacagcagtacctgtgtgcatactagagcatcatgctctcttcttttgccttataaacatctgtcatgtgttaatttaatctttctgagtggttaaatgtttttacaggta

SEQ ID NO: 16064 - DNA, 556 bp, Brachypodium distachyon
  Intron number 3 from transcript Bradi5g22650.1 (locus Brad i5g22650) derived from phytozome v7.0 (chr-ID Bd5; pos 249 41035 to 24941590)
caaaggatcaggtggttctgctaggtataaactactgcatctctttttagtttatttgaactttgctgatcccaacaaatctccagttgcagtctccccataaaggtgttgtttgtatacactactaagcaacttgttaatcaagcaaaggtggtgtatgcatttaccaggtcaacagagatgggaaaagacaaactatgtcgtttccattcctagttatattacaccatacaaaaccaagggtcgtcattgtcttttagaaaaacaaatcatacctttatatacgagaattagtacatttcattcctttgttggccataacgacacttattttgcacacgcagatgaaaaggagaagaaacctctatagctcatttgtcctttgcaatttcatttttgattatctcacatccacagaacatatatatgactaaaatttctgacgctgcaaattttgcgattcaaactcagtaggaagccatggaaactgacacgcactatctttgttcacgcattgacaggggggcacacccttgggacctcccactgctcttcg

SEQ ID NO: 16065 - DNA, 1010 bp, Brachypodium distachyon
  Intron number 3 from transcript Bradi5g24960.1 (locus Brad i5g24960) derived from phytozome v7.0 (chr-ID Bd5; pos 264 64774 to 26465783)
ttcacgcgttgttcaacaagtatgattctccgccataaccatatgttctgcaataatttagaagctttgtactctattataaacaattattgattatttggtactaatacttccatttttatacatatactatccaattgttagtttacttttcaggtggctatttgtctttatgtagtgttgtcatccgtaacctaggttttttctgtttaatgcctcacatataactctaaaattagcacggactagcacctgtgtgttaaatttactctgctgcattagtctcgaagctccgaaacgttgcatagctaattctttttttcttccccttgaactgatctgcaactagctagcgaatgaaaatttctgatacacaattgacactcttaggttttagtcttatagataacagtcagcctggtgatgtttacattagtcacgaagctcccaaacattgcatagctaattcttttttcttcccttaaattgatctgctactagcttgcgaatgaaaatttctgatatacaattgacactcttatgtgtagtcttatactccctccgtccaacaaaaaatgtctcaactttgactaaatttgaatgcatctatacaccaagtcacatctagatgcatccaaattttgacaaacttgagacatcttttgttggacggagggagtagataacagtcaccctggtgatgtttacattgaatttgatctgttgctgtcattattttcaccgtgtactccatcagtagaactgtcagcttgtttaatggaaaggaatcatgagtttaaagagctggttacaccctttcaattttctctgaacacaaaagaacagtgctaaaatctgtgggcatggtgttagtctagaaagtgaagtaccatcagtttttccctcaagactattttcctggtgctggtctcgggatgtttgtcttgtattcccttatgcacttactcttcaagcagttcatgttaattcttggttcacattgtgcagct

SEQ ID NO: 16066 - DNA, 624 bp, Brachypodium distachyon
  Intron number 1 from transcript Bradi5g17050.1 (locus Brad i5g17050) derived from phytozome v7.0 (chr-ID Bd5; pos 202 71215 to 20271838 reverse strand)
cggagcctagcggtgcctcggtgagaattttctgtactctctagtctctttcatactgttggctaataggatcactgtataaataatttcagtcggtttatactttcccatgttctagaagtctagaactgatcagtgtgtgacgaagtgattgataccagcgttctgtagcatgtgcctttttttttcatgtatgtatgttccaaattaattataaagggctcccacagtatgttcgaaaattatatctgaatcaaagtagttatgaagaaattcatgtgtttggacatcacaccatccagtttgagcatttgtgatcaagcatagctcccctaccttggcttttctgttgatccttctttagcaatcacctagtataagtaaaagaacataacgacagtagtctctctgcctatttatgcaaattctccaggaacatgattatctagttaaattgctagaacaacgataagctagtctgcattttgaaatttggatctccgcaatgtatgtatgtcagtacacgtacgaagcggccatttttgttttgtatgatagctgctatatgttatctgttatttacttattttcttttttccttcaatttgtagtcgcatagatcac

SEQ ID NO: 16067 - DNA, 501 bp, Brachypodium distachyon
  Intron number 1 from transcript Bradi5g18280.1 (locus Brad i5g18280) derived from phytozome v7.0 (chr-ID Bd5; pos 213 12253 to 21312753)
gagttctcgtgccggacccctacaggtgagtgctctgaaatctgaagacacgctttatttcacatgcttccattactctggcgacctggttaatctggatttttagttgtttgccttctcgatgaacactacgtgtacgcgtgttgatttgtttcgggcctctccccgcgtttctacggccctgtgtaatgtaatgttactccttccgttcttcagttctgcacatctatgaactttgccaacctaagcatgtaggatttgtagtactagtatcgtgcaactttgatgtttgggagtttacgatagatttcataccactgaaaaagaagaactttgcctaagctgaaaaaaataacaatgtttcttgacaggctgacattatgtatgtcgaaatccctgcatcagataacgttttctatacattatgtcagttccgcactgcggtaaatggattctgctaaaatagtgcacgagacgagaacaggatacactggtccattc

SEQ ID NO: 16068 - DNA, 1017 bp, Brachypodium distachyon
  Intron number 1 from transcript Bradi5g24030.1 (locus Brad i5g24030) derived from phytozome v7.0 (chr-ID Bd5; pos 257 85697 to 25786713)
ggccgttgccaaggtcaaggaccagggcggctgtggtaagaatcctccactgctctgtttctgttttctttttactgtaagtattgtgtttttacctgttatcgatagattccatctatttcaagtgaagattcttacgagtagtatattccgcttctggcgtgaccgcttgatccttgacgaaaatttaggaacttttttgtttggtcaacgtgtagtagtttcagtatccacatgaacagaaatcaggggacctgtatctaactttcaataattggtgctgcttagaggctttatctatacgattgggatagtgaaaaggaaacaattacagatctgattcttagttcgacgtgttgaatcacatggtaaaagaaaatatttttggtaggatgcgttaatcggtccagtatcaaatttcttcagtataattcctttgttgttttctgttgtatggtaaattggtgtatacataatatattaaaggatcggtgtctccgatacgcatagtttccaacctgattttatcagaatttgagtacttcactgatagtactactttacctacaaggataccagtatagaaggtttgcatggccttatgcagtgcacgtaggttcatcgaacatggacatgtccagttgtgtttgtgtttcaacttcaatgagcttaactagaagagaaatagaggaaacttattaatagtgtattagtggtcattgtctggttgctaggctgatggacccatttgtccttttctttgtttgatggtctcaccatatgccattatttcgcatgaatccagaaatctcatcttattaagctcttctgaacgttttgtgttccaattggtagcagcctagtcctctttgttgttatctccagtcaaaatctccaatgtattgttgctttgttacttctctactaccggtgtcagtatgctatgaacattaaataactgattatctgtgttcttttacagggagttgctgggctttctcagcaattgctgctgtt

SEQ ID NO: 16069 - DNA, 648 bp, Brachypodium distachyon
  Intron number 2 from transcript Bradi5g25850.1 (locus Brad i5g25850) derived from phytozome v7.0 (chr-ID Bd5; pos 270 04760 to 27005407 reverse strand)
ttgcactgcggtgctgctggtctacagttaagttaattattccaaatgtttcgtggcctcttctccatacttgttcagtttgtgatgttattgtacattgttcttactggtctctttctgcacttatagtgtgagaaagtctcttgattttgctaaacatctagctagatgtgcattcaaattaaagacaccatctatcctcgccatattctctttgccacacagagaggtgcctaggctgctaatatgtcaatgtcttgatattttatacctgtaaacatgactcaaaagaataggtaacttgaaggatatataactttagaaagttctactagatggccagttaccaatgtgtggatgaagtacataacattaagggcgtactctttatgtggccagttacagaaagagtttctgtcatggtctccgttaattaaaggcttaagttattaatgttggtttatcttggacaaagttttacctctgtgctttctgtaagcataattttcacagtgattccaacctggatacaagtatcgtgatgctcgacattttagattgttatggtaagtagaactgcgcatataaactactgtcctgctgacatgcccttttcattacagggtaaagatagaaggaagaaacccg

SEQ ID NO: 16070 - DNA, 722 bp, Brachypodium distachyon
  Intron number 2 from transcript Bradi5g20540.1 (locus Brad i5g20540) derived from phytozome v7.0 (chr-ID Bd5; pos 233 98536 to 23399257 reverse strand)
agtcgctgcgcttccccaccgacatcttcttccaggtatgtgcatccgcaccggctggccgccggcagcaccgccgttcaattatccagatggctggttccgtgtttttagttaaacctgtttcgccgaagataacacaaacaggtgtcttgcctcgtggcgtgtcatggggggcaagggacaaagtagcatggtccctatcaactcctgattctggtttccccgctttctcggaagaagccatttgtagttagtagtacgatttagaacgtgtacccaagctattatttttcctaatcgtttgtgggactcagttttatattctgcagtaacatcatatcggagggtaattttattgagatggaagaaggtgaactttttcttgacacgttcaagtatcgacagaaaggctgtcatcttgacacaaataaagtagtgaccttcgacatcaccagacacgtgtgcttagctagtatgcacaggttttttgtttgatatcagtgcaccagtccctgtcaggatgccatttgttttctcatgtatttcactaaagtactggtgcctgtttatcatgattcttgcactagttcatcttcttgactccttctctgtatttctggagtcgagaagaacaatcacgtgtccatttttaattgcgtttgtttttcaaaatcttgtcattctggtgcaagctgaccctgcaaattggatgcagaggaggt

SEQ ID NO: 16071 - DNA, 722 bp, Brachypodium distachyon
  Intron number 5 from transcript Bradi5g17900.3 (locus Brad i5g17900) derived from phytozome v7.0 (chr-ID Bd5; pos 210 39088 to 21039809)
tgcggaggtaattcgtcgttcagttaacacacacttggtatatagttttgcagtggttgacggaaagagctcttatcattatttgcattgatatctaggcttcaggaattttcgacatgttgggtgtgcatatattcaacatttttttcttgaattgtttgaaaaatgcacaacgctacaaatatccgactgatattcttttggacaaatccttcgggttcatgataatccatctcatcgaataatgtaattacaatgtatttattccgtttgctgaaaacaagaaaaaaacttgttttcagcagagtttacgtttagtaattgatatcttcttttgagttaaagaaaattcttttaatgttccattttgtttccgggcagatcaggaccttgtcgcagcaccgtgtcattttcaatatagcaatatgataccctaaaaaaaatgtaaacttctacccccacccccctcagggtgccttgtttgtacattattagattaatcaagtacagttcattgagttggtaatcagaatcaatttgcactatatttttttgaacttgtatgttacatgatttgattaatcaagtacagttcattgagttggacataatcaatttgcactaaacttataaatttaatccattggtttatttttgctacattatttatcctatgcgtctgtttagggtgcctctgtagtatcaaagctggttggagagag

SEQ ID NO: 16072 - DNA, 660 bp, Brachypodium distachyon
  Intron number 2 from transcript Bradi5g25480.2 (locus Brad i5g25480) derived from phytozome v7.0 (chr-ID Bd5; pos 267 85888 to 26786547 reverse strand)
cgtatctgcacatctacgagtgcgacgccttcactgtaagctcacttggttgtttatcttgctactgcaaccactccgtttagacaaccattgccttgagattgatggcctaactttgttgcacaatttctctggactctcttatgctactaacaagtcaacaaccactctgattcccggcgagtaaagcgatcattacggactcgttgctgctgctttgtgaactatatatttcaaggatgtcaagcttattttagtggagtgatgtagcctgtatagatgtgcaattccaagtgtttttccccactctctggttcgaatcgtcaaagtacatatccaatcgggtgctcttctgttcgaatcgtcaaagtgatatttagttgttgaggtttctaccagccattgacttctgtagtaactagccatgtttagcattctgactccgtgtttcagctttgacaagttatcccaacaaacttatagcttgtattgctattgtttctacattttttattcttgtttgattacaactcttctatcaaaactacagcgtacctgatagttatagccttataggtagtagacgtttaacacctgttctgatgtatcctatatgtttttccagattggaatattctgcttaccaacttcagccgtcat

SEQ ID NO: 16073 - DNA, 257 bp, Brachypodium distachyon
  Intron number 3 from transcript Bradi5g24390.1 (locus Brad i5g24390) derived from phytozome v7.0 (chr-ID Bd5; pos 260 46377 to 26046633 reverse strand)
tttgtggtaatgcttttgcatttattatttatgttgtcatgatatctgcctgaatgtgtgctctccagctaagtgtagaaatgaactaataaatagataatcaaaactgaaatgaacacttcaactaagtgcctctgtagattactcttcttcgtccatgttatattttcgtttgtgtataacgtcagattcttctttgtgaaaattgacatatgtctgtgttaatgcagattccattttgtgtcgtcgttggttgg

SEQ ID NO: 16074 - DNA, 664 bp, Brachypodium distachyon
  Intron number 1 from transcript Bradi5g19290.1 (locus Brad i5g19290) derived from phytozome v7.0 (chr-ID Bd5; pos 223 22948 to 22323611 reverse strand)
ccgcacgcggaccactgccgttactcgccgtcgaagtatattcgtctggccttcgatgaataatcacttgtatctctgtttgttattctgttgtaaataatggaccttaaagtcggaggagtggctaatgaccaattaggttgggttgcatggcaaatagcattctttacatttataggaatggcccttgaacaattacctctttcagatgggtaatgattggagcttgcttgttaggtgctcgctgttttgccaagctgaaagcccatttcttttctctctgaactctgaatatgagcagcttttaaccggatcgcgtccttttccttctttttctgggggtaaaatctctttacctggctgaagaaaccacccatggaagtgcaataactaaggtataacataattagaggggaatatgtttgttcatttagtatacttggttttcttttctagtatcagtctggtgttgagtactgatttcttacctagatcgtgtttttgattccgctgttgttatatatggcccagtatagatccaatggtttgtatctttgtcgtcaactgcgtattgcaatgttcttctcacactgaccattgactgcttgctaaacttcactttaattcagaacagattattcatcgcaggtcaagaggataccag

SEQ ID NO: 16075 - DNA, 632 bp, Brachypodium distachyon
  Intron number 1 from transcript Bradi5g22540.2 (locus Brad i5g22540) derived from phytozome v7.0 (chr-ID Bd5; pos 248 76312 to 24876943 reverse strand)
acctcgactctacttgttagaccagcagcaataaagtaatctgaattcctgctcctaatctgcatctgatgtgcttgttctgagttctgaatttccgatatgcaaacgtgttcttcaatcatacccttagtccgcatctcatatcaaacatgatttttgtgcagtagtgtagcttatgcaccgagtatagtctatttatttcgcctcacaatccaccaggctgtttggctgtttgcaactgggttgcttgtcttctgcatagcaccctgagaaatactgaagattggttgagttactagtatgagaggggccggccagcatccaccaagggtgttaagtgaaagatgagagccctttgaacacactttccctaagctagtggaaagtcctgctaaattacacccagtcctatgtaaaaacacatattaggaaaatagtttggcttaactgtaaattcttttgcaaaatgttttccatgtttcaacctcccgcaatataatctaacagaatatggcaaatgagatctatttaatctggggtgcatgtcagattgtgtgtgcttgttgtatcccatcattttctgtactcttattgtaaccgatgtatggcacatggatttattgcttcagttt

SEQ ID NO: 16076 - DNA, 843 bp, Brachypodium distachyon
  Intron number 1 from transcript Bradi5g22430.1 (locus Brad i5g22430) derived from phytozome v7.0 (chr-ID Bd5; pos 248 08544 to 24809386)
agtcatcaggtatgctttcttggattatatacactgctgaggttcagaacaccagccacattgacctgaaatcctaaatgtattttcccatgaaagaattagaaacttgtcaaacctgtctgttgtgcatggctctcgggaaacttcatgtattatttgatgttactatcttatgctctcacttttgtagatgaagggatctccaggctaatctaagtttcatgcatttaaaaattgaaacaaatttacctctgatatggaagaggttaactcaaataatgtgggaatttttctccttttggtttaataggggaaggaaaatatttaatgttcaggtaatgggtgttgttaagaaatcttctggtaagaattaattattaactcattgacctattctaaagcttataaggtaggaagctcatttatgttagtggctttaccatgtcattccaaattctcctattctttggatggttatcaaacattatatgatcagtgtactgttctagactcaccagagtgcatttcctgtggttgatgagagaaaagtagtattactatggactcctggggagccaagagttgatgtgaaatgaaagtcctcgcttttcatctccccctctatgccttaaaatccatcattacttatattaatttatgtagttcattattcatatgcatgcatatctatttttgtttacggtttgcatatctattatctgaaaataaactgcagcaacgcatggctcgattgctagtttagctggtagggtacagtttgttacagttggattttttttttgggcagcccaaattcagcgtgttgatccagctgccatcaat

SEQ ID NO: 16077 - DNA, 704 bp, Brachypodium distachyon
  Intron number 2 from transcript Bradi5g24460.1 (locus Brad i5g24460) derived from phytozome v7.0 (chr-ID Bd5; pos 261 03984 to 26104687 reverse strand)
cgggaacggttcaacaccttaatttcagtaagaatttacttacgttttctaggcttcatggttggaattttatgcgtacagaggatgcagttgacacaaaagctttatcgagaatgcaatcggtgaacactaaaaatggccatgtgatagcaatgccagactcagtttttttttaaggggaactgtaggggagacgccgcagcacttgtatagctgtattgcaaaacataaaataaattgaacagagattacatgaaaaacaaaagaaattatagaaaccctttaccatactatggaagatttatctatccaagaataaaaagatcttaaaaaaaaaaactgtacaagtgatccaatgcctggaggcatatttttgaaaatcttgccatctacttgaactgaggaatttaggtgaaaatattagtcatgcctattgtcaggactaaataatcaaactaagaggaaaagtccaatatgtcatcaactaatgtgttgccaatacatcatatgattgtgacaggatctattcattacaaacggccggacatatttatagtaaaaaaagtgagattaattgcgtaaagaaatgcatgcttaagttttagatgttcttctaaccttttgaacagctgggcaccattatagctgaatttgcttgcagcgctttctgacttacaattgcaaatctgtttctctgacagagt

SEQ ID NO: 16078 - DNA, 788 bp, Brachypodium distachyon
  Intron number 1 from transcript Bradi5g24460.1 (locus Brad i5g24460) derived from phytozome v7.0 (chr-ID Bd5; pos 261 04809 to 26105596 reverse strand)
ccgccgctgctgccagtgagttctctctcccatgctcgcatcagctgtttatgtattgctttgagtttgttccaagaagctaattaacaggacttcaccttttcttttttcctcatgtaagtacacattagatccacgatgcaaaacagtacctagggcaaaaaagagtacttttttgttggaaggaagattcagtatttggtgtcagttctcaaaacattcaacatttggtgaagtagacaggctgcagcttaatgatattgccgttgatgctgttcatatgccatgtttcatcgtctcttgacaattcccatctgattcatttctctccctgctgtctctcctttgagttttatttttcttctcttactcctttgagtttactcactttcttgtctccttgcgtggatattagatccacacgcaagataaactgaaagagggaaagaaaatgtctccttgcccaggttcaagcctgggtgggtgtacgtgctgctcctgaggcacccactacaaatggagcaccgggcgcgctcctaataattttgttctggataggtaacagagttgagggaaaaggttatgttgctacatgtaaacctgattcaataatgagggagtccacaagttgctacctgtttacatttttgatgattttgatcgattgggtttcttgccagtttacctatcattcgatctgtttacttgatgtctctgctgtgcattcatacccaaacttcatattttcttcagttcttgaaccgttttcttgttcttcttgacgtgca

SEQ ID NO: 16079 - DNA, 899 bp, Brachypodium distachyon
  Intron number 1 from transcript Bradi5g25700.1 (locus Brad i5g25700) derived from phytozome v7.0 (chr-ID Bd5; pos 268 94573 to 26895471)
ggtggcgccgccgccgacgacgacgtccgtttccggtaatggtccgctctccgtttctaatactccgtactccactacttagtgatcctagctgacgttacttacggttcgtgcaaacacgcgtttagtgatgttggttaactgagacgcgggccccgagcgttatgattgagctgacagtgtgtgttagaataatctttggcgttgagttgccgtaattatttacccctatgtcatgttgttcgcttctccgtgacctttttactgtggggttattcctccctcctcccgcccggccgggtaataattgtcgcggaagaagaaagctgcgagctttggttgcatgcatgcgatgacagtccatgcattgctgaaaaggcttgaccgggaatcctgcccagctagtatttgtttacggcgcccttattagttcaaaaccataaactgacgcagttaaaaaaaatcaaactagcaatgctgtcctgccaaccatcgtcgatgcgtttcgcgaaggatctcccaaaagtatgcacttgcaaccactttttaaagcctgcgtcaaaaatgcccctccattgttatgtagcaaaagcctgaaaccgtggggcgcaatggaagcatgcatgcgagaacgagagcacctttcgttgcttcggctaatttcctcgtttccatgtgcttcttccgtttgttttatttggtttgcaatgtataggcattgccattgccattgccgttttggcgttttgtgtttgtgtctaaattcaatctgcctgcagtgttttaatggcttaaccacgcaagtatacattgacgccagttactccactcaattagccgtattattaacaagctgagtgatgaactgtttgatctctatgtggatgttataacagagg

SEQ ID NO: 16080 - DNA, 658 bp, Brachypodium distachyon
  Intron number 1 from transcript Bradi5g18410.1 (locus Brad i5g18410) derived from phytozome v7.0 (chr-ID Bd5; pos 214 25585 to 21426242 reverse strand)
gaagtaattccttttcttgtgcttgcagtaagtcttctgtctctagcttttctcttcttcaatccaatcacacttttctgacactctttttatttgctacattaagaaaacaaagaatatcattatacattgctgtttgacacatttgagttgtaacatagcttcttcatgttgattatcaaactatctttgctaaagattggttttctgtggcaccttcatattgtttaatccttgttgtgcacttgacgctttgtaatgtgtgctttccccacatatataaactcacttagtgcctatattgcatcgcctgacattcttctcgaacacacctagcatcatgtcattttgattaaggagaaggtgctaagatagcacaaagtacaaaccaactgcagcaaaacaaaataaggcaaagaaaataaggaaaagagttaagctacaaggcaaaaaacaaggctatgctacaacaaaactgcattgcctatatatatatatattctggctgcattcaccatattagccatttttctgcaagggagattgatcaatactgctacttcattttatctgccctttgttcaaaagatacatgttctaatcactctgcaactagatgaaactgacagatgtgactttttaggttggtgtggacaac

SEQ ID NO: 16081 - DNA, 981 bp, Brachypodium distachyon
  Intron number 1 from transcript Bradi5g20370.1 (locus Brad i5g20370) derived from phytozome v7.0 (chr-ID Bd5; pos 232 62280 to 23263260)
agggacaggctgtactgaggcgcccataccatctggtaatgtcctatgtcttggaacatttgacagtttatactagccaaagtagtgtcttagtttgtactaaaaaacataataagaccataaatcttttctttcaactataaatccgagttagtggtcgtcaattcaccctaccaacaagactactttgtagcttgttagatgatcgtcatttgattgccacccatttcaatgtagtatgtatcacgatcttttgactggtttgatgcatacttttgggataattatttttttaaataaatattttgagaactcttattaagcataaaattagaaaacatgatcacattaatatttaaaataacgcatacatgtaatatatatttttaattccgtagcaacgcaagtgcatttagctagtgtacttaaaatacatgcagtatcaaaagctgcatttgagctactgttatgcactacctccgttcctttttacatgtcttggacattgatgcagtctctaaacttcgaccattattttttgtacttgttagtcaagttattttagaactttaatggggtaaaagtatttctgaagacatttgcacataaaaatcgaaatatttttatgtatattagatgtcagagttttaaaaggttagactgcatgcattgtagaatgacatcttacaaaagaacagatggaatattacacaggctttcatgtagtcatcatatccatttaatgtcaataatttttactcaactttaattctatcttccaagttttcttacacacgttctttaatctcggtccctgaactgtagacatgtatcagatatgcctatctcatggcagaaatagttcaggttctcaaacgctgctgtagccatagatctaataataacacttagtactatcaagagatctaataataaccattcaattccaatgcaggttcccctcagcaacaaccgcaaggt

SEQ ID NO: 16082 - DNA, 1017 bp, Brachypodium distachyon
  Intron number 3 from transcript Bradi5g21860.1 (locus Brad i5g21860) derived from phytozome v7.0 (chr-ID Bd5; pos 243 67373 to 24368389 reverse strand)
gaggagctgcggaacctcactcacctcatcaaactgtatgtgctgtcgtttttcttgcctcgaattggtggtctctgagcaaaaccaagctgaaagcccatgccttgttttacttgattcgtttgtgtcctcagttggatttcttggatggataatgtgcttgctcggattttttttatgaattttgctttcagttcaatgttatttcctttggggaattattttgggaaatgtcattggcatgtactactccgtactagaagaaagaagagactgctgtagatagctgttgggccggcccagagaagcagaggcagctatgctttctttcagcccatgtacttacagcccattccaaaactcgccaccccgcacctgacctgtctcacctcccaaccccattctcaaaaaaaaaaaaaaactcccaacccaaatgccggccggagaggttgcccggcgggcggcggccgctcgcaggctcgcagccgtgccggctcccacgagagagctgtccgcgcgtgcgggtggcgcttgcttaccgcccgccggagtggcgagtccgttcctgcttctcagagttcaaatttcaaacacaacggtttggtgtgctaggctattggtgtaccctaacggaggtatggtctcttagaatgtcggtggaggtggagcgcatcagctccatcgaccacatctgatagagttgaagggtctctggaggtataaatctaattagcagagtttaggctaatacagccgatttgttttcagtaatcaggtgaaaatcaaccatgccacgttttacaaccatgaaacatcagtatcatcagtttatcacatcgttgctgaattactgctttccagttgtgatgaacacttacgatcaatagctttgccgatttgttgtacagttttggatgacgcaacttaagttaagatatatacacgtaattaaagttgtgggtctctggtgttatcgtttcagggacttcaggaaaaacagcttgactggcccattgc

SEQ ID NO: 16083 - DNA, 814 bp, Brachypodium distachyon
  Intron number 2 from transcript Bradi5g25600.1 (locus Brad i5g25600) derived from phytozome v7.0 (chr-ID Bd5; pos 268 43822 to 26844635 reverse strand)
cttggtttggcatctcggaggttcccataaccgctgtaattccctgcccaattaccccagctataatcattttgcttcattgttaagtttattgtataggcagcaaagcagcctgcattattactagacaaattggctagtctatttacagaggcttcagtttgcggagtatgcatgttgcagaaatcaagctatcttcaaggcttcgtttctcacagtgcttctttcagtaaataatcagtaaattaaaactggctgcctgggaggttgcctgagaggtagagccgtgtagtagctgttgcctgtgaatgtggcgcagacctgtggtgtttttccccctcgcctgtatacccctgtaacttctcttcttccttctaataaattttcggcctctggcccttcgaaattaaaactggttgtgctatttgcacctgaacttaaagggctatcacaaagtaaatatcctttttgagaataacagataaaacactttaaggtgtggtatctgttgcaccgttagtctgttactttagaacaacatgccatcatttcctcaagcattttaaactgcatattaagtctttgagcacgtggtcatattgcaaccaattgtgccagattaagcctatgttttccttggaatctttatgaccattcaagggcatcaactgaatagagtggagtgttgttctaatgttctacttctggtgttcgaccacacactcggctgaagaacagatagattaatctcttttgctactatagcattatccactttgattcatccactttgtttctcagagcactgtcagag

SEQ ID NO: 16084 - DNA, 785 bp, Brachypodium distachyon
  Intron number 1 from transcript Bradi5g18300.1 (locus Brad i5g18300) derived from phytozome v7.0 (chr-ID Bd5; pos 213 28606 to 21329390 reverse strand)
cgctccacgccgtccaccacctcctctccgtcggggttcgtctccttacccatcttgtttccccctgtctccccgagctacggcatagctctgcctttcgattataaggaagtagccaaaacataattttacagattatagttgtgcttaagcagcaatagtagtggaagtcccccttgggaatacagcgtagttacttttttggtcggcgatgaaacttagctacttgaagcaaagtagaagaaaaatccccaaattggtcattttgtgtttggtagatgtcttatctaatcaaatctgttattcctctgcaccatcgcaaaaatgctgcgcaagctttggtgctgaatccgcactcttctcatgttcacggtttggtacttggtttacctcccccaacatagatttaatctcagatgagcatttcctaaatacggggttgattgtttcagcaactttgctaagttatttggttgcatgtagatgggtggggattgaattccgagaattgtgtgcccctcttgatctggcttgtagagatgtaaggaggaatataggaacactaaggaacttctgtactgtgtttagtatatagtgaagcagattgtgatatttgttggctcgagtgtgaaagaatgctgaagcggttgattagccatgtagatatttctgtccagttgctcttcagtttgtcgcattgtccgtgtgacctgcctgttaatacatacgcccacaactggagaagaaaatatcaacatttttgtcatgttgcaggtttgcgtgcc

SEQ ID NO: 16085 - DNA, 559 bp, Brachypodium distachyon
  Intron number 1 from transcript Bradi5g20940.3 (locus Brad i5g20940) derived from phytozome v7.0 (chr-ID Bd5; pos 237 22424 to 23722982 reverse strand)
ccgggccattgcgcgagagattcagaggttgggaggtgaggcgttcgtgtttttttcttttcttttacaaactgttttcacaagtttggcaccggcgcaagcaagtactaggtgttcgttcgtgttcccatctcttgcgatttggcaacggggttggcagtagtgctgggcaccggtagtaccatatgccgaaatatggatctggcatcgctgtttggccacattgtggagggatgccttactagcgctaaatcttccacttaatgtatttgctttctctagctgccactgctgtagtaataaggctttggtactcaaaactttttcattctgtgctgctttgaattttctgcttagatgaagctggtaaacttgaagtggtaaaacaaacgtgtggtagactaaattttctttgaaatagtttgttctgtttctagtatgcttttgttgcgttgtcccatgcatcaaattgccaattagctcatattttactatacttaagctactactcctagtatctgatatgtgttagtttttttatgccccttttcaggagctg

SEQ ID NO: 16086 - DNA, 940 bp, Brachypodium distachyon
  Intron number 1 from transcript Bradi5g24130.1 (locus Brad i5g24130) derived from phytozome v7.0 (chr-ID Bd5; pos 258 79947 to 25880886 reverse strand)
ggttccacggccccgccctctcctcacacctcaaggtacaagcactgtccttcttggcccctaatgctttttaaaaagtggaatggtttgatttagcagatagttcagtactaggttcttctgttgtaccctaatgtgcttgctctccaaacaagtgatggatgctgcaattgattgattaattagtactgctcatgagggcgcattggggttgaataattggtctgggcttcggttgagaggttcatcgagatgattgtaatttctataattctgaagatgttattgtaaaatgttattcctaaagatgctacgacaagaaattctacggagggagtagaataaatccccccaaaactatcgttcctatatcaattgcttattggctagtgtccttgaggtctagccattgcttagttctattctgcagattcatagtacgagaaaaattgtatgatttatatgcgaaaattcctttttttaagttagcatgagagctgctaaaattccattgcagaagaagagatcgatgggcctaaaaaacatacaaagcatgacttatttgagggaagccgtacaaaaaactgggcctgcatgtgccaatttatttatgtttttttttgtttctgaaaagaaaatatttacttcatccgtctaacaaaggatgtttcaattttgactaaatttgattgcacctatacattaagtcatgtctagatacattcaaattttaaaaaacttgagacatcttttgtagaacggagggattatgttttttttccacattatgtgtattatgatcatgcacatcttatgtctttctagaagctctacgcataaaaaaaaagattgatggccaaaacaacatgaacttaaatgagtgagaccattaatggctgacacacctttttccttgcagaggtctgtggaggaggggaag

SEQ ID NO: 16087 - DNA, 606 bp, Brachypodium distachyon
  Intron number 1 from transcript Bradi5g19560.1 (locus Brad i5g19560) derived from phytozome v7.0 (chr-ID Bd5; pos 225 83166 to 22583771 reverse strand)
agcaactgccgactaaagcttcttcaggcccaacggtaagaggaactgtgcctggattctcataaagcaaaagagagaagaaagaggttcaggaggtcaattatttgtttattctgcatgtaccacgcttttggatgcacccaattgtttaattccatgtcgacttcgtagaagatcttgcccctcgagctcatagggagaatcagctgttgagttcatctccgcatctcgttttctgtttcctttctttcatttattagttggacaagcatatcttaaggtgaggggtcttaatttcttaagtcagggacgatagcatttgctgatttatgttttgatgatgtcttcccagtgtttcttatcaagaagtgtccaattctgttctgttgagccccaattcctatagacacatcacttaaccccatctgtttccttcactttctgatcctaggctatagaactggccatgttttttcaattcatgactccaataatttgtcgagttatgtagtcaacatatctgcttaacaggcagcatcaggaagcatatctgcttaacaggcatcatcaggaaattctgttttgattatttcagcctgtcaattg

SEQ ID NO: 16088 - DNA, 1060 bp, Brachypodium distachyon
  Intron number 2 from transcript Bradi5g19040.1 (locus Brad i5g19040) derived from phytozome v7.0 (chr-ID Bd5; pos 220 93641 to 22094700)
gctgctgctgaactggcgatcggaaaaggctagtgcgtgcagtcgtgcactgctatgctaatatctctggaatttagttgtaattttcagcacaacaaataattttttcggggtgatcgggaattttcacttagtttttgcatcttcgatacagcaagttttttttttgtaaggtacatggtatattgacacttagtccaaacaaacaaattaattaataatgatgaaactttaggtagtacaactattgtttccagtgaataatcgggagagttgatggaaatattctgctgttagaaagatggaaattaactcctttttaagatgaaaatgaaccgaggtttgctcttcttttgttatgcttatgcactcagagatggctacaaacagtgggattaattagttccacattccacaagtggatctccaaaaaatgtcaagtggtctactctctgcttctgcatataattgccatgaagcttggaggatacaggagggagtgtgagataaataaattgattttgggattctgttgcctggctaagggttggtcactttattgggtttcgtagcaagactttatttacttatgtgcttgaccttgaagtaaggatttctttaggtggttggccaagtggcctggccagcatgggcaactcatgagaatcttataacctatgatattttggattaggtgtttaggttcatctcatcatctgtacttgcatcagatataatatatgatgtttttgtctttcctgcattcacaaatgtcattcacatcatctttttagtttgttaaaaccaaatcaggatttcattattttcttttataacctagctagatgagctaacagacatgacattctctttgtcatagcgctgtcgtgtcctactcgatttttttgacctatagctacttcagattcaaagttatctgcagttcgcctcaactaaatatcctcaaacgcgtttccccagattaatagttgctaaccttatctagttccaattctgcatgcagtgcaagcgtatttggtgtttcaccaacctcgttgca

SEQ ID NO: 16089 - DNA, 1010 bp, Brachypodium distachyon
  Intron number 1 from transcript Bradi5g23130.2 (locus Brad i5g23130) derived from phytozome v7.0 (chr-ID Bd5; pos 252 12838 to 25213847)
tccacgcggaaggacgctccaagcctcgcgagcaggtaagatccatggcgctgccgagcttctcgagcctctctgtctctccctctcgttgctccgctaaggggatcttgtgtggaggttttcttgcgtccctcttctctgcatttcagttgctgcctgctttggctgcggccggaattcgatcttggtagtcaacgcggctgcgagagcgcctgtcgatccgtttctgggttcggtgttgggtcgttttttctctgagcagatccgcacgcggtagttacaagttacatggatgatggcctgaattctgaggtgtcttgttgtgtggattggggatctggccctttttctctgtatggtttggtagttggtggttggtactctgctctacatgatgcttggtactaggctagtactagcacgcattctttagttagcgttagtcattcacgggaacttttgtttttggatgccaagaaaactggtttgtaataagtgaattaacaatccatgctactgccacaccttttctggaagaggggattttgggagggggggcttttagttgtaatttattcgcttctcctgcgcattgtcatactttattatgcttgcttgtttcttgttacttgatgtactaacctacgatagaatgccaattgtcaaataacctgaactgtaaaagagcaatgggaatgggaatggcacagtcataggaatatcactgtaaagattgctgagttggaaaataccatccactgtatcattgtcacgtggcaccaggcaccacatgtcattttcacattgaatgctattttccaacttacgcctttttgagatggcattgagctagttttcttgctttcactgtgcgcaaaaaaaagtttttttgctttcatttctacgctctgattgataacacaatatgagcactgttttgttcctttccattctatcattaattcatccgagccaattctaattgttgttgttcatattgcttttgcagg

SEQ ID NO: 16090 - DNA, 802 bp, Brachypodium distachyon
  Intron number 2 from transcript Bradi5g27580.1 (locus Brad i5g27580) derived from phytozome v7.0 (chr-ID Bd5; pos 282 97654 to 28298455 reverse strand)
gttaattgctccacgtgttggcaaggtatgtacctgtcaggtgctgcattcttacttctgtgtttgttttgttattccaaaattaaaacttgatgacactcttcttcacatgataattccattttcttttacaaacatagaaaggaaaaacttatatccgtgttcagtaaaatgacataaaatgatccggaacaaacattcagctgcacatccattctaagacgaactgaattgtgtagacagttaaatagctgttttaatcttgtagttcatatcaattatcaacagaacgaactgaatgtggtgtgcatcttaaaattatcaatgccgactgcagtactgctattatgcaccaatgcatacttgcgtgatgatagacctctcacgtttttttaactaacgccctgcggcacttatcaagggttgtgtggataggacacttgtttgtctgtagatataaggtttggtagtctgaagtaaaaaaaaatgatgtagctgtgctttatatcctcaagttgaactagtgtactctcatcatgttcacttgttcagggtatattatctatcacatggaaattcttttgtctttcgttctctttgtctagtatatggtgtgttctgcttgtatagttgtcagacaattaacaagtctctctttctcttggcctaattagaaaggctggtgtcctgcagtatcttttcgtattagtacaatgtcattatggatcaaatttctatgagaattttgattattttcttcttctgaatgtctgtgcagaaagctgctgcaatctgtcttcat

SEQ ID NO: 16091 - DNA, 983 bp, Brachypodium distachyon
  Intron number 5 from transcript Bradi5g21940.2 (locus Brad i5g21940) derived from phytozome v7.0 (chr-ID Bd5; pos 244 36958 to 24437940 reverse strand)
ttaaacttgagaagtaagactacagagatcagtttctcttaattacaatacactggaacctatcattttacatccgtatctttgtcttgcatgattttcttggtttctttcaatctttaattttttttacggtctttgttttttacttaagtaagcaatcttctaagataaataaggaacaatgatcccaaaactctagggtaacactgggagtaatgcaataacttctagagtcagtcctccaccatgaacaaagaaagtggactaagctactttggtttgctcttgccaaagtacaccaaatggttgataataataggtggtatgttcaccagatttggttcctacagtcaagggctctggtgcttgcatgattaattctatctttgttattgtggtttgtaactagttcaccttgtaacttttcaaataagaatgctgttcgatgcatcaaacattaggtgggcaatggcttaaatttactgtgtactcaaataaaccagaacgtttgatcctatgcagattgttgaacaactatttctgtatatcgattgagtctctgttttcgtttggacaaaactaatatctttctcccatgctttaattacttacagttacctttgttgttcgtgatggttctttttttcttaacaattgctctgttttgacttttgaatgattagagattgcatagttgaattcatccctttcatggttcttttagttttactaaaacctatatcagatatatcaagctgtactccctccgatccataataagtgtcttagatttagtacaactttgtactaaatctaagacacttattatcgatcggagggagtagcattttttgttcacaccttctctgtcatcttttttcggatattatgcatgtatgcacaacttagcatctttagtaatctaatttatgtactcaccttgtgtttcgtcccatcttttgccatctctaacaggtattcgg

SEQ ID NO: 16092 - DNA, 699 bp, Brachypodium distachyon
  Intron number 1 from transcript Bradi5g22410.3 (locus Brad i5g22410) derived from phytozome v7.0 (chr-ID Bd5; pos 247 91085 to 24791783)
cttacatccacggctgcttcgcgtccaccggggaggtatgcgtcccgatctgacgtgatatttcttcttcctaaacgatctgatgtgagctttggttgcgcctaaattggattagtggatgtacgagtcgctgtcagtattcgctctagttgtaaagttataacgatcgatcgagttgtgatggtagaactgctaaaaaatcaagctctaggatgtgacttacttcgttgtggtcctatatcatatagggacctaatatatgtgcataaaaattcgagctctagctgatttagcttgtgaattttgatctgcggttaaatgtattttggtatgattgctttttttttgcgaagaatattttggtatgattgtatgatggtgtaatgacttgtgaaacaaagaatttacattgtctagttaactgaagtttttgtttctacttattaacttcccacatgggtgtggcggttctgcagagtatgtttaacatatgtattaatctgctcaatatgatttatgaggatcagtttcagtaccataggtttagtcttgtcgctctgatcataagagtggctagacatggatgattgcttgtatcttgagtatgtgtcttctgtactttcactgtttactgaccatctctttactttgctttgattcacagcttcaatccgtgaagcttatccgtgacaagcaaac

SEQ ID NO: 16093 - DNA, 878 bp, Brachypodium distachyon
  Intron number 1 from transcript Bradi5g25720.2 (locus Brad i5g25720) derived from phytozome v7.0 (chr-ID Bd5; pos 269 09433 to 26910310 reverse strand)
tcgcgctcgcctcccccggccccctcgccgaccaggtgctacggtttccaaccaaaaccaccgcgctcaattgctcgtcctggtctgtactctgtagttggtaataaggtgttcagatgttcaaaactaatctcatagctgttcccaaggcttaagggtaaattttacttgggaagtcttccacgcatctggcaccgaattagcaccaggagccgaaacaagcatgatgcctgcggtgcagatagagggattaattttgagtgggaggagtaatgactcagtaagtagaccgtgttactgattaacgcgaagccatttcttgtatcatcctcgcaggctagcttgtcgccactgtatggcaacgtagacacagcacatccagtttgaacaacactggcccaggtttgttcacatgcaaacacccttgaggcgcagcacatccaaatgcacaaccaggaagtacctcagatgcacaaactgtcgatcacatgcccagcagtcagcacaagagaagcttactgggactgacagtttttcgtgctggttgttcattgggcttatagcaaattagttagcttatagaattaagttatggaaatgatacgtcggtaaactctgcatatgaacctttacaagcccgtgaagcctatggtacactcccttagaggcggttataaggcgtaagtgcaagaatgtgctaattacctgcgtctatgtttgtagcttaggccataagcccattggccaaatagaccaattgtacccttttatgatcatttagttttgcacgacctctttactttgactctgttctatcacttggttttcctaactatttttatgtctgctttgtttccagcttactgagatcgtgaata

SEQ ID NO: 16094 - DNA, 981 bp, Brachypodium distachyon
  Intron number 2 from transcript Bradi5g22120.1 (locus Brad i5g22120) derived from phytozome v7.0 (chr-ID Bd5; pos 245 92186 to 24593166)
aagtgagtatttttgttcctatggcatgctcataagttctttgttgttctgcctaacctatactgttacatcattgttcacttttgaccaatcatcaatttattgttttttttactcattgaatgccaaggtcaagcttatgttgttggctatgctatgtatgctggttgttttctctcgcttgatggaccttctgtagatgcaacatgaaatagtttctgtttttattatgctccacatgttcagtttatacagtccctactacaaactctttatgattgagcattaagtactacattttgtttgagttgtgtcttgagtttatttcgtatcaaaggaattagtatggtattgaatgtacaaataactataggtaggtgaaaactactaagttgatgagttacaaaaggtgctgtaatgagcatacaattttgttaatgtttgcataattcaataaaatctactaattgagctgattttgttttccaataagtatgaaggaaacgcatggaataaaagctctatggtaatgtagaactcaaaaccactagcactttaatttgtgccctgtgttactatagccactcttggttcagcttgttcaaaacatcttttttcctgatttcatcgttaatttgttgccttttcagaagcaagctactcaaatgaagaattcctcagctgctattgtacaaaagaaaaaacaaggatcggacagctctgatagcgatcctgatgatgaatcaggtgattctggtgatgaattaggtgattccattgataaatcaggtgattctgatgatgaatcagatgaggtaagcaatcgtatttcttgcagtgagtactctgctgttgcacggacttagtctcatacttcccattcccctgatcttatgttgtttaatattgcggagtatgtgcaattgtagatcttcaccaacaatattttctaagtcctgactgtaacaatatttgcaggat

SEQ ID NO: 16095 - DNA, 941 bp, Brachypodium distachyon
  Intron number 2 from transcript Bradi5g25460.1 (locus Brad i5g25460) derived from phytozome v7.0 (chr-ID Bd5; pos 267 79117 to 26780057 reverse strand)
cagcgcaggtgattcgatctaaaccgcggttgattccatctagatctcgccgaattgtgtcgcgttttatgttaggatgagcgcgttgttgtgtggtctgattgccacctcttagttatggatatttgtgctgcacaagctgtaggtgtgtcatgggttgctgaattgattggtagaggacttatgaactgatacgtatatggcctatgacacgatggctgctagttagtgtgttttctgagacgattaagaaaactttgtcttaattcttcaagattggatagaagtcatggtaatctgtttacaatttatgttaaatggctctctagccacatggatcggaatatgtacgagccaattgcggtatgtgctctctgctctgtaacaactaatgtttttcaaagccattaaaaccgaaggtagctagagtttttaacggacagtaaggtatgatctatgaccatttaactggtgctttttgttttaagtgacatgtctggttccagcggatatactcaattgttttgatgttctatgtacatcaatttcaattatgagcgcattactaatgttgtgcagtcctggtgctctgtgttcaagtgacatatgtggccccagcggttgtactcgttgttttgatgatatatgtacgtcaatttcaattatgagctccactattacgtttgaattgaagatcactcaactttaaatgattcaaatcattatattagatcactatttgacaaacagcaatgtataatgttcaatactgaactgattgcctccttattaaaaattgcaaccacatgagctcacagcaaatgagttatgacctgtttccttttctacccatccttcgctaccttgctacaatcatgtttgtctaattgtcatatagttctcatactcagttaattttttcaggtcctgtgggtgaggac

SEQ ID NO: 16096 - DNA, 672 bp, Brachypodium distachyon
  Intron number 2 from transcript Bradi5g18240.1 (locus Brad i5g18240) derived from phytozome v7.0 (chr-ID Bd5; pos 212 90987 to 21291658)
ctgtcccatcaggttccttctttttcattaaaatggcaatctttttttctaattaatcatagtataagtccttttagcctcttcacgtaataagtagttctaaaaatctgaggcacttttttccttttgagaaaacaccaaaaacacccgttgagtcgccccaacgggtgtctggcattgtggtttgtcatgaatatcctattttacaggaaaactctgattttgtatgtgccgtggggaagtagaagatacaattttctctccatggctaaagtcactggaattaaaaggtttaatgttcctttcaaacaaagtcccaacaaggttgacactaaataaagacactgaatgtgtctctggaattgtttgcggcgatgagatatatgatgcagatgcatttgttttggctacgggactctcacctctacaatctatcattagaaacaggtaagaacacatattcaggtggtcattatgtgtgcatcctggctcagcttttcctagatgcctgtatttagtcacttcgagagataagattgctctgaatccgaaggtttcacaacttcaaatctttattaagaaaaaactatttatgagctttcctgactactaaattttatctagtccgtttctgcagtctcaacaagaatttgccaatcttctttatctgtc

SEQ ID NO: 16097 - DNA, 992 bp, Brachypodium distachyon
  Intron number 4 from transcript Bradi5g16820.1 (locus Brad i5g16820) derived from phytozome v7.0 (chr-ID Bd5; pos 200 93572 to 20094563)
acataataaaccgtcctgtccagcaatgtatggtgatattcatttctgacatattataaccatcaattcattatagtatcattttcagcaccataattctcttcattcaattttctcaatgcttgcctccatatttctgcagtttgacagagcatatagagatttattttgcacatatatttctcttgtgcatttacttaataggatattcctgcgtcatccgtagcaactactcctccgatccataaaaagtgccgcccatttagtacaaaatcactttttatggatcggagggagtactaattcagcatttgttaatggaactactccattaggctagtctgaagaatagtcacagccatttgtttatcctcagaaggtaaaaagtaatccttttgggggctcgaggcatagatggtaggaacttaaatattgcctgctcgaatttggttgacattaaaagtaagacctacattgtgaatgacatcatgaaccagtggatagtggtactctatccatgctttgctaaaataaagaacataaatttgacactttgtttgcttccttcttggactctgcctctcacattcttcacctttttcccatcatggtttgatctcttgtcctacatttttgtgtatgatccaatgtatccaagtttttccaagtattcagtttttctgccagatatttatgcctcagcactgcaggatgcaaccccacactgattttgtgcattacagaaatacaatataactcaaactggtctatgtgtacttttgtgtctgaatatacgaggccagacgattttttattcaaactagaatgcttatttatttattttaaaaaggaggaaaaccgactggtctgtgtcaatcaatgcacacaaccatccattattaaaagtgtatcatgtcacctcctgctgtaattttctttactgaatattgagaaagtacattacctcataattacaggtgaaaacagcaagg

SEQ ID NO: 16098 - DNA, 868 bp, Brachypodium distachyon
  Intron number 3 from transcript Bradi5g20710.1 (locus Brad i5g20710) derived from phytozome v7.0 (chr-ID Bd5; pos 234 92026 to 23492893 reverse strand)
tcagaggatagttctggcggtcaagctgctaaagtgtatgacttctctaaactttagattactgaatttgtacacattttttatctagtaggattaattatttgatatgttttgtatatgatatgcgctttagcttgagactggtttcttaccttttattactgatgaagaatttgtcctataaacatgctgctgaagtacattatttattttcttttttttgagctttgaagtacattatttcgaaaatacagaataattatcttctgcgtcatttaatatgacaatccctaataccaacttcattatctttttttgacgatttagtgcactagtacacctaattatctaaggccctagtgcaccccatatgtcgccctgattttctctcgaagcaaatgctattcaagatgaaacattgccatggtctgtttggaaggctggttggtgagtttggttttacacatttggtattccttatgtatagtttgtacaaaggagaatagttttttttttacaggaaggagattaggtcttaaatccttgcaagtgcagtccattttcttatagatggagtaacattacttgatattatgtagatggccttttcttagaaggagattaggtcttaaaacattcctttttgaaccacatgtatgctgggctagttgtgttatgtgaatcacacggtacagtgtaagcacagtttatatgtatagaatgaatttcagagtgcctatttgtacatcggcaacgtacacctactgtctgctacagtacatgttatcctacaatagttgtcaaccaagttctttgagcaatgcaccttgtgcagcattctaatgaatttagcatttcagggagactt

SEQ ID NO: 16099 - DNA, 991 bp, Brachypodium distachyon
  Intron number 2 from transcript Bradi5g20150.2 (locus Brad i5g20150) derived from phytozome v7.0 (chr-ID Bd5; pos 230 42985 to 23043975 reverse strand)
acaaacaaggagctgagacagctattcttctgacggtacattttcttcctcaatcttctgaaaattcttccttgtcccccacgcaatgatgattcgttgaccttgcaactggttttgtcggtgcaaaattgatgcaactctgcatgcttgctgccatacatctgcgtatttatattatacaaaataattgtgttgttccctctatccctaagaaacatccagcttttaccttttttatggcgggagaagaactatccagctttagtttgtattacctgcatgcatgcattgattacagtactttagttcagttttaaaaagtagtattctagatattgccccctccgttccttaaagaatggcatattagctttcattaagacaaggctttgaccacaaattactatgccaatgtgtggtttatatgacatgaaattaatatcgctagattcgttatcaaaagtacttcatgatacttatggtttcatgtcgtataaaccacactttaacatagtaatttgtggtcaaagccttgtcttaatgaaaactaatatgccattctttaaggaatggagggagtataagattactttatgccttatgttttgaaatggagggagtatatggtgcctatattttcaaatggatggactatttgttcacacgcctaaatatcattgatatggcaccatgtcctgaaccatgttctgtaaattgttgccatgatctcagctcccagtcataaactattttaaaacattagttccattgattgtttgaagcaaaataatttgttgatgctcacatttttgaattttcaagtttacataatgcaccattccaactaacatttgtttgcacatatgtacctaaccgcagaaatgtgtctttttctgctgcttaattgttttatacttgatagaactgcttgtatgatggaaatgtgacacatgtactttggttccttttccagggtgccacaatagttgac

SEQ ID NO: 16100 - DNA, 1017 bp, Brachypodium distachyon
  Intron number 1 from transcript Bradi5g21080.1 (locus Brad i5g21080) derived from phytozome v7.0 (chr-ID Bd5; pos 238 23859 to 23824875 reverse strand)
ttctacccggagatctccaccagcatccccaccatgtgagccccccctgtaccgtaccccctcgctcccctttgcgccacttagttgccgccgctgtcgttgttgcagttcagttgttgcgttgtgtcggcgcgattcgttccggtgattttgcttggctggggaatttagtgtcacgatctgcctctgtgattgatgaggacttgggattgtcttaagatgatattgctgtggcgcgattcgttttgttgatcacgttaggttcgatccggtgtttgtgtgggagaacattgggttctggtttggttctgatctgttaacctgggaattccagggtttcagtgcgcagtcttggtgctcttaatgatgaatccgcagggtttgtagtgaaatttcacaatcttcagctggtaatttgcctgaattggtagccgacataaacaattgaacctcttacacttccatgtccatgcttgggtatattgcgagtttgagtgagaggatagactcataaatgcagaggggtcaggggtaggagtgaagtgtgaactcaggaggggtgaaaattccgaaagctttgatctgtcggttctatagttgttaggactttgtttcattcagttggtcagcgctcaggaagagcttgcacggagaatgtgttacttcggtccagattatagatttcttgtctcttataagttcagtatggcgctccattcagactagaataatgagtcattttaactttgcttttagcatgtaattgaccctcgtctagttatgtttatggaacggagaagctttacttttgacttcgtttggtttgcagagctatatactttatagggccatatattaaaacaaatgctttagcttgtcatagagaatatgattgattattctatgatgagagggaattttcagggtgcgtgctattaaagttcgtatttccaatgacacaagtcaataatttgtttccttcgtctcatttcccctgtagtgagagcttgtacgaag

SEQ ID NO: 16101 - DNA, 976 bp, Brachypodium distachyon
  Intron number 2 from transcript Bradi5g21740.1 (locus Brad i5g21740) derived from phytozome v7.0 (chr-ID Bd5; pos 242 79055 to 24280030)
agccgactaatcttaagtcagctgataagagtttggtaagaatatttttcatccgtaaagtcaaatgcatgcttgcaattcaaataagtgctactatcatgttagtttcattcttgatgtagaaaaaaacggtttgtgaacatgtagggtgggtgactggtactttcggaaatgtcatcctcggtactttagttttattgaattcgttatgttggtctctggtatttgaatatccttcaattgaatgtgtggaatttctggtgtagatgataattaatgagcagtagaaaatatctattgctctgtcgcatttattttggtgggcaatgggcaatagatgacgtctttatattttactgcactgtcgtattgagaattgtgttgcagttttcatgaccggtgtcatattacagattccactataattacatttgcatccactgcattgaacaagatcctaggagggtggagattagaaaagtaaccatgaaaccgatttcttatctattgaatcgaatgtataaagattgagttggtggtcgttcattcactccaccaagactactctctagatagctagggcatctccataatatttcttcacacacacacacacacacacaccgccggagcctctcttacagttttcagtaaaaaaatcaccataattaccaatgtagtagaaatacgtatcacaattattgttgataacatttattatttagcacaaatttggggaatatgagggtacaatcatttaagcatgcagtatttttttaatcccgtagcaactcattcgcatgcatctagctagtaattcctaaagaataatggaagtctcatgcttatactagcatcgctttggtatttttctttggatgaagatgtgtttacatttgactgatgacttggttactattgaatttgaacttccaaagaaaacattgaattctcacagtggcaatgtctcaggtac

SEQ ID NO: 16102 - DNA, 548 bp, Brachypodium distachyon
  Intron number 3 from transcript Bradi5g24820.1 (locus Brad i5g24820) derived from phytozome v7.0 (chr-ID Bd5; pos 263 34650 to 26335197)
agcgtgttaagctaaagttagaaattgtagttgaggtgatatcatctatccatctgcatctagtaggtttcttcagtgattccagctgtaaacctttgtgggttttaaatgtgacttgaggcaacattatcatttgacaagacagcctacttcactgcatcacgaatggaaagcgggaggggattgacatattgcagaagtttatagtttttactgatttttcagggcctacctgtgtactgaaaaggctcaaataatccatgaccttgaaaattggagctgtgatagaatcgtgtacttcttatatgcatgttactgcctctgctgtggaataataacacagagctttatattggacagttaatctagcatgtgcgcttaataactcaaaatttgttacagctgagcagcccatggacacggaattctatatatccttatattgctcattttggcttcgcttcttgctcttctcaatcctatcaaaaaaatccacttatctagtttgattactgacatatcctttatcttggcatagtctgtagatt

SEQ ID NO: 16103 - DNA, 829 bp, Brachypodium distachyon
  Intron number 1 from transcript Bradi5g24460.3 (locus Brad i5g24460) derived from phytozome v7.0 (chr-ID Bd5; pos 261 04768 to 26105596 reverse strand)
ccgccgctgctgccagtgagttctctctcccatgctcgcatcagctgtttatgtattgctttgagtttgttccaagaagctaattaacaggacttcaccttttcttttttcctcatgtaagtacacattagatccacgatgcaaaacagtacctagggcaaaaaagagtacttttttgttggaaggaagattcagtatttggtgtcagttctcaaaacattcaacatttggtgaagtagacaggctgcagcttaatgatattgccgttgatgctgttcatatgccatgtttcatcgtctcttgacaattcccatctgattcatttctctccctgctgtctctcctttgagttttatttttcttctcttactcctttgagtttactcactttcttgtctccttgcgtggatattagatccacacgcaagataaactgaaagagggaaagaaaatgtctccttgcccaggttcaagcctgggtgggtgtacgtgctgctcctgaggcacccactacaaatggagcaccgggcgcgctcctaataattttgttctggataggtaacagagttgagggaaaaggttatgttgctacatgtaaacctgattcaataatgagggagtccacaagttgctacctgtttacatttttgatgattttgatcgattgggtttcttgccagtttacctatcattcgatctgtttacttgatgtctctgctgtgcattcatacccaaacttcatattttcttcagttcttgaaccgttttcttgttcttcttgacgtgcataatagggagaataaggatttatacgggagccagattgaga

SEQ ID NO: 16104 - DNA, 844 bp, Brachypodium distachyon
  Intron number 1 from transcript Bradi5g22630.1 (locus Brad i5g22630) derived from phytozome v7.0 (chr-ID Bd5; pos 249 31871 to 24932714 reverse strand)
acactactcagagttgttcctgtacattcgtgcaagtaagggcaagaaatatgaaattgttaagttcctgtcttgattttagggaggatactgtaagcttattctttgtttgttgccgaaatatgcttcttttatagtagaacatcttcactttaggtatgctaaaaaggttgaataaatcgaaaccctaatggaacccaggctacatggagcccggaattttcaagaattcaaaagaaatatatttacaagttttaaaacccctgaaaaaagaaatttacaggtatgtgaatgtgtagtacatacatacattatttcattgagaaacattgttatttatagactgcacaaaaagataaatatgtgaatttatagtagacatagtattcaattattatggatgtacatatttttctttttttgtagctcgcatctttaattatttcttaatgaaactttacacgtatgtagtgtaattttttttaaaaattgggctccatggattctgagctccaaacgtctgcactctgaataaatggccagactaacataagtagaagattgttgtttgctcattgttgtctccctgatgctgttgccatgtttgacttttagtccgagtgaattccaggcactcaaacatgcctcttcgatgtgcatgtttgatttcatctgttggtcggtgtgaacatttctgcattattcaattgctttctgtgttgtcattttaattaatgtatgctcatttttgagtactaagcatagcatatatattacttgctacttgcaaatatgtagataagtgagtgtattgattcgtcctgtaggttttgtcctgaaattc

SEQ ID NO: 16105 - DNA, 409 bp, Brachypodium distachyon
  Intron number 1 from transcript Bradi5g23700.1 (locus Brad i5g23700) derived from phytozome v7.0 (chr-ID Bd5; pos 255 45761 to 25546169)
gacagatacagagataagtttaagaggttggtcattttacttaaagggcacttctgttatgctcgagcatctgtatcaatgttctccggacaccattctatagctgtagtcttggtcctctgcctgtatataatggaaatcatgtattgctgaaacaaaacagctaattattaaaccttttggtttacctggaagaatcgccccatgttagtttctaggagaattaggaaatgaagtcaatcgtgtttgtttttgtcttgcattttccttcatgcgttagatgttttagatgttttaacttctcactgttaactgtgcataactgcatatacatataatgttacttttgtttgactgtaggctgttgtgagtatttctcatatatatctcaatactgtatgtaggctgg

SEQ ID NO: 16106 - DNA, 811 bp, Brachypodium distachyon
  Intron number 1 from transcript Bradi5g24440.1 (locus Brad i5g24440) derived from phytozome v7.0 (chr-ID Bd5; pos 260 86430 to 26087240 reverse strand)
tcgaggaagttgtagtgagtgaatattatgaagatgattgctaaaagaggcctgacaaaacacctctttgctatatctatccactctgtttgtttaagtatcttgagtattaatttgtgcatggaacaactatgtgtgtgtgtgtaagatgtccagctatatgtgtgtgccaactgcaacttgtgtgatatttgtgttttgattaatcatctgtctgatttcttgtgtgatatgctctgttgttacttgacttcttctctcctagcagattcattcaatctttctttacaagtaaaatcaaatgcgaatatatagataaataaatcttgagctccatgaaactggcaagagcatgcgagaaaaacaggacacagagcaaacctgagtttaatacggagtaagaaaacttcaacgcaagcaggaagaaaagtgcagtctgcagccaggcgggtgagttatcacgcgtaatacaaccttggaaaccagttcaaacttgacaatccacataaaaatagcattcgatcgaagacttcagcggttactaggagtgcagaacaaagcatgacgatgaacaagtcaacagagcagacatttctctgctgccggcacggtttcgaggccttcaaatactggccgaccggctcaaggacaatcgattgagaagccaacccgattgcacatcaccagctactagctgcgatgctccacccgggtaaaatttttgctatcggggcctcgattatgatcgctgtggccgccatgcttgccatcgccagccgctgtttcaaatctgccggaggaggtggagggg

SEQ ID NO: 16107 - DNA, 776 bp, Brachypodium distachyon
  Intron number 5 from transcript Bradi5g25680.1 (locus Brad i5g25680) derived from phytozome v7.0 (chr-ID Bd5; pos 268 86022 to 26886797)
ggtaggtaaaccttactttttatttgctttgtgaacgtgttttattcctgtcttgtctttaaacacgtaaaaagaagcaatagcactgtaattcatcagtttaaaatgtcagacgttgttttgtcctaatatagtccgttcgtaacttagtatacccgcaggaggtacctccgtacctgactcagtgacttttagtaaatacatgctacttgccttttatagaggagagagattccaatctgtaacaccccagcgtcactcctggctgcccatcttgtttgggaagattgccccgagaggatcagggcgtgttcagccccgggagattagctcttccggcctttttccttcttttttctgttttttctctgttggggatcactctctgatccccaccctgtacagttctcctctttaatcgaatgacggaaacgaccgtcctttcttcaaaaaaaaaagtagaggagagagattaattacatttcttgtatattgttgcattcctgcatgcatcatattttttgttttgcatttcatcatgatcctttgagggtccttttacgtgtttgcacttgcagtttacattgcctttgatggctagtcagtcctcgaaaataatcttctgaacatgagcaaactctttaatcagtgcagtagaatgtctcatagatctatcccatgtctgtagatagaggctttatttgatcttgacaggaaacatttaccttgttagtttatcaggttgaagagtgtgatctaccatttccgcaagaacc

SEQ ID NO: 16108 - DNA, 884 bp, Brachypodium distachyon
  Intron number 1 from transcript Bradi5g18800.2 (locus Brad i5g18800) derived from phytozome v7.0 (chr-ID Bd5; pos 218 97275 to 21898158 reverse strand)
gatccatccgcaccgccctcgacaccggctgcggggtaaaaattaattcgtgaataattactttccttttttttccttccgattttaaatgatcgcttgccccaaaaagaagatgacggtgcattgtatggcagagggttaatgagagatctcggaaatcccagaatgggattttgctttgcgggtgaccgaagtttccagaccgcacgatcgtagtctgggctttagaggacagggtgcgcaaacgggtttttgtcccaggaaggaccggctcgatctaaccgatcagagagcattttgtaggaaccttttgtattttgtgacgtgacagactttagtcaactgcagcagcagcagcagtatatactcttcaagggtagtacgtactacagtagatccgtaatcttttcagtaagctactgtttttttttacagccagtaaaggctgctggttagagaactcgatagtgctttcttttagatgctagtccttcataaagtatcgacgtgccgacgtgcataacaattgcaacgggacatgtggggtcgccttccatttgcaatttcttttgactgatcaaattcttcaaatgcacacttgatctgctgtgtgctgtgtgcatttgtttttcgaggggatgtgctgtgtgcattcatttcttgaaatgggttgagttttagacagtgccactgtcactcataacatcttaccagttaccacatagtactctgaatagtagcaataggggccatgttgatctgtttgtttgggcgagtgcatcattcaagaagccttgtgatttgggtttacagttgcctaatgtgctgcaattgcgctgctttctgcaggtggcaagctggggagcctatttgttgtcgcgcga

SEQ ID NO: 16109 - DNA, 680 bp, Brachypodium distachyon
  Intron number 1 from transcript Bradi5g27080.1 (locus Brad i5g27080) derived from phytozome v7.0 (chr-ID Bd5; pos 280 00721 to 28001400)
gtgggactgcagggcctcatcaagaaacaggtactgctctgaaatttcagtgtcgacattgatgaagtcatttgtgcaattccgtttatttgcagtgtgctattggtttaaaattatgagaccaattgatgaaactgaaggtgtcctatttattgatgaaatatttagaaagcacaaagagcaattctcgagccaaatggagtcaccaaatgaagttgtttctcattgggctcctaaaagattatgatgtgcctggttttcggacaaataatgcttggagcaaggaggcatggacaaatattgcttgtaaactaaatcaaaagtttggtgtatcattaactcttcaccaagtcaaacaaaaggagcaagatctgaagaaagactatcgtagcgtgaaagatttgttggatgaaagcggttttggatgggaaagcgagagacgtatggtggctgcgcctgatagtgtttgggatgattttccttctcataagaacagcaaagatgccctcctatgacgagacaaatcattccccttctatgaggatttaattccaatctattaaggtgattttaacatattagttttgtttccattttgaccatactttccttgcagcacacactcttagaatgatgttaaattggttaaaacatttctaacaaatattttttaggtcgtt

SEQ ID NO: 16110 - DNA, 309 bp, Brachypodium distachyon
  Intron number 1 from transcript Bradi5g23500.2 (locus Brad i5g23500) derived from phytozome v7.0 (chr-ID Bd5; pos 254 15770 to 25416078)
ccgaccactacaccaccaagatcggcggagtccctgtatgtcaaatcctctccgttcctgttcatctcctctagattttcgtttttggcttataagaatcatcaccagagaccaagcgaagctctgcttgggaggttggagataaactgctatgctccttattccaccctgttttgccaaccctgttttgccaaatttttattttacaatactccacaaagtggccgaattcttctaagataggctggtgcgagatcttctttgagtcatttgctgaaccttctgcaggattggccaacggaggagggt

SEQ ID NO: 16111 - DNA, 903 bp, Brachypodium distachyon
  Intron number 1 from transcript Bradi5g22350.1 (locus Brad i5g22350) derived from phytozome v7.0 (chr-ID Bd5; pos 247 48119 to 24749021)
acgagcgaccaccacgaggtgagggaaatttcactggtctttctttgtggaatttctgttcaattctcttactaggtgtttgctactaatcctgcaatctaatacctccacatggctgcaaataaatggatctgttgttctatcttccatataaacatgcaaagttgatagtaggtggaaaaattgaaacctcatctctgcagttttgtggtaactttgtatgtttttgtgcatgtaatttagtatttagatatttgatcatgcttgtagaaatcattgcatcattttctgttacattgggttgaaatatgcaaaattgatctgttcttcggtagtgagcgaaacagcttaaatttactacccgaacttcctttgcatacacattgtgtcttcaatattttctgttgtctccctccttgaccaggcattttcagtgtaacaagaaagaaatttgtttcggaacatagttattttctgccatctgtacagacgcaccacaaaaccacacttcctagcttagcaggtgggagaactgatgtgtaaatgtcaaaaatacacttgccttttttggcttagacagcacctgaactgaacgaatcacttgtttatttgctgatgatatgtggctgagagctttgatttgttaagtggataaaccttgaaccactttctatgctatgttgctgaaactgaaccatttggatatgttcagcctcacttatatgcgaatgtggtgaatttatgggaatttgtatgaagcaggattttgagttagtgttttggttctgacatgctgtagggagtatttctacacatatagtggttatgcttttttttggtgaaccgtatgcatttatttctgttgtagacccttagatcgccttctcttctttattctcaggc

SEQ ID NO: 16112 - DNA, 1037 bp, Brachypodium distachyon
  Intron number 1 from transcript Bradi5g22100.1 (locus Brad i5g22100) derived from phytozome v7.0 (chr-ID Bd5; pos 245 77769 to 24578805)
actcctctctccgcttgcttctccgttgaccgccggtgagaaactgtgctccttcctccagctcccggctgctgctgctgctggctttgtgttcgcccggttcgcgcccgcgccgtgttgatttggctgcggggttcgattcgatttgtcgcatgtggaggggtagggtgttggattaactggaagcgagttggggggatgacacagcgcttgcgtttgtgcgcttgctttattgcgtggttgagtgggtgggggcggctgtggtgttgttgtgtcagtcatggctttagcagttccgctttgacggattggtgcttgcggagctggaagctcgtaggattgctttggattatttaagcgtttggggctttgtagttgtaggtggggactgaggagttttgggtatatctattttgtgcgagttgatgacgatgtgctttttttgtgtgcttcccttacgaagttaatgcgattatgtggttcatttcctccgcttgtccgctttgactagccttttgtttctagaaaatcatggctggtttggtactttggtcctggctctcgatgcagttgtttgaggattcggagactggacatttggggaatgcttttttgtaatccatatctgttgaggtgggtctttgtgaaagttacagatgtttaactgagtagcagatggtggtgaatacaacttgtttaccttttttgggggggctttctgctcttcaggggttttagttttggtgggagttgaggctgtgcttacagggaatatttgcccggtccatgttttgatattgggctacaccgttttgttatctattgaagggttttcaggtctaagtacccaaatacaggtggctggacaaatttttgtagcaatactaataatgtttacactggaatacattaggttgatcgtagtgggtaaaggatttgcgcaattaatacaaaagcggcatcttcttcatcaattgaacctttgcaccgtctcatctcactatcagctattccagggtccgttctgaatactcaac

SEQ ID NO: 16113 - DNA, 906 bp, Brachypodium distachyon
  Intron number 1 from transcript Bradi5g21850.1 (locus Brad i5g21850) derived from phytozome v7.0 (chr-ID Bd5; pos 243 59028 to 24359933 reverse strand)
ccgcctgctacctcaagctccacgacttccacaaggttctccttcctcgggctcgtcttgtcgattgcgttttgttgcagtttgactcttgattggatttaggtgcggtgcccctcgggcgcctgttaagtatcgtctagagtagaagtgtgatcctttgacattttcggcaaatttgggggttttaggttgggtaaatcgctccttgatgatgtcatgtaataacctattaatatgtgaagtttcgactgtgtggagataagcttatgaccaagatgtactactaatcaatcgaagcttgttaggtgtgtgttgtgtaaatcttgctaagctgatgttacatttagtgctattaggctttcaaaatccagttttttgttttgactgaattagagaagctaccaggataagtaatgccttgcttggtgttgcattcccagaattagcagaagtaaagagatactttagtttagatgtactcaacaaagcataaaccatgaactggtgaaggattaaactgtacctgaggctctaaagtctgaattatctagctcttttatgaagcctgatacatctgacagactgggttttgattctgaatgagtatttctatggagaaaagttattgcactatatgaaatttcaaattttattcagtggccaaatatctctattgatggtctaatgacacgacaaatttaggattatttcacgttatgtaatgtttgttaagtagggatgagaataacagtgggttatgggtatttcgctggaataagttgacccctggcagcatttattgttctttttttatatattatcatcactgttagcaacattgaatttttcttcttttatgataattgtataggctgcggaggagtgcacatctgtccttgagttgga

SEQ ID NO: 16114 - DNA, 973 bp, Brachypodium distachyon
  Intron number 1 from transcript Bradi5g27620.1 (locus Brad i5g27620) derived from phytozome v7.0 (chr-ID Bd5; pos 283 28654 to 28329626)
gccggggtaacaaattgccgggtctccttggaattcgtatgttaggagtgaaatggtacagttcaattaaccgtgattgcagtggcacttcggcatctctgtaaaatccatatgtatgttcaatctgatcattaattgacttctagttttgttactccctccgatccatattaattgtcgaaacattacatgtatcaagacgatttttaggcatagatacatccatatttgggcaaatttgagacaattaatatggatcggagggagtagtatatttagccattttgggtgaatatgattgcgttctttaccttactataaattactagctttgattttcattacctttttctcatctgagacaaatagatgagtactcactaggtttcactaaccgtggttcacgaattgttatgcaggaaatgttgcaaaaatttatgctctactacaatggattcgagtcccggcctgtgtttgacaatgtcgaggacatgctcaaatggtcaggcctgcatgggctcacacgcaggaccctagaggaggagctgattgatgccgggctgaatcatcaaactatatcagagcttgtcactgtatgattcatttttttcttcatgtaaagtcatagcccatgatttctgcatttgcgtctttgcgatattgccgaactgttctatgctctgatagttagttccatgtacttgaattactgccaatcttgaattattctgtagcattttcccaatgtaaagaggcatttgattctcttacattctctaggaccaaacacttaaattctcagcagagctaactagttaaacatattattagtggtatattaatcaggtctaatatgctcattgtaaatctgaaagatgtagcgtgcacaactgaaaaatatcaattcaacaacttctgaagaaaccttactcttgctgataattttttttttcagaatcacttgctgataatt

SEQ ID NO: 16115 - DNA, 910 bp, Brachypodium distachyon
  Intron number 1 from transcript Bradi5g22790.1 (locus Brad i5g22790) derived from phytozome v7.0 (chr-ID Bd5; pos 250 20413 to 25021322)
tcgtgcaggcgctgatactgctagtcaatcggaaggtgagcctgtttaattcattattattttttgcgttcagacaaagttttgtttgattttggtcggatcgaacaggtactgagctcatgctatgagtttttgttcaaattgattggtgtgtgtgggatctatttgttgcagttaatgacacgtgagatgatttttgcaagtgaagcatacaattttctgttccaaacgtgttgtgtgtacttgtttctcttatagttttaccacacagaagatatgcatctttcggttggatttgtcgaaggataacagaaaattaggctgatgagcttcacattgttcttgacttcattcatagtgttgttactttaacctgaattgcacgagtattcttcctagaggatcttggttctgtgtttgtttttcgaatgtggtgttctggcgttcatattaggatatttgaactgcaacatgaatttgtgatgagcctagctcctgcctgctatttctatattttatgagaccctggttgcagtgaaggttctagaggtgttttgtttttgtttgaccatggaggactagtgcaaatcacatcactagagttttgagctttgattaaacaacttttggtagactttcaaggtgccaaatgctggttcatcgtgttaggtatccttgtccgacatgcagtgggagtggatgttacaaacttacaatatcatcatgaagaaccaatttttctggaagatggtttttaactgagtgataagtttcttgtttccttttgccttgttccacattgaacggatcctctttcagacttcatttttgcagcttgataccattgtaatcttatgccgttatttaatgcttagattgttgatctggaagacacggtggagttatttat

SEQ ID NO: 16116 - DNA, 1007 bp, Brachypodium distachyon
  Intron number 2 from transcript Bradi5g26590.1 (locus Brad i5g26590) derived from phytozome v7.0 (chr-ID Bd5; pos 275 30489 to 27531495)
aggccatcctcaagcacctcgacgacgtccaccaggttcgtgtgtatcttcctgctttgctttgtgatttgctcttcggttcttcgcgtcgtcgtcgtcctccgccgccgccggcaatggcgatttgtttttgcttcttcttccttccagaagaggagagtcgagtcgagtccagactccagagttctcccggcgggctccccgttgatcggttcgacggcgcccagattttcctccccgtttcgtttcccttcggcccactataatgctagctttctcggcacgaggcccaggcgttcaatatctgtgtaagcccaatgctaagctattctgggtgttgtcctgggccggcattgccagtggccgtctccgtccggttcccttctcaccttgcgggcggcgcggtcgccgcccgagcgccgccgccttctcccacgagagcgacggtgggtgatcctaggggcgtaaaaagctcgcgctgaccaccgctcccctaccctgctgctgccctctgggttagcgattttgcacgccggcgcctctaggtttgtgttttttcttcgtgcggaatgcttagcgattttcgctcgcgaactcgaatcctgcgtggtgcattcccctgcctcctcggtgggctgtggcatatcattaagctcatggtgctagaactgctgcaatgcgataaaatgtaccaccatgctgccgaattgcgggtgtggaaatgtggtggcctggatttcgagacccttcctttgctcttaactggctcatcatcttaggacaaacaacaggttttgagagctctactacagtttagttgccgtcattttgaacagattcatgtaccatctcgataacatatatggctcactatatatacctgagcagaatcggcgtcctgtcagcatgagtacatttttctcgtgttccatgttgttggaccatcctaggctcctacctaatatttcatcgaacttatggtgttcaggccgagcccgtgatactga

SEQ ID NO: 16117 - DNA, 555 bp, Brachypodium distachyon
  Intron number 4 from transcript Bradi5g25810.3 (locus Brad i5g25810) derived from phytozome v7.0 (chr-ID Bd5; pos 269 84464 to 26985018 reverse strand)
acttggcaaaaaaacttattattaaaggtgacaagctctttctttccctgttctacttaattctacgttgattgattgtacctaccttaaatcaactagttattcttttgcaacactttcggcaagttctacttgttcctagtatttttcttcttcgcctatgaacatgttttaagcattaacctgcacatgtatctgtatctagaccagaaaaggaagaatatcatattcttgagtaaatctttttagtggaagatagctggccgaaactccttttgtaactttacgaatagctggaatactattagcttgatcctgtcaggataaagtaaattgtacttatattttatggttggcatacaaaaacctatgtatgctgcattaaatataggtttcacagttaatttctgaactgggcactgtcgtttttgtttcttgtacggcgctactgtatgttgctggtattcaaaagtaataattattgacattatatttctttgaattgtttttttaactgcagttgtgccgtctcaattggagcagctcaagttgccc

SEQ ID NO: 16118 - DNA, 962 bp, Brachypodium distachyon
  Intron number 1 from transcript Bradi5g25810.3 (locus Brad i5g25810) derived from phytozome v7.0 (chr-ID Bd5; pos 269 86425 to 26987386 reverse strand)
caaggaactcgccaccaacagtcaacagacaccgggtacgtattaaccgctcctctgctcgatccctcggccgcaatctcgtcttccccttctcgcctcctgggagagagagatccctagccccgtttcctcttcctctagatcagccgaggcctgaggcccggtaagtagcagcagcaacaggatgaggagcattttgatcttgatttgattatcgcctccgcgttcccggacctcggatcggttcacgacgcatccctacagccactgccatagcagagcagggccgggtccgtccgtctgttgactgtcactctttgtctgtctgggtgaggcctcccccgcgggatcagtatctgtaataggtgtagacagggctatgatgattgatgccgcggatttgcacgagagatttgtcattgtgagttcccacttcggggcggcttaaatcggtcgacgaacccgtttgatccgagcgtcttcttggtgcgggagtatgaggattaacagggcttactggagtactcctcttcttgtaagctgctgtttatcagtcaaatggaaaatctggttcgaatgttctttttttttttgagaaaaatcttcttcagtgccactggaaaatgggagtttggtagtaactagtatccgtgtcaagaggtcaatccttgtcatgctccacatgtgagctgggtttgcactctccctctccctctccccatgatcctgtctgggatggtacatttagtggtggagtgcccacaaacgaagtggttgctgacttgcttgctgtttggtggcaagctacagtttctcagttcctctattttgcttggagaactggactcttctttttttgttcttgttggttgctgcaaaggctccttttcttgcaataaataaactttcggtgacatacctgtgcagggtttggagcacaagcgggaggtggagggaactgc

SEQ ID NO: 16119 - DNA, 542 bp, Brachypodium distachyon
  Intron number 2 from transcript Bradi5g20880.1 (locus Brad i5g20880) derived from phytozome v7.0 (chr-ID Bd5; pos 236 41214 to 23641755 reverse strand)
tcaccactctggatctctccaacaacaacctcgaggtaggattttcttcttgtctgtgttataacgatcttttatttccttcaaatcaattcttcggcagtttcttctgttctaatgtcaagtagacatttccttgtcattttgtctccactagctattttgtcctctctttgaatggataactggtatgaacatatttcgaaacggcagctgcccaatttttttgtgtatgataagttaactccaagataagcatggcctattattaatacaagaaggcatgtcatgcatgttactcaactcaagtggtttttgttttctgtactttggagggtactcgactcaactagcactactatataccatcacccgtggcaatctttctttcccgctcttgtcttctcgcgttgctgttagcaactctgcaccaaaaaataccatagcgtctacatcctagagcatacttgatctttctgataatcacgtcctatttttaaaaaactgcagagcatcccagagtcagtgatagcccggcttctgaa

SEQ ID NO: 16120 - DNA, 650 bp, Brachypodium distachyon
  Intron number 1 from transcript Bradi5g23760.1 (locus Brad i5g23760) derived from phytozome v7.0 (chr-ID Bd5; pos 255 83134 to 25583783)
ccagtaggctcgtcaggctttggtaaggatcgcttcgctccccttcatcgaatcctgagggtttgttatttggattcgagatttcttcccccctttgcctgcagcaaagaaaattgcagtcaccgagagctgaatttcactcgccagtccaaaattgggagccgcgatgttattactgaaaaattaaattccactttcttttcttagggcattgactctggtagcaagtcaagtaccctagtcaacagtatgtgtttccacatggatgagtcacagattattgttgattcagtcattatctacacccatgattatctgtatgtttgtaatgtaggaaatgttagttgcacaaaataggtggaagcacatgtctatttctcaacaatagaccataatgtacacacttcgtaattcataaaattcacaaattcagtattttagtaatgatgcaaatgaggtgctgggtggaactcctgctgaacctgaaagctgagagtttgcatagactgtgtgcattgattaataaattcagaatttcggtaatcttgggatgctgtatgctcaaccaggattaactcctaagttacatcaaattctcaaggtacttgcatctttttaacctgatgatcaatttttgttgttttgtaggg

SEQ ID NO: 16121 - DNA, 776 bp, Brachypodium distachyon
  Intron number 1 from transcript Bradi5g19300.1 (locus Brad i5g19300) derived from phytozome v7.0 (chr-ID Bd5; pos 223 31666 to 22332441 reverse strand)
aacgagggtctattcaagcacgaggtttgtgctgcactgctgctccattgattttcttgatctgttctttgcgtgtccattgtgttgtacggccgtacggtttgttcaatctagttcacgtacgagatgctgtgcggaacatcagctattttgatcgttccagttttcttttcagctacttcggtagttctcccaataatttaacttcaattgtacttgagttgttctagtaaggatctgctcggagaaatggtatttcttggtatctttttgtcctatctaagtcaaatttgacctaaaatatagaaactttacgaatgattaatccttttgaaaatagatagtaaggggtttgacgctatgttgaagataaagaagaatttgcgacgagtctgaccaattttttgtctttatacctctgccttaagagcgcatgttcatagtgcggctgactgagtgttattgtcgaggggagctcgttccccatttgtgacctgatcatgaaaggatgttacattttttctagaaacaatcatggaagcattacatttaaagtaatgcaaatatgctaaaattcatatccaatacatctctatcaccatgaaccaaagaagccaagcaataatgtaacaaatggatgcaatctatttttatcaatcaccaggagttttgcactacttcacgtttttatatccattagtttctatcattgatatctaaccatgaggtttcacaatgcaggtgaaaaggataccacacacattgatatcaagagc

SEQ ID NO: 16122 - DNA, 579 bp, Brachypodium distachyon
  Intron number 4 from transcript Bradi5g21000.1 (locus Brad i5g21000) derived from phytozome v7.0 (chr-ID Bd5; pos 237 69527 to 23770105)
cttttctgaatcgatccatcattctcactccagaggtaggtagatacttgttgctcttcatattttgcctcgttctgtttttgtcgctgctagtataacttatacaagttttagtctatgactgtttttggtgtttgatgttgtagtaagaagttgaagatctcctaattcagtagtgtgacaagggttcatgcaatgccaattaatatcctttcaaatattaaatacaatttaaattgtaaatgtgtatttatcctttacgatgccatctgatgtacacctagtgtgtatattgatctgtctgcttcaatataatcaaatggtgttttgcccaaatctcaacacaaatgatggcagttgtgcgtgctggtgtagttaaagtttgtttcatgagatgcctgcaacttgtttggaaacgagtttgtaaagtttttatttgcaattgactttgttctttagtgctgcaatcttgtcttccatatagctcaaatttcacgctactttgggcatctacttacatagcaacttgtgttctatcttttagggtgaccgtaccgacaagcgtggtataagtgcatt

SEQ ID NO: 16123 - DNA, 920 bp, Brachypodium distachyon
  Intron number 2 from transcript Bradi5g26980.1 (locus Brad i5g26980) derived from phytozome v7.0 (chr-ID Bd5; pos 278 79670 to 27880589 reverse strand)
cagagcagtttaagcaatttccagactacaataaggtagttaaccaatcttgttttgaacctctgcaggcgtgtgttccttttcttgtaatataatacgtatgagcctaagagggacaaattagtagtttagtacactgtacacaaaaatacatgatattaattttgtcttaagacaaatgtgtatttttatatctcatcactgcaatacttgatgttagtttacagtgattctcattactccagttaatgaagaataaaaagggagctgccagcccgccaccttggtcgttttatcatcccagaccataccaccattgggattataaaataatgacctattactttgtatgtgagctttgctgctttctgttacagatttgattgttagtaatcttgaagagctctagcggtgctggttacatgagcttattgcagttagaaaagaatacttaagaggataatttacttcaaaacccgactaacacatttacagcagggcgagcatcctttttttccaaacgattggtcttcctaattctcggccatttctatcagtgcacacatctttagatgccttaattttacaaagcaaattctgaattaccattcaagtatttcaaatgcttcgtgcattaacagcagcaacaacaacaaatatttttttccttcagcactcatatttccctatttttattgtagcaagtgaaggtcataattgaagagcctacggctggagaggttgttccgatgtgcaggtaaaattcatacatgacttggttgaacacagattcttttggtttcctggttgtgaaatggttgcttgcatgatttcttttagctactatgtgagaactgatttatgatggtacatgtttgactatagaaaagccgaggggctagattgatacctagcaagct

SEQ ID NO: 16124 - DNA, 997 bp, Brachypodium distachyon
  Intron number 1 from transcript Bradi5g23630.1 (locus Brad i5g23630) derived from phytozome v7.0 (chr-ID Bd5; pos 255 08461 to 25509457)
acccgggtaacttcatacccttccatccactagttctcttgtttcaaaatcttctgttctttttttcagtaacttgttattattgtctcgccttttcacctggggtcttcagtcttcattggctgcaaaaattctttgaaccttcgtaccgtatgtgcataatattttcaggcgtttcaaaatttagctcattttgcacattgtattttcagagaccacagtggcattactatgtatctgtaaaattagaacaaactaatgttactggcgttaaagttagtacaactacgtgtcactttatatctttagaaccagttctttggtcttaccgaactgattgtttttactttgaattttattacagtagtgtattcctatgctgtggcatgcgcacatataattctcccgggctgttgtcatttgatctccgtgcccattgtttttcccatctgcagaaggccattttagatctgcggtggaaatatctttcacctttttcacactctgtcattcttttgttggttgcgtgacaagtctacctgctctaagttatttgcatgataattctgaactgcacttgtgaaacagcttaccttatcagggtgtatattggtctttgaactttagtatgcgtggttaactgctgctgtttctgattgagaaactcgtttcaggtgcttttgctcctggaatctcagagattatgcctgatacctcaaagaagccagcggaaaatttagccagatcatgagtcacaaaacaggtaaattagttgaactctctttttgcggacaaattagttgaacacgtgcttgacattaagtgctgactcctgcttcaccttttgtccttgaaatgtttggacgttagggaacagaacatttaggagaaattttaaatgtgatccctcagctctcatttttaccctgtgtaacgacattgaatcttgggccattctgcagaaagaaacaagacgtagaaaacttgaaattggggt

SEQ ID NO: 16125 - DNA, 684 bp, Brachypodium distachyon
  Intron number 2 from transcript Bradi5g25370.1 (locus Brad i5g25370) derived from phytozome v7.0 (chr-ID Bd5; pos 267 09774 to 26710457 reverse strand)
ggaggattgggagtgctaaggtaatagtggcgaaattcagttcctacctgtgcctgtgtatacctgttaattactcagtaattttagtgttttgtcgacatattcttgtggatggtgtaaatactgctagttttttttgctgttttcacaatgcattgaaagattagattaaagttaggcgatgcatctttgggaggtaattttgttaatgtatgcggaagattatacttcagaatcagatatcagtgattcattaccctcgtgccccaatccattggccaagtacggagtatcttttaaatatgcagcttctgagttctcaggacatgaggttcatagtaatgaaattctgaacaattttcttgaagagcaattaattaatataaagatttgcttgcagaatcaacaatgatttctacttcctccgatcggagggataattagacttcagattttctttcatattgttgctaaagatattgagatgctctctgaaatatatacaagaatactatgcaggaaaaacataacaagtatgctcatgtcaaaggtttctatacaacttgaaaaaatcagtataactgtttttttatcatatttcatttgcatacaattcaaatttcttgtaaacatttctttacttatacagagtcaaggtaataggcagcagtctctatctggaaa

SEQ ID NO: 16126 - DNA, 994 bp, Brachypodium distachyon
  Intron number 1 from transcript Bradi5g19580.1 (locus Brad i5g19580) derived from phytozome v7.0 (chr-ID Bd5; pos 225 95099 to 22596092 reverse strand)
gcgcccagggcgaggatctggtcagtccgcctcatccctcttctgttagtacgttcagttcccccttcccagtgacccagtctttagtgcgatatgtctgctatgcactgttaaatacttcaattatgatcgaattttggtacttctgctttgccatttcactactggataactaaattgctctgccatgttgattacttgatcaggtatgatcaattcgcgtgtagtggtgtattatagtttatgagttgtttttaggaagaaaaaaactggaggtggttattatgtactgcaaattgtatttaagagttagatatttacaaaactggtcagccagcataagctttcatcctatctctatgagagttgttagtgcatagtgaaatcatttctgggaatccttcgagtgcatatatcttggcgatagttgattagttggtgtattgcagcctattctctagcttgaacttctgagtctctttcactgaatactgaattagtgtctcttcttggggtgccattgacctgtattcttggaattctgctgaagaacttgattaatatatcctcctggacagcgatgttatgttattttacttcttagtaattgaatgtcactctaacatggaaatctcagaaaatttggaaacaaaattaataatgcatcttgcacgttatctcttagttttgcttgtcatggcttccagttaactatgttgttgaataacatggcccacaaaattattcatgcattaggactgtaggaaagttttatgttagttgtctgtttcatgcatttgttgcctcctactttttcagacaatccatgtattattttattttttgatctcctattttttttcaagataatctactgtttttacatttgcatgtacgcttaatcagttagcttccttaatttactcattggacttctattaatatgtgatcctttctaggacagtgaggatctcaaacttgatcgagtcttgca

SEQ ID NO: 16127 - DNA, 952 bp, Brachypodium distachyon
  Intron number 1 from transcript Bradi5g18610.1 (locus Brad i5g18610) derived from phytozome v7.0 (chr-ID Bd5; pos 216 82499 to 21683450 reverse strand)
tccgcctccgtgtaagcaatcttataactgtttaaacgctactgctttgctttgatctcatttaaccaacttctaaactgatttcttgaatgtttgctactttatatctatattttgccaatgtctttggtatggttgccttaataacaagctattagatttgcatacgataggtacactgaacatttcagactgattgatgccttgtttgaaatgactatgagtttgtagggcatattttttgaaactatcaaggtttttttagaggcagtctatcacgtttggaaacgttttcaaatgaaatttctcttgagttactcttcgacactgtttctttatgtcttttggtaatattgattggatgtgttcccgatctctcacactcattgttctagaagtagcttgcagtggtgctggcagttgtttctttcatttgagaaagcaatccaagatttaagatggtgtgtttgatagatcctctcatatttactttatataatgccatgaaagtgtgggatatacggctttgtttattacgtcattgatattctctagtaataatacatttaattgcatgggtgtatagggctctgagccttttgctatgtttatttttgtattctatgtagctgagcttctgatttctattatgcttcctatgggtgcgccattgcttaattggtctctgctgagttgagttagtttcttttacatttctttgtaacatggcaattagccgcaaaaaaaagggcaattagccccacatttttgttgattccaaactataataggatcgtgatagtttttctttacctaagtatggcacaatactgctgcgctgctttgttgcaaagtttttgctcagacatatcctgctgttcatgttctaagtatggcttgctatttgaaatgttgaattattttactgactctatttcacattaattgtagg

SEQ ID NO: 16128 - DNA, 795 bp, Brachypodium distachyon
  Intron number 1 from transcript Bradi5g27090.2 (locus Brad i5g27090) derived from phytozome v7.0 (chr-ID Bd5; pos 280 06316 to 28007110 reverse strand)
ctcggcgaggcccttccttccaaatcccccctctggtgagtcccctgtcccagcggagcggcggcctccatccataggtatcgttgtgattccgtgcttcattcagttcgaatccatgttaagaattcgtttgtatcgtttcctccgaggattattgattgctgaatgctgatggtgacaagattctgccctgccccgatcttgttatccattcccaatcatgttagcttgcacagcccggtcgcacgcacccgtcactaatcgccgcctgtgctgtccatccaaataagtagcacgcgtagatctgcttattttcgattgccatggtctactatgattctgattgcatggaattcaattttcgaatgcactttgaatagtttcttcagtgttctgctatgtgccaaacaaaactgaataagcacccaaggtgtgtttggccctggctgagttagactatggtcatgctgacatgtccaacatagaaaccttgttctgaatcatgtagagattgaattctttcaagagcattgaatacatcatgaagttagtttaattgtctctgtcgcataggctgcagatttgtttctccaagagaacaaggttgcagatttgtttcttcttgagaacaagcttgcagatttgattagtccaaaaggatattctttttgaagaaccataaagttaaactatgttatttactagttcgtactattagttcctagcttgccgaaacataatgatcctttatctagtttgttgtacttgttcattgcagatagagttttatcttat

SEQ ID NO: 16129 - DNA, 994 bp, Brachypodium distachyon
  Intron number 1 from transcript Bradi5g22500.1 (locus Brad i5g22500) derived from phytozome v7.0 (chr-ID Bd5; pos 248 47800 to 24848793 reverse strand)
ggcggctgcttcacgatcaggggtgcgtcgtcacggtcatcaaagagccaccgccggatcagtgcaaggagaagcctttcgagatcccgccgccagagctgccgggacagctcgagcgcgtcctcaaggacgggaaaggcgccgacgtcacgatcctggtcggcggcagggagttcagcgcgcacaggttcatgctggccgcgcggtcgccggttttcgacgcgcagctctttggtcctttggcggagaagggtgacacgcggtgtgcggcaatagaggtcgtcgacatggagccggtcatcttcgagatgctccttcacttcatctacgcggactcgctgccgccgtgcgacggcgaagaaggctacggtgctgccgagatgcagcatctgctggtcgcggcggatcggtatgggctggacaggctcaaggcgatgtgcgaagagaagctgtgcaaaaccatcgacgcgaggcacgagtacgttggcgctggcgaatcagcacttttgcgagaggcttaaaaatgcatgcgaggagttcatgtcgaagccaggacgagcgagcatggtcatggtgagcgacgggttcaggcgactcgtggcacgttgcatcccgcttgttttggagcacaaataggcatacatgacaaaaatgaaattgtagatacattttgaagttctggttatattagcacaaatcttatgttgtatcggtcagatcaaattttgtttcatatgcaattttttttgcataacactataacagacactttatcttctttttttgccgataacagacaatttatcaatgctgttgagacaaattaatacattaggctgccgtctgaattttcaacccaaaatttgatcttcaaaccaaaatagcacgtgagaattcaagccgcatagatttttttttcctgaaaaaataccagggagccaagcacaattcagtgaccagctttgtaagatctgaaatctatttgacagagaaa

SEQ ID NO: 16130 - DNA, 530 bp, Brachypodium distachyon
  Intron number 2 from transcript Bradi5g17400.1 (locus Brad i5g17400) derived from phytozome v7.0 (chr-ID Bd5; pos 206 89413 to 20689942 reverse strand)
acacgcgcatttccttcgatctgaccccgattcaggtgaaactatgctctcgtttttgtgtatttctcgtcgatgcggagatctggggagtctagctttgtaatgagagcgacaatgcattcgttttgaggcatgaatgaaacgcttactggaaacacagcgagtgccagagcatacaaagcaattgttgtatttcattatacttgtgctcaggactcacggcatgattggtccctcgaatcctagcttctgataagaacacgaaaactcagctatgccaatctcattttactgccttttcgtgcaacgttttaaataatactccctctgtccggaaataagtgaattggatttgtttctatacaaatccaagtcacttaattccggatgaaggaagtactactttctggatttggaatgtcatgtggtagtctttaggactttgatcttcaaaggttcctgcacgaatgtgacagcaattaatttctattgcaggaagagtgcctacaaagattacagaaccggataga

SEQ ID NO: 16131 - DNA, 876 bp, Brachypodium distachyon
  Intron number 2 from transcript Bradi5g21900.1 (locus Brad i5g21900) derived from phytozome v7.0 (chr-ID Bd5; pos 244 16376 to 24417251)
cttgatgtgagtatgggttatttcttgtgtctgcacttgttgattgagtttctgtgaaatagacggcatatgcttgtggtagcgtagctattttgtctgttgacctagaggttcgtcagaagctagaatgcacgtcgttgtgaagaaaaaacttagaaaagtagtctcttcgtgaagagaagggcaaaatggaacttggtaagcacacgaacagcttatctggaatccattaaatcgatgaacagcacataaaaatgacaggcagtgttcttaatttctgaagggcagagccttcttgaaggatacacttaactttgagtgattaagagcaccatttctacaacccattattatcaggagaaagtgatacacacacacacaattaaagcttgaagtagtcctgatgaggaaaagtccgctgccttttgagttccatgtgttccaggtgatattaagcaatttggaaaccgaatgctacttgttttttcttcttttcctagtgtgatgtgatccatggaaagactattacttctcttcttaataactaatgtacttaagtgtgaaacgtatggctttggtttattccacatcagtgacatggtgaccaccgtgagtgacaagccattgaatgtcaaatcagtatttaagtgcaaacgtagttcttcagcttgccttaatgcatgtagtgaacaaccaatattttgagaggtatttatttttgtacaggtttctgcactttgaatggtcaagtattcaattctatgtatatcttgtgcttgacagaagaaggttctaattcatactgcaagtttgctttctttctggtcaaagctggccattaactttcagtttgcaacttacagcaactggcatcac

SEQ ID NO: 16132 - DNA, 993 bp, Brachypodium distachyon
  Intron number 1 from transcript Bradi5g20110.1 (locus Brad i5g20110) derived from phytozome v7.0 (chr-ID Bd5; pos 230 13313 to 23014305)
aggtggtactacttcactttgctggaatcgatatttcgtcctacacctcgtcaccgattaacccttgggctagtattttcggaatgggttgcgaatccttctcgtgattgcgatggttctagtcccccaccggcccaccgaaacctccaagctgcgcacaattttgccatgccacttggtagttggcagcggaagataattagcgcagaaacttggttttagagtcagaacttgtagcacaaaaatcggaccggccattgcagatcattcgttattgatgttaatgttggtgcgaaaccacgtgtacatggccaatctgcaagccagttttgtagtcctcttctgttatgtattataattgtaaatttggtcaaaattcatctaaaatcaatgaaatttgtacggaatgacaacgaaatatttttgaagttcccaacatttccgaaatttcggatattttggtgagatccgaatttttctggttgccaaattttaaaccctggtgatttggaataactatgacttgatcgtaagatcgaaatagttgatatgctgtcaatcagctaggggttccttttagaatgccagttccaggttccttttagagtgaagaaaatgatggaattgatagacataaatcgatccgtgattgtagataagttttatgttttgaaagacctataaatgactagcctttgtttataaagcaggttgaaaaaaaatataaaagcccaaatggccaagaggtaaaacaaaaggacttagagagaaaaaaatcccaaggaaaaactctagcaatctctcgaatatacataagttagtactgcatactttgttcttcaaatagtaaaactaaagactattttcttgtgaaaaaaactgtgttgaaaaacagatgatcatcgataagtatttcaaatttatatgaatggaaagtacattaaatttcaaatacatcctgctgatgtaatttttctctatatgattgcttag

SEQ ID NO: 16133 - DNA, 464 bp, Brachypodium distachyon
  Intron number 3 from transcript Bradi5g27670.1 (locus Brad i5g27670) derived from phytozome v7.0 (chr-ID Bd5; pos 283 55912 to 28356375 reverse strand)
ggtacttctcatccattgctcttcagatgcgtaattttgtttgcactattgaagtaacatgtaccatctcatgcttttttctcctatccttatcatacataataaggaacttaatgtcacattaattactttgagtttctatatgaactgaactgtgctcttgcttaaactggttgtatttttaattataaatgaccgagtagaacagcttcctaagtagaactatttgtcttttgtgaaagtaaattactgtatcctacctacatagcatcatttttggtttttacagcattcaactctactgtaccctcgtaaactcttttcctgctttgtataacttaggaatcatcgcatcgcgtgtctagcttttctcttcttcattcacgtgtttcctgttgagttctaatgagttgcctaatttcaagagattgtatcttaatcgatgtgtcatccattttcagttt

SEQ ID NO: 16134 - DNA, 659 bp, Brachypodium distachyon
  Intron number 2 from transcript Bradi5g27670.1 (locus Brad i5g27670) derived from phytozome v7.0 (chr-ID Bd5; pos 283 56406 to 28357064 reverse strand)
cggcaaaaagctcaagcttgccatctgggacacaggtgctacaaccaattcgtctcaccaacagtatttcctaacatcttcctgaacttgcaagcaaaacatgtcgtttatatacacaagactgctgtttgccccccttgtgactaaaactaaaagcgagtgtcttatcaacccaaagtacgctcctttttttgtgttggccaactacttggacccttatttacaattttagatgttggttaatatggcctaggatagaacataatcaaccatctctcacttgttttagtattctaacatgcacaagttgcatactaagcatattattttctattcgacccccgatctcccacataccaccctgtttgtttttatttcttatggatgttaaattgtccacatcatggctggttgttttggtatgcactcgaaaatgcgactcgggttagtttctagttagaagctctacacatgatcttgatcttggctttcgaagaaatctgtttccttaattttccctgttaattttgtgcagattgtgtgtgcaatgcaattgagagtttgttaacatgcatagtctcctccctttgagttcccgtttaacattgaacacctcttgtgcagctggacaggaaagattcaggacattgaccagctcg

SEQ ID NO: 16135 - DNA, 846 bp, Brachypodium distachyon
  Intron number 1 from transcript Bradi5g23910.1 (locus Brad i5g23910) derived from phytozome v7.0 (chr-ID Bd5; pos 257 01119 to 25701964 reverse strand)
ggtcacctccgccgaggtcacgcaggtatccacacacacgcagaccctttccctctctccttgttcttctcttcttcgcgcgtttgttttgggtgttccttgtctctgtttaaattgtttattggcaacctcgacctagatcttggcttgggatgcgtgctcggttatatcagccgattattttgatgattttcagtaggcctgttttatgacatttgttctgcgtcagagttgtttaatgcagcgcgcagttttgcctctatcgggaagttggtcagtggggggatgttgtggcagcacttaggatttgctgcatattgacctgtttttaattcctggactctttttgcatctaagtttggtggtcttgccacggtgcggaaatctgcatatgtgtgttcttctaggaaattatgcacatgtatttctgtaaaaggaaaaaaagttgctgcgaatgctctatgggtgtgcatctgtcatcactcatgagttagttgtgacagtttgcatcactaatacctggctgattctatgtggttgtgatattcttgctcacctaatgcatgtttgtatattagatgaggaacctttctttacttttggtaatcggcatgtttttgcttttacaaattgacctggttttaaaattataagaaagcaaccatgaattggtttgatttaactgaagaacattgtgtggaccctactagttcctcaggagaacatatactttttgtcccttctgataaatcttccattgtcaaatgaattaagttttaacttaatatctgaactaaacttctgtgtgcaggggatattcgctaactacaagcaaccattcgcaat

SEQ ID NO: 16136 - DNA, 1014 bp, Brachypodium distachyon
  Intron number 2 from transcript Bradi5g17220.1 (locus Brad i5g17220) derived from phytozome v7.0 (chr-ID Bd5; pos 204 81101 to 20482114 reverse strand)
tcgtggggattctcgcgctcgtccctctcagaaaggtccgtgtgctccccacagttatatctatcttcacaagttctacgatcctgtaacggctactcgtattcttagtcctaagttggggtaatcctactgagttcacccttgctcgtgcttaaacaaccaaaaagactgctgtctgtttgtcctttcctgtgcgtcaggcatgaacagcagatgttcatgtcttggtatccaattttatttctataatattgtttcggtcttcttgtcaagatcgcctcaccaatcaggtagagctgaagaaaagacaaatctgctttcattgagttagatgacgaagtttgatgtgaatgctagcgtccatgatccgattgattttggcgttattgtcctactgaatcagctctctcatgagaacaattcttggacctacatctggaacaaaccattctactcttcaacgaagacatattttcttggttactacttaaatacagacttactaatacacaagaacgatttgaataatggaagagaactctctctcagcctatgcatccgaagatgcacacccaccaccctattacaaaggtcgcactgtaatactccaaaggacacgacgagctacataaggcatgagtaatcaaatattacatagcttgttatttaactgtcatccaaaggtggggcataaatttcctggtagcaaactccgaccccctggcaccagagaccagcctttcatgctccaatggtcgttgaagtaaggaccacgaattgtgatgttcaaaaaacagcatgagttgtgtattttgaaaactaaggatgtatatgcacatattgaattgcctgctatgtgtcttaccatttgaaattttggataaacatctgtcttgtgaacttttttaagatgaatttgatgcctggccgcctcctttgttacattgcaagcacctcttcaattagtttgatatcacgagtaaatggatgattcaacttttaaaatttcagatt

SEQ ID NO: 16137 - DNA, 584 bp, Brachypodium distachyon
  Intron number 3 from transcript Bradi5g23570.1 (locus Brad i5g23570) derived from phytozome v7.0 (chr-ID Bd5; pos 254 65929 to 25466512 reverse strand)
ctttggaaactgcagtactgctgagtgtaagttttgttggaagtaatattatttaaactagtaatccagagtctggaccatgtttttcttaacggtgtggctgattcatatgattaattcgaaactttctatggtgtgttgattcaatgtgatgttaagtgtcccatgccaggagaaacactttggttctttctttgagttacttgtacatcataaacctttatgtacataaatattggtacttaccctatattccatcatctgaactctcaagtacatagtttagctctgataccatactggtgaagtccttgaaaatgcaactgttgtcacttcgcaaatagtacaggcaagtgtatttttagtattccactgctttgggtgtttgacaaccccatttttgttaattggaataatggggaaactgccatatgcacgcgtacttctttgctgaaccacttagattactgttttgtcaacatatatcctgtgcattgcaaatgcataatttttctcttgtgcccatgatgacacttcacatgttgacagggggctactattgtggatcagccggtttgcatatc

SEQ ID NO: 16138 - DNA, 700 bp, Brachypodium distachyon
  Intron number 1 from transcript Bradi5g27190.1 (locus Brad i5g27190) derived from phytozome v7.0 (chr-ID Bd5; pos 280 65617 to 28066316 reverse strand)
gaccctctacgccctggtaatttcactcttctaccggcatcagctagcaccgtagagaggggacgtcaaactcgataagctcgtttcctgacaagtttatctaatcttaattaacatgcttgctcgatcgatgccgggagacgtgcctgagtggtgaagcactcccaatcatatgctgcaactccttctgacgaatgaatctgtcggtttcaaggaagtgagatgcgctgaccacgacctggaaaatttaaaatattccggttatgggatcatgtgtctgctataaaatgacatgataataatatttacaaaatatagccctccgttccgtattaaatgactcaaatttgtccaaataccccaactgcatctaaatacatgtaatatttcatcacttaacgtgtgacggagggagtggaaaatagtttttaggaattctcctttataataacaagtaactgaacacggcaggagcactagctagctgcatgactgttcatatggataaaaaagaatatcttacaaggtttctgccaaatattaatctggttccaaatctgtcttaataagtattgcctcctaaaattttctctttcggggtaatagcggaaatggttgtttcttgtcatttccaaattcgcaccttttacatactgactgttaacaaaacactgacaatacaaaaaccacatgcagggtt

SEQ ID NO: 16139 - DNA, 1036 bp, Brachypodium distachyon
  Intron number 1 from transcript Bradi5g20780.1 (locus Brad i5g20780) derived from phytozome v7.0 (chr-ID Bd5; pos 235 74552 to 23575587 reverse strand)
cgctttccacggtcaccgcaacgtcaccgccacctgtgagcgagccgttcactcttcctctccgctcccctcttgtcttctttgtgtagattacagcactagaactaatagctgaagcaatttatattccgtcctaaggatgaattagccgttgcaattgatccgatgaggttgtttctggttttgtttgattctgctaggatacaggaatcgtcagagtatatctgtgatgtctaatctattgcaattttagtaattctctgttttagtttaacataaacaagctaccaagtgctgtaatgtgacagaatttactggaaagaaagatcatgtagcaatgcaccgacatcaaggttgaggtcaagcgtcaaaatcagaaattacaatctgagcacattcatggagtagtcttttacaaatgaaactagaaattaattaataaaaaacttacttcatatgtcattatgtatttggtatagagtttgaattagagctaaaataaccctttaaacttgcttagcccaacttgtattttgcttactgactgaacctcagagcacgtagtaattccttgccaaaacagggacgtgatttctcattatgaaacagtataactctagaagtagtccctgaaaatagaactttaccttaatgttgtttttcctgtaaaactttgctgtactgtttttgcgattaggatgacaattccggtttgataagatttttaagtcgtactgtttttgtttgtgggaataaaatgtccaatacacagaaacatataatgaaaggaggtttcattggatggagtaacgcaattagaagattcatcataaccacagttatctgcttgacacataaggcgatcaaccagtatatgaaaggacattacccatacatatattcggattgctagttcttttgtccttttgtttttcttgccatttagttggtatttgcattaccctaacataccgcatggccatgttgtgagctaatcaaggtgcttcttgttcagcacttcttatcagcaagcagt

SEQ ID NO: 16140 - DNA, 453 bp, Brachypodium distachyon
  Intron number 2 from transcript Bradi5g22560.1 (locus Brad i5g22560) derived from phytozome v7.0 (chr-ID Bd5; pos 248 89952 to 24890404)
cgctgtccacggcctccagaggcgtgctgctgcttgtaagccgtgcctcgattcactgatgtggttctaattttcttttgcaatcttggtttggtaggatgttcttacatattgttacatttccttggagagattcggtacttctaaattgcaatttaatctctatgcctcgatactgtgcagactcagactttgaggttttagaacttagaagagatcttgatcaaagtgttgagcctgtgaaaaatgaaattactccacagttgacccctaaaagatcattgtatctgcccagttgatggtgaaaacactccccatgttagattaattgtataggtcccttaattatgcatagagtttagttgtcatagaagtgaaagttgtctaataatttgtactatactgtttctctacccagacaattctgcagttcttcctggactttggggaggc

SEQ ID NO: 16141 - DNA, 940 bp, Brachypodium distachyon
  Intron number 1 from transcript Bradi5g21800.1 (locus Brad i5g21800) derived from phytozome v7.0 (chr-ID Bd5; pos 243 22080 to 24323019)
agcagaggaggcggggagctcgtctggatccgtcggtaagcgcctcccctgcttttacttttccctagtcttttaattgcgtaactgaacatgccttgtatgctctgcactaccttattaatgttcgatccataccttgacggttgatcaagtaatccggggatttgcgatgctagaatccagatcaagtctacatgattcgattatgcttatttatgttatttgattaaggcgtacctttctcttttgtgtcgatggcattactacttattatgtgtcgatgctacttttcgtttgtgtcagttatgtgctgatgctagattatgtactatagactattggactaagcttatttatgcgagttgcatttcttggaacacccaaggcttttctgactgtaacgtatccatcagaacagcggagtttgtttgtttgccgcgtgcagatttgtgtagcatttttcatccttgtgatgcctagataaactaagtttgtaccgtgttcgcattttgtgattatgcacttcctccagttagcttagatttcgtacaagtatgttgctgacattgatgggaacaaggaaatctgagtgatatctatctgtgtttgggaagttggttatatcagagcttggctcaaactagcagttactggtaaataactttttttatgcagtatgggaacgaaaataaatgtactgcagtgcggtgaataaggactaatcaaatttatgaacaatgggttgtttttagtatgtaaaattgaatagcatttttaccggggttgctttgccaaaaaaataagattaaaggggaaaatatagtttggttgtttttttatattgctatttttcttcatgtaaacttgcctttttctgtttttaactgctcttccttttcatgcagaacgcatatccgacaaagtggcaaaaatagaacca

SEQ ID NO: 16142 - DNA, 926 bp, Brachypodium distachyon
  Intron number 1 from transcript Bradi5g22720.1 (locus Brad i5g22720) derived from phytozome v7.0 (chr-ID Bd5; pos 249 74235 to 24975160)
actccgatcgcctccccttcgacctcgatcgccaggttcccgcccggatctgtggccctcggccccgttgtattgatctgtcggcacctacgctaagggggacttttctatgcggcccgagtgtgaaagtggctccttgttttggggtgggaaatgctaggattttaggctgggtgtttctactgtgctagcttctactgggtagattgcgaataagcaccgattcggtaaatgcgttgcaagctccgagcctgtataaggtgaaagtctaggtggggatttgcaggtgtcctctgttctctgcaaagtatgtctccttttttggggggttaatggtgatcggatttggtgaaagatcagggcattgttgtggtcctagtagtttttatgtgtgtcttggctgaaagaatcggttactactacataggattttcggttagcgaaggcgacgggaacttttgaaggatattatgtgatctcaagagataatatacctctgtggccagataagaactagttagtgatgcagtgttttttttttggcctagagtttaatataaatatttaggtcggtttctgaatggcaaatattctatagtcaatagaatgtggtgttcattgactacaaaataatgtgcgtaaacatgagtaagcactctatgcaaggtagtaaggcctgcgggatctatgagcaatggtacaatatgtcaaagtgtgtggtgccagcactggacgtatctggcatggtgtgcttactttgttaggacaaaaggatgcagcaagttttgtgggttctgaagcgcaaagtcctagactctccatgttttgatatgttattttgaatcattattacaagaattattgaagtacttcctttgtttcctcctttagaaacttcgctcacttaccacacttgctgcaatcgc

SEQ ID NO: 16143 - DNA, 863 bp, Brachypodium distachyon
  Intron number 2 from transcript Bradi5g24050.1 (locus Brad i5g24050) derived from phytozome v7.0 (chr-ID Bd5; pos 257 96216 to 25797078)
ttcagtcagcagtaatgtcatcagagcctctttatacttgtctatattttgcaaactgcatagccatgctactgtaattgggaatttagacatattttgccttcctgatgtgtgcacatatatcttttcttgccaatctgttttttccctgcaatttattgaattaatgtccatgtttggctagttttaatcagacactttcaccagaaatactaataatgccttcctgatgtgtgcttacgttcttgtgttcgcatctgcttatacatatgttatccattagcatgttcatacttggctgtactggcaccaaataattcgtggaaatgattaataattcaatctgatctacaggttgatttgaatctctccttgttttattagtacatacttaacttatgctaccatgtgctcctttatgaggagacatccagtaaatcgtagagcagtttcaaagccaaataagaagttattcttcaatttttatgcctagtcgtatgcttccgaattgcccactgcacttgtcaagccactgcagaaaaaatcttgtatcctgtatctcagcagtagaattacacttagtacttctgacatcaagcttccttgatgcaatttaaataacactgtgagctgttggtatgctgcaggaagtacctaaataaataaataaataaataaagtgttctgtgtctaaataaatcatgtgtaaagccttactgaaagctgtggcaaggttttgattggtggctggcatgttataatgtgtggagattgtcctgcaaaaaaaatgtgtccaaatgttcttcacttgcaattttattcattaagctattatgagtaacgtattaaatttcatattgcag

SEQ ID NO: 16144 - DNA, 1012 bp, Brachypodium distachyon
  Intron number 1 from transcript Bradi5g21360.1 (locus Brad i5g21360) derived from phytozome v7.0 (chr-ID Bd5; pos 240 03200 to 24004211)
ggtgagccccctctctccttggtggtttggtttggtattgtttcatggagaaggctggatcattagtactcctaccttgtatgtatgatagaattcgcatgctagtgattgaaattatataaaaatacttgctagtatgctttcagctgtgaactgtaaagtactccagctttcatcagacagtagcagtgatgagtggtaaggtgtgattctattgaaattggcattgcctgtcaggagctgcatctgccagtttcttctgcatgcacaatctgtagaattggtttgagtaaggacgggttcgtgcttagttttgtttcttgtgaacaaggtagaaacagtctttgtgggctgttttgattccttgtctgaaactgtcttcaatgtagccatgaggtagacttgtacttgggagatgtattagctgataaatatagcacatgggttcaaaatggtttgcttttagttatttcttttaagatgaattactgagcaccctttaactgaaggcactttctcaaacttagttagtcttaggccctagctgctcaattttcatgtatgtaagtaaatttctcatgtatggattgaattagatttttcctgtttctgctgtatggtgacaatttgctcacatactgcatcccatagcttgggttggatgctactgtgtgcaacttctgaaattacatactccctccgtccaacaaaagatgtctcaagtttgtcaaaatttggatgtatctagacatgacttagtgtatatatgcattcaaatttagtcaaagttaagacatcctttgttggacggaggaaagtaccaatatttgtggcatttttatttttaaattgtttgctcggacgctacaaggtcacaaaagcattgcaccgttactgattgtaattacatgccagcgttctttgattcatcaacttcaattccacatcatcctgatctgttttattgacctatgtgctgtcctcatgaacaatacagaagtggagatagctg

SEQ ID NO: 16145 - DNA, 945 bp, Brachypodium distachyon
  Intron number 1 from transcript Bradi5g21040.1 (locus Brad i5g21040) derived from phytozome v7.0 (chr-ID Bd5; pos 237 95026 to 23795970 reverse strand)
gatcgccgccgtctcggtggccgtcggaggaggaggtaagtgccagccgcattgccgtcgatgattggggagggcgattggcgtgccgcgtgccggcgatatcgatccctcggctcccagaaattccgcttgtttagggggcggggatttatctagggttgaggctgcgaaaattcgcggctgcttacccgcttttcccattcgttagttagtggtctgttgacgtctaaactgtgtaggaactaatcgatccctttcaattgatttcccatttccttaccgttgtcaactgcaccggtatatgggttggtagtggtagccccttcggaataaatgtgttgctgatgtcgtgttttgcaatgtggtggtggttattttggattgattgtgttctggggattacgatggtgccttgcttaatcttaagaactgtcgaatataagggtctgcgctatgccttttcgattatgcgatgaatttctgagttgatatggctatagtaggtttactacaatgtgctgtagtttttgaacagctggatatttgttgagtaatacattaggtcacaacaaaacctgaataatgctggtgttcatgttagctgcatgagcctatctctaggtcagtggtccctcaagagagctatgtttagggaacatgcaacatgggatgggagggaccataggcaatatatggtcttctcccatcagctcaaagtgctggtatagctagtcaaataaacgaaattcaatcaattcagtggcagctgcatggtctcaaatagtcaaatgcatattatttctgcaggtacattggtcaaattagtgcgtgttattgtcatgtgcttacttaagttcatcttattaatctatgagcatctgatctatttatcctgttgctgggaatgcagcttgacattgtacggaagaaggtggtggagattag

SEQ ID NO: 16146 - DNA, 897 bp, Brachypodium distachyon
  Intron number 1 from transcript Bradi5g25960.1 (locus Brad i5g25960) derived from phytozome v7.0 (chr-ID Bd5; pos 270 97224 to 27098120)
acgccaagttcgtctgccgccgccgacctcccgaggtaatggactgtttcagtgcatactacacattgtatatgcactgccgagtgccgaccactatatacggacattattcaatgcaattcttaagaactcgtatgcaattgttagaacctgtagcagctcgccacccacaaggtaatttggttgcttgcctttttcccgaaaagggggataaccccggactcttggttgcttgatgtatgtctgacctttgttgttgtctgtgagctagttagctatccctgaatttaggcgatgtaaggaccatcggtagtccttttgtttttatgagagaagcatatgaggatgggtaatcatactgatgcacgtgactatagagaatttttttatacatattttttctttgtgtatgtgttattatgggttcatatgtgttgtatgttggtgtacacagggagcgctctatttgtgtacctgcgattgcgccttttccctctgcctctctcagggttggggcgagtggctacccctatttgttactcaatgctcaatcagtcattgcattcgattaggcgattgccacgcctttgaaattctggttcaaccattcaaccgatgtggtttctccttttttttacacgactattttgtctatgttcttatctatgaacattttgcttgtgtgttctatccgattttactttgaatttgttgggtatttggttcccaactttggaggttatatctattccaaatatccaatgcttgcgttctcaatctaaatgacagattgattcctattctacatatatcatggttaggaatttctgcttgtccaggctttaatattctcctggctctgctactggatttgaccaagtctgcataacaggcagg

SEQ ID NO: 16147 - DNA, 729 bp, Brachypodium distachyon
  Intron number 1 from transcript Bradi5g26850.1 (locus Brad i5g26850) derived from phytozome v7.0 (chr-ID Bd5; pos 277 32919 to 27733647 reverse strand)
ggtgaaatcttgttcacctcgcggccgccggcaaggtaagagaagaaggatcccatatatatggatgatcttgtccaacgtaggatcgatcgaggggtcgtatggaataatatagatccgagctatatatatatagatctaaccatcatgtcacatgacttgtgatatttattgcatgcgtttggtctgcctatactgatgtagaagtttgtatcaatataatcagctattggattaaattattatgagtaatttttttccaatattccttgtcctattgatatcattcctgacaattctcttaatcctctcccgtacttgtgtgccttgatttcttaagctgatgataagtctttcgtctcaggtgagtatatttgtgagcaaacagaatatgtggtttttttgagctattaatttaagtttcctctatagttttacactattattctgattgctgcattttgtgcagacaaatgaactttaccagttagttgcattctgcttgttatttgcgtgggtgcattcttttattgcttgtaggctattatcttgtgcacattgcttgtaggctattatcttgtgcactgacaaagaaaatggattatttttaattctgcttgtgagagtattggtgtattaagctactttagtcgaaaagcagggaacaataatattttgctgtacttgacctcattataactacgttgttctagattgtttttttttggc

SEQ ID NO: 16148 - DNA, 429 bp, Brachypodium distachyon
  Intron number 1 from transcript Bradi5g20400.1 (locus Brad i5g20400) derived from phytozome v7.0 (chr-ID Bd5; pos 232 86552 to 23286980 reverse strand)
gtaaggagtttgttaggtctgaaacaagcaaagttgcttcatgtcttattaatcatgctatatgcaacttctctaatctctacacggaagaacagacagccacattgcaaaactccacggctccatctcttttgcaacaaccaaaacaacccagccaaccgagatttccgtgtctaattgaattatatctgctgctgcattcctgttaagtcatcttttccccttattatgtgcaccgcaagtatctacgatttctattcaagctcaagcttagttcacatctaagacgctattcgttatttgattttctcttgtatttgaccttctgtcaggatcaagtttttcaaacagttctttctatgctcatcggtttttcatattgtgttggttttagatttggattgaaggtaccaggcactgttttgccaa

SEQ ID NO: 16149 - DNA, 634 bp, Brachypodium distachyon
  Intron number 2 from transcript Bradi5g26200.1 (locus Brad i5g26200) derived from phytozome v7.0 (chr-ID Bd5; pos 272 68775 to 27269408 reverse strand)
acacacaaacagcggcgtgtcaacataggtacactatatctctacaccaagcgaagggtgcttactttgtgcatattcatgtggctttatgattgttctttctgttatctacaaaatcaatctttattccattcttatctgggtcatttgcataatgagacatttggttagctaatttaaaccttcaatataggcaatgtcagcatctgttgagtaaagccataatgatggtaactatggtgtgattatgcattctggatcaccggccctgcttgtttatatttaccaaaaattctacagagggtacacagtaagttagcagactgcaaacgagctttatgtccaatatgcagcttatgaaatatgcttcatgtaggcgtatctaaaatttcaaccacgatgtgagctttatatcccttgcaatttgggtaaacattcatataatgttctatcataggaagtctatatgttatagttctataacgtgcattaggacacagttcgtcatttttctgttcgtttgattcttgtttctattttactattagactaacagcggagataccggatcataactccactatgttattgttgatgttgacagtgcctttcaagtttgatacgccatctcctg

SEQ ID NO: 16150 - DNA, 822 bp, Brachypodium distachyon
  Intron number 1 from transcript Bradi5g19600.1 (locus Brad i5g19600) derived from phytozome v7.0 (chr-ID Bd5; pos 226 02856 to 22603677 reverse strand)
tacaggtctgcctttgccccgccccggcccggagtcgcctctgttgtttgatttcccttcgtcttgttgtatttgggggttgtttgagttttgggtccggtgggtccccgggtcgggacatttccggcgtctttggagctgtcttttttggggcaagaaaaaggaattttgaccgccggggcaagctagagtcggtgccacggcaaaaaaaaagggtcattcgtttcttcgtgttaggacaaacgagggaggaaatcggtgcgggttccctttcttctttttttctgatgggttgttggtgcataggttttgtcatctatgtcgtgttcgtacgggtactctgcgcgtgattcaattaaattcttcgtgccatgaactggtggccttaattatggtcacgatttgacgtacactggcatgtggagttgccactaatttaccatccgcggtctgcttaatactagtactcccgtagattgaagagagactccgtggctaagcatgggtgatttctatgcgttttctgtcctgcaggagtgctggtagaagccaaatcgttttattgctttgctgctgttaggttgtactactgcttttgtagctagagtaaatgttatctatatatgctattgtttgattacattctgatacagcatgactgaaggattaaagatgcatacatgtaaagggtctagcttgattactgattctcgtatactcactgtggattattcatcagttcacattctaatcctggccagcgtcatgctatgttttgtttgagcagaggggacatcccgttctgcagcgaggactgcagga

SEQ ID NO: 16151 - DNA, 648 bp, Brachypodium distachyon
  Intron number 1 from transcript Bradi5g21730.1 (locus Brad i5g21730) derived from phytozome v7.0 (chr-ID Bd5; pos 242 70459 to 24271106)
ctgcgcggctgcccggcctgcttttgccggaggtgagagcctctgaaatgcactgttgctagtacttctcatttattccatgcatgattaattcattcgttgcctgcaaataccatgcatccgcgtccgtacattctggtattcgatcgatcatccccgtagcaggctagcagctgcaaatatatacatgtagttttttttcagaaaaaatacatacatgtagttagtgtagcttcttacttaactagatagaacgatctttgcaaagaaaagaaaaactagcattcctccttttaataaagaatgtctcaattttgattaaatttaaatgcatttatacacttagttatgtcaaacttgagatatcttttgtgggacggagggagaagaagaacaaggattagcactagtaatggaaattacacgcagtcatcggagtgcaacgtctccccaaaaatgctggcgcgggttgacttgttctaggttcaaatcaatccggagcattaaaacgtcttgaaacggccagattatgttggctagctcagtgtgccggctttacatgtgcacattagttcagcagtaccttacacgtcattcattcgtgcacttgcaggcctgctccagaacggcaacttcgagtacgccccg

SEQ ID NO: 16152 - DNA, 620 bp, Brachypodium distachyon
  Intron number 1 from transcript Bradi5g27550.1 (locus Brad i5g27550) derived from phytozome v7.0 (chr-ID Bd5; pos 282 88097 to 28288716 reverse strand)
tcaccgtcatcatcatcaacaagtggatcttccaggtctcactaaccccccccccccccccccccccttctccattgctcggatctgtatgtgccccctctctcgacctagactaccagagatttggtctggcgctactaatcacacccacacggtagtgccgtttcccaatcccaatcccagtggggaggaaaggaccggtttttctctgtgcaagtccatagattcatactacatgtacgcttcagagaaggatttcagtggctcgactgattcatactcaactagtagttgttaggtaagtttgattcttctactagatgcagctggtgctggtggtaacttatatatagtcgaggtcaggttgggtgactcaactttttatctggtagactgaatcaacagataagaatatgcttgatgtatacttgctgaactatatggaacgagaataaagaatattaaccatgaagcaagtcatgagtttctctgcaaatcttttcatggatatatagagctcaacagggaatgccgattgtattattatttgtttgatgatgtaagattgcctttttttttctgcagaaactggatttcaagtttcctctgacggtgtcctg

SEQ ID NO: 16153 - DNA, 920 bp, Brachypodium distachyon
  Intron number 2 from transcript Bradi5g27000.1 (locus Brad i5g27000) derived from phytozome v7.0 (chr-ID Bd5; pos 278 89360 to 27890279)
cagagcagtttaagcaatttccagactacaataaggtagttaaccaatcttgttttgaacctctgcaggtgtgtgttccttttcttgtaatataatacgtatgagcctaagagggacaaattagtagtttagtacactgtacacaaaaatacatgatattaattttgtcttaagacaaatgtgtatttttatatctcatccttgcaatacttgatgttagtttacaatgattctcgttactccggttaatgaagaataaaaagggagctgccagcccaccaccttggtcgttttatcatcccagaccataccaccattgggattataaaataatgacctattacgttgtatgtgacctttgctgctttctgttacagatttgattgttagtaatcttgaagagccctagcggtgctggttacatgagcttattgtagttggaaaagaatacttaagaggataatttacttcaaaacccgactaacacatttacagcagggcgagcatcctttttttccagacaattcatcttcctaattctcggccatttctatcagtgcacacatctttagatgccttaattttacaaagaaaattctgaattaccattcaagtatttcaaatgcttcgtgcattaacagcagcaacaacaacaaatatttttttccttcagcactcatatttccctatttttattgtagcaagtgaaggtcataattgaagaggatacggctggagaggttgttccgatgtgcaggtaaaattcatacatgacttggttgaacacagattcttttggtttcctggttgtgacatggttgcttgcatgatttgttttagctactatgtgagaactgatttatgatggtacatgtttgactatagaaaagccgagggcctagattgatccctagcaagct

SEQ ID NO: 16154 - DNA, 1011 bp, Brachypodium distachyon
  Intron number 3 from transcript Bradi5g24970.1 (locus Brad i5g24970) derived from phytozome v7.0 (chr-ID Bd5; pos 264 69412 to 26470422)
gtatacttcctgctcgccaagagctacatcttaccgtaagctctagtctcatcagcgttcgttcgtctatgtgcagagcttaattagcttggttttgaccctctacgacaccgtcaatgtgtgaaattagccgcacgatttgatgtgggacagaaagtaacttcagaaatagcatctcactttcattatgtaaatcttcagttcggaattgtagccctatcttcaaagtgagtagattccacacgagttatctctattttgcgtagtaacatgttgctgtccctgtacgtcgacattcagcaaaagggatttgcatctgtagaaattatttttttcaaatgggcgtacttgtattttgatacattcaggaaaggaaaaaaggtggggtctcgatctctgagatcgtcatgtaaattgttagctaaggtcttctttgagctgtaaggcttagcctagagataactataaccacaatatctctaaaaggaacctagtattatggaatgttgtagccatgaaggtgtgattattcattgccatcactgcccaaaaagactacattggttgaagttttaaatgtatagatgcctgaaagaagaattaactcatctcggtttgtcttgaagatgtattcatatagttcaagatttaagactgaagtaatgaaactaccttgtactgttgtcttggcatgcagccatatttccaaaattcacgctaacattacgggaatcatgtacgatggtggaccaaaatttatacagttgatcttttgcaaccttgtataaaatttgctatcagctactcctgagtcttgtcaacatcaattgcgacctttgaaccaaactagattgatatttgatatgcagtggtcagataggcttcagttctagcggctcaagttctatgatactctcattcctaccatggattattgacagcattgaccattttaaaacatcttctgttcttataggtacgagttgcgtgccatacaaaaggagaaggtta

SEQ ID NO: 16155 - DNA, 676 bp, Brachypodium distachyon
  Intron number 1 from transcript Bradi5g24760.1 (locus Brad i5g24760) derived from phytozome v7.0 (chr-ID Bd5; pos 263 09737 to 26310412 reverse strand)
agatcagacagaaagaagatactgacttaactcaagtaagtgacttcacttcttcgttcttcatagagtctgcttttcatttgaaaccatctgcctcttcttcggcggtaccgtggtttctcttggcgctgttttcgtgtcattgcttcgtgttaggacttagaattcgcttcaaagttgaaactgagctgctgctgctgtcttatgccatggttttctgacttttgagttgaaatcgagcagttgatggagtgggcaggaatttcggtccatccaggattgttatgtgaaattaatgaaatcgggtttctccaaaaaaaaattgggggtataaaatggggggaaaagcagtcacagtatacaagtccacgccgaagcaaaataaaactggctgaagtcaaattgtcaaatcaaagtatgcaagcggagagcaatggttgcatcaatcatggccttgccttcgacttgcctgacatatgccatgacgaagacatcgtttacaagtccaagcaaacgaatatgagtcagttacttacctgtccaaccatgatttgtttgccaatattacctatgatttgctttcctctgagcttgtttgttagcagtgtttttatgcttatctgctcattctcataatgcagaaagcaagaaggccttgagaaggtgggcgttgcag

SEQ ID NO: 16156 - DNA, 894 bp, Brachypodium distachyon
  Intron number 1 from transcript Bradi5g21310.1 (locus Brad i5g21310) derived from phytozome v7.0 (chr-ID Bd5; pos 239 65326 to 23966219)
ggccggtgcccttctttgccgctggcattagctcggtaagagcttgctttcctcgtgcattggcatgaagcgtttgatctgttttgaattaggacgtaatttctctgtttcgagcattgcaatgcttgcatatttagcatcagtacccgcaactgggtttacatgtggtacactgcaattatgaccagtagctttgccttacattttgggggaaaaacgctgtaattgtacggaacttctcggcctttaaacatcaggattcaggatgtgtgtaaactgtcagcagataacttaatttgatctttttagcttgacaagagtcttgactcttcacatttatgaatttctttcatattcattagtgtctttagttttcatattcatttacatcttatagttaatcttgtgctgtagttgagggaactgcagttgtgcagctgatccatttgttgctactatttgaaaggcgcatatttgcgtcaagatgcagttgagggatgatcacgacgatttttgtgtctccaaacagtatttgcttctcagagaggatactttgttgatatcaaatggatttgatcattttggaaaatagatggctcatgtcgcagtttggtagaggtaccctggattaggctgatcatttgtctgatgatgcttgtgccatcttctcttgtctctttattttgtatcccatacactgctccggtagtcatttagttttgtgatactgcttatgttaagctgttaactattttgtttgttcagcatttttaatttttgcacatctctttacatttttagtaggtctgatatttcaaacaatggggtgaatcaatgagctggtcatttttactttcaggttctccatcccaagaatccgtttgctccaacatt

SEQ ID NO: 16157 - DNA, 753 bp, Brachypodium distachyon
  Intron number 1 from transcript Bradi5g27090.1 (locus Brad i5g27090) derived from phytozome v7.0 (chr-ID Bd5; pos 280 06316 to 28007068 reverse strand)
ccctgtcccagcggagcggcggcctccatccataggtatcgttgtgattccgtgcttcattcagttcgaatccatgttaagaattcgtttgtatcgtttcctccgaggattattgattgctgaatgctgatggtgacaagattctgccctgccccgatcttgttatccattcccaatcatgttagcttgcacagcccggtcgcacgcacccgtcactaatcgccgcctgtgctgtccatccaaataagtagcacgcgtagatctgcttattttcgattgccatggtctactatgattctgattgcatggaattcaattttcgaatgcactttgaatagtttcttcagtgttctgctatgtgccaaacaaaactgaataagcacccaaggtgtgtttggccctggctgagttagactatggtcatgctgacatgtccaacatagaaaccttgttctgaatcatgtagagattgaattctttcaagagcattgaatacatcatgaagttagtttaattgtctctgtcgcataggctgcagatttgtttctccaagagaacaaggttgcagatttgtttcttcttgagaacaagcttgcagatttgattagtccaaaaggatattctttttgaagaaccataaagttaaactatgttatttactagttcgtactattagttcctagcttgccgaaacataatgatcctttatctagtttgttgtacttgttcattgcagatagagttttatcttat

SEQ ID NO: 16158 - DNA, 730 bp, Brachypodium distachyon
  Intron number 2 from transcript Bradi5g19030.4 (locus Brad i5g19030) derived from phytozome v7.0 (chr-ID Bd5; pos 220 83991 to 22084720)
gctgactcccgtcggcgcctccttggtatttctaggttttctctcttttctccagcagatttgagtggctaggatctaggaaaaacctagtcagagtatggcatgcgatttcgttcggtgcgtgcgcgcgtgtgtggattggattcgggtctgctgcagtgcgggcttgagtaattttgatttcgtctgctcgcttagtttatttctttcgttacaatttagaaaaactatatcttcgggccggtagcatgtctggagagtgatcagattttatgaagtactacttgataaatgatcgtgcattgctacagaagttgatttattgcatgagatgtgtcatcggtccttaacactgttcaaactaaaaaatcatctcaaatttacatcactcaaaccaaccaatcataagattgtgatacatgtatgatgactgtggtcgttaatttttttgtcaacttaagaggtaatctcagtgatatccaccaccccggatctttataagagtaaaggttagcactttaggtgtttagctatcacaggcttcacgttctatgctgtggaatggttgttggtctgtttggtgatttgtggattttttacttgctgacgatttggtggagattgttggggataatgtcctttgtcaaccaagttctctgggcgaatcaatgattttgtaaccttttcttctgcagctcaaaggatagcaggtctgagagaagtagaagca

SEQ ID NO: 16159 - DNA, 961 bp, Brachypodium distachyon
  Intron number 1 from transcript Bradi5g20040.1 (locus Brad i5g20040) derived from phytozome v7.0 (chr-ID Bd5; pos 229 44172 to 22945132 reverse strand)
acctcgcgtcccgcacttgcatccgcagctggaaggtgagttgttaatattcgcgtgttttgtggcgcttctgcgtggcgcctgctgtttgaaaatgttgcatcctgatgccacctcctgtttggaatgttgcatcctgatgctaatcgtggagggtcaggtgaactggagcataggatagcaattgttcgtgcatgtggaattagtcatacgataccaattttatgtgcttgtgatatcaagcacatatttatcgcgaaaagaaaaaaaaatgaaatcaagcacatgtagtaattttatgtgcatgtgatttcaaatactccctccgtcccatattaagtgactcaattttgtccaaatatgaatgtatctatgcctaaaaagcgtctagatacatgtaatagaaagtcacttaatatgggacggagggagcaggtagcaattttgtctgaaaacgtcaattgaagagcatagcataggttggtcaataggctgtttcttggtttcgatgacgtgttagtacctcttgacttataagtgttctttattgcgagaagatgatccagtgtctatttattgcttaaagttatttgctctagaatttttgtactaagcttgttttatttcttctcaaatcatgctgcaaggatatgtgctagaatcttaggcagcttcgcatcagcatgtaagctggtggttagttgtgccataacactgttataaggaagaaatattttgatagtaactctagcttttctagatctacctccagggccatgtcaattcttgtttcatattggtaaaagtcagtgacaggaaggggggtttacatataaaatttaacatcttcgcaactaaaccaaagttcatttcagtattatcattagtactgcctttttttttctgtcctcggtactggcatctggcgtatgttcatttgttttttctgatgcatagggac

SEQ ID NO: 16160 - DNA, 992 bp, Glycine max
  Intron number 1 from transcript Glyma02g47120.1 (locus Gly ma02g47120) derived from phytozome v7.0 (chr-ID Gm02; pos 50819542 to 50820533 reverse strand)
actcccaggtgattccccttcttctttctcctcccaaaatccttcatttcaatacaaagtttccaatttttccctttttctttcttttttttcctcagccccctatattgttcatgttcccttgccaagtagtatttttcttcccaaattcgttttgacttattttttagtagctcatgggtttctaaatcaagtattggcattagaaagagatcagaggattggatttagaattaggtactgaagcaaatgggcaatgtataacttttgtcgttttctgtgcttcaatgaataagccatcaaatttatccctgaagtgttactccttcttctgaatagtccccaaagtaaataatttacatgaataatcccccaatgattagaaatcatattaaatagtctttcaggtatttaaaaatccttcaaattagtccctggacattagtaaaatatatcattgtagtgtttaagttgatgaatatccaatactttaagaaagggtaatacttgagagactaaattgacggtttactcttgcttcaatttgaatagcaatggaaaagtggaaacataaccactcggtcagcctaggctagcaatgaggtgtttgagtagtctgcaagagttcctactatcaaatctcattattgccattgtacataaaagaaatatggaaaaggataatgatacacttgaatttttgggtggatgggtgtagggaaagaaaaggccgaacacgaacagaaaaaagaaagggaagagaaagaaagtgaaatatgtgattagtgatgtgatgagaaatgaaaagatatggaaagaatgcttggttttgttctcttgttatttagctactgctacattttctccacccttttaatggattaatttagtctagaagaaaaatgatgacatttgttttgttctgaatttggtatttttttgctgtgtttgtctcagatagattttgtgttgggaagctgggtgcattcaga

SEQ ID NO: 16161 - DNA, 623 bp, Glycine max
  Intron number 3 from transcript Glyma04g02000.1 (locus Gly ma04g02000) derived from phytozome v7.0 (chr-ID Gm04; pos 1376186 to 1376808 reverse strand)
tgccccctcaattttttgctgtaacaattaccactgtaagatgttatgagtttcttctcttcttgcttaacttctactttcatttttaattagcagttctgcatgttatgatggttatatttggctggatgggccagccaacctctttggttattttgatgaattgtttcgatggagtgggagactttgctttgtctgatgtacttgtccctgaaatttgtgttttcaatcactatccccctttatatcatgtcacatgaagtcatctttgattttagaattttgaaaaaaataattcaaaagtatgctcattacctttgctgccatttcccccccttgtttataactttgccttgtaagccctaatttcagagccttttgcaaatttttccccctggtgtacttatctgaattaattgaagactattatcgatactaacaactgttctggtgttggaagagtaacatatttttagcacaagatggtccaataagcaatgttgagccatgcggtttggttgaattgaagttcttccttttcatttattttgcttcatgcatcttacgtatttcggtggaatcatttggcgttttattaggtagctgaaaaccttgcacaactc

SEQ ID NO: 16162 - DNA, 468 bp, Glycine max
  Intron number 1 from transcript Glyma04g02000.1 (locus Gly ma04g02000) derived from phytozome v7.0 (chr-ID Gm04; pos 1377020 to 1377487 reverse strand)
gcactttggtacttcttcatcttcttactctttcaaattcagtattacccctatctcatttttaattttatatattattattttaatataaaaaaattagttcatgaaaacctcttggaataggttagtgtgacccttaataagtgaatgaatatatcaaatatttaaactctcctatagaattggcgaccatgtgcattcatgtccgtatacctactacttggtgtggtttatctttcatattttcttccaatttattgagtcattatatgaaatcctaagtttcttcagcattatatgccctagcccaagtgattattttggtacatataaaattaaaatgggatctgtagtcaaaataaattgttctggaaacaagtgtctacctctgccggagctgttatctgactagtgattaaatgttttgaaatcaacagtcaaagagcaggagagaaattttactggaat

SEQ ID NO: 16163 - DNA, 359 bp, Glycine max
  Intron number 1 from transcript Glyma02g36210.1 (locus Gly ma02g36210) derived from phytozome v7.0 (chr-ID Gm02; pos 41593981 to 41594339 reverse strand)
ccccatcacctgaaagaaccttctagaagcaccccgtaagttcctaacccctattccccccgaaaaatctcatcttttttactatgcctcattcaatctctgtcttcccctctcatgcccctagtgttggttcaacttagctcctagggttttttgttttctgtttcattaattttttttgggtgaagtttagtgtgttactggagtctcactgcttcaattacatgtactgtgtgattggattatttatttgtttggttattactaattgagatgaaaagttcattgtttgatcagaagtgtgtgtgtgtgtgatgttgttttgtttcgtttttcgtggttaggaaagtgtggttcaa

SEQ ID NO: 16164 - DNA, 1018 bp, Glycine max
  Intron number 3 from transcript Glyma04g03560.1 (locus Gly ma04g03560) derived from phytozome v7.0 (chr-ID Gm04; pos 2593304 to 2594321)
tgtggtgcctccaactttgtccattcagagctcaggtattactattaattatttcgtttcgtatttttcataggttcaagctgcgtgaatttctcagatacgttttcgactttcgtcaactttttaattatataaataaaatggaggttataagttatactcatgacgtaggcatgatttgaatttggaggatgtgttttttgtctcgttccgatgcagcttagtttttttggttttcttctgcttgtccgaaaactcgacaagtcgtagttggtagttccaataccattaaagggtcgattcgctgtggcctgcactcttcagaagagatagggaagagatctatctactgagattaataattaattttttaagagaaattagatttaaacattaattatatctgaaattttctctacaaaaatgaattttatttggacaacaaaagaaaattacttttgtagtataataaaatacaaatatgttcgttaaaacatgatttctttgaaagttaatattattaactttaatttcatttgcaaaaattaatgctactcacgttgttgatacacaatatgccaaggttaaatcactgttcaacgttcaaattcttagtaaccaggcactaaagctgtatttattcgtgtatatttatatgtataaggggtatagctttttgttcgttagggcggagaaaactagctttgaagttgaagatgcgaataacaagaaagacctctattattgcattcctttttgctccatacatattaaatttcaagctttttaactctgtttcaggttatatttaattactagtattatataatcatatgaacagcttcctactttttttttttgtaactctgtttttgattggtgcattatatgtctgacaatgtctttttccttgttttatgctctcgaactttttcttctttttttttttcacctttgtttacctttttcgacattggcactagaaattccggaaaacccatcaacgaagctgtcaccg

SEQ ID NO: 16165 - DNA, 768 bp, Glycine max
  Intron number 1 from transcript Glyma05g26180.1 (locus Gly ma05g26180) derived from phytozome v7.0 (chr-ID Gm05; pos 32179686 to 32180453)
tctccctgcttctatttgatccatagcccacgctggtatgcttgtcaatttccctccttcgcctcttcctttgcggttttagctgcaatttgccttctggggtttttagttttttgcctcttcttgttgttcatgttcaatttcacttgggtcttttgttttgtgttgtgttgtgtgtgagtccgttgattctcaacctactttgctctgtgattgtgattcctgcttaaggattttgttggtttaatgagcatgatttgttacttggattttgagctgagtcatttagtcccttgatgggggagggggggattaagggtttttgtgttagttgaatctgcagaatgcttcaccggttgttggttgtggatgttgattgttgattgtggtgtgctggaacatacactgactttctgttcattatatatgctgctgcttttttctttttgatggagattgtgtatgcttctgtagattcggtgtgtttaatagcttctacatgagagtgttgcttagtagtctgtctatgttcatgtgaattatctgatcttgctttgattggggaatgaatgtgtatgcctacaaagttgtgaatcctacagtatctcaggaaatttatcattgtttagctgtttatgtttaggggcaactggcatgtcttatacttggatgtctttttcgcttacatgaatgtggttgcaaatgggggagtaacgtttgctaatttttgcagcaggattggtgcaggctattgattctacgtttcta

SEQ ID NO: 16166 - DNA, 495 bp, Glycine max
  Intron number 1 from transcript Glyma03g33740.2 (locus Gly ma03g33740) derived from phytozome v7.0 (chr-ID Gm03; pos 41230965 to 41231459)
gcaaaaccgttactcaggtttcccttaaacctttgcgatcatacttactgttattgattgtaaattattggttttagggttgtagagacttgctttcttcaatgctcattatgtgttatctaattatctatctttttacatcgtctttcttcgtgtttttattcattcattgctagggtttttcttgttgttcattgcattcttttctaatattgactcgtccgagattttctctactgaattcaattgtggcaaagttttttagaggaatgttctcattatgagatgagttgtcggccttggcattcagttccgcatgttctttttattgactttttagctattttgtataattagtatcggggaattctataatgtttttcctgttcttactgtttattgtgacaaaatggaattgtcttagcatatgagtgaattgttggtttgattgaatgagcaggtaaccctggcacatctcaaggacaagcctgcgcc

SEQ ID NO: 16167 - DNA, 633 bp, Glycine max
  Intron number 1 from transcript Glyma05g12770.1 (locus Gly ma05g12770) derived from phytozome v7.0 (chr-ID Gm05; pos 12983578 to 12984210 reverse strand)
tggccgaaacacccttcttcctacaggtatccataatacatggtaattgattttgcattggtgtttgtaacaataaaaatatagaaactcaatatacttatcacatatttcctcccttgtaacttattttctctccccagttaatatagcataattgagaaagttacccaatatatattaattaaccaactcaaaaacattaaaaaaattcagcagaaacttaaaacttaaacgtagacttcttagtttattgcatgctttgttgttggttgtagttataaacaccatgttcatacaaaaagtttatttatcaaattatgtttctgttggaaaagttatctttaatctgaacattcaaaccgttatttttattttattttattcgtctattatttatttatttatattaagtgcataaagttgattttctttatctctaatagattttctaaagaaaccaataagatgatgcaagatattacttttgtaaagaactacaatatttttttttgtaaattaagaactaaattaaaaaatggatggaaaatgtatatcttgagccaagaaacaatttgtaattacttacactattatgtgtgtgacagggaagtgacacaagaatacaacaaggag

SEQ ID NO: 16168 - DNA, 291 bp, Glycine max
  Intron number 1 from transcript Glyma01g38470.2 (locus Gly ma01g38470) derived from phytozome v7.0 (chr-ID Gm01; pos 50565110 to 50565400 reverse strand)
gatattacttgtaagttgcaaggaagtttccatgttattatctgcatacaatttttaactttgtgatcaaactttaatcaactctttgaaggcactcaagctgctatgttcttttcatcttatgttttgtttttatttttcaaattctaaataatattttcaatctggtaagatctgtacccatgcctgcaagatgaattttttttttttatgaaaaagcttacctgtctcctctatgtattttttgttgttacagaggtggcacatttttgttttcctttcaagtgtctc

SEQ ID NO: 16169 - DNA, 700 bp, Glycine max
  Intron number 1 from transcript Glyma03g33370.1 (locus Gly ma03g33370) derived from phytozome v7.0 (chr-ID Gm03; pos 40959382 to 40960081 reverse strand)
ggatagtctcgttggtcagatcaaagccaccccaggtaaaaaaaataaaataatcatttttgtttttgttcaggaaaagagagaaacatgaatggaattatgatagtgagactctgttggggacagttgtgctttcacttaattaaggtagtttggggggttatgcaattgtttctagcaaaataaatttgagtgaggtttatgactttggtacagccgattggtgtcctgaatgtgtgtgattgcaagctttttaatattatagaaaaaaattgattgagagggggaaggggggaaaggattggaatctgcatatgtatgatctaataatctgctattttcagttatatatcctaagaaagatctttagtgctagtctgatgtggtgttaatttagtttccattttgatctttagtactatatgccaagcttaaatttgtactagtgatggtaaatttgaaatgatgcataatgcacgcagaatcttattgtgattcatgtttgcataatctttagttatttgtttctggggcttggaaaatgaaacatgccaggtagtattttcacgattgcattaacctgtgttggtcttagaagacaaatctaggcctgctgtagcttgtgcttctcccccttaaatattattcttgtcaattgagtgcaggaaagttgaaaaggaattcatccacgaaatccaaa

SEQ ID NO: 16170 - DNA, 1066 bp, Glycine max
  Intron number 1 from transcript Glyma03g36550.2 (locus Gly ma03g36550) derived from phytozome v7.0 (chr-ID Gm03; pos 43491718 to 43492783 reverse strand)
gccccgttagacggccatttcttgcgctacaagtggttagtattggttctcctctaagtgctgtttgcctattaggtcttactttgttatgcttcttagttagttgataatctgagcttcaatggtgtgccaattttggaattgttttagtccttaatgcaatgcatttgaagcgtgtttgctcatagtttaggtttttttttttgtgtaaattattttgcttattcgttattgttaatttatttatgtcattattcaaaaattgccgtgctaatactgaatagcattaggcagtgatgtatggcttgcttatctttccatttgtgtcctagtctttacggtctcaatctgcacaagttttcatttacatatttgaaaaaactgtatttgtaatgctatgtgatatattccaacttctcaataaatcacgggacatttaaatttttcattcataagctgccaatgcaagatattgaatttcgcttccaccaatatctgtgtggtaataggtatttcaaatgtatgtaagattagtcatttgttcagcaaaaagttattttcacgagtgtaagagagcacaatgcatataggttaatctatctgttggcgatggcatgtcatctcagttggtttcttgtgctgatgaatagatgtttcctatgtatctggtctagttataaggttagtcgtgtatttagttggtatatgctttgtatgttattcatgtttcagcgtgacatgtttggtgttatcagttttttcacctctctttgaagtttggagtttggagattgatagaaatattgaagatttacccttactgccctaaatatgaataaacgttgcaataattttatttgtgttatgaagttgattacttgagtagttgcttgtgataattttaattatgaaaattccaatttgatcctgaatacactccctttatgtaagttttctcttgagctgacacagatctaaatattgaactttttgcatctatcatttgacactcatttggtcatctttggaaggtatcgtgtacagagtgataaaaaggttgctgttt

SEQ ID NO: 16171 - DNA, 945 bp, Glycine max
  Intron number 1 from transcript Glyma01g07550.1 (locus Gly ma01g07550) derived from phytozome v7.0 (chr-ID Gm01; pos 8344952 to 8345896)
cgtttcccagatctgctccttccgttccccctcaggtaaccctttctcttctccgattagtgttttccattttcattcattttttcgctcttcattttccatttctcttatcgatccgcacattttgcatttcatgttacgcgagatccttttcccggcctcgtcaatctcccttgttcagatccattttcaattttcaattttcattttcattttgtttttcgctgtgtggaatagtaggttttgatgtaatcgttgtcttttgtgattgatttgatttcgatcaattcattccgttgcactcattcttatactgtgaaatgtggatgataatggaacagagggtgttattcctctttttccatcgaaaggaagtagatatagatgtctttgttagtcttatagaattatgatcaaataacaaatgtctttttcattccgtttttgctgtgttgtgcattgtctccagaattggatcagatatattttaaaatgattttaattaaggttttaaattaattttgcggttttgttgaatttcctgattgcgggaaattgcggacaaatatgggcgatgtggccacaattgcaatcattgtcacccccaaaaaccttgacgctgcgaccgaggtcttggtcttggtccttttttaaaacctataatgtcgtagatcaattgttcacaagatgatgaaaactggtagtaaaacagaaaaaatgtgctagatgtttgaatgcaaaatgaaaatacatttgattaatgtttagtgcactcttggtggtgactgttgtctgaataaatattttttgtaggttgtcacattttatttctgtccctcccttttttgtgtttgtgtcttttactgcttatgaatttatgtgaatcttgtttgtccatttgatggctgagactagactgtacctttcagaaatcagttgaagagc

SEQ ID NO: 16172 - DNA, 826 bp, Glycine max
  Intron number 3 from transcript Glyma01g07550.1 (locus Gly ma01g07550) derived from phytozome v7.0 (chr-ID Gm01; pos 8346305 to 8347130)
gcgctacaagggattaagtctggtacactgcacacacttacaaaattaggtttgattgtcccctatatgtgttttaattgtcttatatgtattgtactgtgataattttgttactgtgggttcatatagatgatcttatttttcacctcacatgttgaaaattcaaaataattaggtctggatgttcaatctagttagctatactatctgtactagtttggaaattatcaaatatttgggaaacaaaattattatctgggttcttttcttactgctatatgcataagaatcaaaaggttggttttgcctattcaatgagagtgaatctacttaatcatctatttaggatttgttttctatgcaatgaggataaatctacttaattatgtatttaaccttgaatatcagctgtcagcactgactgttattatgaaatatgaataacttaatgttcatattgcttaatgttgacttcctatcagtttattttcaacctggacctaggtattatttaaactgtagtgaaatacctatatatcaatgatagtgatagagcttccatcttgtcttgtaaacagaattcgacactgtttgcagtcaattagcatttaacatagtgggcaataaggcttggttattgtactagagtgatgtcttacaagtttgaatctacaataagatacattccacaacattctgaagagatacatgaaaagtagattaatagcttgtctgaccatgcttagatttattttctttggaatttatctggattgatatttttcttttcaaatttggctgcaggaccgaccctcaaccaaggtcc

SEQ ID NO: 16173 - DNA, 967 bp, Glycine max
  Intron number 1 from transcript Glyma02g18310.1 (locus Gly ma02g18310) derived from phytozome v7.0 (chr-ID Gm02; pos 17009162 to 17010128)
tggtattttcctgcacttttacagtcatttgattctgattatgagttactgaaattttcaatgagatgatttaattcattattacccttttctgtgtcactatgctatctactatctcagtatctcttatatctactactacatccgtccctatatataagaccattttcatttaatgtttgtttctttttataagaccctcttctaaactcaggtgcattaattatttttatcctgtaatacccttaattaattactgtattctctctccaaacaataattactacttggtgagaaacaattaagtagagagaaatgaagggtaattttggaaaagcagtataaatattgacaaatttaatttgatttactaaatgaaccacttttcttaaagggtgtggatcaattgaaaggtatatatagggacagaggtagtaataaagactccttgtaagttagcatacttgggcagagtccgttgatctgtttgtcagtgtaactataattaacttagcccctgcccagctacaaaaaagattataaaatccctgaaattaggttttgtattcccaccatagatttacttcccagttgaaacttggttaaaatgtctcaaagtttttgggttaaggtgtgatatcttacatgtgttttgatgtcaactttataatttgcctaagtgctatatttgacaaacacgaccatctttggtattaaggagggtcagagaatatataaaatgatgaaaattcttataatttcctgacctgcattttttagagtcaattaacggttgtacaatatcttctatgccattccataaaatatagtatagattattaatgaacaccttgctcgaaatagttttattaacatcaattgaaccagtggatatttctgtcgacaaatgtcattggttgatacttccagaatttttttgcaggtgctggaatcagctttggctcat

SEQ ID NO: 16174 - DNA, 584 bp, Glycine max
  Intron number 2 from transcript Glyma03g16200.1 (locus Gly ma03g16200) derived from phytozome v7.0 (chr-ID Gm03; pos 20593023 to 20593606)
attgttgaattgggttctggttgtggattggttgggtaagttcaattgcaatctcatcccatttgacctgttcatgctaaatggctatagtttgtccataatttcttggttagcttttgtcttttttcacatggatttactgaacgaggaaaatagagttttgagcttttgcattgtctttttttacgaacaacagacagtttgaataagcttctcaataagtcctttttgtagaagaaaatataatgaattaagaagttaataacaatcaaatttctccttccacagcttaaaatctacttttccacctaaattttgctatgaactctcatctttctactccattagttgtgtataagttgattttatcttatgggagaagtttgattcattttacctccttaattcttcttattttctttttcttcaagtgtttgttcaaaattttatccaaactagctctaagttgtctaacaaatgacgaggaattatttttaagtttgttcttactcattctgtgatacacctttcttattttttcttccgtagttgcattgcagcccttttgggtagtgaggtcattg

SEQ ID NO: 16175 - DNA, 609 bp, Glycine max
  Intron number 4 from transcript Glyma04g15470.1 (locus Gly ma04g15470) derived from phytozome v7.0 (chr-ID Gm04; pos 16137117 to 16137725 reverse strand)
ggtgaattgaaaaggaatcattttttcccccatctgtaataaattcgatacttggttaatttttaattaaccaagtataggtgagtaaacactacttcaattatatgatatataggttaagtttgacatacttgaaaacacattccattttctcttgttttcatcacagttatgaaacccaggccaggcatgaacctggccaagacagttgatgacaagtcacaggatgcattgcagtgtattaatagaaatatgatataaatatcatgactaattgtcataccctaatttcttccggggacctttgcttgatgacatgcgaccattctttggtccttgtgaggtgcttggcacccatcattaggcaatttatgaaattccaggacatgccgaaaaaccaaaaaaatgttgatgcacaatccgtaagtttccgtgacacaccggaaatcaaatggaagcatcgttgcataattaagtgaggttccgtaacattccgtaagtcaaaaaggggatgattatgtaatccgcaaggttccgtaacattacgtaagttttcgtaactttacgaaaaaagaattaccaaaaaacagcagaggggggtgtacttag

SEQ ID NO: 16176 - DNA, 204 bp, Glycine max
  Intron number 1 from transcript Glyma02g41130.1 (locus Gly ma02g41130) derived from phytozome v7.0 (chr-ID Gm02; pos 46297751 to 46297954)
caacgctatagaaagggtcgtcgccaagtcgtggggtttgtctcttattcttaatcctattcctatcattgccgatagtattttcttttatttttctcaaatttttaaaaccatgtttgattcctttaaatttgttcttctatttagtttcatttcaatggcgactgaacgttttctttttttttttggtggacacacgtgtag

SEQ ID NO: 16177 - DNA, 966 bp, Glycine max
  Intron number 2 from transcript Glyma02g44760.2 (locus Gly ma02g44760) derived from phytozome v7.0 (chr-ID Gm02; pos 49219575 to 49220540 reverse strand)
tctcaggtatcgtatcgattttatgttgtaattgaaaattgagaactaattgcgccggtgagtgtgtggctgaacaatcctaacaatgataattaataagttaataactagtataattgcatttaattcaacttcagttctgttcttactttttcagctattcaaacactgcctaagttcaatgaacaagataattgttccttagaaatgtaatatagacattaaatttataagtaatgggacaaatacatctaataatgactaatgagaagcatttctatttgatatacactttgaattttacattttatacttgtgtctagtttggatgtttggataagcttttatataagcactttaataagagaagaaataggcaccaagtcaagatgatacggatcaacccctcctcttgcgttcttgtgccaaagatcttaccatttccgaaataattggagttacatctatttttccatttcaattcaagagttcttatgtgtttccacgccccttccagaccccgaaaaaatggacaaattgcttttcttaggaacacatatttgttaccaaaaaagataatggtaaccccaccattaactacttcaatttaatagtaataaaatacatgctctactaagacagaatttgtaatttgctatactcttgcatagcaggcaaagatttaagaaataaaataaaccaaacttctccttcaagttaaaatctagtcacgcactttagcttttagagaagatattataagagagcttttaaaagttaaggtgtatcagactataagttcattttaacttgtgggagaagcttgatttattttacctccttattttcttctctcataagtgtttgttgagaagtttatccgaattgggccttatgtttgtttgattcacttgtgctgttctcatgggtgttctattttcttttgggttctttaacaggtacgga

SEQ ID NO: 16178 - DNA, 644 bp, Glycine max
  Intron number 1 from transcript Glyma02g43220.1 (locus Gly ma02g43220) derived from phytozome v7.0 (chr-ID Gm02; pos 48044988 to 48045631)
cccacgttagtttgccacccttccctgatttttacacttgggctgataatttcaataataataatgacaacttctgccacacctcttcttctcaatcatcatggaccagacatgaaacggtggatgattttattcaaaccccatatatattttgagatttaatgttagttaattatgatcctccccccaacccccccccccccctccccctttctctcttttgttgtaattgttctgaattttctgatcaatcaaaagcagcgactgtgttgtatatgctaataaataagtactttcttgaatgaattggtcttaattaattgaaatcttttagtttcataattcctatgctactaggacaaaaaatagatttatatcgttgcacgattgctttgggttttgttcttctatcagaattggagtttcatcttagtaattcatgtaataaaggtttctattaaagcatgacacaaatcaattattgaggtgaaatttcaattctaattgaaaaataacaccaaaacactcctaaagggatcaatagctaagttttgtccatgctattattataggaaaaatgatgatctttctttgtcttttcaatttcatttatgtaataatatataataggattttcacggtcg

SEQ ID NO: 16179 - DNA, 775 bp, Glycine max
  Intron number 3 from transcript Glyma02g17110.1 (locus Gly ma02g17110) derived from phytozome v7.0 (chr-ID Gm02; pos 15429855 to 15430629)
ctggcagtgagaagatacacaaggtattttactcatttatagtactgaactcatcatactcgaagcatatgtaccagatgaataaatatttttgcatttaggaagcatttataagaggttatgggtttattgtatgatataagcactcaagcagaatgttggtgtccatgtttgagtctagtttgagcttaggaaaacggctcatgacattactatgatactatacgttctttttttagtttatttcaataagcttaacagaaaatcctatcaaaataaggtatttttttagcttaatttagtaactttcacagtcaagttcgctaataagctcttctctgagctggtgcttaattaagttgtttaccctgatgcatcctaagtttgtattgaataccgtaaatgcttaattatatttttattcaaatgcaatgttgttaaatggcagcactatggccgccatggcgaaatggcatgccgtttttttgtcaactgccataagcaatttgtgaagggaggcccgctatggctgccacaatggcgtgtttatatggcagaattttggccttccactgtgtgctgccatccaccattgataactctgctcgaatgtgcccagtgttggttgttaatctagagtttttgttagaattaccacttgctaaaagtcttaaataattttttgaattcaataatgttgaaaatatattgattttgtactaatccctgctgctaactgacatgatgtcctcctcactgcagagttttgttggcc

SEQ ID NO: 16180 - DNA, 961 bp, Glycine max
  Intron number 3 from transcript Glyma04g38740.1 (locus Gly ma04g38740) derived from phytozome v7.0 (chr-ID Gm04; pos 45082558 to 45083518 reverse strand)
gcaagcaattgcctggcaggaaaggttggttactactcgcttctttcaaatgcctttttcactctttttatgtgtttgtgaatttattttagttttgtgtgtgcgttgttttaggaatagtaagggttttaggtcagatcttttcaatgctatgaatgttattttgctgattgtgttgaaagaggtagttaaactaatgtacgctatgttcttgttcatgatagctgcagtttctactcccttgttggcttgttgctaggttaggcactattgataaggttctcacatcattgaaggttgagggatacgcacgttttctgtactagctggtcaccacattgagaactagttttttttttctgatgtggagtttgttgaattgtgattcatgaatgtgtaatttgttgttagctccgctgggcatgtatttgaaattgccaacaatgtggtccatgggaatactcatgcatgttatatagtattgacacatgatgcctcttgcttgtagttgtatctatttcatagtcattacatgagtggaccaaattgataattatgcaatttgtgacaagttgcattggatgtatacttgttaacttgatttccatgtttcaattagagtcttttcttctaatggggttgacctgattgactcttaaaaggtccttgtttatgctatcctttgatgttcaagatcatgctcatgcattatggttgagggatccttatgtaaacctgggaaattcttctagaatgtagaaagactagtcagttgggaacaagtggagtgcaggaatagattgttttgtttgcttttactgaaaaattggttttttatagaactctatttgatttatccatttcatttaaaccccatatgaagatgtttgttagctagaggatttataaatgtgggttacacttacatttttattatttgttttcaggtatctcgttgacc

SEQ ID NO: 16181 - DNA, 899 bp, Glycine max
  Intron number 1 from transcript Glyma03g36420.1 (locus Gly ma03g36420) derived from phytozome v7.0 (chr-ID Gm03; pos 43383945 to 43384843 reverse strand)
atccttcttctctaactctaatttattattttcatgtattgttctcgcttcactgcttcatatttggctgtcatttgaaatttctttaataattcttttcttttaattctagtttggctatctgttactgtgtttatgatttcaatttcatggcggaattattattgctttcttagtgacgttgggtgtgtagtgtatgcgttgatcttttgttcttgatttgggtcgcatagctttagcggaatttataatttgaggcttgcttggtgaagtaacgtagacccgagtgttctaacaaatgatacgtggattcgttcattagaatactttttgtcatttataataatgttccttaatcttcatttggaatttttacctttggaagtcatatactgtaaaacgtcataaactatattgtggatcttgttttgaatttaacattcatttagtccttccacaacaaaagaatctggtgtaggttgtatcctatgaaatgaaacaaagtttatgccgaagtacatataagaagactgatctgttattgatattattgctggactaggttttcttttctccttgtatgtgattgtgatgtgtgccatgtcaatatttgtttttttacctaatcccagggaactagttgtgtgtttggtgtgaaactgttattgttatttcttgttacttcggatgtcttcaattttcatttgctgttaagatgcattctgttgaattttgaaagttgaagagctaatgattcaaggttttgggtccttttggatttggaaggtgatatatatgttattcctgatttatctgtgatgctgactgattaactgtgatgcattaaacgcaattgttttccactttcatctcataactgttgattgtgtttgatcagg

SEQ ID NO: 16182 - DNA, 498 bp, Glycine max
  Intron number 1 from transcript Glyma04g35830.1 (locus Gly ma04g35830) derived from phytozome v7.0 (chr-ID Gm04; pos 42309699 to 42310196 reverse strand)
aggacttggctgtgccacctataactggactgttggttaagaaaccatacttaattccttatgcttgttatcagttaattatcacttatgggatttggccccttttaattgctgatgtgttgttaatgaattatgtcatgtgtctttggaatgaaaaaagttaagtagagtcttttgactatataatgtagtataaagtagaagaacaattatgtttccagctttacttaatattttatgccacaaatgtgactagcaagatctctttcccattttgagttggataattaatgcatctcaatgattaactagtttttgtttgcatctttgtcacatggaaaaacaagtttacaaagtcatggggataagggaaagtagatatattgcttgaactttctgtccgactgaattgagattcatataaatttgttcttcattgaataccattttaatatatcacagtattatatttttcagatactactcccccaacagcag

SEQ ID NO: 16183 - DNA, 515 bp, Glycine max
  Intron number 5 from transcript Glyma02g47740.4 (locus Gly ma02g47740) derived from phytozome v7.0 (chr-ID Gm02; pos 51236280 to 51236794 reverse strand)
ttggctcgattgcccccttaaaggaggagaaagaggttcttttgcacgatatctcttccgtgtgtatttgtgttgatcaagttgtttgattgtttgttttgtgcaattcaacttttctccctccccagcacatatcaattacttgaattgaagggctcctagaaaacttgataatataacaagtctgaaggaaaacttgtaaaccgtcttaattatatgctctgattatttctaccttcatttatcatccaaaggtgaagtgaaaaaattgtgtgaaaatttgcatttcattagaaaatagtgagattagtatgtgttgttaacttctgatgtgtattccataaaaaaatttctcaagtttgagtaactttctaggtttggactacctgaaatcaccaccattgcaatttgtgcttaaaattttacttgatacctgcttgatatatttttgctttatcttattagcttaaaataattttaatatgatcacagggaacttcatagctgttggttca

SEQ ID NO: 16184 - DNA, 451 bp, Glycine max
  Intron number 1 from transcript Glyma04g03210.1 (locus Gly ma04g03210) derived from phytozome v7.0 (chr-ID Gm04; pos 2349021 to 2349471 reverse strand)
acagtcataataaagttttatttttccaaataaaggtaatctttcctcttacgttctttctacatttgtaaatatgctccctttcttttcttttctttttattaattattaattaattactctcgagcgtgtctcttcctttaatcctgtaattcttaacacaacgttctgtttggtacagatctctacacggtctcaactcaagattaattaaataaaattttggatatggatctaggttgttaatttggtaggttagtcataaagcagctttcaagtgtctcttaattaattgtgttaagaaaaaaaaattattaataatgatacgccaagaccactgtatgttttatgattctgttcactcaccactcaacagtgaacactgaaagtttctcttaattctgatgattggttgaaaatctcggacttgttggttttgattttgtaggga

SEQ ID NO: 16185 - DNA, 845 bp, Glycine max
  Intron number 1 from transcript Glyma04g02810.1 (locus Gly ma04g02810) derived from phytozome v7.0 (chr-ID Gm04; pos 2021577 to 2022421 reverse strand)
acgaggagctctcccaaatcgcactccctaccaaagtgcgtttccattttctctttttcaattttatttgttttgcctgtaatattgaaagttgaaaagcttaattgattttgattatgtgatacttcacaatttaggtggtgtgttcagtaccaacatagtgcggtatggttaacagataactatgttccttaagcatgtgattaggagtttgaaccatatatgtctgtgtatatggaagaccatttgtatagagagatcggtccgttaaatagatctcttgacctcgaaagattagaatttggttcttgagtggtggataacttggattcacacgaaaaaaaagatggtgtgcagagttttgttatgctggtgaattaaatttaagtttgtatgattttgaagatgggtgtgtgcatcataagttgcagggtctagtaattggagaatttggtggattcatgagttgtgctatagtcaatgtgtggtatttttgtgggtgatacaataggcttaattctacgctttatagtaattgcattgcagaatgcagatagatgaatagtaaatacattgtctgtgttgtttgatggatttccttttttatgaagctagtacttatgcctgtactgctacaatttatatgtgtggttttacaatttctgtttcaataactcggtgatatggtttcatgttgaatctgagtttggttttaattaaccgtcttcaatactcatttgctttgtgaaatatggcctgtagctatagcagttttaattaatttgtgagttttttgtgcctctctttcagccaaggaaagcggaagacaagaagcaatagctaaa

SEQ ID NO: 16186 - DNA, 957 bp, Glycine max
  Intron number 2 from transcript Glyma04g41210.2 (locus Gly ma04g41210) derived from phytozome v7.0 (chr-ID Gm04; pos 47096646 to 47097602)
cttctgctgcatttcccgttactgctgctacccaggttcaaactgtgcttcaattttaaatgtattttcttggatatcttatttttcttgcatattttgatctatggaagttcaacaaagaatcatataattaatagaaagaaactgttgggattgatatgccttgaattcccaatagttactgttaagctcccatttgcattttgctctcagaagctaatatcaatggatgagttttctttgctgagggattagcaaacagaagttaaaggttggaaagaatgaagtggtttctctctcaatgtatcttttgattcttttcatgctaacatgatataatcaacatatcggttgttacagctgataagttgatttttctttggttaccctcttaccataggaagaaatgatggatagcttgtggttttgaggatgtatgatgtagtggttaaaatttagttgaaggcaaccaatgtgttcaaattataacactcagcttttgacatgctaggaaacgtgaggtaaaccactactttgtttggagtattgttccctctatacgtggggtttgattaggaagcctattacaagtttggttaaaattagactatcttcagaaacatttctttcattattccgatggtcttttgaataaatcccaagagcctcacattgatgtccttcacaactttgcaggatttgaattgccttggtgaatcacaaggcatatattcataatatattattcttttcttctctggtaaaaataatttttttcaaattattcagttttagtagcgtgtcgtgtcagttataaatgttaatgaaagtttaaatttgtgaaagacaaatgtgatttacacatctcttcaaaagaagcagttgaggagagaatgcaacacccaatttgttttccttgcagagacttcccccattgtcaactgagccccatcgctg

SEQ ID NO: 16187 - DNA, 1002 bp, Glycine max
  Intron number 1 from transcript Glyma04g14710.3 (locus Gly ma04g14710) derived from phytozome v7.0 (chr-ID Gm04; pos 14913352 to 14914353 reverse strand)
caatcaaagaccctcactctcagcccactcttcacgtaagtgaaacagtaagtgtcaccaacacatatgtgctctgcatcttgaattgctaatgctatttttcttagagggtggataaggataatttgtatgccactgtgaattgggattcatttccctgtgtattgtctcaaaccaaggaaaaagttaaaattaaaatttaattttattgagttttgattttgttcttacatggttgggtcagataaactaaactaatttgtgctggtctattggtttgtctccctgtgaccttccaagtctaatttgcacctggttatcagaataataggccaatgagattgagtgagttagtggtgccgatcaatctggtggtaacagtgatatcaatctgaatgcctttttttagtacaaatctagttcaatgtctatgccataagaatgtacctcaataaattaaagttttaaggttattgtggaatatgttcactatttctcatgcaattcttgcttgcttattgctataagttgcgtgctatcattcttcattgagtacaatgacagttttgaatttataatacctatgtttggtggattttaatttttattagattagattcataaccagcaactattttactttataatatttatgttcatgatcagaaaaacttttctactttataatatttatattccctatctgagatcaaagttaattgctggatctgtgtatctgtttatagggtgcttggtattagcagtgtttctccttccaccttccctttttataatgctccaattcattttgtgttctgtttcataggtttagtcttgcatattaatttgtcatgcattttcaggaaacaagatcaggctaggagacaaatagcttgaaatcttttattgctagctactgttcttgtgctttaattcaattggtcttactttcccttaggatctgtaattacaagaagcttagatttgacacaagcaggcaca

SEQ ID NO: 16188 - DNA, 1017 bp, Glycine max
  Intron number 1 from transcript Glyma02g01940.1 (locus Gly ma02g01940) derived from phytozome v7.0 (chr-ID Gm02; pos 1421825 to 1422841 reverse strand)
aaggtaatcaataatctataattatataaattttgtccagacatcgaacacctatcatcatttcatgccaactttttcaccgcgtatgttctctctcttcctttgcatttaacagtttgttttatgaaaattaaaatatcgagcttcgttttatactacagtaataataagttgttgtcacctgtcattgtatggtacattagaggttccctgttttttcccacctattatatgagtggagaaataatataacaaaaaaaagttatattttattttgtgaaactcacacttcttatattttattttaatttaatttttttatatttcttttgtctaaaccaaacatattcttaatgcatgtttggatattcgttgtaaacggacagttgaaaatcagacacattggtaacaagtttatcatattagaaacggttaaaacaacaacaacaaaatatcattttatagtaagtttatcataatagaaacagttaaaacaacaagaaaaataatcttatggccattaaacaaactcaactcaaacataatcctttggttgtttatataatgctataagttctacctccatcatttcttttaaaattttaatcataagctttcgtagaaaaaaatataattttacaatttatccatataattataaatctaaaattttgtttatttttgtcctgaatgttttctgaatttgttcctaattaaacccattataagtacttatgtgatatttttttaataagaatattttttttatttatcaacataaaaatgaaaaagaaaattgatttagggtttcaaatgtaaaatttatcttatttttgtaactacaaaagtttacctgaaaaatatgagtgctctaaaggagtagtatttacgaaaatggaccgcgtgacataatgtcaaacccaatattgtcaacaaggcccagtaaacggtcaaattaaaataccttgcgctgcaagcacaggaaaaaagcaaaaagaagcaaaacctagggtttct

SEQ ID NO: 16189 - DNA, 932 bp, Glycine max
  Intron number 1 from transcript Glyma02g41810.1 (locus Gly ma02g41810) derived from phytozome v7.0 (chr-ID Gm02; pos 46911610 to 46912541)
cggcggtggctgtggattcgctattgctatatcaggtgccttacctttttcaccggtctttttgattttgttgcggtttttgttttcagtttaagaattggaggctttgtttgacctgtggtctggtccctttgatttcttcaaaaatggtttggatttgaaaattaagcaggtttaggggaagttcttgagctccgttgaagcagaaaatcaactcagctcagcagcttcagcttcattctctgattttattctcattggagttttttttttgtatcaattttcggtcaaaattgaccttactccctatatttgacaaattaatgattttggtgttcgtattattgataataattaatgaatttcatctctcatcctactattctaagttttaaagaaagatgaaatttatatattgggattaagaccaattttgaccgaaaattgtagcatctaaatcacattttacccaaggtttttagggggctctttctcttaagttgtgtctgactgaacagtattttttttaataatttgaatttgattaaataaagtattgcttttgaactttgatggggtcgtattttgttaggatggttaaatactcaaatccaaggagatgagtttgagaggttgtttggaattttgcgaggttttcactactgtttcactttgagactactttttgccaatctcttgcccctcattttcatggaatgcattgtgtacttccttgtgttgatgttgttgtaaataatttaaatgattgtatttgggaatcatgccatgttttttactttcaatgctcgtgtttacatctttgcatccctctatctctctattagctgcttttcttttaccattttatttgtataaagggttcatcattgctcacgtgttcgtccttaatcagaatcagggaagctcatcac

SEQ ID NO: 16190 - DNA, 593 bp, Glycine max
  Intron number 2 from transcript Glyma01g44950.1 (locus Gly ma01g44950) derived from phytozome v7.0 (chr-ID Gm01; pos 55417457 to 55418049 reverse strand)
gttctttgccttgctcattggcatttgtacgtccttcaatttgatcgcagttttgaaagtgttgtttctttgccaacgtgccttttggtttcaactttttgcggtgctttagttagtttttcttaatggcgaactatattttctttctttagctagtgtctttaatatgcaggcaagcattagggaaagttgtataattttgttattcatttaggttcaacaataagatgtcaactcaaagcttgagtttgaacttgttttaaagctcaactgagtgctgaaattttgttatttgtgtgaaaatgtcttatacaagtggtcctagaattctttcgcagaaaattattttaattatttattgagactagtttcctttactacaggctacagcatctactgtttattgtagcacacatataagactaagttaaccaagaatttggtgatttttggtgttgaatcttccaattttaccaagcacaccttcagtctggttcagactatcctcataccactttcagaaatttgtttttatgcatatttttttattggttgcaggtacaggacttgctgctgttttcatcaatattgct

SEQ ID NO: 16191 - DNA, 879 bp, Glycine max
  Intron number 1 from transcript Glyma04g35950.1 (locus Gly ma04g35950) derived from phytozome v7.0 (chr-ID Gm04; pos 42470731 to 42471609)
tctaaccctgataaggatcaatcctctacggaaccgtgcgtttctctcactctcttacacttattattgtttattttggtttcctttatctttttttttgtgaaacataacctatgtcttttactaagaagaattgtagttatctgtattcttcactatgtatgccatcatctttaatggtttgagtgattctctaactacgttttctttttattatatatagcacgtcatttgaaatcaattaattgaagtatgtttttctcgttgacacacacgtacggcaaagaaataagatttttctttgatcttgcagcatgaagttgctgcggttagttgtagctgaatggtgttagttgtgtctctctggttttttgcttctttttttatctgtgtcagtgtttaattacccagctgatatgttcctttcaaacaattaaatattatggtggtgactgaagaatagtttggaacaaggattgtatacagttttaaaccgaagattcgattgtgtaaagatataagagagttgctatggtatcttataaaggattttggtgtggccaatggttgaatgagtttgattcaattcattgcaagcatatgcgatagctgaattgttttatatttaagatgtatatcgttgatattattctgctggtgaatgatttagcagtgcagaagcacttttccatgtcatgatagtttatatgcatgctagctatacacatcaatatagtaagttgtcaaagtagtgttggtttggtttaaaattacatttgcaaattttaagtgataaccaactagggtctctgattatgctgttgaaaatgtatgcttggggcaggaaaagtgaaaagaaggattattccacagcaatat

SEQ ID NO: 16192 - DNA, 694 bp, Glycine max
  Intron number 2 from transcript Glyma04g16720.1 (locus Gly ma04g16720) derived from phytozome v7.0 (chr-ID Gm04; pos 17843336 to 17844029 reverse strand)
gcaactcagaatcaaaggattgcctggatatagaggtgacaatttccttctgtcaatctaagatatcatttggcttggaagataaattttttttacttaccatgatcaatcattagcagattgtttgcacacacattttgaactcaaaatattaaagtctaggctccaatatccttaattgtcacatgtaagccaatatagtcaccagaggatctaggttatttgcgtgctattgtttgaaaggaacttgtgtggttgattaggtttttttttctcatgccttatcattgtaacattatatttctggcaccaacttttctaaatttaaagaaattgcttcattatctagtgttcaacctaacttgtttttgtgaactctcaaaaatccatttgaacttctgtgtttgcaagaatccttttgatattacatattttcatgcttgcagaaaccactttgtccactaatttctgcaagaatccttttgatattacatattttcatgcttgcagaaaccactttgtccactaatttcttcttttatttaatcttaaccacataaaataagcattaaggtcatcttttatttaatccttgccacaaatagatcttcttctttcaaggcttacagtgtaatgtaatctatttatttttctttaaggcaccactggccaaggtcttggactcatttgagca

SEQ ID NO: 16193 - DNA, 719 bp, Glycine max
  Intron number 3 from transcript Glyma04g12320.1 (locus Gly ma04g12320) derived from phytozome v7.0 (chr-ID Gm04; pos 11341303 to 11342021)
acaacttagtggccaaaccccagtgttttccaaaggttagttctcgataagtttctaaatgggtagttcagtgatgctggtaatgggcatagatctcaaatctgtgttcattggaactttttgttgatcatttttgtgcttgtatcattttcttaaaatatagatttccggtgaagtaactttgaagaattcccaaggtttgggtagtttattttagggtttttaatggaaagtttgttttgtttttttaattgcattgtcaagactcaaaggtctgataatagggtggaagttgtagtttgagttttgaaatttctgttaattataattattaagtgtggaccttttctgtggttataatcacagtagtggtgggcttgatgaaagttcatttaaatgccaatttttcttcagaaactcgattcagaggttcatggaagacctgaaaatgaggattctgatatgtcttgattgtatagcttttttcctgcttaatttaatttaaaccttgtgtgcaagtccagaagacagaaagcatagtctattgctctgtttgaagaattttaaatagtactacttgctttaccagtagtttatattaatgtttattgtatgttggatatatttggctgtttttcactgttgcttggtaagaaatgttttttctccgcctggttttgacagcaaggtacactgttcgttcctttgggattagaaga

SEQ ID NO: 16194 - DNA, 822 bp, Glycine max
  Intron number 1 from transcript Glyma02g17720.1 (locus Gly ma02g17720) derived from phytozome v7.0 (chr-ID Gm02; pos 15933054 to 15933875 reverse strand)
acaactaacaacatcaaagctttgatattggtaagttgagctttaaagattaatttagaataaattttcaaatattaagtttttttatcaactacaaaattataaatcaaagttctataattaattatttccaaaattttaatatgaatatatataatgacaaacaaaatcattcaattatcttttaacatagttaatataaaataagatttgaataattttaatttttaaaaactatttttcaataaaaacaatagttacatgcaagtctataaattttcatatacacttttttgaaaagtatttttagtcaaatataattctcttttatttatatttccttaaaataaatgaagatctacaatattatacgatcttcttccaaagttctcagttgaggaattaatataattaaaactatatttttgctaataaaaatagaaatacaaaatatattctaacaactgaaattgataattaagtgtttatttaaaaaggaaatttgttttaggccttgcagttgtcactcaccacttgtcatgttccgtttctttccgacactgatattccagtttttaaagcatgttttttttcacactaacatctatttttatagcattaatctctttaatcctctcatttgtattaattactttatcatatatttttctcctttttcttcttatctccttttctattcaaaaagttgtccaattttgttatatacatataatttctcctttcattttaccaaacttcatataaaaatattttatttttttactaggacatatttgctgctggaaccgatacttcagcatc

SEQ ID NO: 16195 - DNA, 213 bp, Glycine max
  Intron number 1 from transcript Glyma03g41710.1 (locus Gly ma03g41710) derived from phytozome v7.0 (chr-ID Gm03; pos 47118568 to 47118780)
tggtggctgtggtgccgttcttcgaggtaccctcttttcttctcttgttcttgtcgcattgtttttgtttttgacttttgattattacgagctttcgaaatttctagcatttcttccatcaaataatgacattcttatttgacaaaatttgcatttccactttttacttcattgctaggaaacgatctcgtacatttaattaatttttatttg

SEQ ID NO: 16196 - DNA, 747 bp, Glycine max
  Intron number 3 from transcript Glyma03g28320.1 (locus Gly ma03g28320) derived from phytozome v7.0 (chr-ID Gm03; pos 36206819 to 36207565 reverse strand)
atttcgtgttgaagataccattaatcttagcagaagtatgttgctcatgttttgatctataatagttggactccttttttttgtgtggtatttattgtttctgtattatgaatttaatatcatgtctcatactcccactccttgtattgttgtgcttgccaattttgtgtatttaaaacagagtcatatcctttccgaatgattgcacttgtttgtaacttgctcctaacatacgccttccattctatttctatcgtttgggggtaatatctctatttctatgaaagacgctactcactttatgtagtattctgcgtgcactctatcaaccagtactcatgattcttttgtttggcttctatgccaaattgaattgttataccaatagaggaataatatgatattctttccagttcttcccataaactactggtataaatgcttttaaatgagccttcatcttatttctaccttaaagcctttattttccacattttcccgaagaaaggtgtgtttcctctagtatgacccttcaaaagcaagtagaagatgtaggattgttgttggaataaaataactagactttaaaccactaatgtttgattttcctcaggaaactgtttagtgtttatataaaaaactgaataaatactgataggaatgcatgatattagaattgtcatccccatgtttgcaccttataaacctctatttactcttttgtttttatattatctttcagatccg

SEQ ID NO: 16197 - DNA, 890 bp, Glycine max
  Intron number 1 from transcript Glyma02g41890.1 (locus Gly ma02g41890) derived from phytozome v7.0 (chr-ID Gm02; pos 46969864 to 46970753 reverse strand)
tttgcttgaactcgaagcccccatcaagatttgtggtaccccttttgctttcttctcctttactcccctcaatttgctccctcttttgtgtttagggtttagaaatgcttctgggtgtcctttgtttgttgcaagttcgaaccttttggtttttgggtgtcatgggttgattcaaaggaaatgtgggttacactttttgttgttagggcatgtgaatttgtttgctagcttttctgtgtgagccattcatgtttgatatgttgtgctggctgctgcctagggttttagcagcatcctcttcctttactcgggcttgggaccggctatgaaaccatactgggagtttggtttttaatcgaacacaatggcattgaacaatggctgagctcctttgtgggataatattgggaaaaatccaagtcttacattgactagagatagatagactttgatgctgttttagaatttgggtttgggtttaactcgatcctgaaagctagcgagtgaaatggggattgctctccgtttaaatacattttttggtcatattgtttgtcaatatgggatcttcaactgataagactttgttgttgttgcttgttgaattgttgtttgttagcttttgatatattgacaagttttacattgcatgctgagggcctcacagactaacacaacatttctctttatcaaatcatgagcaaagtttggtctttaactgaacaacatggtgttgaggaatccatgtggccgacctcacttagtgggataagatttttgttattgttttaatgttgttgaattgtttgttagcttttctatttaacattggctgtagtgttattttatggcatggttgagatctctctttgctttttcaggtgacattc

SEQ ID NO: 16198 - DNA, 261 bp, Glycine max
  Intron number 2 from transcript Glyma01g09430.1 (locus Gly ma01g09430) derived from phytozome v7.0 (chr-ID Gm01; pos 11509078 to 11509338)
ctggacgttttctagcagatcccaacggtcaaaatgtataattatgtaccagggacctccagtaaaattttcaagtcgatccaacggtgaaggaattggaacgaagagaatgttactggggtatttgagtaagaaaagctgtggtattggtttgtgttttgggcagagttctctgcccctgctctgttttcttgggttttgatagttcatgatgtttggatgttgaaattgcttggatgttgtggaagcttggggggattg

SEQ ID NO: 16199 - DNA, 720 bp, Glycine max
  Intron number 1 from transcript Glyma01g39860.1 (locus Gly ma01g39860) derived from phytozome v7.0 (chr-ID Gm01; pos 51706968 to 51707687 reverse strand)
tttcatcaccaaccacctcttctccttccttcgcagtaagatgcgaaaaaaaaaatcaattttacattattatatacagtagtagctgtattatccagtatgaagaaaaattactattagatagtctctgacaattatatgttcatgatcctggttaacttctgtgtaacacatatttaagtttttcaaactaagataaaaagttttttatattgttttcaaaaaaatatgatgggaaatacaatcaggcatcctggaataatagtgtggccagttagagaattagctaccctatcaaagctatgagagtcaaattcgctaaccacctccttacaaaccaaactttaaaagtttgataaccgatgaaggaatagcctacactttatttggtgctgtatggatattagtctgaatgatgatggtttaggaccatcttttttttttttccataacagagattattaggtgatctaatatcatgatttagactaattttcacattttaagtattaattgttttagcaattaaaattttttaaataagtgttacataaaaattagttaggaccatatgtctagagttacctaataatttcccactcgcaacaatatatatgttttgatcgtttcattggtttttaaattttgacataaaaatgacgaaactgattattcagagtggcagaattcacaacagaggagggtggtttgtcggaggaa

SEQ ID NO: 16200 - DNA, 564 bp, Glycine max
  Intron number 1 from transcript Glyma05g04340.2 (locus Gly ma05g04340) derived from phytozome v7.0 (chr-ID Gm05; pos 3522715 to 3523278)
ccgtgatagcccagtgaggtaatttcgttttcaagcttttctgtgtaaacttaatttgtcttctcaaggtgggctctcttccccacttgtgcttctcaagggacatgcttaataataatcttcctcgccttctgctagttgatagttgctgttgctgctatgtttctttgtactccaaacattgtcttgtaaatcaaaattaaattaaaaaatctcatttgttatacgtcattggtatttcaggttctgttataaattctatttatatatatatatatatatatatatatatatatatatattaaaatagaaaaaaagttatataatgattgtgtaaattttttgatatagttattgaattatatacgtaatataccttttaaaataattatattaaaaaattatataaaagataatttattattaaatgataatataaaattatatatgccattaaatttttttttttcagtagaaaataaaattggatttaatagatgaataatgatacttattcattgttaagcagatctcgtcattcagggagagcaagtcagacgatag

SEQ ID NO: 16201 - DNA, 644 bp, Glycine max
  Intron number 1 from transcript Glyma02g46450.3 (locus Gly ma02g46450) derived from phytozome v7.0 (chr-ID Gm02; pos 50399181 to 50399824)
tctcaagttgttgtttcactctgcatttctttcaagtttcgttcttctctttagcctgaccgtgagcatttccttttttttttttttttgtggatcatctcattttcttgctacttgttcctgatcattgggttattttagcttccatttcgtagagtcatttcattctgctgtgatcgtttgcttaattagctttaccctgcattggattatgattgtatcatatcatcatatgtaatgaacataatctaacttgtttggagattttctttgcagatgcaattaaaaaacttcttactttttaacaataattattaataataataatataattattattattaattattaatattaagaagaaaaaaattggcttatcttttcaaagatccttatttgaattcgttagtttaacttattaggatgggtaattttgggttaccggaattcaacatttacccacaatggattgcaggtttgcatttattatgctttaattgcatttgcattgtcttataacagatgtcttctactttcttgatcttcatagaagagatgtttctctattcgtttggtggaaggagaaaaatttttcatgtcatttttgttttttggggtgcagggtaagtgtcgctgggacttca

SEQ ID NO: 16202 - DNA, 573 bp, Glycine max
  Intron number 1 from transcript Glyma03g06360.1 (locus Gly ma03g06360) derived from phytozome v7.0 (chr-ID Gm03; pos 6646432 to 6647004 reverse strand)
tgacttacccaggtctttctccctatcctatgacaaattttaaggatgtgtttaaaaaatgagattgagaagaagaaaagggaggaaagaaattattcttaaattaagaaagttatataatattaatgtttacaaaaaataaacaaacgattaagagatgattgtcctaatctatcattttatttcttctattttaaaaattatttattggaaacgaaacgaatttgtccttctttctttttcctttcaaaacctaataacttccaaatacaccctaacaatgttgtttaccagtgtcataagggtacatagttaaggaatcaacaaaagaaaattatatttgttttagaaatcatggtgaaaatgtattaataacaattttcatgtaaaatttctatttctatgactgattaattaaatactgttctaataaggatagttgtaagcatttttcttttttaaagactcattcttttgtatctagctagatgtatggcattcttcaatattttgattttggtaatgttttttgagctttgtgaaatgtggctccttctttgttaataaggttca

SEQ ID NO: 16203 - DNA, 805 bp, Glycine max
  Intron number 3 from transcript Glyma01g42730.2 (locus Gly ma01g42730) derived from phytozome v7.0 (chr-ID Gm01; pos 53932057 to 53932861)
cccctgagttgcagaaagatttgaagttattaaaggtgcttttgaattttaacatctctacctttctttcttcaaggttttttgaatatggtcaaatatgatgttttgtgaaagtagcttggattgtgtaataacatacacatacataattatattcaaaatgaaaagaattaatgaaagtgaaaagcagcaaaagtagatgattctgctttctccaagtgatatggtaatggaggaacatttaggatttaaatttttattactgttttggaatgaaaattttaggtcctttttatgttttacttttgcttttataagaaaccttctcgttgtctgggacttggattatgtaggatgtaaatttagattcttgcttgttgctaatgctgtatgtttcaatgattagtagtatttgctgcttcctttaccccatttaaaaccaattaataattgtcagccctgattcgtaattatatcatgttacagtgttaccttagaactcttctggaaatttccttgatgtggtgaaataagatgcaatgatgtatattattgtataaaatttcaagttaaactctcatgcaatggctatgttcatttgaggatgcagtgacaaatgttgagtcggattaaaaacatcagaaaaaaaaagtcttgcgcacatgcagagatttgaatgtatctctaaatttgtgttaagctgctagttttgttttgtgcaccaattcttatccttggacattaacaagcctgtacgttgatggttacagttgagggctgcccttgatccaaagcggcactacaa

SEQ ID NO: 16204 - DNA, 872 bp, Glycine max
  Intron number 2 from transcript Glyma04g42790.1 (locus Gly ma04g42790) derived from phytozome v7.0 (chr-ID Gm04; pos 48448696 to 48449567)
caagattttgctagcactcagagcttatcatttgggttgtcttctctgccttttattcctctacttataatttttaccatatagttgtgtttactttttttatgactgcagtaaatagttctttgtagtttgtgttgttggtttgtctaattttaacttggctgtcaaattgatattctttgagttactttgttttatgtggtgattgccttagctatagtggccatcaatataattcattataattggacttgaaagcttcagaattttttagtttgaatatgctccccatgtttcctgttcagtgttgcttattttcagcgttctgcacttattcgggtgttccctcttcctataccagtccattggtcaattcagaagtttagtttaggtgataaaatttgggtttattctctattctgcaaggtgttcggtgtcttgctaatcttggagtaattttgtgaaataagctttgcagattttgacacattttttagtataatttccccgctgaatgctagataactaggatagttatattgtaaacagtttcaccccctgacacaaatattaacaaataaaacattatatttgttcattttaattttcagttgtgatggttctgattttcaaaaacctcggttattttattgttatattcttttcttttcttgctttcctttttgtcttttgcttgaatgtgctgatgtgcatttgtttgtaagctaattgatgaaagtgtaaccagagttgaacatttcctttgggtttttgttgttctgaaagtgtactggaactgcaagttttgccttaactgactatctaaaactctctgttcagtgtcaagtcctctgtaaaacttgtattgttgg

SEQ ID NO: 16205 - DNA, 504 bp, Glycine max
  Intron number 1 from transcript Glyma03g23480.1 (locus Gly ma03g23480) derived from phytozome v7.0 (chr-ID Gm03; pos 30133818 to 30134321 reverse strand)
agttttgcaattgcttcagaaagacgaagaagagggttcttcctcaaagaaagaagacactaactctttagatactgaagatgtattctaccaaaatgaggataactgttttggcatttgtttagatgatgattaattcaaaaataccatttctatagtaatagttttgatcatgtaaattgtattgtagttacagttcaattttatgtctataaaaagagtcctcaattccattgtgagacaccctttcagatagcaagagtcggatagattgtagagagagaagctcttggaaacactctttgtatgcttttctttcattaataaaatttcaagttctttcttccatttctctctccctccttactgattctatgcggctctgccgccgctttagtttcttcttttcctccccctaacagatctagtgcggccctactgccgtttttgttttcttttgatgttttagatttaaatttttgcatatttatatttactattttt

SEQ ID NO: 16206 - DNA, 878 bp, Glycine max
  Intron number 1 from transcript Glyma01g43930.1 (locus Gly ma01g43930) derived from phytozome v7.0 (chr-ID Gm01; pos 54781048 to 54781925)
tgatttcctttggcccaaactgcaggaacaatcaggtttgttctgcctctctattttatttatttattgagaggttgctaatatgctgacacatgatttctgatgccaaatgaaaccgtcgcttaagcgcttatgatttgttttcattgcggattgaagacttctgctgtagatagtgtcctactatgaagcacacatacttgcatttgtttagtgtatccaataccgatactcttgcaaacttcactagtatcaaagtcttgaaaaaaacacatgaaaatctaatacaacttacatttgaggcatagaaacattgtcctctgatgaaaacacaaatggaaactattttctttatggatgatgttcaagaatgaattaggttgatactattccgttttctagaaatagggagtgatttatgatgacaatgatttgttatttttattttgcttttagcaatgtccaaaattcatgttattaattagaatttgcagaattgttattatattctatgattttttatacatatctactttcatatttttacaagagtcaatatcatcatattgaataggtattgtatctgatgtgtcatatttgtgcatcatagatagagttggtttatgatgtgtttctttttccgttttgggtttttcatttgtaacaaaacaagcttgaggtggagtgtcaagttgtatcatcaaataatgctgagattaaatgtgatatgcaattgatggttctttgtatgcgtttgaaattttctgttgctgcttctgtcattacatgatagggttggtctgtgagttttcttattaacaaaattcatcatcttccatatgtcctatattaacaaaatttaacatgcaggtactgtg

SEQ ID NO: 16207 - DNA, 366 bp, Glycine max
  Intron number 1 from transcript Glyma03g33270.3 (locus Gly ma03g33270) derived from phytozome v7.0 (chr-ID Gm03; pos 40903677 to 40904042)
aaagggttcacgaagaaacaccaatccgctccgaggttgtaactcttcttatctatcccactttttttcttagatttcattctcttccctttcaattcgattcaccttttcacttttggttccgaatctctatcggattccgtctctgcatgcttattttcatcaatctcatcaattcccgattcaacaatttatcggtttgttagttttctccgaattaggtttcaaattgattgcatgcttgaaattcaattttttattcgttattgttatatgctcaaatgatacgattaataaggggtctctttgtctaattaaattttgaaatttctgttgtatgttttgcagagctagaagaaatcaacg

SEQ ID NO: 16208 - DNA, 790 bp, Glycine max
  Intron number 3 from transcript Glyma03g33270.3 (locus Gly ma03g33270) derived from phytozome v7.0 (chr-ID Gm03; pos 40905288 to 40906077)
aaggaagtcgtattattgtggaatttgccaagggggtaggaattacttcccttcatggtttacctttctattttattttattttttcagaattgcttatctcatttgttactagcgatcaaagggatattttccgttggtgctatattcttgggttaatgcatatgtactgtaaagagttcagtcttcacctgaaagtgcttgctttgtggacatatatttgcataattgttggatcttacagttacatatagggatttttctatataatctattaattgggcttttatatatcctttgtgtttctaaattctaattgcacaattagttctgttttcaatatatctcttctgattagattagtcattttctaatcaaaacaatcccttgaatactgattgaagagtacctagtttagtatttgataaatgctttgatttgttttttgactttgttgttgatttttgtattatcaacctaacctttttgtatttaagtaataagtaacaacaaagccaaaaaacaaaataaatttcagtaataagtacaaaatttaaattaggtatgcatagttgtatacctttttctaatttgtttttattactgttctaactgttttcctaaatacttcgtactcaatttcttctgaaccctgccatttctgatatcactgctattgttctttgacttgtttgaacaaattttgttagcttttgatttcttgttaattttattttctcattggatctctaattaatcagggtcctcgtggttcccgggaccgggaatat

SEQ ID NO: 16209 - DNA, 969 bp, Glycine max
  Intron number 2 from transcript Glyma02g35040.1 (locus Gly ma02g35040) derived from phytozome v7.0 (chr-ID Gm02; pos 39794105 to 39795073 reverse strand)
ctcattcccaagttttaccaggattcactctacctgtaagtcaatgttcctttcattccttgtacatgtgtgtttgtattttggtggaagaggaaatctatctatctatctctatctctacctaaattgggcttctcctatatagtcattggaatttggaacttgggaaagaaatctttatatgcatgttatggcatgtaaacatcttaaataggggaatgacttatgttggagcacaactgaatctgatgatgggtcttaacatgttatatttgtttgatacttagaactggtatactatgtgttttatcatttgcaatgtttttatattgatatataggaattggagggggaacttgatatggttgatcattgatgtgaattttccagtgaatattcttgtaaactagctccttaaaccaatatagtagaaatgacaatttcattgtgttgaaattttatttatttctaatgttgctactattttttgaattgcaactggcttttaatccagcaagccagcaggaaccattgtttcatcaagaaaatgtttacaattttcataaatgctgtactgacaaattcctagttcactgtcctgtaatttatctccttaagcacacagctctgttttctccgaatgtcatgagcatgtctgcttacatgtcatctttcccttggagaggtttaaaggttggattgaatgtatcatgtccactgctctttttttgtttccttcatttttatcagcttttaagagacttgtactatttcatggcataccaactacctaattacacggggctttgttgagaaggtgtttaggtttctaattaaagcgttgtattatatttttaagagtgtctaattatacttgatatcgtttcttgttcaattcaaatttatttttatgttcattgtcatagctctcaccatgtattgtatttgcaggtttcatactctttgaag

SEQ ID NO: 16210 - DNA, 763 bp, Glycine max
  Intron number 1 from transcript Glyma01g07120.2 (locus Gly ma01g07120) derived from phytozome v7.0 (chr-ID Gm01; pos 7699279 to 7700041 reverse strand)
gcttccaaggtagctgcaattcgttcagttctctgccattcaatgtgtatctccatgcttgactttgtgaagatgaatcctttttttttccccctattatcccatttgggtacttcatggttaataagaaaactgaattttaactcaattatatatacttgtctttagctggtcacccctttcttcatatcagtgaagaggatcaggtgacttattaaggtttcattgacttatcatggattctatgataatcaatctctattttcagttcctttccatgtgtttctgtgtagatttttttggttcatcacagatatcctcttctggaggcaatcctgtctcatgcatttgtttgtcaacactaaatgtaaacacctttcacagtaaggattgaaccttattcaccacgtcatgggaactagtccctttcaccagatctaacccttattggttgtgtttgtgtgtagataatgtttctccttttcacccctatccaatgagttttccattattaaaagtaatttataagcagtttatatgcagttgtgtacacttttgtctttcttttggattttgattttgtatctgtttcaagagattcacctcctcctttatcatgttgcatgaatttctcaccccttttgtgtggacaaatttttatggggtccttaattatagctcataattttgtaattttctgaagtatgactaattcataatgctttcaggagttctctggtctttgttccttggtttcttcact

SEQ ID NO: 16211 - DNA, 628 bp, Glycine max
  Intron number 1 from transcript Glyma02g17490.1 (locus Gly ma02g17490) derived from phytozome v7.0 (chr-ID Gm02; pos 15749430 to 15750057 reverse strand)
aactcctagcatctgggacacctttgcctacgctggttggtggttaccaattataggctttgataattttggaaaatttcttaatttcctcaaagaaatagatatttaacgtgacattttatgtgttaattcttttttaaaaaaatattaattataaaaaggacctagcatcccgtctaatttgatttttataaattggacttgaaggaggatagtatattaaaaaggataaattgttaaaaggatctaaataaagataagagtaattataaaaaggacctagcatcccgtctaatttgtttttggctagttggaaattgtgcgtgaaatgcgcatccaaataagagaatattataaatgtctaattgagaaagtgaggagagaaaattttattttctaacaattatatttcttctgaaatctattaaaaaatatgattaaatatgttttcaatttctataaaatgagtgaattttagttttggtcttagtaaaaaaaattctttaattttcattcctccaaaatcttaaattactactttttgttcgtagcactgatgcatgtcatgtttactgatcatttacttaggaaacgtgggtctcatgcaattatttttaatgaacaggat

SEQ ID NO: 16212 - DNA, 435 bp, Glycine max
  Intron number 2 from transcript Glyma03g31590.1 (locus Gly ma03g31590) derived from phytozome v7.0 (chr-ID Gm03; pos 39463340 to 39463774 reverse strand)
agttatcgagttttgtaagaatcttgcctctcatctcaaagcctgatcagttttattttgttttatttgaattgcttctacagctcagcctgttgtttggtttccgagaaagaatatcagttatagacagaatggaatatagtggaacatttctttcttcttcttcttcttcttctttttcttttttttgacgataaattttgatttatctgtgagttgaaaagtttgccgaccgataatttactggatcttcttgtgctttcaataattttagctttggataaaatgatttttcatttttatttattttaactggaagtttgttttatgcttaatcggctgccaattgaaattctacagcttctgatgctctgttgtgtaattgggattgactttttgtttgtttcttgcagacgcataggacagaccctttaa

SEQ ID NO: 16213 - DNA, 717 bp, Glycine max
  Intron number 1 from transcript Glyma04g43500.3 (locus Gly ma04g43500) derived from phytozome v7.0 (chr-ID Gm04; pos 49065512 to 49066228 reverse strand)
ccacccacgacgatctcaccgattccaaatctcgcgtatgctctctctctgtttcatcaattcatttttttctcttcccctcccctttttttgtgttaatttctgcgccgtttcatgtcgatgcgaaattagggtttttctgcctttccctcttttcctaagctggggtttcgggtcagggtttttctgtttcccctgttttgaatcttaacaccattgctgcgtgtaaaactgactagagctgtgtaggttatggtgagatttggggtgggattttgttttctgtttcccccctttcttgatttaactgtgtaattagagatgctttggttctgataaagtctgtgctttgtgtcctatgctgctgtttctttttcttgccaatctgtcactaaaagcttatgctttatcatatgattttatctggcgttctcacatcttccttttaaatataatataaaatgtaaattattaaaaattgggaacattgggtttagctgcttttcaggtattttatgtacgattgtgatgtattctttgcagattggtttgtgattgtggcttgtgtggtgcctgttgtttggttcttgtatgctgattgtgaagcatattcttgtttttcaccttacttttgtatgcatcattgctattatcaagtttgaaagataaggacttgtttactccctgttaatcttttttttatcatattttggcagc

SEQ ID NO: 16214 - DNA, 911 bp, Glycine max
  Intron number 1 from transcript Glyma02g17150.1 (locus Gly ma02g17150) derived from phytozome v7.0 (chr-ID Gm02; pos 15455151 to 15456061 reverse strand)
gcttcaatccactcttacaggtatccactttctttctcttattattggataaaaaaaaattgttatatacttatttttgtttgagaattaaaccagcaaaaaataggcacacaaatttgacaaacaagtgttaatacttgattagttgaacagtaagttaaaaaaaaaattcaagattttgctgaaatcacgctgtttgtgctgctttgaaggttttctataattgaatggttagtgcaaattagatgcacgaaaagtccattctcttggtaggttgtgtccttgtttttcaaactcattgaatttgggaaatggataataaatggccataacttaaataatcaccaactagtctcatgggtgctgcgatggattgatttttagaggtaacgtttttcatggctatcatgcactcagtgatgtttttgattgcatgaagattgatggtgtgtcatgtgttacccaccaacccttataatgagggcataatatttgaatgattcagtaagggtccccaatcattctctctggtcctttgttattttactttcgcgatttgttaatatttatttaggcctataattcattctttgtggccaatgaagtttcggacccacatgtgtgtctctagataaacaaaaaattacttgagaaaacgggcccttttcaaaagaagatacgagtgcttaaataaagaaaagaggaacgtaagtactactagtatagaaaaatcaaaaggtttttagcctttgttattatttcatgatgagtgttacttttcaaaacttttttctcttactgccttttgactttggccttatgcatttgttaatatgtagtttaataatggaacgtgatttcattgctgtaaaaggttaataagtgatgtgttttttttatggcagagctaa

SEQ ID NO: 16215 - DNA, 956 bp, Glycine max
  Intron number 2 from transcript Glyma0169s00210.1 (locus G lyma0169s00210) derived from phytozome v7.0 (chr-ID scaffo ld_169; pos 12721 to 13676 reverse strand)
agccaggggagttggctatcatttccaaagaagcggtatagttcatagattactaaacagtccgtttcgctatgtgttgatgcttctatcgtgcagtatttgattttgattgcatttggacgttgtctatttgtcttgttgattgttataagcaacatatcaaactgcaattcaaattgtgaattttcaagcatgtagctttgtttgtgaaccttctcttttcgaagatggaaaatggagcaatgtaatagccaaatacaatgaatgagtgagtgatcatgcgaaactccgtcttcagaagaatgcaaatataacatctgaaaaaacggatatggtgtgtttagcagtgctcctttagccccacccttttttaattttgtttaatcattcaagcttatcagacgtttcaatttctttgataagaaatggtaaagcagtgtaaaaaaaaataaaaaacagtgaattgtgcaattcacatcaacgatatggaatcactccgattcatgcatgtatagtagattcttcacatgatatgaatagttgggtagtcaaatcatatcgaattgtgttattcaaattgcgaatagtaagcttctaataattttggttcaaagtataatctttaactggacctcttataagggcagtatttttaacttatcctctttggtttttattaatatatttgaacagaaatggttctgttttcagtttaacatataaggtttattaagatgtgttatggtggtttccttgaattgttatatttggttgaaagcttccaatgaccaagatggtgaagcaaacttcatgcatattctatgtagtatctccactatttctcttctacatttttcttttcagatttgtatcacatttttatctcttgaacctcttgcggttattttttgctttgtaatcctttatgtatcgtatgtttgcacaggtagcacctt

SEQ ID NO: 16216 - DNA, 1042 bp, Glycine max
  Intron number 1 from transcript Glyma02g08010.3 (locus Gly ma02g08010) derived from phytozome v7.0 (chr-ID Gm02; pos 6287033 to 6288074)
ctcgtgaactcaaagccggacttcaccccctaaaggttcctctctctctctctcacttccatttttatttcttcaccactcaatcgctcaaactctaccaacaattattagtattgttcttgtttttagaataaaatttagatacggttttggtgcttttctccgattagaacgatagtttcaccttgataatctatagtgagatatgtaaacttttattacgcggattactgaggtgaaacttcaatttgattagagaatggaatcaaaagtatacgagaactgcatctaagtattgtctattattatgtgtttgttccttaaattagggtaattttgactttgatcctggtctatggttgtgtatttgggacgaaatggtttgcaatgagaagtttggtgattcatatctaggctttttatttttttaatttgtttttcttattttggttttttattggagaatggcaatttaagggcgtaagtgaagtttgcaccaacgcatagacatgcagaggtccgatgtaatggctaaattggaagtttcggattgtgggtatttatattatttgctgaggaagatgataaagaaattaaaattttggattggttttttgttaaggttttatgtaagggtagcctgctttgatgtatcactatgattctgggatctttcaatttgacgtaaggagtggttttaattctggaagagttgattgaatgttgtgttggctgcttctgctttgaagtagttatatgagagatggttatgcacttgattagattgagcatcttgatcatttgagatgcttgttgattatgtgtggtagctatgtttgtttcactctatcttttatcctgcttagaggctgttggtgcaatttaacattttggtggatttattttgtgttgctggtgatttctattagcagcacaagtttgtcttctggtacactcgtcgaacacctggagttcgaaatcaaacatcatatgaggacaacataaagaaaattgttgaatttagtacggtgaggtctttgct

SEQ ID NO: 16217 - DNA, 828 bp, Glycine max
  Intron number 1 from transcript Glyma03g26200.1 (locus Gly ma03g26200) derived from phytozome v7.0 (chr-ID Gm03; pos 33619594 to 33620421)
ccacacttttctctccatttcaatactattgctgggtttgcattttgtcccttttgctccttattatcactttgtttcttcttcttttctcttctctttttgttttatgcaccgttgatccctcttttctctcaaaacattgccgaacaactcttggattcatgtgggttttatcatttctcaagcaatgataaatgcaacaaaatatttggtttttgtggattttcctttttctgtgaatagtacccttttttcttttcaaattggttttgattttgcatttggagtcagtgttttgatgcttcaggtaactaagtagcttcctgatctgtgctaggctcccattagtgatttccaaattggggtggtgttttgttgttaagggtttgcaatattgaggttttttcaagtaatattattatttttttggttttaagcaccaacaaggtcaattgtattccacagttccactaccaatttcattatttttgctctgagtagctttttcttgttgatgatgtggattcaagcaattgctgttggcttttctgtatttagcatttctttgttgatttgatttggtgtggtggttgtgttttttagcgactcaaatagagcaaaatagtaggactacttgattttgtcattgtttcattttatgttcttcacttggtggttggtttaagagttgtcttggttatgttcatcatcttgtttgttggtaagtagttatttattgaaattcaagttatagaataaatgaagctgctgttgaatgaacttgtggttttacttgcagggactttttaactggaaatcttttgtgtg

SEQ ID NO: 16218 - DNA, 745 bp, Glycine max
  Intron number 1 from transcript Glyma01g41400.2 (locus Gly ma01g41400) derived from phytozome v7.0 (chr-ID Gm01; pos 52908576 to 52909320 reverse strand)
gcaagtgtgagtgccatgcttacacaagcactttgatcgctgaggagaacagagcaatggaattggtgattggatattatatagaatagaagcaacaaagataagcaaatttttaatcaagaatcactccttatttgggtgccaatatttcatgtaatcatgcctgagattgacacgcatttgagacacaaataaagttgaaggcatcttctgaggtccgacctagccaattgaattcgaataacttatttttaaatactgggacatcatcaagtattcatataaaactactactgagtttattattactttcttagtcgagtttgtagaatttgaatttgactcaaataattgaattcaatctcattcttaaatctatttatttaattgaacaaacaatcttaataaaacatttaataaatcgagtttcagtttatacttgtaggaattataattaaaatttgtaatgagtaagtgtatttataacacaaaaaatatattttaaatttatgatgaacaatttatattatgctataatattatttttaattatcggtatttctttaaaaaaaatatcgaaattcaattttgaaatgaaaatgaatgaatcatcttctggctgggcttgtcggaacatgatgggctgaatagggccttacattttttccggccaggcccaagccagataaaggaaaaaagaagagttgtagttgacacgtgtggaacggatagagaaacagataag

SEQ ID NO: 16219 - DNA, 362 bp, Glycine max
  Intron number 2 from transcript Glyma01g02940.1 (locus Gly ma01g02940) derived from phytozome v7.0 (chr-ID Gm01; pos 2434511 to 2434872 reverse strand)
ttctcgctgcaaggccgtcagatattggtttgtgttctttcttcgtgtttatgtgttttaactgctatgctatgttattaatattaacctcaaagggtaggaagtaggaacaatggagagggaaatgagaaaggattttgtttttttgctgctctttagttagaagtagcctttgtttgaaagggattagtggtggttgggggaggggtggagaatttagtcattgggtgatttggtttcaattttagtgtgtttcatgttcaaggggcattgagatgatacttgggtacgtactagtttggaaaaactttattgttggatgtgggagttgtgtccaatagtcttggcttggttcaccttgt

SEQ ID NO: 16220 - DNA, 588 bp, Glycine max
  Intron number 4 from transcript Glyma01g45630.1 (locus Gly ma01g45630) derived from phytozome v7.0 (chr-ID Gm01; pos 55801138 to 55801725)
atagatttttgagtgccggaacaatagaagaaaaggtatatattgttgtttcacatttggttttgaattagagacattaaatcaaaatgatgagtcaatgccaactacagccgctagccttccaactccaagctaacgatgcgggttccattcttgctacccgcttatattctctatatattctatttgaatttatctttttttactatagaatgaatctggactgattaatgaatttgtcaattatgcattttaatttcttaatttagttatagttatttattttgagttgaatttgttttttaattcttcctatttgatgagtcaatatccctctcccataccttcgcatagtgaagagcctctggacaatggggtacgaagtttttttatttattttgagttgaatttgttttttaattcttcctatttgatttattttctatttatagaattcttttattttttaaccttatttacacaaatgcatgttacattttttttactcatttagcttcagttccttcattaaggtattattgtccctttagtaaactactaagttatgtgtaggtctaccagcgtcag

SEQ ID NO: 16221 - DNA, 636 bp, Glycine max
  Intron number 1 from transcript Glyma05g03260.1 (locus Gly ma05g03260) derived from phytozome v7.0 (chr-ID Gm05; pos 2480479 to 2481114 reverse strand)
cgtttcacgtcgtttctaaggtagcaccttacttgttttgactctaattgtttattagatttagtagaatggaattgactattgaggatctttgatgtaagatcttgatggaatttattatgtttttgatggaaattcttcacaatgaacttagtctgatctcactgtttgttaactatgatgcgttgtatttgcttgacttggaagattaaatgcgtgtttggttttttcatttgacaaccatagattcgcttcaaaacggaagtagctagtattagcttctgcgttattttataattgcacgtgaatttcagatgaattgacgcgtatccaaacacagcataatagactatgctatttttcttttttcttcttacttgtgtagtatgagtgagggtctctagtgtcaatttcattgctaggtttaggttggatgttgtttgtgtcgatggaggtttctagagctgggtaaattcatcatagggatattgcgtttgataaattgtgttttggtttggtttttgaaatgttgtgatttagacagaaggcgtttgctcaaaattctttggatattgtatatgataaatttgtgtgattgcaggttgagaagctaataaaagagctgcctagtgtacc

SEQ ID NO: 16222 - DNA, 643 bp, Glycine max
  Intron number 1 from transcript Glyma02g15870.1 (locus Gly ma02g15870) derived from phytozome v7.0 (chr-ID Gm02; pos 14348936 to 14349578)
tacccatcaaaattgacctgaattgtgctcgcgtaagagtatacgcagcctttctaagtttatttaggttttatttggataaacttctctataaacacttctagaaaaagaagataagaaagtaaatgaaatgagtttttctcataagttaaaatcaacctgcactcatgggagaagttaaataagagaacttttataaaagtgcataagttgatgggagatatttaatttttctttcttattttttctcctataactatttacggaatgcaactgtccctggattattttgttacaattttcgtattggattttttagaaaacattttaaccaaacaagcaatgcttaatgtattgtacaatataattctagatatgtaaggatgacaaaaatgtggagtgaatagcattgtatggaatatgacgtaggtagcaatttggacaattactaatgagagaaaggtaagtgttattaacttaacaatatattaggtaaaatcctgtagaaggctataagagaatttaaacaggatccaaacagaaaccaaatatagtgcatattattttcccttggaagtaaatcttattatgtttgatttgatattatgagaagtacaagtaattttgatatgtaatgtaggtg

SEQ ID NO: 16223 - DNA, 412 bp, Glycine max
  Intron number 3 from transcript Glyma03g32380.1 (locus Gly ma03g32380) derived from phytozome v7.0 (chr-ID Gm03; pos 40131440 to 40131851 reverse strand)
aaaggtatggaatatctcttattggtgtttttggtttcaatgattgcaattagaatatggttgtttaaattttttttagtgtttgtttaagtgttttaattaggctctgtttagataaaactttgtttatataagcacttacatgagaagaaaataagaagctagatgcattagcattttttataagctataatgcattttaaatttttggaggagataaatgaaaatacaagaagcgtagctcaatttttttgttagagaagtttatttgaacatgccgcattattggtctttgtgtgaaatccgagtgtgatcttgttgattttttttcctctgtgaaatgtttagtgtttgattggtgagatttttaattgtaggttctgctatcactggtcctattgggaaggagtgt

SEQ ID NO: 16224 - DNA, 593 bp, Glycine max
  Intron number 1 from transcript Glyma03g36960.1 (locus Gly ma03g36960) derived from phytozome v7.0 (chr-ID Gm03; pos 43765481 to 43766073 reverse strand)
agttactttctctgctcgctcagtcacagcacagtgtatatttcgcaactacaccatcgccatgcttacaccttgccttttttcgtttcactaataaataaataacactaatatattgatattaatacatcgtagaccaaatcagaacaatcaaacagcctttttctgtgtctcttcaacgcaacaactagggtttgtgtttccattttccgttaaattttttcattgttgcgattttgtttttcttgctattgactcgacgatcgctttgttttggggttttaggattcgttcttcgccatctgcacagtattatgactgaaaacgcgtgttacgtgtgaagcattgtcaggaattatatggattctttcaatgctctgttagggtttagagctgattcttgcactggtttattgaaatgtgtacggtcgtggtgtgtttagggttttacttgaaatctgcattcgcatgacatggatgtgttttgtgtatttctacgtgctagaagattggttttgattttttttcttctcatttttgcgtgcctggaattatagcatagtctgaatgttgttgatatttttgcaggcgca

SEQ ID NO: 16225 - DNA, 924 bp, Glycine max
  Intron number 1 from transcript Glyma01g44910.1 (locus Gly ma01g44910) derived from phytozome v7.0 (chr-ID Gm01; pos 55380436 to 55381359 reverse strand)
gtctcattctcacattgtgctgctgcgccactcaggttactttcacctcttccactactcttttcttatgctaattattatttttatttatgctcacattctcactacaaacgcagtttcactttgatgtcgaaatgtatcaaaagataataagaatttgaactgcttttatctatcttttgttttaaccgtgtgcttgatgaggattcgttccctggatgctacttaactaccttaattagagaaagagattcgttgttaggccctttgtgttattcaaattcgtcgaaagaataatgcattgtaagtgcgagtttttttgctctagattgagtggaattgaaattactctttatagtagcttgtagtgtacatgtttgtaagaagacccgcgaggaatttgttttgtagtttttcacaccagtacttttggtgatattcttggtatgttggatatccctccttctcatcaacgaaggaactgaaatacgaacgacatcagaatgtttcctattttacttcgtgtggttgtttgggaagattatgtaactatgtatgattttttttgtgataaacttacatatgaatttacttgtatgatgcaaatttacttctagaaacgttatctacacaaatttcaagaaaagtctagtttaacagctacagaatggatgactcgtgctcaatcatgaatcatcgcatgctgatatgtttcttgtgttttttcttttatatatgctctgttcctcacttctacgatggtcatgtggtttttggactagagtgctcaatgtttcccataatgaaaatttcataaaaaataatgataactgaatagactgttacttttctaagctatgaactcaaacagtttataatgtttgggagaaaactcacaacttgcttctctctgttaaacgcagg

SEQ ID NO: 16226 - DNA, 822 bp, Glycine max
  Intron number 1 from transcript Glyma02g43790.1 (locus Gly ma02g43790) derived from phytozome v7.0 (chr-ID Gm02; pos 48508317 to 48509138)
ctccagctcccactttcaagtactgtggtagctaactaaactacctttactcttcattttattttagttcatcattttgtttcattcaactttcatgccccatcttagttatggaaaaatagtgagctttcaatgtgagattccactctgtaatgggttcttctgccatttgcaatgctcttagttaacgagaaacggtaaaatatggttaacttaagccatcaagggaatacctaacagaggacccatggcatcttgcttttggtttttttttattttcaaataagttagggttaggggaataaaaaagttgtcatgtgcgcatcgcatgatgacaacgggtaaatgaatttgaaattgaaacattagttttttttttttttttttgtttaattagaaacggaatggttgaattgagcaaaaatgtaaaggttatctgtgtaatttaccatttccaattgttttcttatttttcagccgtagtagttaagaaatttataagtgttctgataaattatttctatttgatttaattatttctttatattttaagcctagctatagcctatagcagaattagttttatttttatttttattttttaatttatacttctccatttctgctgtcactgtgatgtggtacggtcctctaactcccaaatgttttagcggatttgtctttatttaggaaactctaaaatgctgcttttcaatatgtaaatcttaagttacctgtctggttagtggtttttggtgcttgtatcacttggtttgttagctctttctgtattgatttgaattttatgctatgcagaaaaga

SEQ ID NO: 16227 - DNA, 608 bp, Glycine max
  Intron number 2 from transcript Glyma04g10820.2 (locus Gly ma04g10820) derived from phytozome v7.0 (chr-ID Gm04; pos 9057648 to 9058255 reverse strand)
actctcccgatcgtgcctgcaaccttgcaaaacaggttagattcagatatagtgaatatcttggcctttgttttgctctgtttatttttgttttacaacattttgagcaatgttttggatgtttcccgtgaaaagaggaaggaattgggccccatacagtgaaatttgcagctattattgtccattaattcgaataactttatggctactcccataatgcatttcgttaatgtcgaagcaacaatgatagctactcgttggattctggcggctaaatatggagttcgctttgtacagttgttgcttactttacctgtagctaaaatgagttgtcaaatatttggtggatttcacagtaggtgtttggaagtctaataattataagctagcaaacaacaatcgatcaatttttgactacttaatctaggtactggtatagatgggaatctgaccttagtaataccggtggaatatattcttttagtttttgatgtgaaaatgttctggtacaagttgcaagagcataactttactatgagttctgtttctaatggcatatttcgtactcatgaagaatctttttccttatgatattcgctaggcttttg

SEQ ID NO: 16228 - DNA, 824 bp, Glycine max
  Intron number 2 from transcript Glyma02g11960.1 (locus Gly ma02g11960) derived from phytozome v7.0 (chr-ID Gm02; pos 10175788 to 10176611 reverse strand)
tggagaccccctgcgcctgtagcggcagtcttaaggtatcaaaattttgtgtgtttgatgattttgatttgttaaaaaatttatgaggtttggttttgtcaggtatttgttagttatgatgatgatttctgcgttttggatttgtaaattatgtcttatttgaaatgatcgatcaatgtggaaagttgtttctttaaggggtaggtggggggattttttattttgtgtgtgtgtagtatttaattttttatttaagttcgtattgtttgtgttgatggtagtttactgaacaggtaaatgcttttgcttggatggaaggttttgagttttgtgactttgttgtgtgtgtatgcactgttctggtttctagatgctgccatgatcaaaatgtgtttaacaaattttctgtatatgttttttgcatatttagtgtatgtttggattaaagtttgcaaacttgagtttgaatgagtttcattttgcaaactgactttcaaggcaaaattgaagctttttcagttttactttttgagggggggtcccaactgaaaaccaagcatgtgcttaatataattatattactgggtttacgagttagtttagttaagaaatgacagctaaatgttctgatgagaatcttcttcttgtaacaaaattgaactggtaaatgcattaataatatccattggtcagctttagacagagggatgaaaaaggagggtggaggaatgttgttgtttgtgtcatgttgtttttcatttctttcatctttattttggtattcttaattcttggactgctgttggcatttggttttgtgcagt

SEQ ID NO: 16229 - DNA, 629 bp, Glycine max
  Intron number 3 from transcript Glyma04g12200.1 (locus Gly ma04g12200) derived from phytozome v7.0 (chr-ID Gm04; pos 11183955 to 11184583 reverse strand)
aactcagaagaggtgagactagcacctttcattttctgaccactcaagttaataattctattattacactcattgttgcaagctcatttttatagatgaatgactgtattagtatgatattcttttaataagagattagtcacctaccattttaattaaaccagttgctgattgctatgaagaacaaaaaaaaaggtgtactttaactaaacctgttcgtcagttgtttgctcaagtgtttaggtagtattgatgtgaagtttttgattcatcattgccgctagaaattagaattgttttactgacaaagaaagcaatccctcttcacccttaccctagaaacaaaataaagtaaccattcatttgacataaatataatccctcaatggtagtggaaatgcttttagcaatcttgaaatttacatttaatataatgtagaaaaaaactatcacgtgtgatcgtttcaccctaaaactagttgatacatacattttaaaatcatttccttttatctttcttcccttactaagaatgctttgagattttaaaaaggagtaacattgactaagattgtgttcagtgtatttctgtagataagaaagctcagtgcttcacatcagtctacctc

SEQ ID NO: 16230 - DNA, 624 bp, Glycine max
  Intron number 2 from transcript Glyma04g42720.2 (locus Gly ma04g42720) derived from phytozome v7.0 (chr-ID Gm04; pos 48413142 to 48413765 reverse strand)
agcttctcaactccaagttctgccatcctattctcgtaatgttcgcttcttttttatttattttttgtttttcattttaaagatcactgtgctgctttgttgcatttgatttagcatttcatttgattttaatgtaaacaaaattaaattaaaataaaacaagcgaactttcatttgtctgctctgcgtttatggaattgaagcgtcacaggatttcgcggtactttcgaatatttagtcgtttggtgaagaatgctattattagataatcatcctctgcgcatgcaagtataaaattcgttaaataatcaaattccgtgaccgctggttttctttctttttttgttgttgtcacgtttacttctgctcatggacttgcatactttcttgattttagggttttggattttttttttcaaattgaatttgtaaaggcatttataaattttttcctctttaaatttcatgatcacaagtgttattgtcatgaagcagtttcatctatcaatgtggagatgaacctcttacattataacttttgtttgtttcattgatgagattttttttcttctatttatttcaatagtttacattacataaatttcaatgtcagattcgtttggg

SEQ ID NO: 16231 - DNA, 692 bp, Glycine max
  Intron number 3 from transcript Glyma01g35470.1 (locus Gly ma01g35470) derived from phytozome v7.0 (chr-ID Gm01; pos 47952750 to 47953441 reverse strand)
ccgctgctcccacactctccttccccaagtctcaagtaagtaatgtgctttgtatcttatgtttcaacttaatgatcgtaaaagttgtatcggtaatttcactagttttgatttttaccattactagttttgcttgctgcagatggaaacttcgttcaaacactattttggccgttctcaagaacttgggagctgattttttctgtctacaggtttttttcgtttcttcttgtcaaacgattgtcaatgtgtttgtttttgtgttagaagcctactaaacaaacaaggagaagcaagaatttgttgcttctcacaaaattgtgctttggagcacgtgcccatttaatgaaacaggaaaagcaaacatgctgtgtctcgtactaatattttgcactagtattttagcattttgattgtgcattgtacaagatacgcgtttatttttatataattaaaatttataattataatatatatgtaattttgaatatgcaaattatattatgattaagtgcatcctaaggagagaatattgggcatgtttgattgatagagtcagaagagtgagtctcggtctccaatttgtgtattctaatttataatgtaggagtagatttcagcttttttattactttctttcaaatgatgttcttctttttattcttcttatcataaatcatttcaggaagttg

SEQ ID NO: 16232 - DNA, 243 bp, Glycine max
  Intron number 1 from transcript Glyma0048s00350.1 (locus G lyma0048s00350) derived from phytozome v7.0 (chr-ID scaffo ld_48; pos 115762 to 116004)
atcacaaggatacacaaaaatacaagtaagaagaaaaaagtcatattatacatactaattctgtattcttatatatctttctgacaactcttatatactgcacagctgcagatgaagtgcagtatatatatctttgattgagctccatgatcatatattctgggttgtgttctatttttattgttcctctatatatgtttctgacaccattttatttaatcgttaaaggatttttgtcagcac

SEQ ID NO: 16233 - DNA, 502 bp, Glycine max
  Intron number 2 from transcript Glyma01g00590.1 (locus Gly ma01g00590) derived from phytozome v7.0 (chr-ID Gm01; pos 347151 to 347652)
agtaaatttctcccctatttgctttctgcactgtgttccattaccatatttgtttgtgtaaagaataaagatcttcagttagttgtacgaatcccatatcatataaacgagccttaccctattgtctttacctaatagaatgaattccttgcacctcagggattatttagcttagcaatcatggattttgctatacaattccttgttggcatgtgggttatctttaaaacttcttttgtcaaaggaacttattaaacctaccatccaccataatggatttaacatctctgttaaatttatattttatagtagtttacaaagcaaggctaaaacgtgtgtaaatatttattcttttcaatgacttgtgtatgaaatttttgttgagtcttttttgacttgtaccttttatttcaaatgattcctaccctctcttttctatttgttagtctttgtgtataatgtcaagaaaattttctccttaggacaccagattccttgttct

SEQ ID NO: 16234 - DNA, 872 bp, Glycine max
  Intron number 1 from transcript Glyma01g39190.1 (locus Gly ma01g39190) derived from phytozome v7.0 (chr-ID Gm01; pos 51167086 to 51167957 reverse strand)
tgtttcctctacaaggtatttcctttctagctccttattgctcctttctactgttaaacccagctgtattgtactttttgctctgttagacaatgtgcttcttctcttgcttcccttatttgccaattatgctaaactgcttctatgtgtactgttttgctgaaacgttttaactttctaccatatttgggggtttctctatctctttttaaaatttaattttgagtgtttgttggtactttatcctcaaattctggtgctttaactctgagtgaataaggggaagaagaaatagtcgcgcgggttcgatgaaaaattgtttgaattcggtaaaagagatattgacactgatatatgggtttaaagaggaacactttagcacccccaaggaaaaatgaggaacactttaagctcctttgcacgtttctgggttattatctgaattcgggtgctcattattctatatcgtatatgctgattgatgtgtattatcaaatgtgcgcatatgttgtgttaaggacttgcctcgctggaatttttttgtacatgcctcaccaagactgatgctttatgcctttaatttttttcgcttttgttgtgtttttagtcattttctttaaattactaatatcctattaaagccgagaataatatctttcgttttggagaaaaatccacatagttggtatcagattaagcaccaatttgataatatcctgggcttcttttaccatttatgttcttctgggatttggggaagggggaggctccataaatttaactattcaacacccttcacagtcttttaagttatcccatcattcacattctagtaaatttctgctcgtatgtggttgcaggaaattcttgtt

SEQ ID NO: 16235 - DNA, 583 bp, Glycine max
  Intron number 2 from transcript Glyma05g08730.1 (locus Gly ma05g08730) derived from phytozome v7.0 (chr-ID Gm05; pos 8610997 to 8611579 reverse strand)
caggccctaattgtgagccaaacattgtttttcaggtgaaggaattagttcatctcttcccacattttcctctcctatatgtcaccctacaagcactagaacataggtcaatggccctttttgacttaatattttgtttttatttcatatttttatggcgaagacatttttatgcagataaaaaaattaattattttttactcaaattgaagaatcctttaaatgttgaaaggatgtttattagttaaaagtcatgtcccttgcctttaatataatgtccattggtttaaagataaattttaatataatattaaagtctatagttcattttcttgtaaggaatattgaaaaatctcacgttacctacctaaattcctagtgccaaattatatacatgttggataactttatgtaatgtcagttgattttaaaatgaaactcacatattatgttcataaaaatacatgtagttggatggcaaaatcattgcacctacaggctctgcagcttggggatctggtaccttgcaatggcttgaattctcaaagcttaacaagattacaatcagaggcaaaggtgtcat

SEQ ID NO: 16236 - DNA, 667 bp, Glycine max
  Intron number 1 from transcript Glyma05g08730.1 (locus Gly ma05g08730) derived from phytozome v7.0 (chr-ID Gm05; pos 8611667 to 8612333 reverse strand)
atacaaaggtacatgatttcatattcattccttgttagctagctcatggattcaatttcacttttgctgtcagccatttcacttttcatagatgatgacaaaagtcaatggctttttcctcagcctagcttgttaacctaagaaaaaagaaaagaaaagaagcagccgtagttacacttttgttctccttattatatcattttatgaatttgtttctcccatttttattttcatgaatttgatatttcattattttaattatacaattttgatccatttgtttattaaaaatctaacatttaatagaaatgttgacgtgactttgtatcatgtccatgtccacatgcatgaatgaatgggttaatatgacagtgtgcggtaaaatatcaccttaacatttatgttaagtattggatattaagttaataaatgaatcaaaactacacaactaaaatagtggaggattaaatttgtggaaaaaaaatacagaccaaatttgtaaaacaactatactacgaaaccaaaagttaattaggctaacaagtttaaaagaagaaaaaaaaaataaaacctccagtttgttgcacttatggtagcttctcattaattatatttatttctatataagtattaacttgtttccatattaaaaaacaggcctttcaaa

SEQ ID NO: 16237 - DNA, 761 bp, Glycine max
  Intron number 1 from transcript Glyma04g16850.1 (locus Gly ma04g16850) derived from phytozome v7.0 (chr-ID Gm04; pos 18043342 to 18044102)
cctccttcaagctcattaacttcatccgctctcgggtaaatgttgttatcgctttcttctatgcttttgttaattgacaaagttgcaaaattggactaggatctcgaaaaatgctaggaatgcattatctgacacactcttttaaacccatttcagcttattaaaatttaatcgaagttgcaaaattttttggttctcacacccaatttaacgagatttcaataaattttaaccaataacgagagagagtatgctattagcacagtagtactcttgttaggatcttctcgtaaagagaatgatgcaaagcaatcatactggtacttgctgttattttctcataacatgacattgttttacttgacaaagaaaattcaaattcattgttatgattgtttcttgaggttggggcttttggaatgaggaagtgtaattaagagaaattgtgaattttggattttagatttgaaaatggcagtttatctttatcatgattttggtggttgttacttgttccttttgttgtcaatttaaggattgtttgtacagaggatttccctctattaacctgttactttggtttatgaaaaaaatggagaaggtaactatcggattatgtatgtgatactagctatatgtagacattctaactttgtatgtggactatatatcaaatttcaattgtgtacttttttacttgtgtatcttgctaactggtgttttcttctgctttttttttctttctaggtggcagagaacat

SEQ ID NO: 16238 - DNA, 988 bp, Glycine max
  Intron number 2 from transcript Glyma02g40940.1 (locus Gly ma02g40940) derived from phytozome v7.0 (chr-ID Gm02; pos 46158513 to 46159500 reverse strand)
tttttgggctgttgtggctattatcattactgctggtaacaataattatcttctctctacttgccacattttttgtttttagttaaacttgtttgctattgaattgttatgatgattttgatcggttgtgtgaattgtgaagctcaattgttgagtaaactatcatttcagtccctgagaatataaagtgttgccacattaatctttgaaactaaccaaattccaattaagttcatgaaattctcaattgtttcatttaagtccataaagttatcaacttattactattttggtctctaaacgtatgttaacattatcactaagtcatacattttttttttgaactaatttgattgacagattgcactttcatgacttgaacttttttgtagtttcggggactaatgtgacaacaatatacatttttaaggattagaatggtggtttactcccaacagtttcgagtagagttttaataagatgtcgctttaaatgggattccatgtaggagaaatcttggatgcagttctttacgtgcttttgccttttggtatttttcttttaatataattgaagtttaattcaataattcgcataataaatgtttacattaatggttagcacaagttctcgagttgaaattttatttctgattggagaacaatactaaaagcacctaaggaactgtacataagttttgtccttccatataagagctaagattctaaatttcaattgaactctactagcttttgttgaaatagatgctacaaatgaaaagtgcctaatggactagcaatgggcagatgcagaggttttgttctgtggcatctctaactttatgttggcaatagatttggtccctgtaacactatgttttttaccttttcaaggatagagtactttatggctttggtcttttattatgtcctatttgtgttagctaacactataatattgcctgcacatgaaaatgttgtgatccagg

SEQ ID NO: 16239 - DNA, 982 bp, Glycine max
  Intron number 2 from transcript Glyma02g10790.2 (locus Gly ma02g10790) derived from phytozome v7.0 (chr-ID Gm02; pos 8680011 to 8680992)
gtgatttggttgagtatttcatccctttagtgaaggtcagattatgctgttccactgatataataaatgcttttgtccttaccatgtattgaatgattgtactttgtagtttgtacgtatagtttttcctttttcatccattgttctggtgcctattgttctgaattctaattctgattatcacattcatttagttttcctggatttttaactgtttcctgtaatgtaaacgtgttagtcttcttgtgaaacaaaaaagtggttgattaatgtatctgtgttagcttgtgttagaataataaaaagggtgctacaatatctcgccatggtggggtttttggatgggttagacccattatgagtctattttcggctgcctttgtatttgcaagagggcagttcacaacttgaacctgtgaccacctagttaaatgggaacaactttaactgttgcaccaaagctccccgtcagcttgtgttagaatatctagaaaatatctcattatattaatattgtatcatagaatattttagagtataatagatgatattttaaggttttatttatttatttatatcttgatgtgtttccttattttatttgattaggaggagtctagtactagttaaataggggtgggttctttgtgttttgtatcacatcaataatattcttaagagaatgttggtcatagtctattttatttcccttttcctctattttgtttctcttctctttctctaccaaaatcctataatttcaatgacatgctccttatctaacttatatcactttattgcgtgggctgcaatatcgaacactttggtggtgctaaatggttgcatatgtcttgaagcatattcatcaatttatgatgcattgtatagatcctgctatgttggcagtttacattcgttttactggttgaacatcctttcaacattttcttttaatttggtttcagagattggcatcaggtga

SEQ ID NO: 16240 - DNA, 843 bp, Glycine max
  Intron number 2 from transcript Glyma03g02000.2 (locus Gly ma03g02000) derived from phytozome v7.0 (chr-ID Gm03; pos 1780647 to 1781489)
tgaagctttctgctgtacctatggttcccatgcacgggggatcattggctttccttgactacacaaatctcaaatccatgaaagtaagttaaagaaaactttgaataatttactactcctacgatgttattattttttttgttgatcatcaaaatataatagtttttttaaaaaaattattttataaagaaataaaattttccactgaaaaaaaaaaaagtaaactataactaaacttttaagagaaaaacaaatgatttataaattaaatttttgaaagaaacagataaattaaaattattaaaaaggttggtggataaattataaaaacaagttttttcattagaaggagataaaataaataacttataaaattattttttaattaatatttcaaaattagatagtgtttattttctataaagtttagtattaaaattttatttatttaaaataaaaaattaaaattttgggtataaagacaattgaattgtccaatccaagtaaaaacttatacaagataagattttaacaaatgaaaagaattgaaataaaaataattcaaattgtacttattccaaattcgttaaaattttgactcttcgagtttgcgtacaaagtgaaattttgaaatttcccgccaaaaacaccttataaaaacatacatgcatggcttgtttttcatcacaaaagtttccggtttccctctgacagtctctcgtactgcctcttgcatagcaagaagtctttaccagtcttataaatataggatttgtgtttgtttttctctcctgaaattgattcgaataatcatggcactaataactcaagaaattggagggt

SEQ ID NO: 16241 - DNA, 948 bp, Glycine max
  Intron number 4 from transcript Glyma03g31500.1 (locus Gly ma03g31500) derived from phytozome v7.0 (chr-ID Gm03; pos 39388257 to 39389204 reverse strand)
ttgaaggaggtaagtttgtgcaactccttgtcgtttattaattattactgtcaaaagctaatgagtaatgagctctactgcagtaactaattttgatgtcttaaattgacaagttagctgtgcaaatatcctaagttgctagattgttactaaatttgaacgagcaatgccaatccatcctctactcctgttcttacttgaaaccagaacagaataatagacttgaataacttgcactgattcagttgacttaagcaatgctctattctatggtacatcagtatataaatactggagctaacagaaaatcaggaaagaatatcactcaatctaggagaaatgatacagatatctaatttcctaggatacagtaatttctgtaaattatagatagctataaaatactgactacgtcagatactaaatcagcggtaatcaacatgcttaaaggtaaaggagacgttgttagaccctaaggtctttaagctcttaacccgtattatcatagtctattatcttgctattggaattttttaggaaaaaataacttgaacgatttctacttttgtaattagtgatgtactcatgtctcataaacatgttgtttttgtataagataatagatagatagttaaaatctggtgctatttctcatagtaagtttgcacagaaaacatttttttatattatacttcctattgtcttgcttgcatctattcatttcattccattcatcttatttaaacacgtgaaagcatgatgtattccatcaacaagaacatttggagggatatcttttctgtccattgttacctagttaagcaatcattcctatttataaggaagggtagttcaaaaaccttctcttttattgctttgtcaagtgtatcttctcttactgatgatccttttgcaatggttgatttggcaggttgttccgcaactgtc

SEQ ID NO: 16242 - DNA, 242 bp, Glycine max
  Intron number 1 from transcript Glyma03g36370.1 (locus Gly ma03g36370) derived from phytozome v7.0 (chr-ID Gm03; pos 43345149 to 43345390 reverse strand)
tctccattcgtcaaccgcatttcttcaacttcaaggtcattcttcctcttccttttttttttcttcttcaagctgaaaccagagggatcaaatttctgccgtgtttattccttgcaattttatttttttttccttttccgtcactcagtcattgtagatttgttttctttttcatttattgttattaaaatagcttaatgacatcacgtgattgttgtttttatattttttttattaggttt

SEQ ID NO: 16243 - DNA, 1014 bp, Glycine max
  Intron number 3 from transcript Glyma02g16260.1 (locus Gly ma02g16260) derived from phytozome v7.0 (chr-ID Gm02; pos 14665085 to 14666098 reverse strand)
tagctcagttagttaccatgtaaagaaacactttctccttagcttcattgcactgctccccataacttaatttatatgaacattattgttgtgtttttttttttttgctcagcaaaagtaattatgtattatatatttgaaagagtaccagtggtactgtagttacacgttaataaatatgtgtctagcaggattccagtttgtaactgaacctagctgagagcacaataaaaagttacaggatacatcttcacccattccctcctaactactaaacccctccttgagattagatgaacattattgttgtgtttgagtggtagggggaaattttttgtcctcaaataatagaattattggttttgtagaatgataaccctagccgacctcaccttgtgggataaggctttgttgttgttgttgttgtagaatgataaccctaacctacatcacaccgtcagttagaagttgcaacatgcttttttgtctgtatttgctttggttgtctatggtgcagtaatgctgctcatgcttacctgttatgttctagtgctttggtataaataagcattgatgtaggtgaaaatgatgatatgtaagatttttgtcacttaattgggcttaaagtaaaggtgaagtgctcttggggatcaagtgaactttcaatatctggttgatgcactttatgggttaaaagactaaaaacattttataaaaatatggatgttttttttggttgaaagtgaaaaattgtctcattctgccctgagtagatttatagatactattatcataaaattaacttgagagttgagagctggttcgtgtcttcccatttactttctgaagattttgaaaaatatagattgcatatttcctgcttagatatatattttattcttaaaaatgctaaaatatgttattcatcttagtgattggagtttattaattgactttcggtaatgttggtggggaacaggttagttgaaacccatatattctcttttgttgtgg

SEQ ID NO: 16244 - DNA, 956 bp, Glycine max
  Intron number 3 from transcript Glyma02g05110.2 (locus Gly ma02g05110) derived from phytozome v7.0 (chr-ID Gm02; pos 4146213 to 4147168)
ctcaaaggaggtacacttagtttcttctttcttctctcacttctcatggtgttgtaaaatgaaagggggatgtaaaaaaaaaacttcttaaccctgcatgttgtttccaataataataataataataataataataataatttgttagtagagaaactgaatatccccaacattttaagcttttaagttagtagaaactatttgacttaaggggatatcaagatgtgagaattgaattccccacccctaaccacagttccctgggaaaaaccaggatcaacaagtattttctagtgttttttatatatatatgaagacaaggatcgacaagtatttttgtgtttattttattttatttttcatgtattggtcccctttagaatttagatttgttgattctcacatcacattgcatcacaagcactagtgccacacccttcttttgcgttagtcctgtaattagtgtgaagaagttggtgaggagttcaagtcaataaactagatgacgtaaacaactactaagctagaccaaaagaaatgattaatgataggttgatattgaggatttcttgaataataccttctgacacatacattaaagatgagttggtaactcacatcacaattgtgtggtatcacttccttgtagtctatagacgcataaaatattacccacatttatgtcactagttcagatcagatgcttttgctctataaagatagccatggcatgtttccactgtgatactggcttaatcggaattttacaaagatgcttttgcactaactcatattgtgatgagaaactcattatcccatggttagagtaagactggtcaaccataaatctaaagttatgttaatattttgccttttaaaatggctatacattgatacatgtttctgttttgatgcttaaaggaattttataaagcattttcaagtttctctaacat

SEQ ID NO: 16245 - DNA, 967 bp, Glycine max
  Intron number 3 from transcript Glyma01g25940.1 (locus Gly ma01g25940) derived from phytozome v7.0 (chr-ID Gm01; pos 34287634 to 34288600)
tgttggctctggacagacgtctttgggaataaaaggtaattgattgatcaactctgcctctgggctggatctgtttatgaccctctcttttcagtgtttctgttgactcatcttttcaatttgaataaagtacattttgttgtgttgagttgttttgttgcatttcttattgtttttgataacttaaattaactgggtgggttctgggatatgggacttagatttgttcagtgaggtacctgggattaggatgctaaagcagctttaggttttgaatttgaggccttagttttcataagtgttctgggatttatgagcaagtttagtgggattgagatagccgtgggtgctgtaaatagacagaaactggagtgatggtgtatgcgtctatgatatattattaagtttgacctttctttgtttgtccgtgtgtagaaagatcactgaagaaacttgtatgggttggataagtattatgttcttgttttgtttccttgttccaaatgcagtatcatctcagtgtcagattattataagaaagaaagaaaaatgacaggttttctttttcccccaaggttgaaaaatgagcttatatctagatgggcagaatattgttttggtacagaaaggcttgttaggccattcaaggggctttgacatgatgggtagtcaagttctgttttgggaaaatagtgctctcttaaatatcaaatttcttgggtcgagtaggcttttagaggatgctagagttacagatttctaagtatgtgacttaatcttgtattttgttgtaacttattttccatcttgggggtccattttgtttgctaaaatctatgtctgctattgtttgtaatatttactctctgtgcttcgttgggttctcgtgtcttgtagatggtttgaatcctgtaatgtatgttgtagttgtaattatatgtttggtttttaatttttgcagctgcaa

SEQ ID NO: 16246 - DNA, 624 bp, Glycine max
  Intron number 1 from transcript Glyma01g43470.2 (locus Gly ma01g43470) derived from phytozome v7.0 (chr-ID Gm01; pos 54485405 to 54486028 reverse strand)
atccaaggtctcaatagttgctgggacgtttttcggttagttcatcacttcaatttcacatctcttcattttcttctttcaatttcgatgcagagatccgatcaataatctgctcaacttaatttcatggaatctggatttccagatttgacttcagttgaaagcttttgttgctccatgctatgatcgttgttgctttttacgttcactaccagaagatatatttccactaattaagtacaatcggatacgctaattttaatttcttgaattgttttgctaacttgcctagcaaagctctctgatctgtatcagactgtcgagtgaggcagactttcaatggagctatcatttagagcattcaaagtattaatttcgtaaatgagagcttgtttttcggtttctccaccttctttttttcttccaacattgaaataaatgttggattacggtttcattttacttaatttaggattcaaagtccacgacatgtgttactccagatctctgtttcaataaaccgaatttagggcttgtattgctaaagtattagtcaattcagttctgaatgtgtttgtgtggtacttttgcagattgtctgttgagaaatatccatcaaatcca

SEQ ID NO: 16247 - DNA, 889 bp, Glycine max
  Intron number 1 from transcript Glyma03g34140.1 (locus Gly ma03g34140) derived from phytozome v7.0 (chr-ID Gm03; pos 41617146 to 41618034 reverse strand)
ttgttcagagagctttggctttgtattcgtaagtcgttctttgtctcctatgaactgggacatgcaatttgtggggttgttgtcttgaacctttctatgagataggtttagagttcatgtgtgaggaattggattcatttgccccttttctgttggttagtgtaaatcagaaaatgaggagtgttgacttgatttttgatgttgttttgactggaaagatgaataggtgctcaatgaggatttattgttgatttatgttggatccattttatgagtttatggggtatattgaatttccttccttgattgcttttgtcttaggggcaagcatttgttgaaaatgtttgagtctgttaacttgaaaatattgctggaaatgtgatatctggaaacaacgatctgtgacgatgttctgtttggtctaagtcactggagaattcttacgatggtgttatctgaaaactggaaatagcttttattttgacatttataattgtatgtaagtttatgaagaagggacgatatgcactccatctgttgattttttaacagggtacccattccaaataactcaacaactcttacagctacataggaagactattttgcattgatgatggccaaattggggattgaaatttgattgttttggggacaactgcatatacatcaaagagtgatgtctccctactttttggtgtctttttgctaattcatttgctataagtcataccttgttttaaattatgaatggagaaaaaattatgatcttttatgacaattttatcttctcaatgctgattgtccttgttaatgtaagttgtcttattatgtctgttgtattaatgtatttcttccaacagtattgaggaggttgccttcagtttca

SEQ ID NO: 16248 - DNA, 1008 bp, Glycine max
  Intron number 1 from transcript Glyma02g23590.1 (locus Gly ma02g23590) derived from phytozome v7.0 (chr-ID Gm02; pos 23904858 to 23905865 reverse strand)
ataagcttcgcacccttcttccttgcaattccaaggtatatatatgatatttcattttgtagttcaatctatgcatactctatcaatcttctcattcgtatgtatttgcatcatcttcgttttaaattaaacttattttaaagaaaaaaagttatttactgtttagagaattaaaagaacagttgctaagaaacagtgggtgtgaaagggtagtaacttgtaaaatctttctcgctttttgttcgcaaaggttgcatactttttgacccaccaaagctaaatgggtgcaccagttgactacagtgtaaaagctaactagtgtgtaacagttaacaactggcaatttattaaacttgatagtttaggagaccgagagttgcatgaatccaacttatagacacgtaataagaattcatctcatataaaaattgataataaaatatttataaataatatatcaattaaatattttaatattataataaagtaaaataataaattataaatttcataatacttaaataataaatttaataatatattactgttagataataatttataaatattatagtagtgaaagaacatttcaatcaagagtttgatgctatacaatgatttaatgttattaaaggtgataatattttgattcaagaataatacactaaataaatatatgttaatcactttattttcatcttattcattttctctcaattttacagcctgttctacgacttatatggttacaccaccttctaacaactctcagcaatcttatttaattacattttaaaaattaaaaacagttttttttttaagacatctttggtatagaattttgttgttcttcctccctaggattctttcatgctttatcaaacgttcaagaaaagacaacaacattgcaagacacaaataattgagtttggaagaaaagtcaattaactttttgatccactttgtttttcagacggacaaggcttcccttcttgccaaggtggtcca

SEQ ID NO: 16249 - DNA, 563 bp, Glycine max
  Intron number 1 from transcript Glyma03g39260.2 (locus Gly ma03g39260) derived from phytozome v7.0 (chr-ID Gm03; pos 45406215 to 45406777)
tgcaatgtacttcattctcgctcctcaatctactgcattttcacctcactttagcttttcctcaattttccatttctcgattcaattgttctatgctttgtgtgaatttttttctctctcttttgcccaccttaattttacctgaatgacgagtaaatttcaataattcgttctttctctttgaactacattatcgtaatcacaatttagttgcactacatttcgtaatcacaatttagttgatacattggctcgtaattaattccttttggtgatgattttatctgattttgatatttcactttccattatttaagtagctttgatttttttttaattttttttttgtgtctgaaacttaggctttggtttgtttcacggtaatgcttatacgatccgttcttctagcttaacttcattctagatcttattttagatataaataaataaatcatgtcgattgatgtgtcacacgtagatctagtaaatgacagccagtcttttggatttttattattttttcttcgaataggtatattttgttcgctgctgcggttctggaa

SEQ ID NO: 16250 - DNA, 576 bp, Glycine max
  Intron number 2 from transcript Glyma03g39260.2 (locus Gly ma03g39260) derived from phytozome v7.0 (chr-ID Gm03; pos 45406987 to 45407562)
catcaacggctttttctgtctttgcggtattatttgtcttctttgattgcacctatatttacataagttgactaatatcgttttattagactttagggaactgtctgaaagaaaatttgaatattattaggaaatgagaatatagcctaaatctaaggtcctgtgtagataaattttttcatgacttgtaggagaagaagaaaagtaggtaaaataaattaaactttcctcttgaattaaaatcaacttatgcagttcaaactttatagcagttctttcaattaactttctgaggttcataagttgattttaacttataaaagacttttgattcattttgctttttttttctttcttttataagtggttatgaagaaatttatctaaccaaggcctaagactgagttggtagttggttttgcatggtggtttctcagggttagtaggtttccaatggaaattgaagtgcattatttttctctttgttacatttctcagtgatcaaatggagtgctaatttattccgacaatggttatgatgatattcataaggaattcttgattgccaggtctttg

SEQ ID NO: 16251 - DNA, 815 bp, Glycine max
  Intron number 2 from transcript Glyma02g04600.2 (locus Gly ma02g04600) derived from phytozome v7.0 (chr-ID Gm02; pos 3768629 to 3769443)
agggtctatcatttgatttgctggataagctcaatgtaaggctcactttaacacacaagggtatattggctatgaatttgttagttcaaggcaaatgttttattttttccatgttggcttagattgggttgtatttcaaatatgggtctttttgattaaacttaaaataagtgattaaaaaaaagtgattttcttaagaagcagtatcaaaaatgcggaaaactgcttttttttttttaagtattttttattaaacaagcccattgagttgttatgatgacattcaattttattgatggcatatatggaaatatgaatttggcggttccaaggcacacgttattttgaccctgctggtttagatttgcttctgtttcaaatatggagttgctatgatgataatccagtttattgatggcatttatagagtgcttgatgatacttcggcagtgatgtcgaacctgagcggttacctgagcaactccacatggttaccttttgtttttgtgaaattgttgatggttttgatttatgggaagtttacttgaatatatgttttgtttgcttgaataaactagtattacttatgaaacacactgcttcaaaagctattgtgaaaaatattttgtctgaagagaccattaaagcatgggtgtcttcattttctttactaaagtggttggatgttgcatcttaaatcaatgatgtagcatcattacattgtttcttattcgacttattttaaaatgacctggtttttccttgtttttttaatctaaccttgccctcaaatttgtttttacagtttgatactg

SEQ ID NO: 16252 - DNA, 958 bp, Glycine max
  Intron number 1 from transcript Glyma02g13250.1 (locus Gly ma02g13250) derived from phytozome v7.0 (chr-ID Gm02; pos 11514140 to 11515097)
tgtgtgccaccccctctttaattttttttttctttgtaagcattttcttcctttctactgttgtgaaacgtgttgattctttgtgtgatgcagtttccagttatgttaaactgcatgagactatgattgaccttcatgtttttttttttcttaaagtttctgctgcattgggggggttgtcaattattgaacatgttttatgatctggggcatgtgtttgttgttctttgaattttttttctgcaatcgtcaagtgtgcacttttttcctcccctttcaattcttggcatcgatctcttgaaattttggttgtggcgatgatacccttttgttgaattttgctttctttttgacaattagagagtccacatgcaaattgaatttatggggtgaaccgtttcatgcgtagcttaaagatttttttttcttcttttctttcaacactttagttatattatatgactcatgtatgcgtgtaaccaagtggttgatgacaagtggttaatgtgttgaagttaaggttgaattatttgggtaattactcgagtttaatccttgatggaaatatttctttccttaccttccagtcgaactccggattagtcaaaatttctttttcctgataaatcggagggttaagaccaaaaacaactcatgtaggcatgtaagtcttgtagtcaaacaaaaagtgagattgtctcatatctatgttctgattttttgtttaccttttttagaattttgtttttagctatgaagctgaatcttggacaactttggaattccctttgtgttttaggtttaggaaggctaaatgtcaaagttggttgtgtttttgaatttcattgactttgttgtttctagatctgatattgtttttgatgctttctttgtgtctttctttttttcttttttggtttacaaaatagagcttttggagtttggagtctcttgaacc

SEQ ID NO: 16253 - DNA, 903 bp, Glycine max
  Intron number 1 from transcript Glyma01g23490.1 (locus Gly ma01g23490) derived from phytozome v7.0 (chr-ID Gm01; pos 30279927 to 30280829)
aatagcacaagttttcaaggtttagaaaaccagaaaactttagaaagcttttgacaaagaaagaagaagaagaagttcaaagagactcagaaatcaatgtggaaaaattgcttgtgtaaagaatgaattggaaaagatagatgatcaaatgcaaaacaaagccttgtttttatagactcttcatgtctggtcaagagaaccattagaagagttatgacctttagaaaaacttaaaaccaatttgaaaaagtcaaaaactatttgaagagttacatcttttgatttgttcagaaactatcactggtaatcgattaccaaatcagtgtaattgattacacaaagcttttttgtgaaaggatgtgactcttcacagttgaatttgaatttcaacattgaaacacactggtaatcgattacgaaaacattgtaatcgattacagcattttgaaatcaattggaatgttgtaaattcagttgaaagctttttgaaaaccattttgctactggtaatcgattgcaataatctggtaatcgattatcagagagtaaaaactctttggtaaaaggttttgagaaaaattcatgtgctactcagtttttgaaaaaactttttaatacttatcttgattaagtcttctcttgattcttgaatgaatcttgatcttaattcttggaagcttgaatcttgaaacttgattcttgattcttgaaatcaaatttcctcttgaaccttgaagtgttcttgattcaatcttgaactcattctttgattcttgagatcatcatctttgttatcatgaattgttcttgatctttgagctttttgtcatcacctttgtcatcatcaaaacttcaatgaatcaatcttgattcatcatgaagcttgcttctacattataggtc

SEQ ID NO: 16254 - DNA, 837 bp, Glycine max
  Intron number 2 from transcript Glyma04g04100.2 (locus Gly ma04g04100) derived from phytozome v7.0 (chr-ID Gm04; pos 3012369 to 3013205)
gtatccttaacgattgaagtcgttgctttcaaaaggttagccacaagagatgctgcaatgtgcagcgttttttttttttggtgaaaaatagggtaaaaagttaatcaggcttcctaattagagatatggagtatttattttctgttgtaattattatttaaatcacttcttcttcttttttgccgatttgttctgtcttcttgtttttgttattgtaaattacattttgataggagcatgtatgaagagggaagacctgtgatctttcatgtgttaatgttatatatgattaatttttttgttgatcaatcgtcaagaactataggctataggtgtggttggaactagaaataaaaggagatctttgggatgctctgtttcataccatttagacttgagatattccatttaggttaatttatttgtggtttgtgaaatgagaattatccgtatagaagtctctcgatttgttttctgaacaactgaaaacttgggaaacagcttttcttttcttttcttttttttattcagccaattggctaacaccttgaaataaataatttcattttaacttcccaatagacatgaggattggaaaaaggaaagtaattaaatggtatatatagaattcaattctcaatttgtggcttgttcttgtgagtaccaatcccgctcaaaattgaaacttatacatggtgatttttaatttccaattcaattgtattttttgaaaagcttatataggctgtaattctcttgttttgcttttattttccactgattgattttccttattatttagaggttagacacttttagcgctcctgactgctcctt

SEQ ID NO: 16255 - DNA, 1019 bp, Glycine max
  Intron number 1 from transcript Glyma04g40730.1 (locus Gly ma04g40730) derived from phytozome v7.0 (chr-ID Gm04; pos 46681205 to 46682223)
cgctcgcttccaaattctcttattcggaattgcaggttcgctttcgaatccctattcaattatcccattgctcgatgccaaatgcatgtgctgaccttctgatccaacattaaatttctgtatccatttttttacgcctttatttgttgttttcctgcacttactgcgtttgcatgcttgtctctgccctcggaaatgctgcttcggttctcattttgtgtcgtcggtgattacattggaggaatccatggccgttcgccttggatgttgtgcatttgttatgatctgactagtttaaccatctttcttttcagtaacatcgtaattttattttatttttggaaaaaaaagttgttaactgttaaaagttactaccttattgctattatttgctgcacagttaaaatttttgcatgtgatgccgccacatgagtaattcctggtattgatcctaatgtcggtcggattaggattattgcaatgaaaagtttgttatttaaggatacaattatacatttttttttcggtagatggtaattgttagtttgttagttggagggattgaacccgctacatttccttcccttttttcttaaccatccaaccaaccttatatctccaaggatacaattatacgataagaaaataagaaggcaaaatgtgttgagcttctctcccaaagtaaaatagtcaagtaatcaacttatgcattttggtttttggagaagtaaaatgagagaacttctatgtaagttaatatataaattaattttagtttatgggagaaattcaatttattttaccctcttactctcttatctttaaagtgtgtatgaggaagtttattcaaacaggcctaaataaagtttgtatggagattggtgattgagttgaggtacagtgtacacggatggaaggcattcttcttggttgttgtacttgtcaactatgactctatgagcactgtgctgcatacttctttgatgaaccaatttgtttgtacactttcttgtagattg

SEQ ID NO: 16256 - DNA, 304 bp, Glycine max
  Intron number 1 from transcript Glyma03g31200.1 (locus Gly ma03g31200) derived from phytozome v7.0 (chr-ID Gm03; pos 39114657 to 39114960)
tgttccatcacaagctttttctcctgccccaaacggtaattattaatttctctctacttgttgagaaaaaaaaaaaaagagctaaacattaataaatacccaacactgcatgttcttattttttctcaagatcgaccctcgttcatgcgatcatgtctgtttttcatttttatttttcttttccatttccatgctttctctctttatattttatttgtctgtttatttataatttttgcagcgtcttagaaacttttgatttcgtgcaggtttcaatttttgttttctggggagatctggttga

SEQ ID NO: 16257 - DNA, 454 bp, Glycine max
  Intron number 1 from transcript Glyma01g03490.2 (locus Gly ma01g03490) derived from phytozome v7.0 (chr-ID Gm01; pos 3003685 to 3004138 reverse strand)
agagttttttttttttaaaaaagaaagagtcacaggttagcaggatggaccatgagttgatgagctgcaaattgcagaatgtgatttgtgtcccttggttgatatttgtttttcccaaattctgaaaaagttacattttcaagccaaaagcaaacaaaggaggagacaatccaaccacgtgatctgtccaaatttttttttcttccctgcaaccattttttttcctttctctttttcatcccattctcatttctctctcatcaatcccacaccagcaacctttattctcattaataatataatttgagttcatttatttacttttattttattcctgaaacaagtttttggtcactggttatagttgtgcattacatttgtgtccactttggcattttgttttgtcctgtgtttggttctttctttggttgtgttgtgagcgtgatcctgctcc

SEQ ID NO: 16258 - DNA, 663 bp, Glycine max
  Intron number 4 from transcript Glyma04g11180.1 (locus Gly ma04g11180) derived from phytozome v7.0 (chr-ID Gm04; pos 9487767 to 9488429)
ctgtgtggggtggttttcctggtcctgagaaagaggttaaccaaatgtccctcttcctaataataattccctcttgatgaacccacgttatatatatatttttttaatttaattaatggtttctcattgacaagtcctgttgtttatcctttagcttattttttcttcaataagctactatccaattggaataatagtcattcttcatttagagtttactggagcatcatcgactatatataagtacttaagtagtaaatgcaaagttaaaacttaattatttgcaaataaaagctacatatcctaataattgaaataaggactttagcttgtgaacctcagatcgttaactcgcctccatgaggaagcaaaaattattcactgatgtcacctccattaggttcaatgtcctgaaacctttatcattcagtttgtcttatttacctttgcgcgattggtgaaaagaattatgaatttggatatggtgctgcaaatatataagatgaaattctttgaaatactaatgaatctgtcttctattgtgttatatacttttatattagaattaacttgtagatgtgtgactactttatgttcattttcttttgatgtgatttaacagtcaatcatgccttctactgaatttgactgcagtttgaattg

SEQ ID NO: 16259 - DNA, 548 bp, Glycine max
  Intron number 1 from transcript Glyma01g02350.1 (locus Gly ma01g02350) derived from phytozome v7.0 (chr-ID Gm01; pos 1889590 to 1890137 reverse strand)
gcacgacattttgttttttcttttaaaaaaactcggtaaggattttgtgtgaatgtggatctattaagcttttttatttttttatttgcggaagaaactgaggttatgaagaaagctgaactagaaacaggaaaagagagcggcgtgtgctattgtcataagttttcagttaattactaactcaaaaggttgtttacgtgtcctaattttttgttcctgttgttgtgattatttgtttttgcgcttaaactcttgaatagtataacgcatgcatgttttaattttaatttttaatttttaatttctgactctgcagcaatattctgtgattaattgttgattaagttgctcataaatggcgtgatcactatggttgaggcaattttcattatgcaacgaatattttttccttttataatggagttttgcgttggttttgttattagcatagcgtttttgtgttgctggtaatatgtgaagtggacggtggttttgacttttacggtttctctgtgtgtggcagtttggtttgtttgtgtgtttggagt

SEQ ID NO: 16260 - DNA, 929 bp, Glycine max
  Intron number 1 from transcript Glyma04g12450.1 (locus Gly ma04g12450) derived from phytozome v7.0 (chr-ID Gm04; pos 11529792 to 11530720)
ctcttcttctccttcttcattaccaaacctaaaaggtatgtatgtattcatatcatatgcatgtcctctctctatctttatatacatacactaatgtttctttttttagtttttacgttttggattatataaaaaaattactaatagatggaaaaacgatggttagaaatggaaatggtggttgtggtgtggttatgtgattgtgagatattagaaaatatgaatttgaaatgaatgcatttatatttttgggtaaagtttggtgtcgggtgaagaaagaattaataaatgcaaccacggatccaacccatgacattaattaattaatatacgatcctcctttctttttattcattatgttcatgtgtataacgccttccatcaccaacttcacttctctcacttcattaaaaaccaaaccccaaaattaaaattaaaaaagaaaaaaaaaactctttgtttgtgttctcaacttgttaagcttcgtaccagccagccacactgcaatcgccgaaattttccacttccgcgaaacggcgtgtcgttttggaatcagagagttttggtttttgctttcgtaggttttgattggggttacagaatgaacaagtgtttgacagctacaataaaaaaaggttcataaacgacaattctcacaccttgttagattcacctgtttgattccatcaattcaatgactctgcattttactttttaattttagttttaaaattttaagatttcatgtaccttacaattcgctgaaatattaggtgtttttattgcatttcctttctagagatttttttccccataatttctaattttaatttcaatttttggtttgtgattggagcagtaatttattttcctttatttttttaattttgattttaacttttggttgtgtatgtgtggagcagtgattt

SEQ ID NO: 16261 - DNA, 723 bp, Glycine max
  Intron number 4 from transcript Glyma04g12450.1 (locus Gly ma04g12450) derived from phytozome v7.0 (chr-ID Gm04; pos 11531430 to 11532152)
gaactgataccatccttgaggtaaagataataatatatatcatagcccacagaatgtttcagtgtatcaaagtacaatacctaatcccttggtttatctgattttgtagattctaaattgaatttgtttgttatataatttgaacaagtcagatatagaagcattcattagcctctacctcacagattaagctttcgcaataaatgaccttgagatggtattagggctcttatgaccaagcaaagtggtcaagagttctgtcattgctgcctaattcttctacagataagcttaatttctttgcaagacaaaatttgcattgtctacacttcaagtgaggcatgttaaatataaaaaaaccattgatggacatccacctaatagcttaagcttttaggagagttgggctttgacataatattagtctctatgatcaagtggtactgagtttgatatctgctacccccaattctgtccatgcatcaagcacaaatagttcttatgaggggacatgttagatataaaaccattcattttccaaatggcataagattttaggagagttggtccttgatagaataaaacagaattatttgcttttttaatctttgaatatttcagcatcagcatattttcaatgctagaagacaccggatacatgttttattttggttgggtgtttttgaaggattttgaatttggagagctggaagaagtattgca

SEQ ID NO: 16262 - DNA, 342 bp, Glycine max
  Intron number 2 from transcript Glyma02g02650.1 (locus Gly ma02g02650) derived from phytozome v7.0 (chr-ID Gm02; pos 2016139 to 2016480)
ctctgctgggtggagccactctggttttgtttcaggtttgcactcttctatctctgtctcccctgtttttatgaagtgtatgaacatgtttgggaatccgttgcaaaattatgtttgaggcaaaactaattttgctaacggatcatgacccttgcttttgcgttcattttgtttttaactgttggatttatcttgaaacgtgcatcgcagcgttttcaactgcaaatcaaacattcattgtaatgtagttgaggtttgttctaagttgaaagtaattagttttgtcttttgattagttctttggttggttttcagatactgggtttgtgttcacttgtgggg

SEQ ID NO: 16263 - DNA, 340 bp, Glycine max
  Intron number 1 from transcript Glyma04g05560.1 (locus Gly ma04g05560) derived from phytozome v7.0 (chr-ID Gm04; pos 4225277 to 4225616 reverse strand)
ccgtcattcttccccctctctctttcaagctcaaggcatgtttctcttttcttaattccactttcttttctttttcttttaacttgtttctttcttttccattttcatatgcccatgatttggttcccgtttgccatcgtttttgcggttgtatttttgtaaacggtgaaattgggtacatgcacgtgcatatgtatgaacgagggattttgggtggaggaaaattgggtaaagatccaatttttcgttgaagcatcaggaattcactgtttgattaaggattaacatttctatttgttttttttataaaaaaaattgtgtttgcaggtcataagggcat

SEQ ID NO: 16264 - DNA, 879 bp, Glycine max
  Intron number 1 from transcript Glyma05g01050.1 (locus Gly ma05g01050) derived from phytozome v7.0 (chr-ID Gm05; pos 626246 to 627124 reverse strand)
cgagtttctcctactctaatattatctcttcaatgcatgcttaattgacttgtatggttttccctcctgttttgggtggtaatttatgcttaattcagttaattggtaattgattatccgcattttaagttgtaaaacatattgatgaagcaaaggtgagctaagaagctgaatggattcataaagacgtgagtttctcctacagtcctactcatatattatcacttcaatgcttgctttattgtaaaaaaataacctatcattgacttgtatagttctcccccctgtcttgggtcgtaatttatgctcagttggtaattgttgtaggcatttgaagtcgtggaacatattgcatgatgcaaaggtgagcttagaagctgagttgattctaaactcaaactttgtctacaaaagttattgatcaagagtaaaaaggggaaaattttgttctccgcagtctttagttataagcaccgttttttactgttttgttatctactttttaatgagtatgcacctttgtccattcattaaaattcatagaaaaacaattaagaaatgaatagcagggttactgagttgaatcctgtgatcctacaatatcgaaactcatcctgcagtggtagttttgcttagaatcatcgtagcgagtatgatgcgagttttattacctttcatcatattatcaatattattgtaactaatactaaatctattagaagaatgtttatttattgtaattcattaaattatcatggtgaaactctttagggaggagctatttgccaaaagctatattagctcctcaaagatgagaaagatgtgcattttgcatttgcaagcatcagaaaaaatgggattaatcaagtaagctaaggc

SEQ ID NO: 16265 - DNA, 903 bp, Glycine max
  Intron number 1 from transcript Glyma03g00700.2 (locus Gly ma03g00700) derived from phytozome v7.0 (chr-ID Gm03; pos 408400 to 409302 reverse strand)
tcgctctatcgctcaacggatctaaggcttcaggtacgaatcctaaccctagccctcttctctaagctttctcaatttcatctctcgcgagcttttatctcagatatctgaatatctaattcgatttttgctattgtttaattgattctgccaattaattgtgtcgatttgtggattggattttgtgcgaaatttgatttcctttaaaaaatttgcctttaaattctatacgctgttgtttgtgacaatgccttaccttctctattctatgtacgctctgtggttccaatggattttgttgtgtgaatgtcttcactgataccctttaggtggtgccaacagaaatttctgattaatttccttatgggttgttggcctgtactttttacataatcccccatcttgtgggcatattaatgttttagtctaaaattgttgccacatgtaatgtagagttttttctgttgacaattgtcttttgatgtacacaatctgctttgactccttgtggttactgttttcttcaatcaattttggatttttatatttgttcatgattcatatccttgtttctccggttgttaggatgtttagcatttagcatggagttaatttgtcaaagggacttccattgttatgctcttgagttagtaggatcttaggaatttgttgctttaccatattggctgtcatggtttcatattccatgcttttagtgcctgtgcagttgagtgtgaaatcaaccctgatcgttttttttttttttttttgcaattttcttgtgtcataccctttgtttatttggataggattgtctgtcattcatgtagtctttttctttctcttttgaattttgacttaaattatttattctttttgttttgtgtagtgtagtctgtaatc

SEQ ID NO: 16266 - DNA, 626 bp, Glycine max
  Intron number 5 from transcript Glyma03g36900.1 (locus Gly ma03g36900) derived from phytozome v7.0 (chr-ID Gm03; pos 43713625 to 43714250)
ccaagcaactcgcggagcttgaggaaaaaattaaggtttgtttctaactttgatattgcattgcaaactgcaacttctttaaagtcctattctttcatgcttttgacttgtttctaatctacaaaatcctaattaatagattttaagtgtatgtttctaatctacaaattaaagtttgtttctgttgtatgtttattcgtaagatgttcttctcgttatatgttgtcatggataatattttgttttgtttactcattctagttcaataccaatgtagtaacaatcatcaattcaaaatgttgaatcagttgaaatttcaaaaccatgcagaggaatcatgattcgctttcgtcattctcttaatatgtactttcttttgttattggctatcatgactcatgagttttcattcctcgattttcaaaaccatactgggaatctcctctcctatatatttctcgtcatttgtagcctcttttgtctttggctatcttgagttttcaagcctctcctctatctttttttttttttttatcttttccccatttccccatttcccttggtatttagaaacttcgtaattttgtcctacataatgataggtgttactgcttcccagtgatcct

SEQ ID NO: 16267 - DNA, 576 bp, Glycine max
  Intron number 1 from transcript Glyma01g04270.1 (locus Gly ma01g04270) derived from phytozome v7.0 (chr-ID Gm01; pos 3773825 to 3774400 reverse strand)
aaggtgctaaggtcagttccaaggggtttagatgtattacgcacttctatgaattcaagatttgagttaattactgttgggattcctctattttatctaattattgaaaggtccttataatatatttttggatgatttttataaaggccgtgtgtgtatatacacttttatctgtttgggtgatggggtagtgcagatgaggagtacaattgattattataggcttatttgttcactgtttcagcttgtttaattatcggctatcctatatcaagcatatacaggatgactggaatagctattacacaatgttcctctctctataatactgtatttgctaaaatatattcattttttatgccgtaaagaacaacgacgaagaagcttatggcttaactaaccatgatgattattagaattatgtagatatgtttataacccacctccatcctctctcaaacagataaaagaaaataaatttgttaacagttactgctgatctttctcatacacttaggtttaactattgtattcaactattgactatcaatatcctattcattctttacagtgctt

SEQ ID NO: 16268 - DNA, 947 bp, Glycine max
  Intron number 6 from transcript Glyma01g03710.2 (locus Gly ma01g03710) derived from phytozome v7.0 (chr-ID Gm01; pos 3169438 to 3170384 reverse strand)
gatccatgtatgtcttccaacctattttgcaatcgattctgtcaatgttggatgggtcaggtttggggagaaaatatcaatccaaacaaacctaacttgtcaactgttgggctgtaaatatcatcagatcagggatgaaacccaacaattaacagcgtgttttgatcatatctatgtcacttcatattggtggtctaaaaccacaattcttataaggaagacaaatgttccgttacatacatgtgaggttgcagtaggaaacatcctaagcatatatcttagggttggatgggttaggcccaggggattagattcagggctgattgggtaagcttctctataatcacttctaagatgataaaataagaaaataatggaatgagtttcttatgagttaaaatgacctctccattaactaatgtgtagatatcttctcatcttttacaaattaactaatgagagaacttttacaaattaactaatgaagggctcattttagcttatgaaaaaactcatcatttttttctcttaaaattgtttctagtgaagcttatccaaacaggccctcactgtgttgggaacatgtgttgggaacaggttgcgatattaaaaattcaaaactgaccattgaccttgttttggttgggttgtcattaagtaagtttagttggtaagggtacaaactttgtccaaaattatagtttaaagcatgacaagtactaaagcatactaggagtttttatccatcaattaagtggttttccccttctttgagattatacctttttttgattaaaatatacatcactggtattatcttagggatcactatagccaaaattacttttaaaacctaaatctctataaaagacaatatcctcctggtttgacttctctaacccttctcttctaaataattttagacacatccttctcaaagttgtttc

SEQ ID NO: 16269 - DNA, 558 bp, Glycine max
  Intron number 1 from transcript Glyma01g03710.2 (locus Gly ma01g03710) derived from phytozome v7.0 (chr-ID Gm01; pos 3171638 to 3172195 reverse strand)
tcagttgataaaagaaaaacttcactgtaacaaaggtaacaaatatgaatccttttccttagtttcatgtttcatctaatatgcagagtaccagaaacaaactaacagattttttagccaaaaccaagaaagagggggaatctaaagaaaatatggaagagggggaatctaaagaaaatatggatattgatcatctttagcatgtgaaagcttggcaaactcaataattttgcaaataaagggtttccacaattcatttatgctagaaaatgtgctgagcaaccgttttcccagtttctctttctggactctggttgtgttgcatgagtttattttatttgttaaagggtggtttaatttggatatcgtagttagcaaagtattggttccttctaaggatttgaataatgctgctcataaagggattagccttgggctgagaaaggaggattgatgttaaaaaagaggataaagtatctttagtatatgattgtctattatttaggtgttttgagtctttgaaatatacaattgattgttcaactattgatctctcag

SEQ ID NO: 16270 - DNA, 880 bp, Glycine max
  Intron number 1 from transcript Glyma03g35450.1 (locus Gly ma03g35450) derived from phytozome v7.0 (chr-ID Gm03; pos 42647825 to 42648704 reverse strand)
agcttccatttcgatttatacttgcgcacgatctggtactttcgcttctcttactgtagctcttaataatgcacattttcgcaggctttactttctttcttttttatctcgtaatcttgcgaaagagattgaagaaaagaaatcatatacagttagttttattgattctccatgggattaactaggctattctacgtagcaaatcattctcatgtgaaattttatagtaaaggctctgtatttcttagggagcagtaacattgttattcacatctcaaattaatttagataatgacatatcttaatctccaattaaacctagttaaggagggagggctttggagtaaatgtattgctctttagtttttacttttaatttatctgtctcactatattatgtaatttttttacgtatattttatatatagttcagtttcttatttcttacttttgttccttttccaccttgttctctgtgtacattgtcctccgacaaatagttaagcaacaatttaaactggcctctattttctgggcaactctctggcatcttagttaattcatttctcaatagatgtttttgtctttgattggcctgtttgagcattgttatcctcttgattttttgtttcgagttctctcttgcctgtctctgttacttttgttgttatgatatgatgatccctggattaaaaatcaaccatattgctactccttgatccatacctcatgacacagattcaatcaaaattcttactctgctattccatttggcctctcatattgttttccccccttaccatattttctatctctcttctatgaatgcttctggcatctgtgcttccttcacagttcccctgcaagtttgcttttctag

SEQ ID NO: 16271 - DNA, 288 bp, Glycine max
  Intron number 1 from transcript Glyma05g22240.1 (locus Gly ma05g22240) derived from phytozome v7.0 (chr-ID Gm05; pos 27313467 to 27313754)
ccgagtttgaaggcaagataagctggcaagatgttgtgtataaggcaagatcctcatgtattctgtcattgtaatatttgtttcaaaaaacatagctcttaatgaaaggaactaaatattgtggactatggttgtcaaacctaatcttccttcactataaattcaaaattgtttttctgcttattgcgagttgtgcatgcaaaactcctgttgtacaatataatttgcatgtgttattatttgaagaacagcgatgatgtttactgctctgcattcagcctcctgcag

SEQ ID NO: 16272 - DNA, 677 bp, Glycine max
  Intron number 2 from transcript Glyma05g22240.1 (locus Gly ma05g22240) derived from phytozome v7.0 (chr-ID Gm05; pos 27313911 to 27314587)
aagccaggaacatagagcttgatcttgggttgcaggtacctctattatttcctctcattctgcttttcatttttccttatcaggctatcacattgacttgatgtccgagggttatggaatagggatatctttgatgcaactctgaacaaataaataaccatgcatacttctattgttcccatccttgggttcaatattcatattaaaatggccatgaaagttgtttaatgacaattaatgttgtcagaagaggggtttttatttaacctgttgtgatacttgcctgtgattcagtggaaatggggaaagtaaatacaaaaagtattctgaggtattgctacaacacaattgataatgaattattcctgataaatggatcacttcggtttgtttgttggctgttttaggtatttttttatggctctactgtacttgggttgtctatgcacagtttacctcattaaatcaaagatcatcttaaaaccatccaaatatttatcatgttaatacttaatagtttaattaaaaaatgttcaatgcattttacaactttcttaaatctccctagaaccttccttggaaaacatgaagtcagtagatcagcttggatgttccctagctcctgttctgttctgttctgagtttgatgctatcgaatttcttgttgattttcagct

SEQ ID NO: 16273 - DNA, 728 bp, Glycine max
  Intron number 1 from transcript Glyma03g41980.1 (locus Gly ma03g41980) derived from phytozome v7.0 (chr-ID Gm03; pos 47319832 to 47320559)
tttcttgcactaaagagcagctgcagacaaacaaggtgagttctctctcacatatccatctttgttgcttttgactgtcttttcttctccgaaatattcatgcatggctactaccgctcactgggcaaacatggtgttcgatttttttctcttgtcttttctttgatgcacaaattccgagctgttcattctgaggtttggtttggtttgtttaaaagctgacacaaatatgaagttccactagatttaagatttgtttgtatctttgttttaattttctagctatatcaaggatatatatgatattcgtggcaaatatagtagaaaactcgatccaccgtatattggtctcctatcttctccttttgtaccaaaaaaatttatgatcatgatcctaaacacaaaaagcactgccacagctttaacttttactctttaattaccttcttgctcgtgtgatgattattatcaaatatataacaggaaaaagaaaaggattaattattgatttgttattattgttgattcttaaagtttactcattcctcttgttttgactgtcttgtaaattacctccttaatctgttcgcgtaatgaagttaattattaccaagtcatatgcatggtcttgaaattttaatttttatctgtgtggattcttatcacgtacatgtgaacattacgtaattatagcctcttttggggttggattagctggtgagatccat

SEQ ID NO: 16274 - DNA, 562 bp, Glycine max
  Intron number 1 from transcript Glyma02g18260.2 (locus Gly ma02g18260) derived from phytozome v7.0 (chr-ID Gm02; pos 16871353 to 16871914)
ttcgctgcacgccaaacattgcactgcgcgaaaaggttttctccctctgcttctatcatttccttcatgttgggtatttcattcactttttttccccatcttttttcgaatccctttctctaaaaatttttaaatgatacagtctggcttggtaggtcacacaagtttaaacattacattccgtaagcgccttttctaaaatcttcgattacattctttagttttcttttgagtatttaaagcccttaattcaaccgcgacgaattatgatgcttacgaggcaaatcggtttgtgctaacgtgtttgtatttatagatagtgtctctctttgagtctctgtaatgaatgtaattcagtttgtctattagataataaaaacaattatttcttacctatgacatggtaacaaataataataaaaaaaaattattgttgtgttttaatcatttggtctggttaactaagttccttgatgttctgggatgatggcgataatgtttaactaagttccttgatcattttacagcgtttaataaaggtaactaacttttgtttggagtc

SEQ ID NO: 16275 - DNA, 848 bp, Glycine max
  Intron number 1 from transcript Glyma03g08280.1 (locus Gly ma03g08280) derived from phytozome v7.0 (chr-ID Gm03; pos 9132720 to 9133567)
gcaagacgccggaaaggtacggttctctgctgtgacttcttttccccctccagttattgggcatttctactttctatcgtttgatgatgataattagagatctgataatcacacactctttctagtttaagaacaagatccattaaataagaaataagattcacaggttagatttacatgaattgtgccaaatttacgagtctatattagttttagtttggaatgtttttaaacggttttggtgtgtttgtcggaacagatgcttggctttgtttgttgtgtaatgtggtcagttcctttaattttgtgtttgaaatcatgaaaaactaccgtattttaaaatttaattcttttatgctatgaagtcctaaaatattattttattaattttaaattaatttgtatgtttagaatgatctaaatattaattaaattcctttttctttctttctaattttacgttattattccagtttagaacgatgaagtgaaagtcctattgcatgttttttaaatatatagatttaattgcaaatcaaattgtgtcccaaacaaccagaatgcagcaattatccattctagaatatccaagtggtctagatcaatcggttgaatgaacgatataaatgtctgatatttcttcaattatcatcacagttttttttactgcaatccaatcacatagttgatgccataaaaatgtttaagttaactaataaatggaatcaaagaaattatgcgtgttatttcttttgatagtagtatatatgacgggcatcttaattgattatgaacttggtctttgattttaaggtggagctagtagaagggtcatcataccttgggca

SEQ ID NO: 16276 - DNA, 905 bp, Glycine max
  Intron number 1 from transcript Glyma04g01720.1 (locus Gly ma04g01720) derived from phytozome v7.0 (chr-ID Gm04; pos 1148491 to 1149395 reverse strand)
ggagctcccctttcacacttttcaggtacactggtttttcaatgccgcaatcatgtgcaactttatttttttctcagtttcagatgaggtctttctttcaactttcctccaaattttccatcttcttctacccttttgactttctcctttacctctttcccatttgatccaactgcattgtttttctctgtggtttattatgtttttccgctgtcaattgatgttctatatttatgcggaatctcatgcgttttgtcgtttccacgccttttctctctcactttctgggggcgattctgttttttcaaatccaatatccatctaccaaatattctttttttttccttcctttttccagcatagaaaccacgccaattactttagcattattgtgcttcttcatttcaggctatgaatgtagtgttatcataatattttctcatttgcagaaagataagtttaagagtcatcatgtagatggagtgacactaaaaattaaaccacaacccttcaccatattcttttgtaggtgtggtaaattcttgggtataaatattttgaaatgttgattttagtcccgaaaaaattagtatgtttttagcccctacaatctaacaagaaacacattttaaacacatttttgtagtcctgacgagggactaaaactacatcacttttggtaaatgtgtggactaaaaacaccttaaatttttctaggaactagaatcaacagttcaaacttttttggtgaacctaaatactttcacaatgctgcaaattgcctagtattattttagttttcatgttttagaattgaatatttgtgtattctcatatagttttttttccctgcttatgattcatgaacaggtcgtggctataacagtatttttcttgctatctat

SEQ ID NO: 16277 - DNA, 812 bp, Glycine max
  Intron number 1 from transcript Glyma02g44030.1 (locus Gly ma02g44030) derived from phytozome v7.0 (chr-ID Gm02; pos 48717084 to 48717895)
ctaccaggtaaatgctttttcaagttttcaattctaacctagaggaataatatcaacttaattattagttcattgttataaaacataagcaacagattaaaaaaatgagttttgttttcatttatttttgtctttataggtaacgtttatcttcacattgttttttttttatatagaaaacactttcaatttaatctatatatgtataaatattttcaaatttgttcccgttattgttaccccaacaatagaatgaaattgatagagttgtttgaggatattgaaaataatttatcacatctaaggataaggatgaaaaaaaatggaggtcacaataatttactctaaataatttgagttataagtagctactatctaaaatcatgctatcatcgtacatcccaattgtaataaataatctcatcaacttttttcaaaacttgtgggtatatgtttagattgatgatggaaattaatttttataaaatttattattgtagaattaattttggtaaaagtaaaaattactcttatttgctttaattttatcataattaattttaccataattttgaaaataatttaaatatataaaatttgaccaaaatcaaggttgatccactcaatataatctatcttaggattttacaagcggtaagtctaatttatgtggttaccaaaagaaataaagcctctttgctttctattaaattttcatctaacttttttgtatttgcaaaaagaaaaaagaacacttcatctgctttcaatatgcaggttttagaagggatcaattgaaggttcaagtgacc

SEQ ID NO: 16278 - DNA, 856 bp, Glycine max
  Intron number 1 from transcript Glyma02g43750.1 (locus Gly ma02g43750) derived from phytozome v7.0 (chr-ID Gm02; pos 48476634 to 48477489 reverse strand)
tccggtgatcgttcttcgctcacgcacgcgttacggtaatcctttctctctttttggttcttaatctgaatctattcacaacttgacatttagttagtttgttagttgtttgagtagttcattccctttgttggttccaatttgcaatcatgttttagtttgtatcgatgattgagtcttcctttatcacgttgaatcgcagttgataaatgataacctgtgttggccgggttctaacagctcttgtgatttatctaacttgcatatttgcctaccacttgcttgatgaaatgcctgagctaatgtcattgtacaaatcttttagagtaaattacattgacacctcctgaggtttcaccaattttctcccgatttccttctgttttttacccttacactaaaccctcttaattgtttgaagaacattacactgatacctcttatacattacattgactcacttaattgtttgaaaacattacacggtgtaccccttttaggtggttgctttaaattttaaaaataaaataaaagaagagagttttgttatgtgcaatctcaagcaatcttaggggagtgtctgtgtaatttactcaatcttttattatcatcttctttaatctgttctcgtttcaatagcaaggaggttttataaatgcctgcttatctttccttcactactttatttgcatatacttttgtcactctctaactggtttcttcaatgtgagttattcaaggtaagattttctgttctgcttgcatcaagttgtttcttttggtatctagttagagtatgaaaaacatattaacttgattttttttcttaatgctgttctgacttcaagctgaaggc

SEQ ID NO: 16279 - DNA, 745 bp, Glycine max
  Intron number 1 from transcript Glyma05g09100.1 (locus Gly ma05g09100) derived from phytozome v7.0 (chr-ID Gm05; pos 8917972 to 8918716 reverse strand)
ctgaggaggagaggctcatttacaatctcaaaagagtgtgatctcaaactgttcttctattaattgtttttggagttcaatttgtgaaccgtgttttcagttcatctgttgttttgtggtgtgataagtgtctgagatgtgtgttcaaatttatgatatggtttgtaagtctgtgtatagacatcttcatagtcaggtattctaattccaaatattttagactatactaaaatgtatgtttttttaaagaacataatccatgtacattacttctatgtgaaagtggtaaacagaattggcttataacatatttgtaatgaaattcagttgattggttgaaaattatggaacccgagatacatcaaggaagtaagaatttgtttgttgataatagatgaggactgtctttatgtttgaaagagagagagagagagagagagtaattcttaagattcttctagtttcttcattgaagacattgaatatttcctattagctttaatttgtttcattttggtttattctctggctttgattgtttagttattagcgcatactgataatcataaaatggaaaatttcaaatcatgataacagattgcacatttgtattacctgatggctgatatattttttgcttaatgttcttgtagtgcttgttatatgaacatttgactaaatcttatttccctaccttgcaaattttgcaggccaagaagaaagtggcattgcttctacagaaact

SEQ ID NO: 16280 - DNA, 481 bp, Glycine max
  Intron number 3 from transcript Glyma03g27590.1 (locus Gly ma03g27590) derived from phytozome v7.0 (chr-ID Gm03; pos 35325624 to 35326104 reverse strand)
gaggagcgaccgaagaagaaaaagaggaagaaaaagtcagtttttatcgcttatgtattttttttttttacatctgcttgtggttgaagttgatgagcttatatgtttagagaagaaagcacaatgtttgataatatatattttttattattttagatatatgtgtatatgattatcactcttgcatcaagtagctgataggtttttcccttaaaattatttacaagttttttgaatgacataattacatataaatttgtcttctattttttaaaagttcaacaatgcgcatggactggcttctgctgcccttgcttttttatccggtaccccttcattatgtgtccctttggagggagatagacattggattgaaaaaaatttgattgcgtgcttttgtctgtacttggttgaaattttaaacattaatgatattgacattcatatttgacaaattaatctcactgttttagggaggagt

SEQ ID NO: 16281 - DNA, 435 bp, Glycine max
  Intron number 2 from transcript Glyma03g27590.1 (locus Gly ma03g27590) derived from phytozome v7.0 (chr-ID Gm03; pos 35326191 to 35326625 reverse strand)
tcgcgaggacaacgaagacgaggacgaagaagagggtatgaacttttgattcggtcgaaatttctgaactacgcgcttcgtgaatgctattttttgttttatttttcagtttttattcgcatgctaatttcttcagtggcggtggcggtgttgggtttggtagaacattagtgtttcgaccttgaaattagggttttgatgttctgtttgatgggggaggggtaagggatgttgcctttggtaaatgcaatgtgattgtcagtttagagtttatcattttgctctttttttgttttgttttttattttttcattttgtttttgcttatatgaatgtgatctttcggatggtgtctgattttctggagctaataatgtcttatttttgttgtttctgatactctttttctttccctcgtcacttcagaagggcagg

SEQ ID NO: 16282 - DNA, 825 bp, Glycine max
  Intron number 2 from transcript Glyma03g15850.1 (locus Gly ma03g15850) derived from phytozome v7.0 (chr-ID Gm03; pos 20174113 to 20174937 reverse strand)
attggaagtaccttctggctggtcttgtttgtcaggtttttcccccctcttttgatcaacctttttgcaatggctgagtgtggtcgctcaagttgtgctttaccttttgtgtggaatgtcccttttgttttcctttgatggggagagggaaattttctgaaagtgttttatggttggtggattggaactttacttgcatgctacatggagttcagtttttcttgttcatggtttttgttggtgtggctagtgctacaattgcttgcttttgttttattttgtttgtttctggtttctgcatgagggttaccatactattactatcacttgctttgattaccgaagcttattttgtcagcgattatgaagtgtcagagttgatgtctgagtgttttaatttgggaattttaggaacttgtaactgctcgaagcatcttttgtcatattctgcaactatgatgatttgctttagatgataagttatttgttcttccatcttaaaaacaaaattcaccttatcctcacttctctgtgaaactttgggttctgggaagaggattaaatgtttcatttccatcattggaaactaatttgatagtttgcagctagttgttgagggaagatattgagggccaatgttcaatggaaaagaaataagaatgacaattttttgtaaagtatatgtttctgtgtttctattcttgtctatgttatgtatgcataaagtgtaacacagtatagtacattgttttacttggatacttgacatactatttgttgcaatgtttgatgtctgaattttaactgtttctctacagtatatac

SEQ ID NO: 16283 - DNA, 576 bp, Glycine max
  Intron number 1 from transcript Glyma04g35710.1 (locus Gly ma04g35710) derived from phytozome v7.0 (chr-ID Gm04; pos 42145857 to 42146432)
gagggtaaagtagagaaaggggtggttttggatctaggatttgtcatgagtgagcgctagccttcattttcagctttgtggagagtgtctactcttctctaagtgttgactttagcataaattctgtaatattctttgagtttctcttgaatatgtaaaccaagttctttttgttcaattattgacttcttttgttactcataacaatacacccaaaagttgttcataaattctttgaaatgtaaattcttccactggattcatttattcaattttcttcattaagggcctgatgtactaaaaaatcaaaaaatgagtataccttgttccacctttcttgttttggatgatatgtaggattctggtatccctgcccggagttttatagtgatattttcctatatgcagctttgatcactgtgtgaacctctagagctcctttcaagtacatgttttttgtttcttgttcctttctgttaccctttagatcaagatttaagatcaatatcagttcctttgtattgcaagactttcatggaagaaacatttgttcccttacgtggcattaagaacgac

SEQ ID NO: 16284 - DNA, 821 bp, Glycine max
  Intron number 1 from transcript Glyma04g04150.3 (locus Gly ma04g04150) derived from phytozome v7.0 (chr-ID Gm04; pos 3038998 to 3039818 reverse strand)
ctatccagaaattacgaggagaggcgcgttttggggtaacgggatttttctcatctctctttgtttatgctgccatatgtttggctctatttgcattttgtttttattattattcttggctgtagatttctataaccatattatttccatgcacactgatttagaataagtgacattttgttgatatttttcaagtgtagcctagctggtgtcttctgtatcaaagcttttcttaatgaaattttagagtttcaatagatggctctggtgactgttgaattcttcccatcattgttggccctacctttttataggatttatttatgtcaatccttaggagaaagttgatttttgtgatgtctaactagttttattatgttagcatatattctagtagtggttcgaagcttgcttttaaatttgcactttgtgtaccgagattatatgataaatatttgatgtttggattctaaaagaaacttaatggatttgagtgtacaaatcatcatcttatcctggagaaattgttaggtagtcttggaccatcatggtccctattaatctccatatggcatgtaatcaagtgttattaattccttttttgtaaattataaaacttaaacacgtgtcacatagatagagattgaccataatcatggacacatgaggtccaggactacctaataatttctgcttatcccggctttgtatatattactgttgaattcagaataattattatttttttgttgttttcattctttgtatttgttaacagatatacttatgaattattaggtactctccagagcaattatttg

SEQ ID NO: 16285 - DNA, 421 bp, Glycine max
  Intron number 1 from transcript Glyma03g11960.1 (locus Gly ma03g11960) derived from phytozome v7.0 (chr-ID Gm03; pos 14728464 to 14728884)
cagaaaaaagggaacttgtgagtcctattattcattctggtgtctccgtctttgactctcttagaaaaccaaaaacacaaaacaacacaccaaaaaggttagagtacccaccacttcatatcttccacacaaaaaaactccctcaagcaatccctatctatctaagatcccaagatatatagtagactcatgtggctctcaatttcttgcttaaatatgggatcacttgcataacttcttcatccatacatacatatccaccatttttctctttctctttattgttcttttccctaagggtttttgttttgggtgatatattttgtgatttgtgtaccaatggaacagggtcaatgttggacaaagaagaagaagtactctttgaacagcactagtcttggttcaccaacaaacccttcct

SEQ ID NO: 16286 - DNA, 679 bp, Glycine max
  Intron number 2 from transcript Glyma02g12450.3 (locus Gly ma02g12450) derived from phytozome v7.0 (chr-ID Gm02; pos 10721378 to 10722056 reverse strand)
acgaggtcaccactgtttctgtgttttccggcgaggtacgtactctccgtgttttttgcgtttgatttctccgcggtttatctgttatgttttttgaaatttgatataaaaaaattgatgttgtgttatgtttttggatgttctgacttctcagttctcatgctctgttttcttttctcatttctgatattgtgatgttattattgtgtagttgtgttcttgaaaaatgtctacatatataattttataatagacatttgcatacatatataatttttttattaacgaatagaagacgtatcctatccttaattttaaaaaatttgcgatatcgctgtatccgtgtcgtgttgtacctgtgtcatatcccgtatctaatcttcataggtgctattactttgaactgtatagggtacttccctctataacaataattacgcaattgaatcaacagtagcttgtaactccaggtctccttgctcactacgtcattgataaaatgcccaaatgaaccacttttttggatatgtatgctgtttctattgatatgcctttttgggtgttatttgttgctgggaatataagcatgaacttatgtgatatttgtgtatgcattacaatttactaatataacttgtaattcattgctggccaatccttttactaggactctcatcat

SEQ ID NO: 16287 - DNA, 721 bp, Glycine max
  Intron number 1 from transcript Glyma01g39060.1 (locus Gly ma01g39060) derived from phytozome v7.0 (chr-ID Gm01; pos 51035041 to 51035761 reverse strand)
gtgtcttcaaaattcaccaccacgcaaacaacgccgtatccagatctactggtgcaacttttttttcttcttcttttccttttttttttccccaaagaaaatcgctgagattttcgtctttcaagatttcgacgtccttcttcttattgcgccaaagttattgattttctcctttcccgtatttgaatcgtttattggtcattttcgtgtcggttaatttcttgtcgaaaaaaaaaagaaagaggaaggattaggagacgcttttaatgacctagattagtttaataatatcacgtttgaaatctgtttttaaaatccgcgatcacgaatcggaacatgaagcttcgttgaataataatccattttgttattctcaatgattcctcaatttccatgccttctatttttattttttttacagctatggcgatttaattattagtattattcttattgttatctccatttgactcactcgctctctcttgtttgtttgcgtagaaaaataaaatcaggtactgcagggttgtgaaagctagatactaattagatcgctgaatcgaagaaagagaaacaaaccatagtactactactaattttgattagggatttgatctaatataatataatttcacgatttaattaaccgcagaagctgcctcggtgtgtgagggacaaaagtgagtgagagagagagagagaagaggagagattggaaaag

SEQ ID NO: 16288 - DNA, 520 bp, Glycine max
  Intron number 1 from transcript Glyma02g14290.1 (locus Gly ma02g14290) derived from phytozome v7.0 (chr-ID Gm02; pos 12842838 to 12843357)
cctggttcatacgtccaaagggtatgcatctatgcattcaaatctttgtttcctttaattaattcggtttctatggcacgctcgaaaatttaagggttttgataatattattgagaaattctctttctctaattttcttctttcttttaaatgtctaaactcattcaactattgactcaaaaactagttacaccaaaactcttagatttcaaaatatcattctctatctttcttctttcatatatttaaactcattcaattatattgagaaagtctaactcaattaattaagcaaagtgcataaattgttgttaaagtcctcctgtatatgtctttaatttttatgaacaaaaagaaactcattcaactatatattgactcaaaaaaccaattataccaaaactctttgatttctctgaataccatagcaaatcttgcatatgttgtcctattttttccttccttcattttttgtttatgtatagggtgatcaagcttctataattggaggggctataga

SEQ ID NO: 16289 - DNA, 931 bp, Glycine max
  Intron number 3 from transcript Glyma02g10420.1 (locus Gly ma02g10420) derived from phytozome v7.0 (chr-ID Gm02; pos 8319254 to 8320184 reverse strand)
aacgatctaatgtaagtgaattaatgttatcttaacactgtcttgtgcaatttgattttcattgtggtgtgaaataaacgaaacaaagtgaacgaagtacgcataatccaaatttgttctttttcgagtttcaccaggtttagcttgccacgagaacaatcggattctatttcaatatgtaaaattattgcatgtttggtatccgtatcatccactaatagtaatttacaaaagacaaaaatcaacatgataattaattgaaggattctattaaagcatagtataacaccattattttatatcatcaatttatggttttactaaataccaatcgacatgataatacaagcaaaatagaccagacaaagctaattcattcgagctgcatttgtttagccataaccggtttgaaagagtgcatatttttcatgaagtttcgtattattttgattatataacatgcatcgaaagaatcttgattaaattttaacgatggccggaggttagaattaattatatcattttgagataagtggttgagcttggcatgcccttctctccatatgtgtttcatgttttattttgttcgtacttctgaaaagaattttagacttaaatatcaaaattcatataaacaaaatcttaaggttaataatttatcctaaaaacccctataagaattttaattaactttactgttaacaatttgcatagaaaaaattgcaagtcccggttcacttctgacagttctttgcaatagtacacactctttaatagcttaattgtgttattcatacaacaattcttataacattttcttatgtctatctttctcatttataacatgttatgcttttctctcttaattatacaatttgtcgtgctagttgttgtacaaataacacttctctttatagtgacttccatatca

SEQ ID NO: 16290 - DNA, 477 bp, Glycine max
  Intron number 1 from transcript Glyma02g10420.1 (locus Gly ma02g10420) derived from phytozome v7.0 (chr-ID Gm02; pos 8320416 to 8320892 reverse strand)
agaggtactaagttgtatttggttttgtttatgactagcctttcatgtgtgaaattttacagcatctttcgtcttgggtttggatgttactgtattcttcattacatgggaattattccaacaatgccaacatgagtgattgagatcatttttgctagttcttgcaattttgtgtattgattactagcatttttattctatgagaacccaaagtgccggtatacctatttaaaatcctttttctgttcactaaagaatctgcattcaagtttgagtgcatgtgtacaattttgtgcttcaaatttcaatcctcctttatgactagcaaacaaaaccgtaaccataaccttctcttccaattcctgaagtgcaaagtcatggtaatgcatcagcaagatcattttccgccattaaactccatccatgtcctacaatcttttccttcttgattgatatgcaggtgccaatttgcccaac

SEQ ID NO: 16291 - DNA, 864 bp, Glycine max
  Intron number 1 from transcript Glyma04g32680.1 (locus Gly ma04g32680) derived from phytozome v7.0 (chr-ID Gm04; pos 37662694 to 37663557)
cgggcattgttgctttgcgcgattccaaattaaaggcaatttttttattatttctctctctctctctctcatgttcttcttcgattttatttatttaaaatataaccgattgtattatcgttaaatttttcttcttcttcttcttcttcttcttttccttttcttcgtctgtgttacactcttgagtcttggcctttgttttgcagtatttactaaattgcaatggtttttctttttcttttgttttaatagttttttcgttggttgagatgattgatgcatgtggcatgatggggtgttaaccgtgtcacgtgttaaaccttgaaagtgtgttgatattattctggtggcagaaaagataaaagcttatgctcttgtcgtctaaagttaatgacacctaggtcactgcttatagtattttcttcctctttatgtgtgtagtttaagcttggtatgtgtttatagcattggaaccttaattaatgtttaattttctgtaagctattatgtgtactagttcggtagtgttagatagaatactttaataggataatctgtttttcttgtttgaattatgttatttacatattgaaactattttagggtgatttctgggtctgattcgatttttctgaaaagttgtttatactgttatgtgatacttacaagacctatgttcaaaacatttgatgaagtctgtggcttttattgaaaatttgaaatttttgttgttatgcagatagacacaatttgctttatttctttctttttttgtgtatttgtatttgtgttgcttgcccgtgtgtgcttttgtgaaacacacttacataccttggagtcccttttgctaacagacgtttccgg

SEQ ID NO: 16292 - DNA, 698 bp, Glycine max
  Intron number 1 from transcript Glyma04g13450.1 (locus Gly ma04g13450) derived from phytozome v7.0 (chr-ID Gm04; pos 13016606 to 13017303)
ccgaagaatcgttgctattcgcgctctcactcgtactattcttttctttttagtgttctctctttctcttgcttttcagcctttgcttcttcaagttcttcatttctttccttttttttttccagatgttgataaactttacgagctatacgattcaggtgaagagttgtgatctatttcttggttaattttttagtttggtttctgttacatgtaaaaaaattagatttgttatttgcttcttattgttggtagtcattttgttttccacatttctaattttttttcttgcatggttcttgtgctctttagctatcctgggaatgctaatagcattggatttgctctatattatttgtgttgggtactaaagggtcacacctatcctcactttgctaggttctaatttcaatcaaatatcagttaagttaaaaattaaaaaatttgacagttaaaaactgttacagattgtgaaatcatgaacacaataaataaagaagaactaaaaaaaagttttctaaaatttaaagaattaatataaataatttttttgaaggactaaaagtataatcattcaaatttaaaggattaaaaacatatttaaataactttgtgattattgaatattgtattttgtcctttcactacatttgaagtcttttgagtgtttctttaaggaaaggataacttgtgcctct

SEQ ID NO: 16293 - DNA, 662 bp, Glycine max
  Intron number 1 from transcript Glyma04g00950.2 (locus Gly ma04g00950) derived from phytozome v7.0 (chr-ID Gm04; pos 539071 to 539732)
ctggtgttaggtataatgcttttttactttgtttttcatatatgatttgtttcttatttcttgatgtgtttaaggtcttgttgaattgcaatattgcatagtgacattcaactcttgatcctgtttggataaatttatcataagtacttatagggaagataacaagaagataaaatgaatgaagtttctcccaaaagtttaaatcagtttatgtacaagtttaaattagcttttgcagaaactcaatggttgagcttctttaacttagctcatgcatacgataaaagtgatgtctgtttcaatcggtattaatgcataacttatgggaaaacttaattcattttgctttcttatttctttctcttataagtgcttattaaaatgtttatccaaactggaccatatgtgtgtgtgtgtgtttttactttttagtaaagcaatcaattattcaaaatatatttgtttgaggacatctttgcattgctgaacaattctttcaggaagtacagttatgtctctagccttttcaactgtcagataacatatgatccttcatggaacatatatctttttgcctttactagcatgcatttgttgtgaatttgacggtggattttccttttacaataatactgattaatcaatctgcttctgcagagcca

SEQ ID NO: 16294 - DNA, 752 bp, Glycine max
  Intron number 1 from transcript Glyma05g28160.1 (locus Gly ma05g28160) derived from phytozome v7.0 (chr-ID Gm05; pos 34065906 to 34066657)
ctcataggtaaagtttgcactattgtttacgtaccatttgaatgaacatatatgaatgtgtccttttagtctttttagctagttatgttcaattatatcatattattgaataaattagcatgttcaatctccatgtggccatgacattagctaaggattgaaaaattgcatggaggtatgaaactgaaatcatattatatttttagagtcacaaataaaacctacatttatttcagtcaacctttgagcatcatataatataagtcttatttcaaatttcaaatataaccacaaggtgaagataagtaacatgagattcccctacagtctacttatatacacgagagaactctttcaatgatgctcatggcaagattatcattttttttctttaatctaacagaaacttctataatcacccccactaattgaaaattaagaataacaaaggatctagtgacaacaaaattaattgtaatcgctcagtattgaaaagtcaaaaccgaatcgcagcataaataggaaaaacaccataagtatactttagcacatataatctgactgtaaataattagtcggaagttttgtatgtttactccaatatactattcgttccctatatatacacacatgcattcgtacacacacatttatttatttaacatatggtataatatcttgcgggtctggggcaattatcaactccatatgctctagagcaaggagggtggacatctgcatttttgcttata

SEQ ID NO: 16295 - DNA, 670 bp, Glycine max
  Intron number 3 from transcript Glyma04g01700.1 (locus Gly ma04g01700) derived from phytozome v7.0 (chr-ID Gm04; pos 1136167 to 1136836 reverse strand)
ctaaactcctagctggaaatcgtatcattgctcaggttccattctttttccttgtctgctttctaagacaacgcaactattcatattatgctagcagagcttttcagaccactctaagtttctttccctattttatctcgcaagtttaaatacacttcttcccaagcacttataaaacaaaacaactaaaatttaacataaacttatatattttttaatctttaataaatatttaatttttcacttttcttcttaataaatttttattttacattgaatccttgataaaacaataattttgtttttatctttaatattttttttagtctctaataaattaattagcaaattttatatttatttatctaataaaatttattcatttgatatcaggtagaattaaaataaaatttattaatttattaggaaataaaaataaaattcattatttcacttaaaatatcagatgatataacttctattaaaagctaattgcctaagggttgatttcagtagaaacacaatttcacttcagtttcttattttattgttctagaagtgtttataaaaagtttattccaacaacagaacataaatttcgtagatactattagaaggtacttgagtggtgctgaatctgatgcgtgggtgctttgttctcttaagccat

SEQ ID NO: 16296 - DNA, 439 bp, Glycine max
  Intron number 2 from transcript Glyma05g02050.1 (locus Gly ma05g02050) derived from phytozome v7.0 (chr-ID Gm05; pos 1474650 to 1475088 reverse strand)
ggaaatcagaattccaagagcttcttgtatttgaggtacctgttctctgttagcattttttttcatctgtgtctcttttcttttcttcgatatttcatcatgatcttttttgttagcatattccatactttttatgattatttgatttgtttttctatttttgttatcatttggttttatcataaattcttcctttcctcatttagtctctacagtgtatgtattactatataggcacaatctcttgtatctgatcatgtatattaatattatcatattagatcacattaataaatattgcaaatagtttgtgtactttttctcttaaaatactgtcatttgttcaagaaatgggttactatatacttttccctgtttcttacgaataaaaaatattgatggcattcccgagtgatgtgaaatgtgcagtcatctagac

SEQ ID NO: 16297 - DNA, 531 bp, Glycine max
  Intron number 1 from transcript Glyma05g02050.1 (locus Gly ma05g02050) derived from phytozome v7.0 (chr-ID Gm05; pos 1475111 to 1475641 reverse strand)
tttcctggccaggtaactatttctttccaagtctcgttaagaagggttcaattacttatattatatgatttcatatctactttactttagattttaatttggtgctttttctggtcaatgatttaaatttggcgtttaacttttgagttttgtgtgggccttcgtcgcacctaccaattggttgttattccggggcgactactgtttttcttttcaaaaaaagaaaaataacaataaaaataatatattaattttttattgtataccatacattttatctctaggagacaacacatttggtttagataaaaaaaaaataccatgcagtttgacaggtcattgttaattttttacaatgatataaaaataaaaaatgcaggaatacatatatttttgtttaatatataaagaaggaatgttgttaaaaaagtgtaacaacaataatatactatcatttgtagtaatagtagaaacattttgtactaataattatcacaccaacaatgtacaggagaagcacacatatataaa

SEQ ID NO: 16298 - DNA, 431 bp, Glycine max
  Intron number 2 from transcript Glyma05g03160.1 (locus Gly ma05g03160) derived from phytozome v7.0 (chr-ID Gm05; pos 2433818 to 2434248)
ggagggttatattcctctacacctaggtttaagcctggacccttctctatattttaatagctacaaagaaaaagataaatgattagaattcaatggtcttattgttttataatgactagacataccctttgtatgataaggaaattatttgacaagcatcaatggtgcttacgactttcatgtcatgtcatgattgtcatgacaaatcaataatttaatggaagaattacctctggacatttttacaagaaacaaattatagtgtaaaatataatgtcactttttcttatagaagtgattataggtagtatcttattatcctacctttttaaaaattcaaaatttttttgttaaaaatttcatttttacatgtatattattgtttccacttttcagcctcaacaaccacttttgaattacacggtggaggc

SEQ ID NO: 16299 - DNA, 654 bp, Glycine max
  Intron number 1 from transcript Glyma02g07540.1 (locus Gly ma02g07540) derived from phytozome v7.0 (chr-ID Gm02; pos 5954947 to 5955600)
cacccagtaatgcttcttagttattcgccttaattttgatttacatgcttcaatttatgcacttttctttttttctcatccatcaacgttattagagaatttggtttttcacaaaacaaaattgtgagtttaatccgcgtagtgggataaatacttttgttagactcactgcttgttcagtatattgagaataaacttctaatttggtccctcaagtattattttctctagtaagttgtctctgaaggactaaaattatataagtaatctcttaagaatggaatacctatcagtttagttcctaagttgatatattttactaacgttcaggcactaatttaaagggtttctcaatatttgggggattacttaacatgatttctattatttaggggattacttaacatgatttctattatttaggggattacttatgtaattttcttactttatgaaccatttagaagagagggtaatacttcatgggtggaattcagggtttattgaataatctttgtgatattttcattttaaagaattttttttattacttttgatgccttgatctagaatgttacgccttcaagaggcgtgtttttggaattcggaaaataccaaaccaattgagttcattttttctgtttgtgattttag

SEQ ID NO: 16300 - DNA, 589 bp, Glycine max
  Intron number 3 from transcript Glyma04g03420.4 (locus Gly ma04g03420) derived from phytozome v7.0 (chr-ID Gm04; pos 2504045 to 2504633)
cattcgtcactttccaagccaacaccggagtagaggtttgtgttcgccctctaatgccctacataatttgaatgtctcgcttgtttcattgattagggtttggataggaaaatggaaaacgacgacggttattgagcgtcaattgtcacatttttacaagttcaaaatactatcgatgactcacttttcttaaaaataaataatatattttatataatcttaggttcaaacctgacagtataaatcagttttagtcattcaaccacaaatcaccatggtagtataaaaaacttttacactgttagttcatatattattttctctatcagtgtttattgattgaccttgtaaatatctttatattgtcaaaaccaaatgattagtgataatagattccgtgtgcaacacgggacatttcttttagcatattgtataggctgttaaatgggcggatgctttcttctttttcatgtcccttcccccaaaaaagcatgctagctcaagtgcaagaatcattctgatagagacataattcacctccactgtcttttttatgcacaggtgtgcacgtttcggttgattgtgaaga

SEQ ID NO: 16301 - DNA, 604 bp, Glycine max
  Intron number 2 from transcript Glyma02g20690.1 (locus Gly ma02g20690) derived from phytozome v7.0 (chr-ID Gm02; pos 19924128 to 19924731 reverse strand)
caagataccccctcaagttcatcatacccaaaaaggttttcagtaatcttcaattttactactattattattatattatgaatttaattggaatgcatctaaagtgcatttttacatctcaaccaaaaaatagagtgcatttttacatgaatttaattaaaatatactaaaaactgtgatctgattacaaattagcacgcacaatccttaacctttataataattatcttcaaaatatttcttgcatgacaattatactttttttaatatcaccgtattattggaaattgttgactcaaggataattttttattagttgctattgtaattttttttacataactgtgaattataatcaaactctttttgtatttccatataattgaaaattgttgaatttttgttgtattaattactttaagagttgtatataagataatttcgaaattaaattcttcttattattatactcttagtcatgttttgactaagctgcatagactttgtatgcttgtgttgtggagcgatcattggtataaaaatcatagcttggtatgctaaaaatgtttctttaactaattgcaggtgggttcttccaaaacag

SEQ ID NO: 16302 - DNA, 765 bp, Glycine max
  Intron number 1 from transcript Glyma04g07000.1 (locus Gly ma04g07000) derived from phytozome v7.0 (chr-ID Gm04; pos 5436808 to 5437572 reverse strand)
tctttcttcttctgagtacgtgcacagtgaatttggtactctttattgcttctgattatcatgttttttttttattattcacatgctttttgtattattgttctttagttctgagaagcagaaaactagttgcatgggttatcatgcttgggcgtgtgtcagtgactgaaccgttaagtttctatttttatgttaaagttatgttttggaagttgagcttttgagagattgactcgggcattagttgctgcaagattgaaactttgaggttaagtaaagggaaatgatccaaaagaatactaagttatattattttgagtaatgactcagtttgattcctgaaaaaattagaggaaaatatattcgtccttaagactataaattttttattttaatccctagaatcacaaatgtatgtcgtatctgttttgttctgctgaaatgggaaaggatatatatgcccagtgtttgtgatatttagggattaatgtaggttttttatattttacatttttcatggattgacctgtttcaccccttttaatatctttaaggattaacctctctcaacctaaaattatcagggatgaatttgggtatttagtactttttcgtcaactttttactttttgctctggtgataacttgggttcttggccatcctttattcacgatggtttattggatttttcttctattattttgtgttgcgctttcttcattttgctgaattattttatatatgttacaacatcagattgaaga

SEQ ID NO: 16303 - DNA, 891 bp, Glycine max
  Intron number 3 from transcript Glyma03g24610.1 (locus Gly ma03g24610) derived from phytozome v7.0 (chr-ID Gm03; pos 31540197 to 31541087 reverse strand)
ccagggcagaagataaccgattgtaatttggttcagttactgattttgtgcatgtttagtttatagttaaaaatgctgcggtgggcgttccaatgcaaatctaacggataaaaagtaaaatgaacgcaaaagaaagagttctgatccgctgacaaaattacttttgcctcaaacataattttgcaactgcaaaccaatcatgttctttgttgggtgcattttgtatttctatattcaaggtttacacgttgatacttttgataaattgataagttgagttgaggcttgcattgtaaaggtgcaaatggtttttttattctgtttttcaattgcaaattgacatgtatgataaagtttgctgattaataccatagctactttaaaagtcgtatagctcttatgatttattcttagtcggttgctgtggaaactgacactagagaaattaaattcatattatttgctaattataggaataggataggatggtcttttttgtttcccctgtttctggtcgcttgtaccacaaattttaatgctggtttcaatgtggttgtttgattttgtcgggctttgtaattaatggcattatctgattccgttaatccattatgttgtttggctgattttaccaatgttactttactgggacattactctttcaagcaattttcttccttttttgcgtcattatccatgaagtagtagtatgctagaaatttatcatgttgtcatcattgtactgctgactacttggcttcctggtgtaattatctgtgtgcaattgctttttccctttccttgttttgcttagaatttatcaaatatcttgttttttttttaaagttatttgttttcctttcgcagcgattgtccgtcaggaaattcaga

SEQ ID NO: 16304 - DNA, 556 bp, Glycine max
  Intron number 1 from transcript Glyma03g11710.1 (locus Gly ma03g11710) derived from phytozome v7.0 (chr-ID Gm03; pos 14425266 to 14425821)
acgctggcattttgttacctgggaaatcctccaaggtttactctcccaatccaattcattcatacccttttgaattcctccttttgggtcttcgattttcatctcaaagtttcatcttggcttgatttgttcaaatttacttattccatttgtactcctttttttaggggtatttaagttctccaattttctgtgtgtgatattgtgatatgatatcgtacacaggtgggtactaattaagccgatgcctgttgttcaacttttttttttcttttggattgtgatcctgtggttctttgtattgtagagtagttgtcttagtgtatttccaataacaattaaatttgatgattttgagttttgttggttgaaatggtcaaagtctttaccaagttaatgtttcagtttctttagactgataattgacaatttatcattgcaaatcatgcatattgtgttaaattcttgatttgttgaagtgcatttgctgagttgatgtatttttacatgtttttctttagctaaatttcggaaaagttattgctgttggccctgg

SEQ ID NO: 16305 - DNA, 553 bp, Glycine max
  Intron number 2 from transcript Glyma03g11710.1 (locus Gly ma03g11710) derived from phytozome v7.0 (chr-ID Gm03; pos 14425896 to 14426448)
ggggaactgaggtgaagcttgataacaaagagtatgtattttttatgatatgttttatttattagtttattttataccctcattcaattcttcaacttcatcctgaaatttaatatggtagatataaatgtttgaatggactagaattattcttgaggtcctatatttttgtaaagaaattgtttcttttcatgatttcacttaaactttgatagttttgcctacatgatgcctagaagattcatttcttgttacaaagttgatcccttcaggtctaagtgagtaaatgttattgtgtgtctgcaaattgagagaaagatgaaaggaagagaaagccttaccataagggcatgcaagaaagatatgaaatggagagaaagaaactgaaaggaataaaaaataaaagcttccttgagagtcaatcagatccatttccagttgaaccaaaattgcaaaatttcactcacccactacacaaaatgctgaaaagtatacaattttatctgtaataattaaaatcaaaatccataaggataaatatatagaccactga

SEQ ID NO: 16306 - DNA, 667 bp, Glycine max
  Intron number 1 from transcript Glyma01g05340.2 (locus Gly ma01g05340) derived from phytozome v7.0 (chr-ID Gm01; pos 5038291 to 5038957)
cattttttggttggttttgcttcctatccaaccctgtaagtttctaagcattgtttgtttctctctgcttgctttttattattttatttgttctcttcttcaagttttattctttgtgaatgaggtcaacagtgcttttttttgccgggttttcttctgctgtgtggagatcttgattgaattttggtttttctacttgaatcatggggcgtaagaaatggttggttgtgttcaaaatttgaaatttttgttgcttgcattgggatgctggattcatttctgcattggcgtgttcaattgaatttcgtgttgtttctggcgttttgggtctttgggggggggggatctatttatgacacgggaggcatttttcgtttttccctataatcaaaggtttcgtctttgttataccatgagaaaaatgaaaataaaaaaagtgagtttggggatttatctgggtgattggtttgaatggattgcgatctgaagaaaaaaattgtgatgggtgttgattctatgggccttgcttgctgtgatgggtgtttaaatttgtgcaaagaagaaaaagggggcaaaaagtggggaacttgtgagttgaattgaattgaatttcatcaattctgtttgaacaggctcttgattttgctgtggtggattgaaggttgtg

SEQ ID NO: 16307 - DNA, 947 bp, Glycine max
  Intron number 1 from transcript Glyma02g12380.2 (locus Gly ma02g12380) derived from phytozome v7.0 (chr-ID Gm02; pos 10646955 to 10647901 reverse strand)
tctccaacaatccttcgacaccagcagctacgacggtaccccacacacacctcctctgtataattattactattaggttaaaatattcatttggttgctacaattaattattatcattttttaattttggtccctgtttaagaatacggtaaattttagtctctaaacagttggtgtatcactgctagaaagcttttgtatcagttttactgtatcagacagtttattttttttttctcttatgatcgcgatggggcccaatatttaactcttatgcatgtgtaacaactaaaactttcagtttttttttcttgtgtgaaacttactgtttttgtatagggactaaattgattttacaaagctgattttggatggatagtgatgaaattgattttgattagaattggttttgaatttttttaattataaagcaagttagtagtaaaacacaatataaattttttgttccagaacaaactacctaaagttactttaactccaaataattgattcaatgggaagtcaaacatgtgaaaatttatctaaaatcatgttaattgccatttcaacgtgattctagagaatctaacttaaaactaaacacacactaagtgaataatagtttacccttgttattgataaacctccaaaatttacttctatgcatatgtaagagttaaaagtaacaattttcttgattaaagattacaacttaaaaatagagaccattaaggtgtgtttgggatagctgcaaaaattaaattatttcaataatcgattataatcagaaaacaatttttgtttaaagtttgctgaaaagtgcttttacaagcatgaagcgaatagtttaaacttattattattgtacctccaaaaattgaagggagaaagaaaaaaaatcattactattgtgctgtgtgtttttcctttcttttcatcagttttag

SEQ ID NO: 16308 - DNA, 952 bp, Glycine max
  Intron number 2 from transcript Glyma04g40550.3 (locus Gly ma04g40550) derived from phytozome v7.0 (chr-ID Gm04; pos 46565171 to 46566122 reverse strand)
ctcaaggtcctcttctctttcactgtgttttcctcttagcctaataaaatccttatttggtcctttttttatgtttttgttagtaaaccctatggttctaatcgattatttggtttccgcgtgcttgtgcatttttctagggtttgtgtggagttctgtatttatccgtgagacctaattcatgttggaagaattatgactcctatttgtgttaaacaaattggcatatagattggattttattcttattaatcatactggaacgatcttaacaaggtctctaatcatagagaaattttagttgtttgctagcagtaacagttaatgttcaacttcttcatccctttgctgttatttgtatgtatttatttgttcattggctgttagtctttgctgattgtttttgtttttgttgaagtaaaaacattgttttcatgtgggactagaggcttggcaaaaccctaaattagttgtcacttgattgattggaatttatatgttggggtttgaaaagcatatctgagctacattctattgttatttgtcgctaatgtccaaacttctggaatgtgaatgattggtagcatagtcactaaatatttatctgagaattttaacaaaggtgacttggtcataacgtgtgttccttgctaaagaatgatgttacattagcaaaagaagaaattagtaacatatttgattagtttgcattaattttcaccgtaaattattaactcaagcataacattttggagaatgtaaaatagatgttcaatcttactatatcctaaggtggtctgttctctgagtcccaaagattgaccactagttcttttttatcccccccttcagcttcacattttatgagtagatggttggatctttgttttatctttatttactatagttatcaacagatcaactaggtgagcacctcattgaatctgcagca

SEQ ID NO: 16309 - DNA, 378 bp, Glycine max
  Intron number 1 from transcript Glyma02g39050.1 (locus Gly ma02g39050) derived from phytozome v7.0 (chr-ID Gm02; pos 44349092 to 44349469)
tttccaccgtaaccaaacttcaagaacataagaaggtacttgactcttgaacctccatttagtatttaacacaccgaaattatatttaaagttctttcatagttcatttttagcataatgattaaatcaaaattgatatctgacttaataattgactaatgttttaacaattattgattacagtcatagagttttataatgtaactatatgctagaataacggaataagtgttttttgaaaaagcattctcttccctagtttcctaggaagtgctagaatttgtgagcctccgcatcatgttaatattttttgtagtagttaaattaaagcttttgacaacaggttatcactggcatcgcacttcctgttggatccga

SEQ ID NO: 16310 - DNA, 525 bp, Glycine max
  Intron number 3 from transcript Glyma01g43270.1 (locus Gly ma01g43270) derived from phytozome v7.0 (chr-ID Gm01; pos 54320643 to 54321167 reverse strand)
ggtgttgtttttattggaacatttggcgcacttgcgtatgttttatagtttcatggtgatttagatgcccttgcagtttatttttctctttgaagagagtttaattttcatgaacattcattgttatactccaaaccggtaaaaaattatcttaaatatgacttttaagactaatttttacaaaattcaattggacttatttatcatacatggtcatttataattggactatagtactttagcttctgaatgcattctaattaaattctatgtttacaaactatgcatataagttgatgcaaacaattatgctgacaatatttgcacaacttagaataatcaaaatggtgcatttatacagaattcttcaggctttatgttgtgtctagaagtcaaataaccatgtcaacatttacaaaatgtcacttttataaatgccaaatattttatatgatgcatatatcttcagttatacatactcttcaaatcattaatatgtagtatttatttgtcattggcagggca

SEQ ID NO: 16311 - DNA, 640 bp, Glycine max
  Intron number 1 from transcript Glyma05g04940.1 (locus Gly ma05g04940) derived from phytozome v7.0 (chr-ID Gm05; pos 4147792 to 4148431 reverse strand)
gctcgcctcgttgccagcgatccggttaattctttattcactctcttcaatttcgttcattctgttgtgacgtttttcaagtgctcgcgagcttcccgtctctgcagatttggaacagaaactcactgcattattttaatttttttttgtgcttgtatgaattattatgtgtttgttgctctttgtacttgatgtgataaccttagtgtggtgtaatgtactatatgtattggatccaactagcttttcaatgtcttgcaaatttgttcatcggactaagtaatagtttattttgcttttgtttttgaaaagatcgatgcacggaattttaattaagttaaaaaaaaaaactagttttgtgaattgtgaagagattgtgtaaaaatttgggaaattggttttggtcgggaattgtttgtcgatttgaatttgattgttatggctatgcagtttgagacttagatggttagttcatgtttcacggatgaacttaaaatcctaatatttgtagctgcctggtgcctgttcctggcttcctgcactttttcttttatgttagtttggtgatacatgatgattttgacttccggatgtctgaaatcttgattggttgtctgctgtctccaggcattcagaaagg

SEQ ID NO: 16312 - DNA, 761 bp, Glycine max
  Intron number 3 from transcript Glyma04g38320.1 (locus Gly ma04g38320) derived from phytozome v7.0 (chr-ID Gm04; pos 44722413 to 44723173 reverse strand)
ataaaaggtacccaaagatttcatttccttattcggtgttgtttctttctgattgaacaatgtcattaaacattgggaaatgaatagttgatgccaattgtatgattgtatcacaaactaaatttatttagttttgttcatacataactttttatgcttcagatttgattatgtcactttgtaagtgtgtgtttctttttttctttctttgcataggaatcaaacctatgatctctatcattgtcgcttgagctatgctaagcagctaattatgtgtttccttattattggaagataatccttatgaattatctcatttttctttggtcttgccaaaattgatttctgggttcctaataaattaattttcattctaggtgcgccttttttatttggaagtttatttatttttttaaaaggaaaagttataactttcaattagttggttaatgaatgatatctgatgcatgacatacttagtttattgctggattagtttatcttgtgttcaaaatagcttataatcaaaatcttactaggagagcttttgaaaaaagaagaaatgagtaaatcttaaataataatcaaatacaactgagctctcaatttgcaattcaaattatgctcttcatggttcttgttcaccactatcccggcttggctttcttcacttgattatgaacatagatgattgtcagtatagtccaaatggtgtttctgttattttctatcatatcttttgaatatcaggcaagcaagag

SEQ ID NO: 16313 - DNA, 648 bp, Glycine max
  Intron number 2 from transcript Glyma04g38320.1 (locus Gly ma04g38320) derived from phytozome v7.0 (chr-ID Gm04; pos 44723268 to 44723915 reverse strand)
ttttttactttggcctgaggtcaatttactggaaggtgatttgatttttgttacaaattatgcagtctgattcatatgaaactcaaattttggctttaaacttgcttaaacactagctattaactaaaactatgtgtgatactggcttctcaaaaatctgaagagatactctacattctatcatgctattcatacaacgaccacaaaaaccatgctttttaccactggtgaggttggctacaatatggatcaaatgatatgctataatgttctattgtaaattatatctacagacaaaccattggcctctaaattcttcttaattgttccacttgtagtttttcttggtctcccttcatgctattcataaagtggggaaaagttggttctcaatttggtcttcaattgttgttatttattacttaaagctatccttttttattttttgtctttatatttgtaattgcattttctaaatctttattttactgtgtacttttgttggaaaatctatcagaaggctttgttggttaaccgctgaatttaattttgttgatattaactctttgttgactgtttgattctgcttctgatatatctttaatgttttaaatgctatttaatttttagatcgttatctagaagaag

SEQ ID NO: 16314 - DNA, 472 bp, Glycine max
  Intron number 1 from transcript Glyma04g38320.1 (locus Gly ma04g38320) derived from phytozome v7.0 (chr-ID Gm04; pos 44723961 to 44724432 reverse strand)
tccgtattcacaggtgggtgctaactctcacaccccataagatcaaacttgccaaagttttgattttttaaaggtttttcactcatcttgagtttgaattgtgtctcttggagttgtgggttctgtttgtgtgtcttaattcagatctgagagcaattgaaatcatgattcagttagatgttgaagcaattaatagttttttttagcttaattatgatacccattgtgattattcttgcttttgaggagagaaagtagggagttatatgcagtagttttaatttcacagttcactgcctcatttcttcatgttcttggggtataacttcttttctttgattaataagtgcccatttagcttctgatcatcaagattgtaattttggcttattttgcttcaattcaatttgacagtgaaatagtcatatgttctgaaattttggcctttgtttttttctgttgcagggtgttc

SEQ ID NO: 16315 - DNA, 834 bp, Glycine max
  Intron number 4 from transcript Glyma04g02520.1 (locus Gly ma04g02520) derived from phytozome v7.0 (chr-ID Gm04; pos 1785183 to 1786016 reverse strand)
agctcttgaatcatttgattacatcaccacccaaggtatggttttcactcagtttcaatcttgtaaactctcattttatttttttacttccaaaaaaacaaaaagatcatttaatatttaacgtataagcaaaaaagtatactgttttctttattgtaggttgcaactaatagatgaattaaaagctggttatgtgttttctggctgaccttgtacaattttgtaactctttgaagcatatttcgttttctcctatgtagtctgatccagagaaaagttacataaaaagttggtcatttgaccaatccaattgttccccacaatgcccgctgcacttatcctctcgagcttgaaatcagtgttttcctgtcattttcttaatatggagaaaattctttgttattttcagttacttaatgcaaagttgattattctttagtgaccctagaatatgcacggatggatactaacctgtccctgttgatgcataacgcaaaatagacctcttgattcatcaaactgttttgcttcttcaaatttaagtaaaccttatacaattataccaccacatcttgaaattgaagacattccaaaggaggaagatagaggaggccttaatttaactgttaaaatctacattagttgtatgtcttttgttaggcaataattaattttaatcattccctttcactgtttgttaccttccttatctatcctttttaaccttttcggatttttatcctgaagtctagcatgttatagtgtgtaaacaattttagctgtttccctctacatccaggaaatttcagtttttctgagagattagtggcaaag

SEQ ID NO: 16316 - DNA, 888 bp, Glycine max
  Intron number 1 from transcript Glyma05g00770.1 (locus Gly ma05g00770) derived from phytozome v7.0 (chr-ID Gm05; pos 430585 to 431472)
agagaaggcaaaactttttatcaacaagctcaaaggtacctactacctagtattttcacaacattttgcacatatgtttcgagcataaacaagttatgacttgcaaaatgtttacctaggctttcttctctcgctaagctagagctaataacataagttataaattactaacacattcctttttattaattaaaattcacgtgaactctactagtttgagaatgagattgacaaatgaaaactagaatccacatattatgtgatattcacataaattttacctcaataaaaaagagtatgtaaaaaataaatgttagaaaatgtttcagtaacatttatcattttatctttcttttatagccttgctcgtatatgcacgattgcttcatatgcaagttaacatttcaatttcaaaatcccctatcactaccctataatattttgcatttcatttacccctttcttctcatgcaattttggtatttttgaaagaattagcctaactaatctttgcgtatcatctcaagctataaagctatgcgactgggtaaccggttgttatcccctcaaataattactcattgtttgattcctttcatttggtggcatcatgattctcagattgaaaacttgaaataactgtatctattttgttttttcgaactcaactcttcctaaggcttgcataatcttaaattagcaataatgataaatggcaataacaaaggtcaaggtagttggttcaattcttactaaaatactgaaaaattaacgattaatatttgttgctaagaaaaaataaaaaactgaattacatttgacaaagtctttagttctgttttctaattaataggtaaaacccagaaagccttgcctgatctccttcga

SEQ ID NO: 16317 - DNA, 494 bp, Glycine max
  Intron number 2 from transcript Glyma02g37400.1 (locus Gly ma02g37400) derived from phytozome v7.0 (chr-ID Gm02; pos 42736925 to 42737418 reverse strand)
atcggattcttgcttccattcctttcaaaggccaggtttgtgattcgattcaattgtttagttaggttatgtttaacaaaattaactgaaaatttaacttatttaaattacaagtttttagtaaaactaatgttaaagcatctcaaaagtgtaaaatgacccaaaaaacaagaaataaaatcgtgatttatttaaaaaggttaattaggatatttgatgaatatactaaagataaaaaggaagaaaatatatatagttagcgtttcaaaaaatgctagaagctattaaaaaaaaattatttaccaaatagtcaaacaaactttttaactaataaaaaaagctagaaactagctgaaatgacatgtctaacatagccttagattgatgatggttatagaggaacacaccctcactaactgttggcattcgataatctgatattttgcctcccaattgcaggttctcaatcagacgagtttgtggtggtttgaaag

SEQ ID NO: 16318 - DNA, 808 bp, Glycine max
  Intron number 1 from transcript Glyma03g05070.1 (locus Gly ma03g05070) derived from phytozome v7.0 (chr-ID Gm03; pos 5348135 to 5348942 reverse strand)
tcaagagagagcagtttttcatcttcacctagaaggtactattttcaatttttttttttatagaataaaacaccatccctttcactctgcctcttcagttttgttttcttaaacaaatgctaacatgctgttttgtggtcaaaaaagaaattttgaaaggcatcttgaaaaccccaaatttgttctggattcctccaagatgatgcaaaaccatacatggtcaccccattattctccaaagaagcaaaacactaccacctttcataagtttttaccaattgtaaatattctaacattctgcagctagccaggtctaattgaacacatgacattgtaaaactttgtatgtcctaagagctaacaagccatagagacacaaaaatctgcatttactattaagttcttttttttttaaaaccacagtaataaagatctctggcttctctcatgactgtgaagtattctaacatattttagtctttttgattgactaagactaatcttcaattttgaagttagtcctatctaagaatgtgttacttacaagttacaaatcatttatatttaattattcgacaaccatttagactattatactctaggttgccaagaaatggtaaactccatcaattttgtttttttttaaaatggtgacataattataatctatgttagttgttaattggtattttttttttgttagagggagaaattgaacaggtgtcattacccttttatagttcttaattataaagtgtttgatattgtcataggttggaaggcaaggtagccattgtaaccggtggag

SEQ ID NO: 16319 - DNA, 341 bp, Glycine max
  Intron number 4 from transcript Glyma01g24150.2 (locus Gly ma01g24150) derived from phytozome v7.0 (chr-ID Gm01; pos 31408384 to 31408724 reverse strand)
gttggtaagtatcaattattttctgtacactcattcagtttcctcatttgatgtatattaacaagattgtaggcagctccatgcttttttggttacttattcaattagtatgcctgatcctgtttcagggatttctgttaaactctttatttgttaactttgatttaattggcattactgtcttaatgatgcaagttaaaaagattaccttttggatgactagattaggatgctaaagttcagcagatgtccataacttatagcttagtggttaatattcttcttgttttatattgtaatttgcaggctgaaatcaactatcttggccaactgcaaaatcc

SEQ ID NO: 16320 - DNA, 625 bp, Glycine max
  Intron number 3 from transcript Glyma01g24150.2 (locus Gly ma01g24150) derived from phytozome v7.0 (chr-ID Gm01; pos 31409017 to 31409641 reverse strand)
cagtaggattaaggccgtgagtccttccaatacaggtaagtcacttcttgatttgcatgttacataattttgtttactcctaatatctgaatgagctaaattacttgtcatgatttaatttttggagttggagtgaatattgggttcgttatcacaaaacttaaatttgataactatatgaagatttgtgctgcctagacatgtatgctagtccctgacatctttgagatccatgctatttaaggatggtaagccttatcttatggtgtgatctgtgtttcttcatagttgagtttggtcttggaggttcattaaatgcctaaattctagattttgggccttagtgtatattttcaatttttttaatcccctttgagaagccccttctgatgttggattttcactgaggtgattcctggtggaaaaaagtgaaatttgaatttgagagaaaatatagttagcacaatagggataatttgtggctttagttggattccttgtaaatttgataatgagtgatgatgaccttgattattttgtttgttgtaaggcactacggtgattaaatttttgtgaacttgtcttggtatgtatgcagggttcacttctagaagtgttagcagag

SEQ ID NO: 16321 - DNA, 561 bp, Glycine max
  Intron number 1 from transcript Glyma04g09590.1 (locus Gly ma04g09590) derived from phytozome v7.0 (chr-ID Gm04; pos 7875414 to 7875974)
atctccacgctctctttgcttctcttctcgcacgggtactcctctcttcctgctattctattttttcatgccactctctaaaatcaaatgattagttctgaatctactgaagaacttttcgtttctgattacttagaattaacgtctcagtttctacgttctttagtaacgattgacgcgcattcaattttttttcatgaacaataataataaattaaattttgtaattgtctctgggagagatcatggcatgttccatgaagcttggagcataatctttgagaatgtagaacctttctgtgtgacttaatgcaatctttgagtgtacaaatacttataagcaatcttgtctgtttatggagctattattgccttgttcaagatgacaagattggaagctttgcgattctttccttttaaactgataaacggagataatttgtttctgtaattagtctttcttgatcttccaaagcaccaaaagacaggactggttcagtgataagtgataacttcattagtcacattttcttattggtttttccttaatgtctcgcagac

SEQ ID NO: 16322 - DNA, 731 bp, Glycine max
  Intron number 1 from transcript Glyma04g09730.2 (locus Gly ma04g09730) derived from phytozome v7.0 (chr-ID Gm04; pos 8023712 to 8024442 reverse strand)
gcgcgctgcgcgcagtgcaaatccgttcgctactggtgcgttttcaaattgtgcttaagaattccagttttcatgtggcattggctgtggttgtttgtgggggtcgttttttcatgctcttatgattacaatttgctgtgcagaacttttagtaatttttgtttagggttgaaaatgggaatgttgactctgatttccttttctggagtgcatctcttctggtttcttaaacaaactccacactatgttaaatttgtatttacttaattattaatattatatacccacaaagataaacatgcgaaaaattaggctcgttttagtataagtgtactagaagagctcttcgacaagtgcagtccattatgtacaggagatcagttggctgttcctctctacaaaccgctggctattgttaatggaaataaaaatcatgccgcaacttttgccaggtgctttagaattgtggttcatttaatgattaataatttatcttctgtggtttggagaatatgacaatatggttttgatttcgctttcgtgaccccatttacattctatgttgaatagtttagctgattgtgatattttgtattagtggttcagattcgttgcttttcgtctgcatatttccgtgtgttctttttttgtaaagataatgtctttagtatgcatgtttggtttgatgtgtttcagttcttttgagtgccaaactgttcattggcgccaag

SEQ ID NO: 16323 - DNA, 620 bp, Glycine max
  Intron number 2 from transcript Glyma04g32880.1 (locus Gly ma04g32880) derived from phytozome v7.0 (chr-ID Gm04; pos 38102916 to 38103535 reverse strand)
aagcgatatttagggaccaagtatgttagcttgatggtttcatttgtgtttattgtctgactcatttctgcagatggctgccaagaagaatttctttttatgttttattaggaatgtaattaatggtgtaaagaaaacatcttcatgtgaaagtataatccattgtctacacaaagtaataattttcttgaactttcctatttcagtcatcatcggacacgagattaaacatttatcaactgctggttcctgaaatcatgtagttgtgtaattctattcaatgatgcgttttgaaatggcagtgaggagtttttcatgtatctgttagggtcagaagtaggttctataagaagaaatgttaatcatatctgtttatttattgatttaaaagtgaggagcaaaataggaatcttatttagaaaaacaaagttgattctgaaatttttgtcaaattcatccaaaataaaaaagtgcttgtggaagtttgttgtttgtggcacaattattgttctcctattttcttgaatattcataaagattttaactgtattttttaatgactttgaactatgcattgttgttcagattcaagagcttcaccgcatttaccagaaacaaag

SEQ ID NO: 16324 - DNA, 835 bp, Glycine max
  Intron number 3 from transcript Glyma05g09360.1 (locus Gly ma05g09360) derived from phytozome v7.0 (chr-ID Gm05; pos 9079032 to 9079866 reverse strand)
ccatactggttcgttctcctctactcttctctggacaaggattttatgtcattcattgttcgtatgcattgttttctttgtgccctttcacatttagctaacttgcacattaaatggtcactgtgaggaaaatgttgtttggatgcttttgcatcagaacttcttgtcaaggtaggattgaattaatttcagttatacttgatgtatcatcatgacatcatcatttctatttcttttatttaggcctgttcttacatattgtgaatatgctccttgtatgctgggctttggtgtagttggctggaatcaaatgtaaacacgcccaaaaattttaaggctagaatatatccccttgttttttttgtcttgttggcatttttatggtatttatttcatgaagtatgaaagggattcctctctaagatgttcaaagagagtggattccattttttttctgggttcagttaaagacaacacaacaggtgtagcttatccccttctgataaattctacccccgttagatcttcaagatgttactcaattcttagctattgggatgtcttcttggcccttgtggacaactgattggtctagatgcattttgtttcttggttttatatacatgatactgctatcaatatattatatttttgctgataaaaaaaaacatgatactgctatcatctttttatttgcttttgtctgtctcattcatatttcataaaaatatattcctttaacagaaaagagagaatatttatttatctattttcagtaagagttgtttctcctcttgcagagcctgtcaggacattcaagtggaatagattctgt

SEQ ID NO: 16325 - DNA, 799 bp, Glycine max
  Intron number 1 from transcript Glyma03g29560.1 (locus Gly ma03g29560) derived from phytozome v7.0 (chr-ID Gm03; pos 37567473 to 37568271 reverse strand)
tggcccaacacttcgaaatcgttgctcgctgccaggttctgccaaagttctcttctttttcactcttcgcgtcttttcccttttttcaaatcgtgggtcgttcggaaagccgattgaattagtgtgtgtgtgtgttttggtggcagtgttgctgttagggttgattgctctgtggtttaactgaatcagtgtatttttattaaggtttttgatattttaatttattgtgagaagtacaataaattgaacctggaattgggaggcctgtcaattttatccctgaaattacagagatgtcattttttgtctttgtcattatcaaataaatgtttattttagctcttccatgttaccaaagggtggtggtttgacactttgacttttgagttcatgatgttacaaaaataatgtttaaaatgagagaaatgttagcaatactctcttaacacattcttttgaacacactttttactcttggttggaatttatttattggaaatcatgaaatttttgggtctggcttcttatttaatgagtactacacatgattttatagtttcgaatgaattttgacggagtccattagagagtgttttctcttaaaaaggattgacccttggtaatttcaagggctataacggcatttttgtaatttcagatagcgatgctatttattttaggaattatttttggtgtattgagattggctttgcttggtgtttgtggatatgtttggtttttcaaattgttattttgcactgataatttgtgattattatgtgttctcagggtggagcta

SEQ ID NO: 16326 - DNA, 564 bp, Glycine max
  Intron number 2 from transcript Glyma03g42180.3 (locus Gly ma03g42180) derived from phytozome v7.0 (chr-ID Gm03; pos 47463373 to 47463936)
gaattagtgtaactgtatccttttctgtgcccttaggttttgcgttaacgaatagtgagtgaatgttcgaaataatttcttttctttgtttcgagttatgttttctagtgttagtttagatttgaatcaattgaagtaccgagtaattgggattaaatcaaaactaaaaaaaggtttctgtgacgtaatttttattgaaaaatgtggttttaatttaacctgtattttgttgttgagattcatttgtaaacaatttaaatgtggttgcatttatttgtttctggctttcagcttatattttctatttgtagatttcttattgaatcaattgaagagctgtgcaattgtggttaaaacaagatgaaacgtgatttttttggaggaagtgggtcgcatggttttgataacattttgtttgaaaaaagtgggtctaagctaaaacgtttttttttttgtttttggttttccggagagaaatagtggatgaatttgtttggatatggtgtgttactccttaagtcgtaaataggctgacaagatcagcaccttgttgaaaactgcaaa

SEQ ID NO: 16327 - DNA, 415 bp, Glycine max
  Intron number 3 from transcript Glyma01g13170.2 (locus Gly ma01g13170) derived from phytozome v7.0 (chr-ID Gm01; pos 16336083 to 16336497 reverse strand)
caggtgtgatggtgtttttcttatcactgtcctttaatctcattttgttccttttctttcagcttctacgggtttttattggttttggaatttttcatattttttccctttataaaacttgacatggattttcccccgttagaaagcacgtaaataattgttcttgacacctctcttttgtttgttttgctataaagcatctctcttaggtgcttatctttaacaaacttcattacttctctcagttgacttaaaccatattaaacccaatgaattccagctacagattagcctttattaactttcgatgttacttggacatcatcataggttatccaaatatttgcttaacttttttgattcatggtgattgtcatcaggttgcaagcacaaagtgcgcttgctggctctgaaa

SEQ ID NO: 16328 - DNA, 491 bp, Glycine max
  Intron number 1 from transcript Glyma02g05000.1 (locus Gly ma02g05000) derived from phytozome v7.0 (chr-ID Gm02; pos 4058002 to 4058492)
cttctccgcgatcttgaccttctgctttgcattaggtacaacaccattctcttttcgccaaattttcgatctactatgaagaatttggttttgccattgtgattgtcagtgtcgtgctatgtacgaggttgtctttgaggatgttggcaattataatttttacagacacatttttttttttgtttaattttgttctgttttatggggagcagaaaaatgtgagaacttagatgttggtttgtgttggattgttctgcaattggcatatgttctttacatgtcttgtcttgtgtccatttcctgaatcacctgaagtttgtgtacattttacacgtctttgtcttgtgtaaattttcaatatcatctgaaatcaaaggttttttttctttttataatttttgttttgaaattccaaactgtgacaatatttgaggctaataaggtttaatggattgtttgttatatttgcagttggcactttgttgggggct

SEQ ID NO: 16329 - DNA, 776 bp, Glycine max
  Intron number 4 from transcript Glyma02g05000.1 (locus Gly ma02g05000) derived from phytozome v7.0 (chr-ID Gm02; pos 4059263 to 4060038)
ttcagtttgcctccaggttttttatgatgatacaatttttctttttctctttttaccagtaaatgttatttttttgttagaatattaattcttttaggagagaaaatcgacaaatgactttttctcttcttttttttttcaccatctaacttattttatatctctcgtataatttttcttgttaacacgcgtgtataccttcttgaagtgttgataatgttaagcatggacagatacagagggggcaggtggagggcactggcctttaagttggctaatataaaattagttgtatttattgttattataataatggttaaagttatcgagcatatgatttaactagttgcttatgttattgctattgattatactccatactttatttgtaattgtttaaatacctaaatatttatccatacagagggagtaatgtttaagtctatagaattagaactagtgtaaaattaattatatttgttgttaacggttaaagttattattatttaaaataaaaattatttttaattttatgtataaaatattaaaattagtaaatatttttctaaaattattttttattagaaattaggtatttaaacaattacaaataaagaagaagaaaaatcagcccccttaatagaaaaaaaaacttaggtatttgattttattttatttctggtggtgataaagaaaagttgctaagcttgtttattttattgtgaatttttgcatttgcaggactttcagcttggggagactggtagaagtttgcc

SEQ ID NO: 16330 - DNA, 571 bp, Glycine max
  Intron number 1 from transcript Glyma02g43610.3 (locus Gly ma02g43610) derived from phytozome v7.0 (chr-ID Gm02; pos 48373481 to 48374051)
accgatcaccaaccaacgtggcttcttctcctcaggttctctctcttgcttcgatcattctttgatcttctttctataccctttcgcttcttataatttttttcttcttctttatattacactgattgtttttattttatttgttgattttaatttcgtttgttgagtgtgcaacttgttatgactgtgggttgtttagggatctgatgcgtttgtttgactccgatccatttttcgcttttttcgattagcttaaattactcatgtttctaatcgttttgatcacattatacttttgtttttgttttttcggatcgttgagattcttcacgaatcttaccccagaaaatggaacaaaccaattagtaataagtaataactgtactgtactaccaggtggcctaactctaaagcttgttttgggtttccgagaattgggtaattaggttgctcctcacttttggtgacaaaatgaatttcgtgtgaattcaaattgagacgcacatagtttctgtgctgacaaaggtggatttgtaattgtgaaatatgcctttattatgttcgtaggtaa

SEQ ID NO: 16331 - DNA, 970 bp, Glycine max
  Intron number 3 from transcript Glyma02g43610.3 (locus Gly ma02g43610) derived from phytozome v7.0 (chr-ID Gm02; pos 48374633 to 48375602)
tattaaagtatgtccagcttattgaaataattatttctgattcagttttgactgttgtcatgctgcattggaatataatcagttgtctctactttatagttttcaacttatatattatgaaagcacaggggacatgggtatgaaggttcagattttttttatcttgcctttttgtcttttgacaatgaaatgtttttctcttaaaccctcgtagctgtaagatttgagttcattcagaaaggttatctctcattacaatgtgtgtactataacatttagctgtagaaattaggaaacatcaaattttgttttgtcacactcaccttgtatgtgttgtgtcctgtgtctttgtcattgttcatgcttcttaggtagaagattgatgaatattgaaaaatttgtaaaactgggtaatcctgggtgtctgcatggaaggtttgtaatcccatggtcggtggtgatgccatgttagagcctggtgggatgctccttgatttttgtgtagcatgcattatttaccatttccatagggaaaattgaaagctgttcattgtctccccccatcctgttttcttattgatattatgaaacattttttttctgtaaccaaaatcattttcttatgaatttaaaactggttaccaaatccgttaatatcagggaaaccatgttatttataacaacagaaggggtttaaataatgatttatgttgttttactattctgccattggtagcatggatactgtcacattcttgtagcacaacttcttttcatgcattatctaccccctctgtgttacatcaattatccatctgcatctactaaaaataattcagtacatttgttatggttttatatttttatatgctgtttattttattcacattaacttgtatgatatagaattatgtgtttttaatggttgaacgcataagctaattttacttcattcatcttcaggaaattc

SEQ ID NO: 16332 - DNA, 631 bp, Glycine max
  Intron number 1 from transcript Glyma02g26410.1 (locus Gly ma02g26410) derived from phytozome v7.0 (chr-ID Gm02; pos 27263492 to 27264122)
tgtaccctcttgggtatgttgtgattctacaataattgttttgttttattcaaactttatcatcaagtagtaatagtatcatcttgcttttattgttaattttttttctctcacttcttattttgtgtaattgaatgttttttttttttggataactttgttctagtcattatatttgtcttctgagttgagctatgttaagtttttgaaacattcttttatctgtctcctatacttaataaaatggagttttcagttcttatagatttgattcctgatctagttttcagattattatcaagtatatctgctgtttcattgagtttcacctgccattcaatttctaatttatttagagaaagaataaaagttaggtttgactgaggctcttaacttttttcttgtttttttttttattattattatttgggggggattggactccatctcacaaaaagtcacttttttcttatacatgttttggaagaaaaagaaaaggaaacatggtagttgaatttctaaagtgaattggtttttcttgttaggtttaaattacacgggttccatgaaaaatatctgtattcctctttatgcaggcattacacagtgtctctcaacattggctatcccc

SEQ ID NO: 16333 - DNA, 551 bp, Glycine max
  Intron number 2 from transcript Glyma02g04230.1 (locus Gly ma02g04230) derived from phytozome v7.0 (chr-ID Gm02; pos 3411955 to 3412505)
cccgatcttactcttcaggttctctttcacttctcactcttttattagttttaagttatttgaataaatttatctatattctttttaattcataggaataaaaaatatgtattaaaaaatttacaataatcatacatcatgtttaattaaatgagttagttagactcattgattatctataagtatttatataagaaaataaaataaaataaacttctttcaaaaattaaaattaacttattcataagttaaaaataaattttgtagagaaactgatataacaaattttttataaattaacttataaattattattagcttatagaagaagattattttgttttttattttttttctcctattataagaagtttcttcaaacacagggcagttagtctcaaaataatagcttacaagagctttagaataaaaaatataattaatctgttttaatctgcatagcataatatacacgcgcacacacaatattttatgtggcattttgaaagctgtgtttaacatgttagtgcaaattaaactctaacagatag

SEQ ID NO: 16334 - DNA, 840 bp, Glycine max
  Intron number 2 from transcript Glyma04g07070.1 (locus Gly ma04g07070) derived from phytozome v7.0 (chr-ID Gm04; pos 5479182 to 5480021 reverse strand)
catagaagctacccttttggtacgctccattttcattttcttttctgtttttattttaattttaaaaaacttattaatataatttattatatgtgccttttggccttagttagtcaaacccctttcataagcacatacagcaaaagtgaaaagtaattaacacttggctattttgttgaaattttctatgtatgtgtggatgcaaactcatgaaacaaattactaatgtcatattttgttgtttgaactcatgactctcgtctatcactcggtcatttcttgtggcaattcactttcaaaataacgtaatctgaccgtgattaaggaaagaacttgtcttttctttttgtttttactttttaataatatgtatgtgtcagaaatattactaatctacattttatatattttttcaattttttttatcatgcatttaatttctataaaactgtgacattcaactaattatttatttttgttaagtttaattttaaaaataattattataaaattaatacttataatttgtggttcacagccaaaatgcatttagattaacttcttttactatttagagaattatcaagtatgaactgaaatgcataacttgtatgtatctactttgtgttaataagaattaatatatgaatccaactaattagaaataaaattttgaaaaagaagtgtggaatctttgttaataactgttattataattgttggatcttttctttctagcaaacgtaatttgacaacctcatctagcatagaaaattacacaaatgtggaaaaaagattacaatttctcagtgggtaacgaaaactttttaacaggtctct

SEQ ID NO: 16335 - DNA, 638 bp, Glycine max
  Intron number 1 from transcript Glyma05g05620.3 (locus Gly ma05g05620) derived from phytozome v7.0 (chr-ID Gm05; pos 5059119 to 5059756)
ccgtcgctctgcttccctccctaacactcaatacggttcgttttctctctttatcccttatacaagcgcgtttcatttctttttttcatttatcaaagagaaaaaatcttccatgtcaaacgtggcctttacacacatatgcatgcatgaattgaacgtggcctttttatttttcatggtttggtgtggaaatcatggaattgaaggttgcataaagttgtttttttttcctctgaattagcacacaacaataataatgctatttaattccgtgactgtggaagccccctcattcaaaatgaaattcaaaggggatgttattggatggcaagaggaggattatagaattgtctaatgtaatatcttctagttttctacttttaaggtttttaaatgaatgctcctccgtgtatggttatttgcaactttttcaaacttgttggttctataagataaaaaggaaaaggataatgaaaatgaaaatttgcaagccggatggaatgaacctattgtgcatggcagagttttggagtggatataattacttggtaatggtgtaggatagaacaactggggctgacttcaattcactgatctttattttctatgtgtattgggtgcagaggaatctgaaacag

SEQ ID NO: 16336 - DNA, 751 bp, Glycine max
  Intron number 1 from transcript Glyma03g41020.3 (locus Gly ma03g41020) derived from phytozome v7.0 (chr-ID Gm03; pos 46591178 to 46591928)
caacttgcttcaacgaatcatattggtaatcatgcctactttttcgagtattaagttttttttttattaaatacaactttggttctttatttttttaaatttacaaattttgtccccctgtttcaaaatagacatttcaccttcttattttaaaaaaattatcattttgtttcaatctttaattttgctaatatttaattcttacattttgattaattaaatcaatttaaagatcccctcaaatgtttttccatcatcattcatagtcactttccatgttttccatagccttcaacgctcttggtctctgcatccaaaagagaattagggggaaaactcatgcctaatttttagtgggttagtgacttagtgatactatgagttttagctgttttttatttctgatgtagattaagcgtgtgattagtttaacattggagaattaattttggatcctgaattgattttagataaatttttacatctttggtttcacgttgggcagaggatttaataaataggatctctctcctgttaatggtaaaccgtaaataggagaggatccaaatccaaggaaaaaaactttctttaaaataaatccttaattttagagagtccaacatccattgattcctttagccaatcttttgtagtggcgcaatgaatggttgttctcgttttatattgtttcttcttatataaaaaattgctatgtagttaaatttttgttgattttctctaggtttacctg

SEQ ID NO: 16337 - DNA, 794 bp, Glycine max
  Intron number 3 from transcript Glyma04g01520.1 (locus Gly ma04g01520) derived from phytozome v7.0 (chr-ID Gm04; pos 997870 to 998663)
ctcgatatcaagtaagcctattatgcttcaattatctcaatgccatttttagctaagcttgtttgccttttatatttatttgaatctaatgttctgcaaaagaagtaacatttttttaaggaattgcctccgctagagattaagatgatgatgattatatgcaacatcaccgtggccaattgctttttataaccattagtgctaatattgtaatactaatattattattttgcccctctgcaagaacaaaatggttgtggcttgaaaaaagaaaaatactgtactagtatgaagattgctggcaacacactcttttcttttttattgattgaaatttacatgagtcctattagtttgaggatgaaacctatctaatgaggaatgggactcgtatatgttagagttttgtggtcttagttcctttgtcccacatcgcttggtttgtaaaacttgtgtctcattagtattatatatatataaacatcttgtaagctttaaaatatgcaagtaacaagaaagttttcttagtatagcgaaccactttaaaaactttgtgtcttttctctctcctccttattcctttctcttttttttattactccatactaactagtatagtcatatttagtcaaattaatttttttttacctaaccaggagaatatatcaaaaagaaaatgttggagagtgtggtagtaacatttaagatgccagtatattatttcatgacccttagcaggtatattgcagtactgcttcaattcatctatttctgtcttctttttcagcccctta

SEQ ID NO: 16338 - DNA, 697 bp, Glycine max
  Intron number 2 from transcript Glyma04g38870.1 (locus Gly ma04g38870) derived from phytozome v7.0 (chr-ID Gm04; pos 45196210 to 45196906 reverse strand)
tgattcgttcgcgcggaatcttgctcggcgtcggcgtaagtttcatgccactgttctgtttttccttagatccgtgtgattgttgtttgttttaatcgatttttccagactctgcgccgagaagaagtctttactacaaaacaaagcgtttattgtattgcaaacgcgaaaatgatttagtacttgttttctttgagtgattgaaaggtagttcaatgtattcaattttcctagcttgtgcacaggactggaaaatcgttattcaatgagttgaatacgtggtagtcagcattttgcttcgttttgagaatctgtgtcggtgttggattttgctgattaatgtcatcacattcaaaagatgcgaagtggttttctttcaactttgaagtgtgtaaacgttatgatccgtttagttcgtactctggttttataatcttagcttttatttgatgtagtttcccactcctttgggttttactgattggattttagtattgaatgcattttatattttcaagacattaaatgcatttaatttttttaatagttggaagatttgtaggaggatatttgggttgtctttgatcttgttaactaggcttgcaccagcagtttggtgtagctctttgtaagtggtgtttaatgcttgtttggtttgtgaccaggtgtaagtcatctgtgaattcccttgggcaag

SEQ ID NO: 16339 - DNA, 846 bp, Glycine max
  Intron number 1 from transcript Glyma04g41290.1 (locus Gly ma04g41290) derived from phytozome v7.0 (chr-ID Gm04; pos 47148739 to 47149584)
tgtcttcttctcacgtcctctttcaccggaatcaggttctctttctttcttctcttactatgcttacgttgtgttaatgctttgcttctgtgctacttccattccatttccatgccacttctttgttctctcaataaatcaccttaggataataacttcaactttattgactgaaacttatgagctttactaactcaaaaagtaacacatgcttttattggaatagaactccttttgttacttcgatttgttcaactaattttctaggtctcttgaaaggaacggataactcacctcctatttgatgttctgtttttaaaagtttgaaaggtacttgataatgaaccgttcaaatttctgcgtaattgcttcataggtgaagtagcaactgtattaaaggaacttgttgattttgggtgggcttgtttatcattttacgagattagggaagataacatttggtgcaagtgtggaaatgaagttaagttggctagactatgttgtaatgttggattctatggatttgagttatgtcgggttttgtgacgcttttacggtatcatactgtctttttcacggattgaaccatcaaattatttggacactggcacactaatgcatatagttcggcgcagaatttcttttaataatttaggtgcaagtctttggctagggcctaggatacatgtttaatctcttagtgcaaatgattgtttctgattattctcagtgtttttagttgtctacccttgatttcaatttgcatatctgattacaagaatttgtgacggcttggcttaatgtcttctgttatctattattaggacaagcaaagagcttcggcat

SEQ ID NO: 16340 - DNA, 956 bp, Glycine max
  Intron number 3 from transcript Glyma02g06000.1 (locus Gly ma02g06000) derived from phytozome v7.0 (chr-ID Gm02; pos 4819574 to 4820529)
gtgaaaggaaaaggttggcagaagaaattcaggaggtatagttttttttcttattttattgcatctcctgttgtatactattgttttaaattgattgattattgtggttgatgtttagatcaatcttttatgctagtagatcttgaataattatcttttatgatagtagatcttgccacgtgtattagcaagatatttcgaatgttgtcttctgtttttatttagtgtacaattctcatttttaaggattttgattaaggactatataaatcatttttacataacctatttttttgctgtgtgatggggctatgatgcactgatacagtatgagtattagatacaatatggatttgatacggcgatacgtcatttcttaaaaaatataggatatgatatctaggattgttaattaatttataagtataccaaattgtcacaaataaagttaaaatggaggttaagtgtcgaatctacatagactttgtttgtacttagattagtgtaaacccaattttttttaaaaaacttttgaataaaaaagatgaattcaaaatgtaaatatgtttggacttagcataccaaactacttgatatgtaatgttaataatttttcttatctaatattaccctagtttttatccacatctactttgatactctaatcaagtgaaaaagcctaatttagttattttctctcccaaattcatttgcaaagataaaatagtaaattgcattaagaataaagatacatagactaaacaaactcattctattccttgatatgatttcatttagatgtcatttctcagttctttacaaaataaacatttctcaatgcacagatgcatgagtatgagaccacaatcaacaacaataagctcagaaaataacaataaaaactgaaattacattaaatagataatagagaaaaattatatttcaagagtttggtc

SEQ ID NO: 16341 - DNA, 654 bp, Glycine max
  Intron number 2 from transcript Glyma02g35710.2 (locus Gly ma02g35710) derived from phytozome v7.0 (chr-ID Gm02; pos 40893678 to 40894331 reverse strand)
ttgtgattgccattgctccattggcagggttatttgtacgtcaatattgctgtgactttttgttgctcaagagtgtagcttttatagttttttatgatgttagtctgatcatttatgaaaaataattatgtgaagatacttgctgttgtctcattctttgtaagttggttttcaaaactgccttattctaaaatttatcagatagtctcattaacagaatgctctatacttttctgctatgcaatgtgaagatgtgattgttgcatatataatatatcttaagcagagatatataggaatagagtgcagtcatgcattaggatttctgttgacatttttgcgttttttctcctctccttttgtttgttgtttgagtgtgcacacatgggctttggataggttcattgatccataagctgtactaaaatctaaaccaaaagggggaaaactataaagtataaaaacttaaattttgccacatgtcagatttttcttttttaaaatttaaagaccaagcaacagaaaaaaaaataattaaattttagctgttgatctttagatgggggagggggcggtatattttgatcaattcatcatgtttttatttcttcaattcgttaaccccttttacctgcttgatacagcctaaaatag

SEQ ID NO: 16342 - DNA, 662 bp, Glycine max
  Intron number 1 from transcript Glyma02g01720.1 (locus Gly ma02g01720) derived from phytozome v7.0 (chr-ID Gm02; pos 1242803 to 1243464 reverse strand)
tggggaacttggcttacgatatacctagaatcaaagtatgagacttgagatcttcctcttttaattttggtaaaccgtaggatttggtcggtttcattcttcttttgttttctatttgtgcttttttattgttttgagcctgattcatagattttttagacctcagatcttgtcttgtactgaacttatctgaatctagcacacattgattgcttgaagattctgtgggttatgatttgtctaacttttcaaaaacctatggaagggtttaagtttaaacttcatgaagcattaatctaaatcggaagtgccttgttatgaacttatgacacttgtttcattttgtgtctgagttttctaatttaactaggatgaaagtaatttataacaacaacagaatacttattatttatgtgatctgatcgatgttgagcgaatagttctgcaaggatagtatgttggtggggctatgtttttttaccatttactttttataactatatcatgtttttgtacagctctgttattggtttttattcaaatgacatgttctgaaattgattgataaatctaggaatttgattttctacaaaaatgcatataaaacactaatttataatatttggatttgataatttagccagggaagctcttgaaacatt

SEQ ID NO: 16343 - DNA, 712 bp, Glycine max
  Intron number 1 from transcript Glyma02g41790.1 (locus Gly ma02g41790) derived from phytozome v7.0 (chr-ID Gm02; pos 46879353 to 46880064)
ctgttatatcagggtgagtcagtatgttgttaaaatttaactcttaccaaagattaatctgtttagttaaaacttcttcgtaagcacttgggaaaagaaaataagaaagaaaaatgaagtaagcttctcccgtgaactaaacttagcttatgcataagctaatttgtaaaagttctcccatttaatttgtgcttatgagagaaatttatttaatttttctttcttattttcttctcttaagtttttatagataaatttatccaaacaagccccaatttaattgattctattatatgacttgtatgagcatcatcatatgtttggatgttcatgttgtgttagattgtagtgttgagttagatagtaggtttgtgtatgctttgttcgtgtcaaagtagtgcagacacttcaaaatagtacctgcgtcttgtcaaatacttcatggagatatgggcaatttgaattgtcctagttgcattttacttgtttttaaaaaaattaaagtttaataccaaaattgacttgaataatacaataactagataaattctatccatgtccatgttatgctttttccatgtcacggatctatctatactttatagattcatgttccaatcacttttgcaattatgggtctatcttgattttcctacaaactcaatttatttttatttttaatatatcctgtgattttcacatcttgacagat

SEQ ID NO: 16344 - DNA, 479 bp, Glycine max
  Intron number 1 from transcript Glyma04g09400.1 (locus Gly ma04g09400) derived from phytozome v7.0 (chr-ID Gm04; pos 7632856 to 7633334)
cagtgagttgctctatttcctgctaaaagcattttgtttcgttcttttttctgtcaatattgaaggcaccttttctgtctcctacgttccttaaaaagagactcaaattctgtctttttgcatggtttcagtggctcatatatatgaagtatcttaattggcttgattttggctgcatgacctctttagcttaaactgacttatgttccttaaaataaaccgtagtattttgttcttcaggttttcttttaaaaattctgagtggctcatacagtgtcttgactcaatcttggcagcactgtcttagcacaaacggacatattttttactccttttaagaagcatgatgcgacacaaatgaaaatttggaaatgatttcattaattatgcacaagtttgtgcatatattatttgagaattctatgtaatttaatatgacttcttggattaattatttcagatcacttacagctttccat

SEQ ID NO: 16345 - DNA, 931 bp, Glycine max
  Intron number 1 from transcript Glyma03g03190.2 (locus Gly ma03g03190) derived from phytozome v7.0 (chr-ID Gm03; pos 2989539 to 2990469 reverse strand)
ccaatcgaattttgcttcttgctgctctctctgaggtaaagtttatttatttattttttctgtatccaaaaatgtaaattgttagtttgttaatttttgttagcagtgagagtcgaactacttggcttctttcttagtcatccaaccaaccttatatctccaaaatttatttattggttttttttggggttatgtggttaggaataggagtttgatgcgtggagtggattttgaatatttgattttttttttgtattattcagtgaaaatgaagcatcttgtcccatgaaagaaatggacacgaaattaagtggcgtatgatttagaatgatgatagaaatgtgtataggtggttttaatgtgtagcaataagcatattcaatatctggattgatttggacgtttctgtataaaggagtatgctagcaatgtgttaataatgtcttgttaaaagtatggatggctaaaataatcataaaaatcgagtgggagtagtatacatatctacaggaaatgtattaggtgaggcatttggcttctctattgcgagtaaggaacaagtaatctcagttaatgtgaaaatcaatggttgatattccaatacattcatgatgtgttatttacgggaacgcaatattgactgttgattttatctgcagctgagattatatactatatccttccaaagaaatctttgactcttgattatccaagtatggttgtattaccaattttagctctagaagataatccctcccccaaaacacaaattagaatggtgctgcaagttctgtgttactttcattctattatttttataacttttaattatttaatagatgtcttgtttggcataaactataatttattctgtttttttttatttacttatttagggaacaactgttgtagacaacttgctgtacagcga

SEQ ID NO: 16346 - DNA, 686 bp, Glycine max
  Intron number 1 from transcript Glyma01g05080.1 (locus Gly ma01g05080) derived from phytozome v7.0 (chr-ID Gm01; pos 4729377 to 4730062)
cacccttcaccacaagtcacaagtatctctcttaggttcttcttgttctttacattaccccagttttgcttaaaaatttgattttgatgttctaggaaggtttgttaatgaaaccaagtgattcccatttgcttggtagttaaacggttggttactttttacaaatcctgcattggaaatttattattagaaaagtggaagaattgatctgctgagtgaggaatttgggcttgtgatttttgagaaaccaagtttgtgtaggaatgaatttgcttccccccacgttgcggttttgactttgtctgtgaaaagaatccagctttaaactcaatgatgcataccaggaggactaaataacacttcgtctgtaggaattggttttccatcatacataattctggaaattatgaactttgataattgtatatcagtgtactggcttgattattttgaaccaatgtaaaatcaattttatctctcattgtgtgtgggttttgattcctttaaacttttaatgttttgtgtaatatagattgcttctttcttcaatcagttgcttgctgatactgctttctctctctctctctctctctctctctcttgtttctctatagacaatggcttgtcaattactgattgccaatgcttgtgttggatttgattgaaaaataggttgacttgtgaga

SEQ ID NO: 16347 - DNA, 753 bp, Glycine max
  Intron number 3 from transcript Glyma01g05080.1 (locus Gly ma01g05080) derived from phytozome v7.0 (chr-ID Gm01; pos 4730312 to 4731064)
gaggtacaacaatatcttctaccttatttactcaaaaagactttatatattgtttcaatattcatatgaaaatttctttgcatgtcctaagatactgttttgttcctcctctgcaccactcactaaccaaagattgcacagtccttttctatgaagaacttcaacactttaaaccaaatcatataactgggataacccctgctgcacatttaactgaagattcacgtattataatgatcagttgtgattgtttagtatgtgattagcccctgtaaaatagcatctttctattacccgttgatatgatagcgcaaccatgagcctttgtggattagtaggagacttgggcttatttgcatttacaaataattgagaagaagaaagttcaactttgcatccagctatatattattattattttgttgctgtaaagtacaatcaaatgatttttttagcatgcaagtgctgaaaattttcaagaatattagagtttctttatctgtcatccaatttggaagcatctagaaagatggtgctcttttatttgattcatgcagatatttatagtgctacatgttgtggtattgattttaggcttctttaagagattgattttactgtttgttagattcttcatgtgagggtattttaattatacctggttactgtgttttctaacttcagcatgcttatctgatctaatttgtgtgtctttcaggcacatttaagctaacacttcagttcattgaggat

SEQ ID NO: 16348 - DNA, 582 bp, Glycine max
  Intron number 1 from transcript Glyma05g21470.1 (locus Gly ma05g21470) derived from phytozome v7.0 (chr-ID Gm05; pos 26124526 to 26125107 reverse strand)
tgtaggaatcctcagcgaataaaattggggtttattttaggatgtttactgtattgtaattctgcctttatgattataattacaaaatttttatgtttgactagccaattgatgccctaatgtgaattggttgataaaattgaatgttcttggtgtttttgtatttttaaacctatgattttgatatgattatatgccttaaatgttggaagattgctatcatatgataatgtgttagtgacactactaaaaaattgtttttctacgccgcacattctaagacggttatatgtaaccgccttagaatgtcacgtgatagcaattttgtaattaagaagaatttatgacacacattctaagacgattttacggaaccgccttagaatgtactaggggaacctaaacgacaacgggtttatgtatagaaacgtcgttgtttttcttcgatgccaacagtcacgtgtactttaatttaaaattcctaacctcctttaactagaacccttcactctcttacgcttcccttgactcttgctttggccaccagctcacgcccgcacaagagcatcacccgcttccgcg

SEQ ID NO: 16349 - DNA, 566 bp, Glycine max
  Intron number 1 from transcript Glyma05g27500.1 (locus Gly ma05g27500) derived from phytozome v7.0 (chr-ID Gm05; pos 33407630 to 33408195 reverse strand)
gacgtggcactgtctggttttgcttcaaagctaaggtactttaacagttgagactgagagagacacacccaccgagaactcaactgtttttttatagcaattttacatttatgcccttgattattagttatatttgcataactatctccttcttcttgatgcgtgcaattcaaccaaaattttgatttaaattgatttaatttatgttggaatgtttttattgttaagtagtaaaattcagtctaactttttggatgcaatgcaaaagttattgaagttatttcaacctataatcaacctgaataatttttttaatgatgaactagtgaaaattcacctaaaatcatgttaatagatatttcaacgtcatttatggagaatcggacgtgaaacaaaacactgcattgagtgcatgtttgtatttgacagagtctaaaagctttttttttttacttaaaagtaatattttttgttttttattttatattttgaaattagcaattgcatgttgaaattcataaaaatagtttttttaattttaatccaaacaggccaatcaatattcc

SEQ ID NO: 16350 - DNA, 324 bp, Glycine max
  Intron number 1 from transcript Glyma01g37630.1 (locus Gly ma01g37630) derived from phytozome v7.0 (chr-ID Gm01; pos 49955956 to 49956279 reverse strand)
attgttttgtcaaggtctctatatataacagataacaaaccccataacttagttaatataaatagaaaattcatagtagtggcataactatctgatctatgagtcttgcttatgtgcatattatagaatttagtataatgatatattgacagctacacagtttatacacctagttgacaccttttattcttctatctttttttgtcacgttatatcacttattacatgtgtattgtgtctatgagcacgagtgtacatgaattatttttgtagaacttatatggctcaaatgcatgactcaaagtttaatgtttcagggctgtg

SEQ ID NO: 16351 - DNA, 350 bp, Glycine max
  Intron number 1 from transcript Glyma03g03310.2 (locus Gly ma03g03310) derived from phytozome v7.0 (chr-ID Gm03; pos 3079555 to 3079904)
cttcatcttcactcttccttcaaatttccaacaaggtaaccccaaatcaaatccgagatctgtgttttcctttcgtttattaaggttgtttctttcgtgcccacatgttctcttctccaaaatcctctcttttatatttcccctttgataatttagggtttggtattgtgatagagacacaataatttttgggaattcttgtgacacgggatagttggagaattttgttttgtattttgcttgtgaattagggttggttgattcttttttacagcattgaagttatctactctctcattaatattttttttattaatttttttttggtatatctagggttcaagggtatt

SEQ ID NO: 16352 - DNA, 963 bp, Glycine max
  Intron number 1 from transcript Glyma04g39110.1 (locus Gly ma04g39110) derived from phytozome v7.0 (chr-ID Gm04; pos 45336790 to 45337752 reverse strand)
cctccaggtttctaattattattttttactcatcaattaacttaagattcaattcaattcgattggatttgattcgtttaatttaccctattttttttatttaatttaattaaaattaggttctccggttattaccttaatcatttgatcacataaagtgacttctactccggttcctgagactctctctctctctctctctctctctctctctgtctgtctattgcaaacatcattgcatactttacttgatttatgagtttccccttttagttttgttcagacttgcaaatcagaatttgtaactgcctcctgttactaccttttttcaacacgattgattgttcactttttttcgtacacttttcttccttttcttaccttcaactttcctttaatagtaaaggcctctctctctctctctctctctctctctctctctctctctctctctcttgccgtctgtctgctcatgcctaaatgcgattttcttctggaattttttacccactctcttcagatacgcgattgtttctgttgtttcagtaatggtttataatttgtgccttttcaggaagatttggtccattttgaattatccatctgcaaattgtgttttaaagtctgaatttgcagttctagacttctggtatggatttatttggggaaaataaagatctaaatcttgatggactaatttgataagactaggaagttaacttccaccccttccaaatatcgatttaatgaaatttaagcaaaatgtatttatcttattgtttttctataaataaactgttgtaattataaaacatgggagggcgtatgttataatctacattcattttagcatgattaatgttagaataaggaacaaagagaacatggacagtttaatttgtttctccaatctgctgcagaactaattgatgctgttttctttatgctagagggcaaggtgac

SEQ ID NO: 16353 - DNA, 687 bp, Glycine max
  Intron number 1 from transcript Glyma02g47080.1 (locus Gly ma02g47080) derived from phytozome v7.0 (chr-ID Gm02; pos 50800891 to 50801577 reverse strand)
cataacaagattagtactttcgaattctccaccacgttttgtcattctgtggaaacacattttattgaattttatcaaaaataatatcaggcctgtataagatgataagaatacgtgaagaaatgatactattcttaagaacaattgtattagctagtcttaatttagagttacattacatgttctaaagaaaatctttgaatgatcctaatctaataaaacctctcctattggcgtaaaaatagtatagaaggtggagctttttcatctgggttaaaaataaaaattaataattatcataatttaatcaatgaagtatttatcgtaatgaatgatttttgtcatataagaatataagaagtatcatcttgaattacatcttatattttttatttgtcttgtaataagattttttcatctaattaagttaacctaacccaagccgatgcaaaaaactcatttctttgattataacttccattttaatttcaaagattaaatacgtcattcactctttttatttatttatttctttcattaaaatattgatatttttcttctctttcttcaattattttgctgatacatttttcattcatctattaatattcaataactttggaacacttttttcaataactctagtaaaaaggcttaaaagacagccacaaataataatttttgttt

SEQ ID NO: 16354 - DNA, 845 bp, Glycine max
  Intron number 3 from transcript Glyma04g06250.1 (locus Gly ma04g06250) derived from phytozome v7.0 (chr-ID Gm04; pos 4787886 to 4788730 reverse strand)
aggtgaaattgttggccttttcggagtttttggtatgtttataccttcctgtcttcttcatctccaggttgtacactgattggaaaacatgccaaaatattgcacgtagaactcatgctatgttactcctgttaatatgtattatatatattttttattatcaatctgcttcttttctggattttccatttcttaaaatattgagtaactaagtctccaatgtaacttattgctgtcatatgcagatgcttgtgtgcctgtgcacttatattatataatagattgctagtttgtgtatttttgtcctgcattttcagtcttaccagcttttgtgcttctgttttctcaaatatacataaaatacatggagaggaacttttagatttgtttacagttgatgttttctcaaatatacataaatacatggggaggaacttttagatttttttacagttgaggtctcatctcacctttcaccccatgttaatcttattgtgtggatggtttgattagtctgtttggctgtagtgttattttctgcacacaatgaaggaaatctctttgaaggtttatgatatacaatcttcctttgggtgtaatttccagattcttcaacctccttttgaactcaaatttctctttgtagtattctcatttgtaacttcagaaccttcattttattcctctatgtgaacaattataagctaagagttattttttggtttgccatcaaatatttttccccataaaaatttattcttataggaatcatttcctatcggttaaacctattcttgataaatagaagtagctgcaagtttcttgtttataactccttccaggtc

SEQ ID NO: 16355 - DNA, 433 bp, Glycine max
  Intron number 2 from transcript Glyma04g06250.1 (locus Gly ma04g06250) derived from phytozome v7.0 (chr-ID Gm04; pos 4788822 to 4789254 reverse strand)
caattgtgagcggcgggggtctaaggttaaattctttctcaaaagtccgtctttctttatatcaagaactgtttttttcttttcgtgtgttttttgtttttctcatgttcttgcatttgagacataccagtatttattggttagttttattcagacttgctggtcgtaacattcattttcattttcataattccgttatttgtgattcttgtatttatatggattttgtatttgtgattcatgaaacacgtgttggaattgtgatgatttcattgtacaacaaaattctttgactaggtctttgttaaactagtatggtctagatatgatgattgtttctcttgtgttatcatatcggtgagcaaaaactaaagaatgaggccgcatgagatgattgtgacacagtttgttttgatttgtatttatagtcaca

SEQ ID NO: 16356 - DNA, 430 bp, Glycine max
  Intron number 1 from transcript Glyma01g07780.1 (locus Gly ma01g07780) derived from phytozome v7.0 (chr-ID Gm01; pos 8583721 to 8584150 reverse strand)
tatctttcttttccccagtttctctcgcttcctaggttctctctcttttctctctccattgatactctctgcttatagtctctccattttctattttcaagagtttttcttcaattttgaattttatggtgtaatcaagaaatggttttcaaggaaaaatttgaaatttagcaaattagttgaaacccattgatcccctcttatgatttggataagaatataatttaaaaaaaaaatcaattttttcctttttttttttttggggggggggggggggggggggggtaatcatgtaatgaagttcaggataagaaattttggaatttgctatttggtgagctttagaggctcaagttttgctgaattttagtttgtggtggttgaatgtgagtgtgtaaataatattgtctctgcaatgtgcaggtaccac

SEQ ID NO: 16357 - DNA, 601 bp, Glycine max
  Intron number 1 from transcript Glyma05g07770.1 (locus Gly ma05g07770) derived from phytozome v7.0 (chr-ID Gm05; pos 7754338 to 7754938 reverse strand)
gactccgcttctcagcaggaagtttattccacctcgtcagttcctcacaattcacaattcttcatgttttgcttttcttcatgctgatttttttttttttttttttgcagcgtgatatagaaactgaattgcataggttcattttcacttgtcgaagaatttcggttcatcttactttcataggatctgttaataaatttctctgtagacactttaagaaaagaaagtataaacagataatgaagtaaaatttttcataagctaaatttagcttattagctacttaaaaatcagtttttgaaagtagctaatgtgagaaaacttctacaaattagcttatgcataagttagttttagcctttagagaaatttatttcatttcttcttctttttttccctgtaacagccttaatttctcatacaataagtatttaaggagaagtttatctaacaagttcatattatcatgtgatgtgtaggtaaaacattgttgacaagggtgtttagacaatttcatgcttaataatgatattcagctttagtgaacattgagtttgatttttcaggacttcagagcttgtggaagcggttttgcaaggga

SEQ ID NO: 16358 - DNA, 812 bp, Glycine max
  Intron number 1 from transcript Glyma03g35000.3 (locus Gly ma03g35000) derived from phytozome v7.0 (chr-ID Gm03; pos 42304009 to 42304820 reverse strand)
aagaagaaactaagcgtcttgcaaccattcgtgaggtatctctctcacatcctctgctctaccttcactaattaactctcaaaactatttttttggtcttttagtcgggggaacaagaatttgttgcagccttgcatgaaaaaaataagtttttttttgcttcagaaaaaatttaagtgattaattttaggatttttaacaaatatatgttggtttatcaggtgaagaagctcctgatggaaacaactttggtctttttcagtattttgtgaatttttatttaattaaaccggattatcttttaacaaggggaataccagaggtttagagaacatctagagcacttggatatgcctgatctgtggttttgttctctcgacaaagtgaatttgcagccccaaaacctttttttttcttctaaattttccgttgggttttttgaggaaaagatttcaaaatttgaactttcatgttcccttgaatatattcttgtcagaaaacagtgtcgggccatgaacctaataattcatatatttcctccctagaatttattttaaatatctgttttttttttaaaaaaaaagaaagaaatatctgttgttagaaatcaatatatcaaatatcagtatatttctttggccttacaattttttaatttaccataattcatgctgaaagttgttatacatatttatgtgtagcgtgtgtgcctacaattttgttattttatactcaaattgatatgtaattgaataatcccaaacttcattctatttgaggaatatcaggagcttgaagccctggcagatcca

SEQ ID NO: 16359 - DNA, 842 bp, Glycine max
  Intron number 3 from transcript Glyma05g14330.2 (locus Gly ma05g14330) derived from phytozome v7.0 (chr-ID Gm05; pos 15226470 to 15227311 reverse strand)
gaagaatacactccgttcatcgtcactctggggtactttgacgttaaccccttatcgtattttgttttattttttacatgttggtgctttttttgctctttgttttgattttgtatatacccgaaagggatttgcataataaaagagacgtggtttgacttgcatttgttaacaaggttctccatgaaatgctagtgatgaagtggtgtgagtcgaggtttttaaaaattgtcctggatgcaattgcagctccaaggtcagggatttttgtggtctctgcggccgtatcagctgcatctgttcacaattttacacatcaattattgctacaaaactacaattgggattatgactgcaatttcaaactttggtttgagtgagatgaagcttaagagtgaaagaaagtgaagaagtacgagcacagtgtgtgtgtgtatagatcagtagcactaattggaagtattttttttcctgtgtttatttcatgccatgttaggtcctatttggtaggcatgatcaatctttgatttacacccatgactgtgcctgattgaccaaatgttaagcagcgattttgggatgtttttcttatttgttaattggaggtgaatattagaaaagttattgaactcttgctgttattgataaaattcagttaagtagaaattgttgtgtgtctggtgccatgtactaaagcagccagtgtattataaatttataagttaaagctttacattggccatattatgctgtcacatcccggttaatttgatgttttagacttattttgatgtatgcattaatcttcttccaattttaggctgtagcaggattagcagctg

SEQ ID NO: 16360 - DNA, 548 bp, Glycine max
  Intron number 2 from transcript Glyma01g23820.2 (locus Gly ma01g23820) derived from phytozome v7.0 (chr-ID Gm01; pos 30809554 to 30810101 reverse strand)
ctgtgagggccctagctactgctcagttagtgtaagttaattgtgtattttgtttccctttttacactgaagttgatatgtgattttgctttttacttttttaagttaaatatgtgtgcattgttagctgtgctatttttatgtggtaggtttctcactggggtcagttatgccatgtaggaaataacctcacccagtgagctatggcttgttgatattgttgttgttggctctttatgttttttttattcttagtatatatactgaaaacctgtttacatatatagattaaaaatgttgcaatcttagtcattgtcatgattggctgaaagatattttcttcttcccattcaaaatatagagacccacttaattgttataaaattctatgataaaggatgaatgttttcttatgcccaccaaagttgctatgcaggatcaatacatgtagcttttttttacattgaacaagtaatttatttaagtgtatattttgttttcttttcctatgtttatatgtttggctagatgtttgacttgcaggtgta

SEQ ID NO: 16361 - DNA, 629 bp, Glycine max
  Intron number 1 from transcript Glyma04g34170.1 (locus Gly ma04g34170) derived from phytozome v7.0 (chr-ID Gm04; pos 40220897 to 40221525 reverse strand)
tcaatcaccctcgcgccctcgctcttcccttcctggtttgccaattctcctttttccgattctattttctgttagtctttccggttcaagttcacgattgcatgcttcatcttctgtaccgcgttgatccgcttccaagccctttgtttctttgatttatgttgtaattttggggtttcgtgaagttctgatgtcaaattagggggggggtattaaagattctatttcgggcttgaagttgttgctcaaggactaacggggaggattttttttcctggtgaattctagggttcattaggttgcaattttttattttttaaaaaaaaatgtttttggattttccctcgtttcccctatgttgtctggttctcttaatgctaatactatttgattgtgtaaatctgatgattttttgtttgtttaattatatgtaagtattgtatgaattatgaactattcttttccggtgaaatttattttgtttttattttaaacatttgagtaattttgggcctgattcttatgtggtgttgctatgttggaggcttttttgcccccttaaatacactcgattgattcaagtctattcttttccttattgtgagtgttggtttttcaaggtggcgaca

SEQ ID NO: 16362 - DNA, 874 bp, Glycine max
  Intron number 1 from transcript Glyma04g39680.1 (locus Gly ma04g39680) derived from phytozome v7.0 (chr-ID Gm04; pos 45870577 to 45871450)
gagcagagtaaggaggttagttctgatttctctctctttctaaacgcgtccgttcattttcccctgagacgatgttttgtgtttggcggctaaggaaaaaaaaataataataatcgaatggaatcgaacgaacgatgtttctgtgtgtttggtttggttgctattgacctggaaataatatgtttccttcgtcgaaagcatatgcgtactttgatttagttgtatttgtcgtttttctggctcatgctgttctgttggaacttttcgtgtactcaatgaatagaaacgtctatgaactatgatgataaaactctttctttcatttcaagctctgtttgttgtacttcgtgtcgtgctgtttgtctttcctttaacttaatcgatttgttttgtgtttattgtttgatatgatgatatcagtgttgcagtagcacaagtaatcgtaattccctttctgaagctaatggaatatcagatgtattgcatgaatacttatcatctgttatgctgtttctctttattttttctcttgtatgaatataatgaagttttttttctatcttgtaaattattcaaattaactgtcaataaattattattattattattattattattattaactagagtctagagggtatggtgaagttcataaactttgcctgcacattggcattagtaattttgcttgtaatggttcttctggattgaagtaaaaccttttcaataattaaccattaggtttctgaaattttatcatgcagtctaactaataatttctatttattttattgtaagtactactatatgccaaaagatagttttgttatggtgataagtcctctaacctataaatttttttctctgtagaaaa

SEQ ID NO: 16363 - DNA, 1026 bp, Glycine max
  Intron number 3 from transcript Glyma04g07280.1 (locus Gly ma04g07280) derived from phytozome v7.0 (chr-ID Gm04; pos 5660471 to 5661496 reverse strand)
gctcaaggtacattgataacaatataacatgaatatcttatgcagttatggtttaatgagggatgctatctttattagaattggaatacatctggagatttatttaagggaaaagttttctactttttgagctggttggcaaatggaattaaaagtttgtattttgaaaaactcattgtactcacagcaataaactgccatgtattttctcaatgtctgtccttgtcaatttttgcatggttgaacagtttggcgttggtgatgtttggaattttatatttgtataggttactcgtttttcactggctaacttaattgagtggataccttctcatgcttgagaatatgccttcaatgaaatggtggtggtggatgtgttttcttttaataaatttaatggagtaagggaatgtcaatatcttgtcctctcctggtgatgtttgtttatttaataagttcctagactccatatcctcttttggaagattcttgccaatttgatttggtgggatgacacaaaggtactgccaaccaaaaaagtactataaaattcattttatttcattttctagcttgaaagtttgcagtaaaggaaaccttgactctgagtttttatgtgccaaaaaatagaaaggggaccacatcactgtctgtgttgttaccaaaacttaaaggcatgtagatactaatcaccaaaggatacatatagacccgatgcttaagtaataaactcttgattttcataattttgaaatcaagttgattagtgcttatattcatattcatataatacaaattatgccatttattaatacgtggtcccaaaattaggtaggggtgatataattctaatgtgtatttaatctgtactagcagaactcttagctcataaatagttctaatattttttactttaacttgtttgtatagctagttgacaagttccagattagcctatggtgaataaaatggattttattttgttttgcagctggtcccaactcttggaaactcttcctcttccaa

SEQ ID NO: 16364 - DNA, 784 bp, Glycine max
  Intron number 1 from transcript Glyma04g07280.1 (locus Gly ma04g07280) derived from phytozome v7.0 (chr-ID Gm04; pos 5661807 to 5662590 reverse strand)
cgtgggaacgaagaagccaacaaagacaaatcaaggtgaaaaggaaaaagcccttatgcttttttgagtttgtttctcaccagcttgagttgtttaggtttgtgcaaagaacaaaactttgttcacttttccatttccttttaacctttcaatcttctttttactttcaatttcttttttatgtaagattctggtatatatattatacaaaaagagaaatataccagcaagttcataccaccaagtatgaatgtcataattccaaagtgaaactttcaacttcattcacttaatgccatttcgcacattatatcttttggaaaattcaagatggcaaatgctaaaaaaaaggattttttaataaccaaatattcttcttgttttcttaggccaagtgctttcctcgctttactcaatttccacgagaatagattctccaatcttattctctgtgtgttacaaagtaaaatacttaccttggctccttctctgcattctgtgctacattggctgtggattcttgttcataaaagggttaagactttttttttaaagaagtttttttggctccttatgtttctatctccttttcttgagtgcctttcactttctgtcaattttcaacgaggttttggctagtgctgtaagcagggtagctgatgcagattcattgatattattcttttcctttgccaccctcacatttggttataaatagagattgatgttgttggtgctcttcattgcagaagctcatcttaagcattgtggcagacctgagtga

SEQ ID NO: 16365 - DNA, 712 bp, Glycine max
  Intron number 1 from transcript Glyma04g40740.1 (locus Gly ma04g40740) derived from phytozome v7.0 (chr-ID Gm04; pos 46691012 to 46691723)
gattgggtccttaagctgttccttctctgtttctggtatgacattcatcgaatttttcctttctctctgaatttgcatttgtcgcatgtctctattcgatttgagtgaccccatttacaattagggtttttaggaatttgacctaaattccatcgatgagattggaatttttaatttctccatgttccctcgccatttattgttgtttccatattctgaagactctgcacaatatataaattacgttttaatctcgaattttatttttcctatgttttctcccttttttgttttgtagttgtttatccgagttgttattgaaaggcttatttcaaattatctgatttgattgttaaggttgtaattcactggggaaatctttataagaggttgaagaacctggttaccgggtattcagttgtagcttgtgaattttagggttttatagtaattcaaacaaagagttcgtacgtataaatggttcgtgtacatacacgtctgtttcggatagggagggtagagaaatgtagttccactacatatccaggacaattaagttgatttaactagggtgtaccaatacaataaggggtcatgttgcgaatttttgccagggatgatttttcaatgctgttaaaagagagctgagtaaggtttaagtatatgtcgatcttaatttgatctcatgacatcaatgctttctttatgatag

SEQ ID NO: 16366 - DNA, 213 bp, Glycine max
  Intron number 1 from transcript Glyma03g31820.1 (locus Gly ma03g31820) derived from phytozome v7.0 (chr-ID Gm03; pos 39642395 to 39642607)
cccgtaacattgacatgcattttcttctcttttctttttccttcaatattcctcaccctcgttcaatgtaaatgtagctttagctacgctaatgcatttcacacctttcttctgttttttacttgcaaaaataaccccgccgtaggttttgattttttttttttttatcttctcaatataccgtattttaatctgtattttattttcaatcag

SEQ ID NO: 16367 - DNA, 337 bp, Glycine max
  Intron number 1 from transcript Glyma02g02430.1 (locus Gly ma02g02430) derived from phytozome v7.0 (chr-ID Gm02; pos 1816306 to 1816642 reverse strand)
tgatacccaaacggttagtaacatgtttattgattaatgatgttatgtaagatagtgatatattgcttattcttgacaatatatggctaggattgattttattgcatgaacacgtttaaatgaaatattaaattcaaagaaatcaatcctaaagaaaacaaatattggaagagaaaataaaagcgtaagttaggaaggtgtcaagatgcaaggttagtctaaaaaacttgcaaccggattattatcatttttataatattgcgatattgtttttaattaatttataaacaaaaaaactgaaattaaaacttgcatgatttattcaatttttatacag

SEQ ID NO: 16368 - DNA, 727 bp, Glycine max
  Intron number 2 from transcript Glyma03g01310.1 (locus Gly ma03g01310) derived from phytozome v7.0 (chr-ID Gm03; pos 1051142 to 1051868)
aaagtcagtgtttgcttcttaatttccccaattttctttttatgccgagattttcttttatttgtggttgaaaactatgggaatatgtaattttttttagggtttcttatgtttgtttcggatttaattaattttgttatgtaaaaaggtgttaacttttttatgtgagtattttagtcactgaattctgagatagtggtcaaatttaaactctttgttattcttgattagttgaaagctgaagtaaccaatgttttttttttttatttttttattgcaaatgttaattgttagttttgttaggggatcaaacccgcgacctttcattcatttccatctttcttaactaccctatcaactttatatctccactgaagtaaccaatgtagttgggtctagtggaaggggctagtccccaataatgtgaagaactgagtttcaaatttttgttagtagaggattgtacattttagtgttctacaatgacttgagcatgattacctccaaaggttaatacctgcagagaaagaaaaaaaaaagttgaaagctgatgtaggataaacaagagcctatgctatatgatctgaatattagattcaaactttggaatggaaggaaaaccaaaagtacaaaagattaaattgtgcttttctttatgtgtgtgtttgtgtttttaaggattaattgtcttttgtatggttttgttttttgtttggtatttaggttg

SEQ ID NO: 16369 - DNA, 535 bp, Glycine max
  Intron number 2 from transcript Glyma02g16970.2 (locus Gly ma02g16970) derived from phytozome v7.0 (chr-ID Gm02; pos 15316862 to 15317396)
gaagcagagtactctttcttctgtttctgatacgtgtgttttgggtctcttcaagttttggatttctctgtcgcgttggcttatccctcgggcttctttgattcttacactttaggaagctttccttgtttctcccttttttcaactaatttatttcttgccacccaaaaaaagttttaaggtagaaattccaaagtccaatatttcatttttaggatacaatcgttttgggcaatgtccttcaatttaatatttttgtatccattcctattctccaacttgctttggttggatattcctaactaagctaattttatgtttcatgtgttgctcttaattcatcatcttttaatttgtatttactttgtagagagagaaaaaaaggaaagaaacattttgtttccagagaaaaaaaaaattcatttttgtcttccttaagttatcctctaccatgaaatttctcactttcccgctgggtttgtgatatcttttcttttacttgagggtttcggtgtttgtgggtcacaaaagaaaa

SEQ ID NO: 16370 - DNA, 416 bp, Glycine max
  Intron number 3 from transcript Glyma03g39300.1 (locus Gly ma03g39300) derived from phytozome v7.0 (chr-ID Gm03; pos 45436270 to 45436685 reverse strand)
acagcggaacaactgccctatcaattgttagacaggtaagaacaaaatataaaaatcaaggacagaacttagatacaattctttaaatgctttcaaagttgttttttgattaaagaaagagaagaaaagaaaagagtttctcgcataatataggtttacattaaatatcaacttagattaacaaggtgaaacctcaattttgatcgacaaacaatataaaaatacctaaggaattgtatcaaagttttatcctaaaagcaatccaatttttatagtattcaatgattacttgcaagttgcaattttcttagttagtttcatattcataatagaccaagcaatgttagtggagttgctttgaaaataattctttagtatattctatgatggccagggtgaactcattgtcatagcaa

SEQ ID NO: 16371 - DNA, 989 bp, Glycine max
  Intron number 1 from transcript Glyma02g38990.1 (locus Gly ma02g38990) derived from phytozome v7.0 (chr-ID Gm02; pos 44299424 to 44300412)
gttcgccactacaagttcaacgtaggtgccttgcattacattactttctcagttttattagcatgccatgctatagctttatagaatcaagtttgagagatataagaaaaaaaatgacatgaattgaaaccgcatatgaatcaatgatgtaactgtttgcttagaaatgcatgtttatatcctctcactcgactatagtagcacttgctttcttgaaaaatatgcacgcatatgagaagtttaaattttgaagtaggattagtgtattgatatatatatgttgcaataggtaatagcataagttcattattttttgcacgctcttgctcagagtgcaccaatattgaggatgtaattaaaaatctacaatatttcaactataactaagaatgcttttgtacgaaatgatcttatctaaaactattcatcactaaagagcctaagtctagtgtagctagagcatatgctatttaattatatataaatcaaaaaacaagccatgtatgaaagcgtaagcctccataaagatatatatatatatatataggtaatgcttgttctttcctatcactgtgtcacttataattttaatcagtactggagacaccttaataatcttcttcacgaatatatatacaagtgatagatatagtcaagcatattgaccttctgtaaacgtttaattagctaggtaggatgcattcaattgaatagactaatccactgagaactgagaagaattaggtagaatgcattccaaatgttcaatcaggcagggctagaacctatattaaaatatacaaccctgcatatctttatcaaacagcaaagtgaaagaggcatatatattgttgagcaatgcaaggcactcaatgtttggtagatgttccagagaacatgcagttacactttattgttcttctttttggttcatagtcctgcatggtggctattaattggtttatgttctgtacaggtggtggtgaaga

SEQ ID NO: 16372 - DNA, 733 bp, Glycine max
  Intron number 2 from transcript Glyma05g04640.1 (locus Gly ma05g04640) derived from phytozome v7.0 (chr-ID Gm05; pos 3829908 to 3830640)
actaattatcatacttgtactactgtctcttttatctctttttagctgtcaaataggtttttagatgtctacaaatattattttatatgaattcgttaaaatgacacacctgttcttcttcttgttcttcaatatgtctttttttgtaattgtattgtattgtcactatcgatatatttattagcagttagcaactttttgttccatttgtaaagattctttttactataacactacggttaagttttcgtcaaattttagacatcgatcgtatctcataatcatatgatataggagtatatttattttttatttctcacttaaatttgattttttcataaacttgtatattaaaaaaatgtttcactaaaatcaaaggaactgttgtacacagaataattgtacaaaaatcattttcatgtttgcaaaaaaacattccctccggccggtattcccgcttgtgtcctttgaaaagtagtagggtttcgtattaatattttttttgttctgggtaaatgtggagtttaatgtgcaaaacttgagttgcgttatagctaagatgatattataaagtcaataattaagccatagatgggtacatggattaatattccatgaattactttatattattatgaactttgaatatttggagtgcgattccttttccgccaaaggtttagaagcaataataaattaataggaaatggtgcagaacacagcaccggcgcca

SEQ ID NO: 16373 - DNA, 365 bp, Glycine max
  Intron number 1 from transcript Glyma02g18210.1 (locus Gly ma02g18210) derived from phytozome v7.0 (chr-ID Gm02; pos 16729492 to 16729856)
aagaggagaaaaggtactgcatgttccaactacaccattataaatctacgaataattagctttatacattgaccgatatatatatatatatatatatatatatatatatatatatatatatcacattccccataagcttcttactaaagaaatgtaatctttatttctcttcatatacaaatatcttaggtgcacgttaaactcttacggttcaatcaaaaaggaaattgaagttatcgttgcagtagttaattatatacctactaactcagcaaacatttctttttctttttgtttttaccttccagaaattgttttttgttttttgttttttgatgttaattcttataactctcacttgcagg

SEQ ID NO: 16374 - DNA, 548 bp, Glycine max
  Intron number 2 from transcript Glyma02g18370.1 (locus Gly ma02g18370) derived from phytozome v7.0 (chr-ID Gm02; pos 17079074 to 17079621 reverse strand)
actgagaaatttggcctcacaattccaagaagtaatcacttgctagttgtgccaacttaccgactagttggtgatgttggaaaagaataaattaaaatagattaggtttgttgctaaaataagatttacttatcattaaattaggaaatgatacttgtattttgtttcttaaaataagaattggtttatttttaattctttttaactagcctttttaattaggaaatgccatttcaactagtcttttttttaattctatttaaatttatattggtttatttttttgtatatgaagggatagattgcatactgaagagtttgtgaatccatggtgcaaacctaacaggaagttgtgatcgtgttcggtgtgaaaaaaaggttaagaggttgatcttgattgatattggagtctgtgctttttcttgagttaattaaatgagtttgagttataacggtgatggtggaggtgcaagggtgttaggcaagttggaggaggaccacagtttttggatgtgttgttttacttggcctacatgcaattctagtgg

SEQ ID NO: 16375 - DNA, 711 bp, Glycine max
  Intron number 5 from transcript Glyma04g07300.1 (locus Gly ma04g07300) derived from phytozome v7.0 (chr-ID Gm04; pos 5672106 to 5672816 reverse strand)
gcttttacagggtggagattttgtcaatcgaagtatgtattttattgatacattgcatgtcattgagttaccttacctatcccttttttgaaggttgcaatttgatactatatatgtagtcactttctttatgtttttattatttgctcattcagttgtccgggttgccagccttgttccatttgcatgtttcctgtgacaatggtaatttcttttctaagtcaattaggaacatgactaacaaagttcctttacaacacagtttgacctgatattgagtggggtgttacagctatgaaagatttttgatttgttaattttggattattttctggtattatccctgttaatatcaatacgtttatgaatatgtaattcacattagtcgttgggttgaaagtattgtaggatgcactgggctttcaacaattaaccacagtgaatgataccaaaatatcacgcattccttatttttttggagttgaaagtattgtagctgataaaatagtatactttccgaatatcaatctccgttggtgtttcctaattccatattattgcttggtagtttagtccaggttcatgtgcatttttttcttcataaatttcctcaatgtcttgatttcccaccctctggcatcattctttactttcctgtaatgattgcatgatattttccatgttttgcaggaactgctggagaaagcatat

SEQ ID NO: 16376 - DNA, 744 bp, Glycine max
  Intron number 1 from transcript Glyma04g07300.1 (locus Gly ma04g07300) derived from phytozome v7.0 (chr-ID Gm04; pos 5673663 to 5674406 reverse strand)
ggagcccagcactgatctatttggaactcttcgaggtttttccgggaactagggtttaacttttgccgatcaatttgatgctctttgctatatccatgctgttagttctgtcttccttggtttatgtttgactcttggttttgtattcgctaattggtatgattgcgtgtataacgttctttagccgatctggatttctcaaccctaccgaggttttagtggaatctgtcacggtttatcttcgcgatttcatcattagcagttggtgattgctgcgatatgtttggattggatttgatttttgagattgatacgaaccgaatcggttattgttttcaaagctctttttttgcgatgactctgctggctttacttgaacactgtttgtgtacttataatgggagaaaattgatgtgtatagaagtgtagtgatgataccgcagcgcaattcttaacttgctactacgttttgtgtgtggatggataccaacaacttcgtgttatcattgttcgattgggtccccattttcctgtcttaaaatttgacgtgaaatgatgtagatttggttaatttattttgacaagctcaaaactttagttctgtattcttgacatgtaactagaattagtgtttgttccccgttgatgcattgttacttaaaatcaatgaataactaggtgtttgtttaataatgctatgttacttcaggtctgtggttttactgtactcaatttgataaatta

SEQ ID NO: 16377 - DNA, 473 bp, Glycine max
  Intron number 2 from transcript Glyma04g10560.1 (locus Gly ma04g10560) derived from phytozome v7.0 (chr-ID Gm04; pos 8762111 to 8762583)
cttgcgttagtcttctttctatcttgcactgtagtattgtttggataaacttgtccacgagtactaggaaaagaaaagataaaatgaaatgaattattttttttgttcaagttaaaattaacttgtgcagttcaactcttatagaagctctcttatttaactttcaaaaactaagctgaatgccttttattttcttatctaaatgttcattaagaaaaatgtgtaaaatggatcttgctaaggagttgggacttttaatttgatattatgtgtaattaaggtttgcattaaaggattatgcagattatggaggtaaatccgcaattttattttgagaacaatacaaacacctagagaactatgtataagatttgtcccttacttagttcttaactttgagattgatgcgattcttagtgtgttaatgtggcattgcaggttagagaatttctattacagactgttgcttatag

SEQ ID NO: 16378 - DNA, 637 bp, Glycine max
  Intron number 3 from transcript Glyma02g08620.1 (locus Gly ma02g08620) derived from phytozome v7.0 (chr-ID Gm02; pos 6710787 to 6711423 reverse strand)
aagcttcatctgaatcaacaggtgactttttgtggtgtatgggatgatcttatttaccagctgtgaattgcaaagttttattcattttcactaacacgcattcaagactggcatagtaaggcttttgagtggtgtgaatactaagaatgatacatctatagttctaaagcctggatttgttgatgcttttttgtcactttggataatttgccctgtagtagatgaccacatgtaaattatttgattttttgcattcgaatatagatatagagttaggtcactgaaagtaggtatgctaaatagtatgtactgcagaaaaataaacacagttgcaactttttaatgcaaaatcaaattgttcaatgctgtgtaacataaattttaaacctttagaatattatccctgttgtggagactttcttctttttctgaaagcaaattatcacaaaaaatcttagcatgctgcagagatcaatagctccatgaacatccagttctaacttataattttagtagtctctgtgaagtgtaaactgtgaaggtttaatatgttgcttaaatttactgtccgtgtattagcctaaatttatattgaatcacagaatttcttccaaagttaaggaggcagaagtcatca

SEQ ID NO: 16379 - DNA, 858 bp, Glycine max
  Intron number 2 from transcript Glyma03g21710.1 (locus Gly ma03g21710) derived from phytozome v7.0 (chr-ID Gm03; pos 27538570 to 27539427)
ggtggcaagaagaaggcctggaggaaaaagagaaagtgcgtgcctcttttatgttatttatttattcattttaattttttgaattttttatttattttaatttgttgtgttgttttttttttttttcttgctgcttagagttgcctaatgttgttgctgaaagtggaagatgtgtttgtgttgggatttttggtcgttttgattggtacgatggttgggatctttacttggttgtggatttgacagtttgaaattgaaatcgaaagtgtttttttttttttttgttttgttttaaaagagcttattgttatattttttgttttgttttcactgcgatttgggatttttgaaatgtgattatgtgttctggagcatatggtagatctaggtgtagctgttcttcgggtttttgttaggggaggtggaaattaaaatgggttattgtactagaatttcgatttagaatttgatgcaaaatgggagcctttttcaaatcttagctttcattacagtgtgccacattttttttccaatttttttccgtctctgacggtatgtgaatgagtgagcaaggaacttttccaacagggagtgccttacagtttaatataaaaaaattggttgtcagtttaataatatttttggccttactaatagctattctttcctatttaatttcccttagtatagtttgttttaaacagagaatttgatgtaagttcttttgtatctattttgataacttttttgcatttgataccatttgttattaaatacactataatttgttggtatttactttcagctgtgatgataattctttctttaactaagatattatggtgttttcatataggt

SEQ ID NO: 16380 - DNA, 673 bp, Glycine max
  Intron number 3 from transcript Glyma05g24430.1 (locus Gly ma05g24430) derived from phytozome v7.0 (chr-ID Gm05; pos 30620483 to 30621155 reverse strand)
ttaaggtattttgcttgttttctttatttcacacttttttattaagatattttgcttccttactagagcaagaaatgtatcattgcttggttttgttgccggtgcagttttgacctgagtgtgtatgacatctagtagctcaaacctagtttgttctgagttttttttgtcctcaagacttccctctagaattgaaggaagaaatagagtactagtgtactactgtacaagtactattttcattcccttaaacattgactatatgtgaacaaataatctatcttccatctgacttccttctaagtttcttaccatcatggattggagaatgtgcttttttaattgtaagcctggatagctatgtttaagcattataacatccaccaaatgctaacatactaacattcaaatttgctcttctgctactaaatttatgtttttcactttttaccatgaaaagacatccttggtttttaatcttcagaaatcccatttgatgatattgagtaagttgcataatccttttgaaaagatcctgaactctgtttctataatattctagaaatcaggcagaaaacttttgaattcaatattgactcacttgtttgatcattgatgacttagtattaataggtgttttgtgggttcttcacctttcaggttaacaaaacca

SEQ ID NO: 16381 - DNA, 827 bp, Glycine max
  Intron number 1 from transcript Glyma04g41270.1 (locus Gly ma04g41270) derived from phytozome v7.0 (chr-ID Gm04; pos 47140125 to 47140951)
tctgaagaaattgttcaggtgcctccaccagaaaccaaaaaaaaattcagcttggaactgtttttcatctcatacttaaattgcatgcatgaatgaatgatgtgctctgaaatctgaacaaacgaaactcccttcattaacttcgttgaacatcagtttggactgtgagggagcaagttactctgcttttggaggatactaaataaaatttgcagaaccgaagatattaatgactttttttttttttttcagtttcactcttcactttgcttatttctcccttgattgatcgccttctcataaactaatgtcataaagcatgggttataactgattttggctaaggcgtgaagagcatttgaacttgaagctctcctttattaacattaccttcaagtttcagctaaagagctggaaaggaggaaacatgttggacatgttcaaagcaatgtttctttggattgagggttcggagtttattctatgtttgatcgttggatttgtgctgcattacccaagtttttttagaaatctgcttttgatttagtggtggatcctgtgcttctgtgatgatctggttgaacttggctagatcgagtatgtgtttgttgattgtttttttgtgtgtgtgtgaatttaatctgctaactgagacagaaagcaggcagtaccatgccaatttgaggataatatctttttttactgattttaaaaccatgatagtgatatgaaaagtatggaggtgtgtcttggtgcctgtctaaagatctaatgtacttcatctggaaatttactaattatatgatgttttgtgcaggttgtaggca

SEQ ID NO: 16382 - DNA, 950 bp, Glycine max
  Intron number 4 from transcript Glyma05g00890.1 (locus Gly ma05g00890) derived from phytozome v7.0 (chr-ID Gm05; pos 511813 to 512762 reverse strand)
aagtcctcaaatactgtgcaacagttctattcttggtgatttctaattcgaagacttcattttgctttttttttttttttttgtttcagttaagggtatttttttttcaaatcataagtgagaagaaagaaccaaattactatttgttaattctggttaatgttatcaagaaaaaaaattgtggttacattgtgtcgctcagcgcaatgtatcatcttgctagaatttagttgtgtgtttctcatttcagtcatatgatggcatcttgtttgcagttagtgatagatgctaacaggacttggctagcaatagcattgcacactttgaccaatcttcttcttcttcttcttttccttggttttgcaatgtgatgattcttttccttggtttattctcatcgagtacttgtattataattcttaaatacctggatgcattttctggctttaattaaattatttaacgtactaccttttgacatcaatagtgcttgtatctatctcccagttgtgctttttaaggttggatcactatatggtctccacataaaattcatatacagcagaatactcacatagtcacattcatcaaaattcctatgtcatatctgtttgggggcgggggttggtttagaatctgtcttcagtctacaatttaaatagacaggactaccctacttttggctggaatcaggttttactgttactaagaaaatgattgatggaggaaccttaatacctgcgcttccttctgaataatcaaaaaggcattttaagaaacaacaatatgtttttcttattctatgtaatcttttgtatatatgagtttcaaagctttccttcctgatattgttatgtattttgcagcattatttaagaacttgtcataaaatgttgattatatctgtttttacaggagtcaagtctcccagatatattcactgcaaatag

SEQ ID NO: 16383 - DNA, 348 bp, Glycine max
  Intron number 1 from transcript Glyma03g23850.1 (locus Gly ma03g23850) derived from phytozome v7.0 (chr-ID Gm03; pos 30490665 to 30491012)
tcattccagaccggtgaacgacacgctcttgaaaggtcttctgtcgtttcctcttttattttttaaaagttaattattaattaaactctaccaatatgtgcacgcacccactttgaacgaaagcacactcttttttttttttttaatggttgtttaccgtttaaaggttattgtgaacaattgattttagattttgttttccgtcaatctgtggttttaccaattcataatatttgtttatcaagtgacttgagcactgtttaaatttcccaatttgatgtgtttgaagttttaaccttttcttttatgtgaataacgctgcttacatttcttcacaggagaaattgt

SEQ ID NO: 16384 - DNA, 887 bp, Glycine max
  Intron number 1 from transcript Glyma03g36580.1 (locus Gly ma03g36580) derived from phytozome v7.0 (chr-ID Gm03; pos 43519033 to 43519919)
cctagctcgcgttcttcgttcgtcttttacatcaggtctgaatattcaccgccggtccttcttctctaattctaattaattgtttttcatgtattgttctcgcttcaccgcttcctgattgccgttgccatttcaaatttctctgaaaaatgtttttcttttaattcgagtttgggtatctggtaagatgtatcgatttccctgactgtgttcacgacttcatggaggaattaatgttttctacatgacgttgaatttgtggtgtatgtggtcatgttttgttcttgatttgggtggcatagctttagctgaatttataatgaggtttgtgattgtggtttgtttggtaagtagcgtgacccgagtgttctaacaaatgctatgttggatttgtaaagtagcatacttgtttgtcatttataattataatgctccttaatcttcatttgggaattcatatactattcaacatcatcaactatttggtgggtcttattttgaactaacatattcattcagtcctgctccaacaaaagaatccggtgtatgttgtatcttatgaaatgtatatctgttgaagtacattaaattccttttaagaagactgatctgttattggtattattgctggactaggttttcacttttcgttgtatgtgtgccaaattttttttttacataatcccagggaaccagttgtatgtcttcaattttcattcgctgttaggatgtattctgttgaaatttgaaagttgaagagctaatgatttaaggttttggtccttttgcatttggaagatgttattcctgatttatctgtcattgattcattaaacacatttgttttccactttcatctcataacggtttgattgtgtttgagcagg

SEQ ID NO: 16385 - DNA, 527 bp, Glycine max
  Intron number 2 from transcript Glyma03g34490.1 (locus Gly ma03g34490) derived from phytozome v7.0 (chr-ID Gm03; pos 41901089 to 41901615 reverse strand)
ccaaactacactagttaccttcataattcttttttttttttatttcattgaaatggtgtatttatagtgatatacactaatgatctggcacttaaggccataacagaaaggaataacagctagtataatggctagtaacagaatggataatgtttgtcggcaagggtctctccaaaagggtgcaatcaaatgtaatccttgcaagtatgttggtttcttgtgtgttcgtgtgagcctggtgttatatgggctgttgttgctatcaatatccaccgttggaaaaccaactttgtcctcaaggttggacaatataaacaagctgaacagggatggatatagaaaaaaaaaaaaaggtacgtgagtaaacttgctttgtttgtgggcctctttgggtctagttgatgaaggctattgcattcggaatctacagtcttctaccccaagtggctacccttttgttaaaatgatttggcttcaatgttgacggccgtaacatttgtgtggacgaagttcagcctgtgccagcc

SEQ ID NO: 16386 - DNA, 858 bp, Glycine max
  Intron number 1 from transcript Glyma05g30080.1 (locus Gly ma05g30080) derived from phytozome v7.0 (chr-ID Gm05; pos 35506656 to 35507513)
tgggctgtgaattggaggccctggcgaatttataggtatctcgtcgagattctgcgtttctgtttacctgttttgacttggtgctttgggtttgtttgtagttttaagattaaattgccatgctgcaatgttaatgctgttgattttttgtgacgcatattgtttctgttgctaaaattagtagctgttttaaagtaatttataatttgatatttactggcattggctgctgtgcactgtcgctgaattgcataactgattagctacatttgtttaacaacctgggaattaagtgtgaatcattggggtgctttttcggtttttatgatggtctacaagtatggtggttttgtgccgtttttgaaccgtgtgagccggtaacttgggaattctgtacctgaggttgatgcttcctagtcctgagtgctttactttcttttactttgcactccttttttaagtaatttggccggaattcacgtgaagatgcatgtcagtaacgtcttcacgttttgatgttcagaaaattgggtaatttcacttcttgttttgatgtggtctgttgtgattaattttaaaatatttgatgaatccactgtgatagaaactggattcttgaacataacacataatgttgctctgggcctcttgactgtatttcaagaacaaatgagttcaagttttgctacattgatgactttctatgttatctcatatgttttgagaagaaatacaagttgttttcaatgctgctttgtcatgcagttaaagtactctgaattttggaaaattattttgggcttctttgcatctatttttatttatttgtttctatttcagttggatctttgctcggaa

SEQ ID NO: 16387 - DNA, 471 bp, Glycine max
  Intron number 1 from transcript Glyma04g20330.1 (locus Gly ma04g20330) derived from phytozome v7.0 (chr-ID Gm04; pos 22293374 to 22293844)
cctacccttgtcaattatagtggtaagtgttgcaaggttttctattctttgatcgtttcaaaactggtgcaaggcttatatactgttgtacatgtgagataaataatgtttctttggttcttggaaataaagttttcttaatttggaattgggatcgtggcgcgtttggatcagactaggattagaaagactaataatatatgtttgcttgcatatgtatatacatgatggaaacttctggaggttgttgttgttgaaataagagttgtacagtgtttgtaactgagatcacggattgattttttatttttttttacttcttttttattttggtgggaaatacatatgcaattaatgttctactgaagacttttatgtggtgcatgtgtgatggatagtttttttggttcttagaaataatgtatgttaatttggagcgattttaacatttatggatgggttttgcaggtg

SEQ ID NO: 16388 - DNA, 556 bp, Glycine max
  Intron number 1 from transcript Glyma01g42140.2 (locus Gly ma01g42140) derived from phytozome v7.0 (chr-ID Gm01; pos 53465468 to 53466023)
ctatatatttcatccagccaacccgagaaaagtaatacatctgctcctcgtttttggttctacaatattgcaatatgttttgaagtatgcaactaatgtcttgataaaattgtagtttacaaagcattttggggaatataatttggttgagttttgaattttgaaagctttactttgttgcttttgttttaactcttttcccctcttaaattatctggcaattagtttcccttttgtttcatttttattaaactgtttctttatttaatttatccttatgtttacatccaaatatgtcatgagttatttctttactttttatttctgttactttttgttctctacaaatcacatgatggtgcattactttgtctctctatctctcctaattattcatttatcatgtaaattgttgaataattaatatgtggcattcttttgactgtgggacattttcatttagccttgatgtggaatttagttatatttcttctctgttttttttagttggtcctcatttagtgattttctctccatttttgttggcagtgtaatt

SEQ ID NO: 16389 - DNA, 811 bp, Glycine max
  Intron number 3 from transcript Glyma01g42140.2 (locus Gly ma01g42140) derived from phytozome v7.0 (chr-ID Gm01; pos 53466233 to 53467043)
tggaggtgttgactcgattaggtgcattgagagaggtggagatatttgtttaaaaactagattgtatttgaattaataattattcccaatcaatgacattgcttattgtgattttgtctctcatttggatggcatatgcagatgaatttggagtattttcccatagacagccaggtatgtggttgcccacttgtacttcaatttattctgtcttccatctataatatatctcaccttttttagtatgaatataatcatgttccttcctttttggttgttaataaatctcaaaacttatgacatgtagaagtgttcattgttttggtccagttccacatagacattaatgagtttcaagtgatgattcaggattttcttccagttaaattaattagaatctattagctgttgagaaaaccttccccaaatataaactaaaagtggtgctttaaactctgaataaactgagcaagcaaactttgctgaatttgcagagttagaagcttgatgtgtaataaatttaagtactatccaagaagtgaaaagttaacaaccagaaaatgtggattaggaagcccatctatgcaaattggaaattttgatcattcatgtgtatcttctacattatcttattaggaactcaacattcacgaagctgggttgttgatatccttccattgcgaaagtcaatttctaattgtgcctgttaggaattttttattattttctaatgcatcatcattccattattggatgcattcaattttggggtgtttttttgtcatgttaatgcagggtttcatcacaaata

SEQ ID NO: 16390 - DNA, 961 bp, Glycine max
  Intron number 2 from transcript Glyma05g26140.1 (locus Gly ma05g26140) derived from phytozome v7.0 (chr-ID Gm05; pos 32147114 to 32148074)
atttgaggaaaaagattgaagtatcaattcagattatccttgctattttccgccagttaaatttttttaacatagatttctgttgtatgcaattttactatctgttataacattattttaagacttctttgaactttcaaccaagtccataaaaagtaaaagagaggcttcaagtttctgatttagcttatcttaaaacacaaaatgaacttctggtaatgtgctaatgatatttccaacgctaaggcatataatgtccaaatatttggtattgtttgtgttatacatattgtttgtattctgtttccttattattatcactacgaaggagttttgagacttggtgtgaattgatctactgctgttaatccacttttattttagtgttttagtaagccttcacttcatttgttttaattttaaacacctattatctgatgtcaatttacgttgcctcatctatcatgaaaagcattgcttttgtcatatgctttatccttttaacttctgttaattttactatcatatttgaaggattttcgctaggaacctgatttttaaaatctaattactggtcagcctagtggccctataggaaaaagaaaaattgttggatgattacgtgtaaaactttaatgggaagacaactggaagaatcagaacatgttgaaaaataaaaatataagtagataaaatctgttatttttatcatctttgatgaatgcaacaaattttggccaattcgctagaggacataatttattttgccctttatttcttaaatatctatttacttaattgacggatgatgagtgcatggcatgagatgtatacaacttctaatttactctttctattttccttccctttgatgaatagaaacttgaatatactgacttgcatcaaaccaaggtactctaaattgctcaattctcgtttctttcagaggtgtttggtggag

SEQ ID NO: 16391 - DNA, 700 bp, Glycine max
  Intron number 1 from transcript Glyma04g07330.4 (locus Gly ma04g07330) derived from phytozome v7.0 (chr-ID Gm04; pos 5689380 to 5690079)
tgtaagcgatcttacatcgtgaatcattgataaaggtcagtattcatcttcttcattttttattagagttgtttcggttcatgtcatctttttcaatttcgacgttgctgcttcgatttgtgatatctgcctgcgcgaattttgattttgttacctcttttcagaccccttggtttattttatgttgtatgcttttgtgtatcgtagctattttaaatttatgatcacttttcaattaatcgcgtagccaattttcatttggaatttgtgttttttgattggaacatatgtcggaggaaaaattattgtctcgactaataaacatttttgaattttaaattaattcgattaacgcacctagactgattagtaattagtgagcttaatgttttaaactgcggttgcggttttgtcttgtttatttattgtgggaaattgcagacacttgtgatcacgatacagctgcaatcatgggccacaattacggttgtgatgcggttatttgactgtcgctgacctttttttgaaaccttggcacttggcaggattgttttttcatagttgacaaatgttgttcaatattttctttgagtggaacacgaaaataatctctaatcctttagggtatctattatcaataattttgcgattttcttctgtgatagtaacatttatttgtgaaacgtcactggttcgtgtc

SEQ ID NO: 16392 - DNA, 334 bp, Glycine max
  Intron number 2 from transcript Glyma01g45350.2 (locus Gly ma01g45350) derived from phytozome v7.0 (chr-ID Gm01; pos 55681090 to 55681423)
ggttggcctaagctctgtttcaaggaaagccagtggtgagtttccatttattattttggatatgtattttgtcttcatgttgtgttgggaatcctgtgtatgcatgatttgtgtattgagtctagtcacacaagtgcaacattcctttcattttgtgcaagaaaaaatggtttttcagttatattgtgttttagtcattttgttatcaaatgtggttgagaaacaaaattatttgattttataattttgaaccatcaaatggaaatattacacataacaacttagttgttcacagaatataatctaattagtttgtttttattcaagagcgtgg

SEQ ID NO: 16393 - DNA, 1045 bp, Glycine max
  Intron number 1 from transcript Glyma03g01850.1 (locus Gly ma03g01850) derived from phytozome v7.0 (chr-ID Gm03; pos 1587456 to 1588500 reverse strand)
ttgcttctgggaggacttccatttcttcagatcctgtaagagatgtttctttttttagctcaaaaagttgtttttttttgttttgattattattattttgttgggtgaactatttttgctggaaaaatggaagaagataagttggggaagaaatgagctaattaattgttttaggtttctgggatttgtttggaactattgaggatgctgcttgtcagtttttttcctctattttgttttaaaaaatattttctggggttttgactattgttatttttttttttataatttggttcttatgtgattttattatcttacatgtatcatttattgagtactggtgattgtggattttttttttttggaagatttaggtgatgtgattaacgagttttatgatcttatcatttatatagtctacatgtgagatatattctcatttgctgtttttctatgtaacatctgagataattgtgtgtgcctatttaaatggaagctttgcttacattttaaaatgcattgcttagattaagtgacaaattgaacttaaagtttggttgcattgcttgatggtgttccaccttgaaggagtgaattgggaatttgggatgtgtacctagttgtttgtttacttaattggtttttgtaattaagttttgtatttaattattatgaaacctaaatgtaattaacctaactaagtgattggacacaagtggttaatgtgctgaaattaaggttgaatcatttgggtattacatgagattgattctaggcagaaataattcttgaccaggctttacttaccttccgggtgaactccgaattagtcatgacccctttcccctgatgaactagagggttaagacaaaagaaatgtagttaacctgacttttaagtaatgaaatttatgtggaatatggtttttttttttctctttctccactaacactcttggaataatacatgtctggaatattttaagtgaacttcaggctgtttcttttcagggaggggattctaactcaaaaagagccaagtttga

SEQ ID NO: 16394 - DNA, 857 bp, Glycine max
  Intron number 1 from transcript Glyma05g25420.1 (locus Gly ma05g25420) derived from phytozome v7.0 (chr-ID Gm05; pos 31526767 to 31527623)
aacccttggctgcccctgtgttccaggttaatttccctccatgcccttgtttttcttttttctgatataggtgtttttgtctctaaagtttgcatttttatttggtttttcttatgggattgcatgtgaatgctattttttctcctgtttgcttggtgaactgattctggatggaggtttgtgaaagggttgttgtggttagaggcttgagaaattcagttaggattcttagcgttttagggctgtgtttgaattgtgtgtgattttgaaattttgaggaaaaaaagggtcttatgcttttgatcttggaataaaggcacagcctttgggtagtgatttaggttggttagtcgtgtgagtggagatgttggtgaagatttttttttttttttttttgaatatctgaagtttaggtgagttgggtccggacctcaccaggaccatgacatgccttaaggctcactgggcactgacagatcacccaacaacaaggttctcacattgcgaaagggattcgaatccacatccttgtagtttgtgaagaagttcggtactaaaaggaattgacaaagtagggtccattaaccaaatgttatgtaataaactcataatgagtttaattcattgaaaagatttcatttggttaatgtaatagaagaaggggaattccccggaaattcatagcaatcagcttgacttgctatgctattttcctttagccaaggttttcctagctccattttattccctttgttgtgtttttcttttatttcctatctgttttgttggtttttccatgtaatgaaaaatctaatttgataactttatttgtgattaaatgacaattcagtgtgaga

SEQ ID NO: 16395 - DNA, 1039 bp, Glycine max
  Intron number 3 from transcript Glyma03g30990.1 (locus Gly ma03g30990) derived from phytozome v7.0 (chr-ID Gm03; pos 38844910 to 38845948)
ctctgctgctacacaataccaggtattttgctttgctgcgttgccgttattgttacttggtgatgcttaccgatgtatggatgttgtatcgtgtttttagaaaacagtgttatcaattgtggatgcggaaaaatggcagaaagtcaataatccagtatgtcataaagcgaatagtgtttctggcaaatagcaaagttgcatagtggttgaaacatgatgtatatcagttatatatggataaaaaataaagttgtatgcaaataaaaaaagtgaataaaaattagcataatattaactcaaaaagttcaattggctggagacttgccagagattacaagaggatgtaggatgcttgccacaaccacaacacccatagtggtcgcaatagcggacagagttgtgatcggggatccttggaattttgcaatgcaatagcgctatagtgattatttaacaacattgttagtaaacaagatctatcaaccactgctatatatagagtatttcaaggccattcattatgacaatatcttgcaagtaaagtaagcttctaatacttttcccttatgccaaaatacaagcctattttttttggaaggcaaagaatatattttattaatataaaaggcccagatgatgaatcacaagctgtgaaacaaacatcaggcagaaacaaaatacaaggcaaagagaaactctgcaatacagcaagagctcttcgcatagccaaaatacaagcctatggttcattgaaggccaaaatgatcattaatcatcaaatacaattagtgaaaaagatgaaaaaaataaaataaacaacagctaaatgagttctcatttctcctttacaagtaagtcaagtgtaaagtaagaaattcatgaatctatgtaatatcacagttgttttggtttacttatataaggacatactcttgataatattgttattattatttgcaaaatgtgagtgtctgaaatttaatattaattctaaaattttttaggtccctgaagttttttattttgctcaaaaagcggt

SEQ ID NO: 16396 - DNA, 560 bp, Glycine max
  Intron number 3 from transcript Glyma03g41070.1 (locus Gly ma03g41070) derived from phytozome v7.0 (chr-ID Gm03; pos 46613396 to 46613955)
tttcattccttagtaactggtttaacaagtcaaacgtaatttttaccaaaattgtgcacaaaagaaaagcaaggatcaaacaatttctcattacatttttcttcttcttttttgctgagtccctaccgtttttcctaaattgaatgcaaataattattaaattcagttgaaactttaaggacactgaaataagcttgatgagtatgacttttatgacttgtaaccgaagcaacttataattatactaatgtttatgcactatgcacattgttttgctttgcataatcactactacaataagaacaatcttgcatacaccaactgtatataatactatcatacacataaaactggtcactttaatgtagtaaccctttaaacaatttcattaccattatcattatgggtatataagtatattaaattaacttaacagagaatatctttttctttggccttcttatggtgacaagaacagactgcaattttaaacccaaggaaacagagagattgacggatttgaagagcagggaagagagagagtatttgctttattcagc

SEQ ID NO: 16397 - DNA, 661 bp, Glycine max
  Intron number 3 from transcript Glyma01g22600.1 (locus Gly ma01g22600) derived from phytozome v7.0 (chr-ID Gm01; pos 28537246 to 28537906)
gcaagaaaattagatcagggtatcctgattataaggtaatcagcggtagctacagtaaccagtaaatcatgttagctgtttgtctctttcgaattagggatcccaatgttatcatgttatgtgacgttctgttgtctggaaaatggaatgattaatgaatgtgaatgatgaacctgttttgtaactgatgtgtattttgtatctagtacatggacaaactacagactatcaggtgtataaatatcaaaattgaaagtattttgatagatgttatgaattatgagtatattttaatgatcgcttatgattgaactgaatgtatataaaattttacatgtttgaacttgttcttgcaaatttatattttcttgtttataatcagaataacttatttatacaacaattaaggttgtaaaagttgagatccctcttagatcagaaaggggatggcgaagacccgtgtaatcataagtttgtgtgacaaatccaagaatgcctaagctgatgtatatggaagctaggaaaaattgtcttgactcatgagatgtctcattcttcgaactgaatttaaattggtttttacctaggataccatgttgaaattatttctcttttaatatttagtgtcatattatctaactaaattactatcaggtttgag

SEQ ID NO: 16398 - DNA, 517 bp, Glycine max
  Intron number 3 from transcript Glyma02g06720.2 (locus Gly ma02g06720) derived from phytozome v7.0 (chr-ID Gm02; pos 5332772 to 5333288 reverse strand)
ttcagaggcagataagaaagggaaaaaagttattggtgagatttatgctttttctgatgggtggttaaagttcatttgctgctttatgtaactttttggtacaatcaggatttcagtttatgtggtactaaaatgtatattctaagaaaaatgcatatgatttaatttcttacatacaggcctttctttttatgtctatcttagtgtcttcttcattcttatttaataaaataatgatttactatggtgtcactgatcaagtctctcgaataaaccccaatcttaatctgttcaccagaattatcaggatttgttgattctggtgctttgcattagttgaaaatcaaagtactaaatatatttttcatatggttagagtccattaaagaaattctgaaattccatttggtaaacatgtgttttgaaatggattctcaattttccccctgctaaagtatttaaaaaggccttatgtttttgcctcacaaaaccccagaggacgactctgaatctgaag

SEQ ID NO: 16399 - DNA, 935 bp, Glycine max
  Intron number 1 from transcript Glyma02g06720.2 (locus Gly ma02g06720) derived from phytozome v7.0 (chr-ID Gm02; pos 5333795 to 5334729 reverse strand)
acttgtctctctgctgattcataatctcttttaaggtatgttgttatcttctttgtctttgtgacataaaagtctttatcttttcctccttttgttcctgtctggtctagaatattattgatattatcttttcttgggggtggggggggtgctttatgcttgcggtgttttcaatctacaatctacaatataggtggtgggggttggtggaaggtgtttcttttcatgcatgtggaataatttgaatttctcttgaagcaattcaattagagtccattgatttatcaaaccatatagggcgttgcttcaagggaaaaaaaatgacacaaaagaaagaaagagcttattgggtgctgcggaactgaagatatttgagcttaactcgtacgtttgatgtgaaattcaatgtttttcttatttccttattttcagaatcggttggttgattctgctaatgaaagaaactttaacattattttatcatttatactcataaatatcctgctgattggattgtaatcttccttgcgttttcaatttgtcttcagaagaacatcatttagtcttttacatatccttttcgttttttttttcattttctctgatgtatctgaatgttgaggacctgagaaactgggtaacacgtgattcccaaaataagaggtgatatggtctttatattccatgatctgtctgttgttcatgttgcctatttcttgccttgcaaagcttataagtagtacctcaaatagcactggattgtaacacttttgggatcacgacatgtttttctggtacatttatttgtgtattagttttaaatatgcttaattaatctgcagaatttcgttctgcataatttgtagtatatttacttacctacttggggctttaattcaggaagaggttttgccaaccccaacctgcagcaaata

SEQ ID NO: 16400 - DNA, 867 bp, Glycine max
  Intron number 1 from transcript Glyma03g36950.1 (locus Gly ma03g36950) derived from phytozome v7.0 (chr-ID Gm03; pos 43747869 to 43748735)
ttgccctctcttacattgtaacgacctttttttatcttgattttgcttgctctggtgttctgagtatacttttgttggttttcaagcttggaattattggtgttcacttgttttactttgttagatccatggcctgaattttgtttccggttggtttaatttgtgtagttttagggttgtgcagtgccgaaatgtgttttgttgtgagttgaatagatttgatatgtggttagcttagagggtgtaatagaagattttgaatttttgtggcctttgtgatgtcaacttgatgcattgggttgttgagggtgtttctgatcaatctgcctgatctgcatatgtaaatgctgtgtgaatcagattggtgctgtaaacaattaatttcccatttttctgcttctcgtttgatcttttttatctttttcctttcatgaagaaataatcgttcaatttttttatgtgcttttgtttttgtaaattgatgtttacggtttaggagtgctgtgttccttctgttagacttggatataatgtccgctaagtgccaaacaacatggtggagtcgttttgtctgtattataattatgacagcatgaattacgtttcttgtcgtttccgcttcataaaattcgtgttttagaagttttgtaccgaaggaacttccttaatttgaaaatcgtgccaactgtgagatggctgcgtggcacatttagagttgttccattattttgttatagaatgctgtttgtttctgtatgataaatcataaatatgtctacatctgttggactttgtcagccagatttagtccctgttcctgttttgataactaatcttctttcttttctctcgattctttcccttagg

SEQ ID NO: 16401 - DNA, 530 bp, Glycine max
  Intron number 1 from transcript Glyma03g03410.1 (locus Gly ma03g03410) derived from phytozome v7.0 (chr-ID Gm03; pos 3158929 to 3159458 reverse strand)
agggggcaccacaaccttccgttcagccactgttggtaagttaataaacttttctgactaactcatcttctttaatatccatctcttaggacagtttgggtggataagcttatcgagaaacacttttatgagaaaaaaaagtagtttttcttaaattcaaattaatttgtattaattaatttgtaaaaattcttttatcttttaaagaagagcaccagaccaatttggatataagattaaaagttcgttttgagtgtttcctctactgaaaaaaaattccatatataaataagctctcaaacacacttttggtttgtatccaaacagacaggaaaatttctacaaattaacacttatgtataaattagagttaagttataaaaaaattcattttattcttttttactctctcaaaagtgcttctggataaccttacttaaatagaccattgatgatggaaaatgaaataataaattatccaaggattaagcttttgatagcatatatgatttttgcagctgttgttggag

SEQ ID NO: 16402 - DNA, 568 bp, Glycine max
  Intron number 1 from transcript Glyma05g13920.1 (locus Gly ma05g13920) derived from phytozome v7.0 (chr-ID Gm05; pos 14735164 to 14735731 reverse strand)
gagagaaacggtttattcacccactggtgagtttttttccatttaacccaatgggcacacaaaaattatcttcttcttggtttttattttgttttgggttttgatcctgtttttaatcaacgatttagttctgtattttgcttgcaaaccctataattggcgtagtggagggtttgggtatactttgcttacaatttttgaatatatatatatatatatatatataaaagctcattaatgaatcatttatcttctaaatgttatacctcactttgaattgtccccaaagtagcaatcttcaccaagctctaggtgctttcagttttgatgtcaagttagacatttccatcatgtactcccttgtattactttttttctttttttataacaaaaaataaaatataaaaaaacaaaaactgcttgcacatgccattctattgaaatatgatatcattcttatgtaatatttgattattgaatatgccattctattccttgaatgacctcaaaataacaattctcttcttaacaaatattggattatttatttcaggaaagcctctctgtt

SEQ ID NO: 16403 - DNA, 849 bp, Glycine max
  Intron number 3 from transcript Glyma02g16890.1 (locus Gly ma02g16890) derived from phytozome v7.0 (chr-ID Gm02; pos 15224981 to 15225829 reverse strand)
ctcatcaggtaaaccactaaaagcaaactgagatttctccaacttaatttggttttggaaaaaaaattgggaattagaaacaaccttttgaataatttatttggtacaggtaaattagtttaaggtgctccttttgatgcatgtggtttgcctaagcacattagcaatgaagatttagaatgttaagtgtcaacttttacgtgttgttgatcacgtgatctcaacaatttttaatgtttgcattaaggagctatatattttcaacaaattgaaatattgataaagggaaagataaagatgttgtggatactttttgtcatttgaataatgatagttatgcttgttagggttagggagagaacatcatgttgtgagaagtttaaaattttactgagaaagtataacaggctggcatgtagagctagccctgtcttgtcagttgtaaactgtaatgcgtgagcttgttgaaaagtacaagcttttgtcaggtctgtgtgctgtcaaacgatgtccaaagaaatgcaagttggtcgaacaaagaaactcttgggagtttgttagaacttcttagttccatttccgttgtttatactctactcgcgtcaatttgatgaaaagcaggatatcatatgattgtttagagtataaaaaagtaatgcctgcccaatagaattgaaatctgtaaatgttgcagagagcattagccaatgaatcatatacatttctttatataggttaatccaattcttacttgttcttcggtgatatttatgtttattcaagttcttctggaaaactttggatttttaaataaccaaagataatctgcattgcagctttggaacacca

SEQ ID NO: 16404 - DNA, 701 bp, Glycine max
  Intron number 2 from transcript Glyma02g16890.1 (locus Gly ma02g16890) derived from phytozome v7.0 (chr-ID Gm02; pos 15226018 to 15226718 reverse strand)
aaagaggtatccaacttaatctttctgagcatttccttccccttttaactcattttaaattcataatttatttgatgcaaaatatcacatgacaatggtgaaatgaagttgtgactaaaatattatattaagcaaacatgatgccaaactgtattggatgataggtttcaagtagtaattgtgaagaaggaagtcaacccaaagagcagctgtgtatagtacttgatggttacgccttgtgtctactgtaacagaagatttgttattgataaagttacacaattagtttggggtaaaatatgttttaggtcactcaaaatatcttgaaattcggttttagtccctataaaaatttaatgcttttatttcctatacttatcgaaagtgatgtagatatagtccctcattagcaactgggaacatgtgtttttatttaaatgtagagactaaattcgtattaatttttttataaggactaaaaccaaatttcaagatactttgagggattaaaaacatattttacccttttttttcttaaaaaagagtttactttttactatggtaatggatagtgacatagtccaaaacttcttattctaaggtactgaatcctgtttggcagccatctgtgtggtcaatggtgttcaaactgtttatatattattatcatatctccaaacttttctggaacaggttgaagt

SEQ ID NO: 16405 - DNA, 605 bp, Glycine max
  Intron number 1 from transcript Glyma03g32240.1 (locus Gly ma03g32240) derived from phytozome v7.0 (chr-ID Gm03; pos 40035124 to 40035728)
aggttggtttctttcaaaatcctttgtgttgtccattttgatgatacactgaattgtttagttttttattagtagttaattagactagactttaaatgtatgatttgctcttgcttgcttactccagagacatccaagtcagttgattttttgttaggttattcatattttataaactactttcaggtttttctgtgttcacttttatttgtggatagttgagagctctgagtgtccattcaactgttggttatttaacggaatggttcttcttatctcattttatcatgtgtgtgctatcagggaaaaatattaggtagtctcagaccttcaggtaccaaaggtctcagcctaagaatcatgtgtgacatatatgcaagtttttccgtttaggagaaagaattaataacactcaattgtgtgtcaaatggagattacttgggaccaagaccacctaagaatttctcgctaacagaaccgtggttactttcagatcatggctgacgtgtgtaattgtttgataatctaattattgaacgtttggatttgatatgatctgctacatgactgaaatctgcaggaagctagagctttgttaggaaaag

SEQ ID NO: 16406 - DNA, 958 bp, Glycine max
  Intron number 1 from transcript Glyma02g44250.2 (locus Gly ma02g44250) derived from phytozome v7.0 (chr-ID Gm02; pos 48867218 to 48868175 reverse strand)
gtcacctgcaaccaggacaaccgagtcactcgagtgtatgcatcctctctctctctctctctctctctgttttgttcctttctgtgatgcagctttcctaattgttactgtctgttactttaatttatttatactactgctatcacttttatttattacgcggtgctggttttagcgagttttgttattttgttaattgctttatgaaatcgaaggatcctccgcgaggttgcgggattcgtcaaattacttgctattaaaagttatgtttagatactttcttacctgtttggtgcttatgttctccatcattgggattattttttttatgtaatttaactagatgtttgattttctgggcgggggattattgttgcctatggtatgatacggttcgtgtatagatacgcagagtaaatagtcgtatcgtattaatatatgaaaattgttagcttttaaaataattaccctaaaagttattacaacaatgatttctgattgatcgacaatacatagaaattcaactcatgcggttatttttacaatatgtaggatataacaagtgtgagatgcgtatctagatatgcattaaaattcataaaaaatagtttaaattcatgtttctgtatatactgtatacatgctctatttctcatatatggctatattagattttcatttctttttctaaagcttgcgatacttcatagttcacatataagtattggtgaatcatctatgagtattggatccataaacgtgtcggataggatacatgaagaaaatgaaagtatagtttcttcatagattgttgctgttagtttaattggtaatagcggaatgctaactgaaatgcatgggattgattgattctgttaatattctctccacgtttatggtgataattatggtgctttctacagggatcttggtaactctaacctatctggacatttgg

SEQ ID NO: 16407 - DNA, 636 bp, Glycine max
  Intron number 3 from transcript Glyma03g38100.2 (locus Gly ma03g38100) derived from phytozome v7.0 (chr-ID Gm03; pos 44508108 to 44508743 reverse strand)
ggaacaggccctggcgagtccctcaggtttcttcggtatgacattaccttttgactaatgttttttagggtttagattatatataccatggggcatcgatagtaaaatgtttttattttctctgagttaaatgcactgtcacaacacccctgcactttgatgcctgtgttttgtttaagtggagctaagctgttggtaattagtacaagttcaaaggtgcttgttagtttttgttactaccaagtattttgtgctgaaagaagtgaaactactgcattgatttctcactgattacctatggaatggggcatcttccttggaatgacggttgtggcttttagataattgtatgtttggattaccattggagggtgctactgcttattctacttttggagtaggaacacttttgtatcttttattcttaacgtacttttggaagacttgcactggtaatccaaacatgcattgagttgccagtgttagaaaaagcaactactttctctcataattattggtttggctggctaatatggcactcgtaatattttcttctaggtgggccatgtgccattagatttaccaagttttatggtgaatgctggtactgattttagttttcttgattcgaaggct

SEQ ID NO: 16408 - DNA, 432 bp, Glycine max
  Intron number 1 from transcript Glyma02g12030.1 (locus Gly ma02g12030) derived from phytozome v7.0 (chr-ID Gm02; pos 10249447 to 10249878)
ttgtccatcccccactcctgaaaaggttgagaaaggtgaaaatcctattcttattttctggttcaacatcgatagcaatctgtgttcttaagtaaaatggaagttcctctcacaattctgagatcagatttcttaaaatttgaaccccattactactaaagcgtgtttgttctataacagtgttggcaatatggaattcttgaatccaagatactcatgctttttgctgttttcatatgctattgatgttggaaatagatgcaacagaattgaacctatccacatgaaaatcaattgtttgtgaaaactgaaaacacgttttaaatcttctcttttgatctattaaattctagttgtgcgcaattccatgaccttttacgtaacttcttgacgtctgttgtttaataatattgctgtttcttttggcagttg

SEQ ID NO: 16409 - DNA, 549 bp, Glycine max
  Intron number 1 from transcript Glyma01g41170.1 (locus Gly ma01g41170) derived from phytozome v7.0 (chr-ID Gm01; pos 52723571 to 52724119 reverse strand)
tacaggtctgttgccctaattccatcttcttattacacctcccaattacttgattttttcaacttttaccaatcttgattatgattcttgaatctaaagctttcttttcctccctctccgcattgcttagaaattagtacatgcctcagattccgagcaatcttcacgtaacatgtgattgagtatattatgatttctttcactgtaaattgaaagtctcagtcataagttacataaaagtttgggtcttgggaattgtggtgttctgggactatgtaataatttctcttgcgttgctgacattaaaattcgatattcatatacccaagggggttcatttttacgatccgctaaaaatgaaggtttttactctttttgttttttgaattttctctattgggtttggttttcattctagtttgaaaattgtactttcatttggatttgaatgtgaattttgttagagatctcctttgtgggtctgggtctgatattggtgacaatttaattgcagaggggacacgcctttttgtagcgaagagtgtagac

SEQ ID NO: 16410 - DNA, 823 bp, Glycine max
  Intron number 2 from transcript Glyma03g01140.3 (locus Gly ma03g01140) derived from phytozome v7.0 (chr-ID Gm03; pos 891198 to 892020 reverse strand)
ctgatccgcgctataggtgcttactacttagctccatctttacttttttgatatattttgaaagtgcataactactgctaatgttgggacttgggagtcttacaaggaatgttaggagctgtttggattgggaggaaaatgttttctgtctttaatttttgtttataatcttcaagtcgttcgtcatgtattaggctgtgagccacgtgtttgtgacatgtggagttgatatttaccccataacaattgtccttgagtcgatgttgcctcagagaggcaacgtcggcttatcaagtagaattgtccttgagtcgatattgtctcggagaggcaacgtcggcttatcaagtagaagttgatatttatcctggaacacctgttttccaagtttgtactgaaaatagtgaaaacaaaatcttatacgaccctaagccaaaacagaaagcattttctcacaccaaacatccccatacatagtagtttccgatataacaacatcaacaataaacacccaggcctcatcaccaggtaggatttgcctcttggattaattgacatcactgggttctatgaagaactaaactttagatactatactaccattaaaagtgatgcctatcctactggcccatcatttattacctctggttccttttttcagttttgctaattttagtatgtaggaaatcttcattgcatccaaattttcttagttactatttgctctatgatttaagttatgttgttggatttctccaatctatttttatttcttgtttgatttggaaatcagggtttgtataacacagtgtcaggaaactgg

SEQ ID NO: 16411 - DNA, 579 bp, Glycine max
  Intron number 1 from transcript Glyma05g01090.1 (locus Gly ma05g01090) derived from phytozome v7.0 (chr-ID Gm05; pos 682614 to 683192 reverse strand)
acgtctctaccaacgacaaatcctcccctttgaaggtgagattcgactagcccctctaactgttgatggctttattccattcttaccaattgtgttctccaaattattttctctgtttccttaaattgttgtactgaattcgtggatgtgtggaagattattcattggacatgtgggcaaagtggaatgattgtgtatttcttcgttgctaaattttgtttttctctcatcaatttaacactgatcaatttaattctcacgttcacccatttaaaggataaagtaagaaaccagactgataggtgtgcttttaggtctagtgttttactaggatttaagaaacaagactacagtttatcagaaattcagatgtccattatgtatttgatttatgcaataaacattctattggttttgcttcattggcttactgtcttttcatttgattattaaaggttgaaatttggattcctggttaattgtgattgaaaatttcgaagacttgtgttagaatttgtaatcatttcttgcctcacatacatggtttttttcctttacccatcagactagcaattggca

SEQ ID NO: 16412 - DNA, 703 bp, Glycine max
  Intron number 1 from transcript Glyma05g23880.1 (locus Gly ma05g23880) derived from phytozome v7.0 (chr-ID Gm05; pos 29748646 to 29749348 reverse strand)
gaccctctcgcctcctcgttccttcttctatcaaggtttctccttttcccttcaattcccaatttctaggggttttttcttcttcttttttaatttttaattttcgattccagcatcccaatacacacgatttcaattgacaatttttctcccctcttttctggggctttggcaaatgaaaaattaaaaaagcatcccaagttagtgagagaatgaataccatttcacagatgacaaaattttcacttgacaatgatacttagttagggttagttgcaattggatcattgattgtgggttttatgatatctatatttgtgcatgtgacaacatgaatcatgccattggaatttgtttctgcatcagtgtgtttaattaaagcttcacaaactagaaagcctcagccaaagtgtgccttcatagctcaaattgccaacaattttactttaaattcgttagtgttatgtttttctgaaaactatgttatttgggaagggggaaattgaagctaccaagtaccaagccatgtttattttggccttaattttcttttggcaagaatggtgatggttcattttgatttattttaaattagttagtttgatgatccatcttgttaatactgtattacatcttttttgtcacttttgtttcttctaaatccgcatataggtgtgtgatttgaggagattaattgctagga

SEQ ID NO: 16413 - DNA, 663 bp, Glycine max
  Intron number 2 from transcript Glyma04g29890.1 (locus Gly ma04g29890) derived from phytozome v7.0 (chr-ID Gm04; pos 33786356 to 33787018 reverse strand)
gcaggtgattgatacaggactcattgacttgataggtaataggttatgatatgaaatgaattgtttgagtaattctatgatttttgtgttatatgtgaagagttactttacatttctgcatcattattataaactcataattagcttgtggtgatggcttatattgacaatatctattgccaatgggaaaaaatatcttgcttttggttatggttgtcaatatcaattatcatagtatataactttgagagacgtgttttagttctgagctttttcaattatgattttctacttcgcctatagacattcaatattcttttggcaacagctgcacctagaagcaatgagtgataatggtaacacttagctagggtgaaaagtttttggatgagaagacttcagaacattttaatttgtataaccaattctttttcacttggtgtttgtttttcattttctttttcaaattctcttctacttagaatcttgtaagatggtaatcttcattgtactttcattgatgttacatttgctatttgcctatttgtgattgattttaaattaaaagccaaatttctatttttatttttattttaatgttgattattaagctaatgactgttattataaatatcaatgattgaagcatacacccgtagcaac

SEQ ID NO: 16414 - DNA, 775 bp, Glycine max
  Intron number 3 from transcript Glyma03g41650.1 (locus Gly ma03g41650) derived from phytozome v7.0 (chr-ID Gm03; pos 47062431 to 47063205)
ttctttacaaagttacacgtcaggtaattttaaattactttgctagaaaaaatcgactctaatcaaatgaactattgttctctcaactgttgtgaagacaatggtagttaactatgtgagtggttctcattaccgggttctcttctgacacaatagtaatttccccctgtgtcatctataaagccgtgttatgtaggtggtctttctatttgtctaacagataactttctgacagcattacagttatagttttgagtttgatgcatagcataagatatgaaaatgtaggtgataattttgcctatttattgattaggcatataatcctcttagactgggcatgtgaaaaaattaggttgagtaattcactgcctagttattagaatttatgtttctaggtttgcatggtgaaggggaatttctgtggtatacctcggtttagattcaactgtaaccgataaataaaattccatttgaattatttaaggatgagtcagagatgttacaagttgggctataaggaactccaaccttaaaattgttaactggtgaaatagatttattaaacttgcgtgaagtttctgataatattatgacaaaataatctgtaaaggattgcatgttatgtttcacaaatgtggtgggtagtaattcttcaagcctgcattgagtagatgttcttttgtgcttgtttatttattttcctttgggactctaataacttactacaagagggttcacaggagtgacttttgcaggaaggctttccgagatt

SEQ ID NO: 16415 - DNA, 553 bp, Glycine max
  Intron number 4 from transcript Glyma01g36640.1 (locus Gly ma01g36640) derived from phytozome v7.0 (chr-ID Gm01; pos 49108803 to 49109355 reverse strand)
aagtatgaagctaagcatttcccacgttacattgatgcctatggatgttttatcaattgatgcttcttttcttttaatttttgtttattctgatgtttgcatcataggtgtagtgagtaatattatgcaaatggcagcaacaaatagtattctgcatctctaatcttccaccaaatcatagaatactacataggattttctgcgccagctaaatggcctttatttttagtctaattgcatcttttatcccttagcacagattattgggttagatcatatcatcaatacctcctcttgcatctttgtgtttttgtttgacaataatcatactaaaaaggaaagaagtactatttggataaagttatttgagtcctcttaagagcaaatttcagttatcaatctctctgatcagtcttccttgtgcagaagttctaaaacaataacaatgtagcattatcattctatcatgtttggtctaattccttcaaatacaaattgaatgtcaaataaataattcaaaagtatttccttcattttaccctttcaggtgata

SEQ ID NO: 16416 - DNA, 489 bp, Glycine max
  Intron number 4 from transcript Glyma03g39130.1 (locus Gly ma03g39130) derived from phytozome v7.0 (chr-ID Gm03; pos 45329813 to 45330301)
agaagcccttgcggcgtttgtgaacattgaagcaggtgtttatcttgtacttcctatttgtatgatgtcaatatgtgtgttttaaaacaagtttgtgactttagtatattttgaattatttattttaatttagtgaggagatttgaagagtatcaataaacatgcattccctggaatgttggacttataaatgctttttcaataatgttgaagagaaggttttattttttttgtgctcatgttgggaaagctaacctgcatccctatgcatctatttataactaattgattttggtgcattcatgcatttcttcttgctcgttcttcaaattattatccaatatcatcacttttgagtcatttttaccaaaaatatgtccttagaacttctctagcatttttagtgtttctcacttcttctaacatttctttgcataatattaagttgatttggcatggacatcaaatatcttgttaatgcaggtacaa

SEQ ID NO: 16417 - DNA, 507 bp, Glycine max
  Intron number 1 from transcript Glyma02g01540.1 (locus Gly ma02g01540) derived from phytozome v7.0 (chr-ID Gm02; pos 1101003 to 1101509)
tgtccaaacctaccgactcggcttccaaacctcgagtcagtttctctctctttcttcaattcaacaataactatgaatgactcgttgtttagatgcttcaattcctcttttccttttctgattcatcggaatcggtttcgtaactatgtttcagaatttgattattcatacctagaattttgaatttgatctgataatcacgagcggacatcatttaagagctctctgttcctctgtctccctgtaattgaatgctacagcaattgagttcgcgagtagggatttaggattgcgcttaatctgaattatggtttctgttttgctgttggcgctttcatcgaaaaactatgcttattaaatggtccctgttctgtatagcgtgagaattgaaattttaccagtgctgcatacacaggattttgtttttggacttcctgttttttgtattttgaacatgctaataatttgttctgtaatgttgatagaaacaacttggagagccagcaa

SEQ ID NO: 16418 - DNA, 915 bp, Glycine max
  Intron number 1 from transcript Glyma04g09010.1 (locus Gly ma04g09010) derived from phytozome v7.0 (chr-ID Gm04; pos 7175658 to 7176572 reverse strand)
gtttgtgttcaaacaccaatttcaaagaagtcaaggtgctctttcgtaattatctctcaaccccgtgcccaattccacttcttctaccattcccatctatttaagcacgcacacatccctctctctcacgtccaacccatcctcttcaaatagtatttcaattccaagaattcatcatcgattccctctcttcctaatttgtttgcttccaatccaattcttcgctactctcaattcattttgaccccaagcatcatcgatcgtgagaagaaaactaagtactcctccaattatgatagttaggtacgtaataatatcttttcattatctatgccacttttgcaaattctcttctaagttcatttctttggcgcatgcataatggaccttaacatgaactgactcatatgaaattaatggtagctagaagtcaaacgcatcactcatagccacctgcaaaagctgtatacatgtttttcatttttgttacaaatagacatatattcccttgtccttttatatagacataaaaaaaaataggaattcataatactttaatgtacattctttccttttgcccatgattattttaatttgacataccattgaactgtgatcactgatcactaacataattaaaaagttgcgttaatcatgctatgcactttttacagctggggatccgaggagttaaatccaaggcagatagaagactgaattgcagcttcaaaaaaataaaaaaactcatcatcaggaagctatagacatggccaaaggatcttattcaatatcttcaaaggcaagatccatgaaatttatattcctcttcatgttcatgctcaacttcatcttatccgatggagatcaacatgaggttcagcttctcttgtccttcaaagcttctctccacgaccc

SEQ ID NO: 16419 - DNA, 526 bp, Glycine max
  Intron number 4 from transcript Glyma04g36800.1 (locus Gly ma04g36800) derived from phytozome v7.0 (chr-ID Gm04; pos 43310946 to 43311471)
ctgtcctctctaattctgaaaggtatggatgttcgtattgcacaatgccttgaatgcagtttctttagacttaaaagttatcgacatgcttgtgcttaatttggtgtgaagtaacaagccaatttaatttaatgttgggaagaacttagggggtgtttggtaggagagaagtttttgatttcctgggaatcataggttgggaaacttagtttccaatgtcttgtatgcattttaaaaaaataacattcttgggaaaggatgtttcttaatcaatttcccatgaaaactttcccatgggaggagttgggaatcttacttttccgagtttaatttttcttttactatagtaaaaacatcatgttattctttataaattatataatgtggtaaacaattaaaataataggtaaaatatgcgtaactctttgatttccgggcatgaaaaaacttctcccctaccaaatgtcgccttattctgattccagcatttattacagattgcttgtactgtgcttgcttgaaaata

SEQ ID NO: 16420 - DNA, 920 bp, Glycine max
  Intron number 1 from transcript Glyma03g07540.2 (locus Gly ma03g07540) derived from phytozome v7.0 (chr-ID Gm03; pos 8119397 to 8120316 reverse strand)
gcgatcaactcttccaagaatccaggtccgttctttcttcaccttcccaattttatttgctgtcactctttgatttcgttcgtttcattcaatcattgcgttcaattcaaacttcacggagattgattttctagtttgatttttgaatccagttgttaagaatacactaggaatccgcttcaggagattaattgagtattattgttgttgacttgttgttgttgtacaattttgttcctttattgttaccatgatatacgaatacactatttcctacttgaaacggaaatctaaaagcataatcaagccctctttgattcgagaaggattagctattgctagttttttcttcttctgtatttttcatattgctttgtttgctgcttgaactatactattaatatatgagaaaatttaagtgtcgttgtgatttagtgaagcattacgttctttgctgcaagtacttgagtttttatttatttatttgagttgtttagaagcgatcagtgttgtttagaagatattgatcagtattcttagcttggttgactgacacaatattaattcttatttatttgatgttacgatctctactgtattaatagtgttaacatttaattagtaataggtttattcaaggatctgtccttggtgcaatgtttgatcactgggtgcacagttcttgttttacctggaactgaaagagtcagtcaaacatgttactattttgttattatttgctccagtaatttgtttattcttgtcttctaatacgcaattgatattgtgaattcaatcatcacatgtggtaattaatatgtgctattattggttgaatttttctagcacttattactaaatgtaataattttattaagctgttgtactgtgcattttaatgaatgctttggtttgtgcag

SEQ ID NO: 16421 - DNA, 577 bp, Glycine max
  Intron number 1 from transcript Glyma05g02280.1 (locus Gly ma05g02280) derived from phytozome v7.0 (chr-ID Gm05; pos 1679470 to 1680046)
gaaggtttctgtggtaagaaagtgaaagagtttttttttggatcttggctttgtcatggttgaactctactcttcattttcagcttataagagtgtttgtttttctggcttggtaactgaaaacaaaattctcttatactcttgaattccacctacccgggagtttttttcattcttttgctaacttaactcattctttggtcattcataacaatatatctaaaacattttcgttgtaattacaaatgtgaattcatcgtccggattcgtttattcgttttctggcctgatgtgcttctacatccaaaagatggacatccattttttcctgctgtcctatttaggaagattaaggcatgtaggtttatcttctccctgctcaaagtttggttatggatactttaactaagcaactttaatcataattttcctctagagtcccttgaagtgattcaccatcttccattcatatcttctgctccatttttctataaacaaaaacttagaccagtattcatcccttgatattctaataccttcatggaagaaacatttgttcccttacgtgggatcaaga

SEQ ID NO: 16422 - DNA, 814 bp, Glycine max
  Intron number 1 from transcript Glyma03g35000.1 (locus Gly ma03g35000) derived from phytozome v7.0 (chr-ID Gm03; pos 42304007 to 42304820 reverse strand)
aagaagaaactaagcgtcttgcaaccattcgtgaggtatctctctcacatcctctgctctaccttcactaattaactctcaaaactatttttttggtcttttagtcgggggaacaagaatttgttgcagccttgcatgaaaaaaataagtttttttttgcttcagaaaaaatttaagtgattaattttaggatttttaacaaatatatgttggtttatcaggtgaagaagctcctgatggaaacaactttggtctttttcagtattttgtgaatttttatttaattaaaccggattatcttttaacaaggggaataccagaggtttagagaacatctagagcacttggatatgcctgatctgtggttttgttctctcgacaaagtgaatttgcagccccaaaacctttttttttcttctaaattttccgttgggttttttgaggaaaagatttcaaaatttgaactttcatgttcccttgaatatattcttgtcagaaaacagtgtcgggccatgaacctaataattcatatatttcctccctagaatttattttaaatatctgttttttttttaaaaaaaaagaaagaaatatctgttgttagaaatcaatatatcaaatatcagtatatttctttggccttacaattttttaatttaccataattcatgctgaaagttgttatacatatttatgtgtagcgtgtgtgcctacaattttgttattttatactcaaattgatatgtaattgaataatcccaaacttcattctatttgaggaatatcaggagcttgaagccctggcagatccaat

SEQ ID NO: 16423 - DNA, 421 bp, Glycine max
  Intron number 1 from transcript Glyma01g24950.4 (locus Gly ma01g24950) derived from phytozome v7.0 (chr-ID Gm01; pos 32867427 to 32867847)
gtgttgtagccaaagctgtcaccacagccattctggtaaaacccaaattctttatttttattttcatttcattttttttagccttttctcatttctcaatagaatactaattcaactgaagaatatttctccactggttttagtttttcttatgatttgagtttagttctaattcttgtaagtttagggttagtactcctacttatatattttaattttttcgtattgctaattgatgttaaatctctaatagttttcattgctatgtaaataaaattcaattttagtttttttttttgtttatgtttgggcaaacatttttgtagttttgattttttctaggtggaattgataactaaatttggtgtcgggttatggtttttcaggttggatacaggcatattgattgtgctcaagcgta

SEQ ID NO: 16424 - DNA, 1017 bp, Glycine max
  Intron number 3 from transcript Glyma03g24900.2 (locus Gly ma03g24900) derived from phytozome v7.0 (chr-ID Gm03; pos 31817051 to 31818067 reverse strand)
atagagttcttattcgtttggaggagctttcagatgtatgctatatacttatcaaaaaaccaaatctttttttacatggggtgttgttcattcttattcttatagtatatcagtttcaaaatattggttattctcccatttgtttccttaagtcttggaaatttggaattgctaatatatattattattgtccttatctgaaagtaatgctgaatgtaggactcgtttgtgggccttctttatttggttaacttgcagtttcatgtgattttgagaaattcgacaagattttgccatgaaatggaactttttgttattgtattacaataacaagttatgttccgttggtgggttgctaatgtatgttgccaatggaatatccctttgtatgtgctccagaatattggtgccacttgtgcacatgtgaagtgctttaaaggatattctgcggtttcttcatacaatgttctcagcttggttttctgttgtgtcagtgtcgtttaaaactaaaacattcatgtttatctgttagtgagacccaatgatgctgtttaggataggtaattgctatttaaatgtgtcaatataagttgctgtctttatgcacatgtgtaatagtagctagcagtaaaggaattatgtaactagaaggtatagagtataaatatgttctacagcttatttaagatatgcagattggtgctgtgatgccatgtgggtgacttaatttgatgaaaggtttatcttgtatgtatcattgtttttattcaattggtatttggtaggattctaatgcatgattagaactagtcggttgctttgttgtgttatgatttagcttgatatcatttaggttactggtttgcaaaagtttgttatatggttagaaattagaataaggttttctgcaactgttaagtttgaatgtatatggtactctttccatgttgcatagctaatttgtgaatggtttttggtgcagaaaacagttggtggagttttgctgcctaaatcagc

SEQ ID NO: 16425 - DNA, 1008 bp, Glycine max
  Intron number 2 from transcript Glyma05g26780.1 (locus Gly ma05g26780) derived from phytozome v7.0 (chr-ID Gm05; pos 32698577 to 32699584 reverse strand)
ggccattcctgtgactgtggccgtgtcttttccaggtttattaattagttttgttttcccacttaataattcccacttctcagttgtcagttctcacataaacatacacctgtgtgtggtgtttgtccattattccaagtttccatctttctctctctttcttggtttctgtttttgtttttttgggctcctcagattcatcccctgctaagcaattgttttttctctcaataacagaaaccaagttactactataactattgttattattttgctttttaaattttatatatatatatataattatactatatgattatggtcaaaccctaaaattctaggtacaaggatggtgcagagaaacaaaaattctgaatctcagatacctttcatgtgaaagatttcccatcttctagaggttattaatattttatttattctagtttgcaacttcaaaaacatgtaagttgaaaaacattatgttatgcatatgaatattacatacatacacccaatccatctcattccggctttgtacttggtgttcctatgacagcttttgagtttaagggcagtctatctccaattatccacacgtctattgattactaaagacccaaataaacccatatataggagggaaaagtttaatcttttcattctttttttgaacttatgaataccccattaattagaatattagatcactctgagttattttattttgttgcactattcaagttaaacatgaccacagaatccatggaccagaaccagatctttgattaattattttttatgttgcttcatgctagtttttaaaacactacattaacaaggttttcatacatgtatatctttgtttgacaaagatttttttttctctagccaattatatattcagagacaacaagatgaagccataacacatatatatcataatctaatctattttaattacctaaacttttgtcctttacagggtggagagtttcatagaacaccaag

SEQ ID NO: 16426 - DNA, 323 bp, Glycine max
  Intron number 2 from transcript Glyma03g39040.1 (locus Gly ma03g39040) derived from phytozome v7.0 (chr-ID Gm03; pos 45270627 to 45270949)
agattgtggagggtcctgaacttgaccacttcgtatgcatgttttaaaatttcttttacttttttgagttgcttccaagaaagtagagagattgaaagaaaatgatcaaatcgtggtgccagtttatttatttattatgattaattttccggaaatcagttagatggatatttgcttttctttttccttaatattaatatagatagatacatgcacatatgggtcagctaggaattcttgtgctatttctgaaagaagatttgtattgttgttgttggtacctgaaaggaaacattctgcgaagttcttcatagatacaagga

SEQ ID NO: 16427 - DNA, 962 bp, Glycine max
  Intron number 2 from transcript Glyma02g45100.1 (locus Gly ma02g45100) derived from phytozome v7.0 (chr-ID Gm02; pos 49480880 to 49481841)
gtgtagtctactttccccaaggtcatagtgagcaggtaagtaatgcttcttgtatcctataagttggtttattgcactatgcttgaatttttcgcatttcatggatattttgtgaagcttctatgctcatgaaaagtacattaagtcgtatggaaaaattgaagctcatttagtatatccacatgatcacagtgagctggtcagttgtaatattttgatctgtccaccgcagtcagtggagtagacttcaacttattgtttcttgtgtgtgtatggtgagatcagtcatgcttgtgccagtgcaagctcatagttttaatataagatagatttggtatttgacgtgataggactgggattcacaatttgtctgcagtaccgtgaaagtgaaagtatggagatgtaagctgtaagttacatgttagcagacttcatggattagtgtttaagttgttgtgcctggagggagggagggtgggctaaataagttaagagaaaataaaatatgctccaataaacttttgattttaggctttctgttgttgttgctacctctagctcataagtgaagtccctagtaatatgatattgcttcatgcttgaaatgagcagcattttgttaaattttaaatagaaattgacaaatagaatagtctgaactttgatcagtctgattaaacggtataaatctcttctataattactatgctaaaaatgagtggctggcagatagagaactctttattgcatcattatgattattctcagtttcatttttttccccgggaaggggagggggttcagccaaatggttgtcttttctaatctattgttgttgcatttgaaatttccaaataactgattccttttcatatatttcatttatatttggttcttcagttatttgataaaaatgttgatgtttattttacaggttgctgcatcaaccaacagggaagtag

SEQ ID NO: 16428 - DNA, 591 bp, Glycine max
  Intron number 2 from transcript Glyma01g42450.1 (locus Gly ma01g42450) derived from phytozome v7.0 (chr-ID Gm01; pos 53700312 to 53700902 reverse strand)
aggtttctactctgatttgccattgtgtttggacttgtcatgttgttgcttgtagttactagttagtatccctgcttccgagttatccttgtcctttattgactatgatatcataatacattatattttgtaaatgctaaagtaagttttacaacttacaagccacccatgatgaagatttagctctgtcagttttttccaggatacatggaataatctgatctattttgatgttgtcatgaaccatttaaaaccacaagaaggtcattagatttttgcattatgtaccactagtattgtctcttttagattaaaatgaatcttttaatcttctgtgatcttttagtcttaatgtaattttattgttttatccgtcttgcgtgacactagacatacggttgaactttgaggccattttaatatattttacactcagtggctggttttggcatgtttaatgttgaataggagtataggactccagtgctgaagatttatcttcaagcttataattaatatttctaatctcatttcttgaagactaatattgcatcttcagtttgacagtggttacttctcttcttgagaagt

SEQ ID NO: 16429 - DNA, 593 bp, Glycine max
  Intron number 1 from transcript Glyma01g42450.1 (locus Gly ma01g42450) derived from phytozome v7.0 (chr-ID Gm01; pos 53700992 to 53701584 reverse strand)
ttgacatctacttccctcccgcttgcgttcagcaggtcaccccattttctctcttttcttttcagtttgtcttttaacgttttccaaaacaaccgcggaagctgagctcggtacctagaacctttgctcacgcgaattttgttttcggttactgttactcaattcattcaagatttagtagtgcggtatcttttatttcaatgagttggaactggatcaaatcagtaacggttttcttaggtgcatcaaatcgattttccaaccatttttggtgcaaactgatgctgtgactgaggtctcgaatttttatttttttcactttatgttagatgagttgtcatgtgaaaggagctagctggaaatcataagctctacgaaattattgatttcttgttgattttcccatgcttcttttctttgaagctatacaatactctcgatacttccgaagcatcgtgtctcggaccttattttcttttgtactgttttttttatctcactgatataaaattgatgttgcttcaacctttttgacttttaagtaaggttttcattttcttcacataaccacacgcaggaagcattggagactc

SEQ ID NO: 16430 - DNA, 1013 bp, Glycine max
  Intron number 1 from transcript Glyma02g46260.1 (locus Gly ma02g46260) derived from phytozome v7.0 (chr-ID Gm02; pos 50273235 to 50274247)
cccttcatcttctcctgacgacgaacaaccacaaggtaacctcataaacataattcctctctactcttttactttctagctccttccatttgtgacggtcgactttccccaaatatttttctgttaattggaattttgttggttgttgtgttttacgttttcacttttcacaacgagaagaaatgagaggtttggttagtgattttgttttaacgagattttatgttcttccctggagagaagttggcaagttagtgttcaaggttcatcctaattccatagaggctacaatgaatgagaaaaagtcaatcaaatggaagttgttctgattagttaggttcgtggaagtcctaagcaaactttgattgagctcaacggtttaagataaagcttttgttgcttctttgtgggctttagctagagtgtttcgttgcatggtgaaacttttgcaatgaacatgttctggtttaacaaataagcttgccttcgtaatctttattgtaacaatggaggacttttatgttttgtgttgtgacatattgtgatgtgtttatatatagcaaaggctattaataatcagtcatgggtaattctctaagatttctctatcaagtttgttcaattttgttctcatcatttggacacattgatatatttggttagacatgacatttagttggggaaactatgtgatggtggattgttggctaatggctatcaaaacaaattatttttccgtggatgttggaacaacatttttttttatccaacttccactcgagtctatgtcgagtgtttttttttttttcggcaacaacaaactccacatttgcaggttggaatttaatttgctacagttcctgtgtcagaatacaagtaagaatgttttcacctggcttcaatttatggttggcttcttctgtgttgcagctactgttttagctggataattttgttattgagaattttattatatctgattctgattatgaatgtcacctttttgtgtttag

SEQ ID NO: 16431 - DNA, 423 bp, Glycine max
  Intron number 2 from transcript Glyma04g01750.2 (locus Gly ma04g01750) derived from phytozome v7.0 (chr-ID Gm04; pos 1167069 to 1167491)
tttttgatcttgtagcttcccaactcactcccaaggttagtttcttaatagttatatttgaatccattcccatttgattggatgatcatgagagttaccttcatgcttgtatggattatagatatataatagctcttactttctttgtgttcttcattggggaatctcaaacaactcaatatatatctttctttctttttttacataagctcaatatatatctagaaaatgttagattcataacataacatgtatgctacagaaattgccatgaaaaatgcatagctttttaattattacttttaaaactacgtaataagctatgaagggaatatcataagttcataacaaatggatgacaccttaagtaagccttctatgtttgtttatattttctaaattgcaaaaattaaaagcagacca

SEQ ID NO: 16432 - DNA, 642 bp, Glycine max
  Intron number 3 from transcript Glyma03g28400.2 (locus Gly ma03g28400) derived from phytozome v7.0 (chr-ID Gm03; pos 36283674 to 36284315)
gaagtacttaaacattgtgtacctccgattgtatgttttgagggttaaacatattggagtagttttaggggatgttttgaggctgataataataatccatagtcagtgcaaaaacgattgacacttggtttgacattcaattaacaatatgtgcatcccgaaattagtgtatatgtaaattttgcattggcaatttggcagaaacctgataaaggctgtccctagccaacatggaatttctacatgctaaaatatttatggttgatttaagtgcttcatctagttctctgatattattctttttcgtgaaacaaaccaaagttcctgtaaagatatagtaccatctctaagttggattccatttacgttggttcgtatttttcattgacaaacattggttatttggttgcatcttgcatcatttcagtggcactgaagtactgcattcttctgatacaccatagagcttggtgttatttgctgtgattgattgcatcataagtgatgcaagcctattatgtgatttttgaactctgacaacatggtactcagtagcatggatggtcatgggcagggttttgcaaaagtttgtgctctgtttcaaatgctaaatcaatttaataatcttgttgtacaggcgct

SEQ ID NO: 16433 - DNA, 395 bp, Glycine max
  Intron number 4 from transcript Glyma03g28400.2 (locus Gly ma03g28400) derived from phytozome v7.0 (chr-ID Gm03; pos 36284548 to 36284942)
ggattggaggctttcggccatccgaactcttcaaggtgagaagtttctcttatctatgttttgtaaatgttttttctggtttgaaaattgcttcactaatatctggttgaacattgattgcattccatgcttcccaacaatataaagtgagaaaagcaacaaaagaatcaaaatagataggaccttttttcttgacattattgaaacctaaattcaagatatagtttaggaactttccaattgaagaaatatcagttttaaccgttttgtgtttacaataattgattctgatgttgagttttaaagttcatagacttttatcacgttatgctgtcttagattggattgaaactgttgcagcttcttctaagtcagttggagcctttagtcgagca

SEQ ID NO: 16434 - DNA, 993 bp, Glycine max
  Intron number 3 from transcript Glyma01g32130.1 (locus Gly ma01g32130) derived from phytozome v7.0 (chr-ID Gm01; pos 43554568 to 43555560)
aagacactttccagcttgaagcagtcggaggagaagtaagagaatacactaggatatacaatgtctaatcccttcttatcttagtatatatttgtccttcttttgtttttcctttggaataattttaagcgtctaaaatcaggtcacaattattggcttagatacatgatttctgaaactatatatatatatatatatatatatatatatatatatatatatatatatatatatatatatatatatatatatatatatatatatttataatctactttacatttttttgtttctttaatatatattatatagtattcttcttttaatttttttccttactaaataattttaaccgtgtaaaatcgattcacaattcattgcttagttgatgggacgattaaatttcttgtgaaacttatatacaatagtagttcatattgtcctgaaataaaaacagtaaattaagaataagaaaaaagaaaaaaaaggaaaataatcaaaatatcacgcgtgagttgtacaattttggtttgagcgacatatctaaaattctagcttcaatgtccaaactccaaagtactgacataataatgagtgtggctcccatatatggattcatttaaccgtgttctgtagttggacgggccttgtatccgccaataaaggaagaacaacgatactaatagataaattttatattacaaattatacaatttaagaaaaatataaagaggatagagaacattagataagtgatgtgatggaatagaaagaaaaaaaatcctagaaagcactgtaaaaaatatatattataagtgtttcattactcgtgaagtagacagctagattatacacgttttgtcatggagttaactggttaattgaatggtgcacctgaaaattctcctatatgattgtgatacatgtgtaacactggaaaaacctgttggttttgcagagtcaagagaacgaaagcattgacgcgcaagtggt

SEQ ID NO: 16435 - DNA, 627 bp, Glycine max
  Intron number 1 from transcript Glyma04g06450.1 (locus Gly ma04g06450) derived from phytozome v7.0 (chr-ID Gm04; pos 4927132 to 4927758 reverse strand)
ttctcgttcgccacaccgaggccattcaagctaaggtaccttttactttgccttctcaattttccttatgtattgtgtttgccttgccactttaatttaccaagtgactgtgaaatcatgtcaattggtattcttctttactcagcttttaagtatcatcatcattattattactactataggcttgaaattggactagaattatcgaaattttaaattgtagttgtggttttatggtagtatattctagacaaatgaggcggtgtggtcacgatgtgagaacggagatctcaaaaaccttggtgagactgatatggtcacattgtggtagtgatgtgatcagagatctcaaaaaccctagtgaagctgatatagcctcaaatgtggtcatgatgtaattatggagatcacattaaggttaactaggctgacgtgatcacattcagaccagttaaccttaaacttacagctgcaattgtggttgtggatgggttttaaaaccttgtaaaataattatttatatagcttattgttttttatattaaggcttaccaatttttttgttttgaattgatgatatggtttgtgacaggcaggaaggtacattaaccctgaagaaaatccttt

SEQ ID NO: 16436 - DNA, 763 bp, Glycine max
  Intron number 2 from transcript Glyma02g04910.1 (locus Gly ma02g04910) derived from phytozome v7.0 (chr-ID Gm02; pos 3993817 to 3994579)
ggtaagtaacgtatctttgctcttccctagcttattatataatcaccaagaaaaattgtcatttgctattgctaacatacaaaaagtataaagtgtttttttttttacaagcaaagtattaagtgttaagatagcattcatttttttttacaagagttaagatagcattcattagggtttaaaagatagcattcattagcactataacctttattaaacgaaaattaaatcgttaccattaatttttaaacaacgttagtaaaacataaacttattcctcaaaactctgccaaaaaaaagcataaaaaaatcatagacttaattttttttattcagaaaaacatagacttaatgccgtgaagagtttcggtagttgtaaatttaattattttcttagtgatcaatctaaaatagtatcgataaagggggaaaatttggttaaaagtaaaaaagaggatgtgaaaacgtgaaaatgaagaagggtagaaaagatatacgacatatctcgtccaaaaaaatatattataaattgataaagaataagggaaaaaacatgataaaaaaaatttttctattttttttttaatttggaaatgagcgtatgtgaaaatagatttgaatcaaagcatattataattaacatgataaaatcattacaaatttctgtacgcaataagtaattttttttatacatacttcttattgggacatgaatttgatctttgtagggagaagtggttttctttgaaaggcaggtggaaca

SEQ ID NO: 16437 - DNA, 403 bp, Glycine max
  Intron number 1 from transcript Glyma02g12650.2 (locus Gly ma02g12650) derived from phytozome v7.0 (chr-ID Gm02; pos 10949237 to 10949639 reverse strand)
atctgctcctgctcgtttttctgttctgcacgttggtaatgtttttctgtttgtttcccaggaaattttcgctgaatattttcttcatattttattgcattcaaatttcaaagcttatctttgattttctgaaaagcaaaacgatacccacatgttatttccggctttcatttctagtcctaatgcttctcgctatacccagataagaaatgattcagttgaagtccaatttgaccataattatgctaattttaagggaaagattaaatctttcctttctttttttagtgggttatgaattattcgaatttgcagattatggttttgaaccttcataatttcccctcatgtaattttcattagtgcaggaacattctcttcagaaaaagggtgaatttgtgtt

SEQ ID NO: 16438 - DNA, 1016 bp, Glycine max
  Intron number 3 from transcript Glyma03g03500.1 (locus Gly ma03g03500) derived from phytozome v7.0 (chr-ID Gm03; pos 3274401 to 3275416)
tgaagaaacccctaagcctccatcagctaatagacgtgagaattttctctaattttcttaacctaatcactgttgaataagtcacagtagctttcttatacctttgttttgctttgcataaatacctaaagtttaaacctccacctgttttacatgtttgttttgcatttctttttctcgagtttcccttttctgcttctcgggggcggtgatcagagatccttgtgataccaccaaagaaaagctagagaaaaagaaaaggaaaactcttctgataccattcagtccatttcacacttcttttaagctcatagtgttgtgtgtcatttaaccaataaagggagaaaagcaaacacaaaacaaataaaaaggttatatccctatcaaaactcacttatcaatctgaaacagtggctaaggtttctttgtatacttcaagtggcaaagagagaacaatctttagcacatttaacccatgcattgctttttctccctttcccgtattaatgtagactgtagagtgttaccagaaatccagcttttggttcttcaaattaattaaacactaagcttccattatttttcaaattgaagcatgccttttccatattgtttgattttccccattagcacagtaaaatttcaaaaagggtgtaaagaaaaattaattattgttttcccacttaagggagataaaagaaatcaaatctaaaacatgttaaatcattttatttttctttgcctctatgcatgtctccttacatgcatacattgagtgagacagaattctccccccgaaaatatagtgctgaatccattgggagagtgattgttaaagataatgatgaggtaatgatagaatagagagagagagagagagagaaggggagagagagagagtgatttaggcagaaaggtcagcgaagttatttaatgttcctgtctgtttgcctgtgcaatgtccgtgtgttgtatgtccagctccagagaagagacagcgagttccgtctgcttac

SEQ ID NO: 16439 - DNA, 708 bp, Glycine max
  Intron number 1 from transcript Glyma05g02330.1 (locus Gly ma05g02330) derived from phytozome v7.0 (chr-ID Gm05; pos 1716555 to 1717262)
gaggaagcattttctacttttacactcagtgagttttcattcccttttgaatttctctgtgtcaatatttgaattatgttgaaatggattaatgcacattatatggataggggtatctctgcattatgtatatctacaatccagtttctataaacttctcaacaaacactaaccagaaaaaagaagaaagtgacaagttaaaataaatcaaacatgtaaattgaaatgaatttatgcatcttaactttttttttctagcctgcgagagaagtttgattccaaactaggccatcgtgtgtgtctgttttaacttttaagagtcatcctgccttgttggtatggaacacaaatttgaaagcttattaaactttaaacagagttaattaatctcaaaccaaaacgaagctagtagttgcgccagatgaagggatttgtaggagtgtaattagtcctcttctcttggaattagtgaggcttttataaacctttttgttatcattggtttgtgtgtctaagataacaagtgtttttttaccttatttaaaatgccaattgaagctgctaccattcaaaaccaaaaagcctatttcacctcttattgtattgattattgatttttttggcatttgattattgatttttctttcttttgttttttgttgctttgaaacaggtggacttttgccgcagtcaccatttattttgggg

SEQ ID NO: 16440 - DNA, 503 bp, Glycine max
  Intron number 1 from transcript Glyma01g32390.4 (locus Gly ma01g32390) derived from phytozome v7.0 (chr-ID Gm01; pos 43912569 to 43913071)
tctttaacaagttgccctattttctccctcaagaggcaatcttcttttcctatccttcttcttcattcattactatgtcgttttctataaaagcagctttctcttattataattgccaccttaatatttttcgtgtttgttatttgttctgtatttaatatgaacataatatatgccctctttgtttttctgatcatgcaattgccctgatttattttttgttcttatcctgattggttcaacatcattattatgtcacgcacgttatcatggtgtgttgcactaattgatgataatatttaattgtaaagttatttttatcatattagcattgtttaaagtatattttgatgttgcatgtattcgttttcgtccaagattaattcgttctacatatctttgatgtatcccttaaattttattggcttctgcttttattttttttctgatggaagttaattaacattggtttttgatgtgcttgttaattaattacaggcacc

SEQ ID NO: 16441 - DNA, 777 bp, Glycine max
  Intron number 3 from transcript Glyma02g09680.2 (locus Gly ma02g09680) derived from phytozome v7.0 (chr-ID Gm02; pos 7634339 to 7635115)
tgcctttcttcgactggttagttgggccatctgaggtaattttatatttgtcaatgtagtttataattgctttacttgttttgcgccacattacattgcatcctccagggaagcaaaatacttgcaatgtttgccaagaaaaaatcaaactgtataaatttatgtgctaaattgttgattatacaaagacatccagaaacagtttttcgaaccttttcagtaacatactgcagtcaaatgaacaacatttcagattatctagtgattctatcatgcatagctaaatttccgtgtgatgtgatattgcccaaatgcttccattttgtgcaagtttttagatttgcagaactggatcacaagatgttaagagtaaattgcatctaacctcctatgtattccaagccattttcaagtctcatacataaaagttattttgtaacaaagcccctgaagtttggttcaaatgtaaaattctctacaattaaatcttaatgccttttatgtacaattggaagtaaacaaagacagcttgcaagtaacttaacattcttttttgaacatacacgctttccaggttagtatgggatgtcagcgaataaaattaaacgtttttcattcttactcaaacataataggatttgttgtctaataaactttatctatgatgatcggaaaatggctgaaatattaatggagttattggttgtttacccttaattttctgctatattacttagtattgtcattgatatttagattcttgagatgcactaggtt

SEQ ID NO: 16442 - DNA, 518 bp, Glycine max
  Intron number 2 from transcript Glyma03g36080.1 (locus Gly ma03g36080) derived from phytozome v7.0 (chr-ID Gm03; pos 43097579 to 43098096 reverse strand)
gaatctattgtgagtttgtttctccattctctcccccttctattttatcccaccatcaaattttaccactattaatatgactttatgaagccttaaaattttttaaaataggcttttatgttttattctttcatatattgtctccctagctagattaatgttgcatcaaactgtgaattggagtgcctctattatcaacattaaccaaggttttcaattggcgctgttctgttgcattccttgatattgcgggaaatagtggacaaatgcatccaatgcagctacaattgcagtcatgaacaccttaaaaaccttgatgttgtagctgaaatcgcggttgcgaactgttttttagaaccttggcaatagtcgatgccagagtgaatctcttccagatttcaattgttattaccttctaaatgtatggtgtcgtagtctctcgtgtttctgttattagtaattacattctcctctttcatccagggtaaagaagaaaaaattgcttgtgtgatcggtga

SEQ ID NO: 16443 - DNA, 1022 bp, Glycine max
  Intron number 3 from transcript Glyma03g02240.1 (locus Gly ma03g02240) derived from phytozome v7.0 (chr-ID Gm03; pos 1998944 to 1999965)
tccccgacaaaaacggccgtttcaaagttcaagaggtaatcgatcttctctctctgcttagggtttgttgccatcactttttttgtttttttttccctggctttgtatgcataataataataataataataacaataataatatactatgattatgtatccaagtttgaggatgatgcctattgctttgattgtgaagtaactactacagttgctacccatgagtgtggacacataaagctcaagttttttaaattgcattcacggtcgctgttgcagttttgttgcaatctttgatattgcagtgtagttgtggagagaccaaaaaaccctgataatcgtggctgcaattgcagttgtggactgttttttaaaaccttgatgaaacctgaattcctgatatgttatgaagtggaattctgaacttgactagtcttttttttatcctcccagtggaatagggcacaggtcaaatgtggtgtctaggttaatatattagtatttcaatgcaagcaaattgtaatatatgtgtagactcaattgtcttaggacttgttgcttgtttgtgtgttttcaaaggtgctgtaggaatgccattgtggttcaggcaacccatggcttttgcacatgtgatgtgaaaaattctctaaatgtccagcagctatccaacttgctaactatgaatgttgaagggataaaatagttagaatgttaaaagaataactatgcaaaatttaaaatgttttactgttttcttttccaaatcttaaggcattctctttttagggtggtgttaattggaaattactttagctaccttataattctttgagcttgttgtggatgtatgaatataattgggtcaattccttgctcaatccccgttgccaaacaagcactaatagttttaagttttaactgactgttgttattatgagtaatggccttcatattgaatcaattatcaatctcatattttgtattttctacttttgttcatgaaggtgggcaagacattatctt

SEQ ID NO: 16444 - DNA, 756 bp, Glycine max
  Intron number 4 from transcript Glyma04g30110.1 (locus Gly ma04g30110) derived from phytozome v7.0 (chr-ID Gm04; pos 33995291 to 33996046)
gaggtaaaaaaaaaaactgacattgcttcaacattttcttttcatgtgtcttaatttcctatgtatatcttgccattttttaagcaaaaagcacaagataagaggtgatgttgtttactttaggagaatttcaactgtccctttaaggcatggttctaaaacaaaagtagaaaatagtgaatgaaaaagaatgtatttattatattaaaatataaaaaatatttaatacttattttttactaatatgaaacattttaaaaaatattttttggcttttgtaatttagcattttttttaactttttgtaaaattattattttttattttaatcctctaaaatgcatttttttgttttttatccttaaacaactttacacaactctttgaatagataaaaaaatattatctaaagttctttaaaaacgaaaaaaacacatattttataagaactaaaataaaaaaaaattacaaacacaaaaatgaaaaaaatattaaattacaaaaatgtaaaagatatttaaaccttaaaaaaatacattaattgtatcatcaacgtgcttgttaccaaggtgcttatttttatttagatggtatatcttcacttttcagttttcgtagtagtgaaacaaaaatatcggttgatattgatcatcgttatctgaactttacagattaacatctccgtgtaaactaaacttgaacattttgagtcatagattttgaaattcacaggacctggttgttcctcactggggt

SEQ ID NO: 16445 - DNA, 560 bp, Glycine max
  Intron number 2 from transcript Glyma02g47780.1 (locus Gly ma02g47780) derived from phytozome v7.0 (chr-ID Gm02; pos 51262021 to 51262580)
ttgcaggtttatattctacttcgtttttcccttacaagcatttttttttatcaaattatgatcatccgtattcagaacacataaggacatttgacttattctttttaagttggtaggactatagcgcaagcatgaaagcttgtaaattgtaatattcaaatttgcattatattttattactaaaattaataatataaggctatgtcgttactgcttaataattataatattaataattataacaactgtgttgacttagctaggcaactacagcaagattaacatgaggaaccatgcaaattggcattttaattctgttcgtgtaatgaacagtttgaggaatcataatatccactatatagtccattaaaacttccaaactagtagttgggattttctttttgtgaacaataataattggaagatttcttttatgtgtatgttggagatactatgtttgttatatgttctttttttttttttttctaaagctgcatcaattattacgttaatctttctttccagaaattctggaccctgaagtgactattacttgtttg

SEQ ID NO: 16446 - DNA, 621 bp, Glycine max
  Intron number 2 from transcript Glyma02g12170.1 (locus Gly ma02g12170) derived from phytozome v7.0 (chr-ID Gm02; pos 10414673 to 10415293 reverse strand)
ccctcatcccatcaggaggtaattgtttgtttgttatttagtggaatgaatcttgtaagaaaaaatgtagcatttgagagaatcagttcttagtttgggaacgttagttttaggtaattggttgttttttggatatcattttgtgtcactggctttgccggcggtggtgactaatatctgttggagaatctgtctgatcagctttagtgggatcttatctcccacttcaaacccaagactttgcttaaggaatctaaatccaggttcatagatgtaaaaagtataaagttctattcttcaattttatccttgcctcatcatcttttcattaggttacttgtacatgaaactatcagagcaatcagagtttgagtttgtgtatcatttcagtatattttcatttttatgggaaaaatattagatttcaatcgggttttgatgttattgaaatcactttttaagcaccattatgccttaatgatagagggttttttaaaatttatttcaatttttttggttattcttggcgttaaatcacataatatttgggcttatgttattatgttctggtatcatttgctgtaaatttgttcttgcaggaagcagctgttaagaaaaagt

SEQ ID NO: 16447 - DNA, 714 bp, Glycine max
  Intron number 1 from transcript Glyma05g10870.1 (locus Gly ma05g10870) derived from phytozome v7.0 (chr-ID Gm05; pos 11181440 to 11182153)
gccttcctccatttctccccgccctcaccgtcaacgtcatgtcccacttttcctcaacactctctctccatttcggctctttcttcttttcctcagccttctcttttcgcctcatcttctggtaccccttttcccacgtgttcttagtgtgtgtaaataagccttcgcataattgacttgattttggttaaaattgattttgaagtgatgtggtttatgtttagatgtaaaatttggtatgaattttttatccaacgcaaagttgttcgactcagaattaattcctcaacatgaaaccaaccaaactcgtgaaaatcaaatcacgttaggtggtatttaaaagtgataatcacgcacattatatttgtagcacgtgctgttatttgttcatttgtccttttacatttggtgatgctcctatgtgtggatttgccatgactttggcttgcttaactgaataaaaaataaacctttcttattcgtcgcttgtgctgagggaagctcatgaaaatgctttctatttgacatttcatttttaatcgtaaaaaactataaatgacatgctccttttttttttcttctttttcctgaaacaattgaaataagtacgggaaacaaaaaaaataaaaattctgaacccccctaatgtttattagttttcctttagtgtgttgatttggttgtttttcagggtttgtagttaactgcgtggat

SEQ ID NO: 16448 - DNA, 478 bp, Glycine max
  Intron number 3 from transcript Glyma03g14710.1 (locus Gly ma03g14710) derived from phytozome v7.0 (chr-ID Gm03; pos 18784500 to 18784977)
tatattacgcaaatcaaaagaaaagggtgctgtatatgcttcaagatttcgtattcatattgttttcaacgtccagacaatgaatatgcatcaaaagaatgacaattgatatgcatcaagatttcatattgctttttttttagtactgtatatgcaaatcaaaataaaaaactcttttttttttctgtttcttcaacttgtttttttacaacgtccattattattattattattttcttgtgttattattaaaatgttaattattaatgtgttattattatttttttgacagcatgttattattattattattgtgttaataattttttaattgttattgtgttattattattgttattttgttaatagtttttttttaaatgattttatgatatatgagtattatttttatggaaaatgctaacatgtgcccttaagacacttgttagtgtattatgtatagaaattttgtgttggc

SEQ ID NO: 16449 - DNA, 684 bp, Glycine max
  Intron number 3 from transcript Glyma02g44170.1 (locus Gly ma02g44170) derived from phytozome v7.0 (chr-ID Gm02; pos 48798172 to 48798855 reverse strand)
atttatccaagaattctgggtcacgaggcaatagggtgagtttatgcattttattttgctccctcttttctcataattaaggattccactaccttgttggtatgctaaatttgtatgctttttctgtatcaacataaaattttcttctttttcatttttttggtagagtaaactttggtgctttgatttatgtttaatgaaaatttattgtggtctttactcctcacaaagttggtttctatatatcgtaagtttcggtgcctttttgtttaattgcttgtgtattctgtgttacatatgcacttaagtttgtaaagagccaactcaagagcatttaattttttaaatccaacttttagggagaggaatgaataactatggtcgttgagacaaatcgtagtgtttcaaattttaattttgggagcatggatttgattaagagaaaaacatctgatctgtaagcctgttgattattcaatgacaataatttgaccattgatttattaagaaattctacaactcaatatgtttgccccttttgtctcatgttggttgccaatgattttccaccttaagccccattggatctacttgttcagacatttaatttgatactataggagccgttgatgaattccagtcccatttttatgtgatccagggttgtggaaagtgtaggagagg

SEQ ID NO: 16450 - DNA, 381 bp, Glycine max
  Intron number 3 from transcript Glyma05g13870.1 (locus Gly ma05g13870) derived from phytozome v7.0 (chr-ID Gm05; pos 14484308 to 14484688 reverse strand)
accatccagacatatatcctattaaggcaactcaggtgagtttattttttattttttttctttgcctaatgcctaagtagattttgatgttttaatttatttttcgtcacctcaaattacatcagtaataatgttggggttagtagggaaatagtggttgacccaaagcaaaagaaatgtttatttttttgagtcgatgagtgaatgctaagatgcgcttctgattagttgcagacttgcagtgccactgcattattaactgcaatatgagatatgaacatactttcttacgtttagaagctactaatatatatttaacctcacatctctcttgtgtggaaaataggttccccgggcatctgctagtgctgttgcatttgg

SEQ ID NO: 16451 - DNA, 859 bp, Glycine max
  Intron number 1 from transcript Glyma05g27760.1 (locus Gly ma05g27760) derived from phytozome v7.0 (chr-ID Gm05; pos 33645463 to 33646321)
cagcagctgcaagaggccaggttgaggtgaggcacattacttaagagtagagtgtgtttgttttatctcaattccactttccaaggcacgtttgaacaccaattcctctctcatggattgttggcgttcaacatgagtaaatggaagttcaaacacagccttagtagttggtgcatgttttggttttggtgaaaaagtcccaaattatggtttgggtgaaagtaacttatgcctaaatcatggtttggagattctcaaaggaaaaccaaacacactttgaatgtgctagtagaaaattcagaagccctacgtgtttaatggtattgttatacttagaagtcctaaggacatagatattagatccttaataaattatggaaaagcctggtttattttatggatcactggaatgcccttttttcttcatttgaccagggaggcttaataactacataagtggagtataaaaaatgtttatagatactacagaacatctagttcgttgagttatcaagcttcgcaatagatcaggctcctcaaagatgaatctgaaatataaaatatttagtgaactgctcagatagtactacacacaattgtgtgaattcctctttctgtgattctcaatgctttattccaattggctccttttggcacctgactcggggtgcaaaccttggagtcttgtataagagactaaaatcagagttaaatgttaaatatttctgggggcagttgatgctacaaatgttttgtatgtccaaatttttttgcatcttcttcgtggttaataaattattgttacttattttcattattttaatgatgatgtaggtggtgagaaatctaattgaatcct

SEQ ID NO: 16452 - DNA, 692 bp, Glycine max
  Intron number 1 from transcript Glyma02g06160.1 (locus Gly ma02g06160) derived from phytozome v7.0 (chr-ID Gm02; pos 4922785 to 4923476 reverse strand)
aagaagaagaagactggtatgaatgaatgcgatcgtgctcttaatgtttacactttaccgtctggttctgaatgtttgattaaatgcatgatccgttagtgtatcgaacttgtttttatttttgagttttttaagtttttgcagtttagtgttagtgtgtgattttagtttcgccgttgaagcgaagattttcttagaagtaacgggaactatggttctgcttctggttatttcataagaactagagttattgttcaattcaaatattcgatggtttatttctctgataaaattcctttttctttttacagaaaaatttgaagatgctgcgttttttcttttttttttaagttttaatcttactcccctcccctgactaaaacagggatggtaaatggtaattatggtttcgtcgattaaacggtgaattctttggattttcagatatatttggtatatggacttttttttgtatatgccaaatgctttttgtctgcttttcaatatttttgtgcgtgcttgtagaagttcttcgttgcgtgattttgttttctttatacctattatttgatctttggtttctatatatatttaaatttactgagattggaattcgattattgcaatgatgtaattgtgttctttcataatctgtaggtcaccggtggaaactcactcattttctggagact

SEQ ID NO: 16453 - DNA, 502 bp, Glycine max
  Intron number 1 from transcript Glyma05g26410.1 (locus Gly ma05g26410) derived from phytozome v7.0 (chr-ID Gm05; pos 32386757 to 32387258 reverse strand)
cactcttcttgccctacttgcaggcacctcctcaagtcaaatgattctcttcactccttacagtaggcatcctctactatatggtaacaaagctctttcactgaatattcaaggcagttacatatttagaacgcagttacatatttagaatttaaaatcaagacctttgattaagttagaacaatttaacttaattgatctatgtgtttaatgttttgtgatggcattgtttaaatagttattagttgtttctagtatatctatctctaagccttgtatatatgtaaaattataatgcaggatatatatatatatatatatatatatatatatatatatatatatatatatatatatatatatatatatatatatatatatatatatatattcccctatattttctctcttatatatatatatatatatatatacattatgatggcacaacttatttgtgtaaaaaagattgaggtgtaatttgagtaaaatttcaatttga

SEQ ID NO: 16454 - DNA, 973 bp, Glycine max
  Intron number 1 from transcript Glyma03g39610.1 (locus Gly ma03g39610) derived from phytozome v7.0 (chr-ID Gm03; pos 45623311 to 45624283 reverse strand)
caaattgcccaaaacgcgcttcagtcagtgcattggtatgttttctttattcattgtttatacaattatacaccccccctcactcaccatttcgaacaattattattgatgaaataaattgcctttttttaaattaataaaaatattcaatcaaacatgtacgatactgaaaaagttgcgttttgaacgctagacaacactcttttatggttctattattaaacctctgttaacatttcttttcttttactgtatttatgtatatatgatgagtattatcaaatacgtatttacttaagctatttggtatggattaattgtttttggataatttctttttcttatatttattttacacttgaattggtctttctattatttcatcaaatgttgcatcattatctaccatattatttccctattcagattggtgtaagcagataagtgtgcatattataatgaaactgtgagagttgttatcgtttagtgaaattaaataattaagaatggtttaaaaaatgtgacatctactcctactttgttcggtgggttcatctggtcatcatcgtatatttctcctttttttttataagtcatatctataagcttattactttatataagtcactttatagttaaatatttttaaatttatctttattctctaattatatcatgtttaagtacttttactttttttcttataattttttaacttccacttttctaaaaagaaaaataagatggaaagaggaattataatagaattagtgaacttttaaataataaaagtaatttaaaaatgttttaataaacaaatttttaatcattgtgaattaattaaaaatgactaataataagaaaaataaaaagtactagcaattagggcaggatactgatttgcatggcttatgctaccccaagaattaattaattaattacctttcctaaaactaaataatgatatataggc

SEQ ID NO: 16455 - DNA, 1048 bp, Glycine max
  Intron number 1 from transcript Glyma02g14890.1 (locus Gly ma02g14890) derived from phytozome v7.0 (chr-ID Gm02; pos 13424137 to 13425184)
ccgaagaacctgtttttgtttctggagctgaccaggtttgtttaaatctaattctgattattatctccttttttttgtctgtttttctgacacatataaagtggtttttagtactgtgaaaagggagagagatagagaccaagaaggatattgggggaagttgttaagagggattacaacaacaataaagtcttatcccactatcatggatcacactacgccattcggtacggttgaaagccaaagcttaggaatattatttagcccgagatctcccttgacagcttcttccaacgttgtttttggtctccagtgttgttaagagggattgcatggtaattaatatacctgaaaatctggtatttaaaccaagttgaatggtgttgtgacagtttagcttacctcacaacctagtgggaaaaggcttttttgttgttgtggtggtggtgtgtatgtcgtctagcttggtcactttgttcccaagggtgttgaagaattactttggggggcttttgtttcacttcatcttcttttgttcccaagaatatgagggtgggaatgtttatatgtttgttagaaagttatgacaatatattccctagtttattttatttctaggtataatattcatgggaatgtgattcctggaaatgcaaaattatatcgtgaaacaaatgccccctttgttattgttatttttgtcttgtctttagggggtggtgtgtgtgtgtgtgtgggggggggggggaggggggaatggatggatttgtttcctctcctgttagttgttgaataacagggtcctacaactgatcatggtggatctttgtttggtaaagtttggtctttctttctttaacaacaccttatcttgttattcaatccaaatccctttgtgggcactttgctttgatgcttagtaggccaagaaggaattcataaacctccttatagttttccttataattacaaagtccctgtaattcttcttgtccatctaaagtttttggttcattcaaatgcaggagtggaagtcgtgttcggtggg

SEQ ID NO: 16456 - DNA, 613 bp, Glycine max
  Intron number 1 from transcript Glyma02g40820.4 (locus Gly ma02g40820) derived from phytozome v7.0 (chr-ID Gm02; pos 46038503 to 46039115)
attccctacttttaagtaagggaatgtgtatttcctctggtctctggtctgaaatataagaaaaaaaaacatattaattatgaaaattagttaatcatatttaattgcatcaattttaataaaacaaatatttttttcctcaacttacccttcattgaaactttgtatcaaggataagaaacattgaaactaacatctcatttaaatgaagagtattttagagatagtaattgaaaccaacacctcatttaaatgaagggtattttagagatagtagcattagataaggtaaggttagttgaaattttcttatatttgagaacaagaaaaatatgttttttttttctttttatatttgtgactctgggctagtgttttggaaaaaagttgttgaattgtttgaatagtaaataaattaagggaggaagatgtaatatttcaaacaacaaaggcagaggtaaacataaaaaatgaaaatacaatacactttcaacagtaacctagaattttcaatttgtgttgtattaatttctatggtgtttgtgtttatctgttgggacaatctttatcttgctcgttacattgtttgttcgtggatactgcattgcaggag

SEQ ID NO: 16457 - DNA, 976 bp, Glycine max
  Intron number 1 from transcript Glyma01g30530.2 (locus Gly ma01g30530) derived from phytozome v7.0 (chr-ID Gm01; pos 41215931 to 41216906 reverse strand)
gttctcaaaggtggcagctagggattttaacgagggtaagccacatttaaattttccttaattatatattttcatgaagtattttaaagataataccaataaatgctttcaaaacagtgcttactgtttaaagattagagatattaaggggatttgtgggtttgcaacgtgtatcgatgtctcaggacatagaatactcgatgtaagtacttcttcatctaagtgggtgcaccttgtactacacttagtttgttaatcatcattggtttataaaaaaaatgctttcaaaacactagttaaacatttaaaaatataattaatttatgaaaaaatcatattactaatatattttaatttgttcttaacttttataattttttaatgtcttaaacattgtttgtccttttgtagttatacatttttttaaatggtccttctaaaattttcttttttttgctttggttcttactattttgttctagaccttgtaatatttctagttttctatgttgttgtaatacctaaaaaaattggttttagtttctatctatttttttctttacaggaactaattcaaaatcaacaaaatattacacaggctaaaaaataagatatatgacaagagttaaaacaaaataatatgataggaaaaatgaaaaaaaaaataaaaataccatttggaaaacaattgcaggaacaaaaaaaaaagcctaattgaagaaactaacaagatatttaaccctttttattatttacaaactgaaactgtgaatttaaaggattcgttggatcataaaggaaggacttaatcccctgccggcattttgtatcttatcatttaaccttttcatacttcaatatttatgttcactttaattattatatatcgttttaattttatcctcaatcacatttatgattttctttctatggtaaatggttcatgtgtttgcaggtgaggttgtcaaagagacta

SEQ ID NO: 16458 - DNA, 1052 bp, Glycine max
  Intron number 1 from transcript Glyma01g04920.1 (locus Gly ma01g04920) derived from phytozome v7.0 (chr-ID Gm01; pos 4594464 to 4595515 reverse strand)
ttcattagagcaagtgctggaacctgacgttagaggtttgtttcttccttttgtttttcatgcaagtgaagtgagtgcttcgtgcttaagcattggttctccatccctaataattgattagctgcataataattaaaaatgattttaggacaaaacgtagatatgcgttcttttgattatgttaggctgtgtttgattttgcaacgttcaacaccaaagttttgtctctgtaaaattacgtttgaacgtgtcttgaaatgcgagatttgtttaaaacaaacagatacttggtggtcgatcggaatttttggagtctcactttttaataaattttaacctttaatatttaatacatatctttattacactgattaaggacttgtttgtataaacctctttgaaaggaagtctaagagaagtaaataagatagaaaatgaagaaaagaacttttcaataaactaaaatttatttatgcatagttaaaaataagcttttgaataagttaatatgagaaaatttctacaaattagcttatgtttgagctaaatttagcttatgaagaaacttttttattttttttattttcttaccctagaaataatatggagaagtttatcaaaatagactgtaaccatatgaaactctaaatgttgattaataaacaacactaaaagtacttaagcagcgatgtctttaagtattatcctcaatattagagtttcatttcgataatcggtatgtttctattaaaagttaacatagaataacaaagtaaaactccaattttaattcaagaacaaaatcaaaagcacttagaaaactgtatctaagttttgtgctaattttaaatcctcctatatccttttctttttcctattaatccttgtacttgctaaataaagaaaaaagttaaatgaagtttatatttgatgcagaattgtaatagctcagtttggtctcccagtaattgtcctagtgtttgggttctactgattttttagctttgtgagatgcagaattggagagagaagagccgtgtgaggcaagtgat

SEQ ID NO: 16459 - DNA, 345 bp, Glycine max
  Intron number 4 from transcript Glyma03g30520.1 (locus Gly ma03g30520) derived from phytozome v7.0 (chr-ID Gm03; pos 38463373 to 38463717 reverse strand)
caagttctcttgttcttctaaaatttcaactaaacgtagttttcactttgaaatttgccttttcttattctatttatgacctgattaattgttttaccttgttttccttcatgaatctgtggcatatattgaatgttgtataatgcttatatcttccataccagtttctatttttaccgtggtgcaaatttagaaattttgatgagtttcttttttccaaaaatgttagtaaatcactttttaatttggcctctatgtatgcaaataaaataaggggtctctgtttaattgtaacagttcatgatttggcaattgacctattggtgcaggttgtacaacttttga

SEQ ID NO: 16460 - DNA, 908 bp, Glycine max
  Intron number 1 from transcript Glyma01g10350.1 (locus Gly ma01g10350) derived from phytozome v7.0 (chr-ID Gm01; pos 13419739 to 13420646)
ctgtaggtgttgtggaaaaggaatttcgcactgaagtaagtttcagaattgacatattctcaaagttaatatgctaattttgttaaacttgtttggataagcttcttgattaatatttatataggagaataaaataagaaggaaaaaagtttcttcagaaaactaaaattaacttatgcattagttaaaatcaactttttttcaaaaagttcattttaacttatgttaagttaattgtaggttatgggagacaatttatttcatcttttttctttttattttcttttctcataagtgcttatggagaaacttatccaaacatggtcttaatgaatgacatttcgtttgattggaagacaatattagatgtacatgatctgattaaaattgggtagttaataggatggtttgcaatcaatatcctctctctcttatatatgtatgtgtgtgtgtgtgtgtgtgtgtgtgtgtgttttgttgttttggatcttgaagaggtgtctacccactactcaatgaccgttctcaattcctatggctgagtcttgggtgaaatcaagttaacatgaaatatgttcaaatttggttggatttgatttgcttgaagggttgatccaggactaaaggagctctgtccaaaatgggtgacctgatattgaacttgatttgttgccttgaatgaaatctatgatatataaattgtaaataaactatgtttgtcatacaaatttgggcataaaatgtgggccataacaagagaaggaagaaaatgtagagatttttttacaaacatctatagctaatattgataacgtattcaacgctaaaaatgttaacactgcaatgagaactgactgatgtttgcactttcagttgtctagccttataacagaactagcatcaacagc

SEQ ID NO: 16461 - DNA, 255 bp, Glycine max
  Intron number 1 from transcript Glyma05g05490.1 (locus Gly ma05g05490) derived from phytozome v7.0 (chr-ID Gm05; pos 4822528 to 4822782)
gaggaccatctttggccttcttcttcttgttctgggtactctcttctttctctgtttcgttctgtactctgtttggctgccataaagaaaaaagaaggcagaaacaaataccctaatacatcttctctactgtaaattttttaatgttttgctggttgttattggttgctgaaaggatgagtttttgactttgtggttgaagagtgtaggaaataacttgagttttgttctgtgtttcttcaggtttgtttaaat

SEQ ID NO: 16462 - DNA, 1052 bp, Glycine max
  Intron number 1 from transcript Glyma02g08650.1 (locus Gly ma02g08650) derived from phytozome v7.0 (chr-ID Gm02; pos 6736696 to 6737747 reverse strand)
tgaggaaaacacttgtgaggacacttgttggccaagtaagacaacatgtgcaaacattttactataaggaaacaagtttttttttatttgaactttttaaattaatttgaatgcattcacaatgtttttcttactactatttaattatattgtcttttatgataagattttaacttttgtaatatacttacttcaaaagtcatacttaggaattagttgaaggtgtaaaaatctttatagtgattggtgtatcagaattaaatttggatctttttgtgcttgaaaatgtttgtctgtcacattgtttactcttttatctttgttcgtttctgttgggtgaagttctcaatgttgttttgggccttttattggttatggctttagttttggagaatatggtctttggcataatcgtcaattaatgcctggtgtgatgacaaatacttggggagagacggcaatggagtccctattttcagttagttgaagaaaatattggttaatctttgatacgagtatgtggtgtcaatgaaaaaggactccgctgccaatttgctccatataatatatggtttaaataatgtattgttccaagccaacattctattattttttaattgtttttagtttctaatgtgtttctagttccgtccctagttaattacaactctgggctaagtatttggtcacttgacattaaatggttgaatagtgcctcaattattgtttgctgtgcatgattttgcaagtgcttaaaattggcatcttggtgctctaataaagtatctaccccctattttcatgcatatataaattggaaaatggagtcatcaatctggatatagctaaaatatatgaagaaaacaatgaatctattttgttacacaaaagttagcttaagaaaacaatattgaatctattttgttacacaaaatgtgccaattcttgctacactagtgaaaagttcttcctattttttttcttccctctaattattttaaagcacttgaattgcagcttggccggcaagcagaaactatcattctcccttt

SEQ ID NO: 16463 - DNA, 721 bp, Glycine max
  Intron number 2 from transcript Glyma03g04670.1 (locus Gly ma03g04670) derived from phytozome v7.0 (chr-ID Gm03; pos 4852413 to 4853133 reverse strand)
tattggcggttgcagctcgtgactccgtggttacagtgagtaataattaataacactataacattactaggtactaagtacttaatttataaccccaaatgttttatgagtttaatttttaatgtttatcaatatatatactccaatattttttttctatggttaacgttatgatttgaatcagtcggtggtgaattttattttataatcggaatcgagtagtattaattattacgatatcaaatattactatacggggaagatgaaatgcatttgtcttcgtaaaactatgactagacaaaagtcaaataaatgtagtatagtagtgctacgaaacgtaatactataatgttattatctagtgactcagcgactcaagttggaatattatttagatgatatatatttacaacaggagtaatctcaaccacctataaatatatatggtcacaaaagttttattcgtgaactatatttaggtcagaaaagctggtggggttattatgagtgctatttggggttaattaagaaattaaaaattacttttttttcctattacaaccatgcaatatttatcattaacgtgcttcgtctcaatgcttaatgccttaatgaatcattaattattagtatatatattgttttaattgatctttttatttattaattgtgaatatgaatttacatgttcattctgcattatgcagttaggtgggccaac

SEQ ID NO: 16464 - DNA, 907 bp, Glycine max
  Intron number 2 from transcript Glyma03g34850.2 (locus Gly ma03g34850) derived from phytozome v7.0 (chr-ID Gm03; pos 42146457 to 42147363 reverse strand)
gagttttggggtaacgccatttcttttcagccctcacttcatttcgttagcttcatcctgtctcctatgtttcgtattttcttattctgaattttccgtcttccatttcttaactgtaaaaattgtgctaatctagcacagtactcatcgttcatttttttttttcattttccggagagggagcatttctttaattttgttagaatgtgctgaactcgtgcttttgctatgtttattagataattaatcatgcatcttcgtgcatagattttttttaattaacatgtgtattttattatgtatggtaatcgtccttaggttttgtaaattttgctttctggatagtattggtgcaaatgcgatcattggttctatagttttagtcactcattactcaactcttaccaattaccatcatcaaccatgatgcttgttatatgccaccggtgccactatgtagtaattgtttgtttgttcacttcgtaagttatgtgtcgagagtttgtgaagaacttcatcgttctaccaatttttttagcgagtctttgaagtatttgaccccaatttttctatttaaagaaaatttagtatgttactttgtattaaaatttaatgttcagattttaaagatggtcgtgtcacactattaacagttgcaaaagtaattagatttgtttccctatttgggtttattcatcctggttaaagatatcttgggtaagtaatcatcagtttgtgatagaaacgcattttatgataccaaatttgcagaagaaattgtatttgttgttatattcacgaggacagaaaagttgataatctaactagcattattaaattaacattgtatgtctatttataatcctttttaggtgttgaggtgaaaagtggagaatctctcaaggtt

SEQ ID NO: 16465 - DNA, 631 bp, Glycine max
  Intron number 1 from transcript Glyma02g07620.1 (locus Gly ma02g07620) derived from phytozome v7.0 (chr-ID Gm02; pos 6007348 to 6007978 reverse strand)
cattgcatcatcgttcactcgcatcagaatcacaggtttttatttctttttctcctcttaaatataataatattaataatttagaataaatttgttattctcgtttcttgggattggattttgctgattatatccacctaacccttttgtgattgttttctggtttgtgatcagaacaatcttggatccgattgtgcgttatttgattgtctcttgtcaatttaatttcatctatttgtgatcattgatcaatatgtgtcggtctgtttattttattattttaatatatgtattgagaagaatctgtaaattgaagctttatgttttttatttggctcgtcaataatttgaacatgattttcatgtttgatcatttgatattatgattctctttatcatccgtgttatttactttttacgtacactcactgatttcatctttgaattggtgcattatatctgtgtttgtgttgctttgttgggtgttctgttctaactagacttttaggattgatgatgtagtgagttcatcacttgttagataaatttgagattgttaaatgttttatggccgtggaatctttcgattgtttcaggttcagtttctgtggattgttgtaaaaaatttcct

SEQ ID NO: 16466 - DNA, 539 bp, Glycine max
  Intron number 2 from transcript Glyma02g10750.1 (locus Gly ma02g10750) derived from phytozome v7.0 (chr-ID Gm02; pos 8647327 to 8647865 reverse strand)
ccgaaaaacaaaaggtcagaggtgtattgtaattctcttttgaatgagattcgattgaactttgtttttcttgtcttgtaaatggagtcaacttcgcatgcatgcctcaagctctggttttgtttgttgtgactttttttacctgtggcaattagtctaatttgattcttggagatggtatatgactttccatgttcctttattaaattagtggctagttcggatttgtccaacaacattatttgtcaattccaaaagagttcaattcatggtatcattcttgttcctcaataggtagatgagtgctatgatttgtttctggacctgagtgtcaaaaatagcattggggattccttttttaaacaggcttctacttttgttctttgttaataaatgggtcatgaccatcaggtgtacattgttttaacaattttctgctttctgtaaaccatagatcatcactggtgactgatttgcttattaatctggccattgagctcataggttgtggataagttgcaatctgatagtaaatctaa

SEQ ID NO: 16467 - DNA, 342 bp, Glycine max
  Intron number 3 from transcript Glyma01g01180.3 (locus Gly ma01g01180) derived from phytozome v7.0 (chr-ID Gm01; pos 830418 to 830759 reverse strand)
gaacttcaggcaagctttttcaactcatcatatatagttttattacacagcatgagattatttttgattaagtttgtctttttcatgatgttactaaggttgtcttctttagtctgtgatggatggaagtggcatataattaattgcaaatattttatactaattctctttctttcacccattatctcttcttttctccttttattatggttccttgaactaaaaaatagaacctaaagactccgatgccattgaattttatcaagggaacatggaaaatattgttcctctagttctgaaaattgaaaagtgaaacatgttgtgctggtacgcaggagacaa

SEQ ID NO: 16468 - DNA, 453 bp, Glycine max
  Intron number 1 from transcript Glyma01g01180.3 (locus Gly ma01g01180) derived from phytozome v7.0 (chr-ID Gm01; pos 831035 to 831487 reverse strand)
gaatttctcagttgccaggtttcataatttgcattctttatcagtttttctgagcttctcacaacttcaatcagttatacacgagattagactagactatgagattgtttaaagaagtggttaattagcagaagttgaacttgttgactttaataaaatttctgaccgtctctactcaaaacttccatgtataacataggaagttacatgagcgagcttctacaaaagttaaatgtataagttgattttagcttacgaaagaagaattaagtcgtttgaatttcttcttttgaagtttttatggagacatttactcaggataatatatcatataggaatggtaatgattagttaatatttgatcattttttagttagctgaaactgtgtctgagtttctataagagtttgtgctgcagtgggtattgtttgcttagagatccgcaatacaaca

SEQ ID NO: 16469 - DNA, 884 bp, Glycine max
  Intron number 3 from transcript Glyma02g06980.2 (locus Gly ma02g06980) derived from phytozome v7.0 (chr-ID Gm02; pos 5605824 to 5606707)
tctgcgaaaaatcgtcactgaggtgagtgtcaaaaccggcttttatgtcaacccgcttttgtgttactccctcggtaccagattatacgatgttttagagattttttttggttaaattaattttttccctctaatttattatttaggtttgatttgttcctctaattttttttttttcaatttcttcctttctttcgtctaaattaaattgggaaatgtgtcttttttcacggtttaaaattacttagtgacagttttaagctgccacaaactacaatttcttaatatcattgacctaattttgatggtaggatcaaattgaatcatttttaaaaaattaacaatcaaattgaatctaaaaaataaactagagcactaaaagattaatttaaccaattttttttaacaaaaccaatgctgcattaaatactttttttttttttttgaagactatccttaatcaatacttagtgggaataatatataggaagagtaaatgagtcattagtaagtaaaggggatatttttttgacagtacgataaaggtatattaggaagttacataatgttttctttgaaattcaacaaattaattgcattccttaatacccgtgtcaaaaccttaaatgtcatataatctagaacggagggagtactttgttgcagatattagtttcgtgttgtttttggtggcgcagatggttttgctcactgtcaagagtgaatttgttcaacacgtggttgtcaacgctcttgtcttagtttcaaagtttttgtacacaatggtatgaatgaggaagttagtttccttggtgagtttagattacacatttgaagctactatgtgattctctgtaataatgatttgcaggggaacaattggg

SEQ ID NO: 16470 - DNA, 679 bp, Glycine max
  Intron number 2 from transcript Glyma02g06470.1 (locus Gly ma02g06470) derived from phytozome v7.0 (chr-ID Gm02; pos 5154800 to 5155478 reverse strand)
cagagagtatgtttataactgatttatgcatggattgcaatgaaatttcttttgcatgttgtgaaaaatgattttttttatttattggaagcagtttgttctccaaacataagtttatattttactgttttccccttctttttcgtatttcttggtaaactggtatcatgtaaagagagcaggtccttaactgctactaatgataaagcaatcacaaaattgataattttgttatccaaaacttcaatatcatgaagtcacattaacaaatttgctagacattgaaatttctcaactatgtgtagagtaattgtatgatttattaagcaatgcagccagccatgaagcctttccacactgtggattgtggggttggcgtcatggattagttgcactttgctgatatgttttataattaagaagagttaaattttattaggtgacatttagggttggctacctttctaagaccagaaaaaattgaacttggtgacattattgctataaattgtatttgactgaagttgatcatgcttgtgaatatttcgatgcgtgattgcaattcagtcattgcttcattacttattttccccaaaagtagactgttgcatggttgaattaggcctacttttgctgtgctcttgatctgtttgcaatttctttggtttggttaggtaca

SEQ ID NO: 16471 - DNA, 661 bp, Glycine max
  Intron number 1 from transcript Glyma03g38630.1 (locus Gly ma03g38630) derived from phytozome v7.0 (chr-ID Gm03; pos 44933719 to 44934379 reverse strand)
tcttcaagacctctgtgtcgcagaccttgcttcaggttctattctcacatcacacttttctcttttcctttgatcttgatgatgcacactttcatgcatacttccacttttccccttaatcattagatttcatcctttctatttcattattctttaatccaactcactctcttaaacctaccaactactttaattctgctttttaatgactcaaaaagtttaatcatatagtacaggacccccaccatataattaacttttctcccccctcccctgtatggctgtaattgaaacaccaccacataaacactgtacttttccaattcaaataaacttattaccaaatcccacgaatcattgcatatttttgtagcatgatttgtacactaaacttttaattcagagataattcaacgggtgaatttttcttagaatttaatagacagaacaaaatccttttaacatctgaaataataaaaaatcatcttcaatttaatttatgtttgaagtaattattataaaaattaataagattatgttacataataatttataattgaatgataacgctattactacatattctaatttttttttatgcaattatttctgattgttggtgggttgtaaattgtgatggtaccaacagcggttaaagtga

SEQ ID NO: 16472 - DNA, 546 bp, Glycine max
  Intron number 2 from transcript Glyma02g17470.4 (locus Gly ma02g17470) derived from phytozome v7.0 (chr-ID Gm02; pos 15723094 to 15723639)
tcgaaaccgctaaacaactttgcatcaacaaatccgtaattctgtttttcttcctctttccatgccttttcgttaatctcttaatccttcttctgcatgtttgtttttcacgtttaactttaccggttaacgtgattttaggtaaattttcgtatgcatgactccacattaaggaattaattatgtgtccataattgcttctcaattgaagtgactccttcgaatgaaaaattgatttttactattgacttacttctataataaaacatctttacttttgataaaatatatttttgttctataataaattaacaatttttgttttaaggaaatgcgacttctaaagactaaaaaatcggtagtatttattttaaaatttaaattacaaatttgaatggttaaaaaaattattagaaactaaaactaaaaacaaaatttgataatttattaggaagcagctaaaaaaatattctaacccaaatcatattccttttaaaattagttttatgaacgttctttaaaacatacatgatttttgccaggtaa

SEQ ID NO: 16473 - DNA, 694 bp, Glycine max
  Intron number 1 from transcript Glyma05g04730.1 (locus Gly ma05g04730) derived from phytozome v7.0 (chr-ID Gm05; pos 3911120 to 3911813 reverse strand)
acaagccgtcggcaaaagtatcaggtatggtttaatttagtcttttccatttttgtgtttcctttcaaattctgtagtttgttgtatcagatttatgtgtccatttcagaagactagaacattggaaaaaataatgtaacatgacatgaattatgcaaatttatctttcctctaaatgaataattgtagtaaatttttgcttatgttctcattgttattgaatgttggttaccttatgtactttaagccaagcattgttaatgaccatgctgataatgaccatatttctctttcatcaccccatctctgtattttttcatgtctgtgcccctgttactgatggtctctgcttattgcatatgatggctttcttcttccttgttagttgtatactttattaatttacatttgagctgccctgttcttgtttttgctggcagtgtccttgcacggcaaaggtagtactgaacttctggtgaatatctgaaatgttttgtaattgttcactaatttttcctgtcctgttttagagttacgcaatcttttggtggtagaattgttgaatatagtatatgcaaatgcaaattatgtcttagttgctttacaattgtaacatgcatctcctgctgcttaacatttattcagatgtttctggctttcgcacctttttgatgattgattaattttgtaggtg

SEQ ID NO: 16474 - DNA, 710 bp, Glycine max
  Intron number 3 from transcript Glyma01g01850.1 (locus Gly ma01g01850) derived from phytozome v7.0 (chr-ID Gm01; pos 1410586 to 1411295)
aaggtacgctgaaactttattattactcaccatgcttcttcttcaatctcagcttccattaaaaaacgtttactttgacgatataattataataataataataaatccaaaccctaaacggtagtacaagctcttaattccacccatttatttgaacgtctctcactacatattactaccagcacgtttcccaatgaaaccgcgtttgcattaaaactttcctatgccctaataaaaacagctacacagcccgtgagagataaaatatcaagaaaaatagattaaaaaaatagtaccaatgaccagtaaataaaaaaaaaaaaaaaagaggaagagtggaagactctcatttacttgtggttcttggtatgtccatcatatacactctgtattccattaatgtacgcattaaaccctacctgtcacaagtggtctcaaaccgtactcatatttattgctattatcattaaggtttttattagggtttgaataagtgtgttctattcctccttgcttcataaatttttaaagcatttatgttttaggattacacgaattatattcatcatcattactatacatgttgctatgttataacattaggaaacatacggaagaacctttagactttttttgtattaaccattaatttgtgtttgatttttttaatgtgggccgggaaataggcacaacaagaccgggcagataat

SEQ ID NO: 16475 - DNA, 719 bp, Glycine max
  Intron number 2 from transcript Glyma02g44800.1 (locus Gly ma02g44800) derived from phytozome v7.0 (chr-ID Gm02; pos 49248063 to 49248781)
agaaggtacacctctctctctcactcactcttcgtcattcactgaccagacaattatcgcagatgtgattactgaataaggtcttatccatgtgaatctctcataatcttccaaatgtaaagaaatctggtcaatcttatcttaattaactcaactgtactcttggtataatgtatctgcatattgaagttgcactttggagcccatttttgcatgttcattgatccttttagactttagtggtttgggtttgattaattggtgttattcttcttcctctaatgggaagataacccccctttgcagggttgcgtttgctctctttactatgacattcttttgaattattgctagtccttgttattagtaccttctggtgtatactattattgccaagaaatgttgcatgcttggtgttttggccctttgattttaggtagcctctggcaattggcatacagccttacactggttagtaagcgcttgtctggttcttgagtgataaattaagaacccatgagttgctgctgtctgtcatggcaaaccatgtagaacgcttaacctgtggtttttttgcgtgatgaggcttacttgttcttctaattaacttcgtaagatttttttctttctgtggaatgaatgcaaaagatatatttttaatctctcaaatgttttctcacttagaatcttgaattggagaataagcgaaggagatcagc

SEQ ID NO: 16476 - DNA, 417 bp, Glycine max
  Intron number 2 from transcript Glyma05g16070.1 (locus Gly ma05g16070) derived from phytozome v7.0 (chr-ID Gm05; pos 17879141 to 17879557 reverse strand)
acgtgcgactgcggtgaacaacaacaacaaataaggtctcgaattttaaattaaattttaattaatttgaagttcaaaaaaagggaaaaggaaaaggccaaaaaaaagaaaagaaaagaaaagaaagtgcttacaatcgtttcaaatctttaatggttcggttttgtttgaattcaaaacaattaaaaaggtgtgattgagtgagtttatcgtatggtatgtgtaagtcatcatcatgattattgttccttctgttaaaaaaaaaaactaattctgtaactctctgacatgcatgtatatcaattatgcgcatatatatatcatatgcatcatcataaatatctctgcattattattacacattctgaaaattaaccagaaaaaaacattgtgttgttgtgttctttcaggagagag

SEQ ID NO: 16477 - DNA, 1019 bp, Glycine max
  Intron number 4 from transcript Glyma04g32460.1 (locus Gly ma04g32460) derived from phytozome v7.0 (chr-ID Gm04; pos 37241675 to 37242693 reverse strand)
caagataagcagggttttgtacaaattgaattctggtaatttttttatgagcttaaatctctgaacataaatttgtaatggatgttcccaaaatattatttacctagataattgggatgaaaatagcagatgaagatgatatgtgtatactgcttgtccaagggtgaatttgaatgtaacttgtaatattaggtctaaaatatgaaaaaaatggctcatattttaaatgtctagtacaagttttgggtgttggttgacacgcagatgcccagttttgggtgttggttgacacgcagatgcccagttttgggtgtggggtctgttaaaatatctcacattgtttaggaatattgtcagaatactttggtaattcttcaatcttgagctttcttttgggttcacatatgccaagtccatttttaatatagtatcagactctatccagtttaatgttaagccacctatatatgtcaagtccaaccaacttcactctctagatgttcgtctacggtgtgaagggtgtgttaagatttctcacattggctagaaatatgaacagatttctccttagaaggcatgtggaaatggcaattcttctcgcttgaactactttggtggttgagctatgcccggttcatttctaatggcagtgttgctcaccatttttttttgttttttgtattctgagttttattacttttagcataggtataaacttatttgagttctcattttgttgaccttttgttattacttatttgtatcagcttaagactatgacttttgaatattaattatgaatatatcttaaatttggatactttttttaagcatttttatgtgcagtataaaatatttaatttttatttaaaatcttcagaatagtggccatcccactatcaactatctcactaatgtgtttttggggttgaccgctactatccgaaattgataactacggtgtacggttctgattatatacatgtttactacaacagggcctgataaagagacaaaat

SEQ ID NO: 16478 - DNA, 769 bp, Glycine max
  Intron number 3 from transcript Glyma03g33560.1 (locus Gly ma03g33560) derived from phytozome v7.0 (chr-ID Gm03; pos 41094666 to 41095434 reverse strand)
ctatcaaaattcaaacagcttttcgtggatacttggtacgggttgcaattttgattcaaagcaatataaattaattaattatcccccccttccttttttcacaattcattttttttggttagttttcacaattcatttaactcaacattcaatgagagtcattttactttttttaaaaaatcctacacaaaactcccttgtatttattagagatgatacaattaactctagaatgccaattatcaagcagaaaagagttgttaaaggacaaaacttagatattgttccataagtgcttttggtgtcgttcttcaatcagaattggaattttgccttggtaatctatgttgacctttgatgcaaacctttattatgagcaccccaaaaagtatgtaagaaaatgcgtctaagtttttttcctttttgaaattgggccattaactcattgttttgtaatcaaatgccattcatattcttatggagccttaaaaaagaacatatttgtttagtgcaactccacctttaattgatttaaagttttactgtaacagtagattaaattttaactctttaaagttatcaaaacaaaaaaattaactttttaaatttgaatccatacaatatctttgttaaatgtactctttatacacagttattatgctatctatcaataattgccacaaaaggaattgttatttgaatttcaacctacactttcttttgcaatcttttaggcaagaagagcattgcgggctttaagggggctggt

SEQ ID NO: 16479 - DNA, 727 bp, Glycine max
  Intron number 1 from transcript Glyma03g33560.1 (locus Gly ma03g33560) derived from phytozome v7.0 (chr-ID Gm03; pos 41095987 to 41096713 reverse strand)
acatacttgagatctgtcactttgtttgagttcaggtacctctctcatcttacttcttcattgggctctaaatttttttaacctcatctttgctctgtttgttatatgatatcccatctcccactttcactcattctctctattctctggaatttcctctcttattctcttgagttacctcttcaatttcttatctttttttttttcatttggtgaaaaccttctaacttcaactttggctaaaagacctgttccagctgattaaaccacttgaatatgaattctcgtgtgtcaattctatgtgcaaatgcaaaggggagaaattatttgactacttttcttttttgtttttgactttcggtgcactaggtctagaaaatatagatgtggtgtttgtttttccaaaagcgtgatttacgtccatttatgtggtacccagatagaattaatgtagaattgatatacaactaggattattaggaatttggatggatttttagcataaagctttttcttttttacctctatttccccattatgtgcacgatatgtcttggagaagcttactgttcttttccatcttatgttttttagacggaagaaataattatgttgtattacagaattattgagactctttgcttttgcctgtcaagtttggtagtgctaattatgacatttaataaatcatcaaaaataaaatgatgacatttaataatatcacagg

SEQ ID NO: 16480 - DNA, 493 bp, Glycine max
  Intron number 2 from transcript Glyma02g22730.2 (locus Gly ma02g22730) derived from phytozome v7.0 (chr-ID Gm02; pos 21932114 to 21932606 reverse strand)
aggtttgtcattattatttctcttactgttttttgttgtatggcctttgattgtaattattttatgtcctgtctattctaaagttcaaattcagttctgaagtctaatctgtcaatactgctatgttcttgggtgaattactctatgtggattctgtcgtgggatctttgtcaattactagtgaatcatgtttgaagttagactctaagcagaaagaataataaagatcccacaacttacagtctaacatcaaacatgattcttaatacttctcctaattgttgatttaggagtagcatgaaaagtaagcaaacttccatgtgtataatctttatttcatgatgagaagaccatgtgtataatctttatttcatgatgagaagagtatcctatcccttcataatatacatttacttgttcttaatagttggaagatttccaaactggtcacaccaagctgatgtggttttccttgttggtatgcagaacttgt

SEQ ID NO: 16481 - DNA, 492 bp, Glycine max
  Intron number 2 from transcript Glyma02g10590.2 (locus Gly ma02g10590) derived from phytozome v7.0 (chr-ID Gm02; pos 8500579 to 8501070)
gactctgtaagattgctgaactaccgtgctcttcatgaattttatggattgtgtttttgtagttaagctcagttccgtgtttaattgttttcagaatatagtgttataattctgtcctttttcctgatatgatttttctggtaaaagcaaatttccgtacagcagtgctaaaaattttgaggactaaggtttggtgtaatatttttgagtaagagctggaaaaattctagcagttatttttttcttagaagtcttatctctcgttgttctaacttcttagcaacagtgttgttcttgatatgttgaatattaatggaattctatccttttgctttcaccagttctcatagtttcaaattgttttttttctacattttcttgttatttatatgcgtcatcaatgttttacgtcatgaaattatgtataatgcctgcttattgatgttatttctctttgcaaggaagactctggttttgtgcccctatttgtat

SEQ ID NO: 16482 - DNA, 514 bp, Glycine max
  Intron number 3 from transcript Glyma03g30200.1 (locus Gly ma03g30200) derived from phytozome v7.0 (chr-ID Gm03; pos 38150232 to 38150745)
aagacagcttcaaagaacacaccactctcaatcccgtaactttcactttccttttctctttctctattatttttttttaatcattgaaagatagaataatatctataattttattcaagtttaattataactgtacaagatatatacatagagtagaatacagatgaataataaacttcaaattatttataatttgaatttaactatatttataactaaaatttaaaatataacaacttgtaactaattttttttatcatattaatggtctaacgaatattacaaaatatattgatgacaaaaatatagctaattatctttaacaaggtcttctttcaactagttttttttctagattttgcttaaaaaattcaaacactaatcagtccttaattcgcattccttagtttaatactacataaacatcttagtactattttaatttcttatttttttttatttacaatgaaatcgtgcagaagcaaaaacttgcacttgcaaaacagttaaatct

SEQ ID NO: 16483 - DNA, 587 bp, Glycine max
  Intron number 1 from transcript Glyma02g01760.1 (locus Gly ma02g01760) derived from phytozome v7.0 (chr-ID Gm02; pos 1279259 to 1279845 reverse strand)
acaatcttcgctctcacaagcgttacctaagcgaggttacacacaccattatctaatttccccctcttttgtcgttttattattactttgtttattttattgttttaactgtaacctaccttcttaattgtttttgtttatttgtttgttctataagttagagtttttaatcattttgcaattgtttttgtgaaatggcccgtcatgggaattccgtctttcggcttttataacttttttttttttggtttcatcagctaatacatgtttgtgaatctcgatttattttatgaataattgccttttttattaagtggtattttttgtttaaacttgagggacttggcttgagggcctttttgcaaattaggcattacttgtttgcataactgagttgaatcacaatttctaaaggtgcattttttttttgttagaacttatgcttgctttgatcatatagatctttgattgaattgataccgtgtgatattacaattttcttttcatgtatgcttttgttgcaatcaaatgaaattaactatgattaaattagagtaacttaatctattgttcctgtgccccagata

SEQ ID NO: 16484 - DNA, 971 bp, Glycine max
  Intron number 2 from transcript Glyma05g00790.1 (locus Gly ma05g00790) derived from phytozome v7.0 (chr-ID Gm05; pos 437006 to 437976)
attgaaagactactcctgtgaggttaattttactggtatgcccgcttttttgtttgtttttctttgcattctacttattctttcacttgatattgtgcattttacccatgctcgactttagcgattcctttgttcagtactgttctttatggaggaacaaaatcttagtattatttagtaactgaaaatcataatcctcttctattattaatcaaattgttatagtttatgatcataatcataacttatttcaattgctggcttttgcaatttatagactgcatcattgaagtgcttctgcaaaaaaaaatataaaaaaattaacatgcatcttccttgctcagattggatggatttactaaatgctttacaaattcatgtgcttcaattgcacctttaggtgctttcacttgcatgatctcccatgatttacaaggagtatggattgtagacaatgtttagctgaaagttggtattcatgcttttcttagtttccttcatgtgaatttggtcatggatggatgtaatttttttattttttttttgccaagaatgctattttgaagccaacgctcattttaatttaatctattaagaatatgctgttctatttattgtaaattgccaaccctgattatgatgatctcaaaatcagctggcaagattttttaagatggatcttaaggggattaattggcagccactctccctcttattaagatggctagttttttcattgtgtcaagttagaagaattgttgttatactttggatcttgttctggttgatgctgagaggtgatccattaatgactcgtttgtttaaatcacatgtttactacacatttacttttaggtaaagggttttacaagcaaatggtgtagtgctcaaatttcttcctaatcatcatgtttctagtagtataatcttcttttgatcaattttcagataaggaacttgatattattgag

SEQ ID NO: 16485 - DNA, 1003 bp, Glycine max
  Intron number 2 from transcript Glyma05g07820.1 (locus Gly ma05g07820) derived from phytozome v7.0 (chr-ID Gm05; pos 7777914 to 7778916)
gtttgctaaaccaaaggttatttctttctgtccactggtatattgtatccttttccttactgataagggtttgtttgggagtggggttttgtagtgaaacacgaggttatggaaataaattaaaaagatcatgactttgactttatgttaatctatcattttgcttcttttattttaaaatatcatcaagtttgatggtatatattgaaaatgaaaaattttccctcccgtccctgtcaaaatctagctcctaaacacacccttagtgaatccatgcttgtgcctttattactgtataccaaaattttagtgtcatggttataattcaacacttttagtacatgtgtgtgggcacgtgcgtgttgctaaaaacataagagacagatacacaataataaactggaaacaatgttcgaggaagacaaagaatagagtgaaccttttattgattaataagaataccctgcatttggttaatggagtgttttgctccattaacaaactatccggggatttttgataaggaacactttgtggtaatgaagcaagaacacgtgatgccttatacgatttgttaatccttttatttatacataagctattgctgaagggtgaaaaactaaattctatttggctttttgctattttattttattttattttagaatgacactagttctgttgaagtaaaaacttattcttctttgacaatatctggcaaggaatatagcatctcctttggtaaagaaagcttcttgcctcatggtctactgccgaccatgaggcaagaagctttcttctttgacactagttctgttgaagtaaaaacttatccttcgtcaataatgattcagctgtctaattaataaactttggtctactgccgacctccttttgccacctttccccactctgtttccctcaaatttcacggcatatcatttgatttctgatacttacatatacaggtagttagtgctgtaaattgtgctagtagaggttg

SEQ ID NO: 16486 - DNA, 697 bp, Glycine max
  Intron number 2 from transcript Glyma04g01050.1 (locus Gly ma04g01050) derived from phytozome v7.0 (chr-ID Gm04; pos 626400 to 627096 reverse strand)
atttcaggtatgcattcctgtcccctccaactctcaatgaatgttctttttacatgatgtagtaacctatgaagcacggacaccccggtctcttgccgtgtccggtgtccgacaccgacaccgacacaacatcgacgcccgtgtccgggttgaatttgatgtgtttgacaggtattcacgtgtccgtgtccgtgtcgtgttcggtgtccgtgtcagtgtcggtgcttcataggtagtaactagccagtcctctagtagttacaacctattttaaggtgtttatttagaactttatacaaatatcaataaattattattccgagtaatactggacttggtcttcttaaataaattcttaaatttgagtcctgtggatgaaaaaaaatataaaaaatataattggaaggaaaaaaatctaataagattttctgatgaaaattaatcatcaataaatactccgtattaataacatgataaagaaaagaattttatccaaattacaccaatatctaaattagtcacgggcatagcattattatttttggaaaaggaatgaacaatttcctctccatttctcttggtcttgggctagcgacacgagtattcacacctctatcaattgcacatacacgttgtatttaatctcaatggatatatgattcaatgcaggagtattgtcctacagtataccgaaagc

SEQ ID NO: 16487 - DNA, 1004 bp, Glycine max
  Intron number 2 from transcript Glyma03g30130.2 (locus Gly ma03g30130) derived from phytozome v7.0 (chr-ID Gm03; pos 38078558 to 38079561)
tttgcgggaagatcgcatatcagaatccaaaggtgactgtctagaaatatctctgttagtttctggttgattttggtttagtgcttgtgaagtgataccgggtattttttgcgtgttctgaagtaatttgctttcgatgcgtatgaattgattttgcaagatgcgtgtgagaatgcaagatgacagttgtgcaataaagtatattagaaatttgtttttactagttctttcatttgtcatgtgctgaaatatgttgcagctgattttgtggtttctgttcactcttaaattttggattaggacttctagtcttctaccatatgtgccgtaataagtatgaaggttactctgtgcattataaatgatttggtatgttctgcttgaatttgatactgaaatggatatggaggttaaggtatccgcataactttcattctttgaagtattttttattttcacaatatagttaatgaaaatgcaaaacaaataaggatttggagcagtataatttgttttagatgtttctctaaaaggaagcaaaaaagcatggtcactttaaatagtagctgtacttgtatcagatgtgtatgcatgttggactcttcagaaactccttatatgttttttttacttttataattccattacaattagataaaaaatggtaatgtttcactatgtttacaatgacttatgctaactttcaaaacatcagttctctcttttgatttaagatttatgttttataaggctttgttgttgaattatttttatagtaatttctgtgtttgttaatgtttaaaatttgtcatatttctgtgtcatgtgtcatatctgtgttttgggattctttaacctttgtctggaaaagaagtgtataatgattgtatgctgtttgtcatagcatttatttcattccatcaattgatacgcgactaattactttgttctgaacatgatatgattttggatggcaaagtaggtagttggctgcctcattgaac

SEQ ID NO: 16488 - DNA, 462 bp, Glycine max
  Intron number 1 from transcript Glyma02g42240.1 (locus Gly ma02g42240) derived from phytozome v7.0 (chr-ID Gm02; pos 47314143 to 47314604 reverse strand)
ggtgagttctcaaaaaccaattttgtgatcatatccgattagtattagacaatgctgcattatttagctagccttttgattagtgagaaggagcaaaataataagaggaaagaatcatgttgcttgttttattctctatgcaaagaagggtgtttaattttttgttttgtttgtcaagctcaaatgagtcgttttgaagatttattttggtgtagagtgtatagaagtgacatcaatactgacaaacaatgaggatactacttgacttgacttgtgttcatgggtataggtaaacttttaacgggtgaaggcataacagataatgtaaatgtatcctcaagtttcttatttctttaggcccttctagagggtattcttttgttgatttattttttccatttttaatacatttgatatgttttttcagggcagaagagtactacaagcgatcagtgctagcgg

SEQ ID NO: 16489 - DNA, 661 bp, Glycine max
  Intron number 1 from transcript Glyma03g40070.1 (locus Gly ma03g40070) derived from phytozome v7.0 (chr-ID Gm03; pos 45935741 to 45936401 reverse strand)
ctgctcttcagctgaatatctcctcgatcctctaggtaagtttctttttttggtttctctgcaatgtagtaacatttttggtcttgaagtgaaaaaaagacacaagcttgattggatgcgatgataagaaaaggacaaaagtaacccttttgtgtgcttgaaaatggataatggtatgtgcatagaaaagagttctcgcaattagttagcatttgttgcctgtgctgcgctacttgccacatctgcaacaagttgcagagtaattgacttctgcactttgtagtcttcttttttggaaaaataaaataatcagaagaattcacgggaagtcggggcattcattttacctgatatttagccaactgagatggctgtatattttgttgccatatattttagacatggtgggattaagaaggttacaagtataaggattagtttccagttttagctgtccttgacataaaattgaggattttttttttcttttaaaacctttgcatttgatagttttgtttatttagctaatcatatttgcaaattgcaaaaccttgtccgtcctctatattatataagtgtgtatgatattttgactcattggtttatttgtcaaccatattttgcaggactggtcaacagctcaatttccagtaagttcgct

SEQ ID NO: 16490 - DNA, 813 bp, Glycine max
  Intron number 1 from transcript Glyma02g47810.1 (locus Gly ma02g47810) derived from phytozome v7.0 (chr-ID Gm02; pos 51282543 to 51283355 reverse strand)
ggaaggtcacccctgctacccggcagatagatcatgtgagcaactcccccccccccccccccctttggtttttataatcatcacacaattgggtttgttttgtatttgattacaagtttattaattgtggttgtgggcatcaccctttattttacaagtgcttgcaggtgtgtatgtggatcattttcaaatgaatttcgtggaggaatcactttgtctagactttatattgtgtgacttgtgaaaagattttcagacaaaattttgccgcagattttgatggatgattgtgggtgtggtttttgttttctttattcttccaatgagcaaaatttaatattgatctaagagttgaagcatttgttagccctatgtttgtaacccttacaattataggatctatgaaccgtattggcgtatcacattcaaataatttacatgttcttgagtgcacgaaatttagttgaggcaaaacgcagctttgagtaaatgttaattagaaagaaataggaatttgtgtgggtatttggtactgtttgacattggggatcaagtttgtgtaggcttttgtatatattttggaatgtggctgttgtttatttacttgtccaacaatgtgtactttatgggtttggaaaagaacttgtcatcagggtttttgatgtgatccttaaaattgtgattggttattgatttttgttcaagaagaatatgaaattgtctacttgttactttgttcattatatttattcggcttctaatcattatataagcatttttgcaggatctacccagaaccttccctggtcaccc

SEQ ID NO: 16491 - DNA, 541 bp, Glycine max
  Intron number 4 from transcript Glyma02g07260.1 (locus Gly ma02g07260) derived from phytozome v7.0 (chr-ID Gm02; pos 5767229 to 5767769)
atctcaaggttattcatgtttcttagacataatttgattagcttttgtgagtgccaaatgcgtaagctatttctttacagagatgtatatgctgtggtgatttaatggtcttgcttacaattgaggaatgttaagttctttcttttttatgggcattttgatttttcttttcttcttgattgatacccaaaggtaacggattgataatactttaattttgttgaaaatgaacagtgtaggtgaagctttgataggtttgcttttcttatggctttagcactctgaccatgtagcttataatgacaaagattaaataacagttactttcatggtagtagtgcctattctaaacttgcataaattcaacagagttgttgctaatgcctatcatgaaaatgaatgacattgttctttactgatgaacaaaggaaaatacagaatccccattttgcacaatgtaaattgaattttctatttttcccttaaatctttgtgttttatgtcaggttcgtgtttctgagtataacaatatccgcagtca

SEQ ID NO: 16492 - DNA, 857 bp, Glycine max
  Intron number 3 from transcript Glyma01g43590.1 (locus Gly ma01g43590) derived from phytozome v7.0 (chr-ID Gm01; pos 54561675 to 54562531)
actttttagcatcttcactcaagcaagagataaaggtaaaatgctctaagatttattttctcgttcattatattttctttttatataaaaaaaatcttgttattcatccattaatccattttataattaaagctcgaatgccttattttggtgtcatgttcaagtgtcaaacgacactttttcttgagaccctttttgacacataaacataagtccatacttgtccatggtcacaatgggagctagtccatataaataaaataaaaataaaaaaaaaggaactcttagaaattgagtttatttaaactttttatgtaaaatgtaatgtttagtaataaaaaaaggttgggacatgtttattacgtaacaattttattttctccaacttttttcattttatttttcaccccaccttaactgaatcagagcatgccctcttcatctgtttgtattatttttatatactaaatctagttcaattgtcgcttgtacctgtattgtacataactacttctactagggcaggttcagttaagaaattgtttagaaatgtcaataaaaagtaatgctttatattcattctctagatgagcgtctaaactagtaaattattggatcgtcttggggcttttgcacctttagtgtccatggcattgcaacttgcagttttttttgcacacgattaacttagcccgattaacctaacacttatttttctctacatgagacatattcaaaattttcatgtaattttatacatatttttcgaaattttcttgacagaagagcacacggcaactgaaattgattcctaactgatacattatcttcgatgaaacagaacttgtacaatttaa

SEQ ID NO: 16493 - DNA, 776 bp, Glycine max
  Intron number 1 from transcript Glyma05g23220.1 (locus Gly ma05g23220) derived from phytozome v7.0 (chr-ID Gm05; pos 28799389 to 28800164 reverse strand)
catgttagggccctattttctctctctcatctaaccctattcctttaaggttttaataattagatctcctgcattaggttaggtttgtttcccgaatctgtatggttttcgcgcggaagcgtgtcgcacattaggccaattttcgttcggaaagggtttgtggatttgtgagattggtctagtttcctttgatttaggattaaaaaagtttgccctcagtttttgtttttttttttctttttacttttatcttgaactgttgtgcgttcgttttttttttttttttttttttttatagttgaaatggatttgtaattttgtaattcttctcaactgaattagatttgcgcattgatttgacttctaattttgtttgactgtttcaagtgcttttattagaaatgatagataaataatttttttctctcgattatgattactaattctagttttaaatccgataatgacgttgtgtttgaattgctggatttaacctcaacggatatgtatttgcattgctatgtatcgacactttattcagattaaacgagctaagtaatattatgattttgcgtctaacgtcatcaccatattagattaagatgttagttctgatacattctctttcaaatgttgacttttctgttaagaatttcatgtagcttctttttcaggttgagattgatagatcttttctagctccacctatcttgtactttgcacgaattctatttgaatgctttgttttaatttcttgattatttctcttctcccag

SEQ ID NO: 16494 - DNA, 749 bp, Glycine max
  Intron number 2 from transcript Glyma04g00380.1 (locus Gly ma04g00380) derived from phytozome v7.0 (chr-ID Gm04; pos 168086 to 168834 reverse strand)
gatttcctacgagtgtctcaccgctctcaaaggtttctatgctaacttcttctttctcttcttcttcttcttcttcttcttcttcttctttttagggtttccattttctactctctctctaggactagtttcttcccaattcctccactctttaactttgttgtagatagatagcgtttttcttttcaacccctgtcagatcttgttactctatactgtctccccctcccatgtcttctgctatttattttagcataaaagggagggctttttttcttattatctctgcaaacccccgatttaccctaaaacatttatttgctcaaccatatcacagatgccaccgtttttctttgtattgaatggggggatttctcatctcacatacacgatactggggttctctctctattttagaatactcaaaactattaaagcattgcttgttgatgattctgatacattctcataacttagtgttccgtaaacagttttttcaaatttgaaacaggatttcatttttgtccccattgtaaacacttctgaaatattcaatttcaattttctgctgagtgattttcagggaacaagcttaattgaaaatatcgtgtcgaatttgtgtctaaaagcctatttttccaccttcttcagtctttactattattttactcacgtcatcttatttctgtggtctactataccatgtttggttttaacaatgtatgctgtcttgcgggtgcagatttgga

SEQ ID NO: 16495 - DNA, 903 bp, Glycine max
  Intron number 3 from transcript Glyma01g00720.1 (locus Gly ma01g00720) derived from phytozome v7.0 (chr-ID Gm01; pos 419519 to 420421)
atcgaatcacaaaagtacttgaaccattactttcttttttagcacattttactttgtttgcttttttcatttcattcagctcaacagtctctattgtttacaaatgtgtttgctattttagggagagggaacataaacttttctttttcacctattgttagggtttttcagccaaacgtacgatcactttaggagaaactatttcttttatacttttacagagaatatgctaattgtgtagtatagctgaggtggttcaagttaaagtgttaaactttggcttttgatcatatatatagcaaaggaaaaagacccttggggtaaaataacatctcactatttctgtcctggtaaaatatgatttcttatgaaaactatagcctttatatctagatatacttttactccattacacaaggtagtatggaagaatattaaatggtgaatttggtacagatacagtagcaaagccctggatcaagaatcatcctcaactgattatgtaacatgctagtgcctccttgttagcttcattcccgatgattttaggaatgacttatggaatttgtggtttgttgttaaaataatgtttgaattcgtattctatatcattcattcatgtaaatgtttgcaatgccaacatataatgtctttatgtcttttgctttgacatcaattgtgcgtgtctaaagggattaccacatgtggctttctaaatcagaaaatattgttcatacggtttacaatgtcacctagtgggataaggtgttgttgttgttattcatacagtttataagtttgttcattgtgattgtaccttctcattgcattgatttcattatcatttcttctttttaaactttttcagaaactgccccattgacttgaaggaagcagtttcaa

SEQ ID NO: 16496 - DNA, 336 bp, Glycine max
  Intron number 2 from transcript Glyma03g01860.1 (locus Gly ma03g01860) derived from phytozome v7.0 (chr-ID Gm03; pos 1612887 to 1613222 reverse strand)
cgacacacccctcagcagatacaagaacttgaagcgtatttccatcttcatccaccatttcaccctctttctttctttcttttcttctagcgtgtttgaaaactcattcatctgcagttaaaaatctcatctttagatgtgaagattaaaactaacgtgtttagttcaatgtaaaacataatcttaagaagtgatttttttttacttcttaatctgttttttctctcgacgtgtaaccaaacacactctatcatgttatttgaatggtggatgatgttttttgttttgtttttttatttatgaattttaggttgttcaaggagtgtcctcatccag

SEQ ID NO: 16497 - DNA, 281 bp, Glycine max
  Intron number 1 from transcript Glyma01g44480.1 (locus Gly ma01g44480) derived from phytozome v7.0 (chr-ID Gm01; pos 55152565 to 55152845)
caacaccagcaacacactgcttcaatctcaatcgggtacccttctctttttctcttcaccttttaatgttttttgtttcggtctttttagaaaaattaactagattattctttgacattgcattacatcaattgggtgatcttgggtgtggaaaaagattagatttttgcccttgcttttctatggttttgtttagagccaaatgggtatgtgtgtgcttgtgaatttattttcattgtcatatttgtgtttgatttgttgcatgacaggcacattgagaa

SEQ ID NO: 16498 - DNA, 906 bp, Glycine max
  Intron number 1 from transcript Glyma01g39530.2 (locus Gly ma01g39530) derived from phytozome v7.0 (chr-ID Gm01; pos 51484326 to 51485231)
tcgccgctaacaccctcaccgctaataacatctcggtatctcttcttagtctcaattccgaatctatttgcatatcaaagcatgttccttttaacgaatttcctgtaacagctgtgatgtgacgccgttagtattttaaatttgttaatgttttagattatagattttcaattcagattatagtctctaactgttttacgctcacttgctttagttgcgttaaattttgttaacacgtcaggaatttaatttcgtagagctttttaattttaaacaggtttttatggtgttatagctcgtggttatagagttagagtgagtgtaaaaatggctgaaaggttggaaatagtatttataatctagtttcatgcttcgacgtgaagagtgacagagatcagagaacaaggtctatttgggtctctttgaataaatttctttgtaagcactaataggagaataaaataagaagaaaaaaaatatgaaataagcttctccatttagctaaaattaactcatgcgtaagttaatttgtaaaagctatcttatattaacttctccagcaacttattttaaagttatgcataagttaattttagcttatggaaaagtttatttaattttttctttttattttcttctattataagtactcgcagagaagtttattcaaacaaattctttatttgatatatttgcctccttcaaatggaggaagcccttttgtattgagggtggcaaaatcaagaccggcttgattttacgttgtggccattttggctcgatgttctcagtgatttactatttataaagtatcaacttatgagaaatgtataaatgtagtgaccacgttttgacatgatattgtatgcagccaagaagtggactatacactgttggtgactttat

SEQ ID NO: 16499 - DNA, 174 bp, Glycine max
  Intron number 1 from transcript Glyma04g08530.3 (locus Gly ma04g08530) derived from phytozome v7.0 (chr-ID Gm04; pos 6687386 to 6687559)
gaactcatcaaatacggttttcccgaagacatctggtaaccctaattttcccatctccaattttatttttcttcttcgtttccgcaaactctctgctcccgacacagattattcacatgacctatgtctggaactcgatttgatttatcagttgtttgtgtagcgaagattttt

SEQ ID NO: 16500 - DNA, 936 bp, Glycine max
  Intron number 1 from transcript Glyma03g29840.1 (locus Gly ma03g29840) derived from phytozome v7.0 (chr-ID Gm03; pos 37864074 to 37865009 reverse strand)
atttcatttcagaagaaacccttttctttcccaaggtaaatacatctcagcattatacttcttaaacctaaaagcctcttcctttatctctctatctctctgtctctctctctcttcttctccttcatgatctgggtggtactgaaatttctcaattttttaaaattctatttgttttttttttcagcacccatttggtaaaaaatgttttttttttaaaataaaaatctgggaaaatctgttgaaatgtgaagaacatgaacctgcttataatcagtgtgtaggtgttttcctttttttttttttcttctgttaaaatttctgtgggtgggttaggtggtataataaaagaaagtgctgaaacaagcgaagtaaaaagtaaaccgagggtgatgtttgtttcctgaaaataagtgaacactagtttgcagggtcttagaatgcagaaagtatgaaactttgaagtgggtatctccctaatctcatgctacattctatcggctgctacctttaacattctaggttcagattgtttttacgtcttgtgattttgtgcttttaccgaacacaatcggatctagacttttaagcttgcacactcttggtgtgaccatagatctatgcttgcatccttgtttatttatgcattaatttattatctctgagtttccttatcatcttctatggttttttgtgtgttttgaagtttcccgaatatttaggtggctcgatttgctaccctgtaacggctatttgactgtgttttttctgttgtttaggctcctgaaccgttgtgctttttttttttttttaatttcttttaaagcacaactgtttcttcctacggtggaacattgaccatttgaaatagttgtgcaacagcttccattatttggaagaaaaaaaaagggtcttttgattctttgaagcgagaag

SEQ ID NO: 16501 - DNA, 899 bp, Glycine max
  Intron number 1 from transcript Glyma05g00970.1 (locus Gly ma05g00970) derived from phytozome v7.0 (chr-ID Gm05; pos 588294 to 589192 reverse strand)
aagaccaaggacacaaggtacggttggtgttgtagttactcagaaaaatggttttaagaaagcgtagcaacgtttttgtgacatgtttgtacatacaacactcttaaatgcttaaaaccactctcatggctcggttttgtctcttcaattttcctttatttgcatgcatcacaatgatttttcaaaattttaattttttacttctaaagttgtttttcaatgaaatcttataccccttttatttattttttcttaatttcgattgaaagttggttttatgaatgcttccaattgcgagatttattgctgatgtgtaattttgaatgttttggaaattaataagtcagagtgttgaaagaaaaattttctcttttcactttacaattccaaaactggctatttttctggaaaagcttatataggttttgtgacctttctaaggaattggagtaaaatttgtttccgccgttcacatacagcacacttttctcgtgttctgctgtttgtgattaattctgttatgttgtttttgtggaacattttgatgttttagtggtgatcacaacaatctaccgaacaatttcagtcaactctgtttgtggaacaggaacatcactgtttcattatacataatctgccatatatactaacaaaaggatcagcttttggagtatttttttttggcttttcttttatgcaatatttcttcaaaaattattctaccttgttgccccatattcttcttcttcttagtgttataagcttataaattataattgtcatgtcaattttagaaaattgtgaatatatacacacacacacacatatatatcttggttttatttctgcaattctgcggcattgattttaataagcaaaagatttttcaaattactagg

SEQ ID NO: 16502 - DNA, 633 bp, Glycine max
  Intron number 3 from transcript Glyma03g39700.1 (locus Gly ma03g39700) derived from phytozome v7.0 (chr-ID Gm03; pos 45700031 to 45700663 reverse strand)
gaatctggtaagaaaggagtttttggtataggagacatgtacaaactcacttgtacacataccaacagagagagtttattatgcatttatattaattcacttagttaagatatatttgtctcatttcagcccatctaataacccagtctacacgatattgagagcatttgtgagttcaatacaagaatgaaagtatgaaacatcttttttttatcggctaatgttaattgttagttgttaggttttgttagtgggagggattcaaacctacaacctctcccttcccttccccccctatcccttttaaccaccaagacaaccttataactcctaaaagtatgaaacatctattttccaacttcttcacattggcataattaattgcattttaacctcttcgtatgatttggaatcaaatatttgcgtattttcatgttcaacttaaattccatgaatttcttgatgaaaatctacttcttgttgttagttgctactcctgttcatgttttttgttttagtcatcctgggggagtttacatattttcttctgttcaaattcttttatttcattactgtgttctcatccttttcctctcccatctagaatcatctgtccagttaaaggaagaaaaa

SEQ ID NO: 16503 - DNA, 375 bp, Glycine max
  Intron number 3 from transcript Glyma01g41150.1 (locus Gly ma01g41150) derived from phytozome v7.0 (chr-ID Gm01; pos 52716223 to 52716597 reverse strand)
ttgttcattggcataacaggtatagctcgagggaacatccttttgtgtcactttaagaatctaaagatcaaattacatgatatgtatacattctaacaattcatcagactatctgcataaagttgtatcaccaaaagattttcttctaaagggttttgatttatttttttgtctcttttctgctaaattgatggttcctctttcatatttctaccttaaacattttataccacacctctcaattttctaatgctatggagtaaaaattatcttgtggttttttagaaaggaaaaaaaaaatcatcaaatggaggtggattttaatagaattcatttccaggggggtagctgctcgagcactacacttatcaaggg

SEQ ID NO: 16504 - DNA, 612 bp, Glycine max
  Intron number 4 from transcript Glyma02g06710.1 (locus Gly ma02g06710) derived from phytozome v7.0 (chr-ID Gm02; pos 5325640 to 5326251 reverse strand)
agcctttcctaagttatgtatttactcaaatatatttttgttgcgatttttgtatattaattattcactttctttgctttggagatgaggaaagctcatctcttattatattaaaattcagcatttgtttcaaatagaatgtgtttgtaggggggtcacaccctgctctaaccattgattatcatatctttgtgcacgtaaaatatgtgcttgttggaagattgtgcatcatttgtatatatgtagtttatagtattatatctttcccttggacagaaactatactgaatcccttaattacatttttcttatcatttttacaacttgaggataaaaagctatgtatgattgtcatctagataatgacttatgattgttatgcattttgactattttctttgtacttcaaagttagacggtgtctaggatggactaggtgactaagtggtcttttgtagaccaataattttcaaccaatagatttaataataaaatattgaatggttgagattaaacttttaattaattttagtaattaaaattaatttacactatgtctgtccgtcccttattacagtatctccttcctctgttcgttggcccttcttctcc

SEQ ID NO: 16505 - DNA, 481 bp, Glycine max
  Intron number 1 from transcript Glyma04g41200.1 (locus Gly ma04g41200) derived from phytozome v7.0 (chr-ID Gm04; pos 47081517 to 47081997)
atcttattctgattctgatcatcaacacaacccatgtaagcatgtttttcgttattccttcccccccgctcttttattttttcccttaaaaaagttgtctccttgcaacacttcctctgccaaatccccttccccggtaattccgtttgtcttcactgggtttgatttttttgtgttttccaatttccatgtacccttttgtttttatttttgtgggttcatttcgatttttatgtttcttttggagaaaaaaaaatctcatttttgtgatttctccgaaggtttacactttacattcccaattgtcgaatgtaataaggccaggttaaatgggtatggattgggatctatgttcgatctctcggtatctgtttttattttcttattaaattattgttatcgttgttgtgtggttaagtgaaatgtttattttgactaatattggtttccgtgctgcttttttattttaaatgtgtagttc

SEQ ID NO: 16506 - DNA, 699 bp, Glycine max
  Intron number 2 from transcript Glyma04g01390.4 (locus Gly ma04g01390) derived from phytozome v7.0 (chr-ID Gm04; pos 879240 to 879938)
agaaattagccattgaggcttttcaagtactagttagcatcttcttttcttttcttttcttttatgaattgttttgactattattcaaatcttaccattttttatacaaaaataattgttaaactattgaccgcaaaagaaactatgttgggcaatttggccacaagtattgtcatttgccatatatcttcggacttcatattctgtttgacacttgagagttgagactcgtatataataaaaccatatcatattattgcaatgaacaatgatgtggattgttattaagagatttttgttgaaggcctgaattatgggtaataacttgttaattagagattccgcaatatatggatgatttttattctaaaatatagctgctgatattaacttgactacgaaatgtgttgtgccaaaatatctattgcccgaaacacatgaaccgcgggcatcaattttctaagaaattccacattccccaatattgttcagatttgatgccataagttgaaacatctttttaatagttgagatgatgattctcttagcatgtagtatgaaactattaatcccttccagcattttattagttgaatacaaggaattccacgtcttgtgaattcacttttatgattgatcacaattgataagatataaaatacaggtgaaaacagtagctcgaattgtggaaggtgatcc

SEQ ID NO: 16507 - DNA, 497 bp, Glycine max
  Intron number 4 from transcript Glyma02g04390.1 (locus Gly ma02g04390) derived from phytozome v7.0 (chr-ID Gm02; pos 3561830 to 3562326)
ttgtattgggttacaagcttgactggggagtcaaggtatgtcattctcaattctctacttaatttatacgaatacttttgatgtataatgaataagtatacggatactatttagtgaaggagaaattaaccaattagaggtatgtattttaagttaattggaagagagaattgattttagaagaatagttaattaagtcttccaaatatatatatactgttaatctcactgcttatcttttaataggactaacatatataattcatttaataatgaaaatgataagtgataggcttcaatttttgtatattgattggtggatgaatgaatactaaaatttcagccatagcagaacacatttaaatgtcaagtaattttttttaaatgactagatataaaggtcaagtaaagcctaacatgttcttcaaattcaaaaggcagtacgcagttctttaatattgttgataattgtttgttttcagggaatctggttagga

SEQ ID NO: 16508 - DNA, 793 bp, Glycine max
  Intron number 1 from transcript Glyma04g36330.1 (locus Gly ma04g36330) derived from phytozome v7.0 (chr-ID Gm04; pos 42885275 to 42886067)
gcggaagatccgaattgtgagtgctacaatgatcctttccttgctttgcatgcatccatcatattgcatctcatagttatcttttgtaatcataatgataattattcagaaacgattatagttcaatggataccactctgtatagtggcagggtttgaatgacttgcatgctgttctaggttcaattcccattactgctattgtatgccaaaaaaatttataattaaatagatgatcaaactgcaactaaatattttacaacaaaattacgcattggcttctaaggggaaatggctggaaaaatggaccttgggttggttctgtgtcccctcgtgtaatgtgattggtggcatggttaatgggctgctacaaacattgactgaataatacatggcatcaaggttttgaattacggtttaattgtaatacttgatattgtggataaatgccggctgcaatacagttgcggagatcctaaaatcattaacgtaacagctgaaattgcagttatggactgtttcttaaaaccttgcatgatagtgaaaaatatgggcagtgtagacaggaataaaagtttcagttgctcatttatgaataaaaactagtcaaatggtccgtgtgtgtggtcctctttgcctgaagtgattggttgcctgattttcttaccctgttatatttattttacctggggtatgtattcttcttttctgccgaattaaccttgtggcagtgtgttttgatgtcagttgtgttttcagtggagaagtctcctgtatcatactttttggaggaa

SEQ ID NO: 16509 - DNA, 792 bp, Glycine max
  Intron number 1 from transcript Glyma03g38080.1 (locus Gly ma03g38080) derived from phytozome v7.0 (chr-ID Gm03; pos 44498511 to 44499302)
ggaggtacgtcctatatgcctgtatttttttgttacacatagatttcgtctcggtcggtttcttacgcgtggaccctcaggattcatatgatgtggcctcctcaatttctgcaccctgtcttaaattttactcattatctcataatcataaatatgcttattctttttttttttttcccttcaaatcctaactagtgccggcattttttaaggaactatttcctccattttagattttgagtttttttcttagagaaaaaaactgttaatatgtatcattttttgaaatcaatgatacattatatacatcatatatatacatttatttatttaagaccatctttaattaatatttattaaaaataatacttaataagattaaataacatattaattatcaggataaataatatattaaaaagttagctaatatttaattgttttaacattcaataataaattaattttattttttaatatacgtataaaaaatgtcatgatctataaccgatcaaaagaattttttttttacgtttttttatttattgtttctattatgtgaacaataaatgttttcttcatttaattgtttaatcaaattgttctaaggacattattttttttttctcgtttattcttttcttgacggaaatggccatgctcctgatttttatatagtcgggtgtattttatgagtatttgcttaggtgttaatacattagatgatatattaaatttgggaaataattaactggaattggataatggttgcagtttgtggagtacagcaag

SEQ ID NO: 16510 - DNA, 605 bp, Glycine max
  Intron number 3 from transcript Glyma03g41160.1 (locus Gly ma03g41160) derived from phytozome v7.0 (chr-ID Gm03; pos 46698208 to 46698812 reverse strand)
acaagagaggcttgataaggtcttctgtaactttgattccactaacttctgtgctgtttttgatatttacatcatgattggctttgctcatataatttacaattaaacatctttcttgcacgtatgagcatgttctagaaagcagagattcttatgtcatgttcaacacaatctttgtggttgggagaagttatgataaggaaaagaagcaaactttctggaaaatggattttgctcatggactgcaaaattgaataaaacacaaagaatacttaaaagaaatacaaaatctcaaaataaaattcagaagggcttatcaagactgtaaaacatggttgatgtatgtgtaccatttgttcttaaagtttgctaattgatccatctacaaggtacttgcaaccatgtatggattaccaaatgaattgctttagcttcaagtagtatggttgttgccaaatccttggctcgagctgggagccaaatctctataatgtgtcacttgtttgatagttacaagacaactctctatcagactctgtcatgctattatttgatccgttgttacttattcctctttaaatatttgttacttgcagtttttgtct

SEQ ID NO: 16511 - DNA, 639 bp, Glycine max
  Intron number 2 from transcript Glyma04g10100.1 (locus Gly ma04g10100) derived from phytozome v7.0 (chr-ID Gm04; pos 8367710 to 8368348)
ttgaggaggtttgctcgcaatttggaccttgtttgtttactgttttttaaaatagtttgtctccacagaacatctgaaagtgtttaactcttgaatacatcactgtattttaacagtttgtctccttagcgcttgaggaaaacagaagaagaggatgagaaaacatttcccagctgtttctattttttagcttttagaaacacttggtttggaaacatttttttcaaaacttaatagattgattgctgagaagtgtgaatttttttcagaaaacagtgttgttcatcaaatttatgtgtcttgccaacttcaaagtatctcatgttaacactattaggagaggagaggagaggagttcaacagctgagcggggccgttcttatattggcgtacatgaagtgttctgttctattgattttttaaaactttgattaccagtcattaggcattatattttctagtcaaacattgctggagaacacgtttaacattattgttgtttgctgttgctgttaaaaagtatgcactatccaatttattcattcactttggaaggaagcaacctggattttgggaatagtttttgcactcatctggtttattgactgtagacattatttattatgcagattgaacgtg

SEQ ID NO: 16512 - DNA, 823 bp, Glycine max
  Intron number 2 from transcript Glyma02g03540.2 (locus Gly ma02g03540) derived from phytozome v7.0 (chr-ID Gm02; pos 2804560 to 2805382 reverse strand)
agcaagtacaaaattcaggtctgcccttgttcaaatttgtttttatctcaattttgtttttctatttagaatgagcatcagtcatgactaaactgctccaacattgtttgctttgacttaaaattagtgttccttcacatgcaccttgtttttatatcaattattccttttaccctgtttccttggtgctaagaacaagtgaagaagttcctggatatttctcttttcatagtgtgtttggataacacaaaagaatcagttctatcccacaaaatcatgacgatatcatgaaaaaagtaaaagcaactatttgttggttactttcaccgtgaaaaagtaattgattatttctcaccgtgaagctaatccagacacactatcattttctttttccttatgtcttacatgtgttgttctaacaatgccttttggtgttgactctcaacctttgggttggctggttcaaacaaaagaatttcattgaaaagtatgtaacataattttcggagacgtgttcatgctatatttgaatggtttattgactgaacccctttgataatggcaggaatgataaattgttttccattttcacttgtaaatatgtagctgcaaacattaggaacaataacagaagttaaattttgtcaagtcttgatatgcaatcagtttttcttgttgattttactgtgctactcactagacttctttctcttggtcctttttccttaccttaagcctagtctgattagtgtgcaagatttactgttgttgctaatcttccttgcttgcaggccaaaaataacacccctgctgctcaggagaa

SEQ ID NO: 16513 - DNA, 457 bp, Glycine max
  Intron number 1 from transcript Glyma02g35160.1 (locus Gly ma02g35160) derived from phytozome v7.0 (chr-ID Gm02; pos 39880209 to 39880665)
atttctttttggtttgtgtgttttggtttttgaagtaggaggaggacgaggagatgcttgtcccacacacggatttggcttagaataatcacctacccatggaaggtacctgttgctttctcacgcttttgatccatggagaaaccccatttttctctatttcctctgttttttcaacaattaggagttatgactacaaatgatcaagtcagtctttttttttcttcatttttacctctaacacaacactcattgttccaaataaaaataccaaacacagggccaggtgctgtaaactttatcatagatcatggagagctggattttgtgtttgtccaagataggaaggttatccatgtaagggtcattttcttgagataaagaatttttagttctgggcgaatttatatttatatatcaaacacttgagaggcaaatagaggtacttattaggtac

SEQ ID NO: 16514 - DNA, 596 bp, Glycine max
  Intron number 1 from transcript Glyma0023s00610.1 (locus G lyma0023s00610) derived from phytozome v7.0 (chr-ID scaffo ld_23; pos 691464 to 692059)
gtgttgccgttaagccttccgaagtcaaggtcagattgtttttattctcaactttttcttaggcaaaatgtcaaaaagaatgttgaataccgagcaatccggacacatcgaaaatccataaaactattgacaaaaaaaaaagtttattttttttattctgagcttgatccagttttttttatttttatttcatttctttttattatacaccgtgtaaaatttaatgatttaaataatttcttagtctttaagctttataattctcttaaaaaaaattagtttagtctctaattttagtttgataaaaggtgagaaattgaaaatttaactaaaaattagaagaaaaagaatgagaaatttaaaattttaaactaaaaataaaaagagattagaaatagaaaattctagataaaagcaaattgataaaaagatttaattgtaacattcaaagacttgtttgtaacaattacaatattgggggattgtaacatgattcctagttgtagttagtttagtatttcttgtctttctttgtcaagaatagttgcaagtttgcaattttgtttgattgtgtaaactgcaggtctctgtcgagt

SEQ ID NO: 16515 - DNA, 896 bp, Glycine max
  Intron number 1 from transcript Glyma02g46880.1 (locus Gly ma02g46880) derived from phytozome v7.0 (chr-ID Gm02; pos 50703330 to 50704225)
agggtcaagatatacatttatcctggaatttataggtttgcaatggcaatttagttcattttcatcaaataattaggattttatataaaatttctcttagcttttacatcctaattatagttgcaagcagttatttttctttgctagttcttccgtttccagatgaacaagttaaacgattattttttaaaaggaaaagtgatatatgcatggtgcgaattatatgtgctacagatgtgatatatatgcaaagtatactatatatacttcccgatagtttaaacgatttaataaatcttccatatatatatatatatatatatatatatatatatatatattaatctttgatatatctagtttcttcttttctctccttttgaattaaatactatatgaaataatttgaatgtttttgtccatttaaatgttagatttctagcgatatacctttcatctatttacaatttgtaatttcactagtttgaatatatactgttaactttgggattttattttaaaatataaaacaaaacttgaaatcgccaagttaatatagtaggtgaatttaaaattttatttcatctcttaatgagatatatacaattaattgtcaaaaaaagtaataagagtcacaaataagcgaaatgctctttaaattagttcgtgggaagtgatataatacatcttaaattattaattgaataggaaagggtcactttggttttggtatgggttgctagtgaaattttgtgtatttgtctttaattatatgagatatagcatatgcatctatctatctatctcatcaatcacatgcacgatttaaatgtcaatattttgtaattaataattgagatatgcaataatgtgttgcttatgcagagaaagagtgc

SEQ ID NO: 16516 - DNA, 275 bp, Glycine max
  Intron number 2 from transcript Glyma02g47690.1 (locus Gly ma02g47690) derived from phytozome v7.0 (chr-ID Gm02; pos 51205153 to 51205427)
gaagggtaattcttcttgtttccccccctttttaagtctaaagcttgcattttgacattaaatttttaaaatggagcaggagtacgttaaatttttccacatattttatattctctaatcttttgatttttgttgttgttctcttttctaagcatctgttttaaggattgacagatcttgataagtttttttttttttaattttctgatctacagtccatactcaatactgtttcctctattgctaggttgaggcgaagaaagctgttcctaggg

SEQ ID NO: 16517 - DNA, 569 bp, Glycine max
  Intron number 3 from transcript Glyma02g05210.1 (locus Gly ma02g05210) derived from phytozome v7.0 (chr-ID Gm02; pos 4216124 to 4216692)
tcttccaaatttctacaggtatgcttctgatgtgatgagaacatggtaaagttgtgaacattacttagaattcaagaaagcaacatatatcaaagccatgcaatcttgaacaatattttttgttctactaatgcattctatttctatcattatgtcatatttcattggtggcaagttgtgtcttggtgaccaattggtcatgtgtttgaatctggaaatagtctctttgcatatacaagggtaaggctgcatataatgatcctccctgatacctttgcaccgtgagggcccaggagccttcgaacactggataagttagtttttttttatgtcattatccatttaagcattcaattcttccttttgatatcacaatgttcttttaaatgaaaattaaattggttaaccttatattacctgcttgttatcaaataatcatcttaattgttattccattggttaagatgttagcattaacataaattttattagatgattgaaattttgatggaaatgtcatgaatctaatggaaggaactttatcaactgggagcaagaaggattggaat

SEQ ID NO: 16518 - DNA, 569 bp, Glycine max
  Intron number 1 from transcript Glyma01g21270.1 (locus Gly ma01g21270) derived from phytozome v7.0 (chr-ID Gm01; pos 26391457 to 26392025 reverse strand)
cttccactctctactgtttcaccaccaacaattaggtacctcaatcacattctactctctattgttcaatttccatcatcactttttctctagctttgttctgtcttgctaccccaaatattactgttcactggaaaaccaagaatcataaatgaaaatcacttcttttatggtatcctagttaaactacttttatggcaaaagttatcctataaagggcgtaaagttttttgtttttttatttttatttccttctggtctggctaccccaactacgagttagtgaaaaaaaaagaatttttgataatttttattgattttgcttaccccagatgaacaaatacaaatgtgtttttttagctctttactctttatatgccataattgtttttcttctcacgtcttaattttctatgattgtgatctatatggggataccccaattaccttctctttattcatttatttttttcaatgataagtagggagagatgaagcttataattattttgtttttgagaaaatgcattgcaggactatatagaagttgccacacagtgaattggtga

SEQ ID NO: 16519 - DNA, 466 bp, Glycine max
  Intron number 2 from transcript Glyma01g03320.1 (locus Gly ma01g03320) derived from phytozome v7.0 (chr-ID Gm01; pos 2826995 to 2827460)
cttcaaagtacatttttgcttttcagaaaattattacactgaaatcatatatatacatataatttcagtttttttttattattaaaagttgaaatcttatgttaaaagatttcaatatttttttaaattattttagaaatcttattttaacgtacgatttcattagaaaaaagaagaagaaaaactcaaattatattttagcataggattttagtaggaaaaatatattttaaacaaatgaaaggtaaaattgtattttaatatatgatttttttcattgtgaaatcctatatacggtttactcatttttgtaatttttttaaaaaaatacccatcatgataattttttaaaaattctccctatttccgtaattaaccccgaaaacaacttatatttcgaagaaacaaagtttttagtaatatgctaatagctctacaaggaggctaagaaaacctgttgcttatt

SEQ ID NO: 16520 - DNA, 397 bp, Glycine max
  Intron number 1 from transcript Glyma02g39000.1 (locus Gly ma02g39000) derived from phytozome v7.0 (chr-ID Gm02; pos 44315167 to 44315563)
aagaaaggagtgccttggactgaagacgaacataagtaaattttttaccttttgcgtttgttttgatacatgttatttttatttggtaacttcacatatagattttaatatatgatataatgatcaactgggaatgcatatctgtttgaaagcatggtgattgtgtgaaaagctagaattggtggatggagtttaaagttaattaaagctagaggtgtagggacaagaattctgtgtagatattaaagggttggattttttattttttcaaatgatagctaggtcttttgggtgagtttgttagttataaaaaaattgtgttctttacttctagatttggagtttgaacttccctttgatgttccctgcagattgtttctattgggtctgaagaagt

SEQ ID NO: 16521 - DNA, 653 bp, Glycine max
  Intron number 1 from transcript Glyma04g02530.3 (locus Gly ma04g02530) derived from phytozome v7.0 (chr-ID Gm04; pos 1790236 to 1790888 reverse strand)
tgttgatttcctacaccagcaacacttttcccacggtttctttctttgccctttctcttctccattataactaattccagttcaatatagatatatatgcgttgcaattgtaagcactgttattaaaatccattaatttggagttttccagtggtgtttggcttggtctggaaccttctaaatttggagattcactatgttatcatcgttattcttattattcctgtagtttgaaatgaatataatgtccgtacaccttaatggagcaagtgcttcaacattattggcattatttattacaacttaaaatatcatgtaaccttgatggttagcgtttatttcttctgctgagtctgagaaattgcttgtaatttgattaggagcaaagcagttattaccttattcgtgcttagaaggacttacaaattgtagagtctaaatttgttcttataaaattttgactaatgaatagtggttgtctaatactgttaagggactaatgaatattgattttagcttataggctgcatggatgcagtgattttactttattccttttgtcacatttccaactgattgtttgttctttgacaaattataggcttcacggtttcacccttctctgtttatgtttgtgtgtcaataataggact

SEQ ID NO: 16522 - DNA, 663 bp, Glycine max
  Intron number 3 from transcript Glyma04g06380.3 (locus Gly ma04g06380) derived from phytozome v7.0 (chr-ID Gm04; pos 4880021 to 4880683)
gaggtaaggtttgaaaagtttggctacttggattgatggcagaatgctgcttttactactttattacaaattacaaatgttttttttaccatgataggatgatttattttacttttttccattttgtctttctcttttggagagcatctcacattcctaattctacttctcagtctaataaggcatggaagattagtatacaatatcttctaaaaaataagagagtaaagagtaaaggaaaaaaaaatgagaagccctatataatcaaaaatagaaaagctaaaacaacaatatctcctctaaaacaacagttcccactgaaactcgcatatcttgattctagcttctctagataaaaccctacagggcttccatctcttgctcagttggattttctgatgtgcttctaaactgtgtctgtacttatgctctatttattgaattgtttgtttacctacatatcttttcaaacgaataatttctggcagaaaaatcaaggtcatatacattgacttgagctactaaatattccccgacagaacaagaggaaaatactgcataaattatgtctagtttgaaatcaatgctgtgttatggatgctcacttaatcccaaaatttcaggtaaggtggttgcaaagttttgtgccaagtttcttcatca

SEQ ID NO: 16523 - DNA, 643 bp, Glycine max
  Intron number 1 from transcript Glyma01g34620.1 (locus Gly ma01g34620) derived from phytozome v7.0 (chr-ID Gm01; pos 47045091 to 47045733 reverse strand)
cagcaccagcaccttcggttgaacatccataaaaggtatttgttttgtttcaatcatacctttttttgtttttctttcttgtctcttccagatttgaatgtgcatgttttcttttgcggggaattaatgaatccctctctcactttaaaatttcacgtggcagttttgcatttatctctttcattataaatattcacaaattttaataagatgcacctatctatctatatgtatattaatatctatgaaaaagagaaaaaagtaataaatacaagaatatcaatattgacatatcattttaaaggattacacattcttctaagtattgtgatagttaattttttttaataatttggtataatacatgataagaaaaaattatggtatttaataataaaagctcatcctgtatgataaatttattaatttttataataattattctaaaaatcatataacagtgatttataaaaatcgttttacactagtcatgcatgaccatcaaactcatacatgataaatgatattatataatgcaaaaagttctatcagcaaaatttcttacttttgtgtgtgtgattgatccttgattgatgatattggtacagaaggagagcacaattgcaagaagcaagacggagga

SEQ ID NO: 16524 - DNA, 906 bp, Glycine max
  Intron number 1 from transcript Glyma02g39280.1 (locus Gly ma02g39280) derived from phytozome v7.0 (chr-ID Gm02; pos 44527103 to 44528008 reverse strand)
tggtatattaagttgttaaccaactacttttcttcaaattattgtgcttgattgggggaattgttattgaattaaatgtcatattaaattgagcattatttcgttacttgataatggacatgtgcatgtgcccagcatcatgcttcctatcacctcttttttatttttttaatagactacaagtattggtaattttggtcgaggcaagtaggtcggtcactatgcattgtatgacctttgttaattggcataagtttttgcaatttttaatatgtaggaatttcctctactcaactatgttcatatctggttgtgtgtgaccttgatactaagtggactagaacacaaacaattaaattcacaatcaacatgtagtatggtcggcaaaaaatcataactcttaaatatgtgctcaaggattatatttctgaatctgtatataaagatcaatctcttacatagatctctcgatatttcatgagattagtttgatctggttttactctttctacgcctccaaacaagaggaaaccatactagtttaagttgaaacattgggtactcaaaatgagtcagtttatttaaatttatttgttaaaataagtttttattttaataaaataaatattttttttgttgaaataagtatttaaattgcttttacttaaaaataataattttttacttattttaataaacaaatcttatctgtctttaaaaagaatgctaatatatatgaaaaatacttattttaaagttgttgttttttagtttaaaaagccttaattttggagaattactagttttaattgaaatattgatacttacaatgtatcttaattgaggagaatgtggcaaatggttttttaaggtgcattgtgagtctgtaactgaaggggcacaggc

SEQ ID NO: 16525 - DNA, 492 bp, Glycine max
  Intron number 3 from transcript Glyma05g29330.3 (locus Gly ma05g29330) derived from phytozome v7.0 (chr-ID Gm05; pos 35001951 to 35002442 reverse strand)
ttgatttggtgagtcactttaatttaatgtactgaaagactttacaaatgataaaataaatatgtagtttcttagtttgctacaattggattctgaattttgcaaaagttaacagcttagatttctagttatcattctgttgagaatgaggtgttattgaacctaaaatacaatgaatccagcaacgatggaaaatagatgttagtttggaggttatgtgtttgcataagaagagataaacaattgacttctggtcatttgaagttcttcgccagtttttgtgtataagatttgttaaagtttcaagatttggaggaagaaaatggtgttcatcagtgcagactttcctggtatttgtatttttgattgagtgattgcatatagtgtactacgtaaagtgatagtttctttttcctttacttcctctgctgccaacttacatttatgtttatataaggtcattggagacattacaaaagatagcactttgat

SEQ ID NO: 16526 - DNA, 811 bp, Glycine max
  Intron number 1 from transcript Glyma04g17310.1 (locus Gly ma04g17310) derived from phytozome v7.0 (chr-ID Gm04; pos 18786051 to 18786861 reverse strand)
ccaaaggaaagtacgtcagagaggactatcttgtggtatgccacttcaaattgcttcagtttttatttttatttttatttttatcatagtgtttctgggtctgtgttgtttttcctcttatgggccctatgtagcaatttgtgaattttcattgttcataaccgctttatctaggtttcaacaaactgtttttcttttgtgtgtgtgtgtgtgtgattttttttttcaaattatgcttttttaatatataatttttctattttaaacatccggttaaggcgctgaaaagttagaagttttcaatgtaatgaatgattttgtgtttctaatgtaataacttctttttttctaatgaaaactttttaatttttacaccttatacgtaggagctagaaatcgtttttcttatttgttttctcttagcttctcccggaataaaatgttggggttgtagaaaagaagaaagaacaaaaaaggatcgtcttttttagtttatttctagcaatgctagtatgaaatattttacactcttaactaatcagaaatcattgttaatatgatttttaagctatttagcataaagtcaataaacttatcatatatgatagtttctgattgactgacagagtaaaagctttttttacttggatgatagtgtaaaaatcctttacactcggtgcatggattgtttactcattttttggttttttatttttcaataaattaactgaggtttgatgctatagctatcccgttgtttgttgttggacttgcagaaaaagttgtcagctcaggaaatccaggagctggt

SEQ ID NO: 16527 - DNA, 679 bp, Glycine max
  Intron number 6 from transcript Glyma02g08870.2 (locus Gly ma02g08870) derived from phytozome v7.0 (chr-ID Gm02; pos 6862536 to 6863214 reverse strand)
tctgtaattttccttttacaggtggattctctcaggtggatgtttttcaagccaagttgaagttttgtttgcaattattgatacacagttgaatatatgaggaaataattaatttattatcaatctgcatcttatgaaaagtagcaccataaatgtctagtgagttagtagttgttttctcttcatttactttatatatatatatatatatatatatatatatatattcttaaatctgaatacttgggtttgcatgattgtacccaaccaaatggtggaatttgagtttgctgatctttagcaaaataatttcctgatgggactttatattttttaatttttttaaaaaatggagtttcattagaaaagaggaatttgttgggctttcttttttaacagtttgggattccatttagtggtaaaggacaatcattatattactaacctattgctatgatttgtgtaaaaaaaaccctattgctatgactttttgttgacatgcatgtaaatgaattcttcttttcatttctatttaatgcatgtttggcttatcttaattgtttgtaaaaaagaaaatcagtttttattttaagctttctctgtaggttttgattatatgctataccggacacaaaatatgacaaatcaatcctgcgtattaatttgttttgaattttag

SEQ ID NO: 16528 - DNA, 346 bp, Glycine max
  Intron number 1 from transcript Glyma01g27130.1 (locus Gly ma01g27130) derived from phytozome v7.0 (chr-ID Gm01; pos 36164192 to 36164537 reverse strand)
agatccttggtggtggtcaaggtatgccatttttttctctctcttagttttgattaaatttctcagctttatgggtgatttgttttgatcactgtatcgcaatcttttctttctgtctccttggtgttgtttgtttatgttcattttggtactatttttaacagtggaactgtgcctgcgcatatttgttttagttttttatttgcttttagtatcaatggtaaaagggtcagaatcagaagaacagaatggatttgtaattgatcatgatctttgagtttttgctgaatcaatgccatgcttcaatgcagttgcagatttaattctgtggaggcgtaagaacctt

SEQ ID NO: 16529 - DNA, 704 bp, Glycine max
  Intron number 1 from transcript Glyma02g07370.1 (locus Gly ma02g07370) derived from phytozome v7.0 (chr-ID Gm02; pos 5867410 to 5868113)
acattggccaaccttattagtatgtgtttcttctgaaactttttgtttctctcaagtaaaaatgttatcggaaagtcccatatggcttgtcttgattcttgagtgtaagttatatatttattagatcactttacttaatgttaactgattttaagattttaagatgaaatttaatgtgatatcagaacctatagatcatcttgttaaataacttattctagtaagtttgtttgttctgcgtaaataattttcttagttagcgtaacatttttttttctaatattcgagaacaagtggaatatatctgttgaacttcactaatatcaatttttttctaatattcgagaacaagtggaatatatatgttgaacttcactaatatcaattgattttaagatgaaatctaatacatatgtgatgtacaattctgcacctaggaattactacaaaagttaacaactgtatcaaagatgacaatccattggataacaatataaatctttaggtgcaatctaattaaatccttattaatgatttggcgcagttatggtgatagaattttgcagttttgacttagatgatatagcatagaaacagctttctccccactgcctcttccaaagctactattttctttgtagacttgagtcgtttgggtactatgtgcagaacatagtgctgaccgagttgaatttttgaagctc

SEQ ID NO: 16530 - DNA, 848 bp, Glycine max
  Intron number 1 from transcript Glyma02g41470.4 (locus Gly ma02g41470) derived from phytozome v7.0 (chr-ID Gm02; pos 46581949 to 46582796 reverse strand)
ttatcctccgatcacattttctctctcttcgttcggtaatctcctctctctactctccactgtaattgtggtgatccgttagcgcaattgagattactgtatcgttttgtttctccgttttcgaatcgaatgctgcggtgttagggtttaggattgaaatgcgagtgtctgtgaatggagattcgaggggtgtagtgcgggggataacgagatcttgctgatttgttttgttttgctttattttttgggggatttgattgcgtggattcaatttcgcattgaatctgttggtttatggattttatctgcgccgtgttcttattttggttctgctttgatctccttagtttgcagtgtttatctgacttgacgctcgtgaatcatctgtaatgcttcgacttgtgctttctcgtttcgtgtctagagaattgtgtgtggtgatttgtagagtatttggatgtcatgtttgaagtggaagttcagtcctaggattggaattggctttggaaattcgatgtattattattattttttgaatgagtgtgattgagaacaagaaagaagagaaacagtgttgaaattccaaagttaggggagggatggaaaattagtagtgaatcagaaagaatgagaatggatcatttttgttctatggactattagagtgtatgtttgtttagggagggaggggatgttatggcactacatcatattttcatgactgtgtctttgttgttaagttcagatcttgacttaagagtttgttttcagaaattagatggtgttttgaacagctcttatttttgagtttgattggaagttttgatctcagactatagctgacaggg

SEQ ID NO: 16531 - DNA, 777 bp, Glycine max
  Intron number 3 from transcript Glyma04g09170.1 (locus Gly ma04g09170) derived from phytozome v7.0 (chr-ID Gm04; pos 7325597 to 7326373 reverse strand)
ctgtcatttttacttttggctcttaccgactaggggtgagtatgccgttgttaccttttcctgactcatgacatggccaattgctaatttctcttgattgtttggagtatgggggattttaaatttaaattcaaggcttgcattgccagagttgtagtatgctaatttcttctgagtgtgctcgtcttgttttgattcattgtagaaattaataatggcatgaattgacagtagcggaaggaacttaaatccagatgttggaaagatttgaaggagaaatatttatgagacattataaaagtgcatttgttattggtaatagctcagagtctgagaatacttagtctggttgattgtttatgcttaacactgtcaatataatttatagctggctcaagaaagagacctctgatgcttttttaagtgtttgctgatggatcacattaatgagtgcatttaattctactggactggagagtgttgaagcttaattatatcagccttttgtttgtaacagtagtcatgtttcaatcactgttgacaaatgactgatgggtgatgacttcgattgaatatcatttccaatctttacataaatgtcttaaatcttattcttgtagcaaaaagagatgttctgttaagaaattagttgcagacagcaaatgcgtcccaatgttgttgtttatatattaccatgtctgtattgtaagtgtctgttagtctgttacataaatgtttggatatctagctataaataattcaatcatttgcaggttc

SEQ ID NO: 16532 - DNA, 694 bp, Glycine max
  Intron number 2 from transcript Glyma02g36850.1 (locus Gly ma02g36850) derived from phytozome v7.0 (chr-ID Gm02; pos 42248020 to 42248713 reverse strand)
ttgacattcatccctcgcgcaagcacacttgcctggtaagatgccactttgtgaatgttcttcttgtaaagagctgggagcatagttgtgtttagattttagttttactccttagtggttgacaaagttttaacttttaaattgaggctgtgggaaattgtggacaaatgcaaccgatgcagtcacaattgcggttgcaaatacccccaagaaccgtgacattgttgccgatgtcatggctgcaggccatctttttttaaaccttgatggttgatgctgcaacatgcggaaatgtttgtttgtgatgttgatgcttgctgttgtttctttatgttcagcagtagactgctagttgaatatatgcaactctattggtcaataacctactaaagtttataaaatatgaatgtggcatgatgccagcacaaccaaaaagtacatctatgccatgctgctaattaaggctagtttaatgacattacaggagctgttagctgcttttcactaatgcattaacaactgctttgacatcagtactagatgaatgattattgattttcttttgtaagacttgaatgaatcaaactggtggtttgaagatgctttgtgctttttcttgtatgctgctgctgatgtttctgtgattattatgtacttaggctggtggttccttaggtacggtttttgcctggga

SEQ ID NO: 16533 - DNA, 906 bp, Glycine max
  Intron number 1 from transcript Glyma04g37700.1 (locus Gly ma04g37700) derived from phytozome v7.0 (chr-ID Gm04; pos 44118953 to 44119858)
tacgaaaaaggttctcaacgggctgaagaaaaagggtacatactcctgtcacttttttaagctgggttttatatggaagatgaaaggaagagcacttcaatgattttttgttagttatgaagtgacattgttgattgctgttgtttagatttatatggtgattacatctatgctttgttgaaaagtgacagaagctaatgcaaatgaaagacaaaaccaacacagctgaaaaatgggaagagttttactcactttattcgtcaaccattagcctttaaataggcgtacattagaaacaaaccagaaaattaaaataggaatatgatactcgaaaaaccgagccacatacaatctgaacttcatgctaaagagttggcgaaacataacatgattaatgcctagtgtctgtgactttacatagaaccataaatgaattattttgtccagaaagtagttatactgcacaatgtatatagtgattcagtgtaattatactgcaactaatgattcagtgtaactgtttgcatttcgattacattcaggctagaagacttttaaatttcccgcttaaggattgcagcatcaactaaataaaagaattggcctgtaattgtacttattgaacatctcctcagaccttgcaataatttgtgttgcctttggatgttaaaaaataactgtgactatgcaatacctttatttttattctcatcgatacaattacaagccaagtttcaaccaattatggtcctggagggattatatctgcattgctatgctatcatgtcttgatatatttcttttatttttattgttaattatgttttccatttttgcttgattcctatattttgaatgtcctgcttttgaactgtctaatatttgtttttcttctccttgtaggat

SEQ ID NO: 16534 - DNA, 465 bp, Glycine max
  Intron number 4 from transcript Glyma03g35770.1 (locus Gly ma03g35770) derived from phytozome v7.0 (chr-ID Gm03; pos 42868062 to 42868526 reverse strand)
tatctggagataattttgtagggaggtaggattcgggtctgatcatacacaagcctccatttctgcgaaataattaagcattggagctagtttaccaatctgctagtttgaattcattattgttcttcatggcgaactgaactttagtcacaacccacgaaattattctatagatacttttttgggtactggagtttcatttcttggatttgaacatttttcttattagtttggttggctgaactatgcgattcagttctacaagtgatacttctttagaagtagtgctgtctgcctggttgatgttctgtttatgtttctaacaaaaggacaaaggattataatatgttggagtttttagtttatgaatatagccatatgggtttattttgctttactttcccccttttatattcttgttaatatatgttacattggatatgcaggtctgatttggaaactgtt

SEQ ID NO: 16535 - DNA, 1011 bp, Glycine max
  Intron number 4 from transcript Glyma04g08210.1 (locus Gly ma04g08210) derived from phytozome v7.0 (chr-ID Gm04; pos 6430845 to 6431855)
cagagtgggattttgaggtcagcaaccatgccatctttcttatttccattttctcctctcaaaatcaatacaattctcaaatgttttggggacaaaagagaaacatcaaatgaccttcaaagttcaaacatatttattcttcttcgtatgctggaaacattagttcgtgatgccagctaatttgtggccgaggcctttgttggctatgattacttgtgattgcattcaaagtttgaagctgtggtcgaggtgatggttgcagtttcttcacaatttttggtattgtgagaaattgcgaacaaatgcagctgatgtgaccacaatttcagttgctatgtgttcatggagaccctaaatatcttgacaatgtgtccacaatcacatttgggaacttcttttaaaaccttggttgcattgtaaaacactttgagttaaaggaattttgccgcaggctaattgggggaagacgggatttccatatcagatgagaatgttttgtctaaaaccatgtgtaacatgagtaattgtcagagacataacgattcaatttccttgatgaacaagttatgactacttgtttatgtgcatacaaattaaaaggcagatagcactgtaatagttatactttggtgacttggtacatagttgaccacctcccttttgtgctttccctttacttccctcatgttttgattttggtgaagattttcaaacttcttaattaaagagttatgctatgcttatataaatgattgaaacttcattgaggttttattcaagattaattttgtaattggttttaaaggatcgataataggagtttgtcctgtttttcaagcctgttggcccatcagtatatgcatagtttgtgtcaatgtcgttaaactttacatgttcttttaatttcttcgtttcaaatttgaattcaaatttaagttccttttattgcatccctcccttttctagaagtcgtttttttttctgactattctgattttttatttgaaagga

SEQ ID NO: 16536 - DNA, 740 bp, Glycine max
  Intron number 4 from transcript Glyma04g39730.1 (locus Gly ma04g39730) derived from phytozome v7.0 (chr-ID Gm04; pos 45902202 to 45902941 reverse strand)
gcttgagaattttcgaagggatcctgacatatcatgtgagacactcatttagttgcaattctaattaaaaatgtatggatgtacgctggcttcagtgctgtttgtcgttgaaaagataatttgtttatacaattgttttatattatttacatgtaagtgtacaataagcttgtattcataatttctttttgtattttttcttcccacggatttcggggatttgatccttctgttttgtgccatttcctcttttaataaacttttcatttattgaaaagatattcaactgggaaaaataaataaaatctagaagcttgttgtgatgggaaatttcaacacaaaattcctgttccatgattgcaccaagagaatcaattcaagttagaaacaagtaaatatatgaatagttatgtatgtttcttatggatgcttgcatggtggagacagcttagggattttaggattacatgttatagaagttggaaggaaagaaacattaggattcgtggaagtaataagtaaaatactgaggggacagaggacttggacgagaactttcttatgcgtttcttgtctcaaaagggtatatgtgagaagacatgcatctgtctcaacattacctacgttatttgtttctaacactttccttgcaaattttgtcaaagatcattagaggaatttctttcttttataaggttgtaacttgtaatatattctcaatgttgtaggttggcttgaag

SEQ ID NO: 16537 - DNA, 914 bp, Glycine max
  Intron number 2 from transcript Glyma02g47760.2 (locus Gly ma02g47760) derived from phytozome v7.0 (chr-ID Gm02; pos 51249792 to 51250705 reverse strand)
gtagagcagtgccaggtgagattaattaccgagattactagtctcacgtttacagaaagttaacttcttctgaatgctattgaatattaattaccgagattgtgcatgcatgatcaagtgtaaacagctattatttgcaaaatcttgaagatcatgatactgaagatttgtttaccacaggcagtataatactaatgctattgacctctttcacatgccacaaatgcatacaaccttatacccttaaaacatacacacatggacacacaacctctcaagagacatttattcttttatcgtttgttgctcttcagaataggtgacacatacttgttccaacttacatctgatgcgtgataaatgttatacttatatgtcttctcttttcatgctaaatgctaatacaaaaacgtagtttataggtttacccactgtatggaaatagcaattatgccattgcctgttaatgctgttatacaagatttggattgcagaaggacataaactatatcacaaactgcaatgtgaatgtctctatgttctctgtggatgttgcaaataatttgcttcatcatatgaacttttatatagtttccttctagccttctgttatcatcagtggaagtatatgatgcagtctgttctcatgatatggcagaggaagtttttttctgtgctgttgttattggagtagttagtagtgggagcttcagcatcatgaatttgattcttggtgcatttagttcttctgacagtcaaccttttgtgacagcaagtttgacaattttggactgatttattttttctgattggattttctttccaaaaatgtttttacttttaccttaatcaggtcatgacctctgtttatattcctaggaactgttctggtgaggcagttaaaaaagttgcca

SEQ ID NO: 16538 - DNA, 730 bp, Glycine max
  Intron number 2 from transcript Glyma03g05180.1 (locus Gly ma03g05180) derived from phytozome v7.0 (chr-ID Gm03; pos 5448588 to 5449317 reverse strand)
gtccaagaggtaagcaattaatgagggttgatgaagttaagccaaaaaatgcactaacacttcaaattaaaatagtattaatttttatgtgtattggacacgtatccaagccaagaacttcacaaaccacactaactgtactttataattattttccttttattttcatatcatacatattagaattccacaataactagataaattatagtaacattttattatatctaaaatgatttgtgttgagttttaaaactctgatttctcaatttgatttaagactagaattttattataataacttatatgttggtttatagctgtggtattttaatccataggagttgacacaaagttgaaatatcctgcttcatttacacatgacaaaataacttatttagtagaaacactcatatttgatatttttttagtgtatacaaaattttcttatactagcgataatcatgtattacaaaaagtaattatgtgactcaaaataaaaaataactgtcatattttaaattttttaaatttattatttatgcatattgtgttgtattggatattgttcctgacttcttgaggtatatatttatgttttcaaaaaccagcaatataagagactctagacagcaatgggaaaataaagttgcattgttttatttgattgaataaagatttgttatgattggtagggtctggttgaagaggaaaaattggacttctttga

SEQ ID NO: 16539 - DNA, 387 bp, Glycine max
  Intron number 1 from transcript Glyma04g34170.2 (locus Gly ma04g34170) derived from phytozome v7.0 (chr-ID Gm04; pos 40220897 to 40221283 reverse strand)
tgctcaaggactaacggggaggattttttttcctggtgaattctagggttcattaggttgcaattttttattttttaaaaaaaaatgtttttggattttccctcgtttcccctatgttgtctggttctcttaatgctaatactatttgattgtgtaaatctgatgattttttgtttgtttaattatatgtaagtattgtatgaattatgaactattcttttccggtgaaatttattttgtttttattttaaacatttgagtaattttgggcctgattcttatgtggtgttgctatgttggaggcttttttgcccccttaaatacactcgattgattcaagtctattcttttccttattgtgagtgttggtttttcaaggtggcgaca

SEQ ID NO: 16540 - DNA, 749 bp, Glycine max
  Intron number 2 from transcript Glyma03g36270.2 (locus Gly ma03g36270) derived from phytozome v7.0 (chr-ID Gm03; pos 43273099 to 43273847 reverse strand)
cattcccaggtatctatcttttcatccattctatttctttccccttaaattccttattgcaaacacttttttttatacggggttggttttgattccgtccttacatatgatcctcttcctttggtattttacagttttatttttgtgatgtatacgtaagaagaatgaataacctcggtttcctgccgccttatatattccatcttatattttatggataatcgataactgttaacgaattgatcaaatgttcgagccatacttccgaaacggaaatgctttttttttttaatcatcaaataatttcagaatgtaagaaactgcatttattattacattttattgtgtttgtttgttctatttcattttaacaacagttgttctttattctccggtgaactttctattagttggaccctttttttttactttatcatctgtgctggggattgtgatggggagaaataattgaaatggtgagattatgtacttagttcaaactagttgggagtttggcgaagtagagtagtattgtgaggcattatttccttgttagctttctgcttcgctaggtgatttcgggtagaatctgaattttacatgtacttattgaaatgaatttttggataaggaatctaaatggatttccttttgtgttcacaatattgtgcattcaagagcaccccttgcacaattcaaagtattgcatcttactaaggttgtgggctgatatgtagaaagttgtagag

SEQ ID NO: 16541 - DNA, 662 bp, Glycine max
  Intron number 2 from transcript Glyma02g12590.1 (locus Gly ma02g12590) derived from phytozome v7.0 (chr-ID Gm02; pos 10857561 to 10858222 reverse strand)
cagcaccctcaggttttggatttctatcttgtttcatgttaatgttacttaattaagataaaaattcatttggtgacaaacagacaagtttccttcttctagccttatgagaatatttaatctttcccttatttatataacatatatatatatagatgggtaaagaaaacaatttgtttacaattttattttcatatgtccattaaaatagtaaaataaggagaagaaaaacagacagagaattttatttgatttgattaacaaagaattataggcctactttcatggatcaaattcagaatatatatgagatttgagagaatgtttactaaactttgcatggtttgcacaatgagctttttttggatcaagtcacatgtcattccaagcccatggaggacatacaaaccaatttataaaatttaatttcttccatttgattctcaatgcttatccatagtccatatattttagttattccctaatggtaactccttcttacttcaattaactgaattgattagctgtcaataaaagaaaaccatgtttcttatttagcttatgtgttgtgtttctgattggattttgactaatctatcttccattttcccttgtactttgtactaggttctgcatcactgtggtgattccatcaatataaa

SEQ ID NO: 16542 - DNA, 869 bp, Glycine max
  Intron number 2 from transcript Glyma03g29800.1 (locus Gly ma03g29800) derived from phytozome v7.0 (chr-ID Gm03; pos 37827641 to 37828509)
tcacatcactaccaggaagtccccctgtggtgaaggtatttttgtttttttactcttttgattgatgtttattattgttcattgcgcacattataagtttggtgtgcctcaatgtatccctttgtgctcaattggattaaaatttaaacaacagccgtgatatcaattgtgcctcataacaaaaacataattttgtttagtcttatgcattaagtgatcatagacttgttttccttttttagtttggcaatgtatctattaagagagtgatattttgtttataatctattatttattcctctcattctgaaaagctattaagcgtgagataaaaaatatggtttgtttcgattttcattcttttagttgtagacttgtagtgctctgcagggtaagcttaattatatctatattttcctttcaatatttttgttgaataatatttgatacataagagggtgaaccctggcacagcggtaaagttgtgtcttggtgactggttggtcatgggttcaattctggaacagcctctttgcatatgcaaggataaggctgcgcacaattacccttccccatatcttcgctctacgaggagccagcctccgggcactagaatgttcttcaacatattttgatggttgtgctgtgctgttggggctatagaagcttgaaaagtttggtgctttctaatcttaccaagttcctgaattgtgtgctgttcatatgcctttatggaacagaaatattgttgtgttacttggcttgctgacttgatttttgaagtattgctttcagtgtctatactttctgaatgttagttattctgccttgtgttcatgaaactgctgcttgtttttaggtaccaacac

SEQ ID NO: 16543 - DNA, 869 bp, Glycine max
  Intron number 2 from transcript Glyma04g10510.1 (locus Gly ma04g10510) derived from phytozome v7.0 (chr-ID Gm04; pos 8725649 to 8726517)
aagtcaagtttcagagagattttctggaacaagtggtacgtaatttttttagataacttatgtttcacgcagttttttttttttgcttgtttcgaattttggctgagaaagaaggatagtgcatagtgagtgcctagagttccatgctttatgattcagccaaaatggatttgcttttgaaattttaatttctgtggatgttgaaagctgaaatactaggtgtgtctgtggcaggaaaggtttcacaataaaaaatttaggctgaatttcttgtaatgttgaagatcgtaagacttaaaatggaaaaccatgctgttaatgctgctactatattttgaacctttgacctaaaataaaaaaaaaacaaaaccattttgttctggacgaacgttggaatgttggttgggcaagccgaggtcggtctggaagtcccgccactgttaaacagtggtgaggatgctggcaatggactagtggtgatggtggacccttaatgggattggggttggctcagaacaaattccttgttacaaagaaacaccttttcctttttaaacaatttctaattagtggatctctcatcaggatttcaagctagatgaattttttaccatctgtcagtgaatccttattactttgacagttgcaagggattatctttgggttgagttgcataagataaccgatggatggaagaagggaaatcataagcaatatacttaatgattttgcgcctaaagacaaattaaatttatgagaacttcattcaatattttataaatgagtacagaggaaaaatcttatggcttgtttttgttcaatgttgttttgtagtaattgatcagtcattggcacatctccttttcggc

SEQ ID NO: 16544 - DNA, 769 bp, Glycine max
  Intron number 1 from transcript Glyma01g44400.3 (locus Gly ma01g44400) derived from phytozome v7.0 (chr-ID Gm01; pos 55089915 to 55090683 reverse strand)
attttgtatctttggttctcttttaggtgcgattctctcactctgctcttaaatcatgacctattctatttggctttggttgtattcgttgatgccgtggcgatttggctttcgtcttcttccgtttctcagtttgattacagcaattattaattactaattatattattaccactaccagtttcgtgtttggttatttgattttctctttttcatacttttaggatcaatggattttagagatttagctcacaagttctctcgttgtattgttactgtaagtcttcagtttttcatatccttacttgccttggccttgagtcagatctgtttgcccgaaatttgatgttctttgaatttaagctctttatttctctcaattcaaatatcatgctgtcatagacacatttttagaccatacctattctttaataaactggtaatctatatccaaatgcgtgtaactaactggtaatattaactcaataaattacctattctgtaagataaataaattatgcttatgaaatttttcaatataacttgattctgttaacagggtccacgctagtgtatcaaggttccaatctaaatgcatgttattgttgcttcatgtttgatctatatattgttgaactcaatgagatttaacttaaatggttagtctatgcaactgaaaaatatacttttccattcaacctaaaatttaaagtccattcattgtgggttttaaggtttgtacagattggaaatctcgggcttcaactgc

SEQ ID NO: 16545 - DNA, 965 bp, Glycine max
  Intron number 1 from transcript Glyma03g23900.1 (locus Gly ma03g23900) derived from phytozome v7.0 (chr-ID Gm03; pos 30566830 to 30567794)
aaaatcagagaccttcccttttaccaacgcagcaggtccaattttcccaatttctcattctccttcttaattcttaatttaattttatttaatttgaccttggtatagcttcgtgtagttttcaatttgtgttttcagtttcattttttgattttatttgtttgtcactcacaccgatggaaacagaaaaaaaaattgatataaacaagcaattgggtttaatttgatgtggtcaggagttagttatttgattattcattcattaatgtaaattgaaagtggtgtttattatttttgtagcaccatgggatgaaaatctgaactgggttgttgatgtagttatgtcctgagttatgaaatattgccccgtttggataaacaacttaattaaggtcctaccgaataagtacttatttatgtataacttgtttttatataatggaaggaaaaaatagggttaagctgtttttgtataagccataagccgttttcataagttatcctagaaagcttactagctgaaaacagcttatggacatgtcataagcaactttcttaagttcttcgaaacacgtacacaaatgcttatgctataagataagtttgaataatttatacataagctcttccaaacggggaattagtatatttcctgtactgaaaacaatattgaaagggtacctattggttgacctcctaaggctatactattggtgtggtatgtactttttttcaaaggtgttcggcatataaaattgtggaagatttgggatggttttgtagatttaaggcctacattggtgatcaggatttcattattttgattaatctattggtagttaacaatggtatggttcattattaattttagcttgtttaacagcacaaaaatatattgagaggttacctatttgttttggtagatctctgaaagtaaaattactgtgtgtggctttgttgtaggc

SEQ ID NO: 16546 - DNA, 579 bp, Glycine max
  Intron number 1 from transcript Glyma03g28460.1 (locus Gly ma03g28460) derived from phytozome v7.0 (chr-ID Gm03; pos 36400107 to 36400685 reverse strand)
tcgcattctccgcatcgtcggcaagtactttcccggtactccttccactccttcctctactcaaccaatactcgtaatttcatgtgttctcgattttgcttctcatacacacttttggatgctcttcagagtagttttcgcaattttgctgcaaaaacatcaggtttcaatacttcaattatgctgaatcacttatgtataatctgttatgcaataaccctatcatttcaccttcttttagtgtcctctctgcctggggaaaaaacaaaacaaaactctagctaggtcacaaaaaaaaaaaagagtgagtaattgaagttccggtgataaataaaagagtttaatggtcatgacactgatagtctaaaacacttttacactggcgttgaaccacaaatcatcgttaatataacttttgaagtaattatcataaaagtcaacaaacttatcatacataatggattgtgattggatgatagtgtaaaagggataaccttttttctctaaaagaattcatgtactcttctgaggagctgttttgcagcaactgttgtgagtgcggagcggctcaagcggtat

SEQ ID NO: 16547 - DNA, 755 bp, Glycine max
  Intron number 4 from transcript Glyma04g07850.3 (locus Gly ma04g07850) derived from phytozome v7.0 (chr-ID Gm04; pos 6125271 to 6126025 reverse strand)
tgacgacgtatgaatcattgaatctgagcaacttatttactaatcaacaatgactttttcttataatattactagttttttagcccattatatatttgctagatatcgatgttgttaaatggcagcttcatagccaccatggctgaatggcatgcatttttttcgccaacctccataggcaattttgaagggaggcactatagtagtgccataggctgcaatggcgtgagtatatggttgaattttggccttccaccatccaccattgataacactgctaaatatcctatagttttctcttttaatttggacccatctcactccttccaccaaaagtattaaaataaaaacccaaaaagcaatcataaaatgttgctaacatgtcatgtggctgtttggtgagtgttgttgaagctttccacagaatgtgtattcgagtttgttttctctgagagtatttttcattttccttttattatcttgcattgacatggatgttacatactctaattctttgactactgtttgttgtttgtaatatactttgtgatatttaattttttcacaaccagtaaaaactcagaagtaacttgagttatttatgtacatttgatctcaaatattgtcttcatatattatactttcatgttaaatgtatgtttgaccagtagtggccatgtttaagaattatggcttatgactatgactgttacatatttcttataatttagtgaattattatgcaggtgctcaca

SEQ ID NO: 16548 - DNA, 528 bp, Glycine max
  Intron number 2 from transcript Glyma04g07850.3 (locus Gly ma04g07850) derived from phytozome v7.0 (chr-ID Gm04; pos 6126794 to 6127321 reverse strand)
aaagcagcttcgtttttctcctctctgtctctcaggtaacatgtttctcccttactatcattcgcttaatgaactttggattaaatattttcgattttgatcaatcttcgaaacattacgttttcttcgtcttctcattcgtcaaattagattgaaaattctagggttctctgcggctcacgcttttgtcgaatttcgtttgtgactttttttgcggtggaatgatcgtcaaaacacgggttacggtaatgtgtttgcatagacggaacggaacggaagatggccattacttcgtagaaatctttaatgcgatttatgggatcatagtcttcaattttaagttgcatttttagcatacatgctcgcaagtgatgcatttgatatgaatatggtgttcgtttgatacgctgttattctttggatttctttgaaagttttaatggatatggaattgttgaattgatatttatcagttttgccctaaggaagtatgttgttgtcagggttaggttgtacttgtattataga

SEQ ID NO: 16549 - DNA, 815 bp, Glycine max
  Intron number 2 from transcript Glyma02g05430.1 (locus Gly ma02g05430) derived from phytozome v7.0 (chr-ID Gm02; pos 4372827 to 4373641 reverse strand)
ccgcacctcccagaagggccgaaccggctattccggtaacccacccctctctttcatcaactaaatggaatataaacaaattaaatgcccaatctagttagtttccttcatcttgtttcctgaggatattgcttttgttctagatattagactttgtttatcatttgaccttgaaaactctaaagaggactgttaacgacaagctctttagcacattccctctaagggtctctttattaatggttaaaatttattagaaattacgaaatatgagtgagactcgttaaataagaactgggatgcagtttctattaaatttttatcaataataataaaataaaaaagacatataccagggagatttacaacaactcacgcacctgctcaactaattgaactagactcccttagtaaaaaagatttaattactcatttgatctcaataaatatacaatctttatcttttagtttgtatggggctacacctattaacaactaattttatttcctacacatttttttaactagttttagtctcttcgcatacatttcttaattcgttttagtccctataattctagacggcaagaactaaaatggattaaaaagtgtaaatgaaggaactaaaacaagtagattttagccgtaagaattgaatgtaaagattgtaaagttagaaggaccaaaagagtaattaaatcattaacaaacatgtttaaaatagtgtgttagagtgtctcattcatgcttcttaggcaataaattgtgttgactgtgcaggtgtcattacattttgtcgtgtaaagtctgcattt

SEQ ID NO: 16550 - DNA, 637 bp, Glycine max
  Intron number 1 from transcript Glyma02g37520.1 (locus Gly ma02g37520) derived from phytozome v7.0 (chr-ID Gm02; pos 42856775 to 42857411 reverse strand)
gacacacatccttgtaagttcttgttctttttcatgaatcttatgttttctttacttttcatgtttttgtgtgtctgttttgttttccaaatttggttcttagttagtcctaggataatttaatatttgaataaatcacttagtctttgaagagcttcaattcacacacctgaatctcatttattgcactagatctcgtgagcaaatttgtttccttttaaaaaaagtgtttttttttggggggtaattattgtttccattctggaacttggtgctcttgaattttatgtatgtatgttctttttcttatttatcgttgcaacttgtaacttgcaagctgtctcatttttaagaggttttgtaatggaaatttatacaccagattagctgaatctcagtaattaccttgctctgaaggttttgttttgcaaaaataggattcagggaaggaaaaaagggaatgaataaaggaaaacaaaagttttattttttcttcctgttttgatcttactttattttttatttggttctattttgagctgaattaaaaggtgttgatccgtgctaattgtcagatctgtcttgtatgaattctattgcagggtcttgaacaggtttttgggtgaaggagtagtgt

SEQ ID NO: 16551 - DNA, 843 bp, Glycine max
  Intron number 2 from transcript Glyma04g32440.2 (locus Gly ma04g32440) derived from phytozome v7.0 (chr-ID Gm04; pos 37129406 to 37130248 reverse strand)
caagcctagaaggaaaattgtccgagcttgttgaggtaagaataatgtttatcttctcatttccacatttccgggtaattacatgatcctttatcacaaaacattgtcttgaaatatatctgtttttgtcttttattattagtttttccatgtattcacctcctaacaccgcctatggtatcatagccagtcacaagtctaggtaaagggagagagttgtgctaggccttcagacagctaatgtaaaacttgtcaaaataccaaacatggatcatgtatgaccgattttgtgtgccatatattcacccagtttagttggtctcatcctttgatgtgggggaaataaaaaaatggcatggaaatgaccccttctgatttatgtgccttgaaagagatattatgttactcaattcctccctgtaacatgaaagatgaatgcctgaacttccacttgttctgacttatgctgcaacatgagtttttaattcgtatgactaatttattctagtagaaaccagaattgcagatataactgagttcttagcaattgattagcactggtgtgttgagtaacagaaacaataagtaatctttgcactgatatagatattggttttagctccctttgccaattttatatgccttgtttttcttggaagttccaacacatctttgttttgcaaatcatgcaaagtttctttttccagcgaaagttttcaccctatactttgttccattgctttttgtggttgaagttaatggttcttaaatgggttaatgggtgttaatggtgcacaagttcttgcagcttgacccagagtttgtagcagattttgctcaagg

SEQ ID NO: 16552 - DNA, 746 bp, Glycine max
  Intron number 2 from transcript Glyma02g05310.1 (locus Gly ma02g05310) derived from phytozome v7.0 (chr-ID Gm02; pos 4293083 to 4293828)
ttacccatccctggcgctcctcaactctttttgacgtcagttttctagtttccttttcatttttcgtgctctttatgttgggaaattttctgttttttttttatttataaaaaaactataatgtttaacaaaagaaactaaactttctttaatcaaggatctagctcggtccgttgagaagcgtgcgtgaattgttgtaatttgtaatctttcaaatactatgtctcccattcttacggataaaaaattaaaagaaattaaacttgcttttgtgttttcattgttagtttggtaaaccaatattataattgcttgtcttctttcggtcatgcattgcttcagaagtcataaccaatattagaaattaggaaaaatagttttcagtaggtaaattatgtcaaaacagacatgttctgaactaaattgattctggttttcctattgccataccttacattacatgagaaatgctagcaattcgccctctactatttgctgaaatttgttggaaatcacaaaattgtgtgggtattcttatttaatgcacctcactcatgattttgagttttcaataaattttgactaattggagaaaatgtgttggaaggggtgtgctagagagtgtgttactagcactcttcttccttacatttagtttctacaaaagtaaatgacaatctcatttcatgtgggtatattttgtttatgcagacaaagagtggacaaccgtgctgacctcagtgatt

SEQ ID NO: 16553 - DNA, 893 bp, Glycine max
  Intron number 1 from transcript Glyma05g05860.1 (locus Gly ma05g05860) derived from phytozome v7.0 (chr-ID Gm05; pos 5406353 to 5407245)
tacgacaaattcgacaacacttatcaggtcttcttctttcagatccaatctcactttcactatttcattgcatttccattattattttcaaaacattcaagagatcacggttttatcgtgggatgggatcattgctttcgttccagttttgacatgattggtgatatgttcttgaattaaggttcattatttgtttttaagaaattgctatttaaatcacgccaatgtgttctgacatatgaaatttaaaattcttttttaaattttaacatttttcccccctcattccaattgtgtttggcttggagacatttaataatttaaatccgaaaattgggttgctaatatgattgatatgtttatgctgtatgatgcaacttcaggggaggaaatggcatagggaggagagaaacagaaaacagattgcagtgttgcacgtgtctcaaatacttgatctatatagaggtcaaatagtttagtagtaaattatatttaaaatagaaaaaatataggtatataagaactttgtagcaccagtaatgctgagtcatgcgaaatgattttaggacatacaatacatgtattttcctgtctttacttccttttccacctgcaagtgaaactagagtctacagttaactataccctttattttcctcttaatctgtacacatgcgtatctgtacactacacattatgtacagatataattctacacatgcattaagttgtttacatttttcttgtattacgtcttatgcatattcttgaattacatgcatttccattttcctaaattgagttgtttacaattttaccgtactcaaaactttgttttcttttccttttgctaaacaggctacaatcggtatcgattttctgtcaaaaactat

SEQ ID NO: 16554 - DNA, 508 bp, Glycine max
  Intron number 5 from transcript Glyma03g41500.1 (locus Gly ma03g41500) derived from phytozome v7.0 (chr-ID Gm03; pos 46943013 to 46943520 reverse strand)
actgtcttgttgagagagttactcaggtgcgatttttttaaagtatctgaatgttcaaaagcatctgggagcaatttaatgattaagatgaatttacgatttccaggcgggatgaaaaataacctttccacaatcctttttcttgcctacacgctagttatttatttcatgctttaatttatgaaactgcactatttaaatctctttgctgtatatggttatctagacatctaaacaaatttctactgctacttttgtcaattttgaattcattgttaagtgaatggatattattgaatattttttgcttcattcttgatcttatgaaccccattttccaaattcatggcaatattcccttaaagtgaacaatttcattacaaataatttcaaccaaaagtgccagaaacacacacgtctgctgtgtatttcattctcttctttttggtccaattcatttacgcaaaccattttcttggaatcagcataagtgctacattgttgcaac

SEQ ID NO: 16555 - DNA, 614 bp, Glycine max
  Intron number 4 from transcript Glyma03g41500.1 (locus Gly ma03g41500) derived from phytozome v7.0 (chr-ID Gm03; pos 46943548 to 46944161 reverse strand)
gagaagttaggccaaaaatatcgtgtagctctaaggtagagttatctcttgtgctttgattactattaatttatattctcatagacttgggatgcatacatagaacatcaaattatatatatccatgctgggcttgtccatgcatattctagtttttcaccttgtgcttattaattgaatcttagattgggtaataaataaatcctttgaatatttctattctaaaaccctgaatttttcagtatgtaaaagaaacaaatatccaactgaaatttcaaaatttatcacattctgttaaaaaaattgatttactggggctctaatacaactgagttaattcacatgggaaaaaatgtctctttttaaaagacaaactgacagggggtaaaacaaagcgttggactccttgactttattttcctttgaaatatcgtggccttttgttactatcttcttttttatgctactattggtcatattcttcaagtaagcaatttctcagtctagtagggaaaataaattataatgttctagtttcagctgctgggtgtaatcatttaacccttctatatgtgataggattgcaaaggatcctcgatttgagagaatactct

SEQ ID NO: 16556 - DNA, 189 bp, Glycine max
  Intron number 1 from transcript Glyma03g41500.1 (locus Gly ma03g41500) derived from phytozome v7.0 (chr-ID Gm03; pos 46944883 to 46945071 reverse strand)
aaaaaccttctaaaggaaaagttacccagaaacatgtaagccttcattctctccattttacttttcttctgtttccttgtgaatatattgttttccctatttttaatttattttttggttttaataatcttttgtttgaatttgcattatttagtccaagtcattcatcggcactttttttttcaatac

SEQ ID NO: 16557 - DNA, 723 bp, Glycine max
  Intron number 1 from transcript Glyma02g16000.1 (locus Gly ma02g16000) derived from phytozome v7.0 (chr-ID Gm02; pos 14438844 to 14439566)
tcttgtgcaaaagcgggtctcatctcccgttcttggttagtattttctcttcctaatttgccattgttaatatagggtaatcatctttttgtaaaacacaagttcagtataaactctttcaatgtctgatttctttaacatgacatgcaataagacaataattaaacaaatgaaagggataaaggaatgagttaacttgagagagctttgattatctgaatgagaattttaatatacatgttttaattgattgtttggttgtagatggtgttggttaatgaatcaatcattttcataaaagagtttgacggttgtaagtccaattacactatcaatcactttttaaggtagttattataaatatataatatgtggttttttttttatttgtaagaattgaattgggtatccaaaagttttcaacaatttgtgcacacaattcaaccaacaaaattagatatttttgtgtatacagaggtttcagatggaatgacaaagcaaatttatatttttagtgcatgacttattttttcttccctgagtcaaaagaaatgaaaaaaaaaaaaactgagaagaaatatttaaattgaagtagtttaggaaactatgggtacatatcaaaatttgaaacattctatccttttctctccaactttcttcacaactaaacactaccttaaggattcatttttttgatttttgatttatataggtttgccagca

SEQ ID NO: 16558 - DNA, 460 bp, Glycine max
  Intron number 2 from transcript Glyma01g39070.1 (locus Gly ma01g39070) derived from phytozome v7.0 (chr-ID Gm01; pos 51055112 to 51055571)
cagggtttccgtttcattatgcagtaggttattaaaataaattttgattatttaatatttaaatgtttattaattaattgtgcttgtgcgcaatgtaattatccaggtatgtagtcaagttactttatttctctatcctttcaaccaattgatcaattattagggggggaaattggtgtataagaagatgaagaaataaaagagagaaatacatattaaaaacaagtagagaaaaaaaaaagaaaagttaaaaatgtcaaataaatatttctaatacagagttatttatgaatattagaattggtgcgggaaagttaggtaactttacaaggtttgaagttgtaatttttttttgtttataacctgataaaaatatctactaattttattaataatgaatgttggttaaaagatttaattaaatatttttatccttttgatttgcaagacttttatagtc

SEQ ID NO: 16559 - DNA, 761 bp, Glycine max
  Intron number 2 from transcript Glyma02g02500.1 (locus Gly ma02g02500) derived from phytozome v7.0 (chr-ID Gm02; pos 1867512 to 1868272 reverse strand)
ttcgttgtgaaaccaagacaaaggtttgtttcttccacttttccacttgcacgcactttctcaggaatgtttgagtatctagtggttggcctccaacctgcgaatcgaagggatgtcttcttcgttcgtctgtttggatgcgtttccaaacaaattggacgaaaattcaaacatgcactcacttgtttggtgttattctcctaccacatttgaagtattttggtgttgttccttaattacaattaaagttttaattttgtaatccttgttggtctttattgtgtggatgaaattctaattctgatagaaaaatgaatcaaaaacaccgattcctcctccttaaaattgatcttgctcattttacaataagtatcttaaaagtaatctttgaaatcatctaaaaattctttatactatcaattaatgtacataaattaataaattatgaatagaaagacattttagtcaaataaataaactatagaaggattaaagtgtttcacatttgttatcttgagcatcatttcttttagaggcaaaattgaaattattttctctacacacacttatccgcacttggcatgagcaaggatattatagatgaaatgtaaaattattgatatgcatgttgacataaattacaatatttttgtttggtcgttgcttttccttcaaatgattgcacatatatgtatcctgattaatggttggattaactatttgaatgaacatggccattaaatgcaaatcccctcaggaca

SEQ ID NO: 16560 - DNA, 949 bp, Glycine max
  Intron number 2 from transcript Glyma02g46540.1 (locus Gly ma02g46540) derived from phytozome v7.0 (chr-ID Gm02; pos 50456137 to 50457085)
atgtaagtacatgtttgattagcaagttcttttaattttcatggagttagaataggaattgctgcactgctcctgagcttattgccccagctagctattgatctaatagaaaaggaatacactaaaaactaagttttcattttttcctaaatgaataacttctctggctgaatgtgtccataatcagttctgttgaagctgtttgtgtacctgtacttttactctccatgaccttgaatttggagtactttttagttgaattatgtttgctgtgtaatcgtaccaaacaaaagtaattgaagaggaataggtgaacttttcaaaatcaggatatgtttaggcatacccatgcctttggtgctttactttggtcataagatgggactttttgctgccatatttctcaaggagaccaaaggatatacgatgggaagctttggcttgtgcttgatacgtaaattgactgtaatataaattgtagtgatgttaactggaaatgcataaaaacttatgagtagtttctgaatcaagaagtcaagtgcttgaaaagttatcatttccctgatataactacttatttgctgtctgacaatatgtccagcctgattaagagaggaaggaaaatggccttttgatggaatgaacacatgctttgctgaattagattattttttttggaaaagggggaataccaaattctatcttcttgatcaattaagttcattttatttctcctggtgatgtaattttcataggtctaaacatgcctgccttaagttgataaactttggttcattaatttatggttacattttactttgtttcaatagtaattctaactggtaaatatccatgccctgttttattttccattaagctttctttctttttttgcttactttggttattcatttgccatatcaggtgggcgattgtatatctggcacag

SEQ ID NO: 16561 - DNA, 684 bp, Glycine max
  Intron number 1 from transcript Glyma05g30070.1 (locus Gly ma05g30070) derived from phytozome v7.0 (chr-ID Gm05; pos 35496004 to 35496687)
atcgcttgaacaagcctcctgttaagaccattcaggtctgtctctctcgctctctttctttctctctctttacttttgacttcatgtttgtgtgtgtgttttggggtgttcttcatccaccccattttggtgtttcttcttgttttaatctgtttggcacccaatgaaatgacctagttttgtgaagaaaaaaatattacttttttttttttgcccttgtttgctggaggggagttgctactgaaatggttctgtacctttcaaacattttcacttaaaataacccatcttgcaagctgctgctaccgatttttttttttttttaagtattaggtgacttcttttcttttctctttgttttataaaatgtagatcttttgtgtggatgtgctgatttttcaagccaactaaaatttccctttaatttttttctcctacttacacccctgtaaaaaaaataatagcccatttgatgggaactatagattgaattttgaagctgtaactagaaagtactgtaagaaagaagtaggcaatgatttgccttttttgtttatttattttccctttttaatcagctaccgggttttgagaagtagaaagatattggtttcaattttgttacatagtatttcaaatgttaataatatgatgatatgattttgtcaatgttgcagagtccag

SEQ ID NO: 16562 - DNA, 966 bp, Glycine max
  Intron number 3 from transcript Glyma04g07680.1 (locus Gly ma04g07680) derived from phytozome v7.0 (chr-ID Gm04; pos 6010350 to 6011315 reverse strand)
ggtcaccatcttcatctcaggcgtttcccaagtaagttaatcatttttatttctacatgttcttttgttggttgtaggattttagtagcatgtgtttgttgttttcttgctatttgttgtgtaatgcaggtaaactaaattgcgatattattagaattgatatgtttcctcatcacattaatgtgtgttgttatgcttggttacattattcagtgcatgatttttgttgaaaggaacgatgattctaagagtagttggtttattaatatatagtaaaagtgtggtcacaaacttaaatagcttttgtttatttcttttccttgaaatgttatcgaagtccaactcaattctgcagcatttttttagcaaccattgtaccaatgttaattccaacttattaactttgtctatccctctgttgagattgcatcaaacaagcataagttcacaactgctgccttacttaattgattaatttattcacttaatttaactagtggacttcagttgcttgtttgattacaattagacctgttaaacaggctggccctctttcagacattgtgttgttggcctagcctggcccaacgaaactctaggactattgaaactttgcctggccaggagtatttggtgggtcaaacaggctggtccaaaatgcatgtagagaagcaggctggcccactcaagacattttcctttgttgggttggcttggcccaacaaaagggatgggtgttgaaatgtcaggtctaccctgcaaacagtggacttctcagtccaaattaagagcttagttttaaggcatgatttgtcaatcctttcccttaaatgataaaaacttttgttatgctctaatattttatggttgtttcaggttgggtcaaattctctctggaattctggcttcttccaaattttgttttaaacttttttcatggtttttaaatctataggaagcaagtgg

SEQ ID NO: 16563 - DNA, 990 bp, Glycine max
  Intron number 1 from transcript Glyma01g35110.1 (locus Gly ma01g35110) derived from phytozome v7.0 (chr-ID Gm01; pos 47674697 to 47675686)
cagtactttctgcatccaaaccaatcactactgcggtaagtaaaacaccctctctctctctctctctctctctctttttcttctttttcatcattgttatttttttactttatgattatgcttatgcttatatatgcctttttttcagaaccccattatccagtgtaaagtgtctaattattcatcgggtgtagattataaaaatctaaactttcatgcacacatacacaatctacctctattagatatgcataagaggggagagaaaagttatgctttctgatttagtcatgagtacaagatgggttagactttgttggatttttatgataggaggtgaaattttcccagttattaatggatctctatgttttttcttctctaaattttcctcttggttgacttctttgttcttagcccaactttccagattttgacttggttggagggtcttttgtgtgatttatttatactttctgacggggtctgtgaatgagatcaagttttccttacacttgtgtgaaaagacacatttgtggtgttttttttttttttttttcttgttgaaataagaaaacttgaaattgaccctgaaagtcactcttttcaagtaaatctctagaagcactgaaccagaactgtactaggattcaatagtcggcaactcatagctttgttagtttctctggaaaattcaagggtcatggaggatccatcttttggaaccttggaagaagatggccttaaatgatcctgttgtaaaaggaaaacttttaaacacttaaattgtggcaaaaagtaataaagaatttagttttgcagcacacaggatagagcagacacggaaattgaaaagcagatatatattatattataattactataatttatagatactgttcaaaaaaggatgctaatcgatgttgaaaactgatggtgccattattgttaacaggataactggtaagttcataaaggggagattcttca

SEQ ID NO: 16564 - DNA, 704 bp, Glycine max
  Intron number 4 from transcript Glyma01g44900.1 (locus Gly ma01g44900) derived from phytozome v7.0 (chr-ID Gm01; pos 55368431 to 55369134)
ggcataaacaagggtagcaactgcggttatcacatgtatgtagtatcttttccttccacatgtcctcaacttttcaacttctgaactgcaaatgaatcctttaagaatttaaaatgaatgcatgtttgcctagaaacagtgaaagggaggcactgatgcagtatttgaagccctcttcctttgctaggagtaagcaagttgttagtcaggtcaaattggtgttgtctgtttgacaattatcttcattaaccttttcttagtcagaaactttatgtatgatcaagtgatctatatcaatttgatcttaaaatctatatattatgatctaacaataaaacttgttttcccattggaaatattgtaatttccccaaacaattaatttctaggctgcttaaaatcctggacctaatagcaacaaatgtaaattaagcacatttaatacaagtataccctttgaaaagttttccatggactccaaatggaaattgccattatcattctaagcattgaaaagataatgatgattgcagttccttgaattctgagatgcagctcttaattatgatttacatgataggagtatttctttccattgtagttgcttcagtagttattacttcatgaagaaacttttgcccatagctttactgagtaggtccctttgcagtgtttactcaggcactgtagctggagctcgagagg

SEQ ID NO: 16565 - DNA, 350 bp, Glycine max
  Intron number 1 from transcript Glyma02g15150.1 (locus Gly ma02g15150) derived from phytozome v7.0 (chr-ID Gm02; pos 13663077 to 13663426 reverse strand)
tcccacggacttcctggtgcagacccgattcaagggtaaaacgcctaaagttttgagttttagagccactaataaaaagttatttcttattactctcgctcttgattataaaaaaaaaatgacatgattgattaaataattaaaatttgtttatattttaaaaaaataagaataatttattgtttatattcgagattaatattatttttttttaaaataaaaaatgttatatatgcaaacttttaactaaaaggcttatggcacctcactcttttgttcaaagttattatttttttcttcttatttttactttaggtctgaatttctgttggagcgaccctgtgcgggtg

SEQ ID NO: 16566 - DNA, 771 bp, Glycine max
  Intron number 2 from transcript Glyma01g16370.1 (locus Gly ma01g16370) derived from phytozome v7.0 (chr-ID Gm01; pos 20244140 to 20244910)
tccgcaaaaccgccgagaaattgctgctcaatcatgtacaatacgaccttttgcttttcgttgttaaccaaccaaccgtgaagctatgatcactgtttttccctattattcatcgttgggttccaatagaaggaaaaccgttacttcacattcgctttgaagtagaaaaaatattggatggatgagagttgagtacaatttgtttattcacttttcgggtatttctgtagtaagaaagcagagttataagtaattttccactctttgctgcgatgagtgacgatagaaaacttctctttctgctgacttctgactctcctaaatgattgtccatgtgttgttggtggtgcaatttgtttatgtttcttcatctattgcacgcatgcatgttgtgaatattgtagtgtgtggaaatgcgtgttgattcggtaattttgagggacacgtgcttgttactgtgatacttgcaaagtgaaaagaattcaattacattagcctcatgttggattgtataacatttgtgatttaatgggccttggatatcttagggtagcgaatttggattttcattttccgctctgctttcctacattactatcaaacaaagaattgttgtaccatttatgataatgggtgaacagatatagcataaagtgcgtttgcattctatctattgtattggttatgtgtggcagtcttaacttttgttattctctgtttcttttttttttttttttcagttaaaggcattaaggttgaaggaactggctg

SEQ ID NO: 16567 - DNA, 850 bp, Glycine max
  Intron number 1 from transcript Glyma03g18410.2 (locus Gly ma03g18410) derived from phytozome v7.0 (chr-ID Gm03; pos 23290648 to 23291497 reverse strand)
tttatcacctccaagctgtttgtcttttttatatgtactttatatttgtcatactaatttgttgccaagtttatctatgcaatcacttggtatagatttcttgagagtcttcatgtttttcttcttcttaattcatagttattgaaaatacaatttaataaatcagcattccaaagtattttcattgaattatcttatacaagattagaagagatatttaatttgaagttatcaaatattatttacatgctaagtctgcaagataactcattgaccattttatccttgtacagaaagatgtgaaattctgagattagcatcattaatgatctttacagttgtcatttattttcaatttttcaattattttaacctccactaaggttaaaccatatttgaatccatactaggagaagcacctacatttagtgtttaaccatgtcttgagtaggattgccatctatgaagaatatctattcaaaatcccaaaaacattgatgtttttcaattcttcaaactttctacaaatactgattttctttcctttgaatctgaacattatttcttcatcatctttttatccaccaaataagccttctcctactctaaaagcctatagttcttcatctttttctgtcaaagtactattgtgatcatacgttgttgttcaaaaacttgaacaattttatgaaaagcagaggactttctcaataacagtctacagatttctggcatttattcaaactgttcttgctagtttgttcttaaactcaattacatcctttatcattctgattctgtaattacattctttatacccaatttaatttgcacatgttttataggtgta

SEQ ID NO: 16568 - DNA, 711 bp, Glycine max
  Intron number 2 from transcript Glyma02g10550.2 (locus Gly ma02g10550) derived from phytozome v7.0 (chr-ID Gm02; pos 8434258 to 8434968 reverse strand)
gctcctactaagggtgagtcttgcattattcttttaatgtccacttcttcaatattatctttctatgtatctatctatctatctagaggctcatgtatgtaatgttgatatttatgcttagttgctgaaaaagttagatgtttgtaatggtctgttttgtgctaaaatatatcctgtttgctgattgttggttacttcattaatttagtgcatattatggtgaatgcactatgttttttggttctgtacgcctatcctctagtgtgtgcttgtgaactgaatgaatgtatgcctagttcaaagaaaatggatgtgcccctgggtcctttcctttaattttacatgaatggagaatattttgtttttcatgtataccggtctgtttggagtgtttgtcgagatgttgacaaatgataatgctaacatgttgaattctgtagtattatactggattgcataagtattttgctttccttacgttactatttaatttgcatttcctttcgactactcagtcataagtcatgtcctgcttttcttagcaatgtatagtataaacttattgcccttttttgctagtttgatgttctctttgcataagtattcactttaaggttgatgcattgttttatagacatagttggcaaaggctcaaagtgacactggtttcctgctaatgatctaattgcttttttccttgtgcagtggaca

SEQ ID NO: 16569 - DNA, 599 bp, Glycine max
  Intron number 4 from transcript Glyma02g05750.2 (locus Gly ma02g05750) derived from phytozome v7.0 (chr-ID Gm02; pos 4604936 to 4605534 reverse strand)
ggcgcatcctgaagacatacattactaaaagcaaggtgcaattttgaatatgcatttgctttccctatattttcttcctcccatgtcattctcatgaatgttgtgaatttttattttaagtatgtttgatacctttttaaggaatgtttgcatgctgttgttatttccaccctatatgattttctgtcttgcataattatggtctaattatcattgcataaccataaatgttttagctctggtaatatgggaaacaaaatagaaacagactagctttaattggtattgtgactgttagttgctcatgccttttgtggctaccattgttttaatatagttttgtgtaaaatcattggattctattgtggtcatctctaaaaaattgttgatgcttagtagtggtatctgcatctctaattcattgaacgatatgccctttgagtgtgccttactaaatataaaattctgattttggtatttgcctatttgatactgttccagtagtttgtgatgtttattcccaatataaaaaataaattattttgctcagtctgtacaatctctttctatttcacaggttatacttggcagagaaacac

SEQ ID NO: 16570 - DNA, 923 bp, Glycine max
  Intron number 1 from transcript Glyma03g00440.2 (locus Gly ma03g00440) derived from phytozome v7.0 (chr-ID Gm03; pos 213022 to 213944)
gacacaacacacacaaacaggtatatttctcctttggaaaatttcttttcatcatagatgatagacttgattgtgaagacgttattttagaaaatgatgatagaataacaataaacttgatgacgttatatttatgtcatgtttgtgttgaaaaatcatcttaattgttatcatccttaactggttgtagttgcaatctatcaaaattttttatcaatgtctcgaaaaagggttacctacaaagggggtaaccaaagagactaagtgcagcattgttgttgtgtacagccgtcaggacattgactcttagggaaatgggattctatatcgactagagataaggtggcctaagtagtgcttataaatttttggcaaacctcgttaaacaagttgatttttgtcggattgaattagatcctaagcctaaattctaagagtttgtttatttatgtgtaatgatcttcaaattatgtggttattgtaactgctagtttcttctaatcctacaaaacctcccacctccctgtatcgcaagttctggtttgtggaacccatttgatttgagcgtaccttaggagttaggtcacacatttttgctactttactcctaccctacttgcctatccattgctaagaaatggaagagaatataatagaataatagtttttcttcgctttaaagctagagtagtgacatgatctcaacttatacaccactcttctgtctttgatccacttctatgtaagaaaattaagatgatcagttatataatgtggtccaaaacaccataagacatcgtggctaggggtaaccaactctatggaaacacacaagagatttggattacgtactattattaccttggtcctttttctgactcttactaaaagtctaagctcaactgcatttgatgttagtgaat

SEQ ID NO: 16571 - DNA, 1021 bp, Glycine max
  Intron number 1 from transcript Glyma04g39700.3 (locus Gly ma04g39700) derived from phytozome v7.0 (chr-ID Gm04; pos 45885607 to 45886627)
ttcgcataataatattccaggttgttgtaaaaaccatgcatactttgacaatttgcaaacaatgattgttttctttttttatttccttgagttttcatacctacgtacgtatatatatctgatgcatatgctattcgtatatgtctttatcaaagtatgatatgtgatataataatagaaccagatttgtgtcaatttatccaaatcaatatcaatctttagagtgtgatttttttattctccgggtgcccccaccccaccgtgtagagattaatccggctcactcgcaccaccgcgaagccatcggtcaaagggaattttacataagtgagaatcaaaacctttgatccaagagaattttatatatagtgagaattaaatagatccttttcacacatgtgaatgcaataaaaccttacaccattgaattcctttggattttagagtgcttaaggaatactataatttgaactagacgtcttgcaaaccaaaagttgtgttactactgagtacggcctgtacgggaagaaggtgtaattattgtaagttgacagtgaattatttgtagaaaaatcaaatgaaatttcttcgtagctttagcacttttgaagttagtagaatgttgttcgaaaaagtaaaggaaggaagccttttatttattataatagggcaccgttatttgagactaaatatggtggattatctactatctatattgaaaatcgttacatggtttattaattagaaagggtaatgctcttaccagctggatccttgagggtctgtttctatcaagttgagctaaccgtggctacacttaattttgagctacctttcattatctgtagtgtcagtcacaattccctcgggtgattaattggaaaactaacatataagggaaggcatgtgtttaccctgtactatgtagtttgttgatgattgtaatttgtaataagtgttgcctattttgagtcttaacataatttttcaaatgtcactcatgtagcttcagcattggaat

SEQ ID NO: 16572 - DNA, 772 bp, Glycine max
  Intron number 1 from transcript Glyma04g40130.1 (locus Gly ma04g40130) derived from phytozome v7.0 (chr-ID Gm04; pos 46259892 to 46260663 reverse strand)
ggatcaaaggatcggagagggtcctataaaagaaggtcttttttttttctttctccttctccgatctaaactgattttacgttatgcataagttaattttagtttccggcaattttttctttctcttcacttaagaatagttgtagtgaaacttatctaaatggggttatattatgtggatgttgttatcttatgacttcctcagtcaacaaaggttgtgtgtcaggaatttggggtggtgcctagaggatttggtgaattgagatgtgtacggacagtttactagttatagtcatcttatacatatgagtaaagattatctttcttgaacgaaaaaaaacaacaacattgaagctttgaggttaagttgattggacttttgaaatattttaatactgagaattaatgtagtgagttctcatccgttgattttgatagtgctaggaattttcaagagttttgcttcaagtgggttcctttattttagcttatagtggagtggcctgccttgatatgatcgcatggcacaatgcaattatttcacataattttttttatatactttccttcatatttatattgaaaagtattttttttctctatctcctttttgtttttaccttgtgttacataatttgataatttaaaaataaaaacaacgaggaacgattatttttctttgcatattctgattctccaacaatgatatattattacaccaaataacatgcatgctatatcttaaattgctgcgcaggaagactgaacagac

SEQ ID NO: 16573 - DNA, 737 bp, Glycine max
  Intron number 1 from transcript Glyma01g33900.1 (locus Gly ma01g33900) derived from phytozome v7.0 (chr-ID Gm01; pos 46091228 to 46091964 reverse strand)
atgtcagaaatctaaaccccttttgctctttttttctctcatttttctagtgttgccattcttttttatgcttaaaaactgttgactgttaatcaaaaaattattgtttttatgtttcttttgtaatgtggagattttttatgtcaaaaatctaaaccctttttgttttttttccctacttgagtttatgttagtgttgcacttcttctttgatgcttgaaagttgtggttgttaactgaaaaatgatgggttcttttaatatgaggattgttgatgtgtcttttactttgttatacgtgtatgcacttagggtttaatgattgttctttcaatattgtattatcttaataaaattagcttaagcatatgccaaatttaaggttttatgtggcagttgtggttgtgattttgtggcaatccttgatattgcgaaaaattgaagacaagggttgatgtggctacaattgatatcataatgcaatcaacgatgttccctaaaactacaacctaccaatttttgaaaacttggccttgtgtatttagttgttaacttggtattacattctaaagttgtattgaacataacaggtaatgactatggcttttagttttgattgtttgttactatgttaatgatatgttggtgtaggtatgaattctgttgcttttgttgagtggtgttttgaatttcacaagtggaggagaacatctgcaagtttgccaagaaaggtcttac

SEQ ID NO: 16574 - DNA, 999 bp, Glycine max
  Intron number 2 from transcript Glyma01g08580.1 (locus Gly ma01g08580) derived from phytozome v7.0 (chr-ID Gm01; pos 9980987 to 9981985)
ccactctcgttttaactactgtcaaggtaaattgaattcaccgtttttttatttttaaatattttttctacattggattccttgtgtgcggaattgcattgtgttttagtttagtgtatgtttgttgagtttaatagacatgcactctcgtgtatgtgttacaagatcaatcaatcataaatcaccgttaagattaataattataaagtcaacaaactttctatacatgacagtttgtaattgaatgacggtctaccacttttattatttaaacagatttctttatctattattttttgttattattattattattattagtagtagtagtaggtgtaggtgttttggttactgtgattcttattccttttgaacaaagaagatggacagagagggaagagagcagacccgttttttaaataatagtgtgttaatgtgattgctttgtgatgcatttcatttcagatgtttctttcagtaatgcggcaaagggaagagcagagaaaatacactttttttttttaataataatatgcctttgtgatttctttgtagtgcactcctcttcacatgtttactttagagaggtgctaaaggcatgtgtgtgagtcttgcagcctaaactttcatggtcatttgggtgctaagttgcttacttgtgcatcatgttttttgattctttctttatttattggttggcaatgtcggcattgacttgctgtcaagcattgccaattgatttgctccctactagtatagagaaatgcatcattgtatccattgcccttgttgccatctagtgattaattgagattttgttttctgtgacaacagttctttttatattgcaataatgggttatcatttaccaccaacaatgccaatatagcacaaggactgagaatcacaaatgtatttttaaaactgcaagttatcacaagcttgctattatatcatgtattttaataactccattgcaggaaatttcaagattgagat

SEQ ID NO: 16575 - DNA, 768 bp, Glycine max
  Intron number 1 from transcript Glyma02g43920.2 (locus Gly ma02g43920) derived from phytozome v7.0 (chr-ID Gm02; pos 48602099 to 48602866 reverse strand)
ccgccattgctctttctctcttccttggccttaaggttcttcatttctgttccttcacttctgggcttctcttacttttcataaaaatatgttttttatttccttcttctttgatagattttatgtaacacttactgtattactataagaaccacgtgcatttatgtatttagttatgaatgctttcggtaatgtgttctttttagtcatattgtgggtccagtttttctaattatttccttcaattaaatagtgtatcttggtcttaaagattgttacttctgctgagtgcttactctcagctgcttcagttttgattttggaaaattgtgaacaatcaccccatttaatgaattaaaagaataaataaaagtagagacacaaagggatagaagtgacaaataatgtaatggaaactgtagggaaaggtatagagagataggaagaaaaatgattggaataagaaaatttaagtgaatgtttataattatcctttgatttttttttgttggtttgatacaataaaaataaaaaaacaatttttttgaggggtggtggtggtggactgatggtgaatgcaacaaccagtttacctcattcagaaatgtgctataggattcacatgcataattgcatccacttttgcttacggaagtgtatggtactttctaacataatattctgggtcaaatgttgattcttctgtttggtaacgagtgatggggttttgcagggtgatccggtgccttgtgagcgctgtggtggcaa

SEQ ID NO: 16576 - DNA, 814 bp, Glycine max
  Intron number 2 from transcript Glyma01g24420.1 (locus Gly ma01g24420) derived from phytozome v7.0 (chr-ID Gm01; pos 31701506 to 31702319)
aggcactgcaatctgtttcaagtaatgatcaatcagtctacactacaatccttggagtgaccaaggttgtttacaacttatctttgatatccatttctatctcatatttttatttgatctctttaagttaattatacctgtcaaacaggtttttgacatatattttgtagcaagtggataatgtatgattgtaattcccacccttcttcccgttcctcttcttcaagggaaatgaagtagcatttgactgtgaattctctgatcatttgataacagatatactacaaaatgaacgtatgatttgtctcatattactaagtatgagcatgggtttttggtggggaacattgttgaacaggctgcagtcagagatgttcaggaggcttgtgtctatgaacgtaattttgaggaggtttaattattaatagtatctaatttttttttatttgtttcatatttgatcatttgttgtttctggaattctttgtttttttttttccatattggatctatgttgtttatgctcctataatgattgaggcatgtttctcttctctttcttgcttatagtcgtataaaaagacagaaattggaaaatactcagaatgcaaaaattattggttcattgcttatcattttctatttggttcattgttcattgacaatgctcactattggtaatatcttttctttgttattaataaatatgtgaatgctaacctttttgctattagttattcatatttcctgaaatttaatgtctttgattgaccatcaagtatagcattgtgtgggctgaagctcggaagcaaaa

SEQ ID NO: 16577 - DNA, 927 bp, Glycine max
  Intron number 2 from transcript Glyma01g03260.1 (locus Gly ma01g03260) derived from phytozome v7.0 (chr-ID Gm01; pos 2790291 to 2791217 reverse strand)
ttcgagcttctgagcttcagaaagagggcaaaaaggtaggttttaagttattttccaggtcatttacaaaatattatatttgtttgacttgcactttgcacccttaggttggaggaataaattgatcctgatcataaaattccttctattgaatttgtcttttatttggtattataaaaaactgggttttcaaagtaactttgaagcctgctattgcgaattgttcgaagattctcatatggttttagaggggaccacaagtatgcaccatgttgaacaagttgttgtgtcctagacctttatcacatggccatcatagtagtggtagtatgttacttattacatgtttagcatttgaaacttaatagtaagcactttataatacccagtttttgttcttaatggcttgttggcaaagttgttgttctaatctttttacattgaagtatcttccgtaaagcaaatcagttgttgttaaactctttagctgtttgaaattaaacatatttatatttttattattgttaacttgcatttgcatatcctgaaaatggatttgcataaaaatacgagcatcattaccaatgatgtctatgcaaacatagtcttattatgaatactgtcagcttacattaccttcaagccaaattacacaaataaaattacatttatattcatgtcatcatctatacatttgtgttcctgtacttagtcatggatttagctcctctaaaatgaacaaatgtgtaatgtgaagaagagtacattaatttgaattggactaccatgtaatcttaactaactttgaatcaacagtaaatgtgatcttactaacacttttacacatttgctaactttagaggagccaaattccctactcatatttacagtaattcattttcaattgttggcagattatatttacta

SEQ ID NO: 16578 - DNA, 930 bp, Glycine max
  Intron number 3 from transcript Glyma05g25990.4 (locus Gly ma05g25990) derived from phytozome v7.0 (chr-ID Gm05; pos 32021983 to 32022912 reverse strand)
gcttattgagacctggattgaaaagaaagttaaaggtatttctctccccttcgcttcctttgttattagactctcaatttaggtttggacatctagattttgttgaacgtggtgcaccagattagtaaacatctgtttaatcgttgaaattacaaaaatgtcatttcagtcaatcttgttagccctgatttttgtaattttaaaatgatgaaaggccttacttcttggaagcgatttctgatttttctaatgctcctaaagtactgccaaagttgagtgaacaactactctcatgggagctagttacatcttaaaattttcaacccaatcatcaattttttaagaaacaaattgcccaaccgaatggaatagcatttggcacctagaaacttcactactattggacagggctctacatattctttttagactatgacccaatttagttaaccttctccataaacacttatcagagaagaacttaaaaaagtaaaataatttgagatgatcccataagttaaaatcaaattatgcatctcagttggagaagttagatgaaagaacttctataaaagttaaattgcataagttgattttaatttgtggaaaaaattcagttcattttgcctttttttccccctgtaattgtctatgaaaaagttcatccagacaaggtatggaaagtttttagttgccaagctataaatgttcataatatgtattttgtgatgttcaatgtatcttcagctagcttgctttgcgtttatgactatctcgtatatatgtatatcaactttcagaggctgatatctatgttaaaaattacaaggttttagttatttgaatttgaaaattaatggcttaactcttatttgttcaaattttaaattagaggttgcatcatggtcttttgttttggtattgcagaag

SEQ ID NO: 16579 - DNA, 546 bp, Glycine max
  Intron number 1 from transcript Glyma03g27910.1 (locus Gly ma03g27910) derived from phytozome v7.0 (chr-ID Gm03; pos 35689837 to 35690382 reverse strand)
ggcgtcaagaattgttcaacaacaacaagccagaggtattatgcttttgaatccttgtatttttctgagtgtctgcttcttgtttttatcaaaatattgagtcttttgttgtctgatcttctggtgtgttgtttcaagttttgctttaaaagttggatcttggggattctggtttggtttcttttgtaaatggatgaaaataagaaaattagtgttttggattcaaaatctgtttgaataacaggcaagtttcaattttcatgggttttggttactcgccaatcttttcagatcaaaagggtctctcttgtttttctttttgatggatttttttaaaggccaatgttagtggtttatttgtgttagtgggagaggttcgaatccacgacctctcccttataactcctctttttgttggatttatcctaagtgttgcatttgaatctgtgtgtttagatcgaattcattctatcaccttctttttaatgggtgactttgttgcaattgataggtgaagcagtagtagggggaggaaaacaacagaag

SEQ ID NO: 16580 - DNA, 469 bp, Glycine max
  Intron number 1 from transcript Glyma04g32970.1 (locus Gly ma04g32970) derived from phytozome v7.0 (chr-ID Gm04; pos 38322044 to 38322512)
ccctccgcgccgacgccttcgaaaaactcgagaaggtgaggaagaagaagaagggtcaccaaatatgttctcagtctctgtactttcggcaaaacttaattttagtcctccgaacataaactttcaatcaatttggtctcgaactctacttgaaaaaaaaataatgattttcatccttccttacagtgaaagagtctgtaacaagggacggaaatcactgttttttgggagttcaggaatgatagttgaagtacggaaactaatactaattttaaccaccaatattaaaaacatattttattctaaaaaataaataaattaacattattattcttataataattattttgattatgataattgataatgattacgatttgatggtgatgatgatgattaagtgattgagtggtggtggtggttgatgttgacagatagggcaggggacgtacagtagtgtgtttagggc

SEQ ID NO: 16581 - DNA, 653 bp, Glycine max
  Intron number 1 from transcript Glyma02g40800.1 (locus Gly ma02g40800) derived from phytozome v7.0 (chr-ID Gm02; pos 46006479 to 46007131 reverse strand)
gcgatacaagtatgtaaacatgagttctctttggtttttctatgatatagaatatttgatgttgtgaggaatttttgtgagggatatgggattgttgttggttttgattgtacttgtgtgttttatggtttattctggatttccagctaaaaaaatgtcttttcatttgggtaggatatgcttggttctgttttaaggataaaaataaaaaggtccaataaaataatgaaaaaggtagaaggtaactttatgaattatgatttggtttaccttttctcaaatgccaaatatgtgtagttcttgattttataaattggatgataatttttataaattttggaaaagtaacttttgaatgcttcatgtttagttaacagtttgttaagaacactatgcctgcgtgaggtcttatgaatgatctaatcttcatcaattgtgtattttcccttttcattttttaaaaatgaaacagaacaaattgtgattgttgattgatatttactatttaccatgagatgaatgattccttggtggataaatactttgtgttcatttaactcaacttgaatttctactatgagaaaatttccttcttttttttcttgattattatattatatttatttactatttggactggatgcagagccaaa

SEQ ID NO: 16582 - DNA, 780 bp, Glycine max
  Intron number 1 from transcript Glyma04g41460.1 (locus Gly ma04g41460) derived from phytozome v7.0 (chr-ID Gm04; pos 47302551 to 47303330 reverse strand)
tcacgccgcatcattatctacatcagggcaggaaggtaaatatataatgagcttaattgttactgtatgtaaatttttttatcataatttatttttatattgtcataaaatatactcttctctttcctcaaactcctattattatttttttgcttttgactacgtaaccagttaactactacctccttttttaatcattgttgttttcatgttttgtattaactgagtttaaaaaagtttgtggagtgattgcgtggtggacttgttggtattaaatcatcatgcttggacttgtcactgtagtcacgtgaacacgaattcaacgataatatttttatctttcttttattacatcacaccattttattcatattttttatttttccatttcattttcttcatgctcttgcactaaaaaaaaaaaaaaacagaagcctactagtactagcaacattatctatgtaattatgtaatattgcgatcataatgaatcccatgtggtgtaggacaatgaactgtttactactgtctcgatgacaccatcctcattaattgattttgacattttaacggtgagagtgtgttgaaaatatatactacaacttaaggattggatattaaaaattattaagttgttaaaatattaaatatatgtttataaagaattagcatgtggatggatataaacgccaaatatatatgaagcatgtttggtgatggcaaaggttccgatagataaagatctaagattttctgttgatgcaaattttaatttcaggt

SEQ ID NO: 16583 - DNA, 836 bp, Glycine max
  Intron number 1 from transcript Glyma03g23740.1 (locus Gly ma03g23740) derived from phytozome v7.0 (chr-ID Gm03; pos 30369749 to 30370584)
tctcttcccaactttccttccttgggatcattctggtaaactcctcatcttttctatctcttccattttatttatttatttttatttgatttttttcttttgttttctctctaagagtttagatcggctttgttctcatgagtagaacgagaatccaccttctctgttcatgtttggttttatgttcaagcgatttcgttgacattgcactccaaaagccactagtaacatactatagaaaaattgggtttcttcttttttttttttcttcaggaaattcaattacttactataagaaaattcaatttgtttttaatttgacttctctttgttgttgtcttccttcatgccttagttgttgtgtagaagtttttcgtcaattttgtccccttctctttctcggtgtgtgtgtgtgttttatttatttataaatttataaatttcttctgtttttttagggtttatctttgtgactcaaaggtttggatcctgaactattttcagctagtttttttttcaagccagaaaggtatttttggtagtgttcttgggagttttagtgatcaatcaagccactagagagattgtatagaaatgaatacttaataatttggtaatgctttttcaaataagatgttaaaattagagaagttggttaaattctgggtttgtgtcctactcttagtgaagtttgtgaagctttttactacaaaaagggttgtctataatcggataatgcactagattgttaagtttagctattagatatattacataagttgaagttttgtgattggtatttagtttattgttttattttgttcagcttctttgct

SEQ ID NO: 16584 - DNA, 761 bp, Glycine max
  Intron number 2 from transcript Glyma03g12210.1 (locus Gly ma03g12210) derived from phytozome v7.0 (chr-ID Gm03; pos 15305397 to 15306157)
ttcccggctgccactcaagagcttacactttccaggttggttttagcttttgactcataaaaggcttaattgtatttgattcttttatgaaataattttaagatgacggactgttatttgataaattgccgattcgagcccacatgtgagtccttcataaatgtttttttatttatttattaggattgcaagcttttcttatcttgaattgaggcattatttctttatcttaaaattttattaacaaaaaatcatttcgtttctttaagaaaatttaaaataagtttctaaatatttattgttattttaatttttaaacatgtgttaatattaatagttaggttaatattgttctaaaaatattgttattttaatttttaaacatgtgttaatttttaaacatgtgttaatattttcattttaattctgaaaatattatattttcagaatttattttcttttttaaattatccaaaagcaagctgatttagatacacagcataaaaaatcttcaccattgctgaatctggttaatgtgatacactctatattgcaatctgttctaagaattccaatcacaaaagaggagctccagcataagatacttatgaactctttggattttgttgagattagtatgttctagcactattgtttacaacatacatggtttcttgttgattattatcaataaactctagccaattaatattctcatcgctataggagaagttgaagaacaaattgagtatctggaaaag

SEQ ID NO: 16585 - DNA, 539 bp, Glycine max
  Intron number 3 from transcript Glyma03g12210.1 (locus Gly ma03g12210) derived from phytozome v7.0 (chr-ID Gm03; pos 15306234 to 15306772)
ttgatcatatctaaattaaatattgtaggccattaagttagaattaattttattttgttgtgtgtgttggggggtgagggttaacatgaaagtaggcaggttctgcttattaaaattaaagaaatgttgagccacttatgctttcatgaatacatcatacgatgtagttttttgtgttgagccacttatgttgagccacttattttctcggtctaaggaagtaacacctcataaaggtttcttacatacctcacatgtttcttttcatgggtgagataataagtagcaattgacatatgaagccaacaatttttttgtagatcaatgtgtggggtatgtaaaattttgtattactatgatacttgcacatgtgcttttatattagtttagtggctcaatggtacatatgagggtttggtcctttctcatatgcattcccccccccccaatatcttttatattagtcaatactattttttaatttgcttttatgctgacttacttttttattttcatccacatatagtgcagaagtggcc

SEQ ID NO: 16586 - DNA, 564 bp, Glycine max
  Intron number 3 from transcript Glyma03g42100.1 (locus Gly ma03g42100) derived from phytozome v7.0 (chr-ID Gm03; pos 47394407 to 47394970)
catctcttctgttaagcaacacaacttcagttgaggtaatcctatacattcttatttttctccttttaccgtatatggtaatactgttgttgttaacttgtgcctcttcccataggaattatgccagcctattactagaatagcaacccgggcattcacatgttagaagaagcctaactaaaatgcactccaaatgagatcttatttgtgagaaaaattacaaaagcacctttgagtgggaaaaaaattcatgacaatttgacatgtggaaatgctctgaaagttttattttatctatagccatcggaactgtgagattcattgggtcatcattaattctgataagatggttatgtacttgggggatatttttgtttcaatgagttattgattcaactatctattcttcattgtctcattgaccttcaactagatgaaaacctgatacactaactaccaaacaaatttcaaaataactctgcattgtttattgtttaatcttcatgcagcaccatgcccttcttttatctaaaatattatttggaaaaatgatgttttaggttc

SEQ ID NO: 16587 - DNA, 356 bp, Glycine max
  Intron number 1 from transcript Glyma01g43980.1 (locus Gly ma01g43980) derived from phytozome v7.0 (chr-ID Gm01; pos 54816274 to 54816629)
agcaatttattcaaagaaagagttccaaagaaaatgtaagaaaattttttcttcctgattttaatttgtgtgcaactttcacaatgtttctgcaaacgtttttttattagggtttaaaatttaaattgtgtttttaatgacaatccatttggtgtaaattgttcgatagttaaataactcaagattccaattatacggaagtgggatctgaatgatgggattcgaaactacacatgatgaatcttcatttccctttttgaatttgtttgtggaaagcaagtttttgattcgtctgtgtttatttgttttttttaatcactgtacagctggatagattcataccaaatcgatcggca

SEQ ID NO: 16588 - DNA, 1045 bp, Glycine max
  Intron number 3 from transcript Glyma01g33370.1 (locus Gly ma01g33370) derived from phytozome v7.0 (chr-ID Gm01; pos 45402960 to 45404004 reverse strand)
tgaagaaacccctaagcctccatcagctaatagacgtgagaattttctctaattttcttaacctaatcactgttgaataagccgcaatatatttcatataatgcatttttcttctacttttttttcttctttgcataaaaacctaaaaaatcaaacctccacctgattttcatgtttgtttttcatttctttttctcgactatcctttttctacttcttgggggtggtgatcagagatccttctgataccaccaaagaaaagctagaggaaaagaaaagggaaactcttctgataccattcagtccatttcactcttcttttaagctgatagtggagtgtcacttaacaaataaaggaagaaaagcaaaaacaaaacaaaagaaaagattctatccctatcaaaactcacttgtcaatctgaaacagtggccaaggtttcttggtatactgcaagtggcaaagagtgaacaatccttagcacatttatctcatgcattgctttttccacctttcctgtattattaatgtagactgtagagtgttaccagatatccagctttagttcttcaaattgattaaaaattaaacattaagcttccattatattttcaaattgaagcaacaacccttttccatattctttgatattcccaattaccacaatgaaatttcaaaagggaagggatgtaaaataagattcataattttttgtatacttaagggagaaaaaagaaattaaatctaaaacatgttaaatcattttctttctctttgcgtttatgcatgtctccttacatgcatacattgagtgagacagaatttcccccccgaaaatatagcgctgaatccattgggagagtgattgttaaagataatgatgaggtaatgatagaatatagagagagagagggagagagaaagggagagagtgaattaggaaaaaggtccgcgaagttatttaatgtgcctgtctgtttccctgtgcaatgtccgtgtgttgcatgtccagctccagagaagagacagcgagttccatctgcttac

SEQ ID NO: 16589 - DNA, 788 bp, Glycine max
  Intron number 1 from transcript Glyma02g46640.1 (locus Gly ma02g46640) derived from phytozome v7.0 (chr-ID Gm02; pos 50543508 to 50544295)
aaacataacacattccgctttgactttggaggcaggtatgtgaaaccacgacaacttaatcatctctttgttttttttgtttgtttatttcctttttctctctgaattcttttgtgtttctatttttgctttaactgtttccctcccttggattccggtggtagtttttctgaatagagcagcagaaaaataaaactagtagctttattagaatctggtcaaatcttgttgatagtttttaagttttggccggttctgggtatcttagtatttctctagaaagtgaaaagtttaaattttgaagctgggtttctggttcctgggaattcattttattctacttgggtttcgtggaccttgattctcaattccgtgtttgtctgctctgagctataaaagttaaggtttgaactggggttgctgtttctgaattgccttctttcctgttagttaacaactcacatgacagcccttaggaggaattcaaattgaagcttcctacttctctttcacatttgggagctgagtgttgcctttcctttttctatttttatgtacttcacaattcacatactagaaattttctctgttttggatctgcctaggctgttacgtgaaacttgtaaggaagtattttcaagccgtgttttagcagttatggtcttggaatagtgaattttgagttcttcttgttcctgtttgaagtttggtttgaagctttgcttaacataaagtcacttgaatttgttgaaggtttttgtgctttgtctggttcccaatcaccgtga

SEQ ID NO: 16590 - DNA, 357 bp, Glycine max
  Intron number 3 from transcript Glyma03g40150.1 (locus Gly ma03g40150) derived from phytozome v7.0 (chr-ID Gm03; pos 45971782 to 45972138 reverse strand)
accaagtaattaagtaacactacacttaaacgtaaaccttttcctataaccgcatctcaatacatcaaacatcatttattttgatcttttttcataacattaaagtagacacttatgttgatccattgatttaaatataagtttatatgtttaattatattaccaactttgtgttggtgtgactaactggttcaaatctttaatgaggcattgaattcaatttttatagatggaaaaattggacataattgagaagaaagatttcactaaaaataattcttcagtatttattaatcattttagaccaataatattaactaaaaacataattttaagtgagttttgatatatataggc

SEQ ID NO: 16591 - DNA, 840 bp, Glycine max
  Intron number 1 from transcript Glyma03g38900.1 (locus Gly ma03g38900) derived from phytozome v7.0 (chr-ID Gm03; pos 45171193 to 45172032)
gtgtccattgctccctttgcttattggcttgagtaattatatatatacttcccttactgattttgttttatttcatatatatacacaatgcatgcatgaaagggtttgatcaactttgaagcacttataatattctcacattgagtgtcaccgtcgatatcccttttgttttggttgattcatatgtgttatttatctatctatatatgtttcttgtatccaaaaaatggagtagagagacactcaaaagaaaaatgctacatgttctgatgattaagtagcggactttccatttatttcacaaaaataatcattagaaaaacagtaaggcaaatttagcatccttcctaactagaaaaagaaagaagttgtttttctacatgattagcgtcgtcggactatatcatactcaaaggttttcaaacggttaatgaaactggaaaataaacattcatgcgtgaggcttttcttgcctagctacaaaggaagaacatgcatgaagagaaggagagaagaacacaaaaaaagttagcaacaaggcaccaaccatgcattagtcgcagttaatgggggtaattaagctcctatagcttgattaaaacgcatgttatgcatgaactctttgtcttgttctcatttgtgtagagtgtagagaccaataaacgatgacgacgctaacgttatgcatgtaggacgcgttatgagtctgtgggcatgttacgtgccagcaactttctattcttaagaccaagtagtgcaacacgttgcacggagtttcttaaaaggatatagagtcatagatttgcagtagcgcatgacttgaatatggcagtttcattt

SEQ ID NO: 16592 - DNA, 788 bp, Glycine max
  Intron number 1 from transcript Glyma01g01270.1 (locus Gly ma01g01270) derived from phytozome v7.0 (chr-ID Gm01; pos 908361 to 909148)
tcggcgttctggccttctcgatccgtctcttctccgtaagcatttctcctcattccgcagatctggttacctgaacctcgttccggttccgagttttcgttttcttaacacgattgcatgcttctaaattcagccgctcggattattgctcaatcttaaccgtttcgttacgttcgtcgtgtatgtttcattcatcaagcatagcttgcaatatcagtgacttagccggaactgtctagatttttcttttttttttttcctgcgacttggccgagctgtgttcgttcattcgcagataagtcaacgatttgaaaaaaaaaaaaaaacgtttgcaccagtggtgtaagagtaatgcttagactgaaatgatgaagtgcaatgtgacataagatgttcgtaatttgtgatgtcatttcacatgtgcatgcacttgaaatggatttgaattatattagattagaggataaattgaagtcttcctattggttgacattctaatgtgtataattgcatttggttaggtttttttgttatttggttatggtttcaaaagcatgaaagtgtcgggcaaactcgcattttgttgaaatagttgtgtaaaagtggtgatatggtgtggccatttctatgaactgaatacttctaagttctgactcaaaaattctgtttgtattagtcttcttctgttttttctggcattgtactaggtcatccatttccacttgttggccagagatgctcttgctcttcttcacattttttaatgcattgtatacaggttataaagt

SEQ ID NO: 16593 - DNA, 1049 bp, Glycine max
  Intron number 4 from transcript Glyma01g42490.2 (locus Gly ma01g42490) derived from phytozome v7.0 (chr-ID Gm01; pos 53747833 to 53748881 reverse strand)
attattttcaaacagtcaaggcatttttggaattggtaggtctcttctcattttttaaaaaatatacccaataaattttcttctcataattcaaagtaactctagaatgaggtcacattggtcgtaaattggactgattgcatttggtgcttcattgtgtgccactcgaggggaatctatggcaatatttggtaacagttttccctgccaaaaaataattgtttttttgttcaaaagctatctcaggaatcaagtaaaaagaaagtgactatttctcaaaaataagctgaactaaaaactcaccaagtctgtgaatattactcttatttactcataaaataaagcagaatattttgatcatatatatatatatatatatatatatatatatatatatatatatatatatatcaaattgagaactcttgttattgtcatgaataaaaatgataaatatagaccaattgatcatatttgaatagtcaagattaaaacataaaggcacatgttctttttacatggtcatgtgaccattaactaacttttaatcttggctatatatgttgtgtgattgtatgcctgaaatttatagttttcacattcttaaaatagaattgttctcaccaaatatatccatatccatacatatacatatatgtgtgtgtataaaatattttttggtctctcaaaatatcttgaaattcagttttagtccctataaaaatttgatagattcttagtcctgccatttcttaagcaaagccaattctctatgccctctacaggtgctcacataatttcttcgacttcatattgcatttgcttatgaatttgtaaaataaaaaacctttgacaattaaaaatgaaggttagcaaagttaatgttacatattaatatttaattattttacttgctatttattttatccatttcaatgctataccttgaacttaggcagtaaattaatatcacttttgggattggctgctaattttccatctttccatttttaggaaatcaaagttcggctatctctaatcagagtttg

SEQ ID NO: 16594 - DNA, 913 bp, Glycine max
  Intron number 1 from transcript Glyma01g42490.2 (locus Gly ma01g42490) derived from phytozome v7.0 (chr-ID Gm01; pos 53750094 to 53751006 reverse strand)
cggaacccaaccagatcgataccaacgaaacgggggtacgtgtgactgtaaaccaattgcttttgtcgttttggaccttccactttaattctttttttatctatgtactctaccttcaactttttttccccaattttgaatagaataaaattcgtgagctcgttctgaactatgagaatcatatatatatatatatatatatatatatatatatatatatatatatatatatatatattattttttttttcatttttgtgctgtaaatttatctggcgttgaatttccgcaaaatgggttccgaagagatgcttgtgattagcattccaagagtgtctgcttattgtgtaattcagtaatcgttggcaattgattgaagagtaataaagcttggaagtggagaatagtagatggccgcttagaaaactcgttatttcaaatgtgcttgcgattactaaccatctttgacaatcagcctctgaagtttttagtttcagtattatgagagagtggtgggaattaagactgggtcgtttctgtttaatattttgcacttttgttgctggttttatactcttatttaagttttatgcctgtcttacttcaatgtgaattttggtctgcaagtgttctacttttttctgagtgatgcatgttactgtaacgtaaacacccccaccctaaagaaaaagcaatttctgaaggttgagtttggaggccaaacagaaatttgcaacgtcagacgatgagatttgacaattcttttaagtattttgtatgagaaaaaatgtctgtccttattgttcctcccttgtcatcatgatgatgcagttccggaataaaagaataatggaaggatccctctttgatgtccatagggccgaaccatcccaacaaccaattgtggcagcac

SEQ ID NO: 16595 - DNA, 374 bp, Glycine max
  Intron number 2 from transcript Glyma02g06120.1 (locus Gly ma02g06120) derived from phytozome v7.0 (chr-ID Gm02; pos 4898929 to 4899302 reverse strand)
tcattgtcacttctgtaagtcatatctttgagttgttcaatgttttcattccattgtctttcatccaatattcatcgagaaaatgtatatggatagggcttcttacttaaatgcactctcattatcgattatccgcattctatatagcacctggtctgcaatcatgaagagcagtttccctttcattttgattcatatctagactttgaaaataaaaacacagaaaggatctataatatgtctgcagcggtggcaagaaaaagctcgttaattttccatgggggtctccaatattgaagaacatgtgatgatttgacctttgttaatggaaaaatattttagacgtttatatttattgattctgtctttgcagt

SEQ ID NO: 16596 - DNA, 945 bp, Glycine max
  Intron number 1 from transcript Glyma01g03910.1 (locus Gly ma01g03910) derived from phytozome v7.0 (chr-ID Gm01; pos 3383054 to 3383998 reverse strand)
gcttgatctccacaaggtaatatatgcttttccttttctttttcttccctttatttagctcacttttttccgttaattataacctcatgtataatttttccctgttgcgccctagaaactcctgtttcagtgaagaatctgtgtacttggctaatttgattgcttcttgttttgtcccattttggctgagagagaatgggtcaagagttttctccgttttgtacatgtgaatgttgtcttgtctgtgtaaaaaaaattatggaacgtggactttcgaaatgttcccattctttcaaattggtacatctaattttcttctttaaatctaagctagtctagatatacctctcatctgaattgtgattaatatgttggttttaatatttttagcctaattatgtattaagcaagtgttaaattgctagaaagtagagactatgcaaacgctttgagttttcatttcctgctgccatctgtatgagtatgactgtgaagtttttaacatgatcttgagctgcaaaacttgaaataattgaagtatggtttctctccttagaaagctaacacatgtggtttacacgtttaagttatttttttcatttgttgtcaacgttgatgtcagagtcaaggttttttaagcataatttaatgttttagcagcacgtactattttgctttgatatttttaactatccaaaccccttctagtgcaatctttgaagttgaacccagcttattggacttcaagcgctagttgggctatttatggaaaccaggttttgatgaaaaaaaataataatcttttaattgttgtccataagtactaatccccttctgtcaatttcatgtcaatactttataaatgacatttcatatttattattcttcagattatccctttgacacttcaagtactaccaacattgattaaatcagactagtgaa

SEQ ID NO: 16597 - DNA, 616 bp, Glycine max
  Intron number 1 from transcript Glyma03g40100.1 (locus Gly ma03g40100) derived from phytozome v7.0 (chr-ID Gm03; pos 45952154 to 45952769 reverse strand)
tgaggtgagatttgagattgttaacttaactaaaggttttgattggagttcttaaatacttaaaagaagagttttgccgtccattatacatgaattaatcgggtttatctccattggagaattccagtggtatagacaaaaatatcctaagttacttcatcattcatcacatgcaagaaaacgtataatactgccaagtgccaagttgtcgttgtccacccttcatgatgccactgccacaggttggagctcttggccttttgtgcaagcttatgatgacacatcctaaaaaaatttatgccaatcgtttcagattacgcatgcccacccagtaacaaaaaccatctcacggtatcttcattgaatccaagttcaaaacaacaaactcagtatctaaagtcagcaagacacatgacttgtctccaacactatcgtcctcacttgtcatatttgtacaacacatcgcaatactctttatagatccattaactctcatacacaatcttaaaaaactgtgtggctccttgttctacttgcggggtaatcatggacgaaactaaaagcacagaaccaagtgaattttcaagtcctctgcttcccataggagcacaagggt

SEQ ID NO: 16598 - DNA, 743 bp, Glycine max
  Intron number 3 from transcript Glyma02g13740.1 (locus Gly ma02g13740) derived from phytozome v7.0 (chr-ID Gm02; pos 12070705 to 12071447 reverse strand)
atattccagatataaaggtaattcaatatgcattttaaatatcttgttatatattgagggaatgtttgatggtgtttgaaaaaattatttagttatgaaagtacattgtgccttgttcttttattttatgggaatgaatcatctctgcttgcttttttttccttcatttctttcatttcataagctttccgggaaataaataaaatggagacgatacatactttaccgggagtgacattaatattttaaatatggaggggatttttttttcacaagtttttaaacttgttctagtatgattcagagctgattttatgactaaattctcatttgaaaaaaaaagaatttatgcactgaaaaaatatttaatgaaagaaaaaaatgagtttaatttttatactttcagtcaaatgttgtcaacaaggttcatatactttcatgtagatgaatttgttcttcaaacttaaaaaaaaaaacatggatttagttcctcataactttagaaaacatgagttctaagaaagggtgaattaaatacacacgtttttcgaagcttgatcattaccaaattcatcaaatatataggaaccaagtttttccctcttaaaatcatttatctaaacacgcccttaatataaatgataactttccatttaaaacaattgacaaaagttttatcttgtactatattggaaatttcttgaacaggcaagtattgcaactagtgttacaaagagtactat

SEQ ID NO: 16599 - DNA, 627 bp, Glycine max
  Intron number 4 from transcript Glyma02g39630.1 (locus Gly ma02g39630) derived from phytozome v7.0 (chr-ID Gm02; pos 44887329 to 44887955)
ctcgtgcgccttctacaaggtgaatggataagaaattgttttttcgcatattttgctgtagaagtatctttgatttagtgtgcacttttgttttgctttctctttctctgaatgttggctttgtgaattgaggaagttcttaaatttagtggcagtgttgccaaatagtatccaaggggcaccagcgaggagagtagatagcattgtttttagtcacgtgaaaagaggtcgagggagaccaagaagaatattgtaagttattataaaggagatcttatagtgaataatatatctaagaatttgatttttaattgtctgattgtgtcgtgcaatcatgtaacttacctcacctagcaggataaaactattgttgttgactgttgttaattaccaaagtatccaagaattttggccctggtggagattcattttataaaatctgttactgtgtagtggataggatcactggataggacctatagaaaattagaacttgatgccttcattaagatctgctacttcgctgatgacttgttttgattttgctatagtcaatatataatgttttgggggctactgagaatttgtgatattttctatgctgtgttgcaggctgtgccgaaacat

SEQ ID NO: 16600 - DNA, 382 bp, Glycine max
  Intron number 1 from transcript Glyma01g36040.1 (locus Gly ma01g36040) derived from phytozome v7.0 (chr-ID Gm01; pos 48503975 to 48504356)
tctgttgctttacccttcagttgcaattcgtacaggtaatactacattgcattgttttttcaattttctttatcaccccccccccccccccccaaacttcgaattgatttattctgttctcttgaatttctgcaaagaattttcacaagcacaccttttagctttttgaatttcataggcacatagttctgtggcgcctttttcattttttaattgcataattaaacgtgattgtctgctggagtaatggttgactgtctagggtttagttctcagtgtttaaaattttccttcttttaattttgttgtaggaattcttttttggtctctcttttttctgaaatttctgtaatgggttggtgtaggaggttgttctattctc

SEQ ID NO: 16601 - DNA, 566 bp, Glycine max
  Intron number 1 from transcript Glyma04g03680.1 (locus Gly ma04g03680) derived from phytozome v7.0 (chr-ID Gm04; pos 2696069 to 2696634)
ttcctcaaccgatccactcttctctctatctgcaggttcgtaattttctattcccctcttctttcctttatcgttttttatttcatcttctttcctgtaaatgcccccaatctgtaaaccctgatttttcttctttgtagaaattcggaatttttatgtgacaaagacgttatgattatctagtttttttctttttctttttttccccctgtacaacgatatctggctattttgtcaccttcacctattcttgtttgtttgattctctctgcttaacgtaactttatcatttttctttagagattttgctgcatttgacagttgtttctttcaattccgtccaacatttgggcttcgtcgtttacttgaggccgtgtcatcgaaaacgcgttttgtatgttatgaaacgacgcaatagcctttttggttcacgaataccacatgtaaaatattgattatttttatccctaagtgtgctgtacgaggattgtcatgtgtaagcctgttatatatgttatgaatcactcattaatttgtataggcatttgatggtttggattttgtag

SEQ ID NO: 16602 - DNA, 1040 bp, Glycine max
  Intron number 2 from transcript Glyma01g40430.1 (locus Gly ma01g40430) derived from phytozome v7.0 (chr-ID Gm01; pos 52186456 to 52187495 reverse strand)
tgttgtgttagcttatggacaagtgtatcaattttatcataaataatatagattaaaatgaaaattcatgtatcgaattcagagagactttgattggttgtatttaagtaaagcaaactcaattattaagcaataaaaagaaatagaaggagaaaaaataaaggattgtgaatgtgaaaattaggggtaaaaaaaaaagaaaaaaataacgagaggtaaacaataatttaaatgcaaaaggatgactttagaatgtgataaagttgagacctaatatgccaaaactagttataatgtaatacaaaagattttttcaatgaaatccctgaaattcctgatttcatccgtatctacttaattactctctatctttgattttttgcaccaagagtatactttatttatctatttctcccaaatttctttacaaagataaaaataataaaccacattaagataagagatataaaaattcttggacaaaacaaatgtcaatttattttctagcaatgagtttattttgatattcttccccagttctttaaaaaataatcatttttcaatacattattctttaaatattatatgaatgatcacactataataatactaggaagcacaaagaattgtaatagaaacagaattgcattgaatagataatgaaaaagaattacaagattttggtctccaacctcccaacaaaaagagtttgacctctcgtaaccatgagtcaatagaagaaggttggatgactaataacatgaaaaggaggaatgactaagaaagagggtttctcataagggagaaacttagactttcgatttctttcttcactggtgagactttatttgtcttttccttctattttctactcctaataaaaaaactacaagatattaatttctttattatttcatctaaaataataataaaataaagaaattataatcattattagtcaaaattgattatcaaattaacttagatttcgcccttaaaacaaagatttctgcttgagagtaaagtttctgaagcacacc

SEQ ID NO: 16603 - DNA, 548 bp, Glycine max
  Intron number 1 from transcript Glyma02g45150.1 (locus Gly ma02g45150) derived from phytozome v7.0 (chr-ID Gm02; pos 49519656 to 49520203 reverse strand)
taaccaaaagaaaatctgtttttaccttaactcaggtggggttcttctttgttccatatcaatcactttttagtttttgaagtgtacgtgtttcaatcttctagtgttaatacttagtgcagctttctaaccgactctcaattttttccgactttgttgggattaaaagtttggtatttttttctgctcttgttaatttccatgtactttcaactgtaataaataggaaaataattttcctttccgggtttcttggagtttgaacattccttgctttatttatttacaattgatcacaatggcaaaatcaacttgtggttccatttcattggtttttccccccttggcaagtctagttgcatacacttgacccaatggctttctttcttcctttattatttctttcacttcaaaagttctatattcttatttgattactcaattagctgaactatgcagatttttttattttactctgcctgtaaagtctgctccaagtctaaagttctctcctctcttgttcaaacagacaactcgtttggtgaacc

SEQ ID NO: 16604 - DNA, 810 bp, Glycine max
  Intron number 1 from transcript Glyma03g17870.1 (locus Gly ma03g17870) derived from phytozome v7.0 (chr-ID Gm03; pos 22496136 to 22496945)
ggactagccctactcgcaatttaaggtccaaattttcaatttttacttttttttattccttcttcttttaattgttttcagttgaagttgtgttagccctctttatgatggttcaggttaacaaaactatggaatttcctcgtttttattattttttgttgctgggaaacgcttacccatgtttcaaaatttgatttttgaatggagaaatttgttattttttattgaatgtgattgagggaggtggggttactgattagtggactagggtgtgattttgtgatttgtggttttgtaatttttttattctttgagggggaaatagggttcgtatgtaaatttatgattgtatagtttatagtttctattcttcggggtggtagtttctgacgtgtactcatttagcaaaattttaatgtttttgaaaataaaaaggtgtcttgttgttaaatgagtcggagggttgggaataatattcattggactatgatttgattttgttaattttataattttgcagttaaacaatttatataaggtttgtttttattttatttgtaattcttgttgcaaaattgtatacccattttgtgaaaaattgaaaatttaataccgaaaggggttggtctagcttagttggttgtgtgagttgctgtgaatttcttggtacttaaagcttgattcccgtgcataaatttttttgaaaatttaactgttatttataaagatgctatttatgaatatggaggctgatattgatatagtggacttggttttgattttgtgattttgtagtgaggaggatcgaaa

SEQ ID NO: 16605 - DNA, 926 bp, Glycine max
  Intron number 1 from transcript Glyma05g23180.1 (locus Gly ma05g23180) derived from phytozome v7.0 (chr-ID Gm05; pos 28768779 to 28769704)
cctgttgttgcaccaccatcacaagacacgggttagtttagattttgttgatttgcatgatatggagaaagagagatataaggggtggtgtatggtatgataagagtggaataaaaaaaagtgggaaataagggcttgaaaaacgaataggtacttgaacaaatattatatatatatatagctattgataaattcttcgtttttctccttccaattttcttgcatacctagcacatcctaatccaaaactaattttgatttgcttgatatttgatattttataacctttcttcatttttaaattacgtatttataaattattctttttcagtcaactgaagtaatctatgacaatcaaagtggggccagaacctattttaaatttctctttgttttttctattcttttctttctttctcacttcaatcagattccatttgaatacttattcctctaaaatgtaattaaagttgataaattatcttattgtcgacacatcaaattagttaaactgaattctatcactgaaatgaccaagcttcttgttagtagtatcctctccattgcatataatctgtctcttcaaatattttagtttgtctaaaaatatttcattcattggtatttcacttcaatactcaaatagttcgtaactaaattttaactcttttaataagagtatttgtgttaaagaaaattatttcatcattgtaattggggcttaagatgtgtatactatcttaaaagacaaatgaaatgacaacatagagggagtatataatatcaaaactgtcccataaaaaaaattgttatggttgtaagtacattactttttatgcgatggaagtggtgttatttatatgttcttccactcttactttctgcttaaaggagactctgagacttctctggagatacaatcaaaa

SEQ ID NO: 16606 - DNA, 688 bp, Glycine max
  Intron number 1 from transcript Glyma04g31180.1 (locus Gly ma04g31180) derived from phytozome v7.0 (chr-ID Gm04; pos 35397033 to 35397720)
aagcttcgtggccaggttactttctctctcttctttctcaccctcctttttcatcccataggaagaaaaaataaccaagcaattgtattagtctttggattattttaatttttttagaaaaaggttatgcactcacagtgtaacacagtcttcgcatttgtagaaagttttcaaacgacaatttgtgattggatgatggtataaaactgcaaaggcattgaactcttttttttttttttttttgagtaaaccatcaatttagtcttcgaagtatcaccttatagttcttaaactaatgaaattatattagtagttattgaatccaccaatttagttgctaagttgatatattttaccaacgtgactaatttgaagaaatcttcaatactgaaggaactatgcagcgtggtttctaatattttagggactacctatataaattgacaattcgagactaaattgatggtttattcgaattttttttatacacaaaagtttgggagatggtgcagaaataaaaaaaggtaaggtaataattttgtaattatttatgcagaaaaactaaattagttctgacagtagcgaatatattcacacatttttctaaagtgatatgtttgaattctaaatgttgtgttgtttcccatgttcagatatctgatcaagtgaagagtaggttctctccagg

SEQ ID NO: 16607 - DNA, 626 bp, Glycine max
  Intron number 1 from transcript Glyma04g41720.1 (locus Gly ma04g41720) derived from phytozome v7.0 (chr-ID Gm04; pos 47579336 to 47579961)
agtcactgctccggctcccgctccagcaagcggtaatttgctctctttattttagattccattgtttgtataatcatgctgatcccaccattccctgctgcatattatcttacttgtttgttacattggttattgtataatattaagattaagatatgatatgtcattttttatgtgattagaataaaaattgatcctcagctcaatatgtatggaagaacattcattagaagtcttaaatggatctcgttaaaagatttagtctctaactttcaattgggatggcctatgctcacaagaaaaaaagaataaaattgatcatgacctgcattttggatgaacaagaccatcgttgaaactaaacaattagggaatgtcaattaccaaatatgttataccctctttgaatttccttcttcaataaaacagatctggattctcccgggtgtcaaaatcaaaacattgaaagaatgataaagttatcttgcacgatctgaaattgattttcaatgaattatttataaatacgctgccttttgaacatttctaaagagggggccaatgcatattgctaatacattgtactttatattttgcaggcaccacaatcgaccaagcggttgcat

SEQ ID NO: 16608 - DNA, 880 bp, Glycine max
  Intron number 1 from transcript Glyma05g23230.1 (locus Gly ma05g23230) derived from phytozome v7.0 (chr-ID Gm05; pos 28825295 to 28826174 reverse strand)
gctgggagctttactgcctcgaacacggcattcaggtctattttctcaaccctaaatctccgtactgtaatttttttaacctacatttttccgattcaatttgttcgcgttgttgagatgttaaatctggatccatttacgctgttagttctctttctgcatccgaaccttttcttcacttttttgttgtgtattatttgtgtttcgttctgtattgcttcagagatttgccgatctgtgtttgctttatgttttatgtgaacatttttttgcggtttagtttcgattgattctcagatgtacgtgtacgctgtgtattttgcgaacttttggatctggttatgtgttgttcgagtgatttggaatgtggatttgatgataacgccttgtttgtttaaattattttatttacagtttttgttgatatttatcattttatttcaaatggaccaaaaaccgagatgcatttctctaagtgttttgatgctgtttttcaactggaatttgagtttcgtcttagtaatttgtgtttattatgctgatttttgaaatgaaactctaattttaattggaaaataccctaaaaatactgagggaatctccgatttgcccatttcgaatccgtgttttattgttatgatggtctgtggatatggatgcagccaggatttgactctggtagtactttctggaggaaaaaccctgctttgtcattcaattaaaagttatttatcttttgattggaaatctgaatgtattctggttgaggaaaaacttttttcaactgtcacttttgagttttgaacacacggattctcttttcaagaagataaactacaaattctaatgtgatctatgttgtatgtgttgtttcagcctg

SEQ ID NO: 16609 - DNA, 932 bp, Glycine max
  Intron number 1 from transcript Glyma02g43810.1 (locus Gly ma02g43810) derived from phytozome v7.0 (chr-ID Gm02; pos 48518372 to 48519303 reverse strand)
tgcatcatcttcaaacctgcgcttcttttgaaccggtaaagtctcaaacttcaatcatttttttttgctccttagtcggtgttcatttcaactcagaagtcagaacatcgaagcttatcaagtatgttaatcacttgtcatgcattcacgaattgagtcttgaccaaaccctaattaggaaactagtgttttggaattgatttgtgtgctttggaatctgaagatttcttatgtgtatttttacgtatgatatctccttctgaatgacaatcagtacttaaaacaaccggaagtgaaacattgatgattttctgaacttcaattgttattcatttttctggtccatttccattccattgttgtgggtttcaaagtttataggtaccagctaaggtaaacctcaacttcactcaggttatctcttccctaattattatatatgtgctattattgtcttctcaaaatttcaaggaaaaaaaattggaaaattgtttccttttctagccatgtatgatgggaacagacacagcacaacaaacaaataaaacaaacaaaccatagggaaacatttttttttatgaggaaatgttagttgttagtttctgttagtggggggattcgaaccaagacctctcccctcctcccttcaccaccaagccaaccttatatctcctcccacataaggaagcataactacacatgctactatagaatcatcggaagtttatgttatagagtcagttttttcccctttggagttaaaaattaactgagattcctcatggtaatttaagagggaaatgtgttggttttggaacttttatccaatgctcatcattaaagttggaagtctttgaatttcctaaaatctttctttcagatttgtgctgttttgttagtgaagcacatcgagtgcaaactgtcgaacaggc

SEQ ID NO: 16610 - DNA, 758 bp, Glycine max
  Intron number 1 from transcript Glyma01g06970.1 (locus Gly ma01g06970) derived from phytozome v7.0 (chr-ID Gm01; pos 7481259 to 7482016 reverse strand)
agatctctctcccttccttccatcccaaccacaaggtaaattctgcttcgttttttttttctttctcttgcttcttccccttttgatttgaattgcgtttctgggtagcaagtgagtttttttcctcctacccatttcgagtttcctcgctgcctttcgatttcgccatctgggtgtttttgtttcgaactcaaatgccacctattgtaactttttttttttaatgatttgtgcatgaactgtttgtttatgaactgttggtgggtggatctgttgttttggctggtttcgtgtgaattgtgtcgttagatctgattgctgaatatattatgcggaaattcggattccacaatttgtctcttgtttcgtatatgcttgtgtttgtatgtgtatatcagtatatgagttgaacatttcaatgatttatttaaccgttttgtattttccttgccaatattctctggatctgtttggctttctatgtttgctttacttagaaattatagatcttgttttccctgtgaattatactcttgatttttcgaaattcgcttgttatgcaatgttgtatgtgtggatattagatagattttgttgtttggtgtttcaattgtttagttttggatcttgatatggttggtttccttgttgactggtaatgaatattttgggagtgaattaggcaatctgcattgtttctgtgttgttttgagtttgggcttttttgtgttacgcaggttgctgagaagacataaaaa

SEQ ID NO: 16611 - DNA, 292 bp, Glycine max
  Intron number 1 from transcript Glyma04g38690.1 (locus Gly ma04g38690) derived from phytozome v7.0 (chr-ID Gm04; pos 45056714 to 45057005)
gttgccgacgaagcttcaccgtaagttctcactctcatcactcatcaatcatactcaacttttttacttcgtgggagttcacctcccacttatactcggatatattcattcgagtaataattttccacccaattcaaatcaccgaaagaaaaaaaaaagaaaacaactctagactccaaaatcaacaataacttaagactttcgaagaataaacaaagtcacgctaattaatcaggcttatatatgtcgttaataattttgaatgatacgtgccagattcgagaccagcgat

SEQ ID NO: 16612 - DNA, 477 bp, Glycine max
  Intron number 1 from transcript Glyma02g01260.1 (locus Gly ma02g01260) derived from phytozome v7.0 (chr-ID Gm02; pos 936623 to 937099)
ctccttttttttatcaaatctatctcttcttcaaggtatggatctctcaccatttccatgtttcttttttgttagctttgcacattcttctgtttcttcagattttctttctcttgcactgctggatttaatcctagattagtttcgcgatttctcgtttatcttaattttgatttacgatctggttacttccttgctcgatctgcatcgcttgtggtgagatcgcgcgattttaatcacctcctcgttttcttttatcagatcggaacttaattttggttttggtcatgcatgcaatactgtttggttcccattcattttacatgataactgaattatgtgtctcttggtctgttaccatcatgttacggtgcatctccatctggcataataacatcatggcttttttttttctccccttttcgtttcaatttgatttgttaataatttgaatttgtggaatcagaatagttgaaa

SEQ ID NO: 16613 - DNA, 690 bp, Glycine max
  Intron number 3 from transcript Glyma02g01260.1 (locus Gly ma02g01260) derived from phytozome v7.0 (chr-ID Gm02; pos 937716 to 938405)
ttggaggtcaggacaaggtactgtttttacctcttcatcttcttgtctagctactgacattataggacttgtggttatggatggtttagcaaactgtccgcaatgcttttattgatttgataacatggtaattggctgaaactttgcttgaactactttatatatgatatgatatgatatggtttactttccaaatttgagttgtgaccagtaaattttgatggtgaatcaatgaatgtccatttgatgccatgacagatgttctcctctccattaagatacagagatgggattcaaaaatacgtttcttgtttggagatgcatgtgcttaattgtgcaatctttatgcaaattttagtgtttatggcaatgcaatgctggtcatcgatgtcataaaccaaatgacaatggaaacgtagtcttttcgtatgtctatttcttgatttcaagactgtggatgtactccgcctgatgagtgtggatgattattcaatcatgcaaattaactttaaagggtttgtgtatgttatagcgcttgttcaaattgtcttacttacctgtgacctcttgttattcattatatctctctgaattattttaaaatatatattttttctcaatatggtactaaccttttatatgtttttccctgtagatccgtcctttgtggagacattacttccaaaatac

SEQ ID NO: 16614 - DNA, 848 bp, Glycine max
  Intron number 1 from transcript Glyma02g11140.1 (locus Gly ma02g11140) derived from phytozome v7.0 (chr-ID Gm02; pos 9349120 to 9349967 reverse strand)
gctgggtatgtactcttctcttgctctcaacgtttgattactgaactctatgtttcacttggattttccttctggaacatcatagtacaaactgtttttgcaacaatattgttgtgtctgttgaaggaaccccattttctttattaaaaatctaaattgggttacctagtttcttgtgaaaaatgatgtcttttgtgtgttctggatgggttggttcatctctgctatgttctttgttctatgattgaaagagaagtggaagttagtaaatggggttaggtagtattagcgaaaaatgttagctttttttttttttgatggagtttctggtttggtggatttgtctctgcgatgttcattgttctacaattgaaagaaaattggaaggtcctagatggggttatgtgaagaaagattttttattttttttaatattttggttgaatctgtgttgggttcattgctacctaccatgttgatagttcttatgattaaaaagcaaatgaaagattatgaaagcaattaaaagttggagctttctattttggttaaccttttgatggtacattgaatgtagaatgcactgttaatagtgaattagtggttttaacttttaagatcgaccttattatttggtttaacttcatcgatttggaagttggaatactgagattatcaactagtatttgtttgttttatctatgattaaaggaaatgccagtccactgcataatgtttgttgagttctgatattgataaaatgcctaaatctatacactggacttatgctgtcacagcccagtaataaacctgttgtcttgatgatgctcttgtttatgcagaacatc

SEQ ID NO: 16615 - DNA, 440 bp, Glycine max
  Intron number 1 from transcript Glyma03g37920.1 (locus Gly ma03g37920) derived from phytozome v7.0 (chr-ID Gm03; pos 44367273 to 44367712)
aggagacaccttcaatatcaggtactttcctatataaccctgaaattctttttgtgcgtgtttggattcacgtttcatccaagattacattttatgtcggggacttgattataggtctagaattgattttgaggtgaaacaactttatgtagcttttgcgataaaaaaatatattaaatttaaatattagcttgcctttcaaatttcaaataaaaacacccaaacataaattacatcacttcaaaatcaattttgcaaatgctcactcaaacacacactgaatcgcactgttataattatgactcttttgttatgatgtttagtggtttagaacatgttctgtaatcctgtttgtggaactgtgagcttggaagagaatttaattgagttaactgagattgaacatctggcgtttcttttttctgtatttgattccaggt

SEQ ID NO: 16616 - DNA, 976 bp, Glycine max
  Intron number 4 from transcript Glyma05g28500.1 (locus Gly ma05g28500) derived from phytozome v7.0 (chr-ID Gm05; pos 34301767 to 34302742 reverse strand)
tggtgagggtgtcatcattggaaacctggatacaggttagttttcctgatttatgtgttttaaaactcttgctattcttttcaaattggtcagcaacacctttgaattaacggggtttgattattattattatggtttaatctagatcgttgacttatacatgtggaacatactcaaagtagttatctcatcgtatctctatcccccaccaccaatccagagtttgatcatttcaaaaaagttgatttcataacattagtttattattaatttgaatcttgccggcaatgggttgttagactagttcttttccacaccctaagtatgaatgttcacgaaccatcttgaagaaatagactaattgcattaatctcgtgtgattagctataactacacttacattatttttatacagtaattatactcataaagcataattaacaccaaaatgaaatggacaaacatgatataatatggttagaacataactttatcccttaaatatatgttaaaaaatatatgttagaaaaagtcaatttcgtaaatcgatttcagtattttaagagattaactttcgatccagtaatatcctgaatcatccaaaaaaaagttaatactaaaatgaaataagatgaaagcaattatttctaaagaaattgcaaaactttttgtggttagattacactgtatagaaaatgtttggtgataaatgatggagtagtcgactttcagtcgatttatcacaaacggaccacctttagaaaggcaacatggacaatcaggcatcttgtcatttgtctgttgtatatattagaattataattagaattttgttacaatagtgggtttatactactccattagatgttcattattttaaataattaaaaagttataaatatatgttataaaattcagtctgtgtttattttgtgatgcagaaggttggtcataaatcatacttagattgggacaa

SEQ ID NO: 16617 - DNA, 878 bp, Glycine max
  Intron number 6 from transcript Glyma04g02720.2 (locus Gly ma04g02720) derived from phytozome v7.0 (chr-ID Gm04; pos 1918699 to 1919576)
ctcgagaactggaagaccaagttaatagtttaaaggttttgatcttttttacttgttagttagtgcagatgtattccataattcctggttttagactgcttacatggttgcttttaattgtaagcatcacttagttttttacatatgaacatatatgtgaaaaatgaaaacataccttgcttcttttcaaaccatgggttatacttataggaatcttggatttcttcttgggatcacattactccaaggaatctttggtttcaatatttatatatggtcatacccctgtccaaaatagttgtaggtaattgtacagttaaggctgcttaggatgaagaaattgatcaaaataaaattaaagttgctggcaataaagtgaaacttgaactactcaaggcactgttctagaagacaaaagaaaaattctgggcacataggcatctaaaaggatcacttgtttgcgtggatatctgttttctgtagaaacttaagcttgacatgttttcaaatagctcaagtttatcttacagaataatatacgatatgacgccttttaatttaggctattggactaggcaaaatctaaatgtgatatgataccatgacttatggtactatttaaatatagaccaggtataaattgcatattatggaaggaatataggtctcgccacttctgccttgtattttatatacctacgcagatatcatagcaagcttcttcctgagctttggactgatgtaactgattataatttttagtttaaaatgcatgttggttgtaggattttagctccatctttgaatgctgctgtatgctagtgatttggtccaactctgacagcttggttctatacaggctgaagttgatagtctat

SEQ ID NO: 16618 - DNA, 666 bp, Glycine max
  Intron number 2 from transcript Glyma01g27300.1 (locus Gly ma01g27300) derived from phytozome v7.0 (chr-ID Gm01; pos 36453210 to 36453875 reverse strand)
agattaattgcattttaaaaaattttggtcgtcaagttagtttctcaaacagtactagtatttttcttctgcccacttttatcctctaaattatttagtggttaaacactggaagcaaaagttcttattattaagaatttagttaagcttatttgattcaaagtttattagaaaattaatagttattgattgaataaataatacatgcacttacattgtaaaatcattattacactggtttttatgtgacttttaagattttttttgactgaatgacttttaacatatattttttttgtaaaaatcaacatatctaccaaatattatgaattatgattggaattttatactttgtcatttattcttttgattggatttttatactctcatttattgagaaacaaatgaatatttaaatgacaaagtataaaattccaatcaatataaaagaagatgagggagggaagagagaaagttttaaaatttaaatataaattgaagatcaaatagaagaaaaaattgaacttttacgattaaaaaacaatttttctcttttcttttcacttttttcattctcttttattaaacaaaagaaagtacatcattactcatctctttttcctaattttttcctctgctctaaagtccaaaaataccattagggta

SEQ ID NO: 16619 - DNA, 817 bp, Glycine max
  Intron number 1 from transcript Glyma05g06050.2 (locus Gly ma05g06050) derived from phytozome v7.0 (chr-ID Gm05; pos 5591288 to 5592104)
ctctctctcacacacacacacacactctccccgaggtaactcatcttgctgctagtgctgtctcttttttgtgtgatttggatctacaaggttgaagaggagaacaaatgaattttttagcaaatttttctttctgggtcatttctcaagtgatattttcatgctgatgttgctttctttttttgaattttcctacatatagaatttatttggttgtgttactgttattatcattgctaaagtagttggatttagtttgcaacctttcagcttgatttgttcacatttgcactgaaaagtttcaatttttatgagctttgattttggtggatgtaattttagatcttcagccgatccagcttaacagttgagattgggggagtgatgtgacatgcaatacaattatacaaatgagattgtttgaaagtgggtattagattctatgaagatcagacaatagtgacaccaaaaactctgtttttaaagttagtctttttcttcgtgtaaaatcattatcaatcacatgttagtgttagatccgcttgcatgtgtgctagaagaaaataaaacaaagttcggatgaaactatagttgaaagagagttaagctcgtttattataaggtcttcttctgctagaaattgtgcccccaaactaccttatagattctaaatcagttctagtaccttttttgttaacatataaattctttgtgcttagataattattagatctattttgatggtttgcttggttttgaggctcattaatttcagtgtacactgctataggtttgagagggtactggcatccaaaaa

SEQ ID NO: 16620 - DNA, 776 bp, Glycine max
  Intron number 2 from transcript Glyma05g06050.2 (locus Gly ma05g06050) derived from phytozome v7.0 (chr-ID Gm05; pos 5592715 to 5593490)
gttctgtcagaacagcactggacactggttgtggggtaagtcttaacgattaagttattcttctgatagtatgcttgttttctttagtttaaggatatgtaataaatggaaaagcctcctctaatagtctaatatggattaagataagaaagctgtataattcaattgatggatgcttacattcttacttatcttggatgcctaatcaagttttataactcagtttcttttattttccctgcatcttataccactaaggaatttcagattggattcacaatgcttagctaaaggatctctttattttttcctgttaaaagtgtgtattttcaattcagggatttcagattggattcactatgcttagctaaagggtcactttattttttcctgttaaaagtgtgcattttcaattcacaattcttgtgtcaatgttcttttgaagtcttttcctctgcaatatttatagcttccctgagatacaattgagcagaaagaaatttaagaattacttgtgatggctactgcatgggaatctcatgttgatcatctacttatataatgttcttttgtttattgcattccaaatttctcaattttcatgtatataatttgagtatactaagaatcaattgccattttgttttttgttatgcttgttggcacaggttacttgtttcaataggtatctattaattgtttgtgattgctttatcaatctaaaaatgaaaaattatacaggttgcaagctggggagcctacttgctaaagagaaa

SEQ ID NO: 16621 - DNA, 629 bp, Glycine max
  Intron number 2 from transcript Glyma02g02230.3 (locus Gly ma02g02230) derived from phytozome v7.0 (chr-ID Gm02; pos 1585195 to 1585823)
aactcctagcatctgggacacctttgcctacgctggttggtggttaccaattataggctttgataattttggaaaatttcttaatttcctcaaagaaatagatatttaacgtgacattttatgtgttaattctttttaaaaaaaatattaattataaaaaggacctagcatcccgtctaatttgatttttataaattggacttgaaggaggatagtatattaaaaaggataaattgttaaaaggatctaaataaagataagagtaattataaaaaggacctagcatcccgtctaatttgtttttggctagttggaaattgtgcgtgaaatgcgcatccaaataagagaatattataaatgtctaattgagaaagtgaggagagaaaattttattttctaacaattatatttcttctgaaatctattaaaaaatatgattaaatatgttttcaatttctataaaatgagtgaattttagttttggtcttagtaaaaaacaattctttaattttcattcctccaaaatcttaaattactactttttgttcgtagcactgatgcatgtcatgtttactgatcatttacttaggaaacgtgggtctcatgcaattatttttaatgaacaggat

SEQ ID NO: 16622 - DNA, 757 bp, Glycine max
  Intron number 1 from transcript Glyma04g41230.1 (locus Gly ma04g41230) derived from phytozome v7.0 (chr-ID Gm04; pos 47112910 to 47113666)
cgtttcggttcttcagatctcttctccgattccaggtaattttgttaatccgatctcgcttttttctttcttacttttcttttccgctccgattggctattttgttttgattttgaatttaggcgtttttggttttcgtttgcttttgtttcactcatgttagggttctttgattcgatgattttgttgctcttttgaattgcgatcgatatgaattactgtttgtgttgactcggattcgatctgtggtcgagttaatctatggcttctcactctgatttttgggcgagatgagacacaggcggttgccaaagtcaactgttcttctggccgctaaaactgtattctgtatgcacttgattacagatttaatggttttttgttaatttgtttacaagttagttaatagaaaccgaaaaaagcatctaaattaggtgtctcgtttgaactaatcaaagaatatatagggcatgtactactactttgagaaatttaatataaatataggtttgtccagggttttttctatccttcgttccagagtcatatgattatttccctgcttaatgtcagaatattgatatagtgtggactctgaattcactggtcttttagtttatttctggatctgagattgggataatttaatagtgacttgcttctttgattgactcattgtaattgctccctattttttcggattttcactcttgactgaaattgtaagagctgattgttttgtgccatcaggtagagc

SEQ ID NO: 16623 - DNA, 400 bp, Glycine max
  Intron number 1 from transcript Glyma04g36210.1 (locus Gly ma04g36210) derived from phytozome v7.0 (chr-ID Gm04; pos 42764777 to 42765176)
agggaaagtaagttcatttcttcaaacccctttccttatttcctctccacaagcttaaattttctatctttacttattgggcaattgcatatgtggttgtgtctattttgggtgccatttgattattgattgtgtgcgtgatttactgatttgttaagcatcatgctttatagcttaatgtgttgactgggataatgttacatcttaattgaagtttggttgaacttcagcttcatttccttcaacaatcactgatgggcctgacttatgctttatctgatccgagtaattgtttttgaatttctttttatgaggattgcagttttgtcaatcagcttctgattcttttgctgggtttgtttcagatataaaaaccaaactgttgcttttaaaattgtac

SEQ ID NO: 16624 - DNA, 700 bp, Glycine max
  Intron number 1 from transcript Glyma03g36140.3 (locus Gly ma03g36140) derived from phytozome v7.0 (chr-ID Gm03; pos 43164334 to 43165033 reverse strand)
actccttcttcagtttctacaactgagtttcatatgttagtactgctctcctttgtttcttctccttcttggagtttacggttattgtcaactcactctatatatggagcttgacttttctgttttttggtgtgtgtgtgtggtattttttgagagtattttgtttttgtggttcttctagtggtgtacttggtttatgtatctgggttttgtattatgtatgtagcttcatttctggtttactgtttgtacttttctgttggtatagttgttgggctgtgcttttctttgattgtaattcccatcttacttttgtctccttctaattatcttcacttttatgtcccgctttcaagctaaagtcttcagttttattattgctttggctttctagattggtcttattaacttattattattattgattattgataaggcatggaaattgaaatttgtgttttgatgtatatttcaattcagctcctttctattgatgtttatgctgaagactgaataaaagtctgaggtacatacatactatttatgtactgattctcctctcctcttttattatttatgtactgattcagctgtatatttgtattttccccttggccttactgtttgacatgctttcgtaattgtttttccatctttgcttacagaaagctgcttactacaaaccaacaagattaactaa

SEQ ID NO: 16625 - DNA, 990 bp, Glycine max
  Intron number 3 from transcript Glyma02g15690.1 (locus Gly ma02g15690) derived from phytozome v7.0 (chr-ID Gm02; pos 14177003 to 14177992)
aaaacgttagtgagtgatgatgaatgaatgatgatgattgcgtttctagtatttttttttggtttggttttgtgtgaactgaatctcaatctcttctctgttgtgtggtgtgatgtaattgtccgttgttgcactttagatcctctgattttgtgtgtgaaggcttcaaattcaatggccatttggtccgtacagtgtgtttgtttgttccttttcagctgtgaaacactttgagtttgaggtaatgaatgatgattgctcaatgatgggggcctggggggttgtaaacattgtaggcgacatcgtgattcgagatcaaaatgctgcacctgtattagttttatgtggcatacttgcattagcttactggtaatgaacttattaacagcgacaataagttgcaatcaaaggtgccaagttgcaggatggtaattcgtaacgctttaagggcatgtcggagttgtgtacgaaaggaaaattgtttttttttggtttgtttgatacccttgcacaactttttttattagtttgttgcgttatcatgaatcttgatgcagttcttttccatttctgtcctgtattaattaatgaatgcaatttttattttcttaaattgatttggcatttggttatttatgcttcctaagatacatgttacacgcgttacttgttttatttgtgacatggaggtgcttttctacaattccggttaaaaacgttgcacttactgcatggctgctcctttttgtcttgttgtagttccgataacgaacaaaaaggtgttcatccttaggtcatttaaagcctgtacaaatcatatatatgtcttatattttgtggggaaaaatacaggtagagggggttcccaaatagctttgtgatgggatctgccacagcttcagagcatcaggagaaattcttaaatttttttttgcctattttaattattgtctaggtggttgcaatcagggatatagtgccaccacctca

SEQ ID NO: 16626 - DNA, 347 bp, Glycine max
  Intron number 1 from transcript Glyma02g05620.1 (locus Gly ma02g05620) derived from phytozome v7.0 (chr-ID Gm02; pos 4489458 to 4489804 reverse strand)
ggatctacaaggtacgcacacataactaaacataagatatatattacgtatagactatagtactacaaagtatatatgcataagatatatacttcatgtttacttcaatttattctaaaagaaataatcttctatttgtatcggctaattagtaatcttttaaaataaaaaagaaacaattactaccatttacagcttcttcactcctttccgaatcaaattagggtttttattgtaaaattgatcatattgttaaagaaatatggtctagcaaagctagatcttagtttatggttttaatttaattttggagagatggttgtgaatgatttgggtttggcagagat

SEQ ID NO: 16627 - DNA, 722 bp, Glycine max
  Intron number 2 from transcript Glyma05g13100.1 (locus Gly ma05g13100) derived from phytozome v7.0 (chr-ID Gm05; pos 13635382 to 13636103 reverse strand)
cattgccttcaatcgccgtggcacccttcttgctggtaacccctttctctttgtctctcttattttcatattcaactgctgctctgtcctttctgggtattctcctttgatgcattttcgtgcaaagtttttatcttttgatttttggtagcctgtgtttatgctaataatttggttttggaaaatgggttgtgggtaaaaaattgagttttatgtttttaatgtcgatttcaaggttaaagtagcgaactttagtgagtaattccctttttccctgatgacccagataagaaaaggacgttatttttactcagattgtatgtatagggtgtttttttggacactttttcttgtggggcttatgtggaattttgggattctagcatcaaggccggagtcctgtttttaattttttcatgccttggcttggtgatgaagaaatattaaagggtatgcatacatttttccctaacgtagtaatgatgcaattgatgctcaatgcattggataaacatgtgtgcatgatgtagttgatgtttactttaccattatactggaataagtttgtgaggcaataatgggtttgtgtgctatttgttctaatgtgggtggagtaaatattatagcaagtgttgaactactactaaatatttattggagttattttcaatatcaattttctcacttttgatcttgatttgctcaattgaaccactagttgg

SEQ ID NO: 16628 - DNA, 778 bp, Glycine max
  Intron number 1 from transcript Glyma03g33530.2 (locus Gly ma03g33530) derived from phytozome v7.0 (chr-ID Gm03; pos 41078124 to 41078901 reverse strand)
gggtaatgcaaccttacgtttttgacaattattattatcattctcctttttattttcctgaactaattcattattgcaaaattctcctggaattgctgcttctggttcaaacctttgatgtttttgttcacattggaaattcttactaccctagatccttttgttgctcaattttgattaacattggataatttgcatttatggtctgtttttgtttcaacaagtagcttgtgccatgtgctgtgtgtggtttagttcttgaatttattgttgcttttgtgtgaatctatgtccagtccaatcttctcatggctttttccgacatgaaaagttattttttttctagtacaagacttgtgtagggattgtgctgtgtgatttacgtcctaatggtgtttgttctaccacctattttgtggacgatgttttccgaaggcatcttttgagctttggtattgcattcactagaacactgtaattgaattttgtctgttcattgttttaagatcaactgcctagtgggataggactattgctatggtgttttaatatcaatagaatgcacggttcatttgtttccattaacaatagtgatttatccttttagagatgatattcttagaatgtcgagtgggatataggactatcgttgttaaatgctattattcctttatgtttgcagattgcagactaccgtttatttttattttaaattttcatgtgaacactgggttagaaaattaaatctttatcgtttccaacttctacaggaagacac

SEQ ID NO: 16629 - DNA, 669 bp, Glycine max
  Intron number 3 from transcript Glyma03g30920.1 (locus Gly ma03g30920) derived from phytozome v7.0 (chr-ID Gm03; pos 38771501 to 38772169)
tggcgctggcaacccaaagattgcaacttgcccaggttctaacccaccccaccttttccatttttctcatttgttctcttttcgagtttaattctacattttgggttggttggtgctgaaaaaatgaacacaaaaaggttatctttcgttggctatccatgttcgttttgttttggggttggttggtatatataagaataagacagtgctgaaaaaatgaggacaaaaaagtaaaccttgattttggttcggttcggttcgtattttttctctgaacacaaaatgattttggaattttgtatcgttgttgattgcttatgggatcgcccccgtaaccccgttcatgcggagtattttgtacatgccccgaatttgttttgttttcatgaactgtcctttttgtttaactttgattaactgtgtttgttctttttttttttttttggttaactttgtgtgaattggaatgaaggaagtgcttgtgccttttgtgtttaactttactcgtatgaattggtatgaaggaaatgtttgttcttttttttttttttgtttactcccaaatcaaaaatgatttgttgtttcttccttaggaaaaagaaaaacagacacggagatatgacaatttattaagttgttttggtgtttcctgctcttaactggacagtt

SEQ ID NO: 16630 - DNA, 955 bp, Glycine max
  Intron number 1 from transcript Glyma04g39380.1 (locus Gly ma04g39380) derived from phytozome v7.0 (chr-ID Gm04; pos 45587813 to 45588767)
gtgagtgcaaagccatcgtcttcttctcagacaaggtattcatcttaatcgcttgcatcatagctttgatgcaaagtacgtttccttttgctctttgattcagcgctttttttttttttttttgcaatctcgcatgtttattcttagatttgttcaacagtactactctttattttttaatctgtgtgacattgctacctacctcatcaaaatcatatctggatgtttttgtatctgattatttatattcgtactgcctgatctatactgaatgagatgtagtggattgtggcgatttgtagttttagtgatgcggatggcatatcatagttccgatcttctagacctgagatcttcgatctttttaaactgtacttttacttatttattttaaaatggggatagacatcgaatctataatcttgtgttggatggctttatggtctgatctgttttttatgtgggaatctctcactttttcttttttatttatcattgatctttctttgttgaagatcatctagtgtttgggaacttaagatatcctgatgaatgttgagattttagtagatatcctagtaagtttgagattactagctgcacatactcccttcctatgtttattttattcgccattttctggacgttttccattcatttataaattttggcagttttactttaaaaaaatgatcaggatcggctcctttgtttgtcaatttatgtaccttttctttctaagcaatcataaagtagattatataatactgaattatttcatttgcttgctttcttcccattgatttttgtgtgttatatacaatgtactgttgctgtctcatatagaaaataaacgtaatcttcaaagtctgtaagtggctgggttctgcagattgtctattcaaacttgttaatactggcaatttgttctatgcatacagtagtttggtaaaag

SEQ ID NO: 16631 - DNA, 450 bp, Glycine max
  Intron number 1 from transcript Glyma05g29820.3 (locus Gly ma05g29820) derived from phytozome v7.0 (chr-ID Gm05; pos 35315875 to 35316324 reverse strand)
tgccatccgcgtgtaatgacaatcttgtttttgcttctatcgccgtcaagaaactttgaacgtgctctggtctccgatccctcctcacgcgcttcctcaattaggattgtgattttgggaacttttgcttgcttataaattttgctttttgatttgaatttggaattgtcaattggattatggttttttctattgtggtggaggttttgggtgatggcagaagaataaagaagatgaagaggatgatgggtgacaatatttttcaaaagtttataatttttaaaataaaataaaaatagtgataatttttaattataattatttttaacatttttcaaagaagatgaaaaggtactgaaatttttaaaaacataaaaatattaaaatttaatatagcaaaataaaataagcttaaattttaatgagtcttgggtcttgtcttgggcaggg

SEQ ID NO: 16632 - DNA, 1030 bp, Glycine max
  Intron number 2 from transcript Glyma02g08500.1 (locus Gly ma02g08500) derived from phytozome v7.0 (chr-ID Gm02; pos 6642339 to 6643368 reverse strand)
cagcaaaagtggtagccacgaccccatattacccagtgagctccattaatatactacttctttatacaaaacttaaatgcaagttttaggtgcttttatatatatatatatatataaatatatatttttagttctatattttcatgaaatcttgtttttatttcccatagttttatatcattcaatttaattagtcctacatgataaatagattacacggtctatttagtatgaatttatggaaacaatgtacaagaaacaaataaaatgaaaaaaagtcgcaagaataaatctctagcaattgttcaagaatgacaatggaaacaaagataaaattacagttcttgaaaacagttcaatgtgtttgggagagacaagtagaagttaaggctgtttataaaaattctttgaggagggatagaaaacaaagtcttatgtaaattacatggattaaaaataaaatttcatcaaagtataggaactaaaaatattttttatatatatcattatcaaaattttggtaatcaccataattagaattttttatttttcgataagatctagaatatttcacaagtttcagtcctttggatcgactatgaaacgtatcctttatttggagcttaatcacatttaatcatacttaaaatttcttgctagtaatccccaagaatgtattctatgtgaattacactcacatcttccttcacaaacttagtatctgttaattgagcttcatcgattgggttatcaaattaaattgaattttatcttaataacttatattgaccttttaatacaagcatttattgtgtaaattagtgatatgaaacttcatttgttaatatagaatataacaatacctaaggaacttttttttattactaatacctaaggaacttcacgtgtatatatataatatatttattgatatttagtttatgaaattattagatatatagatgacataaactatgttaaactttttgccacagctctatagaacacaaacccaactctttaattctag

SEQ ID NO: 16633 - DNA, 659 bp, Glycine max
  Intron number 1 from transcript Glyma05g27860.1 (locus Gly ma05g27860) derived from phytozome v7.0 (chr-ID Gm05; pos 33718615 to 33719273)
ccacccgccaatttcctttcccatgtaagttaatttggaaattctgtttatataattttgtatgtatacttaacgtttttatcaggaaataaggtttaattaattgcatcaatatcgttaatatcaatttggaattgttctttaataataacatgttacaatcctcattcttgattgataatgtcaagctgaaaaggatcctcgggttatcgaatatcataaaagagaagaatggttgtttctataatcaaatggaggcatacttcggtgtagcacatatagcggcatacccctttgacctaggtgtaaaagagatctattgaaacccaccataagtatctggggtgacagctgcggatacagatttaattaattaccataagcatatgtctgattgcattgactaatctctgcacaacatgcccaaaagtatatattttgttaaacaaattataaaaatgatgaaccggtgggttaattcgttatagctagaatacagcaatgatcatgtgtgagatctgctacatatggatgaaaatttaaactttgaagtctacgcataataatactataatctttttgtttttgtctttttcacgtgtttctcttataccgatttttcagaagcctaaggctaagacaaggcatcgtccattaca

SEQ ID NO: 16634 - DNA, 975 bp, Glycine max
  Intron number 2 from transcript Glyma03g30250.3 (locus Gly ma03g30250) derived from phytozome v7.0 (chr-ID Gm03; pos 38190455 to 38191429)
tatcccccaattcaccaggtgcagtgcttgcaatttcttattatgggggtctttgtgtgttagataaactttttcttgagatgcatgctgcacacatgaaatagatataggcatacggatagtggcattatgatttttatctccatagtccttgtaggatggttgcatttgaagataatatcacttgcatacttatctttcactgcaaaggctgcatcatgcggctaaatgctggtgcatattaaacttaattttcataaccttaatttctagacattgtgggataagtttagtcattgatcttgagtgaaacatggagagatgtagtgatcagaatgaacctttggggtttgatgaaattgtcatacctatctattcaaattttttgtaatgtgagttacatgatagttatccatccaaatttgctccccgtctgttgtcattcattttctcattagtttaacaaaagtagatattttggactataccaacaatagttaatagataaaaaccttaagtttgttgccttttatagtcactttctatttttgaatttgaattagataccctgcccatcctgcaaaaggaagttcaggaatgagacttgctgattctaagcctatatttataaatactatggttaaaatgctaaggtcgctggattttaattgagatttaccctcaagggggtaggaaggagaggcaagaagacaattgtgaaaaaattgactttagtgttgttattgttggaccttctcactgaaggctgtggacatataatccacatgtattgtgtggcctattctactgtctgagaggactgttgtattgttgtatatggctgttataacctgctgaaagtctttaatcattattttcacttcacatgattactgtgaatttaccctgtcttgtaaatttcttataaatttctaatattttgcactcggctgcatcgtgttttccagtgcccaa

SEQ ID NO: 16635 - DNA, 689 bp, Glycine max
  Intron number 1 from transcript Glyma02g42710.1 (locus Gly ma02g42710) derived from phytozome v7.0 (chr-ID Gm02; pos 47712007 to 47712695 reverse strand)
cttggattcccttttacaattttggagaggcttatgtaaattttcatctctctgtgtttgtttctactttattttaagttatgaatgtgttatgtgtttttattgtttttgttttgtgtttgagtgttcctagtgttatgtattatttgctttttacttgataattagttagatacaaacgttgaatgaaagtaattgagcaatacggcaattctgagaaggaattgttttaggttgagatgcatgggagctgcaaaaatgtttattttttctgagcctctcatactcaccatgcattctgtttaaataaaatatagttcttgatttgtggaattatgcccctgtggtgatttactctctgatgttgaagattgctgttataacagaacagtgctgaagactttgacataaagagagtggaggaggaagcagcgaagttggaaaaggatttgatagtgaaagaactcgaaactcttgacgtgcttgaggaactgggagctaccaaagcaattttggaggaattaaagaagcagctacaatcagaagcattgaattgttttgcaactccgggtgggaattcatgtgaacagattggagttcctgttaaaaattgtgtgaatgatattaacaatgaggagcaggcattacaatgtaggagcccgtgggctactttatcacctgatctgttc

SEQ ID NO: 16636 - DNA, 883 bp, Glycine max
  Intron number 4 from transcript Glyma03g41110.1 (locus Gly ma03g41110) derived from phytozome v7.0 (chr-ID Gm03; pos 46639295 to 46640177)
atcggaaaaagggtgtgacttttggatcatttaaggtaatgtagggaaatctttcttttttgtggatacttaaaatcacacgcataacttgatggcatgacaacactgaaatacttcttggttaacttgtgtttgaggttgaagctactttgttaatttagttttggatgtatttgatgtattttccccttctcaaaatagtgcatttttatcttgaactcttgctatttttcattgttttctttgggctgctttgggtgagcaggtgggggaagttagacagaatgacatgatgaagtaactgccaggattatgatttatcaattcccgtcttagaatcattgataactctatgcggactgtacccacccaatcatgatttttgcttcagctatgcaatgcaaatctttcatgcttagcatgggcagtggatattgaaaaagtatacaacaatcatgatttttgcttcagctatgcaatgctttcatattagcatgggtagtagatattgaaaagtgcacaactatctccctaggagatacctttatggaaaaaaaatgctcattcaaatatgtgttgtgccttcttcctatttttttccaagtatttgaccccaagagaaatgctagcaacacactctttactattagttgaatttttttggaaatcacaatattttgtgtgtgccactccatatttaatgagttccactcataattttgtagtttcctataaattttaaccaataatatagagtgtgagaaaggatgtgttacagtgtgttgctagcattgctcttgaccccaatatgttgttttttgtttgcatctcaaaatcttaatgtacctattaaactaaatgcaggtttcaaaggagatcaagt

SEQ ID NO: 16637 - DNA, 879 bp, Glycine max
  Intron number 1 from transcript Glyma04g10850.1 (locus Gly ma04g10850) derived from phytozome v7.0 (chr-ID Gm04; pos 9102991 to 9103869 reverse strand)
cctcctccaatcaaccatcacaagatttcccactggtaactctaaatctcacacctttttgttgcatgccactctttttttcatctctctctcacctacccttttgtttatttactcaagaaacacagaatcctccctacactttgcaaaaataagaaaatacatcaatctgtggattctttatttactcaagatttggtatcttctaaacttaatctgttcttgtttattttttttcctttttgttttgttttgttttgttttccctctctttcctcggagttttctcagcaaaagcctggtggggtgtctgagtctctgttcatggcttgggctatgtgtgattcttagcattctcccaaggttgcggtggctttgttttggaaaagcaaaaaataaacgtacttcaatttctgttctgttaggaaaatatttctaacatttttatttttttgtcgggagggaattttctggcttttgtattttctcagcttcatgttgttgggggagtcggtgagatgaacatataaagttgagattttttcaattatcttcgacttggcaagttcaattttgtgctataaaagtttcttcgagttttcgatccctccaaccctttccgaaagatgctttcttttactgatttttcatagaatatttgaatttgaactattcattcacatgcttgtgacagatattttggtgtatgtgtgtgtgaatcacagagtctggaatatgctttttcatttttgtttttttctgtgaagagttccacttttttgtcaatgctttttaattaatatattcatctctgtatttggtgcttgaacctcaacaagaaaccataaatgttcaaaattttgttattctatagattgg

SEQ ID NO: 16638 - DNA, 513 bp, Glycine max
  Intron number 2 from transcript Glyma05g14300.2 (locus Gly ma05g14300) derived from phytozome v7.0 (chr-ID Gm05; pos 15082952 to 15083464 reverse strand)
acccaaggtactgcttattcactatgccctaggtaattttttactctgtttttttttttggtttaattaagggcccgtttgtcacagttttttttccataaaatatcatcttttttatattaaatatcgttttaaaaagttttccatcgcttcagcttttcaaaataatcagaagatggaaagaatctaaaatctattaaaatcaaaacctattttgaatagtttctcataaaatcagttgttttgttttttaattgttaacagatttaacttgtgtttttgtatgtaaaaatatataaatcataaacttttttttataatatgtaacaaatgtgccctaaatttgtttgaacttgaaattatcaaatcaccaagttaattttcgtttttcaggtttttgaatggaccatataatgatgcagtgagtatttctgagcttatgattttgaattttcatttgtgttttgtggatttgcagaggctgtttcaaagctagaggaggcgcttgcggtg

SEQ ID NO: 16639 - DNA, 429 bp, Glycine max
  Intron number 1 from transcript Glyma02g00560.1 (locus Gly ma02g00560) derived from phytozome v7.0 (chr-ID Gm02; pos 340432 to 340860)
gatcgtgtcagccataggtaacattactacgcttcgtcattgatttttccagttaatgattcattcttaaattattaatttttttgttgctctccagtaaattttcgatgcattataaagatttctatactttgaattaatcaaacaccatcctaaacattacttttaagatatttattacaaaatcaactaatttatcatacatcaacatatattattaattagagtgaaattaagtttaaatatgttaagtaaagtctcaaattctagtaaatattttacatcgataatataatgatccaaaatacatctcgtatgatataaagtgagagtattctttgggtcattataatatttctttaggagtttattactttacttaacacaccatggagatcttcttcttcaggggttcacggtttcttctcg

SEQ ID NO: 16640 - DNA, 851 bp, Glycine max
  Intron number 3 from transcript Glyma01g37380.1 (locus Gly ma01g37380) derived from phytozome v7.0 (chr-ID Gm01; pos 49742978 to 49743828 reverse strand)
gattccatcttcgtttcgatccgtggtctcaggtgttgtattttttttcccttcatcttgtttacaatgtagagtccttatttagagaaagcttgagattatgtgttttaggtagtgaagtttttgtttagaattgatttgaggggccatcactagtgccttggtagctatatgttctcacaaataactataaaaaaatactactaaattagtcagacacatgtgaaaatgcaaattctgtaattgtgtaaaggattcctgcaaaaaaaataagtgagttctgaatgttattggattctcttagaaaactctatgtacttttagtagtatcatcattgaagttcattctgctgacatatagaacttgataaaagattaacgagaatgaaaaatcgtgtaaggatctttttgtaatttcccagtgcaaatgaaaactgttgaagttgaactagtgtaacaatccaagtttaaaatttagctatcctttcttttcccatgttaattggggtgaattgtttgaagttttgggttgtttgttacaataataatgtgcttcgtcggtccttcacatcaagatgatacgatgcttgagaatttgcatttttttaaacctgaatacctgatattgctgctttgttcaaaagtaatggagcatttcttaatttgttttgcttgttcttgaagatctaaagctataacactgtagtatgcatcagttcttatgctttcaatattaatttaagctgtgttatagtgcttgtatttattggtatctatacttgcctaaatgactctgtcatgatgaaacatttcattgatattttagagactgcggcttattgaaatatttg

SEQ ID NO: 16641 - DNA, 361 bp, Glycine max
  Intron number 2 from transcript Glyma04g38040.1 (locus Gly ma04g38040) derived from phytozome v7.0 (chr-ID Gm04; pos 44461761 to 44462121 reverse strand)
aatttcgattctaggctcagaacattctttgacatgtaagtctatgtttggtgtttagtttcgttcaaaaagtaaaacggaaaaggcctcgtttggttttcagtagggtctgattgtaaactgagttttgttttaattttccctcaaaacacagtttgaaataagagaagagagaaggttgcttttggggtcttaatttgtaaaatgaagttcattaaaaaagtttgcaaactatattccaaacatacactaattctttgatctttgctttttctggtttataaagtttaagtgaaaaaatatgtggcgaatgtcctgaaatatgttaccaagcttaatttgtaatgcagggttgataaag

SEQ ID NO: 16642 - DNA, 323 bp, Glycine max
  Intron number 1 from transcript Glyma04g38040.1 (locus Gly ma04g38040) derived from phytozome v7.0 (chr-ID Gm04; pos 44462248 to 44462570 reverse strand)
atacctgcatcgctctctctttgccaagtgcataggtatatttgagttgatcactggtcgagaaattactccatggtccgagactgtcgtggtcacggataatctccatgtgacacatagcataactgagttttattgattctttctcgtaaattgagaaaaactcagttacctgtcacgtgaagattagtcatgatcatgggcacttggtggttctggatcatgtgataatttctcgtgtttttttttctttacttagcttcaaatgtttgttgttggtgtatggagtggttttttagatgcgtttggttttaattgtagag

SEQ ID NO: 16643 - DNA, 579 bp, Glycine max
  Intron number 2 from transcript Glyma01g39440.1 (locus Gly ma01g39440) derived from phytozome v7.0 (chr-ID Gm01; pos 51382141 to 51382719 reverse strand)
tgaggtacattgtgttctcattttcatatcatggtgtatgctcgtgcgctccttttactctcaaatttcttcaatagcgctttagtctcattctagtgggattcacatgaatttcatccaatgaaagtatatcagaatgatgattttagagagtgtattgctaccacttcttttattgttacagcccttgacaaccaaatagaagctgctttgttttgtactcattaaactcacagcgctattggtctgtttcttttctcttctgtttcgcttttctgttttgattagttagtaatgtcatgtttgtaaacattatcaagcatttttctctgaaacaaaatatatatgtatatatatatataaatgaaggatacagagaatcgagaaactctgttgttggacaattttaattacctgtttcttttataaatagcatggagccaagtttaaggccaaaataatatggttaataatagtttacatgcttttgtgcaaagtttgatgctgcaggcatttttctagtagattctcccttcaaaataaagtttcaactttgataatgattgattaaatcatagg

SEQ ID NO: 16644 - DNA, 440 bp, Glycine max
  Intron number 3 from transcript Glyma01g38680.1 (locus Gly ma01g38680) derived from phytozome v7.0 (chr-ID Gm01; pos 50768545 to 50768984)
ataatcgcattcaggcctcaggtcgaattaaggtggtatactcaaatcacttcttccttcttctttttaataagcttagaaattgaagacactacatgtggataaagtacattcttaggagttaggcatgaagaggcttgtatgatgctgaaaagaaatttcatcatttttcttttgacttttcagacaaatctttatcatgaatgatgtcaatggtggcccaaaatttaatagcaactaactatatttccaaaagtttaatgtaaaatggacaaacagagaattggtttttggccaacagtgtatgcttgatttcattaatcacatccatactgttgggacattgatgactattttgattttattccctgtagtcccccacgcacaacaaaattcattaacttttatgcctaagtttgggtttgatttggttccaggac

SEQ ID NO: 16645 - DNA, 659 bp, Glycine max
  Intron number 1 from transcript Glyma05g01570.1 (locus Gly ma05g01570) derived from phytozome v7.0 (chr-ID Gm05; pos 1072518 to 1073176 reverse strand)
gttggaaatccagagctggtgaagatactggtaagaaaaagtatgttttattcactatggttgtgatgtatgaaacgattcaattccgatactttttggatacttcagctactccttttgtccctaaatataagtttttatttgtttatttataattttgtctgtctctttttataagaatctttggctgactgtgaattagttagttaaaaaagtcttatatttatatttaggaacgaagagagtatttgtgaagtatgcaagtcttaaaaaaagttatgaaaatctaatacgcatgcatataaacatgtataatattgaaacatagaagcactaaaagatggaaattgttctctttacgaatgattacaagaaaggagtgagattgatactattccaacttgtagactataggaagtgatttataattgcaatgatttataatttttattttgtttttcgcaatgtcaaagtagtatgttcttaatatgaatttgcaaaattgcaattatacatttatttattgcattttatattttttttttatacttatttagatatatcttgtatgtgtcttgcgctatatcttttttgagaataattgtatcattgttttgtatctgatacacttatattgtggcttgtgttttatacagttg

SEQ ID NO: 16646 - DNA, 660 bp, Glycine max
  Intron number 3 from transcript Glyma01g44360.1 (locus Gly ma01g44360) derived from phytozome v7.0 (chr-ID Gm01; pos 55040582 to 55041241)
tatctcattttgccaaataaagttccaccaaataggtgatttttaaccatttttatgaattcattccaaaactaggatgtgtttctatgtggatttgctgatttgtcatccttgactttgtttattacaccctattaatgtggataagatgaaatatattttgatatcttgaatgcacacgcatcttgtttacttgcttgagggctgaagcatattgctttgtgtttttcaattctccttgaggcacctcacctcagtgccttactctcttgttcaccagtagttgtttctgcaggaatgctatgttagcagttcatagttcttaattgtgaattgtattctatttaaaatgtgtctgtgaatagtgttctgagtttaaatgcatatataatatcaacactttgaagtgaataatttagtttgcaatcacattattacttctagaagattttttaataaaattgatacagtcaaatgtcatatagttttatgttttctcttttaaacattgttttgctgcaatactaatatactgatgataacaagttcaaaatgggttgtgtgcacgtgtatgcattgcagtttctctagaatgtgcttgttgctaactacttaatatcaactgattcaattttaggttcgaagcacatttggaagttc

SEQ ID NO: 16647 - DNA, 1046 bp, Glycine max
  Intron number 1 from transcript Glyma01g20670.1 (locus Gly ma01g20670) derived from phytozome v7.0 (chr-ID Gm01; pos 25147873 to 25148918)
cgcacttcgaaattgaagtgaacccttcggacacggtttgcccctaacactctcattcttcaattgaatttcgatcgtgacttgtcccctttttgtttttcctcgctttggttgcgcgagcagaaaccctgaatttgtggattgactagggttttactttccttgttggtcaatttttttattggttttgagtgatggcaatttacaattccccgatcaatcttttatgttttgtaattgtgttaaatttaggttctgaatttgctttatgtatgtgcgtgatttggtgtggaattaatatgacctgccatgtttctttgttgtgtattaggtaagagtgcaagaccaattgcggctaagtggttgcatggttgaagcatgataatgaataagtttcactctttgatgttgtttggaacttttcttcttgggaatttcaaacaggtttatcgtaggatgaaaattctggattaatactggttttgattactattggagatcattatcattatagttgcacatgactgactttgtatataccgctatcatacacttggattgataattaacttaactatgagctgttggaattgacattgtttaagactttgacggagcttcttgttgttaaaccatcacgaatgactgaaattagggaatttggcttctctgagtgaaggctgtgtttcagaggaaacttatggagttataactgttgattaagacaaatggttgagagtgtgataaaatgcatacaaatgtataacaaataatgaaattgttaaatttcactccctcgagttttttaaacaacacttataactttgtctttttctctcttaagcacacccctcactttagagttatatgtgaaataaggatgtttaagagtgtgttaatttatcttttaattatgtgcttcaattctctcatgtttctaccatattctgttctttctgaactacagtaattagtctgtaatatttgattaattgtggatattatttacagctttctgaagtgaagaaaaatatagaaactgttca

SEQ ID NO: 16648 - DNA, 814 bp, Glycine max
  Intron number 3 from transcript Glyma05g10960.1 (locus Gly ma05g10960) derived from phytozome v7.0 (chr-ID Gm05; pos 11346914 to 11347727 reverse strand)
agctgttgagggaggctgagtactatcagctacttgtaagctgaaatttactatttttaaagatatgtggatataaattgcggttgtggttgggacgcagaggccttagaaactgtaatattgtgtctgcaattgttgttgctggctgtaatttaaaaccatgttaggagtccttctgtttagtactggaattgtcggaggttgtttgggcctagttaatagctacacatgagtatttgcttttgtcataagaatcaagaatgttgacttggctttgtgatgatgccatgtactaccattgggtccttaatgaaagtttttctatttaattattattttccattgtgggtaggttaatgcatctatttgacagttactcatatttcatggttataaagacaatgtagtaaaaattgattgggctgtttatttagaatcttgtaagtttttggctgttagttttatcagccagaaagctgttttttctttatcgattttccagaacataatttttttaaatacaaggttcacattcattgtggtttttgtttgaagaactgcaatctatgatggaaactttccccatcttaactcaaaaacaaggtcctttgttgtatcataagtaaataaatgcattctaccacttgctatcgttgcttatgtgtatatgccatgatgttaaacttgaagttttcttattaccgtctgcctagatttcttccaattactttacctaatggagagaaactgaaacttcagtccttattgaaaacataaaacctttgataacttgctgaacctcaggggcttattg

SEQ ID NO: 16649 - DNA, 855 bp, Glycine max
  Intron number 1 from transcript Glyma02g44490.3 (locus Gly ma02g44490) derived from phytozome v7.0 (chr-ID Gm02; pos 49059392 to 49060246 reverse strand)
catcgtcatcaacgctcccatttcctaaacctcaggttggttcttcttcttcgtgttcccgtgtttcgctttttctctctctctttctttcaatctcaaaccacagctatgatcctctttcgcggaattcggtaattcgccttgttgttggttgtgtgggggactgagaaactgcatgtttggtttcgcgttttgtgggattcaggatttcgggcctgtttggattggggaagtatgaatatcacggatcctcgagagggaatagcgtgctgatttttgaaattttgaccttgattgcgtttttctttatatataattttgacggggatgtgtgtgattttttgtattgagtgcccattgcggcaatatgttcttttttccagaaagtcgaaattttttggtgatagaaatatcgcatatcagtgttatgggggattgtggtttcatgtttggttatcaagaatttggattttttgttaagggtgggatgatcttgtgaaaatttgggagagtcatcatgtcacggcctttggaagaaagttaggttttttgtttcagtttgaccacaagcatttagaagaccatttttttccttttacttactgtgttgattaatgtagaagtggaatggcggtttttttgtcttagagttgattatttgaaaaattcggcgtgattgaatggttgaacttccgtgaaaaatggtacaggactgtgtgatacttgcactctctgttggctttttaataagtgttgtgcatccttctggtaaattcaactgaaacattctcaattttgatgctgtgacattccggtgtagagagggatccagctaacagttgtttcccgctgaaa

SEQ ID NO: 16650 - DNA, 820 bp, Glycine max
  Intron number 1 from transcript Glyma01g42350.1 (locus Gly ma01g42350) derived from phytozome v7.0 (chr-ID Gm01; pos 53622823 to 53623642 reverse strand)
ctctccttctggccaaagaaacccgctgattatatgtcagtgtactcacttctcttcttatcatcatttctttcctaactacaacttgtatatatacaaaccttactcttcccatatcacacatgcatgtcaatctcaatataataaatctatgcatataattagtatattctaattctaatagaattctatagacaggttagatttagtagaaagatattttgaattcttgataagaaattcttctataattagtgtctaatagtactttcaacaagagaaattattaaatggttctaactaatctctctaattgagttttattatctctttctcaagattttaaataccagtgattgtcacaattttattatgtttaatgatatagacaaatgctaccgatgcaactctaattacaatcacattattgttattgaaacttgaaaaaccttgatgttgcagttaaaattaccgtcgcaaacagtttttttccagcaaattatagaattgagtctaaaggaaggtatatatgaacaagaaactcttagatataatgcattgtatgattgacatggacatctagttttttattaataatttaagttcttttttataaagactatattcatggtggcaattttaatgcctcatgtagtacttattaaaaattgtagtgttaatttccaaattttacataattaatataaagccaatagagaacttaactgacaacttgattatagatagtagtttaaccttgattaaatatgtgtagctttaacaatgttggtacatgcatgcagtgaggtcacaagcgagt

SEQ ID NO: 16651 - DNA, 891 bp, Glycine max
  Intron number 1 from transcript Glyma03g27110.1 (locus Gly ma03g27110) derived from phytozome v7.0 (chr-ID Gm03; pos 34642872 to 34643762 reverse strand)
gggaatcaagcaccccattggtggtaaatcaggtatttgtgatttctttcataatttatcggaacaaagttttatgtctttggagtgaaagttgagcattggccatgctcagttcattccttgctttccaataaactggatttgatatcataaaaagtgtatttttgtgggtgtccaagggtggtgaagttaaaattctaatagctaggtgaataaatagtgaaataatttatgttagaaaattaatgtgcgtgcaagtgttagttattgaacaaataattgggttctggaagctaagtttaaaaaacaggagaaagatgctttattaccaaaggtatcttcgtattaatggaggatcacactgaggaatcggaaattgttctgtattgtagcaaaaatgcttcttgtaagtaatagtaaggatctgtattaaaaaaaacttagggatgagataactgtacactgaggaatatttatgagtgtacatttcatgttgcctctattttgcactgacagtccattccctttttcctacctcctcccaaccaaaaagggaaggtgagaaaaagccttttaggtgaggtcaagcatctttaacttgtgatctgttttttctacttaaggcttcttgagtcctgcatttaattatttctacagagggggatttgttgaatatggatcttgctgttaatgttagtttggttcaaatgcgtaattactattttgttattgcatttagttgtactttttttactagtagctgcaccttccttttatgactgtcttgatgattaaagcaatactagataattattttattattattatttttttttacaaaaaatcaaattaagtttatcttttttcaggtacagggagagggtttgacaa

SEQ ID NO: 16652 - DNA, 343 bp, Glycine max
  Intron number 1 from transcript Glyma05g10890.1 (locus Gly ma05g10890) derived from phytozome v7.0 (chr-ID Gm05; pos 11257982 to 11258324)
aggttcggttttttttctttgtttgtttcttttagtttttttgttcccatttcactttttcacttaccggtcaaatctaaagataaccaattttatcaccaccccatctctgtgtaatgttatgcagccttcgccgcatttgtttcccacatcaaaatcacatctttagtgtgaaaaacgttggaaattttagaatattattgacccatttgcttgtaacttgaagagtttaatattctgagcaatttccccattttttatttataatgtcgttgatttttttttttctttttcttgtgtgagattagtcgccatcctgaagttctgtgggcacaacgttctg

SEQ ID NO: 16653 - DNA, 535 bp, Glycine max
  Intron number 1 from transcript Glyma02g36350.1 (locus Gly ma02g36350) derived from phytozome v7.0 (chr-ID Gm02; pos 41809655 to 41810189)
caagcattctcaaaccttcttttgctcctcctctggtaacacttcttctgcgcacctttgcttcattgtcttatgctctttcttttttttaaaaaaaaaaatataatataaaggtgccatttgtttcgctctctctaaagtggatgtggaatttaaaatcatatgttatgggttgatgttcctaatgatctttggatatttcccatctattttttatctgaaaagattctgtcttttattctgtttcaattataaatcaatttttaacattaatcaaataatagatgttgtagcttacgtgttgctaatcctttattcttctaccttttaagttgcaagacaataagaatccccaaaaaaactagagataagagtgataagacgagttggttaaaactttatgaaatggaaattgcatctgaagctatatgtaaaaactagaaatgtttctgaaagagactctaatatagcgtaggataaagatttgttcatttctgtattaatatgtcaaattgttgtttaggtttgtgacttc

SEQ ID NO: 16654 - DNA, 918 bp, Glycine max
  Intron number 2 from transcript Glyma01g34980.1 (locus Gly ma01g34980) derived from phytozome v7.0 (chr-ID Gm01; pos 47516926 to 47517843 reverse strand)
agccacagagaaatcttcgcgccagcttaacattggtattttctgtttttttttcttcttttaattttataattctagagagtattgagtatattataattaaaaaattctgatattatattttcatattatttttgtgtttttacttttttgataatttggataatgtgattgttatagggctgttgtatgtgtatccttatgatatgaagggcttatatttttcattagtattttgtagtttatattgctttgtttagagaaatgtaagagtctaataaggatattacttagaagaggttctttaattgtactttaggtcctgtttggataagtagaattcagcttctcttaaaagtttcgtaagtacttataagaagagaacttctatgagagttaagtgtataagtttaaataatgaattgagtttatttctctcataagctgaattcagcttttttgaaaatttaaatgagagaacttctataagttaagtgtataagttgattttattgtacgagagaagttcaattcattttatttcttattctcttcttctataataagtgcttatagaaaaatttattcaaacaaggatttagtattattctctaagtatttcacttgggtaaaatatacaatattgacatttaaagttgaccttgaatattgaggtaagtaaaactcttaactttcgtaacagatcaacactaaaaacacttaaaaaattgtacctaggattcatccttttgtgaaaccttgtttgtgagattattttaacattgaatcagaattggtaaaatactggatgttggatgagaatgtccgagtggggtgatcattcgtatgaatatgcacttattgggaatggaaagtttagttttgtctatgcactcaaattttttgttttaggcaggg

SEQ ID NO: 16655 - DNA, 743 bp, Glycine max
  Intron number 2 from transcript Glyma02g41830.1 (locus Gly ma02g41830) derived from phytozome v7.0 (chr-ID Gm02; pos 46930652 to 46931394 reverse strand)
agttgaggccaaagactgcatcacaatctatctaggtatgcttaaaatatgctataattttgtcatgttatttggtagttctggatttagatggtttcagtgtaactcgattatgggatgggggaaggtggtttcttttggaaatgggtttccgaccttgtaattttgctaactatgacttaattaaattatattttttacttttgctatcttttggagtcctgtgaatccttatctgtaatttatgagttgagagtggtgttgttagtctgcattgtaggtaacccgaaagatattagttgttagataagaacatggtctgagccatatgatatgtaaataatgatggtaatggtaatgccagcttatcttgatgtttgtttgtttatactagtaactagtaaagaccacttaattcatatttgatttattgggttctgtagacacttttttaatgtagctcgtagattggactgtgtcattgagcaatatttcattggcagttgtagctagtatgttccagctctttgcctagcaataggctttcttgagcttagtttgctaaggacatggtcttgctaatcagtttctggtcaagttcgtttaagtgttctttactgctatttagttttcttgctcatttctttgagttgcttgtcagtatgttgcatttttgcaattggcatgcatactttaattttaatatctgctattatgtacagtttcaagcaaggaggaattcg

SEQ ID NO: 16656 - DNA, 612 bp, Glycine max
  Intron number 1 from transcript Glyma03g41660.1 (locus Gly ma03g41660) derived from phytozome v7.0 (chr-ID Gm03; pos 47066351 to 47066962 reverse strand)
ttcccttgcagctgctcctgctccttccagaggtaattctcctcccattcctagtttcacaagaatcattgaacattttttctcctctaccttgtgaaagaatcaacaatgtaatgtctgtaagaaattgttgcacttcatttcagtacaaagttgaaattgatctttgagatgtggtggcagatgtaggggttgagaggagatctagatctcccagaattatttggcatgtactttttcaccatatataactgtcataatgaaatggcaacaacgcagtaacacttggtcttctaacatagttttctgtttctttttttatcaacaaattttaatagttaatttgttagtttttgttagcagagagtatcaaagctgtgattttttttccctttccttctttcttaactaccgaacaaacttaatatctccaagtagttttctgttgttagtggataaagctgctcgacatgactgtagatgaatgtgttgttttgtttcatttagtttttagttaataattaatgttttttttctttcgatatataataaatgttgttgggtaatgttcgatcaggtacttcaatagaccaaggaattgcatacgtattg

SEQ ID NO: 16657 - DNA, 774 bp, Glycine max
  Intron number 3 from transcript Glyma01g38910.1 (locus Gly ma01g38910) derived from phytozome v7.0 (chr-ID Gm01; pos 50906403 to 50907176 reverse strand)
gagattcggaggattcaaagagaaaataaggccaggtattgcttcaaacctttgtttacctagttatgaggttcagtttacttacctagttgttgagagtgaaaactgagaattaagatttttttttaaaaaaaaaaagaaaatgcttttgagaatattctgtatttcctttgcatcatgattgaaaattcgcgaatatagattgatagatactgggataatttctagcttggtctaaataccgttgaggggttggggtgaatagttgcaaagaatgttactgagtagattcaaaaactcttttctattgaaagacgtgactttgcgagcttctgattctgctgtttagtgtttaataatcgattagcattaggtgcctaatggttttgaagaatttgttggaaaaaagattcagtaaatccgatcaaacttgggtctgctcagtgtatatataaaatggctttccagctcaacatttgttaaatgagagtctacaaattcttgtaaggatgttgaatcgtatgatttaatatatgctaacctttagcatcagttaaattgttcctgcaaatgtcaatttttgtatcactcttttttctgtgctaaaccataggttaagatataattgcatgcgcttcagctttgttgaagtcactcgcaggatttgtttttggacttgtgcaaagcaatctaattcagtgagtgcctaattatatggctttgcatttttgactggcagggttgttcgtgaaggaaaagagcgtaggaggagat

SEQ ID NO: 16658 - DNA, 891 bp, Glycine max
  Intron number 1 from transcript Glyma02g44920.1 (locus Gly ma02g44920) derived from phytozome v7.0 (chr-ID Gm02; pos 49358765 to 49359655)
gcagaaccggtcctgtggaaagagacattgaacaggtgtatatatctatctatctatctatctatctatctatctatctttgttttgtccatttctttggaaaccttttctcagtagcgtcgtgctttgaatttcatgctgcagtactgtttgcttttagattttgcgtatctatgtggtgtgcgtgcgctgtacagtggtggtaatgttcttatttgctgttgttggggggcattgggaataggtaattggctaaatttcgctaagagctaaagattttggagatattgatggaagtccagttgcaatgaatttggtttcttagtttgactgccagctagaaattattatcatcaggtcaagctagttgcttaggaaattttcttttaattaataacttacttaaggagtctgtttatatgtagttaagtatgtgttatgatttctgagtattgttcgaagatttggtttcttttttagtggactaaacattctagatatttgactatgtgaatattagattaattttttttttcttgaatttatgtttcactaatttgaccattcggagatctttctatttaattatcgttcacttttatagattgtttgggtgttagataccatgttatgccacaggaatacaagtcaaatgcattatactgttactattatattgactaatagatagtatgttgttgaatttttggacttcagtagctgctcttggtgcttgtcagttgaattttatccataaactatgcttattcaatgattcctctatcttataagtattcttttatcttcagatgtgttgtatatgctggctgatgtcctttattgatcttattgacaggccattactgctttaaagaaaggggcctgcttgct

SEQ ID NO: 16659 - DNA, 967 bp, Glycine max
  Intron number 2 from transcript Glyma02g44920.1 (locus Gly ma02g44920) derived from phytozome v7.0 (chr-ID Gm02; pos 49359673 to 49360639)
gaaggcccaagatttgccccttccgtctttccaatgtgagttttgtacactttttcagtagattcaaattaaattaatccttgttaaagtgtgtttcatttttgtaaagaattgtatttggcattaataactttgtccccatatagtttcaaaaccaagctcaaacccttggtcttgctatatttgattttattttgcatttatttttcttagatagtggtggaaatatttcttttaagagattgtagggtaggggaccttgaagttgaatggcatagtgtgagtaatttgtggaagagaggagcaaaaatgtgaagtacttgtcaaacaaattaaaccgtgaaaattaggagatctaaagacttcatgatctactagaaaaaatacaattattacagaaaggttaatcaattgttaacatcaattaggttagcttaagattaggttttccaaagtgtttgcagtaacaacattatgaaaatttgatggagtcgtaataattatgggcagccctgactagtttacagggaaaatttactagtgtatggttggatacaacttctctcccacatgagaatgatttgatccgcttaagacacccattgtgccaatattaagaaatgggaaacctgcctttaaaaacttgctcaatcttgttaaagcaaacattctaatctgcatatctagaatgtatatttgaaggtaagcatgcatgttaccttattattgaccaccacaccatatcaaacacttttgtatttggtggtgattatgcatgccatttatggaatcactttcatgccatttcatggtttgaaaaccatttgattattttgttattcccctaatcttgctgctggtttatttatattattttcataatttaaagtttgtttttagatgttttccagttgccaaaaattaagatttggtttctctacttttttcaggacgaatctgttttgat

SEQ ID NO: 16660 - DNA, 579 bp, Glycine max
  Intron number 2 from transcript Glyma03g31650.1 (locus Gly ma03g31650) derived from phytozome v7.0 (chr-ID Gm03; pos 39512943 to 39513521 reverse strand)
gcagctacaaggtgtgtgtgttactatatattgttctctaagagtactaaacaaaccatcttaggaaacgagactgggatcgtctattttgtaacaggaacagaatataataggcgattagacaatttacttgtcaattacctgacattttcttttggcctcacttttctacatcaatagcttccataagcatttttattcttcatccttatcttaaaaaattaatgtatataaagattttaccattcaaactttcataatctagaatctaatctaaatttgacttatatatatgtcttcctatattagtgttttggtgcatgacagaatgcataaaaaatttaacacattttaggtatatgggaataaatagtttttctttttcccaaagaagaaaagttccaggacctctcttcaaatgcgtttgttaaaattattagcatgatgaaattctacaaaaagttttcagagcaccaacaattatgttggaaagggttggttcaacatatctttatttctgaggtaaatattattcattgcatagggaacaaaggattgagagacttgccaagaatctga

SEQ ID NO: 16661 - DNA, 901 bp, Glycine max
  Intron number 2 from transcript Glyma01g38840.1 (locus Gly ma01g38840) derived from phytozome v7.0 (chr-ID Gm01; pos 50849736 to 50850636 reverse strand)
caggtcatattgttcaggtgctctctttgtgcccttgttgcttattagttatctattccattcttgttatatatgattttttttttcatttcaagtagaacgtttttttcttgggtagtcgatgttcctagttgaggcatatttgatttcatttgattgattttgttgtaatttatatactaatggtgttgagctagctgattaatggagtatctgtttttactagagttttgcacgcggcagagcacggttcacgttctagcttgccagttgtaaactagcctaatgcttagtcatttctattattaaagtattctgtcgacagagcaaacattaccatcgttagctaatttctataagagttttaaatttgcattgtttgttgtttagaaagtaaagtgggaaagaagtgtttttgttgacagttataacttaaagtgagatagaagttgtagcaaaattagttgatagttgacacttgaattatgtaatttgctctatttctctattaaggacatgtgacctcaaaaacacaggatctgtcagcttttcatgtattttgtttgtcccataaaggtagcgaatgatttaggtatttagccttcataaatgtgttatttaagactgaagatagtccaactcttgttgcaattgcaatttttgtggaaaccggctaacctatttttgagagatgttaaagcatgcaggcttcttatgatgtgtgctaaagttaattttaaatccattgtttcattcctatctgcttttcatgtattgttaatcaacttttttctataaactaagaactattaccagtgttaacatggttaactgttccctaacattgtgcttattgcttaatgtgatctatgcataggaacttggtggaattaacacagct

SEQ ID NO: 16662 - DNA, 724 bp, Glycine max
  Intron number 2 from transcript Glyma01g00620.1 (locus Gly ma01g00620) derived from phytozome v7.0 (chr-ID Gm01; pos 374335 to 375058 reverse strand)
aaatacaaggtatgcatcacattaactagctgaggtttttatatttttaatatcatgttttttgcattgacattgctaactctgttgccaacgcacacagttgttccatagactgtgattaatgaattaggaatcatgctgtcattgtttattgtattataggtataactattaacatttcctttagtaaggaagataaaatattggggcaaagagcgtgtgttagtgtgtgtgttgaagttaattaatcaatcaacttgactatattttaaatatgtattgaagaaatattgacagctaagtttcttttcttcccttaattgacaaggtgcgtgttaaggaactgatcatagtaaaagcctaagctacctggacaaagtgcatgattgattttgatttatatatcttaacattgtctttttctggcagtagtgctcattagtatgcacttatttttcctctgtgacattactatttattgatgtactccatttccgtgtgggcgcagttttatgagagttgtcgacatatctatttattcagaatatcttgctatttgcactacaccttttaactagttatgtatggcattcgtattaacctatatatgaatcactttcattgtatgcactcctgttataggtagcaaaatcatatcattcatgtctggcttaatgtcagaaaaaatataatcttttaattgtgctgatcatgtagccagagg

SEQ ID NO: 16663 - DNA, 944 bp, Glycine max
  Intron number 3 from transcript Glyma05g04540.2 (locus Gly ma05g04540) derived from phytozome v7.0 (chr-ID Gm05; pos 3689686 to 3690629 reverse strand)
ctaggattagggagaaatacccagaccgtatcccggtgagaactaactctgatttttcctctgcaactatctgttactgatgctgtctatgttgttcttttatctgttttgcctgttgaggatcgacagcatcaatgcttttcagtatatgcgactctttttgttctgatgattaaatgttgtcttttatctgttgtctctttcatttcataatttggcagcatagatagctgactagcatggtagcacctgacctttgtgtaggaatattattggatgtgggatctagtgcttcatttgcaaccttccatgttaatagtgataaatgcatgtcaccgggttacataattagttaattacagatttgatattcatgatttagtgttgtgttgtgctgttgttcattgtggtggtgatactcttttggaagactcaaaatgttgtaaaaaacaactattgagatcccccaagtcatggtttgattggtttagttagttaaattcatggttgaactggataatgttctgataagagacatagtaggttcatggtttgactacttctaccaggctggctggcctagttcggtttttactgagttcactgaattatagaatgaattcaactcaaggaagaatgttcaaatgatttttactcatgaaactgcatttgtggcctaggcctttaaccaaagattgaatacaataatgcaagtgtggagtatcttatgccctcaagctattttatttgcagcttagaactagtttcttcattcaatatgtcatttaagggcaattcatgttcacgtatgcttctacttgcttcctactgtatgtgtgatacttgaaaatgtacatcggtggtatatctctagttattgtgctaaattgtctctcgatgtgcttgaaggtgattgtggagaaggcagaaagaagtgatatccc

SEQ ID NO: 16664 - DNA, 593 bp, Glycine max
  Intron number 1 from transcript Glyma05g04540.2 (locus Gly ma05g04540) derived from phytozome v7.0 (chr-ID Gm05; pos 3690783 to 3691375 reverse strand)
ttgattttcttctgtttttcgatcgtcttcacgaggtttagttttctgagctatatacaatcaaattcgtaaaccttgaggtttaagtatcgaaaattattaaccggccaaacaaatttccttcgccgataagaagtaaattgtcggaaccgctttgtgtctctttccctgttttttaaggagagattgtctgcaatcagaggtttttatcttttcataaattccgttatttggaagagttgatcggaaattccataataaaattgcctgaaacttcggctctttttaattttatataacgaagattaatgttctgttgcatgctctttttgttaaataagaattttaggtgtaggcccatcttcaatcttcttgtttttttatgattattgctgggtacttgtttgttaatttttttttctgtttctgaatgatgctcctttttatttgtttatttctaaaacttagtgtgtatttttaattatttattttatttcgagtgattaacgaattatttgtcctttgttggaagaatggacgatgcatcatcttagtttatgattgacttttatttgatgctaattccaggaaga

SEQ ID NO: 16665 - DNA, 802 bp, Glycine max
  Intron number 2 from transcript Glyma01g06080.1 (locus Gly ma01g06080) derived from phytozome v7.0 (chr-ID Gm01; pos 5982360 to 5983161 reverse strand)
ccctcatcccagcaggaggtaattgtttgtttgttattcagtggaatgaattttgtaagaacaaggtagcatttgagagaatcagtttttagttttggaatgttagttttgggtaattggttatttttggatatcatgtcacaataatgactttgttggtgactaatctctaccgaagaatatgtttgatcacctttagtgggatcttgtctcccatctcaaacccaagactttgcttaaggaatacgaatccagtttcacttggatgaacgtaatgttgttggttgggtaattggtgtggagatgctaaaaaacataaaaattttgaaacaattttttcttaatttgggtttggcagccaaaatatcataataatgcctaaaaggctaaaatttatcttagttgtatgcctgctgctgtgtattttgattcacgtaaatgttcatagatgtgaaaagtataaagttgtattcttcaatcttatccttgcctcatcatcttttcattaggttacatgtacatcaaattatcagagcaatcagagtttgagtttgcgtatcatttcattatattttcatttatatgggaaaaatattagattttaatcaggttttgatgttatttaaatcactttttaagccctcgaagacattatgccttaatgatagagggtttcttaaaattatttcaattttttttattattcttggcgataaaccccatattatgggcttatggtattatgttctggtatcatttgctgtaaatttgttcttgcaggaagcagctgttaagaaaaagt

SEQ ID NO: 16666 - DNA, 721 bp, Glycine max
  Intron number 4 from transcript Glyma02g04040.1 (locus Gly ma02g04040) derived from phytozome v7.0 (chr-ID Gm02; pos 3241122 to 3241842 reverse strand)
aggtactctagttaatttattttggccttttaagccctgtcttcatattcaaatttattcatgttagatgataccctgacattttgagggaactcgttcttataaataaggtttgggatcacataggggccaaatgaaagggcctgtaaattagttgagatagaaaggttttagaatcgtgttgacctataaagaagattcttttatgtagtcacggaacattcaaagatgacttcttgggtattgaggaaggaatgaaatgaatgttcattttaagcagaaaatgtaattattttgcttatctactatgactcttgcttttctagcgatacattagtctagcacatgatgttcatactcaatggttgtctttattgatggaagtgataatttttattgatcttatgactgaaagcatttctcactgctgttgttaaatgatctgttttttgttggaccataatttctgataactcttgtatattgatgtcactatgacatcgtttggaaattgaatgaccagttcttactcagtcaatctccaggaaaatttagtgcttctaattgaacatacttctgtgtctgtcaacttcattgtttacaaggatcatgatccatggctagaattattagtctccttgttcttttgctctctgttttatgtattcttgtgatgtaatgacaatgtttataaaatttttattttaattaacttttcagg

SEQ ID NO: 16667 - DNA, 527 bp, Glycine max
  Intron number 2 from transcript Glyma02g04040.1 (locus Gly ma02g04040) derived from phytozome v7.0 (chr-ID Gm02; pos 3242169 to 3242695 reverse strand)
gctcggagagatcgttactacaattcctaccattggtgagtttctaaattttctctttttctcctaccttgatagatgtattattctaattgttctttacatgtagtaggaatatgtcttaccggttaagattatatagaattatcttaattaattactaatgtcttaattatttagttaggactcatgataataactgacttcagggccactaggccagttgcgtcgatgatcttttaagatggagtgtgatcagcatgtttctaaacctgtgaagaaaccttaacaaattgaataccgagatcccaaattatgttggttattatgttttgcttgatgtgagatcctggattgaagttgatctaattgcggtgaaaataaaataatcttcgaactgtaatattacttttcacaaacgttgggggttattattggtttactatttggcgtgttagagtgctggaatgttttgaatatgttatgttatatatatatgcattgatgcatttgttttgtttcagggttca

SEQ ID NO: 16668 - DNA, 497 bp, Glycine max
  Intron number 1 from transcript Glyma02g04040.1 (locus Gly ma02g04040) derived from phytozome v7.0 (chr-ID Gm02; pos 3242809 to 3243305 reverse strand)
gcgctttctgcaaaccgaacatttcatctccaaaggtaataatcacaaacttcagatcctatcttcttcattccgtttcctcaatctcttcatgcaaacggattttgcatttccacttcgcacttcaatttccgattgaatcactgtttttctctaccgtttcatatcttcgttttcctttattctctctctttctctatgctttgatctgcttgtttcctgatcaatctctccagatccttccgtttttccaacctgttattgttattcgttgcgatccgtttcgatttgcatgctgctgtttttttttctagattttatttgagatctgattgaatccggtgatgatgttgacgtgaatgtgttttcatttgcgggagaaactttgctgttttttttttttttttaataagaagctctatttcgttttggagatttttttttaattgaaaagttgtttgaattgtgaaattagggatcaacaggtcgaaggagaa

SEQ ID NO: 16669 - DNA, 895 bp, Glycine max
  Intron number 5 from transcript Glyma03g38950.1 (locus Gly ma03g38950) derived from phytozome v7.0 (chr-ID Gm03; pos 45204376 to 45205270)
caacaataaacaggtctatctgctccaattgttgtctttcacttcttaacattgataattttatgggtgatttgtttatcttttttttattatggtcctattgattagttattttggcaaacttggaaagttaaagacttcaaactttgaatctaagactacatgcaaaagaaataattatgccttgtacttgtttacctttaaagaataaattattactataattcattaatgttgaaaacttattggtgggataggctactgcaacttagtagtgtagttttctttttctcccctcatctgggttggcacttactcaatcttcttttaccggattagagttcattgtttcattgcttaacttgcaaactgaatattccttgaaattatactatgacagaatgaataagcatttgaggttgtagctctgcaaagcttgaaatcttatacagacagatgcacttgtgtgggaacacacaccacatattacatttccgataaaacattttaggcaaagctgctagattaaatcattcattatgcttaatgaatagctagttatctggcagagaaatgatcaaagggcagtggataactcaaattgatatactttttaaaattatctgatctccatttctaacaaataaaggagtggatgaaacagagatctttcgatcctttttcatccttttattccctctccatttacctccttagccttttgcaagctttgtgaacaggatattactgattcctggaagcttgaacttgtggaactttatatggctgaactttttcaatgatcttgaaactcctgcatagtagttggtatcttctgcacgatttctttcagcttcttttatactcactgctaaaaaattcttttgattcaggg

SEQ ID NO: 16670 - DNA, 704 bp, Glycine max
  Intron number 1 from transcript Glyma03g01010.1 (locus Gly ma03g01010) derived from phytozome v7.0 (chr-ID Gm03; pos 742485 to 743188 reverse strand)
actgctttgtcagagtaagacacaaaccactctcaatcatcacattgctttactaaccactcttgtcttttcggggttcaacactagatttaattcttttaggggaggaatttgatccattcacccattaattcagttgattcggaagaaaattggatggttaatttaaaccttgagtacatattgatttgtctatgtgcatatcttaaatcaccaactttaagctatatataattcaatctagctatgcttgctttttcggtagaagtatgttgaatgtcaatctatggatttggtttactcactttttttttctttttttttttaaccattgaatctagttttttctttaatgagctaaaaatattaaaaataattgtggcagtgcaacccaccttatatctctcaaagcgcattaaaatgcattgaaaagtggattaaggtaaaatgaaacacactgttaattaatagaaagaaatagaagaaagtgtaataaaattatactttaatagttaattgcattatttaaattatttcacataagatgagttttcattttatatttttattatatttaatatacctcttttttcttcctttatcataaaagcatttaaatctcaataataattttttactaattgtatttgattcacaaattggattcagggctgtgacgcgtccatattaatagactcaaccag

SEQ ID NO: 16671 - DNA, 957 bp, Glycine max
  Intron number 1 from transcript Glyma01g28820.3 (locus Gly ma01g28820) derived from phytozome v7.0 (chr-ID Gm01; pos 38704215 to 38705171)
ttttttccctttctaaggtattcctgttcttaaaaatatcccctttttattttattttctttaggggttgaatttcttggcttcaatttctatttggaagatgagaaaaattcaaagtttgatttttgtttttttacttttttttgtggtttatgattattgaggagttaaaaattaaagggtgatttaggaggagaaatttgcatagtttttgatgttttcatgcttttcaattttgttctctctctctctctctctctctctctctattaatttgaatttgtttacggtggcctcaaagcatgccaaggggaaggatacatatgactcggggagtttctatgcgcttctttttgtatattcttatatcataattttgataatttacactgtattttgatttctgaattttgatgaaaaaatcaacttaatgtgtgaattattctggtgctacaaaatgtcaaaaatgtgaatttctacaaggtggtttccttggtagatatgtaacatttggtcaagcatcagttaaccttaacaccataagatttctgaaactttagtttttaaccgtgccaaatgacatcgtaagattcatgtagccgagttcacctactgggataaggccttgttgttatttgtgagatcagtagtagttaaccccatagtttgtgtgtatgtgtgtgagagagaattatgctgttgctacaaattctcaaacttatcaatttctataagctggattgctaggtaaatatgtaacatttggtcagcatcagttaaacaccatatggtgcatttattataccctaattttagtggggatcctgttttttgtattgagctaatttttctgtttaacttcttgaagttctatctgtcttttgtcctcttttattggaattttctaattcctttgttttgattgctgtggattgtcttcagacaggaacttaaaca

SEQ ID NO: 16672 - DNA, 986 bp, Glycine max
  Intron number 2 from transcript Glyma01g33610.1 (locus Gly ma01g33610) derived from phytozome v7.0 (chr-ID Gm01; pos 45797899 to 45798884)
cgcactcgggctcagcaacttgaggatcttagacagtaagacccttccaagctctccattcacgtgtgtgtatgtgagcatacctttgttttaggattaatatttcttaatcctattcatttaattagagtcttcagaatgataatttatgggaatcatgccacctctagatgccattggaagttggtttttggtagacacatggatggggtgggagcattggttctaaaagttctaacaaaatggattccatgtattagccaatgtagaaaaataaattaactagctgaacagtaggatagcactgaaattgtgttggagtcagcaaaagggagagaagttgcatgaaaacaattagaaataggttttcctgggttaaactgaaattgtgctgaaatctgctgttttttgtctctccaatagtatttacatgaggctatgcttcaaagtgaagtttgtttactttatgtccatctttctgtgaaagtctgtattaaacattgatttcacaatatttagaatcaacgtgtttattaattttgaattggcagtttataatgtttgaggtttccctctctctgatccttgccgtacttatctgtttgattgtcaataattgttgggatgctcaaattcaaacacatatataatgtagttcaaacttcaaaaacttcttttcttttttggagagcaaaccttttatcataatgaatgaactatagaatgctatgtttttgcattatgttttcctttttaactttagaactcttgttccttgtttctatccctgtctttgtctctttctcttgataacatgccaaataaaggggctcagtattctggtagcctctttggagatatatatacttttaaaggattggttgtaatttctaattttattttgatttagcatggatgtataaatgtccatttgggttttctaatttcaatttcttccaagtacagatttaagggcatatctcact

SEQ ID NO: 16673 - DNA, 828 bp, Glycine max
  Intron number 3 from transcript Glyma01g39990.1 (locus Gly ma01g39990) derived from phytozome v7.0 (chr-ID Gm01; pos 51796360 to 51797187)
atagctctgtcaggtaacgcactttccaatacaagagtgccagccaaataactcaattctaaacacatgatctgtattcccaagggaatcccattattgggtttctaagtaatgggtaaatttcatccactatcttttaactctcaatcatgttttattatgctatttaaaaattataatcaaatctaaatacgtgaattaatcttttttttaacatgatctttactatcaaatgaattccgtgcaaccaatatgttgttaatcagtttaacttctttattatcaaatttgtatgttagaatactgtgaattaaaaaacgtagaaaaaatatttcacagtagtcatcaacaaaataaatatttatattgtttttattctcaataaatacacaattataaataaattttacatttagtactaacaatggacagaaagtaatattttgaaaagggtttggtagaataattttaaatcctattattaatctctctacttttttatacgagaagtattgaacttttttacatttttaagatattgaatttttttatttaatattcttttataaagtagcaggaagttttgtcgaagaatacagcattacttagtttagtattcttgaattccttcattaaataagaatgcaaaatacagcataaatataacttagtgtaggattattttcgtaaaaggatatttaaaatttcgtactagaaaaagaagaaaaaaagaaaagtcaagctaatcatagtttgaatttctttatgataattgattcactctacactacaggtgctcacactgttggattctcccattgcaacaaa

SEQ ID NO: 16674 - DNA, 510 bp, Glycine max
  Intron number 1 from transcript Glyma02g12200.1 (locus Gly ma02g12200) derived from phytozome v7.0 (chr-ID Gm02; pos 10428347 to 10428856)
accttccctcgcttgtgtaagtttgtgttatgtttcaagttattttaaatcaagttgaaatccacaaacaaatttttaggtcaatattacatgtttatatcgtgtttgatttcacgttttagatgtgattattcatgtttcgaatgagattttgtacgtgaaactgataattatagctttcgagtcccaaacatgttttattttctttatttttaacaaatttctaaacacattattagtttccggttgaaaaattgattcttcggaaataatttttgagttaaagctaagaaacttttatattagataaaaaaaactattttttattattgacttgttcttaagataaaaacacctaaataaaaattgcttcaattaaaaaaattgcaaacgctgaccttgaaaagtgattatggtgtatgtaatcgtgtgattggcttgagagatttttagcaaaagtgtagctaatacattggatgtgtgtgaacatgcaaatccaggttttttgtg

SEQ ID NO: 16675 - DNA, 794 bp, Glycine max
  Intron number 2 from transcript Glyma02g12200.1 (locus Gly ma02g12200) derived from phytozome v7.0 (chr-ID Gm02; pos 10428936 to 10429729)
taaaaagtagaattctccttgttgctcttgacacggtaaattaacatgcagattctccttatcaccaaggcaaatttttggatgtggcagcaagagataaggcttttcattaatataggatgtttagtttgattcccccttttcattttaagtgaaatcttttcactataattataattataaaaatgccataattttttttatttcatttcctgttttaaaaaaaactgtaaaaacagataaaaacaacttaaaatattaataaaagaacttaacttagatgtatcatctggacaaagaattgttacagagctatctaatcacaaaatgaaatgtatgatgggtttaccagttatatctaacatatttttattgattgacaatataaaatcctttgggcaaagagtatataacaattaaactcgataaaaatatgactttataccaactaacttcaaaattcataattacaattttaaattgaggtgatgcagtcacaatatgcggcatgaagttgtgattgcagacaacattatctgcaattggcctgcaacacaaatacaaccgtaatttcaactaaagtgacattattatatatatcacgaatactaatatatgttaaaaaaaagtcgtaattttaactttataagattccaatttctctaaatgcaacaagtagaaatccaccattttacctacaagaagaacctttgcttaatgtttatgtcaaccccttatttttaatattgctaaaacttggtgatgaaatttgagttaatattgttgttaaggta

SEQ ID NO: 16676 - DNA, 974 bp, Glycine max
  Intron number 1 from transcript Glyma04g02640.1 (locus Gly ma04g02640) derived from phytozome v7.0 (chr-ID Gm04; pos 1882525 to 1883498)
tggtcgccactcatttggagaccctactagttgctactactatcatatataatgtaagtcatcgtattcatatgataccatacgccagattaatccaaatcagtttcttaggacccggccaatttttgtgtatcccatcacatcataatcagagtttattaatgaatatattgcagtactactagttggtctcaatctaattaattatactcccttaatggtttgttaatttggcagagaatagtcaaataatatttgagaaaaaatttatatttttttatccacgtcctcaattttttttttacaaatattaattaatatttttaaggtattggttaaaaaaagtataagtgtttttattagaagacgaaaaattgtgttatccaagattttttttaagtttttctattattcatctatagttttatacaataaatattttttctttttaattctttcaccaataagatgaacaaaccttttttcttttacttttcttaatcgtgacttccaagatcaatttaatttcaattatcattaccaccatcttggatacctacaaacatctctttgaatttgatagaaatcatatgtagaatcattgaatggatggtcatatgaaccatagctaaatctaaacgaacccctttaaaccatcacactaataatagatttatcaagtttttaatatggatgagacacaatgaactatgagtgaggacccgtaaaaaatatttaaatgttcaagtgagtgaatgtttttatcagcataacaatatataattaggccgtcaggtcagactggattgggccttaaattatagtatttttactcttaaattgattattttaaaatatatctatatatgttttgaaagcggtcgaaccatttaatatatttttagtccacattggtatattttggttgatcaccatattctccagattgattcccccttccggcgtttgcataa

SEQ ID NO: 16677 - DNA, 378 bp, Glycine max
  Intron number 1 from transcript Glyma01g39230.1 (locus Gly ma01g39230) derived from phytozome v7.0 (chr-ID Gm01; pos 51207674 to 51208051 reverse strand)
attcacctccaactagtatcacttcttctcaggttataaatttatctttctttggtttcatttctttttatggggaaaatattattttgttagttttattaaaaatgacaattggaagatttgaactcgggatctctccttcttcacctttttcaaaccattataccaatcttatatctccttttttcaattttatttatttggattttctatctctagagatttagtttttaaagtatgattcatatagtggaccttcacttgtggaacaaggctttgttgttgttgtggtttttctttgatctgatcactagctgggtgcatgtctgataatgagctctttttgcttttttggtgtaatattccaggaggtgttga

SEQ ID NO: 16678 - DNA, 766 bp, Glycine max
  Intron number 3 from transcript Glyma04g10700.1 (locus Gly ma04g10700) derived from phytozome v7.0 (chr-ID Gm04; pos 8949526 to 8950291)
cctgtgggcacacaaggtcaaagttctgacttgattcttcctgatttggttgctgcaatgctgcaaattcaattttcctagtgctttttgttctccttcaaactttgcatgcaataagaaaataaactccttttttttactcctaaacagctaacataaactccttcaaagttctgaatattttttttttgtttcagtttgctcccgagtctttaaagttttactctgctcccttgaagtatttttgttataccaaaatattcctttcatcagtttaccgcactgatttggttagtttggtgacacatggcaagctgtgaaagatcccacgtctgatgggcatttgccacattagtcaaaattaatattgttagtgcaaaaacatgagggaaggatcattaggtaccaaagtgaaaattttaaacttaggggatcaaattgagaccaaaagttcatatgagggccaaaattatattttggccgttcccaaattgcttcggttttaaatggagcaaatgaccgaagaaatgcttcacattttgaagtaaaatattttcccatgggcattggttattgcttgtctatagaatacaaacattactgaatgttggtatttgcattgtttgatgtgaatttcttggtctgttgggattttggtggattgcttaatagttgtggttcacttgagatgctgcaattttgtcttatagatgggatttttgaatgaccaggaacaataaagggattgacaaatagccagcttgag

SEQ ID NO: 16679 - DNA, 716 bp, Glycine max
  Intron number 1 from transcript Glyma04g34330.1 (locus Gly ma04g34330) derived from phytozome v7.0 (chr-ID Gm04; pos 40445683 to 40446398)
gcccccaaaaagaaggtacaaattccttatttaatccctcactaatcttttatttcgtaaatgtccagttccacaaatttcacgtttgagatgcctaatttgtggcgtgaaaagattgtgttaaaaaatctcaaatttagcagtggtatgttcaaaattgtgtgtatgaaaaatgttagaaacacagatgcttttttttttattggttcaaatctattgaaaattataaaattttataggtctcattttatttaatgattccttctcgtgattgtttggtttttaataagttttaaccaataaaaaaaaaaataaacatgttttactaatcggaaaaatgctagtgatgagcaatggcggatacagaatcctaagttagtgggaataaaaaagcttacttgccactagtgttactggagagtgagaaattagagaatactgaattcaaatatactaaactagagggagtaaaacaccagaatttaagacatttagatgtaacttttcaaattcaaggtgcccataatttcacactgaattatatatataggtctgtgaatggtaattatttttgttaacgagaaagattagaatccacaatcttttcttctttctcccttcttcttctatcagcaaccttgatgaattaagtggaaactcaaaggttaagatttgattttagttatggaattgaacttggtaggtgaacaagtaca

SEQ ID NO: 16680 - DNA, 823 bp, Glycine max
  Intron number 2 from transcript Glyma05g04890.1 (locus Gly ma05g04890) derived from phytozome v7.0 (chr-ID Gm05; pos 4060282 to 4061104 reverse strand)
tttatcaggtacttgcatcaattctcacccttaacagcaatttctttttcttccttttttgagcttgtcttggctccaatcaattgctttctgttaatcttgattctagaatatgttagatgcatcgatggcttctcagctaggattgtaatttgtgaaattgaagtactccagaagatcaatttgtgtttcttttaaatattgctaagtttttgcaattgaagttgctgttttgttgatttcaatgatttgacaggatggcttcattgtatgattgacaaaatttacttgagttcaggatcatgataatttgctcctttgtcccatgccttcatgaaacttacatatctcctctggaatgtgcaaagtgatattgtgtaataaaaaactttttttttttaatgtttggtgcagttttaagaaatgttaaaattgataatttggtatgcttttattatcatgattcacgcatactgttctcggtaagatagctgtgaatcttgatgggaggggggggggggtaactggataagaggtaaggagaagttaacctcacaaaaagcctgcatggcagatgctagaaaatggaaaaagctgactagatatcctaacacacaaatttaagaaaaaggaaagtttctcagtgtgtttgttcatatctttgcttgtaagcattatttatcaactatcaagggtgtttcaatgcccctcaacttattatggagtagtatttctatcataaaaggaaatgcctaacattatacctattatccttataatctttcggtgattttttcatgttatgctgtttagagtccgcaag

SEQ ID NO: 16681 - DNA, 814 bp, Glycine max
  Intron number 2 from transcript Glyma04g01380.2 (locus Gly ma04g01380) derived from phytozome v7.0 (chr-ID Gm04; pos 872848 to 873661 reverse strand)
ttaaggtatactttttttctcttccttttggtgtgtgtataccttttaaattctgaagtggagcacttgtagtgatactctgttgcaccgaaatatatatattggctatgattgtgatgttcattttgtttgtcaacgttttaaataaaaaaattggcaacaatgaaggtgtaaataaaatagtccagatttcctaatatttagaaaccatttcagattagtgtcatggtgtgagatttccttgaaatgatttacatataacagtcataaaatcaacctttggattttaatcataactcctaagaaatcttacaaataaaatgttattcaattgtgtagaactgatgtaattttataacacagcgtcaaaagatccttcttatccatgtgtatgtgggtatgaccgtatgattatttgcccactttgtattttgttttcggcaaatttgtttctgtgctttgtagcactgtctgatgcttatattgtttcataaccaaagtcaagccgttttgtaagtgtagaaaaaagcaaaggtgatattggtggcttgttttggattcacagccaggttacacaacttctgtgtttttggattgacctttaccttgttaattgaagattttatgaaaaattgtgacaagctaaaatgctaatttgattgttctaatttgatagaaactgtggtgactgctttgttgtacaattctagatgacatattacatatattataaactagagatatatattttgccaagactctaacacttaacactaatctgttttacagaagttctatccatctgagtttggaa

SEQ ID NO: 16682 - DNA, 765 bp, Glycine max
  Intron number 1 from transcript Glyma05g05750.1 (locus Gly ma05g05750) derived from phytozome v7.0 (chr-ID Gm05; pos 5169858 to 5170622 reverse strand)
ttggagacaattgcaggtatgacagtactcgtttttatcatcttttctttttaattttccccttgttagaaattgatgttttgaaaccaagcaaggcacgtaatcctttttgaattgttccattttatggagacatagtcagcgacatgaaagtaaaaaatttaaataattgattggaaatcataattttttgtgaattccacttttaaatcatgagatagagttgttagagggagtactgctagcatttttctttaaacagaaggaggaaagggaagtgttactgttatattctctaatagtattatggtggatggtatgagactacttgttttatgttacttgtgaaaattatttttttgtttttaaatttgcatcttgctggaaattgatgttttgaaaccaagcaagcacgtaatcgtttttgaactctcacatgtgatggagaaatattcagcgaaaggaaaataaaacatttaaaaaagaaaagaaaatgttattgttataattagtttgtttggattcacatctaaataactcaaacatgaatcacagaagcaacttttagttgcttttggtgtgcatcctgacgtgaaaatttgattaaatgccgatcacgatgccaatccaaacacacagataatctaatatggtagatgatatgagctaagagattttgttaggaggaccaaggtcaagttatcagcattttgttacaattgtcttagtattgtactctctttttttcagcattcctctaccacc

SEQ ID NO: 16683 - DNA, 667 bp, Glycine max
  Intron number 2 from transcript Glyma05g08540.1 (locus Gly ma05g08540) derived from phytozome v7.0 (chr-ID Gm05; pos 8393613 to 8394279 reverse strand)
caccaacactctttttaatcagctttctaacaacagttagtttctcttcccctctgcattttctttcatgtttatgtgtttttgtcagtgtgctagacgaatgtgtattgatattgtttccaacaagaactgtcatcatcttgaatttaataaaataacatcaacaaaagtcttatctctctaggtaaggtcgaatgcatggatcacacgatgctattgagttcgattaaagaccaaatccttagtgatattatttactataagatgatctctcttaataatttcctctaatattcttcttggtctccctccctctttcgcaaggctaaaaactatgcaatttactctcctcaacaattctttgattggccttcttagtacatatccaaaccaccttaaccgatcttctgctatcttttcttcaattgatgtcacaccaatatctcttcgtattcactattcaatcattttatatcctgtccttttttgtgtggtcataaccccgtcttaactttctcattaagtgctaatattgatggcatatttgaaagagaaccatttttatgaaagaagtagatggttattccttatgactgatgacattgcaatttgaacctgtgtgatgtttccagggacagaaccacctttcaagaatagtgttccaagg

SEQ ID NO: 16684 - DNA, 357 bp, Glycine max
  Intron number 1 from transcript Glyma02g02680.1 (locus Gly ma02g02680) derived from phytozome v7.0 (chr-ID Gm02; pos 2038953 to 2039309)
atcagtcggtatgctaaacactagcacacgcttagtcttttttcttacacaaactgaatacgtactaccatgctacggtgcataatcattatatacgtatgcgatacaccattcaatcattgagcattatataaataagtgtcttggggtccttagttccaacctaccaaatgcctaacatatttatggaaccatagagagactgttagctatagcaaaacaaacagtggagaaattttgattattgttgtgagataatgtctgcttcagaggataatggaaaaagattctctcactcttcttggtcacttctatgctgtagaagtggcatctcttcaacttcagcagcagaaagag

SEQ ID NO: 16685 - DNA, 557 bp, Glycine max
  Intron number 5 from transcript Glyma02g02550.1 (locus Gly ma02g02550) derived from phytozome v7.0 (chr-ID Gm02; pos 1881513 to 1882069 reverse strand)
ctggtatgtttcctacagttttatgttcttgcttcaatttgagttattcgtatttcctttttaagcatgctaacaaaataaatgctagaatttagtgtggtgtctggagatttcgttgctgaaattaaggttttgattggagagttttctcaattccttgtcattatataaccaaagcaataatacatcttagaaacaagttggaccttttacatatttaagcatattagacaaaagcctagactttcatgaagctaacattctaaattgtgattcatttttcatcatagaatacttttacaaattcctgatgtcattagcatcattatcctgaacaattactttcttatatacataaccttgcatgtacacaattaagttggtgccaccttaaattaatacacaaccttgcatatacttacaagctaaagcattatctagtttgaacaaaaaattatttgatgcatttttttttcttcctgatcactctttacattgttcttttaccattacaaattatagctgcaagattgagggtggctacaaacgacaaagct

SEQ ID NO: 16686 - DNA, 552 bp, Glycine max
  Intron number 3 from transcript Glyma02g44000.2 (locus Gly ma02g44000) derived from phytozome v7.0 (chr-ID Gm02; pos 48681395 to 48681946 reverse strand)
gacagagtctaaaccctgctgttgatttaggacaggtaagctgactacacatttgctatgcaagctcagccctaaccaaagaataacacaagaattgggtccaaaaatagttttttattaacacaacttctcacatcaagatcctcgggagtgaaaaaaggagaaagaactggcacagtattcccaatgccaaaaataaatttaacattaaaagtggaaaagacaataatcaaatcctgatcagtttgccacataggctgagtccaatatatctagttaagagccaagaatccaagatattagagcttgacgagccttgatctcttgttaagaactagagaggctttaattccttatgttagctaaaaatttattgttaagaaccaactccaccaaaaagcctaagatattagttggaggtcctagaatgtctatggtctcttactacttagaactattgttcagttgtttctctatgaatatttatgcttcttaacaatataattgtatcctgcagattgaaggagcttttgtccaggggttagggttttt

SEQ ID NO: 16687 - DNA, 276 bp, Glycine max
  Intron number 1 from transcript Glyma03g32020.2 (locus Gly ma03g32020) derived from phytozome v7.0 (chr-ID Gm03; pos 39836692 to 39836967 reverse strand)
caccaacggtccccaggaaatctacatacaacaaggtccataatcttgtttaattttttttttatcagatgttaatggttagtttttgttagtaaaattgattgaaactgtggcttttgtttttcttcttaaccgtccaacctatcttatatattcaaattaataataacttgtttcaatttctcagttttgtgaaaccatgcattttgaaaagaaaatggttatgctaatgttttttttttctttgtgttgttgtgtaatatatatgaataggta

SEQ ID NO: 16688 - DNA, 351 bp, Glycine max
  Intron number 2 from transcript Glyma02g38960.1 (locus Gly ma02g38960) derived from phytozome v7.0 (chr-ID Gm02; pos 44276184 to 44276534 reverse strand)
caggagttcattgccagaggtgggatgattggaacaaccattggtcccaaaggggtgtttgaggatgataaggataagagtgactacaagaaggagctcaaggacaagaagtttgggcaggaggctcagaaactgtgaatgaggatgaggagtgaggtcactgctgagattcagtagaagggctttgatgtggaatgagtgagtgaaatgagtactcaaaagtcaaaactattggtggtagtaaatattgagtttgcatttttttctttgtttagacattgtaatttcaataaatcatgggagagggaaaaagactcatcagtctgttactctttgttgatgagtttgtgt

SEQ ID NO: 16689 - DNA, 577 bp, Glycine max
  Intron number 2 from transcript Glyma05g00460.1 (locus Gly ma05g00460) derived from phytozome v7.0 (chr-ID Gm05; pos 220952 to 221528 reverse strand)
aagctgcgtaccttgctgctggctctgcagtagaggtcatatttacagcgaacttatgagacttttgtgttgttcattaaacgtgaatatactgcattattgagcgatttcagttttcgaatttatattattgtcgttggtcatgttgatagcggtgattatgtttgatatctcagatcattgaagcttttcctgttattgtcttactttgatttgcatagaaggaaatttaataactgttattgaatttggacttgataatgtttatatctgtggccaagattttttctgttaaatgcattaaattgttataatttgacagagggagcaatgttttttgcttctgtatatcttctctctccctcttggtggcccggtggacataggttctacttgcaaagctgcctcttcttttgtggcagtagtgctgcgtgcaatatgtctaaccctttgcggaccttatgcttaatctgattaaaataagctttgtgtcttactcataaaaactttatgaacctaactgaagatgctttgacaaataggttgttgaaagagtggcaagcagggaattggattc

SEQ ID NO: 16690 - DNA, 817 bp, Glycine max
  Intron number 2 from transcript Glyma03g26690.1 (locus Gly ma03g26690) derived from phytozome v7.0 (chr-ID Gm03; pos 34159314 to 34160130)
agcgttgcaaggttttttccctcagcctcccttttattttgtctacttttgtttactgttttgtctcttttttttttcttttaaggagaatttgatacttcagtttgtgtttgtattttatttatttgggttaaattgtggaactgaaacagagttttatttctttgaaattcacacaataaatttaatgtactatttcttaggtaactggaggggtctgtgtaatgtatttatttcaaacaaaaaaaaaggattcttttgtttttctgaataaaacagctgaaatcttaaatttcagatgtccaaacaaagtagaggtgtcatgtgaatttcaaagaaaccatagagggtggcagtataatttgctcttattttttaattttattattattattcttatcatcaatcatcatcatggacaagctattttcagctagcaataaagactagtttttttttttcgaccgttttttgttactttggagatatggtgcaattcaattgaagttttcaaattctttgaaatcatggcatatttttcctgtgtgttggtggggttttgttttctctgtttttcgttttatattttagagttttgatacttaaatatttgtgcttacatttgattgtggttgttgggtaacaaaaactgttttttttttcctttttatagataagttcaactagcaaagactattctttttgttacatgtataattgtagtaatgaagttttgtaatttgttgttaacttgatattatctgttttctattttcggacagtcggcacactggcttgtggtgcacagagctataat

SEQ ID NO: 16691 - DNA, 746 bp, Glycine max
  Intron number 1 from transcript Glyma04g37830.2 (locus Gly ma04g37830) derived from phytozome v7.0 (chr-ID Gm04; pos 44305089 to 44305834)
aaccattagctttttgtcagaaattccctgctcaggtgaacctttacatcgtcgatgatgcacacagaaagaaacctgaccacgctgtaaaaatcacatcttctgtcatgattggtagttttgagggaatattgttagcatcaatgatgtttcctgtaaatggcacaaagaaacaaagtagttatttttcaatgcatatgtaatatgtcatctatggagttattttcttcccaaactatccactctttaacagttttaccattgcctgattatgataaaatttcctttttctctaacctattaatttggctatttcttaatttagccagttgaaagaattattgatgcttcaggaggtgtataacttgcctgctgggtgttaatttcttaatttgcttgtggaggtggatacatatggaggaatataaattggttctgaatggttcttctggtgtgtttggaaatcatatggaggaattattgatgctggttgtttttattgattttctaatttttccttgttttggtcaatgcttattcattttgcaagtcatatagttagttgaggctttaagtttttggcatgagaccagtaggcgtctctgataacttgctgtactcaaaattacactgacatcaaatgcactgtatctgttgatgctttatttttcttttatcatttgcctctttaattttttcgattttgttcaggtgcaattcaaaatttacaaagactgtttaccctt

SEQ ID NO: 16692 - DNA, 864 bp, Glycine max
  Intron number 1 from transcript Glyma03g38570.1 (locus Gly ma03g38570) derived from phytozome v7.0 (chr-ID Gm03; pos 44897098 to 44897961)
cttttcctttctccaacacactctcaacacacgtattatcaattatgatgtctatgcttctgtgcttttcatatagcaattgtcataatctattgtttatggtattatctgtttggatacaaagtgtttttgagagcttctctagtaaaaaaaacactattcttatttgtaattgtcataatccatttggctcttcatttccttctttttccatcaaaggatactatataactaacacagataacaggctttttgttccgaaaatgcatacttaaaataagagtaaataggctatgtcatctaatcataaattcaaatccattatatggttgacttggtgagaagtttgagtagtatgcacaaggttatagattctaacttcatgtcaccgttataaattaacatatatagaatttgtaacttttattaacaattaaaagtgtaattttttttattcacattgcatagaaatttaactcttcaaaaattaaattaaaacatttagttcaaatgaaaaatacttagaagagttaaaactaaaagtggacaatatttacatttataaacacccatttatctttcttcagcctcgttggcggtacatttataaacagccttgctgctttgaaattttacaaaatcaatgatgtgccctgatatatggtgtggcaagctatacaccgaatttgatttatgagccacttttttcttgtcaaattcgaatagcatacacaattacacaggaagttgcccattcttttcaatttgtgttttaatttccttctcttatttacctttaaatttaagccttgttaatgatgatatgtaggcaagaattcttttatttggtttgggcgaaaacca

SEQ ID NO: 16693 - DNA, 940 bp, Glycine max
  Intron number 2 from transcript Glyma02g07020.1 (locus Gly ma02g07020) derived from phytozome v7.0 (chr-ID Gm02; pos 5623370 to 5624309 reverse strand)
agaaggtagccagttctagttggtcacagccttggggggcttaacattgcacttgccatggacaaatacccaaaaaaggtagcagttggtgttttcttagctgcttttgctccagacactgaacaccaaccatcttatgtcttggaaaaggtttgcttcttagtcttgaggttacttgtgattttttttttttatcaattttcttacttctgcaagtgcaattgctgcccaataatacaaattgtggaactaattatttagacataaatgcatgggctggattccgtggaaaaggggactatcaattcctttataaaaatgtttcaatcacaatcatcagatcacattttttgacttcctaattctacgctttcgtatagaaacataatattagacatatatgatgtaaaaatttaaatcttttaagtgatcattatctttataacaattattcagtgaggttgactgctgagcaagagacgagttgggatgggctcactcttgtccttaatgatgaaaaataactcaatacaataacaaacttaatagagtaataggaatttttctaaacttgtaagaatctctgagcaacaccgataaattatagagtccaaaatagaaattaaagaaaatagagacacagtttgtttaatgtgaaaagcctctcaatgcaaggataaaaaccacggtgcaataaaacgtattacaaacagtcaaatcaaaacaaactctcaattggtacaatagagacaagaagataaaactctaaaatataaagcagatcatgtgaaacacttatctctctcaacatatatctttttcccgatccaacaagacaatttaaagtatcacgcgtttagaaccttgtgtctaaaactcagcccgatccaatggtaaacgaatttgcagttgtaatctaaaaaaatgttctcgagtaggc

SEQ ID NO: 16694 - DNA, 737 bp, Glycine max
  Intron number 3 from transcript Glyma02g02400.2 (locus Gly ma02g02400) derived from phytozome v7.0 (chr-ID Gm02; pos 1801797 to 1802533 reverse strand)
gaggtacaataatatcttctaccttatttactcaaaaagactttattgtttcaatgttcacatgaaaatttctttgcatgtcctaagatactgttttgtttcctctctcccccctctgcgtcactcactaaccaaagattgtgcagtccttttcttgatgaacctttaacattttaaaccaaagattgtgcacatttaactgaagtttccattattaagatgatcagttgtgattgttttgtttgtaattagcccctaggcatagcatctttctattaccgttgatatgatagcacaaccttcacccctaataattgagaagaagaaagttgaactttgcatctatctatctatctatctatctattattattattattattattattattattattattattatgttgctgtaaagtacaatcagatgatttttttaagatgcaagtactagaaatcttcaagaatattagtgtttatatctgtcatccaatttgaaaagcatctagaaagatggtgttcttttatttgattcaagcaaatatttatagtgctacaggttttggtattgattttaggcatctttaggtgattgattttactgtttgatagattcttcaagtgagggtattttaattagacatggttactttgtcttataatttcagtatggcttatctgatctaatttgtgcgtctttcaggcacatttaagttaacacttcagttcaccgaggat

SEQ ID NO: 16695 - DNA, 703 bp, Glycine max
  Intron number 1 from transcript Glyma02g02400.2 (locus Gly ma02g02400) derived from phytozome v7.0 (chr-ID Gm02; pos 1802768 to 1803470 reverse strand)
acccttcactcacaagtcaccagtctctctcttaggttcatcttgttcttttcttaaccccatttttgcttaaaaaattgtttttgatgttctaggaaggtttgtttatgaaaccaagtgatgcccatttgctttgtagttaaacggttggttactttttacaaatcctgcgttggaatttttttatgagaaaagtggaagaattgatctgccgagtgaggatttgggcttgtgatttttgagaaaccaagtttttgtgtattttggaaaaccttgagtatgtttatttgtgttgtgtaggcatgaatttgcttccccccactttgtggttttgactttgacagggaaatgaatccatctttaaactcaataacacgtcctctgtaggaattggttttccatcatacgtaattttggaaattatgaactttgatcattgtgtaccactgtactagcttgattgttgtgagccactgtagaaaaatcaattttatctctcattttgtgcgggtttgcatttctttaaacttttaatgtgttgtgtagtaatttgttgtagattgctactgtcttcaatcagttgcttgctgatgttgctctctgtttatccatctcttgtttctctatgcacaatggcttgtcaattactgattgccactgcttgtgttggacttgattggaatataggttgtgacttgtgagg

SEQ ID NO: 16696 - DNA, 685 bp, Glycine max
  Intron number 1 from transcript Glyma02g14450.1 (locus Gly ma02g14450) derived from phytozome v7.0 (chr-ID Gm02; pos 13039696 to 13040380)
tgtaagttaatctacacctatcttcatttcattatacatatttttttttattaataatcatgctatatgtgtgcaaaatatgtattgcatttgcttataattaagtttcactgaaaatatgtattgcatttgcttataattgagtttcattgaaaaatttgactgatttcttttaatggaatttcttttttttttattacatcttttttttttcttcataattacaaggctcgaatctgacacctttcttaagggatgagtctagttctactatgactaacaatttgttggtcatttcattgtatatatacacgtttgcatgctgtcttttgtataatatatattgattatgcttaaatatgtatttagtccaatttgaggcactattaagttggtttcttaaacaaaaaattatttttttgattcctcacatttttataatgttttttactctttcaactttgttttgaagattataaatctattcttttttaatctctcaaattcactttgagggctaaaaataacatttcaaatttgagattagaaagcccaaattttcaattgaaagaccaatgaaaaataacttaaattaaaagcatgtctaaagctattgtttattttcaatacctttgattggcttaatattaatgaaaactagtttatcatttcaggtgataagtca

SEQ ID NO: 16697 - DNA, 625 bp, Glycine max
  Intron number 3 from transcript Glyma01g04700.1 (locus Gly ma01g04700) derived from phytozome v7.0 (chr-ID Gm01; pos 4319855 to 4320479)
acaaggtatttatatttctgtgtctttactccttctggctttgcttattcttaatgttaaaataagtctcttatttataaagttttaccgtgatctcttaaagcatgtgtttttattagaccaagttggtcattctgtcattttattactacgacacttggtcaaaatttttatgacacgtgatatataaagaaagatgtcatgtttgatgtttgatggacatttgtgatgttaaccaaaactaaacctaataataataataataatattatgatgaatttggtctaacacggatattttaagagattaaaataaagctgtttaaatttaaaaactaaattgaaaaaaagaaagatgaagaataaaagtttaattttagcctgaaaattaattgaacttaagatattatgtaatcagttaaattaagggttttgttgttaccagtgaccctttcataagtttttttttaattaatttattttagaaagttgcaggaaaagcttatcatcataaggtagaaacattcatgtgattttcattgaataagtactaatatttatggggtttttttatttttgtactggaagtagtggtttaagtccatatttaatattctattggctga

SEQ ID NO: 16698 - DNA, 681 bp, Glycine max
  Intron number 1 from transcript Glyma01g02350.3 (locus Gly ma01g02350) derived from phytozome v7.0 (chr-ID Gm01; pos 1889590 to 1890270 reverse strand)
tgtctctgatctctcaaagcttcaaattctccttggtgcgtacttcaaattcatcttctcctactcctaactgctcttcttttttcaaattctctgcgcgtttctgtttctcagcactttctggtagaacaatgcacgacattttgttttttcttttaaaaaaactcggtaaggattttgtgtgaatgtggatctattaagcttttttatttttttatttgcggaagaaactgaggttatgaagaaagctgaactagaaacaggaaaagagagcggcgtgtgctattgtcataagttttcagttaattactaactcaaaaggttgtttacgtgtcctaattttttgttcctgttgttgtgattatttgtttttgcgcttaaactcttgaatagtataacgcatgcatgttttaattttaatttttaatttttaatttctgactctgcagcaatattctgtgattaattgttgattaagttgctcataaatggcgtgatcactatggttgaggcaattttcattatgcaacgaatattttttccttttataatggagttttgcgttggttttgttattagcatagcgtttttgtgttgctggtaatatgtgaagtggacggtggttttgacttttacggtttctctgtgtgtggcagtttggtttgtttgtgtgtttggagt

SEQ ID NO: 16699 - DNA, 478 bp, Glycine max
  Intron number 1 from transcript Glyma04g18940.1 (locus Gly ma04g18940) derived from phytozome v7.0 (chr-ID Gm04; pos 20683604 to 20684081 reverse strand)
gcacctctcgtcctgttcgtaattctcccccctcgccccctttcttttctttctcatttattattaaataagataataatatgttttttcccttcctttttttctaaccttcttaatttcgcgcgtttctcttttgaacttgcttgtgtttcgtcgtttctggcgttttgttgctgggaaaatgtcggaaagtgggtcaggtttttgagggaaagccaagtcaaattcggatttggcgattccagattcttaggaaccgttcaatttctttggatttgaaattgtgaatcttgtgatgcgtaatctatatgatatgtctttcgatgttgaaccgttgaatttttcgttttctttttgcgatttcgcgttgctttctccgccgctgttcatttctattcctgaaattgcatggtttctgtttccttttttatttaaaaaaaaaattcttgtgatttcttacagaaagttgtgcaaggat

SEQ ID NO: 16700 - DNA, 405 bp, Glycine max
  Intron number 2 from transcript Glyma02g38010.1 (locus Gly ma02g38010) derived from phytozome v7.0 (chr-ID Gm02; pos 43341644 to 43342048)
caggcctccagttagttttctttgtccattgtaagtacctactcttggcttctctcgtatctattatctatagtttataatctataataacaataataaaggaaatatccccacttggtttacacattttgttaaacttcttcatcgttttaactgcacttcaaaccactcactattctctttcaaacttccatgtcaaattaactatataaatctgttaaaagaagaaaaaactgataaaaacaaaatcaaatttaatatttttccaaaaaataaaaaatgcagagaaggcaagtgcctgtccttctgctagtttcttcattaaaaaaatagtttttttttgtttgtggaattggtacctaaaatttattttaattcttttgcaggttggtttctgttcgggca

SEQ ID NO: 16701 - DNA, 1005 bp, Glycine max
  Intron number 3 from transcript Glyma02g38010.1 (locus Gly ma02g38010) derived from phytozome v7.0 (chr-ID Gm02; pos 43342118 to 43343122)
atcgtggaaggggaactttcagtgttatttaactggtacttttttgttctgatgagaattaattgataatttggggaactcatttttgtatccaaagtgtaatagtttagtttaatggttaagctcatttaattacaaaatttggtacctttagtcgtcaagtcataattcaactcatggttagcttcttgattgctgtgaggtgagcttgatggtagtcttgcttagtgaaatgatgtcattctttgcatgtgttcaaacaacttcattgatttttaatcatctttgccttaataggtgtcacacaaatatctcttcctgtataatcatttcatatcatgttcttttttgtgagcattgggcacgaatccatcttaacatacttatgttattccgatgtttttctcttgtgtctataaagttcagcattcacgttcatagagtacaactggtctatagcaatatgctaaaacttccctttcaatttgataggtactttgctgtcacaaataaccactaatgtctttctccattttaaccactcagctcatgtcacatgtgacatcttcattcattcttttgtcattttctaatatttatcccaaatacttaaacttataaacttgtggtatatgacatattttccggcttttaccccccaagatactttcctcctttttctacaaaaattacaatgtatatactttgttttatccccactcaagccaaaagcctttggttttaatgtatgtttctaaagccttttataagcatatcatctgcaaaaagcatgcatttaaggataatttattgtatgtcactgacagggttaggaaagaaaaagaaaaaaaatagactactactaaactcaattgttcactcccctacattcgttgtctgctgcaagaaaccaatcacatttgtgcatatgtttgaatatgctgatcttttggttttctgctaccatttttctcatttttaatttggttgttgttacagcctccc

SEQ ID NO: 16702 - DNA, 722 bp, Glycine max
  Intron number 1 from transcript Glyma05g08190.1 (locus Gly ma05g08190) derived from phytozome v7.0 (chr-ID Gm05; pos 8156627 to 8157348)
tacattcctgggatctgctggctttgtttttcaaggtacgattttgggaactgggttttttttttctttgcgagattcagctctacccatccttgcaaattctcttctagtactcataccgctcatgcttcactttctgttttttttttttgttttatttaatgatgtttttttttcatactgttggacaaatcgaaatcttgcttttagtgaatgcttttttattttcttcagtgtttaacataatcgcatctgattatgatttgcacgaacgtggatgaatatatgtatgatgtcaaattcttagcgagtacctgggtttgttgtgtataaggaataagcataaggggttgtatttgtgcacatgaaccatggatgtgtttaatcaataaatagaattgagctttgtcttcagttcattttgtgtgtattgtccttttcaatttcgctaactttgttctctacgcacagactattttcatttccacctgatttgttcttcagtgttcactctcagtgcatctaaattagaaaagtctgctttatttttgcaattactacttgtactttagtagaaattcttactaacaaggatctttggtggcactttgttgccattctaagaagttctatgcttgaaaagccttttgttaacatcttttggttaaagctagacagctagttatctaaccaaagtagatttaacttttgaacagggcaaa

SEQ ID NO: 16703 - DNA, 881 bp, Glycine max
  Intron number 2 from transcript Glyma04g06990.1 (locus Gly ma04g06990) derived from phytozome v7.0 (chr-ID Gm04; pos 5415586 to 5416466 reverse strand)
cacatttccgtagttgctggtaccgtactgtactctaccatcaccttctcttccctactgtcgttactgcatccctttttttttataaaaagacatttttttttataccttttgttcttgtgttgagaactgattttgtttactggggcgttggtattgacaccaaggtttctccttttcctttgcagaaagagatccatcttgttcttgtttcatcttgttcttgttccttagtggtctctgttaattcatgtttttttatttttatttttttcatttcttaaatatttaaatattttataggatttattttttttatctttttggagtaagttttgcttcccttttttgtttttctttacacaatttcttttccgggtttttctaactttcttttccgggttatttattataattttttttttttatctttttggagtaagttttgcttccctttaaatattttatgggatttatttccgcgttttctgttattttattttattcttcttgtttcgattttttgacggtaataattttttttgtaagaactaactatattttttaaaggggtggacttgagagttaggttgtgggtaggtaccatttgtaatattcgaagtattttcttagtctctgattctgatttttgactgataaaaaatgatggaccttaatttaggccacatacacgtcttgtcatgatagcctcatgtagaaaacaaactcaggcatggtggtcattttaaacaatgacccatcaactaatgagggcttaatagatttaatggggctattgctgttgatgttgcctttggttgatttttgtgtttattattaatgtaatttgattacacgtaggaattgaggcaagggggttc

SEQ ID NO: 16704 - DNA, 826 bp, Glycine max
  Intron number 3 from transcript Glyma02g03920.1 (locus Gly ma02g03920) derived from phytozome v7.0 (chr-ID Gm02; pos 3134426 to 3135251 reverse strand)
ggattccttccgcttgttcttcagggctccacttggtacttattcgtgttctggataaaacaatttaatacggtttttccccttttaatcttttaataacttgcctattattttttagcttccaatgaaaataactatatgtttctaattacttttcctaaaaatatatttaataactgtcaaaaagaaaaatatttaataaccaaaactgtggatagcaaacttcacaacttagagcttgttgtaaattttcttgcttaattttctgttagatatttcattagcaatgtttccccctaaaatcgaagtttgagatcataatattttatgaagttttagatcatgagaaccaacttgtataaattttgtttttaagttgagcaaccaattagtagatttgatgaattttaattatgccactatcattccttttttagtttaaatatcaaatgatgaaatatcaaagcctcttttaagtttgaataactcattgtttacagcacaaatcagtagtttgacatgaagccacaccaccacctttttctaggcctgtaattgaagcaaaatttctcttctctgatactgtggcttatagctcagatattaccttttcagatgcttttgacatggatcttgcttcaagccttcaacaataatatattactctgttattattttgactttgtatgcaaaatattatgttttgttcaactgtttaataacttttctgtaattaactagatcttcacagaactacaataatttcattctggagaatccatgcttttgaattgctaatattaaggctttcaggtcacacgaggaa

SEQ ID NO: 16705 - DNA, 789 bp, Glycine max
  Intron number 1 from transcript Glyma03g28500.1 (locus Gly ma03g28500) derived from phytozome v7.0 (chr-ID Gm03; pos 36421112 to 36421900)
aacagatcccgtggtgtgaccgtgacgtcatcgctgtaactcacattcatttccctttcctttctcccattaatctcaaatccaaactttccttcctttttttttttttattatttttgcttttaattatttgtttctgtattttaaaaccctagtttttgccttcaggaattcgaatatgttagattgatgatttttttgaatcctgatttgtttttcttgaacctcaacattattgcgccttgagtcgattggcggctttgtgtgtgtgtgtgtgttaattggtggctgatttgttttacgttaatctctaattggatgctttcaatggatttttttgccctagacattttcttaaattgatcttggatttgatctttgttttctggattatttaatctttggtaattagattttagcaaactgcaaattaagtaaaggaagtggagaaaattctcttgttgtcttgttgatcagttaaggcatgaagagaaatgctggcaaccctttttcttttggtttaaaattgtgtgggtcccatacttttattttcaataaattttaataaataggaaagtgtgttatagagtatgttgctaacactccttgtggtagtaatggtagctgcggggatggctaatgcactgtttgacttgttaccataggtttgctattgtgtgtgctgtgatgaattgggcttgccggtactgcagtttgttttccttctttcattcttaactagttggcatgttttgaagggctgtgagagagaagttgcagaggctgcta

SEQ ID NO: 16706 - DNA, 869 bp, Glycine max
  Intron number 1 from transcript Glyma05g02930.1 (locus Gly ma05g02930) derived from phytozome v7.0 (chr-ID Gm05; pos 2249125 to 2249993 reverse strand)
gcttcggtattattctcctcttctctcccaccgttttcaattctttgttttttctattcatccacaaatgacaaataattcaggtttagaaacttgtttgatatataacacgtttgtcaaattgatcattcattagttgagtcgaatttcctccttggaatgactaaggatcctgattgcttgcatcaaaagttttaaatttattgtaggaaattgctgacaaatgcggctgctttgcggtcatagaaacccaaaattttgatttttgtcgttaaaacctttttgaaacctttgcatcatttgaaaattgataatgtaatgtatttttttataattgtgtccctatctttcagtttatggattgtgtattgatttattaaatgagttagcacttgtggtcaatgagagggatacagggaatgaatagattgaatttggaatcagaattaataacacttttcttttctcctttggaaacggtgcaattgaaagttctcgtgtatcaacttgctcaagcttgctagtttaaccctgttgtttcaattgttgaaaccagtactcaattattctgttctgttatgtatgtgcccggctgtaattttttttcttttgggcaaaagggtgaagaaatgttcttattttttttaatccaattcaatgcaagagatcttattgcaatttatacaaatgagacgatgcataaacagatcagtcgtcaggtttagagaatatacattatgatttagaatcataatatgaatttgcagcaatggaagcatgaatgccatggaacataacatgctattaataaggacattaaactcatcatgtactaagtgttcaactttttcttcatatgcagcaggaga

SEQ ID NO: 16707 - DNA, 848 bp, Glycine max
  Intron number 1 from transcript Glyma02g02570.1 (locus Gly ma02g02570) derived from phytozome v7.0 (chr-ID Gm02; pos 1899100 to 1899947 reverse strand)
ctcagtcagtggcagtggcaccagtactcattgtaaattcatcactatttccttgcaagacttgctgttgttcttgtgatgatgtgcttgcttgcttggatgttccatccttggtaatgtgtttgtgatatgattttgttttgtgtataaatgttgttcctttttttgtttttagtagtttgttttgtcttagcttttaagaaaatccgaatagtattttgagaattcctccctggagcacctagtgcaggtttgtttgcagtttggttgaaagttactgtgctaagtaatgtgaaatgtatacccaactgatatgccaaaagaactagggtgtctgattacgagttctgcaggtggtgtttgcatcgctgcagcaaaactatgttgaaatataattttgagttctctttattcctgtttattcagaactgcagtgagttacttggttaatcccaaaatatatgccaatgcatatgtaagcttcatcacgagaatgtttcctttacctccctgtggtcttccaggtttatagagtgagaaaccactgaaaatttagattttagattgcctaggaaaataaggaaatacacaaaacttgagactttagttaacctaattattatcagatgtgcttgtgggtaaatattagaaaggaagctaaactcagctactatttggacataacttaatttcaaacatatgctaaaaatgtaaattacttgtggtggtgcttatttccttatctattctaaaacctataatgcatgatgctatttttactgcttatcctaatactttttattttccctctcttggtggctttccattagctgaaagtaaatcaacta

SEQ ID NO: 16708 - DNA, 707 bp, Glycine max
  Intron number 1 from transcript Glyma02g47890.1 (locus Gly ma02g47890) derived from phytozome v7.0 (chr-ID Gm02; pos 51341930 to 51342636)
agccaccacctcccttgctcatacaaccccaggtcagagttagatgatcctttcttaatttcttttattgaaaaaaaaataattatggggtttgtgttttttctctctttaaaataaataggataggttatgtttaatgttatagttttatacagtgtatccatgagggggaaaaaagaaatttgatcaaagcagtgagaaataagcatcctatcaaagtggggtgcttctcagccctgcttttaccgtttaatagtgatttgtggaattggaatttggaatggtacaactaaactcagatttttggttatagggcaaagatcagagtaatctttcaagtttttgaaatttaaggtggatttaatattttgaatactgattttgtttaccattcatatgagaaaaactgctggtcttattgggaattgttatgagatgtattggccgaagaaatttataatgagacttaatacatgcatgctattgcaacattagtcaactcccaggtactacaaataaaaaaaattatgcaattacaataagggtttaatgcttttaatctgatgaagaatttacaagttaattaagagttaatgtcattgaatgaagctagtgtgacaataatatcttgaagggcacaacacaatgaacgtttacgttgaaacatcaaatttaaaatggctattttcaaggtccctgtggctgcc

SEQ ID NO: 16709 - DNA, 483 bp, Glycine max
  Intron number 3 from transcript Glyma04g40650.1 (locus Gly ma04g40650) derived from phytozome v7.0 (chr-ID Gm04; pos 46640625 to 46641107)
tatccccacaggaggaggaagaatcaattgacgaggttggtagttggtacttaacagttggtcttgtttggtttcattttatctcttcttcatgtcatgccaatttcctttattatgcttgctttgatttctgattgtgcacatcttgaattcggttcatacttgtatacctgtcaacatttgtattcattgttaactgtgctgaatgacttagcgtgatccatgtagccgaccctacctagtgggataaggtttttctgtatagaaatgaaagttgttctacatgaacaaaatagaaaatttgatgggtgtttgctgtgggataaggttttacacgcatattgaaaaactcctgtgctatctgttgttggtagatacattattgcttataatgagacagtgcttttctttctctttccttacactgctcctacccaaattgtgagctgttttaaccaggttgttcgcacaaagtactttgac

SEQ ID NO: 16710 - DNA, 876 bp, Glycine max
  Intron number 2 from transcript Glyma01g33340.1 (locus Gly ma01g33340) derived from phytozome v7.0 (chr-ID Gm01; pos 45340244 to 45341119)
tgcgcgaagaggcactagccattcccaaaaccaaggcacgctcgtcacatgcactctatctgtttgtttttgaatgagtggtttttgattttgctttcaatttgtatctactttttttttggcacttaaattgaaataagtaatcgatgcttaattggttctgggttttatttcttgtgtatgttgtttttctgtagaattcggggaacattatatggggcgcatttgggtaatcaatggatgggagtggctcatgttatagtgtgtttggaatagattcatggtgagaaaaatcaactatttttcatagtgaaggtgaagcaacaaatagttgcttctactttttcgtggcttattggataatataagctcttgtcaagtaataacttgtatcaatatttgacggaaaccaactggaaaagctaaaaagagattatcttaataatctttgttaagaagattattgaaataaactacaatgagagcttattgacatgttttgtgaagtttaatgaaataggctgtaaaagaattaatagaaaagtcataaactactttcataagtccagataacatcttccaaatgcttctgtactttatgcaattatttcaacggacaaagtttcttgatgagatacgcttggagattggtttggggaaatttagaataagaaacaaactatgattatttactctaaaccaatggtaagattaatccctatagcctgggaaagaaaaagtaaacaaatttttgcataggttttgctgtgtacccttattatagaattgtttgtgtttgcattgatttggttattaaactgttaactttcatttgatgatcgttttgttttttggccttattgtagaaactgattg

SEQ ID NO: 16711 - DNA, 929 bp, Glycine max
  Intron number 1 from transcript Glyma03g30510.1 (locus Gly ma03g30510) derived from phytozome v7.0 (chr-ID Gm03; pos 38459349 to 38460277 reverse strand)
ctatttcgtcttcttctgaggatcacaaagatcaggtactgctcccgttccgccctagactcgatgaacttttcctcgtttgcgtgtgtttggtaccaattattaatatctatgtatatatatatataaacatatttgttggtgcttattgaatattaactctctgaggattctagttttcttgttggtaattgcaacgacctagagccaaatatatatttgcttcgtacttttgacgttaggcaaatgtgttattgcacctcctcttgtattagctctataaatataaatgccttaatttagactgaagatattataatttgcactgaggttttgtgtttgtctaataaaagtgcacactgagttggctttactaatttgttagttgatgtagaatagccgtctgcgaggaaactgtatggaaaaaaatcaaccttgaattttgcaccttcagtttttttttattattattatataactgattcccgtggactatatttgttactcaatcgtttttcgggattctgggacttgaaagctatcgtaagggatgttaatttaataattactcccaatgatttgaagctactagatatggaatctgtataatttaccaaactttacacattggaatttatacgagttttaaagtctctgtataaattggttttgttgcagatcttgctttattacttactagctttgacttgtctatagatctcccaacattttgcacactaactgctttgcaatttggctaattttccattgtccagttaaaattatttttatgatgattagactttcttctttgacctttatattacatgagctaatgtatccaatatcacatcctagtaattataattttaccttttacgacttggtggataggtaacctgggctggttttgatacactggagcttga

SEQ ID NO: 16712 - DNA, 517 bp, Glycine max
  Intron number 1 from transcript Glyma01g33500.1 (locus Gly ma01g33500) derived from phytozome v7.0 (chr-ID Gm01; pos 45666835 to 45667351)
aggaggcaccacaaccttccgttcagccactgttggtaagctttttatatttttttattattgttaattaattctaatcatttcttaggttttatgtttgactgtgttacataaaaataatttaaagaaaattaccaaaatttatttaaattgtctataagaatcagatttcatgataaaattgtaaaaaaatgattatggtattatttttttaaaattgatgagttttatttttccagtggataaaacgagaaaatgaaaactgattaaaatataacatataattaagccgttaattttaatctgtttttaaaatcttgcatatttgaaaagaaaaacttttttcataataataaaaataatctacgactataatctgattttcaccaatattattaaaaaaaaaaaagtgagcataacagttttgatcaatagtatcttgcgtatttgaaaagaaacttttattgcacttaaaagagacttaactatgaattaatttttgcagctgtagttgggg

SEQ ID NO: 16713 - DNA, 718 bp, Glycine max
  Intron number 1 from transcript Glyma01g10600.1 (locus Gly ma01g10600) derived from phytozome v7.0 (chr-ID Gm01; pos 13781580 to 13782297 reverse strand)
gcttgttgctcctcctgctgctgctgcaccttgtagtaattgtggctttgttcaaccagttcctccatctagcacctcctcccctgaccatactcgaaaataacgttctttgttgttgttctctattcttttgagttttctcttctgtcctttttttttttaaagatttttctgttttaattttacttgtacttgagatagaagattataggcttacgagggaaatgggtgttatagtcttgtagagtacacacattatgcattatgcttcacggatttaatttttgagctggaagtttttcatctgtttgtgctggttatctttcatgattatgatatcttgtagccttgtagactaggatatcttgtattgttgttgccgagttgagaacctttctctcttgtgatgttccatcttgcatatcaacggtgctacactgtacgaaaggattggagtacgaaattcacgaagttccttcatagtaaaaaagttaactcttattattattattattactattattattatgtaattattttaaaaaataaattaaaagaaaaacaagataaacaatcttttgattttatcccagattctatctcattaattttggaaatcatctcaccaaaattaaaacaatttcacgaaagcaaattctattattcttttttttacaaattaggtgatttcggtaaaattatataccaaattaacata

SEQ ID NO: 16714 - DNA, 980 bp, Glycine max
  Intron number 2 from transcript Glyma04g00980.1 (locus Gly ma04g00980) derived from phytozome v7.0 (chr-ID Gm04; pos 569462 to 570441)
ttactctgcttcgtttattgaaaaggtcagcattcctttattacgagaatgatgacttctattgatgattcattactactgttcatactaattaccgctgttaaaattcattaatatgtttattactatgataaactaaaactacaagcatggttcctgtctgtttgtgaaactatctaacatgagttgtgtagtttctttttagtttcaagagtctagtatcctccaacctactcttctagcatataacctatgcaacgaaggaaaatgttaccagttttccttttttttttttttttttaatttgattgagttttagcgtgtagtttgattgagaaggggaagaatatttacatggttaagaaacttggctcaagctggctgtttgatcggtgaagcggttgagcatccgatatttagcgtgtagttttgcacaatattaaatgcaatccattggttgaattaatgtgccaggaatatatgggtcaagtttaataacactgaataatggtaatatacattttattgattaaatactagtattaagtttagcacatgaatcatttcattttagaagaggtatagtaggaaaaagattttacaaagtgcagacttggtgtgcttccaaaagaacttgcatagacatctgaagttctgtattatacatatagactcatttgtcagctctgttcacttctcagtgaaaagaaattcatttgctcgactttatgtttgcttaaataccaatatctggttgaaataaagtcttttaagcaagctggaatagtagaagataaaacggtgagagatgaaattttgaaaaagaaaaaaaaacaggaagattaatttgattactttaatctcttaatgtgaagcaaataatcttaaaagctgcaaaatccataataaatatatcttacagaaaattattctaactgttacgttgttttcttcatgaattctgcagcccgaaattgaaa

SEQ ID NO: 16715 - DNA, 917 bp, Glycine max
  Intron number 1 from transcript Glyma02g42430.1 (locus Gly ma02g42430) derived from phytozome v7.0 (chr-ID Gm02; pos 47463438 to 47464354)
gggtaagcaaaaaaaaaaaaactcaactttttgtgttttcctaattgggtttttgtcatactcagttgggtctacgagatctgaattttggcattctttactttccaattgggtgctcttcttttctcctatattggattttactggattcattgacttttttgttaaaaaaaaaatactgtatttgtttactgtacctttccaaaagtggggtgtttggttttactttcgtttttgcaaaagcttggtctactcatgctagttctcgtttagtgttatgctcaaaggatcaatcgtaactgaatctgtagtgatttagcttcttcttggtttcctagtttgtacttttggactcaccccgcaaagaaaaaagtccgagttttattgcattttggttgacctgttgactacgaggatttgtaattcaagttacctaatagaaaatgataacaggattgaggattagcgtcccctcccccccccccccccccaaaaaaaaaaaatttcagaatggattcatcatttatgcagttgagccattctcttataagttgcttcttttgggaagtatagggcattgcagggaatatggagccttttgctttatattccattcattgaaataccctttattgttggatacgctatatatggcattgatttttattgtgtttatggaaatcagtcatttagtttaggatcttcttttctagtgccttaattcggtaaaatcaggccccgagatattacagggggtttcaggggcaaagctttgatttacatactgaatttcatccaaattttttacaagtcgcaaacttccataaatattgatattgtatcatgcttaattatatgcattttcttattctgatcaatgtgtgttgtgtgattatttcttccatttcaggtgcatc

SEQ ID NO: 16716 - DNA, 842 bp, Glycine max
  Intron number 1 from transcript Glyma03g24570.1 (locus Gly ma03g24570) derived from phytozome v7.0 (chr-ID Gm03; pos 31449871 to 31450712 reverse strand)
cccggctcgaaacaacggagaggttcgttgctgcaacaactatctgtattggaatttgatagctttcactgtattacatcaacaatttaaattctttgcattctcagcgtaaaacaccgtcaactgaatagaaatcatagttggtatgaccaaaaagtagttattgtaaaagtctataaatttatcatacgtagtggtttatggttggatgccagtgtagaaacctttcatagtttgtatgacctttgaagtagttattgtaaaagtccataaatttattatacatgctagtttatgattggatgtcactgtagaaacctttcgtagtttgtatgaccattgaagcagttgtcgtaaaagtcgataaataaatttaccgtacatggtggtttatgatttgatgataatgatttgatgatagtgtagaaacctttaatactgttgtgcatgtactatttattattattattattattattattattattattattattattattattattattattattagggttaaatacatttttggtttctcaaaatatcttaaaatttagttttagtacctatgaattttttatgcattttagtccttaccaaaagtgatatggttttcttttagtccttctttagggattgaaaacatgtgcttctataatgtagagactaaaaaatgtattgaagttttacagggagtaaaaccgaatttcaagatattttgggagaccaaaaacataatttatgctattattattaattttttttgggagaaattattagtattatttttatcattattatgattataatattgttatttattatttcaggtgaga

SEQ ID NO: 16717 - DNA, 972 bp, Glycine max
  Intron number 1 from transcript Glyma04g08520.1 (locus Gly ma04g08520) derived from phytozome v7.0 (chr-ID Gm04; pos 6681162 to 6682133)
atttgatccaaaatcatccacagctatctcaaaatgtaagatttgacttacccgctttaaacgtgcttattaccatgagtttgccgtaattttggatgatggccacaattaattggttcccttttttagttttacgattagttgaaaaaaaaaaatacttcttacactcatatagttggataaaataaatatgggtcaaatatgtttgggcacccgtaaaattttaaaaatattaatttgattcttataaaaataaatcttaattttgatgatttttaatgataattttattagatgattttcttttgtaactaataaacttaattattttttctttctatttttttaaatacacttaaaagaaactaggctccattatttttttcatattatttcattggaaagcgaaagaagatcgctcaagatataacaaaaaattacaatttttgaaaaattttagttaaagaaattgtttaatttattttgagggtttaagcatcacaaattatttaatttatttgtaattaatttacatgtgtaaatttgtttgtcacataaattaatattttttaaatgtcacagggactccaaagtccaaacttattttacccaataaatattttctttttcaaaaatattatttaatttttaattattaaagtcaatcatttaactgatattaagaaaattaactattttaagttctaacatcatcaaagctagcataatatgttcgactggatgcaatcctatgattaataggatgaagagaaaaatgagacagaaaaataaaatatgaattaaaaaataaaatgaaagaaaaaaagcattatttttttagaaataaagttttccttgtcttttcttttcataaaaaaggttacactattcgtactatttttcataaaagacttgcacatttcaagagtccccaccacatttaattaccaggtgttctgttttgtgacaggt

SEQ ID NO: 16718 - DNA, 669 bp, Glycine max
  Intron number 1 from transcript Glyma04g41610.2 (locus Gly ma04g41610) derived from phytozome v7.0 (chr-ID Gm04; pos 47468026 to 47468694 reverse strand)
ctactcacgctctttgcttccttacttctcttccggtactcttcttctccttctcctctctctctctctcaaccactctctatatacttttttcaattcactctgactttcttcttcctcagtaactgctccgtcgctttctccctctaattatttttccttcaacttggctgcgaatttgactattcgcttgattgatcaggttatttaatttgtacaaggataggggatggagatttgttttgtcttgcttttatggaattattgttatcattaaatgtgtacttggaatttcgtccgtgatgattaatgatacactgttttagtaattcctcaaaacacggtaattatccatatcatgatgtgtacttgtatgtgtgtgtgctgacaaatttgagggaaactatatttgtggctatcacgctgattttttttttaatgtgtttgtgttttgtcggccattattgaaagttttatttcattttgtggacttattgtgattttgattggtgtcgcttttgtcggatcaatatatcgcaaggtgcttgggcggctgttttaccctattgatgagttggtctctgttttggtagataattggaatatctaactgtggatgtctcacttgtttttactatttcaggagtaggccgtgagattttcaggttc

SEQ ID NO: 16719 - DNA, 776 bp, Glycine max
  Intron number 1 from transcript Glyma04g07580.1 (locus Gly ma04g07580) derived from phytozome v7.0 (chr-ID Gm04; pos 5933569 to 5934344)
tcccattcacttctttacaactttgctttgtccaggtacctcataattctccattcgtttcgttctatcgattgttttctacttttctcggttatatgacaaagtaacacttgctcgtgccattgatattgcttcttccgcttttccgacattaaattcaattacggggattcatctgtcgaataattggcatgtgttgtggttcttttttagcttttattcgatgagttgattaattaattgttggtgtaatttaatttcatcggtgctctttgtaattgttagattaacgagactgttatggtgattgctatgagattagatgtctgttgtttatttgttgtgtgatttgtttgagtgtctctcactctcttgatttggggtttgtaacgtgttatgaactgtgtgtgtaaaatttatgtttgagtctcttggcatgtgttcttcttttatgattttattcaattaattaattaattaattgttggtgtagtttaatttcattagtgctctggggctgggctccactgtgtaattgttagattaaacactttgggatagtattttgttttatgttggatgagactgttatcttgtggttgctatgagatatcttgtatatttgttgtgtgacttgtttgagtgattgagtgtctcttgatgatggattgatgggtgacgtatcgtgaactgtttctggtgtgttttgtatactttatgttagatgatactggtctgaaatgtccaacaatctggtttcagagccgataccaagt

SEQ ID NO: 16720 - DNA, 575 bp, Glycine max
  Intron number 1 from transcript Glyma04g42120.1 (locus Gly ma04g42120) derived from phytozome v7.0 (chr-ID Gm04; pos 47905614 to 47906188)
caaaggaaaaagattcagagctggtgatatcctaagtaagtaaatttaattagtactccactccttgtatgtcacttcaaaaattaatgttagtaacacattttttttataagtctatctttttatactttttactcataattttataattttcaataaattttaacatgtaaaacatataataaaaaatgtgttagagaaattgtttttaagttgaattttctattgtcatgtagtcgatattttaaaaatatttttaagttgaatttatcaaaatgatttatattaagaaatatttaagtctcacatcatctaaaaataaagtcaaattaaaatatataaataaagaataatcctcacctcttgaattaattgttgggattgaattagatctctcagattatttatttattgtaagaatttatgaacagtcatatctttatcagatggttcttattgtctgaccgtgaatgtttgtttctccgacggcaggaaatagggatccgttgttatactcttcatcatgtatcattttgttaattttctgaatgtggtaattgttgcagtcttcaatt

SEQ ID NO: 16721 - DNA, 589 bp, Glycine max
  Intron number 4 from transcript Glyma01g36620.1 (locus Gly ma01g36620) derived from phytozome v7.0 (chr-ID Gm01; pos 49075710 to 49076298)
ttcagagttggatcaggttctatttcaattctcaaaattgtatattaaattataaatactatcatcttagtggcaatgttagcagctgctttgttgattcctaatgcctcccaaaacaaaaatagctacctgatatagcttgttctttggacttggactcttctattaatttattgacattttggtttgggaaaatactttcttgtttctatgttcaaaaatttatatagaaattactcaaaataaattttattattttctattttcaccatttcctatataactacttggccaaggcattttattttcactatcttatgcatccaatgaatccgacccaattgatagtttcaacttcaagatgatgtcaattgtgactcaatttttcctatccctgaaatgcaattacttttgttgaaagttcaaattaaaatatcaatagtggttacttgcaagagaaggttatatatttagtgttaaaactaatactctaatatggtaaagttatatacagggatgagtcttgtggtcctatgtattttttattttgtctaatttgttaatatattctccattcatgtattcaggg

SEQ ID NO: 16722 - DNA, 220 bp, Glycine max
  Intron number 1 from transcript Glyma01g05480.1 (locus Gly ma01g05480) derived from phytozome v7.0 (chr-ID Gm01; pos 5309023 to 5309242)
tggtgttgcttgttgaaaaacttttgtttgtcttcacgtcatataattttgtttgattttgataccactgcaaatatttgtcatgttttttaaactgtatttcctcctgacttaattataagaagaaaaaatggtggatatcaaacaatgaacttaaatataaataatttttatgaaaaaatataagtaaattttaactttcttcagctaagtaacgatc

SEQ ID NO: 16723 - DNA, 820 bp, Glycine max
  Intron number 2 from transcript Glyma01g05480.1 (locus Gly ma01g05480) derived from phytozome v7.0 (chr-ID Gm01; pos 5309287 to 5310106)
ttgtcgcggagttgcttgtaaacgcaagaatctgcaatttggagtttgaatttcaatcacataaaatgccgcaatgcataccaaacacaacgcaataaaattataaggctaaatgttttattttatccattatgttttagtattattttattttggtatattaaatttaaaaattttattttggtcatttatatttttttaagttttattttgattctttatgtttttaaaagtttcattttgatgcattaagttttaaaagttttattttgatcatttatcttttaaaaatttcattttagtcatttatgttttttaaagattcattttgatgatttttagtttatgttagcaaacttagtgtgcaagttaactttaaattttaaaataattaatttaaaataataacggctaaaatcatgttatcttttgaatatgcattcaaccacctaattctctaatctctatcatcttctccccaaatttcatttagaacctctttcacactacaactatcatcaacaaacaacaccaattacaccatcacaccatcctatagtcacatcatgacccactaccaacctagataaaaaaagttggatccaactgtgatgagatagtcatatttgacattgcgatggtgattttgggtcttacttaaaaatataaacaaccaaaacaaaacatttaaaacttaatatattaaaataaaaaatattataacatgagatgaaaagcgacatttaaccaaatcacaatggagcaatagcagaacctcaacaccgttttattaccctttttttgtctaaagaatacaaaa

SEQ ID NO: 16724 - DNA, 695 bp, Glycine max
  Intron number 4 from transcript Glyma03g01090.2 (locus Gly ma03g01090) derived from phytozome v7.0 (chr-ID Gm03; pos 817683 to 818377)
agagaaaagaactaaaagagcgtgaaaggttaaaggtgccaccaaattgtttcttacttttatcttcaacacattttatatgtcacactgtcaatgccaattgtagtccttattccttaattaggtctttctgattgaacttttattgataagaactgtacagatcagtgttgtcagtggtgtattgcatatttacattttttcaacaaggcaaaagatattgcatatttgcattaacttccatagacatagttttacgacagattgcatagtgtcaccattttttgaagcaaggcaacaatgttggagaaaatgtaaatttattttgatagaagagattcatatatatgaagagaaaatttatagtttaaatagatttttggttcttatactttaccttgattttggttttgatccctatatttttaaaagtttggtttttgatccttagttttacaagtttaggttttgatccttgtagttatatattgttttgggtttggccgcacaatttttttgcttcttctaccaaagctgtcaaacacaagtaagcatctcatccgttgcttctattccaaagatgcaccaccaaccattgacaaaactggtgctgatgtgttcttgcttcatttatatttctaaattgtagataagttttgatttaaataagaataaatctgtttgcatgtttcaga

SEQ ID NO: 16725 - DNA, 576 bp, Glycine max
  Intron number 1 from transcript Glyma05g23210.1 (locus Gly ma05g23210) derived from phytozome v7.0 (chr-ID Gm05; pos 28792494 to 28793069)
ctttgttgaatactaagtatctcagtttccttcgggtatgtatgcatgtaatgtcatgtgtgtgcttttaccatttgtaatatatgccaacttagttgtgatgttgtttagagaaaccattcttgatctgggtacatgtgtgaatgcgttttgagtgcgtgtaatacattatcatttgttttatttttgtttctggtcacacgttcttttgttgatctagatttggttcccggatatcagtatgttatgttgctatttttatcttcctctgctaataatttgaaattaggatgtgtgtggtgtttatatgatttgttgaagagtaggttgcagatgtggccttgtattttataagcattgtgtaatttaatatcactagtagaactgataaaaatattactttgtttataatacataggtcaaactttaaatttgtatctttttttcttcctttgcctagttctttcttatcagttgtgctgttgagtttctatttgtgaatttgagagtcccttatagagtttaatcttcatatgatcaggttatattggaaagaagtaaaatttggagagtgag

SEQ ID NO: 16726 - DNA, 807 bp, Glycine max
  Intron number 1 from transcript Glyma03g41550.1 (locus Gly ma03g41550) derived from phytozome v7.0 (chr-ID Gm03; pos 46986781 to 46987587)
caagtatgtgtgtacatgccttggctattttatatttaggatacttgatccttaatacttgctaaccggggattcattctggcagttttctgttggtgtaaactgctcttttgtattggtactgcttgtaccaggttttgccccttcaatatatattaatatacatatctgttgccgaccaaaaaaaaaaggcaagtaagtgtgcgcgtgagtgcatgtctccattagaatcatgagcagttctatgatttttaacatgttgagaagttaacaatactacgtaaatttgaatgtcgaacgagtatacaagttaagagttaatgcttgcctcttctttgataattctatgattagtggactagcccggttgtaaccttgttaactttgttcttataaccatgaaatgtaacttcttgcacacgtttttcttgcagttaaagaaccacaatactattaaggactcattgaaggaaattttgtaagattaaaatgttttcttcatttagcgttttaggctatttttctaggacatgtattgttacaaacgagcaacgtttcggcatgtgtttactctttagttcataagatcttgccaaggagtgtcttacgaatactagttaaagaacacttaatatcttataatttgttttttttttattgttttataaagtaagtattaagtaaattttgtatattcaatgttttttattttcattaaatacttttgttgtcattttaccctttatatctgctatctggtatataagattaatatgctacagtattatctaaaacaggtggcacctc

SEQ ID NO: 16727 - DNA, 914 bp, Glycine max
  Intron number 1 from transcript Glyma01g13950.1 (locus Gly ma01g13950) derived from phytozome v7.0 (chr-ID Gm01; pos 17440904 to 17441817)
gaaacttggttacttggaggagttaaagacaagatgtattggccaggagcagtgccgaggctgagtatagggcaatgacccaaggtatttgtgagattttatggcttaaaaggattctagaagaattgcagcttcctatgactcttccaatgaaattgtattgtgataacaaggctgcaatcagtatctcctagaaccctgttcaacatgatcgaaccaagcatgttgaaactgatagacatttcataaaggagaaggtggacgccggcctaatttgcatgccttttgttccttcttcacagcaagttgctgacattcttacaaaaggattgtttagtcccaactttgagtttcttgtaagcaagttggatatgttggacatctatgcaccaacttgagggggggtgttgacagctgtatgtctatattaagaattaattagatagctggatgtttatttttggaattaattttctagaagattgaataattaggatcaagatcagattattccgatttgatctgatccctttttatttacttttatttctgcatttagtatgtaattggcagccttgtctatattcttgaataatatacaagaattattcttcctctcctattgtttttctccccagcagtccctaaaatcacagaacacaattccaattgaaatattctatctagattatgattatgtaagattgaggctgagattttgttgtgaatatggttgatataggctgagattatgtttgattatttgttaattggtagttagctgtaaatgtttttttgattgctgtaactatttccttttattttttgtacatgatataggtaatttggctagaatattttatgaatattccctctaagattatttgttcttgttaaaattctgaaacttttac

SEQ ID NO: 16728 - DNA, 376 bp, Glycine max
  Intron number 2 from transcript Glyma04g04330.1 (locus Gly ma04g04330) derived from phytozome v7.0 (chr-ID Gm04; pos 3220215 to 3220590)
gtgtgatatcgatgtatcaagggtcttcttcaatgagatggtggttctttcacaaaaggattccacgatcaaagctaaaatatagggattgatcgatgatgattattttcacactactaaaaaactgatttttagtacgcaagcttaactatggttctctttaaaatgtcttatctttaagacggtgaaacttttgtaaatacaacaaatatttcaataacgattttcgcaaaaacatagttgaaactgtaaaacaatcacagtttttaggaaaatcatcgtcgttttggttttgaaaaactgtcggttatttttttatttttttctgactcgcgccctagccccctctcactccgctcactccaccgatagatct

SEQ ID NO: 16729 - DNA, 490 bp, Glycine max
  Intron number 4 from transcript Glyma02g40810.1 (locus Gly ma02g40810) derived from phytozome v7.0 (chr-ID Gm02; pos 46027100 to 46027589)
ggttgcactggtcctaagtatgtctatgcctatatgcctaattggagatgttattctttgttttagataacaggaaatttaaatcgagatttaagattgagatcatatatatgattttttttgtatttttaatcttcagtttttcaaaatttattatgatcggaaagatatattatatatacggtcaatgcagatgtagtaggtgtgtgtactgtattgcattttgctttttttttttttttcttttggtgaatgtgtattgtattttgtttgaaagcaaatctgtgtgcctccttttacaaaagaaaaataaatttgtaaagtacttttcaacttaattgaatatgaagagtaatttgactgtctgtgccgggataaaagtttcctgaagggttattttcttaaatcgccatttttttggcgagctgtatctgtatttagttcttaattggcatgtgaatgaaatgcagatctgtaattgaagttcgtg

SEQ ID NO: 16730 - DNA, 795 bp, Glycine max
  Intron number 2 from transcript Glyma02g40150.1 (locus Gly ma02g40150) derived from phytozome v7.0 (chr-ID Gm02; pos 45358821 to 45359615 reverse strand)
gaatgttaaatatgaagaaaagaactgacttcgtaagattctcgaagacaaagaggaaggtaggagtagaatataaataggatgataatttcataaagttagaagaatagcatatttttattattgattgcaatattattttgtgtggagttatattatttatagctacatgtattttgcataacacccttcacaatttttttttatctcttttcatcatattacataaatagtatatgacttcttcttttaaggttatttcaataattttcttagaaaaaattatcaaaataaactttttattaattaacttattttatagtaaactgtttgatagaagcagtgtgaagctgcacattttgcaatcaatacaacatgactattcatctagcagtgttatttattaaccaatatatatatatatatatatatatatatatatatatatatatatatatatatatatatatatatatatattctcttttacttatatattttggaaatgtataaatagacaccctaaaaacacctacagcaggaatagaaaggaacaaatgagagataaataataagtatgatagaaaaaaaaaaaacagaagcaagaaagtgtcaatagggtatttatatttttgagtgtctaaaaattaagactgcttgtatattttgttatgcaagtatttcttcttagagtctgcttttgtaattatcagaaggctttgtatacgaaagacacatgccggtataaattccaaagctaataaatttgagctcatgattttcctactgtagaac

SEQ ID NO: 16731 - DNA, 745 bp, Glycine max
  Intron number 2 from transcript Glyma04g16100.1 (locus Gly ma04g16100) derived from phytozome v7.0 (chr-ID Gm04; pos 17072223 to 17072967)
cattgccttcaatcgccgtggcacccttcttgctggtaacgcctctctctctctctctctctctctctcttatgtttcatattcaactgctgctgtgtccttccagggtattctcctttgatgcattttcgtgaaaattttttatcttttggttttttgtggcctgtgtttatgctaatcatttggttttagaaaacgggttgtgggtaaaaactgaattttatgtactaaatatcgatttcaaggttaaagtagcgaactttagtgcataattccctttttccctgatgacccagataagaaaaggacactatttttactcatattgtatatattgtatatgtactatgtagggtgttttttttgacacttttcattgtggggcttatgttgaattttgggattctaccatcaagggtcgtgtcctgtttttaacttttcatgccttggcttggtgatggagaaatattaaagggtatggatacatttttccctaacgcagtaatgatgcaattgatgctgaaggcattggataagcttgatgtgcatgatgtagttgatgtttacttcaccattatactggaataagtttgggaggcaataatgggtatgtgtggtatttgttcaaatgtgactggagtaaatattatagcaagtgtcgaactaatatgaattatttattgtagttatttgcaatatcaattttcttacttttgatcttgagttgctcaattgaaccagctgg

SEQ ID NO: 16732 - DNA, 808 bp, Glycine max
  Intron number 1 from transcript Glyma05g29060.1 (locus Gly ma05g29060) derived from phytozome v7.0 (chr-ID Gm05; pos 34738280 to 34739087)
gaccaagataaagaaagctctcaaaaaattacgtggtacataaaagccttaactttgtgtgcaattgtttttatcaaaatcatataattatatacgtgtttagtaataattgtgctaaaacggaatagaagatcatatatacaagttctattttatatttgataaactttaaaaataaaacaaaacaaaacgtaaaattaaaaaccaatacatttccattctactgaaagagggtgaaaccaaaattagcagatcatatcatatcaatcgctatatcagatttaatttatttcgcattgacaacataatgtcattgagcatacttgacatttttttccctctctttttgctcctttaatatagaaagaaaggtataattagaccctatttgtgtgtgtattaaaatttaaattaattatgtattcaatcttgcacatatatagctagcgtttgctcaacgatttattaattttgacattatggaagagtactaatattgtgtgatttaaatgtgaagctttgaggaataaaaatatttatagttgaaaagaaactaatataaaatatattgcatatacctattattgaatgaattttctaaaatttggtgtataaataaacaaaagtataactgtttacatataattcaagagttcaatggacccaattcgttttttcctgtgaaaaaaattataaaatagtgtgtatgcaagttttatgttagtgctcttcaaacatttatcgttgtagtgtgccaagttcaaattcatacctattggttttaaacgaattgtatcatcaggagttg

SEQ ID NO: 16733 - DNA, 844 bp, Glycine max
  Intron number 1 from transcript Glyma03g24170.2 (locus Gly ma03g24170) derived from phytozome v7.0 (chr-ID Gm03; pos 30895771 to 30896614)
cggactttgctaatacacgtgaatctgttgtccaggtaataatgtaatatacttaaaacaaccatgtcatcctttcaattttcaggaacgcccaaattttgtttgcatcaaaatgatttatacatgcaacttgtaatagtgtatagctgctgataaatttattgacacataatcttcagtcctacccaagtttgtgtactctaagtgaataaaccaaaattacttttctgtgtgttgattatgatgtgttagatagcatatctaacactggttaaatacttaaatatgtaaatagctattgctataaattagggatgcagttaccacaaaatagggatttgatttatttattcttatgtatttatgactgacactggtttaccctaatatatgattataaataagactcgtgtgaacaatgaacatacaaaacacaacattcagcagattccttctataatgtagatttgcctgcttgtatttgtaattttatgcttgttaatattctactaaacagatttgaaccttttgtaaacttggagctcaattaaatttgcactgctgttgtgtataaaacttctgattcatgttagagtctcatgtgcatgtagttaaaaatgtcttttggttgcaaatataaattttcaataagaaggaaaagaagtgttgcaatctacttatactaaattatccaaatttgtcatgcatttatactattttcagctgttatgcattctggttgggcatagtagccaaattttctacaactgttttatgccatgatttttaacttagttaatttgaaacaggtccttggcaacttaacagcagttcactcatactt

SEQ ID NO: 16734 - DNA, 846 bp, Glycine max
  Intron number 1 from transcript Glyma04g09100.1 (locus Gly ma04g09100) derived from phytozome v7.0 (chr-ID Gm04; pos 7258679 to 7259524 reverse strand)
ccgaggtattttaattacaattgctgtgccaccggtctgggttttcaattttgattcttcaactttttctatgccgttcctctagtatcatcgttatcagctatacaattgggatatgttctttgtgtttggaattagaagccttgggctacaaattataagtttctaagtttaataacgttttactggttcaacaatgtttcacgtcatgtatttagtatttgatgttacttcgatgattccaactttgattgttcattgttggtcatggtgtttgtaagaaggtagtgagtagtagtgactgataattttgtgaaggttatggataaggttttaaatagcgggtatggtctctgattcatcgcattccgtgatattgctggaaattgcagaccaatgcgactgagttggccataattattgcagttgtgttacagtcatagacatccccaaaacgggtaaatcacttttttggtcactgaaagtgttaagagctatcatatgcattcctaaaactaaggaaatgcccaataaatccctgaaattgtctttagctaagtccctaaacttaaccacttattgtcattttagtccctatgttaacattatcacttaagtcacatctttcatgtagcggttgaactaatgtgcttgacagattgtagttctatttccttagtttcagggactaaggtgatagcacctaacacttttagggatgaaataggtgatttacacggttgtggactgttttttaaaaccttggttatagaatatagagggtgtgctttagcatgtcctgttaatgatttgaacttgctgtgctctggaaaacagattgagaaa

SEQ ID NO: 16735 - DNA, 638 bp, Glycine max
  Intron number 1 from transcript Glyma05g04050.1 (locus Gly ma05g04050) derived from phytozome v7.0 (chr-ID Gm05; pos 3173179 to 3173816 reverse strand)
agcacccccaggtatgttgtctccaaacttcattctttgtcttctttgttatttctgttatgtgattgttgaagtggtttttagttttctcaaaatcctatcacaatttgtttgtttattgttcttctttttttcaacctttctcaaaatcctattttttttttttataattccgagtctctttttatgaattttcattgtaaaactgcatcattttttgaaattagttgctatttttttctgtttgaatatttttaattttattctaccttgttgtttcatgagatgtattgggcaccgattcaaccttcttttttgcttacctagggtttaataatttatttttctaatcctttgagactgtgtcaaaaatcgtgaacatctcgaaggggagaaaagcatgtttcatctaatccgcacggctttgtcaaatatatttgtaccgacaactgtattttaacaattttctgacttttctttgtttatcctgtctatgactcaattgcccctttttcttccagaatgtttttcttcattcacattactttaccttttcattaagtcctagaatttcggcataaaatatgaaaatttcgctgactttgacccttcactacgaaacagggttgtcatagaca

SEQ ID NO: 16736 - DNA, 716 bp, Glycine max
  Intron number 4 from transcript Glyma01g03650.4 (locus Gly ma01g03650) derived from phytozome v7.0 (chr-ID Gm01; pos 3133794 to 3134509)
aggtactctagttaatttattttggaattttaagccatgtcttcatattcaaagttattcatgttagatgatatcctgacatttagagggaactcattcttataaagaaggtttgggatcacataggggccaaaagaaaggacctgtaaattagtcgagataggttttaaaatcgtgttgtgacctataaagaaaattcttttatgtagtcttgaaacattcaaagatggcttcttgggttttgaggaaggaatgaaatgaatgttcattttaagcagaaagtgtaattattttgcttatctactatgactcttgtttttctagcgatacgtcagtctagcacatgatgaatattcaatggttgtctttattgattgtagtgagaacttttattgaatctatgactgaaagcatatctcgctgctgttgttaaattgatctgttttttgttggaccataatttctgataactcttgtatattgatgccactatgacattgtttggaaattgaatgacctgttcttactcactcaatctcatggaaaatttagtgcttctaattgaacatgcttctttgtctgtcaacttcattgtttacaaggatcatgatccatggctagaagtattagtctccttgttcttttgctctctgttttatgtatttttgcaattgaataacaatgttcataaaatgtttattcaaaaaattttcagg

SEQ ID NO: 16737 - DNA, 557 bp, Glycine max
  Intron number 2 from transcript Glyma01g38150.1 (locus Gly ma01g38150) derived from phytozome v7.0 (chr-ID Gm01; pos 50298169 to 50298725)
cagcggagtctccaacttcggtccttgaagacgaggtatgttctgtgcttctccttcttcctcgaacgaccataaacgtttttgaagagtgaacattgaaaaatgcatattttctctcgcgccgtttcactcacacagcgtgctctaggtgtttatgctttgtttcgaatatatttttgattaacggtaacgcgctttattatgtattgtaagcttgatttgaacggttattttacggaaccgcgttttgtgccacaaagtagtgttaaaacttttttcgtttttgttcttgttctgctgattgagttttaggtgtttttttttttgttattttatttattatcaatgacgcgcataatgtaatgcaagcttcaaatgaagggttactttagggaacggcgtgttagtgttctcgtcgttttgttctacaaagtagtgttaaaagcttgtgtcatttttgtttctgttatgctgataagggtttattctgtttttgttatatattttttttggtttgttgtttgcttttacgttgctaactttttcaaatggaaagg

SEQ ID NO: 16738 - DNA, 657 bp, Glycine max
  Intron number 1 from transcript Glyma05g27240.1 (locus Gly ma05g27240) derived from phytozome v7.0 (chr-ID Gm05; pos 33102112 to 33102768)
tccccccaagaagctcctcattaagttccacaaaggtacttcactattgatcaatcgattactcttctgttttttcaattcttgctctcttcagatgccggattcaatatttgaattcatcgatttgtgtttattactttgttagttcaattgtaagctgcattttagtttctttctctgttacttggtgctcttctccgatgtttatacttcgacagctgcacagcgctcttctttcgttttcagtcgtattagtctttggaaagtgaaatttgaactctagagagctcgttttcatttccttctttgaactttattcttagtttcatttttttcttaattcattgatacagtcatatatagcaaatattaaatatttatcttatgaatgggatgattgggggtgaggcttggcacatagataaggttgctgtcttgtgagttggaggccatggtttctaatcttggaaacagcgtcccctcttgaggtagttaggctgcatgtgtccatcttccctagacctcacttggtgggaatcttgtccaatgaatcaccctctttttaatgaattggattggatgactactacatttttttatacttctgttttttcttgtgaaggtataccaacattgcccccaaattttgaggaggat

SEQ ID NO: 16739 - DNA, 777 bp, Glycine max
  Intron number 2 from transcript Glyma02g42060.1 (locus Gly ma02g42060) derived from phytozome v7.0 (chr-ID Gm02; pos 47151526 to 47152302 reverse strand)
cctgaaaaggtgagaagtcaatacatatgtatgctttaaacatgtatgtagtgcgtcatcatcgttattattttcagatgctaaattttacttcaatcataacaaatatctgttgttcaagtcaccttgagcttttcttatgtttgactaataaataaaacgaacatgaattatatgttgacatttcagactaacgtattttctaaatgtgatatttgaagcattctgacagatattgcagtataacgcatgcacactttgtacatgtactgaatttagtcatagattgtgagcttagtttgctacttgagtcatcagtaggtttttaagtccttcattaggattgttgataattagcatgaaataactgctgaaatgtagctgttttgatgttatggaatttacattggagtaagcctaaatggataggtttaaacttacctaggataattgtgaattcaataatctcaagtgtatgtttgattcaatttatttggaaaaataatcgcttatttttgttagtttcatgaatgtttaaaaaacaaatgatttttataaaaatagttcataccaaacatgcactgctagcgttgtgagcaaaccttttttacgtatgcatttttgtcttctacgtcctttctcttatacagattgaggaatatggttgtttattttcttattaagaagaggtaaaatggatgtatcatgacatttaacactttttttttcttaatgatggcaggttccaagagttatcatcaggttatttcaatttgt

SEQ ID NO: 16740 - DNA, 666 bp, Glycine max
  Intron number 3 from transcript Glyma02g45320.1 (locus Gly ma02g45320) derived from phytozome v7.0 (chr-ID Gm02; pos 49620730 to 49621395)
aggtattttcatagtgctattaatattggtattacactattactgcagctgaaatgatttttctcaggtgtttggttgttttaatttttgaattttttgtttgaactagttagggcattgagtagaataaggtttaatttttatcttctaaattcgcgttaagctgggcaaaatggaatctgcaaactgactttgtttaggtttcttagttaatcttggacagttgtgaactgtaaattttacgaaccttcatgaatgtagtataaagaaaaaatgtggaacgcaacggagtgatttcataaaccttttctgtaaaacatactggaattggaatcaattgaataatgaccacaattaggaccattagttagcttttttcaatttaggcttgtgaaaaatcagtcatctatcactctttctatgatctgctgtgtcctcacgtttttcctgttttgtatccaatgcctagaggattatacatgcaccatggtacatatcaaatttcaaatactttcaagttactcttagaatttgtttattattttttcttctcgcactttttatgggttgtattcattttgttattatcaattgaattttgatgatctcaatatataaactctttctacaggctaagtttcttaaagcttgtgggaccttaacagg

SEQ ID NO: 16741 - DNA, 660 bp, Glycine max
  Intron number 3 from transcript Glyma01g41460.1 (locus Gly ma01g41460) derived from phytozome v7.0 (chr-ID Gm01; pos 52954080 to 52954739)
ttgcgttataaaataagagcaagccgtaaaaggaggtaaacattccttctaattacaatatatgggtatcatttaattaatatttagtttcgtgagtcgtgactccatttgttaaactgcactgttgtttatactatttccacactgctaatgtgatcactcaaggcactttaagtagttgtgctggtaaaaaggataattaattgatgatgatttaataaaagaaatttgaattttgagttctcatccaaaagaaccaaagacaacaaaggaaaagaagtaaaaaaataattctttagttcaaaaaagataaccttttaactgtataagattttttctttaattatgagctaatggtaagccaacttcaaaagtaaacggatcaaaattaaaggcacaggttgtgctgttcattgtttctggctggtggattgatttctagtttaattttagcattatagacttgtatctttttcaaaatttacatttaacaactggttagctataaattttttcctgaataacagttaatgcaataaggagttcatatcaattatgctttatctcttagttttgctgcattgggtgttaatggaaattttctggggttctttctgttttataggttgagagcaggaattgtgattttcaattataggg

SEQ ID NO: 16742 - DNA, 393 bp, Glycine max
  Intron number 6 from transcript Glyma01g35730.1 (locus Gly ma01g35730) derived from phytozome v7.0 (chr-ID Gm01; pos 48252543 to 48252935 reverse strand)
ccgtgatgtcttagtgatttggactctgacactgtaaaactgactaaatgattatgtgctccttcgtatctgtgtggtttaccaatttggattttttgttttctttctaatctttttactgaaccaattgccaattatgtgatatttgagtccatacacctagtgtgttcgaattgcttcaactgataagggatataataattttggagaattgggaatagagtcaactactttaatgaaaaaataatatatatacaaagtgtactaaaaactgcagaatatgataataacaacaaaattattaacatatatgaagaactataaactagaaacataaaattcaccaaaagtatctaagttctcaaggttgaggtgtattattacaagtctcat

SEQ ID NO: 16743 - DNA, 536 bp, Glycine max
  Intron number 1 from transcript Glyma02g43300.1 (locus Gly ma02g43300) derived from phytozome v7.0 (chr-ID Gm02; pos 48090835 to 48091370 reverse strand)
cagggatttcaaagagggtgagctatacatcgttttgccttatatatgtattttgatcatgaatattttaaagtaatggaatattattatacttcagttgtatcttttttctatatcatctcatcctcaaacacttttatcgttttcttttccttccatcccctttatcatgtatataattgtgtaggagtttattagtagagagtcatacgttttctccctatataaggcatgaatcatgatacataagtttttggaaatttaaatttaaaggatgtttacataaacacgaggggtttcttaaataatcctattcgttcgatcataaagagctccatcccttgcaggcattttgtttcttttttccaatttattatgatataaccttttcatacttaaatttttatgttcactttatcttttccctatcgctatttttctttctgatctcatcttcaattgcgtttaccattttctttgttttgtaaatggttcatgtgttaattaagagctaggtgaggttgtcaaagagacta

SEQ ID NO: 16744 - DNA, 876 bp, Glycine max
  Intron number 4 from transcript Glyma05g09190.1 (locus Gly ma05g09190) derived from phytozome v7.0 (chr-ID Gm05; pos 8965985 to 8966860)
tttcctgaaggtgaaattcagcagtacaaagacgagtaagttgatgatgaataaatttctgcaatatctgacattttccttgcaaatttgatttgaatttgaatgagtaaagtgaattctgttccttttttttattctttgatttttttgtttatatttgaaaaagaaaaagaaaaacaaaacaaaacagaggaagcatattgtctaatcaaagcttttatgttaaataaacccctctgaattagcacgtagctaagctttggactataaaaaacataacaaaactacttttttataataagggagatggatgcataatttgttacctacctatactcctcccaaagtcttggaaataacaaaagaggagttaaagaatgtagctgttgtattcactacaatagccactgtgtgacctgctatgctgctgtaacgattttggatgtggctcctccacactacatttcactattaactgctttgactggatatagtttgcacgccaagagattatggtcccaaagcttgtgttttgaaaaaaaatagaaaattcttaaactttttgaatcttggagtattaggaaacataataatactcatttgctcattcataaattcttatcgaagctattgagaacctcctcaaatctgaatcaaaccaaatgaatgaaagaagcatacctctgcaagattagtcaactttgttttgcacaagtgacatgtgagtggacttaattaccaacaaagtagtacagaagatgaaacacttgtgttgagcaacatcaacaactgtttgtgtctcatgcctatttaaatattctgtgtaaattttcaaatatctttgtaatcattttagaatctttgtgccagtaacct

SEQ ID NO: 16745 - DNA, 421 bp, Glycine max
  Intron number 3 from transcript Glyma03g37080.2 (locus Gly ma03g37080) derived from phytozome v7.0 (chr-ID Gm03; pos 43845152 to 43845572)
gcagagaccccctgttccttccctgcactcccaaggcaaatgctctttaatgtgattttttttggaatacattcaattattatgtcaacaattcgaatgaatttcacatgcttagaagaggggaaaacacaactaatctagttatcttgtcatttttattttcttagaagtacttttaaagaaacttatccaaacagacccttagaacaattgagttggatatatccttcattcttcctaaaagtaaaaggctttttatacttgttacttaattctctgtgatcctcactgaacctatgggaatgggaaggttgctctaatttattctttttcttgttttgatttaagtctgctgaatacaatttagtttttgaaatagtgtctccaaaatctcattcacgtttgctatttgtatgcaggc

SEQ ID NO: 16746 - DNA, 763 bp, Glycine max
  Intron number 1 from transcript Glyma02g00570.1 (locus Gly ma02g00570) derived from phytozome v7.0 (chr-ID Gm02; pos 353351 to 354113 reverse strand)
gaaaagccatcttgcgttcccaacgcgaacgccaggtccatcatcatcattattattgttattttgtaaatttatgatgttttgttttggttttagtttagtttttgcgcagtataaactctcaaccaattagtaatcactgacttttaaatggtaaaagttgataagtttagcaatggaggaatgctagcaacacacacgagtgagtttcgttaaataagaagtgagagactcacaaaaatttgtgattttcaatgaattttcaaccaataacagaaaaatgtgtttaaaagagtgcactagagattttgttgttaacatttgcctttagcatacatatgactggatgacagtgtaaacaagttttgaggaatgctactgctagcaagtagcaacacactctctactgttagttaaagtttactggatattacaaaataatgtgtggagcttattgaataagtgaaactcactaaattttgtgattttcaataaatctcagtcaataaagaataaagaagaatgtgttcaaaagaatatgttggagagtgtgtgctagcatttctaaaaggttttatagttttcagtatatttaaattatttttttgtaaatttattttagaataaataatatatgcactatgtagtgatgatgtattagaatgccatccgaatatctgattacaaactgccatacgttgtaagtttgctgactatgtagtgatgatgtaaattctctttctttgggtgtttttagctgaac

SEQ ID NO: 16747 - DNA, 602 bp, Glycine max
  Intron number 4 from transcript Glyma03g40780.2 (locus Gly ma03g40780) derived from phytozome v7.0 (chr-ID Gm03; pos 46440260 to 46440861 reverse strand)
aggggctacggtattacaccattctgcagggataggtctcttctcacctcacctcacctctccttttttttttttttgctttgctttctatgcaatgaattgataaataggtaaaatatgtttcaagttcctcaattttctatcaaaattggttttagtctctatacattaaaaatcacgatttttggtcaccgtatcttttataattggtgaatttagtccctaaccctagtatcataaggggatgtatctttggggtgtacaggattaggattttaaaagacatttttgtgataaaaaaaagtcttgtggctattcaataaaaacttttaaataatataaacaagtcttttgtaatcatgtggttgtttattttgatagctttatcggatgattttttttttatcacggttaagttatcaaaataaacaaatttatgttctataccttcccggagtaagactatcaagattttttaaggagggtgtcaaagtttagtggtattccattaagacattttactttgttctattattttcatgttctcttcatctcattttgtttcaggggatactgaactgctcaagtacttgctgtccagg

SEQ ID NO: 16748 - DNA, 650 bp, Glycine max
  Intron number 1 from transcript Glyma04g32290.1 (locus Gly ma04g32290) derived from phytozome v7.0 (chr-ID Gm04; pos 36787894 to 36788543)
ggctcgccgcattagccagaagaggcttgcttctggtattcaacatagtaggaacatgttcaattttactgattcagttgtgttttatgtctctaatttttcctccttgtcaatctctgaaatgattttacattttagccgttgactttagagatgattttgattactgattgatttatcacattgatgccaaattgccaatcttgtatcagtgttagttgcatttgcatattcatagttttctttttctttcttatgaattagcgtctgattggttattcaaggtcttcacagtttggaaaggagggaggggggtaggatgttttgcaatttttttttttcaattttgtatcaggaggtatttgaattttctctgtattcaataaaagtataaggtgtggataagacgcttgtgataaactatttaaagagatttcatttcttattttttattgtaagttcaatctgaatcttttttgttgtatacgtgatcctctctgtgaaatgttctgctcatgtcatttgcgtcaccattgttggttcttggtcatatgtttcagtttcattagagtagagtatttgccaacttgcatctaattcttatgttttccttaggtaattctcccttcagtgagggcagcttggaaaga

SEQ ID NO: 16749 - DNA, 684 bp, Glycine max
  Intron number 1 from transcript Glyma02g47610.1 (locus Gly ma02g47610) derived from phytozome v7.0 (chr-ID Gm02; pos 51136525 to 51137208)
cattggccttgcgctctgcactttcaactgatttggttagttatttgcaccgcggaaaggtagaaactttactaaagctaaggcatgtatttgttatgcccaaaagtcccataatttaaattgttgattctcctaaaaaatgcgagtacataagaattatagcctagcttacaattttcttttctcactgctcaacctaccctaggggggcataatatggtagttgattgaatggagataaaaagaaaacatagtgacgaactttaggattcctaaatatcattttctgtaagagtgctgagtccgtggaagctgggtgagaaatgtaactattaataatgcatcatctggtgctgtgcaaaaaaaaataatgcatcatctggatctacagtggtaccattttgtatgcacttgagtgtaatcaaaagattcccttgaattgcctatgcggcatcataacattctttttagcttggctagttctataataaattcttgtcttgatgtgtaaaagatagggcatcaccaatgatagtctagcatttcaaatcattcaacctacagcctaataataatagtcatatcaatggaaaagtagtggattttggtttatttgctccaaatattgcctttcccatgttgcttgtgaatgtgatttataccatagactctgcttctaagctt

SEQ ID NO: 16750 - DNA, 642 bp, Glycine max
  Intron number 1 from transcript Glyma0092s00230.1 (locus G lyma0092s00230) derived from phytozome v7.0 (chr-ID scaffo ld_92; pos 31974 to 32615)
tgtctcagtccggcaccaatcgtgccaagcaaaaggtattattctcttcttcgccatgtccattactcttctccgctcgtgacgtggcacccttcccttcaaaccggtttgatccctttttttatttataaggtgagaatcaaataactcacctcagccaagtcaactaaattaaacccttttgacaccagttcggtttggtaactagttacggaaaactatttttgtaccgatgtgacaaatacaattgttgaagattgaagaaccaaaatgcaatactattatttctttgtcatcttatcactttcttttatgaaaccattttttgtacgccagcttcgttgcacggtggatctccacccaccgcaaaatagattgcttttaaatgtgcaattaaatttgttatcatagtgagcatcgactcatgtattccgattgcatcgtttatgccaatcttattggttgggtttgggaatattttaattgccgggtttgatttagtgctccatgcttgagcaataattaaaatttacgatatatatattaattatatatttttaacttttgttgttgttgaatttagtttttgttttgctttggtgtgtaggcggagaaactaattgagcttctgcggcaaccaag

SEQ ID NO: 16751 - DNA, 618 bp, Glycine max
  Intron number 2 from transcript Glyma03g32430.2 (locus Gly ma03g32430) derived from phytozome v7.0 (chr-ID Gm03; pos 40178613 to 40179230 reverse strand)
ccaattttttgtatcaggttagttctatatcctagtttgaaaccaactctctaattgtttgacggaaaaaacatagatgcaattctttaagtgctatttgtgtcattctctaatcataattagagttctatcttgttaatctgcataatcctttaatgtaaatctttattatgcagattgtcatggtgaaacttcaattttgattgaagaacaacacaaactacatctaaagaattgtatctaagtttgtccttgtttaaaaactcatcatggtagccaatttgttaggtcatactatgctactattacaacttttttcagaggatttggttaatgttagaacaaacagttaatttatactgagtaaaaatgaaaaaaagtagaggtgcatgcatctagtgtttaatttcaattaatttattttgtaattcctaacattaaatcaattgttgatgtttagtatagaacaaatctattttcagaataacctaaaacaaatcatcataatcgtttagaaacaccaacacttggagttgtttttattagagaatgtttttggtgatgatttttgttgtttggacagtgcaaacaagaccgtgaaggagcagaggagtatta

SEQ ID NO: 16752 - DNA, 499 bp, Glycine max
  Intron number 2 from transcript Glyma01g00740.2 (locus Gly ma01g00740) derived from phytozome v7.0 (chr-ID Gm01; pos 429715 to 430213)
gctggtaatctattcaccttcttctttataccatctttttttctgtatatttgttaattgaacccacgcttcaataatcgccttatttattaataagttaattgcttggtactaaagtgtttaaaattgttattaaccaaccctagctaagttgagctgtatacacatttctatggatctgagttattcgttcttttataataagagagattaagaaccctagcaaacagaacaacaaaagttctgcacttctttttcttttcctattgattgcattgataaaaaaaattatttcatgaatttgattttgtgatctatctggccattgatctgatgtttatttgatgtaaatgaatgatttcatattaattttatttattataaatttgggtcttttgattgctttcatgttttggttcgagaacagttgtcttagtggtttggtttgttgttgtgtaaaacagcacatttaagaagaaagctcctaaagctattaagg

SEQ ID NO: 16753 - DNA, 681 bp, Glycine max
  Intron number 3 from transcript Glyma02g05670.2 (locus Gly ma02g05670) derived from phytozome v7.0 (chr-ID Gm02; pos 4545479 to 4546159 reverse strand)
attctgctggtaacttttctttcttgaagaagctcaattcttatgatttcttgatatggaaaatttcattgctagggcatcgatcatgtaaaactagtatattaggtactaggttgatggtgctttttcctgaagcaaaagttggtaaaataaaactaaaatggaaaatgatcatgtgataattgtagatgtttggtcttctcctgaatgataggctaggaattttctttcgcctttatttattgatttgttgagttgaagtcattatccttttacatttatttaagcgcatcattcatagttcttggtgtttctgagaaccagaactagaatgtgataaaaatggagtgataccttaccagcttggaagctaggtggcctgactgttggagattgaagaggaaactgtttttcagccttttgattttggggtacaaaattatggtttgatgtttgcccagaatgcctatttcccttgtagaaaactgtgaaatatatttacttgcatgttttagtgggttccattttaatgcattcagaatgattcattcctctattgattattttccacctaatgcatatgatacttgaatctcttatataaaaccattaatatattatcgcttgctttatcattttgctgatcctttgctgcatatgcagctgtttttccaagaatta

SEQ ID NO: 16754 - DNA, 996 bp, Glycine max
  Intron number 1 from transcript Glyma02g05670.2 (locus Gly ma02g05670) derived from phytozome v7.0 (chr-ID Gm02; pos 4546505 to 4547500 reverse strand)
ttttctcccctttcctttttttacacctttcactggtatcccacctatcaacttctctgagattcaatttctgtatatacaatagttctatattgtgtctgattagtttaattcctctgtagtataatactatttaatgcttgttgtttcttttttgaatgattcttacaaagttctagcttgtgcccaattgcgtcgatatattgtcattttctcttcttagttcttagttcttacagtgcctcacgtctttgctgctcctttttataattatctttattgttatgatgaactcggggttgtggaggttttcaattgcgcttgtgttcgctgaaattgcgaaaaaaagtgaagtcaaatgcagccccaattgtggttggccgcaattttaaatctcaggttgcaacttaataacagtatatgactctaggaagatctggcctatggtagtaattggtgaaaaaaaatcttatcttttagtgatttgatactaggtatgcagttaccttgctagtgatgaagttgcattgtagataatgagacaattcaagaaaagttttctagtcatgacaattgttggagatcccacgtcaactaccaaaacagtggatataataggggggacaaccctcaccttacaagccggttttgtgaggttaagttagtcgtaacctacactctaagaacaattaacatggatctacatatccacgagtaaagaagaaaattggttatgtatggaatcggaaggtttagagaccaaattttggaatctaagaattaatgggttaattatatgatgatatcaattggtttgtatttgtaatgcatgataattgtcctacttgtctttttatatctgatgctagagtcttgggccgttgttggttttcttttcttctatttttctttcttcttttgactgtgaaacatcaagttgtaatctcaatttctcacaaagtgtaaataggtaggtcatattgccagaggattttg

SEQ ID NO: 16755 - DNA, 931 bp, Glycine max
  Intron number 1 from transcript Glyma01g44200.1 (locus Gly ma01g44200) derived from phytozome v7.0 (chr-ID Gm01; pos 54939871 to 54940801)
ccttccttcaacgtcgctttccactgtggccaccggtaacctctctcttctccgctcggaatctctatttctctcttattcttatttttggttgaatttcccccaacgctctctttctctgatcgccttctttcttcaatgtgtgaaaatttatttgtattttgataatacctttttttgttaaccgtgaactgcagctaggtttcatcttgttaagatccatgtgatgttgtaaatggcgtataataataatgttccgatttaggtgaagatagcgtcttcgttttattgttagcggaataatgatagtgtgtgtatgtgcacacactatctagggtttggtttcaggctcctcaacctgaaagtgaaactatcctctaaaaaactcttaaacattggccttttctaatcctcttgttgttttgagctcccatttctatatgcgattatggattattttagtcaagcttctcaacaaacacctgtaggagaagaaaataagggggggtgaacaaatcaaacttttctcacaagttgaaatcaacttattcatctgaacttcttcggaaactctctcatctaattttcccaaagttgaagtgtataacttgattataagttattggagaaatttgatttcacctccctatttcttcttttataagtgtttgtcgagaagtttatcctaaattaggaataccactatttttgcacactgaattttatgattttacatggtctgtagtgtagagtaatgtgatatgctcaggttattggtgtgatgcatcaatttatggataggtctttttgtaacatagctgtcaatttttgttcacaccaaaaaaatcctatagagataacttctctgctatgaaaaattcattattcattgtttccagggtgaacttttcaagtttgtggacacgcttta

SEQ ID NO: 16756 - DNA, 929 bp, Glycine max
  Intron number 4 from transcript Glyma01g44200.1 (locus Gly ma01g44200) derived from phytozome v7.0 (chr-ID Gm01; pos 54942151 to 54943079)
ctcaggtcagtaagcttttggtattgactttattgtaatgtgttttcttgggcatatcattacatatattgttgtggttttttgagaaaaagatctaacattttttttctaattaaatattcttctaagatcttgtgtcagcttagttggtggaactgggacatgcaacaaggatgcatgggttcaaacttcataattcactccaccccttttcccattggggcttcccctggggtttgtctcaatagtgggtcctccctttaactaaaaaaaaaatctattagggatgtttttacaattctagggcaagccttggtgcgacagtaaggttgctgccttgtgaacaacctctctacttgtagggttaagtatgtgtacatttaccctccctagattccagtaggagagagccttgtggactgggtcatcctgaatgcttttacaattcattttgagaaaaatgattacacactgacaatgtaaaaagttttacaccatcatccaatcacaatccactgtgtatggtaagtttgttgacttttatgataattactttaaaagtcatattaatggcgaattacaattggacgacaatgtaaaagtgttttacattggctgtgcatgaccattaaactcattcattttttaaaatcactgggatgcaccttgggaatgcttttcaattctgtttcagtggttcacgccaataattttgtgatcatctttgattgtcactacttcccaattatcctttatcatttatgaagcaatccaagctcaatattgataattctgatagttttgtggcatatttaaagcactaaactcacaaaaataaaggccagtcaccaaccattctgacagggcatggcattttctgacaaaaataaacagcttcaattgcctgggaaccacattgaaaatcacat

SEQ ID NO: 16757 - DNA, 871 bp, Glycine max
  Intron number 1 from transcript Glyma01g26860.1 (locus Gly ma01g26860) derived from phytozome v7.0 (chr-ID Gm01; pos 35688397 to 35689267)
catcttctctctttgccacttcgtcaatcaaccaggtttcttgaccacctttctgtgtttttggcaaccttcttggtttctttttccttgttttttgttgttgttaccagggtatttaagagtccaccacacacaaacacaaaaatttaacgtagggatttaatcaatcaacctaatttgattcttatggacaataatcaagatgaataaaatcccattgtgttggtttcatactcaaaatcatgatgaaaattaaacgcggaagcgtatctggattaaccataatggaatgatgaaaaaagttgatgaaaatcaagattaattttataatcttcgagtagagagctttattttttctcatagttttctcttttgatggaaattagaataagacagtaatgttgtaacttctctatgcatatgggatcataatcacttctattggtcactatcatcacctattccaaatgtaaatgtaataattataagttggtcattcatcaaattataatactaatgttatctatacaattagcctttcataacatataacatatatacctttgggtataattttatagtattagaccactttaatattttttggctaataaaataatgatctaactcataattatatcaaaattgttaacatttaactaagtatcccatgagtttgagttctttgggccggttattggactaatggttgagtctttgccttccttaagaatatattatgtgaaaattgaattcaagtattcccaaaaacttaaatacattgggtttctcaaaatatggtttgccatattgtctcttgacccaatttttttacttgttttttgcatagttgccgaagactttggaggag

SEQ ID NO: 16758 - DNA, 864 bp, Glycine max
  Intron number 1 from transcript Glyma04g34020.1 (locus Gly ma04g34020) derived from phytozome v7.0 (chr-ID Gm04; pos 39856366 to 39857229 reverse strand)
tttcgaattaattcgcttctcttttatctaaattcgtaagcttttcttctgtctttttttcccttggggggtgggggttaattaatgttttcttttttgtttgcttttgagctttttgttgggttgtctttgttttttttttcaagtcttggaactggaaaaggggaaaagggtatacggggttgctgccaatgtaaattacaagtgatcttttctttatttctttctttttcttttctttttttcttttaaattttcgtatgttgatttgttggagggtgagaaactttggggtttgaatttggacacgcacgctgtcattttgattctggttttattttattttttaattcgattaattcttaaaattgttcccttttttttttcttatattttatgccgattcacctaatgagatctggtttttggatatgttgtttgattttcttttgaggtctggtgatcgtgtgtggttggatgttgtcaacgctttcttgttcataatcttgtttctgatctgtgtgcatgctctaaatttttgagccaaatcatgattgaccaagagggtgtttgtgattcagtttgcgctttcaattaatgggtggagattgttaatatctcttatttgtttgattatttgattgttgtgagatgtgcatgtcttgtttatgggtattgttctttgcggcacatggaaaattgatgcttgtggcttcatgattttagcttaaaattgacctatgttttttgtaagtaagtatttttgtcatcggtatattggagttttcttacttaattggttttaattttgatggatgaaaaataagacttttctttgtaaccagattgattcttttcgtcgac

SEQ ID NO: 16759 - DNA, 1030 bp, Glycine max
  Intron number 3 from transcript Glyma02g23860.2 (locus Gly ma02g23860) derived from phytozome v7.0 (chr-ID Gm02; pos 24261315 to 24262344 reverse strand)
aacatatccacctgcacaaaatcagtaagttgcacacctttaagataaataaaatgttttcattttctttaatataatgttcagtttataaatagttggaggatttcaaatttttggaaggtttcatgtcatggtaaattttatatgtatgcaaaacacaaaactcaatttcacatctgtgcacacaatggtttggatttatattttgtccatattttatctttaatctgaaattgcgtagaaaccgcaactccatttcaaacttatgggtgttgctatcgctcagatggccttataattgagtttaattaaggttgagaagtttatttaattaacttcttgtctatattcttagtggaactgtattatatgccgaacgcagttaactaatctgttcatatataaaaaaatatatatctcgtctaggataaatatatgaaaatactattcaatgtgggaccgaagttatatcgaaactatctaatcattagccttcaatcaaataatggcggcacgtgaactttttgacagcaaaaaagtcttattcattaggcaagagcaattatatgacttacgtgtacgtgttttatctcaataataacacgtgaactttttcaaaatatttttcatggaaattacttattattgttcaaaaagaatattttattattgtcgttgtttgatttgaaaaacttgatgctgatgatataagaaattagtctaaataattttgctcttcaaccatttaccattctaagattgattaatgatttttaaccagacagaatataattaaaaattagtggacatgtatatatatatcatagattgaacaaaaatatttactattattttatcctatgctcggtcttgaatcaaagttaattaaattgtgtctattttcattttagctgggtagcatatataactcaaattatattgaatatactctttagtctttatctaggatgacatgaacaataattaatttaaagcaattgttttgctcattgtaaattagattgcaacc

SEQ ID NO: 16760 - DNA, 610 bp, Glycine max
  Intron number 2 from transcript Glyma04g01100.1 (locus Gly ma04g01100) derived from phytozome v7.0 (chr-ID Gm04; pos 663518 to 664127)
ttatattgtaactggatccaagcaagttgaaataggtcagtaattttggttggtgaaattttctttgcagttatttatggaatatattgtatgtcatagctttgatatctgtgcaggagaagaaaaaggagggtggtatgaaaattaagtgtttatgataagagaaataggagtgctgctaggaggactgaggaaacaatgatgggaaagtgtaacagaatatacacttataggagaggaatggaaatgtgaataaacagtagtggggaatagtggcaagacagaacggaattttgggaatgagttggtagcttaggcctgggagggcataatctgtgtatcagctatgattgttgttatctgttatttctacattttttttctggtatatgtattttcatttatggagctgttatcggtattgttctggtatctgtatttccatttatgcagctgttatctgttatttctacatttgttttctggtatatgtatttccatttccacgagtttgatcttagtttaatcttaataccagctcttttcggtattgttattgaattaccatgttatttaacaggaacaaagttatcagaagataacaggaaat

SEQ ID NO: 16761 - DNA, 424 bp, Glycine max
  Intron number 2 from transcript Glyma02g13300.1 (locus Gly ma02g13300) derived from phytozome v7.0 (chr-ID Gm02; pos 11561247 to 11561670 reverse strand)
cctcccctcctattgcagaattcgaaaattggaaggtaatccaattaatccttttcgggccattggaatgaacagctccttcatcatatttttctcgaagaagacatcatcaaaatccaccaagtgcctcttttcaacatgctgggagaagacaaattgatctggaaattcaggcaaacggtgactatatggtacgctgtgcttatcaccattatgaattctattgttgataatgatcacctcaaagcacctggacaatggatgactctataaaaacaaaatctgccccctaaatttaaacactttctctggagacttcttagctagggatgtttaccaacaagtgaaaaactaactcacaagggaaccaattgccctcatgagtgtgttttttgcttgtccaatgcagaaaacatatcggcac

SEQ ID NO: 16762 - DNA, 800 bp, Glycine max
  Intron number 1 from transcript Glyma04g43080.1 (locus Gly ma04g43080) derived from phytozome v7.0 (chr-ID Gm04; pos 48710486 to 48711285 reverse strand)
acaccgtcatccacaaaacgcagcaacctttgcaggttcaacctcttctcccttttcagatcatcacactttccggatccttttattattagggctcaagatttttaatgttcctagttaaatcagatgtctgaatgttaattgggctcatagtatctttatattttagcttttatttctgctggctacctatttcttagtattttcatcatgatgcagtgtactttcgtatatgggatgggtcaatcacacactatgaatcacccttgtttttcaatttcctccattttataatttatatattcttattcccttctgaattaattagttgcttggtgaaggttgtattttttgctacaacaaaaatgatatttggacacccaaaatgctaattgacaccctgtgtaaatgagaaaaatataggtatgataagaatagagagatggagagaaaagatgagggttaatttggtgtttggaaaaaatggggtgttaaaaattcattgctcttgctacaatttagtttcaattcatttgaggatgttagcctatttattttgtaaaactaaaaccttctgcaaggacctaagatcatatcttggaatggttttggcagttaagagagtttggttctgttttgtaactggcaatggcatcttcagaccaaactaatgccaaaaaacatggattttgttttggttctgttctgtacctggcactgggttgttcactgtttgattcttgttgattgtcatttggttgtcagatcgcaaagcgcttagaaaaatttcagacaacaat

SEQ ID NO: 16763 - DNA, 903 bp, Glycine max
  Intron number 1 from transcript Glyma02g00430.1 (locus Gly ma02g00430) derived from phytozome v7.0 (chr-ID Gm02; pos 233473 to 234375)
ccaccacgaagccaccgccgacgaacgacgtgacggtaaaactgaattttgcctctttcgatctcaactctgcaaatagtagtttttctttctttctttctttctttctttctttctttctttaagtcctttattatgttattgacacaataatcgtggaaagggaaaagaaaagcaataactaaataagaaaaacaagacttattttattttaatttgttggaattgaattctggctgtcttttttttttattctttctaattttctagttgttgttagtaatcttggaatacggacacgtgacttctgtaatcaagaatgaaaaaaaaaataaaggaaataaatgcttctattgttttattttattttacttttgcgataaagttttggctggctttgtattttgttttatttaatatttttctctcaaaattcgaagcctagcattgccattgaggttgcatggtttgtgaattgcgtgaattttgaaatttgtagtctaacgagctgtgaagatgctatttgctgagtttccttttggattttctttcctaagaaatcaagtggcttaatatagttttctttctaaatggatattgtacttcggagatgttagtattttgacttcttgcaatttattcatcaaaatttgaagttacctttgaaattgaggttacttggtatgtgaattgcgtcaatctttgaagtttgtaatctaacatgctgtgaacatgctatttctgagtttacatgtgaattttatcccctaggaaatcaaatggtttattttagttttgtttctaaatggatgttgtgcttgggagattttagtgttgatttcttgtatattgatgtattcttttgttcattttttatatcatgtgatagaatcaggttcagga

SEQ ID NO: 16764 - DNA, 901 bp, Glycine max
  Intron number 1 from transcript Glyma03g03780.1 (locus Gly ma03g03780) derived from phytozome v7.0 (chr-ID Gm03; pos 3617955 to 3618855 reverse strand)
tcaacaacatcaccctcggtggccgtggaggcaccgtaagctctctctctctctcttctaaaccctaatttttagtttgccacattcaaccatgccttttgatttcattttacatgtaccactgagagttttgctagcgaacgaatcttagggttttgctcttcgtattttcttctcatttgatttaatccctaattattatcattattatcgtagaagagtacctatttatgtattttataaatgtgttgaaattttacttggctgttttagttagtactgactagtgcgggatatttgtgcattagtggttcttgtttcgttcttaaaaccctaagggagtgctttgtttattagatgaaatttgggtcgcggtagaaaacaaggttttaaattgtggtcatggttggggttttgttggggtaaatactgtcacagagaccccgaaaaccttgatgatgcggtggcagacagtttcttaaaaccttagtagaaaatagacagttgaataagttgttttctttgggatcatatttctagttgtacaaagcaagtgcaaagtatttttgttccaatttttctaccttctgtaccagtaagtgatatttcatttggtgttatgtaccatttatttaatattctgtaggaacaagcgggatatgcatagcccctactcagagttgcattgcttgttgttccatctcaactgtcgagtttttatcagcttcattgctttttgataaaaatataatgataattagagagtcaaaaaattgatttttttctagtgatttgtgcataggagactggaattagcagttgaattaagatgtgtgacacttcttttcatgtaattgagattgcagaatccagggcagataaaaatatatcctggaggaat

SEQ ID NO: 16765 - DNA, 959 bp, Glycine max
  Intron number 1 from transcript Glyma01g40340.1 (locus Gly ma01g40340) derived from phytozome v7.0 (chr-ID Gm01; pos 52078166 to 52079124 reverse strand)
attcttgcccagactgcactgtggtgaaggttagacacaattctctacatacaagttgcacatgttaaataatcaatcttgccttattcattgtgtgtttgactcattaattatgcttgaatacgtggagtgtcccctacttcgtcatttatggcttttcagtgaacatcacccatagatttttaacctgcaggcatagtactataagtactttcatgagataaaccatttagtatatagtaggaaaataataatgggaacaacatgatacatattagattaatatccattgtggacattcccacttggcgactaagtatatagtaactaatcattgtcattatataatattatattatacaaggttcaaagatatttagttgtcagtctaacacttagtaccaaaagccaatgcaaattgtggtacgtgcttgcttttttaagcattattacaaggggatgtgaatgagaaaggataaaacaattctactttgttgtcatcttataggaagaacccaagaaaaaagttcctcttaaagaaaaccaaattttgaatttgttctatcaaaatgacgtaaccgttagtaaaaagtgtctttgcctacatttatataatttatttgttcaacaaagaaagatgtgtcggattagagctagagagaggaaaaataatattatagaaagtattataaaatgttttgtatgaaatagtatataatcaaaaacaaggactcacagaaatcagaggcaaaacctgcatgccgcacgcaaccaaaaagaataaaatggttagggctttcggctaaaatagaggtctaaaacaactactaagtactaacgcgtgcgaattataaaagttctagtcttcatctcttaaaaaacttaaagattaaattcaataaaatgtgtgttgtggaaaagcaggttgatagtgcaaacaggaagggcatattattgga

SEQ ID NO: 16766 - DNA, 627 bp, Glycine max
  Intron number 1 from transcript Glyma02g43490.3 (locus Gly ma02g43490) derived from phytozome v7.0 (chr-ID Gm02; pos 48248347 to 48248973 reverse strand)
gaaactccatcaacactcctgccaccaacaaaaccgtaacccctttctctctctctacatggttctgtatccgtgtgttttaatatatgtgctgtgttcttctatctcaatgtttctgttggcgatccttttctgaattttagtaaaattgggtgtgtaattggtttctctgagctgaggaattggctctttagttctggggtagtgcagttttagataaaattttcatctttatgacaagggggtggcagtttaattgtgcttagtgccaactaacttctgagtgctgactagggctattaagagtaggaaggttggattttgatgtcttgtgattctttacattgtgtcatgctttcatgtcattgagagtctttcatttaaaagatagatatatattttgaaaatgaaaaatttagatgggcaagggtttttatgagctttgaggtgcttgactagagtttgtggtaaaataatgtttggtttcttgtttatcatcacagcaactctttctttgtggcatattttttttttcaatgttagtttttaattagttttaatcatgtaacggggaatggtatgctcccttcaggctgacccaggagtcttacagttccagaatcagca

SEQ ID NO: 16767 - DNA, 903 bp, Glycine max
  Intron number 1 from transcript Glyma02g05060.1 (locus Gly ma02g05060) derived from phytozome v7.0 (chr-ID Gm02; pos 4110571 to 4111473)
tcacttaccggattgcctcctctggattgtatgagaattctccaccccccctcttgtcaattttttaacttttacttgttttctcttgttggtactttttttttggaagaaaacttttctgggtcagttttttttatctgaattttgtgtcgaattttgagcatggaagaatatgtgttgggaaagggcagattttatcctttggagaaaaaaatatattaagcttccaagttctgagaactttatgttaatagagtgaattctgatgccaaagtgtttttgtttgttaaataaaaaaaaagtttaattatttagtatttttggtagttatatttgtatgcagttctgcacgttacggttccatatgtaaaatttgtatgtttttaacatatagagtgaatttaatgcgttttcgttcgaccaataaatttaatagtaataagctttggtcctaaagatgaatttttaatgtctttgccaataccttttgattcctaaagacaactgatcacagggatcaaaacacgttaactaaaactttttacatataggatcaaaatggagacaagtacactggtcaaaataatatttaatctaaagaaaactgagcctagctatatataagaataggagaaatgttatttgtactaagagagagaaaagagaaaattttaagatgcaataaataatgtgctgaagaatgatagatacaaaaaatgatgttatataaattattggatgtgtatcaccatcgtatctctaagaatatttattcttctcactttctgtcctctttgaagataacaataaaagtgtaatgatgagtattgttaggcattttctatgatgattgtgtactaataatttctccttgttatttggatttcagtttgcattttgcca

SEQ ID NO: 16768 - DNA, 716 bp, Glycine max
  Intron number 2 from transcript Glyma01g44450.1 (locus Gly ma01g44450) derived from phytozome v7.0 (chr-ID Gm01; pos 55121434 to 55122149 reverse strand)
aggaaccacacttcttcaattagtgcagaataccggtatgccatttgcacctcactttattttttgcttgctttaaaataaattaataccaccctagccactataccagatttgtctttttatttgtacattaaaagattaaaattttaagacttcgtatttggctgttgtggtaacatggctgggagtattttgtgaatcattaaatatagaatttcaggaatctctattttatatgtggtatgtgcaattgtgcacaacttggtgtttctttttaatctcgtatagccttagcttatgctaaataaattatagaagaatcttccagaccagttggtatggtaaattttgtcaatgaaagatgaaaagtgaagaatggtgatgcttaatttttcttttgacttgtatgttctgatttcatagttttgcataaattttagaacaaatggtgaatgggcgtgtgtaactgctttctctgtaatgtaatgaataagaagcaaaaatggtggccaccgattcatttcatgatttttaggttattttggtgctaattgtctttcaaattctgtgtccttggagaaatggttggaaattgcacgtcactagatcttattggttgcttgttttagaatattatgcaaagatttatcattctttccatttactgtctccattgtatagtgataatagaggaggtggaggtggggattttgttg

SEQ ID NO: 16769 - DNA, 286 bp, Glycine max
  Intron number 1 from transcript Glyma01g44450.1 (locus Gly ma01g44450) derived from phytozome v7.0 (chr-ID Gm01; pos 55122221 to 55122506 reverse strand)
gcaacttgtttcgctccgttctccgtttcaggtgaatttctccctctctgtattaacccttcagaatcaacaatttcattttattttatcacagtcattagtgccttgatttttagggtttcttctggttttgttaatttacattttctttatatatataccgatgattaatccccatcagcgaatcttggaatgtaatacttaagattattttttctttaattcaatgttttgaattaatcttggattgtattttttggatttaatttgggagtaggtggatctc

SEQ ID NO: 16770 - DNA, 902 bp, Glycine max
  Intron number 1 from transcript Glyma02g13080.1 (locus Gly ma02g13080) derived from phytozome v7.0 (chr-ID Gm02; pos 11315791 to 11316692 reverse strand)
ctatcaaaagttttctgctgattctcgaccttcgggtaactttactctctctctctcttcctttctggggtttcaatttttttccaattttttctattatttgaatctaatttgatagaaatcattaatatgcaaaaggtgaaatcttggttgagactcgggggaattgtgggtgcagttagtggaagattaaggagtgggaagatggctattactgatgattttaaagttacgattttgagtgtgagatttagttcaatttatggagaatttaactgattcaatttgtttatgagttgggttgaagttagttgattgaaggactgtttagcgagaattgctattttggcacagcactagtgtttacaagtttaaaggaaagtaattttattggctaaacaattttttgaatttgaagatatactatgcattgattgatggtaactaccagagcattgggtttattcccctttagttttgtttttctctaatttgattgtttccttttttattgattgattatttaggttaaggttttattattcaattggattgaaatcacttgtctcagtttcttgttccttcaattaaaagtgaaagtgatatgtggttaaaatggaacattcttgttcctatttgtagtttttcttatcggttcacgcgtcgcttttttttttctttcttttttttattatgggggaacaggaaagggaacaagaaatgggaagagaggatttggttgcattcaattcttctattagaagaagtacatgaatatgacctctttccttttatttttgtccttccccagtccagtaatttgcttctgggatatgttcttgttcgactaactagcacattggttctatcttatcttccaatttcaggtctgaatttaagaa

SEQ ID NO: 16771 - DNA, 678 bp, Glycine max
  Intron number 2 from transcript Glyma04g10920.1 (locus Gly ma04g10920) derived from phytozome v7.0 (chr-ID Gm04; pos 9193796 to 9194473)
aatctagcttcatacaagctggggtaaatgaatatttattctccattgaaaatggtgtagttaaggattttttactttattttttgtggtaattatagtcctattccactaattcagtgcatgttagttataaaattgagcattcttaaattcatccactttgcttaattttgataaatgggtggggtatctgcattgacttaacttcactgcttactctaatagtagtaatattaaaatagatatcattattaaactatcttcaaggtattttcttcaaataatgaataacaatccaaatcttctctctttgcttgaaatgttaaccttatttatatctgaactgttctagcatttaccttgctctacaatgatacaattgtttgtctttaagtgccagaaaatcccatgggattattgaataagtttcttgacatctttggctaagcagcatctcctcatctacttggtgggtaattatattcataattttcttgtaccctgcattttggagggttttgtgatagattttctgataggttatggtggtactcaatgtgaactttagttcttaaagtttgatttaattattccttgtctaaaatgttctttgattaaacatgttggcattctaaatatacaggttagaaccatactggacattggctgtggttacgg

SEQ ID NO: 16772 - DNA, 315 bp, Glycine max
  Intron number 3 from transcript Glyma05g28040.1 (locus Gly ma05g28040) derived from phytozome v7.0 (chr-ID Gm05; pos 33937783 to 33938097 reverse strand)
tttgaggtattttcattcatggcctttttttgttcttgtcatttgttttctgtttttctatttggctccacagaaagaggaaagagaacaaaactttgagcttttttgatagacaaacctgtttgtttttgctggtattgttattattaataatgataggatcatatgttgctatgtgaagttcctttggcattggcatttttattgggaacttgctttatttctgcgtagtatcagtaatcttcaagttattataaatacattttggggcttttgacagctttgatattttacgtgactctttgggcttggttc

SEQ ID NO: 16773 - DNA, 718 bp, Glycine max
  Intron number 1 from transcript Glyma01g06630.1 (locus Gly ma01g06630) derived from phytozome v7.0 (chr-ID Gm01; pos 6987484 to 6988201)
aaaatccccgtcaaagcttatttcctctccaccaggtacctccccaataccctatctttttcaagttccttagtttctctcgccccttttgttattttgtgaaatgcgcaaatgggtcgttttctgaatctcgtttctctgctgttacttatggcttccgttactgttccatttaggaagaggagaccatgctgagtgggagttaaaatttttacttttagctttaaacttagattttgaatttagagttttatggttatgttattattttttaattcatttgtatgtgtaaaatttgcagcttagcttaattatttgtgtgtttataatgtatagcctttgtgtttctgtttatcctatggtttactgttataacgtttaatgttggatttagaaggctgtctgtgctgttttgtgcggggattgaatttttgttgcatttatgatattagattgggaatttggaggttttttttcttcagtttattaaagtgggtaactttaatgcttgtatgtggtttataggttttgaggttttctgggctttttttttagtgatgcattttgtttttccctatttcacgggtttgaattgaatggaacccctctcctcttacatgtctttttgttgtcctgttcttggtctctatgatttggctgtctcagattcataattttggcagtataaatttgaagggcattcaggctgataatcaca

SEQ ID NO: 16774 - DNA, 549 bp, Glycine max
  Intron number 2 from transcript Glyma02g46270.1 (locus Gly ma02g46270) derived from phytozome v7.0 (chr-ID Gm02; pos 50280150 to 50280698)
caaagtcattcacttgaggtatttgaactcttgattaattattatataagaaaaataagttggatacagtcaaactctaaaagcacataagaaaactgtatttaaaagctatgtcttatagaccgttgtgttccttgagaaacatttgatttgcggaagacaggctttgggttgtgacttgattgtgctagttgttttatagactgaagatacatattttgcaggaaagtaatctataagtttctaaaatcattggaaaattatgggttaatagtgtgaagcattggatcccagagaaagatctccaaaatgcgcgaggcagcatatatggacttgatggattagtatcaggtagggtgacctcctgtgaagctccatcaaggatgcctcggtcacgctctgtccaaaattgaggttggctgtttgttcatttgtgttttgttcttgtcagagcatcatgatacttttatgtgtgtgttttttgggttttagtttcttgctttaacagtattttgtggtggttccagaggccatttgtgtgtgctgtcg

SEQ ID NO: 16775 - DNA, 797 bp, Glycine max
  Intron number 2 from transcript Glyma04g24070.3 (locus Gly ma04g24070) derived from phytozome v7.0 (chr-ID Gm04; pos 27658102 to 27658898 reverse strand)
aggagaaggagaagcgcccgaagcgcaataaagtatgtgcataaattttctgtgctgttcgaaccgttgttctctgtgttgaaactacttggatgggtactatggaattttacagcgaaatatggcttcaaattgaaagttaagaattgggtttgcgtgtttgttttcaagtcattccaagtaaagtgaggaaactggtccaaaatgttctttatctctttatgtctataggctgtgaaaaataataaaagagaaaaggaattggtaaaagcaattgcctttgctgtgctttcatgagaaaggaaataggggaccgcatgtatgtaagtacgtgaaattaccctcatttaaccgtgtgttagtgcttgagccttgagaaattcattggattttatatagttgtgaatgtgatgttaggacttgggagatcatgaagatgtttatagcttgtttgatttttttgtttcctttaagctacacattgagttactgcagttggatcatgccatatggtagtattttggtttttgtttgtaaaagaacatgttattccctgttttctttcactttcattatcaatttctagaggcctctgcctggtgtgctttaacatcgtatcatgttcaattataaaatggatactccgagctatgatgggctgtcagtgccataatgttaatgctgatgttactcatagcatagatggagatttgttagctaattatttttggatgtctgttatgcattgtgggaaatttggagtgatcttaatccaaactgtcgcttattggcaggat

SEQ ID NO: 16776 - DNA, 815 bp, Glycine max
  Intron number 1 from transcript Glyma01g35480.1 (locus Gly ma01g35480) derived from phytozome v7.0 (chr-ID Gm01; pos 47964395 to 47965209)
actacttggtttccccaacccagtctccatctcaggtacaccttatgattcataatcatccattctgcacaaaatgttttttttttatcttctttttaccagcttagatcgtctgaatgtttgtggggttggaatgaagattctgttttgcctttggccttagaatttaggaagagttattagattgtaatggaatcagtgatatttttggtgattcattttgtgccacttgtgggagatatgtaaagtgcaggttaacatttttggttttccttgtgttgtattctgattctgatgaaggttttaatgaactgtctgtgtccgggattttggccgcaacatcaaagtttttgagtcactgcaattgtggccacatttgttcataatttcttgcaatatcaaggatcatgaccacagctgcaatttaaaaccacctccatggaaatgcaagtttatggattttttagtgtggaaaccaatgggaatgggggcattgggatttttcactgcggaaaccaatgttcacatataattcataaattcaagttatttcttatatatgaaatcaaactgtttttggttctatgattttcggaataacaacatgaatagatatagatcttatattggtgagtgttaggttgaagtgaaacaagagttggaaagttgatatgaatagttcattcattcaccggtggaagggtttcctttatcatgtatgtttgttgacttatcgatggaaagatctgaatctgttttcctcgttcttctctatgcgtatgtttatcgttctctctttgttggatttgtgcaga

SEQ ID NO: 16777 - DNA, 807 bp, Glycine max
  Intron number 1 from transcript Glyma03g40280.2 (locus Gly ma03g40280) derived from phytozome v7.0 (chr-ID Gm03; pos 46077079 to 46077885)
tccttttctcttctctgtctaaggggtgccctgaggtattatgctaagctcctcttttttctttgattagttttcattttcgtttcttcagtttcccctctgatgtttatcgatttcgtttcgttttcatttttcctccgaaatctccattttcgtttttttcttcgatcatccgcagatcgcatctttatttttccttctgttactttgtttttcttcttcttagaaatagaaatagattttattttaatttttttgcttattcatttattttgttgaactcatgctattatgcatgtggaatttggaagaatttgattcagtagtggatttttcaagttccgtttggtgttattagactgatctactgaatagccagctagtttgtgtaatttcgaatttgaggttttgctttttgacatgataatctgtgtttacttacggtcagctcaatcggttccttctcttattttggattaacatcagaaactcaatcaattggacataattacacatggataccgaaagttttagagtttgtaagatcttttttgtgtttggattgccttctaactcaattgactcggttacctgtggtcacatcactacctaaaaaaaagtcatcgacatttatcttttaatcttgactatttaagtatgattcaatggtctatattcaccgttcttatttattataatatccacgatttcttacctgatactatgtatgtcacgtcacgcgtcagtattttactcttagatgttttgttttaaatggctgttttcttgttcagatcacattgaaca

SEQ ID NO: 16778 - DNA, 902 bp, Glycine max
  Intron number 1 from transcript Glyma01g43650.1 (locus Gly ma01g43650) derived from phytozome v7.0 (chr-ID Gm01; pos 54610704 to 54611605 reverse strand)
ggtaatcatctctttcttcttccaattgctttgcccattaactgtgccattgcacaaagttcgggtcttttacgttgctgctgaatgctgatgagcattccttctcttggacgtgaaatgttccattctcatcgtttgattctctggttcaagtgtcatttcgcttgccttttcacggttttccctatttttgtttttttatgtcttgctgtgctgcgtgtagctgtagtccaattacttgaagttactgtttatttgctgttttcactcgagtggttttcgcacatttcatacctatctgcattgtatattgttttcaagcatgtgaagtcacattccttttgaagagtttagagtaattatcacaatatatctaggaatgatttttacaataatttataatgaaagtcaatgatacgaaaatccatgactgattgacaatactgttgttgtattctaattaaattatttcttgaattgggagttctgttgaatattaacttttttttgcaacatccaataaattgctcctgtactatactgttttgaaaattccatgctgtgacgcatgatttgtgtcaatacttaaggtagtctgaaatctgcaagactgagttacagaatccaaggtttttggagtttgattgcatttattttatacctgttttgagcgttaccacgtgtttatgattcaccgtgtgcgctactatgagcatgcattgatggcaaggcttatgtgtcattaacatgcttgagcagaagtcttgttcagaatgcaaagttgtatttgttaaatagatttgtttctataattttgtttctggattgttgggtttaattgaatatagaactgatatatttatattttttctcttttatcaggaccgagagaggaacatatt

SEQ ID NO: 16779 - DNA, 549 bp, Glycine max
  Intron number 1 from transcript Glyma01g41190.1 (locus Gly ma01g41190) derived from phytozome v7.0 (chr-ID Gm01; pos 52778315 to 52778863)
ttggagactcctgcaggtatatatcataggctgctcattttaacttattttaatatgttcccttatactcctgtgtttaattttgatgttgtgaaagaaaaaaaaaaaaagcataatcttactcttagattgattttgggtgagcaaattgcaaaattattttttaatgaaattgattttgatcataattgattatgaagtacaatgatatattttttagtgtttttaatctaagaaaaaatagtagtaaaacttagtataaaagaaattgatccaatgcaaaagctattaaagttgctttaatttgaaatcaatttcttctctagaattaatttttcaacatagaaccaaacttgtgaatatttacttaagatcaaatgaactagtatttcgatgtgattttgaattacttaaggtgatatcaatcacgcaattaagtttatttatttataatgatatagcatattgcttgttgtacttataaaataaaattggggattaattttgttttttattggtttgtcttttttttagcattcctctacctcc

SEQ ID NO: 16780 - DNA, 767 bp, Glycine max
  Intron number 1 from transcript Glyma04g42880.1 (locus Gly ma04g42880) derived from phytozome v7.0 (chr-ID Gm04; pos 48501385 to 48502151)
tccgctacaggttctttctctctctttcattctgcttttgtttttacttttttctccaccaaaattgaaatatgaatttgcttctttccaaatgaatacccgactgtgctatttttgcattccatccaatatcccatcacatgttttcggattcttttgggttaatatttgtttcctttgatgcccttttagttttctcaacttttttaattaccgtgtaaagtgtctaggccatgtgaaattggaattctaacaaatattctttcatatagatacacttgaagattgaacttttgatcatatacttaagatgcacgattatcttacaaataaaccatgttagttggattgtttattttgaatctttatatcatttgaacacaggagattcattttaggtgccgttaacaatctaatctattcaaaaagaagaaaattttgatgtaattcacctatgtcactatttggattttgcaaagataattaatcccggaggatctgtttgcaaaactgacaacatgaccaatgtttttagaaaactataatcaaattgccctaagtagttatagttcgctaaacctttagtttagaaaagtaggacaggaggtagcttcctcttcttctattctttctttcttagtatttttccaatatttgatgatgatttgaatggtctagcctggaggaaattcttttctttcccaattgcaacaattataatgtctatatatctatctctaattttggcagttgtggtaaatgcagct

SEQ ID NO: 16781 - DNA, 577 bp, Glycine max
  Intron number 1 from transcript Glyma01g42330.1 (locus Gly ma01g42330) derived from phytozome v7.0 (chr-ID Gm01; pos 53608885 to 53609461 reverse strand)
atccaggttttgataatatttctcttgtcacatgcatatcatgtgaattaaggagcttaaattgtgggggcaagaaatggaattagaaaagttataaaggcagaattacagaacatttcatataaaataaagtgatggaaaaataaaagtaaagtcacaattttctaatcaaaacatatttgctgggcatgtatggaggaggggtaatgcacccccctccagcccactccctcccttcttctgtttagttgtacactacttccaaatggtgaaccaccttcccaatccatcaaatcacagaaatctaaaacggcaaaacatacccttaattagcaaaattttattgtagtgtgtcctgatgatcactgactttggcaatggtagtggagcatggaatagtgtgttgatcatatactcaagcatttcatagatgcatgtacatctctattaacataaatacatggatgtgagcttttttcttttcatttttattttgcattaagatgtagtttttttcccattttagtttctgacttagttttaaactttttgttagagagctcaggttacaagttta

SEQ ID NO: 16782 - DNA, 866 bp, Glycine max
  Intron number 1 from transcript Glyma01g36300.1 (locus Gly ma01g36300) derived from phytozome v7.0 (chr-ID Gm01; pos 48789870 to 48790735 reverse strand)
ttctgaatcttctcaccattcaccggtatattgattagttctgtgtttttctcatccgtgcgttgatgtgtttgtgttgcttggaaaaggttggaaattgaggcagtgaatgatttgtttagcacagcaatgtttattgttcagagttgtggggttcatgcattttctcaaaaccttctattgggtttctctgattggcttttcatgagtgaattatgaagatgagactgttttgagttattggggatgtttgtactttgtaccacctgaaagcttctctctcttttggatcaccatgaaagcagtttacacattttgctgacttgaccttttcatatcactcttaaaataattcattgttttatgcgacattggaagatattggtcttcaggtattccccaatactaaattgttttaattgtttggttttgactttcatgctaattttgctctacaaaggatacaattgctatttataaggcctaaaggtcatccatcattctaaatgcaaaagtgcagttgttgaatttgtgtgctcatagcatctgaattggcatggagacttatgtgttctgatgtgaatcaagattggttgactggttttcaaaattctgaatcctcctcattagtatacatctgcattttttttttccatatatagatttgtttctattttatatgtccttttccttttttggttttaaatgcaattcatatcagtcttatgtttattttttggttaaattttaagatgttgggatctttgatgtttgtaccgtagacttctgaattttctttaactgatacctgatgatgacttggcattgtagggaacaaactacacagggatattatcataataatc

SEQ ID NO: 16783 - DNA, 796 bp, Glycine max
  Intron number 1 from transcript Glyma01g05160.2 (locus Gly ma01g05160) derived from phytozome v7.0 (chr-ID Gm01; pos 4825555 to 4826350 reverse strand)
ttgtaaaaatgtaaatttttttatctcttggtcacagggttggatataatttgacagttttctcaaagtagtataatatatgtatttttttttttttggggggggggggggagggggtgttgtgttttttttttttttgttgctgttaatttttagtgtttgtacatttcagcttgaaatattactacaagggtttagatgcttcaaaatatcatctagtaattttatgatcatgggtttttttattttagtctatttgtcctccttcaatttttagaatatggattgttttgagaattgaagtttgattgctttttataagtaagttgtcttggaatcgtatgaaataaggagctcagttcgttcccatctttatatctgaagttttataattttgtgtttatttttttatgttaaaaataagcgttacatcaaaatggtgaggcaaacttttaattgagttataaacaatttaaattttaagtgggagagtttggagttcataaaataattaaagtggaagatttggctttgtttttctgtgattatgtggattgggggttgaaatcatgaaattgagttataactaaagaaaattgctgttgtgttgtgatgcacaaagtatgaatttcttgttcagaaatgggtcctagtattgttgatggttaaatttgaaagcttttttgttttgtttttttggctcttgcttttgtctctgtaggcactatggattaaccttgtttgtctcccttgtctttcagcatcaggaatctcaaaaactactccttccagttta

SEQ ID NO: 16784 - DNA, 363 bp, Glycine max
  Intron number 1 from transcript Glyma03g14770.2 (locus Gly ma03g14770) derived from phytozome v7.0 (chr-ID Gm03; pos 18945525 to 18945887)
agatccttggtggtggtcaaggcatgccattttctcttcttgttattattagttttgattgaatttctcagctttattggtgatttgttttgatctgtatatcacaatcttttctttttatttccttggtgttgtttgtttatgttcattttggtactgtttttaactgtggaatagctatatgggctgcgcctgtgcttgtttgttttagttatttatttgcatttagtaccaatgggaaatgggtcagaatcagaagaaaataatgaattggtaattgatcatgatctttgaatctatgctgaatcaatgccatgcttcaacgcagttgcagatttaatactgtggaggcggaagaacctt

SEQ ID NO: 16785 - DNA, 624 bp, Glycine max
  Intron number 3 from transcript Glyma04g40230.1 (locus Gly ma04g40230) derived from phytozome v7.0 (chr-ID Gm04; pos 46354800 to 46355423)
ggtctcgtttacaagaagtaggttactacgaagtggattttattattgtgataactctattaatttattatgtctaacttcctgctttgtatttttcttttttgggaattttaattttcatgtctgcatagtatagtatggattgactaaaaaatgaacttttttcttctgtaacgctgttttattcaaaggttttcatattcctcttttgattgatgaaagtaggaaatcaaaacaaactatctctctctagaattaaacatcttgtatataagatatattcattattgtgaaccatttattgttttgtttgcacactcccacttgatcatttttaaataatactgggatataccaatttactttgcaactttggatatctccatacaataataatgttttagcatgttttgtagttactcttatttgtgttgtttataaaaagaagcttttgtgccttaataatcttggattgtccacaaaatttccaaaagttataactttttttccgtaggaactggtttgatcttctctatcaaattttcttctttattttcatgttctatgatccatttactcttgcttgtaggtaagaagaggggtagatagagctgaaatcaacag

SEQ ID NO: 16786 - DNA, 795 bp, Glycine max
  Intron number 2 from transcript Glyma01g20700.1 (locus Gly ma01g20700) derived from phytozome v7.0 (chr-ID Gm01; pos 25222964 to 25223758)
ggactgtcacccttgcttccattatataccagatagtaaagaccctcccctaactctttcttgtgttgaagtgaattgagaaagtattatacatatgcgttacaactcagattttaacttcttggtgctacaataaaacttaagtcgagttctttatattcttaccattaaacttaaattatttcacttattatatatatgtacttttctagatatcttctctctctctttaatttatctctctaagtgtcttcatgaggctgttcatccattattttgcatatggatatttttaaaaatttactactcataatagaggttttatattcagtattaaaaaaaaaaacattcacatgccatatttaatttgataacttctgaacaaggatacatgcatatataggattttatataatcttagtgcgactctcagtatactagctttcttgataaagcaattgattgcaatatatagatattttattttttcacgtgagggtatatagaggttagaacctagcaaaaggtcacactggtctcttagcacacgcttagtataattcaattgattagagatagaataaaaacattgaagtaggtgtaaatttaagtcttattcatgaatgattaatttaattcttttactttttataagtaaattacagtagatcctttgattttttttcgccaaacaagttatgtcacataaattgtgtttcccacttgaatgaatgtttacaaaagccatttattccctaatttgtcacttttttttcttttgtaactaatcagggg

SEQ ID NO: 16787 - DNA, 1013 bp, Glycine max
  Intron number 1 from transcript Glyma04g21090.2 (locus Gly ma04g21090) derived from phytozome v7.0 (chr-ID Gm04; pos 24098978 to 24099990)
gtctctggagttacaccacagccacggaggtttgtgtctgtaaaacttgaatcctcgtctttccaatttttgtgttttgttcttttgaatcaattcttagtcctttttgttttcctttctatttcagaattaattttattgtttagtgctttttcttttttttttttgtttcattactagtcatatggttctcaataacatcatctttattgagatttactgtatttttattttgtctcttttttgggggatgttctggagttcctctgggggtgttttcggtgctgtgttttgaacaaaattgacctagttctgacattcacgtcaaggcataaatacgttgatacttgcattaatgtgatttcctttttctaatccctaactctttagactgtcgtctttgaacaaattttaagcatcaaattgagcaccagttatttatctcatgttggtttctttattaaacaaaagttctccaatgttgtttctttgctttgctttatgttttgcaatcccattgaaaagtcaacttacccaatagcttaggtacctgcgtttcttgtgttgcttgagtttcatatcactggttttggaaatgaaatcctatttccttccttccttttcaattattttaaatggaacagaactcttctaagctcccatatttgcaaaatattctggccttttaaaattgttcataattttgacattctagaaaactggataatgtaaaccagtcatggatttggttcaacatgtttgtttccttttacacttattcttgagctcgtgaagacttgaagtactgcttctccttctaatttagatacttaattatggaattcctaaatgttttcataatcgtacctttgatgtctggttcttcatttactctgaacttgttatcattacaggtctagtccacttaactgagtttttagatattgatttcaatttttcaatatttgtttattgcagctctaggactgctcattaggtagttttttatttag

SEQ ID NO: 16788 - DNA, 651 bp, Glycine max
  Intron number 2 from transcript Glyma01g09520.1 (locus Gly ma01g09520) derived from phytozome v7.0 (chr-ID Gm01; pos 11696026 to 11696676)
gagaaactgttctcaaagaggtgttttttttcttattattcattcatcatcaaccatttgcttcttcccttttgttgatgttcttttttttgtaatgtgttattagttttaaggttatggataagtgacaattgtcaattgacaaatttatgccttgtttattgattactgttttgaaaaatagttctttgttttctataccgataagaggtggctcctagaagatgatattgttgatcaatcattccctaagaacttggacaaaaaagcatttgaagaaaacacaagaagagaatgggaaaacatttcccagattttttagtattttggtttttaaagcgcttgttttgaaaacaattttcaaaacatgatggatgttggttgagaaattgattgctgagtgtagtgtgaatttgttttagaaaacagtttttaaaacgaaaaagtaagaagagaatcaaacatggccttgctttcttttattttcaaattcggaggtgttttttcaatatttaaacacttgtcttgtggcttgtgtagtttaatgaacttttctataatctggtctaataacaacatggttttgtgccttaattatgaaatttgtttccctaatgttatatcagattgaattggaagatccgttggaaa

SEQ ID NO: 16789 - DNA, 192 bp, Glycine max
  Intron number 1 from transcript Glyma02g10410.2 (locus Gly ma02g10410) derived from phytozome v7.0 (chr-ID Gm02; pos 8313749 to 8313940)
caaaaacaacgcgttttctcttccccttcgtatctgtaagcgtgatttcttcttcttcttcttcaccttcgtatcgttgatgcagcgttcgattcattctcttctgtatcatttttaattttcggtttttgattattatttattttaaaattttcagattctttgcgtttgtttttggttgattgaaggcat

SEQ ID NO: 16790 - DNA, 697 bp, Glycine max
  Intron number 2 from transcript Glyma02g10410.2 (locus Gly ma02g10410) derived from phytozome v7.0 (chr-ID Gm02; pos 8313951 to 8314647)
attcgttgctgcattttaatcgatttatccaaccagttacgtgctcttctcttaatctctctctctctctctctctctctctctatatatatatatatatatatatatatatatatatatatgtattttattttgtaatgattgtgtggtttctagatccaatgaacttttttccttttctttcttttttatttcgtttgtcttgttcgattgctttatttgattttcgtcctttgtttatgtttaatattttttcgtatgattctgttattgtttgcttctgtctctcttcgctctcctcttgtttgtttatttcattgatttttcgtgattattacttgcttttcgtcaaatgagatttcgatgccagttggtggattcgtaataaactttttttattggttatgtacttgggtcacttggctttccttttgtcatgtccaattccaataagtgtactagatatgaatcccatttggattatgcaggcatgaaaagccatggcctttcctaatattgacaaatatgatacagccgggtgtatggtcacaaatgtgactaaattgggcctaaagtcattttagttccattaaccctgcttctcgttctcgtcgtttcatgattagggtttataaataataaataaataaaatatcgtagacacatgtgaatgtgtgatcgcggtttgttgaagtag

SEQ ID NO: 16791 - DNA, 724 bp, Glycine max
  Intron number 2 from transcript Glyma04g10750.1 (locus Gly ma04g10750) derived from phytozome v7.0 (chr-ID Gm04; pos 8999831 to 9000554 reverse strand)
ttcactcttcagaaggttatgttatgttatgtttctcttcgatccttttcctctttttcttataaccaattctgaataaattcaaatctaatctgtactttataaaatgtcttgttatttattgatgaatgcttgctatttctaagttggatagaacaacaataatgggtggatttgcaaggcattttgctgaatgcttatttcatggttcttaattggataaacttctccgtaagcttcaaggagaagaaaataagaacaagaaatatattgggcctgtttgggtaagcttctttagaagcacttctaagagaagaaaataagaagaaaaaaaatgaaatgagcttctctgtaagctaaaattagctcttcattaactaatttgtagaagttttctcatatagcttatctgaaatagagcttctttataagctaaaattaacttatgcatttaactaagctctttcatctaacttctccaaaagctgaggtacatgagttgatcttagctaatgagaagttcaactcattttaacttcttattttaagtttatccgaacaaggcataaatgtttaagattatgttaaatgtgagcaaccaaccatcactgaaatgcttgaaagatgggtgttggtgtaatgcccaaagatctttgttctcaatggcttagctaatttgtttcttacagatagcaggaagttgagagggttcgtggtgaaagaa

SEQ ID NO: 16792 - DNA, 733 bp, Glycine max
  Intron number 1 from transcript Glyma05g27360.2 (locus Gly ma05g27360) derived from phytozome v7.0 (chr-ID Gm05; pos 33251872 to 33252604)
aacacagtgcccacaagtgcgtttctctttctttccttttttaaacctaggccatatgttgctacgccccaaagacaagattttgatacatggttttgtcttgtttttttctcgactctaacttttcatgttcaaatctgatgatgttgttgtcccacttggatcaggttaaactttggtgagttgaatgaatgatataagtttttgaatcattcattggaatatttgaatagtataattaaaaagaaaacataaaactaatcatgagtagtaagctgaaagtgccttccaaaaactgttttttaatgcaatcatgttgtttattctgttttttcatcacctaagcataaaaaaaaataccagctacactttgccagtttctttatgcctgaagcttccttacaacactctcaatagtaaatattcatgcctgaagcttccttaaaacactctcaatagtaaatattcacaattggtgtctctactgagcatttttacaaataaaaggatggtggggatttgctttttttttggctgtcagcttatctggttggtattgaacatagctttcttttggttacttgtttagttggcttttcttttcacacttttcttttgtatagattgttaattgttaatgagtttaattaattgcttttggtcaaatattgaagtgatctttcctgtctcaaatgcagttaccatccccttccgattgtattttctcaggcaa

SEQ ID NO: 16793 - DNA, 868 bp, Glycine max
  Intron number 2 from transcript Glyma01g34630.2 (locus Gly ma01g34630) derived from phytozome v7.0 (chr-ID Gm01; pos 47068059 to 47068926 reverse strand)
aaatcttctgcgacgaggtccctaaaacctccgaggtacttcatttcaattttaccgtctttattaattttggctgaataattgctctcttttttatttttcaaaattatgaaatatgaattgctttgaggaaaaaaaaaaaaaagactcaaaagtctaagccgagtgatgtttgtgagaacaaaccacaaaacttagacgcgaaatttcggaattttaatcctaattttattagctgtctgtaatttcaattttgatgggagaagaaaactacgggtgtgtttggacgagcagttgcaaaattgattttggagtgatatgatttatgttattttaaaaatgagttaatagaaaaaatcattataattttttttattcaactcaaaagctacctgaagttaactcaaaatcaattcctagtactaaacatgtgattatttacctgaaattatgttagctactatttcaacatggtttggatgttttaacttgaatccaaacatgcactgaaagtacctagtaaactgtttctatgttttatccgtgaacaaagccattgcatcagttgcccaattttattggtggaaatagattgtttgcattcatacagttatgaatcgaaaccgtgagatgaagattgtagagtttgtattttaagttgaatttaccttaatatctgattttcatccaatgtttctgattggctgataacatgaatatctggtttagcttaataatggttaaacgttgtcattcttgtcctttatctgaggttttacatttggtttttctgtattgaaggggggtgtaactaacagttaaattatcttgtgtgtgaatgtgtttcaatccagaattttttagcgct

SEQ ID NO: 16794 - DNA, 497 bp, Glycine max
  Intron number 1 from transcript Glyma02g38710.1 (locus Gly ma02g38710) derived from phytozome v7.0 (chr-ID Gm02; pos 44068366 to 44068862)
ggagccttgggacttgcctggtataaaatacttcttctctttggaaatttgatttcggttttttgtgtaattgggaaagttttagtcttttgctttactaatcatcttttgggtgctgttgatggattggttcttcttttttatcttgatttttcttttgagctaaacttaagtactgttaatctgttattgttgttctataatcaaaatcagcatttttatcttgttgattaatggagattataaaaaagtgttggttttaattggagatcagatatctatggtagtgtatttaagttttatccttgttttggggcgaaaggggtagtttggaattgttggatatggaattagtggtagtaaacattgatgtggaaggtggctatgctgtttgatttgcttatttttttttatatttttccttgttgggtttggtgggggttgggggtttgtttgttgtagatttgtcagtggtacggaacaaggatccagagtgg

SEQ ID NO: 16795 - DNA, 729 bp, Glycine max
  Intron number 2 from transcript Glyma02g38710.1 (locus Gly ma02g38710) derived from phytozome v7.0 (chr-ID Gm02; pos 44069089 to 44069817)
gtaccaatcctggacaggtctagtctgatctcctacttttattgtttggtatttttgcttttgatctttgttgtcatagtgttttgacactgaattgttgtgaactgtagcagttgtattcttttttccttgactgaagtgtataagatgttaagctagtttttatccctcaatggttgattagatgaatgatgatttacgtttcttcttcttcctatttggtttgaggttggttgatagagtgatcactttacatatttgtgacaattgaataacgcaaagtcaattcactctgctattagatttttgttttaaaatatttgtttcttgtcttgtttgttaagtcccaggtttgctatttcactatatttgtcatggtttcaatgtctgtaagaagctcttgtttgctggactttgagtcaaaccatgttgactattgtatctaatatctctttaaattacttctccacctagttattttgattctaaatgttcttggttttcttatgttgcagttttctagttcaatgtactattatgcatttccattaactctggttcaactgcttgtaacccttatgcagtagtacctacaagtctatatatattatttaacataaagctactgcaatttatgtttatcttagattatagtgtatatgatgatgatgatcgtgatatgttgctgactttttcaatttgattgatttgacttatcacagaatccat

SEQ ID NO: 16796 - DNA, 880 bp, Glycine max
  Intron number 2 from transcript Glyma02g44360.1 (locus Gly ma02g44360) derived from phytozome v7.0 (chr-ID Gm02; pos 48948742 to 48949621)
actggtaagcttgtagaatggattgtttggagtgtgttttgcttgtttctatttagataaatatttttcattatgtttttctgtgtttgatttttattgttctccaacctctaaatctttcagcaacaaagctcttacattttttgatattgtaccaatactcgtgttagattagtacagattttttcctttaacatggctctacatctaaggtagaattatagtaactcaagtgagccttcttcctagcaatttggataaactttatgttttggaaacatgtactctccaaggtgaattattgtttagtatttctatccttctgaggattattttcttaaaaaactgtgttatagattagcagtctctctctctctcactctattttctgcttttaaatactttcttgaaacctttgctattgttgggcttatcaacttgagtcctttgacctgctaaagtcttttgcttgaatgactgtcagcctatgatctgaatattatttggagttcatcatctgcttgcaccctcctgattttgcttcatataaaatttcactgctagttatcatttctccattctgtaaattttttctggtggattggaattctaatcctgcctctttaattgcacaacttttgtgttatgcaattttctccttgatgacataattagaatcttacatttgattgtctattgttttcttatatttagtggtgctcaccaagtaggctatatattcttcagttgcaaactgtgttactgtcagttcttggataacatatgaattgtttagtgactgatgatgatgaatgttgattcttctggcttctgtgtgtgtgcaggtttaaatatcgaagtggacagaatattggagatt

SEQ ID NO: 16797 - DNA, 477 bp, Glycine max
  Intron number 1 from transcript Glyma03g39480.2 (locus Gly ma03g39480) derived from phytozome v7.0 (chr-ID Gm03; pos 45546303 to 45546779 reverse strand)
attattctcacctctgactgtaacttttccaaacggtattcttctttctgcttattgctctatgtagaatgcttggcaataggttgcttatgtatgcaaactatgataacaaaagatcttaaaattgtgattgtgtttatggttgtggttgttgcggtatgccatcaaatacggttgtcttttaaattcacaacgtctgatcagtgtttaggacttggatttaggccctgttaggataaagttctctttgagcaggataaggaaataacaagttaaaatgaattgagtttttctcataagctaaaatcgatttatgtacttaatccgttgaactattctagaagctaagatgcataatgggagaaattcaatgtattttgcgtttttattttgatatgcgtgaagtaagggtgcaagtgtttaactgctcgtatggttccaggtatttgaagtacttgacgaagaagtacttgaaga

SEQ ID NO: 16798 - DNA, 369 bp, Glycine max
  Intron number 1 from transcript Glyma03g05010.1 (locus Gly ma03g05010) derived from phytozome v7.0 (chr-ID Gm03; pos 5263111 to 5263479 reverse strand)
ccgccggcgaacccattgtcacactacgccggaaggtttgaccatatatttattttgatttcttaatttatcttattatttagagcatgttttattttttgattaattcttaaatgataatttgaagaatatgaattaacaaacttatatagtttctgggattggatatgttgtttttcttttcttacaattaacgtacaattaaaattattacatagatcccctctctaattttgtttagaaactagtgttccttttattccttgaataaatattcctttttcattttcttttaacactgtatgtttatagatatgtcatcatattgaaataatcctatgaaacgattcaaatttgtttatgtagatt

SEQ ID NO: 16799 - DNA, 1039 bp, Glycine max
  Intron number 4 from transcript Glyma02g40530.1 (locus Gly ma02g40530) derived from phytozome v7.0 (chr-ID Gm02; pos 45798558 to 45799596 reverse strand)
gaataaggcaattgcaggaattattactgaaagaggtacctgaaaaaataaggatgtaaatattttgttttgggtactgtgatatattgtctaatggataatttggttttatttacaaaaatattggcttatgccattaaaaattgtgcttatctattaggtgtactaaatgtctaaatcatattgaaattgatttttggatctttacttggatcaagaacattgaattatgaagtaatgacttaacttaatcaatagttgatgaccctaaggaataattttatgagtccttctgaagggtgtttaaagtgacttttcctcttagaattaagcggagtttattaaatgaatttctgtaaggaatcaaaagatgcatgtgcaatatcttttatgctagtatgtccctatagaattctaaggaaatgcaaagtagtgaatttaaatgttctatgttatagaaacaaagaaagagtgagaaaaactgcatttttatgctctttcatctcttgctccctatccttgccatctatgatcccaaaattctatacaatcttcgggaacgaatttcagtaagatagttcaactctactacatcttttgcacaatcgagcaacatatgcataattgcataactgaacaagcaaaatgagattgtcgtgcttgacactgttggcatttggcaccctgtaaatacaagaaagatgacaacaagatgggtgatattaatccaatggtgctattggcatttgagaatctttatcatgtgctgtaaatacctgcatgtgctttgaccagaataatatgatttgtgttgggaaagcaaaattggctaactagccaatgatcctgaaaaagacatacaatgtagtggaggaaaattgtgtgggtttttatcaatatattattggatgcagttaaatggtctaaatatctacagcactgtaggttgattatgtttgtccctgggtcatttatgttaactatttggtcttcttttcatccagattacttaagaaagatcatcgtgcagggaagatca

SEQ ID NO: 16800 - DNA, 554 bp, Glycine max
  Intron number 2 from transcript Glyma02g40530.1 (locus Gly ma02g40530) derived from phytozome v7.0 (chr-ID Gm02; pos 45800002 to 45800555 reverse strand)
aagaagcaaatctgaatagagaggagagagcagaggtgagagtgtgattcagttttcactgttcatttttttggattcgatctgtagattctgcttttgtttcattgctttttttataaaaaaaaataattattttgacatactttcagcttcggatacttgtgacttgaaaggtgattggatgctcttctctggcatgtctcagttttcatgtttgagattctttttgttcttctttgaattagtgaagttgagtaaatcaaatggtttctatgatttgatccaattgtttttttaattggacaagagaatgatttggttctccttttgaactttgaagatgcagtcctgaatctaattgaagcaattgattctgtctgtgactccaaaactaattctaaagtacctttcagtatgcatgtacttagatcctgtccaattctttgcagagtgcttgctcatcacttttttcccataaatctttgcattcatagacttgagactaattaaattgcaaattctgatatgtgctatctggttattagacagctaaa

SEQ ID NO: 16801 - DNA, 679 bp, Glycine max
  Intron number 1 from transcript Glyma02g47770.1 (locus Gly ma02g47770) derived from phytozome v7.0 (chr-ID Gm02; pos 51255568 to 51256246 reverse strand)
gccactgttgaggtaactctactctaatttccatcttatgttgctttggcatcactttcttttattttcagtttgatctcacccgtatccttgcttttctgttgtcttagacaggaaattattcatttctttagctttaatactccaaccgtcaaaaaaaatttctttctgaaattcttgtcacgtaattaaagccagtaaaatgacagcattcacttggcatcttatcaatatatagcttgtcaaaaagagttcatatacttgttttcctctgaaaattatagagaaaagtacaaagttgctgaaatgcaaatttcaattagtttgtcatcagacaaagaatccacacgaatcatgtgcttctgctaccagtcatatataatcatatttgttagagtattaaaagaagcattaaatctatattaatctgacagctttgaatctgtatccttataatatactactatattgcgacaattatgagaagtgatacattaaccaatagttaccaagttaaagaagagtaagaagtgtttaaactgcatgtccaccaccttattaagttttttttgctgggattctaatagacaaaatatgaattttcatcagaatatgtctttgtctgttggaatacgaaattgtaggttgtgtcagccaaggttgccctcccagaggacac

SEQ ID NO: 16802 - DNA, 528 bp, Glycine max
  Intron number 1 from transcript Glyma02g07410.1 (locus Gly ma02g07410) derived from phytozome v7.0 (chr-ID Gm02; pos 5893292 to 5893819 reverse strand)
ttacccactaactggccggctacgcttgacaaaaggttaaaggtgacttgtgatgtatgaataatatttaatcttatgaaatgtagtttagagtgagtaattatttaaagtttttgaagattagttttttcttctttatttcttacaataagtttaatgttattaggtcaattatccttcgacacttattggtatgtgacttcaattaactaatcgacatatgagtatctaaaaaaaattgttatacgtgagaaaccatgaataaaaaagatattgtcagtaattaatagagagagataaaataaaagttggccagagagtataaaacgtgtatttaaaatttggaatctattaataccaacaacaacaacaaaaacattggaatctattttaatgagtatcttttactctttatgattgccttttaggttttatttttgagtaatgatggattgggatggaaataagaaaaaaatagaaagaggaagtaataagatagaaaaatgataaagtgtttgatgtaagagt

SEQ ID NO: 16803 - DNA, 848 bp, Glycine max; identical to SEQ ID NO: 16530
  Intron number 1 from transcript Glyma02g41470.3 (locus Gly ma02g41470) derived from phytozome v7.0 (chr-ID Gm02; pos 46581949 to 46582796 reverse strand)

SEQ ID NO: 16804 - DNA, 535 bp, Glycine max
  Intron number 3 from transcript Glyma03g38540.1 (locus Gly ma03g38540) derived from phytozome v7.0 (chr-ID Gm03; pos 44881936 to 44882470 reverse strand)
atactgaggactcaagtgtgtttcttcattcacttattcaatcatattctgtggacaatttttttcttaagcttggtgtatcaaatcatcttcaattgaacacttattatactgattagtgtttggatgtacgttgcatcatctaaaattatattgaaatactagttatcatgtattttgcaagttggataaaaaaaattatactaacttacttttaaaatagagttatcttaaacataaatcagtccaattcaaaatcaattttcaccaaaattattttgtaaaactaattttattcaaaatcaatttcacaaactgaagagtttttggaagataactccacatttttgcattaacagaagacacagaactatgaaaaaattatggttgttagaaagagagcatgcgttttggacatctgtaatgataaataatagtgagatgggtcttttattggagggttgtttctaattttcttgactactgacaccgtgtgctttgctatcttgatcagatcaggagattcaacaagtta

SEQ ID NO: 16805 - DNA, 843 bp, Glycine max
  Intron number 2 from transcript Glyma01g39470.1 (locus Gly ma01g39470) derived from phytozome v7.0 (chr-ID Gm01; pos 51403694 to 51404536)
cctacaacctcactaaactagatatgtacgtatatataattatgtatgcctttcttttctttttcagaccctgagttctgttctattctatgcccctttatagttattgataataaggatggtaaaatgtttctgatagcttccctttgatggtctttcttgaacatcaaagagaactttctgtattgattctcagagctttggagatggattgtgaatttgagtttataaattttgattgtatcgaggaattgagttggtaattacctctggtgacttgtagaatttggttgataacatgtttatttagggatagatggataacatgctgctttgtttgaaagcttaggctttcactgtggctattgtggtgatttaaatagcaattgaattgtgtaaatacgtcaaatggtaatcagagaaatgggaatctgctagattttgaactcttaagtgaaagccatatttgtatttttgtttttgatatgaattgtcataagccatatccctaagggtaatagaacagcagtcattttactttattttctcttctcttgtattaagttttctgatatggagatgccaatattgaataggagtaagggatgtttcgtacaatagcaaatagtggttaaaaagattagattatacatgttaggtgcgccattgacttcgatacttaaaatttggcacctgcaaaaagaaatagttgagtttggtggtttatcaccagttataagctgataaattgccatgatgtcaagaatgtagatctaagatgcaccacatttattgtcttttgtatttgcagaccgaggagccgctggggttgccaaataactg

SEQ ID NO: 16806 - DNA, 563 bp, Glycine max
  Intron number 1 from transcript Glyma05g27910.1 (locus Gly ma05g27910) derived from phytozome v7.0 (chr-ID Gm05; pos 33780300 to 33780862 reverse strand)
ttgtcgcaagagatcgacggtcgtcaagtaagccgattttttttgttttttaatttggaaatgtgaaacttgatcatggtatttgcgtttttaattgtatattgtttacaattagggatcttaattgtgtgacatgatgatgtcaatcgctttcgaacaggtggaatctgatagctcttttttcatcgccatcggtgttatgaactgagaagtgttattcgtacaataacttttaaatattttatataacaattttaagaagaaaaaaaatagaacatacactgacacttgtcactgtaaatccaattacaaactagtatcaaatatggtaagtttactgataactactttaaaatagttgtcattgtaaaaccttagtctaacagtatatactcgttaaactcttatttttatctcttttgtcacattatttgttacatctcatatttctctcttaatcacagataacatttctctgatgaatctgacatgattttgtgaattgacttttggtgcatttattattaggaagggcgtcctggattgaaaaaggcagcacaata

SEQ ID NO: 16807 - DNA, 683 bp, Glycine max
  Intron number 1 from transcript Glyma05g06080.1 (locus Gly ma05g06080) derived from phytozome v7.0 (chr-ID Gm05; pos 5649083 to 5649765)
cgattactgtagaaatcgtcgattctatcttgtgagtaattgcacttttttttatcaatcgtagctctcgtccacattttcgattttcttcacttttttatttttcttcattactgaaaacctttcactttgtttttttaatccggattgccaatttatgtatatctttttgattcaattaattctcatcttgatgattgtatgagctagattttgttggagattctggtcaattgcattcgaagcgacttgatcaattttttgaaaaaaaaaaaattggggatgtagtttgtattgaatattcacacacccaataaaacaaataaagagttccagtaacagaaccttttaggctttctagtgggtttctgaagaaagattgatgaaaataaggttaggtgttgaatatgcctgcataattgacctggccaattatttttcttttggaatgcctgatgttaaattcatgtgtatgttgaaaaactttgagttgttattgttttggttctttttattaaggtagtaaatggggcataagtttatttatctgtcttgaaattgaacctgaattgtggtcttattgttgctatgatggtttgtttccggttattagtgatggtttatggaaaaaggcttttttttgtgcagaaaacgtattgggcactggccgccattttgaattc

SEQ ID NO: 16808 - DNA, 898 bp, Glycine max
  Intron number 2 from transcript Glyma05g06080.1 (locus Gly ma05g06080) derived from phytozome v7.0 (chr-ID Gm05; pos 5650018 to 5650915)
atttgcccaaggcttggtatgaatgctgctcttctcctgccaatttttggggcgtatctaatgagtaacgtgtattgattaatgattgctttgtatgatataaagtagacaattatgttttttttgttagtttcctcaactgaagttaaatttgtgctggaattaacacctgtgctttttttttttttttttgtgggggtggtggggtggttcaattttgtttgccattgtatctctaagattaagattcagtaaacaaataacaaaaaaatatctttccaacttgctttagaaacaactatgagtgaaatgcaattgggacttgctaccagatttgcttagctcatgggaatcaaacctctgcaatcagtttcagtgacatggtcaatatcttaagctttcaatctggtcaagttcagtgagagaagctatgttgagcttttagaatggctcaccaattacttgtggttatgcaatagttggaagcatcctttgttatatggtgcaattggtaccttactgattgttttgttgttaatgttgaagaaagcaaacttctaatatatttgctctattcacttccgatattgctacacgagttatgaatttgaaataacctttatttcttccacatgtattgatgatttttaggcctactggtgacatctgtgtatttgcatgacaaagacaatcactaattatagaacgcatgtagtattttctccttgatagcttttgtctgcattcacccttgtggaattttatcacatgtgcattgttttataaaaaagacattgacacagctcaaactaaattgtctgtacactgtcctttactgattgtgtatttttcatgttttgcaggtttatttacttatttattggaattggtgcagtcc

SEQ ID NO: 16809 - DNA, 1067 bp, Glycine max
  Intron number 2 from transcript Glyma01g05740.1 (locus Gly ma01g05740) derived from phytozome v7.0 (chr-ID Gm01; pos 5471816 to 5472882 reverse strand)
ccaagtgccccgtcactggcaagaggattcagggggtgcgctttctgttactctttcaattttttcttcttttttgttgtgtaattttcagtgttcggctgttcattttttttaatgttactttatgaacattgttaagggtagtgttagattaaaaccagctagtgtgtatagtgcaaacttcctaagactacaataaatagatagattaaggagcagtggtgagtaatatcttgtgttttgattattatataagagggctcaccctgatacagcggtaaagtggtgcattggtgatctgttggtcttggtttcgaacctggaaacagcctctttgcatatgcaagggtaaggctgcttacaatatccatcccccataccttcacatagcgaggagcctccgggcaatggggtacactagtttgattattgtataagttgacatgtgttatttagtgctgcttatagcttcatgttatgtgataatgtttgaacacatggatttattcttgtttatccatgactccctgctttaaatatttgtttattttacttatagcattttggttatcaaagagttgagttttatatgttttattacttaccttccaagcctgtgaacaaggttatggaatttacaggatgtgtttgaaacatcatttggccaagttgatcaccgaaccactgagaaaatgtgaacgagctgaatcaagcacactagtatctagtttgtgcttaataattgttttttctcttcataatttggatttctaaattttaatattgatggatgatatgtggaatgtcatgtggatcagtctctgcttgattctttggcatacaatgaatatatgatgcagatatattttgtatggtgaatgatttttcttagtgattgttctgttcaagtatattcgggctcccttggattaccagatgtttttttgctttacgtgagggacattatgtttcctgtgtttggataaaattacatatctttttcaaattctaatttatgcttgacaattgcagattccacacttgaggcctgcagagtacaagaggtc

SEQ ID NO: 16810 - DNA, 631 bp, Glycine max
  Intron number 2 from transcript Glyma04g01590.1 (locus Gly ma04g01590) derived from phytozome v7.0 (chr-ID Gm04; pos 1063798 to 1064428)
ttcacttggtcgaccacggccccctctgccttgtattctattctgtttaattcgttttcatcactatgaatgaatgtatcaatcaaatttaacaacgtaacgtagtgaagtgaagttacattgctaatctgcggctgaatgtgcgttataaagtttaattctgatgtcggttgtctgcattgaccgctgacgtcatcatcattgtcgtttgctgttgttgctattatttatcattatcggaatcccacattggcgtgcctctgttattgagataaagtcatgggcattgatagaaagaggtcgagtgcttgtgcccgagtgtttagtactaacattgccctaaagtcatctcctgactcttatggaccacctttttttaattttttttttcttttcacatgatactgtctgtctggcctagtaacatctttgtttgttatttcttgttcatcttttaaacaacgtgttcgttttgcttcaacaaccgtgtcaggcccaggcaatgttattatttccttgatatgtgtaatggtctgcatcaacataagcattctagcctaccctgctactcaggttacttttattttatttattttttcttttataggacggatcagacctgcctcccctt

SEQ ID NO: 16811 - DNA, 1021 bp, Glycine max
  Intron number 1 from transcript Glyma02g41820.1 (locus Gly ma02g41820) derived from phytozome v7.0 (chr-ID Gm02; pos 46923191 to 46924211)
gttccgtttttcattctcgcggatctaatattaaggtaattctcattctaacaatgtcattgctattgccagtgccgtttcgctttgctctcttcttaattctaatcaatcagtgcatgcaccttctttccgaattccgattatttaatcgcaatgttcatgttcctgattctttttttggtttggaatttttgctctgattttgatttctgatagatattacagtgtgctactcagatctggtgctgcgtgttgtgattttttttcttcctttttttgtgtttaattgatttctctgttcagtaatttcacttaaattttcatggatttgtgaaatttctgattgaacctgataccgaggaattgaattttatgtgaagaaaaaaatagactaatgcggaggagtaagggtttttcacttgcaaaaacgttggataaactattcagttgcaaatatatcatatatgtcatgcaataatgcttgttttgctcaattcatgttatctcactgcatcctttgtttcatttatgtcacgaattctaactcttttgtttcatttattgttggcttcaaatgttgttgacagagtagccaaatacccctattttaccatgcaccttgatttgagtgtatatttgatgccatttatagagaagcttgtaccagacttcaaccattttgtcattctcattagaaacattagttgtgtatcagtggattgtgtcgttgtttttcatatatggttaaaactttcatgtgcttttacgttcaagttctagcttattgttcacgttgtgacacgtaaaggatccgtgccacactcaagattacttgttagctcaggttcaacttacatgccagttgttcattaggtgttatgtgcaagttctttcctggcattgatatttacaggacacattggtatctatctgctcatatttaagattgtattctctgtccacttatcttgatctgcttctaatatataaatttacaggaatagcttaagggcacattaca

SEQ ID NO: 16812 - DNA, 706 bp, Glycine max
  Intron number 2 from transcript Glyma02g05510.1 (locus Gly ma02g05510) derived from phytozome v7.0 (chr-ID Gm02; pos 4413338 to 4414043)
cacacccttttcctgaagtgctctacattcaggtcaattatttgcttcaactttgtgcaattgtgcctactgctttcagtttacttttgagaaatataatagttttttaactgtatatagcagatctcatctagtgggataaggctttgttgttgtaaatgtaatagcttttttttttataaaaaataacctcttaggattcaattgcatgatatgagactttattctcgtgttgaaactatgggattctagtgtaggttttatgaagtcttaagctttccaattacaatgactagttttgtggtatgattcttgtaaaattcatatcaattgataccagagcttttcactgtatcttaatcgtagatgggcagttttataaggttttgagctttccaattataattactaggtttatggtgcgattgttctaagattcttatcaattgcaagatatgaaactcgagtttaacattggaagtgtgaatttttagtgtggctttataacttggcctctccaattatcatggataggttttgtaacatgattttcccaagtttcttatcagacaataaaagaaaataaattaaaccaaacataaatttattgttcttgccatttttttctctgttaagctgaatcaaacacacgtttgttttcttgattgaaggtgggggatcctgaggtggatcataattgctggga

SEQ ID NO: 16813 - DNA, 911 bp, Glycine max
  Intron number 2 from transcript Glyma02g11990.1 (locus Gly ma02g11990) derived from phytozome v7.0 (chr-ID Gm02; pos 10206715 to 10207625 reverse strand)
gatcagagtctgccttgtaacagatttaaaggtgaataatgaggaaactaatagtgtgaagagaggaacaactcttgaacttggcacagtttgattttgaatatgttacatacttatattcttcacctatatgttatttaacagtttagtttttatggaataatcttgaaaaaactagttggagaacttatttgtacttcaagttcaaattaactgattggagcagagagcaagcatgttttccttaacatttgtattggtgctgtctgccaacctatgattaactagttgcaatcattacagataataaacaagttcttgcagggcaagttgtgaagaaaaatatctttccagtgggtaatgttattccttccttaaatatcattaatatataacaatatgaatcctatgactcctgatgcttgactttgtttgttctgtcactgttactcaacagaggaaacatatgttaatgcttcatattatgtattatagttaatggatagttttcttcagtcatgtaattcctcaatggaagtgcatggtgagattctttttcagttgacagtttcttaatctagcaataccatgacaaattatctacatgttgaagtgccagcttatgttctttggtgaagataaactgcacgatttcttaaaattatactgcacaagtcagtgtcaaattaatatatattctgcacttattagttattagttttttgatgaactttattttggagttggtaaatagattgaagtagcttcctggaaaatgccaagacaacactcagcctaatgctgacttgattgttactgtaattatacatttttatctttcaatatatcagttgatattgattttcatgctatttggatttatctgccagattccagtccttctgtcgaag

SEQ ID NO: 16814 - DNA, 360 bp, Glycine max
  Intron number 2 from transcript Glyma01g03610.2 (locus Gly ma01g03610) derived from phytozome v7.0 (chr-ID Gm01; pos 3121255 to 3121614)
tcaaacgcattgctaacgatcctgctgaacgtaagttccttttttccttactggtctaggtcttgtttggataaatttctcattaaacgtttactagaagaataaatagcttatgcacaagtcaaaattggtttttgggagaatttaagtgagacagttttgataaattagctaatgagagaaattttctttattttagcttctcttggaagtgcttattgaggagtttacccgaacaagacttttcttcgttacaactgctagctattgctattgctatttctatcgctaaggttaatgcaatgttaatggtttggtttctcagagactggggaatctgtgcttctcattaagggtcct

SEQ ID NO: 16815 - DNA, 838 bp, Glycine max
  Intron number 3 from transcript Glyma05g28580.1 (locus Gly ma05g28580) derived from phytozome v7.0 (chr-ID Gm05; pos 34404953 to 34405790)
atctctagtatgtgatttttagttttttcttaaaaattattttggtgctgcatttactaaattataatatatcatgtagcattttacctgcaaaacacatttgacaaggcctaatcataagctacctattttaatttaaaggggatttcttgtgaccaattgtattgcatgtttgatttaattcttctttaattgtctgtttgtatttattgtattaattcatgatacaagcttttttctgttgtgcatttaggtcatgtagcttttagacaatatatcaaggtttgggtgtctatgtaaagccgagccacctttattattaatttttcaggttgaggctgtgtgttttagcttgaagcaaaggaataagatgcttgaactttttaaagtttttcaattggaaaggtgtttcgttggttgtctttatcagctaatttgacattttacaattaagattataatggagggtgcaaaaagataaagtgatgcagaataatttctatcacatttcaagtctagtggactaccaaaaattcttgaacccaaccgatttaagtttaattcttcttagaccaagaaaattatttttattacttttaacttttaagttctaatactttgacaatgtttcctttgactttggattcaaatgtcttagtacatacatataaatttcatagagaaaattttccattataactcttagtactcttataactataaataactaatttgctaatgtccgcgacaatcttatgaaaatttcatcaactaattctatatgtatgcttacatttttgtagtgattgttggggaagtagccaattttgcagcttat

SEQ ID NO: 16816 - DNA, 973 bp, Glycine max
  Intron number 1 from transcript Glyma04g13670.1 (locus Gly ma04g13670) derived from phytozome v7.0 (chr-ID Gm04; pos 13425475 to 13426447 reverse strand)
acaccactgtttcacctctgggtgttcctcaacaggttttgttcatctctctgctctctgtcttttattgaaactgcgtggtttttcatatgggtcactctgcttcatgctcaaaatgataaaaatcagttcttttctcaaaagggttcttctgggttgctcttgttttcttttgttctctctctttctctccgtgaagcttttttttctttttttctttttaaatttccgtatctcttcagttccttttttttttttttttcttttctctctctctctctctctgtgtgtgtgtgtgtgtgtgtgtattggtatattaaatgttaagaatgcatgtgaaactagtatttggaattgggctgctgctaagattgtttgatatttttttttagttttgattttagtcgtttttttctttcttgcaaaagtcccttatgtgaaactagttttgattttacttggtcaagtatttgcacggtgtggtccatgtgagatttttcacacggtttttgaagcccccctatcccaatgttacttttctgttattttgccatgcagttaaatgtacccaaagtttttcaatttttaattaattttcggtaattttatttaggatataatgtgtttcaaggtctttcatttttcggtcaaaatttgttttagttcctgtactatatgatttgtgttctttatatttggtgaatttcgttccttgccataactccgtcagtggggctggaggttgatgaggacggaattcaccagatatcgaaggtacaaggaccaaagtcatcgttttaaagtatcattacgagatcaattttgacctgagggacctaaaacacattttctcttttatttgtttaagttgattttacttcaagtgtaacatgatttagataagaatttggctgattcgttggaaaatctgattgcaggtcatagctatcaacaagaagtttccaggacctgt

SEQ ID NO: 16817 - DNA, 810 bp, Glycine max
  Intron number 1 from transcript Glyma02g14280.1 (locus Gly ma02g14280) derived from phytozome v7.0 (chr-ID Gm02; pos 12800283 to 12801092)
ggaagcttccctcgatcaagcctctcgccaaccaggtctcatttttcacttcagttctctttggcgagaacctaattgaatgcggatttctctccgtgatgtgaaaaccttagttcgtgtttgggatggattgtttattcagaaacgttggtttaaaaacataagcgattgcttattcagaattaggtgaatcgaattgacgcttatttggtttgttaggcgtgctctgattgctgtttgtgtggtctggtgtcggagtgactagtgagtgttttgcagttgaggacttgagggaaatggttatgagttttggaaattgagtttgtttgacaatgctgttgtttttttgtctttaatgtgttactgaaaagatgataggaagggtggtttttggtatttaggaggtggaagtatctgaataaacatttaacaaggaaatgatgatattcactagggtggcaacttgttgaatgtgaacatatgacaatggtgttatgtatcaatcttgtgcgggtttgaaaattaatctttgttgaatgagaattgtatttgtcatacttaaatgggaattatatgtttgattttctttagtgaagcattgattgctgttttgctttatcttctattgtaatgtgtatattctctataacttgaccatggagatgaaggagcataactcgtaatgctcattcaatgccatttttatttaacgaatattctcaatctggttcaactgtgtttctatcctaattttgcatgttaaattgtccttaaggttttggcagtgcattatcaaaagttgctgcaaac

SEQ ID NO: 16818 - DNA, 1017 bp, Glycine max
  Intron number 1 from transcript Glyma03g08930.1 (locus Gly ma03g08930) derived from phytozome v7.0 (chr-ID Gm03; pos 10216259 to 10217275)
cagtgccaccagaggaccaggtttgcttctttttttttttctttctatgcttagtttcacatttttgtttttctttgttggaactatcatggttctttttgttgttcttggtcctcttgaggtgtttcttgtttgcatgttaggaacatgattgctttcaagtgggggtgattcttgttgggttttcaaaatatgcttctttttcttttcttgcttttttttttctttcctttttctgaaatttcgtgtttgctagtagcttgcccagtttcttctcaccttttggtttctttttatacgccaaatattctcccttttgtatgagtatgcgtagatccaaaacttgttacgaaacatttcgtattactgctatgctatctgattccgttgacactttctttttttgtttcccttttatgggaatggttatttcttgaaatgtttggcgacttcaacaatttactttgttttttatagcttggtacgattctttccagcatatttcgggtttgaagttttctctgttgctttggtgttactggtggagcctctttactgtcttgagaatttatttcaatgattttgtataattcaagaagatatgagccaaatgaaagacaaaacttagatgcaatttcttaatacttttagtactgtttttcaattggagttggagtttcacctcaataattcgtgttataaattttgcattaaaaattagcttagattacctaattaaaactccaattctgattggagaacaacactaaaagagtcaaattctgattgcagaacaacactaaaagtatttaaagaacaatatccatgttttgttcccaaactaattggcttttctgttatgtggggaaattcgttaagaaatggttgtctagttgttgtatttacattaaataaattgagaacgtacaagattttggcatgtttgatgagacagtctcttggcccgaataaaatgttgcaggtggacttggaaactgtggagcctcaggctcaaca

SEQ ID NO: 16819 - DNA, 682 bp, Glycine max
  Intron number 2 from transcript Glyma05g25780.2 (locus Gly ma05g25780) derived from phytozome v7.0 (chr-ID Gm05; pos 31837565 to 31838246)
gtggtttcggggccaatcacgccggggcaggtgcgtcattactactgtgattcttcgattcggtggctgaaaattcgaaaatgcgtgtttgtactgaacggaattggtttcagttcgtgtgtggtagttctgagttgtgattttggtgatctgcttgcatgttgtgttgtttgcaatttgaatctgattcttagcaagtagtgagattgttcagtctggatttggatggtgtgtggaagcaaagggaattcgttttttgagttggattgagagcaattgtgtgagttgagttgctgaatctgttgtttttctgatctgaagcggtgtatatgtttgggggagaaccgtttttcagttaaacttgaatgactgtaagatttgtaaaagtatgttacgtgcaaggaaactgctatgctgtcactcaaatttgagcatgttgatgtggggagtaagaaaataaatatatagtttccgtttgtttcaatggtgtttgttgaagagtggttttgttgttaatgactcaattttgtttgattattctgggatgtgcttgtttttcctgcttttgattattgtcgtgaattaaaatatttatgctaatttttgggaggtcagttttctgatggagctttgttttatgtcttcaggtgtctttcttgctgggggttattccagtttttgt

SEQ ID NO: 16820 - DNA, 935 bp, Glycine max
  Intron number 3 from transcript Glyma05g25780.2 (locus Gly ma05g25780) derived from phytozome v7.0 (chr-ID Gm05; pos 31838269 to 31839203)
ttagagtacaagaaactctcatctcctcccaaagtgtaagtttctttcactgtcactataaagcaaattatattgactttaactgcttgggttctatcaagtgttaaagtttattggtggaatgtatatatcgagaattaggtttcctctcttctatttgaccatttcttcctgtgattggatagacatagttgaagagggtagttgtgatgaagaagataagtagataactatgatattatagaaatcttgtgatgacacttgattatattataataatgatgtaatctgcattgataaagagaaaatatttaaaataagtattatttaaggtatttggggatcaatagtggttcagaaatcaggtagcaacatttaatcatcaaatttacagcgtgcaatctttaaaataagtgatatttgtgaagacatgatagtacacaaatcagtgaacggatacttcatacttatatatttaataaaataattagatgctgcctctaaactctaaagctttgaactgtttggactttggaccccccagtgcccagtgtttgtggtacatgcatggacacttaatgtctcatgtggatttgattcaactacttgtgtcatgcaaacaaaactactattgagaatttggtattggaaaattgcattttgaacacaaacacctactaatatggatggtatctttccatctttgattttgatctatttcaagtttttatttagacaactaaattggatttatgttatcactctcttcgttgatcaaagatgtacttttttttttaatcatgctactttcaaaactgaatttcctactctaaagtttagtgtttttttttttaattatggaaaacataaatttatttatttgcaaatattttcagacactttataaattttctttgttggctgcagtcattcag

SEQ ID NO: 16821 - DNA, 1017 bp, Glycine max
  Intron number 2 from transcript Glyma03g05120.2 (locus Gly ma03g05120) derived from phytozome v7.0 (chr-ID Gm03; pos 5405721 to 5406737)
ctcagaaggtgggtttgttagttggttattcttctttttgatgacccttgttttcagtcttctttaatgaactttccttggtttcactggattagagcttgttgggacttattattaggttttgttgttctagagttgatgagtgttttgaacaattcatctctgcataattgttgttttttgagaaatgcaacactgccaacacactctaatatacattctttttaacatactttgttattaacttattagtgactgaaatttgttgaaagtcacaaattttgtaggtttcatcatcccttgtttaatgggcttcattcgtaatttttgtaagtttcctataaattttaactgataatagtgactgcgttagaacaagtgtgacagagagtgtgttgctaatgctctatctttctttttctttcctctttcaatgttgaatttgcttgagaaaagaacaggaagttgagtgctacttcaaaaaaagcccttttgtttggttctaatacatgtagatcagtatatgggaggatctgtacccaaatgctgatagtaaattgtaattgcatggatagatgcctgcgtattcatgtctagaatgacatacaaaaagatctataatggattggagtaacaatttaaattttttttttggggtggttattttaattgtgtttttgtaatatatgaaaactcattgatttgtgctatgacattcattgtttaacataaacaaataatagaggtgcatgtaaaaactaaaaagtttgtagtatgaaatgtagaaatcctatgggccattagttgaatatgaggagcaaggtctaatatttttatcatagtttacgaagttgttgtggattgcagattctgtggatgtacttaaatttttgttgacttttggtttctgagactgaccttatctgttaaatttttgttgacttttggtttctgagactgaccttatctgttggcaattaagggaagagtttgggttaccaaagcatctaaggctag

SEQ ID NO: 16822 - DNA, 780 bp, Glycine max
  Intron number 1 from transcript Glyma05g26210.1 (locus Gly ma05g26210) derived from phytozome v7.0 (chr-ID Gm05; pos 32227403 to 32228182 reverse strand)
tacagagaaaaagtatgatgcctcatcgcaacttggttttacagtctttctctttttcttgctgaatttgttttgtcattactgttactattgagggaaaaaatgcaattcattaattctaattatggttcttaatttgtacatagattaattaatgtagctactgtcaaatgtcactcactattcgaaaagatacttgaaattcaagttatgtaatctatagttttgatttgcctcttcttgtttttaatttcagcccacttaatttgtattcttagttgctagcagtgtcaaggacttcattagaacacaaattgaacaaaaagtagggctttcctttgaatcaagaaagattccctgcttttaaatgcattgtggagcatagatttgaaacagcacaggatttaaaaaacagtctgcgaccgcaatttcgacctcaacatcaaggtttttggactctatacggccgcaattggggctgcaccggccacatttgtctgcaacatcaaggattgcgataaaactgcaactgcagccacaactgcaacttgataccttattagtctcatttaaaagataaaaatacttaaagcaacttgatacataactagatgtcaatttgaccaagaaattcagctctttctgtgttatacaaattacagaatatggatgcattaataagctattatgtaagctaagggatttggtatgtaattccttgttaatgcagtttttacttgttcagaaatcttcagcattgttgcttctgcggctagcatt

SEQ ID NO: 16823 - DNA, 974 bp, Glycine max
  Intron number 1 from transcript Glyma03g00830.1 (locus Gly ma03g00830) derived from phytozome v7.0 (chr-ID Gm03; pos 549562 to 550535 reverse strand)
gtgttctggtacttttttcttcaccaaaaaccttgctatttttttttattttttttatataaaaaaagtggaacaaactacgccgcatgtgtagtattgtatcatgttttgactgttttcttgtgttgctgtctcactatgtttggtttggtgtctcgtaacttgacgaatcaaggttcgaattcctattgagagagttgttctcgtttagtttgattatgtctcaaacagggttctcttgaaaaagaaaaatacatgaaagaaatagaggttactcctctgtttcatcaattaaaaattaaattttttcgtttaacaaaatcttttggtgttgtaggttggattgttgcgattggttgaacttgggttatatgaacacatggattgtaacatctgaagtttgtgaacatatgctataacaaatacatttagtgtttgattgtaacatgaattataacaaaaaaaattcgaatttctgttcagagaggtgtctacgtttagtgtttgattatgtctcaaacaggattctcttaaaaaaaatacatgttgggggaaaaagaaaaacatgttattctgatttttttatttttaaatttaaacctaggttgttgttctgtgttttctgtattgtgactcaaagatactgagattgctcctctgtttcatgaattacaaattaaatatttttgttcttttttaatttgttaatcagatgaagattttttggtaggttatatgagaaacatggattataacatctgaagtttgtgaacataggctatcactgtatttaaaattacgttacttagtgggtgtgtgtattttttcatttatttgatttttacttaacctgtgtatggtttggatgaaactgtatcagtgttgtgttacagttgcaattacaaattttacaatatgatgcctatgataatgactaaaatttattgtttgtaaaatggaaattgcagttagga

SEQ ID NO: 16824 - DNA, 955 bp, Glycine max
  Intron number 1 from transcript Glyma03g35440.1 (locus Gly ma03g35440) derived from phytozome v7.0 (chr-ID Gm03; pos 42636994 to 42637948)
tcggggaagcgaaagaggaagttgaaattgtaagttctcttcatccttagccccaatttgaactatgtttttctctctctcttattattattattatttaaataatttgcatagttttagggacatgaagcatttccacagggttttaatgccggatcagtacggatttgtaggatgtgttggtttttctttagttctgtttttgctattgagtttaaatttcgcaaaaatgaaaataagttgtgtggccctaattgacttagtttgtgattgataatgttttctagggtttgtggatgggatcagtattggattttgacaattgagttgaataatgggttgacttaatttgaattgctgagatttggaatttgtaacttgtaaatagctgtgtttaatttcaattatctataataatattatgcttacttttaagtgatgattactacatgtatgctatctcatttccaatttgatgaatttttcatgtttctttcatacttatttcctgtatttgaagtttgctattgatatgttgtcctttgtcttggagctttaattggtgcgtcatgactggttctttgaatagccatttctagggttgagggttgtgggatgctcttgtagatccatatcattggtagttttagagttcttaatggtgacagtatgatattgtataatgctggtattatatacttgtcatcacataagcctggaaacttttgtgcctccgagaaatttacaagttttgagaagagatataagttggttggatgtctatgcctttgttctgtatattttttacctgttcttcatttgatatttttctaaactgtttctagtttcaaaattctggctcttttatcgatcttgttgcataagttcatttgttgaatttgtttcacttttatcttgtatgcgcatctctaatacttattatttaggttaagcg

SEQ ID NO: 16825 - DNA, 672 bp, Glycine max
  Intron number 3 from transcript Glyma04g21910.1 (locus Gly ma04g21910) derived from phytozome v7.0 (chr-ID Gm04; pos 25217003 to 25217674 reverse strand)
caggttgtggttgataaatatcccacgtaagttggtgtgactaagaagaacctttttgatgtgtgaagaattgcaaaggcgtccatgctcagctgtgaaatcttcttttgccttactcatctttactttgactttatatagtatctggttgaattattttgtacttctgcatttgtttctgtcacttgtgcttttttgtttcacaaaattggtatgatagttaggaacttgggattaaaggcatgtttggaatatattgtgattgtgaattatttttaaaaatattttcacttttcaaaatctatctcatgaatctgtaaaaataaaaataaaaaataaaactactgtaatgtgtataaaaaattcttcttggatggtaattgatctgataagcacatgctttttacataatgaattatatgaagtcctttgccttaagtctgttagactgggtatgagatatggtagtaaattctttttacattccgtacatttttttgcatatttctgtcttattattgtaaaatgttggatgcatatacaggttttcaaaagaagcaacttataccatgtgcccttttctgcattttggtctgttcgagaataatctctttagtaaattctgaatctgttcatctgaagttgagtgaatctatatttgcttcaggggtg

SEQ ID NO: 16826 - DNA, 794 bp, Glycine max
  Intron number 3 from transcript Glyma01g44650.1 (locus Gly ma01g44650) derived from phytozome v7.0 (chr-ID Gm01; pos 55237751 to 55238544 reverse strand)
atacccaagacgttgcaggtatttacacttcatttagatatgttgtgttcttcacttttattctgtttgattttatttatcttataaagtgagtgaatagagattgaatatgccattcagtatcattaaatactgaaatgttctgcatcgattctagtttctgacaaaattggctggtttcctcataccctgtgaatctggattttaaaatttttcttaaatcgatcatataggctttgctataatattattatttacatctttgcctgagtttgaggatgttgtgtgtgcgagagcatagcttcagcttagtgttgaataaaaatgaccaatgttatgtgatgtccttctgttatgatttgagttacaattgttcttagaacaaggtatgttttggcaatttttttctccatgtcattatatggtggtctattgacacatccagttttttagcaagaagttaaatgtcgaaagatgtgttttaaagcccccttgctggttggctgaaaatatgaaactagtggatgtgtcaaaactaaagcttatagaatttttagaagtagtggatttccttagatcttatcaaacttaaatatttactcctcatattcactttatgtcaaactgcatctttattaatgtttataataaatttatggtatggggaatatagcagtgtactaattctattatcttttttggtctgtgagagtaggacagaacgagaaataatttctataacttttgtattgtcatcttgaattttatagtgaaagtgttggactggggtgagg

SEQ ID NO: 16827 - DNA, 850 bp, Glycine max
  Intron number 2 from transcript Glyma03g07750.1 (locus Gly ma03g07750) derived from phytozome v7.0 (chr-ID Gm03; pos 8428007 to 8428856 reverse strand)
aattctacggactctgcgatccaggtaacggcgcggcctcggatctgaattgcgtttgtttttgttttccactttacgttctgaaattattatatatatattttttataattttccaattgtgctttcgtgtttctgtgtgaattgtgcgggttgactttttcttttctgagaatttggagaaaaaaactgtataataaaataaagtcaaactttaacatgtcccatcccacatgttttataaataaataaataataaacatatgtatataaatatattgtttgtttataatattcacaaattggttaactaactaatttttggttagtcataagctggttatggattcgtagttttttggtttctctgtgcatactggttaagcagtgtatgtgttgttgctaatcgggaaaattgtgaaaatgtaaaggttggtttgtttgtgttcttctgagacgcattgggttctggattgggtggggtttgaatttgatatgcacgtaactggttggattagattcatgttggaagtgatatgttagttgttgtggtttcttatgatgattattgtgaatttctgtgttgtttcgttgagtttgaggcttgtctggttggcccttttaagataaggagaactcgtgcttttggaaatgatatgttagttatcatgatgattattatgtttcgttgttttaaagttttaactgagttgactagcgttgtgtaatccttatatagccaaactcgtctagtgagatagtgagataaggctttgttgtttttattgttgtttcattgagttcaatgtttctctggtgtttgtttcaagataaggagaacttgtgcctct

SEQ ID NO: 16828 - DNA, 528 bp, Glycine max
  Intron number 3 from transcript Glyma01g06600.1 (locus Gly ma01g06600) derived from phytozome v7.0 (chr-ID Gm01; pos 6946522 to 6947049 reverse strand)
ggtttgtaagatttcagttacacttgtgtctcttattcattacacttttcttctaagctacatctgtgagatattgataccccaaagtgatttgatgtgatataaataaggttatttaggtaagataaatgataatttgcaccgatgcttttgattgcatgtttggataattacgttttatgttcaacggggtgattggtgatagaattgattttttttttccaaaaaaagctgaatcaagcaggcatcaaacgattaaagtagccagataaatagttaatgcatctgtagttaataaattatatatgatttaaattttatctttaacatccgtgtatagtttcttggtctcatttttcactttctcttctgatatggtgtggttaatatagtttggcaattggtcaataatgtatgttaccctttacttaaacttaggacagtacgactttctttaaggtgaactaaggatatttttcaatgaatatattaggtgagtctgctgactgagactggtggtactaagga

SEQ ID NO: 16829 - DNA, 842 bp, Glycine max
  Intron number 1 from transcript Glyma04g18960.1 (locus Gly ma04g18960) derived from phytozome v7.0 (chr-ID Gm04; pos 20773470 to 20774311)
gagtgcttctgattatcctttggtaacccaaggtaggtgcctctcactgactcatccctcttcgtgtcaagtttgtgttttgatgagtcaggggatttgggtgcgtgggttagtggttaatgatgtttccttaacttgcttattttggtccttaatgaggttgttaatcattactactttatctatcttctttttgctaattttgctcactgctaaatatagttttttttaagaaagaaatataaaattagtttaatttgttcccaatccgtgttttactagtttaattagtttacttgcttggttgtcaaatagtagttatttttgtcggcagactctctgtctctccctccctctctgtgtaacgaaataggggttttggagggaacggctgaaaaaagtttaatagagatatgaactaatcagaaatcattcggctttcggtttttaaagtagctttcatcattgtcaataaatttatgatgtataatcatctgtgattgaatagatatatttttttgtaaataaatggcagtgtactttttttatactgtgaatttattttatttgaattctttttttcttccctgatcggaagcataaccattttatattgtgcattgcagaatgctaaataatattcgtcaagaaatgtaaactatggaagaatttgatggtttgctaattattgaaatttcaaaatagagagagagaaaaaaaaaaaaaaaaacaagagaaccacgaactatgttgcctagttttcattgtcgttgactaactttttgctacatttcttttgcacaacagatctgctgcatacgctttcgtctattcccagacac

SEQ ID NO: 16830 - DNA, 755 bp, Glycine max
  Intron number 2 from transcript Glyma01g44630.2 (locus Gly ma01g44630) derived from phytozome v7.0 (chr-ID Gm01; pos 55230748 to 55231502)
tatccctaactcccccatagataccaagtcccaaggtatattcactttaattacttatttataaatcttatgcgaattgaattattaatcttccgctatgtattgccttgccctatagggatagatagatagatcaatattctagaatctaagattaatgattgatgacacaaatgtatctgtatggatggttttgtggttctgttttatggcttcttattgcattttttttccattctcagatcagtgtaatcagaggcatgattttaaatggttaaatggtcacaatgttgaactctatctgtgatttgtagttctgttttaaagcatattgtttcgttcttattcaatgttaattgttagtgacaggtcaattttgttttataatgtcaataacatgtatgatgtatttaactttgaataagagaatcctttttttttgtcaccttgttttgctcaaaatatttattttgacagttgcttttaagcatatcagctaagaaaacactgtttgaatttttatttttatttttatttcgagttacattggaaatgggatacctttgcctcattctctttcaggatccttagcttgtaactcattgctgttatcatttggataaacttcttattaatactgtggcctgaactcgtttgtactttggtttgtagatagcttgtatgtgtcttccttaatcttgtgtgcttgctattcttatgcatgcacttactttaagggtcatgcttgcacgcag

SEQ ID NO: 16831 - DNA, 767 bp, Glycine max
  Intron number 1 from transcript Glyma04g40120.1 (locus Gly ma04g40120) derived from phytozome v7.0 (chr-ID Gm04; pos 46251899 to 46252665)
ggccagaaagaaatacttggctccaagtacccaaggtatggttggtgatattattattggtaaattaatcacacgacttgatcaattcaactcattaatgcaacttatatcaaggacatcttagcttcttaaaaaaaaaaaaaacttatatcaaggttatctacctgccaacattgaaacgcccaaataacacgtcccttttttgttgtaaacttatacacactatctatatagtagtttatgccacactcaattcattctgagatttcttgctccagtcagaaaagtcggaaataccccagaagtgtataactcctccccacagtcccacgtaatgaataacaagtggttgaggcatttctctggcatgcagtgaccacttgtttcgcaagttgatcgaacaagacaaatgtttcttttttatatttacaacaactcaactactactgtatcaaccctgacaaagaaaatcacatcgaaaatgccttatcatgacttaatcaatcatccagtcttgtttgattggtgtcttaaaagtactacatgtaacaatacttttaacaacgaccctaatgattgtttttattaaattctttttacttatattttcgtagattaagatactcttggcaaagaatgaagggagaagagaggggcactctttagtagattaactttatatacataatgttacttctttttcttgattggaaatggttctttattccttctcaggagttactacaggtgcacacaccaaaagttat

SEQ ID NO: 16832 - DNA, 937 bp, Glycine max
  Intron number 1 from transcript Glyma04g36180.1 (locus Gly ma04g36180) derived from phytozome v7.0 (chr-ID Gm04; pos 42720769 to 42721705)
aatattgtggtttgtttccctcatcactatgttaattaattacttgcatacatacactaacactgttctgtgaccttcctttcagtttcattaattatgtttctgggttgcatcttttggttggtcacgctgtatacgatgatgttgtgcagcttctcaactttatatgcgtactgaaagtaaattattatgaaaaaaatgaaaattgtgaagtgcataagttagttatataatgtatgtttcatctatgtacgagaggaaccctagatattatgtgatctttcctccactaggtttctgacaactatttgacattttttgtggctaaaatgtttgatttgtattaattccttgaagaatgccacaacgcactctttaaaatacttcttgataatgactgaaatttattagaaattacataattgtgtagatttcacattttattcaatgaatttcactcatgattttatagtttcaaacaaattttaatcaataacaagattaacactcggactcttccaattgctttctctgttaacatagttgcatcaggcagaaacttcactatagtggttaactagtagatagcattatagagtacattttaacattcaaggttacggttcctacttttcatagcatatctagaatttatgtatctgcagggtaacacttgctagttgctgctagtttctaaggaattcaattggaaaagtgattataaaatgagtccacaggacaatcttaagctaatgttgcattttttgttctaatcatttctacttgtttaccttatatatacacagttttgtttgtcacaggttaaaccactcttttatttgttttgtaattttggaactgttgtccaatatatggaactgatttttagcttaatgtcttgtatgatcagggaaaattctccttaccgtttctcttc

SEQ ID NO: 16833 - DNA, 741 bp, Glycine max
  Intron number 1 from transcript Glyma01g35960.1 (locus Gly ma01g35960) derived from phytozome v7.0 (chr-ID Gm01; pos 48413142 to 48413882)
cctcacctcaccagaggtttgtttccctcacacttctccttttctgcatttatttactggttcttgttagatttaattaacaattatttcctatgatttaaataaaactataatatcaacttgcaatttttatatcaagatgtataatattatttatataagatttaaatatatttttcatcgtgtttttttgtttcaattttttttcgttataaccattgcaaaatgtatttttttttgtttttcatccattaaacaatattttttcctcttcaaaacattatttaaaatgtattaagaataaaaaataaaataaatacatcttacaaaaactaatatttttttcagggacagaaacaaaaaaaaacattaaattactaaagaaaaaaaatatatttaaacctttatacaatattgattgtaatatgactttttgtacattctttccttctattatgtcacttattttatatcacactttttctatttcttatcttattgtaaaaaaaaacatatatttaaaaatgttgtataaagatacttaattttaacttagtttttggtataataagatatggaaaaatacatatatatgccccagtatttaatggaagtaacagacctgaatccctcattccttttgccgtccatggttttgattccacaaacggacaacttgatatagtaccttttattaatatatttttttaagtgtgaacggttgattttaacaggcaaata

SEQ ID NO: 16834 - DNA, 940 bp, Glycine max
  Intron number 1 from transcript Glyma01g21510.3 (locus Gly ma01g21510) derived from phytozome v7.0 (chr-ID Gm01; pos 26674262 to 26675201 reverse strand)
tcactgaggtactacttgttccccacatttctaggggaatttccatagtggtcccaaaatattaggaaccatgagtaattttaaatcaagacgattcattttgtattataaagtatgtttctttttaattaatatgaaatggatggttttgatgcaaggatcatttttggtccttatgaatttttggaccattggaaaagccactcatgtgacttttctagagcactgactattaaacatgattaatattatttaacatttaccagttttgagtgcttgcagagctggcttgacattttgcatccatataaagaatattcctaggaaaaatattgtttcgattcttcacagaatatgttatccatgtgaaaactgaaaagctgtcccctgatgctcagaatttgataggaggactaaattttttgtagaatggtatctacaaatttacccttttggttatgtttgtgaacaagcaaagccatatggctttttaaactttgcagagtcggttgataaaactatgcatttagagaaagatctttgctagaacatggttgaattaattaaaataaaatatattaaataatcttttctcactcatagtatttctgtaaatccagtggcttctaattaggttgtaatttatgcaatctacaatgcttaacatagtttgatcatgctgctgatattacaaattttcaaattatattaaaaattatatatactagttaaaaaatgtgccaccacttacctgacataacacagtatcttctgttcttttctttaccattttgggataaatgcaataagaacatataaagtacaaaaaaaaaaaaagttaatgtgatttattgcttttagtttaaataacactaccttactctgatggtactttttcattgcagctattcaactatatcctgggtggcttgtttggcta

SEQ ID NO: 16835 - DNA, 985 bp, Glycine max
  Intron number 3 from transcript Glyma01g37290.2 (locus Gly ma01g37290) derived from phytozome v7.0 (chr-ID Gm01; pos 49642425 to 49643409 reverse strand)
tttagtgaggaagccttcgtcgtcctcagtttcaggtgatgatctcttatggctcaatcattctgttattcctggtatttgcaatagaattcaacagagggcttattggactccaaagcatctttttttatgtatctagcggtgcccctttcggtggaatttgtttttcctaaaatgactgtggtaggctgaacaatatttctgaaactttgatttttatccgtgccaaatggtttcgccatattgtgtgatccatataatcgaccctatgacagctataatagaatgcagtgttgctgtgcattgcatttcctaacagcagccagctcaactctatcatgaattgggattattccatttgtgccccacatctcttcctcacataaagcttccacatgcgtgtttggtttggtcgtttgttgtgggttcttttatgggcatgctattctcgacccataggcctatcatattagcaaggatacttttatggttcttactgtatatgccaagtctacatctgtaaatgttttgagagtttgaggaatgtttctattttctgttaaactttttaccccacattcccctatcttatagctctcaaacaagatgtgagagcataaatatgtcatgcactcatgctatatcgaattattaaagattgttgaattggtatgtcctccgcccattaatgtaagggaagacgtctatattgttcaatttgttgctagatgattttgtttagttttcagaaacacattgatgtgcacatgtttcctgtatgattttttttgtttttttattacatttaagtccttatagaaccctttttctgatatatcatgttagttgggatcattctattgtatgctagcagctgcatttaatactagtagttttatttgggggcaattacttagttgctctctttttcacgattgaatcagctacagtcaatccgaaggttatactggagctcttctcaata

SEQ ID NO: 16836 - DNA, 939 bp, Glycine max
  Intron number 1 from transcript Glyma02g15790.1 (locus Gly ma02g15790) derived from phytozome v7.0 (chr-ID Gm02; pos 14298045 to 14298983)
gaggaaatcacaggtaaggttaaaaaactcatttgattttaaaaacattcagtggttaggcataatttcaactaatatagataatttttgtgtatgaaaaaacgtgactataagaagtaagacattgttaaagatcaatcaatcaagtttttccagtaaaaattaatcatttacgaagttagtgaatagttcaaacttataaatggtttttaaaaaactaaatagtagtaattctttgccttcttgttctttgtgttgtttgcatctcttgatgcagctcaataacgcacaaaatgtgttttaagcgaaatgagcaactatgactttggatcaccattcttttaaatcgtggtcagcaactatagttgcaaacttgcaggctgcagccatgatattataatacctctatttttttttattcagaaattgacatgtaataataatgccttttaagaaacgaaattatgttatagattataaaaatgaaaaatataatagtatataaaatgtcaacgtacgtaataaataaacataaaagatatattaaaaaagtacagatatattactttttttatgtggctcataactttaaataattagataaagtttttgaaggttctgcaattatattgtaactgtaattgtaactatatttatctcaatttcctacaatatcaatataaccgcgaccaaactttgaaatcatcaacaatgaaatgaattccaacgagggataaaatgcaggtttcacaattccagtcaaaaggaaaacattgactagttcgtgctgacaagcgtttctttagccttgctttgaatttgtttgacttgaaacttgaaacccggtttgcttgttttgctgatatggtataaagaattttacatttgttattttttttttcagaaacaaggttttgatattggaggcaggaatatcgt

SEQ ID NO: 16837 - DNA, 564 bp, Glycine max
  Intron number 3 from transcript Glyma03g33340.2 (locus Gly ma03g33340) derived from phytozome v7.0 (chr-ID Gm03; pos 40943655 to 40944218)
gataactaggaactgtaaggttgttttcttcaccatgcatcttttagacaagtgctctcatttaacctctgtaaaatttgaagtatgtaagttgattttagtactcaatttagtttagatttaatatataagttagtttttgagctatttgaaacattttaattagaaccttaaaccaaaaggattagtaattaggtcttgatttacaatttttgtatttagacatctggtgtaaataaagccctcatagattttttttcaaacaacataaactaattttagacattacaaatattttacaagatcaaagattcagttataaaaaaaatagtttaaagatataattaaatttttctataaaaaaaaatcatgggcttactgatttatttaaccttcattttaccttcttgttttttttattaaaaaatatctctgttaaaatttatccctaatatctagttctctttgaaatatcaatgaaagctttgtcccttttgtttattaattagtgatgatttgtgaactacagggactgcaagacaagatcgaattggttcctattga

SEQ ID NO: 16838 - DNA, 258 bp, Glycine max
  Intron number 1 from transcript Glyma01g00710.1 (locus Gly ma01g00710) derived from phytozome v7.0 (chr-ID Gm01; pos 415605 to 415862)
cattgcggagcagtgcgacagtaagatattctattaattaatttaattaattttcttatcaacaaatattaattgataatttattagtttttgttagaaaaagggatgaaacctgcgactttttcatctttcttaatcattcagccaaccttatatctttgaattaatttaattagttgagttgatggtaaggtagcaaagattgattgaattaatatgtgtttttgattaaaattaaatcagctgttggaatcaaat

SEQ ID NO: 16839 - DNA, 689 bp, Glycine max
  Intron number 1 from transcript Glyma02g36520.1 (locus Gly ma02g36520) derived from phytozome v7.0 (chr-ID Gm02; pos 42007260 to 42007948)
caagaagaggtgtgcttggatcactcccaatactggttcgtgttcttctccatcttctttcactttctcctaatttatacttagaagacttgttatgctgtgatgtaagttggttttactataagccttttgagttttgacagatagtttctgttgtctggtcttgttggtgctcatattgatgtagttgaattgtgtgattctcacttggtttcagtatgtatttcagttcttgaagtttgagattttcttactataaaaattgattgtatagctccgtttaatgtcattgtattctttcagatataaattaatgtgaaatgagagtgaaggcggctttgtcaatttaagatatttgagttcttttcatttgcttgaaatgtaatacaacatgcatgtgtttgtatttgaagccagtgtaatagaacatgcaacgaatatatggtgttttttttgggtgaattttagttgatatttttcaactattaaagtcaaaatcgggaatcctaagtgaatgtatggtatgaaccagatataggttgatagtggtgaagatgaatgtacgcaagccacacctttcttggaaattcatctataattcttgttttgagttttaagttctgaactaaattggcttttttcaaagttctatttcctaactaagtttacctatcaatattattagaacc

SEQ ID NO: 16840 - DNA, 817 bp, Glycine max
  Intron number 2 from transcript Glyma01g03850.1 (locus Gly ma01g03850) derived from phytozome v7.0 (chr-ID Gm01; pos 3313813 to 3314629)
gcatcttcaccccggctatttctggtgagattaaagagtaatgactttggagaagaagaagaagaagaagcagttctttaagtgcttttggttttttttctctaattagaattggagttttacctcgacaatcaatgtaatactccctccttttcttttttatgagaaacaactttttcagtataagaaatacattgaaacttgtttcttataaaaaggaccggaggtagtatatgtttgcattgaaggtcaacactggttcttgaggtgaaactctaattctgattggattggagaacataaccaaaagcacttaaggaagtgcatgtaagttttgttatttggctttcgagaaaacttggatggagttctttatgtgtttctgatgttgttttctaattagaattggagtttcacctcgatgattcgcctaaataagtgtttacatggaaggtcaacatgggttctcgaggtgaaactatgattctgatggaagaatagtgccaaaaacaaataaggtgctgcatgtaagttttgtcctttgactttagagaaaactaagatgcagttctttatgtgtttttggtgttgttttcagttagaattgaagtttcatctcaatatttcgtttaaaaagataagcacaggttctcaaggtgaaacttcgattctgattggagaaaagtactaaaagcatctcagaaactgcatgtaagttttgttctttgaatttttgggggttttgttgaggaactgtgttgagttttttggatgagtgcatgcagttttctcggctgtgtctggactggagctttca

SEQ ID NO: 16841 - DNA, 636 bp, Glycine max
  Intron number 1 from transcript Glyma04g21680.1 (locus Gly ma04g21680) derived from phytozome v7.0 (chr-ID Gm04; pos 24888126 to 24888761 reverse strand)
caactcctaaccaacggtacaagtttcaatccatcatcatcgttttaccaaagaaacatatcaaacacaagtgatgatgatccaaattccattgaaccaattaaaacatggaatgtcccaaaccctaaagtttcatcaatacgccatgatgaaaatattatatatacttttatcactgcacactcagaatattctttttttttttttttctgatcttccaaataatggcttttgtattaaggtcttctattttttttccacctcattctcctcttgcttttcctttctcatatcaaggtgagagacgtatatcttctttattattattaatgagttgctataaatacccacagaaaaatctaagttttgatacaattgtttttttagcaaatagctaaacgagtttgggcacataaggaaaaaaataaaaaagggagagaaggtctcttaatatacaaaaacccttaaaaaattagggtaccatagaataatttctcttaatattatttattattttggtatacacaatcattagtctcaaattttagcctctgaatgcaaagtaaaaatcttaatttctttcaatcttctattttgctagccgtggaggcttcaagacagcaactacaagccttc

SEQ ID NO: 16842 - DNA, 415 bp, Glycine max
  Intron number 1 from transcript Glyma03g29640.1 (locus Gly ma03g29640) derived from phytozome v7.0 (chr-ID Gm03; pos 37667634 to 37668048 reverse strand)
gccttcctcgttcttcacaagtccgagaaaaagaggtaagtcaatggcacctttaactgcttaaactatgtaacatgaacaattgaagatccgtttattttcccagttagaaaatggacaaacccacgaggaaaaaaataatattttctagattattgtgtttaattgttggagttgaggcctgcaaagtttgatggtagttagttttaatgtggacatggacggttggatattgattttttctgttaaatgatggacaacccaagaaagaaagtttgaaaatttttggtttttttcttcctattttgagatgttggtgtttaattgttggatttgaaaatccacgcaattgagtatagttagcgtgtcaacttcgattattactctttctcataatttcataccctcggtaggt

SEQ ID NO: 16843 - DNA, 558 bp, Glycine max
  Intron number 2 from transcript Glyma01g42910.1 (locus Gly ma01g42910) derived from phytozome v7.0 (chr-ID Gm01; pos 54034708 to 54035265)
ataccacctgatccttctttaataacttgccaaaggttttgttatgctcttcttttcctatttcagttttgcttacgagagttgtccctgtaataattgaatttgaagactgaaccatggggagaaactaaatttataaaaatccgaatgctgctatgttttcaatatgaccaattttaattggagaataatcataccagttttatggtataatatctaagttttgctctgtgttatttgtggcatgcttcaagtttctaattaacaatccaatttgtgaaactacatgatggttgcaggcttacagaagtgttttcttatgcttctatatgctattctgttctgcagaagcttcaatatgattccgtagtttataaggtggttttgcttgcttacaaaatccgtgtggtatattgttgaagaatttggtgatatattgttaataatgtaatttgatagaatcaaagaacatgagatacatccaatagctccaaattttttatgttgcatttttttttttttaatatcaaccctgatcatcatttgactgctctacag

SEQ ID NO: 16844 - DNA, 630 bp, Glycine max
  Intron number 3 from transcript Glyma03g25520.1 (locus Gly ma03g25520) derived from phytozome v7.0 (chr-ID Gm03; pos 32690988 to 32691617 reverse strand)
agcacagtaaattcttttgtgagttctgtggaaaggtatattcttcttttcttttctttctaatgtttttggggttcactattggctataggaatgtttgtgggataagtttgtgtttatcagtccaaaaatgttgatagagttattcatttgaatctgatctgaatctcaatcacacccaataataagagtctatgagataagatcgagttacgcaccagttatatcaatcttaatattatgtatagaattataaataaaggaatatgttacaatatatttcaatatcaatatgtaatatcatgttgttcaaagtagtttctttcagtcaataagtttgtctattaatacataattgtttaacaaacttatagtttttaaaagaatataaggcattagacttgattctgataacctgaaattattattttgaggttatgaactcatcctaaaaacatattgggtttaattttaagactcaaacttgttgaaattaactttggtctgagagggtgggatatatcatgggtcataaacatctctgttatttgctgtggcctaagatcaactattaatgatatgtttgtttcctcagtacgctgttaagaggaaggccgtgggtatttgggg

SEQ ID NO: 16845 - DNA, 684 bp, Glycine max
  Intron number 1 from transcript Glyma04g16390.1 (locus Gly ma04g16390) derived from phytozome v7.0 (chr-ID Gm04; pos 17531837 to 17532520)
tacaagcaaagtggagggtctgaagaagagaaaaggtaggacattctatgtcttttattatctgtgagtaaactagctttaaaaaattcatgtcactatgtccccccacatgctgctattaaacaaatgctatttcatctttttttttatccaatttgaataatttttccatgagtatttataaaaaaagaagttatgataaaatgagtttagtttcttccataagttaaaattaacttatacatttcaattatccagttaagaaaatttctataaaagttgagtgcataaattgatttttatttacgagagaaactcaatttattttactttcttattttcttcacataaaaatgtttattgaaaaaattattaaaacaagacctagaatgtttttgagtggacaacttaataaggtgtgtataaaagcttgacacttaagcctaggtaagttgaaaataacttatgggaaggtaataattcataagccactttcataagtcaaataagctttgtatgagttcttccaaatgacccctaaatatttacatgtgttacacaaagcatccattaaattcttggacgaatcatttttcaaccacaaagcagaagttgctgttgcattagttaaattatatatacattgtttatggtctcttgctttaaatttgcaggctgagaaac

SEQ ID NO: 16846 - DNA, 1050 bp, Glycine max
  Intron number 2 from transcript Glyma02g16320.2 (locus Gly ma02g16320) derived from phytozome v7.0 (chr-ID Gm02; pos 14732628 to 14733677)
atttgtcgttggattgagttgcgcctttactagcggtaagattcatcatctgtatgtctcttgtttaaattgagatgataagatgtttttctctgttgtggtggttatatgcggtttaaattttgaatttctttgttggtgtatttttttttctttctttctttcatttttagtagaacctaaataatttatggtttatattgttttaattgtttaactcggaacttaacagtgtgcttggttatagaagagggaggaatttttatttttattttttttaatttaccttgtttgatttataaatctagtgggaggagaggggaaacgagaggttaattatctacctctaatagttgaagaatttggaatttatgatttttgaaatgtaaacacaacattgttccacaattttattttatttttcatcacttttcttactgtatggatgtatgatagttcgtacttttcctcccctcggtttaatctctcactgcttggttaaaatttgggctttgatgtgtgtgattctaatttttggacaatggacaaatgagaattgcatttaggaattgggattactcttgatattaaacttggggtatgtccatcattgtgggttgtgaccaaataccaatgcgtgggttctccgtgttggagagatttttgtgtccggactgggaggatgttaaggcaatacgttaaaacttatttacgtggttacattagggttccaagttcttatttctaagtgtagatctagtctaatttcttccttcaattgagagtgcaatggagtgatgagattggattattcccttatatgacagcttttgatgtaactaccgtttctgcaatgggaaataaaaccgcccttgaaatccaaattgagaacttggttgtcacgtgttaagtcttttctcccttgtaaatttttgcttgttgtgcaactttgttttgcttacgttgcatatttaggttttgatttttttccaatgacgctggatatttgatacagagaaagttattctggaagctgtcatattgactgct

SEQ ID NO: 16847 - DNA, 977 bp, Glycine max
  Intron number 1 from transcript Glyma01g02640.1 (locus Gly ma01g02640) derived from phytozome v7.0 (chr-ID Gm01; pos 2171893 to 2172869 reverse strand)
cgccaccaaagacgaagagttagttcaagtaagttttgctgttattactgttaatctgttattgttagaaattgtgtttttaacggtcaacgtcttggttagtgttaatttggaatcaaaatcttattacaatgtgtgtgtgtgactgaattgggatttctatttgagtagattggatctgatatgtcactatgccaaatggcaatactgaatttgttttcatttcttagtatcatttaattcccctttaacatgggaaagctaaaggcttctttatattgttcctacatctggatttcatctgataccgggagagaacacgtgttttttttttttttggtatatatacgtattgaatgctttcaattgctttataaaagcataaaaaatgatatttaattatttatatttccgatataataaatactttttttttcaataatactttctattttttgttttttttttttcttgtctagtgttaggcatttttgcctatattttttaccgggggtgttaaattgcctacaaagggatatagggtgtgtttggccgcggatatgcaaaattgattttgaggtgatatgatttaatgatttatatttagatatttttattctgaaaacaacttggtaggaaaattcagtataaaattattttgtccaccgtaaaaattacttgaagtttcttcaaattgattaattttggacttaagatcagctcctcaatgtaaagccaaacatgtgaatatttacctaaaatcatgttaactgatatttgggcgtgatttttatcatctaatgtgaatccaaacataccttttcatagatcctagttcaatgtttgggttcatgaacttcagaaataacaccataccattatcattgaaaaatgactatttgaaattctttttctttatcggggaacttgtttgattgacagataactggtggaattttggctgttaagaaagcgct

SEQ ID NO: 16848 - DNA, 702 bp, Glycine max
  Intron number 1 from transcript Glyma03g03140.1 (locus Gly ma03g03140) derived from phytozome v7.0 (chr-ID Gm03; pos 2948304 to 2949005)
gtagtcgagagcgacctgatcacaaataagtactagattttggactatgttcgattaagtatcaaattgttgacagattgcacccattttcctcaaccaacataatctcatacatatatatttaagttaaggaaacaaacattaattcttaccgtgggtctatggttaaatttttatgtttaatttcatcatctaaaattatatgattaaagtgtactcaaataaaataataatatgtattaactaaaagtagctgttatcaaaagaagaaataaacattgaaagagaaggatgttataggaagaaggtgttagggaaagaagaatgagtaattgaaagatatttatatgaaggaaaaaaaaattattgaaaatatttatatgagagtgtttataagtttcaatctttattacataagtttaatatttatggagtataaatcttaattattattaactaatcattaattaatttataaatgttatctcatcttttagaaaagttatatgatataacttctacaaattatttaataagagtttattttaacttatggagaagttgattttctttttttcttttagaagtgtttttaaaaaaaaaatacatccaaacagcttctaattcgctaaccggtccaatcccatctacgttggatcaattgaagaatttggctctatcttgattcaaacaaactcgaaa

SEQ ID NO: 16849 - DNA, 1031 bp, Glycine max
  Intron number 1 from transcript Glyma05g01360.3 (locus Gly ma05g01360) derived from phytozome v7.0 (chr-ID Gm05; pos 876940 to 877970 reverse strand)
aagtcagctttgctttcgaagcctttatctttgaggtgtcattctgatcctctctgtattttgcttctaggttgtaacttttccgctaattccttgcgtgtttgatgtggtgcatgtactggttggatgaggtttgagtatctaattatgttattgcttggagagttagggtgaattcttttgtagaaacatatttgcaatgttttattgttacatttttattagttgttgtcatctctcttgttccacaactgaaccataggaaaatttctatttgtggatcaaaatagtctcactagtgcaggtgatttaagatagaataattgcattattttgatatgattattaaatgatctgatgttgggttccttattgtttagtaatctttttgggggtgaatttattaatttggcaagactttctaattactgcctttgaattgttcattttgttttcttgcccagttaactgttgccttgtttttttagtttttttttcttgtttctttcaaataaatatttgtctagccttttcccagtgataaattctcaattctgcagtaaaaagtataaattttggtcatcctttttaattgttaaactcttctactgtattcatgttgcatgttcttcattgaatagcttgtaggaataactcaatcgatgtttccttgataaaatactttagtaaccaaaaccttttcatcttcatccttactgtgcttcacttctagtgcattgatatatcaattaaccaagaagtactatagtagaggtttgttggtatgaacactggttcctctcctgttgaggactgtgactccatgagtatcaacagatttgactgttggttttgccattggaatgtgttaaataatttgcggcttgtgtattgccagttggtgtttggtcaaaatccttcaattttcttacattccgttcatgcatattataattatcatcctcacttatgctatgtgttggttgagttaatgatatggtgatacatttgaacattgcagttgaaagcaa

SEQ ID NO: 16850 - DNA, 617 bp, Glycine max
  Intron number 1 from transcript Glyma02g45820.1 (locus Gly ma02g45820) derived from phytozome v7.0 (chr-ID Gm02; pos 49968299 to 49968915 reverse strand)
agcgccacctccagaatagttgccgccaatttctggtccgttctctttctctctctctctctcctcgttgtatgtatattgattggatgatttttattcttcgttggtaatgctttgaatgaaagaccgagaaggaaagaagtgtgttccgaataatcgagatgtaatcaaactagaataggatactgagccaaagatgttggttgcaacagagaatgcttgaaaaaccattgaattattattcgcatcgtgttgagaatcaaagtaattgagcttagtgttgtttttgtcattgggttcctatgggaatctttgccaattgatgatgagcttcgactctgaaggatttcaattaacatgtgagggaaaaagtgaagttgtttattgtatactaatcaaactttattcattagttatttagtgcggatgcttgctccaaagtactctgcttccttgttttctaatgctttaagaattttagcttttgtttcaatgctgtttttgttgtgttttttttttcctttttaacgtaatttcagctgtaaggaaaaagtgggtaggattactgattactgataacgttttgtttgatctgaaatgttaagtccagattcgtg

SEQ ID NO: 16851 - DNA, 754 bp, Glycine max
  Intron number 1 from transcript Glyma02g09550.2 (locus Gly ma02g09550) derived from phytozome v7.0 (chr-ID Gm02; pos 7473903 to 7474656 reverse strand)
tggtaaaactggttctttgacatcagggtaagttctatttttccctctctattttgattttttttcctgtggacaaaattggtgttaattatgaagaaactgaaagtgataataaacaaagtggtatcatcattttgctattgttgcaacatatgcttgtggttttaataaaaaaaaaccctttaaactgattttgcaagtttattggaaaacatattctgcagttttatcagggtgtatatcccttgctattgccccactactagattttagggtttttgttcgatatataaaaaggcataatggcatagtcatgtctcaattgctaagttttgatatggctatttttcaatcctggcaaggtttcaaatgtattttggttatgtttcagttatcttcaatttgaaatccattcatggcatatttcttgggtgactttacagagcttaatgttgattttgatattttagttgttctagtttttcctttttaaggcttgcatcattcttttaagttatattttggaaactgcttttgactatatttttttttccatgggggaggaagaaaagaaaagaaaatggaagataatatgtttcattattttcatgtctattcagacatcaaatgctaagcggtttgttttaaataagtggatgacattggaagaacatatgctattaagttatttattttttgtttaagttgcttggttcagtttattcactgagtgaaaatacttggatgtggcaga

SEQ ID NO: 16852 - DNA, 292 bp, Glycine max
  Intron number 1 from transcript Glyma04g39420.1 (locus Gly ma04g39420) derived from phytozome v7.0 (chr-ID Gm04; pos 45630903 to 45631194 reverse strand)
gttcctgtcagaagtggaacaacaaattcaactccgtaagtttttttttttctttttctattttaaaattttttgatttccaaaaggtcatttgctttcgtgttggtgtcaatatatgacaagatgagagacttttacattacatgatatacaaacaaatgtttgtctatcatcttttatagtttgggttgtttatgttctcatttcttcttggataagtgattaatttttttactaactatgacaaagcttggaaattaatacaatgtttttatttttttttacttgcagg

SEQ ID NO: 16853 - DNA, 420 bp, Glycine max
  Intron number 1 from transcript Glyma01g20900.2 (locus Gly ma01g20900) derived from phytozome v7.0 (chr-ID Gm01; pos 25812913 to 25813332 reverse strand)
ccattgtttgtaagatagctcaggtgcctagcttgcttcttgtttcaatttccgtgtttcttctccacgttgtttgtttagataaacttatccttaagtatttctaagagaaaaaaaataataaaataaactttttcataaactcaaattaatttatccacaagttaatttgcaaaaaattctctcataattttttttaaaagatgagaaattttctataaattaatctatgcataagttaatttgaatttctgaagaaatttgtttcaattttttttcttctaaaattatttctaaataagtttgtcccaacatactttttgttgtgtttgaacgtgcaagtgtcactaacatttttttttctttcattggatttattgtccaggctcgcctcagcactgcagctgcaaaggctgtgaa

SEQ ID NO: 16854 - DNA, 988 bp, Glycine max
  Intron number 2 from transcript Glyma04g11160.1 (locus Gly ma04g11160) derived from phytozome v7.0 (chr-ID Gm04; pos 9464340 to 9465327 reverse strand)
aagaggtcgagagcttaaataaaaggtgagatctactctattctctctcgttgtttcctctaaattcaactttttatgatgttttcgttattcaaactttgaaacatttagcctttgaaatttgaaaagaagcttgttcccttttctgccccaaaatatctggcacaatttttttatttttatttttttgctctggttgtttgtgccattgatctgtaatcagtattctgattatattttctggtcacagtctttcactggcaatttgagcacattatcgtgcttatcttatttattcagccccttaatataagtaaatgtttgaaaagggtcgaacgagattggcagagtttgttggatttggataatcggatctattaattaaacctttcttcgttttagaaaataaagtggtgaattgagatattttggttgagctttggatacacatcgttcttgccactagagtagggaagtcacatttacaacatcaggctggttaaaaatagtgatgtgaaattaaattcagaatatcttcgttctccttcttttccctgcaaaaccgacaactttagcactcattcttattctgtgcatgcatactacaatttctctttgagctatcaacatcacctttttgtggaaatgagtcatatcacattcactgcaagtcccaactatctattgtctcagaatggagaaacaccattaaatcatctatcctttgcctccctttccctgtctcccaatcttggagcttgtaaagaaagatattaaagagaaaacattggtttccttttcttatacgtattttttagtttcttgttcctactttattatgtgattctagacttgagtgaaatgaattcaagctcaactcttgaatcatattatgaatactagatcatttttgctctgtctatatattctatggcatctgaaattatgtagttgtgtaatttccagaaagccttgttcggattataag

SEQ ID NO: 16855 - DNA, 914 bp, Glycine max
  Intron number 1 from transcript Glyma02g13180.4 (locus Gly ma02g13180) derived from phytozome v7.0 (chr-ID Gm02; pos 11405480 to 11406393)
cggtttcccagatctgctccttcctcaccccacaggtagcccttcctcttctcgcattagggttttccattttcattcatttttcatctcaatttttgatcctcattttgcatttcattttacgcgagatcctttttccggcctcgtcaatctcccttgttcagatccattttcaattttcattgtgttttttttggtgtgtggaatcgtaggtttttttgtgtaatcgttttattttgcgattgatttgattttgatcaattcatggcgttgcgctcattcttatactgtgaaatgtgaatgataatggaaaagattgtgttatacctatgttgtcatcgaaacaatagaaaatgaaggagattgagatgtctttgttagtcttatagaatgatgatcaaagaacatatgacttttttattccgttttgcaattatgtgcttgttgcttttgctgtgttgtgcattgtctccagaattgcggacaaatatcacccatgaattgggaagtcgtggtcttggaaagttttttaaaacctaaattttaatggaatacaatgatgtagatcaattagcccaagatgaagaaaactggtagtaaaatagagaagtggtatcagcaaagtctggcaatcagttttttgtttttgaatttcatcttgattcaatttatctgttgtttgttgatggctgggtgtgctagatgttagaatgcaaatgaaaatacatttgattaatgtttagtgcatactaggttgtgaatgttatctgaattaatatttgtaggttctcacattttattttgtccttcctttttttgtgagtgtcttttgttacttatgaatttatgtgaatcttgtttgtccatttgaaggctgatactagactgtaactttcagaagtcagttgaagagc

SEQ ID NO: 16856 - DNA, 1045 bp, Glycine max
  Intron number 2 from transcript Glyma02g13180.4 (locus Gly ma02g13180) derived from phytozome v7.0 (chr-ID Gm02; pos 11406608 to 11407652)
gccagaacaccggcaacttcatcacggtattaacttatatttaatttctttttttcccaagttgttatagtttaggctctatgtcaagaaccaactataccaaaagcttaaactgttagatgaagacacatgaatggttttatattatgtctcttaacacttgaatggttttatattatgtctctaacacatgaatggttttatatgatgtctctaacatatgaatggttttatatcatggcactacaagggattaaatcttgtagactgcacacttacaaaattagatttgattgtccccaatatgtgttttaattgtcttatatgtattgtactgtactgtaataattttgttactgtgggttcatatagataattttatgtcaactcacatgttgaaaattcaaaataattaggtctggatgtatcagtctagttagctatactatctgaactagtgtgaaaattatcaagtatttggaaaataagaattatcatctgggttttgtttttactgctatattatgcataagaatcaaaagattgattttgcttattcagtgagagttaatctacttaatcttctatttaggatttgtttgctatgtatttaaccttgaatatcagcagtcagcactgactgttgctcatattgcttaatgttgacttcctatcagtatattttcaatctggacctaggtgtgtttatttgaactctagtggcaaatttattagaatacctttatatcaatgatagatatagagcttccaatcttgtcttgtaaacagaattcgatactgtttgcaggcaattagcatttaacattgtggtgaataaggtgtggttattgtactagagtgatgtcttacaagttgaattgaaactacattcagatgatactttccataacattctgaagagatgcatgaaagctagatatatagcttgtctgcccatgcttagattgtattttccctggaatttatctggattgatatttttctttttcaatttggctgcaggaccgaccctcaaccaaggtcc

SEQ ID NO: 16857 - DNA, 624 bp, Glycine max
  Intron number 1 from transcript Glyma02g06130.2 (locus Gly ma02g06130) derived from phytozome v7.0 (chr-ID Gm02; pos 4904542 to 4905165 reverse strand)
ttcctcctctttcttcttcttcttccctgcccaaggtttgtctcttcttattattttaacctttttctgatttttatcgcaatttttcatttctgattgctgatttcgtggaaaaataaaatctcatgccaatttcgattttgctttcttagagagttcggctaaaatagcgatttgggtttggaattgaattccgttttaggtttcggctatatttcggattcatggattccttgtgagcttttttttttctgtataattattatgatgctaagaatttttggtttcgtttcatttcttcttttcttctgcaatgaaacagaagattatgatttggtgttaggttagaattgtgcaaagattcttctgttttcgatgtattcaaaggaggagagaataggtcattatataaggttagggattttgcgtttgtttgatcttctatgttacctgattttgcttttctatgtacatggttctaccgatttttaatttctatcgattagattatatgcagcataattgacatttgcgttcaattagcctaggaacggtcttaatacatgattggttagttattcaaattttaacgtatgtatgattttgatatgaatttatacagct

SEQ ID NO: 16858 - DNA, 733 bp, Glycine max
  Intron number 2 from transcript Glyma04g35080.1 (locus Gly ma04g35080) derived from phytozome v7.0 (chr-ID Gm04; pos 41370935 to 41371667 reverse strand)
gcgtaagtgcttcacctagtttagattcaaaactggctttctataagaaaactaattataatgatgttattgaaaataaaaattgttccttttcagttcccagttgaggattttttttaaaaaaaatattgaaagaaaactagtgattcttaaggtggttgaaaaaacaaaggaaaatgaactgccttttctgctttgggggtttgattctggttttgtacttttatgccactggcaattcaggcttctttttgcttttactattaatggagccaatttgaagttctgtttccaatttaattgaaatccttttaactatatatataaaccaagggccttttctgttatttccagatccagatttggtactctggattctggaaacaatttgattgctacttccaaatttgccccactggtgaaatactttttaaatattttaatagctttaaaaaaactatatgtttcatactttttggattttggggcattgcacacagtcaagatggaacaatgttgttaatggattctaagtaagtgaaataattggccgactttaatgatgtattctttgatcatttgttgtttatgtttaaaaatttaagaatctccctgccccccgttttacttgagctttactttgtttttgttttttttcttcttaatttgatgagaattttggggacattctgatgcagctgaggccatacttcttggttttcaacattttctt

SEQ ID NO: 16859 - DNA, 599 bp, Glycine max
  Intron number 1 from transcript Glyma04g35080.1 (locus Gly ma04g35080) derived from phytozome v7.0 (chr-ID Gm04; pos 41371772 to 41372370 reverse strand)
aatcttcattcaatttttttctgctcattttcagtgtacgcctttatcgtttctctttccctaacattggagtctgctttacaccacactccacaacaaagatcgtctgcattccctttcccttctcttttcaccccttttttctttctctcttggtctctctctctctctctctctctcttttttctggtgggggcacctcattttgtttttgacttcataatactactcctcttcactaaaaaaaggtgctttcttttttgcatcttctcttaactcctttcttaaactgtgcaattattgtggttttggccattgctttcacttcattgcctaaagagagtccccagctcagctcaggtcaactctctagttgtttgttgcatttttcattttctaggcttagtcattgtaagagagctcccactttttctttgtgtttcttttatcctcttctgggtctttttctttgtggcattgggggatctgggttggtgttagatttgatttttttttttttgtagatttattaatttattggttgttgttgttgtttattcattgttcagagatagaaagagaaggaaaaaagggctatt

SEQ ID NO: 16860 - DNA, 558 bp, Glycine max
  Intron number 1 from transcript Glyma02g46620.1 (locus Gly ma02g46620) derived from phytozome v7.0 (chr-ID Gm02; pos 50529608 to 50530165 reverse strand)
ggctccgtctttggatacggttctctcttctcttctctctgtattatcacattacgccgtcgtttcatagactaattaccgtttgtttagcctaatttcttcgctcaacttttaatcgaagattcactgtttctgtcgatagtgtgttgtggatacagtgcttgaattgttcttcgttgtatggattggtttttgaattatcggttgatcctttttagcggtgatttgtagtgacaacacgattgctgcttaggttagtgtaactgagaagtgaatgtgtttgactcggtttacatgagcacgtgtctggtgttaggttaaattcaattatttagtttcgttttctcgttaataatgtaggttagttatgtgcagtgtgtatttgagtgaaaaataagctggcacgaggactttttttagtgaaaaaaacctctgagaaatttgacttttgatggcttaattgtcatttgtcacttgtatttttttgattttgcttaaggatgaatattatggtgtgtttcaggtgctggattgtttaagaagaaaggttttaaagga

SEQ ID NO: 16861 - DNA, 664 bp, Glycine max
  Intron number 2 from transcript Glyma05g04090.1 (locus Gly ma05g04090) derived from phytozome v7.0 (chr-ID Gm05; pos 3214702 to 3215365 reverse strand)
ccacagcataggagagagtcttccagtactataatgttttgaaagagggagcgttttaagttcaatagaatattttctttttttacccttatcaacttgttgtagtttattctcattgtttttttttatcagcaaatgttgttaattttgttagaaatgttagttgggaggattcgaatctgcgaccttcccccttcaactattggaccaaccttttgtctccagtttattctagttgttgatcgacttgtccggttgacatccggttctgtaatgttgtcaattcatctcataagaatattgtatagaataaattaagataaactatgacttatcgcctagcactaatctttgtgaagattcttggtagttttaagttacggtgtggtgatttttgcttttagtagacacagggcatgagccagaggatatggaaacaggtaacaaactgtgcaggtttttttcggcattgggtttcgatataattgctatttatatgcattcaaacaccgcaagtgagtggcactttttaattaatttgttgtttaataaaggtcccatgaccgttgcagctactggttattatcttccataactagctacaacatactagtaaaacacataccgaattttgctgctgcgattaatatacatttttctagaa

SEQ ID NO: 16862 - DNA, 506 bp, Glycine max
  Intron number 1 from transcript Glyma05g10130.1 (locus Gly ma05g10130) derived from phytozome v7.0 (chr-ID Gm05; pos 10179701 to 10180206)
gtatatattggtaggtcatttacagcattctctaaacaacttttgatgtcttgagacttgagtagaagttttgtaccatgttggttttctaagaagtatttacttccttaaaataacaaacttaatattttcttctccataagttacagactttgttcttttcaaagtaacggtgaacttatgcacttccgaaaatatttttacaattagtttaataaaaacatcaatatttgtaccggatttaccaatattccattccattggttaatgttagaaaagatcagtcgtattgctcataacaaaatgctttcagtgtcttaactatttctccttgtccttgtactacaatatgaaatctacgacttatgtgcttgcatttaataacatttctcttcttattcgttctttcttaaatatgaggttcctttgtgttttctagctttgaccatgttcaattttcacactaatactcatatgtaaacagggacaagtggatattgaattaa

SEQ ID NO: 16863 - DNA, 693 bp, Glycine max
  Intron number 3 from transcript Glyma05g10130.1 (locus Gly ma05g10130) derived from phytozome v7.0 (chr-ID Gm05; pos 10180457 to 10181149)
tggagggctagaggtttgaacacatactggatattcttcaaatgttccatttcattgattcagttgtcatatttaggataaaatatgttttaagtttttgtacttttaatgaaacttattttagtctttgaatttcaaatttgataggtttagttcctaacttttagaaaaagtagtggtttttgtccatcctctcgtttttgtaatgtgggacaaaaatcactattttctagagttcaggaatccaaattgattaatgtatgagaataaatatcaatttttactgaacctagaaacatattttatataatagcctaatcattcatgatttccattttaacatgctcaatgatagagttattcggttcatttggtttattgatgttccagtcttgcagtgcctttatgcatgaagtaatctaactgtttctaagtatttataaaataaacggcgatgaatcttttttccttagatagtaacaaaagattaatgtcaataaagaatagtaggggccttttcttttacaaaattataagcataccccttcttagttagttatgttttttggtttattatgattgatctgttatgacttataagtgatcttgttagcacctatatttttttagtaatgtttacctttgattgaaactctaggttgtcaaggatttggacctaagagaaagacacat

SEQ ID NO: 16864 - DNA, 661 bp, Glycine max
  Intron number 4 from transcript Glyma01g36320.1 (locus Gly ma01g36320) derived from phytozome v7.0 (chr-ID Gm01; pos 48810851 to 48811511 reverse strand)
cttccttcgagtcactagcacttcccgagttacaggtcagctcgctttctttaaatgtcttactaactagtttccctagggtattgattaagaaattgaaaaaaaaaagtattttttgtgaaaatcataggagagcacaaaaaagtcatgggcaacgcaattttacgcatcccaataaaatcattctccttttagtttcttaaccaatgctccaaggacactggttagcatttgtgtttctttaatatgttttctctatgcatttttcccctactaactttagtaggagattggattactaaatattttgccaactatattgctatccttgcaaatgtggtatgatgctcttcaactgttccgttgcatttttaaactaaaaaacttcgtaccctattgcccagaggctcttcgctatgcgaaggtatgggggagggatattgtacgcagccttacccttgcatatgcaaagaggctgtttccggcgttgcatttttaaactattggtgtatttttatttttattttctcaatgtggatttgtcattgagaatacagaatttattatttgtcatataccatgtattagatcagtctttgagctttcaagacacattcaatgaataggttaaagaagacactgatctcttcatcattgacga

SEQ ID NO: 16865 - DNA, 632 bp, Glycine max
  Intron number 2 from transcript Glyma04g43520.2 (locus Gly ma04g43520) derived from phytozome v7.0 (chr-ID Gm04; pos 49078937 to 49079568 reverse strand)
gagatccttctcaaccacgcaattttactttcgaggtgatttgatttatccctctttcttactttgccctcttcattgtaaatttcattatgtataatgttagatatcagaccagatacaacatacctgttatgttacctattgccttcatctgcaatacaactttgtttctggagttgcaggggtctttaagtatttaaatcattatgcattttatcacataggcatgtagtacaagtgtaacagaaggcttctcaaatagatgaaaacagctgctttggtggttgaccacatggggggctaaaggctaattgctcccaaactgaaaataattttaagttcatttaaaaaaataaattcacacgtgttttcttgctcccttctctttcttttaacatttttagcatgttattgttggcacatcattttggtacctttaaatggaggtgtattttatttaattaagttcttttgtccatgtgatgaagctgtgtgccatgtaattgagtctggagacaaatatatgcaatgtattctttatattttccatgcaccttataattgactaacctttcaagtttttatgatgaatggtagctagcaacatcttccttggctagcttgtcaaggtt

SEQ ID NO: 16866 - DNA, 982 bp, Glycine max
  Intron number 2 from transcript Glyma02g07360.1 (locus Gly ma02g07360) derived from phytozome v7.0 (chr-ID Gm02; pos 5858525 to 5859506)
attaactttaactttggaaatcctttctcgaagtaagatctctttatttgtatttttctctgtagataaattatctgctcactctgctgtattttgcagtttatctattcttgctcataagtacatgctgcatgtgacaatttcttacttttaaatttcagtgaatgagtggattagttattgatgtaatgttgtgtaattggttttattattggcctttgagttgagtttaccagcattaccaattgcatatttcagctataaattctgtttggtgcttacttcgaaattcaatctagattttatcatatcttacagcctattgaccagttttctatggtcttccttttgctgcagacaattttctcaattttgtaacttgaagggattttgtttggttgaaattctgttttgttcttcattgttcctatgcttacatttttttcgtttatgttcatttgacaactgttgaaaatataggactacatttctgaaagatttgagatacacactggagaaaaattatcactctctgctcttagctttttattaacacatatatatagtacagagaaagagagagacagaagggggaaagctgcctttggataaggattagacactcagcttcccacacactcaacatgacaacacataaagcttaatacacactcaacctcacacacacacactcaaaacagccttttacctacacagctgtctacacaatacagctgtctacaatatatatttaacaacaaccatctctatgctcatttgggtagtgattgtttatcgatattgtttgttatggcaatatcatattgcaatctcattaagatccttctgttttgcctattttgtgagcaaaatatcattaagacatgtgaaggtatttgtttagtttgctaatcattcatgaagatcttctttttcagagtcacaaatgtcttaaaatatatatttgcaggggtgcttcgct

SEQ ID NO: 16867 - DNA, 890 bp, Glycine max
  Intron number 1 from transcript Glyma04g13600.1 (locus Gly ma04g13600) derived from phytozome v7.0 (chr-ID Gm04; pos 13289223 to 13290112)
gttatactacctatagttctgcaactgctggtaatttatattccatcttctttctttctttttccttttacttacattgatatatactccttcctgttttaaatatatataaaaaaaactcttgagggcagacccgcctcaagaaattatgagacctaagaccaaatttactcaaattttaatttaatacactttcttaattttttttaaaataaattgttatttcatattttaaatgttatttaaattttaaattgaaactcaattaaatatttaaattaatatatatatacaaaatatcaacataaattgaaattttagttaaatgtatgatcttataatcaatattttcatcaattttttttatatatcaaccatagactcaatcattaaatttaaattttgtactaatttcaaaatattttttttaggtaaaggagaggttgaatcttagatataaaataattttctttaactttctcaaataaaatcaaaattttgcttaaatgatataatattcatttaataggattttgattaaactactttttatttttcatatcaaatttcaatgaaaaacactctaagaaaataaatttataattgagattgttggaattaaatattattaatcagctttcttaatgagtgtgaattaatttttttatacttatattaaaaatcagagtagtacatcccattaaataatgccatgtgtcaccgaagtgttgctaacatttttctttctaattctctaattgtgtgtcaaggaagtgtttctaacatttcacttttctagaattccttatgactttccttaacttctaaacctttacttgaactatccaattttaggaatagacggcctccacttcattgcacgcgacatc

SEQ ID NO: 16868 - DNA, 837 bp, Glycine max
  Intron number 1 from transcript Glyma01g34930.1 (locus Gly ma01g34930) derived from phytozome v7.0 (chr-ID Gm01; pos 47417233 to 47418069 reverse strand)
aaattagggacatgtttgattcccatctcctattttttcattcaaagtctattaaattttgaatattgttttcaaaataattgttttaaaaatgaaagaaaaacagaaacagctaagatattttctcatattttgttttcatcttgttcaatttttcatttggtctgcaccttgttcaattctgctgtttgaccaatcttgtaactacaatttgaaagctaaaaattgattttgaaatcagaaagcaaacactcattgtttagtctttactggttatttatttatttcaattcttgtctaatcttcataaaatagaaaatattttctgaaatcacccgtttaggaactagcgagaccctgaatgatcaaccgcggaagagcttgcaaaggaaggggcagttaatctccagtttgacttttaaacatttgtttgagtccttagtgtaatattttaagtgatgttggtttgtccaattttgcttttaaattcatgaaaatgctattcttttccttcacaatgatcattgatgacaacaaaagcacaaagtgtaagcataataggctaacccaatgccaagcaatccttcagcttttttttgctgctgattagaataaatatcctttgatttccgttcaagtcattccattcactttattccccacaagaattctagagtccctcaatataaacacacccacattcatattgagcacaaatcagacccgaaaataccatcacacttgagtgaaaatcttcattcattcattcaccttaaaagaaaatgccttcaccagtgcagccaagtcactctccatcatctgctgaaggtgagaaac

SEQ ID NO: 16869 - DNA, 1025 bp, Glycine max
  Intron number 2 from transcript Glyma03g29810.1 (locus Gly ma03g29810) derived from phytozome v7.0 (chr-ID Gm03; pos 37831066 to 37832090)
tcacatcactaccaggaagtccccctgtggtgaaggtatttttttcactctttccacgcttgttattatggttaatttgccccttttattctctgcttttcattcatgttcattattggcaaatgttagttttttgaaggttagttttgttagcagaggggtcgaaaccgcgacctttccctcttcccttgtcccttaaccattcaacccacgtttttagttttttctgtgttgtaattttaatatgcctgtcctttgtataagttgtagttttagagaaagtcaaggcgaaagtagtgaccgaaaatatctcctaggtggtgaaatgtcaaagatgaggaaccatggaaaagaacttgcttatgaaaaagaactttgtcaattgtcttttgcaatatctcttagtttgcaaggtctggattgtgctaaagggaaagcttgggaggttaagagagttatgttgtttttataaatatgaataagggattattgggaggtttcgatgattatctgttatttattttttcattctgaaaaagtatcaattgtgtaaaaaaaatgtgttttgtttcgtttttcatttttttttttttttgaagagcagggcaaattgttcaagttatttctctattgttctcaatttattttaattgaatgacatttggaacttaaatcagaatgttcttcaacaaattgtggtgtaaattgagtgtcctatgcacatggtttgcagaattgtctcttctgagttttgtcatttgttatcatgtgattgattttatgtgacttgtgggcataggcattcttgcaatctaaaacatggaaaaactgctgttgcagctaattgtgtgttcatatgttttctacggaacacaaatacaattatattagttagcttgtttatttgatttttgaactattgtgttcaatgtatacactttctgaatgctgtttattgttgatattatttgatttctgaatgccttgtgttcatgaaactgccttttgtttttaggtaccaacac

SEQ ID NO: 16870 - DNA, 966 bp, Glycine max
  Intron number 1 from transcript Glyma03g33790.1 (locus Gly ma03g33790) derived from phytozome v7.0 (chr-ID Gm03; pos 41274820 to 41275785 reverse strand)
ttttctctgaatctaacacagacccgattgctacggtaccttccaatctctttatttcggttttctcctttacttttagatctaccattttcacgccaatgcagcccttttcggatttcacgcgctttcttactataatcaactcgttttcgctcccgtttctcacgatttccttttctcattcaccgtttttgtttctctatgctttctttacataatcaacgattgaattttcatctgcttgtgatcgattttgttgttttgtttctacttatatttacagcaggttttgctgccaattcgtttgaaattcctacatcgtgtttgagtcactagtgtagattgttgattttgctactgcaaactgttcattctttgtaaatattatgattctattggacatggcgttgggaattgttttttttttatttatctgttcttggaactgattgaatgtataatcacgatggattatttctgtatgctgcctttcaatttgacagggtgtgcattttgatgcatttgtttgatctgctttcaccacgatatgattgtcttgaaaagaaaaagaaaaaaaaaattaggttttcatcttcaagttgattggcattataataaaattgaatctctgcaacaaagaaaaacaaaaggaaatcaatacatactctactctagtgtctaaaattgaaatgcagtacataatttgtgtggtgatgattctcctcctcctattggagtgagaagaagattgtacagtggagttatttctctaattttttgagcttaaggtttttggtgttacaatataacaatagaccttttcttgttctctttccaagtggtgtttgcagtggcttgtttgcaaaagaacttgtttgtgttgcttaaggacctgatttatgtttacttttctattaattttgatttaaccacttgttaatagttatcaaccaattttatcacaga

SEQ ID NO: 16871 - DNA, 843 bp, Glycine max
  Intron number 2 from transcript Glyma03g36130.1 (locus Gly ma03g36130) derived from phytozome v7.0 (chr-ID Gm03; pos 43157415 to 43158257 reverse strand)
gctcggtaagtctcatacattagcagctgcataatttcattcatgagaaatgctagcaacacattcttttcacactcctttattgtatgtaattcatgtaagtccatatgtgagtttcattccccgtttggcgggtttcattcccaaactagtgtagtgagacacatgaatttcaatcaatgagaaaaacatgttgtaaggagagtgttagattgtgtgttactagcactcctatgtgatttcatttatgcaatcttcataatcataatcagaaagatatgatgttctaattagttaatttgttttgtgttgctccctttgatcaatgtagtgctagacattgcctagagtatgttctgttatttcattaaattgtcaaaggatgattaggtccttatgaattatgataatgggttagtttgtttaaacttatttgttaaaaaaagcacttattttaaataaaataagcagctttctgtttttttagtgtttgtctaaactacttctgcttattctaaaattgcttattttaagtttaaacaaactggcccaatgacttattggcaaatgatgcattacattattcttaaaaattgaaaatttccaggttacaaaggagcattttctttcttttggcactatttatagttttatactaatatttatctatagaggagtgttggcaagacactattattgtatgattcttaatatattttagccaataaaagtgtggtattcaaaactgtgagagttttgtaataaattatcatttcaatgctaatgctaatgaatgttttgtgaacagcaagttggtggtaggactgttaaggtaaacttccc

SEQ ID NO: 16872 - DNA, 996 bp, Glycine max
  Intron number 3 from transcript Glyma05g04260.2 (locus Gly ma05g04260) derived from phytozome v7.0 (chr-ID Gm05; pos 3393714 to 3394709)
aatagacgtgagatataaaatctactcttttattttatattattattattattattattattattattattattatgattatatgactgaaaagtagtaactcaggtttctctccttcaaaacgatggtgccctttcttgttcacccatgatcttgtttctttaataatgaagttatcttttagatgaaagcaacatttgtcgtattaaaatgtactgtagtttttcaaagaaaaataaaacatgttgttgcttttatggtcaatatttgacaggatcggttccttcggtagaaggaaaagggtcttttgaggcttcatcgcgaaagtgcctaaacccttccttgtttccaaacgtacatgccctaaaaaagttatcaatgatcctaatacgtaattaatgaccaggtctatatatagaacatcaccaccctaattaagcctagaaaaggttctcaatatctgggaagttaatgaatgtaaaagaacagcaagtaatacctagctattaatttctgattctagggcacagtctgtgaggctgtgtttcattttcacttttatcaataatatttaatttcattttgattaatttttttgttagaagcaccgacagagatgaagagaaacgtaggttaactttggtgttcgtaagtggcatggggaaaaataggtggtagagagagagaaagacatatatagggcagtttcttctcccccggaattatagttgcttaaagcttttaacactgagtatatcatcagaatcagaagcatatatatatatatatatatatatatatatatatatatatatatatatatatatatatatatgcagacagagccagtaatgctccatgccacgaaaatagagaatttaaattgcaagaagaaaataaatatagcaactgaaagtcaaaggaaatgattttgatatatgactggggtgccattgtccagctcctgagaagagacagagagtcccctcagcgtac

SEQ ID NO: 16873 - DNA, 556 bp, Glycine max
  Intron number 4 from transcript Glyma03g01220.1 (locus Gly ma03g01220) derived from phytozome v7.0 (chr-ID Gm03; pos 972526 to 973081 reverse strand)
tagtgtgtgtgtgtgttttttagggtaaaatatgttttcagtttctgtacattatatgaagcatgattttagcccccgaacttccaactttgatcaatttagtccctgaactttataaatgtaatagtttttgtccatctttacggtgaaaatgtctttgaaaagggacaaaaaccactgtttttctaaagttcagggatcaaattcaacaaagttaaagtacaaggactaataccaattttaccaaaagtacaaggactaaaaacatatttcactcttctttttaatgaataaaaatgggaagtggaaataaggaggaaggaaactgatggctgtatcaagaactaatttggaatcatgctttcataatatggtcaaagaaagaatctactctactatacatttggtttgtcaattttagttgcctatgttttgcgattaaaaaatgaaattgcatgttgttctcaccagtcttaattttagccattactgcaatgtagagatcactattttcttctacaaaaaaattcgtacaattttgcttgtgaagttttgg

SEQ ID NO: 16874 - DNA, 938 bp, Glycine max
  Intron number 1 from transcript Glyma03g27030.1 (locus Gly ma03g27030) derived from phytozome v7.0 (chr-ID Gm03; pos 34566579 to 34567516)
gagaaaaagaagagccaccgctgcgacgccgttcggtacgctcttctttctcttcagttttttcatcgttgatttctagggctcagatctgttccccctttttctttttcttttttcaattgcgttagggctctcgatctctgagtttcttagatccgaaattcgatcttcgattttttaaagtggtttttttttgagaaatttttggacttaattttctctgcagttattgccttgggttttcgatcaatttttttttttctatttttgcttgaaattttggttatttttattatctttttgttttgaagttcttgtgagctggattttgggtttttgtgattgggtatggaaaatttagataaaaaatatattaattttgaaaaggcaagttgtgtcctttgtttacggccaagaaataagtgctatcacttgatcgtgtgtttgtggtattttggattgtattagcacacacacacacatacatatatatatataacagtgcagatgatgttaatttaagaaggcaatttagattccacttgtggtggccagagactgcgattttggttttgagtttaatgattatgattctaacatggaaaggttttgttgtgtgaaaatagtttatgtaaaattgtgaacattataatgtgtcttgcatgatttaaccatgcatggcgatgcctatgtagttgtggtttttactatggattttatggtcgtggggtgaccatgctttcagtgtattagtgttgttctgaggtggtggggatatgtttactgattgagatggattctattgtaaatgttaaattatgcaaagctaatgaattgaaattccccccctgccacgcactgaggtggtaactattttctctcttaaaatttaaaattcctccttctcttgtgtagtgcatttttgaggtgccgctgtc

SEQ ID NO: 16875 - DNA, 385 bp, Glycine max
  Intron number 2 from transcript Glyma03g27030.1 (locus Gly ma03g27030) derived from phytozome v7.0 (chr-ID Gm03; pos 34567635 to 34568019)
agaaccatccagataagggaggagatcctgaaaaggtaagactcacagtttttacttaactgcactgcattttgattatcatatgcaaatgccctgctattctattaggatcagcattcacaacttgaccatataatttgattataaatattttatattagtaaagtgagtatatgtaaagagatttgatattaatgttgcctgaagatgacttgggcatgctatatttttgtgttttaagtcttctcatttatataaaggatgttattcacttgctaactttttatgttgagaaactgccaagttttctctaagctcttgcttttttctgttttaatactaaacatctgattcatatatcagtttaaggagttaggtcaagcat

SEQ ID NO: 16876 - DNA, 931 bp, Glycine max
  Intron number 1 from transcript Glyma02g42880.1 (locus Gly ma02g42880) derived from phytozome v7.0 (chr-ID Gm02; pos 47806723 to 47807653 reverse strand)
tgggttgaaatcgtggtgaacattgacaacataaggtaatcaaataatatttaaacaattaaaaaaattaatttgatattttgttagttaatctcacaatttaatgaattaacattagaatttttctaatttaattttgtatcttagaagacacgaaaaaaagacataaaaattattatataatttgaaactatcatgattttgaatttttgacaaatctttatataacacattttttttaaaggactgtatataacacaacacagtaaagtactattaattctttcttttgtaaattaaattttttagttatatatatatatatatatatatatatatatattgtataaagattagttgattaatttgaaactatatatgtaataacttctctaatatcacttgctatctttatgtgtcaatttttttttcatctaaaaaaacgactccaataaaattaacaaatccgagagaaaatattattttccaatcgcatgacatttttctattgaaaagacagaaaaaggaggtaaaaaattgaaagtgatcatatctatgtatctcaacttcaacacaataaaatcaacaacttcgcgagaaaacattattttccaatcacatgtcatttttccattgaaaagattgaaaaaagagaccagaaattagaagtgataatttctatctcaaaattgagagaaaaaaaatatttttcaattacgtgtcatcgttctatactggagagagagaaaaaaaaagagataagaaatgaggagcaatcatttgcatatacttttttttgaaattttacaacacccaactaaaaatatatgacttgtcatcattttattttctttatatatgcatgtggggtgattttgattcttattctttatcatgttaaattaaccaatatttacatttctgtggaaag

SEQ ID NO: 16877 - DNA, 447 bp, Glycine max
  Intron number 3 from transcript Glyma04g01770.1 (locus Gly ma04g01770) derived from phytozome v7.0 (chr-ID Gm04; pos 1184356 to 1184802)
gggtttgtatatattttgtttttgttttacctgactttttagtttacatacattgctatgacgataaagtttgatttttccattaatacatggcttacaagttacttggatacatttgttcttgccctcctcaggaattaggatcatatgcttaatcagaaagtttgtgttctataaccactgttttgaatccaacctttcttggctcctgtaatactcatgaaatgtattatatctgatgtttgatatccattaaaatttggcacagctgaaaattagttcaaactagttatatagattagagtgcaaataatttaattttttgctgggagatactgttatattccgtttattttgttgctcgtctggggtgtttcagactcaatttttttgtttgcatgttaagttcaacaattgattaacttctactcattgttcaggtgtttg

SEQ ID NO: 16878 - DNA, 921 bp, Glycine max
  Intron number 5 from transcript Glyma02g06190.2 (locus Gly ma02g06190) derived from phytozome v7.0 (chr-ID Gm02; pos 4942181 to 4943101 reverse strand)
tgggtttatctatccttatctggagttgatcctaggtaagtacagtgttctttctgttttgcaatctgagaatttgtttgttgactgttctgccatcgtgtgattttggtctcttttgcttaattgtgctctgtctgtagctgattgtggattgtgtttgtttttaatgggggaaactacagtaacaatagtttattgtagggaatgtgaagaaacaaatcctgctactttatgaatttccgtttcatgatgttagtatagtttcaaactttctatacggtttcaaaaagttttatgttgaggacttaatacaatcctcctcttttagtcaggcttgagatcacagagttaaggtgtattggaatgatgaaatcggaccttctccctgcttttgatcatattgtgtttggggcattatcagtgttgttaaatatcttttttgacaacctccataagctattgaggccgagggaggcccaccatggcagcaccataaggcacaatggcatgtttatatggcagagtttcagccttccaccatgttctgccatccaccattaataacactgggcaatatactgtggctactgcctagtgatcttctaaatccgtggctgaattcttgcctttgcagaattcttattgatttttctttgaattccatactgtcatactacttgaagatgtgtttgttggtatacatgtatgtagtaaacagttcttttcatttattgaaccactgtattgtctttgattgttactctgaaaatgaaaatgcaatgaagcatcagtggttgtaagttgtaaccgagataatggaatgtaacttaaagattgtttctccttcatatcagtacactagttaatagaatcttgtaattgccttttaccgatctcagggatacctttgtgaacactttc

SEQ ID NO: 16879 - DNA, 359 bp, Glycine max
  Intron number 1 from transcript Glyma02g06190.2 (locus Gly ma02g06190) derived from phytozome v7.0 (chr-ID Gm02; pos 4943923 to 4944281 reverse strand)
ttaaaaaaagaaaactcccatctttttacaaaaaggtatgtttttagtcttttggtgaaatttgattctcttaactttaatcttgaaacttatccttgaattttacaaaaaattataacacaaattattttttcaaaatcgtatcataattaattcacttaaaaaaccatttcaatccattttatttatccaaacaaaatttaaaaacaaaaaaataaaatttaaaaccaggcctatttttgttttaatttcaatccttttttcttttttgttcttaaattcattttcggttcttccccatttgcatttcttccgtggaaccagtagtcaaaacttgaaatcaaatcaggagcggggga

SEQ ID NO: 16880 - DNA, 751 bp, Glycine max
  Intron number 1 from transcript Glyma01g26220.1 (locus Gly ma01g26220) derived from phytozome v7.0 (chr-ID Gm01; pos 34484669 to 34485419)
acaaggttagcaatcttgctttgttcttttcttccactattttgattattgcatatttggattagtgtttttttttttttcacggaatgtttgaattagtgttgaatcatgtaaaattcaaatatttagtagattttaggtaaatatttgtatatttagtttaaaattgattgttagttgaattaatttaagtagtctttgtggtggataagaaattttatattgagttttattcttaacttgttaaaaaataaaagatctacccataaatcatttaacatcaaaaccaattgtataaattaatttataaggctctatctaaatcattgaggtatcaattcaatccaaatttttatttcttaaaaaggacgtccagtcaaacaactttctaaaagagaaaatttaagtaaagattttggaagtgtttttagtattgtattttaaataaataaaaattagttattctccgataatttaaataataaaaatttatgtgaaagattaatataggtcattagataaagctttaaatttgactagatgataacattaaaaacactaaaatgcatgtaagtttagtacttttgaagagctaaaagtatctctttttagcaacaaagatctgtaaaataaagttcttagaggacacttttttaaagagaagtgaaagagaaaagtatggctaaagcaagcactactatagggtagagattttaagttgtcttttttggttttagatcttgcctgctat

SEQ ID NO: 16881 - DNA, 415 bp, Glycine max
  Intron number 2 from transcript Glyma02g06790.1 (locus Gly ma02g06790) derived from phytozome v7.0 (chr-ID Gm02; pos 5451260 to 5451674)
aaacgatactgcccaaggttggaacatcttcaataaattcttagccaataactgtgcttttgcttctgatgtcataattttcatacaatttattaacatgtgtgtgacactctaagatttaatggactgatttatatgttctttcttaaccattaaaagaaaattgatgttgacatacagttctgctttatgtatactactagactgatggtgaaaatgtttgaggctaaatcatgccatgtatgtgtttccagtcataagattattttgcaggccataaatgattatatatgtttagtaattataggtctgctatgaatttcttgtcaagtatggctttctgtttgtgttgacttttatttttggttttttgactccagccaacgtccaaattaattaaagaaattgcggtgtt

SEQ ID NO: 16882 - DNA, 856 bp, Glycine max
  Intron number 1 from transcript Glyma03g22790.1 (locus Gly ma03g22790) derived from phytozome v7.0 (chr-ID Gm03; pos 29369272 to 29370127 reverse strand)
cgcttctcgctccttcctcctgcgatcgccccaaggtctctttccgcatcgctgattctctcaccgtttttcacttttcattttcacttttatctttctttctttctgcattttgtggtaaaatatctcgaaacactgtgaactgcactgtgctgtgatatgacgatgatgtgtttcggttggttctacgaatttgtacttggttttggatttgttgaactctgtttggttactcagagaagcaacacggagatgaaaaaaactgacattctaacgattaacattcgccgataaaaaaacctcagagaagcaaccctttctttttttaaaccgattctctaacgtgcttcagcttttgatattcgttttttcttggaaaatctggaggaaacttgtttacaaacttttttttgatgaggttttaaaaaatggtccgactgaaaaaaattgaagaacattagagaatcgactttttcttttcatggattgtttgcaattttaagaatcacgatgagccgcaatttaaaaccttggactgttcgcttgttttgtttgtttatttatttattggtattgttttagttgtcttgattagttctcaaagtttggttttgggtttggtggaaaactgtgtttggttgctcagaaagtagggttggtgggaacaagctgtagcattttctgaagaaaatagagtttgtgagagttgataaggattttttttttttttatttatttattgtgaatctttgattgttcagaagagtttcgttctcatagttagtgtattggtgtattattttgatgtgacattctactaatttatatgtgggatttatgattcaggtatatacca

SEQ ID NO: 16883 - DNA, 610 bp, Glycine max
  Intron number 1 from transcript Glyma03g39110.1 (locus Gly ma03g39110) derived from phytozome v7.0 (chr-ID Gm03; pos 45315094 to 45315703)
aggttcctcttcaatttcttttcccttttttttgtttccccaattgtttaatattgttttttcttttggattcgttaatagtggtggatctgcccttatttgcttttcatattccgacgctggttttaatctatactgcgaacattatccggttagttggaaaaaatagagaaaaaaagggttattatgttttttatgtctttctgaaagaaatttagcagtgttacttagacactcaaatgaacataatttatttgctattagatgtggagccctttgcttgttttagcaaggcatgttgttgacatagacttgttcaagtactcagcttccttacattaccttgctctatgcataattggctattgacatttttggtctattgcattctcattggcatcgaacatctgattaaatttgattggttttttctatttttgcactgtggattattttctggttttggcaagcaagacattttgaccgcaagtgtgtactcttagtctatagtaggttcctgaaattgccatggtcttggtgtgatgttttttttattataagagttgtttttgcagagattagtccagcatcagcctacccaatatcctac

SEQ ID NO: 16884 - DNA, 491 bp, Glycine max
  Intron number 1 from transcript Glyma05g08400.1 (locus Gly ma05g08400) derived from phytozome v7.0 (chr-ID Gm05; pos 8321179 to 8321669)
agtcaaagtaaacaaagagatacagaatcagggtaaaaagacacgatcaattttatttttatggattttgatgtgacacgagtggataacgtaagtgcaatattgtttccttcctgcgttataatagctaggataaggcacattggcatacccaggtaccaaaatccgtcgcatgcacgaatttgaataaaactaaattcatttacgtcaccatatgaaaaataaagtaggagtatttagggaacagcaaagacatcaaccgaccgaaacagaaaccaaagtgaaaacaactggcggagacggtggatttcggttgaaaccatcaaacttccccctgccacagtgtaccacccttctctttttttgggaatataattttaaattaatgatttatgttcttcaccaaatctcatcagtataaaaatgccagcaacttcagcaactcttcatccaaagcttcttcagttattcatctgcttactaaaatttct

SEQ ID NO: 16885 - DNA, 607 bp, Glycine max
  Intron number 1 from transcript Glyma04g02540.2 (locus Gly ma04g02540) derived from phytozome v7.0 (chr-ID Gm04; pos 1794610 to 1795216 reverse strand)
tgttgatttcctacaccagcaacacttttcccacggtttctttctttcttcctttctttctttgccctttctcttctcaattataacggaaagttagttaaaatcacacacacacacacacacacacatatatatatatatatatatatatatatatatatatatatatatatatatatatatatatacatatatgcgtttcaattgtaaaactccaacaatttggagtttccaactgatgtttgacttggtttggaactttccaaatttgaagattcactatattatgattcttattgtattttgaaacatccttaatgaaccaagtgattcaaagtcatttaacactgtttatcacttagagcttatcttttatgttttgaataattgagtttgagaaattgattctgagcacttgaccaaagcagggatgcgttgctactgctttatttttatttttttttttttgtcagctttccaattgattttggttttgttttttaacgaattatggctttgtggtttgtttctttcacccttttttcatttatgtttttcatcattgataacaggactacgtgcccacggtttttgacaatttcagtgc

SEQ ID NO: 16886 - DNA, 747 bp, Glycine max
  Intron number 1 from transcript Glyma01g01220.2 (locus Gly ma01g01220) derived from phytozome v7.0 (chr-ID Gm01; pos 861857 to 862603)
gaagtggagcttccatttcatagccggcggtgaaggtacgatttccgtatccattgtttccttttggttagttccactgtgattgaaaatgggaataaggtagcggcgatggcttgagtggttgtgacattttcacaaacaccaaaagggcaatatgagttctgatgatagtgtggatatctttgtaccaaccagttggttttttttattcagttatttttagttactatgagttggtgcagttatcatcatctccaataattgcgttatcatgatcgcaagttttaatactcttctgagtagcatgaagagcaattcagatgtgtttgttgttttgtgtagtatctgtgctagtttactttttatatatagttttggttgggggtaggggtgtaaatgagtcaagctattcgttagctactcgagctcgacttgttaaatgaaacgatcaagctcgcttgtatgacctagcggacctacagtagcttggttgggggatgctattgatgtctatgtttcttatgtttttgtaacttctcaattaatctttgttacatcttgcaccgaaggttagtaatcaataaataaaattcatttgtctacaaaaaaaaaaaaaacaattatagtgacatttgttctcattatatttgattatataattgaaagatggtattagcaattcatttgttgctatatgatgcatttcatgcagatagatagttagcagacttggctgaccctgagcag

SEQ ID NO: 16887 - DNA, 940 bp, Glycine max
  Intron number 2 from transcript Glyma01g01220.2 (locus Gly ma01g01220) derived from phytozome v7.0 (chr-ID Gm01; pos 862789 to 863728)
gcagatattatcaggtgagttgattatctgtaatgttgtaacgagagtttatgcattataggttttttatatgctgttttataatgctttctttgatgtaagcattgcatgtttgtgtgctggtgtgtttttgagcctagaaatcacttcaagaatgcaaccaatcatccttcattgacttctactatttagatggtggaactcatttaattcatatttaattttactgcttcttcagattaatgaattcatttgccaataatgtagttgttttttcttgtaagattaattcagacctggtatttatttgtgttacatgtttagaaaattttgccactttgcatttaacctcattgtagaaactgagctactagtgcaccagtaatatgtgatcaaaccaccatcttttaggtgaatacttttttttttctgtttaaattaaaatctcgttgcttgtactgttttttgttatcagggttgaattattcatggacagagctaagcatataaaattgccaaattaatgtaatgtaggttgaattaaaaaaaggctttggtggtacaatttcacataagcatatgtcaaaggatttggtgatatgatgtttcacataactctaggtttgaggtggtgtatggtagaagttgatttattagacatgtaaatgtatgactatcacagtactatttaacccaatgtggctcaaaaaattgaattggaacatacttgaaaatttatgcggaaaaatgtttattgattattgaatgtgcggtattctgcttgcagctagtgaagtttcagcaaactttgcttagtttgagagcctgatttgcgaaataggaggatttaaaaattatttttttgagtttgaatcgaaattatgcaattgtaatataatgtgtttccattttccatttttaattgctgtagggcctactg

SEQ ID NO: 16888 - DNA, 1041 bp, Glycine max
  Intron number 1 from transcript Glyma03g27460.3 (locus Gly ma03g27460) derived from phytozome v7.0 (chr-ID Gm03; pos 35174756 to 35175796)
aagcaaaggcaaaaaaaaaaaaacaaaccaccgaggtatttgcatcatcattgtcccttttgcttcactcacactgatactgatccaatccaatctttgtagttgttgctctataaagggaactcacacactagattcagaccaccccctccccccccttcctttaactccttatttcccactttacccttctcaactctgattctgttactgttactccacctcaatctaaattcaaacatacccgtgagtctcttttagctctcaaacttgcaaatcagagaccctttatatttaaatgattgactttttagtcttttttaaacttgattgtgttatggataagaactgtttcataatctggtcttattattatcaatttattattatgtaacatggtgtgggtgggtgcaactacctgcaataatctactgttcattttttttcgaatttttggacattattcgaattcaaaatatatgtcataaatcatactaatagttgcattcaaatgcgtttcaaaaccttcaatttgagctcagtgcttgcttcctactgtattttactaaattctcatgttattcttttgtcaaattcctaaagagcttttcgattcgtcaaattggtcaaactcctaaagagcttttcgattttgcatttttcgattagagttgacttgaacaattccatctgattattgacatatcacttctttctttattatgctctatttatccccttgtaactgtgagtttagataggtcatagccttgatattgatacaccaaaaagaaaaaagaagaaggcgagaaaagggttggttttttgttgtcatattgtaggatcaagcggtggtgaaacaataactattagcttgtttgtttcatttgtttcctcttttgtccacctctgatcacatgacgtgttggttgttgtgtttttaactttggttgtttcttttttctcctatataataatataatcaaagtgttcctgttcattacctctaccttgtgttgtttcagattgcagataggttga

SEQ ID NO: 16889 - DNA, 422 bp, Glycine max
  Intron number 2 from transcript Glyma03g27460.3 (locus Gly ma03g27460) derived from phytozome v7.0 (chr-ID Gm03; pos 35175958 to 35176379)
caataccagagacactttttggcatattctttgaggtaaagatgataaacttgcatctagcactcattgttgtttatttgctccactccctttataattactttttattatgctgatacctgattattatttctggtgtattatgagagttttcttttaaatgggcttggatagaacatgtgctatgcatggtttatgaaagagataagtatgaagataaaatatgaaataatttatttttatgaatattgtgtatgtaatgtatcatctatagtaatacgagttatgagtgatcgaataaactgcatggaatttgggattatgggaatgtgcatttgattttgtattcaatttgatgatgcctcttatccaaatatcagaaaatgaccagtttatggaatttcatctacaggaaattaatc

SEQ ID NO: 16890 - DNA, 1041 bp, Glycine max
  Intron number 3 from transcript Glyma03g40020.1 (locus Gly ma03g40020) derived from phytozome v7.0 (chr-ID Gm03; pos 45913858 to 45914898 reverse strand)
gaggtggaaaattatcaccttaaaagtagcctaaaatgaccttgtaaaactttaaaatacaacaatgtaaataactacttctgtgaagcagggatctggtatatttgaatgtgatgaacagaagaaggggctgcttccaagagttgtaaaaggactttttgatttcttaaattctttggatgaagagaaaacatattcaattaaattgtcaatggtaaacaccacggagatttataccaatgagctataaattataagcaaccacacaagtgaatttgacaccacattttaaccctaaaatcctaaaattcaagtttgagtctttccttcactcatataatatttagcctttttattcttatacgatgtgagactttacctcacacgttaaaatttgaaaaaagtagttttgaatttggatttttgaagtcttcaaaataactctatcctcttatatagggacctatttgatttatcaaaagataatatacaaattaaggagattaaatgacgaggaataatgctgcctggtgttacagaggtgagctgtttttatgagaaccttatatctcatttcattccgattattctttttctatctgaagttactttgctgttcagaattaaatatatggtctttttttacaagactaagataagatgtaaaattttagttttgaaacttgtatcctgacattaaaaaatataggtgttggcttttaacccctttaagcttgatgttattttagaaaacatttaagaataaactggtaggtgtagaataagcttaagtacatgcatacacgtgtaggtgtagaataagttgtaccctttctgttataacttttgggccttggccaatccaatagtaggtgtagaataagcttatgtacatgcatacacgtgtgctttaagtcaaattaggtaaggtctcacatttgtttcaccaaaaaaataaaattggtgattcttatcttattcagatattgacatttagtactaacaggaccttttgagtttttccttcagatcactgtactg

SEQ ID NO: 16891 - DNA, 977 bp, Glycine max
  Intron number 1 from transcript Glyma01g17230.1 (locus Gly ma01g17230) derived from phytozome v7.0 (chr-ID Gm01; pos 21160644 to 21161620 reverse strand)
aagattaagaggaaggaatttcttcacgaaagggggtattttttatttatttatttagttttcgctatgatttttatatgaccctttaatcataaagtattagtttactagaatgagaaactctactgagtagacgaagcttgttggcaggaaaaactgaaaaggaccaagtctagtgcacatgtatgcataattaggaattgaatatatacattgataatttatccccagaagtttcaattatgattttcgttgttcttgttgtctctactgtcgcatatcctttggacttaccggtgtaagatgttaaacaatgcataacctttaggtaattgagcttttactaagttgatcaaattggtttggttctgcactttttgaaatcctggtttctgtttctgatttgagaaatgtgggaagcagatttgtatttcacagataatgccgtgtttttggatggattatattgtttggtagacaattcaattttgccatatctaattgatgaatgaattttatgcggtcctgatgacaactatgcagttttttctggttttgtaaacaatagtcacgagcctaaatggatttgactcaataatagtaaaaagtttaatcaaaagtgtgatgaaatataaattaagtcttcatcttacagatttaagttttcttggatagtttattcagatgaggtttattgttagtggcatttacgttttgcactttttaaagttttatataaaagaaaaaaggtatttggagcctgctttgtttcttcaaatcagtaaaacagattccatatttagtaggcattcttcggaggtttatttctattagaagagatcattttaacccaataagacttttgtaaggctatgcaattaggatcaactagcataaactagaaggaatgctcatatgtaacacaatcctcttgagtctcaggccaaattcgctaaagcataccctccctgtagaca

SEQ ID NO: 16892 - DNA, 751 bp, Glycine max
  Intron number 2 from transcript Glyma03g24180.1 (locus Gly ma03g24180) derived from phytozome v7.0 (chr-ID Gm03; pos 30906503 to 30907253 reverse strand)
cagccaatcttcagttgcaagtttagtaaggacaggtgatatgaaattcacgatctattttactttcagttatgttgacccttctaagaaatctttagaagtcatcatttagttgttctcaaataacttgcatttgagttttaaaattgaactcaatatcatgttttacaaggtttttcttttatcaacataattaagtatggatctggctcctctaaagtgaactcactttagagagtgaagtaacaaattccaatcgtggatgagaaaatcaatgattaatattatgtgcacatgcattataaatcatgcatgtgttagaatatcaacagttgatttgtttgtcaacaacttagatttgttactttactgactaaagtgaataactcattttggaggagccaaatccattaagtataattttctttgcatcctgaagcatggacaaaacacttataccagaatgtctgtggactgatgtagttaaccagtctcctccaatggaagcttaaattatatttcataagaacacaatgcctggttttgggaccaaggaattaaatcattctctcaaatcaatatttcaagtggaaaattggtagtgtattttcttcattgtttccttgtcagttggttggacctgatatctgtaagacgtgcaacatttgtctaaacatttgttgttaataaaacttttgatagctatggaatgacagggtttcccagattgactcgttgagcgcttactggt

SEQ ID NO: 16893 - DNA, 531 bp, Glycine max
  Intron number 2 from transcript Glyma03g36830.2 (locus Gly ma03g36830) derived from phytozome v7.0 (chr-ID Gm03; pos 43671155 to 43671685 reverse strand)
ccttaagcaaaagctagttgctgagtggcctcaaggtttgtcttcttgtggggtgtgtctgtataaaaaatttcttaagacttcacaaccactttggttcactaaaaatatatttggcaacaatttggtcattcaaaacatttgtgggaacaaactagttccccaaagacttaagtggcattaaaatggttaaaattgatgtcacatgtaggactgctttgaatatttgatgttacaacttaaaagtctttggatcaccaaaatgaacgatgtcatattgataattccttattttattttatgttggatcgttgttgttcaatattctatgtactttgtgttttctctaagaactaatttgaaacatacattagacattttttggcaattgactgtaatatgtatccggctatatatttatcgctccttttagctacagaaatgcgttctttctgtgtgcatttatcctttgttctatttgtattgtgagtttatggaatctttctgtttacaggcaaaccagttacacca

SEQ ID NO: 16894 - DNA, 434 bp, Glycine max
  Intron number 1 from transcript Glyma02g11730.1 (locus Gly ma02g11730) derived from phytozome v7.0 (chr-ID Gm02; pos 9926696 to 9927129 reverse strand)
aacccgaactgggatcgacccgcgtcgtctttcaggtttttctgtgtgaaaatttgcatcaagtttgatccttttttgttttttgtgttcatttataattgcttggattttcgttgaaatcttgaattgagtttcatgcatgcttagtgtttttagtgttgtagacttgtagctatgatctctatctgtgctgtgctctatttagttcttaagaaatagacaagttcaaactgtggatacccatgttgtggatggagaagatctcagttatctatgttctgggtatgagtggaaactggaatcaagtagctcattaagttaaaaatcccatcttgtctatgttctcaaattgatattattttgttgttgttgttatttgttgcttatggtgtgtatcacttaggttcttgtctttttctttatgcagacaaagt

SEQ ID NO: 16895 - DNA, 452 bp, Glycine max
  Intron number 1 from transcript Glyma05g29700.2 (locus Gly ma05g29700) derived from phytozome v7.0 (chr-ID Gm05; pos 35241345 to 35241796 reverse strand)
gcaagctcagagagcaagttgccaaacagcaacaggtttgctctcacttcccttcaagtttgtctttttatgtgtagtcacttcaagtaccgtgtttctcttctcaaattcgcatatgggtaccccaaattcccaaaatttggcgatcacttttgacgttttagttcttctttcgttgttctgaaatgcaattgaaaatggggggtagtttgactaatgttatagctttttttaagtggagatgctcattttcttaagcaagatgttgaattattatttccctggttgtgtttggcacattcttgtggatcaaccaaccatagtgttttattagtttagatttacactttcatagtaacagggaaaagtactgttttccaattgctagtttgtaatctttgtcagtgtacttgttattcaggcagtaataaagcagttcagcagtagtggtt

SEQ ID NO: 16896 - DNA, 393 bp, Glycine max
  Intron number 1 from transcript Glyma03g28530.1 (locus Gly ma03g28530) derived from phytozome v7.0 (chr-ID Gm03; pos 36465940 to 36466332 reverse strand)
tccttcggtccctcgtcattgatcgttacgctcaggtaaaaaaaacctttcccattttcttctttctgctcttcatttgctgtgtatattcccattgtatttgtttcctgagagagtacaagaaaatacactcttgattttggagtaaaaatgctaaaacgagaaaaaaaatgcagtcttttctagatatgagaagtgtgaactttcacccccatgatgtttggaaacttgatttcattccccttttgcttcaagagctcaaaacatgcttcaaaatcatttttttttcactcaatgatgtaacccattttcatttgtataatgattctcattctctccttggcatggtgtgtttcagagcacaactactgcaaccaggtgtgagtgcttggg

SEQ ID NO: 16897 - DNA, 611 bp, Glycine max
  Intron number 1 from transcript Glyma01g34970.1 (locus Gly ma01g34970) derived from phytozome v7.0 (chr-ID Gm01; pos 47511134 to 47511744)
ttcgtcgtgggaactgtagcaggtgataatttagttttgagttttattttcttctatttaatatataagtttattgtcattgaagacaccaaaagttggagacctagctaccttgagtaaatactataaatctagataataatatgacctatatatattaatttagtttacttatatatccgttaccttcaatttgaatatttgaaatggtcgaacaatctgcacaatttgttccttttccttcttgcatttcatttagggctatagtttttatcaagtcatatgatttcctagcttgactttttgttccactagttaatgtcgtaagcctatacctttataaagaacatcggtgcattgataatcgtagaagttacaattttattaattataatctttgaagcttattgtatataatgcagagtttggtatataaatatttgaggcattataagtatttaaactactaaaaagacatgcacgtccaatttcagaaaacattaatacccaaaacctaagtagacttttttagatatcttcaataagtcatgtaattaacattccttgttggctacctttagattggtcggagctagagatattgtgtttga

SEQ ID NO: 16898 - DNA, 634 bp, Glycine max
  Intron number 3 from transcript Glyma01g34970.1 (locus Gly ma01g34970) derived from phytozome v7.0 (chr-ID Gm01; pos 47512064 to 47512697)
gctgggaaactataaaagagataggtggacgaaaggtaagaatattaatgttattcatttaattgaactcaattttaatttaaaagttttttgaatgatatgactttttagcttgaatgtttgatattaagtagttattaatatcataaatgagtttttttatttgtataaattgtattactttataagacattataaacgtaataaaatactaagttttatctatttatatcatgatattcaaaattgtattggtaaaaggttaaaaaaataaaagaaaaattacaaaattcaaccagaatgattggaagtatttgtgcaatatcaacatatatagatacatttgtttgacacaaatacaacgaatttacaactattatttagaattatccatgcttctgatacctagttagtccagtacactataacaaaaggaattaaattaataaccatagtgtatccttcaattctttgcaatatgcttgtttggctatggtcacttagtcatacttctaagtatatatttattacattacttgaaagagtgatattaagatattttgcattgatcttttttctcagaaacgattgcctgacgaaccattgcctgcaaaaattttccttggacaaaagg

SEQ ID NO: 16899 - DNA, 827 bp, Glycine max
  Intron number 2 from transcript Glyma02g44270.1 (locus Gly ma02g44270) derived from phytozome v7.0 (chr-ID Gm02; pos 48886070 to 48886896)
cttctctctttcctcatatcatctcatcacattttgtaagtttcatgctaaccctctctttaaattttgatatgcctcctatggaaatgagatagttaacgttctcatctctataaactaagttaaagtgaataaacagataaattaggagagttctttcttttttcttttgatagactgaattttatacttctgtagcatagatttttacatgcaaaagttagctggtgctttatgtaagtaaaatttattccacagccaacagctttggggaaaccaaagttgattccgagatccaaatcaccctgcccccatgaacatcctttccatggacttgagtattaggaacctcttaatggaaaattatgacatgaaatagattatcataatatgaagaaaacataagatgtgaagttgtaatctccactgtgaggagtgtcaaataagggcaagcggcctttcacttgttgcatagactaaaatgtgtcatgactcatgagaagtagaatgggagatacatgtatatgcttaaattttactatttttgtgaaagacatgaaaatatgaatgcatggataaaagactttaagttttgtcaatttaagtattaacatgggttctactgcttgcatgattggtactaatcattaaatttgatcaacttgaataaaggacttaagtgcttgacaaatgatgtaaattgagtcaataatatgaagtctctcattcaattattcctattttttgtgataactttcttgaatcccttttcttcccttgcccttcacttttctaatatcatggataattgcagccaggagctgtgt

SEQ ID NO: 16900 - DNA, 698 bp, Glycine max
  Intron number 3 from transcript Glyma02g12480.1 (locus Gly ma02g12480) derived from phytozome v7.0 (chr-ID Gm02; pos 10763016 to 10763713)
accagacaattaaacttggtggtggtctacgacaggtatgtctcaggtttttcggaaatttagaacattcattgacagtttgacatttgaattcctgtttctcactatttttttgttggctctacactacgtgtgcatgctcacacagacatgtatcatttttgacaatgatggaaacttgggtattatggggtgcctatgtcccacattgagtaatatgggatgctcggtggagtacttaagtggcttggttctcctcccttaacagctttttcttgagggacagttttccaattgatcgggtgtttatcagactaactaatttgaggatgccttgtttttacctccatacttcctttttaatttaaattcatatgcatgttagacacagtacatatgctcagctctctcatgtttttaaatcactttggttaacataagtatacaaatttttcttagaatttatgaactggcttttcttctgtttagggatgaagtgatacagaactctaaatttcattaaccttaaatttcaggtgtcttgcttttgattttgtatttgtttattcacctcctcatttagcatcttataaacaaaatggaaataacatgtgatgatagttcatatatttgcttcattctgttcaatcctgttaataataatggattctcgctcatgtcaattttctaggactgtg

SEQ ID NO: 16901 - DNA, 737 bp, Glycine max
  Intron number 4 from transcript Glyma02g12480.1 (locus Gly ma02g12480) derived from phytozome v7.0 (chr-ID Gm02; pos 10763759 to 10764495)
ctaataaatactgggttgaaaattctcagaagagggtgagtatcatactgtgttcatgctatatgtattaatgtgtaaaggcattgctttgactgacatgacaatgctgatttaaaggcatatttatagcaatatagctatagttaaatcaagaatgttttattttatcttacatgtattcctggagcatttttagtagaatgggctaatatgtttttgatctacaacaaaatgaataattccaaagatgatgggaataaatatcctcaaatcaattgttttcaattttcagtgttgttatttgcaggtgtcaaaatttgtttgtcattatactcattacattgaaagttagtatctgtcaggaaatttgtggaggaccttttgctatgtttgctttgggtctattttatgctctcttgaattaattgatttttcaattgcagtcacaaaattaggataagtttgtgtgcattttcttccattttaatttgtagtttcatacatattctatatcaatatggaattaggttcttgctgttaagatgaatagcagtttgcatttgccagaaaactatttcctaatgcctacaaattttattttattcttttcagcattgaattatgttatgtaattttcattcttgttataaacagagtagaatttcagtgttttttcccgaacaaaaattctattttttccttccatattctgattttttgtttctgctttgttcagt

SEQ ID NO: 16902 - DNA, 968 bp, Glycine max
  Intron number 3 from transcript Glyma04g35960.1 (locus Gly ma04g35960) derived from phytozome v7.0 (chr-ID Gm04; pos 42478453 to 42479420)
tgccacggttgtgtcgcatcaccgtcttggtaaccacgtgtttctctggaattgcaattttttgtagctatatacggttactattgttcaatatcagtttctgcgatgtttgtttatttattcattaaccttttaattggcattgcaaaactagtctaattagtctctaactgaactagccaaacgctaacaacacttgaactatggtaatagtataattaactctcatacttcgtatggacgtgggtttgattcccttgatggcactaaaatcccacttagtggcaatcgtcttcactcttcagggagatccccccctagcaccgagggactagttgagtagctacaagtaggtaaaactacttgctgttataggcctgtcagtagtcttttggatctctgcaggacacctcagtatgccattggtgctctgcccaatagtcttgggtgtcctcatgttctaccacttttattcagcacaaaaaaagtgagtcatattttaatatgtgtgcattcatatttctttagatactttgatatgcacatggtatatagggcactgttgtccataatcatgtttttatgaagattgaaataaaacttattcctgataactataatctgatgaagattatacttactcaacgctaaaacaattggtccagtttcagcattgaaatgacattttaagtcataaatcataattcatgttgagtttcctttatcgtggattaaagaacaaacttcttccaggagagggattaacgtggcctgaacatttaatctgcatatctacttctgcacttgttttatgagaccatattttggacatctttttctctttcctctatttgcatttctgtgcttactaaatttgaaatattgtgaactattctaagcacctctacttttcccctcttcttttttattccacaaaaaagttttggaagtgtctgaacagaaatcaa

SEQ ID NO: 16903 - DNA, 879 bp, Glycine max
  Intron number 1 from transcript Glyma01g01060.2 (locus Gly ma01g01060) derived from phytozome v7.0 (chr-ID Gm01; pos 730165 to 731043)
ttgataatctcccttctgggttcgtaaatccatcacctttttcttagaatctgccttttctgctttagtttcactcttccataaccggttttcatgttttttatgttatacatgatgatgtcttggtgagtttctgtttggtttttcattttaaggccttgtgaagtaagaaagcaagaccttgtttggataagcacttgtgggagattaagaaggcgataaaatgaattaaatttctttcacgggttaaagttatcttattgggaaagctaaattagagagctttttgtggccctgttcggataaatttctccataaacacttatgggagaagtttatttcattttttcttcgtattttcttctcttgtaagtgcttatagagaactttatataaacaggaactataaattagcttgtatataagataattttaacttatggaagaggctcaattcactttatcttttttttttcttctcctataaatgcttattcggaagtttatccaaacatagcataaatgaatgatgatttagctgttggtcgttatttcttacagggtggctatgtgtgactcttaaaatttctgtgctttccaacaattctttgttgatcagttgtggtgataaaaggatacagttgttaatgtcccactagatgataacagtttagtcgtacataaggctttggatttttttgtggtgtgttctgggtaatctaaaagcaagatggtgaaggatggagtttgattgactgagtttttctatgttttttaattgatgaaaaacaagtggataaatattgtcatgagtttgtaattcttgaatgctttttccttttttggctcattctttactttgttccgttgtttataggg

SEQ ID NO: 16904 - DNA, 807 bp, Glycine max
  Intron number 1 from transcript Glyma01g03040.1 (locus Gly ma01g03040) derived from phytozome v7.0 (chr-ID Gm01; pos 2536604 to 2537410 reverse strand)
aggttggttcgtctctacttgtggattttagtctcttttgttgaatgtttttgtagcggaatacaacccagtccatatggactaataattttaagacaattatcatatggacaggggatccggatgtgtagactttagtctattttgttgaatgtttttgtatcgggatccaacctggtccttatggactaataattatcatacagacttcggaatcccaatgtgtacactttaatctgtcttgttaaatgtttttgtatcgggatccaacctggtctgtatggactaataattatcatacagacttggagatcccgatgtgtgcactttagtctgttttattgaatgtttttgtatcgggatccaacctagtccgtatggacatacgaattaggggatcccgatttgtacacgttagtttgaattacattaagtgtgtttctcatcaaaattggaatttaacttttgtaatctgcataattctttaatgcaaacatttattacacagattatccaggtaaaactccaattctgatttgaagagaacacgaacaatacttagatgtagttcttagatgtttttagcatgaatcttttaatctgaattggagtttcactctaataattcatgtaacaaagttatgctacattatcaaggtaaaactctgattctccgactaacaaaatatataaaaaaagtttttttccttcgttgatgtgttttaactgcaatttttttcttcttttttggttatgtctgtgactgtggcagaaatcctacgactagtgactttcctggtaattatc

SEQ ID NO: 16905 - DNA, 831 bp, Glycine max
  Intron number 3 from transcript Glyma04g07500.1 (locus Gly ma04g07500) derived from phytozome v7.0 (chr-ID Gm04; pos 5852148 to 5852978)
acctaccgtgccaatcagaagtcatccagtatgtttgtttctttcacttgtggtattaagacgacagattgatgacctactgtgccaatcagaagtcatccagattgatgaccttctgcattttgtattattgcaacttcctatttcttttaactgaaacattttacgttgaaacttgagtctaaacattgttctgccctttcattttgttgtagtaaatgctctctcacaggtctttaatgatttcatctctgttctctattaccagcatatgaatgtctctaatttggagcatttttttttttagcttgatatatataacttgtatctaaaatttagccacagcggctatctgctatcccactatagcagtttttgggtcagcctctcctcactgttaactaactttcctaaatgactaatagtttaagctattggaaaggcacagatgattttatcaactcttatggtcaatgagattctacagaatattctggtctgaagtttttcttgacctcaaagttttagagtggtgacatggctaaaaaaatcatgggtgcctgccctgtccttatttgatgagaagaaacccaatttaacagggtttgattgagggtaggttaaggttttcctcaattcataaatggtaggggcaggtttattgaaggtagtgaggatctgttgccatccagtggagaaaaaaaactgtttgacctagcgtttcattgtttataggggaaatctgtgttttctttaatgttatctaaacagtttcagctgttgtgtttcttttcacttatttgcagtttcaagaggcctttagtagcactg

SEQ ID NO: 16906 - DNA, 745 bp, Glycine max
  Intron number 2 from transcript Glyma04g07240.1 (locus Gly ma04g07240) derived from phytozome v7.0 (chr-ID Gm04; pos 5634522 to 5635266)
aagcttctgcagtaactgatcttcagcgcttggaggtttggcaatttgactaccctacacattttgtcttttgattattgaggtctcttgtattgacttaaaagttaaattaagcctcctttctcattttgtggagttgtttgttcttgtcagttgcaaccatcttttctaatttgagccttactcttgtcaaggattttgggtggactatttagttttgaaatggctgatgtctttgctaagttgaatagctaaataaaaaatgattattagatttctagttttattttctaaggcaattttgtttcccaaggaaaaaaaaaaccctctggccgaagagaatactctgttggcaaattaaagaggcattaattgctaacaagaggaatgttagctacactctttcagacactctttctaactccctgtgattgacttgacttgaattcgttggaaaacaccaattctggtgagtcttacttctaaatcgaagagagtatcattaaatcagaagtgagatagttgttgctagcattactcttcccaataaaatgtgctccataattattccgtgttattcttgtctatttgcaatttgatataccgtcatgtggaattttcaattaattgcattgtatcacatgattccattttccattaggtttctgttgacacttttcatctataaaaatacttcaattgttttccaggttcttgcagggagctacttcacagtggccggagc

SEQ ID NO: 16907 - DNA, 762 bp, Glycine max
  Intron number 1 from transcript Glyma02g43910.1 (locus Gly ma02g43910) derived from phytozome v7.0 (chr-ID Gm02; pos 48591382 to 48592143)
ctccttctttgctgagaattgttgtggcagacaaggtaatgtaccccaatggagtggatctgttgtataatgatagtcaaggactttttttttgcattttttttatttgctatggtaccaaatgctaaattttgtttaattgtctgtgttttctgttgatgactggaagatcaaaacatgtcatgaagtctgggcttaaatttttggttttgctgtgagaatgggatttcagattctgaatcggttttgccttagagaaaaacatgtcctttttttatctatgaaaattgaagacagtgtcagtgtcagggagaaaaacatgtcctttggatgctgcattttagaagcggattatggtttgaccactgagagataataggaaaagggctaattagtacttccttctttacttgattatgacttcactttgtgagaaattttgggaggaagataaaagaaaactcagtttgactatgacttttcagcctctcccccttcacaattttatttttaattattattgttactgtttttgtttatatgatcacaagaaaaacagtttttcatcagttctcaatttcaaatcagacgttaaaccttcaatccttcatgtcattatctgctttgtcttctacctctatcactgctgcaaaataaggttgtacttttaaattcaaagcttataaagaaagggtattgattttgacattatgcttatttgtgtattttgcagggagtagcttcttctttctaagttgacat

SEQ ID NO: 16908 - DNA, 809 bp, Glycine max
  Intron number 2 from transcript Glyma01g42390.1 (locus Gly ma01g42390) derived from phytozome v7.0 (chr-ID Gm01; pos 53646586 to 53647394 reverse strand)
ccttggcaatctctcaaaccataaataattctcaggtatttttcatctttgatcttacaattttgttttcctattcttttggaatcgttgttgagcaaaaatttagtggaaaagaagatgcagatgttgtcacaaaacagaggaaatcagggtatcttacaacattcttgctgtgtaagagaacattttttgggccaaaagggtaggaaatcatgatagatggtaacatgtgaatcatactgccgaccaattagatgggtgcttggttgaattcattgaattttattctgtagaaatagtcgtttgagaaagtgattattttgcataattaatttgatacgcaagacccacggaaataggaacggattgttcaacactccaacctggtagaaaatgaatccttgtaagtccaaaatgtgtgtttgacttttgtaaactcccaacctaaaattggtgattgtaaattgtgtttgtttaccaataataatatattttggaaaatcataataaaattgtatttgtacatgatttgagtcaaatcatggtttagaagttccataaacctaataaattgtgtttttgcaaatcattatgaaaacactaataagtagggcaatggtcacaattaatttagcaattggcttaaagtaacctcttttttattttcaatttctaattgcaatcatgagattcctgaacatattatttgtgaatgaaaccacctagtttacaaagttcaaactgaggaaaataaacatgggaattgaattgcagttacaggggtggtacaacagattgcaaagggacga

SEQ ID NO: 16909 - DNA, 641 bp, Glycine max
  Intron number 2 from transcript Glyma04g34690.1 (locus Gly ma04g34690) derived from phytozome v7.0 (chr-ID Gm04; pos 40883117 to 40883757 reverse strand)
cctgaaaacaccggagaggtatgaaatgctatctcatcttgataatttgggagctgaatctgtgctttttggtttttgtaatgttgctttgaagtttgaatttgaaatatttgactaggcttctgccttgtgatgacatttaacatctactccgtggtcacatatattggatgacataaagttttagcaattgtattcttcatttgttagttaggttaagatgattactattgagatgtatttcatgttttccagattaagtagaactatcttgacatcagattactgattatattaacaaattacaaatattatatattacaacatttttcatatgattttgttctgtacatggttgttccttatttctgaagatgctgtaagagccaaggatctcaggcattcttctctcttattttcatttgaggagggggaattgagtgatgggtgttgggggggcttttattattgtgaaattttttatgtacagtgacttggatgatatatatcatttgtgttggatctttgtattcaatcgtgtaagtgtcagccaattctggtattatttgattgaacatgtgatggacttgcttgactcactatctgtcatttattctgtaacaggtgccttttctttggtg

SEQ ID NO: 16910 - DNA, 653 bp, Glycine max
  Intron number 1 from transcript Glyma03g00300.1 (locus Gly ma03g00300) derived from phytozome v7.0 (chr-ID Gm03; pos 111224 to 111876 reverse strand)
tggacgtaaggaccattttgagagcaaccgtagcggttgcttgagaaacaactccttcactgaagtagcatagcttccaaagcaccttccactgcaagcgttgtacgaatgactagaatgaagcatgggttgcttcaagatttttctaataaaaaaagaaataaatgaacataaattcaaaataatagtcgttgtgcttcatttaaaaaatttatgaccgtttagcaacgttaaaatttaggatagtttatatttttatttttaccattgtatataaatagtggtacttgaaaaaaatataaacacaactaaacctcttaaatttctcaacttctttgatttgttttcattcaatggatccaaaccaagattcattcaatatgaatctgtggtttaatttgatgccaaattatcaacaaccacaaatccaaaatttcaaaattttccaaatttacctaacccataaaacaatcctagtatggataatttacaatatcctacacccccatttcatccatatcaatttcatatggatcaatcatcaccaattaatcatatgaaagacaacatagatcatgcttctccgcaaaggaagacgaatgtcttgctgacacatagctaaatatttcgaagaattcaattgtggggtaaag

SEQ ID NO: 16911 - DNA, 959 bp, Glycine max
  Intron number 4 from transcript Glyma02g09120.1 (locus Gly ma02g09120) derived from phytozome v7.0 (chr-ID Gm02; pos 7104684 to 7105642 reverse strand)
cacaccaagtttctcgtaagcatcgtgaggtaatgatatttacaatcttgttcttgttatgtatatgtgcatagtagtcaatagcatgctatagtggagtagcagagcagagaagccctgagctgctattggattcatatatcagagcagttttcaacagcagccaaaagaagctttttgcatgctatagtggcatagccatgatataataggctttaaatttgaaaacccattttacccctaaaataatattgtttaggactttggggcttttttgggtataaatgctttagaaacatgatcagatttgaaactcttcttctttgatcattcacacaaaaagttacctctgatttgacctctgttacaggactttttttcctgaaaagttacttctgtagttctgctttgatctttaatccattctttctgcaaacttcccagttgacgtctcaccaatatttatctaaagtgtcatgttttcttctacataatctttcttttttttaactccattactatgttgttattgatcctagattgtgtgtattatttgtcataaattcctttaattttgtcttttattgttttttgagtatttatattggtagtataatttttttttatttgtattataatatttacaatagtggtcatcctgttcctgctgctatcttgctatagtgttctttgagcaggcttctatgtgctgctatcttggattgataactatgtatatgtatttaaatatttaaacatctctcaatggtatttttgttttagtcaaaattttcttagcacatatttagatggtcttatttttataatttctgggagtcttgttaaggtttgtttccctttgtatttcacaacctcccttacccccatccatacttcaaaatgagcttgccttaatagctatgattattttggacaggcaataagtaatctgaaagcta

SEQ ID NO: 16912 - DNA, 520 bp, Glycine max
  Intron number 3 from transcript Glyma02g09120.1 (locus Gly ma02g09120) derived from phytozome v7.0 (chr-ID Gm02; pos 7105709 to 7106228 reverse strand)
aagaagaaaaagcgcatagaatctccccttgtaaggttggtacttggtgctcatcatgtactttttcatttcacaaaacttcatgaatttgcctgtggaattttgaatttggtatatgctatactgcatcagttattaattcactcttcatggctttattttttattcttcacataagaatgatactttagttcttaaataccttctgcttttgaattgagttatgcccttttattgacttgtttaattttctgttgatgtacatggcatctatatttgaatttgcaactatatgtacaaatatccacatttactctgattatgatttgcatctgattatagctacagctactcatataattgttaagacatgcctcttcctggctcatcataaaattaaactttattatttgtgttttattttgtttaacataattatgcccttcttatttggataaaattgtatctgtcattattttgactgtttctgcctttatgtgcgcatatacatacaggtata

SEQ ID NO: 16913 - DNA, 1010 bp, Glycine max
  Intron number 2 from transcript Glyma02g09120.1 (locus Gly ma02g09120) derived from phytozome v7.0 (chr-ID Gm02; pos 7106283 to 7107292 reverse strand)
gttggcatagcagaagtggaatcagctcttgtttcatatccttaatatatagtggtttctgtgcttggcttgactgcatagtattctctgcatgtgtgagcaatagcatcaagtttatttttgtgtgtgtggaaacatttatgtgcaatttctgtgtagtattgccaagtgatttaaaaaatttatagagttgagattgagactagagattgggtctctttcaagtctcctgttttgatggataccaccctgaacttatgtgcaattttgttgtttgtttgatggttgggcgtgatttataaattccatggttgtgttttaactgcattctggacctgatcacatttgtttttgtggtttgaggccggagttgcttttgggatgcttaatggcagtgttatcaatgtaatgggatgctgccctttctttctcaattagttttagtcttgttgcttctggtgatataaatacttaggttagtatttactatttaatattcagatttcttttttccattacaagatttaatcgagttgctgcactggtattggttttggtcttgaaaataaatctgaatttttttcggaaagcatccagtgcaactgcaatctgcaagggaatcctgttttaaagaattgtttttgctgtttatcagaaaaactattataaaccaattcagaactgataaactagtttaaaactatctctgatctagttctgaactggttttaagcagttagaaccaattctgaaccactttcacttgttaaactagttttaaaatgattacttgttggctcagaattgattttgaacctttcaccaaaaacaaaaccagtgtggcacaaaaattcttgttgcaattgcaaacctcttttgtttttcctttttttttttgaggtaatggaagattattaattcaactatgttttgggtgttgagatttctgcacaaagtttgttcctttaatcaattgttttcctatacatggatgcacaagcaacaggaac

SEQ ID NO: 16914 - DNA, 584 bp, Glycine max
  Intron number 4 from transcript Glyma05g04740.1 (locus Gly ma05g04740) derived from phytozome v7.0 (chr-ID Gm05; pos 3926833 to 3927416 reverse strand)
cctcttcaagtcatagagcatccttagaaaaagatgtaagcacttatctcttattttgtcgtgtctctggacctgtaggttcttaacttcaaaatttcttttcaacaattctgtttgactctccacatggtgagatgactctgaccaggcttttgcttcttggttttcacgtattttgcttgcatttgaccctagtaaaattggttgtgtaatttaaattgttgaaaagtgggggaaaaggaacaaacgggtcaaagccaattccactggttgtatgagcttgggagctctctttagaaaggcgaaaaaatttgattgatatcatcatgaaacttattgataaaaaaattagtgtttcaagaataaatttagcataatctcttaagtcttcatagggaaaaaagccataaaagtcccttaatgtggaattacataagcaggtagcttttcagaatcatctccagttcaagaaacacgggaaaagaaccctatataatacacatatgaagataagcaaagttttgagaccctcactataatgatttgcaggttgagcaactacagttacgcctacagcaggagag

SEQ ID NO: 16915 - DNA, 703 bp, Glycine max
  Intron number 1 from transcript Glyma05g08750.1 (locus Gly ma05g08750) derived from phytozome v7.0 (chr-ID Gm05; pos 8632496 to 8633198)
cgcagaatctactgccacttctcgctcttcaatcggtataataagattcgattcgtttcgttgttttttttcttctcccaattttttaggtgaatgtcgtgctttacatacagcattccgtaatcgaccagatctgagtgtcaaatcttagggtgtgcccacgcacgagtactgtttgtgcgttttgattgaatctaaggcttcggtttttcggaattggatttttgctgctgcatgcgtgcgattgttttcgctggatttgcgttattctgaaatcgattatgccgtgtactttatgcgttatactgatattttttcagcttcggagtttttccttcggatttgttttggttcctggtgaaaatccgtagctgtgaatgctgtaggtgtagattagggtttgttaacgtgctgggtgtaaacattttagattcgcttggattatgaaatttaggttaacggtgaatgtttgatttggttgataatgtatgttatttttattttaatttaattgtgatattgttgccaacttgtcaaatcgaatgtgttaatttgaatgtgttttagttttacctagtcatttttatgttttaactgagaattattcatagctagttttactttttattttcgagtaggttattactgacttgtttaatttattattattggatattagaattgtattgctggtttccttgct

SEQ ID NO: 16916 - DNA, 510 bp, Glycine max
  Intron number 2 from transcript Glyma05g08750.1 (locus Gly ma05g08750) derived from phytozome v7.0 (chr-ID Gm05; pos 8633485 to 8633994)
gtgggtctaacgaagctggatcacggaataatcaggtacttatgcttgactttatttgttgtattttaatgtgttcatgtggtagctgacatgacctatggcacagaattttttgatatgtagttagttgtatgtaatattataccaattggttgtggtttagtgacgatgatttttaagcaacttttgatatttatttgaaaccactggttatgatatacgtattaggatctctacagttaggggatgggatgaagctagtctgtattgaactaaaacattaagaagcatgtattgaatttaattgtattttttcttaaatggatgcttcagatgtttgggcattacagttgtgtaggaaatgaaagcatcatattggtagagctgtagagggaaaagaaatgcagtatttgtaaatcaattgtatatttctgtccatcatagtttgtttgggggacttatctttcatgtctttcatcttgtattagaagagttccaaagggggaagtt

SEQ ID NO: 16917 - DNA, 779 bp, Glycine max
  Intron number 5 from transcript Glyma02g34690.1 (locus Gly ma02g34690) derived from phytozome v7.0 (chr-ID Gm02; pos 39150925 to 39151703)
tggtaagtcaacttgttgtttcctcctaactgtcatcatgccatataaaattaagaagatgatacgagggttttatttgtctattgtgagaatttgaattcaagtgcactccacagagttagtggtaaaagatagcatataacacaaattgtggtacattttaccttaatttttctgtgaacacagaaaatcaattttagtacacccaattttaaagcctcagactttacatcttaattttcataaaattgcattttgttctacatttttattaaagctgacaatgaagaggttttctgccaagcttgggattagttttttggccaaaactttaccaatggaatacataaaggccttttctatcttgttttctactgtttacaatccggattttatagtttgcgcactaaagttgatctgggcaaaaactttaggggataaagtttatcccttctcaccgatgtcaaatttgaagccttatgattgtaagtaataccataggatatgttggggctaaagagacagagtattaaataggatgaacgcctcatctcacaaaggttttcctttttaccaaagaggctgagattacttaactagcccagaaattcatgccaatctagtgagaaagactgaatccatattcttctataatatgctttctgctttgacaaacatgttatgaacaggtaatcaattaagtgacatataatatttgagtttttatctgggcagatggattagatacttgctgcataccgcaagtcatcaaagcagtg

SEQ ID NO: 16918 - DNA, 435 bp, Glycine max
  Intron number 2 from transcript Glyma04g14770.1 (locus Gly ma04g14770) derived from phytozome v7.0 (chr-ID Gm04; pos 14964430 to 14964864)
ataagaagaagaagagtttgaggcactatagacaggttttgattgtgtttgttgtggttgtgggacaaaacttatatatagttgtttaagtgcttttggtgttgttcttcaattctgtgtgtgtgtgtgtgtatggttggttgagtttgttgtggggaaaaacctatatatagttctttaggtgcttttggtggtgttctctaattagaattggagttttacttttaataatttgaaaatataggcttgcgttaaaggttaaaattgattgctgaagtgaaactctaattctgattggaatatagtggtagatgtagctaaggaactgtatctaacttttgtcctttgttgtgttggtttgtaattttgtatgtgtgtctgcactattttgatgctggaatgaatgagttgtgtttttatctcaggcagactgtg

SEQ ID NO: 16919 - DNA, 532 bp, Glycine max
  Intron number 2 from transcript Glyma02g47070.1 (locus Gly ma02g47070) derived from phytozome v7.0 (chr-ID Gm02; pos 50792305 to 50792836)
gacgacctccgttagatccaagcaaaacacaaagtgtaagatattcttgcattatgatataataatcaatatatcgttacatgtctatgtttttgtatgagtgttgtgtatttatatgcttgtttttcttttcttggtttataatgtatttatatttcaaaagaattaagaaacaacagaatgattgtctgagctacctaaatatatacgatgctaaacattgtccttgattgaaaagttaagtggatcctagacccattgcaacaatgattcatttacaacctttacgttgcaaccaaatatgattcttacttttattgttctcttggattagcatatatagtctttcgcaatttctgtatctggatgtctgttagtggtaaatgaactatctgatttttgtctctatagatagttgatctagcttagggataatttgtttaacctataattaataatttgtttgatgtttatgggtttattttgtatttacatttctcctctcatgaatctcatttgattttcagaaaaa

SEQ ID NO: 16920 - DNA, 563 bp, Glycine max
  Intron number 2 from transcript Glyma03g27120.1 (locus Gly ma03g27120) derived from phytozome v7.0 (chr-ID Gm03; pos 34651877 to 34652439 reverse strand)
agtttttcctggatattcttgacctcattaattgggtttgtttccattctcaagttatatatatattacgtgtgcatgccacgcatgtatacgtaattatctatatatatgtacatgaattttttgttctagattgattgagtaaattaaacgtgtttcagttaatggtataaaattgtcaattgttgttttttactctgacttttataactctcacttttcatctctatattttttaaatactcaaactttcaccctttgttgttagataagtgtacagtaatttaacagaattagactgggagatgaaaagtttaagcatataaaaaataatattctagagaacaaaagttatctctagtgagaaatattaatgatctaaacaaatgaaagatgaaaaaaataagaattttacaagtctgacaagaataaaagattgataattttacaatgaccaaaaacaccattaactacatgtgtgttttaattaaggatgtgagattaattagtcttaatttggtgatgcagcatcacgttgaatcaaaatttattttttgagggtc

SEQ ID NO: 16921 - DNA, 571 bp, Glycine max
  Intron number 1 from transcript Glyma02g04560.1 (locus Gly ma02g04560) derived from phytozome v7.0 (chr-ID Gm02; pos 3732158 to 3732728 reverse strand)
aaggagagtaccccagggcagatatcctaggttcagtttattagactctattctaatcaaaatctttattaattttcgtattcctcaaacctttgctgacaaaattattaatgggttttacttatgcagatttatcagcagagaattgccaagatttttacagcagtacttggctcagttcaacgctggactcacaaaaggttgatcaacttctttctagtttcaaaagttgcacaattaaatttaactcgaactaagattttaaattgtggtcgcttgttattgtgagaaattgcagacaaatgcaggttaatgtgattataactgcggttgtcatcactctaaaatccttgaagttgtagctaaaatcgctattgcaaatcgttttttaagaccttgacttgaacataaatatttagcatgatttctattttctgattattccatctttgatttgaactgcatgcaggagaaaactgaaaaccgcaaaagggagagcgattacgtgaagaagaagaactgtaacatcctcgcagttccgatttcggaagaggagctgaagatacgaagt

SEQ ID NO: 16922 - DNA, 713 bp, Glycine max
  Intron number 3 from transcript Glyma04g05020.1 (locus Gly ma04g05020) derived from phytozome v7.0 (chr-ID Gm04; pos 3759531 to 3760243)
ttgatccttattttgtacgcaggtgggcacctaaggtaaattcagctttaaaatctagttaagctctcttatacacctgagcgaacacaatatatgggtgctgctcaagttcaaatcgtatctagtgcttgttgtcaatgttcttcacactaaatactaaattgttttcctgtgtccttagtccttcatacatatgatactagtattatatttctgtctgaatcatttacatctccaaagatgagcaaaaacatgtaaaaatttaaaaaaaaatgtttattacagattgaccctttacccctgatcatgcaatcaaaggtgaaaaattttggtatatgtgtttgagactttgagtgtcaatggaattcatggatatttagttgttgaacactttcaaaattgcttataacaaaccagcatgttaatgtaatgtcattttttaaacttgttcctcttataatttgggtttgagcctaaatcaactccaaaagccagctcatgatgcgaggattgtgaccagtattgatagcataagggtgtttacttatcatatgccatgacattatttacctcgtgaaccaattctattttttaattgctaaaatccttgtggcttattggataactcttttcacgtaggatttggtagtccatccattgtgatgccaaataactttgttcactttttctcaaccagttgagcaacttagttg

SEQ ID NO: 16923 - DNA, 369 bp, Glycine max
  Intron number 1 from transcript Glyma03g14770.3 (locus Gly ma03g14770) derived from phytozome v7.0 (chr-ID Gm03; pos 18945525 to 18945893)
agatccttggtggtggtcaaggcatgccattttctcttcttgttattattagttttgattgaatttctcagctttattggtgatttgttttgatctgtatatcacaatcttttctttttatttccttggtgttgtttgtttatgttcattttggtactgtttttaactgtggaatagctatatgggctgcgcctgtgcttgtttgttttagttatttatttgcatttagtaccaatgggaaatgggtcagaatcagaagaaaataatgaattggtaattgatcatgatctttgaatctatgctgaatcaatgccatgcttcaacgcagttgcagatttaatactgtggaggcggaagaaccttactgtg

SEQ ID NO: 16924 - DNA, 788 bp, Glycine max
  Intron number 2 from transcript Glyma04g34160.1 (locus Gly ma04g34160) derived from phytozome v7.0 (chr-ID Gm04; pos 40212711 to 40213498)
aggtaaccaagcaacccgaataatgtagtttttttagtttagttttatacacagggtcatctaataataaattatcataattttcttttttttattaataaatattaattattataattgttaatttttgttaacaagagaattccaacctaccttctcttctcttcttccttttcttctccctttatcattagaccaaccttatatcttagtaacatgattttgataatttttactgcaattatcttaaaaattataattattataatttctaattagttgacagcttagggattttagactgaaatgcatagaaattaaataaaaaaatgtagggtttgtttatttgggggatgatgctttgtgtatcatttcctgtttttaattttaattgtagaactgtcacattgttacaattgttaaaaaatgtatacgagatatacaacttatgattttggtcaattgtaaatcttgtaaatatgtatatgtaatatgcaatattaccaaaaaaaaaaaagattttggacacccaaagagtgtgtacactatacactgagagttgagagagataggaagagaggagggataattgattaataagattaatgatagataaagaaaaaatgagaggtattgatgagacaattttgggtatccaaatatcactattcttaccaaaatttagtattttttatcgggtggctcaatttttgatatatgtgtatcttttaaaaagtagcattttcttttcagggggagaagtgtaggtgcttcaagtgtaagtaaaa

SEQ ID NO: 16925 - DNA, 667 bp, Glycine max
  Intron number 2 from transcript Glyma02g44540.1 (locus Gly ma02g44540) derived from phytozome v7.0 (chr-ID Gm02; pos 49088751 to 49089417 reverse strand)
aggtacgttaatctatatatcctgtttcctttcttcgttttccactttctctagaaaattacaaggtattggtatgcaactatgcatatcagcatataaatgcaggttaatgaattgaatacatttgcatgttcaatcattaatcataaataacaaaatgtcatcttttttatttgttgttatgcatgcatgcatatatatgtttataaggtgaactacatggaagtttcttttaaccgctggtggcaatatcttcctctatctcaggcttcacagtctgagtggaacttgagataccaacacaatcattccctagtagacataagagtattgttatgttgctttggggagcttgctttgagttaacatatatggccattgtcaatcccttgcatatcttcaatataatagaaacgctccagaatcaagtattctaaaactttacctccacttagctggaaagctgagaatagatatagtgaacaattttttgtcttacattttcaatatatatacaagaaagtttttatctgaagtcgtgctgcgcttcccctaaactaactcttggtaatgtgactaagcagctcaatattttttctttatcttgttgtataagttgtattttcttgtgtcataacttttgtctattatatttttcttagcagga

SEQ ID NO: 16926 - DNA, 519 bp, Glycine max
  Intron number 2 from transcript Glyma01g45240.1 (locus Gly ma01g45240) derived from phytozome v7.0 (chr-ID Gm01; pos 55628916 to 55629434 reverse strand)
acattaccaaacaggtacttactttcctatcaatttcacacagtttgcaacctatgttatacactctgccaagtgctaaccatttcgttgtttttgaattctttttttctttgtgagttttgcagttctattacgtgaactctcaccgttacatgttatacgtacttaaattgcaaaatttctagattatttgccaactgcagtggatggatcacttctatcttttaatttaaacaatggaagaatcttcagaggaaaatacttggattgcttagtgttccgaattgttaatgtttttcagttaaaggcacacatcatgtgctcatgtcacatatacttgatttgattcattacgagcactcatgtctcaaataatgctcctttatcatcgtcgtactggctttgtctgtttctttcttacatagcctaaaagaaaatgttgttaagatgcttttgctagaatgactattactaaaactaacgtccattcaggcttgtgtggtgcaacccaaagcagaa

SEQ ID NO: 16927 - DNA, 487 bp, Glycine max
  Intron number 4 from transcript Glyma01g06380.2 (locus Gly ma01g06380) derived from phytozome v7.0 (chr-ID Gm01; pos 6622028 to 6622514 reverse strand)
aatattgggtctgaagtatacctgcaggcagaagtgtaagccatcagatttttagctttggtgactaatagcattgattctttctttaaatttcatgttcttgatttttttaatgcacagtcatactttatcaccagtccatttgaatcaagagtttttcttttgtatataccatctttatagttaccggtcattgctgttttatgtatatcatctttacagacatgactcatcatcatactatcaaatattaagatttgtgctatattgctcaacttgcatctagacactgcccgctctctcccccctcctcctagggtacaatcaatgcatggagattagggcaacccctcaccacttgcacagtgctagttcttttcatctgcacattataatttatggatctttttgttttgtcttcaatccagtgaaatgcgcatattttatgtttttgattacaggccagatacacaacacatatttgtgg

SEQ ID NO: 16928 - DNA, 660 bp, Glycine max
  Intron number 2 from transcript Glyma02g26850.1 (locus Gly ma02g26850) derived from phytozome v7.0 (chr-ID Gm02; pos 27961102 to 27961761)
cttatctcaaggttcgttcctttctctctgccatcgtaatttaagtttttatttgtttatttttcttttaagtatatatattgtgtcaatcaattagaaattatcgcttgtatcacttttaaaaggcttgtggatattccgcattaaatgaaaaaataaatatatttaaaaattaacaaacttaccatccatgatggtttctgatttctgattgcatgataggacggtttctgattgcagtgtaaaaaaaattctttatacttttacttttggtgtatattatatttactctataattaaactcatttgagaaagggagtcatactttaaaaatcatatttgagatgatctttgattagttgacaaagtaaattttttacactaaaagtgtatgaaaattgaaaattaaactcatttgagaaagggagtcactcttagcaataataattaataaattcaattagaatgcacttgtaatatataaaattttataactttttgttttaaaaatcttattagggtgatttctaatttcaaattagttgacaacataaaaatctttattgtgacagtgtgtgaatattaaaatcctttctatttgcttttgctgtattacagtattagtaacattctctttttcctttcttcaatattcagaaa

SEQ ID NO: 16929 - DNA, 365 bp, Glycine max
  Intron number 2 from transcript Glyma05g24050.1 (locus Gly ma05g24050) derived from phytozome v7.0 (chr-ID Gm05; pos 29934015 to 29934379)
ttcgccgtgaaggggtactgatttctttgttctctttacttctcttgttttgtctttttattcgagtaaattttgaattatgtttttctatgggaatattatgtgttaattatgtttagcctcctgttatgttagaattatgcttcttcatgtacaattgagaagctgattgaacttttgtttcatgaagaaaataagctctcaattctaatattgcttccttgtttttctggttgaattagtattttgatcaatgcttttacactggttggatgataaagtttgcaattggctagtattcatttcctcctgttttggtgtgtttgtcactttgtcccactctcaggtaaaagtgtgcagcaatt

SEQ ID NO: 16930 - DNA, 357 bp, Glycine max
  Intron number 2 from transcript Glyma04g40100.1 (locus Gly ma04g40100) derived from phytozome v7.0 (chr-ID Gm04; pos 46234004 to 46234360)
aacggtgtaagtcttctcttttcagattaatcaaagtttaccaacatgcgtgacactgttaacagatatgtaaccatgtttcttaaacattagttagatatttgattctgggactagtgtatggaaaaacattaaatatttgtagaaaaatgtctaacaccttaaatagttccaaatttttaatatcctgaagtattagtcttctggctcaggggactccctggatatttttttaagtttaatttaatgaatttaaaagtgataaatcagagtgttctactacatacattttaacctagctgatacgtgctaactaattatagactatttgctactttgtagagatccaaagtaaat

SEQ ID NO: 16931 - DNA, 661 bp, Glycine max
  Intron number 2 from transcript Glyma04g34600.1 (locus Gly ma04g34600) derived from phytozome v7.0 (chr-ID Gm04; pos 40767322 to 40767982)
gctgtgcctcggttttgaaatcaatactttgtgcggtaaggtttcttcttctcccaaaagcatgaatttagataaggaccacgaaatatgtcttttttctctgccccttttattggggtaaactttactaacaggttcttcacgtttaatacgttttattaagtagcaatcaagaattaatgaatacgttgtcgtgtcttaatgggtgtaatttgggttcaaataaatgattttggcaaaattttggttaggatggaaacaaaaataaacccaccaccattcatcccaaaacacccctattttatgtcatgaatatctggtttatatattgatatttgaggatcaagactccagagcgcccttatcaatttctcatggatgggtagtggcactttacaggcttcaaaatataaacttctttgtcataaaattttcttgtttggaaaaggaatagtcatggctatagttttattgatgctataattttcttatcaatatgttgacatagagaccactgtgacacgtcctctatgctgataatttctaaaagcaagaatgaatcaaagataaaagtatccatgataacttctgccttggattaatttctctgatacctttgtttgtagaggtgcgacccattttcaggggagctatttacagt

SEQ ID NO: 16932 - DNA, 369 bp, Glycine max
  Intron number 5 from transcript Glyma05g27710.1 (locus Gly ma05g27710) derived from phytozome v7.0 (chr-ID Gm05; pos 33601298 to 33601666)
ggctgttgttggtgagagttgttcactaattaatactattcatgattgacctttcaacttattttcttggctatgtaaatggaattcgtacaaataaaaaattctgaaaatcacatgtatatatacacacgtatgtatcgtatgtatctactgacaaaccaaaaaagaaaaataatcaatttaccattttatatgttgtagaagatttgtttcctcttggttatgcttttcatgaagctagcaaatacttactttaagttatgtacctactaattttctcaataaaagaaaccttataaatgaaaaatatttgtgattatatattcagctaaaaaatatttctttgaattaattgtagtacttcgaagg

SEQ ID NO: 16933 - DNA, 890 bp, Glycine max
  Intron number 1 from transcript Glyma03g00670.1 (locus Gly ma03g00670) derived from phytozome v7.0 (chr-ID Gm03; pos 383313 to 384202 reverse strand)
gcttcgggtacctgttctttttctccatttccccctctccacttcgtgtcgtagtaatctttctcctgtagttaattttttcgcttgctaaaatcgcttcctttatttattcgctttttcggtttgaagagacttgaaatttgattcctgatttggttatgttcgtgattttatgccatggaaaaatcttgatcgctacttcgggggtttcggaggtttttacttcgttgtagagcaattgagcacaatctttgtagccctaggatgtgtatttgagtccgtaattgtgttggtggcgtccacgaatcgaaatgttgagggcaatttatgagaatcccccaaaaaaactgtgaagctttgagtgaagcagggttttctgttgtttgcaatgttttaatgttcttgtggattgtatttggagagaatgcgattgattattgtttttgtgcttaattcctcaacatgcctgaaataactacaaagccttatcccacttggtttggttgggcttttcctatatgttgtactctgttgctaaactttgtctagatggttccaaacttggataaaagaggggctggtgttggaaagttgcccgctgatttaaaacttgtttaatctttatgacatgaattcgttctacatgcctgcttttagttcccgcccccctccgaccctaatttttgtgaggtggtatattgtaccacaaattccatgatttgaaactctccagttataaaaggaaggataatcccggaagctagcttatgggtgatctttgcctaagaagtttgctagttattcttgtttgacgaattcataatagttggtttcattttaccatttgactttgaagacacaagtaagtgtttgcttctgttattctgtag

SEQ ID NO: 16934 - DNA, 731 bp, Glycine max
  Intron number 3 from transcript Glyma04g32950.3 (locus Gly ma04g32950) derived from phytozome v7.0 (chr-ID Gm04; pos 38230931 to 38231661)
gatttgtgagtttctattcctttgactcactgacttgttgccggagtttggtttcgtgtagtttctcatttccctgtttcgcataaaaatttgaaaatgtcaccttttgtttttttaattaataatgtatttcatgtatttaaacaacaacatcaacaacaacaacaacaatattccccttggtggttaggtgaggctggctatgtttcttgtatttaaagatgagtctaattttgatacatcactaactattacaccgtcaactgcttagaaattttcatagatgttattctttaagtaattattattaaagtcaataattttcaatcatatagctacctgtgattggatgttagacactgtctgtatattctttttaattaaattcttttaagatttgtgttcattccaattaatttctatgaagatttgtttaagaaatgataaaactaaccaaattgtgattttccctgaatcttatacaatctttggaaataaagtgacttggatgtaatcacatgtaaacattaaaatgaaaataaaatattgttctctccaactaaaaagctctactgttactattgtctgaatttatacatgagtgatgtaacatataaacattaaagatgaaaacaaaaatgttctcttcaaaccaaagtgctctaatccttgccagtattgtctgaatttattcttgaatgatgtgttatagcttagcttgcttactgaaa

SEQ ID NO: 16935 - DNA, 805 bp, Glycine max
  Intron number 1 from transcript Glyma02g13140.1 (locus Gly ma02g13140) derived from phytozome v7.0 (chr-ID Gm02; pos 11358028 to 11358832)
attctctaacggtaagcagagacttgataactatgcaggattcttatgtatcaggatgattaaaacagttaattagtataatttttttctctgtataattaattggagtattatacaatgaataatcctctgtacactagatcttagctttagtaaaagccatccaacatgaaaatacatattattccatcaaatttcttgctataatagaataatgagcaccgtaatgtgaaatgaaagagatgaaaggctagggggatacgatacgagaagaaatatggggtctaactcaaccctaaaagttaactcatagggtgagggttgtcctcaccttataaactctatcttgaaactatctctagtcaaagtgagatttgagtttttttctaattcacccccttatgtctaacactttttgaacttggtgcgtcgtctttttaaatggatctaggatagactctaatactaagaataaatttggacctaactcaaccctaaaagctagttcatagagtgaggattgccctcacttatatactctatctgagactatctctaaccaatgtaagactttggtttttttctaattatataaactttagagtttcaacttgtctaggaaagaatatatctccttggaaagatttgcattgtcagaacctgatcataaatctggagtcttttgttttttgctttgtatcttgaaaacttaacattaaaggttactaaggatataaaattattcaattgagataatagttatggaaactaaacttggttgtgatttttcagcaacttgcttcac

SEQ ID NO: 16936 - DNA, 710 bp, Glycine max
  Intron number 3 from transcript Glyma04g04770.1 (locus Gly ma04g04770) derived from phytozome v7.0 (chr-ID Gm04; pos 3540078 to 3540787)
ttgtcgcaggtactctacgctcccacacttctattctatccataatttcatgcttatgtagtaatgcacacttctcatcaaatgaatttgtttcatctgcctcgtggagccaacttatttattgcaaaattgggtatagtgagggagtggtagtgatttaaggattaagacttcatgttagtaaagaactgacaatatcatgttacgaaagaaaaagacataatgggccctatgtaaagcacgaggtgctcctatgccacgagtttagtactaggtgaagaagagtttctgttatgttcttcagcttttgatattataagaatgaataccttttttttcttccaattctaggaatgtagcctgttatttatgatgatagtctatgggcacaagtcataattatgtctttctcttgacctgtttctagtacaatactgatactatttgttggaatgatctcttgaatagcaaaaattcattaattcactgagttccatacaaattgccgaagtgggatttttttttttaactcccaacatcagaagatagtggaagcaaaattagatacctatcagtaataatgttcctcgaattctgcatggttcatttcctttactttttgtcaaaatgagttactaatttgtgtttgatgcctgtatttatgacccaatgcaggagttgaagctagaggctttatatttggtccaccc

SEQ ID NO: 16937 - DNA, 602 bp, Glycine max
  Intron number 2 from transcript Glyma05g01880.1 (locus Gly ma05g01880) derived from phytozome v7.0 (chr-ID Gm05; pos 1336402 to 1337003 reverse strand)
aatcaacaaggaggtccgagccggaggacaaccaggtaaatctcaatcaaagtttggtttatactgtttctacttccctagttgtttatgatgatcaaatcttcaagaacatgaccagcttgagtagagtggtgcctgatgtaatatttctgcctattgtcaaccattatttcatcaagcaatatcttttttatgagtagtaaataattgttggagtatttcttaaaagggttggttttgcatattgatttagatgtatttctaattctagtaactaatcaaagctttactagtttgtttgggaacttgatacttcatgattttcaggtttcttgatccatttactctctactagctagtgggttagacttgtatttaattaagaaaatttacatgaaccaaggaagtattagatttttaaagtttaattacaaggaattagattagtgaattttattcaagaagagaatttaaagagggagagagagttttgtttaaagctaatattgtatgtgccatttggtgctttcacctatgtgattctaaatttttaatcatcattttcaggaaaccaaagctgaaagacacgggtcaaggacagc

SEQ ID NO: 16938 - DNA, 921 bp, Glycine max
  Intron number 1 from transcript Glyma04g06560.4 (locus Gly ma04g06560) derived from phytozome v7.0 (chr-ID Gm04; pos 5014996 to 5015916 reverse strand)
cctcctcagcggaggagctcctcccactcctagacgtaataacgcctttcccccccttttttttttcttcccttcaaatatctgattttttggggttgctgttttccattcctttaatctgtgatttatcaattaatcagtggagtggagcctagaaatggtaaacttgctcctgaaagtgtcttcctgcaacgttattctgtgattttggtagaaaaaaagacgtgtacttgtttgtgatgggataaagtgttatagcgtatgtgttaagtttaaatagacatcctaagataatataatcatataattgttgcacgcctcaaagttatggggttctgattggtgattggtaatattactaatatgctggaattgtttggttagggatgtatgaaatagacgatgtaagtgaagaaagttgaattaggtcctatttctttagtttttatcaattgttggtttgctggtgagtgtagtaagctagggtttggagtggtgccaagtgctaacagtgatgctctgtctgagggatgttgggcttggtttcagtggtgttggcagaggggtttcacaccgtagtaatgtttgttctccccacccccacccacattaccaaagtaccccacaatctgctgcctctagactaaatccagcaagactcacccaccatctttttgttaatttgctgttgaatatctcggctttattttggtttggttctgtgatgatggggatggaagctatcaatgatgggtttagggattttatgtggagctaggggtgtcagctgaaaagttcctctctcctaactcctagctaaatggttcgtcaaagtattaaacacaattttgtgattgtacatattattttctcctttacactgcagcaagttgagagttgcctatcaagggttgagcagtc

SEQ ID NO: 16939 - DNA, 777 bp, Glycine max
  Intron number 2 from transcript Glyma05g15210.1 (locus Gly ma05g15210) derived from phytozome v7.0 (chr-ID Gm05; pos 16586924 to 16587700)
cagcacggagcagattcgtttggcgcctgataaatgtatgagaatatgagatttgaatattctgttttgcttaattcattgcttatagacaaggcttttaaattgtggtcactttcatggtcgaattgacattgtgggaaattgaggctgcaattgcagtcactatgagcccaaaaaccttgatgttgctgcctaaattgcagtagtggacagccttttaaaatctggttgcttataaatgagttaaatacataataaattgtgtgttgaaattattttgattggctgtgagatactcgttgtatggttaattgttgctatataagaaaaggagagatgttaatgttggttgagaaagagggaattttttttagtgaattgtgattgttcaattagagggagaagaaaggagacggttgaaggctgaggaaattttaatttggtgttgatgcttcttggttttagtttgtttaacctttttttttttttttttggaattttgtagttttgtctgtgtgtaggaggtggaaggatcaaagggagaaaggattttaatttggtgttgatcttgtttctcagttttcattacgtagttttttttttttttttggaattttgtagtttttctgtgtgtaggatgttaaggatcaaaggcagcagcagggattttaatttggtgttgattttatttctcagtattcgattaagtaattgtgtttttaattttttttgaattttgtagttttatctgtctgtaagaggttgaaggatcaagtg

SEQ ID NO: 16940 - DNA, 1062 bp, Glycine max
  Intron number 1 from transcript Glyma04g08150.1 (locus Gly ma04g08150) derived from phytozome v7.0 (chr-ID Gm04; pos 6395355 to 6396416 reverse strand)
atccgctggtgttattcttcagctgtagctgcaaggtaacttacttcaaaaatttatctaccaaccagttacttgtttttgtgcacttatcacttatcatttgtgtctactttggatcacttatcacttattctttctccattttatttgtgtattgaattcattaacatatgttgttaatgaattcatgcctcatgactggttttgctgcaaaaaatcaaaatattctcgaaagaatactaatagataagggggcttttaatcttcttctccttcttttgggtccattaaaatccgcttgaatgcaaggattagtaacttatgagttcataaatgcttcttggtgtggtggaaaatcacggtcggacaccgtggtttggttttcgggtttccaccgcaaatccaaacacactactaattacagttggacccacctaaacttttacacatatgtattctaattctggcacgtaagatatgaggagatgtgactctttctatatatgtatgaagcattttccaattgagttatattagaaagaatcattgatcatcaaaatcatttgcaagtcgtttagagagtgcgatgctgtttcatttgaaaggcgtgtacgcaaccctttgcctggttttaaagactgaagcaccctcctggggaatattcccccatattcattttcatacatgatcatcaatttttgtgctctttgttaagtcttgcttgcttcccacttcagaaatttctgttctccaagtttggttcacatagctatagtataagatttttccactctgtttccttccaattgaaggacagctacagagaaattgtgaaatttaagaaagagccaaagatgcccttgcgcagaatctgaactgcttctgtctcaaggtctttcggcccttacaatttgcaaaagtataaactactgtgagagttaaaattcaaggtcctattgatactacagtgttatagtccatgctggatattactttcaaaactcatatttatctcttgatcaattaggtctcaaggaagcttataaaaagagagcacatctg

SEQ ID NO: 16941 - DNA, 566 bp, Glycine max
  Intron number 1 from transcript Glyma02g07240.1 (locus Gly ma02g07240) derived from phytozome v7.0 (chr-ID Gm02; pos 5754355 to 5754920 reverse strand)
gacttgcagctatagctgcaaattgtaggtgagatgagtaaatgtgtgtttattggagtttgacttgtcaacttgctgatcgttcaggtctgtttgggttttggaagagcactaattgaaggaatctaacaaccactactagttgctgattttgatgttttgtccgtcaagtttggatttgttagttaattatcctcttgctttgtatgtaactagtgattggaggaaaggagttcaattgcttgagtatagcacgttatcagttttgacttttattttcaatccaatataagattattgatttgtgtttatgcatagctgatgacttaccaacatgccatgatggtttgctaacaagttggtgtttaagactatcttgagttttattgtactatgcatactcgagttcattaaattgtcaatttgtgaattgtttgagataaatttcagaaatgttcagaaatatattctttggattgacctacaggttgttagacttgttgtcttgacttctcagttcactgttataaaatgtaggttccttaaggagctggatttgcaggaaa

SEQ ID NO: 16942 - DNA, 1065 bp, Glycine max
  Intron number 3 from transcript Glyma01g01140.1 (locus Gly ma01g01140) derived from phytozome v7.0 (chr-ID Gm01; pos 781897 to 782961 reverse strand)
aggcaaaagctcaagccagtttaaacgttgataaggtatccagttattgtagcttagtgctttttctagcatttgttcttccctttttttttagctgtgaattctgctgcttttactataggttataaaatagaatcattaccagtgaaatctatttctgactttgtttgaatacaatgtggatcttggtgaaactgagaatatatgtaatgtcttgtttcagttgtttaagcaattggtgaggtgggtttcttaggatttggtgtcatttgagtgttttgctcaatgctcataccccaaaagaatgaaaacttgtgttaatgatcaagaatgcttgcaaaatatttgttaaaagttaaaattctcttttcaacttatagaaggtgggtcctacacgggatttcacccaataataagagtgttgaaaagagtttgtcaatgagaatgttgcttgagttcctcctaaatgatgtggctttatcttttttgtggaagacttatttcttatttgagttgagcacaatctaaaagcaaaggcgtgacatataggaaataggaggccttttatcattgtctgattctgagtaaagatcagagttttaccattttttgcttcagggttgaaattttgaaattcagggaggcccacaaaaggggaattaactttggggaggctattcttcagaaccttgcttattgagtggaatcaccatctatccagcttgcactttgactaatgaaagataggactaatttagcatttaaaaagacgagtaccatttttatgattttatcatattataggagctaggttagtaagatggaaataaacttaccttgaactacaggtcaaatgttggtcatggtgaactaatttgattggactggaagtaaatctatctatagtgggagctaataatagccagtggacaaaattgggagggttgattcaaacataaaattgtgtgttctttagtgataaattttatctaactgttatcattcattatctactatattttgcttgtaggcatcaaaatcctacagtaaaacagaagtttcgtt

SEQ ID NO: 16943 - DNA, 800 bp, Glycine max
  Intron number 2 from transcript Glyma03g34960.1 (locus Gly ma03g34960) derived from phytozome v7.0 (chr-ID Gm03; pos 42250897 to 42251696 reverse strand)
aagtttctaggtaccttttttttcttcattctattttaaacagtactttcttctgttttcaacttcaacatctcaaaattataattatttgtttgtttgtttctttggggttgaaaaagtaaaaaagaaaaaaaaaacacacacacaaactaaatttgaatgtttgtgtagctaccttcttgacggtttcctactatgataactgcacttaattggttttaatttggtcactactttctggaaactctgatagaaatataacatggcagtataatacacgggtcttcgtctcgctactcaattttcgattattgatcgtgtacttggaagtgctagctttaagttcatataccaagattagtacgtctctaccactgtccctttttcccttttagagaatttcctagcctcttttaagtgcaagtgctagcttcccttttattactagtttttccttactcaaattccgttcaactttccgaagcttttgcaactattctagctcttatctcatggaatgacatcaaccgcgggctcttccttcaatgaatcatgtttctataccaattcgaaatggtcatttgctgagtcctatttgctaaatctaggttgctagctataacatagacaacgtcagtgcatgacattgcatagcaatttggttattatttattattattattacgaatgctcatatcatatcattaattcacagctcagactagggttccatgttccatcacctacgttgagctcactttttagcctttttgtttttcttgtgttaatgttgaaggaac

SEQ ID NO: 16944 - DNA, 932 bp, Glycine max
  Intron number 2 from transcript Glyma04g05980.1 (locus Gly ma04g05980) derived from phytozome v7.0 (chr-ID Gm04; pos 4568475 to 4569406)
ggcaagaggcagcttggagaatcaactgcacagaagtatattgcttttatttattccactcttttttatgctttttctttacttttccccctcaaggaaggagtgaataggcatggcaataaaatccgtacccgtggggatctgcccaaacccgtcctaattttgacaaggaatacctgagttgaccgggtacggattcaggttcagggattatccgacttttttaatcggggtcgggatcagggatggggatgtcattacctgtcacatacgcattctcgtatccatgatgaaattattaaaatcttattaattacttattaatttttttataatttaagattttttttttgatgatttttgtagacaaatgttttacaaatataaatagttaaaaataaatgtgtaataattaattttttttaaatcagattttcaatataattttaaaaaaaaaaaaaaaattacaaatctaaacagcagacgaccggataccaggcacggaaatgggtaacaaacttgtaggatatcgaggacagggttgttgggggctggggaggcaataggtgcccgcctaactccgttgccatgtctaagtgaattggagtaaaaagtcacagcgtcattttctttgtgtctgtttgtgattatatcaatagtactagtaactcagtccaatcaaatttccacatctagctctcgatgatcaaataatttggttattctgttcttttattatcaagcacatctaattaattcagttctacttgttttatatggatttttatgagaaatcaatgatagttgaagatgtatattgcgaagaatatctcacataaatatttggaaattaaattcttgccaatagcatgaaatacaaactaagcctcaagttttgttctaatacaagcaggatactctgctgccttacc

SEQ ID NO: 16945 - DNA, 613 bp, Glycine max
  Intron number 1 from transcript Glyma02g14570.1 (locus Gly ma02g14570) derived from phytozome v7.0 (chr-ID Gm02; pos 13176686 to 13177298 reverse strand)
gaattcggtcactcccttactctctctcatattatgttttttttttcgtcaaacattttgaaaacgaaataatcaagtaatgcttagttttgtttttatattattattattattattagtgcaaattttatttgtgtttagtttaattttgatgctttattattagtaaaacaaaattgtattattaattaaataaaacatgttagtaatatatttttttaaatattcttttaaacataatctttattatgaactatttttttaaaagagttttactttttaaatttttaataaattttaaataaaaaatgtgttagaattagatgattatgttcctaatactttttaattaaagttactctaagcattatttttaaagtaatttttataaaataaaattaaaaattatcatttataattaaaacccaccaaggttagctgggtgaaaggaaagttattaagtttgtatgatgttttatgtttaaactccattactgttattgtagataactaaaaaaatatagtactttgtttaataattaaatgatgagaagaattatgcatagatagtgtaatatattttatagaatcatctaatcgcaattcatcaggt

SEQ ID NO: 16946 - DNA, 178 bp, Glycine max
  Intron number 2 from transcript Glyma01g00960.3 (locus Gly ma01g00960) derived from phytozome v7.0 (chr-ID Gm01; pos 604551 to 604728)
ttgtaagttcactcagcttcttccatctccaaactaaccaactaatttgcaattgtttttctttttattgttgttgttgttttgattttttcttaattagcttacgcgtttgtttgtttgtttggaatgatatgattttgcaggaagtatattgtccagctagtgttaagaagcagtt

SEQ ID NO: 16947 - DNA, 632 bp, Glycine max
  Intron number 1 from transcript Glyma01g37730.1 (locus Gly ma01g37730) derived from phytozome v7.0 (chr-ID Gm01; pos 50043043 to 50043674 reverse strand)
actttcttctctctgtttcttctttcttctgccaggtattttctatttctcttgtgtcttcagactctttcttcttcttctttttttctctttctatgttgatgttttcgaaacatttggatagttgtttgaattttgaattctgtttctgagaacagtttaggtatctgttttattattatttcctgattttctggggaagtgagtatgtaaatattattgtgtcacatgctttgttttaaatatgttcaaggaaggagggacgatggcatgatattttgttattaggagtttttctttaacaagagaaaaaaaaattgtatttatcccgcctatatcgactatccgtcaaattagattaattgggagattttgcgttttggaatattttttttttatctcagctgaatgtaatttttctgcatatggtggtggtttgggttgagggaggcaataatcctccccttgcctctcttgttttctcattctctccagaagaacaaagcaacattcaatttcgttaatttagtttgtattcaatgattcaatcgtgagttaatggtagttattgcattaggggtttggatagattgttaaaactcacatatatttggctttatgtttgtacagcg

SEQ ID NO: 16948 - DNA, 330 bp, Glycine max
  Intron number 1 from transcript Glyma01g43860.1 (locus Gly ma01g43860) derived from phytozome v7.0 (chr-ID Gm01; pos 54732619 to 54732948)
catttctacgaactcagacccttcaatcccaactcgtaccttatttctatctatttctttttcatgtttcattatttttctcaattttcttttgttccgcctttgatctgattcctagttattagggcttatatcgtgtatttggggttttcattttgtgtatgcactctgcaaatcgttcgtgtatttcttctgtttgatttgtctttatggaatatcatttcaaatgcatatatctagggcagattaattaccggtgtaattgatatattatgttttcagactttgattcaatgattgcattggctttatgcagagaaaaaaaaaatc

SEQ ID NO: 16949 - DNA, 384 bp, Glycine max
  Intron number 2 from transcript Glyma01g43860.1 (locus Gly ma01g43860) derived from phytozome v7.0 (chr-ID Gm01; pos 54733444 to 54733827)
tggcaggcttcggtttcactattcttttgtttcgagtaagccttcttcctcctttttctcctcccaaatgagttatgactcgtaaattataaactatgaatagtaatgcagctgaatttctggttgtatgagattgagaatgccgtttggttttttcttgtttgacttttatttgatattttgatttagtgcataaatcctaatatccaattaggccatgttggtatatgaaatttcacatcttggttaaactctcaaaatttattgttggaaaatgataactaaaggattggtgtctggtgagcagccatatatatcattctttggaaatgataaatagtagagtattttatttgacaaattatctgtttctatctcaggtac

SEQ ID NO: 16950 - DNA, 756 bp, Glycine max
  Intron number 2 from transcript Glyma04g26800.1 (locus Gly ma04g26800) derived from phytozome v7.0 (chr-ID Gm04; pos 30736385 to 30737140 reverse strand)
tccgtaagtgtttgtcgacgttggtgtatttgaaaaggttgcacttgtgaatatagttttagcacatgttattagcatttattagggatatccttgtatagttattgttgtcaatataaatatacatgtgtgttcatcattctatacacaattaccaaatgtaataaatcttaactattccatacaaaattcagccttgtatagttagggagtgattcaatttagttgccagctgtacagactacctgatttaaaagatagaataactgcttaactaatttataacagtagagtactgaagtgatctagcgatcactctaatatccattagtcataatcagtttacaaatttttgacgtgataccaaattagttgggtatttcactgaaataaacaattaaatggacatatccttcgttagtttcaaatgctgagtgatagttggtagtgaagtttttgtaaattttgttatgtcttgtcctctttctctgtacatttctgttcttcccggtgtctatttgttgaatatttttgtattttacctatgtttggtagcttaatctgtaagccttattcagaaggcaacagtaagatcatagctcttctccctcttctctttcttttgtattctatatatatgtaacattttgaatctaataaaagctgtgagagaaagtgaggttttgattttctcctcaccttcatttcaagttggcatcagagcaggtgtcatccgccgccgccgctgtcgccatt

SEQ ID NO: 16951 - DNA, 829 bp, Glycine max
  Intron number 2 from transcript Glyma02g14440.1 (locus Gly ma02g14440) derived from phytozome v7.0 (chr-ID Gm02; pos 12985021 to 12985849 reverse strand)
cacattctctagtacataaccaaccttgtcttttaaatttagatatttcatgattcaatgtccttcatttgaatatttattcacaattttattgcattccaattattttcttacaattggcattctgtatcatgtgagcacatatgtcaacctatatgcatttcaatatggaatctttatcataactaaatcacctaacttctatcaaatgtttaagaaaaatgttaaatgttacaaaacggttttcgtttaaatcaaacaaaccagagttttctattattgtatatttatctaatttttttttaatcaatattgtttagagaaagggttatcattctatgttacttttgtgtatacgttattcatactaaatagtagcactgcatggttaaacaacatatatcttttccggtgatgctatttagtagaacatgtgtacgaattgcacaaaaataatgtggaatgatagtctcttttttaaataaatattaattaaaaattagaagaagaaaaatgagattagacaaaaaaaaaagttcatgtgagtttgacaaaaatcctttcaaagcaaatagcatttttcttgttttgcttattatagtcaaatatggaagagagaaaaaaaacttgtactatataatattcaaccaaactaaatgagcacaaaacacaaacaattttttatcatgaaagaaactagttaaacactttttttttatcatttttatatgaaacataatatgaggaaatgatgagtaattatgtgtatctcaaactctgttcactgcaaacagaggaagactctgttaggagcagagcacaacaagaa

SEQ ID NO: 16952 - DNA, 852 bp, Glycine max
  Intron number 2 from transcript Glyma02g40470.1 (locus Gly ma02g40470) derived from phytozome v7.0 (chr-ID Gm02; pos 45716687 to 45717538 reverse strand)
cttaaactcccaccgcaatcacattcaaaagtcaggtaaaatattattctgagaaagaacttgtgattgttattataattctagaatagggtatagtgaaaaataaggttaaacaagtgttattgtcaaattaaatcaagcatttttcttgctagtgttagtcggtgatatatatggtgatgtttattaaacatgtatgccaatacttctatttttgtttgtaaatggcaacgtgtatgcgtagttaatatgaatttcttgttactgtttgtgtatgaatcctggcaattggaattaaataattagttaaacatgtaattttatttttgatccgtaggaatcaaagacagttaccgggaactttacaacaacatacgcaccctctttaaccaactgagctagattgccttgctagatttacatatgtaattgattaaggccctgtttgaaagagcttatttactgcttatttggacttatcttatacatgagcacttgtgtaagtgtttggtataacttatgaaaataatttttgataagtccctaagttgtttactttttttttctacttattctgataagctctttaggatagcttatgaaaacaacttacagcttatgtaaaagtcgtttaatcctattcccctttcgatgataaaaataacttacaatacaggtgattctatactttaattaagttgtttatccaaacaggccctatatgcttagaaacttactgaagagtgttttgctggtcatagtggtaatattttcatgtgtcacctgatagacttcatgtattttcagattgatttgttttaaattgtgtacaagggcaggagggttgttaaa

SEQ ID NO: 16953 - DNA, 942 bp, Glycine max
  Intron number 1 from transcript Glyma02g41020.1 (locus Gly ma02g41020) derived from phytozome v7.0 (chr-ID Gm02; pos 46209098 to 46210039 reverse strand)
ttcgcaccccttctgcgatcactgccgctgcgtaggttcgtttccgaatttcgccttcttgggtttggtttgattgttgattcttgaaatggggttgcttcaagtttgggttttttgcttgatttttgaaatgggtctgaataatgtgattgcgttttgttgcttgtttctgaaaaggttttttttttacgtgttttgtggttttattttcgtcctgattgagttaatctgtttcgggtattttgatacgggtgatgatgtgggctgtttccaattttggatttttttctatagtagggtattgttgagaagggttgcttagtggtttgggttgtttgagaaaatgtgtattttaatttttgtttatcattttgaattacaaaacggatacttttttttatttaagttatggtttttgaagagtttgaaaaggaaaaatacttttcattgatttctgattatagactatagagacttttgaaaatagaaagaatgagaaaaaatgtgacatttttgtgattggaaatgaaaacagaagcattttcttctgacaagttttccaaaaatggctgtggagtatagtatagggactagggttatcattgatactgataatgataccaatatgcggctttgtttggttaaaagtttgtaaaggaaaaaacacttcccattgatcatattattgtttggtatacagacttttgaaaatagaaacagtgaatacatgaattctatgattagaaatgaaaacagaaacatttttttatgactagtattccaaaaatgttgatttattatgaaaagggttggtaggaagtttgatgattttgaattttggataatgggttttagaactactgatgtcgatattaatatttgactttgtttggtcaataattgataggttggagtggacattttgtatcaaagagaaggtat

SEQ ID NO: 16954 - DNA, 396 bp, Glycine max
  Intron number 4 from transcript Glyma02g09380.1 (locus Gly ma02g09380) derived from phytozome v7.0 (chr-ID Gm02; pos 7352929 to 7353324 reverse strand)
aagaaaggtaatgttggatcctttttttgtgtcaggggttaagttgaaattgtgtgcagctgttgtgtcagggattttaaatgaagaaaaagtatttttttttgggatatataaatgtttcatctaagtttttttaattgataaatgttggtagatttcaattacatgattttacattttttgtgtgcattttaacactgattcattaaaaagattctgctatacttatcggtattttagtgtttgttttgaaattttgaacacagtaggtttccatcgaaaaccaccatgcttctgacattacatctcaattttgtatcactattataaaaattgtaatttaatttgattccctgtgcagttattgctgttgatctgaggcagactgtacaagta

SEQ ID NO: 16955 - DNA, 792 bp, Glycine max
  Intron number 2 from transcript Glyma03g31040.1 (locus Gly ma03g31040) derived from phytozome v7.0 (chr-ID Gm03; pos 38912226 to 38913017 reverse strand)
tccacaagtcatccacaggcaagtttctttttttgaattaaagatattaactttgttaagtatctacaattagagttgagtagttgacatgaatgatgtttgtgttctacttttgtcctctgtacccattgttatcttgaactaaaagccagttggaacaaacttctcaacacacatgtgaagtagaaagtaaaatgaattaaattacttgtacaagttaaaatcaacttatacacttcaacttatgggaaagttagtgagggaaaaaaaattgaggtgcatgacttgattcattttattttctcctgctacaagtgcttcttgagacgtatatccaaactagctatgattgacatttcattgaacttttttggttgtcctcactctacttccttttatttaatgcctaagaggttccttttttcatcttgggttttgtggaagaaatgtatacttgtttcttgcagttctctattgttggttttagcttctttatttgatatgtaattttattatacagtgttacagcctttttacatggtttctttgttttatgaataatagtttatattttgcgcttatgctatttttttttgttaatgtcacataatgcttcaaattggaacatgaaatatttgtaagagtgtaagaccatacatcctagtacaatattaaggcctgaggttctaggatgatacattcctagtcttcatcttactgttacttttgcttttgtggatggatctatggctgggaaatagaaagagaattttggttttaaatagggaagac

SEQ ID NO: 16956 - DNA, 236 bp, Glycine max
  Intron number 1 from transcript Glyma03g33630.1 (locus Gly ma03g33630) derived from phytozome v7.0 (chr-ID Gm03; pos 41142643 to 41142878)
cccactgtgcaaaactcgccgagacatacaaggtcaaaccctcttcttattattttcaaattatttcgcatgcttgtttttttcattgataacttgatttcatatttactgatatttacttttatattatgtatgggtacataaatataacattcttcttttgatgttttatgtgttgtaacggaatatctttgtcttcagatatttgtgataaggaaataagtttcacaatttct

SEQ ID NO: 16957 - DNA, 919 bp, Glycine max
  Intron number 2 from transcript Glyma03g33630.1 (locus Gly ma03g33630) derived from phytozome v7.0 (chr-ID Gm03; pos 41142883 to 41143801)
aggtatgttttacttctgtcacctaatatatatgattatgcatatataacaatgttctgtttcatgttcttatgtttaatgttttatcaaagaaacatgaatatgcctacttccactataactttgacacaagaatcacaaatccttgataaactgatagctttagtgtaagtaaatgacaggtttagtgtgtgtttggtttggctcattttgaagagagaatcacttatttttgcccacttcctaaatcctaagagagctttcgaaaaataggtgattgtttccttagaaacaattgttttcatacatgctcttagacctaccttaatttaatgcccgtttggttatgcattgaaaggagaagacgcacgtcactttgatgtattttaaagtagcttctgcgtcctttttgaagagttttgaagagttgacgtcaattcatagttgaatgtgcataatcaaagccaatccaaacgcacacttactctctgtccaggtgggaattggtgaggaaaacacccttatgagagtttgagtagtttagccattttgaattttggacctgggtttagaattataatatcaatgtagcaaagatagaaagcagagctgaatgagaaagtgagaaaaaatcaagcgggagaacttaataatttgagtgttttttgtttctgaatatttatgaaaattaattaatatcgttcaaataggatcacagatacattatagttgcaacagcttagctgaccagctcgagtgtgtttgacagattctagttgatataatatgaactagttactttaataagcctaatttgtgatttcatcattatcatgaacatatttcactttatgtagactatttgcaattgttccttatgtaaccttgtgcttggcaggatatcagaagagagcttgga

SEQ ID NO: 16958 - DNA, 1016 bp, Glycine max
  Intron number 1 from transcript Glyma04g40640.2 (locus Gly ma04g40640) derived from phytozome v7.0 (chr-ID Gm04; pos 46634004 to 46635019 reverse strand)
cagctacaaaggtaataccaccttcttttattgcttctttcctttaatttcattaggatggttttgttttagttctttgttccttctattttgtgaattctggcttgtgtttgttttacttttttttttttggtattctttccactcgacctggatatgggaacttgcttgcttcttttatggtcaaggttatataattttcattttttattttaaacttgtacttgtttgtttgcactatgttagtctctctgcccaatttcctattttgtggtttgctactaagttgtttactttaatataaagcatgtgtaggttaggtccgattgttctgctttttcctctgtcactcttctgattttgaaggatgaaactgtgaatttgattgattgtaagcattaacttcttttctggggtctgtatcattaagggtattcaccagactcaatgaaaaagggggggtaaaagcaggaactgaagaagctatcagtaaatccaagatttctgagtcccaatttgagaaaggactgacatatatgatctttgatattataaagggtgccagtagtctaaaagcttataaggatttaatattgaaaagaaaaaaaattagggaaagaagtgaaaaattgtgtgcacaaaacatggcccttttgtttattttatatagttttagtaaattttcttttttaaagaaattatctattttcttacaggttatgtgatggggatctgggttcaatgaaagtctaaggatctaatggctcctttccacttgctttaagagtcttggcagtctggaaactacaggcttacatgatagtgatacaattattttcttacatgatatgattattttcagttgtctatttgccataaagaatttctattattgacctttgttcttgtatgaaacttttaatgtgagaaaatgaagtacttgaaactaatttacacaatattagaacttcaaaataactttgctcatctgctttgagcagtggttgctgttcctg

SEQ ID NO: 16959 - DNA, 197 bp, Glycine max
  Intron number 2 from transcript Glyma01g39750.2 (locus Gly ma01g39750) derived from phytozome v7.0 (chr-ID Gm01; pos 51624984 to 51625180)
aagaattggcatccattgacaaacagcatcacacggttcgtgatcattccctttctgatttattattattaattaattgaatcaaattggactctctgattttcattttgtgtttttttcttttcctttgcggttttgttttttgggtgattgaacgaacagacagggagtgggttcataaaggcggcgagagaagg

SEQ ID NO: 16960 - DNA, 944 bp, Glycine max
  Intron number 1 from transcript Glyma0304s00210.1 (locus G lyma0304s00210) derived from phytozome v7.0 (chr-ID scaffo ld_304; pos 2826 to 3769)
cagtgccaccaaaggaccaggtttgcttctttttttttctatgcttagtttcacatttttgtttttctttgttggaactatcataattcttttgtttgttcttggtcttcttggggtgtttcttgtttgcatgttaggaacatgattgctttcaagtgggggtgattcttgttgggttctcaaaatatgcttctttttcttttcttgttttttttcttctttcctttttctgaaatttcgtgtttcctagtagcttgcccagtttcttctcaccttttggtttctttttatacgctaaatattctcccttttgtatgagtatgcgtagatccaaaacttgttacgaaacatttcgtattactgctatgctagacttcttggttctgattccattttcactttctttttttgtttcccttttatgggaatggttatttcttgaaatgtttggcgacttcaacaatttactttgttttttatagcttggtacgattctttccagcatatttcgggtttgaagttttctctgttgctttggtgttactggtggagcctctttactgtcttgagaatttatttcaatgattttgtataattcaagaggatatgagccaaatgaaagacaaaacttagatgcaatttcttaatacttttagtactggttttcaattggagttggagtttcacctcaataattcgtgttataaattttgcattaagaattagcatagattacctaattaaaactccaattctgattggagaacaacactaaaagagtcaaattctgattgcagaacaacactaaaagtatttaaagatctaaatccatgttttgttcccaaactaattggcttttctgttatgtggggaaattcgttaagaaatggttgtctagttgttgtatttacattaaataaattgagaacgtacaagattttggc

SEQ ID NO: 16961 - DNA, 879 bp, Glycine max
  Intron number 2 from transcript Glyma01g27460.1 (locus Gly ma01g27460) derived from phytozome v7.0 (chr-ID Gm01; pos 36706204 to 36707082)
gctagcatctcaggggttgtagtcctcgattccaggtaatttaaacacttcctgttcttcagacttcaaatttttatgtaccgtagtttcagaattgcatagttgtaaatatgctattaaccaattaaattgacactttaaacatgttaacgtatagcagataacaaatataaggattattgagaagttgtgtttaaattcttttatagaaaggaaaaatatttaaaagacgaaacagaggaaatatgtggcagagtttaagaattgcggcaatcaagtgtttaccaaaaaaaaaatggtaaaaatcaatatgtttataaaaaaatcaaaacttaaattttaaatgaactgatatttataattaattataaattaacaatgatgatcttataaataataaatcttatttactgtatttttcggaaatcaaacaaatgttggttaaagtagcagagcaatcaaagctcctttattttttttttttgaaaggaaaaaatgtttgataaaagtaatttcagaaaactatttttttataataaagcctctctgttttagctttaaaagctattttattttttcacctttactcatgttcttctttgtgctacatcatcttcggatcctccacttgctctcttccgtcccattctaacaaactagtgtttgagaattgttctacaaattacttttcaaaaaccaaaaaataagaacacaacctaacatagtccaagaatcataatagatgtatctttttgttatatatattttcttataaatggtagtttgtaccatacattaaactataaatttttttactctaatgtcccactaattttgatgcatatatgcgtgtacctttcctttgttttttctgtagga

SEQ ID NO: 16962 - DNA, 624 bp, Glycine max
  Intron number 1 from transcript Glyma02g26780.1 (locus Gly ma02g26780) derived from phytozome v7.0 (chr-ID Gm02; pos 27814381 to 27815004)
tcggtatgttttttcttctttcttattccctcatctttgtcattaattacacggtttcgtacactataataaggtttcaattgttgaacattgtatgcttttcgagtgggacagattattagaatggtcttccactggatgtttgggaattaagtgtcgggtttcttgaaaattaatcagaagaggtggaaaaaacagatttgaacatttgatttcttggtatcttaaaatcaactgttttaggcgcaaatgtgttgttactgttgataatttcctctctctctctctctcttttcgagtgatgatgatttctgaaaacctgaactgcaatgatatatagtcaatattgtgcagtagatactgaaaattatggtattataggagagctagaaattactcggtgagggggtaataaaacaaagaattttagaaatttgaagtgttttttgttttgattgtttgtttgttttaggttaggattcgaaagtgtttttttggtctatgtctagaccaggaggtaatcttgttcgagcaaagtatgaccactatggacagcaaagcagaaattgaaagagtgtatgatgatgttttctttctgaaactttcgtgtaggttttaccaagc

SEQ ID NO: 16963 - DNA, 489 bp, Glycine max
  Intron number 2 from transcript Glyma02g06480.1 (locus Gly ma02g06480) derived from phytozome v7.0 (chr-ID Gm02; pos 5160836 to 5161324 reverse strand)
tcaattatacactccaggttttttccagtccttttctgtaacaagtaatttagtgtttgcttatactattgtttccagtacttaatgtttccttagaagattggatggtattatgccttgatgacagaagttgtataagaattgagcccagaaagttgtatcccctttggccagctgatttttgtctcacattgtttcttcatttctggttttagttcaattattgtaccattcttctggtcttataagtcgtaaatgcaaattattacatgacatagattttatatttttaggtattaaaggttttgactttcaataccttaagtcctgtattttcctttccaccaaattgatttattatataccgatattagttttgcatacaattggtatatgtggtaatgtgcttgtttgataaagcagacatccaattccatgtagttgattgtttgattgaataattgcagaaagcatattttaagtgtgcat

SEQ ID NO: 16964 - DNA, 746 bp, Glycine max
  Intron number 1 from transcript Glyma02g04340.1 (locus Gly ma02g04340) derived from phytozome v7.0 (chr-ID Gm02; pos 3520736 to 3521481)
tgcgcagtgcaatttgggactttcctatctccaaggtttttcatttctttaccttataccctaatttcatgtcccaatcgactagcaatatgaaaagaaatagtgtatatatatagctgggttgagttaggcaagttcaaattttaagagttgttattacaaaacatgtgttttctgtttcatttgcttctttgtaggagagaatagaaaggaatcatcctaatcacatgcaccttttagattctgtctatgtttattggtggtattttcggacatactttttaggttgtgtctatatccttgttgttctgtctccctgctcctcctgcatacttacataatttaggataataataatttctctttttcgtctgcgagattggggctagaaatatttttttagtgttatttaaaaaaacggaagggtaaggtgttgctttttaaatttttcatggttttaaattgcggtcatggttacggtgaggtgagttagaaaacctttatattgtcagcaattgtgggaaaatgcagttgatgcagccacaactgtgatcttgatgcggttgtggagagtcaaaatagcttgacgatgcacaccgtaatttaaaaccatgatatttgtatatatgtatgcatctgtttgggggttgttaatgaatatatatacattatgctgataattcgtgtctgaacaaggtatatctatgctatgcagctgaacctccgaacactgagctagctgtcaa

SEQ ID NO: 16965 - DNA, 1028 bp, Glycine max
  Intron number 1 from transcript Glyma03g32430.1 (locus Gly ma03g32430) derived from phytozome v7.0 (chr-ID Gm03; pos 40180017 to 40181044 reverse strand)
tgaaaggttggtatgcttgtactacttgcttcaatattgcttcttttactttttctgttttcttcttatttgtaatactctctttttttatcaaataattgttttaaatatattaaaaaataataaatttataaatttaatttatatattattaatttatttataaattttgttattcatagttgatattataagagatataaataaaaaaattaatattatataaaaaaacaaaaataataattattttaagataattttttcaatataacaattataatggacccagaaagtactataataatggtctcattttaattactacattgaaaacaaaacaaggttgtctttttcccaagtactttccaacttccatatgcaccgtccgcaataccaaaccaaacgatataatctcttcaagttgatagatattttgcttgcttctagttgaattgtatcatatcaaatgtgatccaaatgccatatccaccacacaatcactacccaaataaactttttttttagggtgaaaactaaaccatttttttttttgtttcttaattaatatattagacagagaaggttaaaccactcatgttcacactctatattatataaagggtccagcttataaattgcattgtttgttttgatttgatgtctgctgctacaaaagtctcccttccaatgatcatctgaaattacataggatttatagggtcatcaagaactcttcagcatcacaaaagggtattgttcttttcttctctgtcttcctttaccaaccccaaacatttcttttgtgttaaatttactgattctactcagcaatcagcaatcagcaatcagcaatcagcaatcagcatcattacttttccttgtagccatgtcaatttgttttctgtttcaaaaaccaatatgtctttctctttttctagtttttttcttattttcctgaagtaggtaatttgcagttttgttctattttcccagtgatttataatcaaaaagcaagggacagacacaca

SEQ ID NO: 16966 - DNA, 603 bp, Glycine max
  Intron number 2 from transcript Glyma02g00280.1 (locus Gly ma02g00280) derived from phytozome v7.0 (chr-ID Gm02; pos 74750 to 75352)
caccgttccttaaacttaagcatattgcttctcaggttattaattcattctgctgcataatatattcattagtacttcttattaagggatttaattttgccactccattatgcaaggaaatttatttacaacacttccattacgcttatcttaaagtaattgatttttataatttcaagttttaaagtgaaggcactagtcaaatttaggataagcatactttatagatagagatgtattggagcgtttgtaaatcaaagtcaatatatctgtgtaacgatcgacctataaatgaaacatgtaacttcaccaaatttgaagttttaaagtgttaaattaaattggccagagatacaaaaattagacacaaactataatgatttaacacatcccattaataaatgaaaatgtttggtgaacacccattaagctattcaacacctagaaaaagagttagaaaaatatagatatgatatgatttgtgagaaaagaaagaaacaagagatgttggtggaatctctaggtatcaatactcttagttaatgctgtttgaacgaagatcttgaatactaaataaagaataaattatgtgggtgtacgtag

SEQ ID NO: 16967 - DNA, 688 bp, Glycine max
  Intron number 2 from transcript Glyma01g41680.1 (locus Gly ma01g41680) derived from phytozome v7.0 (chr-ID Gm01; pos 53117973 to 53118660)
ccttttcaaaacctagagcatccttggaaaaagatgtaagttgtcattttggtttggtggaatttatctctggctatttagattcttcacttaggtatttcttgtgaacacttctgttccaattaacactgagatgactcagaatgacactatactgcttcttggttttcttatcttccccccaaagtttaatttggaagtgggggaaacaccattggataacttgaagattgtattacttgaagagacctttaaaatgaaagaaattgattatatggtcttggaactaattgatataaagtagtgtgtttcatagaacaattttgcatactctttattgtggaatcagagacgcaactcctgaagaccagaactgacctttgtcaataaagtgtaatttagaagcatcttaataagatcaagaaatcacaatggaaaagaattgtaggaaatattcatatggatataagcatagtgtctttttgggaaatgcatcttctgtattttatcactttaatgaaaacacattggaagaaacatgaagggcaaaaattatggaaagacaatgccagattgtgcaggtttttattttcccataagatggtcatagcttagtatttgattgaacagctatatgatgtattgatttgcaggttgaacagctacagctacgcctacagcaggaaaa

SEQ ID NO: 16968 - DNA, 992 bp, Glycine max
  Intron number 1 from transcript Glyma04g36480.1 (locus Gly ma04g36480) derived from phytozome v7.0 (chr-ID Gm04; pos 43001512 to 43002503 reverse strand)
accccacttccatcaaccgtcaggtacctaaattaccccaatattcacattacctacgggaattattgtatcatgtatatggctaatgaatttttaagggtttttttcttcttggaaatttttataaatacaatgataatttttgtggctggaaattttagctgttctttgaagcaacaaaattttaattttatagctatgcatacttgtggagtgaaagacttagggtaagatttttagatttttttttttttttgtgtatccaagaggtacttaattcttcttatttgatacataattaatttttcttccattggatgagcctattttggataatgtgatgtttccaattgtgattttatgttgaagttaaagatacaactcaaattttgattaagatatttaagtgtcaaatcacttgtaaaaatttttttaaagatatattagctacaattttcgccacaacattaagatttttgggtttttcataacttaaatgcaattgcaaattgtggccatatttgtctacaatttcttgtagtatcaaggattacaacaagatcacaatagagatcccaactgcaatttaaaaccttacacaaatatttattacacatgttattaaggtgaaaccttaaaatttacttctttactgtaacaaaaacaaaaacaccttgaaaactatatcaattttgttactctaggatgtagttccttggttgcatctaatttttaatttgatagctatgtgtatggagtgaaaattttggtgtagttctttaagtttttttctgcgttgttgtccaattaaagttaaagcttcacctttacaaaccttttattaagcggatcatccttgaggtgagacttcaattttcttcataaacaccactaaatatggattgtcttttgtggaggatattcttcttccacaaaacatgttatattcttcttcttagttatttatttatgtgtataaaaatctcagggca

SEQ ID NO: 16969 - DNA, 916 bp, Glycine max
  Intron number 3 from transcript Glyma04g08720.1 (locus Gly ma04g08720) derived from phytozome v7.0 (chr-ID Gm04; pos 6855916 to 6856831)
agagaaataaggtctttctagtttccaagatattaattttgttagcacctgtctgctttgccttctctttcactctagcgactcggatgcaatttatagtcaaatgtttgtgatatgtaatttattgaggcaatatggataagatacagcaattatacctgtatttaacttgctatgaatttctgattgtcacttctttaaggataagagacatggttctaattttgtctgcctaacctattgaaggaggggtatggggagggtcattataagtgttgttgattgacttggtgtcatattttaatttttattcaatttctgagaaagagactacatacatagatacatacattgtaattgcgaaggtcttctgtgttgtgcaaagttatgtcagaatgagagtctttcccttcttttaatacaaccttagtactcaaattctatctatcacttgcctttattttgatagaattcaataatgataggaaacccctggcccctcacctcttttggtgtagaatcatatgatgaattagcagtggccaaaggcatgggtgtgattattatggcaaactacactttgacgccttacaaatacaaaccttatcatacaaaatagagaattattgtttaatagatggttgtttatttcgaattctaacacaccttaaaaagttaagaatataatgtgtatgtatttgtatttgggtgtgtttatctgttgaaaagtgaacactaatgagcagtgtgacaatgtttctgttaatcatctcctactcttcaatcaaattgggttatgcagaatgttctggcacattcgtctttcctacaatatttttgcgttttcaattattctttcatttgttagttgtgacttgtgagatatcgtcattttgattctcaggcgatttggaac

SEQ ID NO: 16970 - DNA, 1011 bp, Glycine max
  Intron number 1 from transcript Glyma02g07590.1 (locus Gly ma02g07590) derived from phytozome v7.0 (chr-ID Gm02; pos 5983890 to 5984900)
tcattgccttccagacttcagcagtaagtataatttgcacgcaatgtgtgtggcaaatttattgtaaaataaataatgacacttgctatgtagaaaatgtacatacaataagttattataatcaccgaattcaatggctaactagttaaaagcttctctcggactctatgagctatctttgccatgattcacatttgccatgcatatatgatatatggttgttcaatattctttcaacactagaattatgccctataagattcatattttgattcatcaaatagtttttatacacactaagaaatgtcagatcatgtgtctgaacaaaaatgcaccctttgtacatattttgtgtatttgcacgctcgtaggtgtgtttttctcctatggctatggcattgtatcagagttgaaaccaacccatgccatgtgaataaatgtaaaacagaacttaatagtttgttatatgcttgtcattaagttctccaatgatataatatgaggatttttttaatattaaataactttcattaattatgtgttatagaattttaaaatacatttacatgtcgcgatttcattggaaaacttgatcattaggatataacaacttgatctaagagatgttttgaaggcagtagcttcagtgtatcttaaccaattgcatcactagagtgagttaatttgtatgtaatcagaaagcagttattgctcacccaagcaattgtttcttatcaagtataggcccacttaaataaaacattgcagcattttattatattaggtatcattgataaatatgattcaagttttatctaatgaatatacaaaggaggagacaccagaagggtgaacagccaacaactgagttggcaattgcacttgatgacattcaagaagctcaaataagtggaaaataaaacccaattagacatgttttacaacattgtgttaatgtatttactttagtttgaaggttggaggcagagaaggaaacacaaaaggcgtagt

SEQ ID NO: 16971 - DNA, 997 bp, Glycine max
  Intron number 1 from transcript Glyma05g03430.2 (locus Gly ma05g03430) derived from phytozome v7.0 (chr-ID Gm05; pos 2623732 to 2624728 reverse strand)
gtataaggtgaatttctgaagtctgaaccataaacgacgctgcgttttcactttgaatttaaattgtgtttattacgatggcgctggactaaaacgaattgagtttgctttatgtggtttgagtgaatttgaggagcctgcatgctgatgtaattaaaacttaggagcccgttgaactaattgaagtttcatgacttccgcggttttttaactgtattgttcggatgtgcatgtgaaattgttgggtagtgctttgagtgccattaagggagaaagaagtagctgtgttaattaaaaactctagcaaaccttcagttcatatttcagagaaccctcgtgggaattttaggtttttcagttgttttgttaaaaaaaaaaattgtctgttcaaaatatgtcaaagactttgggccttgattttcaatttttttaatccttttagttcttctgatctctaaaatctctctctaattgctttgagtgactgaaagtgatgttttaagttgtaacttaactttgattgtaggaagagattatataggctttctcatctgataattggctgaattgtcagatactagagttatttttattcaatctctccaagcacgggagtagatttataggtttattttctgatagattagtaacacttgatctttgaaccacaacaacatgatgactgagtgtagaaatgtaaaatgctggatgatccggggaaaatgctttatttcccattttccctgatttaattccaaaatggttatatatgggctcgtttgttacagttttttttgtccataaaaaatgatattttaaaagttttccatgcgtttgtttcagctattcaaaacaatcaaaagctaagggttgaaacaataatacaatatgtccaatatttattagcatggaaaattagtaaatatcaattattgattcgttcaccattctatctttaatgttataggtttttatgtttgtttttttgccaagcagt

SEQ ID NO: 16972 - DNA, 871 bp, Glycine max
  Intron number 1 from transcript Glyma02g09050.1 (locus Gly ma02g09050) derived from phytozome v7.0 (chr-ID Gm02; pos 7019941 to 7020811)
agtcttaaaggtccactttgggaagaagtttcaaggtatataaataaataaatataatttatataattcaatttcgatacatctaaatctaatctctcaactcatctcttttcatttttttttctttttggagtcacttcaatatctttttctttttgtgggtttgaagaaagtatatatatatatataaacttcaagctccaattctagatcgtgcatggagatctatgaattggttttcaatttccagttcagacaattaaaaatcattttccttcatgtatattcgagccgttaagagctgtttttttttcttaattaattacatgcaccatcaacttttgaaatcagcgaatcttattcttccagtctgagataatacatattcaatacgaactttattttaattaactcaaatttttatatttaagtgtcagccgtttataaacaaggcatatataaaatggacccatgtttgaaatgaatcatccgtgagtttttcggttttctattgatttgctcttaatttttgaacctctcttctttgttgcctttcatatcgttttcattgttttttttttatttgtcttatctgttaactcttttaagcatatgaaccatctcttctgttgttaatttagtacatcaaggcaagtacattaagttgtctgggattttttagccttggttatgtgaaagcattagctcatttttatttataatttttttctcaactcatttttctattggataatgttgaaatttgatctttctctctctccctccctttctacatctgaatatctctaattttatgcataaatcttgccacgcaggaaattggcagagcttggatatcaaaggagtgcaa

SEQ ID NO: 16973 - DNA, 384 bp, Glycine max
  Intron number 2 from transcript Glyma04g06650.1 (locus Gly ma04g06650) derived from phytozome v7.0 (chr-ID Gm04; pos 5105375 to 5105758 reverse strand)
gatcttcctgtcataagtaagtttggatcttgtatggttatatgtgatcttcagtagttcatctttaccgtttcttcattttgactctcattattgattgttgatataattattaatcagtttaagctatttagatatcaaataatcagttttctaatgttctctttttaaatattcaagtgtattattatgtttatgtataataatagtcaagtcctacaatagaatttgtttaagtttcatagttggtttttgataaatgtgaaaatgtgatgtgcaaataaacttatttaggaaggctgatttgagttatttttgtggtttccatgattttttggagaacctttgatgttataaaatgtttgatttcagtgttatctgcaa

SEQ ID NO: 16974 - DNA, 271 bp, Glycine max
  Intron number 2 from transcript Glyma02g13910.1 (locus Gly ma02g13910) derived from phytozome v7.0 (chr-ID Gm02; pos 12247804 to 12248074)
aacctgtaagtttccatctctaaataattgacctaaaaaaacaaataatactattactatactcctctgctttccgattctcatctgcgtctaattaatgttttttgtctttacctggcaaaaaaaccatcaattgcggaagaataaatttatagttttcataaattaaaattaaaatattgacttgagaatttagtttgtttttagtcaattaaattaatacatttatttattctaacggtgattattattatttttgaatggaacagtt

SEQ ID NO: 16975 - DNA, 1035 bp, Glycine max
  Intron number 2 from transcript Glyma04g39920.2 (locus Gly ma04g39920) derived from phytozome v7.0 (chr-ID Gm04; pos 46075358 to 46076392)
agttcactgcatttcattttcggtaactcaacttccccctttgaattgtagcaagtttatactcttcttttgctttctatttttgccactcatttgtattttgtgtctttcatttgaatcatttctttctttgctaatatatttgttctatctgtgtttcattcatgctattagaattgaaggtttttgaccctcccttccctcttgcatcttttgttagaactttgaagttgctccattgtacctgctgctactccttgtgctgtattttgcttgtgatctaggctatgcactcacctagggtgtgcctggttggttatttgagtgaagcttttggaatgaaaattgcgttatacttgcttgttttgacataaacatgagaaggtggaaatggatatgtgtttcattttcgctcttggttaacaatcattttcctccaactcaactgctcgtggctttagtaaaactagaagtgttagttggagattgcatttgtcaaatgttgcaattttttgtttgcctttatgtttggaatttagtttcctagatactgtttgcgggaatgtgacaggatctgttggattgttggtatcccttctttttccaaataaaatattgcctctttggaagtatcatttgttgtcttatttgccaggcgttactaagttaaggattttgttttctttactgctttttctaaatcaatacagctgccgagtaatgtgaataagatgtaagttgcttcataaaaaatgtaattgttgattttttttttttggatttgcctaaacattagacatctcttagcattatttggtttttaattacctgttttcagttctattcatgaagaaggtaaatttatctcctctgaaatgtgttgtctgatgatggtttgggttatgttcatgctatatgcaaatttgagctttcatctttacattttaatgtactgtctgagatttacaagtttttgaaatttgtgctttttgatatgcagctacaactttgaccagctggcatctgcttgtcacg

SEQ ID NO: 16976 - DNA, 710 bp, Glycine max
  Intron number 4 from transcript Glyma04g12950.2 (locus Gly ma04g12950) derived from phytozome v7.0 (chr-ID Gm04; pos 12402861 to 12403570 reverse strand)
tctggcctgctcaatgtaaatcattctctttgtttccttatttgtattatatgtgcattgtctgctgtatttattgataattaggacatgctaattgttaatgtcgttgaatatgtttgcatgcactttatgatcatgtgccatcttatagatattgttgttttgacaaatgcttgtttttacaagtcttggtggggctctagttttggagcctgtggttggacaatgatgccgggatttgtaaggaaaaaaaaactatttagaatttttttaaagttctttactgttgattgagacagtcagacttcatcagagatgtatttgtcttttccttcaaagctttcctgagtatgagagtagtggagtgaacattttgtagtggttttggatttggataagaataatattgtggttgatagtttcatttcttatagcttctatctttgtaaatcttttgcagcctgtatttgaaatctatggaagaatttaaatgaggagaaacatttaatggtttttgagctctttatatggtttgacctgagtcttcccttttttgtttttcactctcgagggaattttgtttgtcagatgtttggagttgttggctctcaatttctattctatattaatatttcttcatataggcgtactaatgcttaaatgtgaaatgcataggatccaagtatcaaggaattggctgaacagatagc

SEQ ID NO: 16977 - DNA, 666 bp, Glycine max
  Intron number 2 from transcript Glyma04g12950.2 (locus Gly ma04g12950) derived from phytozome v7.0 (chr-ID Gm04; pos 12404174 to 12404839 reverse strand)
gcttcagattccaaaaaggatttccctgctggtatgtgcaatctccttctctagatttgataataataatcagaatagtaataatgatgttattgctattgttgttggattatttttcccatctggtgaaaattcaacgcagtttattgatttatttagcttagttttccttactggaggtattgaaaaaaaaaacggttttttgccctaaaaaacagtctttgccaaaaggatacttaaattttgatctcaattgatgtttatttatcactttatagaagatgtgtggacttgggattaacgccttgagctggttgaatcgaatttgcaacacgagtttggtgttttcaagttacatagttgccgtcatgtatgacttacctgtgtttatattaattaatgtttatatttatgtgaatatatgaatactaagagtagcacttttgccctttatcctttactttgggtgtactacacgtagcttcctttcttctttttgttttgttaaagttcaatgacgctttcctagtgctgcaataatctctgaataaagttatttgtttatttattcacctgaatttataactttgctacttcctcgttatttttattccttctttcatgtaatcagaacaataagggggtaattgctttacacgttgtggt

SEQ ID NO: 16978 - DNA, 970 bp, Glycine max
  Intron number 2 from transcript Glyma03g37700.1 (locus Gly ma03g37700) derived from phytozome v7.0 (chr-ID Gm03; pos 44217197 to 44218166 reverse strand)
gaggtaatttttattttattttttctctcactgacagtctcgcgttattctgtttcattggttttgctttgccgtgctatctgtctctccttatttatttatggggttttaaaaatggcatttttcttcggtttcggggttcaactttttttatttacgtttgagatcagatccaagtaactactcaatgggtttcagtaaatgctcctgtcctgcccacctacacacgcaagtgctttccagctctttttattccaaaaaagaaccctctcttgaacaataataaatattcaccgtcacggttctttttaccgtggtactcttaccactctcttccttcaatcagacatatatgtccattgtacgctggttttctttgtttttatctccaaaagcataaccccctccccttcctggcttcaagcttcaagagaaaaacaaaaataaatgcagttgccgttaagaaaccgtatctacggatatttatccttcacttctttatttattttttcattttttaaattacatacatacaaatttccatactatatttcaaaatttaaagaaacaatttcctgttaccaccttttcatgctcaaagaacattttccaatcaaataaaatgtagtctgagttggcctataacaacaacatttggcttagatttcagatgtttggtagacctataacattgttaatgctctcccatctttttatctttttcatcacactctattccactttactttagagacaagtttatgcatctaataaatgctttaaataaaactatttgacaggtaatatagttagattagaaaaatcaaatattgaactattaatttgaaacatttatatagacaacttatgattaaattttaattaagcaatacagttattattgctttgagcgagtttgattaattgtgtggaattttcaaacatacagatacttggtgttgggtgaagc

SEQ ID NO: 16979 - DNA, 941 bp, Glycine max
  Intron number 3 from transcript Glyma04g03480.1 (locus Gly ma04g03480) derived from phytozome v7.0 (chr-ID Gm04; pos 2528002 to 2528942 reverse strand)
caggtaccatgggttggtttggacgttttatgtttaactttatttcgtgaaaaatatttactgtggactaaggtgtaagtgctttttgctttccaaatcaatcaaatcattggggaaattcttatattttactaggagtaagagatttttcttactccttaccgctagatatgtgcttacatgcccacatctgcgatattgatggctcacatggctaggatgtaaatggttttggtatacttaaattcaacaaaataaaaaacagtaaaataagggaaattagtacaataaaatatcttccaaatatatttttctgcctttttaaacttttctaattgaactttttaaacttttagtgtccgcgtgattgttttcctgtagagtgaaattgaatgaaagtttttaaaattgtgtctcatattttcatacactactttaatatagatatttttttcttaattccattctctttcactcaatctatccacctttagtatcatctaaaactatagtttaaaaattgagtaaatagtgtataggttagagtttttatatgtatattcaatggtatatataacaatgttaatttttacaataagtattttaaattatactaataataatttttatttgttgaccgtgtaaacttttttttatctaaactctttaaaagttcacacaaaattgttttcatttcattttgttttcaaagtcaatattaagagttcaaaaatagttgttgttgttgagagtaaagaaagaaaattatacgcaaaattcatttatattaaaatggattaaaatatagtccatgttaaggactaaagtattttttagaaatagaagaaatggctaggttactttttgttttttcttgggtattgaaattgaaaactaatgtgttagtggttgttgctgaacacatcttcaaaagagaatca

SEQ ID NO: 16980 - DNA, 757 bp, Glycine max
  Intron number 1 from transcript Glyma03g07910.1 (locus Gly ma03g07910) derived from phytozome v7.0 (chr-ID Gm03; pos 8653104 to 8653860)
gctttggaagagtgagccctctttttcttaattctgtacttcttacttataccctcagctttaaaaatttattatatgatctaggaattttttttttatacataaaacttataaaactttaggtaagttaaatccaaaggattcataagagttaagacaagtctcaagcttcaaaagagtgtttatagatatatttaaaaattattcattaacaagatttttatctcaataacagaaattgaatctatattcttttagagtgaactatattttcttggcatatatgatttaggaaatattcattgtcccaccaattcaaatatgaaactgagttttattaatatatatatatatatatatattagccgggtttaaaaaaggttaataataccctaatgtttttatctacccaatttgccaatcatggagttatatctgttctggtttattcattgaaatttatttcataacaatcacttttgataattagtcttgcaattacgtatgataagattgttaatggatgcttgggatacttttttactacatatcgtgaatttgtcataaagataataatgcataaatgtgtttctagaaactgtatatacaatgtaggttggattttgctatcgcttgtctattgattaatattgcggttgttaataatgttatattatgggatgatatgaccctgtactctctctctcctttgtttcgtaaagtcttgggtttttgtgttgagtttacttgggctcac

SEQ ID NO: 16981 - DNA, 833 bp, Glycine max
  Intron number 2 from transcript Glyma01g03380.1 (locus Gly ma01g03380) derived from phytozome v7.0 (chr-ID Gm01; pos 2873684 to 2874516 reverse strand)
tggaaaattttagtaatgtccattttctatttttcattttgactttcttgcccttttccttgactgttgtctttatcttttctttgaatctgctttctgttgatgcattttgaatattcaattcaatagaagacaatgcattatgaaaagtggatgattatgttcttgcttctaactataatatttcatataatttggttggatttctttggtctgctctgatgcagcttgattcttgaatagctgtacaatgcatacttggtagctgaaatctttgattttaaaacaccatgttgatttatgtggctactggctggatagatgtgatagtctcttcttttttgtgcaaacaatattcttagttgaaattgtctcaacctaaacttctaattaggatacatggcaatggctgtaacttatcactgtcctttcatgttctcttgtaacatttagggtcatgtgtaacttttatttatgttaatatctgcagttatctatgactatagctttcttaaccgggattatttagagggtttaattgtatagttgattgccagttgtataaatgttcttgagttttttgttgttggaaatatatgagcgttacttagaaattgttgagtagtatgtgggctaaaattggttttttcgcatattggatgtttgaaagataagaaaatgtttggtcctttattttaattttgtggtaaccatacccatttcacctggttttgtttgtctttccagtttccactgtgtccagcaaatatggtagtacggttgcttcttataatggctgctaattattgtattattttccaggctactcacat

SEQ ID NO: 16982 - DNA, 734 bp, Glycine max
  Intron number 2 from transcript Glyma02g36420.1 (locus Gly ma02g36420) derived from phytozome v7.0 (chr-ID Gm02; pos 41902736 to 41903469 reverse strand)
agcttgagagtgtcaggttctcttcttcattacctgttttgtttcgcattattatacgcgctctggtgtgagttaagcagctgttgtcaattgttatttcagaatttgtgaatatgttgaagtttattaggtttgagtctgacatattcatatataacatcaatttaaatcttactatagtggtttcggggtcagctgcttcatgccactttgcacgattgataactatgattatattttaggtatcttgtttctgaaaaatcgtaaaatatcaaaatgagaggttttaattaaatcagggcattgcttatatatgattgttaggggtacactgaaataatagtctgggtatgggatctttctgcattattctttccctccgtcaactatgctattgagtgtatattactattagttatgcctttcaaaaaactgatattaaaatgtgctttgtctgtgttttgctttgaaaatcttcagcattgcatgaaaactaatttttactggtggtctgtggaattgtgaaccaatttgcataaaccccaagagagagattgatattttagggttcatgcttttggtgcatttatgttgcagatgtcattctattctgagagataatgctatgagtttgtttttcttacttgtttttggtcaaatttcactgtgttatatactgtaattcatgaatggaagcagaattaaaagacgtaaatttgaaagcattgaggaaa

SEQ ID NO: 16983 - DNA, 788 bp, Glycine max
  Intron number 2 from transcript Glyma03g23910.1 (locus Gly ma03g23910) derived from phytozome v7.0 (chr-ID Gm03; pos 30591892 to 30592679 reverse strand)
aaggttagtgagtgagtgattgtgaattcagcaatgatatatggatacctctatgttatagaaacttttaaggaaaatgaaacctacacatgaaaatgaacatttagaagagataagataattgaattactgaatgagatcatagtatctctctctctttttttaatctcctgagtgtgttgctagcactcctcttatattctcctgaatgacatttgagaaactcattatatctttattgctctcttttctatccctcttttctctctctctctctctctaggtgttgcataacataacaatggatgtccactaatatttttccttgtggaacaatgatatatggatacctctatattataatcacctatttgacacccctttttatctctttcttcttgtcacattatatcacctattatttctacatcaaaaataatttgtagacaccaaaaacctattcgacatttgacacctagtgagataaagaaaaagaagaaagcaaaatgtaagcataataggtaaatggatgcaataaaaagagggacagagaaaaatggtaagtgctaatgatgtgtttgaactgatatgttgttcatgtatcattaatctatctacatttctctcctctctttcccttctaggtgacaaattacattggggtgttcactaatctttttccgtgcgcatttttcatggttttgctttggtgaaatttttgtttatggttaagtgtgtatttttgtgggttgtgatgaatttgttagggcctggtgttggaggggatt

SEQ ID NO: 16984 - DNA, 676 bp, Glycine max
  Intron number 1 from transcript Glyma03g28630.1 (locus Gly ma03g28630) derived from phytozome v7.0 (chr-ID Gm03; pos 36558270 to 36558945)
cacttcgttcacttcttcctgggccagatcaaacggtactttatatccctagcctctctctcacaataatttgtcctttctttaaattgttagccataatattttgtaggaaccaatttcaagaaattaagatgaatcggtgcccttaattagcttccatgatggtttataagacataattgtcaaactatatacgtttattcaattcattttttttaacggatgtttattcacttcataacaaatactgaaactggatttgcttgtttcacatttgatcctttatacaagtgcaagtttaagggataggtttattttttattgtgcaagaaactcgtatagccagaaattacttattaattagatggtattattgctctgtgttttattttcatttttaattaatatgttgatatcataaaaaaattaattacattggttattttatgtttataagaatattaacaaaagaaattataaagaaaaagcaatcaccatttcttcacattatttttttttaaaagaaaaacaaagacagagtagatagtgcttttactattacaaacaaattaatacatatcaaccacaaaactataacaaaaagtgaatgaaactacatagctgtttcatcaatagagatctcattccttgttaattaatgttgttgcagaaaaaa

SEQ ID NO: 16985 - DNA, 1033 bp, Glycine max
  Intron number 1 from transcript Glyma02g44780.1 (locus Gly ma02g44780) derived from phytozome v7.0 (chr-ID Gm02; pos 49228681 to 49229713)
cttttgagcgaccgagacctggggcttctaatacggtatgttttgttttggaggcggcagagattatgttgactttttttgttgaaaaaaattgattttgaattaatgcagattctagctaattaaaatttgagtttgaaggaaaggttgtgatttgtaaataaattgatttgtttactgaactcggacacatttgttttgacccttgtttgtgttagtgagacaatgttggtgatggagtgaaggaagtgaagctcggccttgcttgtttgttttgctagttgagtgttgagtttgtgtgcagagtgcattttagcttggtccagttaaaattaatattttttatttcttatgcagtgaagtattaggttaatttaattgaaatttaatcaatatgatatgattagttttctattagtttcttttgaataaaatttatattttcggtgcatgttagtttagttaatgattttttttttttgcatttataattttgtggcgacgaacgggatttatgtgggcaatgtgattgatagtttctggcatgttggaggctgagattagtacctcagatttcatctttatttgtttactcttttgttaaatttaataagggattttacagtttggaggatgaaagtataataccaaacaaattgacatgtgagacaagtgaaaagaaaatatattgagcaatttaacccattaagtaaaacctattaacacacccgtttactgaactacattgtcaaagcgtggaaaaactaggaaaaaaatatagggtagttgacaaatttgaagaatctatactattcttaaataattataatcttgatatctcctattcctaaatatgatgctattagtatttaccaaaggatcaagttggatttggagggtgcgggggttgtcatgcattttgattacacttgtttcatttctattaggtttaatcaggagttacccagtggttcctaacagatgttattatttggcaggtttttaaaagtggcccactttttatatcttcaaa

SEQ ID NO: 16986 - DNA, 362 bp, Glycine max
  Intron number 1 from transcript Glyma05g14800.1 (locus Gly ma05g14800) derived from phytozome v7.0 (chr-ID Gm05; pos 16001280 to 16001641 reverse strand)
ttcaggccaaacattcaaggttggagataaacttggtatgtttctttacataattatacattggtctctttcgttatatacctttgcatgacaccaaagaaattatcttctctcaaaagccaaaacaagattttcaaaaatggtctgtgtgaccatcatagtttttcacaaatcagaatatcaaagattgtaacaaaaattgcaattgcaaccaatatcacaatttttaacctttgtctaaaagctatgatagacaaaaatgaaaatcttcaggttgtgttgataaattttgatcattttgttattattactatgattattttgcagttttcaagtacagttcttttcatagtgtggttgag

SEQ ID NO: 16987 - DNA, 818 bp, Glycine max
  Intron number 1 from transcript Glyma04g35730.1 (locus Gly ma04g35730) derived from phytozome v7.0 (chr-ID Gm04; pos 42212419 to 42213236 reverse strand)
tcttcaacatctacttcaacatctacaacaaacaggtccgaatactctctcagatctctcgttctagtttttgcctcaacttgcttttaaacgattgttgctgcaccataatgatttaccaaacacgcccttggatttgtggtaattgataatgattaaacgtagagagcagtttcataggtgcttttcgtgtagttcttcgataatacaaatggaaaaaaggattgctgctgaaacgatgatcgtttgccaaacgcgcacttagatttgtgttaattggtaatgactaaacttggagcagtttcatatagctgctttttggtgtagaattggagtcatttcacttcggtaattcgcactaatctgcattgatatttaatagaaacgtttattactaattcgcactaatctgcatttatatttaatagaaacgcttattattacgacgtggattactgaggtgaaactctaattttggtgtcgttctttagttagaattggagttttagtttacttcggtacaccatgttaatctgtactgatatttaatcgaaaccttaccaaggtgaaacctcaattctgatcggaactacatctaagttttttttctaattgttatttgctgaatcttgcacgtggagatttgaattacagattctgattccgcaatagtgttctctgttacgtgaaaggaattgtaatcagtgatgctagttcgatgaggatttgaatttaagtttaacctggtgcgtttttgttttgttttctctgtgttgtttgcaggtgttgaaggcgtttcattacccggtaactgtgac

SEQ ID NO: 16988 - DNA, 686 bp, Glycine max
  Intron number 1 from transcript Glyma05g21820.1 (locus Gly ma05g21820) derived from phytozome v7.0 (chr-ID Gm05; pos 26710503 to 26711188 reverse strand)
aggtacgtcttatctcttctgtaatatctctaacttcatttttggaccatgttgttttatattcgtacatcaaattttataagttctattttggttttttaagtttttcttttgtacaatgtacatcagatctgtgtttttttgttaaagatcttgcatccacgaccagaataatgtatgtaagtgaaagataatataatattgaatctcgagcatgtgaatcaactcatatgagtgcgagaataactccatagtcttgaatttgagtgattaggttaaatatttggaaggaaaatatgtgatttataaaataataaaaaataatgttcattttattagttgaatttttcaggatgtttttcgttgaaatccaagtgcttgaaacttgattgaacttgactgagtttagggttttacacttttttactacgctaaactgaaagtgaactaaggtgtaagcttacggtgaggccacgcgccaccattgacgcgtggatttggtttggatagcctattaattttttattttataacagtggtggagtaaatctaggattttggttaatcaataaaatattactacattacttctttgctttggacaaattgtgaacactttaacattggtaactgggatctgacattgtttgctttattttttttttcagagtggagcagagaccatc

SEQ ID NO: 16989 - DNA, 482 bp, Glycine max
  Intron number 1 from transcript Glyma02g10050.1 (locus Gly ma02g10050) derived from phytozome v7.0 (chr-ID Gm02; pos 7960520 to 7961001)
ttctccgtcaaagaattatctttttgggttctcaggttctctctctctctctctacatatatataaatattttgggatggatttcgttgttgttgtttccatattttaagaataccctttgtctttctggttattttttaagggaaatttgcaaacttgttcatgtgggctcattctaaagcacgctcacaatatcagaagaattaacaaacaggagagagagagagagagagagagagagagagagagagagcaaataggaaaattgacatgatagtgtgaaattgctgaagagataatgtttgatgccgttgattttaagatttttttggcttgttaatgagggttcattctgaactgttggatgccccaatatatcaaaataaagaagaagataaaaaacactgtgaaaagggaatgaaactgcagagagagacagtatctgatgttgtgtttgtgaattgttttgtttgattaggtgg

SEQ ID NO: 16990 - DNA, 777 bp, Glycine max
  Intron number 2 from transcript Glyma03g07390.1 (locus Gly ma03g07390) derived from phytozome v7.0 (chr-ID Gm03; pos 7937720 to 7938496 reverse strand)
cccttctagagtggctcttctttcggtatcttgtttttctttgtctcttgaagtccatttatctgtttggaatttgaggaagttattctgccggaaaacaagataatggaaactggaattgctaggtcttagactcgagtaattggcttttgtgcaaccattgtggcgtgatgtgggattacttaatgtgcttgtggttgtgggttgatgctcattttttaaacaaattttgggaaatcgtatgctgtttatttgaattcattcttcagaggtgaaaataggatggtgagagaaggggtggtagaaaatttggaatcaaaataggagggcgagccctggtgcaagtgcaacagtaaagttgtgtcttgttggtcattggttcaaatctagaaatagtctctttgcatatgtaagattctgtacagtgacccttcttcatacctttgcaatgtgaggagcctttggcactggggtacattagttttcttggtgctataatatttgaaggacttaaaatgaaaagaaacacaataactccttctattgccagcctttccacatttccatagtactatttctcttttgtatcctctgtgtatcatgcataaccctagcaatgccctctttcacagtatctgacattgtcttgttttagcctatgtgcagcaccactactcactttttttatgttttcctgtccatgttaagaagaaatgatctttggtacttgtacttacaacaggcttttaggtgataagtcacccttttctcaacaaa

SEQ ID NO: 16991 - DNA, 1039 bp, Glycine max
  Intron number 1 from transcript Glyma03g26810.1 (locus Gly ma03g26810) derived from phytozome v7.0 (chr-ID Gm03; pos 34345996 to 34347034)
gaactgagaaattgttggaggaaacagtctttcaggttcatgcaatgtgcattgtagttaacattagtttgtgatatgataataccaattagatccttatagtagttaattttgtttatcactaattctgatttgtgtcttcactctaaaactatgccatgatcttttattaggaaaaatctactctagattctatcctcttcccccaattgtgttcagcttctgatttttcattttggttttgtttcttttgttctgtttgtttgagatgttgccattggttactttacaagtgattctttttccccttgtattcttctgggccttctgtttgtagttgatatttaaaaattttaattttatctttatgcaaagcaagaatgactttagccaaagtggcaaagccattttttgttgaaagtatcttcactttatgtctgtacaagaagatggatggatcctatgtgtatatcagtactggaatctgccttatcttactttgaagagtcacagcacatctgcactatggatgtcttttaacttttttgtattaaaatacatctttattatacttgagagcatagattttcatattcacaagaatactaaaaattggtttgtctttaaaatgggtcatttctcataaaaatagataatttgtaggaattttggagttcatatctctaaattgcaagtgtactaaagaaactagcttaataattttttaaatattttaaaagagtaaacagtggaaataaaaactatgaacctgtgtgacttattgtaaacataaaccttttcttcgtagctaggaagcctctagaagattctataattcttttggtgaaagatcacacgagtaaggaaacggcgtcctatgttggaaacataagtcaaacaaacacatgttttctaaatcttgaaaatttgaaaatgaaaacagggaaatttttgtggctcttgatttgtatcaatcacaagttattcatttgtccgatggttgatgtgcttgctcaacaggatcagaagaagagatctc

SEQ ID NO: 16992 - DNA, 442 bp, Glycine max
  Intron number 1 from transcript Glyma02g47640.2 (locus Gly ma02g47640) derived from phytozome v7.0 (chr-ID Gm02; pos 51167579 to 51168020)
gtggttttccaacctcagaatttcctcaaaacttggtaagaaactggtttaatgttcaaaaacttctcaaactgaagccatggaaatttgcttcagtttttatcttcattgatttacaagggtttctccaaacggtttggtgaagtaaagcatattctgctcatacttcttgcccgtgaactttttgagcatttatgtttatgatgtgaatggtttctgcataaatgtcaaacttcccttttgtaatcttcaattgattcctaaccaacttctgcaatgagatgtgagctttgatttgatgtgcgtttttctgtgaacttatctgcttgttgcacaaatttcgttctctctctctctctatatgtgtgtgtgtgtgacagagagagagagagagagagtactgtataaggggtggcttgattaaccttgtcttaactaggtg

SEQ ID NO: 16993 - DNA, 772 bp, Glycine max
  Intron number 2 from transcript Glyma02g47640.2 (locus Gly ma02g47640) derived from phytozome v7.0 (chr-ID Gm02; pos 51168075 to 51168846)
aaagtacttctccaattgctattactgcttttctggtttgtgcatctgttctgtatgacattcaaagttttcttcttttcagctcagccaagttaaaagttaaatgagttaatctagtagcatttgaaattttcttaacggtgttttataaacattgtatttttcattaggcatttttccgtatgtaaatgttaattctgcagttttttagaatgattaacctcattcaaatgaaaactgattcaatacaatatgtggggccatgcatatttctgctcgtctcatcttttgaatttttttaatggaaattatatgttcatgtttggataattccctttccctttctgaatatttattcccttctcttagtttaattccgaagtattttcctttttgttttggagaaaaatcactaatctttagaattggttatttatgaagtttcttggaaattcttctaattgattacatcagttgttcattttttttctcataaaaaagaaaataagcagagagatgaattgtgttgacttggtatgagagtcaagttgttgataatacacggtagaaggagaagaagaagttgactaatgttaacagtgcgctgactctaaagagtgcctaatttctttaagacaaaaaattgtccttatattctggttgaatatttcagctattgctttctatctcttcaattcattgtatgcaagttgaaagttgatgatatgataacactgatgacaccgtgatttttccacgcagacagcagatt

SEQ ID NO: 16994 - DNA, 961 bp, Glycine max
  Intron number 1 from transcript Glyma02g40790.1 (locus Gly ma02g40790) derived from phytozome v7.0 (chr-ID Gm02; pos 45998705 to 45999665 reverse strand)
cccgtgcagtatcgcaggtactccaaaaaatttctcatgcattttcagctactactagaaatttcttttcaaatattattctatagatcaatgatgctgacgttttttgagcaaatggtgctgatgtttattttgaagttcaattttcatataattgtgtttatcttgaaagcttttttattgaaacaaattctatatttcccgtataatttctctatcaaagctctcaaaaacacttcagacttatatccaacacactgtttctaacacaggttaggatctattgaaaattatataatcttgttagaatttattaaaaactacatcatctagagatgcactaattaattaaataacaagtgagaccccttctttgtacactctatgacaagtaattgtaactttgtaagaccgtacctaatacattcttttttgttgaaaattataaaatcaaggggattcattaatggtttaaatttttatgtaatgtcattatcaacccataagatgtcatagttagtatgatttttaagttaggtatgtaaaaaacaaatttaccattaataaccatttgttaatggatgataaaaaaaaaacttttattagattgtggatgcacgaactatttactcttcattaaataaacaacaggcatacaaaatttctaaaatgtcttaagagtatattagaaagtgtctttaatttttttctctaacttattagaaatctccacaatctataactggatgatagtggtggcaattatagcctacacaacatgatgtgggtcacagtcattatgaattggtctaaacaagtatggattcaattatgagttgcttcctcatgacaatacaattttttttttttgcattgtcattatatttgagttaaattctattttgatttttgaatgttgtgatgtgtttggagcaggataaagtgtaggaaggaaggaggg

SEQ ID NO: 16995 - DNA, 922 bp, Glycine max
  Intron number 1 from transcript Glyma05g08590.3 (locus Gly ma05g08590) derived from phytozome v7.0 (chr-ID Gm05; pos 8438096 to 8439017 reverse strand)
ttgctgcccctgcccccatcatcaccccaactgtggtatatataccaaacactacactttgatcattcatgcattcaaattacacatttgttgttgagtttaatttttatgcatagctggtgtaaacgtttttttaccctattaaccgatgaaacatcattgtcggtatgaattttagcatatatagttattgtaaaactaacaaacttatcatatataacattttgtccattgttagtacatgcattatttactctttgttgttttgttttgtgtttcaaattttaagggacacaaaattctcataaactttgcacttttggatcacaatatgtgtttgagttgtcaccatgacttagctagttgatcatgtgcttaataatctaacaaggtccacgtataaggttgctacttgtgtgtcggcagccagcaccatacaattaacaaattatttatattaggaagaaaattcataccgaaaataaaaactatatatatatatataacgtcaaatagcgttgtatgggggaggtgtgtcagtgcgaggattctaaggcgattaaagaaggaaatccaaactactatagaagaaaaagtccattcaaaatcaggtttgccaaccaaatatagcaactaattaatcctcggacagtgtaaaatcaaatttccacttttccgaggtttgacactatttattttcataataattgaattctgaatattattttcctttagtccttccccactcaacagaattttatcatagttactaacttatgctaaagtttcatgtttaattaggagaaatttataattagaaaattgcttttcgtttctcatttcattttctagtcacttgttaccagttttttttataaaaaaactgacacgtatttttcttttctttttggagagagaggat

SEQ ID NO: 16996 - DNA, 679 bp, Glycine max
  Intron number 3 from transcript Glyma03g31280.1 (locus Gly ma03g31280) derived from phytozome v7.0 (chr-ID Gm03; pos 39183548 to 39184226 reverse strand)
gatcagggtacaggtgaaatgaatcaaatgattaagatttagtatttagactctgtttggataaaaaaaaaaacccttttttgtaaacactagtataggaaatgaacataaggtagtaaaatgaattgaacttctctctacatgctaaaatcaacttatgtacttaacttttgtggaagtgttagcatctaatttctccaaatgctaaagtgtataagttgattttagtatattgagagaggttcaattcattttatctttttattttcttttcttatataagttcttatggagaaatttatcgaaactgagtcttagcattgtttgtgatttttgttttcttgtatctattatgtagcccatttattgactaacaatcaagatgatatccatgattattaaatgttgtgcttcccaggtcgtgtatttagctttgcattggttatttttgtacaaatctttcttgttcttaaagggaatggtatcagaaagttgtatgaaatgaatttcaaggtccatcttgtgcttttacctatttaagctttttcctgcataggatcgtttacattttagaaaggttggggtttgataaagttttgctgctgttctcagcactgatagatattatatattttttagtgtcacatttcttgatattttgtttctaacagtggggatt

SEQ ID NO: 16997 - DNA, 620 bp, Glycine max
  Intron number 1 from transcript Glyma01g01860.1 (locus Gly ma01g01860) derived from phytozome v7.0 (chr-ID Gm01; pos 1434552 to 1435171)
tttgcaaaagattgctccagaagcttctaaatgtatggagttttggtctgttgaatatcttttttcttctactgtgtattcactttaatattttgcactgataatatcgtaatagtaaaccgtggcattgacacacttacaagacaaccaggctttctggtgcttgtgtcacttctcaaatccagcttgagtgagttgagagggtgtggatttgtgttgtaacagaaaatcatcaatgatgaggatatagtattctgcaaaccaccataccatatgttaaaaaagttgtaggcttaaatattgatttatagacggtcattgtttttgtattagtttaatataatttagtagttaaaactgtcctttttaaagattttcttgattaaattatagtctatgaggatgtacttttggtttattaatgagaggattatcattgattatttggaacttgaaagtaaaagttgtagattctgcataatgtaatgaaaatagcctccttgtatgttgtatagatgtagatttctttcttttttggggaagggatagatgaaaccagttgagtgatagaatagtgacctaattgttttccatttgaatctgtgataaattccaggtat

SEQ ID NO: 16998 - DNA, 1036 bp, Glycine max
  Intron number 1 from transcript Glyma02g00670.1 (locus Gly ma02g00670) derived from phytozome v7.0 (chr-ID Gm02; pos 463971 to 465006 reverse strand)
tcacagtcccttcgattcctgctgcaacatactttgtatgcacatcatctcttctctattttgtctctttctgttcatggaccaatgcatgttcgtttgtttctagagaaaaatggaatataaattttgattcttttggaaaattagcaaatgggtattctaaattcttctttttcctgaactcagtttcagtttctgggttagtcccttgctattttctacaccaagggaaagctaattagctggaacaagatctgttatttatttgtttatttattttattccatgtcatggttctgtgaagttgtcattttttttaattaagcatctcaaagggcgtctcatccagaaatcctaggatccaaacttttgttcattgaaatttcccaatctcagcttgtatcgtaatatgtgtgttaggaaagcaaattgtgatgatcttataggatttagaactactagctgtaaacaaagtttaagcttttgatgtgttataagtgcaatcaagtttaaattcgcttctttagaactacttttcctagggtgatttttttatttggatatttgtcacagttagagcatgtttgggagttgggacagcttattttttgagatttcagattttttttaagtaaaaaagctgtttaaagaatattttattttctatttattttttaagaaattcccatttttctattttacgaactatcaagatataggcgaaaatctatccgtacattgtccagttaattttattttttcttcacttctctactttagaaattgttcattacaaggatacattattatgtatcagctaaatcaatgactattttccacctatgagtttgtatgcttcccatggaagttctgaatatttcttcctaacttcacattcttatatttgtctacttgttggagtaagaaaaatgatatttgtatacttcagtgacttatatgtagctttgacttctgagaagctgatgctaatgtatttgtttggtcttggtcttgccatgtgcagcaaagccctaaa

SEQ ID NO: 16999 - DNA, 697 bp, Glycine max
  Intron number 2 from transcript Glyma04g37740.1 (locus Gly ma04g37740) derived from phytozome v7.0 (chr-ID Gm04; pos 44168497 to 44169193 reverse strand)
tttagaactttcactggaggaagctcgccaacttggtaaacatctttttcaccttcttccattcttttcatattacctaatttatacatggcaaaaagcattagtatcttcaacagaggattttcctcctttttatccatctgcctattcttattagttttctcaatgtttctctggtgtaattgttactcgaaataaggtagaagtgatgtggctatattgggtctgttatgtatatctattttactcatggagtcatcttatgttttgactacttatagaagaggaagaacaaaggatggagtggaggattgaataacctaccctattattatcacactgcaagttacagaaaagggagaaaaaatcatgacccataatgatgcaaaacacttctcctcctatcttgtcataattttttgcttaatacttctagtacatctatctagtcaattgcaccaaacctgttcatgcagcgtgtgtgccaccattaaatggtactctcttgctttaaatgcatttcagcatttgaaattgagttggaggcaatgtttttttttttggtgtcttaatgcttcttttttttttgggataaaaagttatattaagttgtaatatttgaacttgctggaaccctgacctttaacccttgatattatcaggtcacaattatattggatctgagcacctgcttctg

SEQ ID NO: 17000 - DNA, 882 bp, Glycine max
  Intron number 1 from transcript Glyma02g29170.1 (locus Gly ma02g29170) derived from phytozome v7.0 (chr-ID Gm02; pos 30630158 to 30631039 reverse strand)
ggtgattctcctacgcggtcgttcaggccaacgaggtcatcgaggatcacagccaggtcgagaccggctccgacgccgtcttcgtcggcgtctacgacggacacggaggcgccgaagcctcgcgcttcatcaacgatcacctcttccttaatctcatgagtgagttcccaccctctccttttccacctttttcaattcctaagttttttttttatcgagaaatgttaatttgatagttattagtattttgttgtttttgattcgaactcacaaccacttcttctttcccactcagagccaaccttataactctatcatcaactacaatagtagtaggcgaaaaatatgtttttattctttttttttctggacgttcgtatataagatgaatctaggctcaaaattcaataaacatttagatttaattccttgtttttaagaattcactctattctctgagagtgagtgtctaaatcaactgacacgagattgttttagattgtctctaattagagtcttcggtatgcaactgtaaaaaaattcaggagagttttgtcgtatacaatagttttgatcaaatttatcaatatttggacagaaaatacaaggattaaaaacatgatttttaataatattaataataataatattcggggtgcattgaatgcttggattaactggcgtaattttgttccaatttagttagtagtattcttgagtatgagccattcaatactcaataggagtgactgagtgagctttgttgcgtataatattcttattatggggcgatgagtcgttgatttgggggagggttgatcaatgttgatattttggacctttttggttgcttaagagattttgggtcttggagttatttgg

SEQ ID NO: 17001 - DNA, 578 bp, Glycine max
  Intron number 2 from transcript Glyma02g42260.2 (locus Gly ma02g42260) derived from phytozome v7.0 (chr-ID Gm02; pos 47329492 to 47330069 reverse strand)
tgaaggaggtcagtgaggaggttgctaagtacaaggtaaagtgttatttgcgtacatttcaattaaaactatgtacatattttattggtttgttttcgttctgtatttgataatgttgtaacgttactcgtttggctatgcttcctgtttttgtgttttgaattaatttgaatcataacaagtctttcctaagtttttctgtgaatacttagcaaggctttttgaattgatgctagtgaatgtatttcgtgagcattgaagatgtttactgatattgttttataatgattattatccgatttgctttgtagttgcaaggtgctaaacataagtttgattcttgtacattgttttttttcatgttatgcctaatgatttggtatccaaatatgttatagacccaagttattaagattgtggtagttgttcagtaagttgcatcccaattgttagtttttcattctttctttttgccaccgtgtcatctgtggttattatttgctttaattgaatgctcatcaaaacattgtttaatccgaacaggttggagctcctgctcgtgttggtttggttgctcc

SEQ ID NO: 17002 - DNA, 705 bp, Glycine max
  Intron number 2 from transcript Glyma04g06070.1 (locus Gly ma04g06070) derived from phytozome v7.0 (chr-ID Gm04; pos 4622596 to 4623300 reverse strand)
tggtcttgtcatctgcgttactggtttatctaaaggtgtggattcatcattcatctattcaattttccatctttggttggttggatttagtttcgtttttcatggcttgacactttctattgctttttcttttctttgttccactaacctttttgtttgtatcaatcaattacttcaagccattggcttaattctacatgaatgttttcttaacattttatttttgagaaagtgaaccttgattctctcctctcacctttttttgatgattcatgacagaggggatgggtggatggtggttgtccttcttgacaatataagatgtcaaataacacatgttaggacttctgaatttagacttctgttatctatcatttctgatttatctttaacagtgagcaaatagaagaaagggttgagaaatgagaggtgcctgttttgaattatctatttggttgatagtgattagtgcatgttctctatggaatctatcttcatctgtcgttttctattttgtcttttcttcttggcataaaactgttcatgtaggaggctgaaaaggtgtagtttaagttatcagtggaactgataatagatattttgtgatatccttgtttcccctctctctgacaagttgaagagatattaatacagttatgttgttttcattggattggtgttttggcagaagcaaggaatcaggtc

SEQ ID NO: 17003 - DNA, 998 bp, Glycine max
  Intron number 1 from transcript Glyma04g06070.1 (locus Gly ma04g06070) derived from phytozome v7.0 (chr-ID Gm04; pos 4623404 to 4624401 reverse strand)
acggtccttagttggagtcttgaaccacaacccaggtgagctttgtctcttccctcttactctcattttcattttcataaccccccaatgaacaacccaaccatctttaactcacatttccttgcattgcgctcactttaagaaatggggaatcctccaaactttttcaaaataaaagcctgctctctgttctctctcttctttctattcaatttgggttgagttaagttgagacttgagaggtgtgattcccgttactcctcactactttgacccgctttttgtttctctctctctctctctctctctttcatccccctacttccatctcagacatcacatgcaatttacaaaagcaggcgtttttttttttttaatttaaaaaaaccactataacaagtagaaactataatggtatgggggcactattttctttcgcgtactcaagcagaaaagaagagtgaaaactctgactgtgactcctcgtcagagcagagcaccacattcaaaaaaattcccttttctcattgtcctccctccctctgcaaaacaaaaacaaacacatcttaaaaattcactctgtgtctcccactcctcaacaaccccctttactcgagattccgtttttttttcctcacagcctttgcaacttgttgaaaatttcaattttggaatcgtttcaccacttaacgtgatctgggtttgttccatataaagttcagctcttcacagatccaacatttttttatttccccttttaattcatccattcattgtttctattgaattatcagaaacccgttttaatgaatttcaagtcatatatatatatatatgtgtgtgtgtgtgtgtgtgtgtgtgtgtgttgccttttggattttcaattgctgagtgatgaatagattgatgcttttgttttctgtgtaataaaaatcttgtggctgttatgggtggtgatggtagagttgaagttgtgagtggcaaggggtgttcgaggc

SEQ ID NO: 17004 - DNA, 518 bp, Glycine max
  Intron number 1 from transcript Glyma05g00420.1 (locus Gly ma05g00420) derived from phytozome v7.0 (chr-ID Gm05; pos 197629 to 198146)
tctgcattggtgagaatagcaaattaaagtcaacagtacattatcactttgtttcacgaccacaaatacaataattcacaatgcattaatgcatgatgctcattgagactttgagaagtccttttcggtgtctcttgtgtttatcatctggcaccgatcaattaacacgagaataatagcaagcagagcagttagccaccttagccatgttcttcggatacgctatagttccgtaatataagacaacttgtttcactttttaattattcttcttcctacttttatttagttcaatgatcaatgttcaacactttatttctcctttttaattaattctccattagtttaatatcctttttaataatatcaaaaaaccaaatgcgttatctacacctacctgttcttagtttattctgatcttattatgccaattattgttttagtttttcactttcaattatgtcctattttatagggatgcagtcatcaccagagtttgccaacgaattactcagagc

SEQ ID NO: 17005 - DNA, 500 bp, Glycine max
  Intron number 1 from transcript Glyma04g06200.1 (locus Gly ma04g06200) derived from phytozome v7.0 (chr-ID Gm04; pos 4747568 to 4748067 reverse strand)
ttcttcacctttcagttctcaaaggcgtcacacaggcatgaggcatatccttcaattcttttgttttacttaaaagaacaaaaggcgtttttcttttttcattgcctcaaaagagaagacttgtggaaaacaaagaagaaaatgtttttataagactttatcatggagttcatttgggtttacaacattagctttaatgaccctttctataagctttatttttctcatgttaccatcatatgttgcaaagcgtatctcatttttgttgataattaattttttttgaaaaatttgagtgaccaattttagtgagttttttttttagtcatattttttttttcgtccacaatgtttaaatgcaagatcttgcttattctaatgttaatttatttaatcataggttaatatgaaccaaaaaaaccatagtttaatttcaatgttgtgcttttgatgttctttgtacaggcagttgggttgttgatagacagcaacataaacaa

SEQ ID NO: 17006 - DNA, 428 bp, Glycine max
  Intron number 1 from transcript Glyma02g18260.3 (locus Gly ma02g18260) derived from phytozome v7.0 (chr-ID Gm02; pos 16871500 to 16871927)
cttggtaggtcacacaagtttaaacattacattccgtaagcgccttttctaaaatcttcgattacattctttagttttcttttgagtatttaaagcccttaattcaaccgcgacgaattatgatgcttacgaggcaaatcggtttgtgctaacgtgtttgtatttatagatagtgtctctctttgagtctctgtaatgaatgtaattcagtttgtctattagataataaaaacaattatttcttacctatgacatggtaacaaataataataaaaaaaaattattgttgtgttttaatcatttggtctggttaactaagttccttgatgttctgggatgatggcgataatgtttaactaagttccttgatcattttacagcgtttaataaaggtaactaacttttgtttggagtctcagtctcagagt

SEQ ID NO: 17007 - DNA, 827 bp, Glycine max
  Intron number 2 from transcript Glyma01g00760.1 (locus Gly ma01g00760) derived from phytozome v7.0 (chr-ID Gm01; pos 434898 to 435724)
ctgttgccactttggacaagctaaacgaggtccactattcatccatgctctcggattagggtttctattttttctattttgctcttttttgctaccagacttgtcaccaatcgccatagcaactctgcttatcaactttaaactaactggtggatatatatttgtggattagcattattttattacttacaataaactcttttttgagttattaaatatatcgattaagaagattatgaatttaatcacaatatttgactgattcatggaattgcaaatgagcttttgttttgactgattcttcattgaaggctcctaactctcatcaaacatggtttttcattgcatagcttattaagtttgtcaataccttagttgttagagagagggtagttgttttcacattgttagttcggtatttccgaatggcaattaaacaaagaaggacccttttctgttgtccagtacacaattttagtcttgttttttctttaattcaagatagtgcatgctatataatatgattatatcgatctgggtatgtgataatttttccagcataaatgggttattgctggcatgttgtgagtgttgttgaataagaaatgacaatttctcccagtttaacattcatatgattgtggaaaataattttcttactttagtatctccaaattataacactagttggcagagtattcttgcaattcttctgagccacaacttaatatggtggccaactgttagactggtgtttaataccagtaatttacgagagaatttctcaaatagaatgttttgttctttgaattatgtagacacttgaa

SEQ ID NO: 17008 - DNA, 581 bp, Glycine max
  Intron number 3 from transcript Glyma04g24870.1 (locus Gly ma04g24870) derived from phytozome v7.0 (chr-ID Gm04; pos 28521193 to 28521773)
tattttacagaagctagctctagcttcaagctcaggtaatccattctcacggtttcactttttcatgtggttgcatagctagcttgtgatgtaagcattgcaaatgtggacaaagtcagtttgtttgtactttgtagctcaactatcatggcttaatcttcaagatgggttctaaacttctggtgatgtcgatcatttgtttgatcctttaccaaagaaaaacatgagtaatgctaaccctattatatctagtgtaggctaagtctgtttgggtaaacatttgcaaaaaaattttaatgaaattcattttgaaattaagtgatttatgtatagatgttttcttctaaaagcaacttattagtaaaatttggtatataattttggattataaagctagttcaagttgcttcatgtcaaagtcaattttaaactcaaaatcaattctttaacgtgagacaaaacatttgattttgtatctaaaatcatattagtcgatacttcaacatgattttgaataatccaatgtgaatccaaatatgcactaattataattgtggcatttgaattttgcagggatctcc

SEQ ID NO: 17009 - DNA, 769 bp, Glycine max
  Intron number 1 from transcript Glyma05g29380.1 (locus Gly ma05g29380) derived from phytozome v7.0 (chr-ID Gm05; pos 35033883 to 35034651)
ttgctcgcttttgggctgctactgctgaagaagtaacttatcaaatcacgccccatctctaaatgtcttattactattctttattttgtttttgtttctaaaatgaacttgaaggttccatttccaatggatgaaataattttattttataatttgcagaggttaccatttttccgtttttaatttgcttgaaaaaacattgggaatttttttttagcttctgatttcatagaaattaaaatgaacaatttactgttgttttatgttattttttgtctaaatattaatcggtaaattttatgtacacttttctgtatttttttgttgtcacttattccttgagcacgtactgtttttgtcactgaactcatttttttttattccgtatagtttttattttattttattcggattgtactccttatatgctatagcagtagcagtgatagcagtggttttaaacttattagcaacaatttttttactgtagttatagcctttaagaaagttttagtggtgcaaaaaagtaaaaatataaaaaggtcaataattaagccatagctttatgatgtatgggtatatatagttcctatttcatgcacattccaaagtgcgatatgatgtatgcatgattgaaaaatagatatattttatacaaaaaaagatttgtcttctaaaaattttgattttgggatacagaaagccatatgaataactaattttcaaatgcctgttttgtgtgtatatatatatagttcaggaaggtagt

SEQ ID NO: 17010 - DNA, 513 bp, Glycine max
  Intron number 1 from transcript Glyma05g01270.1 (locus Gly ma05g01270) derived from phytozome v7.0 (chr-ID Gm05; pos 806871 to 807383 reverse strand)
cactacctcattcctaactcacacacacacaacgggtgactcaattttttctccattttcaattatattttttttatttgttaattttgttgtcttttttgttcgaattttcgttttttatgacctgaattattgatgattgctacagagggtggatctacatcaaagcccccttttttcaatgtttcttggaaattcccactgttttttgattttggggtttgttgttgtgttgcggatgaagctgtggtgtgagattagtgaaaaatttatttcttttttctaaatttggcgtgagttgttgccctaggatgattgtgaaaattttgcaagttaaattcttgaattatatcttcaaatgtgttcttagtgttacccctcattttccacgtctttagtctgtgttggaatctgaattgacctgttggttatgcttcttaatagttttttaatagaaaattgaagttatttccgttttctctttgtggctgttggtttttctaggtgatatca

SEQ ID NO: 17011 - DNA, 792 bp, Glycine max
  Intron number 1 from transcript Glyma04g08480.1 (locus Gly ma04g08480) derived from phytozome v7.0 (chr-ID Gm04; pos 6650000 to 6650791)
tctcatcgatcgccctcaccgtcgcaaccgtcagggtcagttcccaaatccactttcctttctttttatttatttgaatgtttcacaatttcaatttggactcatccacggaagcaactacatagcaattgccgcctttatctcgcaacatgctttagacaaataggaaatttcgtatgttttgggttttacctcacagcatagcatggcttcaaatgtttgaacgcgcgcttcgctttgttctcattaacgttagagatccaatgccgttgagttttgtcttatttggcgtacaattacgaaatctacagtgcttgcgtgttatgacttaagtagttaagttctgtatggcatagtgtctcgcggattcatcaacttgcgctatctcttctatttcagaaacttgtttctggaatgaggaaaggagctatgttaactacattgagttggtgcattagctttacacacacacacacatacatatatttaacctctaatgttttcttgatattgttctccaaccagaattgaagtttcacgttggttaatctatgttgacatttaatgcaaacttttattacgcagattaccgaggtgaaactctgattttgattgaaaagcaatatctagggaactgcatccaaagtttttgtctatattgatatcccaattctcttctgtctacatggttgattatttcttcgttgtggtgtaatacctttacttcaagtactgacctaatgtttaattttaccaggaagagtgaagtctccgatctgaaatcgcagctcc

SEQ ID NO: 17012 - DNA, 867 bp, Glycine max
  Intron number 1 from transcript Glyma01g41620.1 (locus Gly ma01g41620) derived from phytozome v7.0 (chr-ID Gm01; pos 53075018 to 53075884)
ggtactgcctctaccttctttgctattctgcttatgtttttttgttcgtttgtaatttgtttttgttttcattagatctgatgcctgaattgaacgattatttggtttaattgttctgctggagctttcttaagagggtttggggttttaacgccaaagccaaaacaggagaaagaacatcatctcttcgctaacttgaactagcatggatgtttgctactgtgcccccatttttttgtttccattttgcttcatgactctatatttgaatctaggctttatatttggtccatggtcgtgcttttttttttgcttgccatttttcttttatgaaatggccattggttcttatctatgtttctcatattcgttctacgtcttgtatatggttttcttgctgtaaatgtttttggttatataagtttctgcttgtttagttagtattgtaggatctgtgagcatgcttacttcgatcccgtatggtttttgaagttgatagtcagatctaagtgattttaaatatagttggtcttttggaacgagagagacttgttttggcaagctgcatgcatttgatttcataattggtttttgtggtgtaatccaattgtcttatctcacatgcaccaaccagatgttaattaaattaaatactgtacagtcttgggctcttagtgttatcatcaatttaggtctaacaactcattggtgtcaagtaatatcaaacgattagtcgttaggttggacaatttggtatatatagcttttggttattctgatggaattatgtgtggtacctgtgttggaagtgtaattgataaaacgtgttgtttatgttggtgtgattggcaataggtgcctacaagt

SEQ ID NO: 17013 - DNA, 430 bp, Glycine max
  Intron number 2 from transcript Glyma01g05170.1 (locus Gly ma01g05170) derived from phytozome v7.0 (chr-ID Gm01; pos 4851234 to 4851663)
tggtgtgtttaatctggtcttttataagtgagtttctatcgccaactactctgtgttcatagcaatttgatttgtacatagacttggtataatttaatttgagtttaatttctatacactgtgtctctaaaaccaattagaaactaaagtgatttttacaaaagtcaataatgttatcatacagaagatataagaaggtttggatggttaaaggagaagggaatagaaaaaaagtcgtaggtttgatctcctaccaacaaaaactaatattttaacaaattaactattgccgatacaaaaaaaattctatcatacacgacaatataaaaagtctttgcactatcaatgttatttaaattagatccgtttagcattttattttatttactttttgtttattttggttttgtttatgtggacagtgataaag

SEQ ID NO: 17014 - DNA, 664 bp, Glycine max
  Intron number 2 from transcript Glyma01g44800.1 (locus Gly ma01g44800) derived from phytozome v7.0 (chr-ID Gm01; pos 55327347 to 55328010 reverse strand)
gcagtattgaacaggtatatatgtatatgtcttttagttttttcattgtgtatgtttggtttaatgtctttgaatgtcaaatccacatttatactaaacttaataactatggcttcttgtcttctacatttttaaccagttgacatggtttctcatgttcttgaagtttttttttccaagaactcatattttgtattataatatttttatgtgtataaatattttctatttgcatattggtttattgtaaaccttatatacttttcatttattttgagaaataattgatagaattatacatcactaattccataatgtctcttgacaaggcataaacatgaataagtcatacatgacatcctcatgtacaaaatttgtttaaattatgatatatgaatttcagcaagtcttataaaggttgccaaagaaaagcttaagaaatgatactttttcttgggattttgcatgtagagtcatgttgttaggagtattaagtaaataaaacttattcttaagaatctaatacaatttaactatatcacatgtgcttaatttgatgtagaaaaaatattatgcccttttatgttgttagattaacatcatttgaattttgctaatgctttattatgataaaaaaaggtagcagaacaattgttagctatcc

SEQ ID NO: 17015 - DNA, 779 bp, Glycine max
  Intron number 1 from transcript Glyma05g26580.1 (locus Gly ma05g26580) derived from phytozome v7.0 (chr-ID Gm05; pos 32507032 to 32507810)
gtctctggcatctccgctgccagccttctgatctggtgcgttctatttgtgctttgttctgagttgtgaaatttgcgatttagttcttttgattctgatatcggttacttcgatcctcagatgaggaatttcagcgcataattcgtttaaatcactttaaatagaggccagattattgtacgtctgctccaattcgcattccgtttctcaatttatagatcttttgattgggattaatggcaagtaaagggatcgcaacttcaatcgatcacgtgtaaagggtctaagatctgtgattatttactatttagtagtgctcagattgacgtagaattaaaattttcaagtgaggttagtttgggatccccgtgaagaattggggtaaattctcatcatgatttttaaggggatactatagtggctcgtattaatgaatggataatatgatttaatgttgtatcatatatttcatctaggaatgaaatatgggttgcattttattgttttgttactgttttactgtcatataacgaattgaacacaaatatctgaaacttgggtttttaacggtgacgaatgctatcgtgtgatccatgtagccaacctcacctagtgggataaggctttgttgttgttattattactgttcactgtctaatgcctatggagttgcgagcctctctgactttagtttttccccttgtttatcatctccagtcataccaaatggccctctaactttagtttttccccttgtttatcatctccagtcataccaa

SEQ ID NO: 17016 - DNA, 770 bp, Glycine max
  Intron number 2 from transcript Glyma05g26580.1 (locus Gly ma05g26580) derived from phytozome v7.0 (chr-ID Gm05; pos 32507872 to 32508641)
aggtaagagtgtggcaatgtcatatatgctttctttatgtcttgacagctgaagaacaaatatttcatgtttgtgatgcatgccctttagattttttctttggaacctttagaatttcagtttgtgaagattgaaaacttgaaataattattgcatcacatcagagtcagaaagagagtgatttgcttcaataagacataagctggtaacttatttatattctgatagttgagtgcatcaattaaataggagtataggacttatcaaaactcaggagcaggtagtcttaaacttcagttcaaattcaattagacaattactacaaatcagatattcagccactaacataacagaacccctaacaagagtgaaacacatgctgagtactacaacctaaaacccatacattgccaatttgacacaactagatatttgactttacaatcttaacatcaaagtactgaaatatccctatatcttaaaaaatttagttaaaatagacagctactctactaagaactgcaagcctgcaacattacaatgagccccagacaaattgaaaccaattagtgagatactttatagttcaagcttgtgttttaatgtttcaatgctgattgcaccggttccccattctgttatagttgtaattttttcgtaattggtattctgaataactgattgaaatgattaaaacatcctgaaggcttacaatgactactatattttacacaggatactgtagttggatttttgttggctggagtggg

SEQ ID NO: 17017 - DNA, 174 bp, Glycine max; identical to SEQ ID NO: 16499
  Intron number 1 from transcript Glyma04g08530.2 (locus Gly ma04g08530) derived from phytozome v7.0 (chr-ID Gm04; pos 6687386 to 6687559)

SEQ ID NO: 17018 - DNA, 914 bp, Glycine max; identical to SEQ ID NO: 16855
  Intron number 1 from transcript Glyma02g13180.1 (locus Gly ma02g13180) derived from phytozome v7.0 (chr-ID Gm02; pos 11405480 to 11406393)

SEQ ID NO: 17019 - DNA, 309 bp, Glycine max
  Intron number 5 from transcript Glyma02g01370.1 (locus Gly ma02g01370) derived from phytozome v7.0 (chr-ID Gm02; pos 989885 to 990193)
acacccttggtaagttttctctagatcaacttgttaaataaattcacgtatgcatacttctctctcacatctttattgttttgcgattaagatgcatgccaaagatatgatcctaaccaaagccaatcttcggacttggtttattttacatctcttagtaaacagatatggtgctcattctctttattagtgcgaaattatttaattagttttctggtctaaataaaaaaagcaacattcaaattttaattaaggcatttttttctgtttttaatgcagggcctggtgctgtaaattttatcatagatc

SEQ ID NO: 17020 - DNA, 851 bp, Glycine max
  Intron number 3 from transcript Glyma01g07060.1 (locus Gly ma01g07060) derived from phytozome v7.0 (chr-ID Gm01; pos 7607203 to 7608053 reverse strand)
tgttgtacttccaaggggcaatatatagaaaagatgtatggccttcatgctctttattaatatcttggttgttttggcttttcagaaaagatagttctgcattgacatctagaattcatttaagttagcgaacaatttacttctctattacaattaaacagtgtttaagggggctaatggtgtccctattctgtaagagtcactggatatgtatcttatatagcaatctttgacgatttcgcatacattcatgagggtctgctacattccctctaggctattcagacataacaatatagagtcaataatgaaggaatcctatcagctaaattagagtatttatgtggctcaacgagtctgaaattggtgaaatttgagcccttgagtttctgtatacactggttggttgaataccaggttcttgtcatgtaatatgttctattacatgtttctttgcttctccatgcttccaacatatatgctaatgaccatatctttgcttaactaagttttaagtacagtaggaggaacttttctgaagaatatctttctttgggaattatggtgaaatatcaagtaaattttatgtacaagtattggtctgatgcaatattaatttccagaggagaaatttcttgtctaaaatataaaaaaatgatgttttgatcatgttagttacaaaatcttatgcaattgtttgataaagttaactgtctgaaagaattataagacggagtgttgtgaagtcaaaatgatatccactttattattgtctggcgtcttattctgttgcaatttttgttctcaataatctaaattgtacatatgttttgtaatttagggggtaagaa

SEQ ID NO: 17021 - DNA, 856 bp, Glycine max
  Intron number 1 from transcript Glyma03g14970.4 (locus Gly ma03g14970) derived from phytozome v7.0 (chr-ID Gm03; pos 19220881 to 19221736)
ctcgcaggtcgttgttttttccttccctggtgagaaactcatcccgatttttcttcttctgttatttttttcctgaaaaagttaaactgttatggcttcttagtttgatgattaacttcttggttggattgcgatggtttcaattttgtggatcacataaaattggtttcactgataatatttagtatggtccatactgttattgttatacttactgagattacaattttatatgtttttggtttgcatgcgagtttgggttgtgccatcggttaactgagtgttgattaccttgcaatcttgcatgatttcgttgatttacttttgagaaagagaaatgtcttaaaccactgtttagttattattgctagagggggcaaaacttgtgttgaaagttggaagtaaaatgtattaattattgatcctttcactttgattattagtggagaatcttgtgcggattgattggtttgagactttgagttgtgctgttttacttgttattatactcaaaattgaaagccttgtgatttatacacacaaagttgaaccttttattctttaatggttagatttgaggatcagaaatgttactgagaaactgtgctatgtatatgtaacttcctaaaggaattgaagataaccagaacttactaatactgagattcctttgtcccatctttctcatcttgccatatattatttttaagcagcatgtcatgctgcacttttgcagtgatcttatgacttggagtagaatattgtaccattgcggactagaatcatcagccttacatttttatttggattctgttttgcagtgattttaacactggaggaaaaaaattcactataa

SEQ ID NO: 17022 - DNA, 759 bp, Glycine max
  Intron number 3 from transcript Glyma04g06260.1 (locus Gly ma04g06260) derived from phytozome v7.0 (chr-ID Gm04; pos 4799959 to 4800717 reverse strand)
ggaaaacgagcagttaaggtaacatattatcttttgtcaatgcttttcatattcttttgcagatacacttggggaatgaagacgctacttttggtttggggcgttaggttaatttgtttaatttatcatttatttgacaaagaattagtcattgaagaaaaaagttcaggagttataaggttggcttggtggttggaatggagggttgaagggttttttcaattttggtcccggtaagcctgaacttacagggactaaaaataaaaaaaatggaatcctaaagggactaaaattgaaaaagcacaaactacatggataaaaacatatcattaatgattagatagttggtcattttgagataaaagattttttgttttaccattaactgtctgaccttttgttcctttgatacctgatggatttcattgaaaacaaagaatatcaatcaatttgaccgttgttgcaattttttaaatgaaaattgtagccatgtgtaacttcattctatgaggggattggcaatataaaagaagtctttttactcattttgtatgtaaagttctttcaaatgtgaactgtgtatttgagcatcataacaaataccaaaccacttaaattcttccattaacagttcttccggcagtagaaaatgtggattcgttttgttataattgttagggaaaactgctcgaatgaacagtgatatatatgcaattttttgcagtttcgtgaaactctaatacgcttgggtcctttcta

SEQ ID NO: 17023 - DNA, 1005 bp, Glycine max
  Intron number 1 from transcript Glyma02g06340.1 (locus Gly ma02g06340) derived from phytozome v7.0 (chr-ID Gm02; pos 5042994 to 5043998)
ctcaggcttatccaaggtctctcagtgttttcttgcggcaatctaatgtgtctttggattgaagttcgatgataagacgaaagctaaaaatatgattttagtgcatgtactttccgtaaaaattcatattaatttcggtactttaactttgatcgatttggtctctcaactttagaataacggtagttttcgtccctcatcagagacattgtccatggtcaggagggacgaaaattgctgtttatcataaaactaatcaaagttgaagtttggggactaaaaccaagtctcaacaaaaatatagaaactaaaaacatattttatccttgaatgaataacaccggtgcttgcttttgtgaaaaaagatggaaaataagagttggaaaaaagttggatgcattttttttaggtatttttgttactgttcttcaatcaaaattatagtttgactttgaggtaggcaatgtaagcataagttatcaaggtgaaacttcaattatgattttgaaacaacaccaaatatcaattagaatttaagtttgacttttgtaatccaagtcaacataggttatcgatttgaaatttcaattgtgaatttaaaatagcaccaaaagcatgtaagaaattgtatctaatttagtccataagatttagggttgttatgcctgatatagagtagaatagtgccgttgagtagaaatcacgctttaaatggtccaaaagctttgaatagataattagaaaagtttaaaatgttctgtgtatagtaaaaagtaaatttacttaagcaaattgcttaaatatgtgttggtattctttgttcaatttgttcattgacctcttcaaagatgtgtatttgaccaccttatgttcaatgtacatgatttgacaagattattgtctgtcctttcacctctcttttcatttcattttcttcttacttttttttttttttttttttatctttcagatatcagactcagcttgagagtttctgtaagttca

SEQ ID NO: 17024 - DNA, 783 bp, Glycine max
  Intron number 1 from transcript Glyma03g22960.1 (locus Gly ma03g22960) derived from phytozome v7.0 (chr-ID Gm03; pos 29638214 to 29638996)
aagccctgcaaaaaattaaagaaggtacttatttttttttcctttcctttcattattttattaaatgagatatgcatatatgatcaattttacaagaaacctttgaaagtggtcaaactatacatgcttttgttcttttggtgtggttctcaaagttagagttttgcaagcaagactaacttgagtgatgaagtcaaccagagtttttttttttttttttattggcaaatgttaattttgattagaaatgtctgttggggaattcaaatccgtgacctctctcccctcccttctgccttcatcctttctcaaccgctgagttaatcttatatctcccatagtctaattttgattcatgagtgtatctgttggtaaggaattcgcgactgatcagacgtgaaaaatggttaattatcgaggagttgatttcctaattttacttttcttaatttttaatgtgtatgtagagatttccatatgaaaaatgtgatgtgatcaatttcataggctaaatggaatgatgtgatcaattttgaaacaaaacttaggcccttaactatttatacatgatttttggctttttggtgtggttctcaaattagagtttcaccacaataagtaggcatgagttattgagataaaactataattttgattcaagaatgcaccaaattcttcttaatgattaatgggtatgcagggacttctgttatgaaaattgggatgtgattaattttgcaatatttttttccttttctgttttctgtcttcgtttcagagttg

SEQ ID NO: 17025 - DNA, 782 bp, Glycine max
  Intron number 1 from transcript Glyma02g04770.1 (locus Gly ma02g04770) derived from phytozome v7.0 (chr-ID Gm02; pos 3905460 to 3906241 reverse strand)
ttgtcagagaagaagccaagttagaggtaccaataaaagtttttcttcttttttatgcattatatgttcccccacctttttctttggttgcattttcctagtcttgcagattggatgctgtctatgctagtgaatgttgggctaaagggacagcaagagaaaaaaaaaagtcagaataacagaaatgagaatgttaagataaatgtgtgatcatgcaagaaaggattgttgaataggatacaaaaggattctataggagaaaattttagtgagacaccaattgaaaaaaaagatgacaaaaaaccggttaaggtggttcggagtttggacacatacaaagaaggctactgaaaacaccactgataggatagattgcttggtttttactcaaaggggagagggagatcgagatcgagaaggacattggaggaagttgttaagatggatctcataatgaataatatctctgaggatttagttttaatcaaaccaaatggtgctgtgtgatttatgtaatcaacctcaccttgtaggatacgacttttgttgttgttagcatattggatgctgaaaattggataattgagaagttcatggattgttctgttcttttttcctctgagtataaactttatatagttatatgatgatatatgcagttagatgcttcattttgcatatttgatgagtgttggagaacatttacatgttttttatgcatcatgatataccatattttgtgtgcaggcagaaaaggagccaatattaagcagcttcttcca

SEQ ID NO: 17026 - DNA, 584 bp, Glycine max
  Intron number 1 from transcript Glyma05g09290.3 (locus Gly ma05g09290) derived from phytozome v7.0 (chr-ID Gm05; pos 9033865 to 9034448 reverse strand)
ctttcctctctctctctccctctgcatttcccaaggtaggcattgtattctccgtcccattgtcaatttttcaattcatctactttgccttgtttaattctctgcaatgtcattgtgttctagttattttgattttttgcggatagggctggatttgtcaatgctcaggtcattctattcacaccattaatctgcttgttaattttgtaaattactgcctatgatttatcccatcccacatgacaggataggagatttcataaatcattcctcatgactattctttttccttggacctagttttatttatttttagtttgttcaatatgtaatagataattgatttgtggctaaatagtgagtgcattgttccgtcactactttgttcttctaatttaatcaaaaaatatatgagaaaggctaagaacacactcctgttgtgcagttgaaatttattgaaaatcatgaaattttgtggatcacatatcctatataatgaatttttcccggattttttttaatcttcaattaattttaataaataaaatagtgtgttgtttatccagcagagcagatattagaag

SEQ ID NO: 17027 - DNA, 981 bp, Glycine max
  Intron number 2 from transcript Glyma01g32360.1 (locus Gly ma01g32360) derived from phytozome v7.0 (chr-ID Gm01; pos 43829430 to 43830410)
taaattggagtgagtatatattctttaattttccttgtcgcactgttctaacagtttttttaattccagaaattgattccatcattctatgtctttgcttcatttagtagatgacaaatcgtgatcaaaaagtgtgcatttgatatatagtgtacaaggcatttatttgtagccaagaaagttgggtttatatatatagaacttcaattctgtgggttgaaaatatcttggacaaaacgtgttttcagcaacttgtgtatataactatatattatataatactataaaaagataaactaacttggactttatttattatttatatattattttcctatagcaacactagatacaactcaagctggtctactatctttagcaatgtgtcttggtcataggctcgtagctaatttgttgcttgcattaaaagtggaagagaaccgtactgtggttatgatttttctacagttattcttaaatagaaacactatctgaaagaaaacccaattaaactgttttctgaatggttggacttggatatatataagatgaaaacaacagtccaaatgacttttggtgcttttctgcactgatagcttgtaagatacctaaaattgtttggtactgcaaaacaatacctatccaatccattcaatgtgcagaatattgattctattcagacatttagaagaatttacataatctgtgtcatctattggttcatccaatgaaaattagggtggaaaaagtactctcaaggatcaattcatggtggagttccatttccttctaatttaactttgactttgaccacaactctgtcaaataatattttggtgttaattgcacatttcttgcaatactaattgcatcattctagtagctatagcgcttctatgaatatctttcacttctcaaaaacgtgtttaacattattcattgacagggagtcaaacgcttccgcagtcagatcaaaatttg

SEQ ID NO: 17028 - DNA, 794 bp, Glycine max
  Intron number 2 from transcript Glyma01g38470.3 (locus Gly ma01g38470) derived from phytozome v7.0 (chr-ID Gm01; pos 50565472 to 50566265 reverse strand)
gaagcaaagtgctggagagttgcgtcttcacaaaggttttcttatttttattatatggagtgtcttttctatgttttactatgcccaatttgtgtagcattctaaagtttcaaacaatggaaacggatagggcaagaggaaaataaaaggtctaattctaatatgttatatcttaagccatatttgatttaaaaactgcttgtggaacttgaagttgaatgagcagtaattttgctggggcctggtcttggggtaggagggagaggtggggacaagattgaagtcacaaacagattatatgaatggacttatttcataacaaatataagattttcttctgctttatttttcagttactagggattctgagttgtataggttgaaaatcaaaagcataatctgcagaattgtttgtccagagttagttatttagtttctgaactaaaactgaagtgaaattttgaagtgcaaattgcttcatactttttatatcacacatctcattgcatgttgtaaagtccggatttgttttgcaaaatgatttttgtgctaccatcttcttgattcttgcttacggagtgagttagaatctacaatcttgcctattacttttagtcaactataatttacgttcttttctttgactaaagttataatatcaagtaaggaaatgttataatacatgtagattgaacttgtaaagaaatgaggtagataagataggagtataatacatgcctattctctgttgtattacatctttcagatataagtgagctgaatctaccaaaatc

SEQ ID NO: 17029 - DNA, 525 bp, Glycine max
  Intron number 2 from transcript Glyma04g35050.1 (locus Gly ma04g35050) derived from phytozome v7.0 (chr-ID Gm04; pos 41322349 to 41322873)
gattccacgtcgaaccaggggctcgtgaaaaagctgtaagacattgctttttttttttttagatttgttatttatttagttttttgcgattcaagtaatttggtgcatctagatcacctatttcaacttgtaattactttgatctaaattggcaaagaaaaaaaaattagggattaagaaaacctcatccacgaagttagtcattataaaaggagggttttcttttgatagattcattttgtaaacgaatattgggattcaggattaggaaaattgctgaaatgtgattctgatcctgtctccacgaatttgtcatttggcttcagtattgcaatgaataggtagacaatttattattcattgtattgttgaaagaaatttaaaaaatcaaaatatttatatttcttttataacacaattggtctttggaacatttgcatagcttagcaagcataagttatgatttcttttgttagcctgtgcgtaattttaattcctggattttgtggcagctcttggcagaag

SEQ ID NO: 17030 - DNA, 477 bp, Glycine max
  Intron number 1 from transcript Glyma01g42420.1 (locus Gly ma01g42420) derived from phytozome v7.0 (chr-ID Gm01; pos 53672910 to 53673386)
cttggatttaaaacggtaaccaacttcaaataattgcattatttatgtttctctttatgatttgtacatttctttgtatagtttaaccattagttattttgtgaaggaaaacaaagcataccttatatataattcataataaagggggttgagtcttctattggaaaaagattagtcttttacaagtggtgaaccaacttttgaatccttgctgagaaagatatcctcatttactgtctaacagtacattgaacagagttgtttgcaaaggagaatacttgtggggaaaaaaattatagataactcatttggtattctgtggtattgtggtaccatattttggttttctttttatgtgtcagtttcatgttcaggaaggcgtgcctcctgcagttgattaattttgaatcgaaaaatatagtatgtaaatagttgcttacttctatcatctacttactatgaatgtaggttggactc

SEQ ID NO: 17031 - DNA, 959 bp, Glycine max
  Intron number 1 from transcript Glyma04g01970.1 (locus Gly ma04g01970) derived from phytozome v7.0 (chr-ID Gm04; pos 1351499 to 1352457)
gaggtaagtttagttcatttttcacctgtttctaaaatcaaaatgattgattgcccccctttatccacatctgtgcttaattcaggatttgcacattatatagtccaagcatgaatcaaaattagtaattgaattgtagatcataattcgtacgtgctctgataaattccattagtattatgcatcaaccatgtgctctagtactaatgtactattcccaacacaagcttcatatttgatccttcatctaggcacaaccatgtgctctagtactcttgtactattcctcttctttagcaaactatattcttgaaaacctaattcttattttttgaagcataaagtttcaatcaacgggaatcaaggttaatctcaagactccaccaggatttgtcatgtttttatgcagctgaaagttgtgatagaaattcttgataatatcttttgcaaaatagaggaagtgtcagcgcaaatattaggaatgggcatacattatagacagtacattacttgagggttttcttctgctcttctcaatggcagatccatgtttagcaatgtgggtgtacatcctgccattcagttccaaaattctttaatactaatatagtagtgtcaggttgtcatttaagcatccttgtctttaaaactttgcctccatcatgttgatttttattacattttgtctcatgaagtaagagataatgtcttgcctccactacccaaatttctgggcctgtcaccagctccgattatattatttactactattgttttgtttggtattgttgcttcttttacattatttgacactacattaacttttattggcaaatgtgtaaactacattatttttaatttggtcaacatgctaaggaaccattcatatatcacttcatagttcatatgacaatttttgctgtcctttttctcccctcatccctctgcaggctcttttt

SEQ ID NO: 17032 - DNA, 660 bp, Glycine max
  Intron number 1 from transcript Glyma04g03190.1 (locus Gly ma04g03190) derived from phytozome v7.0 (chr-ID Gm04; pos 2326899 to 2327558 reverse strand)
actccatcttcaggtaaatataaactctacgattcttttgtggaatgtactataacattagcacaaggcagttgatgtttatagagtaccccaatgtttgaaagttgattacgctgatgaacaaattcttttggcaattatctttgaatttattgtgctcactttctcaagcttcacttttgtctttctaacagagggaatgggaaaatttttggttaagctctctggctgaacccaactttatttttccatgctgtacctttcactgtacttattaataatgttgcatagtggtgtctagaaattgctcaggcactttcagggcttaatagttcctttatagatcattgctctttctagattcattttcttttaaaaaaaagataaaaagaactgccttttcaatcttactcatttctagattattttttaactatttattttgtatgcgaggatatctttcaaactggtattctctgtatcatgtttgcttttcatccgctgtttgtttcctgtctataaggttttctatttttgtggcatatattgcttcttgacagccatatgattatgctctctggttcctaggtttcctgtttttttgttttgagagttaatttttctttcttcttcctctttgtgcttgttgcagatctatcc

SEQ ID NO: 17033 - DNA, 613 bp, Glycine max
  Intron number 1 from transcript Glyma02g03970.1 (locus Gly ma02g03970) derived from phytozome v7.0 (chr-ID Gm02; pos 3184161 to 3184773 reverse strand)
tttggatctctctcttccctctcaccaatctgcaggtcgcattccaatcttcaatctcctcttccttttcgcttttctttctattttcgtgccccttttttttcctcaatctatttatttcctttccaatctcatatctcgattttcatggggaaaaaaaacttatttcttaagtatgtttggtggaattggaaatttggtatgagtttggatctcattctctgtccattttactacctgatattattatcaatatttgaccctgagatattgaaaatttcaaaacctttttaccccttttagctggggttaggttaggttgattaccaggctctgctatgtatgttagttgattttacttgctttttcttgtatttttagttcacattcgctaaactaggttttttcccttagctgaaaattttggatggaaaagttgaataagggagcatttcatattcaaaacctatgtacaagaaacagttcgttcattaaaactttgattttgagctatgtattaagatcttacaagataatcttagtgtgcagtgctgcagtttttatgttgtcttgtcttagtggaggttcttgtgttttttgtaggatttgaaaa

SEQ ID NO: 17034 - DNA, 813 bp, Glycine max
  Intron number 3 from transcript Glyma02g37100.1 (locus Gly ma02g37100) derived from phytozome v7.0 (chr-ID Gm02; pos 42435711 to 42436523 reverse strand)
ctggatcgcattggattgtgctggaagccaaacaagtaagaagaatttgcttttaatctgaattttttcatatttgtaaagtttatacatgttttcgtcgttataaatatagcaaaatcctttgattttcttttgttagttttagttttataaattaaattttctttaagaataggctgtcatcgtctaatgataacttgacacatatctaaatatgttacgctgctattttattttttttgtgacaaatttatacgtagtatgttatgttataagtaaataatgataggaatcatttataaaagttgctcatttctctgtgacaggataaatgtaagtagtttcgcaagtgatttttgactcataacacttttgctatctcgaattgcagtatcattttctccttctatttcttttaaataataaataaattataaagatcaaaaccaactgtttttttaaggattaaaaacaaacttatacatcatggtgctttcaaattacaaacatcttaaacctatttttcattagagaatttctatggtgcttttgaaaatataaggattttgacattgttattgagaaactctcctttcttagtgtgctcattccaccaaattctaaaactctttgatttttaagggcacatagcaactaaattaaccatatataacaataatttatctttcaatattgatatttaactattctaaaactctttgatttttaagggcaccataataacagttttttctttcgatattgatatttaactatatgtaaatgcagtaggattggctgggagggtagtgg

SEQ ID NO: 17035 - DNA, 537 bp, Glycine max
  Intron number 1 from transcript Glyma02g43080.2 (locus Gly ma02g43080) derived from phytozome v7.0 (chr-ID Gm02; pos 47969225 to 47969761 reverse strand)
cgaggagcactagctagtttcacaatttccaagttcgtattcttatcctacttctgattttgatgcattctcaattttatcttcgtaataggtttcgatcttcatcgtcctttatgcactttaatctaattaaatcttcactttttcatgaaatagtgtttggttttgtgcaatcagagtgtcactatctgtctacatttcagatcacttgctttaattcacgatatcatgactatttgtttaataatggattcgtgcctttgaagagtctacatttcgattctttagatttcactctgtgaaggatgtactgcattttttggaccaaactggagtaaactagggttttgtatatgatttgttctttgtgttttttttatccatctcggctatccattgatactaccataggttttggtcatttaatgtcagacttgctgtttgaatctttttgtttaatttgtgtttgagttttaaactttcgtgcttatgactgttacaggctaggggattgaagaagcatctcaagaggctcaa

SEQ ID NO: 17036 - DNA, 782 bp, Glycine max
  Intron number 1 from transcript Glyma02g15070.1 (locus Gly ma02g15070) derived from phytozome v7.0 (chr-ID Gm02; pos 13610163 to 13610944)
gtcagcactcgttaccggtggtgcctctggaatcggtaactccctcttttccttaacgccattcatattcgtatctaaaaatatcatactcttccgtttgactttgcaattatccgatttcaaatattcaaaaacaagtttcagttgactttaggaaccgattcaactaaactagctatgctatgcagatttttgccactgaaattaattaacataagagcaatgttgtgttgtttgtttacacgctctttcgaattgaagatccgattccttcactctttgagattttgtcgtggaagcgctttgttcatttgtgccgtttcgaaatgaatccgtagtttaattgggaagaaaagagatagcaaactacagagcacgtgttcaaactactgttagtaattgaattaacactatttgcataagcttttctgtaagtacttatgagagaagcaaataagaaaaaaaaatgaaacaaactcctcctatataagctaaaattagcttatgcataagcataagttaaaatcaacttttggagaagttaaaatcatttagttctgacatctgaggctttaactatgataagctttggtcacaggcaagtgaaagaatgataacatgccatgtgatttgatacatctgcttccaaaatatatgcttgatgaaacttggtttagatcgcgtgattcacttgtttatactattattgcgtgtgatgtgactctttttttttttttttttttacaggcaaaggtcttgcactagctcttgcagagaagggt

SEQ ID NO: 17037 - DNA, 577 bp, Glycine max
  Intron number 1 from transcript Glyma02g07870.1 (locus Gly ma02g07870) derived from phytozome v7.0 (chr-ID Gm02; pos 6223665 to 6224241)
tgctgccaattgctacacacaattgcacaatacaggtgtttttttttattgaattctagtttttttttgttctatactgtttgatttacagttagcagctgcaagctcaattcttttgctttcttttatgttttctattataaaaaactgattttattcatatctactgttattgtgaatgccccaaaagattaaaaaaatgtttttttttgtttgatttgtaaagattcaagatcacagagggactacttggtttgcagttagtgggttttttcattttattgtaaattcttatactgtaccatttgcaagattaatcattttgtgatatgaagctttaattcaaattgttgttggcctttataattcaattttgaattttcaagtcccagttggaaagattattcattttatcctgaaaaagctatggactttgactcaatttgttgaagaaataaatcgggatacctaaaatgagatcaatctttttatgtgtttactcattgttttttttatatttgtctttgttgttgctatttgttgcttatggtggtggttttttggttttagctctaca

SEQ ID NO: 17038 - DNA, 414 bp, Glycine max
  Intron number 3 from transcript Glyma02g05760.1 (locus Gly ma02g05760) derived from phytozome v7.0 (chr-ID Gm02; pos 4614705 to 4615118)
ggttctcataatttcttcttggaacttcccaatcagtgagtaaaaatttccaattcaatccatgttatgtttacttgttagttgttactgttagatttcagaattattcttgaatcagtttcctagatactttttcatgtacatctcttcatttttattacaaaatcttgaccaataatattttagtctataaaaagtctgtaagtcattctagatttatggaattatcagcgatcaaaggttaaggtactatttacctcaagaattttttgtaacaggatcaggctgaatataagttcagcaatgcttcaattgttgtcatatttttggtgttttaaacttatcacaaaaatgttaatatatttacactattatgcagtactggcattggatccaataattggggcaatatct

SEQ ID NO: 17039 - DNA, 884 bp, Glycine max
  Intron number 1 from transcript Glyma02g10300.1 (locus Gly ma02g10300) derived from phytozome v7.0 (chr-ID Gm02; pos 8177336 to 8178219 reverse strand)
cgaaggaagagaccccccatccataagccagacaggtacatgctcactctctctatagttattttctggctcctggttttggtgcaccctcaaacttaaagtggtttatggtttaatggatctttctcttttcacctgtttaaaagtgttccattacattctttgagggcaattatgagactaatccacatgagggtgtttaatcttaaatggggttagctagctaggttaaagccaagggcccatgggctcatgcttatgatttgcaagtgttgctttcaagggaaaaaagagagctttttcttcggttggcccttttagcagattgatgttctgagaggttttgcaatttgaaaccaaggtttgtcattatgtcatgctttattggtggggaggggatgtagtcatgttatgtatgtagatacaatattacattcatacattgaattttagtcacaagatattatccacattttcagtgcttgaattcagaatcagagggtaaaagttgagttgagagtactgttagttaattgctcagtaagctttccctgaacacttaaacatgtatcttctcttcgatgaaatttgattttgtttttgtagtgcactggtctgtttgatgtgattttctggatcatagagattaattagtttggacattaagtattttaggaggttgaacaatttcaaattgttttcaatgtgatttgaggacaaagatgaaatccttgagtagtgtaggtcttggtctgagtattatttttggttgtctcttgttggctctagtagctgaggtttactatttgctatggtggaagaagaggataaccaacagagagattgagaatgattatggcaaccctgtgaaggaattattctac

SEQ ID NO: 17040 - DNA, 584 bp, Glycine max
  Intron number 1 from transcript Glyma02g01510.2 (locus Gly ma02g01510) derived from phytozome v7.0 (chr-ID Gm02; pos 1082310 to 1082893)
cgctccaacaacctttctttccccgctctctccaggtattttcttttttttattaatttgtttatagcaccccatcaactgcggtgtttattttagctgaatttgaattagaatttgccttaaagtttacattttgatgaattatccatgagtttgtggcttttcgacttgttggtgttggatttttttattttattttagagaattcaagtcgccagattcgtggaagatgaccctaagttttttatgctaatggataggggtgaaagtgagatttttgcgtcacttttaggttatgcttcgaattgaaaaaaaaaatagattcataaaaatgttatgataatttcgaagttgttaattcttaagcctggcccaaatgattaatctagattctagggtatgctattatccaccttttattagtacttaaatttctccttttttttaaaaaaaaaatggcaattgaacatggaagagactagtatattctctgttatgctggatatatttatgtctataaaggggatgtagccttgctttgatttgcaggaacctaaggaaatcggtagaagatagaaagatta

SEQ ID NO: 17041 - DNA, 554 bp, Glycine max
  Intron number 1 from transcript Glyma02g45910.1 (locus Gly ma02g45910) derived from phytozome v7.0 (chr-ID Gm02; pos 50019564 to 50020117 reverse strand)
cttccttcccttttaccttctcagcctctccaacggtttacccttcttccttctctttatttcacttcaaagttcatgtcttttgttgcttctgaccttgcccatctctttaatatctaaaaaatctgcatcttttccatctgggtatcctactttttgcttaagaaattaatgtttttatgttgcacagtaaaatatgccgattgttgtttcttttagtcttgacttcaatgggtcattgtgtcttgctgttctttactgctttgaaaggttgagactagtgtgactatttaaattttacttgtgttgtaactgctatggcaatttgttgatgagaaaacctgaaataggttattaggggtgctatcctgggattaacttttgttagtattaatgttatgggattagagtgatgaaaatatgtattttctttttgtaccacgcatgcctagatggagctttttgttagctagtgcttggctacataaaatgctgttacatttcattgattggaacctttgtttttgttgcatgatgtgaattgcagaagaaaa

SEQ ID NO: 17042 - DNA, 791 bp, Glycine max
  Intron number 1 from transcript Glyma04g07530.2 (locus Gly ma04g07530) derived from phytozome v7.0 (chr-ID Gm04; pos 5877539 to 5878329 reverse strand)
cggccccttctccgccacctccgacatcgcttccggtgagtgctactttgttatcaaaacaataaaatccaaaaaaataaaaaataaaaaaaatactttttttaaggggcattttccttttgcctatgaagcgatgcttttgttagcattgaatctcatccactgatgttctctaccttagtggggtacctttctgatggactagtttagtgaggtcagtgttgggttaggttggttctgttgtctttgtttacttgatatgttttcattttcttttttctcttgttttttttcttcattttctactgtcttttaactgatcattaccatctagtgtgtttttagtttgttggtttttcttttttcttctggtatgtgaatatattgtcagggtttttcagtacggtggtttgatttgactcttcgtttctctcttctactagtataatttcatgtactaagtgggaggattgaattcatgctgaaaatttctgttgttttcaggttatgttttgtcaacatttgtgcatagggtaataatgatgatatgggggttttgggtttttatcactattattgttattgtattgcctctctttttcttttcttggccttttcatctataaatggcctttttcctctcctttttaattatagttgaaaatagaaattatttttggaagtgtttattgctatctttgaagtgtttttttttttctttttttatgtaatgttttcccctcgtcaatttggtagagaaacagataggaaatcatctcgagggagttcca

SEQ ID NO: 17043 - DNA, 388 bp, Glycine max
  Intron number 2 from transcript Glyma02g26510.1 (locus Gly ma02g26510) derived from phytozome v7.0 (chr-ID Gm02; pos 27408819 to 27409206 reverse strand)
ccatcactcccgtcttgcacgacgccactgccgtcgtaagttcctctcttcctaattcgcttcggtttgagttttttttctctctttttttgtgtgaaccaaggtatcctcggccgaaatgcaaggactaatggaattgagctcttccaactgatactttttcatgcgcatgacttagggatggaatccatgataacaataatattaatattaatattttaataaaattaagattaatgaaaaaatttgagtttattttttttacttcaaagatgagactaaccatttttgagcttaaattctgacaatatgcttattgtatgagtggtgttgttgttgcttattttctgtgtttgctgttgaataggctgggtcggggattggtggt

SEQ ID NO: 17044 - DNA, 412 bp, Glycine max
  Intron number 2 from transcript Glyma05g08290.2 (locus Gly ma05g08290) derived from phytozome v7.0 (chr-ID Gm05; pos 8251248 to 8251659 reverse strand)
acaagtggattatagttggaaaggtacttttattctaccttgtgaatttttgtttcatcttctttagcaattgcctagttctgttggctgtagacgtggatactgttacacatcatctgttgagttggttttaacttttgattgagcttttgaaatttcattcattcagcatatcgagtttgctaaaataactaatcaaagtttaaaaaatttgggatttgctttttcttgttatactttcaatattaccagtttcttactttcatattttctacagttttcctgttttctttttgttttaattagctttcatgaatttttctttgtactattttttttatgtctggatcctctgctgttttatggttgtataattatttatccttctcccatcttcagggttcttccagcc

SEQ ID NO: 17045 - DNA, 961 bp, Glycine max
  Intron number 1 from transcript Glyma05g08290.2 (locus Gly ma05g08290) derived from phytozome v7.0 (chr-ID Gm05; pos 8252043 to 8253003 reverse strand)
agagacgaaaagatcgtcttctgaatcgaaacaaggtcagtgaattttcttctcttcccttcttacaatttcctcctcccgttttcatctactaattcactttctctgcataattaatgggttattaatattgcttaattttttctcaatgagctttcaatttcaaatttctgcacgatttgttgttgccgaggaaacagagggaagggaaacagaatcagaattcttctctgtggttctgttattgcccgatttagtattattattgagttttattatttttcttcagaaaataaataaaatttagagaaaacgagagagataacagaatatcaaaaagaaagaaccttgaaactcagcaaatcactgcacactcgatcggttttagcatttgaatgagatgaaaatcggtttaacggcatttgttctacttctaatcaattggactttgtcgtgactgattggtctgtttctccttctgtttgtgcgtttttattttaaattttactgttatgtatcgtcgtctattttgaacataaacttgcaaggagttctgtatttagctttgtttggcctcagcttcgtgttttttttcctgatcaaaattttcttactttatgattggctcaaaattggtttttttttttcgattttaaaagtcaagatctaaattaattcgatgtaagagtttcagattaattttttttgttgattctgtaaccagttatctgtttatacgttattatgttctatttattgattgctatcaccatccattccgtggtttctacatgttgagatgatgggatgcttttaaattttaatccttttcctgttcttttctgattctgagctgctggcaagtatgctatttttaatttttttttgtcatgttttttattttgatttttgttattgaacaacaggtgttcaggttgaaattttagagtaatatacttgc

SEQ ID NO: 17046 - DNA, 1049 bp, Glycine max
  Intron number 2 from transcript Glyma03g35610.1 (locus Gly ma03g35610) derived from phytozome v7.0 (chr-ID Gm03; pos 42760119 to 42761167)
ataaggacgagggtcgccttgtggaggctgctgaggtatgcctacctttcacaactctctgctgaaactgttgcatagttttatttatttttttcttcaatattatcatttgttggaaaggataatgcagctctaagtttgtagtttatgaccagagtcttattgtgccttgcatatgtgcttgttatgaagttctcatagttgtagttcgattgaatgtgactgttatacatcaccacaaagaaatatcagtgtttgttgaacttggatatttatgagagtttctgctacataaaaaacttcgtgccccattgcccagaggctcttcgctatgcgaaggtatgagggagggatgttgtacgcagccttacccttgcatatgcaaagaggttgtttccggattcgaacccatgaccaacaagtcaccaaggcacaactttaccgctgcaccagggctcgccctcagagtttctgctacataactgaaaaatattgttttactatttgaccatgctgttaaatttcattcgcaattcaaattgtttatcataaattgaatcaaactgtaagacacgatgaaaaatagattgaactttatcatatcaaattaccaaatggagtatatagaataagtgagtgctggagtgaaacccctgttgcagaagaatgaaagcaggctaacagagaaatggaataataaaatagggagcatatagtagtgatcttctagttccttttttatttaacaatttgtgcttatcagattttcaatttttaatgagaattgtaattggtgaaagaaaaatagaaacagcaaaaactaatgaattggtgaatcatgtgattcacatcaaatgacacagaatcacgctgattcatttatgtatctcatgattcaaagtcatctactattcattacacgatgcaaattgatctttaccatggtagtgtttcgtagaagttgaaatttgtgtggaatttatcactgttaataaagtgatttacttggaacagtcatatcagaaggctttacaagtggatccttcata

SEQ ID NO: 17047 - DNA, 256 bp, Glycine max
  Intron number 1 from transcript Glyma04g16640.1 (locus Gly ma04g16640) derived from phytozome v7.0 (chr-ID Gm04; pos 17733628 to 17733883)
gagcgcttaagcttccccccatcccaccaacgtctactttgatttcttccttcttccttccccaacggtcactttttttctccaaaatacaaataattccctctttcattctgacttctaactactcactactcactctttcattccaaatacaagaaaattcggattcaatcaaaacctcaaaaacgcaataacgacagtaagcatgaacgacattcaagtgtggaacaacgccgcgttcgacgaccgcggcggc

SEQ ID NO: 17048 - DNA, 861 bp, Glycine max
  Intron number 1 from transcript Glyma04g14640.2 (locus Gly ma04g14640) derived from phytozome v7.0 (chr-ID Gm04; pos 14769606 to 14770466)
ctcagctgctgttcctgcgcgtgaacaagcctcaggtagctctcacctttcttcttcttcttcttagatgcttcattgcaaaattgtgtatatttctcattctagatcttaattacgctgttacgtttctaagacagtgctcgttatattcttgttttgaaatttcgcgtctttttttgcttctgaaagtggatcgctctcctgtttttgttcattgttttctggattagtagtgcttggggttgaattagaggtagagctatcgtatttttcgatgttctgtttcccttgtatttggttttagatttgtatgtttgagctgttattgttttggaagatgtaggactctgaaaattgctttgattttctgtactatgtgtgattatgattataccaagatatattcccgttagtgtgagattagcctcttgagttgtgtggctaagcttgctctctggaaagatgttagctgataactgtgcatgtatttagttaacgagaccatccaatgttttatgaaaatgctgcaaaataacaattttcgttgtatatgtttaatgattttgaataaagacatgctttttttttttattgtgatgtttgatatatgttgtaaattattataagcgttatggtctattgtagttgaattcttcttggttttcactgccacctatttttttaggacattctgacattgcattacttttcgcctattgaatgtatcaaatgtggttattgtatttgttgtttgtgattgatctgctatggttacgctttcttgtgcttatccaattaccttattacataatctaacttgttgtcgtggatgacctgttatgtgtaaggtaagccaaagcc

SEQ ID NO: 17049 - DNA, 433 bp, Glycine max
  Intron number 3 from transcript Glyma03g01030.1 (locus Gly ma03g01030) derived from phytozome v7.0 (chr-ID Gm03; pos 758145 to 758577 reverse strand)
ggttggacgtaaaattggattttttatttatttatctatatgtttgtgtggaaagctttatggggttcttgagttttttttttattatgttctggctggttattggagttcttttcaagctttaaaaccttgttgaatttgaagggtggtgttgtctcttgataaatggaagtttttgttagcttttacttggatggcttaatttggtatatttgtgtgtttcaagtttagactttagatttctataaacaaaggcggtgttcagtggaagcaagttattattattcccatgaattatagtattataactttgagcttgtttcattttgaattggagcgtctttaattattcttgtccttgttgttggtttgatggagcatggctgtttcatctgtagaacaagagctttctgtaactgattattttcaacag

SEQ ID NO: 17050 - DNA, 600 bp, Glycine max
  Intron number 1 from transcript Glyma04g36810.1 (locus Gly ma04g36810) derived from phytozome v7.0 (chr-ID Gm04; pos 43321539 to 43322138)
aacactagcaaactcagtgacacccaaggttagttcttcaactttgcaagggtttctattcccccctcccctcccatttttacgacatattatgttgctgtttgtataatcatagtttgcgagccatgtcatcggtttgtttttcttgcaaaacatgtcactgtgtcctagagttgtacacaacgccagaagtttagcataatagagttgtgcgttgtgcccttgtctctgtaacaaaaaaatgtgtaaaatgggggcgtaattgtttatgtttttagtggttacgaacaacatcacccttagttttattttgtgaacttgtatatttgttaggtacgttatatgcgtggcttaattgttgttgtgggaccatgactgtgaatttctaggtttgattggttagtttgcgttttcttacgtttgaacattggttttgttcttttcttattttggaaaaattgtgggggtggtttagtaaaatttgtgtttaatgtggttatgtgggtattgggggttcaaaactatggcatgatggtgttttgagacccgtcattgtacttctcagttgtttctgtgaagcaagaaagaaaaatcaactta

SEQ ID NO: 17051 - DNA, 822 bp, Glycine max
  Intron number 4 from transcript Glyma02g05950.1 (locus Gly ma02g05950) derived from phytozome v7.0 (chr-ID Gm02; pos 4779883 to 4780704 reverse strand)
tggagagtagatcacaaacggtagtagtgcatgtcaccatgctttcaactgctttgttcattattatgtgctctaattcttcctcttcccctattttgggcttgtgggtagagtagtttttgcgttatcagaagaaaaaacatgctttttttttgcatttttttatcttctcggtacttttcacatcaagcacttaaggcaccatctctaagaatgtaaaacatatttaatttaatatttaacttggcctggactgttataaatctcacaaagattgcttcagctatccagtgtttgattcattcatatgttacatggttaactcacgagttgcttatatgttctactgataggccagagttttacttattcttctcttctcaaactgagactgatttggctgaatagattgattttatttacttctgtttgggtttctgctcatggctttatgaggtagacttttttacagattgcagagggataaggacactttttgggtcatgtattttttgtttctattttcttctccttcccctatttaatggtcttgggaagattatgtcatttttgtttgcgtctttcattagttattaaaaggtagacgtgcagctgttcctttgagttctttaacaactatctgatgcataatgatttccaaacacttaaattcagttaagctgcagaaattttggatcttatatctgacctagattgacctaaaatttcaatcaggtcatcgtttatcaaggcatgctcattttattggatgtaatattttttttccacttcattagctgatacccaaaactttccagggat

SEQ ID NO: 17052 - DNA, 747 bp, Glycine max
  Intron number 1 from transcript Glyma04g04890.1 (locus Gly ma04g04890) derived from phytozome v7.0 (chr-ID Gm04; pos 3646411 to 3647157)
tgttcactattgcattaacagtcctcctccttggcgtcagtatcttattgtttttctttttatggcaaaacaaattgaaaactagactaatatgcattcaacaaaactcatgcacttttgtttctctgacatatacaatccaaagaaatatgaaatgactaagcgttcaatgcagagtgtttttatttggagaatgttatgaattttcctttggaacattttggctgaaacaaaaacatgcatatactgatttgtacatttgggagaaccattgatccctgctgaatgataattatcacgggatccatgattgatggtggtgctggatttataatcaggaggctttgtaggaacatgaatttacgattttggcgggcagattatgcactgcgggtgtagatatgtgatttgtgaaccagtgttttggtatcatggtagtgtattgttacatcacctggagcttgtatcttatattatgcatgtgtatggatgtatagttcaagattctagttcttcgtgtgatgtgatacactgcagcattctattttgctcttttgtaattcgcactccttatgctatatatgtgtgtgtgtcgttttgttgggcgaccaaaaaaaaaaaacaaaaacatgcatatacttttcatgaaccaaaatttatcttcttgcttgtttcaacattttaactgtattttttattgccatgcattcagcacaagcactgctattgggattccagcattatatt

SEQ ID NO: 17053 - DNA, 945 bp, Glycine max
  Intron number 2 from transcript Glyma10g40730.2 (locus Gly ma10g40730) derived from phytozome v7.0 (chr-ID Gm10; pos 48049261 to 48050205 reverse strand)
gcttttccgttccacatctgaccacaaacgagacggtataacctcttacccttttcactttatagacgagggaacttgtacaaatgttaggatgtataaattgattttgacgtatgtaacaagtttgattagttttgcctctcttatttggttgggcgttgctaggtgtgctcagcatttttttaaaataccaaaactgcccttgtactttttttgcatttgtgatgagtgtgtgtgaggatgatccgtaaatcgtacggatcaagttgatccgtaagattgatacggatcaagttgatccgtacagcttctacggatcaagttaatccgtattgttctgtaaaaggcttacggatcaacttgatccacaagtcttttacggaacaatacggatcaacttgatccatagaacccttacagatcaacttgatccataaaaggcttacggatcaaggatatttttgtcatttcaccttaagtactaggtacatcggcagtaatgcttatttggttttaggttacactattcacttggactctgtagctgtagctgtacccttctcaagttttagtctcaatgaaaaaaatacaaattttagtcccgtttctatacagtttttttgtgacagattatgactgccaaaaagtttttatagcgttttacactaccaaaaagttttctctgtttttagcaataaaaaccaaaacttctttctcctgtgggaactaaaattcaaaaggaggataacaaggaccaggtgaataaattaaccttcattttgttttcttgtcccatcagtgtataattgaaaagtttatcttaattgggttgaatgatagtctcttcttgtgactataatgaagttcttacaaatttaattatttatggtgttaccattggattgaattcatattggcttcttgcagttgccgaattttgtggga

SEQ ID NO: 17054 - DNA, 504 bp, Glycine max
  Intron number 1 from transcript Glyma08g01770.1 (locus Gly ma08g01770) derived from phytozome v7.0 (chr-ID Gm08; pos 1126527 to 1127030)
ctggtattaccttttctcattagcaggaattaatttaagctgttagatttgaatgcgtgagtctcgatttcattttgttctctgctagggtttacgtcgtgtgcataattgtgttatggaaaataatcaatggacaccacgacagtacatgacaatgggcacgcggagagagtaagagagagaagaatagaagataaaaaagtgtcagatatatatgagtgtctatatccaatgacagtgcaatttatagtgtttccaaaagcttacttgttttatatttgccgctcttcctaatttctgacaactgagagacaagtgttgtttgaggtttcagccatgaagttgacttgtgaattatttgaggttgatggttgttttgtgaaagtgggttctaagaccttctgaaattgaaaggtgtgtgttttgatcctgcaacttattgttattcctggcattactgtttctgcaggaggaccctatacttctcacgcctgaggacaaaga

SEQ ID NO: 17055 - DNA, 1021 bp, Glycine max
  Intron number 1 from transcript Glyma13g19910.2 (locus Gly ma13g19910) derived from phytozome v7.0 (chr-ID Gm13; pos 23404451 to 23405471)
gaagagcacgacaagtttctcgaagctcttcaattgtgagtccacttccttctttcccttttaacattgttacctgttttactttttacattgaatatttatatgactatgtttgaggttcttacagccaattttttattttttttatttaagtatccctatttctgtgtctttttctatatgagcaaatcatttggctagcatttcttatacgttttggtgtctggggagaacccaattcatgctgttcagcacaagtcctgaagtggagtatttcaacggaatctcctctggttcaaacttcgctgatgtatctgcaagagactccgatgctcaagtttgtgtatgaatgatacaaatagagaatagaatttagagtacctcatataccttattgggtctctatttataccattcttgatttggttatctgggcattctgacatgaggtaacatgggaaatgcctccttggacaaatcttactggaattgctacctcttacagattcttggccatgatttcatgctttgcatcagtatcgatgttcatctaccactataaggttctagaaatatgccttttgaggcatagttattggattttggttattgagccagcgcattggcttaatttgctagactgagccaaaattttccaaagagggatccagaatagatgctaagacctgtaggttgaaggagtagaggatggtcaagttgttagaaaaactgtacaattacaagtagatggaatgttacaaggttgaaaacttggaatgaaaactaatttgatactgggattatgtggcagcacagaattaggagaaggtagaaataaaatgtagtcattttcaggctatggtgtaattttggttgaaactgcctttcagtctgcttgcgctctattttcaatcttcccaactttacaatttaaattaagtgaagaactctgcaatccagttggtgacatcttgtggtttattcagatttgacagggactggaagaaaattgaagattttg

SEQ ID NO: 17056 - DNA, 576 bp, Glycine max
  Intron number 3 from transcript Glyma06g12130.1 (locus Gly ma06g12130) derived from phytozome v7.0 (chr-ID Gm06; pos 9367652 to 9368227)
agctgctttttgaggtgtttcatatcatcaagttatacattttgatcattgacttaatggctattttttttatggtggaagtatattgtgtgggagtgacaatgggactagttactatgtgctaatggtatgtgtggtctaagtatctgatgtgggacagtttggtcatggttatgaaattagtttagaacatgttaacaaatgttttcttgctatgctggaaacttatgaggctttttgttacattattgaaatcatctctctctttctctctctctctctcacacacacacacacacaataccacttttgtaaaataacatgatagtttagattttgccttgtcattggtcctacagttttgagctcaggcactgttcttaaaataagaaccagaatgctaatgacctaaatctttcacttgtttgaaacctctacgaacctctcttcaagtccttttctctaatttttgaacaaattatatgcatgaaaattcatatgctaaaaggtctattattgtatacaagaacaaactatgaaagatttactgaatatatttgataggtttttgctcga

SEQ ID NO: 17057 - DNA, 713 bp, Glycine max
  Intron number 1 from transcript Glyma09g03390.2 (locus Gly ma09g03390) derived from phytozome v7.0 (chr-ID Gm09; pos 2376337 to 2377049)
atcaccaatttctcacccaatcaattccaattaaggtttcttcctctttttcgttctctctccctctctatttcgtcgctgatatctctcaaattctgctcttagggtttcgtagaacaattcgaaattcaattgttttaggtccgattgtgggatcagtattttttattttttttatttcggatgaacaattctgattaggttttctgttgatgttgaattccaaagttttgttatttgattggacagtggtttgcatgtttctgtagcttccgtgttaagaatggatttgtgggttttctttgaacgctcacgatcagcttcctccgttgaatttatagtttttgtgccatgtgtgaccttaaaatcacatccttgaactatctgctgtctggaatcaatggattaacaatggaagtagggaattgaacaatttttaataacacaagttgcgtgatttgtacaataattggattgtatgctgtctttaaaaatcaaaacaaacgcaaagttgaaattttcttagatgatttgataaagaatcttgagtcaagaatttgtaaaattcaatatttaatgggatataagtttaaagtaatcggaagagcttctgatgtcttatgattgcaaaacttgtgattatgtatttagagctaaacataatgcttatgtaatttactattgcttgccagctgagagtgtttctgatctat

SEQ ID NO: 17058 - DNA, 670 bp, Glycine max
  Intron number 2 from transcript Glyma11g03670.1 (locus Gly ma11g03670) derived from phytozome v7.0 (chr-ID Gm11; pos 2461591 to 2462260)
agagcttcgcaatcccactaacagctgctacccgcgtaattctaaccatcattcatttttttttttttacttatttttgttcactggttattattttcttcttgttttcgcacttttcttctgctaagatccttccatgttttcactacttcaagctcaagctgtattgcagttttagttatctgctgctatgctatgttctgtttattttttatttttgggtgtggtagaaaaaaagttttattaattcgaagatgtctgggttgcgaggatcagttcaagtttaaccagtaaaccactctgtttagttagttcggcttaattttgtgagtacccctatatctagtgggccttattgcataatgaagtttgtttccttaaaggaatcctatttttcctcatactttgagttgcagttgcattttctggtataatttttggacgttttgattgtaaacatttcactaatatacatgttacctaaatgaggcctaacctatgtctacgtgtctgtggactggattgagccttttggaaaacttctgcaatatatcaataaattgctgcattattggatttcgcatattactggccaatgtgaagcactgtgttaatttgattagcatatgtgtcagggttttggttttttcgctagtatcaatctattctt

SEQ ID NO: 17059 - DNA, 1011 bp, Glycine max
  Intron number 1 from transcript Glyma06g02310.1 (locus Gly ma06g02310) derived from phytozome v7.0 (chr-ID Gm06; pos 1535164 to 1536174 reverse strand)
ataagacttcgcacagcaagtttggcatcaacacggtattttttcagtaatcgttttaaactgaaaatgcatttgttgcatgcttaggttcaatcgagtttctgtaggtttttctttgtttgtatatgaacttcaataaactggtgagtactagcttagaagttttaatttaatctgcttgctaagtattttacatagttttgtggatataatgggagtaactctattgggaactataaatataaattagaaaaatatttgtgggacactcaatatgttatccaacggttagatagaaaaaaaaatatagttatgatagaaaaaaagagatagaaaaaaatgaaaaatattagtagaatttataaattatttcattatttttaagtggtctcgtgcccaccaactaataatcgtaattattcatgtatatagttgtatgatgtaaatttattgtttttatttttcacaataaccatgtgtttctcacatacgtaaatacagtttttacttgtttttgagcttactaagtttaaggagtaacatgttgatgtgactttttgctccttcattagaatgacttgtccatggaacatacttgtgacgtgttaatatgattgctaccttcaaggagtggcttgatgatgttcctttcgttagtaatattgggttttggtattcaaattggaccttattgtgttcctgctcttcaattttgattcaagtaccccgtgacagattccaatttaaaatcacatgttatataggcacatgacgttgtgttcatatttctgagatataggcttctattctaagttttaactaatcagcattcgttttttttctgccttcattttacttctagtgagttttgtacttacaagttgcttgaacatcgacaccgatttgggttgatttcctttgtttgccattctgcccagttgactgtggtgtctgttgagtttttcttttaacaaccttaccagttagtaattttaattgcagagtggagta

SEQ ID NO: 17060 - DNA, 596 bp, Glycine max
  Intron number 1 from transcript Glyma07g05270.2 (locus Gly ma07g05270) derived from phytozome v7.0 (chr-ID Gm07; pos 3920322 to 3920917 reverse strand)
ggccccatcttctccgcacctcttcgtcttcagtaactataaagtcttcatcttttcactgttttcatttctgggtcagtctcaatattttgcattctctgcacttcacaaccagaaccagaagaaatctcttatctttgttggattttgttcttggggtggggaattcatgaacattgaagatgtatcttaaaaaaatcacaattataacaatagttataggttttgtgaattatgaaatttaaggcagtatggtaggttggtatattcaaattcaaagataaatgtttttagtttctaccaaggaatgtggggaggttatatgctggatctgtaaattttttttgtaattttttttttgttggagttttgttgaatgttgaaaagtttgaatgtatgatgattcctagctgccatagctgaaaaaggtgaatggaatctaagccagcatgattgtttcttctacagaatattttaaaatgtctacattacaataacaatttcatatactaaacataagaaaatgtatagctgagctgattttctgatttttgctcgcaggttgaaacagacagcgggaactatcaagctgatta

SEQ ID NO: 17061 - DNA, 982 bp, Glycine max
  Intron number 1 from transcript Glyma13g44000.1 (locus Gly ma13g44000) derived from phytozome v7.0 (chr-ID Gm13; pos 43575310 to 43576291 reverse strand)
tcaagggaattgcagctcgttctttcaccgcccctgtaacactgaagcaaaccctactctttcatcttctgcaactttgtttgtgttatctatatgtctcaattatataaagttgcatcctttctgctcttaacgcttatgggtgtcctttgttttgtcgtttttcccctgtgagttctatttaaagatggaatttctacatctgggttgttcagtagtcgaatttgaaattaagggagtgccaaaatgggggccgatgtgtcataatccagaaatctctttgttttcttctcacttctcagatcaatcagttatgttggtgtatctgatagtgagtggaatagaatggaatgaggtggaatcgaatggagtagaagaaggttaccattctattgtttgtatattttatgatggaataggttagtttcatctcattccacccaatttggaggggaagaaaaggagattatttggtggaatggaatagattaccttccatcaggttcattctattttaaacaatctaaacaattattgtttagattgtttaaaatagaatggaacttaccccccatttcatctcattccacgcctttgcatcattccaaacataatgtcttgttatgtcctatagaactatgagaatatgggaacagtttttgtttgtgtaagattggtcttttttattttttctttttctttttatgtctttcaatcaaatagattttcggcctttgcacttgttttttaaatcttattttttcattaaatgcgttcaatttggtattactatttatatgcccgtctacatgcattgatttttgagaagttggttatacgtattgcattgctttactatgttaattactgctataattgatagactagatgtttttgtttctcaagttgtaggtcatgttttccttttgtaacagtatttgtcttcctttaatgtcttcacagctaactaggtcctgttatc

SEQ ID NO: 17062 - DNA, 484 bp, Glycine max
  Intron number 1 from transcript Glyma11g13710.1 (locus Gly ma11g13710) derived from phytozome v7.0 (chr-ID Gm11; pos 9746415 to 9746898)
cgagaaagctggggaaacactacctcctaaggtctgactcagtattctactgctattaatttgatctatggggaaaagataagcgtttatttattggtttctgtcttggtacgtttaagcgattactaaatctgcatttgaatagattatgggttgctgcacaacttttggggcagaaaaagacaacacggttaatgctgatgatttgacaaatcaatagtcattcatcaatcagtatagccattattcattcaattagtagatgatgatgatgaccaaactagtcaatcttctatctgtcagtctttttgtcagatattttttttccgcactattctttatagctgttgtgattacagggacattgtaataactttaacttctatattttttatgaatcatgacgtcaataagtttaccctcatctaaattcttatgtgtataattaggaacgaagatttgctgtcctggtatcttctctttt

SEQ ID NO: 17063 - DNA, 712 bp, Glycine max
  Intron number 1 from transcript Glyma12g07710.1 (locus Gly ma12g07710) derived from phytozome v7.0 (chr-ID Gm12; pos 5324501 to 5325212 reverse strand)
gatccttccagtggacaacaccaggtaaatatcattgcatacatgatatatatcataacatgcatgcgtgcttttttttgtgttttatatcaacgtgtcttaattttgtcttttcttttgtctttcatggcttttttaatacttggttttggttttaattcttccttaagatgaatttggatgagtgaagaaggaaattaatggtcttaattcacacagaattattgattttatattatttaacatttttatataggaaacttctgtccatccctcgttattctaaaccatatactatactattcatggcgttttctatgaaactcatacttatatatagccggggtatgtaattgatttgtctctcgaagtagaaagtaaaggcaaatccctttgagttaattggaaattcaattatacgtatatatatacctgatgtatgtactgtaattttttaattcttaaaattaacctttcatttctatatgtatataacttgtaagcatacactcaaatgggatgttaaaaggaatctaattcagttggttaaatataattaataagttattgtaaattttcttgacattgtttttaatttccacaaataaaaaaatatatattcgaattgggttgaggattaattggttaattcctatgtttcatttcacatgtgatcaattagttaatttggatgtattgtttgttgcagcaa

SEQ ID NO: 17064 - DNA, 709 bp, Glycine max
  Intron number 1 from transcript Glyma12g29280.1 (locus Gly ma12g29280) derived from phytozome v7.0 (chr-ID Gm12; pos 32692313 to 32693021 reverse strand)
ggtgttggtggagggcctcacccacaacaacacaagtgatggaaattattaataaagaaaaaaaaaagataaagttaagtgcaaagcaaaggagaagagggtgcgggagtgtgggttctgtactgtcttggcttgtcccccccacccaacacacacaaactctctctctctctctctctctaacactcacaactccaaaagccactactaccgcattggcttttgttgccttttgtttctgtgcctcctatgcaattgtctatgtctgctgtttctgctccctctttcaagtaccttcaaatgggtgtggaatcttactttgaatttcttgttattatttgattgacactcttctcttcttcttcccaccatgtcctctgttccactcctcccctgttttttttttcttcttttctcccttgtggtgtccctccaaacatgaactccttttcgtgatttgacctcatttccattctgttacagttctcactttctgcctttccttttttaaaacccacttgattgcactcttggcctcctttatcctctcttttctctgcttttttttttcttttatcctctttggtttcccatttgagttccacttcagaagaagaaccaacaacaacaaccacactggggtgtgttcatggaaattgatctgaatgatgcagtgacgagtgaggctgaaaagagtgcgtcttgcaat

SEQ ID NO: 17065 - DNA, 1004 bp, Glycine max
  Intron number 1 from transcript Glyma09g25160.1 (locus Gly ma09g25160) derived from phytozome v7.0 (chr-ID Gm09; pos 31213455 to 31214458 reverse strand)
tcaccatttccttcggagatcaatcttccaggtattgttattgtagtgcttttgagttttgcagttttggcttggtgaattttgttgaaagtggaaataaattgattgaattctgagttttgagggttttcggtttttgaatagtgtaatgtttgggtaagctgaatagtaatagttccccctaaatcttgagggtttgtggttcttgaattgtgtgatgtttagataaatagagtacttcccctaagtctttgagggtttgtggtgcttgaattgtttaaggtttggatagagttttcacgagtcatagctgactagtgaatagtaatacttcccataagtcttgagggtttgtggttcttgaattgtgtaagccaaggtttggagaattagagttttcattactagttagtaatacaacccctagatcttgagggtttgtgattcttgaattgtgtaatgtttggagaattagagttttcatgagtcatagctggatagatacttccctgaatcttgagggtttgtggttcttgaattgtgtaaggtttggactttccataattagttttcatgagccatagctgaataatatcatatcccctaaatcttagggtttgtggttcttgaattgtctaatgtttggagaattagagttttcgtgaaccatagctgattagtaatgcataccctaaaggtttatggttattgaatagtgtaatgtttggagaattagagttttcatgaatatagatgaatagtaatagtaatacatctttttagatgaaatatataaaaaaaataaaaataaaaaacggatttacatttataatcttgaaattttaaggtctcttacgtttggaaagttgaattttctttctttcttttcaaattattatgaataattttcttgtgggtttgatttgatgaaagtggaatcggcactcatttgatttgatctttgctgtgtagtcggtatttggtggactattgctataaggaag

SEQ ID NO: 17066 - DNA, 676 bp, Glycine max
  Intron number 1 from transcript Glyma08g07620.1 (locus Gly ma08g07620) derived from phytozome v7.0 (chr-ID Gm08; pos 5473347 to 5474022 reverse strand)
ctcacaggtgttcctatatacttcctattaacttttaaaaataaattagtttaattactcatttaatttttggtaggttttaaatttcaattacagttttatcacgtttgttgatatgcaataattcatgaacaaatgcgatccttattgcagtcatgttgtgattgtgaacagttaaaaaaactttgatattgtggttcatatcactatacagattattttttaaaatcttaattcctatacgaatcatatatataaactgtacatagttcatttaaaaactactcatattagtcctcatatatatacttttgaatatgttttaattactttttgtatcatcaaaatggtaggaactaaaataaattaaaaagtatatttataaaagctaaaacaagttaaaaagtatgtgtagaaattaaatcgagtatttttttaggtgtagagactaaatatgtaaagattgattagttagatatagaaacaaaatgagtaattaatccaaataaatatcaatatccatatgtttgtgataatgggctgcaagtaaggaattaaggggaagatcaaatatggtaaatatatccttattcttttactttacacatcttctaaagcacggtgtaccattttattttcttcatgccatatctaaacattcagaacctatccacag

SEQ ID NO: 17067 - DNA, 879 bp, Glycine max
  Intron number 4 from transcript Glyma13g18040.1 (locus Gly ma13g18040) derived from phytozome v7.0 (chr-ID Gm13; pos 21697045 to 21697923 reverse strand)
ataccaataagtgccttctttgcatcaagtctttggtaagcactacaacatgggcaaactgaagttgctctgagttgggataaacataatcctttgataatgggagatatccctcatgtttgtgttcctcatcatgtttgatttgttaagtgcttgtgaaaaaaaaattgagcctttatttattgatgaatttttgtaaaagaaaaagtagatggttgtgactgcttttagccagttcttgactagttttttttgttccatcagttttctggattgtccgaactagggaccagctaagcctggattgcaaaattatgttctactgttactctgtttaaggacattcttatgcttccagtgtggtatagaagttttattagcctgcattagtctggacatctcactcctgcaatgaccaaaactattaagatggtgctgtaggcatgaagttctatgttctaatttctcaatagaaaaatcctgtcagagaatctggcataataaagagtgaagaccatctggtacttggaaatactatgattctctatccaatgaaaggtcattattagactcctcagaatggattaccagtggtcttaagttattataatatgatttccgtaaagtagattttacttttttgtctcacctacacatttggaatttgttcattctctataattttaatctgttcaaagtatgatgtttctaagaaattatgatagttcacttgaataattcaatgattactttggtggatcttctatgttctcttatttacatgtttacacctcatgtaatatcagtacttatgaagaaacaattatgtttttggtttttacaggtttggtaacacagcttatttgcatatttctgtgg

SEQ ID NO: 17068 - DNA, 519 bp, Glycine max
  Intron number 3 from transcript Glyma13g37010.3 (locus Gly ma13g37010) derived from phytozome v7.0 (chr-ID Gm13; pos 38210683 to 38211201)
gcctcacccgccataacattgcaagccaccttcaagtagatatattcttcaactttgaccccttacctagcttgtttgattttcaatccttctataaatttcatgccccaaaactcaatattaagagtcaacctaaaaaacataaaaaaaaaaatagattattcttttttatttctttgataaacaaattgaattcattgaaaaaaaatgactacaattaagtaatactcaaatgaaaattaacaaagttgctagaaagagtataataaaccagcagagcctaacctttaccaaaaccaaaaataaagatataccttattacttgcttttaatatggaaactttttaatttcgaatatatgctataatatgcatgtgacagcaaaaaaatctaggtaaaatttggtttgtgcttagacatgctaattagactcggatcttgcattatatacatgattcaaatgtgtagttttggtgtgtggcagaaatatagatcgcacaggaagcatttgctagcgcg

SEQ ID NO: 17069 - DNA, 818 bp, Glycine max
  Intron number 2 from transcript Glyma08g22340.1 (locus Gly ma08g22340) derived from phytozome v7.0 (chr-ID Gm08; pos 16987870 to 16988687 reverse strand)
gcttgtacagagccattgatacttatctaaaagtatatgtcttctttattattatttttgtcaaattgattggttactagtttggaattccaggttttgagtaatctaattcaattgaaggaaaaaagagaagataataagagaaacaaacaagagtacatatgatttttggacatgccaaatgctattcaacatctagagagacttgggaacaaatacttgaccacatgcaagggagaagattattttgctaattgtgttacactattttagtttttttttattgaacaaatgctaattgtcagtttttgttagcaaaggcatcaaactcgtgattttttttcttttttaaccatccaaccaaccttttatcttcgtgctacattatgttagtgaaatttaataattacttgagtataggaaacctctccaatgtacacgtcaaagctggtatttcaatgttatagtaatattcaatactacttaaatggtaaatgataaattgttttaagcttgatttgcattttatgttttgaagtgtaacactctcactttagtagtagagctaaatccttgtgtatatgcacttgattatcaagtcactttagaaaaaatgatcattgtgatgagaatgagataaaatcgttagccggacatgttttttttatcggcaaatgttagttgttagcattgttagtttttgttaataggccgaacttctccttctttcccttttctcttcatgaattctaactctggctggcatgcactatgtgattataggcacattcaggagtgtcaaagcaagaaaggaaggg

SEQ ID NO: 17070 - DNA, 815 bp, Glycine max
  Intron number 1 from transcript Glyma12g08390.1 (locus Gly ma12g08390) derived from phytozome v7.0 (chr-ID Gm12; pos 6151494 to 6152308 reverse strand)
tttcccttccctgcttctctcattctcagagtaagatatttcttcttcttcttcttcttcttcttcttcttcttttcgcaaataaaacaactactgtcatcaatccttcttgtactttctgatttacatttatttatttgtggtaactgaaaaacttcatgaagcaagtagttaatttttgtgtatattgaagatatgcttttttacttagcggttatattattctgttcggtgctaattcattgctatcctcatggaggagtagtactactcctggtaggtttaaacgtgtagttcacgttcaccattatcatatcacaggaatattggtttcaagggaatccaaaattcagctacgagaattaatactggttggttgaagctgggttcttaaattggttttggccgagtttgattatttaataaacacaatttcatacttgtttaagatagaacaacaagaataagcacaacttaatgcttgttaggaatacacctagagtatgccatgtaaacaaagaactcaatcttgagtttcaaaagaaactaattttacccttgctatgctttttcattgtaattcaattctcccttctttttaattctttggaataattaattccttaggtatagtaattcattattgaaaggtaaaataaaaaataaaaaatgcttattgtgatcctttgaaagtggctcttccatctcttcttcaatgggagatgataatgaaaacttatggctacctgactgttgatgatgtaaagttcaaagggaaagctatatttgctagtctcattttattccttgaatag

SEQ ID NO: 17071 - DNA, 1011 bp, Glycine max
  Intron number 1 from transcript Glyma09g34420.1 (locus Gly ma09g34420) derived from phytozome v7.0 (chr-ID Gm09; pos 40800852 to 40801862)
gactctgctgttttccttagaatctatattcttgggtactcttctctccttttacacccttcacatcatctttcacttttttcttcgaacacattgaaatctctctctctctctctctctctctctctctctcttatataaatagctccgttgttgtattgtttgtttccaacaagcacattctgttttctgctcaactcataataaagttaccattttttttaatcttgcctaacaaaatattttatttttaggcatattctgtacttttttaatatactgaaattctgggaattgtgaatttgtttgttgtgtgattgatgcgatggattattaggcggcgaccatgtttgtaaaattgttccttttgtattattttaacacaagattttaactttagtcgcattgtctatttttttcacaattaatttaatcatttgaaagaaaaggacagatgaacttgctgtaatgcttctgggaattgtggttttgcttgttgtgatgcatcgttgtgcggcaaccatgtctggaaaattgttctacttctcaatattttaagcattcggtgcttgttttttctattcgattctatgcgttcgattatcaaagagattctagagttatgccgtgtggttttcaactatcttttttggttttgccagcttttgttaaagccattccgtggaagcttcaccttatggggtgtagtccatgttgcgacattttccacttttctgtatacgctctctatttctgttttctgttaacttttttgtgtaacatgtgaggaatgcaccttttttttcttctgtcaatcatatttaataccgtcgtgtgatgtgaactttgcctggtctgacttttaaatcatggaaattaagagaaaggaacgtctcttttttcaacttaatattaacattgaaattactttactgtgttatcagcattctgactgatttttatctcttatcttcagcttcaaggtttttgctccaatcacacttgtggcac

SEQ ID NO: 17072 - DNA, 765 bp, Glycine max
  Intron number 3 from transcript Glyma10g04240.1 (locus Gly ma10g04240) derived from phytozome v7.0 (chr-ID Gm10; pos 3230763 to 3231527 reverse strand)
gaaggcttcctatcttcgtcgaagaacactgcactgtatggatttcttctctctgaccgtctttctttattttctctagacactaataatttattccatattttgacttcttgctatcaaacaaccttttctttctgtactcgtagtttctcgagttcatttcatttctgctgaaaagaaatagcacacgtattttctgtcagaatctgtgattctcgtatcctaaggaaaataggaagtgttaaggatgcactttcaagtatgtgatctgttatatacttgatcacagaccagatcatatttattgggcctcaatatgggtgttctgaaatcttgattcattgatgagatggttgggaaaagctaactcatgactctggtacttttgttacttgtattgatcgctgatattccacataaaatggctgggacttgcctatatgcattggtaattgaatcttaccaagattttggataatgaaatagaattgtttgaaatgttgagaagcaaggacagttcatgcagtgcagttttgttattcatgattattttcttatgatcaatttatgcctttctgtgtttttatgtatcagagtctcagagtcagagatgacttaatttttttgcatgcatgtgttcacatgttttaagtgagatataatttttttcatagtttagctccatcttgatgtttgcatgacattggtaaatcaaatttcttcatggcagcttgaaaaggtctagaaagtttcaacctgaagata

SEQ ID NO: 17073 - DNA, 815 bp, Glycine max
  Intron number 1 from transcript Glyma07g18180.1 (locus Gly ma07g18180) derived from phytozome v7.0 (chr-ID Gm07; pos 17954187 to 17955001 reverse strand)
gcaaacatctcatcacaatccaaaagttcgtagaggtatatttatttttttataatatattgtaattatctaattgcctttaaatgtacttattagtgtcattaatcctctacataactatagaacaaattctgtatgttttaaaccgataaaatcttcaaaaatattattcttgataagctgagttgaacaaaatttttcagcttaatagagattagcttattaagctattaaccttaaaagttagaggcctgtttatactagtgcacttgctactaacatgtgatcatgtggagggaatgtgactgattgaattacgtagataattctagctatttattacaattgtaatgtattttgtgttcatataattaatggaacttttttatgaattcaaataacaatgaaccttggtttggagctgaaacaccaagccaaaaccttggttttggtttagttttaaatttttgaggaatgatagctcaagttggttcgagtttaagcttgaagcctaaaaatcagtaccatggatgctgtgtcaatattagtcattatttccaaatctgtcaaaaataaaattaagcagccattaattatattatttggatcttatgaaagttaatctaatggcatgtcttgattgatttaatgtcttggcttggtttctattcctaatatactcttagtctttttgaattgtaatgtcacagattaatgtcattgcgttatttaatccagttaagcattcaaattttcatttaaatttgataatcctcatatttaatactctttcttttccaccctttaaattacag

SEQ ID NO: 17074 - DNA, 649 bp, Glycine max
  Intron number 1 from transcript Glyma05g31880.1 (locus Gly ma05g31880) derived from phytozome v7.0 (chr-ID Gm05; pos 36919027 to 36919675 reverse strand)
gtcctttacttgaggtatgggcattgaatttaattgcttgtttctctcttattttccttgcctctgtttgggaggatttattgtctgactcaacatttttgtactcaatttttctttcttgaaaacttctaagaaatgttttactgcctaaagcttgtttagctatatagtatttgcagttttattggtactacagactccaattacaatagtgtgaggaacccgattatgagtatcctctcaattgaattctatgcagtttctggtttgtgctgtcagacttaattatgtgacaattttcttgaccgtaaaaggtgtttttccctaatcaaatatttttgaaagcaatgctacgcagtaaacacacacaagcacaaaaaaagacaattctgccagaattttgcattattctgtagttgttggataagtcaaaattgtctgggaccacccatctatcgaaaagtcattaaccatgccaacttgttccaataaaaaattctggctaactattatttatgcttttaggaacttaactctaatatacaatattcttctctatctgctgctataagtgcaaatatgcaatttgctgtattctaagtatatttttatactgtgtgttggtaatttgaattgatttttcaggaaa

SEQ ID NO: 17075 - DNA, 761 bp, Glycine max
  Intron number 1 from transcript Glyma11g34790.2 (locus Gly ma11g34790) derived from phytozome v7.0 (chr-ID Gm11; pos 36595114 to 36595874 reverse strand)
ttcaaagaaacacaaaaacggtgcgtttcgatcaggttggttttctccttcctcgctcgcacttcttcgttcagcatcagcatgatctgattgtgtttcgtctcaccccaccgttccgttttcaggttttttcaaaactaactcattttgtatcttaactttgttccacttttattgtaaaaaaaaaatcatattttttcctcgttgcttttttttttggaagatctaggattccgcttcattctcaatcgtgagttttgtggcattggctgaatgttgttttgacttttgttacttgaacacgattcctctatttttttgtctgtcgcgtcttaaaatgtttgcacctgtttctgttaattgtttccacatcgtatgagattatttgtagattctattaaaactaggatttatttttgaattggaaatttggttttttgaatttttagtaggtgcagtacattcgtatttctttaaatttaattagaaatagtaatttaattatggtatttaatatgattgaatttgagttgctcattgtaaaattgtaacctgtgagtgacatattgtgatgtaccaccaaccttcagttcagggaaagtgatgaatcatgaaactctttggtaataagtctcttttaagctccctgaagatggaagcatactcttctgccctgtaactgtcaatgtctaagatgattgttttttatgggattagttatgtgatggccataggattggatttctttgcaatgcagggaa

SEQ ID NO: 17076 - DNA, 630 bp, Glycine max
  Intron number 2 from transcript Glyma05g30850.1 (locus Gly ma05g30850) derived from phytozome v7.0 (chr-ID Gm05; pos 36095949 to 36096578)
caacaaaggtatgcatctttcatccatgagaaggacttgaaaattgaagggtgtacagtgattcaagaaagttaggggaaaaagcatattttattcaattatatagttggagtgaaatccataaagtcaagaaaggtttagcaccttataattgagcatcgtgtttcaaaagttattgactttagtttggaaggaattagagattagagatgtttactcccatgtagagcttaagtatgatcatcaaacactgttattgaaagcagaaatgccttgtgaacagaaacagcgttggttaataatggatcaaatcaaatgattttcagaatatatatggaagaaaacaagatattattagaattttatgcggttatctgactagcgtgaaaaggaaaattaaatatagcagcgtgagatccataaagcctcttcttttcctctccatccttttcttatttgttaatcaattataaaatataattgtcaaaggatttaaccatgatttcacattttgtaacacttgaaaatatgacatgttaaggtctgtatatatgatgataagacatttgctacttgtttttatgattgtctgcagatttgggttccaacaaatccaagaggtgcagaaag

SEQ ID NO: 17077 - DNA, 789 bp, Glycine max
  Intron number 1 from transcript Glyma11g03950.2 (locus Gly ma11g03950) derived from phytozome v7.0 (chr-ID Gm11; pos 2645614 to 2646402 reverse strand)
gatcgatcagactcaagaaagtatgttcataaaacctttttgcttatctttgatttttgaaaacataaacttaagttgtaaatgaagactcaactatttttgagttctgtattagagaaatgtttggaacacactctcaaacactctttcttgaatacactttttcttattggttgaaatttataggaagacacatttgtgtgggtgctacatcatatttaatgaatctctttcatgattttgtggttttcaataaattataaccaatagaacatagtgtgttcctagcactcctgtctttattatttatatttatttctattgttcttttagtttctgttttataaataagtagtttctatgtcatgtggggtataataaatatagtttctgctaggagtgtggtaattttgtgaaacatcaagttgtatttattaaaattctaagaacaatttaagtgaatgatataaaataatacaaagtcgaatgcctctgtatggatgtttgagttgtagaatatctgtattgtatttctgtcacctgtgattcaaatttcatagcttatgcaaatgcatcattactgttatcattgccaatgtggcatctgtgatctgattttttattttatttttaagaatgtcttttatactttgtatcaccatgaaatttgattaatttgagaggaatcgtaatacctgtgactttttttttattataatctttctcacgaatgtccttggtttgagcattttgattcagttttttgattcaaaattgttttccagccgg

SEQ ID NO: 17078 - DNA, 471 bp, Glycine max
  Intron number 1 from transcript Glyma08g22910.3 (locus Gly ma08g22910) derived from phytozome v7.0 (chr-ID Gm08; pos 17417302 to 17417772 reverse strand)
tggtagctttgaaggttagagtttctccctttcatgtttccgaatctgtggctttttttttttttttcaatttttattttattttgttaataaaaattttatgctcttttttttttagggcgaaactttaggttcatgcatcttagattaaagttgctttgtcgatcgtgtgggatgtagatagagtcaaatcgttttcgttttttttcttcgttttcgtttggccaccgaaaccgcatcgtttttttctttctttctcttcttaggttaattttggaaatacggaggaggggtttcttccataaataaatgcttctggttagatgatttcattgacggtgcggatttcgattattagtatttttttttattttttattttgtggctggtcccctagctgatttttattatttatttattttttttgtttttgcagatctagttcactgttgctcattttagtgtgtatct

SEQ ID NO: 17079 - DNA, 717 bp, Glycine max
  Intron number 2 from transcript Glyma10g08720.1 (locus Gly ma10g08720) derived from phytozome v7.0 (chr-ID Gm10; pos 7642322 to 7643038)
ctggaccaaggcttttcttgattatcttagacactgtaagctctttcacacttaggcttaatttgtatatgtatggatactttttttttttcttgaagtacttataataagagaagaaaaagaagataaaatgaattgagcttttttcaaatgttaaaatcaatatacacttaattattataaaaattttctcatctaacttctctaaaaattgagatatgcataagttgattttaatttacagaaaaattcaattaattcattctacttttttaatttttttttctcttataaacttttatggagaaggcattggattatttgatttaatataatcctgtatgtctagtacatatactacaagaaaataatttattagtgacaaaatttagtaatgagaatgtaattttcgtcactgatattagtgccactaaattttttgcaatgaatttttaaaaattccatataaattgattcgtcagttaaagttaataatgttttttgtatacatgcatggcaagtctctttattttaccattgataatttctccaatagaagaagcatgtcaaggggtctggatcattcattacaagagttattataaaaacatgttggttcaacacttggtttaagctatgcaacattttggcttaagctttttgtgtgttggtgaaattgcaggtgtttctcactctaacaactgctagtggtgcttc

SEQ ID NO: 17080 - DNA, 1028 bp, Glycine max
  Intron number 2 from transcript Glyma10g42870.1 (locus Gly ma10g42870) derived from phytozome v7.0 (chr-ID Gm10; pos 49719480 to 49720507 reverse strand)
ggtacacagccaagtgtttttaacttcaatattattatttttttggataaaatgcgttttagattttctaatatttgatgaaaattgggtttgattccagtgttttgaaaataatgattttggcctttctactattagaatagggcggttttgtccttgacccttttagttcattttaacttaatgaggaacgaaatctgccacattttagaaatacaaagaagaaaaatgtaagtactaaaatttatgtagatttttaaattaaaagataagttgcatgtatattgaaaattaaatttttatcagtaaggtttatgtgatttaaatgtaaagtaaaagattatattttgctagatgaagattatttgaatagattcattagaagttgtttttatttcaactttcaagagaacttatttgttataattggtgacaatcttcactataaatagagaagataattagtgaagaaataacacacatgtagagaaagtgcgtgagaagagaagaaattgtgaaacaaagtcactttgttgagagaaaagtgtttttatgtgagagtattatcattttttgtaaccattgaatgaggtactcggatttgcagagtaatacactattacactatttgagatgaattacaatcttgtaatcatttttgtgatagtgaaatattttttgagatgattccgtatatgtagacgagatgtgtcaaattacattaaatttttgtgtttgttattatttctttttacagtgcaatctttttttctacggtataatctttattgtattctcaggatcctttgtatgtatgagtaattttatttgtggaagcttgattacccaacaatttatcctttttttttctattatttggtgaaattttatactagtcttgttaataaaagaagacaattcaaattatttaggatgttgttggctaaccaacttgattatcaatgaaactaaaccagtggaattggagtgcaggattgtcactacttcattggttacagggcaacaaa

SEQ ID NO: 17081 - DNA, 448 bp, Glycine max
  Intron number 5 from transcript Glyma10g27820.2 (locus Gly ma10g27820) derived from phytozome v7.0 (chr-ID Gm10; pos 36644410 to 36644857 reverse strand)
gaagcaaccatacagcatcttcagttaagcttcaggttgatttcctctgtttgtctaatgtagaatatgtaaatcttttgttaatcacttatttagtaccttcaccttttcttattaagtaaatccttcaacatgcactttttttttatgatgttttaatctttacaacttacaaggtgctgcaaaaagccagctactaataataagactttttgtttttgctaatccctgcaaatactaatagttggcaatgcatgtggcaacctccttattgttttttcttacattgctcaaactcgattagtttttcttagtaataaatgatcgagttgcattagtagtatatgcctctttctggtgtcaggtgtgggtaaagactaaagaagacattattgacgttttacattattcaggctgtgcttgtagcttctgactgtaacccacgttg

SEQ ID NO: 17082 - DNA, 720 bp, Glycine max
  Intron number 1 from transcript Glyma13g29650.1 (locus Gly ma13g29650) derived from phytozome v7.0 (chr-ID Gm13; pos 32524123 to 32524842 reverse strand)
gttgttgttggtgaccagtcttctggcaagtccaggtaaaattttgtttgatttttttacttgttgttatgcaaatgcagtaatacatataaatatgcagtggtgtaaaattattttccaatgtaaactaatcacaaatcatgatatgtacagcttttaagtaggttttttttacaagtcgatgaatttattatgtataaaaaaatttaatgataatgtaaaaaattacttgctctggtttcaaatataaataataaaaatctcattttttattttaaatataaataaatcttaattacttatctcttattcattgagactcttcaaaataatgaaagatttttgtatacttaatataaagttttaataagaaataacttagaaaaaatatttattttttaattgaaaataacacacttgaaattaactactttttttcaaaactgtgaaatatatattttgtttgcttataattgagattgaagggagtatttgcatatttttttttcttaacactttataagacacttaatcctctattactatgagacaagattcttgtaaaatactagtgcgtgaatctaaaagacctatacctcaaaataaattaattaaatagtgaatcaaagttaattaaataatccactaaacttcattgatgtaattgtttcattttccaaaacagtgtcctagaatctctggctggaatcagcttacccc

SEQ ID NO: 17083 - DNA, 711 bp, Glycine max
  Intron number 3 from transcript Glyma13g32080.1 (locus Gly ma13g32080) derived from phytozome v7.0 (chr-ID Gm13; pos 34349826 to 34350536)
ggcagattttggagttcaagctctcataagtttgggtattaacttagtctcgtgtcaaatataacaattagcttaacatatttcttaattgtgatgcgtgtatgaaatgaaaccaatgtggagtaaatgtaatgaattttatttagggtctgtttcgataaacttcttcacaagcacttataagaaaataggaagggaaaaagaaacaagcctctccataagctaatttgtagaagttctctcattagctttttcaaaaattatttttaacttgtacataagctaattttagtttatggagaagcttatttcgtttttcttctcctattaataagtttatctaaataggtccttaacgtggtcaattacagctctacatgagtcgcttttctttttggggacataacagcaatatgatgaacattattttaaaggactcggtgaaacttaaaaaatgccaatgaaatctgattaatactcataatttctggccaatgtgattcatcgaaaatgtaattgtaaacactagtttgctaaaacatattttccttgtattaatgtaattagtctagtattaggattaccatgtagccttgaaaatgatttgtcagaagttattattcttttcacgggattgaaaattttggttttatatcttatgtggttattaaaacagagttaaataagctgttcccttctatacctttggtg

SEQ ID NO: 17084 - DNA, 884 bp, Glycine max
  Intron number 2 from transcript Glyma07g31390.1 (locus Gly ma07g31390) derived from phytozome v7.0 (chr-ID Gm07; pos 36408025 to 36408908 reverse strand)
ctggttagtaagaacatcattttttttgagtttgttacgttactacacctggtttctcttacatctcatttttttactttttgtattctgttttggatctgtgaggttttgcagatgtaaatattgcttctccttcacttttgtcgatgcttgggctgattctgtttcttaaaaaagattaataagtagaggcaacttagattaaaagggtcacatgtttctcaaaatttgaattgattagatttcaaatatctgtcttttttttggtttatttcatctgtaatggcttttatttttggacagtggtgatatataatgtgacctttgtatatgagtttcctgtgatgatttgttattaatctgctattgtacatttacacacaaggataggttctggaagttgcgaaaaagaaaatgaggggcaatgcaagaatttgctgccaagatataaagcaagaaaggagtggaaacaaaagttaggggttaaatatgcttttagtctcttcaaatggggtattgtccacatttaatccgtaccaaaaaactcatttccatttagttccttatttatgaaaatgtgtcatgtatcataaaccagagacaaaaagagatggttcttttacgaatatatttccataatggagggactaattaaatggaatccatatttatattgcatggatcaaaaagtaaaaacacatttaatccttttttcttgtaattatctcaaacttgcccatgtacgttattttcttgagtaaattagctcatgcaaaattttcaatgtttatgaagtttagtatatatttcatactattgaaattgaaacactattgttaaatcagcacggtgtgttgtaactttgctttccttttgttcaggac

SEQ ID NO: 17085 - DNA, 827 bp, Glycine max
  Intron number 2 from transcript Glyma08g23430.1 (locus Gly ma08g23430) derived from phytozome v7.0 (chr-ID Gm08; pos 17879112 to 17879938)
tatatcttggggctcagagtctcccctcggcacaggttctattccactctgctcatatgttattggtttgcttgcttctatctgtttctgcactgcacatattttcattggtcctttggatgttaatgtgcatgcgtttcagataaaataccaaaagcacaagagtcataatcagttttcctccatcgtattccgcaaaagaaaaagtcatttcagaagctgtttctttcttctgctctgtttgccattggcaacccctctttctttctttctgattccatccctttctccacaagttgttgtgtgctttcttggttctaatctcatttggaccttataaaataagggaaacgaaaaaaatcagaaaaaaaagaagcggtggaggattagattctaagaaaaagagaaggcaatgttcctcgtatcatggaaaggtgaaaaaaacgtatggttaagctagcctgtcattgacacatgtatgatgtatccactgagcctactttaataagaaactgcaattggatatgatgtcttattcttattttcaaccatctcactgaatttcgtacaaagttcttcatctatagacaccaaggtccacacaagccttacttttctattcagttcaaatattcctcatgatccacctctagcgcccttcattttaatttccattagattacttttaattatatataaaaaaaataaacctagacccaaaagcggtagctataaatgttttgatacttgatcaggcaacaataagtaaaagacttgtcttggcatatgcaggagatttggcattggcacaaaactagttgaacatt

SEQ ID NO: 17086 - DNA, 908 bp, Glycine max
  Intron number 1 from transcript Glyma09g37820.1 (locus Gly ma09g37820) derived from phytozome v7.0 (chr-ID Gm09; pos 43340749 to 43341656 reverse strand)
tataataaggtatagtgctgtatttgtaaaaatttaaaatttagttctaatatgcattttaatgaatattcgcaatcagactgaattttaaaaaatagtttaaattaattgtgaaacaaagtgatttatatttaattttttatatctaaaataagttaattataaacttaatattttttttatcaaacataaaagttatctaaatttactttaactgaatctattttaaaccagaatcaatttcttaatataagaacaaacatataaatatttacataaaatcattttggtatttcaaccatgatattaaataatttaatgtgaattcaaacatataattaatctctcgatgatgaacactttaattttattttcataataacaaaataaaaagttaaatatttcaaatcataatattttatttctcacattaaaagctgtgttgcaggaataacataacattgcctggcatgtctttgtcattgtttctcctctgtcctcttccacctacaaggaacactactttccttagccacttataaaacacccttccgaccttatatgtgttccaccgaattaggacattttcccttctcacttctcattctctcttgctccctctttcagtgtcattctctaaacccacactgcaacaatgaagcttacaataaaaacaccacaccctctcccttcaccccaatccaacaccctcctcaaacctcgctgcataacaacaaccacccaaacatccaaaccaaccagcaacaaaaacctacacatgtctaatgatacacgacaagccgcattacgtttagagaaaatgataaacttggaagaagaacataatactaacaattattttccgtccatgcaatcatcaaaacttggcaagaggtggaaggagtacc

SEQ ID NO: 17087 - DNA, 530 bp, Glycine max
  Intron number 1 from transcript Glyma08g10320.1 (locus Gly ma08g10320) derived from phytozome v7.0 (chr-ID Gm08; pos 7456310 to 7456839 reverse strand)
tcttgttggtgttgttccctgtaactgctccttcggtgagtgctctgctcatcacatcacacgtcttcgcattcgatcatttttcttctgcatttctattttccttattattattgtttgcgtgccaaagcttactggctaatacttcttcatgcttcatcaatcatgcatgcaccctccttttagggtttcactactgcaatgttgtgtatacccttcacttgtgaacaagtctcaccatatatatatatatatatatatatattatataaggtttagtaaaagaatgtgtgtacctacatttcctctcccaagtctcctacacattctcgctgagctagttttccatgtcttttatttgaagcaactagcactatacccagcacaatataaataaataaaaaacattgcttttttattttgtgtgtactgtgggatttatttgatttgactcgtcgataacatctttgactcaagttattaatttggtgagtgtctttgacaggacttcttttcagaagagtgcaaac

SEQ ID NO: 17088 - DNA, 566 bp, Glycine max
  Intron number 3 from transcript Glyma11g01340.1 (locus Gly ma11g01340) derived from phytozome v7.0 (chr-ID Gm11; pos 787954 to 788519 reverse strand)
aatagtaagaaagtcatatttcaagtgcacaggttatctctttctccactgtcccccctccctctctctctctctctctctctctctatatatatatatatatatatatatatatatatatatatatatatatattgcacatgagggtgttacttgtatcagctgaattacttaaaagttacaagatatctttttcatgctcttttctgtgattaatttgtcctctgtgctatatttgttctttaatttgccatctgaatcaacttagtttgtatcttgaaattgttgtaatgtgacgagctagtttttaattgcattactctggcattcattctttatacctcaatcccccttctattttttttaaatgcaaatagaacaagtaaatatgagttaataagacctttttatcttgatgaaatatttttctatagttatagataaaataaaagaaataggagtccgaattctactctgattgttaatgatttatagttacatacttacatgtgatcttcattttcattatcttactggcattaccatatttgaatttcttaataagg

SEQ ID NO: 17089 - DNA, 507 bp, Glycine max
  Intron number 2 from transcript Glyma10g43760.3 (locus Gly ma10g43760) derived from phytozome v7.0 (chr-ID Gm10; pos 50340050 to 50340556 reverse strand)
aagaggtaacaactaacatcaatatcttatcttattcaatcaaattcaaaggaaaagaaaagaaaatcaaaatattggtatataattatgataattagtatgttttaacgtttaactaagtattagttatcaaaatacgtgaacaatgtgactagaagaacttgtgagtggaccagcctagaggtagaaatgttgtttgattgaattgaatcacacacgcctttctctgtgtgttttcatttcctatttttcatgcaataaaatctctctcacacttcactcttcaaacaactctgtttttctcatctctcttctcataagaaaaatactcccatccgaaacaaacttcggagttcaaccttaacaagtcttcatggtctctgtctctctttctctctctgtgtatctatctataattataaatatcatatatcttgattcgtgattaattttgttttggtttttctttgtgttatggtgtgcaggcgagtgaagctgagatcaaat

SEQ ID NO: 17090 - DNA, 738 bp, Glycine max
  Intron number 1 from transcript Glyma10g04390.1 (locus Gly ma10g04390) derived from phytozome v7.0 (chr-ID Gm10; pos 3383198 to 3383935)
tcgacattcaccccgccgtcaatcacaggctcaaggtatatcaatcagaatttctactatctaattgttttgattcggtaattgaaccgaaattcgcgatcgtgattattgttatgaatgctgaatgatgaattggtttttttttagatgaataaacaaaagccacttaaaacatgctgagatgtataatttcattggtttagttaagtttgagtgaatgaagcaatgattagatgttgtggttaactggatcactgagatgatgcatgttttgagcttaattctttagtatctactgtatgctattgttgttgtgatgatgaattaggatctgtttcggtaagcttctccatacttataggagaagaagatcaatttatgcacgtaaatttgtatagaagctcttttcatttaacctttccaaaagcttaggtacataagttgattttagcttgggcaaaagctcaatgcattatatcttttgattttcttttctcataagtgcttataaaaaagttaatccaattagggccttattttgctttggtcaaatccaattttttgagcaatttctaagggtgttcagtttcacaattctccaagattttgatgaatttacttttttctattgtcttaacagtatgtttttcttaccccctggatcatgatggctttttcctgtgtttaagatggtgtgtttgttatttggcctgtaggaaggggaaaccattaggatta

SEQ ID NO: 17091 - DNA, 925 bp, Glycine max
  Intron number 3 from transcript Glyma08g00420.1 (locus Gly ma08g00420) derived from phytozome v7.0 (chr-ID Gm08; pos 141769 to 142693 reverse strand)
aattggccattcagtcctctggcatagcaaaccaggtaattgctatatctattgtagatgtaatatacaatgattcatgtgtgtacctaacagttaaagctttttgggttcgtagattcagattctaagagattaagtggtgctaaatgggtctaaacattatcacctaaacaacttaagcttttagaataggtggatgatcacaatagcctgtctcttctttagaccttcaaataccaaattcctatctattttttcatgctttaaatatatttttagttcctgcaatttatggtttttttgtttttcgttctttgcaatctttttttttgtttttagaccttgcaaattatgtttttttttttgtttttagtctgtaagacattttaaataactctttcaacagtgaaaaaaaatattatctaaaatgtcttaaaaactaaaaataaaacaaacataatttataaggattaaaaacaaaaaaaaataattttacagacgcaaaataaaaaagcctatggactaagtctttttcatttcattacaaagtaggaagaataaatctacccttttcttagattatccacgcgtttcgtaagtccctaactttacaaaacactcactttttcttgattttgcaaagctatcatttcttcactttagttattcctttattccaacatttttcgctaacaataaagattaaatgacattttgcaaagtctttcaaaagttaaagattaaggtaattatgacctgataatttcaagaactgaagtggggtttagtctattgggaaagcagtgtctatgatttttgcagtgctttctcacttatatagttatattagccactcatgattattttgactgaattagttactgtgatgtaaccaataggaaccagctattacatccgccaagga

SEQ ID NO: 17092 - DNA, 964 bp, Glycine max
  Intron number 1 from transcript Glyma07g06230.2 (locus Gly ma07g06230) derived from phytozome v7.0 (chr-ID Gm07; pos 4952767 to 4953730 reverse strand)
ttttttggttgcagattcaggaactggtgtgtgaggtaatatatttgctagatcttcattccccctttttttggcttcatgggctgtttttttggggcattggggcttccttgtggttttgtggctcaaaaagtttattcctttgaaggagttgtttgcttgatgaatctgtgtgccgcttccacttcagttctcaatttcttatcgacaatcgagatctggtttgttttaaatttgttaatttgtttaactattcctttcattttttgagatttgaaaaaaggtttttttttgtaccatttgaattaattgtagatactcagaattcattggtggaaggcattgtttcaccgactgcaatttttctgaaagtactgcatgattgcattccctcctccccttttctcgtggctgttaaaattgtgatgttaattattgcctagtcttatcgtgaatcagaaccgactttgatttttaacttttcctgctgaagaaattcaaaattcatcttaaaggctgtggctgcacatctgatttattctttcaaaaggaatgttgaaattactaagttgactgaaaaaaaaggctatggcaattgtgatgttttacagcatctttactaagttgcttatgtctactttagtgttgtaatgaatgtaattgccatccttccttttggagaaacttttcattttaaaatgtacaattaatggacctctttatagagttgtaacagtacaggcaagtgccagctacattttctgtaccatatgaagttctctctgatgtagaagatattatttctcatatttgtttaagggtattttgatatggatttctttgtagatggtttttgttgacttaaagaaccacgtgcttatttaagtggtatgatttacaattttctcattactcctcttgtttgatatgaagatttcttcaacttggggtgtcattgacataa

SEQ ID NO: 17093 - DNA, 864 bp, Glycine max
  Intron number 2 from transcript Glyma07g32960.2 (locus Gly ma07g32960) derived from phytozome v7.0 (chr-ID Gm07; pos 37828111 to 37828974)
ccactaccaaggtatgaatatgatccatccgaaaatgatttaccgattttgctttgtgattgaaatgaattgtgacggtttagacctaaacgaagctggttgccaaataagtgtataattatgctgcaaaccgttactaaattaatcttctagtgtcgattaaaagcattttgaaaggaagtgtagtgcctgctgaggttaagtgaaaatgaaaatgtaaggatctgtttggtttggaaaaaaaatatgttttctgttttcattcccggttttattaatttacaaacaggtcacattttatttcctttgtttttttgaatattttcataggaactagttaaacagcaaaatgtttttttttttaaccactgtttcatgtgcaaatgtttgaaaataagaaacaaagtgataagaatgcaacttcttttgtaattatttgtaatgaggagggaaatgaaaacaataaacatttttttttcaaaccaaacatgctctaaggtggtatttggtttgttttttgttttcgtttgctgttgatgtgttttttacaagtaattacaaaattgttacgttggtttcatgtgatttcttattttcatgatttttccaaaggaatagtgaaaacaactaaatgcctgtttcatcatttccttcacagcatcttgagaaacatgaaacaatgcgaaaattaggtgacttttttgtaatgataaacaaaatatatcaactgaaaataaaaaacaaaccaattgttacctaagaaatgttatcgtaacacactcagaaaagatgaaaggaagacaatatcattaattcttttaacttttaggttacttactctggagctgtgttggaagtctgcat

SEQ ID NO: 17094 - DNA, 423 bp, Glycine max
  Intron number 2 from transcript Glyma08g20470.1 (locus Gly ma08g20470) derived from phytozome v7.0 (chr-ID Gm08; pos 15496975 to 15497397)
gcaaaacagatatcaaactgacacttaatctgaaggtcagctccgaaacaattagttgcaattttgatatgctcttgtcccatgttattttatctttgcttaatgaagaatggtaatgaatttaataatatgctattgcatcaattgggctgtttcatagttatttcttttttgtgattcttgtattttggatagttctcatttctttcctaaatggagctcaatgaagatcctggaccaattgataattatgttctttatgatcaagataatcatatattttcagcagtttgggatggacatgtaggtggatattattttatttataatttttaataaatcatatgaaaatttctcaatactcatataattggatatgatgatattagtcattccaaatccacaggagcgtggtgtacttag

SEQ ID NO: 17095 - DNA, 983 bp, Glycine max
  Intron number 1 from transcript Glyma13g17590.1 (locus Gly ma13g17590) derived from phytozome v7.0 (chr-ID Gm13; pos 21363135 to 21364117 reverse strand)
ggtaagaaagaaagttgtaatgggtaatcgaaaatgatgccctaatttccgtattaaccaacaattagctttcaacgtttgttttcaactctctctttaaattctcccttttatcaacttaagaaaaagattaattaatctattgaagtagtctcagattcagtgcatgtcgtctatttttctacacaccgaatgattctatataacgaagaaaaccaaaaatttgaatttaactcttgaacactaaggagggattagaagcaatcaaatcacccatatacaaagattattcttcattgtctatgatttcgagcatattcagttttcaggttctagcatcttcttgaaactcttctgaagctggaccaaaatttctcagcttttccctcattatcgttacccatcaaagtttcctcttctgggtgtttgtttattggatccggggcattgtaagatttgatcttttcacgaatcatatcattttcaaacactcccattttctgggtagtaattgggattggttgcctcggatttcgcactctcatttctagggtttatgtcggttggatttggtggatacccttttgactccgaacgagcttgaccgcgaaaagattggtccttggtgatcgcagtgttcaattcaataagttctgggattgattcttttacaaagagaatattgccttttttgctctgagatttatccgttcatttcttttattccttttcttttaatggtgatgcttgaatatcagagcaagattctggtgttattatgtttagattaaagagttgtgaaggccctgtgcgctacttgtatcagcaaacttggcatcacctttatcataacaatattatggcttatttagttggttatgatccttgttcccacttgagcaaggccttttctcagtacccttctctttctttttctgatcgtggtagctacctgtctttcccatttctccgtaatcttgttt

SEQ ID NO: 17096 - DNA, 590 bp, Glycine max
  Intron number 1 from transcript Glyma08g36610.1 (locus Gly ma08g36610) derived from phytozome v7.0 (chr-ID Gm08; pos 34772145 to 34772734)
ctcgcgacttctcaatttggcttcgttgaagggtgagaagctcccacaagtgggatggcattagaagttgtcttagctcttcgaataatatttgtgctgacttggatcaacgctaccgaacagcttaggacttccttaatgcacacctaaccccattcaagtaattaattaaaaaatttaaactccgctcaatttggttggtttcccactttatcattgtttttaatttatactccatcggtttttatttataagatttaagtttgtttattttttataagattcaatttataatattttttgaattaattatttttagattaaaattatttttttattaaaaagaaaaaaatatattgataaactattagaagagaaagaagtattaatgacaatgataatttaaaaaatatatataaaaatttaagattaatttattattattaattaaattaaatatttttttaatttaaaaaattaagtaatttgatcttatatataagaatgaagaggataatatgttatttttttggtgttgagtattaagtgattcagtgtatattgtccgcaaggttttaaattaggcttac

SEQ ID NO: 17097 - DNA, 651 bp, Glycine max
  Intron number 2 from transcript Glyma11g38020.1 (locus Gly ma11g38020) derived from phytozome v7.0 (chr-ID Gm11; pos 38991269 to 38991919)
acaccaccttgacaccaccaagcgagaaaattctggtactgtttatttctacatttatgtatcgaattgaatattctgtctcgaatgtttatttggctcctgtttaaagaatacatgtaactattgtctattggtggcattatccagctttgttttgctgagatagtattagtagttcttttctttctcgtttcgtgatttctctgaaattgaaagaacactagctgaaattggtattatacaacaggttttgtaactaattgtgaagcacgggtactttcatttgcttcacatatatgtattcgataatactcttagataactgatactaacttctttttttttttaatcggcaaatgtaagttgttaattattagttttttgttagcggggtaattgaacccacgacctttccctttcccccttcttttaccaccaaaccaaccttataactccattgatactaactatctacgatgggaggctggcattaaatgccttccagtgctgcattaccacaatgtgtactgatattcatataatgcttttcatgtttttccttcatatgctctgtttcatgttttaattctaattttgtgatatttttgaatttttactttcacttaggttttcaacaaagtcttgttgaaa

SEQ ID NO: 17098 - DNA, 445 bp, Glycine max
  Intron number 4 from transcript Glyma13g24850.1 (locus Gly ma13g24850) derived from phytozome v7.0 (chr-ID Gm13; pos 28148313 to 28148757)
aaccaggtagggtcttttacttggttaatagtgttggttttttagttatcattgattggttgttttttgactattaaacatgcttgttgtctttactgattatagcactagagcacacaatgttgtgtggttgctagatgttaataatactaactgcagagttttatttcaaaatcttcttgtctagattgatcactgctggacaacagaaaataaaatgttatctggttggctattacttttgttattatttgcataatcatgtgtcgtaacatttctattatctcactatttccatgacttatcaaattattttctaattctcaggaagcttaggaatattttttatcctgagtctccctattagctctttcatgttcattcctttcatttgatgtactatattccccatcaatttttaatcggtattattttaatgcaggtt

SEQ ID NO: 17099 - DNA, 991 bp, Glycine max
  Intron number 2 from transcript Glyma07g18020.2 (locus Gly ma07g18020) derived from phytozome v7.0 (chr-ID Gm07; pos 17782794 to 17783784 reverse strand)
aacaaggtattaaaaaagaatatgcatttaaattgtatcatggattaattgtttgtgtctaaatgaactttttttatgtgtcatgtttctatattttctgctgaaatgctagataagtgttgttacaaaagttggaattatctaattattggtggcaataaacggatgattgcttaatgaacagactgcattttctggcatttttttgttttctgtctattaaatcccacagatgagaacatagaggcaatttttataaattgttgcaggttcttcagtgaactgtgtctaggatgtaggattgggtgttgctgacagctaactttaggctgtcaaaaatcaaaattgattttgatgtactaacttggataatttgattgatttttcctagaaagaaaaaagatttaatcctggttaatgaggctttaattctcaccctcatggtcaaaatgttgtcaaccatggaactcatggtacacttattaaatatatttgaaatttattgtgccgggatctatatgttgctagaaataattaattgcatgtcaaacatgaggtcaaccagttgaattatcatttatctctattgaaccaacttactactcccaagtcccaacttaatgggatgcatttaaattctgatatcctattttaaatgcttaaatattaatattgaaatttgactactgaagatggctggcaggggtggttggccatggtttggttacattattttttggttatgtacttgtgttatattttattgaattcatcccatatggtggaaattatttcaaataatataagcaaaatatgcatgtatctctatttcagttgaaacttgtctagatctactgagacatcttcacttggacattatcttcctaaaattgcattcttgactctttttatttgtattttaaattttgcatcctgtgatttatttatgtaagctttatatgtttttgacccgacagtggttgcaactaaa

SEQ ID NO: 17100 - DNA, 585 bp, Glycine max
  Intron number 1 from transcript Glyma08g47710.1 (locus Gly ma08g47710) derived from phytozome v7.0 (chr-ID Gm08; pos 46509528 to 46510112 reverse strand)
ttggttgtggggtgagtcagcttctatatcttattatgctttttccttccttgtattctctttctttattttcttttgtcctctcttaattgtttgccctgttatcatttcattcgcctttttttagcttgtacttttacatgttactacaagaggagtttcttgagcaacaaaaacagagaggcttttcaatcaaatgagagcttatgtataatcaaagacttttttttatataaaaataactaataggaagtctccttagcctgctttctttttaaagtttaattagcatgtattgttagtgtagttccccttctgctgaatctaatgccactgggaaagtacgatttaattgtactttcatgttgttgattagttctttttcatatggcatctgtttagttctactaatcatgacccattagttacgaaccttagttaactgctttgatatttttcgtctctgctcaatgttggataatgaaactttgttcttctttttgggtttatttattataacttcatgtaatgaatttgtgttctgaatgtgcataatcgtaggttgcaagctttggagcttctctg

SEQ ID NO: 17101 - DNA, 396 bp, Glycine max
  Intron number 1 from transcript Glyma05g36290.1 (locus Gly ma05g36290) derived from phytozome v7.0 (chr-ID Gm05; pos 40142562 to 40142957)
tggtctcttagctcgagcccaagagaggaagaaaggtatatccacactttttcttcaggaagataatagtagttattacgtttctttgtagtttcaatctataatatatgtctgtacaaaataagcagtcccccccccccccccccccccttccccattatttttagatattatatgaatttgttgatatatgatttgaaattattaatacaagaaattatatatgcactagctagtatcttttatcctgactttttggaaaatctttgattattattgttgaagtacttttccttcattcctatctagtaactaccatttcattatatgtatatatataatctaacattgttgttatgcattttttttaatgcaaacttaattatcaggagtgcc

SEQ ID NO: 17102 - DNA, 874 bp, Glycine max
  Intron number 1 from transcript Glyma10g00900.1 (locus Gly ma10g00900) derived from phytozome v7.0 (chr-ID Gm10; pos 623625 to 624498)
agcgcgatattgaacaagttagtttcaccacaaaattaagcttttatctaaaaaagaaaaaaaatgtttggtttggtttgtttcatagccgaaaaagattagaatttttttccattaggcacgatcatgcttgtttatttcaaattagtaatagtattcattttctaaatgaaaagaaagatcaaaatattgaggggtcttttgatatggtgtattaattatagacttaagttaaaatttatctgggtgttggcaattatggctgtttgccctagctagaagaagtataattgaagataaggcatgcccttgcaggctagaatttgtttgattgcagggatgaaaggtagggtaaaataatggtatgtaaagtattttgtgaaaagtattccatgtacgatatattaaaagtagtcatggtactcttggttactatttagaaggggaacaatatcctacttgatgcaggagacaagagaaagaaagtaatgaaatggatactgatgggccttggtttatatatacaagcaatatgataggaaacttgaatcattacttgaatggaaatatatggtattctaggagaggcaaattgagttaaagccatggatgcatggggagggaaactttcactgaacatggtcatgatattgttcctttctatgtggtttttgattgagtaacaatcaaaaccactttatctaaatggggaaaatacttaacttggaaaaacatttttttctgcaatagaaactgtcactaactgatatggttttctagagattatgttgcttaggtgctccatttaaatttaatttctgtcttatttctttgtgaaggcattcattactttgaaaaagggcactcagttagt

SEQ ID NO: 17103 - DNA, 690 bp, Glycine max
  Intron number 2 from transcript Glyma13g05490.1 (locus Gly ma13g05490) derived from phytozome v7.0 (chr-ID Gm13; pos 5807906 to 5808595 reverse strand)
gtctgaatcagaagctgagcttcctactgcctttggtatgttgtaacttccctgataagtgttcacacattgcctggtttataatatgcgttcattttggtggagatgtagataattgagcacggacacatatatgaactttcccctgctcgatgggatattgaatctaaagtttcaaatagtggtcacagtagtggttttctcatgatccttgatactgtgggatgtggtagacagatgcagctgatgtggctgcaattgtagtttttgaaactccaaataccttgatattgcagccaaaattgcagtcgcagaccattgttttaaatcttgattgaatcttcagtagccttttttatatatggatactttgcttcattatgtacctgtggtaattcaagtttgatttttcttctctttttttccatctgcatattctgttcgtttgcgttgggggtcaacttggtcttaatcttaattgtttggatttgcaattgaaaattgttttttgaaaattttatttttttccgtgaagatttgattccaaaccagttaaggatttcttttaatgaaatacaaacttagataaaattgctgaagggcataattttgcatgctgcagatttttgctatgggttcaatatggttatactagttctgatgtttgctttgtttcttttgtagttggtg

SEQ ID NO: 17104 - DNA, 644 bp, Glycine max
  Intron number 1 from transcript Glyma13g05490.1 (locus Gly ma13g05490) derived from phytozome v7.0 (chr-ID Gm13; pos 5808612 to 5809255 reverse strand)
ttaggatttcatttgattttcctcggatctttctggtaaaaactgcgtaactggtttcaattttatttcttaatacgtaacatttgttgttgttgttgttgttgtggaatgatttttgccaatggaaaatgttaatcttgatttaggttttcctttgatgatatagttgctagcttggataataattcataacttgtctcatttttttttattggcagattgttaattgttaattttattagattttttagcaagggagatcgaactcgagacctttcccccttccttctttcttaaccacccaaccaactttatatctcctaataataacttgtctcatggttaggatggttgtgactaaaatatgatctttgtaattttagtcttatttttcttcatatcattgttttgtgtgtttcgattatccactcaaactttggcaagtgtttgttgttcaagtgcacggggtgctgttgtaattcagctgacatgttggactgtcatttggctgagatgactgaattctgaacaatcattttgatgctttcttattatgaaactttgttgccgtggtaattgacacagctaacatgttggttatatatccaggtctggggtatctgcttggtaggacttcatttttg

SEQ ID NO: 17105 - DNA, 565 bp, Glycine max
  Intron number 1 from transcript Glyma14g03440.1 (locus Gly ma14g03440) derived from phytozome v7.0 (chr-ID Gm14; pos 2228919 to 2229483 reverse strand)
ggatcttccaagtaagatcagcttcctctttaatatatagtattagttactgaaagtgaatccttttgtttctgctgcagcagataaatttcacgagtttggttatgattcttgatatatataattcaataattaaggactagagtgtttgatatatataaattgaatgaaacaagctaggataattaattaagcttaaccaaagaaagcatatatatatatataaacttaattagcacatcttaattattaattatatggataaacttaatttgcgaagttttcatgtgaagatgtagaaactcaggcttcaataatatgttattggataaaatataaattgaaaaagaagacagatttggtgtatataggcatgatatgtacatgtagctggctttcgattctaggctagctagttaggtgtgcaactagctagccaccccattttgattttatacatttattgtatggattaattcatgatttataatctcaagtcctttttttgtatgctgataactaattaattaatgcatgaagaagtgagttcagttggggagaagga

SEQ ID NO: 17106 - DNA, 778 bp, Glycine max
  Intron number 2 from transcript Glyma05g36380.1 (locus Gly ma05g36380) derived from phytozome v7.0 (chr-ID Gm05; pos 40218142 to 40218919)
aaaggaattaggaacagtaagtcttttattccatcaaatcaaatgtgttttacgtttctaaattttcacttaaaatttatcttaattcctattgtagttaggtccactctttataatagattaatttgatacttagcatactagactgagggatgaaattgataggtgaaactctacttttactcctatcattctatgactataaagagatgaaaaaaatatttctgtttcttcattactctctcaatggaattacagggatatataagcagagcaccagcaattgctaacagaattctaaaaataatattctagaatctacctgagatatttattctaacaaccaaaaaaggtctatttgtaaacatcataaccgttccatttcttagctactgaaatgatcctcttgggggccaaatatattagatggatcgtaacagaaattcaccaattatgaaaaatacaaggaccgtaattatttgttctagcgagaattgttacccaattgatgtttctgacgttgtttattttgtcggaattgtatgacaaccttatttaacttgaacgtgagttgcggaagactgacctaattttccaagaggaccatgaataccaaagatatcgtttaaaatacagtgattagggttattttttgaccgaaaattgaggatgtaaaactcatttttatctaatttacttgtgtcatcttatttattattagtcttcttaattgagatagcatgattctaattgcagatcaatatctgtggtccaaaca

SEQ ID NO: 17107 - DNA, 620 bp, Glycine max
  Intron number 1 from transcript Glyma09g38410.2 (locus Gly ma09g38410) derived from phytozome v7.0 (chr-ID Gm09; pos 43780247 to 43780866)
agtttctgaaatcatttttgaagagcgttttggtatttgctattttcttccctgtttttttttttttttatgcttactttttagttatatcatattcatatgtttcaactgttatcacatgcgtgtagttagttagtttgagttggtgaaaactgaatagttagtttattggtaattaaatagatgattcattgtatatttatatttactctagtaagtgtatgagccacgtatgtatgtatggccagtgtgttgtttttttttcttatttagtgaatttcaatttcttagatcacccttctccaccaatgatttctaacaccaacttccttaacaattattccttgtttggttggatatggagaaagcaccaaatacacttttttccccttttgtcttctgctttcacaactttgcatcactactttatgcacaaaagcaaagtgaaacaaaactttcatggcgtcattactaaaaatatcaattgaaaatgaaaaaacaaaccaaatagcttctaccatctcaaaggaattcaacttgtagtttatagggtggtttggtttttcactgatgatatgaatatataatgtgattatgataatgtgttggtttttgtatag

SEQ ID NO: 17108 - DNA, 495 bp, Glycine max
  Intron number 2 from transcript Glyma13g31430.7 (locus Gly ma13g31430) derived from phytozome v7.0 (chr-ID Gm13; pos 33840899 to 33841393 reverse strand)
tattgtgaccccacaagggatcatttctggttcaggttttgcttttttaaaccttgattattattattattattattattgagtagtgctatctagtaggaatgttgctaacacgaattgttacgaattcaaaaacagacaatcaaattaattgtattaacatccaggtagagagcggataataactatctgcaataaattttagaatccttacattttgtgcagcttggtatgataactgttcgtactaaactactaattatcatcatccttttgttttactcttttcattttgttccgtgaggttgtaaaggttttggtgtaaagtaaggtcttggaagttaggagttaggactcacttgagtggcactagcatcaattcattagtgaagaacatattttcttttgaccatttgttgtttcaattgtacatgtaaaactttcaccaggctatcactatgtacacatgttaattgtttttaacagtggagataa

SEQ ID NO: 17109 - DNA, 636 bp, Glycine max
  Intron number 4 from transcript Glyma08g39830.4 (locus Gly ma08g39830) derived from phytozome v7.0 (chr-ID Gm08; pos 39412158 to 39412793 reverse strand)
atcgcaggtgtgtttgttatatgcacatgctatacatgaattaaaaaattatgcatttaaaatatccaagcctttttagcttttccctttgtttattgttgggattgaatgcctaagtatagaaatgtgctttggtcttttgtgggaggcttgcgattgattttcccattatgtggacaaccaccctctactgtagtttctgtttaaatgtggattgatactcactctctttgtaattatactttatatataatatgtataatgtataatatgcattatctgcccaacttaaaattctctcttgttggagttatctaattgtcttcggtctgcaggatattattgttagtttgtcatggcattctgactgaaaagaatattcataagctaaaataaattcaaacttgagtgaccagagatctcaatcttaatatgggtgtgacagccggtcaaattaactttcatagtatataaaatttcagtctacatttatctaaatgcatgctagatctcttggacatatgtcgctttctagtagcaattcctttgatagtttatttatcttctcacgtctccttttggatttgctttattttatcagtagttatagccctcgtgggagaagatctccaagac

SEQ ID NO: 17110 - DNA, 395 bp, Glycine max
  Intron number 2 from transcript Glyma08g39830.4 (locus Gly ma08g39830) derived from phytozome v7.0 (chr-ID Gm08; pos 39413223 to 39413617 reverse strand)
gtgttcttaggaggtaatttcttcatcattctctctctcccaaaggaaaataactgttaaaatattggctagtgagttgcaagttgttgattttaattatgtgattagttgttcctaaaagcatgatcatttcacagccttttatttgaaatgaggaatccatgtacttctgttggttggcaatgatatattctgtaggtgccaaggtcccttcttttgctatttgacaaaatgaacattttcagttattggaatttacaatattgaattttgtttgtgctgatcattttcatcacttgtgttctatgtatggtttgttggttaccagtcttattttgatgtttggtactttggttataaatatagtgtctgggttgctcgaagaccaccgggat

SEQ ID NO: 17111 - DNA, 460 bp, Glycine max
  Intron number 4 from transcript Glyma10g35620.1 (locus Gly ma10g35620) derived from phytozome v7.0 (chr-ID Gm10; pos 43894056 to 43894515)
gctttgtactgcattacagggcaggagagttacctgtgagtatttaatatctactttcatatgatatgatgttttctgtcggttgttcatgttgttatctgattttctctctgtttattatatttccctttggcacattattttgtgcgtttgtttgtttgagtaagcttatccaaaaacacttctaagataagaaaacaagaagaaaaaaataaaatgagtttttccataaactaaaattagcttattcattagttaatttgtataagttttctcgtatgatttctctaaatgatgagaacattgttggttaagtatgtattaagctaaagatcaaaatgattgaactagaacagtttttagggccttcgggtcatgaacttacttttattatgtgtgccatttgcttcttgatccaattcttctgatctttatactcttgctttgctcttctagttat

SEQ ID NO: 17112 - DNA, 606 bp, Glycine max
  Intron number 2 from transcript Glyma12g34410.2 (locus Gly ma12g34410) derived from phytozome v7.0 (chr-ID Gm12; pos 37545286 to 37545891 reverse strand)
gtgtcagcatctggaataccagaatattcatacaagtatgtttgtcttaaagtgaattaacttcatgtactaccattcttctcgctctgagatgacccttctctatgttcttgcacatgtacatgtgctgagactgtatgaataataattagctgtaagcttttcttattatatgaaatatgaaatggttggctctaaattaagcttaaatgcttcatgatttttgttctttgaagagaaattcactggaataacggggtgatttggttggagcatttaactattggatgatgaaactaaggaaaggatgactttaaaccaccataactatatgataccatcatacttgttaaaataaatgtttgattgtctctaggaatttgactcatcatgtctcatccttccataccttatacctatgattgaaattttgcaattttagtgattactgcttgtttctaaaagtgaatccaagtttacaatagctcgaacacaacaacttcttgattgatcatgtcatttatctctttatttttttctttctgtttacttctttttgtctatgcttcagggatttgcaaaaggcaacatataattttacaacac

SEQ ID NO: 17113 - DNA, 954 bp, Glycine max
  Intron number 1 from transcript Glyma12g34410.2 (locus Gly ma12g34410) derived from phytozome v7.0 (chr-ID Gm12; pos 37546232 to 37547185 reverse strand)
ttaattcagctttttttcttctagtgtgtgaattggtgagtatatgcttcatggttgtttttgtttcctttttgtgtcaaccttctttgctgtctctctcagtgttttgatctgtcatcctatgtttcttcaaagtgtgatttgtgtctgaatgtggctgcttagctggatatatgatatatcttcttcattctttttctttctttcttttttgtattttttaaaaaaaatttggtgtacccttttttggtttctaagaaagaaaaaaaaatgccttgtgggatgaatgaaaagaagagaaaaaaaaagggttatttgcatttggttacaccatgtgactcacatgcttatataaatctgtgttgagatttcatttgtgtgttggacttttttgcatcattctgatcttgctctcattttcctgcttttcggtccttgtaagattggatgaatagaaaaatggataaagtttcgagatttatgcgtttcagattggtatagaggagaggattatgattgtgttgcgtttattttggatattctggtgcctttctattttgggtctttgatgcacttcttgttctgcttgatttgtggttttggtgaattttagttttggatagacatgatgggtggtaactggtgaagtggttgatggtaagttgtgcttgattgattatttcaatgtactgatgtcattgtccaatgtccagctttgatttttctacctgatattatttttgtcttctgagtgttttatacttccgaagactttttgataacgactttgaaaattaagaggaaaagccttcaattgaccggttcaagttcaatgttgtaaaccaagtaccacggaatgctctatattagtctattactagtggcatatatttgactatgttttgttgcattgtgatgatgatgatgacgatgatgatgcaccttgtggcaggt

SEQ ID NO: 17114 - DNA, 938 bp, Glycine max
  Intron number 1 from transcript Glyma12g06280.2 (locus Gly ma12g06280) derived from phytozome v7.0 (chr-ID Gm12; pos 4266879 to 4267816)
ctatcggagttgagttcgccaccagaactcttcaggtagatatgcttccctttactttgctgatttttttcaagattcctaagaaattcttcggtttcttgcggaagcagatgattattcatctgctcgtagtgaacgcatgtgcttgtgccgattgatttgtttgctttttggatatctggattttgttttgttatttgttccttctgctttaatttctaaatgtcatttgaatatataggtattcgagtgccgtcgtttttttcatttttttgtttatctttgttttaaaggattgattctttagcttatagttcagaattcagatcctcttctgaggaacatccggtatgaatagcaaggttttaagtggcagtcacagttttgtcgtgatcttgtccttgcaggaatttgacgtcaataaacttgatgttgccatcaaaattgtggtttgtaaaactttgttgaatagatgttttggaacaatgattttagctttaggtgttatgatcaagtggagaaggacttggatttatatcttaaaatataattaaaaaatgattgaaatcctagcctgatttggtgagatggattgcttcttagttaaaaattcagattatcagtaagtggtggatgttgagtaaatttttttgtcatgtttgaaggttttttgaattggatggatggttgtttaattatgagcaaggttttaaattgctgttgtggttgcggttttgttgtaatcttttgacattgctgaaaattgtggacaaatgtcagtcatgcggcgtgactgcaattcatgttgcaaaaatcacggttgtaggtcattttttaaaaccttgattatggatccttgtttgtattatagcattactaatggttgtttctttgattatacaggtagagggtaaaactgtgaaagcacagatctggga

SEQ ID NO: 17115 - DNA, 456 bp, Glycine max
  Intron number 3 from transcript Glyma07g05880.1 (locus Gly ma07g05880) derived from phytozome v7.0 (chr-ID Gm07; pos 4599019 to 4599474)
ctggtaagcagtttggttggccttgttattaatttcctctggttaaattattcatttggtccttataattgtctccattttatgtttagtcgctatacaagaagactgtaagtttgagttcttacacgcataaaaagttgagttttaacttttgacccctattgataataccaaagaaaactttttggctgtataaaaccgctacaaaaattttctggtgatgataaaccattacaaaaactacatagggactaaaactaatcattttctcatatagggactaaagcttaaaatgagtataactatagaaactacgtgaatagtttaaccatttcctccacagatgtcataataaacccttttaaggccgtgattttgaaccttgagaagttgtaaatgatactgaccatgtgtgtctgtgtcactgatggtgccagggagaaggaacttcacctg

SEQ ID NO: 17116 - DNA, 779 bp, Glycine max
  Intron number 1 from transcript Glyma08g46210.1 (locus Gly ma08g46210) derived from phytozome v7.0 (chr-ID Gm08; pos 45388334 to 45389112 reverse strand)
cccattcttattcctcccatcaacaccacaacgcggtaagcttatacttttacttaattttcaaccttttttatgttttctcccttctgtgatttttcccggagaacaaaaaaacttttattttttgcaatttcttgatttctggctttttgatttattgggttagtttaattcgaagaaaaatttggtgggatgggtttagatttggatcttattgtgtaggttcaaatgcgtcggatctgattctctcctgatccagtgagggtttgattcgtgcttattttcatggcaatgttactagaaatggaaaaagattgtgttttctattctgggaaagtacagagatttgattaagccaggttattaatctgttcttgtgctttggaactaggattgatttgttttaatattcctggcaaacaaacagggtatgatttgtcttgtaggctgggaaaatttcgatgaaaatgtcactgctagaaagggaaagtttgttattttgtttcctgagaaaggaacaatattgctgttgtgcttttgaaataggcttgatgcgagctaattttcttaggaaacaaacagggtttgttttgttttaatttgatttgtgcttgtggtgtggaaatttttcaaaggaaatgttactgctagaaagtggaaaagtttgttattttcttcaaactgttttcattttctgagaagaaaaaaagatttgatgatgttaggttactaatctgttgttgtggtggtgaactagggttctgacggtggtgttgcac

SEQ ID NO: 17117 - DNA, 519 bp, Glycine max
  Intron number 1 from transcript Glyma10g42230.1 (locus Gly ma10g42230) derived from phytozome v7.0 (chr-ID Gm10; pos 49234389 to 49234907)
gcgtttttcaacacccactacgttgagaaaagaaggtataataattaatattagcttcaattttcatatactaattagtaaaattaccctccaaaatataccttatccatcatatttaattagtcaaatggacaaattattaaagaatgctgagaaacatatgatacttagtctaaaatttatctgatgtttttaggtgttattctccggttagtattggagttttatctctgtaatttacataattctttaatgcaaattatgtatattgctagttacacaagtgaaacttcaattctaattgacgataaaatcaacacctaatgaattgtgtaagttttttttttcttgtgacccacattgtgacatggactaatttgattgaagagatgtatattctcgtgccttcaaatattgatcatatttaattttactctttattctatttggtatacgtagttcctttaaattcaatttttaatgtgagtatttgttggtatgttgctctacagacaaatc

SEQ ID NO: 17118 - DNA, 512 bp, Glycine max
  Intron number 1 from transcript Glyma13g22650.1 (locus Gly ma13g22650) derived from phytozome v7.0 (chr-ID Gm13; pos 26148282 to 26148793)
ttccaacaaaaccttcaccgtaaacgacactctcggtaagcaaaaacctttactagtattgtaacttttaaaccttctcatcggaaaaaatcttcactaaagaataattctttaattatattttaagattgagttaaatttatattttaagattttaagatgggtgttagaaaaaatgccagtcccacttaaaatcatataagtgaggggcaccctaataaaacatggctacatgttatcttttattgagaatgttttttatcggcattggttttgttagcacaaattatttcgagaatatacaagaagataaacaaacgagtttgtataaaaagttataaaaaaaaaaaatatagaagaaatcaaacttcgaacttttttctcttccgttatttcttaacccatctagtgttggttttactacatgtgtttgttgcctatagatttaaaagttttgaatctttttattttttgcagtgttcaacttcgccaccggccaacacaacgtggcc

SEQ ID NO: 17119 - DNA, 724 bp, Glycine max
  Intron number 1 from transcript Glyma09g35760.1 (locus Gly ma09g35760) derived from phytozome v7.0 (chr-ID Gm09; pos 41680187 to 41680910 reverse strand)
agcacgccacaactcacctccactttgcttgaggggtacgatttctcttttttctgaggcaatttttcttcattgcacttttcaactttgtgtcttttttttaaaaaaaaaaattctggggggcgtttatttatttattttcgcgtgtttttggtgtcgggaaattcattcattcatcccatgttgggctgtttgtctgaacttttttgttttccgaggtggcttaaatttttatgatggaaatctttgctgcagtttttctttggattttatttcagattcactttgcatgttcatactcactgcacctcccactgttataaatttattacttttttttaattctaaataatatgttttcttgagtcaaatgatcaaatggaactccatttttctgaccttacgtcttgcttttgacgattatgctttgtggtggacgtgaggaaaatacacagtttctctggagaaattgttttcagatcctgggggattggggtctttagatttttttatatataaaatgaatttttgtatggactatatggtatttgttagttaaaattaatggctatgtatgatcgagtcaatatctaggaccaggaaacgattgctattttactgtgcaatcggaattaaccaaatctagtgtttcttatatattcatttcattattatttttttttttgcagttatattctattctatataaggggaagctcaactt

SEQ ID NO: 17120 - DNA, 868 bp, Glycine max
  Intron number 1 from transcript Glyma10g39620.1 (locus Gly ma10g39620) derived from phytozome v7.0 (chr-ID Gm10; pos 47249863 to 47250730)
gttttaactaaccctcagatcaacgaaaaaaagaggtacccttttctcatttataggttttttgtttctcactctgcagtttgtcaaacttgtctctctttatttcactctaccctgttcccagttccttcccctttctccaaagattttcaaattcgtgtttaaagtttgtatctttgcgcagtctcggatctgttgcattcgagcttaaagctaagatttttattaggatgggtttgatttgtgggtgaaccaaactaagttgattgtcggttatttattactgtcgacggttttgtgagtgttctcttctcttcagaggaaacaacctcgtacgtacattcatggtatgttttgcaaagtttcctttataaactccctaacccttttcattttttcatcatgctttgaagtttttattagtttcattaacatgatatgattgaaatggaaaggaacatgcccctactttattattgcaatccactttacgtgtgtgtgtatatatatatatgtgtgtgtgtgtgtgtgtgtttgtgtgtgtgtctgtgtgtatatatatgtttatatgttatagcaattatttcttggaggggatttcttttacttctgctcctattaactaacctgttttgtaaaacatttttttttatccattcaaaactcaaatttgtgttaagggcttgtaaaatgttttattctgtctgacaagggctgataccatattgaggacatgcatctatgaatgacattgccttacaattgttttctctaacaagtctgcttgaactattttttactcttgttatgtatcctaaaatattccatttatatacttgcacttgcagttcttgttggtttcattgcc

SEQ ID NO: 17121 - DNA, 712 bp, Glycine max
  Intron number 3 from transcript Glyma09g38390.1 (locus Gly ma09g38390) derived from phytozome v7.0 (chr-ID Gm09; pos 43769423 to 43770134 reverse strand)
ggttgtttggattaccggtgctagccgtggaattggtataacaataaatctaccttttttaaaataaaataaaaaaattaatatcactcttctatttctattgggtcggttcattcattcatgtcgacattggacttacatcaaattcaatctcgaattctagttcacccggaaatcacgttgatcagtgaaggaacaaaattaattaacctctgattaatttaataaggacagttttatgcactcaattctccattgagcaggtgtattgatttaattaatctgccagagaatgctagcaagacactctcaaactcactcttttaaatttaaacacaccctctgttactagtttaaatttattgcaaatcacaaattctagtagtatcatttttcatttaatgagtctttctcttagttttgttgttttcaataatttttaaccgatagtagaaagtcttttagaaagtgtattaccagcactcctctaatcttcaatgccttacaatacctgttttaaagtattttagtattttattatttcagggttaaattcttctctacaatatagaagtattcctttaaacagccagaatcttttactttttgtaactaattttgcttgcataactgattccttcttcttcttttatgtttcttcaatgatgtatatgaaggggagattttggctaaacagcttgcaagtttaggg

SEQ ID NO: 17122 - DNA, 458 bp, Glycine max
  Intron number 2 from transcript Glyma10g32610.1 (locus Gly ma10g32610) derived from phytozome v7.0 (chr-ID Gm10; pos 41046138 to 41046595 reverse strand)
catttcttaatacagaaaatagttcccccttgttggtatggtttctccgcaaatataaaaaaaaggatgaatcttgactaacaaaacttgtgttagtagatcctgtctataaccttgtaatcttattttattttatgttgcttccttcgaatgcttgtttgggaacagcataagtaagttgctgattgcattgtttaaatttggattggaactccatactgagctaaagcaagcaatgtttctctcatttgtaccattacatgatacataatcattgtcagcatagtgaaacatctgtagacttttttaccgaaaaaaattgttaatgtggataattagatgatagttaggaagaattaactgaacaattgctcttttattaattgtctgttcttttgaatatggatggggtcactttcttagttttgcttttttacttgaaggtgaaactcgaagtg

SEQ ID NO: 17123 - DNA, 819 bp, Glycine max
  Intron number 1 from transcript Glyma05g31760.5 (locus Gly ma05g31760) derived from phytozome v7.0 (chr-ID Gm05; pos 36828679 to 36829497)
gtcaacaagcacaaacccaaacccgctaagctcaggtgcattatcaatctcattctcacttgttatgtgtaatggattttaaaatttgtgtttttttatttgattttagtttagtttgtgtaattgatttgatttggagtttgagatggtagaaaggtgacatatgattgagattaaagtagaaagaggatctataggaaactctgaaatttaatgattgaataatataatgtgccgatacaaagctcagggtaaatttacaacctaaccaattcactaacacgtaactaagtagaattttggatgtgttccagggctagcattactccgggaacagtgttgattcttcttgctggtagatttaagggaaagagggtagtctttttgaagcagcttccttctggattgcttcttgtaactggtgagttttgttgttaaacatgatacttcttattgctaagattttgcatgctaagcattttgttcatgtgccattgtaataatcaattgaattttttattttagtcttgatgagtaataatcaattattactcttgcatgtgaatgttgcttcttcattattgcttggggtgtatactcctgtttcgtctcacaatgttagtctcattatattagggatttcattttctgatttaagattgtataggaaacagtgaaaatagaaaacaaagattagatgctcaccaaaatacctaaatacctattgctcaccaattgtaatttgtgatgcactctgttctccacccatctctggtctgtcttatatctcacttgccatttcaggtcctttcaaggtta

SEQ ID NO: 17124 - DNA, 792 bp, Glycine max
  Intron number 1 from transcript Glyma12g08160.2 (locus Gly ma12g08160) derived from phytozome v7.0 (chr-ID Gm12; pos 5901642 to 5902433 reverse strand)
agactgcacagcaaacaactcagacacaagttcaggttggagtaatgatatttcgacactcattaatttatgcatgcatattcttattacatcatatcacttatcatcatagttatcagaatcttaccattcacaattcgaatcttactatttgatacaatttgactacctaccgatacgtatcctaagatgaatcttaaaaaactttgtatcttacagtacatgattaaatcatgttaatcttacgattcacaaggttcaaggattccctattttattttattttagttttctttcaccattctcaaaaaaaaatttgaaagccatacaagtctaaattattaaatgaagaggaattgaaagaacacttttgaacttgtcctattcgattactccactactttatttgttgcccactcatttaatgcatctattttatttgttgcttcatttcctttctactaaaatataggcttcacaaactcagatttaagagaacttatgcatcttgtgctcctagatttgagttttttagttattgatcatgaatatgtgctttaatatgtttttgttagttgtatatgctgttattattgatcatgaatcttacacttgacgatttaaaaaatgaatcttctgattcatgatttgaattccattctatcatgcttattatagctatatttttttctcttttatttctatctggagcttgtaacaggttattgggggtgttcaactgattatttttgttcaggttttactcgcaccagtggagaacgtgggctgcat

SEQ ID NO: 17125 - DNA, 734 bp, Glycine max
  Intron number 1 from transcript Glyma09g38850.1 (locus Gly ma09g38850) derived from phytozome v7.0 (chr-ID Gm09; pos 44106443 to 44107176 reverse strand)
tcagaaattcccagccaaattggttgctggtttaggtacttttgtctaaaccctcttaaagaagaatcaaaacatacttgtatcgaaattttcgtttttgatttttaacatagcatagcttttgtttgtaaatgacacccctaatgagatatggtttggttgtttttgtgtatcaccatagcagagtgaagacaataaagtagaataaggtgttgtttgtttccagttttcaaaaatagctttctgtttttttaaatttgtgttcctgagcatatttgaatgtgtttgttctctgagcacatttctgttttctaaaagtttttctatgagcacttgaacatagtacttgaagaaaacagaagagaatgagaaaatgtttttcaactgtttctgttttttagtttttaaaataattgttttttaaatgacttttaaaatttaatatatttctgtatgagaagttgaaagctaagtagtgtgaaaatgttttagaaaacagtttttaaattcaaatagtgatgaagaaatcaagcagacccaaaatgatcagcaaggatatcatggcaagacttaattttcactaaatagatggattaccttgaacttgcaacttgttatttactaatttctctaaaatacaaggatgtttgttgcaagcctatgcttccacctgattttttttttttttttaatttgcaggagttggaattggtgcaggctttctgtgcttgttt

SEQ ID NO: 17126 - DNA, 804 bp, Glycine max
  Intron number 1 from transcript Glyma10g35680.1 (locus Gly ma10g35680) derived from phytozome v7.0 (chr-ID Gm10; pos 43949000 to 43949803 reverse strand)
ggcaatttggatcgaatttttcatctttaatttgggtgatttgccccctacttttttcccctctttctatttttcgttttttttaggtacggttgtcggaaagtttcgattttttcatcttttttgaataaataggcgaatttatgagatgggtttgggtttttatgcttaatatttcgtttttatgcaaatttttaaaataggttgtgctaaggaggttgaatccgagaatttcattgcgttttgctttgcgttgacttttgtggatgcagaagataactgataaatctgatgataggatcactggggttgtgaatcaatgcatgttgggaagtgggaatgctctacttgcttaaatatgtagtcattaatttgtatttgatatttagtgtagtcttttttgtttgactcaatgacaaagggtgggggagttggatccaaggttcaagtcttgacaagtttagagttattttctgtttctgaactgcaaaaatcatgaaaaaaaattatttgatgttgatccatgatatcatatagattcagtgttgtattaggttttgaatcctgatatatgaactttttgggtttgtatgcatatttttggtttgatctattagataaatttaagaaatttagtctgattttaaaggtttttgaccctttagacttaaggttttgtttaattttgtttatcagaattctgagaataatcctccacagatcgtgtctctgacttgtaattccatgaagtattcttatgtatgtttgccttccctccttatgcaggtcttttgaagcagaaga

SEQ ID NO: 17127 - DNA, 292 bp, Glycine max
  Intron number 4 from transcript Glyma12g09430.3 (locus Gly ma12g09430) derived from phytozome v7.0 (chr-ID Gm12; pos 7237631 to 7237922 reverse strand)
agattccagcaaacctcaagagtactactctgtctctctctctctcacttctccatctttgaccaatccatatccatagatgcttaaaactagcgcaacttcaataatatcccaatcttttcaatttttttttttaatttgataagtatatggttaaattcaaatcttcattttcaaaagtctaatattctttcacaattggctttattaagtactaacaaagaaatgaaatatttttggtcgattcacaaacatagggaggttcaaagtcaggaggggaaagcactgattc

SEQ ID NO: 17128 - DNA, 987 bp, Glycine max
  Intron number 1 from transcript Glyma11g31870.1 (locus Gly ma11g31870) derived from phytozome v7.0 (chr-ID Gm11; pos 33216600 to 33217586 reverse strand)
ttgcgttgttgcctctagtggcattgctttcagcggtaatctctctctctctctcttcttttcacatcatcatcgaaattaaatctatctttgaaggctttgcatcatgcaaatggtttgattaattttattttgtttgaattttaaactgatgaatgataaagtgaatagattgctcgtttgtacacactttgttttctttgaatgaaattcaagctgtgatcagtactctctagttaggaaatcttgaaaatgggaccaattaataaatgaaaaatggaactcacattcatattcatgaaaccaacctagatttcaagagagattgtatcggagcttctaaaattggaaaaacttagtacaagtatttttggcgttgtgttttaattaaaaatagatttatttgactaattaatgcgaaaccttgatgttggccagtattttgacgtgcgtgttaaaatttatttatttaaatttgaataaagttcacgtttggtttattatagtaagttttctttatgaaaacattggatgaaattaactatgatggactagtcttactcatgtatatgaggactattgtctaataaaacatgacctgcttttactctagtgctctttcaatattaattttgaaatggcaatcacaaatgtgacctctcttcattgagatgaatggaattttttatactttaattctgaattggagaaatattttatgtatacatcattatatttattgtccatgtgaacatatccaacattttaaagttttatatatatgatgaaattaggggtttaggttttcttgctaaataaccaaccgaagtaatggtgtcaataaaacgatatgttttgtaattaactttaatatggtcaatcctctaacaactaattataattctaacggaatgtatcttctttgttgttaatgcttgtttgattggatttgcttgagcaggaggttttggtagctacttgtttgga

SEQ ID NO: 17129 - DNA, 552 bp, Glycine max
  Intron number 2 from transcript Glyma06g42050.1 (locus Gly ma06g42050) derived from phytozome v7.0 (chr-ID Gm06; pos 45255105 to 45255656 reverse strand)
gaggttgaggaggttaacgagcagcttgatcaaatgtacaattttgaatatctctattctttcgaatttgataaatgttgttagtttaatctttttatgtaaaaagaaaattgatttttgtgattccgtggttcagtgtgtattattatgaattaaggtgaatgtttggggtggataggtttagggaaggagaaattattatacggtctaccatagtcccaaacaatcttcatgtgacacttgagttttattaatcctttcttgtaaattgagaaactagccggaaccatggacacgtggccgtggtggtcttggaccatgtcgtagtttctcgtagggaagagagaatagaaatggaaaaatgaagaagattgaatgtaaaagatgtgatcaaaccagaagaaaaatggggtcaaaaaggagatgaaagaggaattgggtttaggaatataattaccctattcatatttagattacttatatttacagatgtgaatttttggtgtttgatcggttttttcaggggttacaatattggaatccgattgattg

SEQ ID NO: 17130 - DNA, 902 bp, Glycine max
  Intron number 1 from transcript Glyma09g40520.4 (locus Gly ma09g40520) derived from phytozome v7.0 (chr-ID Gm09; pos 45440896 to 45441797)
ttggtatgtaaaaaaatagtttttattttttatttttttttccttttgtgtacttaatttttccttgagtttcagctttctgtcttttaaaagtttaggtaaatgccagatacgaagcgggtttatgcaaaagggtggagttttttttttattatttgtttttttattttgctcttttagaaaaatctttggtatttctggttgcttttgctctgttcagagttcggggcttagaaatatttgaagtgaatgagtggtttgttaaaaaaaaaaaatttatgatactgagtttgaatttgctatttttaaacatgttttcaaaattttcttaccaaagtatgttttgaagttgtaataatatagcaaaatattttcctatttttgtatttattttaatgccctcttttttcgtccttttggttacgaatcaaatttctagtttcagtacttgaaagttgaaaacttgataactgagcatgtaccgatttttcagagatggaaacaaaaggaaaaaaaatgaactttgttagaaaataactgcattttttcctcatatgattttctattcaaaccctagagtgatgtgatttttgcattttagtgcaaagttaaaagttttaaatggatctgctaattcagctaaacaacttaaaaactccaaagtttgtgtctttgttttctttcttcctagtttgtgggaatcctttgatgggttttcactttggtttccttgcatgtttaagaatggttcaaatccttggttttgctagaatgctcaaatttttgcaatggcatgtgctttaatgagccattttccttactaagtatgattgtacgactcatttctgacttgcagattttggttagattgtgtagacttaggagtgaatagtttgatatat

SEQ ID NO: 17131 - DNA, 873 bp, Glycine max
  Intron number 1 from transcript Glyma06g18850.1 (locus Gly ma06g18850) derived from phytozome v7.0 (chr-ID Gm06; pos 15122917 to 15123789)
tgttctcggcattcttgaacttctcaaagttcatagtgtattttttttcttccttttctttttcctttaccttttctgtttacaccgcaaaccaaccacgatgtgggtgttttatttcccgttggaagatcccaaaacggccgttgaatcaaaagctacaaattcttgcttctcataaacaagtgcgtgggaatctgtgcccgttcaacctaacgtgtatgatatgattggtttggatttaattttaccctgaactcgtaccaatgcaatccttgaatacccctagctcccaaagaaacaccattggtacattaagagattttaggtgcgtgtttggtttcatgttagattgtctaggatcatgttgaaacacttaacttatcatgattttaggtgaattttctcatgtttggttctacattgaagaattgattcttggtcaagaatttgattttgcaatgaaacaacttttagtagtttctgtgttggataattttttttagtgagttttagtactcataataaatattcaaaaacaaatcatgtcacttcaaaatcaattttgccagcacacacataaatgcacgttaaaatcaaatcacttttagtaaatgtagggactaaaactgaatttgcagatattttgagggactataaacatgttttatctttttttttcttctgtagttcttctgcatgtgaaaatcaaaattatggttttacttattcataaaactgcttctctgatacttgttatataagtgttattttgttaattttattaaaactgaatttcttatgttccttttctgattatattgttcatgctatgtgttcttttatgatggtcagccgtgctgtatattgatattg

SEQ ID NO: 17132 - DNA, 1035 bp, Glycine max
  Intron number 2 from transcript Glyma08g01250.1 (locus Gly ma08g01250) derived from phytozome v7.0 (chr-ID Gm08; pos 737182 to 738216 reverse strand)
cagccagcgtaggtgtcaaattctctgagccacaggtaccactattctatgccctgatattttgaggggtgtcacctcatcattttgttgccttattatacatgcaattacaactataagctcttttcattagtggagatttttttcttctcctagagcttccaaaccaagctcatcttcttgggtcccatacatgcgctgttttgagcgtgttttttacttttgattttgtatgattcttgctctgaattttcctatgtcacatcactccataaaatgaagttagcacttgattcggaagtttttcactttatccccgctaggatgcagatgcactgaagtaaagaatttggctggggaattttgagagtggagtttaattggaaatatcatgcattggaaataatgctttgttttttaaatgatgggaatgttgtagaggattttctttttttgaagttaaataagggggaatacgtccacttttatgtttcaaaattccatctaatcccccaatggattctttggttgttatgcctgtatatatgtatttttaaaattgtaatttatccctagtttaaatggaaaatatagtttgcatgtcacatagggagtgagaaattatcatatggtccttgaaccaccatagttccaagtaatttcacatgacacataattgagttttattaactctttttcttaaactgaaaaacttggctacatatcacataaagattgattgggatcatggtcacgagatggtgtctgggaccatgtaataatttctccatggggagggtggcgatcttacattgtgtactgttgcaagcagaatgttaaatgataacaatttttattccttggtttcatggagatatttacatttagtacatggtgaaattatgtgaagtattattgccttttcaagtatcagtaagaatagaagggaggaggagtctttcatatttaaaaatgtaagcataaaatgtactgaaaggctgattgtttctcagtatgttctttatgacaggtcaa

SEQ ID NO: 17133 - DNA, 489 bp, Glycine max
  Intron number 1 from transcript Glyma12g06540.1 (locus Gly ma12g06540) derived from phytozome v7.0 (chr-ID Gm12; pos 4458083 to 4458571)
gcatcttcctttctcgcttttgctctaagctaacagtaatttctcattctctcttccatttatgattttgcttcgcgtttactttaacattaccaaacactgccagatccccacttttgttttctccataaaaattaaaactttttcgttttcaaccattgccctttgtttctgaaacttttttatttgcaacggtttagttttctcccccttctctaccatgttaattttgatttgactgttcagttattatcactttttaatctgcattccctggtatctgcatttttatttttttcggacattgacttgacttgaatgttaaattttgattttttcttcctttggggtagcagaacacatctttcagacaacaattttggttctttggctgtttcatttcatgtttctgtgttggggtttttttgttttctctcactgtgttttgacttttgtaactttaattaggtctaagaaattcaggtcaaa

SEQ ID NO: 17134 - DNA, 406 bp, Glycine max
  Intron number 1 from transcript Glyma07g16830.1 (locus Gly ma07g16830) derived from phytozome v7.0 (chr-ID Gm07; pos 16494414 to 16494819)
ataaggtaactcaacatttcaaaaatcttcttagttttcatgatttgtgctgatttgtcagcaaaacatcacgatgaaatctatatatgtgaaatctttctggtgtggaatatatatgtgaaatctttgaatatgttagagaactcaaaagtcaacagccaaccatgattttttttaatgtatcaactttttgtaaaacgatattagtgatttgaaactttatggaatcatatactatgactttgggagaaattttattttattttactatttttatttggggtggggggattctgtcaagtatttgtttctatataactcgatctaaattctgtttgtcctaatcactttaagaaataattactaataaataatgtgatttgcgaaatcagattgtgggtgcagt

SEQ ID NO: 17135 - DNA, 617 bp, Glycine max
  Intron number 1 from transcript Glyma08g29130.2 (locus Gly ma08g29130) derived from phytozome v7.0 (chr-ID Gm08; pos 23511914 to 23512530 reverse strand)
gtcctcacaccaacgaactccttctaggaaaggttcccatttttgtctaccctttttgatcttttttctttttattctttctgttgctttatatgataatcctaggcctgtgctttgaattgagcatgcatatgaccgaggttttttaaatagcggtcgcggtcgtgttgcggctttatattgcggttttttttttttatattgcggcaaatcgccccaattgcggtcgcacacagttaaaatatcttgatgttgtggcccacaatgaagaacggacacaggacacgtggacacttgtaatgttcaaaatataaaatgtaatacgggtgtcgtgttagtgtcggacactgacacggatgcgtgtcggacacactagacacactagacacggtaaggggctggagtgtccgtgcttcataggtggcccaaaccattgtcgtggaccaattttttaaatgtaaaagtgtttgggtttcaatttagttataatttgctttggcctgtgctttaatttgccctttgatcatacatacatatgatataatataatataatatgatatgattaagtgttcttgtatggaattgtggaacaggctctgaagggaggggtgagag

SEQ ID NO: 17136 - DNA, 918 bp, Glycine max
  Intron number 3 from transcript Glyma12g13810.1 (locus Gly ma12g13810) derived from phytozome v7.0 (chr-ID Gm12; pos 12455599 to 12456516 reverse strand)
tgactgtggaactatcttttcaaggtaactaaattaacctagtaatctgaatttgctcattccatttgtcgttcgcacatgaatatatatttattttttttactaaatgattcgaaattttttgatgaatatgtcacaattaattactcttttttcttgtaaagctgagagatacacggttaaaaaaaaacaactctctctattttcaagtcagagttcaaacaaaggacttaaagaagcgagtgccacacaagtttatgataagcctttttgggaaccttagccctaaacgaaaaaagctcttagtttggaattatcctatactagttacctattacttggcaatatatagtttgaggttataacccctatgggctagatattagtatcgtacaagtcataatgtcttagtcgtgatatcatgttactcatgtttggacttttgttgagctaatgttagaggcatacgtttgtcttcactttagtacgaataataatgtattaaaatccaaaagtaacaacttgttaccaagaagcaaataaactatttgactgattacgaagagggaaacaaacatatttgaagtaagtcttattatgtctacatgaatttcaatgcaccaaaatggagaagcaacattttattactataaattataaattatacattacatgacctttgagtgcttgtttaatttttttcgacaaataatctagcaactaaataatttactttgttatttactacgagtgattgttaaacagataaacaaacacacataatttagacttcttaaatgtatatatgtttctttagattattgttaagattattattattattttgctaatggtttatcaatacttatgggtgatcgagcaggagagatagcttcatcacacacagggccttctgtg

SEQ ID NO: 17137 - DNA, 861 bp, Glycine max
  Intron number 1 from transcript Glyma08g46820.1 (locus Gly ma08g46820) derived from phytozome v7.0 (chr-ID Gm08; pos 45813951 to 45814811)
cttacacggagttgatagattgtagatccaacaaatctagagacaacccaagaaaatgttgtaacaaataaatatattcacactctcacacaaaaagtgtgactgaaattatcctaaattcatgtaaaaatgaaattgattttagtttaattcagcaaaaatccccgtcatccatttatgttatatgttattgcccctggatctgtaaggaaacaagttaatatcatgaataagatcatgtgaccctcatgtgacaagggcttagtgcccttgtaggcaagtcacgaacttttatgagaggaccatagttcaaattaaagtcttacgaaaggaaattattggaagtgtccttaatttagttgcaacatacaacagtgctcaatgatctagtatatatcactgcaatctctgagataaccttcttaaatgtggcatggcaccaatatggttggatacttgtccttgtctaattaagggtcatcatgggaactataccgctagagaaaatcctctaagtcctatgtgccttgaatcctactctataagcattgccaaagcagcaatctcgtgggatggatcagacatttgaatttgttattgaaggcattgtgggtttgcaatatctcattttcaatcatctaattatccaaacccaccaacatctttatcactatatatattgcctcgtatttctgttttccccatccaaaattccaaacacataacaagaaactctctaggctgatcattcaagagctttagaaacaagggcaatggaacttgcttctttctgctcattaagggccatatttcttttctcatgtgctctgtggataatgccagagttaacactagcaaagc

SEQ ID NO: 17138 - DNA, 473 bp, Glycine max
  Intron number 2 from transcript Glyma13g13030.2 (locus Gly ma13g13030) derived from phytozome v7.0 (chr-ID Gm13; pos 16698154 to 16698626)
tggcgatttctctcacggggaaccccaccctgaaggtcactgcctttttctattattattattattattatttggttcaatggctgtttgatttggggtaatgaaatgatgtttctcaaattccaactccatgcttcataattatttcatgcggtatatatttatggggaagagatgtttggaagtcccacctgcctcaattttcggggtagtttatatatatatatatatatacacttcacttaacgtcaattgattttgagatgaaatctaacaagaggtagaattgtttctgatcatttaactcactctgatccttgaacttccttgatgtttagttaagataggcaactatttatttaggtagttggtctatggctatgcttatgtgagctatttttatgacttgtgacttcaaataatacggtaagattggatggagactaatatagtaatatatgctatttgcagcc

SEQ ID NO: 17139 - DNA, 845 bp, Glycine max
  Intron number 3 from transcript Glyma13g13030.2 (locus Gly ma13g13030) derived from phytozome v7.0 (chr-ID Gm13; pos 16698696 to 16699540)
atagctgaaccaaagaggtacctaatttgactttcatttcttgaactagttagtgaattatttgggtattgccattatcataattggtttacctgttgtttctcagtcctcattgttgcctgtgtttcatacatcattcatcttatagaacgaatttccttcatttgtttgacaaaaagaaaatgcagtggatgagggtgcagatgtacaggtgttggggagagactaagaaattaaaaccagagctaattgaaataagttgagattgtatagaagcgctatctatgtataatccttggtcaatgatggcttaatagtttacctaaaccaaatcagtggtggcaagaataggagaatatagaagataattacttgaatatcaccttcctaaatcaggtagggtatatcatttagtttacatctgaagaaaacttgaatttattcttaattaattgtaagctttcgtctcctattcttgcttatgtctatctttttttactggtgaaatcaggtgtttccgttgtaattttgaatgatacttctattcaatcatttaccctgtgatgagaagagtatataaaacattccagaccatgaacatactttttgatgtttatattgtttttagttccctactctggaatctatgctccaactttttattctcctgattatgcaagtgcaagagataaaaaccgttcctctgtctgcatctaagagccttaggttttaagttgatttattctttgacagcaagtattaaatctcttcattctaacttctttatcaactttctctttgctatcatagccgtaggaaaggacttgcgaaggagtctgttctga

SEQ ID NO: 17140 - DNA, 607 bp, Glycine max
  Intron number 2 from transcript Glyma06g05850.1 (locus Gly ma06g05850) derived from phytozome v7.0 (chr-ID Gm06; pos 4193316 to 4193922 reverse strand)
ttaagaggtatgaatcataatgcaccatgtcatggatttcttctaacggttaattagttcctataattataattactttacttagctgttatgttagttagttcctttaattagttttcacaagattttattatctttacgtagattattattcgcaatttaatatgtatcgtattgacttgctttgagatggtttaaccatacatattctttgaagacaacttattatttgatttgagtttaatttgtatgtacctaaagtataaagagtttttatactatcaaccaattgaaaattatttttaagatacgttcatgtattataaaagtaaacaaaattcccatagatgacaaaattatgttaggattggttaactgtgtaaattaaacctgtttgtgcgtgtattatttgttcatttatttttttatacaagcaggaatttggggagaggggatatttgatttatttcttggttttggattttctagtttataatttgtggttaaatcaatatagtgaatctgaagagtgttgattctaaatctaataaatttgttctgaaatgctctagaaaaaagcttgatcctctggaggtttatataccag

SEQ ID NO: 17141 - DNA, 924 bp, Glycine max
  Intron number 2 from transcript Glyma13g28290.1 (locus Gly ma13g28290) derived from phytozome v7.0 (chr-ID Gm13; pos 31341296 to 31342219)
ttgagttcctatccagccaaactgttgttgatgtatggcatacaatctcttgatgatgtcttcattggttgaattgaattttacttactgtattgcttgtaagacctgtgatctgctccttataatttttttttaaagaaatttggagattgtatgttttctgtgatggttttgatttgcaagttgcaattaaaaacttagttgataatatggatgtgtatgttcttttttatgtttgtttaagatttttctgttctggtttttcactttttatgctttcctatctgtgatgcttgtttcgtggttcttaactcgttcccatattctgttttacatgtcaaattgaagtttgctattattatctaactactggttagctgcatgtagttatcattttctcaatattaatctgtatgtcttgcttcagctgttggattttatgacaaaaaatttgttttaatggtatttaatacctaattatccttatgacagaaggatatattagttagcgtaatcttataacctcaaagtttcataataatgtaagcttgatctgtaaattttttacaagattaaatactaattgttagtcattcttttaggtcctaaatgtttacacaatttgtgtaggttgctctgtgagagaaacttcaattttctgcagcttgctgctgatcatctctgatttgttgcattagtgtacaggaatattcgatgttaactgccctgtttaatatacattcacaaattattgtgaattatttgtgtaaaaatttccttccactagttaacatttctaatatttaactctagggttgctactaaatctgatgagtagaggcagaactatgattcaatgtcttatgttaatgaattctgtgatttcttttgtggtgtaggcagcaagttattcagatcctcgtg

SEQ ID NO: 17142 - DNA, 392 bp, Glycine max
  Intron number 2 from transcript Glyma09g01720.1 (locus Gly ma09g01720) derived from phytozome v7.0 (chr-ID Gm09; pos 1113087 to 1113478)
tcactctgacagaaccattgggagttctgaatttggtgagttccataatatttagtatgcccctcattctttgatttcttcagtctttcctagtttgttagtcattttagcaaggaaggcactcaagttcagtggttgtgaaatcctaaatttcataatgagagatgaaattaaccaattataaaaaaatgaggaccaaaaattgttgtttctaaagtatgaggactaaaaatcaattttgaccaaaaattgaggcacacataaaacatatttgatccttttttaatcttgaatacaaggaactatttgttagctcttatgttgtataactgagttgctttttttttttttctatgtataggaagtgtttgacaaagatcttttgaaggctg

SEQ ID NO: 17143 - DNA, 619 bp, Glycine max
  Intron number 1 from transcript Glyma12g13960.1 (locus Gly ma12g13960) derived from phytozome v7.0 (chr-ID Gm12; pos 12617068 to 12617686)
acaggtaatataccaattcatatattataaattgcatttaacaaagttaaatttcatctgtattttctaattttacatcttctaattcttcatttctatcaaatctcaacttattttttattctagacgaacaaaaacaaatttatcacaaaattatggaagctgtcaacaacaataaaggtggcatgttttttctatatggatatggaggtacaggaaaaacatacatatggagaacattagcaagttcactgagggcaaaaaatcaaattatgattatggttgcttctagcggcatagcttctttgttattgccaggaggcaggactactcattccaaatttaagatacctgtgccaatttttgaagactcaacatgcaatatacttcaaggaagtcagctagcagaattgttaaatcaaacaaatctgataatttgggatgaagcacccatggcacacacattttgctttgaagcacttgatcaaactttaagagacattattaaagaaaaaaaaatcccaataaaatttttggaggcaaagttattgtatttggtggagatttccaacaaattctgtcagtcattccaagaggaagtcgttcagacattataaat

SEQ ID NO: 17144 - DNA, 412 bp, Glycine max
  Intron number 3 from transcript Glyma06g02440.1 (locus Gly ma06g02440) derived from phytozome v7.0 (chr-ID Gm06; pos 1624784 to 1625195)
aaagtcactggaaagcggaagaaggtacttatttttctcaattttgaattttcacactctccttctgtctgtttctggatacgtatgaagaattagtaatgctaattcctgatttctattgttttttggtgcaaagttgaaaaatgctttcatatttgtgatattacttttaagaatagaagtctagaattaatggctttattgttgtgaaatggatccacttgttaatggtattatttcattatttctgcaagtggattgagttgcaaattttatcttgttatattatatagggtgttttcaagaaaatgcagagcttgttgttgttaatgttactgtttaatgaattttgtgcgttgtacagtgctttactttatgaaaagtagcttcttcttcttctccttttaatagg

SEQ ID NO: 17145 - DNA, 893 bp, Glycine max
  Intron number 2 from transcript Glyma08g23650.1 (locus Gly ma08g23650) derived from phytozome v7.0 (chr-ID Gm08; pos 18024920 to 18025812)
ggcaatttgtgaaggtctccggggtatgttttgcttgtcttgccaaatttattggctattcttggaaagttcatctccacttcttgggcttatgattatattctttacatcaaatcatgctgtacttatttcaaatgtttttcttattcacgtgtctttgcatcagtctgattttgctttttattataaattataaattgttcttctcccgctttagaagtatttggggcttgtcttttaatttacaggagcttttcaagaatgcgattttttttttcatgaaggaaagattgaaaatcttaaagcatacttgatgtgtgaaccctactattttttgtcaattataaaaacttacatacgtctagtaaataaccttacctgcattaggtttacagctcggatttgtatcagttacttccacaaacatgatttctctttggtttaaatgaatgagtctgtttaatattgaaatttcattgttttaatttttttcaaagacatgacatcatttgtaagcaaagcaaaataagaaaataagagtaaaaattgatcgtggatgtaaagcctttaagtcattctttatagctgtttgaaataatgctattttcaatgaatgggctttggatgatacttagatgagagcattttgtttcatcttccttattttcatgctataaacatatgttgtatcagtaacactactatacttgtgccttaatagcagtgttttcccggagaaataatttcgccataaaaatccaattatgcaaatgagaaatttgcacttgattgatttttcattctatgcatcctttttataactacaatacaagcttaaatgactgtaatcaaatatgttttgctgtggtatatgaaggttgttacctgcggta

SEQ ID NO: 17146 - DNA, 433 bp, Glycine max
  Intron number 1 from transcript Glyma09g10830.2 (locus Gly ma09g10830) derived from phytozome v7.0 (chr-ID Gm09; pos 10865877 to 10866309 reverse strand)
ttggagccattgatagagcttgtccgtgtgctcgggtaatttttctcaataacccacattttaagtttccttattcattttttttgttgaattgtggaattctgaatcttgatgtgttattcagttttatagtgttttaatagattaaaatcttggacaaagaatgtgtctttatatgattttttttctctccctttgtattgtttgttacaatttatttcacttataagttgagtgtgtcttccattggtatttgtaatggaagtctcttgtattgattggagccacgaccagtggaaatgtagagatatggttttaatgaattttttatttttattttttgctgctgtgtgactagaaatttagtttgatgttttgattgaggcttgagttttcgttttgtctgttgcagggcacaccgaagtacagtggc

SEQ ID NO: 17147 - DNA, 355 bp, Glycine max
  Intron number 2 from transcript Glyma13g40260.1 (locus Gly ma13g40260) derived from phytozome v7.0 (chr-ID Gm13; pos 40786517 to 40786871 reverse strand)
cacaagaaggtgaacatttgagtgctctgtttcttcactttttttttttttttatcatattaagaacaagtctttaactaatacatgctaaaacaaaaataatttaaaaccctgtgcctttacattactaaaccaaacaaatcactaaaaaattgtctttctctgaaaagggtgcatataaaaaccaatgctatttaaatatatttttcaaaagaagattttttaatctgcttcagtttgcttgtgtctttttgttctatgttatctttgactagcaattatagaatcaaggttttgattgcttttcaaaatctaaaactatcattaacaggttaaaggtctcacaaaagaggac

SEQ ID NO: 17148 - DNA, 985 bp, Glycine max
  Intron number 1 from transcript Glyma11g12790.1 (locus Gly ma11g12790) derived from phytozome v7.0 (chr-ID Gm11; pos 9146247 to 9147231)
actggcactcagggtggaggccaagaaaccacagcgtaagaaggccttttattttctgccttcattgatgcatgcataaataagagccttgctcttcattttattttctttaatggaacttcagaattttatctatgtatataaatcaattgatagaatttaattagaaagaaatgagggtacaaagatcggttttttacgctatcgaattgactttaacaataattactttaaaagtcatgtttaaagtgatttgtaacagttaaactctgtttcattgttagagttttatctgctttgaacttataaatagtgtggtagaaaacgggttctaaagtgcctatagcagaagtttttctacttgaatttagtaaaacttgtttcaagatgcgggtgttctgttagaaacaattgtagtacatcaaaaccgggagagttagttgtgtataataccatatgcgttgttgattagtgccaatcagtggaacttaaaaaaattgtagttatctcagtgaacaatttcagcgtatggattgtttgatctgggagggggagggtggattggtggtcacgttttagatagataaacaaattgaggggtggggtcagggggtgaggagtatggttgaaaattaaagacactttgaattagaagattttgccgatgtggttgggtctagttaaaggagttagtccctcacatcttgatgagccaaggttcgaattttcgttgtccacatttaatgtctaatcctagttcgaataagattgtctgagaaaaagaatacacgtggaaaaccaacaaaaagagatactagtttggtggagaatctccacatgctaatgaagtagtattgttgttattttgattgtaacataatcctatagtggtgagaatcatgattgggagacagaccagcaatgagtaacatgactttttatgactattattgtagttggacagcaatcacacagttagtccacc

SEQ ID NO: 17149 - DNA, 642 bp, Glycine max
  Intron number 1 from transcript Glyma08g47480.2 (locus Gly ma08g47480) derived from phytozome v7.0 (chr-ID Gm08; pos 46324616 to 46325257)
gtcgcagttcgcagaggatcgacttcgcggtgctggtgatctctttgttttgcttattagtagatcgagttgataaatctggaaggattgttgtttatttttactgattgttgtttccgttgtcgtattcgttgttgttgttccgcggttcctaattttggtttttttgctctgttaaaagctttatgtaggagtgggtgtcataccagactctaggaatgttaagtaaaaggtggggttcgtgtgagtcttttgtttttgtaacaatggtgacaaggctttttgtgtctctggttgaaggattttagatactgtctgtaattgttcttgggaggctttgtatcaggggtcttattggcatatgtatggtgtactctctgcttggtaattgaaacacaggttgtgtgccaaattttgaataatatttgcctttttattttttaaaaaaagctttatgtagaaggtgaattgaatttctgaaatctggtgtagggtatgaatttttgaatggtttttgacattttgtggtgaactgaatcttgtccctaaattgtttaattttctgtgaagattatataataatgaattgtgtattcgttttctgcagttatagagaatagtgaaacaacccaagaagaggtg

SEQ ID NO: 17150 - DNA, 923 bp, Glycine max
  Intron number 1 from transcript Glyma08g09900.1 (locus Gly ma08g09900) derived from phytozome v7.0 (chr-ID Gm08; pos 7083216 to 7084138)
aaggtgcttataaccaatctcttgtcgcttttcaggtaattaacaatctaacatcaacttaattttcatttctccttcttctcacttctcctaccattccaatatgagtccatgttaaaacatttatatactccatttttaatttgaatacggttacaagacaattgtatatatttattttttagtgtaaacaaaccaatataaattattacatatttaacaataaaagatttttctacataatttttcaaatgattttgtaattgctaatttgttttatttttaattatcaatgtcaatacatgattatatatatatatatatatatatatatatatacacaaacagacacactgcgtgcatatatatatatatatatatatatatatatatatatatatatatatatatatacacaaacagacacactgcgtgcatgatctagaattctagatctatctgttttattctctttcctcaaatgtttttcctgttggagctggagaaacaggaggagataatctaatttgtgcagatagtcaaggactttcacttcataaagctgcaaacaccaccgacacactgtccttattctatgaataaaaattattattattaatacaaatatttaacagttttaaaaaaaaattattaaattttaaactcaattagacaattaatttatatattattaagagacagtatggaaaatagaaatctggctattgttcttgaattccactattctgagaaaagatataaaatattagatgctgctgctgatattttaagcttgggggaaaaaattgtatattttgattgccttcaaagaacacaaaagtcatttgattaggttttgtttcgtgaattcgaagaaatattttatatacagctcaattacatttttaacattttgcatgtag

SEQ ID NO: 17151 - DNA, 987 bp, Glycine max
  Intron number 2 from transcript Glyma11g30030.2 (locus Gly ma11g30030) derived from phytozome v7.0 (chr-ID Gm11; pos 30925912 to 30926898)
aagtattcaattcaataaccaaattcgaatttttcattcaaatttgatccctttcatttgattaacttatgtctgattacgtttgagttaagttaatttggtcaatagcgtattcaatttaaaggtctaatatgcacaatttcgtatcttgcataaaaaattgttgcctgagttccgtgctagtttgtgaaaacagagacgtttgatattttttttaaaggacggagttaaaatttagtcgattttgctttgttgaattaatgttagttttttaattggtgaaataaaataaaatgccgtgtgctacatccacgtggtgtcctggctggagaggaggtgttcagttcaaatattcaataacgaacttgaaattttcattgaaatggaattcgtttcatttggttgtgcatgattgcgagtttagggtttaggtcagtaacgtgttgaatttagagctctactgtgtgctacatggaaaaatgttaccagagttctgagccagtttgtggaaacagaaatgtttaacatttttttgaaggatggaattaaaattgatgccattttgttatgtggaattgatgttgaattttttaattgaagaaatagagtgaaaatgctgtatgctgcaatcgtgtggtgtgtttcaattttgtgtttgagaagagtgtgtaataggatggacgggttttggttttgttccttgtaaagtgatgaaatttgaagttggttgagttttaatataatggtggactagaggcttgctgaaatgctgagtattttgttattttgaaattagagcttagaaggcttgaataactgttgacaatttgtgttgggtacgcatgcattttttactttttgagtatgcatgtggacagaatgttgtcactgaagtgggtgattgtgatttgtaaggagttgatggaagttgtcatgccatttgcctttgtaggaggatttgccctcaaaatctcaactgcaaggtag

SEQ ID NO: 17152 - DNA, 717 bp, Glycine max
  Intron number 2 from transcript Glyma11g07880.1 (locus Gly ma11g07880) derived from phytozome v7.0 (chr-ID Gm11; pos 5542409 to 5543125 reverse strand)
gaattgcggtatgttgctttttaaactgtcttcattcatttttccggtataacctattaacatgcaattggatcggatttcgcttgctctacgtattttgtgaaactggattacacatgcatatacagtgttttgtgtacctagtgattattgtaaactgaggagttctgattaaaatttggagttacagaatctttatgcttgttttcctactatatgagacgagagatatttgaattaatgcaaaattttgaaaatgaatgtttcattatcgcctacatgcagtctgatcacatctgtgaatgaaatttacatttgaacttttgaaaattatagcataattgtagggttgattaactgatgacacaattgtgtcgagggaatgctaatttggacggggtgaaatggtgaatgcttgaacaagtgacattggttcctcttgcatggattgctttatgtagtaccatatagatttcctatgcatgcatctcttcttttccttatacagaatcaactcaatgttcttcaatgatattcacttattatctcttttaaaaggtttttgcaattattacatttgctaatcagtgcacattcactcctttttgagaaatcaatcctctttatttattttggttttaatattttagtatgtattaaatggcttatcttctgtttaataaacattccttttttgcactacttaggttggcatat

SEQ ID NO: 17153 - DNA, 251 bp, Glycine max
  Intron number 2 from transcript Glyma12g29080.1 (locus Gly ma12g29080) derived from phytozome v7.0 (chr-ID Gm12; pos 32478740 to 32478990)
atgttagccagtaatggactggtttctcctgttactgaatgacagtggtgatattgatagagtaccattttgatacaaagtgatttctgccttcacaagaaattcattttaaaaaaattagtttaagattgaaaaaatacaaggtaaacaaacttcagggcattatcttctgttgaacaaactgagatcaaatattctttgcaatactacaaatcacccttctgaaaattttaataaatgaatgcagggcc

SEQ ID NO: 17154 - DNA, 891 bp, Glycine max
  Intron number 1 from transcript Glyma06g11510.1 (locus Gly ma06g11510) derived from phytozome v7.0 (chr-ID Gm06; pos 8882819 to 8883709)
tcattgaagttactcttcttttttgtggtcagttttcattgttacgccacccccttttcctcccaaaagaaagaaaaaggaaccgcggaggaccattatatcagcaaataatactaaactcaaatgtaaatttcctggaattttcatctgatacatggtttgtgtttcatatctttgcactcatgactcaagcaaaatcataactacaaagaagagacatttgtaagaaacaaaagaaggaaaacttaacaagttagcaattaaaagagatatctgtgttacatggagtacttacatttgcttcaaaagtatagataggttaattaaactccatttttggctgcagcaatttaaaatgttgattgaagattaaactgtcattaaacatgaaattcaagtactttagtggccgtgggaattaggcaaataaaagatggtcagttatgatattttcgaaatgttttatccaaagacagaaacacacacagcagcataaaaaggcgggggggacccgtaggccaatactacctctttacttttcccacaacttagaaaataaaaaggactcttcaatatagaaaaaaaaatcaacggtgagaaatactcatcataaagtcatatatctaatatcttccccacaggaagaaccatagtccataggttcctcaaagcttcaatcttaagagcccccccccattcacatgttacatatacaccttgttctaaaagccatcatttgctagcctgaagaaacttccattctttccacaatgagcaaacccaaaactcaaagaaaaccaaccatgaccaaaaaggtcagccaaaaccaagagcaacagaaaactgagaaacaaccttcatgggtggtgagaggcctattggcttgtagga

SEQ ID NO: 17155 - DNA, 535 bp, Glycine max
  Intron number 1 from transcript Glyma12g36380.1 (locus Gly ma12g36380) derived from phytozome v7.0 (chr-ID Gm12; pos 39463054 to 39463588)
gggattcttccaggtggatctctttaattttctccttttatccttcaattactttttaaacgtgggtttgtaattgtacacatgcactaacgtttatttatacatttaattgtttgatcatgtgatttttcttttttataattatttttttaatgtaaaatatgtgtttaaaatttttatttgagattaaatagaatgatggaaatatatcaccattattggtccaaatcaacaaaacaaagaaataccaagaaagtctagcttgtgcatgacttgttatatataaactccctagtataggtgttttttttattcctacgaataaaaaaaatcaacgaagaaatatgcaagagtgacattttgtttagagcatcaccaaaacagattactaaacgttgattatatttgttctccactttctggtctgaaaaagttagctataaataaggaattgaaattagataattctggtcaatatattcttcaaatcataagttgatttgagttttaatatctattttgtagcttataaacc

SEQ ID NO: 17156 - DNA, 685 bp, Glycine max
  Intron number 2 from transcript Glyma13g18300.1 (locus Gly ma13g18300) derived from phytozome v7.0 (chr-ID Gm13; pos 21956247 to 21956931)
tttgatcggtatgttaattattgtataaatgccttctacaaataatcattatatgcagtatcacttgatcctgtaacctgttaatagatgatggtctttcaccatctcatgtgtagttattaatctttaaaccatatttagaaattatgtgttggtctgaaggatgccatctagatgaaggattgtgactcataaaaagttacaattgatatataaccatctgtttttttatgcttaaaactatcgggagacatatttcactttactctggatattaagcttgaaaattgaaatttattgggcggttgacattggtcaccttaaaaaagttcttgaaaattttaacccctgtttgatgcaaagctgtaaattgccattgaaggaggacttgttcagaaaaaaaataaatgagttaccaaatggtaaaagcacaaaaacttgaggaactaaaaacatatttaatcctaaattttttgttgtggcagtactgctaccaatgagtaaaattgttaatgactggggcctagagtcacaggtttcacacaatctcaaatcttcatagctgctgaagaaaaacatgtttaagcctaatgtttataatattatgtatccagtgatggttttttcatttgaatgtgctttctctgcagaaacttctgtgttagaagagactttgtgtcaaatc

SEQ ID NO: 17157 - DNA, 912 bp, Glycine max
  Intron number 5 from transcript Glyma13g38830.1 (locus Gly ma13g38830) derived from phytozome v7.0 (chr-ID Gm13; pos 39544961 to 39545872)
tcagttcccatcagttgagtccttttatcacaaaagtgggtctatgtttattttggtattttttttttacattaattaatgcatgcttagattattgtttgatcacaagaagatatgagatgaaaaatatctgacgaatgaatcatatattagaattgattttgttgaatgctgattctgtttaggtaatttttttaatttccacactcagttctgcagtgggtagaattgatcttgggagaagtggaagtttttaacttttccattggttggaattggtgatgggtgtttttttttttttttcttcgtaccccattgcccagagcctcttcgctatgcgaaggtatgggggagggatgttgtacgcagccttacccttgcatatgcaaagaggctgtttccggattcaaacccattatgtattatctacactctgaactgaaagctattgtacttgccaaccaaacaaaaccaattatgttcaactcacttttaaagcatcatacccaatcacaaataaatttttccaaaatttgtttttcctacattatttcttccaaaatcaattttaccataatgaaaaacaaatggatgataatttatcaatttaaatgaaagaacaaacccttagtgttggaaatcaataatttatgtgaatggagttttagtttttttgtgttgatcaaatgatgtgcgtacaaagctctaggactatgtacgttaaatggccatccatttggtagtccactttcaatgaagaataagtaacattttaataccagattattgtgagttttggttggaatcctgagaagtcttggtccttattgtgtttgcataagttagttcgtgcattaaacttgaatttaattcttaggtctgcaaatacgctgcaacatcaaaagaagagtg

SEQ ID NO: 17158 - DNA, 901 bp, Glycine max
  Intron number 2 from transcript Glyma11g00590.1 (locus Gly ma11g00590) derived from phytozome v7.0 (chr-ID Gm11; pos 260536 to 261436)
aaggttggactgcaagactactaccctcaagacaggtaaccttaaaacctaaccctgatcaatcacacctttgcctttgtcttccatatagttacctctttaattctttgcaatacattacaaagcatgagtattgtgtaaatttgaagaaactacagctgtcgtcagtctatttttctcctaaaaaaattactttcaattgaagaatatttttaagaaatgtaataattaaccactcctaaacgtagctaacttttgctttaagctttcactttagacaccaatgtatatttaagatggttaaattcaacatgttcattgttgcaatctttttttgttggtgtaagtgtttcttcatttatacattggttatatagttataatggctctctgtaggttatagtgtttggcctgttttatttttaatcttttatctttaaaagtagtcaattagcttttgttcattagcaaaaaagctacctttgtcttcaagagctttcttgaaattgtgtcttaagctctccttccaaagggaagagatgcaccaaaaaaagtaccttaaatttaaagaatgccaacctgtatctgtatgaggtattgttgtttccaggacagcaaaataagaatatttcttctgtaaattgaagtacttgtagaatttgtatagtaagttgttgaaaattggtttttgcttgttctttgataaaatttgctcgtattgtttttaaactttgatgtatattaagttgtgtagatgtgaaattgctaacctatctgtgattaaactttatgttgtccgttattctcttgtatgcatatggtttctcctgtttgcccctaaactttggttgctcaaaatgatgcagtttgggtatattgtcttgacaacctctgctggtat

SEQ ID NO: 17159 - DNA, 983 bp, Glycine max
  Intron number 1 from transcript Glyma11g05070.1 (locus Gly ma11g05070) derived from phytozome v7.0 (chr-ID Gm11; pos 3527669 to 3528651)
aactaaattttctgctatctatattcccaggttagttagtgtgcacgaatcaagtttacgcatcgacgattattttctctgttacttttatttactcggattttgttaatcgtgccctgtacgagttgaagagtaattactttttcttgtcattgtgtttgtttagtgaatgtaaaaatttgtgtgtgcttaatgaattttgaaaccgaaacattagcagcactgggtttttgatttgaggtgatgccaaaacccttattggtaaatgatgattctgtggtgttgttaatgttatgagttataattgattctccaactcaatttacatgtagatttaggtgtaagtaaattaggtgttatttggttgtgtgataggaatgggcctagagaggcccaaataggctagaagatttagatattattcttttatattgtttagttttattttatatttcctaaaaatattagattgtgtcacttgtatgattggtattctttgtaaaatcctatttaatagggtatgcactgtgtaaggaattattaatgaagaatatcattgagatgcatgggtcagccctctatcagtgtgactctttgttgtgtgtgtgtgtatattttcagtgccacgttgattttcaaggcttgatctaattgtattggcattgaaacaatatcactgcatcatttttctccttttgtagatgcttctgataacacatttggccagataaataacatcaaatagtggtttctgggctatctggagttgttttcttttcaaatgttggatgtctaagagatgattgaagttaattgggaattgaggttaatgtttggtgatctagattttgggtttgagctttttaaaaaaaattaagaataaaatgtgtttaaactcctcttgttatttttatttttacttttaatttttcattctcatgcttgtagataagtaaagtcagatttttcttggtgaacggaca

SEQ ID NO: 17160 - DNA, 171 bp, Glycine max
  Intron number 1 from transcript Glyma07g01130.1 (locus Gly ma07g01130) derived from phytozome v7.0 (chr-ID Gm07; pos 677891 to 678061)
accaaagaaaaaaagaaacctccctggcaatccaggtttttttttcatattcttcctattcaaagtctaaacctcatttgttttggtttggttaagaaaaatatatgtcatgttttgtgtagtttaatgtgttttcttattttatttttgtttttgactattcagaccctg

SEQ ID NO: 17161 - DNA, 224 bp, Glycine max
  Intron number 3 from transcript Glyma07g00400.2 (locus Gly ma07g00400) derived from phytozome v7.0 (chr-ID Gm07; pos 179106 to 179329 reverse strand)
gaatctaggggttcaacaagctaaataaaaggttcttttcttccgtataaattttcctgcgctttgttaccgattgtcacaaaaactaactgctattacttgggtctgttattcagtagtattctcattctcttttgatgtgattattaagggttttgacctaaacattttaagtatcgggctgattgtagaatagtttgtttctgaaagtaaggtgataaagc

SEQ ID NO: 17162 - DNA, 773 bp, Glycine max
  Intron number 2 from transcript Glyma10g32400.1 (locus Gly ma10g32400) derived from phytozome v7.0 (chr-ID Gm10; pos 40880522 to 40881294 reverse strand)
gctttcagagttggaggagcgggaggagtaagcttccttttgcctcttcgccttcctgctgcatctttttttttattcaactttttattttccttattttggagatttatttttttgccctgtctcggtccaatttttctgatttttagtcgctagtgcagattttggttctcaatttttgtcccgctttgtggttggttcctcgtattttgagttccgaatttttcttattttgagtgcaatatctttgtttaatcacgagtttttagtttgccacactcacttgacattaaatcgatgttgatcttggtatacatacagctatgaagatattgtagatgattttttttataatttcgttcgtattagtgttgtctttggtttgggttctggatgctactattttgatgcatctgagtttggtctggtatatgttatgttttcgtatgtttggtttgctatgagcgaaagcttattgaatactttattctttcctcatgcatgaagttgctttgagttgcaattaactttagggttgtgtgtatcagagttttcttttaatctggggcattgggtgcaagataagcaagtgcatttggcagttttgtcagttgctcctattggattgttgtagtttgtttttgtacagtgaaaggaaataacatttttttctccctgattgattagatttgttttactggtaaatatggttaaagtattgaatttggaaagggcaagagtttagaattaatgtgtggattcaatgtagggaa

SEQ ID NO: 17163 - DNA, 554 bp, Glycine max
  Intron number 3 from transcript Glyma07g36900.1 (locus Gly ma07g36900) derived from phytozome v7.0 (chr-ID Gm07; pos 42148619 to 42149172)
catttgtgcttccaggtaatttggacttaaagcatttttttttcttcctgaatacagtttagtacgggaacgaatgtgaaatctactatgcgcttaatttaggccttgtttgaataaactcatccataaacacttataggagaagaaaataattaaaatgcttttggtttctccataagctaaaatcaacttatgcattcttctgcattcttgattctctacttagttacacttttatttggttggttataacttataattataaaatgcttgggcgagatgagaggtggagatcaaaacattatttacaaataggcaccagttttgatgttttacccatattaagtgcagtagaaagtaatttgatttaggtatttaggagaaatttggaaaaaaagatcctgctcctaattgttttattcaaaatctgattttctgatagagccactgacatccattgattcatgtaactaatcctacttagttggataaggctgtttttattttggttttataatgattgacgcttatcacttgcaggcacaaacatccac

SEQ ID NO: 17164 - DNA, 683 bp, Glycine max
  Intron number 1 from transcript Glyma13g28220.1 (locus Gly ma13g28220) derived from phytozome v7.0 (chr-ID Gm13; pos 31274766 to 31275448 reverse strand)
cttggttactcggtggtggaaagactacttgtccggtttgtcgcaaggatttatcaattagtgtagactagatgcacttattattaagtaagattatatcttccatgtttagaatgtctttttaattagtgaatgaaatgtagattcagtgaaactttttatgtatttaattatgttgtatatatgtactggttttgatttagaatcaaaagctaggtagctaggtcactggcgttactcctttttctttgatgcattgattgctgttactcagtcactctatgatctctctgcttaccatcttatgggtacttcaattcctataagaaaaaaaatattatagtaaagtttacttatcatatctattctctctctagatgtccatgatgagtactaggtatcacacgattacttttgtatatcttaaaaaacaaatccgtaccaatccattaaggattgtgttacttaaataataagtcaaagaataaaaagacgttaagagtcaaacgagaatcatgcacgccatatctttcgcattcagttttttaaacaaattagtgtactatttaattttaattttaatgtttttcttttcttaaaacaaaaaaataaagtaaatgtatattttttttcacttaattgcgaggcacaaggcccaaacagaaaatagagaaaacgtggga

SEQ ID NO: 17165 - DNA, 466 bp, Glycine max
  Intron number 4 from transcript Glyma11g08700.1 (locus Gly ma11g08700) derived from phytozome v7.0 (chr-ID Gm11; pos 6147107 to 6147572)
aagtatgaagctaagcatttcctgctttacatttgatgcctgtggattttctatcaattgatgcttcttttcttttaatttttgtttattctgatgtttgcatcataggtttagtgagtaatattatgcaaatggcagctacaaatagtattctacatctctaaccaaattatagaatgccacagaggatattctgcagctaaatgtcctttctttttagtctaattgcatcttttatcccttaccacggattattggattcaatcatgtctttatttggatgaagttatttgagacctcttaagagcaaattttcagttagcaatctctttgattagtctttatattccttgtgcaaaagttctaaaacaatagcaatgtagcattatcattctatcatgcctggtctaattccttcaaattgaatatcataagtatttctttcattttaccctttcaggtgata

SEQ ID NO: 17166 - DNA, 289 bp, Glycine max
  Intron number 2 from transcript Glyma09g09190.1 (locus Gly ma09g09190) derived from phytozome v7.0 (chr-ID Gm09; pos 8763522 to 8763810 reverse strand)
gttttctagaggacccccaagcagcacaatccaaagtaagcatcactttattgatggtttgataacttctgcattgcattgcagactctatcttctctggggggcgggggggtattttgtttcttagtgtgctgctgtttgttactttttgagttgttgaaaattaaagagtagcaactttgagctactttgaattttgataccgagggatattatttgtgtttaaatcaaatgagcttgatatttttttgcagttggaagacagactaagaaagaaaaggagcaaaat

SEQ ID NO: 17167 - DNA, 843 bp, Glycine max
  Intron number 2 from transcript Glyma11g31750.1 (locus Gly ma11g31750) derived from phytozome v7.0 (chr-ID Gm11; pos 33095603 to 33096445 reverse strand)
ggtctgtcttcactggcatcatcttctgtgttattgtgagtaaaatgagttgttcatcaatttctcagtgtcttctatgttgcaaatggctcttatgtaaccatggaccaaattaggattttgaatgcttgatggaggcgcagaaatgcagaatatcattttattaacatcacaaggaaaagaaaaaagggagggaagggattagggaaatgccttttcttaaattgaactaagatggctgataattcagatgaaggattgaatgtataaatatatgggggaattaatatgtgttaatcatgtgtattcgtattatccaaaagcaggattagttatgggatgtgatatccatttggtaggagttactacttgtctctttagttttgatactaacattatgtttcaggtttagggtgtaatttggggagtaggtatcttcaaagtgatgttatctatagtgtaacttggattaatgtgattaatggtgaagaagcaaaaaacaaaaaaatatttcaattgaaaagaaagagcttgtgttcttgtgcattttttatggtgtagtaattggtaaaggctttgtagatatagggccaagtgggtagttatggagcatccttagactgaagttgaaattgtgtgcttacactggtttgggaagaaatgtttcattttaagtgctctgctggcttctttagttcaaagaaatatggttaactcttattatttactttatattacattattcttgtggaggttactttgtaattaacaaatggaaattgatccttttttcatttccttcttgaaggtttatagattgactgctattttgagttctctgtt

SEQ ID NO: 17168 - DNA, 666 bp, Glycine max
  Intron number 1 from transcript Glyma11g31750.1 (locus Gly ma11g31750) derived from phytozome v7.0 (chr-ID Gm11; pos 33096534 to 33097199 reverse strand)
attgttggtctctttcagtgcctcagcctcaggtctgattctctctccctaaactaaagtttcaagcttcaattgaatgagtgtactaagtcataatgggtcacctaattttcttcaattcactacctttataatatttcctgattttccttcttcttctgcttcacacactgctgcttcttctttcttaatttgcttcttctattctcttttcttcttggtatgctttgccactgttatttttatgtatcatcatcaatccatgatcatcattatgatatgaatataatgtaatcaatcaaatgacttttccctttgtcctattggctatttccttttatggggtttgtttgtttgtttgttttccaagaaattttctttacttgcccttcctatgttcatcatggtttgaatggtcagcttgtgctgcaagtcatgtgaagtgtgcaaacgaaataacttctagtactatgttgtagacaagttttcctttcccatgaatcacggaaaaaaattaattttttttattccagtttcttgttgagtggggattccacccttctttatttgtttgtttcaataggggttcatttattgttgatgggcactcatgcattatgtgtttttttttttaatgcagtttggtactttcaactagttgattgg

SEQ ID NO: 17169 - DNA, 572 bp, Glycine max
  Intron number 1 from transcript Glyma13g25630.1 (locus Gly ma13g25630) derived from phytozome v7.0 (chr-ID Gm13; pos 28843163 to 28843734)
gtggtgttgtgttctggtaagcatttaactctattttttttagtattttcacttcttgataagttggttattcacttgttctagttgcattttttgggatttttgaggtatttgtgagtgccatgtttgctaacttgtggtgtcaactgtcaagggcctttctcatgagaatcatctaacttttttgcctgctcagttttccttttgcatcagacagacaaaagttgtacacttcctaacttcattattctctctcttggtgaaatcaggaaaaggtcaacccttattggtgactgattgaattggcatgattatttcatctttctcctgaatgactgatattagtagtggggaagaattaaagtgaaatgctataatgttatatgggattttcaattttttatattttgataggaaaaccagtgtttgattctatgttttaccagtagtcagtttcttttttttttttttggtcttttctcaatcaattgcaactactttgtcctttctgatgtcactttattttgtcctgaacagcattgcctatatcatctctctttccattcctttat

SEQ ID NO: 17170 - DNA, 491 bp, Glycine max
  Intron number 2 from transcript Glyma13g25630.1 (locus Gly ma13g25630) derived from phytozome v7.0 (chr-ID Gm13; pos 28843709 to 28844199)
ctatatcatctctctttccattcctttatttcgtgagtttaactatctactggggattactgttaccttctcatttgatgtatactctgattttgtaacattgtttgaagttgtctgagaacacatctatttatttgagtatttcaagttcaatttcagtttttatttatttatatttataattaaaacttgaagataataagagaacacatctatttatttgagtatttcctttattgcattttattttcttcaataacattataccaatttgtgataattgcaacatgttaaatgtgccaaagttaatctataattgcttattattcttcgttctgctttgtgatttgttatgaaatattatcacgaaaccaaatctttgattaatgtttaactttatatactgatgcacgtaacatacatcctcattcctcataatgcaacatctattttcaggtaagggattttaatattgcaaaaacagaagccga

SEQ ID NO: 17171 - DNA, 741 bp, Glycine max
  Intron number 2 from transcript Glyma06g30620.3 (locus Gly ma06g30620) derived from phytozome v7.0 (chr-ID Gm06; pos 29862582 to 29863322)
aagacaaggagaagcaccggaagcgtaataaagtatgtgaataaattttctgtgctgttcgaattgttgttctctgtgttgaaactacttggagggttactatggaattttacagtgaaatatggcttcaaactgaaagttaagaacaaaatgttttttctctgcttgtgtctataggctgtgaaaaataataaaagaaaaaaggatttgataaaagcagttgcttttgccgtggtttcatgagaaaggaaataggggagatcatgtatgcatgtacatcaaattgccctcttttaacagtgtgttagtgcttgaggcttgagaaattcattggattttatatagttgtgaattgtgatgtttaggacttgggagatcatgaagatgtttatagcttgtttgatttttttttttgtttcctttaagctacacattgaattactgcggttggatcatgctgccatatgatagtttggtttgtgtttctaaaagaacaggttattccctgttttctttcactttcattatcaatttctggaggcctctgcctggtgtgctttaacatggtatcatgttcaattataaaacggatactccaagctatgataggctgttggggctatgatgctgatcttgctcatagcatagatggggatatgttagctaattatttttggatatctgttgaattatgagcaatttggagtgatttcaatccaaactgtcgtttattggcaggat

SEQ ID NO: 17172 - DNA, 529 bp, Glycine max
  Intron number 2 from transcript Glyma10g31710.2 (locus Gly ma10g31710) derived from phytozome v7.0 (chr-ID Gm10; pos 40210449 to 40210977)
gacctgaccagtgaactgccagggcaaacgacaaggttagttggataaatctttggtgcttatttttttaattatgtgttgagattatggaatgaggaaaataaataaagaaatgagaatcattaatgctgctgaaaatggccaaataaaaaataaaggaaaaattaatgctgcggaataaagtacatgtcaattttaaaataacatggagagttctagtccaacttaaaatgtaatgttgcccgtgagtaacctactaccactcctttgttggtttacatttaattacctatgctgatggcttttctactgttaatttccctgtaagttgtgagtgttctctaaactttttgaactttgattgatgaatagtcatctttgtttctggagtatatttgtggaactgttatccccataactttgtgaagcttgatgtcagagacaatataaactcgttgtgtgcacagaaacacaatactcttggtggtgattcactgtgtcttctttctatcatcaggtgtagtaggac

SEQ ID NO: 17173 - DNA, 603 bp, Glycine max
  Intron number 6 from transcript Glyma10g31710.2 (locus Gly ma10g31710) derived from phytozome v7.0 (chr-ID Gm10; pos 40211747 to 40212349)
atccactgatagtcatcagccaaaagtatcagaaggtgagtaataagatttttcggcacatgtcaacatattccttgtataacttgccccataatcttattgtttattacatcaaacaaccaaaatacatttgatcaaaataattccaattggagacacacacaagtcagttaatcttgtttctgctttgtgtgtatgtgattttgtaattacatggagtctgttctgtcgtctttaattattagtattttcttttttctttttcttttttgttctttgttctgtgtcttgtcttgttcattgcatatgcagtaaataattcttcacagttctctgtgttcaagtcagttatcataatttggaatggaaatttcatcttattaacagaataatacaaaatttcttgtaatttttttcacctgttggttatatattgtggtagctgattgactagaaacatatttttattgtcttatatgccgtgtgtttctaataatgttgcttcattgacacctttatgtatattgttcctattgggaagtttgaacttttggttaattactggcagaaagcagacgagcttctgttgatatcttcttaaag

SEQ ID NO: 17174 - DNA, 518 bp, Glycine max
  Intron number 2 from transcript Glyma07g31460.1 (locus Gly ma07g31460) derived from phytozome v7.0 (chr-ID Gm07; pos 36470051 to 36470568 reverse strand)
agattggtgagggcctggtgattacttattttaatattttgtagccttcaataattctgcactattgtacaatttcatattccttctattggctttaccaatgagcctacacttttctgactgtaagtaatttaccctgatcacatatggagagaaggaaagggtctttgtcctttctgaatgatatatttgaatattggttcaacttgagtattgtcaatcaagccatcttgcattttggtcgcaatcactggtaggtctgacaagagcaacagaaagtcttcaataaatgtgtccatatagttcaaaacataatcatagaagttggaatacagacatactttatggatttttactagtttggttgtatttgatatgtgggttaattaatgatgatgttcacaagagttctggtgtataattagtaatgcttttataactacaattttgttttttccatttatcactttattgaatgccatatacaaatctttgttgctcaggctttccacttgata

SEQ ID NO: 17175 - DNA, 714 bp, Glycine max
  Intron number 1 from transcript Glyma07g31460.1 (locus Gly ma07g31460) derived from phytozome v7.0 (chr-ID Gm07; pos 36470639 to 36471352 reverse strand)
ccttagacttgtgcattttctgttggcttccaaaggtgatcatcattttttttttcctttgtttcccaaaaggggttcctgtcccaaatggggttccactgttttacatgctaaaggtttggtctttctgtattataagctgaatgctcaaatcagattatgattctgagctgaatctgcaaatgggttttctcttggtagcttttttttatttgaagttgggaggggtcaattcaatagtccaatttttttgatgaattgtgatgaaattggaagattttgcaaactggaataatcgttcagttttgttcggtggtttttgtctttactaagtcttgtgaaggatctaatctaaggtttgatcaccgattgagcagaaaagaagtataagaatgaaatcattaacatgaaaattgaaaaaaaattgacttttattgaaatttctgttattgagtccatgtagttagatttggtttgtcagaattttagtattcctatcccagaattttgccaagttgcagaaatccatggcaagttgaacaaaggcttgaaccatatcagttcaacctattattttttcttgcttgacaaagtgtgtgcttgagttccatctatatctcttggtgtttgcaattcaaatgtacaaatggcacttcacttatgttggaatatgatatataatgcagagtgtggcagtcacatcccaggatcatt

SEQ ID NO: 17176 - DNA, 575 bp, Glycine max
  Intron number 3 from transcript Glyma10g38950.3 (locus Gly ma10g38950) derived from phytozome v7.0 (chr-ID Gm10; pos 46679046 to 46679620 reverse strand)
tcataggtgtgctcggagaaacagattcacaccaagtaagaagaggggcacttttgcaatttgttccttggtccttattacccttctatttcttgttgtctttactggaagtgattagttttttgagaaagtgtacattttggtattctaaactaaagatacatgtgtcattacaatggtcttccaattggttcaccgaagatatacatgaaatcaatttggttttttaatgtcagatttttgcccagcttgatctttgaagggtgaaactaatggtatataacctttgatttgaaggcacacatgtgatataagttgaggacttatgtgccgtaggcatgtagatgtagcctatatcttttaacgatcaagatgggtgctaactctatgtttttcttataaaaaacaagattattactgtgtaacttgttggtgctgttgctttaacagttttccctttggataatggtcataacccatgattacacaaatttatgctttctttgtcttgtttagaaattagaattcatgcaatatttagtactttggataccaatttggctattccatgcagg

SEQ ID NO: 17177 - DNA, 684 bp, Glycine max
  Intron number 1 from transcript Glyma12g31700.3 (locus Gly ma12g31700) derived from phytozome v7.0 (chr-ID Gm12; pos 35272063 to 35272746 reverse strand)
gagaaagtggaggaccaagaccgacttgagctgtggtaaggttagctgactctctgtttgttttacagcaaaataagtttgcaaaaatattcatattattctttttataaaaccaaatttatagatcattaaatttactttaaaattcgtgcatctcatcatcatgtagtgagtgatttggttggttggtttcttccaaaaagtaaaaaataaaaaataaaaaaaaataaaaggaatgggtaacccctttcactttgcctgcacctatatacactcaccccacaccgcaccgtagaaaacttgacaaaacttctctctcacactcactttctctctctataactctttctcacccgctagggtttccttttcatcgcatcttgagtttgcaacctcgtcttgtgatttccatggaggtaacaccgtttcgattactccgctgcttgctctcaatttcccccctcttttattccgcgctttgtcgtttttgtttagggattctgcttgtttcttccgagattcttaatttgatctgattcctcgcgagttattgtttgattttttatgtttgctgtgttccgatccttttttctgtgagttgattcgattgttttgttttttttggagcggctttttttgttttgtgtcgatttcagtgtggtgttgtttttgtagggtgctggg

SEQ ID NO: 17178 - DNA, 779 bp, Glycine max
  Intron number 3 from transcript Glyma11g12830.1 (locus Gly ma11g12830) derived from phytozome v7.0 (chr-ID Gm11; pos 9172896 to 9173674 reverse strand)
tggcttgcacttttcccagaaggcactgatttcacgtaagccacttgataccttttctgtttactaccattaaggtattcatcaaataaaacttcaatgcattattacatatttttgcttatgatcatcatgatgctggaagaaaaacttaggttcttctatttgtgaatcatgcgattttctcttgaaacatccataaaaaaattattggctttaatatgtttttagttcttgtaatatactgcttttttggttttggtccttataaaatatttttttcaaaatggtccttgtaaaattattttttgttttgatctttgttactttgttttagtccttgtaatatatcaatttgttcgtttttgtccttgtaatatataatttgtttttggtcctatcaaatattttctaaggaactaattcaaagtgaacaaaatattatagggactaaacttaaaaattagatatattacaaggactaacaaggaccaaaactaaaaaagaattttacaaggaccattttgaaaaaaaataatttcataagaacaaaaaagtgttatattatgaagaacaaaaacatatttaagccaaaattattagtaggaaaaatatgttgtcaccaaccttcaaatggtgactttgaaactgaatggtcttcatcccatgtttgagttgatgtagcatatgtaattctgtttgtatgtgtattctgttaaaaatttattgccacctatctttttcttcttgcagtgagcaaaagtgccttcggagtaaaaaat

SEQ ID NO: 17179 - DNA, 772 bp, Glycine max
  Intron number 1 from transcript Glyma09g32510.1 (locus Gly ma09g32510) derived from phytozome v7.0 (chr-ID Gm09; pos 39031199 to 39031970)
tctcggaacaaaacggaggatccgtcatagtattggtgcgtaattgcgtattcacttcagccatcactttttcagctcagatttcttttttatctctctatttgtttttttgcttgatctcgattcagtttttgttttctacttcgttttacatttttttctccataataacttatcgtaaactctgttctgttgcctcgcttttcgtttctgagaaaaaacaaacagaggaactcgtttgctgcttaggatcatcaaaatttctccagtattctctgccaagtacatatctcaactattgattgagtatataaggttaatgataaggataatgatggaaacaaagtgtgtgttattggcttttgttttttttgttcgtgatgcttcgaccgattgattgacagagcaatcgtatttctagagttaattaatatagtttgttttcggtgttttttgtgtgaaacgttaggataagctgatggtactgtggtttgtaagttctgtagtttgtaatgcattactgagtgatgtttgaatctatatgatgaagttaaaattgcaaactagtgttgataaattgggttgtgacttgtgagtgtttgaatgcagcatcatgtctttttatttatgcagcacgtgcctgagtttcagtttaagcttggctagaatggaactattaagatttaagtttacttcgaagagttttcatgtgatatattagttgaagacttttttatatattaataaaaaaaaacaggtcaaatattggcta

SEQ ID NO: 17180 - DNA, 639 bp, Glycine max
  Intron number 5 from transcript Glyma09g32510.1 (locus Gly ma09g32510) derived from phytozome v7.0 (chr-ID Gm09; pos 39032716 to 39033354)
aggttagacttccagtaccgatataatattgtttgattcattttgtttttctcatggaatagatggaaactctccttgcactttattcaaccactttgtaggtttcaattgtttttctcaaggtttatctctgttggctatgatggaaacatagaatagtttattatttcattttcgtgtcctctaatgtgatagcatattaacatcttttttacttctttcttcccaatcccaaatgtacctgattgccatcttatggtttcaatatggcctcttcatccattattatattttcatgtttctttgttggttctagaaaagaacataagcctttcttctttcatatatttcatgcatatcatgtctataacaatagaatgacatagcagagcatttcaccatttttatgaatttctagattacaggtgggcagtaagtggacctttagttttgatttaaaggccccctaggtttagatttcttaactgttatgcatatttcaccacaagtcagtatgtgtatttcactttggtcaaatgacagttttttacttttatgctttccaatataaattcttgtgactaatttctcattgtaaaattgtgcattttcagtgcagcaacaaacaacttgtttggc

SEQ ID NO: 17181 - DNA, 524 bp, Glycine max
  Intron number 1 from transcript Glyma08g19970.2 (locus Gly ma08g19970) derived from phytozome v7.0 (chr-ID Gm08; pos 15055379 to 15055902)
ccaattacgttcaacaggtattcaatttcaacttcctttctttttatttagggttttgatcgcctcaatatacctcaacattgaacctactttttgggaaatgcaaaccgacttcttttgaacaaacactctaattgttgttgcaacattttcattagtccacagtagacgccagccttaaccatgaatgagcggttagaaaacttacttgttccttatcctatgtgaggattttagtgttttttgtttggtaacccaagaatccagctagttccagtttacttcatagttcgtaattattcgtggtttgctgcttgggtttgaattgttaggaagtctcacatcttctgtctcaattttcggggtgcagcttgtatatctgttggtcaacttcacttaatgctaattggttttaagttaaaatctaacatggtatcagaacctatagtccatcttagtttttgcctattcaagtaagttagctttggtttcttatatatttttcttctctatgtgaagcctgg

SEQ ID NO: 17182 - DNA, 644 bp, Glycine max
  Intron number 2 from transcript Glyma05g36610.1 (locus Gly ma05g36610) derived from phytozome v7.0 (chr-ID Gm05; pos 40436197 to 40436840)
gcttcgttaagtttcaagacacgtaagttatcaattcacaatttatgtttcactcgactttaatattcatgcactctcagtgtaattatgctgtcaactaacataaaatcagggatgatcagacttctaaggtagttattgtaaaagtcaactgacattatacatgacaattcgtgattgaatgacattgtaaaagtcaaccctttacactatcactgcatttgttttctgtttcttttttttattgttacttaaaagttaagttgtgtactctctgtgtccaatataatcgcatatatggttttgaagttatgataaactattgctaaatgataaatgcaaatggtaaacagattcttggttccttcttcttatgtgtgtacttaacttactattagtagatacagatttggattattattgtgttttaaagttgacatacccatcagagttgcatccatgcagtgtttagttgattggcatacctgtccactctttcatgcacccaagaattagtgtgtttcaactatttgttgtgtctgcatgcgtgtgtttgatttatttattgggcgtttccaagttttagtcagatgtttatcaagtgctaaatataaagcatttccccctttttagagctattgcgg

SEQ ID NO: 17183 - DNA, 450 bp, Glycine max
  Intron number 2 from transcript Glyma06g21900.1 (locus Gly ma06g21900) derived from phytozome v7.0 (chr-ID Gm06; pos 18504333 to 18504782)
ggggaagaagaggtcgacgaagccagaagccctaggtatcttgatatcacataattcacacatcatttttatgtttttgttgttttcttgttgatttcttatgttctcttaattcttatgctcttgcatgcatatgttaatattaatgagtttcttttagatggagctctctgtgtgcacgtgtgtcttgcacagagagtgccttaaaataaaattgccttcgaattgtattgtcgaattatgaatgttcaattatgaaagacacgatttcagattaagagttgtctgtggaggcttattgtgagatatactttttattgccagaaattttgggtttgattgtgtgtgcgatgacattgttggatgatggtgtaagtgaagaaaatatagaatgtgtattgagagtgataacttgtgtccttttttcaaaatgcagtgggtcacccaggg

SEQ ID NO: 17184 - DNA, 969 bp, Glycine max
  Intron number 2 from transcript Glyma07g15810.1 (locus Gly ma07g15810) derived from phytozome v7.0 (chr-ID Gm07; pos 15499695 to 15500663 reverse strand)
caggtgtgagtgtgagatctttcaggaaaccattatttcgctttgtttgctgtcgtcagggttttaaattgggttgaggctattgcaagttaatgtcttgtgatttgcaatgccaatatgtcatacccgggttgtagtagactctcttttttatacaattttctttcctagatatatgaattagtttggttttttctagtatcatgaggttttgcaattgtatagatttaggattaggattactatcatgaggttttgcaattgtatagattctggtttttttgttctgaacattagactagcaactaaggattatggaaatggttttaaattgtggttgcatcatgtgtggttgtagagatctaaaaaactagaatgttgcagctgcaattgttgtcatggaatgcaatttaaaaccatgatcatgggttttatttgaggattttagaaagtgcatccactcttagattcttcaaaattcaaattggttgtacctcctacttgttgatgtgaacttgtagcctgtttagtttagtgttatgtaggacaacacacacgtttagttcccaaatccaaggtattatccgttaattttgagttatatgttcttttttgatccacattttgggctttttgacgcagaaccaaacacacatttagagttaagagagtgaggattaggattgttctttaatttttatgcttaacaatagcaaaggtcctggttatatttttctaaatactatcccagaaaatatgggggctgaggtggtggatttgaagaagtttattcattcttgggacttggattccttaaatttgtggtacctagttgtaaattttttgttttaacattcttttatttaatttttctttttatgttttttgaagtttcatactttgttgtgttgtgttcttgagatgaactgatgcttggtgttgcagggaaccgaggaacaaccaggcttg

SEQ ID NO: 17185 - DNA, 966 bp, Glycine max
  Intron number 1 from transcript Glyma08g17540.1 (locus Gly ma08g17540) derived from phytozome v7.0 (chr-ID Gm08; pos 13028885 to 13029850 reverse strand)
acatttataggtattcctttaattctttctcaccccttgtgaccatatttttttcttcgtacttgtgaccatatatgtcttcaaattcttttctccgtgctgtttttttttttttgttcttgggacaaaactcttaaatacagtatcgatgatagtgttaggactttggactatttttcaattaagtttgtcgttttaccttggcaaccattgtctttgttttggtaactaattaaaatttcttgtgattagctagataaaatgctgaatttgattggaaaataatatcaaaagtaaggatccttgagcaattagctccagagttaaaacaagtaatctcagtcgttaaagaaaaaaaaatcaacaattgatattagttgcatatgcataacaaatcataaacatgttagactattaattactaattcatcaacactgagattagttacgttaccctctttaactttatagaggagccaaatcccaaatgcaattgtttacactagtggaaagacacgcataatagtgcctgtctttccacacgttatttcttagaatcagactttatatgcagttagtgcgattttcttcttatttttaatacattgagtagtctaattaaagtaattgactgggaggttaaaacagaacagtgaaatgatttgcaacatcagccaagggtaagaaaaagtccaaaaataatggagagaccaaaagtgggtattggccattatagtgcatgcttggggtaacattcttaatattccaaaagtacgttgagagcaaaagatacaaaggagttccttctccaaaagtatgttaagcaccctccaatgaaattccaatagtaatccaaacatagctataattgttatagacaaatgtatctgagttttatcctttgcctttttatgaatgttctaacttttttaagtaggttttcattggagtttggttatttcaggg

SEQ ID NO: 17186 - DNA, 722 bp, Glycine max
  Intron number 4 from transcript Glyma10g38190.1 (locus Gly ma10g38190) derived from phytozome v7.0 (chr-ID Gm10; pos 46029471 to 46030192)
aggaaggtaatgataggttgtcatttggtgtttctaacaatgaccattacctttttttcattttttactgcaatcattatttcttacatcttcttgctcataagagattgttgatcaatttttcctacctataatttatatcttttgagggatttcatgctaaataacacttatgaaactttaggatttaaccgagtcaaatgacatttataatccatttaactgacctcaccttgtgagatataagactttgttgttttaatttatcatattatttcctttggtataaattaagtgtgacatggaaggataaggtggagataagtcaacctgtttgattttgacatgatatttaatatgaggtttcagtgtaaaaaaggggacttaatttaaatttgctgtgtaagacagctacaagaaatgcttgtatagtacagtgagtatagtaaatattaaacaagttgattctgtctgagttaggacagatcaggcatctttggccctcaccgaaaaaactctgggcaattttttttcattctccgccattatggggtaaatcaagggtctggagtaattttttgtattgatagattccattattctattctgacctagattattttccttggtaactgtcatagctgcccctaactaagttttcatcactgggaatattatttgaaacagatagaagtttgagtttcagagagcacagaaaggcc

SEQ ID NO: 17187 - DNA, 366 bp, Glycine max
  Intron number 1 from transcript Glyma11g15700.1 (locus Gly ma11g15700) derived from phytozome v7.0 (chr-ID Gm11; pos 11370202 to 11370567)
gaatcgtttggtactgctcgttcgttttcttcgatttattttgttttttgaaaacgcggtttatttattttattgagaaatgttagttgttagttagttgtccacaatctcacggagctgggagctgtatgcttagcgtccatgtgattttcgaagacgtgattgatataattaagaaattgtgcgtttctctgattctcgattttcgttctcgatgaatcggatttgattttgagtgaactgttaatctgttagctagtgctgagtgtttattgtttagcgttgacttttttttttatttgtaaaattgagaaatctgaatatgttgatgtaatttttgaagctcgctgttgaataccgagacga

SEQ ID NO: 17188 - DNA, 829 bp, Glycine max
  Intron number 2 from transcript Glyma10g03070.1 (locus Gly ma10g03070) derived from phytozome v7.0 (chr-ID Gm10; pos 2197581 to 2198409)
agaagattgagttcctcgagagtttgactggaaaggttggtaattgctatattccatttacaattgcacttatttgcagttgtgtcttagtttctaatgatgctgtctctgttaactgtgaatattagtgagtgttggggttgccattgctatttgatatgaaaatttgatgagtgcattggagaatctggttgatgtttttttggtctcgggctaaatacctgtctatgtttatggacttgcaaaattttattacttttggcaatcacacattatgtaaccagtgagttaatgctggattcattagtggcatggtgttttatgcttgtgtgattcattttgcatgggtggtggtttaaattaaacaactctaattgcaaatgttgtctctttgaatattttgaattttaaatggtttaatgactttcctattcaattttttttttttttttaccaaatgaactcgcttgtattcttgtattttaaaatggaggataaggaagcattggctagcagctgcagccgtgcaggtgagtaatagtttgtatgaaatgattgttatgtgaatctcacttccttttgagaattttcacagcacttggtcaatgatatactgcagagtttcattttttttcttctttataatgtatgtggatctcctatgaggctgatgtttgctaattgttgtgagttcatagttttacccactcagtgataacaatcacaagatatgatatgagttttctgatttaactattaggttatgaattaacttgagacaaatgttacctgtttcaggtcacaaatcggaggtctcggaggtggttaa

SEQ ID NO: 17189 - DNA, 629 bp, Glycine max
  Intron number 1 from transcript Glyma13g25040.1 (locus Gly ma13g25040) derived from phytozome v7.0 (chr-ID Gm13; pos 28328383 to 28329011)
ctcttgctctttctaaggtactctctattctctagcatagcattttttttctagtgtgctgaagtgtttgcagttttctaaagctgaattttgggatcagatcataagatttgttatcaaagtaataaatagagaaaaaagaagtaggaaaaagctagaaattataaaattgaaagaaaattgacatctcgtatcaaaagtttgatttttttttaacggaggagggctagctcagtttagttgaactgcctgagttgctataatccctaatacttatcttcgattcttacacatacaaaaaaaaagttagatttttttttatactgaatactacatttagtgtttttttaaaatagaatctaatcatatgatgcatgagattgttaaagttgatacctgacttaacataatcaggttacattaaaacaaggtaatctaacctgatcaaacctgtaaattcaacttaacccaattttttttactttaatcagatcgagttggtatgataaggcatactaatgtaggcatgaagggatgcctacatgtaagatgcgactgaatttagttatatgttgcctaattgattccactcaggtgtttcttgttgggaaagactttggagctcgtcc

SEQ ID NO: 17190 - DNA, 976 bp, Glycine max
  Intron number 2 from transcript Glyma09g02800.1 (locus Gly ma09g02800) derived from phytozome v7.0 (chr-ID Gm09; pos 1934030 to 1935005)
gcagcgatttgtctctcagaagatctgcggttaaggtttgatagtacttttaatttgttttgtctgttttttgagtttggaaagaatggttatttgaatgcttctgctggttttttctagttaaattacagatccaactgtccggagaatctgtagttatgctagatgtttagtactatgctaatttgatatggctgttaaaataccttgagggatcaactataagattagtgcatcttcagtgtaaaaaggctatgttttactacacatttgatttggttcatttctgtacctgcaagactgtaatagggttgatgaattatcgggcaaatattaaagttttatcttgtaagagggcgagccctggtgcagcggtaaagttgtgccttggtgacttgttgttcatgggttcgaatccggaaacagcctctttgcatatgcaagggtaaggctgcgtacaatatccctcccccataccttcgcatagcgaagagcctctgggcaatggggtacgaagtttttattaaagttttatcttgtggtcaaaaaaagctattagttgttgttgataacttggtatagatgattttttttttgacggaatgatcttctactttcaattggcgcaactgtgtatttttaattttatattagaaatgtagagctttagtattgatgtatcttggtttttcaagcacagtggtgttttagtttcagtgcttacttcatgtgtatgtttctgagttttacatcttgtttgtgtagatacttgtgttattatgtattaattgattttcaaacatggattttcgaagcactaagaataatactgcaattgttagagttagagattctgtttacataattatgttatgaaaatgaaatttggcttcctgtttatgtttaataacttgtaattttaaagaaaactacacttgatgatgcaggcacctaactttaacttttgggataaatc

SEQ ID NO: 17191 - DNA, 873 bp, Glycine max
  Intron number 2 from transcript Glyma11g12600.1 (locus Gly ma11g12600) derived from phytozome v7.0 (chr-ID Gm11; pos 8983868 to 8984740)
tttgctgtagaaccttgcagggtcacacgggaaaggtacccttccttgttccctcttttttgtgacatgttttgcttgccttacttgttctcaattttggtctctaaacttggttaagagcaccacaatagctgaggcttatcacttatacgttcttaggtcgttaaatgattatggaaatatggcattacctaatcaaaaacttaggtccattaaggggtctagctcagttggttgagcaggatgcatgagttattataaatcctgtgacactgccctccattccttcctatgaataataataattttaaaaaaaacttaggtcctgtgtagataaaaaaatttcataggagaagaaaataagcagaagaaattaaataaacttatcccattagctaaaactagcttatgcataacttaaaattagcttctggagaagttaaaatgagagagcttctacaaattagcttatgggagaagctgatattcatttttccttcttatcttcttctataagtgtttatgaagaagcttatccaaacaggaattagtactataacttgtgaaacgactcctttgcatttgccattgtgttttcagttctgaatgatgtcttgaatgtcatgaatattggtcagtttgaaatcttaagtgatatctagctttctttttgtccaccctagtcgtaacttgtgagatcatcttattctgtcttacatagcagcggcaaagcaatcatcatgcttttgatatactactttagcaatcgttgtagatttcttctaatcgtcaaagttgcatattttaggttgacttggggttcatttcaaatttacaggtgtattcattggattggacttctgaaaaaagtca

SEQ ID NO: 17192 - DNA, 881 bp, Glycine max
  Intron number 1 from transcript Glyma07g28080.1 (locus Gly ma07g28080) derived from phytozome v7.0 (chr-ID Gm07; pos 32044397 to 32045277 reverse strand)
ctatcaagttgcataaagctttcaaaggttcgcaaaattcacaaaggcacatattgatatagtaatgtttttcatatcattgttgtaagttaagtactcttagagccaccatgcatatcacaagtgattgcgtgatgaacatttgaagaaatactataaattgaaattagcatgatcatttttataccataaaagaagtctagttgatttgtttatgtcaaatactgaaattctgatactcaatatcaaaggacttaattaattgaaagaacaaaattaatttgataacggagaggcaagtcttcagattgattaattagtagagatgaaaatggaagaaatagtagatgattatgtaaaatgaagctatagagaaaatttgagaaagcatgatgagacagcatttgacacataccataaactcatagactctatcaaatttggtgccttttggcgttatttctttttcctaacctccccccaccacacctgttcgcattccattttgaccctttctcaatttgcatatacccacctttccttcatgtttcatttctcaattttatgcttgactcagccattagtggtgtaatgggttgataaaaaaaagttgttgtaaaactccgttgggatgtaaacgaaattaatgcatgctaattcattgaaaacaatatgtgctactttcccccctcttctctttacttttccatgtcacattgaatatggtttggtttctcttaatgcttgtacaagacaagatatagaattcaggtaaatgggtgagagattatatagaaaataaccatttgaattttgagtcatcttataatgtatttctcattacaggtcttggttgtgacacgtctaaagttatcaaaatc

SEQ ID NO: 17193 - DNA, 749 bp, Glycine max
  Intron number 1 from transcript Glyma06g44600.1 (locus Gly ma06g44600) derived from phytozome v7.0 (chr-ID Gm06; pos 47485602 to 47486350)
gcagttccaattgatgactcacagactatacctttgcttaaagatgtcttcctccctatcaacccacgtttctcttctattatggttctttctctcttccatatgcttttactatatacacttgagtttagtattttttttattatgtcattggtacaaagtatttatatactgattttatcgatgattaatctttattacatctattattcttgacttctttctctctttcatatgctttgatcacgtttttttattcacaaaactcaaacttaaaatctttattaagaaaatcaaatttaatatcacttaaaccaataacttattaggtcaaattattagaatatatgattagttagtttcttaacaaaattagttagacatggttagtccaataaattctataaataagattaagattattgtaatcgtttatcatcttaatcaatcaatatgatatctcctaggaaatattgcttttattggcctatgcctatatatgatctttattcctctcatccttttttttttataatgttcctctcatcctcttattaccaacacaagccaactaccaaatttagttatttaattataaggctagtcaactctaaagacttagtgatatgaaataaatcatcagtagcactcgatcacttcaaattatataatattgaattaataatgttcatcatatttaccgtttgttttaattttcaattgttcatgaccacaggtgagagaccaag

SEQ ID NO: 17194 - DNA, 912 bp, Glycine max
  Intron number 1 from transcript Glyma07g13900.1 (locus Gly ma07g13900) derived from phytozome v7.0 (chr-ID Gm07; pos 13115784 to 13116695 reverse strand)
gttgccgtcgaagcccctccctccctctcaggctggttagttttcaaggcttcgatttttatttcattctgtttttcatttgtagttgaaagttttgctttttgttcgtatatgtttatctgggtcgtgaaatttgtagctttttgttgatggttagttttcaaggcttcgatttattgcgttgttattttaaaaaagatgtggattttggttttagtttggttccttttttattcaccttttcatttgtgaatgcaaatttgcgttttttcatatttatttatctgggttgtaaaatttatggcttttgttgagatgggggttaagatttgttgttttagaaaagatttttgttatttttgggtgttaattgtttcttgatggtggtggtttgttgtatagactcttttgcttttagttttttggacaaaaaaaaaggctgtttcatataaaaaaaagttttcatgagtatttattttttattagtttttttttggtggtgtacgagagattagtgggaatacgatgctttttctgtgttacatatgcggttgagcttgctttagttgttgtctgtttgtttgaaacatgcaataggtctctgattgcttaaatcttggtttttgggtagaagttgcagttcaattaaatacctcagtgagaaatctgttcaaatatttttttcttattgatccccctgtttttatttgtaatgtggtatagcataactagaattgaaagatgattagtattagtatatttatactttcagcgtttgaacgtttgttgagtttattttgacatgtttttgttggtaccttgattcctgaatgaccattgcattgatgatattccttgtgttgctattctcatgtatttttttttcttgtcttatagtgagggaggctaaaa

SEQ ID NO: 17195 - DNA, 447 bp, Glycine max
  Intron number 1 from transcript Glyma12g15420.1 (locus Gly ma12g15420) derived from phytozome v7.0 (chr-ID Gm12; pos 14255796 to 14256242)
gcgctccggcgcggaaattgaaaccctaaaaaagtgttcgttcccaaaaccctcatcgaaaaaaaacatataataaatattcgaatagttgttcgtcgcgtgttgattatctgacaaatataaatttcttctcacgaattgatcagtttattgtcttttttatttttttgaaatctcggatttgaacgtgttctcttgtgattgttgctgctgcctttgatgatttggtgttaaagggttaggagaaaaaatgatattgataactaattagtttggatggaaaaagggtttgggaaaaattaattaaatattttcttatggaatggttgtggacgtgtcttatgtgtttgtttctttttgatcttttttgttcttcttttgttgataagcttttttatttggatggtttgaattgtgattgttcaattgttgttgttgttacagata

SEQ ID NO: 17196 - DNA, 828 bp, Glycine max
  Intron number 1 from transcript Glyma09g27520.1 (locus Gly ma09g27520) derived from phytozome v7.0 (chr-ID Gm09; pos 34368956 to 34369783 reverse strand)
gaatagtgctggggccactattgcttaccacacaggtcagttttctattcgtagttgcacttttttaattgtatgtttatttataataaaaaatatatttaacaaaaataccctcggattttaacacataattgttttatttttttatttttcatttgagaggagccattcctgattacgaagaaatggagtaaaaatattaagtattttatactagtattaagaaatttaagatacttaaaaatatttattaaatgaatcttatgtctttaataataactttaattttttattgaagtttaaattttatgcatgattaatagaatttttttttttacattattaactaattaaaaaccatgaaaaatatttttctggtataaaaaattacaatcaaagttagcatatatgaatatttataattaaataatattataaaaagttatatgatcactaggacatatatatccaggacatatatatttaggatgtgtttgacctagcttaattttttttcctttaaagaaaattctggaccaactaatatttacataaaagttttttaaattttaaataacttattgtaaattctgtaaaaaataacttatataaaaaaaagttccttaaagagactcgtgcagttaaaccactaattctaactagactctactactctttctaatttttttcctataattcttagagagactctctaactttctaattttaattaggtttaattattcatttagtttttataattttttaaatttattatctattgtttctatagttaataattatattttttgttcccttaagtttaca

SEQ ID NO: 17197 - DNA, 652 bp, Glycine max
  Intron number 1 from transcript Glyma11g15550.1 (locus Gly ma11g15550) derived from phytozome v7.0 (chr-ID Gm11; pos 11221445 to 11222096 reverse strand)
cctcgaccagaaacccaccaatttcaccgcgacaggtaaaaaaaaaagtctttttttttttttactttaataatgcatttcactatcacacacaaacacactcgtattgttttgtgacccattttgtgtgatcgtgctgaatgctgtgttttcttagtggttttcgttttaatgtaaagattccttggtgggtgtgtcgtaaactgatcaaagttcgtgtttttttttgggggggtggggagtcattgaatgcttcttttccagtttgaaagagtgtttttcaaggaaagaataaaaaaatgttttgttttgtattcaatattgtaattaaaaattttggtattcggcttggaacgtgtcttctggcaattttgatgttgtaagcctttgaatatcgacgctctattttttggtggcatgaaactaagactaaccatactcgatttcgtgtttgttttgcttggctgcgaggttggaatgattagatccataatccaaagttgtgtttatcattttgcacggttgttttggttctatagtctccacagattaaagtaattttcttctgtgttattttgtttgatatctttcccttttggcttatgtgtgtttgtatttgttatagatagcgtaaaagttgatttcaaagtga

SEQ ID NO: 17198 - DNA, 568 bp, Glycine max
  Intron number 2 from transcript Glyma11g38130.1 (locus Gly ma11g38130) derived from phytozome v7.0 (chr-ID Gm11; pos 39072066 to 39072633)
ctttgtacaacgaagataagactattgttgtcactgtacgtatctttgttccactataaaataattatacatgtgcatttgttttgggaatattcatttcattaaaaaatgcattgtttttttttttttctcttctggaaagggttaaagtggatgcacttgcatgaatgctaatttacatgcttataatctctagtttggtctattacttagcctgacgacaaccatggttttaaatttcgtccgcggttgcggttgtgttgtggtgagacaaaataccttgacattgcgacggaacactatttaaaaccatgctgacaacctagccaaatatgatatttatgaagtattagaccaaaagcctggcgcttgcattgctgaacatcgatgagaatgcagacatcaaaaggcatttgtatgtgctatgcggtctttttaatttttggatatctgttattgttgttttcacactttaattttcatgatatatatgctgaactagtttctagatatttggttatcttcataccagatgtttccttgttgaaactgtgccattattaggtaa

SEQ ID NO: 17199 - DNA, 420 bp, Glycine max
  Intron number 3 from transcript Glyma08g00460.1 (locus Gly ma08g00460) derived from phytozome v7.0 (chr-ID Gm08; pos 171994 to 172413 reverse strand)
ctgtggttctcatagaaattcaggtatacccttccaaaactaagaattagttaattcaaaaaaggttaaaatattcatttgatttttatagttctccttttaagttatagtcgataacttttagaccctacacagttttttgtggcagtttatcagtacgttttatagtagttttataccgtcaaaaataaattgatattctcagcaagtaccaaaacttataagcatgcgtaggaactaaaactcactatttttttcgtataaaaactaaaacttaaaatgaagacaaatatagagatgaaatgaatagtttaacattaagaaaagaagattatgatttatcatatagtaagctagccaaaatttaatatttttctgactacaggacaccataaaatctccaccatctgaagcagaaac

SEQ ID NO: 17200 - DNA, 786 bp, Glycine max
  Intron number 3 from transcript Glyma13g32650.2 (locus Gly ma13g32650) derived from phytozome v7.0 (chr-ID Gm13; pos 34756478 to 34757263 reverse strand)
ttgctctatctgctcttgttccgggcctaaagaaggtaccaaacaatgttgttattgctctttttgtcattatgattctcagtatactgcttctgtctttcataaagttatattttttttatgggcaaatattagttgttaattgttagttttttgttagtatgggatcgaatccataaccttttctcccttaaccactcaacccatcttatatctccttggtaaagctatatgttgaacacatgtcggagtttccagtcataaaaaaccagctaaatacaagtttatcaaaacatttgtttaactagttgtgtaatactgatttattcatgattcatgttgtcaaaacatatatttttcatcttagcctcgtaagaaactacagaagattctgatatcttcgtttattgttttttcatcaatttgattgggataagtatcagaaacctttttgaatgaaagacagcaaagctctcgaattaaatatgtaatattgtatgctagtaatagtaatagtttttgttgctgctgcagttattatttttgtccatcctgttgctatttgtttaggatatgcttgaataaacttctaattacttatgggagacatataagttgattttagcacatgcgaaaagctcaatttattttaccttcttatttttttttctttcctacgtagttgtggagaaaatcatctaaacagaaccttattaggctgtgactcttttaacctgataccatctttgaagtctgtcttttgtcttttcaattccctaccaacag

SEQ ID NO: 17201 - DNA, 697 bp, Glycine max
  Intron number 2 from transcript Glyma07g20070.1 (locus Gly ma07g20070) derived from phytozome v7.0 (chr-ID Gm07; pos 20331080 to 20331776)
accctcttcttccctggatacagtgagtataaatatatctctttccatccccaatattcacttttctttgggtagtttgtatgcaattttaggttgaaatctcattttccccattatacacaaaatatttaatcttcccacatgtcataaataaattgccctaggcaaaccctaaaaatatgtgttgaataggtcaaatcacttaaatttaacaaaagttggcgtttcgaaccttggacataatttttaccatcccgtaactaatatgatctactgagcaatttttgcattagttgagaacagtgactaaagagatgagaaagatgtttttctgaagttttttaatgttctaataataagtatatacatcaacaatctatttgtttgtatcgagagaaaataagaggagaaaatatttggaaatttcaacccaggagattttgaaatttcgttttttaaagttattttcccccattttctcataatcaaatgcaaacataaaataaaatagtattaagaatgtttcatttgacgtgttttacatatgatatattttttcgtatgatatgtgacatgtgctctgttattgtttagtcattaagcaactaagagcttactgttttactatttatttatctaaattaactttattgatgttgaaggtgtatcaagtgggttcaggaggcgtttcctcctg

SEQ ID NO: 17202 - DNA, 576 bp, Glycine max
  Intron number 1 from transcript Glyma12g00570.1 (locus Gly ma12g00570) derived from phytozome v7.0 (chr-ID Gm12; pos 270746 to 271321 reverse strand)
tacttccgtctattgtgaccagtgccgagtcgttggtgagcacattcgccgagtctgtgactcagtgactgtagactccatgcattctcaataacttcaaataaaattaaaacacaaaaacaggacggatcatagtagaaggaaaaatattatacttttttttttaatttaatttacatagttgagggaaatttattatactttcttattttttttttaatttaattcactgagtagtgtaagaattgaactccatcagatttccctcctagaatttggttgaaaattcagcaaaaacctgtgttattttccctcttttttttttgtgtgcttaaattcaaattatataatatacttattttgccaattttttatattattattatcattttataatacacaatattatttatattaataataataacgtgggtgtgtgaaaagataagaataataagcatgtgagatagatatttatgggacctttggtggatatatggttgtgttctaatgctgactttttgttggggtaaaaacaaagggtggagtgggcatccggtgtgtcgaaaacgatac

SEQ ID NO: 17203 - DNA, 410 bp, Glycine max
  Intron number 1 from transcript Glyma06g24820.1 (locus Gly ma06g24820) derived from phytozome v7.0 (chr-ID Gm06; pos 22593675 to 22594084 reverse strand)
acacctctcgtcctgttcgtaattctcacatttttttcttctttctcatttgttaaataaaacaataatatgttgttatttttccttcctttttttttttctctctttctttcttaatttcgcgcgcttctcttttgaacttgcttgggtttcgtcgtttctggggtcaggtttttgagatttgtcgattccagatttttaggaatcgttcaatttctttggatttggagttgtgatgaggaatctataacgtgtcttccgatgttgaaccgttttttttttctttttttgcgatttcacgtggcttttttcgccactgttcatttctattcctgaaattgcatggtttcttttcttttgtttttttttttaattttcttgtgatttcttgcagaaagttgtgcaaggat

SEQ ID NO: 17204 - DNA, 764 bp, Glycine max
  Intron number 1 from transcript Glyma07g16530.2 (locus Gly ma07g16530) derived from phytozome v7.0 (chr-ID Gm07; pos 16213108 to 16213871 reverse strand)
tttactcgtttccacgatcggtatcagtgcttcaggtaatatccatttatcttctttatagtgttcatggttttggtttgtcagagctatttcatctttgtattatagacatgaaaacttatttgtgttaatacattagtaaccatctcagcaataagtcatgtaagtagtaataatctagcaagttatgctaataactatgagaaaatgtgacttttatcttatgagtagcttattagtatgacatcctaatcgattgaactaataagttatttatattaaaaaataattaatatcgttatataaaatcttaaaatttttaatgtacttttaatatatataagtttactaataattaattttgatttatttttttatatataaatttttattaaatctatttgtgtgaatttatgtaaatgatcaatctgtatggacctatatctgtatcggtttatacgaattgttaatccttatatacgattgtaaagacaatgttggaattatgaaaatgactgctgcaggaaggaaaagaaaactccattactgagaagagtagcagcactccttcatgatttttaatgcagcccaatataattatttttttgtgaaaaaaaattattttttaatttccagtggtcacttttagcaggaaccttgtttttaccgactgaatttgcatttctcattttgcatccttgtgtagtcaatagaatttttttgtttcaggttttaagatttttccaagtttgctgttgctacca

SEQ ID NO: 17205 - DNA, 610 bp, Glycine max
  Intron number 1 from transcript Glyma07g06560.1 (locus Gly ma07g06560) derived from phytozome v7.0 (chr-ID Gm07; pos 5284353 to 5284962 reverse strand)
ccaccattcaccatcttgcgcaagcttctcttgaggttttgtttcctttgcttgcttttccactccttttttcattcttccacataaaaactgtttcttttaatgtatattttgatgggcaaataagaaaatgcacaactgttctgtgaatatgctatcaagttcctttttttggggggtggggggaatgaaaattgactcaatattgttcatactttgatgttgtgatatcaactttagggctgatgatttgttgccacggtttcattttctggttgacagtttgtgaggtttggctaatgctttttaacaaaatctgacaaaataagcatatggtggtggagatgccactgcttcaggatggttgatctttgtttttggttattgttgctcggttttttattgttggagccaaggttttagggctttgcataagaagaaaaagggaacctctgtaactctatgtgctttggactgtagtatagatagcaataactgattgtttcttttgatttctttgtgtgtgtgtgtacttaaaagcagttgttttaatttgaagactaattgtatcctcaccaggtgattgttgtcatttttgtgcaggaagtaa

SEQ ID NO: 17206 - DNA, 746 bp, Glycine max
  Intron number 2 from transcript Glyma07g30070.1 (locus Gly ma07g30070) derived from phytozome v7.0 (chr-ID Gm07; pos 35137035 to 35137780)
tttgctgccgaggtctgtcatgttgctcaatcacactctttctttatttactttttttatgaagaagaaaaaaaacactggttttgtttcatgtagtggttgggttgtgccatgtttttatccttctgttgcattaaaaggagattgactgatgaatattgcaacaagtaaaatataccggattcggtttcgaatataagaagaaaaatatcttgagtgttggttttaaatatcagcaaattttaattaattttaattcataatgagaccatctccaaagtacttttcattgaataggattttaattccaataacttcttctgattcttaatatcatatttcaattaagaaaataacttactattttttaattgaaagtaatgctatagcccccatctttttgagtttgtccttagttgcaaatctattttgaaagataagccaaagcctaaaaggaaactcgagcgagatgttaaatttgtgccaaaacagaatagcctaacttaccgtaggagagatatgaatgaatatcgtgataaatagaatatattgcagggcagtaagaaaagaaaaccctgtgattgtcttaaaatcattcaaagttcctgtgttgaattttgcggatgaaatatttacacactcttttacggcaaatgattgcaatcagattaacgtgttgaccaaatttaagtattctttctgattgttcaggaaatattttacacctggaaggacaaaactgagca

SEQ ID NO: 17207 - DNA, 1032 bp, Glycine max
  Intron number 2 from transcript Glyma11g33260.1 (locus Gly ma11g33260) derived from phytozome v7.0 (chr-ID Gm11; pos 35052794 to 35053825 reverse strand)
gtgattttaggctcttcggtaagaaattaaagcaccaaaaaatgaaaatgtttttggctttagctaatttctgttactcgctcgctttttaatgttcttcaaaatttaatgttttttctcttccattaagatataaattttaagagtgaattcttacgtttatcatctaaagaaataactcattttaatctttaaatttagtcattaattatacaaagtgtcattaaattgattgttttaatgggctaaaaaatcactgtacgtctgtacagaatcctaatttaattattataataaaattttcttattccatttaattttcaccaggccttttcttcccttcaatttgatcagaatgagtaaaatatctaaatagaaaagcaatgaagttatttatttcaatatatttaacttcacaacatttcttattttatttcgctccttttttttcattatatattcaataatcttagaatttgaattcaagatctaatttaatctcgtaaaaatacatacgagagtgagatctaaaacactattatctctaaacttataagatgagaacggttcaagtattattataatttggtcgaggacatgagaactcaatatatatttttaccttatatctttaccaatttaagttttctattaacaataattatattaatatacctcactttttttctctattctttttgttttgttttattttatttttcctttggacgtgatttcttttggtgagtatgtgaaactgatgtacgatcattttgttgccttcacatatatagtcatccaacaacgttaggctgttctgagggatccaattaagttgtgttcgtttaaagataaagagggaaataaaaaaaaaagtaaaataatatgaaattcatattattacactttattttaattcaaaatttttatcccaatttattttctttttattactttcatctctacagatttttaatgtgattttttttaatcttatttattatacagaatccagggctattataaggtact

SEQ ID NO: 17208 - DNA, 677 bp, Glycine max
  Intron number 1 from transcript Glyma08g15910.1 (locus Gly ma08g15910) derived from phytozome v7.0 (chr-ID Gm08; pos 11597539 to 11598215 reverse strand)
tgcattagacacaatcacgttgggctctactacaggtttggaaatgagaatggacctttttaggtcatttgcatgttttgtatttatctcttttaggttgatgccaatgaatattaagggtctagttaaaagtatattcatcaataaaaatatttttttattaagatataagttattgttgcgaattatgattggatacatcaaaaatattttatgctaaacttttttaaaaaattatgttttttaagagtttagttaattatcatcgttttataaggctttatttatttaatgtctattatttttctgtttgcgtttctttttcatttggtttaaggtcattccaacgaataatttaaaagtatataattaaaaaattatttaatataaatttttattataaattaacgttattatgaaagaatacaattggacaactgataaaaaaaagaatagaattggacatttaaaatattgtatgttacatttttttatacttgcagtttgttagttatttattgtctttaggagtttttttcttatattttttctattattttgttaattaatgtcttcaggagttaaaattttcataatttttataaactctcttttttaattggtattaaactctctttttaggttcctcggtctcatttcccaagattcccattggc

SEQ ID NO: 17209 - DNA, 585 bp, Glycine max
  Intron number 2 from transcript Glyma08g40820.1 (locus Gly ma08g40820) derived from phytozome v7.0 (chr-ID Gm08; pos 40664224 to 40664808)
aggtaataattcatttcagaccttattgaccaaaatggattatttttgtcaagtaagatacatgagacgtaatcctgaatgatattttatattttttttccagtaacaagaggagtcaccttgaatgacacctccttttcatccatgatcatttggttttgatcaatgtcacttataaaaggaataataaaacttaattttacatgtgtcatgcatagagataattgtttatatgatctatgacttttggccaatctcatgtaaaaaaaattaataaaacttaattacatgtcatacaaatattggttaaaacatatattcttatcatataataatttatcgaaaaaaaatattatatggtccaataccatatgatcctgattaatctccttatataacatgtatgaaagaattagtaaaacttagatacattttctgtaaagattggtcgggatcacatggtcccaaaccatatcataatttctccatgcaattaattaaagggaaacaaattaaaaacaacctttaggttggctttaatttgtagttgttgggtttgagttttgtttgtgcattgtgcaggtg

SEQ ID NO: 17210 - DNA, 568 bp, Glycine max
  Intron number 1 from transcript Glyma09g08180.1 (locus Gly ma09g08180) derived from phytozome v7.0 (chr-ID Gm09; pos 7249500 to 7250067 reverse strand)
caattggacgctattcaagctgtgctctcaggtgcattaacctttttctctctaaaagcatagaaaaattgaattatggtatttttttctttgtgtttgtagtaattggtgccttagagaattgttgatgattaatgatatcaattcaacttgtgttctttgcattagggaaagagaagtgactatttgattcacaagtggtttttggattttccaaaaaatccgaattgattcaacaaaccacttcactttataaaaatggttcaatttaggttcagttataaagtggtttggtttgttttttaggctcgattcggttcaatttggttatctattttatactcatatatggttcggtttttcctgagaaccgaactaaacccctttataaaaacggtttggttttctcaaactggttcggtttatataattcagttcaattttagatcagtttggtttgtttgtttttttcacacccctagcatgtggtaatttaagtttgatttttccattgattgtggctctttatttttattttttggctgcagggaaagattgtttttgtctt

SEQ ID NO: 17211 - DNA, 716 bp, Glycine max
  Intron number 1 from transcript Glyma07g07260.5 (locus Gly ma07g07260) derived from phytozome v7.0 (chr-ID Gm07; pos 5972812 to 5973527)
aaacttttctcttctctttgattcttctctaccaggtatccttcttcaccctctcttctctgatttctgcaaaagaataaggaaagaaaagaagctcttattttctatttcgtgagaataactgaagttaggtttgtgaattaatttcataatcggtgccttttgcgaattaatttggaaatcggtgattttattcggtttaatcggtttctagttcgccgatctagagtgtttgatgagttttagatggtttgaccttttttttttttctttcaattaattttgagatttgcgttgttgaatttggctgctgttgtttgaaattttaacttttaaattttatatctggacatgtttataactaggattgaaggttgaattttattgttctagtttcttttttaattatttatttaggtaaggtaaattttagacgctatggtttttcccttatcagaattttggtcccaataatattttgtgattggttattacaacttcacaatgtttttgtccctcagtgaaaattataaagactaaaatttgaaaccctttatctttaggaaattttggttagttggctgctaatttctgattctctttaaggtttacatcttgtaagatttaatttttggtttggtggacctttacaatatggacacatactaaactaaaccatttccagtgaatctcacggcaagcaatccagcaggtgt

SEQ ID NO: 17212 - DNA, 988 bp, Glycine max
  Intron number 2 from transcript Glyma07g07260.5 (locus Gly ma07g07260) derived from phytozome v7.0 (chr-ID Gm07; pos 5973670 to 5974657)
tttggtggccaattctacatctgaagctagaagaggtagagttgtctaatgttgatgattaagatggcaattaccaagggtctcaatggctgagaaatgcttattaatgttgaaacttgaaagtcaatttcacctttgatatatgaagtgatgagtcacaagtgaacatagatcttgtcaaatgcagcttctaggaactattggttggtttggttaaatattagtccaccaaatcttataaagtaatagcagtatttatttgaagtgaaaaaaatggattggacaaaaccaatttctagaagtttggttcagttcagttcttacagttttatccctcaatcattgtttgtgtcttgtgtttctttaatggttgttaactttggactttagagaatgaagtaacctctgtctttccttatttattctaatataaccctcgtgtgcagtgtcccttccctcgatggtaaaataaggcgagacagaggtttcttcattttctaaactttccctctcgttttgattcttcaatcatttcaggtaacaacatccttcgttctatgcttctttgcttcccaaagaaattagggttattatttgcttctttttctctgtcattttggtaattaatctgataatcgattattttctttgatttcatgtgctgaaagtgtttgataaggttttcatgttctgacatttttttgcaggtaaattttttagacttgtggttgataattcgctgtagttttatggtttttaaggttcctataattaattccatactaaaggttttggttcatcatatttctcattcttgttaatgttaatgtcattgttatttttaatcttaatgtttatcattcccgttaatttggttttgtttattctcaatatgagttgaatcaaaattgatgaatttgtttggctttccgaaaataatgatgtgtttgtgttagttcagattggcaagtatagttagttatttgca

SEQ ID NO: 17213 - DNA, 341 bp, Glycine max
  Intron number 1 from transcript Glyma10g40490.1 (locus Gly ma10g40490) derived from phytozome v7.0 (chr-ID Gm10; pos 47891853 to 47892193 reverse strand)
ccaccccctcctttccctctcaaccaaccctgaaggtatggcctactgcttcatttctctcagcctttctctttgcttttcaattgtgtatggtcggtcaatttggtttctcaaaatcaatggcaactggggaacttaatattcaaagctcttcttatggctagctagatcatattatgtttttttttgtttcaattgtttggttttccttttttcattctttttttgtttcaaaatgacctattttatttctttggcctcttcttagctagcaagcagacttaagcttggccttaatagttttgatttgatccaaataatttgcgtagggaacgctctgc

SEQ ID NO: 17214 - DNA, 741 bp, Glycine max
  Intron number 2 from transcript Glyma13g33040.1 (locus Gly ma13g33040) derived from phytozome v7.0 (chr-ID Gm13; pos 35012298 to 35013038 reverse strand)
ttcaaggattagttaatccatctattggtcaacaggtataattacgtttactttccaatattccttgaatgatgaattaataattatgcaccttttttttatcatggaaccatgaaaaaggggcctctgtttctgagcgggaattgaatattttactacaatgagaaagcaagttcagcgcagtactcctgctgtttgctttttttttttcttagtttttttccttctcggatgattttaaaatgttttattttgaagagtctaatgattctacctagtggaataagtattattgttacttgttaccggctaagcaatctctcatggacatttgaaaattgaaacaattgtctcacgatgattctatggatttcacgtcagttatttttcaattttcttatcgtagattaatattgatgcagttgtatatctaaagtgaatctgctcttgtaagtgcttggcaattagtgaatgaattttttttttgaagtagacaattggtgaatgatatcacaatgtttctacagcattctgcatccttacctcgaaaggaaaattggaacaatgaaaaaaataaaaattgatttagataaagttttgacttttgacatagctagcttgcttaagcatgcacaattggaaatcaggagaggcagtttttttttagtttgaagttaattctgaaatattctatatgtacgtatagcttggaagtgactcccttggcatcctgcgaaagga

SEQ ID NO: 17215 - DNA, 709 bp, Glycine max
  Intron number 1 from transcript Glyma13g33040.1 (locus Gly ma13g33040) derived from phytozome v7.0 (chr-ID Gm13; pos 35013079 to 35013787 reverse strand)
tcaaggtttgaatcctggaatcatatattctgggaagactttacttaaccaccattttttacatcttgtagttttgcctgtgagaatttccggtcaaagagtcaatttttagtggtttctctgaaagttatattcggtcttctgcttttttaaattggaatattttccatatattgattcacttttctttaacctatatttgtcttctccatacacacgagctagccatttgattccaaagctacaacttggctttcgatcgaatagtcaattttctcaacatataatataagcgggaactatatgcattgaggcactagttagctcataaatgtaccatatatatactaagtcttgaaaataatccaagttccacatcgactaaaaataatctcacattaaaatatataagtgagggacaaccctcaccccttaagttagctttttaagttgtgttaggcttctttcattatacattttaagactaagattatgagcttaatgcacacctattaatatgaatttaaatgcttaatttggttactccccaaatttgattttaactacttgatgtaatacaattggatcaaaaataatctacattgacataatataaagttattgattccatgagcccatacgttggttcaaaagaaatagtaagaggaaattttgaattttaattttaatgtccttgttatttctcagc

SEQ ID NO: 17216 - DNA, 840 bp, Glycine max
  Intron number 4 from transcript Glyma08g14720.1 (locus Gly ma08g14720) derived from phytozome v7.0 (chr-ID Gm08; pos 10719236 to 10720075 reverse strand)
aggtaagcaaaaatagtttatgctctaactctaaacataaccaatagagtaactaactacttatgttatgctgcgtagtcattggctaggtctcaatggatgatttaatttgacctaacttgtttgaattattcaaattagtttatcgtttgcttgccgaaaatctttgatgattttgaattttctgtctgattgacaacggtgccagacttgttttatcattattcaatctgtctcaagtctgaaattatttacttgcatttgtttgttcaaaagattcttcaactggcttttcagcttctaaagctttttttgctgtttgttttatgtctctgatagtctgttataattacttttgttgaaattaaagaaagctttttttattctttgataaatgtaccatgtttatatacaagtctgagagactcaatctcataaatttagggattaaaatcaaggattagaatgaagctgcatatataaaaataatagaaagagagcagaatttccctatttacataaatagacaatatttacctaattatacgaaatatctcaatagtatttcccacaatatctcaactactttattatgaatgtatcatttattcagggtccggtaatatgtttgctgtggtaaaagtcacaaataaaatagtcactccttactgtgcacatatttccatttataaaattatggctgagttgtttttggacagcttaatgcttatcacatactagtactccattttttttttccttttgctcactacaatggctttcatttatggcatgagtatttcaggttattattccagctccattctgggttagttaccc

SEQ ID NO: 17217 - DNA, 972 bp, Glycine max
  Intron number 1 from transcript Glyma13g33620.2 (locus Gly ma13g33620) derived from phytozome v7.0 (chr-ID Gm13; pos 35413793 to 35414764 reverse strand)
cacaacctttaaccatcacattgtcaacaaattcggtacgtgcgtgcatttctttcccatactgcttagttttgtactcttatctgcaaatttctcctccgaatttgtttatgatttcaccatgtttgtgttttttctttcttttattacctccaataacttgaatattaatttctagcattttctttcaaagaaaccgccactttcgtttaactttttctttttctttcccaaatcaatctgtcggcttctttactgtaatatatggtatattttgcttttaaatttgttaaaatagtatcctttaaaaattatttatctgcgttatgcaagtcgactttgattttgtaaaaaaaaaaaaagcaatttctgctttttcttctcctcagaaaattctgtgatgtttcttaagcgtgagaaaaatgtaaaaacatgctggaatttgtttttacaaaaatcaaaattaactttcagaaaatcgacttacatcatatgaataagtctctttagaatatactattttttataattttaaaagtaaaatataccacttgaattaaaaaaaaaaaaaaaaaccattctatcagataagatattaactagaattgaaatatataattgcatttctggtacggctttataatctagaccgcccactctcataactttcgcacgtacaagatgcaacacatggttcatttactttttatttaaagttataaaaaaatattaaatttttaatttttgaataattttaaaaatgaagtacatatctttataattaacaagtatttaacataatttttcattcctataatgtagtgttgttttgttttttttacgctagtgttgttttgtttttagtctttctaaaaaatttatttttagcttttgtcccacaaaataattggtgttatataacataaatcatatgcaggcaagaattcatttttttgggaaggtaccaaacca

SEQ ID NO: 17218 - DNA, 932 bp, Glycine max
  Intron number 1 from transcript Glyma09g40770.1 (locus Gly ma09g40770) derived from phytozome v7.0 (chr-ID Gm09; pos 45601083 to 45602014 reverse strand)
ccactctccgcttcatcgtgatacctcactctcaggtcattttttttctctcacttcaacccacaaattttatgccatctcacaccgttaaaaattcgtccttttcactacccccacattgcttccattcctatcgacgatttccctcatctgggtatttcgtaattgtagcggtttagttgcgatgattcgaatatatgataatataatattttataattatgtatttttttaatttcttccttgcaatgtttggcaatgcactgtacgttattcctgaattcacaagctttccactttccaccaatcatatgcatttagagctagttgggcatatcatgagatggacctaaaattgaatgattgaactggttagcatctttctgccactaattgtgtgagcggttgtaaacttgattttgagtgatcctgattttagttgaaggtgaatttgaagtgatgtgatttatgattggtaatttttatttaggaagtaagtttgtagtgaaatttagtataaaattttcaacttagcatggatgttgtatatattttttccagttgtagttaaacgtgattttaggagcgaagttgatttttaatcactgtaaccaaatatgcaaaagtttgccaaaatcatgttttgccaaaagttgatttttaggagctgaaatgctcccccatactattaaccaatccatgtgcatgcaatcagatttgagcttaacttacatgatttgatgaagttggtggtcttactggtctgttgggttgtgtcgttcttagacgtagaatagtcctagtgctaagtattactagttattattatctctcgttaacgattaatttagattccttgttatcggcattatctggtttgttttgattatattttattgtctttgataatttagatttttatggggtttcag

SEQ ID NO: 17219 - DNA, 594 bp, Glycine max
  Intron number 1 from transcript Glyma13g29290.1 (locus Gly ma13g29290) derived from phytozome v7.0 (chr-ID Gm13; pos 32207267 to 32207860)
ggtctcgaactctactacaactaaacacaacaaggtctattcccatctcaattcttcttttaattgatactagggttttgttttttagggttcccgaattttgatttgtttttctgctataatcaagttgcgttctgttttgtgacatgcttgtaatgacgattatgcttcttctaattcttcgagttagacaattatatctcgttttcgttttttgtttcaggtgtgttttatgcgtaatatactatgtgctgggaatgggataagcgctaaatgtaattctgacttgcgaaagttcccatgatttgaaataatgtacatctccaaatgatattgggtattatataccgttgacagcttaagttgctttgttatataacctatatctgatgacttgtttggcttgttgctaagctttatttgggttctgtgtttcttctagagcctatctattcaatctgatcggttaagcgtttgattatgtcaattgcttttttaattatttggttttcgattaactatttttcgtcactttaattcactggacaatggatgtcaggacttagggcataatcgcaagttcacagtgcttga

SEQ ID NO: 17220 - DNA, 495 bp, Glycine max
  Intron number 1 from transcript Glyma08g11240.1 (locus Gly ma08g11240) derived from phytozome v7.0 (chr-ID Gm08; pos 8214583 to 8215077 reverse strand)
taggggcacccctttcaagttcaggctaggccaaggtacacattcattcattcatgattcacttttgtttttttttagaggtgaattattgatttttttatagagaggattttaattgaatgacattataaaattctttatgctgatagatactaagatttaacaggatgaaataagtaatattgttctttgctgaaaaattgattaggatcaatttagtgattggaggtttgagtaatttacatagtattaagttgaaattttgttactggtattgtatgtatataaaaaacaatcattcattgattaaaaaaacaattgttaatgttatatgtgcatacataataaatcataaatgtaatcaggatgaaggttatttaatttattgttatactggacatgaaaattaaacttaagtgattaatgatgaatggatgaataactatagtattcaatgttttgtgacttgactaatgcagggcaagtgatcaaggg

SEQ ID NO: 17221 - DNA, 1010 bp, Glycine max
  Intron number 1 from transcript Glyma11g12180.1 (locus Gly ma11g12180) derived from phytozome v7.0 (chr-ID Gm11; pos 8694713 to 8695722)
gctcccagcactgagcttaaccgagcttcacaaaggtaccgtctttattgctccactattcaatcaccaaatttcatatccctttcgttgcaccttgtttgggttatgttaattactggttacatcggtttctcaaccatttgattttgacattcttgtaatgttttggtgatgtgatgatttcgagttctatttgattatttgttttctgaatttgggtcctttcattgggattattatactgtttctctctttctttatagatgggattttggaaacgatcgatttttagttgcaattgtttttgggttcatcaattggttttagggcttctattttctcgaatcgcagattttttttttccattgcaaattgcagcttggtagaaagtgttggagataaatttatgatggttgcttttgattattttctcatgtgaaagactgaaagttgttacttgttagatattatttaaaattatgatatggagttagacttaccaattcaatctggtattgtttgtatgatgtaagatgttgtatttatcttttctagaatatggatttagtgcgacactcatgtgggctttatttatctcatggttgtcaccttgatattgatatgatctagtatagtattgtagttgaattcagtgtccaagcctaagagttgagtcctgttttgatgggtagcacgacatcttttaaaatctaattgtttggcttcaatatggaataagcaacatataacttctctgttataaattagtatgtgcatttaagtttttgtgggtgccactatgaaaagtccatataaaattacttatgctgttccagtagaatgtgttatgtatgcttcaattatacaatgtagactgtttgattatgtcttttgtcatctttttttgtcgtatatttcctctctggttttattaccattaatttttggatctttgtatggtcctgttgcttagggtgaaatttatgtttttcttctttgcctttacccag

SEQ ID NO: 17222 - DNA, 503 bp, Glycine max
  Intron number 1 from transcript Glyma10g21990.1 (locus Gly ma10g21990) derived from phytozome v7.0 (chr-ID Gm10; pos 27953129 to 27953631 reverse strand)
tctgcacacagaaacttgcttgctattactacaaggtaacattaacataaacgttgtcggtttcaatctctcaaaggcttcgacttttttggcagtgcgatctgggtcgtcctctgtttgattgatccaccattgtttcattgttccttctttccttttttttttcttcttcttttctatgaagattgctttgttttgtttttgcaacttggttttctcttttttcttttctcttttcgcagcctttttttccctatagccaaaattttgtaatgtagggtcgggtagatattgaatagaagccaagtttgattaattcttttatgtgtggaatcagaaaaattttgaatacaaaccttgtatttgttgattaaatgtatcaaaatctcattggattgtgtttataagaatgcaagttatttttatgtatggctagatccttcctgaaattaatttctgtttatgggttttgatcaggattggattctggcaaggatttctct

SEQ ID NO: 17223 - DNA, 618 bp, Glycine max
  Intron number 2 from transcript Glyma12g01500.1 (locus Gly ma12g01500) derived from phytozome v7.0 (chr-ID Gm12; pos 903648 to 904265 reverse strand)
acctgcgtcacgagaaagctctaatcgtcaaattggtaaatcaaccgctgcaacattttctctttaaatgaatctgaataaatgacttaagaaatgtgaactgattacgtgtagaattaggatattgaatgggttccgtggtgaaatccttttggcttttgcatttgtatttagcttaggtgttttagaatttttgctataaggaataattcaattgaatgggttcttagtgaaatttctgacatctctttaagttacattcagtttattttgtgaaaaatagaagctcaaagcatatagtgcaataaggagaacattatcaattgtaaggatggaaattacctgaaaatctgactcgactttggatgctttgaatttgataaataattaagactatgctaacaatttgaaggtaaaaactaaaaccatgctctcattttattcagtgaaaaaatttgtcacctgagacatttcaattatcataaaagatttcatagattctgctgtagttaaagtgtcttttgtttatttctaatcaaagataatgaatgaaaggaatagagcttcttcatctaacttgttgaagtaaccacttctaggttgatattgttgacttca

SEQ ID NO: 17224 - DNA, 781 bp, Glycine max
  Intron number 1 from transcript Glyma13g21190.1 (locus Gly ma13g21190) derived from phytozome v7.0 (chr-ID Gm13; pos 24692997 to 24693777)
ttacggttacgtcaacttcaggtctcagcaaggtatctctctctgagacacgtatatataacaacattaacgattaacagtttctgagataaattgcattgcggtgttttctttattcctttctttgatatttctttttgcgtttagagagagacagggaattttcatcgttcctttgatttctgatattaattgcattgcgtttttttttctttttttatcgtttcttcgattattcttttttgtttagagagacagaattttcatttttgtttatcgattgccataacgtgcaacggagtaggaggatataacagtacaaagctagctagttggttctacttagtgttttgttttctaggttttcaagtgagggatatctagggtttttcgttgcttggcacgtagtttgatgtttcagattttggcttcattgaaaatggagggtgtattgatactaatactattgttgtttttgtaaagaaacgctaatcttggaagactcttgtcagtttagcgtgtttctaaaggattcagaccaagttgtgtcactgacatagtgtgtggcttgaaatttgtaattgtaattttttattaactgcaagattttttcttttaaaaaactagagcatattgattgagatcttagagaatctttaaaacaagatgcttacctcaattgccttagtatgtttatactgttgatgtagtctgattccactaaccttgatttatttgttgagtagcaattcgtgcaatcaagttgagaaacaattcttat

SEQ ID NO: 17225 - DNA, 746 bp, Glycine max
  Intron number 1 from transcript Glyma10g41060.2 (locus Gly ma10g41060) derived from phytozome v7.0 (chr-ID Gm10; pos 48265898 to 48266643 reverse strand)
ttctgcttctactttacaagattacaatttacaaggtgatttgatttgatccaatccctctctctatgttgacgctagctagggtttctcttcctgctttgtaaatttcatcacgagtctctcatatttttaaaatgggactattctcccatcaattcgtttcacgaaattcaaatgtgtagtaggatacccagtgggttgttcttcaatcaaatgcaaactcgcggctagactcgctctaactcatgattttatacagagttagccaattttccatcaaacacccaaaaatgtccaaaacgccaccgtttcgctagggtttgtttgtccctttattttaggttttacgctctctccctttgtttgtcacgcacaccaacgagctcaggtctggttcagttttttgctttcttacattccattctcacttgttccattcctcacttcgatttgatcccatcccattttgatcctttttttttcactcccaagttcagatactgaatttagtccttgtaatattagttaaacttgaaaattaaagaatttgtcactgtgacttcattactttttgtctgtgttgtcctgttgctactgaattgtgataatttatggtgtagactctcacgagtttaagttgattctcaagtttgacaaccttgcagttgcatatacatgtatatgataatctttgtgtttcttatgttgcagttacatttcagcaagtcaaaatttcctccagaaag

SEQ ID NO: 17226 - DNA, 941 bp, Glycine max
  Intron number 1 from transcript Glyma13g34370.1 (locus Gly ma13g34370) derived from phytozome v7.0 (chr-ID Gm13; pos 35950918 to 35951858)
atcgcaaattttcttccccaaatcgtagatctacggtaaaattctccttccatcgctgcttccttttccttttcgcggattcccaaatctacatattcctcttcctgcacccccgtttgtgttccccgattcgcttctcgccttttgcacgtgcgaattagggtttcaattcgcgtttgccatttcatgaggccagatctagttgtattgcatgcattggtattgcgtagctcgctggttttgtttactgttatttaggttaaatgcaggcgatgtgtaattttctgtagccatgtaatcgatgattgatgtaccttttttttttataaaaaaaatcgaaattaagttttgtttacatggtatcgtttttaggatcaaaagattgaaccagtgaaaattgggcatttggttgttcttgtattctcagtaaactggaaattttagtgagcacaaattgaagaaggtttgctaatgtagatgggaaccgtcttttaatgtagtgtgtttgggtgagtttttaaaaaatgattttgactttgcaaaattgattttcaagcaatgtgatttatgtttcatgtttcgatgtttttattttaaaagcaggatacgatttgttatccaatgaagttatctataattgcttcaatgcaatcaattatggactcgtggatcattttttttaacataaaactaaacatatgaatatttacttaaaatcatcttagctagtatttcaactaaacatgccattaggaactttacagtgcacagcgttttttatttcttatttttgtttgatttgggcttcgttatttttgatgaattgtcacttggatgctgagatattctctagatgtacgatattttggctccttgctggtaatcctattagatatacgtgttgaattttggtacaggtttaactggagtagtgtggtaag

SEQ ID NO: 17227 - DNA, 1019 bp, Glycine max
  Intron number 3 from transcript Glyma05g33810.1 (locus Gly ma05g33810) derived from phytozome v7.0 (chr-ID Gm05; pos 38355727 to 38356745 reverse strand)
cgccgttgctgccaatttcgttgactttgcattgggtcagccaccttcttctttcatagccatttaagtgtatatatctttttcttttcagtaactgttgggcgtttgtacagttattgcaatcaacaaatgccatctttcttctattctctgatctggcttcctaacagcaactaaacacaaggagaatatactttataaatttgtctttctcgtaattgtagagggtcatgcattcatatgatgtaatggagtcattttcctccagggttggctcttttcatgtctgtattctttattttatttttttgaggggtagcataattcactcctcgggaatagaataaatgctaaatacaatctggtagaataaatgcgaaatcctatggatcatcaccttggttgtcaattatcatgtgatatacggtgatagtagaagaaagctaactttctattttaagttgttcacatgctgaatttttaccattaaagacctaatggattgttggtaaagatgaaaaaaacactgcttcttcttttatcgtgagcttttattttttcatcctgctacatgcctttgtttcttaatttctctttacaatcaagtatagacatggtctcagttttttgtttaaattaattcagaccataacacataaatgtgcttaaagcatatctaaaatccagccatttaattgtttaactatgtcaacagcacacttctgttaatgggaaatataatatccttgctttgcattttctatggattaaaatattaatgaaggtatctctgtaactttgattcattgttttgcgattatgtacatttgtcttgccacatcactgtaaaatatttcaattttaacaaccatagagttattttattttatatatatttgcatatttataatttttgttttattatcaccacatgctgatatgtgaaaaatgtttctgatactattgcaccatcatgtataacaggtattgatacaactggcggggtgagagtacctgct

SEQ ID NO: 17228 - DNA, 878 bp, Glycine max
  Intron number 2 from transcript Glyma0777s00200.1 (locus G lyma0777s00200) derived from phytozome v7.0 (chr-ID scaffo ld_777; pos 4206 to 5083 reverse strand)
aagtaggcaacaccgctctccatctttcagttctcaaaggcttcccacagtcatgaggcatatctttcgattcttatattttacttcaaagaaaaaaagaatctttttaaaagacctgagcttatttaatttgggtttacaaaattagctttaatgaccctttttataaattttagattttttttttcattatgacattggtgtcaaatgtcaccgattttactgataattaatctacgttggagaatctaactgtttagtaggatttttctttttaatcatattttttctatttaaaagactcaaattaaaaattttatttaaagagacgtaacatagttccacttggattaataatttctaggttagtttatttaatcatgggttaatttgaacccaaaaaaaatcataggttaatttcaatatggtgcttttgatatgctgcgttggacatagtggagatcaatcaaactcaggctcacagtgcattgataagagatgagttagttagatgaggagcttttacgtgggtttttgtaacattccattttatttttcgtaaataaaattttagagaataatgatgttttataagtaaataaataaagaaaaatagttataataaaataatggtttgagagaaaataaaaaaggtattttattattcatttgatcgagaataaaatagtttctttttttataaaataataaaaataaataaatagagtaaataataggtcatgaatacccctagttataaatagcaaaatgcaaggtcggttttcagactgacttctctgcctttcaatttcattttttctcttcttctttcaaaattcattctttttcccgcagcccaccaaatttgtcttagaaaa

SEQ ID NO: 17229 - DNA, 515 bp, Glycine max
  Intron number 1 from transcript Glyma11g19800.1 (locus Gly ma11g19800) derived from phytozome v7.0 (chr-ID Gm11; pos 16577785 to 16578299)
cccccatcgtcttgcccctttatctgtgagtatatataattctcttataccatcttagaatttaagtttagatctaattaaggacctttggagtgtgcttctctactgtaaagaagctctcaaaagtatttttaacattgtatccaaacaaactttaaatctcgaaagttaattcataagatgaaggttaatttctcttatatgcattattttagtcatatcactattcactagttagatctaattaagagtctgtttggatactagtcataagtacatttcgagtgtgcttctcaacggtagaaaagctctaaataaacacttataactttgtatccaaacagattctaaatcttgaaagttaattcataagatgagagctgactccacttatatacattattttagtcatatcactattcactattcttcttctatttttgtcaatttttttattttttttatttttgtgattgaaatttgggtatttggtttttggcaggaagggaggatag

SEQ ID NO: 17230 - DNA, 908 bp, Glycine max
  Intron number 2 from transcript Glyma13g27110.1 (locus Gly ma13g27110) derived from phytozome v7.0 (chr-ID Gm13; pos 30280751 to 30281658)
caatcgaagaggtatgcatgcatgaccaagtaatcgtgatatatttatttggcttcatatatactttcatttaagcatttcctcaattagtttggttcacatatatgaaccagtttgaaagaacaaagttaccccttttgatcatcacccttcttcaaaagtatatgttaatttaacttattaaataatcgtgaatatacggcttgcaacttgaacatcatgttatgctctttatgtatctaactacactgtactctctctctctctctctctctctctctctctctcaccattgtagttgtacctaacaaaatggtgcagaactcatgtactacccatctactaccttcctatttgaaaaagagctcataaaacagcgcatgccctgtgttaatttccctcttctttttcttcttatatatttagtgtccttttgttatttttcttgtgagtatggagcatattagatttcgaaaacatgaaaaaaatgagagtaaccgatcttcactgtacaaataaacatatatagatagagtaaatatatagtataaaaaaaattacactatcatatgattataaactgtaatatatgataaaatttatttatttttacaataattatcttaaaagttatatataatttttaatttgtttatagtataatttttttacactaattaattattaacgatgtataaaaattaaactcacatagataattaaaatgaactacttttatttctcacattctcataatcaaaattggaagaaggtataaatttctaattttaattttccatctctttagcatctcaatttattagaagtttacactcagctgctatatatattcatgttttgtcaatttgctagggaacaccaaggaaaccactgaataaggaagaagt

SEQ ID NO: 17231 - DNA, 699 bp, Glycine max
  Intron number 1 from transcript Glyma10g07430.2 (locus Gly ma10g07430) derived from phytozome v7.0 (chr-ID Gm10; pos 6127877 to 6128575 reverse strand)
ccactgtctggctcgcttgggacaccaaacattctgtctcttcttctctctctctctctctctcttaagccttttgtttcgatctcccccccccccccctaattcgttgttttaggtttattcttgaaatgtttttttgagttcagttacgtgttagtctgaataatatctagacagagtacgggaaactattggcatttagcaacggttcacgctaatttaggaacaatttttgtttttcgaattttgttgacttgttttgtttcttttagtctgattaatttataatctagagataattcaagagattattggcatttaacaatggtttgacaccaaactaggagcagtttttgtttttctgattttgttgacttgttttgattttgtttcagtttgattagtttgtaatctagagacaattcaagagattattggcatttagcaatggtttgacactaaactaggagcatttttttttctttctgattttgttgacttgttttagtttgtttaatttctaatctagagacaatacaagagattattggcatttagcgatggcttgacactaaactaggagcagtttttgattttcgatttttgttgacttgttttgtttgtgtttttttttttttttttgtgtgtgtgtggagatctgcagagatacgtggctttgaaagttcagaagagtgctca

SEQ ID NO: 17232 - DNA, 692 bp, Glycine max
  Intron number 1 from transcript Glyma13g28630.1 (locus Gly ma13g28630) derived from phytozome v7.0 (chr-ID Gm13; pos 31638708 to 31639399 reverse strand)
agaagccttctgggattggaacaagatccaaaacggtgagttttatgttttgcttttcatgtactatgggggggaagttgggaatttttattttgtgtttgattctgaaggaaacggttaattaaatatgtaattgataatagttttttgtgattgttttaacttgaaacttgtatctgttagcttgaaatcacaggaaaatatccagggtgcctgaatagttttgttaaattcttcatttacatagttggggtaaataatgaagtaaacccccttttgagaattttaatatattaatggggtggtaaataattttcccttgaatttgtcatctgttaaatttgagtaattacctgtagttttttttttggagtggtggttggggatgattttggcaaaagtaaccctgatcgcggatattttgcctgggaaaatttcgttgataatgcataacctattgattacagttaaaggagcaattgtgaacttttattcttttgttaaccctgattacattgatgaatgagaaccataagacagtttattattctgcttcattcaaatatcatgtagttatgttatatgttaggtggccaaatacactgagtttttcatataattataattataatgtctagctgaaggcattagaaggtaactaacatgaataaaataatatgttttgcaggtag

SEQ ID NO: 17233 - DNA, 834 bp, Glycine max
  Intron number 1 from transcript Glyma13g34890.2 (locus Gly ma13g34890) derived from phytozome v7.0 (chr-ID Gm13; pos 36394132 to 36394965 reverse strand)
gcctatttgttcattgttttcttcgcctgcactctgtacgccctcgctattgcctctctattctttgttaatttgaaggtgtttcggttgaattcgagaatctatgctgtgttttagtcatataaggctcttgaatttgggaattttcatcgtgtttggataaacttctctgtaaatagttatagaaagtagaatgagttgattgtctccctgagttaaatttaggttatacacttgattttcattttcgttctgtttgaatgaacttctttataaacttataggagaagaaaataaaaaatgaaataaacttctgtgataagctcaaattagcttatgtataagttaaaatattcttttgaagaaactaatatgagagaacttctgaagattagcttatgcataagctagttttggcttatcggagaagtttattgttttggttgaattggagaatctataatgtgtttagtgaaataagactcttctatttgtgaatttgttgtgtttgaataaatttctctacaaccaggggtgtttagctcaattggttgagcaggtgcgtgagtgttgtaaatcccctgctatcgtttttgattcctacggattaaatacatcagtttctctagaaatatgcataagccaattttagtccatgggagttcattgtactttacccttcttattttcttcttttgtaagtgtttagagagaagtttatccacacatagtcttgatgtggttcttgcttaatgaatttataaggaataaatgtgtttattgtcgtgctttggtgtaactgtgtgttttggttactatggttgcaggtataag

SEQ ID NO: 17234 - DNA, 429 bp, Glycine max
  Intron number 3 from transcript Glyma14g01070.1 (locus Gly ma14g01070) derived from phytozome v7.0 (chr-ID Gm14; pos 585451 to 585879 reverse strand)
aggagctctctgtcattatagatctcattaacattgtaagtagtgcatcttactctctgccaagtaagggcttcctttggaacattctttagaagaaaaagccagtatgtggcttaaaggaaggaaattgtgttagtttcatgtaattcatcaaggaatggaatacagtgttgagagaacttttatgaatgtcaacttaaaatgccagagaactaacaatcacaggttcataattaagcatcatgccatttgatagtaatgaaacctttcctgtataaccaacttctttgcaatattatggatggcaaccgtgttttgaatttgattaagatttttcttgggtgttttttgtttatagtgtaagttatgtgcagtctgacaatacagacatgatgttttgttcatattattgtttttaggtcgaagcaa

SEQ ID NO: 17235 - DNA, 491 bp, Glycine max
  Intron number 3 from transcript Glyma09g37290.2 (locus Gly ma09g37290) derived from phytozome v7.0 (chr-ID Gm09; pos 42843737 to 42844227 reverse strand)
gaagtggaagtgtcaagagttaccgtaagtaaagttcttgtcttcatcttctcattttatggtacatctagcaatgtagaacattatgatatttctccaaaatggaagaaggaaattttttaagacccttcccaaaagctcgcagagcagatctagcattgttattttgttattatttttttagttaagacaaattatactcccattatttgtactactcttgtcaaagttctaaactaacgaacactatttgtactcatttttttataaccgtgacccccgtacactcgtcctcacagtcaattttagtttgactgtggtcaattttcccccccgtaaaagctgcttcttttggagtgttttgactgatgtgtgaaaagaggcgagtcaaatggctattgattattgtattgaccataatgcttgttttgtttattatcaatggtcatggtgcgtctcttattctctttttggaatctgatatgaccaga

SEQ ID NO: 17236 - DNA, 532 bp, Glycine max
  Intron number 2 from transcript Glyma07g08040.1 (locus Gly ma07g08040) derived from phytozome v7.0 (chr-ID Gm07; pos 6687069 to 6687600)
ttatcaaatctaaatttggaaaacttgatattctggtaacatgcaactttgattctcctctcctttttcttgattgtttggttgtaaatgaaagtctgtcaaagcaatcctataagtctgcatgcaattacttttctgtttttatgattctgaatattaatttttactcttctcttagttcccattgcatgttggtttgatcatcttgctactgctgttattcgttgttagaatgttagttgttgttctgcatgttaagaatgtgcgagttctgttttactttattttaaaatttggcgtaaactgtgttcatttaatgtatcagattatgttccttgcttcttgtattacgttaacatttggtgctaagtaagcttcagtttctgttttatcaatttggcaaatttcttacatatctagttatggagttatgataaattttcttgattgattgccttaaagggaatctcatgacctctcattttggtgtatgcatatttcattaagaaaagttgtacaatgcaggttaaca

SEQ ID NO: 17237 - DNA, 386 bp, Glycine max
  Intron number 3 from transcript Glyma07g08040.1 (locus Gly ma07g08040) derived from phytozome v7.0 (chr-ID Gm07; pos 6687634 to 6688019)
ctgattcattcacttcacttctcttgaagcgtggggcgagtatcttttccttttttgggttatgagaagagcttggtgtgaactcttatgacgagcatgccctgtataaatataatacactgaaatttgattattaaaatcttatgttgaaattctaaatccactatagatgtggtcaaagtagagaagaacttaaaaaaaagaaaacttttactaattctgattggagctttggcatttcaacaatgttgtatgtcaatgagaaatctggcagttagaaaggttgtgattggttttattttagggcaggggatgttgttagggatttgaaaaactactgtcatagagtattgagtttgtcattattctgcaggcagcaccagaag

SEQ ID NO: 17238 - DNA, 792 bp, Glycine max
  Intron number 2 from transcript Glyma08g14450.2 (locus Gly ma08g14450) derived from phytozome v7.0 (chr-ID Gm08; pos 10491249 to 10492040 reverse strand)
ttgaaaattttagtaatgttcattttctatttttcattttgactttctttcccttttccttgactgttgtctttatcttttctttgaatctgctttctgttgttgatgcattttgaatattcaattcaatagaagacaatgcattatgaaaagtggatgattatgttcttgcttcttactataatatttcatataattaggttggatttctttggtctgctctgatgcagattgattcgtgaatagctgtacaatgcatacttggtagctgaaatctttgattttaaagcaccatgatgatttatgtggctactggctggatagatgtgatagtctcttctttttgtgcaaaatatattattaattgaaattgtctcaacctaagtttctaattaggatacgtggcaatggctgcaatttaccactgtccttttatgttctcttgtaacatttagggtaacgtgtaacttttatttatgttaataccaggattgaattgtatagttgaataccagttgtataaatactcttgaggattcttttgttggaaatataagagtgttacttagaaattgttgagtagtatgtgggctaaaattggttttttggcatattggatgtttgaatgataagaaaatgtttggtcctttattttaattttgtggtaatgatatccattcacctggttttgtttgcctttctaatttccactatgtcctgcaaatatggtattgcagttgcacttcttatcatggctgcttattattgtattattttccaggctactcacat

SEQ ID NO: 17239 - DNA, 763 bp, Glycine max
  Intron number 3 from transcript Glyma13g09270.1 (locus Gly ma13g09270) derived from phytozome v7.0 (chr-ID Gm13; pos 10403849 to 10404611)
ggaagcattctgtatctaggtacatatgatgctcaatgatgatgatgatgatgatgaaaccttttagcttaaatgtaattcgatgaggaacttttttaatttatttgctaacaatctggattgatgagttcactgaaaaaagttatattaggtattatgactagaatttaatgataatgttagtttatgaagagcctctctgactattaattacattgccgtcgtgaatagttggtatctagtcgcaattctacttgactgatttgaaacagagtacaatccaagttaagaaagtgaaaattcctcaaaagggaataggaaagagaaggaaaaataacaaggataaggtcaaataaataaaaatcaaaagacgattagtttacgccccggtttacggtctttaaggggtgttagtataaataatttagttaagaatttatttaataaaaactttcattgtattgtagaagaacctatgtcataaccacttaatttagtaaacttattttaataagcttcattaattatcattgggataaagttaaaaatcacttatagacaagatgataatttagtaagctcttttgaaagcttcttaattatctactagaatcggtttagtgacgaaggtttaggtagtttagatgagattttaagttcaaaaatcctcgttgtaaaagtaaaaaagtgtcctgaatttctatcttccctaaagaagatttatttttattagacaatgaatggattccttgacagggaaact

SEQ ID NO: 17240 - DNA, 723 bp, Glycine max
  Intron number 2 from transcript Glyma06g46350.1 (locus Gly ma06g46350) derived from phytozome v7.0 (chr-ID Gm06; pos 48994595 to 48995317)
tacaacagcttggacgaacctttcctcttatcttggttagtctctttctctgatttccttcttgtttagtccactcttaaagtatcagctgcagaaaaaaatgttgaaaaaaaaactatcctttttcttatgttttttgctccatttatgaaagcctatttttggaagctacgatgtcgtttaaaagaggtaatgcagaagaaggattgtggttggtttggtttataggaatatattatatactaaatgcctagatctgggtggttttaaaatctttttgaccggaactgtcattgattttatgttttgtggttcaatagatctttaagattcttctattgtcactcttatgtttattgtaactcctgtttatataattttctttaaaatacccttatttgttaatcaaaataataatttagagaattttataaaattaaaaaattgtgacaagtgacaacagacactcccctgattgaaatattaaatagttgtctgatttagaaatatcaaattttcaatgtaatttgtaggtgttacaatataatacatgaatggaatcttgcctttgcccccaaaatggcaggcaatgtttgatgagaaaatcagtgaaaagccaaataaataagtaaataaaatgtcagagctaagacttcaattgcagcacttattattattcatgtgaggagaattcagtgttatactacttgattctttatagga

SEQ ID NO: 17241 - DNA, 1055 bp, Glycine max
  Intron number 1 from transcript Glyma08g43760.1 (locus Gly ma08g43760) derived from phytozome v7.0 (chr-ID Gm08; pos 43545365 to 43546419)
gtgccggacgatcgggttgacggagagagttcccggtaaggatgttgacgtttttttatgaattgatggtgtttgatattttgactgattggaggatgataccaatgctatgtatgttgttggagtttagtatttcaaaatataaggatatagtttgaaagagaaatgattcttggacctgagttttgtgcacatattttaacttagggttattagaattgttggtattgatgaataaggataagaaagagagaagggaagaaatgaatggtaatgagagttatgcacttgctttgtatgtgcaagtaacttgaattgaaatggggctcttgtttaaacttttgttttctgttttgtagatactccataagaaatgataaaaataggaaacaatgtgaaaacaaaaaatatggtttgtaaatgatgaatataagtaataaaaaaacacactaattgcagcctaaagatattacttttattgtgtgcaaagtgaagttcgtaaaagggcttcttgtcttggaagagatttggtaaaatgttaggtgtgtagtgtacctcctcctttaatgtgtatgttagcatcctccaagttttaaaaaaggacaaaaatttcattcttttagctggaaacaacacaagtttcacaggtaaaaacatagttttatgttacaacaaaaaaaattgaaaactgtaaaatttgcctagtatttatctctctgtaaaatttgtatgtttccaaattgagtaggtttttgtccatttagaggatgctaaactgtatatacaaggaggctagcatatgcacaatcacacacatgcatgtggcatgtatgcgagtggaggcactgggtggtgtaggttataggaacaagagtgaattttcattaatttacgatgatacaagagttttatcacttctatgtttctctgataatatattatagacaaatgatgcttaatttatagtgttacccacttaaagtagttttcttgctaacacaaggcgtttgtggtttgcagatattgttcaaaaacttatagataaggacaaacat

SEQ ID NO: 17242 - DNA, 741 bp, Glycine max
  Intron number 4 from transcript Glyma10g31530.1 (locus Gly ma10g31530) derived from phytozome v7.0 (chr-ID Gm10; pos 40014913 to 40015653)
ctggacgaatttactactgtgtaactaaggtccgttcgtatcaaactaattgctaattaaatgccttctctgtttggacaaaataagttttttcataagttcaaatttggctgtgtataagtttaagttaatttgcacaagttttctcataatagcttttggctccaaaagctgatatttaacttatgcataagttaattttagtttacagtgaaaacttatttcatatcttttctttgtcttattttcttttcctataagtccttatggagaaatttacccaattaaggtctaagtttgattttactcttttcttatgtccattctgaaattaaggttgggtgggttagctggattcttagattgtgtaatgcttcaattggtttgtgttttttgttgagtccttgatactagttttgtttgtttatttggactggactgtgtgttgagatgctattttgttgtcttggcttgtccgtaaagagttaatagctagtttttgctaaccttttcgtcagccttgttataatatgaacacttgacttgagcctttggcagtattaattagacttaacttattcgaattacataagctatttccaatttgaaacagtagctggttggtaattatgacagtgttctcattctttcaggaacaatcttttatgttatacatatacttctggattgtgatattgacttgtggttgttttgcttcttcagggagtaccttgcccctcc

SEQ ID NO: 17243 - DNA, 862 bp, Glycine max
  Intron number 4 from transcript Glyma14g00290.2 (locus Gly ma14g00290) derived from phytozome v7.0 (chr-ID Gm14; pos 76388 to 77249 reverse strand)
aggacaacaggtgatgccattttttgttttgtttagatttcttaaatactactatgtccgcaataatgaggagctgcaagtcagggaatatattaacattttaacagtgcattttacctttatttatggttgtgaacatctttaatccgatctttttgacagttttggaactggactaatttgactgttaattgcatttgtaaactcttgggcttccttattccctgaagaaataacctgtgtatggctaattcataggaagaaagtagttgtttactttgtgaatctgattgaaaatttaatacttcatcctatactactaagcacagttgcacttggtaatcaaaacatttggttatatggtcttacaaggtaacttataaaaccaaaaactgtcttaatgggattttgaactgtattccgcatgactactccaccactatattttgatattttaattttgaaaaacagacaaacattcctttttttttcttggaaggcgacaaacattcctttatatggtgtttattttatgtgtgttggggggagggtctgaactgtgttcttttggtggagaggagttcacaaggctagaacctatattgttaattgtgttgagtaggccaatgggttcacttaattttcccggtggtgtttatgtatttgcaacttcatcttttttattgaagctttactttttccccttgttggtggttttttaatctgggtttacaacaactcacgcacattgctcaaccaattgagctagacccccttgttggtgttttatatagaatgaatttaaataacttgataacttgatgtctattgttccttggacataggttgactacaaccttgg

SEQ ID NO: 17244 - DNA, 846 bp, Glycine max
  Intron number 3 from transcript Glyma05g33360.1 (locus Gly ma05g33360) derived from phytozome v7.0 (chr-ID Gm05; pos 38047084 to 38047929)
gctcgcgtttaggtcgactaaacgggaagcgaaatgtaagtaaaaaatatgttgttttctgaatataaatttttattcatgtactagcaaacaacgttaatccaatatccattcactgggaatacactaagcatgttttttcgcataaatattcgtgttttggaatgttaaatagagtttaatttttgtaaactatccgtttgaagtatttatacacacatccaataggaaatttactttgtcatcacatcatattcataatatgatgatcttgtaaaatgatcagatttgattttatatctctttaaagctttcgagtttgatttctatgcattatgttgactatcaccacctaatattaatatgacttttaaaatattttttcacaaaatattcaacaaagcagtagtttgtaagtgaataatagtatagaaaccctttacacaattaccacatactttgctcaaaaatatttttattttacagtttatagaaatgaaacctgcacaatagatgtttccttgatgagaagtgctaggaacatatattctttttaattagtcaaaatttattaaaaattataaaattaaaaaaaaaagtcattaaatatgatatgagactcactaaattttatcattttcaataaatttcaaccaataaaaaaatatatttaaaagagtatgttaaagagtgtgattctaacaaaatttttttcttcctttaataaccttcacgataaagaagccttagtagtagttttattagaattaacttgtggtagaataattatataaaaagtgattctaagttggtgggggtaacatgtactactatagagattggaga

SEQ ID NO: 17245 - DNA, 993 bp, Glycine max
  Intron number 3 from transcript Glyma07g10100.1 (locus Gly ma07g10100) derived from phytozome v7.0 (chr-ID Gm07; pos 8479234 to 8480226 reverse strand)
aagtaagccggggacacttgttttgaaagtattttggtgtcatacttgataattggaaaatagtactttttgatatactgctaccgatattagatcagattggttcacttgattttatgctagatgttgttgactgacgttgatgctttacagctttctcactactgtgtagtatatgattagacatgggtttttttacttaggctgcctagtgatttggtctgtgtgaagtcctttgtctagggagagaaacaaccgattgaaagataaattagcaagaaactgataaaggagcaagtgatggaaagagagaagagattaagataaaaaatggaaggacagggagagaacaccttctcgaggctaaaatgctgaatccaaggcttggttttctctcagataatcccacttctataaacatgtccccccattattaactatcacctcaacattctatctgcttgccagctcagactaactaacttccctaacagctgtctaacagtttctctagtttgatccttcacacatacaacttccagatcctcacttcattacgctgggggctaacatgttattaaattatggtctttcttaggctggtattaatttatgctttcactgctagcaccatcatcattaaataccattgtttctctcactttacttccatccagagggattcccacaaatcagtcaaaagtttaactttcataggctgtttggtttttatttttgttgttcagtccaatgtcactcaaaagtcacaactcacaacaatgtataagtagaacttattttaagcctgccaagtgatttgggcttcagctacttatatgtcatttctattagcctcctctctttatgggccaagaagaattgttatcctgttattgtatagcatccttgaaaagttgtacagagttttgctgatgacttaataatcactttggtgcaggttagtacttttattaaaacttgccaggaacaaat

SEQ ID NO: 17246 - DNA, 472 bp, Glycine max
  Intron number 4 from transcript Glyma06g07280.1 (locus Gly ma06g07280) derived from phytozome v7.0 (chr-ID Gm06; pos 5290954 to 5291425)
tattgtggactcgggatttgagcatccatctgaaggcaaactatctctattcatctcaatcttttatttaatttgcagttgttgttcttggctgcggctgaagttaatgtgatgtttttggggattttagatttgtaatggttattagtattactgttttgaaacatgtactgggttttttcatctatggttaaattgtttggcgctcgttacaatgcttttgaaatttcggatgttgtggggtttcaactttcaacagaatagttaaatacacgttacatatgtgtctactgtatcatccttatgtgagtattttttgtttttgcaggtaatacttgtatcacaatcttgttttggagaactaaattgctttggtaacgctatcaaatgaattgaaagcgtcagaaaaggtttattttacttaccctcggttccttcggccgtgttttatttgcttcatcatcagtgcaac

SEQ ID NO: 17247 - DNA, 693 bp, Glycine max
  Intron number 1 from transcript Glyma13g44820.1 (locus Gly ma13g44820) derived from phytozome v7.0 (chr-ID Gm13; pos 44177068 to 44177760 reverse strand)
gttattattcgatttctgttgaagaacacccggaggtatgaattttttaagatacccttatgctttggagcttgaagattttgtcctgttctttaaaaagacgttttttttttttgggtgttatcggatggaatatattagcatagatgccctgtttggtctataatttgtatgatattgatgtgcatgttttcctgcagtatcagttacttgggctccttatttttccaaaacctggatatttacttttgattaaagaagttgataatcgtagcctagtgcatagtatttgtattaataacattatcgattacatctgcatataatgcttcttggagattagtaagtaaagaccgttgtgcagtagttgtgatgtggccaaagcaaacttgtgattgtgagaggggtcaataaggacatgaccctcgtcctcccaatatcttgtagttgtctgagacttttatcattcttcagaccatgatgccactgaatatatagtgggagattcatattagatgcatgcttcatctgttggggacacaagtatgttgagagattgatatccatctagattgatcaatactgtctgtcatatgcgtgatattttgtttgtataatgttgttgaaatcaataggtggctaatgctcttacctcatatcatatgtgctttcagctattagggaaccttcaca

SEQ ID NO: 17248 - DNA, 661 bp, Glycine max
  Intron number 1 from transcript Glyma11g07550.1 (locus Gly ma11g07550) derived from phytozome v7.0 (chr-ID Gm11; pos 5290612 to 5291272)
actgctctcgacggtgcctccgaagaagaagcctggtaatgccaatgctactatcactgttgaagttacttagctcacagttcgtgatcccttcccatgttgccttttcttttctgtgagacgtagtgtagaggattggaagctgtgttgcttgctgtttttgatgtttgacacaattagagtgaattaatgactttgattgagggaaattgtggcatgtggctagggatggggcattattgtgaacttgtgattcaatttaatgaatttttgggcgtggaaaattacttcgtctgtgatgaaattggggccgctttgttttttaggattttgatctttagtcgttttcgttttttcataaaacaggattgggatttggaagtttagggtattgtagaatgtagattaactattgaagtagtgaactatctatttggagttttttttttttttggtgaaagaaatatttggagtttgattaatgtagtatgcacactccctggtaccaatctgttattccacgtgttatgctttgaggtatttttgtacgtattgtaaaaattgctcaattgcattcaatgcaaatataattctgcaatataatgacgatctttcatcatctacaggagtcttgcagaaacggactcattctctggagagt

SEQ ID NO: 17249 - DNA, 705 bp, Glycine max
  Intron number 1 from transcript Glyma13g03400.1 (locus Gly ma13g03400) derived from phytozome v7.0 (chr-ID Gm13; pos 3358946 to 3359650)
gcggtttcgataaggtctgacacaataaatgctagctagctctattaccgaaaatttatggaatattaagagagtgatgagttaggaggatgaatgttagttagcgggcactggatggtgggtgatactttcaaattattaagaggtcattagatgagacagaagatagataaaaaccagtgattttcaataaatatcactcaactgtaaagacagtgttaaaaggagagtgttagagttgctcattttttctagttcttggaaatgttccaaacttttgtttttgtctggacttttaaaaactaattgttttcctggctgtgaaaatatacatacaaacatggttttaattgcattgcggtgagttaaaaatcctttacattgcaaaagctgcaattgtagtggcaatgcagttgcagtgggtcgaaaaaccatgcatacaaactttagttcctacggctaacactttttctctcttacgtgaaaatatacaatgtttaggcatttctacaagtatatagactaaagcaatgttttaaaagtcttggacaaaaaccccaaaattggaaaaattttcagaaactacaaacgccactaacccttataaaaattaatatttttgctctgctcctgtttttgtcagacgatttttgaattcaattgtggataggttgagccatatttggatatcaagagtgtctacaa

SEQ ID NO: 17250 - DNA, 987 bp, Glycine max
  Intron number 3 from transcript Glyma09g15970.1 (locus Gly ma09g15970) derived from phytozome v7.0 (chr-ID Gm09; pos 18966062 to 18967048)
gataaggtaatgcataatgtataattttttattttttatttttctatgaattttagtttcatctatatattaaggatggaagaaccatgctgatttagtggaaaacagtgtcatagattttttattctattatccacaacaaaaatgattagtggacacctccactagtgagaaaaagagagagaagtgtaggaatgtgatatgctaggaagagagagatagagagaaacaataggtattaataatgtgtttttagagtgtccactgtccaccaaccaattcaccaaatatgcatgtattcttatattttctgacttcacaacacagaaacttgcttcaaccaatttctaatatcctaggatgcagaaaattgatatattttgctaacctgatgcatccagcttgacaagattaaaattttgatgcatgagcatgagggatgaaagtgattttgtattttgaaaatttggttattatatcatcatgttgagttattcttacatgcctcaaattgtaattcgtgtaattgtgatttcgttcaataataaacagaaagaagatgtaaactttcagctcaaaatattccagtaatgggaatgctgatcatggattgaagcagaaacaaaaattcattgtacctaatcaaagataaagatatggttaccaccttactagtatagcacattatgaataggcatccaacaactgattgcagattaaatgggttttattgacctgcttgtggttaaaatgttgaagtcccatctgatgcttctgtgtcgtaataactcataaatgctttgatagaatctggaatatttaatcattgctaattagatatttattgataaataaggcagccttggatgagaatgattgtgcaaatactttatggtgtagaatatatgctgactgcgattctaaccaaagatttttaagcatttttttctagtgttttaattctcttcaaagcttggagtctttaaa

SEQ ID NO: 17251 - DNA, 883 bp, Glycine max
  Intron number 1 from transcript Glyma14g02470.1 (locus Gly ma14g02470) derived from phytozome v7.0 (chr-ID Gm14; pos 1516822 to 1517704)
gcagcactggacagtaccggagttatcttagatcggtacgcgataacttaatttttcttcttttattctttgattaataattcttaggtaaagatggtcatcatctatgactttcggcagagggatacttgattccgaaaaaatggtcatgaacatatgtcatcgtttctgtagtaaatttaccaatcttacttgtctttgatccaaattatattttattttattggtaaattaacgttttggaagtgtgtgtatggtaagtgttcattacacatagagtggcaaaatggaatgaatcaactcggttaggccgaattcacccaataaaatgtagggagaccttttaaattttgaatctgaattaaaattgatatcctttattgtaattcgatcatgatctaatgcaggcttaatctgtaaaaatctgcaaaagccaaaaaaaaaataatctggttttcattaaatttgaaccatattttagaagtttgaattgaattcggatcgacatgttactattaactgttcaaagattcactatgattccaatgaaattttggcatgtgaaactgctaaaattaaaaaaaactttaaagatagccagatattttcaagaatattgaatttgttctgtttatagaagaatggcaaattcaacttcccacatgtctaactactaattaattaggtattatattcatatacatttttcttttcctaatagagtcactctggtaaatatacctatacaatcgaggtgatcattgttacacaaataacaaataaacaacaggattagtctcataggagaatgatttctttcctgtgtgttgtagaggcacatttaatttatagttatggttgtgcatgaaattaatttaggtac

SEQ ID NO: 17252 - DNA, 820 bp, Glycine max
  Intron number 2 from transcript Glyma06g15180.2 (locus Gly ma06g15180) derived from phytozome v7.0 (chr-ID Gm06; pos 11933086 to 11933905)
acaaggctactgctcatcatttgggcttgctgaaggtaagcacataagtgtaatttgtttgattattaaatggcatatgaaaaagaaaaagagatcaagtatgttaataacgtgtgtgctgttctgattttttgtttttttggttgttgattgcatgcgctttggctctagttgtggttagctatcgaagacagtgggatatcttgtttttgtttcaagtttggaaatattgtcctgatcttgtatgagttggttgaagtggatactggatagttgttacagggattgcatttgaaagtgtatctggttcatgatgatattgtttgctctacattttatattagaaattgtaggcataagcctcatagcacattctgcactgcacatacaattgacttatctatattgatttttaaagtgatttatttataattttggcggcatgctgcttatatatttatgcccctaaaggaatgctaacatataagtaataagtaaataactctaaatgtatggaatcttatccttcttatctttgttttttcttgtttctatggtccacatggatctttcacatcaatttcttctgatatgtaacattgaaggcgagatgggtgtttctgtattctgcttctatgtggaatcaaccttccataagtatcattaggattttattcctcattgtccccttctttgagcttttcaagttcctcttctgttttcctgtattctgttgctgtttttgttgaggggttgattcattattggtaaatgtctggtgccaggctaaactagcaaagctgcggagggaactccttac

SEQ ID NO: 17253 - DNA, 1066 bp, Glycine max
  Intron number 1 from transcript Glyma08g47960.1 (locus Gly ma08g47960) derived from phytozome v7.0 (chr-ID Gm08; pos 46709115 to 46710180)
gcgacatcgaacgacaacagtttcgagaaaccctagtatgttcatcttcctcctttccaattcttgtttctttggactctgaataattacttagatgcagttccttaggttcgtgcatttagtataattctccatttagaaattgaagtttcactttggtgctgtttcaattttgattacagaacaactccaagagcacctaagaggctgcatttttaagttttgccctaactagtatatacgattgccgaaaagttaaaatgaacctggatttactggcacgtcaatttacttgttgagggttcaaattctggattttgatttcactttgaagttcaaagtctgttcttcatgtgtgatcattttgttatgtggtgaaccgctgaatacgcttgttattgtgtcctactctttgaaaagaagtacaaatctaaaataggccatgtttggataaattctcaataaaagagaagaaaatatgaaggtaaaatgagttaagcttttttataagttaaaattatcttatgcgtaagctaattttagcttatggaaaaagcttaattcattttgtcttcatattttcttttcctatagatgctttttgagaaatttatccaattagtaccttgttctcttggggtttagacttatagatctaattattgttgtagtctaggtggattttagtggtacaatatgtctttgatttctctctttggattttttgtcatctctttatattgcaaatgtatcattcaagtgatctattatgcaattggacctgtttccttctttttcttgtttttattgtgtttgagaaaaactttgatcaaattgctttttgcaaagttcatttcatgttcgctttagattacttttcgggagctaattgcttatttttcaaaagctttctaaaaaaaagtgacaaaataagcaattgtttctttagaataagagaaatcaaattcgcacagtcttaattagcttattctgatggaatgattggttgatttctaatttttgtgaatcagttaaaagaaagagcagagaaacttgaaaactggaa

SEQ ID NO: 17254 - DNA, 545 bp, Glycine max
  Intron number 2 from transcript Glyma12g35070.2 (locus Gly ma12g35070) derived from phytozome v7.0 (chr-ID Gm12; pos 38208859 to 38209403 reverse strand)
gggttgtgccaaatcctttgctccctttccaacaggtaccttttgagccaacactcattggtttcttatcttgaaaacaatttaggcttaattgcagtttttgtttaggcttaattgcagtttttgtcttttattattgtcattttgtaaatttggttcatctagtttttttcttttcaaatttgcccccctcactatattaattgtttaattttgatatattcgttgatttgatatttaatatttaatatttaataaaacatgttgatgtgacaatgacatgtgaatatttttgttaaatattgaatgtagattgaccaaagttgtacaattaaaatagtgaaaaatcaaatttgccagagaaaaaaaatgagagaccaaattcagccaactgtttaagttattgaaattacatcaattaagaggctagtatgaaatttcaataaaaattgaagccctttgatatatattgaaggaaaagtaatggactaatagtattacttatgagatccatgacatggtggtggtggaatgatgcagggtgt

SEQ ID NO: 17255 - DNA, 726 bp, Glycine max
  Intron number 1 from transcript Glyma12g05010.1 (locus Gly ma12g05010) derived from phytozome v7.0 (chr-ID Gm12; pos 3338878 to 3339603 reverse strand)
aatcgcgagtacaccagtatgtttcctcggaattgagctctgaattggtgtttcagttctttttatgtgcttttgaattgaattgtataaaaaaaacttgctactttctttctgggcatttgattatttcgggttagagagagatagagataaattggataggtaaggccttgtttgtttactgtttttttttaaatagttttctatttttttaaatctgtttgttccataaacatatttgaaagtgtttgttgcttaacacgtttctgttttctaaaagtttgtcccactggcagtcgaacaaaacacttgaagatgatgaggaaacatctctaagctgtttgtgttttttttttttttttaaaacacttatttgggaaacaatttttaaagttaaataaattttgggttaagagtttgattgctcagtagtttgcagtgctttagaaaacagttttttgaacaaagaagcgagatgggaatcaaacatgccctttttgtggttcattgtgctgttcaattatttgttgagatgatttgcttccgtttcatggagattgagctctaggttagttttaaatgcgtgtttttattgttgggagtttacttaagatatgctgctgtgttgaatttatgtttatgttttgttctttgtgttgtgtgtaatgattttgtgtgtaccatgttttgtaatttcaggtgatatcattaagactttgaaggaaa

SEQ ID NO: 17256 - DNA, 369 bp, Glycine max
  Intron number 2 from transcript Glyma08g03080.3 (locus Gly ma08g03080) derived from phytozome v7.0 (chr-ID Gm08; pos 2174914 to 2175282 reverse strand)
tttttccagcaattctggtaataataatgcctctggattgaaatttttgtcttctgtagatgtttccctcccttttattcgctcatgaaattttctctatgttgatttgtgagaaagcccatggtagggtagtgccgtgctagaaagtttattgcattaaggatccccattactttaaatgtagatgatgatgtgtgcgcggcttagttgcaatgtatggtttgctatttgatataaagttaacggtaaatttgttttgaattcaatgaataaagtcaaagagatctgggatcaaagtgttagggttttttcatttgtgttttttcctctgttttttcattggatgaaaatatatattgacaggaagtc

SEQ ID NO: 17257 - DNA, 831 bp, Glycine max
  Intron number 3 from transcript Glyma08g19110.3 (locus Gly ma08g19110) derived from phytozome v7.0 (chr-ID Gm08; pos 14422073 to 14422903)
tggttttacttctacccttcgaggtatggtattttttttttttttttttgtggttgtccaatgttgcaaatgtcactgtatttggtttttatgaagttttatgcaatatagagagaagtgccaaatgggtgtttttgtaaaaataggatatccatatatctgtttttctcctcaacaaaacaaatgaaggatgttggaaaaggtgcgtgaatattgaggggattttgtagtcatttgattccttttcatgtgcaatgtttgcattattttctcctcaatctgccacttaataatctcctttattgatacttggaacattaataaatgagaatttgaaaatccttctatgttttgtggctggtctaattttcataaaattgcgtgcttcattggtttttcttcgtttcaatattttactcctcagaccatcccattttaacagaactgatagtaaggattcattataacgtcgttgcaatatccgttacctcttaatattactaattaaaatgttagagaacagtttgagactttgagtttctatatatctgtcttaaaactcaacttttcatcactagtagaattgctaactaaatgctatgttgttgctcatagttatacctttgaactgctagatacatgcacttaaaatacataaacatgaaatgtaccaaaagaaaagaacttaaatatgatgatggacattttcttcccttagtatgcttgttgttcacttagcaatcattatgcattttcgatactattatttgatttacatgacccttggtgggttaagtgacagatcaagaagatagcagctgaaggagttct

SEQ ID NO: 17258 - DNA, 649 bp, Glycine max
  Intron number 1 from transcript Glyma09g08290.2 (locus Gly ma09g08290) derived from phytozome v7.0 (chr-ID Gm09; pos 7404276 to 7404924)
tggtacggctccttaaactctccgaaatttttactttttttacttttgttattttattctttttataattttctctgaattttttttggatgttgcttagttctataggaagtggtttattgtaggaaggggaaaatttggaattagatgggtgttttttgaggtttataaaatattagaatcttgatgggtacttaattagatattcttttcctcttggtttgttttgaaataaataaatcctaggtaggaaggagaagcagtttatgggtctttcaaagttttctctttctttagaaaaaaaataaaatcaaaccactctttttttttttaatttgcagttttaggcttgaacctctatctcaattcttaggtttaatttgttaccctggatgatttttcaaatttgatagatctaacacatggctccaattttgcccctctaatttagtgaaaaagtaaatatgttgtaagggaagaaaaatgataccaggtttaatgtttggtttcttttagtttcaaaacgggtttaattttcagatgtttttgccttctttcctttaagaggctttttctttttcatccttttttgcctaatgtgaatttttttacagggtcacctgagacatcttgtcaatctgctacaacc

SEQ ID NO: 17259 - DNA, 712 bp, Glycine max
  Intron number 1 from transcript Glyma08g02630.3 (locus Gly ma08g02630) derived from phytozome v7.0 (chr-ID Gm08; pos 1809384 to 1810095 reverse strand)
gatttcaggagctcttgctcttcctgccgcaggtttcctcaatactcaataataataacactgttgaaacaattacattcactttttccactactgtttagtttcatcagatttaactaaactaattttcaccaatacatccttgtttgtttcatcatatgcgtttttattgtaaagtgaagaggagccttgtccattgctgtctctgtctggggatcaggttaagtttttggattattacttcccttaatatcccctacgttttaaactttttcaaaacttcaatcaagctagcctctaaagtaatcaatccttgcttattcttttcattttcaatccaatcctgttagtttttaacaattgacacagattccttgatctccaccatgaactgtataacattttaacagataaatcataaatcacttggaaaaaccaaaaccattttttcattctgtttgcctttgccgtgtgtatcagtcctcctacaagattgcattgattataatatatacattagtattttaatatcatagtagtttacaccagttagttaactttgaagtttgaacaaagtctcaacgatttgctatatttgtcggtggtttctcgatgttacacaaaataaaatactattacactgtgcgtcctttaaccagatattttcaatctgctgctaatttgatttgatttgttttgtctcgtagcttac

SEQ ID NO: 17260 - DNA, 663 bp, Glycine max
  Intron number 1 from transcript Glyma11g06690.1 (locus Gly ma11g06690) derived from phytozome v7.0 (chr-ID Gm11; pos 4728249 to 4728911)
ggttagtaaatattatgccataaaactcatttttttcttttttctttttttttttaattttaccacaaaaatgaagggtagaactatttactcaccttacttgtttttctggaaaaggaagaaaaacaaaacaccacttatattagatcttttaataaattttttactaggtaattttattttaaaatcaaatattagaataaaagttattatgatatataaaatattagattaactcaatttttttatatttcaaaattaaatacacacaaaaataacccttcatttttttattattatttagaagtttaaaaaatttgatatttacaatcaaagtaatcatgtagaacaattaagttagttaaacagattttttttttcgaaaattaatgagaaaaaattgataaaaacttcacattaatattatgatgataaaaaataatatgtaattctaatttaatgattagatcaataattacaatcacattatacaaaatagtttatcgcgttgatagtgtaattagctaacccgcgatattatcaaaccttattattttggttctaatctatttaactaattcatcatattttttctctccatgtggaaatatttattttctttatctagaacatatttgctgctggaactgatacctcagcatc

SEQ ID NO: 17261 - DNA, 584 bp, Glycine max
  Intron number 2 from transcript Glyma12g16510.1 (locus Gly ma12g16510) derived from phytozome v7.0 (chr-ID Gm12; pos 15838241 to 15838824 reverse strand)
tcaccgctgccaaagttggcaaattggagatcacggtttgttgattttcactctcactgatttgagtctttttgatgtttggtttcttggaatcacaatgcgctagttaaaatgaacctcgaatttgtaactgcttatgaaacttatgaatctggtgatgttgtaaaagcatagttaatttattctctgaatttaacgaattgattaatgtgtacaaaagtcagaggttaaaatgattgaatgttgccaaagtcaggattaaactgatgggtcttaatgttagggactagaattaatagcagtttccaatttctattttttttcgtaattactgggactaaaacgaaacgactgatgattgtaatttaggaattaatattaatgttcactcaaagtaaaatgggctgataaacgtggtttggtttgggtcaaatctgttcaaagaagaaaacttagccaacttaattggtttggttaagttggttgggtcgaaccgaaccctttgcttttatatattcaaatgagtttctatggtttcttattgagtccattgtgtgtgcctttctagcttccgtccgtgagca

SEQ ID NO: 17262 - DNA, 999 bp, Glycine max
  Intron number 2 from transcript Glyma08g01020.2 (locus Gly ma08g01020) derived from phytozome v7.0 (chr-ID Gm08; pos 568622 to 569620 reverse strand)
tgctctccaaggtttgtcgttttaaccgttgcatgaatctctcaaaatccaatgctcaattgtgatgatttgagagaggagatagttgttttcttttttaatttaccttgttcaatttctttctctgtttcggtagtttttcttctatagctatttatttatgtttgattttgaatactcacttcacttctgttaatcacagttgcatatcggcttaattaattcttgtttgaaccacttatttgatgccagtcgcgttatgcacgtgcaggaaaaattgataataggaaaattctgaagtactagtacttcagcaacgaataataattagttgaatttcacatctagaaatcaggggagtagcgtataggtcttgcctcatgggatcatgcatttgtgatttgccatctctagcagagagttttttttttttttgtcacaaaataggaaatctccaatgctgagatggatgttgtgaagtccgaaagggtcatgtcatgtgttttagttgtattgtatcgcactgtcatcagtatttactttttgaaagaggttaaacatcttaacgaaaagagtggaaaaatgttgatggaccgcattcacttgtatagatgtcctccgtgaatgagatttggaatacgccttttgttaaaaaataattagtaattgggaaatgctgttgtcatgaggaccacagaaaatccatattaaaaacaaaattctgaatcagatttgtggcaagcatgaagtctgaatcagattatctcaaacatgaaaatcttaataacttccttttcgttccagacaaaaagaactagaccctgttaataatatagttcagcaaacaaactacatgggtcaatgaggccactgtcaattgcccatttggatttactgattgtcatcgtttacataaaatgtcatgcttttaatagctattattctcatcaatcagatgtacgattattgtgtaactcttcatttctgtagagtgatcca

SEQ ID NO: 17263 - DNA, 547 bp, Glycine max
  Intron number 1 from transcript Glyma07g12150.3 (locus Gly ma07g12150) derived from phytozome v7.0 (chr-ID Gm07; pos 10423002 to 10423548 reverse strand)
cattttccattcgtagacgccaagaaccctaacaggtactgctcccttctcgctctgctcaaacattcccataccctcttattttttcttcgatagttgaaatgggttttcatcaaaatccttttttttttttttcatttccccactttcattttgatcttagattttgttgatctgtttagttttttacccaaagatctgattttttatccacttttttatggtaaaatggatcttagatcaaaacaaagaagctgaaacctttggggtatgaggttttgcatgtctacatttatgggatttgtgtaatttacccccttttctggtttgactttatctgagctgaaacaatggcaagtttttaggtcagtaaattgcatgctgtttgttgtagtttttttttcggttctatttttgttattaaactttgtatgttttgaattgtgttgatttgttaggagaatgcagtggacctggataatttgtgaggatatttaacatcgtgtacattgtgctcctttaattattttcatcagttggtgttgtg

SEQ ID NO: 17264 - DNA, 1025 bp, Glycine max
  Intron number 1 from transcript Glyma12g10690.1 (locus Gly ma12g10690) derived from phytozome v7.0 (chr-ID Gm12; pos 8640580 to 8641604)
gtgtttctgtcactacctccgtatctatctatctgtcacctttcaattcattttttgcttcttctaaagtttctttttttctcgttttaaagctttgtcgtccataatggtcttacaggccagattgcggagaatacttgtgtttctattagaaaagtaaaaaagtttctccctttttaaatgaccccattttttttttgttttaaattaataggatggcgtgtttgtgtggatcatttggtaatatgaatgattaggcttctggggaaagagagaaaatggttatttttctcatgtttggacctataaaaagtctaactttttggagttactggcaaccattcatttagaatcaattcaattatttgcttacaggggtatgttagttgttgttagattcatcctcatcatttgctctgttgtcttgtaccatggattttcatttgaagattttcttggttattattacattgtacaaggaaaaaaatggtcgtttttgcagctgttagatcatgttgaattgatttaaacaaagtttgctgtctaaatataatgaaaacaaaaattggggttatgacattttgtagcttagatttaaaatttgatcagaaactatggttcagatatgcatggcttttttaacaatcaggtgcttgcttaggtattaattacactacaaaagtgtaactctctagtttgactttggagaaaacttagatgagatacagttttagatactgcttgtgttgttctccgatcaaaattggagcttcatcttgataatccacataatccttcaatttaaacttttattttgtgaattactgaggtgaaattccaattttgattggaaaacagtaaaaacctaaggaactgtatctaagttttgtcctttgactttttacaatggcatatgtttcactgaagttggaggtgtaatactattctccatcccagccatagatggtgtaagttacaaagagactttggttatttgtgggttgcaggttgctatattatcagaa

SEQ ID NO: 17265 - DNA, 532 bp, Glycine max
  Intron number 1 from transcript Glyma10g37750.2 (locus Gly ma10g37750) derived from phytozome v7.0 (chr-ID Gm10; pos 45670452 to 45670983 reverse strand)
gaactggtctcactgccattgtcacaggttaataattcccatttgggtaatctttcccttacaaaaaaatcattttttttcttctgaccttgctgatgctgctctgtcctaatagttggctaagaaaaaacactttttattcgtatactttgatgcaatttttcttctatctagttcaatgatggactgaacaaactgaaaaatgtttcatttctagctcaattgaacagatattgggttgtggagtgatttactagctttttcaatgaagattcaaaaccgacatttaactaataccttttgtagttgactctatataatttagcccaagaagattgcgctcagttaatgcagcaacaaaaactagagtctttagtggggcataacttgtgcatctctgtatatccattctttgttgaattcttgcaactggcatgataaataattcttagaaagcttcattgtttaattgtgatatgtgaacattatggtaacaggagcatccagtggtattggcactgagactacacgt

SEQ ID NO: 17266 - DNA, 1041 bp, Glycine max
  Intron number 1 from transcript Glyma08g10840.1 (locus Gly ma08g10840) derived from phytozome v7.0 (chr-ID Gm08; pos 7884046 to 7885086 reverse strand)
ccagattcaactcatcagcgaggaaattcaccctggtacgtctgtttctcaacttaattcaactctttttttctttttcttttgatttcgatttcatgtccctttgttcaaccaaaaggaaaaaagttgtttggtcttagatctactcatctgccatggaaccaccttcttattttaatatttccaacagtaataaaatatcttgtctaagattgctttcaattattatcacattattaacataattttttatataactaattaagtagacataatctttgaatatatatattttaacataaaggattcgatcgtctgaatagatctaaagtaagacaaggtttagtaacgatattgtaaatataaaatgactttaattttagtccgaagaagacttgtgtatggatttccgtgggacagtataaaagtatctctaagagaaaaattaatttagaattatatttgattactccttaacagtatgtttgagattaaaatttagtttcaaaattcagttttttttataaaaaaactattgaaaactaagtttacaagctgcaatccaaacatttatttgtcttaagctgaacatcattcttctcttctaaaaataaatatatttttaaaatatttttttgtgcgtaaagaaaaaaaccttggttaataaaaagtgtccgaatctagatgagaaaagatgcttgtgcaagtattaaagaattaataattctcaattaagatactagtgtaagtattaaagaagtattattaatttcataaactactataaataaaaaattattattttgattggattctctctttaaattaaaaaaacatataattatttttgttctttatttttttttcatattcttcactaaatgaaatagaagatttaagatttgacgttgtaaccaatattgatgtgatcatgttaaattaacttcttgtgtagtctgtcctatctattatatctttttctgatttgcgctatttaaataattagttactaattctgggaaaagcgtgcaatcctacgtg

SEQ ID NO: 17267 - DNA, 1013 bp, Glycine max
  Intron number 2 from transcript Glyma11g14330.1 (locus Gly ma11g14330) derived from phytozome v7.0 (chr-ID Gm11; pos 10265323 to 10266335 reverse strand)
tgatccaccacaagagatatttggagcccgctgaggtttgaaccctttactctattattctgagtgtgcaattttgcttttaaataaaatggtgttttcttgtactcttgatcacagttatgggcccaaagaggcccaaaagaaagatgattaagtgattcaaagattatataggatggagttagatatttataaattatagttttattttatttatgcttagaataacatgatgttgacacttggataaccatggattaatgtcatctaggactatataaatggattcccttttacctattagggcaatcaatgaaaaatatctcagttattattttatcttcttcatagctttctttatagtctttaatggtgttttcttaggagtagtgatagagtagaattagcactctatcacaatgttaatgagtttaatttgtaagaattgcaagttcttgaatatacctgacactcaagtgggactctgggtcaatagtttcaatgttggtataatgggatagtcaatttttttccatcaaaatagctgatgataagatagttaagtttgatagcactgtttactgaatggaaattgtacggagaaagtcaacaatgaagaatgagtaataggaagaggattttaacttatcatgatgtcattagaagatagaaatatgatgtttccattaagttccacctatcatcctctggcatgttatgtggtcttattggagttatgtactcactgatatcattttgctacttgtatagattatgttactaagtaccgtttattcatctttaaggatcaaagtgatcaaactagttttgtttaagataaataaaggcttctgtcattaaaagttttttttattgtgaaaaggagttacccaataattttgtataattttcttcttcccctggcctagcactagcactcacacacacaccaggtagtaacacaagaaaattctattaacctctgttgtataaaactataaatagaatctccc

SEQ ID NO: 17268 - DNA, 996 bp, Glycine max
  Intron number 1 from transcript Glyma12g05240.2 (locus Gly ma12g05240) derived from phytozome v7.0 (chr-ID Gm12; pos 3496196 to 3497191 reverse strand)
cctgttagttgaggtggcagcgccatacagtactggtatgatatttttctctcatatatatatatatgtgtgtgtgtagggttcatgcatggtatatatcacttgatttgctggtaaggatcacaaagctttatttcaaccttctgttgcttctgaaacagtgaaatccttttgtttaaaagcactagttaattaatgagatttgaaaaaactggtggttctgaaacctttttttttttttttccatttaagagaacttgtatttgtccaccaaggcctcgagtgaagccattttctttatacctgacgattgaaatagctagctagtggttgggaaaaacttgatctcaacactggtttgtggttgaatattacaaagagaaaatgttgtttacactttgagggtttcaaataggtcgtgtacggagcaaaattattattgtggacatggtagttgattttgactggtttctcgtgtctctcatgcttcttgtgttttattttaccttgtcagaaccttagtttgatttttttagaaaaggcaaaacatttcattaaaaaaaaaacaataaaaaagatcaacaagttgttagccgagtggtattgaactcaatcctcttaaacaagatttcatgttcgagttttatggacagaaaaaatgtgattgagaagagagaacctcactaaaaaggatcagacagcagattagtcatctacaaagttaataaatatttcgtaccaataatatattttaaaaaacaaaaataaacaattgttgtgccaaaagcagaataaacactggctaccttatatattatctctgtttacttctttctctttgtcattgattgacataagaatctaatgattttggtggctcttttttttttttttttttggttaatttaaaatgaataaaaaattaaactgcttcaatatttatccctgacaatatgtttttaattttttttattagattaacattctttcaattat

SEQ ID NO: 17269 - DNA, 971 bp, Glycine max
  Intron number 2 from transcript Glyma13g37870.1 (locus Gly ma13g37870) derived from phytozome v7.0 (chr-ID Gm13; pos 38801568 to 38802538 reverse strand)
ggtaccttgtggtaatctaccaagacatatatatagtaagctcttccccccttcaatattttcttcatgatcttttccactacaggtagtactgtagatgctctgcaccaacccttcgtttatttttattttttcccctatattctccactatcttttgtgtgtcataaatgaagaaggtgaccctggaattgggaatttatgtttggtcttttacacaattgatgcttattttatttcctcaataggttttctattaagggcaagataatagtaatatttttgtactatatatggttgaaatattaagatacaagatgggagaactgaaaagtatttttactctcaaaacaacaaaattttccttcgttatttattttgtgtcttgatattcaggaatatatgtttattgaaattcaaaaaaacatgtttccaaacatagcctaattgttggtctctctgcatattgccttggcagctcagctaaaaagctagttcatgagtcatcatttggaagttgaaactaaagcggtggctgcaaattgccaaatttcaatgcctcactattagttgcaatgcctgttctgcgccggaattattatataattgcgaatattatgagtgccgtggagtgctcataaatcatgattatcataaaagaaatacacatgctttgacttaatcaaccacaatattacttagatgctatttattataaaggtgttgtcaagtagtatttagctgtttatttattgataatggctgtaatgagtgagatattattattgtttttaaaaacttgatatattaaattcgtgtatttttatcttaaaaaattcataggtagtgcctggggtggcttagtatagttatctacaatacgtcaaactcattataatacacattgaagccttgaggaaataaatctactttcttgtagaacttgattgcaaagaagcatccacggcaggc

SEQ ID NO: 17270 - DNA, 648 bp, Glycine max
  Intron number 1 from transcript Glyma06g01280.3 (locus Gly ma06g01280) derived from phytozome v7.0 (chr-ID Gm06; pos 816369 to 817016)
atcctttcaaaattccgtgcttcggcttgacatcggtcagttcctttcttcttcacattttctattttttgctttcttttgtgtcagtattatgttgcatgtgttatttgcggactttatgtatgttagatagatggttactttgttttgtaatctctctattttcctcagtggttttgatagtgtagaaaatggttcaactacttatgtgcctcttgtgcagttatattgtaacatgtgtgtgttcaatttgggaatttttttattactggtttggtggttccaaattttactgccgagtctttgagaatattctcattttgttgtgaagccaaaacataaggtcttagggtcactgttttgtcccattctgtgacacgcattagctgcaccagttcttgctgaaatacggggttatgatcccctctcctctctagtaatcagctttgaagcaacttaggtcttagcttagttgcatagcgtttatgttcagtttctgttcttttctaacagtatgttgcattcccttcattttgaagtgtttttttgtgcatgactggtgtcatttatagttacctcttttaattttaattattacccttttcggtttcagatttctctgcacttcccaaagaattggttgtgcag

SEQ ID NO: 17271 - DNA, 874 bp, Glycine max
  Intron number 1 from transcript Glyma09g00250.3 (locus Gly ma09g00250) derived from phytozome v7.0 (chr-ID Gm09; pos 25573 to 26446)
gactacgaaccctacgacagtagcggtaacgtctctctctctctactattttcccccttttcacttccacttagggttaggtttctctctctcttcattaggtttttctttctgtttcttccgaatcgaaactccttcggagaaattaacgaaaccccaacaattactgccgtcgattcgttccacgattttctttctttctttctttttttctgtgtgttcggttttcttcgataaatcgttactgagataagctcttgctttttggttcttgctcgtttgctggtgtgacctaaaatttgggggaaaagggggggcttaattgtgctttgaggttttgacttctatgaattggatttttttttgcacacaagatcatcgcttgtctctttttcgcgctgttattttgaatggtttactgtgatattgaccaactttgaattcaagctcggcatggtatgctgtatgaatgcggtttttaatgggtcaactgcttgaattaatgcattggaataattcgtacatagtgagattggtggtttctgctattaagttttccccttagcaaaagcaacagcatctagttgattgttttgttgtgttggttgtgttgttgtgtgtgttgtgttgtgttgtgttgttgtgtatgttgtgttgtgtcgttgtgtgtgttgtgttgtgttgtgctgttactactgtgactctccgtatgcagagaagtgttagttgcaatgcgtttcctgtgcatgagttttatttttctccggtgctgaaaaatatgggggttgttgaatgttgatatttgcttcatggattcaagatttggacttggttgttgtgtctcttgacttggttgtgacaattgcaggaactg

SEQ ID NO: 17272 - DNA, 630 bp, Glycine max
  Intron number 2 from transcript Glyma12g04400.1 (locus Gly ma12g04400) derived from phytozome v7.0 (chr-ID Gm12; pos 2900774 to 2901403 reverse strand)
aaggcaagctttctaaagttgaggtaataatctttcttcacgcgtttcttcgttttgttgaaaatggaaaactaccatggttggatttttcttgtagaaagttttcagttaaccttttcttttgcttaggtcgctttttttatgaggactgggtttttcttatttttaattgttgaaaggtttgcatcttcagaaatctctgattatttcctggatcttagtatgacgtgttgcattgcactattacttcaaaaaatgtactacttgtaaatatttggtatgatccacaattttttttaactatttcggggtcttatatctcattatttgaattttgtaattaaataagtttcgtgtttgaatttttggaattaaacgagtttgtattataactaagcatgtttggatatgtgtcgtggatcagatgacgtgtgtcctcttgaagcacccagtagttgcttctccttatttctcccagaatgatgccattttatatatttatgcgagtcttctgaaagaaacatgctaataatgttctgtgtttcgttcctacttcctcaagcttagtttaatttatacgtgcttctttacacaggacttgtggaagaacttttccagtgcagatactgc

SEQ ID NO: 17273 - DNA, 706 bp, Glycine max
  Intron number 2 from transcript Glyma10g36400.1 (locus Gly ma10g36400) derived from phytozome v7.0 (chr-ID Gm10; pos 44568215 to 44568920 reverse strand)
ttgtgtgaatacaacagagacgccgactcttacaggttcatttcatttttccataatcatccctatttctctggttttttctaacaactcttttttgttaagcatgtttcacttttatcaagtatttttagtcaattttttcaattgttatgaagtatatctagttaattttttatttattgaaatcatctttgagtagcatgtaccgaaggaatgtgacatctaataaaacctcaaaccgtgtttggtatagcatttaaatttaaaacatcggcattttcttttaaaggggatttatgtagaggtaaagatatagcaagttggttgtgcctgggagaaatatcagagaaagagagggaaaatggaagaaatgattttccacaaagattaatatttgtttaattctatgtttttaatctaaatgaaatttaatatgtttactggtcttttgatgaatatggctgtgtaatataaaaataacaaaatattttgtggaaaacacgatcttgaaatggagaccagtaccaatatttaatttttgttgctgggtagttcagttcctagacagatctgtaatttatttctcgggagtgttccccacaattttccctttttaatgtgtttactattcagggacggtttaaacttattgttgttgtatatctctgcagatcaccttggtcaaataaatatcatccaccattag

SEQ ID NO: 17274 - DNA, 928 bp, Glycine max
  Intron number 1 from transcript Glyma07g39540.1 (locus Gly ma07g39540) derived from phytozome v7.0 (chr-ID Gm07; pos 44003614 to 44004541)
gccactgttgaggtaattcaaagatacactagtctatagctagtttggtacactgggttatttgtccatctctatagttttgtttgtcctcctctatccaatcaaccatttctgaagaatgttcacagttttttctgcgtttctttattttatttgctgcgattcattctcgttcatcaaatcaaaacgtgtttgatgttttctgatgtgcgatctacatagcatttgggatggtaatacacgagtttcaagcacggcacatttactcctaatcatcaacataaaaatcaactctcatttatttttcttgttttggtttctcttttctcttttccgggtttctatcttgctcatatattataaactgatatatatacccgatagccatggtaattataaccaggacatagaaattcacgcaacagtttccagtgggttaattttacatttggaatagattctgatcaataacttggcgtttttcatttaaattataaccttaagtaaagatcattcatcatgcatcaaataaatggcaagtctattacttttatcaagcttgttgtgccttcaaactaacgccttctccacttcttgttttcgattaaagaagaaacgctaactaacagtaacagccacgctgaatcacttgttcagttataaaaaaaggaaattaatgaacaatgttacatcgtattgttagcactacattctagaacatactaaaatgaagactattcattcacttttttttttgtcttgtaacatattagttttggtgatgctcccatgccatcgacctcttaattagtttgttattcacaagaatatgcgatcttaagcttggatttagaagtttcgaatgcttagttaaatgaaaatggatcttgcaggttgcacaacaaacaccaacaactgtgacagaaaa

SEQ ID NO: 17275 - DNA, 909 bp, Glycine max
  Intron number 2 from transcript Glyma09g40410.2 (locus Gly ma09g40410) derived from phytozome v7.0 (chr-ID Gm09; pos 45332103 to 45333011)
tcgctagacgagctggcagctcatctgcaaatcaggtatgaatgtagttggtggttagattttcaaagtaggtgttgtttgcagagtgattaattttttggttttgtggttctgaattctgaaatttgaggttggcattgcaaagtgccactttaaggaatatattaactgttaaaactgcattatctcttttccatgatgttgtagacttttggttttttttttccaaagctattgatgttttacaattcaaattctcgttaactaaactaacgagactggatcaactgacatgggtttatttcagcttaacctgttgtctggagtttgagctttgagttcgtggttgcgctaaaaaaagtctcaattaattttttttccacttattcgtcctatttatcgactgttacaatagaagtttatcacaattaatgagatattaaataaggtacttagtctcaattaatttttttttccacttatgcgtcctatttaactactgttacaatagaagtttatcacaattaatgagatattaaataaggtatttaaattcaaaagtaacgatattatttttacttatattaagttcttcttgtgtgttgcccttaaacatcaatagatattcaatggaggtggtgttttgtatcataaagaggggatttggattacttccatgtaggcagttatacttgtatttttaagaagtaattatgttggctaatggtcagacttcagagcctttggacttttctgcaagcctgttaaattacagtcattgaatgttctcgctttatattggccatagcgtactagttttatgaatatgattataatgaacctttaatgttttttccctcaaaaatgtttgcagagcacctcaaaacttggtcaaactgctgccgctcc

SEQ ID NO: 17276 - DNA, 681 bp, Glycine max
  Intron number 1 from transcript Glyma10g04790.1 (locus Gly ma10g04790) derived from phytozome v7.0 (chr-ID Gm10; pos 3742065 to 3742745 reverse strand)
agccaccacctattggccccaagagaggtgctaaggtgagctacccccaaaacccaattttttttgtagttgtagttgctcatgttgtgcaaaatagctatcaacatgtcctcttattttcattttctttcttgtcatcaaagatttatataattgatagtaaaaattggattttttgcaaactaaacacaattattttctcaaactataaacgtgtctttgttttctatattgcatatacggctagctgtaatcagtgtatcaaagtagtttctttgttacaaatatatatagaggattgagtgctgctaatacactcctaattctctttctagtaattgttagttaaaatttattagaaactacaaaatcataagtggatcttcttattaagaagtgatacatgtacaattttatgatttgccaataagtttcaatcagtaatgaaaaatatgttcaaaaaagtatgttagatagaaagtatgttatttgatgcgtaggaacagaggacagtgatgaacttgtctgttttattcatttgagactttgtgttagtaaatagcttgaaagttgaaatttgtattaaattagttgcccacttgcccagcaacaagggtagtttctaattcttatttacaattaacaggtgaagattcttaggaaggaatcttactggtacaa

SEQ ID NO: 17277 - DNA, 504 bp, Glycine max
  Intron number 1 from transcript Glyma13g23420.2 (locus Gly ma13g23420) derived from phytozome v7.0 (chr-ID Gm13; pos 26826483 to 26826986 reverse strand)
ctgctgaaggagtcgtattgcttatgaccccttttcttctttagactttttggcattgcattgtattaataataaatgtttgctcttaaatgaaaggctcattatgtgttagcgctctagtagagtatcttatcacttatcagcttgaatgtggcaatgcaatagagtttcaccttagtattactagagtatcacatcacatcaacatgaatgtggcaatgcaatagtgtcatgttcggatgactgaaatcgcagttaaaatagtagaggaattaaattcacgtaaaaaaaaaattgggagagggaaccaaatttgtgaaatgagaaaaatagagaaagcaaaagtataattgagtcaaaatgaaactgttatgtatatgatatgacctatctgtttgattgtaatactacttagttactgtgctatagctgcaaaaccattgagcttttagtttcttgtggtttgtaggtaaacacagagagagcgatacgtcacgcaattca

SEQ ID NO: 17278 - DNA, 1055 bp, Glycine max
  Intron number 1 from transcript Glyma10g04070.1 (locus Gly ma10g04070) derived from phytozome v7.0 (chr-ID Gm10; pos 3074286 to 3075340)
ttcgcttccgtcttcatactctctgcttaccaagagtcagcaacttctttttttctcctttcattttttatagaatttgatgcatacaatgttattttttgtattttttattcaaaacaaacgaattaattaaagtttctggattctccgtaacttgcttccgtagatttggctatttacttgctgtggtagttggatccgttacgtttaagggttgaaaccgcttgtctaagtaaaacaaccgcttagatctgcgtttactttttcatggtcgatccattaagatttcgaagacaacgttttcgtgttagatatttaattattctgacgttatcatgttaactagttgtgctcagatttggttgaagtgcgaggagctcgaatttatttttggttttttgaatatttctaattattaaattaattcttgtctaggccgcagatttatatgtctgatttcatttccttgtgaagggatattatcttaaagctggaatatggtatatttatgttattatgtttaatcttggttggcccttgatatgaaataaatcgtattgggaggagaatacttgtgtgcacccccatcctctgacgtagatgtgtcactcctttcggaccttggtcagaaaaaaaaatacttaccatattttgctgtgtaatgagtaatttggcttttgcttgaccatgttctcattcttactgaattgggttgctttgaattcttgtgtgtgacttcattattatgattttactatacattcaattgtgcttgatttagaaattattcgttgtgggtttggaggagttgatggggttggttgctttgcttgtgttgtgcttactttccatgttgacttagagactaaggttaataattaagttctttcaatttgatgttttaattttgcaagcactcttttgctaattaattgttgactgattctcttgacttttttgtggtccatccccgctttggtttttgtgctttaagtgaattatcttgtttaatgtgtcttttgtgttttactatagatttaacgaatttggagttg

SEQ ID NO: 17279 - DNA, 945 bp, Glycine max
  Intron number 1 from transcript Glyma09g30330.1 (locus Gly ma09g30330) derived from phytozome v7.0 (chr-ID Gm09; pos 37168257 to 37169201 reverse strand)
gactgctggttgaagctcacttggactgtttgaaggtttttaagttgtctcttctttttccctttcatttccttccttccttccttcttctatttactgtttcctgccccagtttttacattattaatttatgtacaaatgtattgaattcaacctaaattctatgttttcttagtttctcagcaaattaattatataaaactaagctgtgattcaaattagtaaatttttctcaatgtgaattggtgttagagagggaattgttttttcttgcccttataaaagaggctttcatcttattcaacttgttgataaaaaaaaaggggggggggggggggggggagggggattatccaacagacaacagattgaattctttgtgccaatataaaatagctagtgaagggagcagattcatatgctggaagaagctcaactccactttggtccatctggttaattttatagttaaatattatatattaaaacttgtgattatatgaatgagtttaaacaatagaagtcataaaagataagtttactcctcaaattcaaaccctatagatttaaacatttattgatgataaactaagtagattatatgtaagttgttggtaataaattaaccctataggcatgtgtctgtgaagttagttcacatcagaaaccaaaagcttgtccacattatttgaacatgaataataatccttctttgaatatgtagttttgcttatctagctttttggtatcaaccattatagtttgataaaccgtgcattgattaactttgttggtgcaccttgtgtacaaaagatatcatgatatatatatcaactaaagctcatttattcttttaatttaagcatatgaagctttgaagatgcatggtgttagtacttgttcttttcaggttggtgacatttccaacttggagagggagctgaa

SEQ ID NO: 17280 - DNA, 913 bp, Glycine max
  Intron number 4 from transcript Glyma09g33600.1 (locus Gly ma09g33600) derived from phytozome v7.0 (chr-ID Gm09; pos 40040840 to 40041752 reverse strand)
ctagcccccatttctggaagaacgtttcgaaactggtacgcatcctgctctctgtgtctgagtagaaactgttgactttagccgggaactaagtttgagaataatgttgttgtaatttaacagaaatttgcaactttgggattggattgtgctaatcttcgaagctgactgttatagtgttatgtgcttttcatttttacagtttgatgtgtggttgagtattaatgaaacttaacatgattgtcttttttctgcctttgttttgctatcttcccaaatgttagaaaacatatttgatgcttcaagtgttgcctgagaacttgcatgttatgtgacagctaaggattgcgtgcataaatgattaatagtgtaactctgtaatgtcgtgctagctgtttgtgtttgaatgaagtgatgtagaatggaacgttaccaggtattgttttttgtattgtataaaattaggatggaatggtactaggtggtttccagctaaaatatacagaacaatggcattgtaactttattccattccatctcatttcatttaattccagtcatatatctaaacatggaggaattgttattgaaaattatagtttctgtatgtatatatttcttaaaagaacaaatgcagctttataatctgttggcagtcaattgtttgtcagatacatgcagatggggctagcttatagatgcagatgcagcttatagtcaattttagttttctgtatgtatatatttcttaaaagaacaaatgcagctttataatctgttggcagtcaattgcttgtcagatacttgcagatggggctagcttatagatgttttattcttgtatttgtggaatcattgccattgaaaatctgttgcaggtgccaggaaagtctcaacaagattgctttgatag

SEQ ID NO: 17281 - DNA, 749 bp, Glycine max
  Intron number 2 from transcript Glyma13g44200.1 (locus Gly ma13g44200) derived from phytozome v7.0 (chr-ID Gm13; pos 43702960 to 43703708)
gggtatgttttctgcatccgttctttccttttcccctttatggctatccataatttttctcttcttaaaccttgagtgaataatgatcatgtagtattgctatgcttttgaaagctcatggtaagtggaggagctagatatttctctgttgagagattacagtgtttcgatacttgtccaaaattcataacttcttaacctcaacattttttaaaacagcatccctatttagtttataattcttagatgtgtagctaaagatctgatgccgattagcttcattttagcaaaatatcgtattaggatgttcgtgattgctattctttcatttggtctcaatgtagatagacagtgaaaacactgttattgtatcacattgaaaatactttttgctagctatggatacacacaagtgagaactttaatatgggactgaggcagattgcccttatgcagtttgtttactcgtgctacgtaggaatatgatcatactgatacaaaatccaatcttttgattttttattttttttattggatatacttgtgatttgctatttttttttctccattgtgaggaaaattctgcactaaccatttaaatagataaaagaataattttagtgtgagctaaccaagttgtggagcatgatttagacaatcatgtggatatgattatatcaccatgcataacagaatttaacgtgattgtaacagagcagtggttgtcttggaccctttaaaaagccccc

SEQ ID NO: 17282 - DNA, 918 bp, Glycine max
  Intron number 1 from transcript Glyma10g38080.1 (locus Gly ma10g38080) derived from phytozome v7.0 (chr-ID Gm10; pos 45967126 to 45968043)
agtccaaagctcttgtcatagttgagagtatgatactataattcccctttggctttctcttatcattaatttaatatctgctaccaaaagggtgaggtgatgatattatattattatatatctggccaggacatgatttcaaaaacaaaattataaaaaaaaagtcattgcttatgttttatgcttatctgtatctgtttatctttttcaaccattaattaaggtgaccaccagttttaatttctttttgagttacatgaagattttaatataagtgaaattatttctacctaccaacatgtgtgtcaggatgtgtaagtgaatcagttggtatattcaaggttttaatttttcttcagttttgatgagaatattaatttttaacgccatatatttgttttcctttgtcttctggtatctgttctttttaacaattataacactctaactgcaagaagtagttttcttgtgctgaaattttccgtcgtagttctatgcgaaagagttgtttgaccaaattgatgtgttaccatccaaccgaaagataattaagattctggcattcaagtaaaatccaattttgtatatttgagacaaaaaattcaaggaaccatcttcgcctggtcttgtgaatcgtgatccattgacgattttaaaatcttcgaagttgatattttttacttaaccacatttgtcacctgtatacaagctgcttaacgtggtttaataatcttacaaagtcactttaacttacaagtcaccctgtctctttagttcatcacaatgtacgttcctatttaatcatcacaattactgctgtaaaatgtaaaggctcaaagataacaattattgtgttttttgttgttaaattggttactgtcagagactagtgaagttgctgaagagaaaccgattgag

SEQ ID NO: 17283 - DNA, 727 bp, Glycine max
  Intron number 1 from transcript Glyma12g31850.3 (locus Gly ma12g31850) derived from phytozome v7.0 (chr-ID Gm12; pos 35407532 to 35408258)
acactgtgagtgtaccgtctttcattccccttccacttttttttttcttttctttttacactacattcagtcccactattaacttattttccttactatatttccattaatttttaatatgaagcagaatcatctgtgtgctttggaattgctgcagctaaattcatctttgacttgtttatttccttcttcatttgattctatgaacatctgtagtggaggcttttgtttacaacatgcccaaaaatagaagtttcgagctttttgattaatgtgttgtgatgatgaattttcatcatagatgttagcttgggtgtttatcaatatcaaattttgtaattgaatgctaccttcgttccgcttaccctagttgaccgtgcttactgtgtggaaactgctatatatgcccagttgtgattttcgataatctgtgcttgacaggtgaattgtagttagatctgattatttcgtgctatgctactgatctaccatgctcaataagtttgatgtagtttgcagcataaaattgtgatttagattttagactacgatgattttaacaagatatcgttccctgtatggtattgtacctacaattttcctaagccattttccttattccatcatattatatctattacaatttccatgtttgttatctgcactggaactaaatttttatctttgttatgcaattttgtttccaatgatcagacatttgacgcat

SEQ ID NO: 17284 - DNA, 558 bp, Glycine max
  Intron number 2 from transcript Glyma08g05970.1 (locus Gly ma08g05970) derived from phytozome v7.0 (chr-ID Gm08; pos 4244638 to 4245195)
agacagaggtaagtatgagcaaatactaatgcatattcagatactattagtcaatggcaatgtgctgatattttatgctaatatacttaatgccattgtcaatatcaaatttacattttaaagactgtaaaaccaatagaagaatgactacttttctagaaggaaggaagatgaagaagattttttcacattttcagatggatggaaatgagtataattattcttcttagagactactctcgtctgtaactatatgtatataacagtttgatttgatggattctcttccttattgtttgatattttatgcttttgtcttcttaaaattatgaccgatcaagtgttaattaatttagattgagtgttttggttgtggtatgttcagtaaatggagaatagaatgtctgtttattgtcctcgtctgattgatacttgactctgaaatctccaacttactttatcatccttgccatctcaagcatataacaaaaatgagacacctgatgcttattcttttttcgatgttacagaagacaccatttggatatacaaggaaag

SEQ ID NO: 17285 - DNA, 519 bp, Glycine max
  Intron number 2 from transcript Glyma08g20690.1 (locus Gly ma08g20690) derived from phytozome v7.0 (chr-ID Gm08; pos 15705228 to 15705746)
aaacaaaaaaggttattagttctgttcccttcacttcttctctctgactctgaaggggtgtgagtgtttgtacatgtgtgtttatgcctctctttctctctcccacgtgtagaggtcagaatctaactccaaagttagctcacggtgacttcttgagaatagttccatcagacactaaataaaacaaaaaaagatgctgcttctcttaaatctatacttgtcatcttgttatatatattaagctgtttatatgaaaacatctacttctccaaagttgtatgactaagtgaccacactactttctcattaagtttatgtatgagttactgaagtaataattggtgattgagttatctttctggcactctcctacttatgtttcaagatgatataattataaagtgaaaatcctagttatctttatggggttcataatcatttttgtagtaatcataattactcttttcaaagataccaacaggcaaaaatacttctttttttgtccccagattgcttttc

SEQ ID NO: 17286 - DNA, 724 bp, Glycine max
  Intron number 2 from transcript Glyma05g38350.1 (locus Gly ma05g38350) derived from phytozome v7.0 (chr-ID Gm05; pos 41725556 to 41726279 reverse strand)
cgaccagtgtgtttgcagcacctttaagcattatcgtgagtagatttttcttaatcgacaaatattaattttattataaaaaaatcaaactcattttttttctttaatcattcagctcattttatatctttcattattggatttatatatacaatgagtttgagaaaacattttaattgagcatttaagctctcattaaataacctcttataaaatcagagtgtattcattagtttgatagttgtgaaatttattgtctaaaaggaacaatttgtttttataagttcctttataaaatttattaaaataaactaaaaagagtttctataaactcaaataaacttttttgaatgcatgcactcattttatagattaattattatttgttatgatttgctgaattcctcttttcatttatggctgataaatactcattgcaaaagaataattatattaatgtattaatttgttcttccaatcattttcacgtcatttatcacatatgttattctttctctttcgttttccaccctaaaataggaggaatgattatcacttctttgattattatttttttcaaatcccccttttctttaaaaaaaaaataaacagtttgttttatacttgatttcataataaatagcattggtatacttactaatcgcatggttgatcttgttgaatttcagaaagtggttattcgtaccaaaagtgtagagttcat

SEQ ID NO: 17287 - DNA, 899 bp, Glycine max
  Intron number 3 from transcript Glyma08g21880.2 (locus Gly ma08g21880) derived from phytozome v7.0 (chr-ID Gm08; pos 16649554 to 16650452 reverse strand)
tagcagcattttgggcatcaacaaatttgattgcggtaatctttgccactttcagtgttttggaaatgaatacgtgattgtagaatttagctgaactattgacatatggatatgatgcacagattagatacattgtattagatatgatatgtatctgatacagcgatacaacttttcttaaaatgtataggatataatatatgcaggatacatttaaaatttgataaagcataaaaggtatgcaattgtcaacattactaaaataaaaataaaaatgatagttcattgtcatcataagtcacttgcttactgcctactagtaagaactaagaatagtgtcaatctcatttccttctcgagcatcatctataaagaggacaacttctatttttggttcaacaaaagacaatgtttctatatttctatcttatgtacacttttatgtttcgtatcttgctgtattaaatttcataacctttttcaaaggcctggatacttcataaatatgtatcaatgaagtatccaaaaatatcaggggtttgaattatggacatgtgaagcaaatgcaggtacaagtgcttcatagcatatgggctgatatggccactgctagaaaaaaaatgatctgatggtggaagaacaaatccattggggctatcacagtttgatccataagtaaatcattattttttaaggatttgaaaacctcttttaagtgaaaacagcttcacaagagattccttctttctttcttgatttggctgttgagcctgtacatattttttccatgaaaaacaagtgtctgtagatcttatcccaatgcttgcaccctactgattttgtttttgtcattgttgtatgtaggccattgacaaattgccagttttcccaacagtact

SEQ ID NO: 17288 - DNA, 831 bp, Glycine max
  Intron number 1 from transcript Glyma06g09390.1 (locus Gly ma06g09390) derived from phytozome v7.0 (chr-ID Gm06; pos 6925004 to 6925834)
ccatttcaaaccatcaactcatctcgcaccttcaggcacgtatattcattcactctcttgcttctatttttccctaccagacttttcctttgtctctcttttataacactacaataatattacttctccactaagcttcgacttgaaaaatatgcttagctatctcatcattccaagttggaaatagcaatagtattctttgacagtttctttttctttttttggcttctgctgctaaaatgttgattgaattggatatctttctttcggcctttgattcagcacttgggattattgtctccgtcaatggatttgttttttcctaatttttttttttttttttgtataacacaatacaaaatacaatagcgaactcattgattatttgatctcagaatccactttaatttaaagtggaggcttgaagtatgcatttcctatgataaaagagtaatactgaatagcttggttttgagctttagagggggggaaaaacattagttggtggaattccttgtttccaatttgttgagtattttgatgactaacacatcactaatacctgtgatccaagcaaccaaaaacctactaaatactaatttaacttatccaaagttaaatgtggggaaaaaatgaagaaaaaagactatcattgtcatattgatagagaaacttaccaatcatttttctttgttatgaagaatatgctcaattatttttctacagttaaggcttctttactctgtggaagactctggcttatgttttttttcctttttttttcttctgatatatgcttccttacacagattctgttgacacccgttgttc

SEQ ID NO: 17289 - DNA, 647 bp, Glycine max
  Intron number 1 from transcript Glyma08g01550.2 (locus Gly ma08g01550) derived from phytozome v7.0 (chr-ID Gm08; pos 977798 to 978444 reverse strand)
gatcaactttctcaccgtaatgctgtttccttagtttctactctctttttttttcatttcaatttttgggtttgtttgttccattttcctcttgctttcacttttatctactgtcttgtgttcacgtgctttttgctgttgttcttgcataccccacttcagttttcacttgaacgtattccaaagatacgatttttagtatccaactttacttgctgttatcagttaccactttctttccctagctgtttattttgtgtgctaaaggtgaaaacagaagataagaactgggacttgagggtgtgtttgatttctattttcaaaaactctatttcgttttcaaaatgtaactaaatgaggttgctcagacaactgatggagggtgatgcacggtacacagtagagtgtggaattgagggagaccgtttctgatattttttttaaaatacttgttttttaaacaattttcaaaagttaatagattttatatgagaatctgattgttgagtagcatggaaatgctgtagaaaacagttttcaaaagattttatatgaaaatattttttttaatgctgtgattgttgatgctgttttcatgttctccttgtgcagcttttggccattgttgtgataatatttggagtgtg

SEQ ID NO: 17290 - DNA, 708 bp, Glycine max
  Intron number 3 from transcript Glyma11g09160.1 (locus Gly ma11g09160) derived from phytozome v7.0 (chr-ID Gm11; pos 6485283 to 6485990 reverse strand)
gtgggagaaagatgtgtgcatttcattgttgttgtttctttcttttttctaccatgttaacttgcgactagttggtgcatttgttgtgcctgcatgctccatttttttggtggtcgtttcctgaacacagcagtgttcaagctatgttcattaaaagaaacgaaaggtatgttgtgattagagcgcctaaaatagatttttttttattgttttaaggttttcctactttgtaacagtcctttgttacgcgataaaattatctttatgtagtaagccagatgactgagtgaccttgcctattgtattctcaaatttcttttgtggaggtgattatagtttgttaaatttctcagttacaatacttttagttcgtatatgcagctgtccttggggtcagtgtttggaaaattgtattaaaaggagtttgtcgttccttgattctaaaagttagttaataaaggtaactaaagtgatcagaccattgcagtctgttgcaatgtttcaaactcaacatccaagaagctacatgagtggctttttattagcctatattgcataaaatgtaagaaaagaagggagcctttttttttttttttttaattagttcttccatgaatttcagtttccttgccgcctttgataatgttattatgtatgtatattgaacaagcagcaacatcaaaatttcttaatttggttgacctgaat

SEQ ID NO: 17291 - DNA, 976 bp, Glycine max
  Intron number 1 from transcript Glyma08g44580.2 (locus Gly ma08g44580) derived from phytozome v7.0 (chr-ID Gm08; pos 44155717 to 44156692)
tccctttttctgttgtccgatcttctgcctcctaggtttgattttcctccctaccctcttcggtttattgctttttaatcttagatgagcctgcagtacgtattttatggtgtatttttatgtggggttcttgagttttctgtaaattttgttcctttttttttgtatgtgttgattttgttgctggttcgcagatcgatggttttttttcgtgcatgtgaatagtgaattgtcctgaattcagaatctgatcacttaccaaatttgaaaagccgtgttcttttgatgtggggatgttgaaatttgaatctggtgttgttctgaggcgattttgatgggttttgtatgtgaggatggatgtgggatcatggatccgagtttatcaattatcagtaattgtggtgtgagtgtttttatttatttatttaaagattatggatttattgaaaatttggtttttgatatgggcaatgtagcatcaccccatcttgtggaataaggctcgtttgttgtttctatttttgttgttgttgctgttgttttatatatggttctatcttgagttccttaatccttgttaatttctcaaattatgtggcaaattacttcgacatccaaacattttggaacgagtttaaggagtgttcgataggtgtacattcatatatcattgaaatgtgaatttatatgcacaatttcatgtcattcaaagtgaaaggaagaaagcaatgcacaattgcctttgattgttgatacttttattatgtagtgataagtaacttccagtttcaaattaattctgcttgtgattgaaatatggaaccagtaatgctgcttggttttcaatttgagtaccttctaatatcagaatggcatggatattatgtttcaattctgaagccaggtttctttttcccattgttgcctttcaaattttgcagatcttggtatttgggattgatcacctggagttgga

SEQ ID NO: 17292 - DNA, 394 bp, Glycine max
  Intron number 3 from transcript Glyma08g44580.2 (locus Gly ma08g44580) derived from phytozome v7.0 (chr-ID Gm08; pos 44156908 to 44157301)
tgaagatcctgaacttcttgctagagagacagtgtgtatgcacttaaccttaatttatgcttatgattcattgattgtcacatttgttcttacataattcgatcacaaattaattttgattttcaacctatgtgctttggttgagaatgtgcacttttgaagtcctagatcttgtgttattccatcgtatttgagttaactttattagtgttgatgaacaagaaaagaaaagcaacaacatagaaaatgcaattatcttgtttgttttgctggattatgttgcctctaatacggttgttaggaaataaatatgtaatatttgtgctaaagatagctatttattttgcttgtatatgcagtcagtgtaagtgaaatagaagcactctacgagctc

SEQ ID NO: 17293 - DNA, 793 bp, Glycine max
  Intron number 1 from transcript Glyma11g10670.1 (locus Gly ma11g10670) derived from phytozome v7.0 (chr-ID Gm11; pos 7596271 to 7597063)
ctaaggtcaagggcttccccgcttggcctgcgaaggtctcactctcttccttcttctacctttttctcttccaatattattatgattatgcgtttttgttttgcgatgcatatctcatctctctgtttcactgttggttcagcatggctttcatgtcctttttttcctgttagtttgtgatattgctgagacgagggagggattttacattgtttgatgtcatatgactagaatagtgaatataagtagggggcaaccctcattaataccctaacttttagggttaagttatacccaaactcaaattctaagatggtactagagtctggttgttgttattgttgttgttgggtctacagaaatacctgttattataccacctatagatgtccagccttgcaaatttcatgctcaagatgtttagtactcgacgtgaggagtgtgttggagatcccacattgacaagggatatgactaaaatagtatatatatgtgtgtgtgtatacacatcataagttagcttttaaggttgagttaggcccaaactcaaattttgggatatgatttactttgctttcagtttatgggttatttaccatagtgttgttagtggtattcttggtaaatttgatctgtcgtcgcatttgtatgatgtctctttctgcattgttataaggttttccactcatggtgcttggttgaactttcagttattattagtactgaggatgctgattttgttgcatctttctattcagataagcaggcctgaagattgggacaaagtccctga

SEQ ID NO: 17294 - DNA, 873 bp, Glycine max
  Intron number 1 from transcript Glyma07g04810.3 (locus Gly ma07g04810) derived from phytozome v7.0 (chr-ID Gm07; pos 3542443 to 3543315 reverse strand)
ttctgcgcctaccacccctcgcacccccttgactcgtaacacttctctctctctctctctctctctctctctctctctctatatatatatatatatatatatatatatatattggtgattgtcttctcagaatgtttcttttcttttcttcttgtttgtattaggctttgtttgcatgaacggacaaaagacaaagaaactgaacctttttatgatcattttaaacgaaatacaaacactaacacaatctttgatatatatatatatatatatatatatatatatatatatatatatatatatatatatatatatataaactttaattcttcttattagataacatcactaaaagcaagggagtgtgtattttttatcatctagtttagtatttacaagaaaataagaaattataataaaaccttttttacaagttaaaataatatatttttataaattctctcaactagtttgcgaagcatataatcttctcactgtaagtattgtacattttgggagaaaaagtttatgcatgatgaaaatatttttttcctaaacgcaaacccttactttgcaatcttattctctttcttgtttgtcttttttaaaatatgtatgttaaattaccataagtatgtatttgtaatttatagtaataagaagtagttgaatttggcaaaaaaaattgttgaatttcttcaattaaatcatccagagattaacgtaactttttaagaatttacttttagtaaaatagttatgatatcataccatgaaaaaaattcattattaaactttttgtgacaattttttaacaaaagaacaaaataatttgcagcggaggcaccaggcggtgatttcaagaagctcacg

SEQ ID NO: 17295 - DNA, 649 bp, Glycine max
  Intron number 1 from transcript Glyma08g19420.1 (locus Gly ma08g19420) derived from phytozome v7.0 (chr-ID Gm08; pos 14683617 to 14684265)
cttcccctgtaaatcacgtttagttcgcacaaggtgtgttttgttcaccgattctgcgatttgcgttttcgtctgatgaatttttgtgtttacatggcgtttttggttactggatccgtaaacttttgttgtgctttatggatcgaaattcttttgacttcgtttggtcttgctgatgtggatctacttcgtacctgcatcttgtgtgtgtaggttttggttttagcttaattttgtgatgagatgttttctgatgcatcggtttttattttcggcttgtttttatccgatcaagttggaagatgatattcttgcttagcttattaattttatgtgtgtgcctttttttttacgagtcttgtggatatgttctgctatgcatgctttcaggatctttcgagtgtgttaaaagattttcattgcaattgcatggaaatgatggtattacttgtttcttttcttgattgaacgaaaagtgaaatcattgtgagtagtagttgatgaatttttgcataattgagtgatagtgaaaaaaggcctctctagtagtttcaaacttttgatcgttgcttcatcttttctttggttttgttttttatttcctttcctgaacaacttatctcccgttctctgctacaggttttaaaaa

SEQ ID NO: 17296 - DNA, 895 bp, Glycine max
  Intron number 4 from transcript Glyma09g39680.3 (locus Gly ma09g39680) derived from phytozome v7.0 (chr-ID Gm09; pos 44718832 to 44719726 reverse strand)
gtgctgtatcctattttaaaattcagttctaatatggtttatatggtgactgtttctttaaggttatgatattgtctacttttactgcaacctttccttttaatttggcaattcttcactttgtgatttgattcatcgtgacatgtattccttaggattttagtttgatgctgaaagtatgactcaacttgtcattctactttaaccctgttttaagtgggtagtgttatactctcttgaaaatggaaggaaagactaatcctttgagagtcatgaggtgctgtaatagttatttatttctccgtgaaagatttttctaatcattttatggaaatctgtttccttctgttgacattaaaagggtaagctatgaaatcctgccggcttgtcattttgattgcttgtgacatgcatgacaatgtataataattttactgatgatccatacaccatagggtacatgtgtgagtgtgactacagtttcatccctcttttttaatttattctgtataatgtatgaaatcttttaaccatcttccttttaaattttgagccttttgattggtatgaaaagcggagaaactatatttttccctaatgtctagccaacacatttgtgctatttttacacttcaggttcaatggttaactattagaatgggtgctgggtagtggactagtggtattcagtcactctgttcacacctttagaggcaagttgttgcttttttacaactatgaaagagaacaaattagattaccatctgatacatacatttcagtttgattttattgtttattacatgaggggtggagacctaaagtgattaataattaatatatatgcttctggatcttttgctccgttttcttgacttaatatgtagcttcttcc

SEQ ID NO: 17297 - DNA, 250 bp, Glycine max
  Intron number 2 from transcript Glyma06g45490.1 (locus Gly ma06g45490) derived from phytozome v7.0 (chr-ID Gm06; pos 48217581 to 48217830 reverse strand)
cccttttcttcataagcactttgtcgatcttaattgtaagtcctttttcacttgtttgtaatctttgattccgttaggacatgtttcttacttttgattttattttttctttcaatttgcatatgtaagggtaaggctgcgtacaacatccctcccccataccttcgcatagcgaagagcctctgggcaatggggtacgaagtaatttgccatagttggatttagcaacatctggtaaaggaggacttgg

SEQ ID NO: 17298 - DNA, 673 bp, Glycine max
  Intron number 1 from transcript Glyma09g32580.1 (locus Gly ma09g32580) derived from phytozome v7.0 (chr-ID Gm09; pos 39089810 to 39090482 reverse strand)
agctggccttgttgttctccaaaggcactatagtactctcccaattttaacattaatttactattctttattcactgaaaattcaacaataatcaaaacgcctagcatgtataacatgtctcaatattaaatatttgaattcctaattgtttccagatttaagtatttttttatataatgtttattggaatgtgttaatctagtattcttattattttttaatgaattaagatttatacatttttttatttaagttcatattattttatttaataatcacatattcacttaatttaatatcataaaataaaattcattaattataaataattaatataaatattttatgatattaacacatatttttttatttataagatttaaatttaaaataatatttttttataaaacccaatctataatatttcttgtattaattatctttagattaaaaatatctctaatttaaagaagaagaaatatattaacaaacaattaaaaaagaaaaacatattaattagagagataattttaaaaaatataaatttattattgtgaactaaactaatttttttaatgttgatgaattatgagattgaatcttatatatatacataaaagaggagagagtattaattgttgaaagataatattccaacaggtagcgctcagg

SEQ ID NO: 17299 - DNA, 521 bp, Glycine max
  Intron number 2 from transcript Glyma05g34490.2 (locus Gly ma05g34490) derived from phytozome v7.0 (chr-ID Gm05; pos 38808590 to 38809110)
tcgcctcacagtaacataatttgattcatactgaaattatttttgggtcatttcttatagccatatatcaatttacctatgtattttttttatgcatctcagtgtgctcatgtttactttgaccttatttatctgttaattattctgctttatattgctctaccttttttaattcagtctccacacaatccctttaatctaataagtttatcaaagttgtaaatatgtacatgcgttatagattgtaggaaagtgttgtatagtttgttaaggtaaagaagatacattcctggagtttacacattaatagtatattttgtttgatttgttgctaaaagagtatctccattgccgtgtttgatgtttgacagtttgagaaatgccatggcattagcaaaaaactatatataagattggactttcgtaggtgaacttaatgtgaactaatccctataattatacttataatattcttattcattgctgcagtggtttgacacagacaaattacaaagaattga

SEQ ID NO: 17300 - DNA, 736 bp, Glycine max
  Intron number 3 from transcript Glyma07g12290.2 (locus Gly ma07g12290) derived from phytozome v7.0 (chr-ID Gm07; pos 10570949 to 10571684 reverse strand)
gacaggtaacctattaaatgattcattgtttttttaggttacattagaggtgtgataaagatagaggttgttttttgtatacttttttttgggggggtttgggggggggggggggggggacttgggattatgacaacccaaagcctcctttcctggaattgccaaaaaaacctaaaaggatgttcccaaggtaaaaggaaaaaaaaaatatccattgttttatcaaaaaaaacattttcttcattttaagggtaaggggaagaattttgttatatgtttgctgctgaacctatattgtcttttgggtaaaacttaaagtggagtttttgttgaagtgtaatttgctagaagttactttttgcataaaataatgcatatatattcttcctatatgggcaccattgaacatgtacttctggaatttcatttgtgatgaacttccctttgaacatttaaagtaaaatctttgaatttaataacttaacagaactttgtgcaaatccagtaaacaaatcttaataattgatcttatttttaaagataaccaatattctggaaattttgtcttggtgtctgtctgatttatatttcctttagaagattttatatacccttcttaattcctatgaattttccccaactacattacttcattttcattgcatatcagtcatccatatgattctctgttgtaatgatcattaacttatttaggtagctgacaaaattcgaagag

SEQ ID NO: 17301 - DNA, 640 bp, Glycine max
  Intron number 1 from transcript Glyma12g30680.2 (locus Gly ma12g30680) derived from phytozome v7.0 (chr-ID Gm12; pos 34326845 to 34327484)
cggagtgcagccatatcagcagcagcagaagtcctgtaagtgcaaagccacaccttccaaactcacattttaattccaattgcgtcgataatatagttagaacaatgttatatcgattttcttaatgctttcatcattgtatttttatacattttcgaatgttataatcgagattagattgatcctaagtaggataaaaggattatatactgttgtaacgcagaggaaaacacttggctactgatagctttaatagaaccacagtttgcagtagaagcttcatgaagatgcactctttattgttgttaattttctgtgctttttagggttctgagaagtagtgttttttggcagttcaagggattcattctattggaagttaattgttcactaattaatagtttctattgcatatgatagtgatctaatacatgttgaccctgtcgtattctttgattccctaggttattcaactgatgagatttctgcttgcggtagtttaatttgatgataggagtaggacctaagaatatgtatctcaatttttaaataatattttatacgttcctcattattgttttctgttttggacctttttcttcttcttttctagtgaagtgctgctctagtttgaggcaca

SEQ ID NO: 17302 - DNA, 773 bp, Glycine max
  Intron number 1 from transcript Glyma13g38680.1 (locus Gly ma13g38680) derived from phytozome v7.0 (chr-ID Gm13; pos 39422643 to 39423415 reverse strand)
gctctcgctcagttcctcaagatcttcacctcctggtgcgtccgtctctcacactttcaccatcgcgtttcctttccgttatgtttagctcacttatcttccgtacaatcgttgtttccctcatccgttagatcaaaacactgcgatgagaaaagcgcgcgtttgtcttttttttttttaggatccagcatcatacttcctttttggacgcttctgttgcaaatattttgtgttttcgtcgacaattcgtgtttcagactgtatatttggttaggaatttagtgagatttgggttttagggtttgaaattaaagtacggtccggccttttggtttctgttctagaaattagagaattgcgaatgaatgaatctagggagaaaactctttctgctgtgcttatagtttgagcaatcaaatgtctggtttagtattgtagggatttacctttcagtagaaaagtagtgatttaagccgttaatttggaaccgtgaaaatggaatgaatatcatatttagtttaagttggtgcatgtgtttgctgacatcttctcacgagtgtaagcaaatttttggaggtttgaatacacgatattgcattttttttttgtctctaaaactgaataatttcttagcgcagacctgtatgggattggaaacatcagcataatttgtttgagattggaaacatcagcataatttgtatgagattggaaatatgagcttaattttttccaaaatttttctcctagatattcaggtataaggagaagag

SEQ ID NO: 17303 - DNA, 796 bp, Glycine max
  Intron number 1 from transcript Glyma11g01230.1 (locus Gly ma11g01230) derived from phytozome v7.0 (chr-ID Gm11; pos 716889 to 717684)
catcaccaaacacagatctgaaacaaacaaaagaggtaagcttcatctttcatcttctgctttgcgccaccacccttttctactccaaagcttcaactttacttgaccacttttcctttatatgtgatgatctcaggttaaaagggtatgaaagctgtgaaaaatgagaattgggcattttttttttttgtgatttttaagatttttgatggtttgtgggttcattaaagcagggaagtcaaaggggtttaccaacttcagctgacttgttaatgtcgtcgttcttgctggttaggggcatcagtgtcaaaggggttgttagttttgttgctgctgagattttgtgagagtgaaaaaaaagagaaaatatttttgggatcttcttctacttctagtgggggtttatggaataaaatgttcatgggttgagtgtctgcatctctgtgcagattccactgaatctctggtccgttgtcttttcaacttcttttctttggggtggcaaccacgccccatgaaattatctatgcatttttcgggattttttttttctgatgtttgtgtggacctgttgaaattatgtatacattcttcaaggttttactgagatccagccagtgctttagtgttgaataatgtgtcttcatatggattaagattcatctttgatatttggtttcagtctttaacttttatgttatagatttgtttctagtggattgaattaactatagtttttgatgatttactaaatttctgagtttcaggatattataatcagccttagtcgtcaaat

SEQ ID NO: 17304 - DNA, 611 bp, Glycine max
  Intron number 2 from transcript Glyma11g01230.1 (locus Gly ma11g01230) derived from phytozome v7.0 (chr-ID Gm11; pos 718516 to 719126)
ctgaagatacctgctgccgttttgagcccatatcggtataaagctttagtcttaaatactttattttttcttttctaaaatatcattttttttttgcttcttttctaattataccaacttaaacaattcagttccccattattctgaatggctatttggcattagcatgtatacccatgttcatgcacaaaatagataatagtttacattaatatgtttgagatttaaattttgatagattaataaattttgtttacatgagtatggcaatttagcaatattgacttggtcctattcctttcttcaagcattccaacaccaacttagaatacaagtgaggcttgtgaattatttacttgcccaatccttttttctttgtactgtgtatgtgttttaagtctttgcggttagacttttaaaactcattttctcttcatattttttagtttttgcgtgtttttttattctaaaattgtatcatgtgtactagtcctgaacttaaaaattaatgtgcaccacatcaataatctaaatcatctgacaatttccttcttctttttgtgtctgtttgtacagtcttatcatttttattcgtttggttgtcttggcac

SEQ ID NO: 17305 - DNA, 1017 bp, Glycine max
  Intron number 2 from transcript Glyma12g36650.2 (locus Gly ma12g36650) derived from phytozome v7.0 (chr-ID Gm12; pos 39691923 to 39692939 reverse strand)
cctttgctggctcaattcctgatcaggtttttctttctacttccattttttatttttgggtaaaatatttttttttgttcctcgaaattcggttttagtctctctagaattttaataataccattttagtccgtacataagtgatgtggttttagacttttagactttagtcccttgttggcaaggttttaaattgaggtttgcggtcatggatccttgacattgcaaaaaattgaggacaaatacggtcatgtagaccccaaaagcttcacattgcagctgaatcgcagttgctgaccattttttagaaccttgctaatatgggctgaaatgtagaaactaagaatgtactattaggtttttatatggactaaaagtgaatttcgagacattttttagggactggaaacatattttactctttattgttatttttggtgttgtttcaatgtttcaaaacttgctggatgatttaatggttttgctgacaaggttgtagattcatgctacccatgaattgctaatgtgggttgtttctgaagtttattgaattttatttaccccaaattatgggagtaaaagcagaaatttcagtccttttgttgttatcattgctgctgctacctaacagttaggtatttaggtgatagaattcacaatgtttgacatgggataatggaagatcttttttttttcttttttttaaataatgggaattggaaggtcaagtacaaaaaataatgtgagaatgatagttacttttctttgagttgaattgcaagagtggatggataatgctgcatttgaaagcagctgtgtcaaagacatgcatgtctcccttttgacccaattaaatattaaattttgtattggtgtcattcgtaagtgtgttgaacatcgctgaaaatattctcttttgtttgttttattaactcatagtttactattgattctgttttggtctgtgatcataactatgtaatcttatgttctgtccaggaaagtgtctactggtca

SEQ ID NO: 17306 - DNA, 705 bp, Glycine max
  Intron number 3 from transcript Glyma08g08920.1 (locus Gly ma08g08920) derived from phytozome v7.0 (chr-ID Gm08; pos 6357655 to 6358359)
gtctgtattgagggcattgtcactaaatgtaaaactaacattccttcctcttttttttgcacctttcttacttgtttaaggtttaaatggttgagtgcacccaatttctggtaaagtgactgtgaattaaacttttgtttctttcttccctgaattgattatttaattgctccctgataggttttacatggtctaacttgaatttgaagattatattttatttttttattattttgaggcaatgtttgtttctttgttcaaggatttaacctttcattacaccgttggttagtataaaacctgtgattttttttcctttctatttgtttctttaagttaacaagtgtacttcataattttgtttggcatagaaagcttttagtttgatgattagttaatattgtttatgctaagtcacttttagtatgtcctgagtagcatgttgggcattatgctatgtgataatgatggcaatgtgaagatcttttacttattaaactatgtaatctctttcttttacaagcagcagtttggttttatctttaggttgctctttttctccattgattcctttctttctgtttcatttggcataaatttacaatcacagttctatatttgagagcaaatactctggtttaagggatcttatctttattttcatttataggttctcttgtaaggccgaaggttgttaaaagtgtt

SEQ ID NO: 17307 - DNA, 1014 bp, Glycine max
  Intron number 3 from transcript Glyma13g37200.1 (locus Gly ma13g37200) derived from phytozome v7.0 (chr-ID Gm13; pos 38351144 to 38352157 reverse strand)
aaattattcgtatactgcaggaagaaaacatagtggtcaagagtgtccattcttcatcattcgctggaaactcaatgttgaatgttgtgcatgcagaagtaagtttggtttacaaagaaattaattaattaattagaccttcaaatattaattaattaaggaattaatattgattttaccatttttgtttattatggttttgtgtagattcagcaatattcatttcttctagaaacaaccgcaatgagtattgagaaattgagaaggattgtggacatgcatggaggaaatttttaggccatcccccattttatttcgtactagttaatgcactattattgaaatatattatcatcaaatgtttttggtaatttcccttttgatcattagttaaatttgtggggtttgaatttttttttatctgttagaacacgtacacaccggctgaatcaactgagttagttcccttacttcatatttgtgctttgaatcttgaattattgatatgattaagtgtattgctggtaagacatatggaactgagtcactattcatgcaatcatatgcattgtctgctataatcggttgaaattttggagcaccaatgctcgtaattaaattaaatttacaatagacgtactactggctacaacctaggccaccatgatattacggtaaattgcaaccggttatacatgtaagtaaaattttaaatattatcaaatagtaaataacacatattgaaaaggatattctaattgtgtttttggtagaaaggaaaaaaataagtaaaaaaaaaatatatgagatctagaaaacggggaaatagaaacaaggaagatcagaaatatgaaagacagaaataaaaaattaataaaaaaaatcatttgacatcattttgtttaacaaacaattcatttttttaaaaaaattaaaccatcaatttgtcttcttcaaacacatataccatttggcctataaagttatagacaatcgattgtcttcttccagagt

SEQ ID NO: 17308 - DNA, 528 bp, Glycine max
  Intron number 3 from transcript Glyma13g35480.1 (locus Gly ma13g35480) derived from phytozome v7.0 (chr-ID Gm13; pos 36896525 to 36897052)
gggttgtgccaaatcctttgctccctttccaacaggtaccttttgaaccatcaaccaccactcattggtttcttatcttgaaaaataattttggcttaattccagcttttgtctcttattagcgtcattttgtgaatttggtttatctacttttttcttttcttttcaaatttgctcccctcactatattaattatataattttggtatattcgatgatttgacattcaatatttaacaaaaatgttaatgtgacatgaatgttgacgggacaattaaaatattaaaagattgatcaaagttgtacaattaaaatattgaaaaatcaaatttgccaaaaaaataaaataaatgacagaccaaattcagccaactgttttaagtttcattactttaattaagagactagtatgaaatttcaataaagatagaagcacaatcctttgatacatattgaaggaaaggtagtggactaatagtattacttatgagatccatgacatgttggtggtggaatgatgcagggtgt

SEQ ID NO: 17309 - DNA, 1003 bp, Glycine max
  Intron number 1 from transcript Glyma09g15380.2 (locus Gly ma09g15380) derived from phytozome v7.0 (chr-ID Gm09; pos 17904161 to 17905163)
ttggtgattgccatattggaaagactagttttgtggtactagtttcaagttttgatttagtttattcttagcttttgtttcatttttcattcatctcagatggttgttagttgtttttgcttagtgattcatgttggaaaaactattttgtggtgctagttttaagttttaattaaatttcttcctagtttttgttttcagtcatctaagatgggtgttggttgtttttgcttggtgattcatgtaggaaaaactagttttctggtactagttttaatttaatttttcctagttcttatttcatttttcattcatctaaaatgagtattagttgtttttctttggtgattgtgtcatgttggaaaaactagttttgtgatactagttttaatttttaatttagtttcttcctagtttttgattcatttttcattaatctaaaatgggtatcagttgtttttgcttggtgattgacatgttggaaaaactagttttaatttaatttcttcttagcttttgtttcatttttcattaatctaaaatgggtgttggttgttttttcttggtgattgctttattggaaaaactagttttgtggtactagttttatgttttaatttaatttcttcctagctttttgtttcatttatcattcttctaaaatggctgttggtgtttgccatattggaaaaactcgttttgtagtactaggtttaagttttaatttaatttcttcctagcttttgattcatttttcattaatctaaaatgagtattggttgtttttctatttttcattaggagtaattttttatacttggtcatgtatagtactagtttcaagtttcaactacaagaaaaagatgactttttaaaaaaacttttagacccctgaattagtattgaaaaagtcatttttgttgccaaaatttgtaactaattcattaatttttttgtaattgttcttcttttattatgtgtgtgttttattctcagatcaagt

SEQ ID NO: 17310 - DNA, 734 bp, Glycine max
  Intron number 1 from transcript Glyma10g40550.1 (locus Gly ma10g40550) derived from phytozome v7.0 (chr-ID Gm10; pos 47935967 to 47936700)
attcgtcaacaagcgcctcttcccttatttgcacagtaattcctcattcctaatccttttcttttcgtttaaaccacgcttttaagatccaaaatgacttcaacccttactcatttctttgtctttttttttttttattcaatgccttttatatttcaaaataagactatttttttttaatttaatactttcttatttctgggttatatgatattgatatattattctggtattgagttcttttttactaattattaatataattaaatcaaatattaaatgtcttttatgattttttagataagagaatatttttttaaaaaattctttatcaagtacgaagaatattactggaagatatgaattatgatattgatattctggtattgattgactggtttgtttgttttctatgctctatgttacataaaaagtgaaatgccaactgttgttgtcttctcagttatacttcctcaaatagaagcacatggttttgttcactcgttagtaggaagaggaattattctaaagaggcatttgtagtcaattttacaattgctatcaataaatttccctttgttgcccagttttacataagctatgttaattcgtacttgaatttgtgaacaaagaatttgaactaaataggcatcaatgatgctgcatcttgctcatttgtttgttgtttttgatttgcagaattcgcaactgagcaaggagggttgtctgtggat

SEQ ID NO: 17311 - DNA, 397 bp, Glycine max
  Intron number 1 from transcript Glyma13g22970.1 (locus Gly ma13g22970) derived from phytozome v7.0 (chr-ID Gm13; pos 26445745 to 26446141 reverse strand)
ttcaatttgatttgattcgcttgctggaaaattctgtgagcccacctttttgtccgcgattgtttgttatgttttagttcttcattttcgttatttaatttagaagcttgttcggttattgtctatttgtggacgttattcagagcttgggggggtgggggttattttgtagtccctgagggttgtttccttagttggatctgagcttattaatataacatctgcgttatcgagttaaatttaagatttatattcattacttacgcttgattaattattgttctctcttttttgtaaaaaaatagacaagatgtttataaagagaagtgtgtttgatgtcagattagttggaaaggggatcttatgttttgaattttgtagttgagtgagggagaag

SEQ ID NO: 17312 - DNA, 294 bp, Glycine max
  Intron number 4 from transcript Glyma11g01140.2 (locus Gly ma11g01140) derived from phytozome v7.0 (chr-ID Gm11; pos 639469 to 639762)
tcttgcaaagttatacttccaaatcctaaattgtatgattttgaaccttctcgtaatgtctctctacttgctattaatagtgtcaatttcttctaatcttttagatgctactctcttttgatttgtggtttgtcgatatactatgtggtttgtgatgttcatgatttcatgtggagaagttattattacctttgtaaagcattttttttcttttcattttaaccttccttggtaatgtatgttaaaattaaataattaatctctttctttgtttttgcagtaccgttccagcag

SEQ ID NO: 17313 - DNA, 707 bp, Glycine max
  Intron number 2 from transcript Glyma12g10420.1 (locus Gly ma12g10420) derived from phytozome v7.0 (chr-ID Gm12; pos 8359538 to 8360244 reverse strand)
aacctttcctcttatcttggttagtttctttctctgatttccttcttgttcagttcactctcaaagtataagctacagaaaaaaaattgtagaaaaaaaagttttcccttttcttctgttttctgaccatttatgaaagcctttttttggaagctacgatgtcgtttaaaaggggtaatgcagaggaaggattgtggttggtttggtttacaggaatatattatttgctaaatgcctagatctgggtggttttaaaatctctttgactggaactgccactgattttatgttttgtggttcaatagatctataagactcttctattgtcacgctaatatgtttattataactcctattttatataattttcttataaataacctcatttgctaatcaaaataataatttagagaattttatataattaaaaattgtgacaagtgacaacagacactcccctgattgaaatattaaatagttgtatgatttagaaacatcaaatttttaatgtaatttgtagatgttacaatataatacatgatggaatcttgcctttgccccaaaatggtaggcaatgtttgatgagtaaattagtgataaccaaccaaataagtaaataaaatgacagggctaagacttctattgcaacgcttattattattcatgtgaggagaattcagtgttatactacttgattctttatagga

SEQ ID NO: 17314 - DNA, 753 bp, Glycine max
  Intron number 1 from transcript Glyma08g02850.1 (locus Gly ma08g02850) derived from phytozome v7.0 (chr-ID Gm08; pos 1952017 to 1952769)
gccttcaccaagccagtacatttcagcttcttcatgtaagagccattactctttcctattgatacttgttcttttgttgcttaattatgaaaggaaaaccttgatgacttgtaagggcatgtttgtatatattgaaaatgtaattgtggtagtgtgaattccaatgtcctttgaaaatgtatattggagggaactagttacttgaatgattgctaacatatcccattaaaacattctccttgtttctgtggtttcaattccacttcatgtgatgcagcggcagacgtgttacgtgtatgttgtgtttgtatgttagggactgccaacaaattagattctcaaatgcggatcaggaattagaagagtattctgttttctctttttgttggataggtagacatagtgtgtcttaattgagattagtgttccactatcatgttaaccagactgtttaagcggtgcattccttttttttatgtctatttctcctattttgaatttgagctattctacatcctattaccaatctaacagttggagttctaacgtatttatgatttgttatgttatgtatgtaaacataacattaaaaatcaatgttgacagtgattacttattttagcttctaaagggaattgtttactttagatgagtcaaatcccaatattccatgggtaaccgtaaataggaggacgtaaactagaatgcatttttatgttatactttattgtggattgaagcagcagctccaag

SEQ ID NO: 17315 - DNA, 593 bp, Glycine max
  Intron number 2 from transcript Glyma12g02400.1 (locus Gly ma12g02400) derived from phytozome v7.0 (chr-ID Gm12; pos 1521357 to 1521949)
gaaggtggtatatcgaatagtacagctacaggtattaatttcttttgaaattttatatttataagattattttttatatatatgttgactcacacacacgcactcaaactaacaaataatctagtacagtacaatatttttactctatggtttcttgtggtggcattttgtatggctttgtcattgacctataggctatagcatttgtttaagatatattttcttccatgaaataaaaaatataaagcaagatttgtgattggccaaataccatttattcatatgatattttttaataattttttttctataaccacattaataatcttattttgtagtattttcttttctcttcttattttatcgcacaaaaattagacaaattttattgtgcattttcaatgtaatattaaatggagatcgtcttgtaataagggtatcattttagcatgacatgttgtgtgtatgtatgtccacgtgtgccgtgaaataaataaaaaaaatgttctgtgtctctgttgacaaatgtgttgtgttaattggaaatttaattattaggaacgacagagtcagagttggaagccttgcagaga

SEQ ID NO: 17316 - DNA, 522 bp, Glycine max
  Intron number 1 from transcript Glyma12g33800.2 (locus Gly ma12g33800) derived from phytozome v7.0 (chr-ID Gm12; pos 36989805 to 36990326 reverse strand)
cgccaagctcgccgaacaggccgagcgatacgaaggtttcaaattcttcctttgttttctctgactttgacgcgcacatgcgcgtcgatgtgcgtgattttgatgattcctttttatacggttgcttgtttctactaatttgagttctcttatttcattctatatcattttcagtgagaaaaaaaaatattttttttggtcaatttggtgtgctatttactgtttactgtcactttggttgcaagtggagtagaaaaaaaaaaaaaagaaatcggttagggttaggagtcatttttaaagaatttgattttccattttttttttgtttttttagttgtagtttaacttcccttttctgattttgtttccttaaaaaaatggaaagtgcgttcagtttgagtgtgaggctacttcaatttttcgtgtgctgcatgttcaagttgtggtgccgaacttaagagattttatcagatgtgaggctttatttgtgatgttttgattttgcgtttgtttgtggcagag

SEQ ID NO: 17317 - DNA, 567 bp, Glycine max
  Intron number 1 from transcript Glyma10g39780.6 (locus Gly ma10g39780) derived from phytozome v7.0 (chr-ID Gm10; pos 47394919 to 47395485 reverse strand)
ttctctttgcgcagttccctacctctcctttcaaggttcgtagatttcttctgtttttttttcttcttctttattgtttgttctacatcagcatgatgttgatttgattgtgttttctatcgtttcatcgattataaattttcataatcagaagattcagcttttattaatgcaagaacgtccttaattgatgattttataaccgtaaattaggtctaattagagtttttttcataaagattttcagatccgtttacaacaagccttaattgttgattctgtagtcgtagattaaggtttttttcatgaactacttcagatccgttaaacaacagccttatttgttgatacttcagtcgtttttcaagaaattgttcagatccgttgataaaagccttattcgttgattctgtatggtatttcaagagatattgctcaggtcctttagcaactaccttatttgttgattctgtggccatagattaggattttttttcacgaaattgcttcttgaaattacgtgatggattttgattctgatttatcttgtgattgttgactctacag

SEQ ID NO: 17318 - DNA, 615 bp, Glycine max
  Intron number 3 from transcript Glyma06g09230.1 (locus Gly ma06g09230) derived from phytozome v7.0 (chr-ID Gm06; pos 6789465 to 6790079 reverse strand)
ggatcagcagtagcagatcacagttggtttcccgggtaagtgtcagtccatttccaaattctgtgatgctatgaacaattgaagatatcaagttatttatttttctttagagttttcatgtaatggtgatgacccatgtacatttacatttcttttctcacttagtttgctgccatcgaaatgtggtatggctggattctattttccattgtgatgttgggcttgtcctctcatttttcagagacattctccacctgttatctaggttttgggagaagaaaggaggtgaaagtgctgttagtttatgttttagttcctgagtcaagtattgtttaacgtctatgctataccccagctataaaaatggaaggatgagccagtgccccataatgtggacctacattgcaactcatgttttttttttttttttttgagatttgtgctgtgaatgctacataatgggctggtttgtttaaacttatttgttgaaataagcgtttatttaataaaataagcaaatcttatctacatcttataaaagcacttagatatttggttgtttaatgagaactgagatctgagaagcttatttgccaattgctacttttggcaggt

SEQ ID NO: 17319 - DNA, 971 bp, Glycine max
  Intron number 1 from transcript Glyma07g00870.1 (locus Gly ma07g00870) derived from phytozome v7.0 (chr-ID Gm07; pos 486978 to 487948)
ctccttcaagttgatcagtgctacctccactggtttctttcttctccattcccattatttctctctatcatgcttagttgcttacactatttttttaattaatttcttggttatataaatcggactcttgtcctgtccactgcataaccttaattatccttaaagtttaaagaataaataatgtatagtgtaactatcatcatccagaaagtaaacgcatataaattaaattttataaataatctaaatctttaatttttaatgtgattgttatactttctattgtgctattttataaatatttaatattttcctttgtatttttttaaattcattaaaaaaatattcttttaccttacattaaaatttctttttcccttaatttttagctttcattattttaaaaattatattaacttttaaaattgattatcttatcataaatttaaaatatctaatttttactcatttatttgagttgagtatacatattttttttaataattattataaaattaataaatttattatataataataattttttattcataggaattaagcttaagtattaaaaaatttataacaacttaaccacactccttaattagtcgaacttaattaatttctcttgatccatacatgtcaacttgtgattagataagaaaataaaagtatttatattctttgtatattctaattaaattctttcattatattttctcttattaaatttaaaaatattcatatatagttgttaattatatacatacaacttgtccatgcatgtaacgttcgttgttttatattatttcagacatctttctgacaataatttacaaattataaaaatatttatgcatatatgtatcactttttaaagactattgctaactcgatcaaagacactcatcttttgtattttctttttggttttatttgtatgttttttttttctgtagcaaagggaa

SEQ ID NO: 17320 - DNA, 891 bp, Glycine max
  Intron number 3 from transcript Glyma10g44580.1 (locus Gly ma10g44580) derived from phytozome v7.0 (chr-ID Gm10; pos 50900131 to 50901021)
ccattgggatcattggaagaccatcttcgtatcatcattatattttcggacatattagactttctattttataaaggcttcacaaattcatatattaccaatcattttgttttataagaacactatatataatctatatcatatattgatgtaatttctcattgtctctaaatcttacaattcaatacatatcatcattcacaatttgaatttcgatctgataaccttgtttaagctttcagcttctccctaattattagctgttgtatccattcttttacgtttattgtacagtgggtctaacaacacattgacaatgtaggatctggaacctacacattaactaaatttcttggttgaaagaaaataatataaaggagaggtaaccattgtatattcattatggtcttcaaattgctagaagagatattatagaatagaagattttgtgtctaatgactaatgaaaccctccacaccataaatttatccagaaggatggagcaaagcctcttccacccattcaaggtgctgctttggctccttcaagagagacacagagaaaagaataaagttgttaccctgtgaagttaattttcattcatgatgcatatatatgctatgtagtgcctgttcaaatctaaaagctttttgtaataaaacctaatcaacttagtgtttggattagctttccatgttaatgcaagttatggaaaaggaatgtgatacatatgataaccatgctattgtctgctggaaaatgtttccttgttattatatctgtcttcttatgattgactagtatctcatgctgataataactaatgtttaatcattatttatggactggagggcagatcttcccccggataaggaaccattagattggaac

SEQ ID NO: 17321 - DNA, 571 bp, Glycine max
  Intron number 4 from transcript Glyma10g33660.3 (locus Gly ma10g33660) derived from phytozome v7.0 (chr-ID Gm10; pos 41974374 to 41974944 reverse strand)
tttgccgggaattggtgggtaagttccttactttggctgcttaaaattttatcctaggggcttctttaccttttcttttttcttttattctttagttgtcatatgctgtagcttatcatgaggcgctactatgctgtttacttgtttgatcacaggcttaagtctcagagtaacggagttaagagtttttttataaattaagcatgttaaaccagtaaaaaatgtaattaaaatatgatttcagatgtgttgcttgataacttataaattaagcatcatgtatttatttccctggtctatacatatgtcagagaagaaaatgatgcattgcttgataacttattttctagaattttgttgtattctccccctcccccttttgttttctttaatgcaaatttacttgggaattgaaaaaagacaatggtataaatttaattaatgaggaggtttttgtgatttttcttttattccatttttaatgtttaatattttttattttcagttgttttgagtatgcttccatattatgctgtttgttctgtttgagcaggttttgcccttaacagga

SEQ ID NO: 17322 - DNA, 957 bp, Glycine max
  Intron number 2 from transcript Glyma13g08740.1 (locus Gly ma13g08740) derived from phytozome v7.0 (chr-ID Gm13; pos 9326929 to 9327885 reverse strand)
tcaaacgggtaagtgtttcttttatgtagaaattaaagatgatatcagaaaactcaaacatatggtttatcatgtcattactcaaacattaaaattgtagatatatacctcccttgattgtagcagtatgataataattcatttctacctttattaattagtacatcagttgaaagttataagatttacttggtggttaaagaatatcggagggaggttgatgtctctcaaaaaaaaaaataccaatttgcattcttgactttgttttacacccaaaatattgtccttcacatagacagtttgagttcattgaactacgtatgtagttgtttcgaggtttttgtttaattatgctatatattgacaatgataagttgtaatatactttttaaaatgggtttgattatctcttgtatattcttcaatttagtttttcttaaaaaaaaaacaagttatctataaacggattacaaaagtgtaattctactagagaggttgcaaaaagatttcttgtattagctagtagacatatctaaaagcaataaggaaaataatcaatggatgacgcctaaagagagaaatagacaaaaatatatatatatgataagtgataaaaaaaaaagagataaagagtaataataggtgttgctggacaatagccttagatacacaatcttgaaaaattcctcctagacagcttatgtatatgaacaatgattttgaacaccctactaacacttaatttttctctattgatctctctttttaacacatcatatttatagttttatttcttttttctctctctagctcagtaggtgttgaatatatcatattcattatctaaatgtatttttcctatgtatattgtgattttatgcactggtacttgatgctagtttgttcctcctatatgatatagggagaccaagcatcaataattggaggcgtggttga

SEQ ID NO: 17323 - DNA, 671 bp, Glycine max
  Intron number 2 from transcript Glyma05g34560.1 (locus Gly ma05g34560) derived from phytozome v7.0 (chr-ID Gm05; pos 38853929 to 38854599 reverse strand)
tctccgaacgactcagagaaaaggccgttgaagaggttaccttctaattttcgccttcgttgtactattcaactgaaattaaattaattacagatttccaaaatgatcattgctgttactgttagtgttaggacttaggattatggaagctttattactaattttttcaggtttttacttttgcgctggacaatgcttctttgctgattggttttattacttaccaaagagagatttttttatatatatatattattgttactacaaagtactctgtatatgtccgtgttcgtttgttggtgatattgattcgagtttgcttttggtgtttttattgtatatattttgttgttctagagtcattatttatgtcagtttttccgtgtcatatatttatgcaagtaattgtaattatgttttggctgatgtagagggtggggttactttgtcagttttatattttaaccttattggtggtgttataatgatttcaattatttcttgtgcatggtttacttgaaaacttgtccctatgccataatttcacttattcatgctactgctgttttttcatcattttgcgtcaacttgaaatgtaactgtattttctgttttttttttttccttgcactgtagcttactgaagaattgtcaagggttgaggggaagct

SEQ ID NO: 17324 - DNA, 838 bp, Glycine max
  Intron number 2 from transcript Glyma07g35240.1 (locus Gly ma07g35240) derived from phytozome v7.0 (chr-ID Gm07; pos 40345046 to 40345883 reverse strand)
acctcaggagaagccaccgttttctactataagatgtgagtcatgttcaatatttttacttatgtcctttgaatattatttacttaatttctaccctttttgtcattgactttttactttctttgagtagatgttattcctttttgaaatataacttgatagatatagatatcacttctctaaagtgagggatttactttaatgaggaattataacaattgattgaaatcaaaaattgagatttaagttttatatatatatatatatataatcaaatcaacatgtccttaatttgagtgaaactcaattcaaatcttttaagtaaactcttagattttgagtataattaagagagaagatcccaataaagataataaatattaatcaataacataatatcaaaaaagtttcttataatcattagctaacctgtcaatcaatagttaaaattctcacccttttctttaaggaagaatttgtgtcaatatatattaatggcattaattttctttggggtcacctatgactgaaattaactaaatgagggatggaatttatcttttaggctttttgtactgtttgttcgcaaacagcccaattcaaggagtccaatgccatgaatatgtcagtggacagtggctttatgtgtttatattctgttatcttatttgatacacaaatgtgaaaaatataatgtaacaagaaaaaaaatcgtgtcatgatatatctcttgctattttagcttagcatgctttgattctgtatttgatttccttgagcttaatcaattcattttgatccaggaaaggtgactattatcgatatctagccgagttca

SEQ ID NO: 17325 - DNA, 605 bp, Glycine max
  Intron number 1 from transcript Glyma07g35240.1 (locus Gly ma07g35240) derived from phytozome v7.0 (chr-ID Gm07; pos 40346154 to 40346758 reverse strand)
aaggtgttcatcacttcttttcttttttttattttgtttccttctaatcataaacattattactccattcaattatgttaatcttgattatttgttttgtaacattttacattaactaatatgtcatggcataaattaagttaaattagttaattaatgcatgttcgggaacacgttcccagacctcaaaaatgacgttcatttcgaaagatacacttgagttcctttcataaacggaacattcacctcctaaccaacggattcccaaatatagctttaattaattttgtttgattaattatgagaaacttctgagagatcgattattaatttattatgttgaaattgattcatataattgattttgtaattggttaatgatgagaatcttatgagagattttttttctttcgaaaagcaaaaatgaaatgagattgattattaatttattataatgttgttgcatataccataatgctaattgataagaatgattatgagttgttacgcgagggtgcaatcccatgttggatgcaaacaaattaatgaatggacaatgttatattaatatgttgatcttgatatttgtgtgatatatatcagag

SEQ ID NO: 17326 - DNA, 1066 bp, Glycine max
  Intron number 5 from transcript Glyma11g15160.1 (locus Gly ma11g15160) derived from phytozome v7.0 (chr-ID Gm11; pos 10859854 to 10860919)
ccactgttatttctaaagaaggatcttctgctgttgtaagtacttgatatttctcctatagttgtagacaagtttagttccatggttcaattccattttcaattcagtggtactggttttctggttgctcagtcttgccataccatgtctaaagtgaaacaaaggatgactatggttggtagttttaaagaggtccttagtatgtcttctgtgggtgtttgggtaaaccacttaatttagcacttctctaatagaaatttattatatgatagctttttcataaatttgactataaaacctagtgaaataatttataagttttgcataaagcatgttgaaataagctaaaaagagcttataagaaagtcaaaagccactttaaaagctcaaataggctttctagaagctaacaaaagaaggtcaactttcaagtagttgtgttgatgatctaaccataggatttggtcagtaactttctctctgacattttatgtggttatagaagccactttaaaagctcaaataagctttctagaagctaacaaaagaaggtcaactttcaagtagttgtgttgatgatctaaccataggatttggtcagtaactttctctctgacattttatgtagttatagttttcaagtgtgagccatgttcattagtaagatgaaactacaaatagcatgacttggtattcagttgtttctgttagctaattatgatggatatttagcatgtctttgtcatttcttgttagttatagacatattcaatctgcaaaacaaagaagagtactaaccaaagaaaaatcagctctagttttggactgttccatgattctccattttcaaatgctaggtatccctgtttacaattaacgtttgaaaatattattttttccagaaactgtgtgggttggtcaatctgagtttggtctttctgcatataatatgtatatgtttatagttaatcttgaatctgctaatatgttgagggatatcagtataatctctgattggatttggattgcagatttttgaattggaacctggtctatataaggattg

SEQ ID NO: 17327 - DNA, 573 bp, Glycine max
  Intron number 3 from transcript Glyma13g21730.3 (locus Gly ma13g21730) derived from phytozome v7.0 (chr-ID Gm13; pos 25291426 to 25291998 reverse strand)
ccaagagagctttagcactacaatcacaggtttgtttcaatgggatgtgtttggcattttgtgacattgactccgagtgaagcagttaattcaaattggtttatcatggctggaaatggatagggaaatgggaaatagctaatatatacggtgatatataaaaagcaactagacacagatgatgttcccttaatacttgtttctgataatgcttcttaactaaaatgaagttactgggatgtgctacctagcttgacattttggaattgcaaaaagagaagaaatgtttaattcctaccggtgataaattatcatttttgtagtgtttggcagaacattaggaataaatttatctccacttctcatgttcttgtttgtgcctatttgaaagaaaatggaaagtgcatttcccttgtcatactgtggttgagaaagaagtgttttgctttttcattgacgagatttgaaaagttttctattgacaattttatatatcttctgagagcacacattacaaatgtagctaataattatccttttcttgtgttcgcagctttatcagagccaatagac

SEQ ID NO: 17328 - DNA, 539 bp, Glycine max
  Intron number 4 from transcript Glyma06g05020.1 (locus Gly ma06g05020) derived from phytozome v7.0 (chr-ID Gm06; pos 3553251 to 3553789 reverse strand)
ctcatcaatttattaggaaggtacatccatcttaattttcattgccttacttcccttttcatttttctaatttgtattaagtgtggttttagtttctttatttttgaactttaataaatttggctcatttgttacttctcttttttacttaaaatctttacaaattagatttgattaaaattgttttgctcaaaactcatttgtcaaaatatcaaaattttcacctaaatataaaaagaaattcaaaactttccttcttcaaatcttaatttcacatctcataaaatttatggaattttttcaacttatttcttacttctatgcttctaaaattatttcatccctagaaaaaaagtacacggaagaccaaatttactaaatttaaaggtaaacttagcagaacaaaatcttttcgttgacataataacctccctacagtgtcagttttgcaaatgtaaattgagaataactggaataagttgtgatagtgatgtttaaatctgtgtagtggctaattgatcatccggaatttctctcaa

SEQ ID NO: 17329 - DNA, 653 bp, Glycine max
  Intron number 2 from transcript Glyma09g01240.1 (locus Gly ma09g01240) derived from phytozome v7.0 (chr-ID Gm09; pos 762744 to 763396 reverse strand)
ctggttagtattgcaattgcatgctactaattgatttggtataccattcacacaaagattgcatacagtttcttatttgtttttagcatcagaattggaattttattaaaaaacaattattaagatcaaattctaatttttatttgagaacagtaccaaacatacttaataacaacttctaagttttgtcccaccttattaacgtttagctcttgtttcttgtcttgctccaagctaaatgagcttaattttgattcaactcaccatcactttaatttggtacatttgaaaatggttggctaagaaaaagaatgattccctttcctttggtttattcccttggatcaattgattaatctattatattatgtctacatctagatcgttcgagaggggcaagttttattcatcatacccatgtgccccaatcaggatgaacagtatttttattttttatgttcaattatttttaaaatagcatacatgtcaagttgccaatcgattagccgcatataccaataagaataagaatggttatatatatttatattgtagcaaaataatactattgaaaagatcaacaagttatgggactttgtttgataaattataccctctctgtacaggtctttgcaaatccaagtgggagaaaa

SEQ ID NO: 17330 - DNA, 531 bp, Glycine max
  Intron number 1 from transcript Glyma09g09070.3 (locus Gly ma09g09070) derived from phytozome v7.0 (chr-ID Gm09; pos 8580322 to 8580852 reverse strand)
aaggtatgtattgatgtatgcatgtgccccccatcttttttttttttttttaaatcttatatggtatcttcttaggcctggcttaactattttgtcatgtaattttctttgaagaacctgtgtgatcctgttcaagtttcatcaattagtctggatcgatattgcatttcctgtccttttattttttttagtgtattttttaaacaacattaaatgattaagaaactgagtcagaaaccccctccctgggtgcatgaaacagtcagtttattctgcaattcaaacataagcttgaggcatgttacatgtattatgtatagtttctttaatttaattggtcaatgtttgagttgaacctttctttgaattttttttgctaaatgtgaacttatgtcgttgttggtgattcatagaacataaacttagctctagcattatctacttttgtgttttcctttaatgtgtacttttttcatttgcttttttatataaacagtattaggaaactttgtgtcagctctgaacaagttc

SEQ ID NO: 17331 - DNA, 465 bp, Glycine max
  Intron number 1 from transcript Glyma10g35120.1 (locus Gly ma10g35120) derived from phytozome v7.0 (chr-ID Gm10; pos 43300084 to 43300548)
ctgccaagtattatttcatttttttaatgtagatttgtttttgtataagttgtttctatgatagaaaaggaaatatgattaaactgttttcatgtaagttctgtgtttcttaaaataagctgaaaaataatgagctcttcctgtttggatgaagagggggaagaagaatgtgaatgggaaaagaaaatgattgaatattcaatagttttctgtgctttgatgttagtgaaatttgattgatgagtaatggctttatccatgggatgtgagctgtgtgtataacagaaaagataaaaaccactgactgaaaaataacaaatgataacagaaaatggaactaactgtaagctattgtaaactgattaaaatcaaagtgattttatatctgttagatgctgcaaatccttaatatgtttttgttatttattacttgtgagttgtgactttggggtccaatggtgcagg

SEQ ID NO: 17332 - DNA, 465 bp, Glycine max
  Intron number 1 from transcript Glyma06g07810.1 (locus Gly ma06g07810) derived from phytozome v7.0 (chr-ID Gm06; pos 5729488 to 5729952 reverse strand)
tttgtcaagtttccatagcatagagacaaaaccgggtgggtttaattggctttcttttcctttccctcggattcttcttctttttttcactctctggttttcatgcctcatctcactaattgtgccctttagctgctttttttcacttggagttggtacactcattcactcatctttcaatggcataaaaaaagttttttttttttttttaattcacttttgcatttggagtttatggggtggaatgaaatgatggctttggcttccattattattggtttcttcatttgcatgttttttttttctcttctgggtttctagagaatcttgcaattacagtgtgagatgaatttaaagttttgatttttattttctggtgtttggctaattgtgtagtagcattatttgtgatttgaaaaattggttgtttgtgtgtttgtgttgttcaggtgctttgagataata

SEQ ID NO: 17333 - DNA, 703 bp, Glycine max
  Intron number 5 from transcript Glyma13g29370.2 (locus Gly ma13g29370) derived from phytozome v7.0 (chr-ID Gm13; pos 32278619 to 32279321 reverse strand)
gataaatctccaggttagcatcttaaagtatctatttcatgttagaatatattttttttccatttagtaatacgatgtttgtgtggggagagtcagagtaatgttaaaaaaatggaagtcaggattggaaatttccaatttacatttgtttattttgtacaatgatagcatggagaagccatgataatttggatttaagatctatagcaaactactaaaactagtaactacttgaccatatttcaagtagtaagttaatattaaacacaaattgttcaaatagtttgatcaatcagactgctataccaaaaaaaaaaacaaacataaattgttcaatttaaactgagagttgaatagttgagtataatctaatacccttgtcccttggagcatatatccattgccaaagatgtgcattgatacaaaaataagatgttattcatttttattttttattttattttttcaaaatggtaaactaacaagaggctttctacgaggtaaaaaacattagttagtacaaatgacttcagaaaagtagaatattatgtgaatttaatttgattatatgataatcttttggacagctgatgagaaatatcccttaacaaaatcaaagtaacccctccctagattgaatggcgaaatgcagcttccagattgattactaagtgttcttttcttcagggatacctgctgggaa

SEQ ID NO: 17334 - DNA, 956 bp, Glycine max
  Intron number 1 from transcript Glyma06g13930.3 (locus Gly ma06g13930) derived from phytozome v7.0 (chr-ID Gm06; pos 11010039 to 11010994)
agcatcatcattctgcgcgaaaccccgacgacgaggtaattgtttgacgtacaaacagttcgcattgtctcattgtgtggtttgggaaatgatggagaggatgtgcgtttttaaagtttagtgctttactttgttagcgatcgagacatcgagaggattttttttttcaatctattttttagttgatgctttatgacagtttttagttcttatagcaccaatttgggactagggtttaaatgttgtttgaagcaagtaagtgttttttttttctctcttgtcgtttaaggtttaggcgttcgtgggttttctcgataatgtgtccactagtttgcgtatgctttgcttctccagtatgtgtgtggagcgaagcatgtcggtttaactggttttagtgcctatgattttttctactgggattcaacttccataaaaattaattgagtagtctagtttttatttttatgatgagttctatggttttgagatttggtttagtggaaaatcctagtttgtccatcagacccaagttgttgttttttcaatgtcttgttgttaaaggtaaccagaaaccacatgggacgtgcatttttttttttttttagggttagacttgattctttcagttacaattgaatcgagtggcctttataggcaatcaaagcattaaaacactgagccctagccatgtgaacatagtacgctttgtcaccagaatttagtctgataaagtcaatgttaggtagaatgggcctcatttgatgttgatgtttaaagttacagccttactgggtttgaactattggtttcattaacagacttaaggttgttggtatctaagtattcaagtttgattgaccatctttatgtctttggatgtggcatttaagacttttttttcttttcttatttgtttggttgataatggtcatctgctgatgagcaggagttagaca

SEQ ID NO: 17335 - DNA, 608 bp, Glycine max
  Intron number 1 from transcript Glyma11g12120.1 (locus Gly ma11g12120) derived from phytozome v7.0 (chr-ID Gm11; pos 8655779 to 8656386)
acctcggcgaccttggcctccttcagttcaaagatgtcagtactcttctcttcaattttccgctccgataaacacttactcacgtctctgatctctcctctttcgaattttttcctttctacttcgtaattaggtttttgccttctctttattgatcgctctctctcttcgcacaatttttctgaaaagtgattgcgatttgtttttttgctcaggaggagtggaagtgaactgtcgtacttagtttacctattttcgactagatgattaaactgattttgatcgttttcacgataattgattagttaattgagcttttatcgcagtgctaattaaatcgctgttcaatgaacggtgaaagtagtgtttgataacagaattttgacattagaatgctaagcagcggggactatgttattgatcataagtttggtttgtatcagtatttaatcaagttaaaaaggactatgtggaacagattgggggataatgataggattaacaatgaattaagcaagcatgttgcctagtttttagaaattgaaccatgatgatgtgctgctttgagaggtctttctaatcacaatgtttatgttgtttccagctca

SEQ ID NO: 17336 - DNA, 426 bp, Glycine max
  Intron number 2 from transcript Glyma07g32860.1 (locus Gly ma07g32860) derived from phytozome v7.0 (chr-ID Gm07; pos 37757967 to 37758392 reverse strand)
ctgcctccttgctggcgatcgttcgggtgagcttcactctctatcattctgttccattggtaaagaagaaacataatatgtaccaaaaatataacaaagctaattattccatatagattgttatatataaccttaaatgatagaataaattatatttatatgtgtgtgtgtgtatattatatatatataaaagaacctttttgtgatcttgtatgctagtccatatttatctcatgtttctgcctgttttgttatgacagaattgtaagcacctgatgtataatacatgaacgattttgatcttacaacagctgaattcatcttatattttgagctagctgaaaaattattaatcataaaatagcaccagcatgcacaggccatgatattttgtgtcttcattttctcttacaggaagaaacagta

SEQ ID NO: 17337 - DNA, 744 bp, Glycine max
  Intron number 1 from transcript Glyma07g32860.1 (locus Gly ma07g32860) derived from phytozome v7.0 (chr-ID Gm07; pos 37758396 to 37759139 reverse strand)
ctattctagtaacctctgccaaccaacaaaacaaggtatattatctatgatccttgtgttttgtgtttgttttattaataaattttcaagatttagcttttgggttgtgctagatttgttagttattatggttatgttatcaatcttattagcatggacatgtctgaattaactgacatgacctcgggatcctcttaacatagtctcaaactctagagcctgtcagaagattatgttttctcgtttttgttgaagctgttgtaggaaaacaattctctctctctctctctctctttcatgctcatagctcggtctttctttctgctccattggaattgactaggctctcatttcatagatcatgtaggattttctttcttctcaattttccttggctcctagaacaaaagttctctttattattttcatttttggtgtttaattttgacaattctgttttcttaaacgtttgttttcatttttcagttgaaatttcgttctcaccttatattatactccatactctttctgtgtagctttaattggtcgtgtcatgtaccgttagattggagtctttgttaatataagtgtccaattaagaactattggactttcttcttcttgtgtcctctgcataaaggggcctattatcttgggtgaatgaagggtttttcatttaaattcatttattgtttatttattcaattattttttggccatcaacagcctgaaaataaaatagag

SEQ ID NO: 17338 - DNA, 570 bp, Glycine max
  Intron number 1 from transcript Glyma08g47900.2 (locus Gly ma08g47900) derived from phytozome v7.0 (chr-ID Gm08; pos 46680032 to 46680601 reverse strand)
tctcttccattttgctacgctttcttttccttcaggttcgtcttctccactctctcttacctcatcatctctttttagggtttcgattgcgcctattcttttctcatttttgtttctcctaggtttctttcttcccgatctgcatcttcacttcttactgcttattcttcttctttccgattcccatttattccttctttcttctcgatttcgtatatttgtattttctcctcttttttcttcccgcgaagaataaaaaaaacactggagaaatagatcgtgttgtgtgttgtattttagtgaaattgattgtgaagtgatggaatctatatttgaatgtttttattctaaaatcaaattaatgataaaattgagtagtgttatttatttagggcaaaaatactcaattgctcaaactcaaatcaattttggatctagaatcaattatgtagtattatgaatatttacctatgattacgtgtgacacacacttgtcacttaattatgaattgcgtaatattgtgaaatttatcttgcagggttaagcggtgagatttgcgaatctgagaa

SEQ ID NO: 17339 - DNA, 495 bp, Glycine max
  Intron number 1 from transcript Glyma11g03460.1 (locus Gly ma11g03460) derived from phytozome v7.0 (chr-ID Gm11; pos 2325328 to 2325822 reverse strand)
tctctcttggttttcttgatctccaccttcaccaggttaacttcttttcgatcattaacttcgtcaaaatcaaactttgatgttcttcctttccttaattactattatctgcgaatttttttcttttcctcttttctgaattccgtttctctgaaaagaagtttatcataaacacggtaggtaggagatgatcatcgcacttattagggtaacctttttcactttacatatgagattttgttttccgatggttttccccccatctgcttcttgtttatgtcaaattatttgctggcttcgtgttgctcaagtttaggttttgtcgttttatgatgtctcttcctttgttctatgtattagtattttttagataaaatgattgattatctgtttttgattttttgagtgattggcgaattatcttttctttgtcagactatggatattttatttttctttttaattgaattttttttaattatactttcagttgga

SEQ ID NO: 17340 - DNA, 486 bp, Glycine max
  Intron number 1 from transcript Glyma13g04890.1 (locus Gly ma13g04890) derived from phytozome v7.0 (chr-ID Gm13; pos 5150164 to 5150649)
gtgtgctattgtattttgtaaagccaactaaacgattggcataattcacagtggacgagtcaaagagcctcatccaatcagcaactccattcaaaacaagcactttttaatcaccaaatccccattgtacacacctcctccaagaaccaaaacaaacaccaacaattttttctctctcttaattaattaaacccccccacagcaagatcccaccttcaattaacttcctcacacattctctgcactttttatctccgcattacctcgcacaccccacaagtcaatggcaccaccttcccaacaacagggctagacccttacccttctaaccccaccataaaaaccaaacctttcacaccccaacaacctcgtttccccctccatggatcgcagcaacaccttttcctcctcgttccttctgctgatcttgttggggtttcacttccacgtgttcttcgtttcgtctcaggtcgaaggcgacgtgag

SEQ ID NO: 17341 - DNA, 1030 bp, Glycine max
  Intron number 3 from transcript Glyma12g36020.1 (locus Gly ma12g36020) derived from phytozome v7.0 (chr-ID Gm12; pos 39135445 to 39136474 reverse strand)
ccacgtaaggcttgttaccgggccaaagcttgcaggtacttgggtcttttgtaaaaataatagtaataataagaaaggacaaaacttagatgcagttctccaattttgaattggagtttcactttggtaattttgtgtaataaaaggtttgctttaaatgttaacacatattatcgaggtgaaactctaattttgattggagaacaataacatctaaggaacaaggaactgtgtcttagttttgtccaataagaaattgggtgctcgactgtattttacttactgccactctgttgacatacaggaatttgtgagaatatgagagggtaaaaaaaatcaattttaactttgccatagtggaaaattgttatatgcttctgaaccattgtcgtaagatattttcatttggcttggtagtattttccagtctagtgggaagagacttggcagaggtgcctacatttagtacccaattgaggattgagtctcgaataggattgtctccaaaagatgatacttgtgggaaaccaaaaaaactagtgcactatattcatagttttgtcacacattagtttgtgcatatttgtttaattttaaggtatgcagctttcattgctatgtttataacaagcagaactgggccactggcagatatcccattttctagtgaagtggcagttctaatttagtatcattttataaaaactgaatttgtttgtttttgtaattctcttgtatgaaacttggatatggatcaatttggtatgtctctgactcaactgtcaacttgtattgtatgatcagtttgtctatggtggtagaactgcttgtcaagaagtttcactagtcatatggtgtgtgcatttcaattaacctgttcagtttataatttgagagacattgttagtgaatgggttttgagaaagttttgcgtgccattctttgatatgaagtggcttattaacagatggaaacaggagtaacatgaaattgtttcctactttttatgcagaagcacaacaagaatttg

SEQ ID NO: 17342 - DNA, 785 bp, Glycine max
  Intron number 1 from transcript Glyma10g26630.1 (locus Gly ma10g26630) derived from phytozome v7.0 (chr-ID Gm10; pos 34982377 to 34983161)
ggtagtttgtaggggtgagtctgagagtgatgaaattgccaatatttagagagaagaaagtcatggtgtagcaaggtgttcacaaaggctttgataccaagaagaaaactgataaattgtataaccttttgaaacgtgaacacacaacatcgatacaagagagacaagagataattatatagcatagtgtacaatgattctgcataaagtaattaaatgtgaattgattgcagattaggaaattctaaatatagaataagtttcctaaatatggttagctgcaatctggtttatttgccaaattgatttgtgccacttaaaacagattagtcttccaacaactttccattatcagtagcacaatcatagggatctattttcgacggctcttcgtttcctttttctacatgattgtctttattagtagcacaatcatagggatttgtttcatatacgcatattcattttgcacttaccttgtcgatatctaaacttttgctaatatcggtggtgtgggaacaagttttatttcacacataattcactatgtaaccaaactccaaaaaatcatgcgctttaagtatgaaaaattgtgtctattgttgctgtcatttattcttatttctttacttcatgtgttgattcatggttattataatatcggtgtctggtactctatttattattgtgttaaaaaataagatgaattcaaaagtgagtgtatattttttaaaactaccctaataataataattgtgaaatgttttggtggttgttttcaaggc

SEQ ID NO: 17343 - DNA, 1054 bp, Glycine max
  Intron number 2 from transcript Glyma11g01960.1 (locus Gly ma11g01960) derived from phytozome v7.0 (chr-ID Gm11; pos 1191775 to 1192828)
gcgagtacctggaggaagttgaggaacgggaactggtaagtcattttctacatccctgctatatatgaatttattttatatgtctctgaggttggttatttgatgtagtttctttgcgcctcgtttggtttctaaggctatttccaagatctctgttacgattatgaactgtgcgtggtaatgttttgcttttgccatcgttatgacaaagacttgtatcgttactcgagttttggtccttaaaccagtaatctgaacctgatagcttcactagaagattttggattatctgtctgtgcgagtaacgtgacagttacttgttagggttttgacaattttgcggaggcatttgttaagttggtttggtgaaatactgtaaattatgttccatcttccaactaaattttaaacatcgtttatccttgcttattacttgtcatttttgttaatcacctaagttagggatcaggaagtgcatttgaaattaaattatttttgccattttctagtattctattatggactactactaatgtggcatatgcatgttttttcatagcattattgtataatgatgactgtctttcctacatcttctggattgctagaaatgaagccctttaaatctcctgaaatcttgtgtgttggctcaatctttcacttatgctgagatagtctttaataatcaagatagtttattattctttgtcttttctggttgtttccagccttaattccattgtttcaagcacagttttgagtattaggacaggacaatgtgtatgtgaaatacactacaatattgtcatttgatttgcatctaaagtgagattgtttccttcttgtggactttgctgtattggaaagaggctgcttgctaagaatcaagctttataaacaattgtgattaggcagaagctattccacttaatgttgactttattattgttatgattgattctgttatacccagaacactgtgattgaaatgttgacaatcattggctttttcatttattcaatttgcaggaagctgatttagttttggggggtg

SEQ ID NO: 17344 - DNA, 719 bp, Glycine max
  Intron number 1 from transcript Glyma11g37760.3 (locus Gly ma11g37760) derived from phytozome v7.0 (chr-ID Gm11; pos 38784793 to 38785511)
tctcttttcattctcctctttctctgttccgagaggtatattaacatggccatatggtctcttcttattcttttcccgtcgctatcatttagtatagattacgtgtttcgcttgcttgtttcatcactgattgaaacctctccacattggataataagtttgatcagtaattgcgtagcttatctcatcgtttcttgttaatttcactattgaattcaaaacgcatcaagttttgggctgcttcttatagctggttgatcttgtgggttgctttaaaagttcaaacatagtatttgatctctgcaacacaaaaactgcaccgaatgcggtttatggctatcatatatctatgagaaattctaaaatcagcatctaaatttcactttggccttgggcacttttcttgcatgaagtcaactcgaggaatctcgtacaaatatttttcgaattattatagacaagcttcaatcttgtaattttgaactgtgtgtggaataattttgaatcttataagcatcttcaatcttgtcctgactaattgcaaaattagtaatgatgactagattaaattgaatcataatttgcacaatcatgtcctagtgcaacctctggatggcttaatctttatgaccttgttctgtcattatttgtgggatgttaaacaaaagagtagactatagagatgactccaatataatatttcagtgtgtcctctcaaa

SEQ ID NO: 17345 - DNA, 969 bp, Glycine max
  Intron number 1 from transcript Glyma11g09770.1 (locus Gly ma11g09770) derived from phytozome v7.0 (chr-ID Gm11; pos 6976583 to 6977551 reverse strand)
atcccgagcaacccgctcattcctctttcgcaaaggttctttccttatcactttttcatttttcttcttcttctttgagctggaattgatcagcatctaccctgaatttgaattatatgaatatatttatatcttttagtatgtgtagactttgtttggtttctgagaggtaagcaaaaaaactattgggagggaaggaaactgttgaaattcagaaagaatgaaaaaaaaagggctgaaagttggttaccaaacaatcaagggttcaatcttcaatgggtgtcacaaaaatagtacttgttaaagtcaaaattagctcaaagaaaacaagttgaactgcgtcattaggggttttggcatacactctgtgttcgactcatttcctccctatacaaacttttcttggactgacacacaccccacaagtgagattaatctctgatccaatgagttaggagacactcattgtctctgaccaggacaaaaaaaaaattggccaattgctcctttagttttgatttatttataaactatacgatttgtcaagtcttggattactgcaagcatattacaaagcaattttacaattgttttccattgttttttttagctgaatattctgttgagagagcgtcaatagaaataacagaattgaaattatcaattttttttgtacttgtacttgcttgcctatcaactattttttttaatgaaatcagagaattatgtgaatttagatcttgattatttatttattttgtctgtataaaaaattgaaataagaataggctgaatgcttgcagtcagatactgtcacactaacacatgcaaagctgtgtgttgtttgttttactggcaattaaactaatttgttgctatcttttggtgtttattttccctttcataacgcttgacatgcattgactttcactaggaagcaaggtcaggtggtgagattgggagtgcaat

SEQ ID NO: 17346 - DNA, 670 bp, Glycine max
  Intron number 4 from transcript Glyma08g13290.1 (locus Gly ma08g13290) derived from phytozome v7.0 (chr-ID Gm08; pos 9717957 to 9718626)
ttgtggatatctcgcaacattcggtgacaattgaggttattgctggacacctttaaatatgttttaatttttaatttccatgttttagtgcatgctctgtattcatatgtactcacaatcaattggattgtacttgtaaagtggggaaaaaatatcattgttgtttcattaagataattatttactattggaggtgaaatgtgttatgagagtggtacagtgccttgtaaacagctcattttgggaacatactatatgcattcatatactctttcctttcattgcataaatagtaatggtataatttggtcactaaggttggagtatgactgtattgtggttgacttgttggactggctgtttttatgttattattttgttcttgataggagtctttcatttttacacaaataggattttgctcctctttaaatgatatcaggaataaatagtgtgctgatatgagctgggtagatatttttaaccttatttgtacaagtgtttctttcatattttgattattttcttttctatctacctattacttagtcacaatcattaccatcattacttgcaatttgtcattagatattcttggagataaaatcaggtcataattttgagtgaatttttcctgctaatgtgacaggtcactggagatccagggaag

SEQ ID NO: 17347 - DNA, 915 bp, Glycine max
  Intron number 3 from transcript Glyma06g05210.1 (locus Gly ma06g05210) derived from phytozome v7.0 (chr-ID Gm06; pos 3707564 to 3708478 reverse strand)
gaaagagtggtgagtttttttgttcgttttcttttcttattctctctacttgtgtacttttattgttattattatctaagagcctcgattttgtagttttcaataaattttaaccaaagtagagagtgtgataaaaggagtgtgttagacacttagagattatgttgctagcactcctcttgtcatctttttctttttttttgtaacaagtcctcttgctatctatatggactttgcattttactttacaaatttgagacggaaagatgtgtcatgctatatttttttcagtaggttgaatcactattttgggaagaaaccaaattttaatgcctcacagtgagccagaaagaaatgcaaattttagcttgcgcgaatgttggattggatggttattataggcaccttagcagccaaggtgttgtagaacaataaacctaagctgtggggactcatctagggctgactagagtacttcttctcttgggcaaaagtactcttactgagtttctgatactctgaggttttgaggaaaaagtaaatctcaatattataattatgcagaaaagtcttaataatacaaggcacttaaaatgtgtttataaacaaagatgaattactagataaatctaaatgagatataaaatcctaatcaaatatgaattttctaaaatatgagacttagttgaatcatatctaataagaaatcttaatatgattgtattttcctaagattaagaaacctagaattttttaaagatcaaatccctaaaattgatgaaagatcttctttaataatagaaaattctaaaatttatgtgaatgtcatgataatccttaaatatgcttcttcattctgcatcactcaccactcagtggttttccatctactctttgcaggaacgaataaggcgt

SEQ ID NO: 17348 - DNA, 318 bp, Glycine max
  Intron number 2 from transcript Glyma06g05210.1 (locus Gly ma06g05210) derived from phytozome v7.0 (chr-ID Gm06; pos 3708562 to 3708879 reverse strand)
gttctatactcaggtacggaaagtgaatttcaaatttgttacgaactaaaggcattgaaaactgaaatctaatagtgatcgaattagtaattcacgtttttttaatgttattcaatgaaaatatgcgtttcgtcgtgtgttattaggatgatttgcgtgtgtgagatctgaagagtatatgtttttctcttctcggtcttcttgtaacagagagattcaattcatggtgaaactaactgtgtatggttttgattcattgaacacataaatcgttgttgtaactatcgaggacacagtcatcctggaaaggagagagaa

SEQ ID NO: 17349 - DNA, 774 bp, Glycine max
  Intron number 4 from transcript Glyma10g30140.2 (locus Gly ma10g30140) derived from phytozome v7.0 (chr-ID Gm10; pos 38866629 to 38867402 reverse strand)
ctgagaaaaaaggccttattactcctggaaaggttagatgtgttaaagatatatttacatatctggattttggagtggagattctctgtgtggcctcaggccagtaataatacaggcatgcgcacttctcaacatggcttttatttggacaatattgttttcccaattccatcagtaagggcgtgtttgatttctattttcaaaatcgtttttagttttcaaaatgcaactaaataagatgctcaaatagctagtggagagtggtgcaagatacagagtagaatgtggaattgagaaagaggttaaacaagatgaaaattgaagaagataagaagatatctctaggctgtttctatttttatttttaaaatacttgttttgaaaataattttaaaacttaatagattttgaggagaatttgactgctgagtagtgtagaattgttttagaaaacagtttttaaaactaacaggtgagaaagaaatcaaataagctctaaatgtccttcaactttggcctgtaataatgtttggacttttggacaattttttcaaattctttcagtccataacataaattatccatcatagtcaggaaatatgttttattgagcttttccaatattactgcttataatattgaagaattgggtatttccactcctcaggcacttatgttgtctgtattgttgaagatactatctaactaagtttaatatttttgacaaatggttgaaaagactgttctggttgagtatacaagtggtaacaccgg

SEQ ID NO: 17350 - DNA, 258 bp, Glycine max
  Intron number 3 from transcript Glyma10g30140.2 (locus Gly ma10g30140) derived from phytozome v7.0 (chr-ID Gm10; pos 38867416 to 38867673 reverse strand)
caggcctgctgtagtgtcaaagataggcatggaattctttgatttcattttttttatcggcaaatattagtttgttagaatgttagtttttgttagtagaggagattgaaccctcgaccattcccctcttcccttctcccttaacctgcaatcttgatttcataaactagagctatctagaactgtaagtttttaagattttcatttgtggatttgtaatgataatcttcttttttctcaatcaggattgctttgagc

SEQ ID NO: 17351 - DNA, 341 bp, Glycine max
  Intron number 2 from transcript Glyma14g03200.1 (locus Gly ma14g03200) derived from phytozome v7.0 (chr-ID Gm14; pos 2055458 to 2055798 reverse strand)
gcaacggtaataatatcgcctaatccatgcttccaatgggtgttgaatggcgatgcattcgtaattttaattttaaggattaaatatatttttagtccctgctaataggatgttatttgttttttagtccctctgaaaaaatcgtgtcattttagtccctgcgatgggtgttaggggtggtgtactggtgtctttgttcttcacaaaaaatcgtctctttttttgtccttggtttatgtaaataggaaccacacactgatgcattttcgtaaatgatgactaaaagcatatttgactctaattttaattttaatttgtttttatggggggattatttgtag

SEQ ID NO: 17352 - DNA, 803 bp, Glycine max
  Intron number 1 from transcript Glyma06g01220.1 (locus Gly ma06g01220) derived from phytozome v7.0 (chr-ID Gm06; pos 762877 to 763679 reverse strand)
aaactgtctgaaacgctcctcttctctctcaaaaggtacgcgtgcgtgcgtgcgtgcttcggcgtcatagttataagatgtattcattttgctatcaccatattattattatgtaccaaaaatcatgtttgtttcacccaatttcaaaatcagttttttttcctttccctcctcaattactagaatattaattactgttcaaagtctggaggtcttccactgtcaattccgttttttcagcgtttatttgggatcgttcttacttttcgactgtaacggatttattggatcatctcccacgcccttttcaattattttttggggaatttcatttcgttttatttgtctcgcctgtgatttgaggttggtacgatatccgtgacgagtttcatcataataccatgcaagtttttcccctcttcctgctgattctactgattttgaattttttaggtgttcgtaactatctatattctgttggtttagatcgattaagaagtttatttttgtctttaagtgggtcactttagcgtccccttaaaattaaaaaaaaactgattgtacttgcccttttttcaatgctctaccttcattttggtcgtgttcatttttttgtggggtgttttgatttggatttttgaattttgtttagcttcaactagattactggttgagtaacagcgagttacatgttttggatcatgcttttgactgtcatgttattgatcgttgcaattgatggtgtgcctttttttgttactgttccaggcaaaagggttgtgttcacgagtgaacggtgttga

SEQ ID NO: 17353 - DNA, 973 bp, Glycine max
  Intron number 3 from transcript Glyma09g05030.2 (locus Gly ma09g05030) derived from phytozome v7.0 (chr-ID Gm09; pos 3811334 to 3812306)
ccacttttgctctctgcggcttcatacgtgctcaggtctaaatttttttcactttttttttattctgttctggaatttctttcttgtttatttttattatttattgttttatttttgcctctatgcaagtatacaatagtggaatattgcccttttatgtgtttgttgatttatcccagatattaatagtgttttgttaatgtctatttagcaaaattgatttttttatttgggaaataaatacttgttacattagaaatataaaatgtaaaaaatgctttgttttcgataatttttgttgttgcgtaaaatgagcattaatggcttttatcaaccaatctgcataaattataacactacattgcttttttgttgtttgcgtttactaagtgatttggtttgtaatgtgttgctattggacctgctatacccacgatttattaacactgtttaaagccattgcaaaatgttataattagtatcaaactgtactggttgatcatgtgtttctcttctatttaattactcgttctctatttggggaattggggatcggatgggagctgtggatgttagagtttcctgttttgatctttggttttgtatttcttgtcattttaaataccttggcattgtttattatttgtataaatgataatttaatttagttcctacataaatcattgaaaagaacaaacaaattgaaaacaaggaatgcttttggttattatctgtggaaatcctccacgaaggaaagaaaactaatacagttaatatgattccaagtagactgcacacttttgatgtttttcttttcattttatattatgttggaaattgtgttcgctattgtattctggtccctttttctctgcctggaaattcctacatgttccattggtgcaccttgataattacctttaggaattgcatttcttagctcatgttttttgtgttttaaatttccagggtg

SEQ ID NO: 17354 - DNA, 584 bp, Glycine max
  Intron number 1 from transcript Glyma13g24040.1 (locus Gly ma13g24040) derived from phytozome v7.0 (chr-ID Gm13; pos 27386090 to 27386673)
tgaagtatttgttctccgtcatctcgcgtcgttaggttagttcatctctgccactttcgctttatttttctttaatcacaattattctgtgatggaatctgttcgtgttagagtctgtcatggagaaaacgctttccccgattttaaatttgtgttttttttttcttcaactgagtttttggatcttcttgaataagatgatccttcactaattttggttcgtttcgatgaatttgagagccgcaattggcatttcccttcctgtacgcatgcgtagggattttattatttggtttaataattaatattattgagaggctcttttgattcaattaatctcaataacttcctactcgatcatcgattttttttacccaaatgacatgccaatttgatgcctctaaccgggtgactaatacttctcctccaaaatagtagtattatagaaatgatcagcgtaagtgtatttaaaaaagaactgtttctatgtgtaaatatgttgattgttctgtattacgttaattcaaactcatattgtgtatttgttagttcattgaactcactgcattgagtggatttggtcc

SEQ ID NO: 17355 - DNA, 542 bp, Glycine max
  Intron number 5 from transcript Glyma13g24040.1 (locus Gly ma13g24040) derived from phytozome v7.0 (chr-ID Gm13; pos 27387489 to 27388030)
ctgatctatcacaccatgtaagttatgctatttgcctgtagaggatattttgaatttatgaagaatgattaagagcctgtttgttttacaatataattgtgattctccacacttttccatgcaaaattacatggccccaggcaattttttcagtgggaaatgttttgggtctatttgttttacaccaggaattaattccccgcactgtgcacatgtttcaatgtaaaatttgttgttgggattaatttggatacataacccaattatcttcaatggctcgaagtcaattatacccaacattaaaaaaaatgggcacttaatcagccagccacaaagctctgtttccatccatatagaaacaggctgtaaatttgaaagggaataaaaagaagggttggatgaacttcttttttggatttttagtttagagaatttattagttgctgaatcatatttttttcttatttatttatttgtctttgtctgatctatttatgtcttctgcagccaaaatatttgccaagcttcattaggtaaagaaa

SEQ ID NO: 17356 - DNA, 593 bp, Glycine max
  Intron number 1 from transcript Glyma07g13450.1 (locus Gly ma07g13450) derived from phytozome v7.0 (chr-ID Gm07; pos 12178891 to 12179483 reverse strand)
tacaggtattagctcatttttcattcaattcagatcactcaaacaactttcatctgtttatgagccagctagtgataccccagatgatgaatcttgttgatttgatcaactttttatgtaaaaaaattagttttacactgaattttcatgtggagcttaagttttcttttctttttctgtgttgtagaccttaattagttttttcagatctagaaaaaagtagatgcaataattctttgattagttttatttttgaaaggccaaagaaaataatattattaagcaactattgaactaaagcacaagatgataattctttgattagtttgagaattttgttgatttttttctcctattggccggattaatgcaattaatatttcataaagtttggtctttggactcaaacaagcaacgttgtgagatactcagattcatgtagtcgttcttacttcatgaaaaataaaagatttattatattctggattggttgaaaacttgatctaattgttttgatttttaatttttaatgagtattttggaattgttgctatgcagagggaacacaccattttgtagcaaagagtgcagac

SEQ ID NO: 17357 - DNA, 928 bp, Glycine max
  Intron number 1 from transcript Glyma08g42700.3 (locus Gly ma08g42700) derived from phytozome v7.0 (chr-ID Gm08; pos 42677172 to 42678099)
aatcttccacactgcttctgttcacgccgattacggttcatttcctcttttttctctcgttgatttcttcacactttttttttctgggaaattcggttcttttgtgtagattcccttgtaggctcaaatgggttgtgagaaatttcgtattttgggcaattcccattgccctgcttgaacaatcacgtgtgattttcatctggggtggctttctttgtcttctatttgtttttgctgaaacataaaaccatagatcctgagactgtcgatagtttttagcttcaattgttttgtgtggaacttgttagctgagaaaatttgagggattgaattagttattaattctgtcatctaatttatttattataattgtatttttgtatttgttttaggttttaaattgttcatttgttttctatagatgtttccgttttaagttttagtccctgtgcgagtaaaatggtaatccttataatgcataaaagttaagtttgatcctaagtcctaacaaacataatagagaaaagtttctacgttataaaaccgttatataaaatttcattatcattttctaatatagggactgaaacttaaaatgaggaaaactatagagacaaagtgatagtttaaccttggttttactattggatctaggggttactgaatggacttgtttatacaaaaagtttatttaactcttgggagtaagaaatacattggattcatcttgtctattatttatgtagacatgttaaaatgggtgatcagataagtcagaaacctcctaacctagttgttaatgtttttaattattgagttttggcataaaacctcgtttaaattttagtgaacatctttggtataagtaaaactcatagcatttctttgctttgtgttatgtctaggtattgttttgaagaaagcaagg

SEQ ID NO: 17358 - DNA, 822 bp, Glycine max
  Intron number 2 from transcript Glyma05g37620.4 (locus Gly ma05g37620) derived from phytozome v7.0 (chr-ID Gm05; pos 41179189 to 41180010)
agactgtgttgagcgctccacctgcgtactactatgtgtgtgtgcttttcatgtttgaattttgtgcttttactttattttattttttttgctttagcctaactttgcttttctgagaaggatttaatttaattgttgcgggacatgcatcgatttcactgctttgattaggtttgaaaaagtttccagtaattaatattcagtattttctcttcaacaaacccaaacaggaagagagtttgtgtaatactacatagatgtgtgatttttagacttggcacggaggatgtttgtaactcggttttctatctactaagggaaggttaaagtgtaagcttaatgaagtctgtccatgtgagaaaagaaactgataataagcgaagttgattagcttacggtcctccatttattagaaagaaacaaataattggtcctccagtgataaccgaatgccatcagtttcagtgtttttaagaactaatatgatgtcactttgagaaccaatttaatggcataacattgaaagagtagtatgatgcattcataaagggagggttaacctattaacatctaattttttagaggaccaaaatggttattttgctcttgataaaaaaataaaataaaattcagaacctgtaaggtggacctgttttatgttttgtttgatgagattttgaagtctacttttggtaattattagtatataattgctttccaattttccattgtctattttccatggttgtgatatcaattgttatagcattgcttcatttgctgcattctcttctcagcagtatccaagagcatcagaagagc

SEQ ID NO: 17359 - DNA, 711 bp, Glycine max
  Intron number 2 from transcript Glyma07g03670.2 (locus Gly ma07g03670) derived from phytozome v7.0 (chr-ID Gm07; pos 2539608 to 2540318 reverse strand)
gtttgaggtatggatggcattctctttaatattgttatatgcctcattcaccgcatgtattgtactttttctgttgtgaatcatttcatagcttgtgtcttttcttcctcctctaccttgtctcttcattgttacttttttcttcaccaaaaccttctttctgtttttcttttttatctgctcttccagagttgaggtaggtatgggctgtacttctgacaagaaaactattcaaatacatcagagggaagcaaacttgtgttttcctgatgtgttgtatgctttcagtgtggtgtttctttcagttgagattctaaacggaataaattctgttggaaaaagtcgttatatttaatggaagtttgatttggaagagtatataccagattctcaaattaggggaccacgagatcatttgttttctgttctaaaatgagcaatttgacatgacttttgacagaagaatatttatatgactagaaaaactaacatcctagaattgttctttgaacagtgagtttggtgttgtctcaaaaaataccattcagtttgatcattttaatctatggatttttatctagtaaatctgtgttgtcctaattgacgtttgcattcttctcagattctaattaatgagacaagcataataaaaatcttgaccttgattttgttgcagctcttatcagctgctggaatctcttccacttccaa

SEQ ID NO: 17360 - DNA, 776 bp, Glycine max
  Intron number 1 from transcript Glyma08g16670.2 (locus Gly ma08g16670) derived from phytozome v7.0 (chr-ID Gm08; pos 12217373 to 12218148)
gacgatcatccaatttcgcctcccaacaccaacaggttctacccaatcattcatcgcataaactgcactcgttctttccttttcctttctctctccactccctttttcctttttctttttctttaaaaagaagataaaatcaccggttttgtgtatatgattgtttctgttctttcttgtttgtgactgaaaatgtacaatttattcctagtttgaggaatctgttgattataaaaattgttaatagatacaattatacaaagttactatctagctcctcctctgcctaatttctgctttagatttctcagtttttttatgagggatttaaattgtggtagatcaaagtttttgagaaaatggcccaccataattacagctgcaatgatagggtttttggtgtgtcgcatttatccgcaaatttcctgcaatatcaaggaatctgatgaatggtgaccacgaccataatttaaaaccttggtctcaatcctacaggaaattgcagacaaatgcggctgatgtggtcgcagcaaagagacctaataccttgacctcgtgaaccggttgtggactgttttttaaaccttggtttttaggaattgtattgtagggtatgtgactgtgatacgtggttgagattataaaatgtaattcttagtgctgatggtgtaagtaacagagataatatggagtgttcagggtgcttttccaatctggtgctaaactaatccatggtatttgtttaacatgcagaggacgagaggaggtgaggttca

SEQ ID NO: 17361 - DNA, 930 bp, Glycine max
  Intron number 2 from transcript Glyma12g06980.1 (locus Gly ma12g06980) derived from phytozome v7.0 (chr-ID Gm12; pos 4758322 to 4759251)
tgccatctcccttgcggttttccaagttctttcaggtgaactctcgcgtagcattctcatgcttttctttcattctaattgttgcttggatcctgttatgcggatttcttgttagttcacttttatttttatggggaaatgttagttgttggaatgtttagtttttgttaacaggggattgaaccggcgactttttcccactctccttttctcttaaccatctaatccaccttatatctccagttcacttttgttacaagttgattgtgacatgttcaagtataaaactgtgtttatttgcagatgagttgtcagattcctctttttgcttttatgaatggatccttattttaatttctaatgtgcctgaattgatggtgatattttatttgtatggccaattgtggtgtagaaacaatttatgaaatcaatatactttttttgtaggtgtaaaatgttataggaattcagtaaatttaatgtttgctgggaacatgagtagtatttaaattcagatctctcttaatttcaacttgtgtgctggttagatcttgtagctgttagcattttagtttttatttcaatgctcactcttgtcaaaatatatgttatggttgcattcttatgttttatttttcagctctttttgccagttggttaattaaaataatttgcccctttcactgcttaatttcactttatatattctcttgcacaacatagttcaagtcatatgggattatgtgcataaaacatgctgaccaaaaaaaaagttcatgaaagtcatattacatgtcattatcgagagaacactgtttacctgaacaatgctcttgtcaggatgtcttcctttacatggtcattttttccctttccttgtgtgaattctcggttttactatgttcctttcatctctgacaacagtccaat

SEQ ID NO: 17362 - DNA, 855 bp, Glycine max
  Intron number 2 from transcript Glyma13g34510.1 (locus Gly ma13g34510) derived from phytozome v7.0 (chr-ID Gm13; pos 36056549 to 36057403 reverse strand)
gttggcaatatacggaatcactgtgagttctcttctgctttttctttttcagtcctactatggtggaaaggttgtcttctttgtcttcggtaatttttgcttctttcatgaaacattcataagcttacctatcttcacttggaagttgaatacatgatattctttttttcttttaccaaatcatacacacacaagataaataatgaaggcttgccccatgttttttgcatgctaaaccaatcaccaatttaattcaccctcccaagtaatcatagtccttttgatgtaactcttttacaaacaccttagcccaattctcaaagtgaagttgcaatcttaaagatggaatagatcttgaataactcttattcaaaacacaaagagaagaacccttgtattgctctttcatattaaattagtaagcaagagaagaaaataaaataacttaagtcaaatgaattaaatttcttccttttttttatggataaaagatctaattgttaaaagaagcacataaggatcaattaacaaggtttttgagaccattaaataaaaagtacttacttttctcatgatggaaagatcacatctgttaaaatcaatttatgcacttcaactttcccaaaaactctctcatctaatttttccacaagcattaatatacttataaaccttttcttttaagttaagaacaaaatatttaattaaaaggctcacatgagctagaagctaaaccaactctactttagttatttaattatgaaccataatgggatccattaattgtttgacatcctgacttaattctaatggaaatctatatttttgtagtaagagttagttctagaccagctg

SEQ ID NO: 17363 - DNA, 327 bp, Glycine max
  Intron number 6 from transcript Glyma05g34210.1 (locus Gly ma05g34210) derived from phytozome v7.0 (chr-ID Gm05; pos 38599773 to 38600099)
aagttgttttatcttccaaatctttccttgttgcatgcacactcatcatacaagtgtagtttttatctttgccttgcactttaagcaatatttgagcatctatcgattgtcatatggcaagcttctcctgtagatgaattatgttgtatttattctatctcattcaatgttcaaaattgtggaccataaactggaaatattagttagagctccaatatatttattttattacaatcttttttttttggtttcgttatttttccattttcattcaaattttgtaggtgcatagccctggagcaaatatagacactctttgtgtgggac

SEQ ID NO: 17364 - DNA, 769 bp, Glycine max
  Intron number 1 from transcript Glyma06g24760.1 (locus Gly ma06g24760) derived from phytozome v7.0 (chr-ID Gm06; pos 22457603 to 22458371)
ccaaaaattggccttcgctaagcgctgttctcgtacatataagcttttacttccaatttttatcctaaaagagaatgtacattgtatagcaaattctgtgattccatttttcttttcttttactgagcagaaattatgttctcttgaaataattgtttggcaagaaacgccataactagaaacataatatagaatgagaaagcatttatagtgaatttggatatgatttctttaaaatcaacgtacaaatgtataaaatgagaaagtattaattcaaataaaatattctgtaattttaaagaataaaaagtgcatgtattaaggttttgtcagatacccacatcaaccaaattaagtatatagctaggtgaaggataacttctatcttgcaaaataatttttgttgagaacctcaaacccacacaagatagatattttattcttaatacgatttatttctttcataactaaagatcaattagaaattgaatcttgtattactccattaaaaaacacatactactatcatttctgtgaatagttgttagtcccgtccatgccttcgtctttattcattgatcgatatttcaactatttctgatatgatatggaccgctgaggagtgcatcaaaattaagatatataattgctgaaaacttttgccgatttcccaatctgatattattactaatttgatttgggtttgtttaccttttctaattttgtgtaaacagagggtgtgttagcgggagcaaaggcagcagttgtt

SEQ ID NO: 17365 - DNA, 664 bp, Glycine max
  Intron number 1 from transcript Glyma13g18750.1 (locus Gly ma13g18750) derived from phytozome v7.0 (chr-ID Gm13; pos 22412720 to 22413383)
tgcaccctctgtttttctttctggaaattcaaacggtgagagctttcttttctcttgttttcttttacgtttccatggttcaagttcaaagtttaaaccttttgctcgactgaattcactagcgaattttggtgaaaatgttttgccttttttctccttcttctgaattttatagtagcccagtcattgtgggtcagtttcgattttgtgaatttggccccattatcatttttctcatttttacttgacatatacaaattttaaaggggtttgcgtcaatataacagaacgtagatgagggaatctgaatgggtttgactcgaatttcactttttagtggtggggtttgtggttgttgacttaaagggctatacttgttttctaattactttataattttctgttatgtttgttttcctgtcatgggatttcaattccactgcatacagtttactcagtaggatcattttggttggaaattccaaatttgtgacgctcttgatttttgcttaatctaaatgcatgaacagagagtagaaggttctgaattttgatgtctgttttgatgcatgaaaagtttactcagtgtgtttgttttgatgtctgaattttgaatatgtatcacattgctggatttgcagaattttgagtgaagaggagaagt

SEQ ID NO: 17366 - DNA, 632 bp, Glycine max
  Intron number 1 from transcript Glyma09g01830.1 (locus Gly ma09g01830) derived from phytozome v7.0 (chr-ID Gm09; pos 1188491 to 1189122)
acccaaaagcaagaagtccaagaacaaggaatctggtgcgttaagcagctgaactatctactttcctttaccttatccaattatttgcttcttacctaacatttgagtggccatgtttgttctctctctctctcttaactggtagctttgttgtttggttatcttatagtggctttacattgctctttaaatgatgttaggtcattctttgacatcaaatttgttgctagtgaacatctacttttagactatcttgatttaaagaagtatcattggaggaccatattgatattgtagtaatatttcaagaatcaaattgatgtttaaaaaatctttctaagatgaaatgaggggtttaatatcattttattaagttaaacttgttcagttgttgtattgattttgtgcttaaattgtggctgataacatgatgtaaattgcatggtgtctaatttgagattatggaatgtagatcattctccttgacaccttctggaaaataatgtggtcactgactgtgaacatgaatatgtgaatcatggttttggtgttatcttgaacttaaaatgctggcattatttttccttttcttggcaggtgagattcgtttaagcatatatttttcacaaaat

SEQ ID NO: 17367 - DNA, 983 bp, Glycine max
  Intron number 1 from transcript Glyma12g00750.1 (locus Gly ma12g00750) derived from phytozome v7.0 (chr-ID Gm12; pos 362358 to 363340 reverse strand)
acttggaggaaggattctgcgcttcaagatgtctatatagtccctgctgatactactgtcttacctttccttcgtaataaagtaattatcaacttgtcttcttctgctcctagtctaaattttcatggctgccttggtttaaaattttgactggctagatttacccaaattgggaattcatggtcttgatattgtactggaatgcttgtgcttgtttttaatgcagaaaagacatcaaacttcactctaatatatatatcaatagttgctatcaccctaatacaagaagagtaaaatataattctagtttacaatacgtactcttggttaaattttattttagtaattttaatctttataaattatttagatatgtcatatgtcacttaaatagttatcaaagtaaatatatattatatatgatttttatatattacacatcattcttaattatgtggtagagaaataattttttaaatttataaagattaaaattaacaaaaactatataatttaagttagatctaattatattagaaaaaaaaataaatatttaagtcatatatgaaaacaaatacaaaaagatttaaataaacccaacttctttttaaagtactcgaagggtcttcacatgtacttggctatttttaaggataaaatgtatagcctagggaattattataattaataacaaataatgagatgcatatttacttcatttttctttatatataatcaaaatcaaattataaaacttgatgcgcatttcgaagtaatggctctttgctgtctcataagtcatcataagacaaggggttggggctcatttaaatagtactataggtttttgaaataaatatgtagtatggtaatgcttttctctttcaaagctccgttttattttatataaatgaatggattaggaacatgatttcccaatgaacacgaaatactataggttgacttggttggtggttactacg

SEQ ID NO: 17368 - DNA, 712 bp, Glycine max
  Intron number 1 from transcript Glyma12g11150.2 (locus Gly ma12g11150) derived from phytozome v7.0 (chr-ID Gm12; pos 9151066 to 9151777)
ctatccagattacgaagatttcggtcgccagtgaggttacttattcacttgataattccaccttcttttttgtttttatttatcaaactagaacttatatttctatgcacactttcaaaaaggattttctgtttggttacttttttttgggtaaaataatgtcacttgtttcaacctttgacttccttgagactacattaacttacagttgtttgcattgcatgtgatgtttctttaaatttgcattttaggattgatgaacctctagaattgcataggtgaaacatcatgagtggattgaatattgataatattaacacatggaaatggctttgaagtggtgtttaattatgcatgccttactaatcaacatcatgtttagattagcaattttggttatctgtttagaatgcaatcaggatgctgagaaagtgtatgttttttgatactgtcccgcaatcacaagttattctgtcacataatggtaaatttgttaacttttatagtaactattttaaaaatcatcacttagataatgaattatgattgattgagcatataaaattttttacattggtagtgtatgaaaattaaacttatttattggaggtgctcttctgaaatgaatattggtatattgcatgtacaaacctttggttttgtttctaattttgcaggttgtgattcaagtgctattttagcattttttttt

SEQ ID NO: 17369 - DNA, 732 bp, Glycine max
  Intron number 2 from transcript Glyma07g04630.1 (locus Gly ma07g04630) derived from phytozome v7.0 (chr-ID Gm07; pos 3430664 to 3431395)
cagcttgtggaaaacccctgcattaagaagtctaggtgtgttactgtattttttttattgttatttttttctgaagtctaagcaaaaaagtaaaaaaaaaacgtgattttttttctgtggaataatttagggaatggtgacttctgattttttatctttattggtagactatatgtgaatttcattataaatcctggttcctggttgaaattgatgatttctcttcataaaaagcgtgtctgctcctaatctaaagagtttttaaccgaaaaaaaaaagttttgggaatgttcaaaatgaccctcggacagagtctagtgaaattacccacatacccatgctttcaccaaatatttcacatgggaaattgaaggaggcatatgctaggaattgtgatacccttctatcttgaaggctatgcaagaaaaactaaaccaacatttgtgcggatctaaatcgtctctagttgatggatctttgtcatgaggaatatttttactttatgaaaaagaactatgaacatgttgaagttttagaaccattagattaggactggaccacgtgcggttgaaaatttgaaccctttacacccatttgtgcctagatctgtttgatttatgggcacgtgtatgttacctccaaaatttgaacaggttcatgtattcacaatgtttttgttattattctcttactgtaggtcaccgggacctgaatctccccaattgacaatat

SEQ ID NO: 17370 - DNA, 814 bp, Glycine max
  Intron number 1 from transcript Glyma12g02220.1 (locus Gly ma12g02220) derived from phytozome v7.0 (chr-ID Gm12; pos 1373142 to 1373955)
tgttgttctctaggcacgattacttctaattgaaggtgtgatgttaagttttaatctctgttttttatggtctgattgttgaatcttactttggttgattcaattgcacttttgatgaactgcttgtcatgtttatgaacagaattttgatattatggattttctttattaattgcttttatattgattttgcttcttgttcttttttaattcattcagtgggtaaaccctaacaagggtttttgctacataaatgctaatgggtaatgattagtgtgactggccttattttttaaagttagtgaattgaattgtatctcggatggtttttggtattctgctcttctgataatgggaaggaccgtgtctacctgtagtattctttgactatactactaaaaagctgaaatttgtacctaagtgagtacaatttgtaatattcctaataaggttccactaatatccaataatccaaaccatttacaatgtatactcaatactgccttaggtttccttacctactaatctgaacattcttggcttgtggaatttcatccagttcaatgatgtaattggtgacaactgtaatgtcaaatatctttgacttttactgaaaataattttgtatatgtgcctctcatataactatcttctttgttctatgctcgatctttccataatactattaaaagtttgaatcttttagccttgacttgtgatgataacatttgttaatctctcctattgtctattgcgtggagatacctttttttctcctttgtatgtaacttcatcatcttttattcttcagaat

SEQ ID NO: 17371 - DNA, 786 bp, Glycine max
  Intron number 1 from transcript Glyma08g28070.1 (locus Gly ma08g28070) derived from phytozome v7.0 (chr-ID Gm08; pos 22333795 to 22334580 reverse strand)
cttacaggtgtttaattttgttgattgtggtatttacacgtgttttattttgcatgttgtgtatgtgttgacctttgcttctttacgtggttttttgcatttcattcttcattcttcagtttgtgtgtttttgcttttcattttaccagatacagaccagcttaatttgggttctgtttgatgctgttttgatgtatgttttgttacattcgatgttagcttatggttttctggcttttcttttcttacatgcatattacctttcgggtttttggcttttgtttctgtgctgttttcatgtttgttttgttacatgcatgttattttttcattttgttgtgttggacgatgtttggtttgcatgtttggttatcgtgtttgtctgttcgtggtacttctgttgttctattttggtgctgttttcatgtgtgttttcttacatgcatgttagcttctcatttttgtgtgttgaacgaggttttggattttttcttagcttatcgtgtttctgttttgatggtggttttgtttttttttttttttgcagtattatggcacgttctccagacaagataaagagcatcgatggctcaaaagaaactcttaaaattagtgtgaggatcagtgatctatgatttattggcacgcctaacaaatctgagcaagctgaaatgatgtttgtggactccgatgcatgcttcaattttgtgtttttcttttgtaggtttattacttattactcattgttcagttcattgtgttgtaaccttaatgcaatccagggtg

SEQ ID NO: 17372 - DNA, 780 bp, Glycine max
  Intron number 1 from transcript Glyma06g07640.1 (locus Gly ma06g07640) derived from phytozome v7.0 (chr-ID Gm06; pos 5600821 to 5601600 reverse strand)
cggccccttctccgccacctccgacatcgcttccggtgcgtgctactttgctataaaaaaaataaaagccaaatatttttttaaaggggcattactcgttgcccttgaagcccttattttcttagcatttaatctcatccactgatgttatctaccatctctttctcttagtggggtacctttctgatggattagattagtgaggtcagtgttcggttcggttgcttctgttgtctttgtttacttcatatgctttctttttttcccccttttttctcgagtttttgttacttcattttctgatgtcttttaacactttatcatctagtgtgtttttagttggttggtttttcttttttcttttttcttctggtatgtgaatatattgtcagggtttttcagtatggtgttttgatttgacactttgtttctctcttctacaagtttaatttcatgtaccaagtggggggattgaattcatggtgaaaatttctgttgttttcaggttatgttctgtcaacatttgtgcatagggtaataatgaggatatcgggttttgggtttttatcacaattattgatattgtattgtctctcttcttttattggccttttcatctataaacgaccatttccttttttttagttatagttgaaaatataaattatttatggaagtgtttattatctttgaagtgtttttgtttttttgaatgtaatgtttttccccctcatcaatttggtagaaaaacaggtaggaaatcatctcgagggagttcca

SEQ ID NO: 17373 - DNA, 848 bp, Glycine max
  Intron number 3 from transcript Glyma07g29440.3 (locus Gly ma07g29440) derived from phytozome v7.0 (chr-ID Gm07; pos 34297176 to 34298023)
cccgacgacgatcgagttgtggcttctcaggtgagttcgggctgcttgaggatgtgtgttcatattagttgaagagaaggaagtatagatgtgataggtaatatgatgtgataagacaagagatagagagagaaatgaatggtgtcaattgagtgtttatgttgtagcgggagttcatatattagcactcttctttggttgtagaaaacatttctggtttttcatgaattcacaagtaaatacaaaaataatttaattacaatgtaaaggttatctaatcacatattgttatgtttagtaggtttattgactttcataataattactttgaaagtcttacataagatgatttctaattggttaccacaacaataaagttttgtcatacttccggagttttgctatttaaaccatacccattgggatctcttagggacctaggtttcagagattgtttgacaatgtaaaaatgtttatggtgagagtgcatgaaaattaaactcttacaaaaatgttgttatttacttaatatatttgtattatgaatataggaaacaatgaaaatagaaagtaaaataaaaacagggtgacatttttgccattatttataaaattggtaatagaaaatattattacaaaccatatagtccctgaagtgtcatgggtgttcatgcacacagacacatgtaagtagagaagaaaagaatgcagagttagaaacataatttggtgaacagtgaaaaggatatttcctatattctggtctttcgaagtagttgaattgccaacttttgagttgtgtgtacatcatgacttaaaagtgtccaatatgttctattttcaggtgt

SEQ ID NO: 17374 - DNA, 689 bp, Glycine max
  Intron number 2 from transcript Glyma12g10820.1 (locus Gly ma12g10820) derived from phytozome v7.0 (chr-ID Gm12; pos 8823382 to 8824070)
tggattatttgctcaacaaaagttaaatctgcattgtacagttataattctacaactccattttcttgaaattgatttatgtattttttcataaatatttttttttcatttctatcatttgcagatgatcaaaatctattttattgttctttatacttaattggattcaaaagcttgaagttcccttaaatttgtcatttgacttaacagtgtatattcttttagaactttgaagtttaacaccactattagttcaaggttgtttgtgttaatcatgacgccagtcttcaacttttacttcaataagatattgtattatgcactcgcaaatttaaaagcacagcagatgaaaatggctatttgattaagtgaataaatgtattttttgtttgcgaacattattattttacaaattaagctcataattatgcaagttttttcaatatttcaagatactttttatacatttctattagttatggaacactacttcaatgatttggtttaatttctttgtgccttttagttaaatttttagaatggagtcgtcaataagattcaacaacaatataaattgaataagtagacaaattttgtaaacaaaaatactaacatgtacaaagaaaacaaatctataaaatatcttggcatcaggtgaaagtatagtagaccctgttttgtattctcat

SEQ ID NO: 17375 - DNA, 957 bp, Glycine max
  Intron number 2 from transcript Glyma05g38190.5 (locus Gly ma05g38190) derived from phytozome v7.0 (chr-ID Gm05; pos 41582488 to 41583444)
tttttgttgatttgcaggattataaatattcaaaggtactctagtttgatcacagttaattattggttgttatgatatgatattatcttcttttatttcttgtcccaatttgtgtgcttttttatatcacgatggtttgtaaacaattgaaattttctattatatctatgatgacaatgaatatacagtctattatagtcatcattttttgtaggggatcttttgttgcaattagtggtagaggccataaggaagaataagtacaaaaactgaaaacctagtgaagttgtcagttgggatggatgaaatgtaaatgcttatattcttacagcatgcttggtttgacatgctggagcattgggtgtgcgtcaagttgaacaacttcatattgttcatgatctaattgttcattttattgtgaatttgtctgtttatgtgcgtttggatgttgatccaaacacatacttaatgatggctatgattgtggattgtttgtttactttgttgactgtttgacaattacccttgataattttctaaaacatgtgggttttatgtttatgtttgtaacaacaaacaagtaggcttaaatacctttttagtccttgcaatttagtgtttttatttttatttttcgtacctgcattttttttgcttttagtccttacaaattatgtttgttttattttttgtccttaaagcgctttagatgacactttgaacagtgaaaaaaacactatctaaaatgctgtaaggatgaaaaacaaaacaaatacaatttggaaggaccaaaagcaaaaaaaaaaatgcaagcacaaaaagaaaaaaaaacgctaaattgcaaggactaaaaatgtatttaaaccttttttgtatcattgtcagatgatcttgtgcttataaaacaaacactaatttctttttaatgatgttttcttattttgcagaaaaaacagg

SEQ ID NO: 17376 - DNA, 511 bp, Glycine max
  Intron number 1 from transcript Glyma10g27080.1 (locus Gly ma10g27080) derived from phytozome v7.0 (chr-ID Gm10; pos 35719926 to 35720436)
acttttgaaagaatcctcagaaacaagtcacttgaagaaatgtgacttttggaaatgaatttttcgaaaacagtcactggtaaccgattaccataaaggtgtaatcgattacacatcaacagatgtgactcttcattttgaattttgaaaatcttaacgtttaaaaacactggtaatcgattactacaatctggtaatcgattgccagagagtaaaactctttggtaatgattttgtaaaaaacttcttgtgctactcaatgttttgaaaaacttttgaatacttatcttgattaagtcttctcttgattcttgaatctttgagtcttgaatcttgatcttgattattcttgaatcttgaatcttgattcttgaaatcaaatttcctcttgatccttgaagtgttcttgactcaatcttgaactcattcttgaatgtcatcatctttgttatcatgaagtgatcttgacttttgagctttttgtcatcatctttgttatcatcaaaactcc

SEQ ID NO: 17377 - DNA, 959 bp, Glycine max
  Intron number 1 from transcript Glyma11g20390.1 (locus Gly ma11g20390) derived from phytozome v7.0 (chr-ID Gm11; pos 17202030 to 17202988)
agaccttgaggttggtgagcttgcgaccccattactctaattcactttttttttttttttgctttgtttcagtttaattagtgaactactagtttctttccaaaacaaggaaaaacgtgcataatttgaggggaaattacaaaactttgcaaaccctcttactagctatattattagtcttagtctttgctttctcagatgctcatgatcatcatggctttctttctttttgttttgttttgctgctctgactttctttaatttgcaccaaaacccttttcttccatctccaaaatctcagtatttgcagaattgtaggtggaaactatgatggtttcttttggtacattccattcatagacttttggaggctgttttcgagtcacgcttctaccagttcactatctgagttatttatttttgtggtgtaagatactaagatgtagcaattatgtcggtccacctgcccttcaattgtaacattattgcaaattgcaaattggttgtctggcttataatttatgagttcaaagcactctctctgtgttactattccaaacagtttactaccatctatctactctactaaattttcaagccttcaatgcttcttcatacaatgctttgttgtcaataacctccccattgccatcactttatgtttgtttagtacatggtactgagagtgaataacttcgactctgatgcttgttggacaactcagcatttgttccttcctaccctttttaccttaatcacatacactggctgtaaaattaggtcagaaaaagagattttctatccccttattaataatgaaatgattgatatccatttccttaccatagattagaaactgaaaaatgagggtgctgttgctttcttgatttgtttgtgtgcagttggtaatttttggattggtttatcttgtggatcaccttagctttttgcttccacag

SEQ ID NO: 17378 - DNA, 759 bp, Glycine max
  Intron number 4 from transcript Glyma11g20390.1 (locus Gly ma11g20390) derived from phytozome v7.0 (chr-ID Gm11; pos 17204259 to 17205017)
tgattgcttctcaggtatactattaattttctattggaatgaagacaagcagcctcctgcagtgttttgttaggaacacacaagcaagagagctgagaaaagaaaattatgcaaaactttattaaatgtcaacatgaaaaagaacagagttcttcttccaaggcctttccccttttacaacagagctatcactccagttttccaatgatatcaattcagaaggaaacttctactcccttctaagctaaccacctaaccatttctttaatgaactactcttaaccaactctaactaattctagaactacgatgattaccttgatttattttctttcttgtgctatcagtttttccctttcttttcgctgttgttatattcttacacttgattatttagcttgacctttgcctttgtgtatgtttagtggatgcattttttgctaaagctgcctggtaattgaattcatcttgattgataaaagttgcttttgtaataaatttcaaattataatggaaataaatttttacatttattgagatgctaaagtggctaattgtgattgattaccaatatgcatggtaggaatgcaatatattttctccattttgagtgaaatggggatacagtgatcaccacctgagtattttatatatatatatatatatgtattattattattattattttatcggcaccacctgagtattatatgatgactgctttgccttccatgcagattctgaagagagtgcatctgt

SEQ ID NO: 17379 - DNA, 963 bp, Glycine max
  Intron number 3 from transcript Glyma06g01640.1 (locus Gly ma06g01640) derived from phytozome v7.0 (chr-ID Gm06; pos 1041796 to 1042758)
tggtatggattattcttctgtgttaatgttattgctaaatagttctatcccgttcatgccttttgtaagataaaaggaatttttcatcgaatatagatttcaacattttagcaaacgtccagatgatacctcagatatactgtagttgtgctttcagtactactgtttgttatgctttccctatgtttgatggcctaggtagtgcttatatactcagagctacacaaacgattgcagacactagttgtaggctatagcacaaagagaactgatgccgtggaagtcaagcatttcttcactttgtcctcagtcctcttgtcaactttacaaagatcctatcatttagtatttgtcattcatctaataaatcctttttgaattttgaaagatatggtagggctatgttcaaatagttgttgtctgacttgtggagacctggtaactgcttcagcctatgtgatttggtcttgtactttccttatagtaggttcatgagacccagcccagattctttatttttttttgtcctgtaactttttttgattagcagacaatttaattataaattttggaacagaatgtatcattacatttttagtttatttgacatttgggttgcctcttgttaggctctagatatcacgttgagaatgaaagagaatgagaggcacgatgacttgtgtcagaattacacagcggagcatatatttatattaggagtcataaatgcaataatatttacaagaatatacagtcactctaattgacataattacatgacatatataccagctggaaaaaaaaatataatataccatatttacaagtattactatgattacataatttccatcaagttttgggccctctgccagttattgattaccaataagtgataaagttgatcttattgattgattatatgtaggtaactggatccaagttgtggcggcaagtaggaga

SEQ ID NO: 17380 - DNA, 640 bp, Glycine max
  Intron number 2 from transcript Glyma13g39330.1 (locus Gly ma13g39330) derived from phytozome v7.0 (chr-ID Gm13; pos 39963786 to 39964425)
agatagaacaagaacttcaaagagcacgctctcaggttctcatgtcatgaattagtattattatatattttaatttttttactattagtggttaatattatttgagctgttaatttatagggcttgttcgtggattatggaggtgttggaagtactgtaagctctggtgagtttatttgatactttttttttgttgatttttaaatgcagtgccactttctaattcctcaaactcagaaagataaaagaggataatgccataatattttacaaagtatacatcttttgaataccaaataaaattcaagatttaatgaagcctctgcatatatttgaccaaaatctgtggctaaataattcgtgtttgaataataaaaacaatatgccaatgtcagaatcagataacgctaacatattttatgtctagttgtacgaccttttcttaacatattatataaaactataaaaggctactttatatgcttcggcttttcagagaagataattattccattctgatgctgctcttttcgactcctggtaaaataatacggtctttgaggtaaaaagttaacaacaaataaagtaataataataattaattgtcattaatagaaacacactttctaacgaaaaggaa

SEQ ID NO: 17381 - DNA, 826 bp, Glycine max
  Intron number 1 from transcript Glyma08g09100.1 (locus Gly ma08g09100) derived from phytozome v7.0 (chr-ID Gm08; pos 6477850 to 6478675)
tttctgaactaactgcactgccactgaacacacaggtatactgctctctgtttttttggcgcaatttctttgttttttcatgttttttctgctctctgtttttcttctctatgttttgtagattttgaattttttggaagtgggtgtttgctgaagacttgtttctgtgtgtttcatggatctatgctttgcgttcagtgattatggttcttcttccatgtagaattcttatacccattctttcttatacacaagtctgaatgcttgatcacgtgttcgtgttggttgttcaaaggtgtattggattctcgttggttattcattcccatattagttatttgtgtttgaactccggtatagttgttaaaagatcctgtttttggacactatgcttttcaaaattggttttgttttcaattttctttttatttgggagaattttgtaatcaaccatatggggtgcctcaaataatcgtaaggaatctttaaattttgtcacgactgatttttggtgattagtttttttctttttggacacaacgattgatagttttcaaaacaagtttcaggttttaggagaatcttacaagctggagtgtggggtgcctaaaatagtctactactcccttccactctagaactatagataattagatatcaatgaatgatttcttaatctatgttcagaacccttaaaagacaacagatttggaatggagtatgaataattgtgttatggatgggacttgtgtgggttggtgatggtatagtttatgtcatgggctgataactggtttttgcttatctatgtttggttttatcagca

SEQ ID NO: 17382 - DNA, 490 bp, Glycine max
  Intron number 1 from transcript Glyma06g19390.1 (locus Gly ma06g19390) derived from phytozome v7.0 (chr-ID Gm06; pos 15615728 to 15616217 reverse strand)
gctactcaatccccttcacctcagaacctaggttcactttcttctctcttttctttcactgaattatattttctttttacatgccactttagtagttaatactattacctattatctgcgaataattatttaattgacgctcacacacactcttcactttgcacaatttggaaatcaatccataagcctctctaggaatcaaattagcctaatctctgtactcgtcattttgaaagataattggtcgatgaattaaattaagtcacaccaaaaaaatggtgctgagctctgctttgttattcaaaggtgtgttttctgtgtggaaaatacagtttttatatttttttcatgtttatttattttattgtgtggctattcaatatttccgtgcttgatgttatattatactttgtgtattgaatgtgttgattaatttgattcattggatccctttctcatggtgtaggtggtgaaattgagcaaacagaaa

SEQ ID NO: 17383 - DNA, 816 bp, Glycine max
  Intron number 1 from transcript Glyma08g18270.1 (locus Gly ma08g18270) derived from phytozome v7.0 (chr-ID Gm08; pos 13727309 to 13728124 reverse strand)
ttcccacaggtttgcttcatcttctgggattcaatttttgtttccattttgcctaaccatttctttgatgggtatttgtttttgtgtgtgttttttttattcagtttgtttatgtagatctggtctgttttaaccactaatttgatttgaattataggaaaattgatccaatattacttagttgctattgtttttacgaagttcttatttttgaatttctattgttgattggttgttatcttcagtttacacacagcatccttttaagctaaaggttctaagttcttacatggcctgctgagtagctgaaccaaaaccttcagctatagctgatagttttgcaaattctagaaagtttaacatgctctgattattccatatgaattggaattttgtgttaacatcttttggggtgtggtgttgttgactgcttcagttgatgaccatagtgtttggttgctgtgtaatgccgttttatttgctgcaaatccagatagtgctgagttaagagcagttttgtcacgtgtcaatgctttgttattggaaattattttaaataacattccttttttccattttaatgaaagacttgttgcacttccaatgatatttgcacgcttttcaaaattaggattactatgtcatttttctcagcttttttttgtcttactagtggatttttttgacttgatgttatgtttggtgtctcagccacatgggaattctctgctatgtccaacagtgcatcatcctgtacttttcatgttaaatatttctaatggtggaaacttgtttttttctatgatgtagtttttg

SEQ ID NO: 17384 - DNA, 797 bp, Glycine max
  Intron number 1 from transcript Glyma09g38020.1 (locus Gly ma09g38020) derived from phytozome v7.0 (chr-ID Gm09; pos 43519714 to 43520510)
ggtcggctaaggtggaaagtaagtcccttttttattatataatatatatatatatatatatatatatattatattttttttatttggatcttaacagggtgttatttgtgatttaacgtttgttgtatgttttggatgttatgttacatggggtttgtcaaaagttcaatttcatttttcttggacttttaaatgggggtatcatgtgaatttgcgtcctgccaaggttttaaattgctgtcacagtgatggtcgcggttttgttgcaatccttgacattgagagaaattgcagccaaaattgtggtgcatacaagtttttaaaacattgagttctacacttttgtattggttcttcgtgaatatcttaatttgattaggaaataactggtagacgtatagtttgcttatgtagtaagggaaatctgaaaattgatatagcccttccgccccaaccatttggagaagttatggattacggaactatttgtagcgagcatttttatgatagattatgattagatggtgctacctattattgaaaattttctttacttgcttggtaacttgagatggaagggtgttgtatgggatgggaatatgaaagtgggttttattgttttgctctaatttcttttctgttgtgtgttagtgttatgcaatgttgggaataatttggaccaagaatgctgaggattggttgtggaatacggactcccttattttaataattactttgatgttaggaaagttgtgttttgactgggatgattttaaatatttattttttggcagaca

SEQ ID NO: 17385 - DNA, 837 bp, Glycine max
  Intron number 2 from transcript Glyma07g00450.3 (locus Gly ma07g00450) derived from phytozome v7.0 (chr-ID Gm07; pos 198149 to 198985 reverse strand)
aagtttcagcaggttggttggtatatttgtttgagagcaacagattatcttgtatgcatgttctattgttcttttcatttaactgagatctgttgttaaattacaatgtgttcctggtcgtaactcaacctaattaaatttctcacggttctgaatatttcatcaatgttaattaaaacctttgccttgactcttgatgtatgttccaatcatcctgtaaaatggtaaatggttctattttatgtcaaacgtagttctgctgcatatattgtagtaaataacggttcatggaatagacatgaggacatgaactttaatgaatctgctactttaattatttgatctgtgagatggttttcctgtggtcgagagaaatcacgaaaaaacgtatgaattttggaagaataccactgtggtcaaggtgggcaataacagcagtaatcttaatcgtggtaaccccagcaatttatgtgaactttctagtatggaagctctcactggccattggatacctgaccctgataagtttcaacacctccaaacacacctagttcactttcccactgacaagaagagagattttttgttgtcaaaaatgataaggggcaaaggtttatggcaaacttcgaatatgaaaaatagaacttacttatcatagctttttcttgagtttcactagttaactgttgtgaaatctgatgattgctggactgctcagagttacagttctgtttttgttcattttccttaatctttagttttaattcaccataaattttgcaatatatataatgctatttgatgtaggtggaagtaaagaacaagccaaagattcaa

SEQ ID NO: 17386 - DNA, 233 bp, Glycine max
  Intron number 1 from transcript Glyma07g00450.3 (locus Gly ma07g00450) derived from phytozome v7.0 (chr-ID Gm07; pos 199256 to 199488 reverse strand)
gagtttcaccctttgattgaaggtttcggtgctcggtgcttttctgactcccatcatcttctcatgctttctgattcaataatttgaatgcgtgtatcgctattcactctgtttttttaggatttctttttcaatgctggatagtttgctggaacgatctttttaatttgatgtttgtttttctaatacttcactcagatcgacgttcataaactgttttagtccttttgacg

SEQ ID NO: 17387 - DNA, 764 bp, Glycine max
  Intron number 1 from transcript Glyma06g33840.2 (locus Gly ma06g33840) derived from phytozome v7.0 (chr-ID Gm06; pos 34918260 to 34919023)
tggccaacagcaacctccctcgaagaatcatcaaggttcgtacttatttcctcgttgttattccaatttcaatttctctgatcgatttctttggtttctgagaaaacgaaagaaactcgaaacccgcttatggattttctgcttcttcccgtgcgaattcccaaattgccctatgtttaaattcagttgccacatgaaggaaaacttataaaaataaaataaaaattgaagcgtcttttggtgttacaatttggggattcagctacccttttgcttttgatcttcgttggaaatgaactgcgattctgggtttttcaattgttttttttttaattttgatctttctgaatgttttgaacactattttttctcctacctcaacaggaaacgcagcgtttgctcagtgagccaggtaactagttattcgaactttgcctttgtttatttatatgaaaaatttgttctcagtttatttcagtgcgttataagcttgctctaagtttaattgattgtatttgtccatttttttaagctttacatagtgtcttggctttgtgttttgttgatatcttttcaaatgatcaaagcgcagggtcgatcatagcatcaaataaaaataaaaatagaatcctagtgtcttctaggatatgttaaatatttttaccttggtgatttaataatccaaataatgatgcaagggttgtgactttttatccttttgattttattctgcttatttcttgattgtttcagtctctgatatt

SEQ ID NO: 17388 - DNA, 789 bp, Glycine max
  Intron number 1 from transcript Glyma11g16030.1 (locus Gly ma11g16030) derived from phytozome v7.0 (chr-ID Gm11; pos 11696500 to 11697288)
aaccaaattgtaagctattgcacaccctttgtctgtactttcttatgaattaataaagtcacttttttgaaaaggaaaaaaaaatgaaatgaacacctgtatagctacttcctgcatatactgtgcatcttctcatataaatatatcaagagatagagagataataaatttgtgatttgtgtttcttgaaattttaaccatgctgaagttggtgaattgtttggaaataattgtgatcttggttgttggaatttttcttatcaatgcacggtaattgtctgttattttacttatagggtttgctttttgttttggccatacatttgaaagagatataatgttagagatcatttttatggttaaggataaggacccaaggttggagtagaatgtctggattttcaagggaagatctttgcccctacatctgttgtgttgtaaaatagacttttatggtttcggtttggttgcacatgaatgttttagggaagcttatcttcaaattgagcagccttactgcactattgaacttctttactttctcagtcctccctccttttttggaggacgtgttcacctcctgtccttctaaattctaattgtacttcttgtttctcttcaataatatatctttttataaaagaaacaatgaatgagtgttaattgtttaaccttggtgccagaggctacttcctgtattccaattttgattatttgtttgtttggttgttatatgcgccatccttgtcaaagaattttaattatttttttatttggattatcttacag

SEQ ID NO: 17389 - DNA, 772 bp, Glycine max
  Intron number 1 from transcript Glyma12g36580.1 (locus Gly ma12g36580) derived from phytozome v7.0 (chr-ID Gm12; pos 39622371 to 39623142)
tggtaagaatgccccttctttagtagctttattttgcctagcaattcttctttgaatttatttagattagagtagtaaaacatgattttagttcaataatatttgaaaaattgagtattagggagcgtgatgttattcttttataactcacaagcaagggaaaggaggaaaaaagactaaagggtggacttaaaacaaaaggtgttgatattttttatagagaaaatttaaaattagttagttattcttattaaatgaacagtgtagagtagaagatgcttatgcaattcaaaatttcttatgatttaaactaaattactgtgtgaaagtttggtttaccaaattttagttatatatagagttacagtactgtttcgtctacattatctttagctacggaagagagatacttaaacttcgtttgtcaaagatttgcgaagaatttacattggttcactaggtttgtatcattgttgtatgtattattagaacaactatatatcggaagtttattatgaaattgaacattataaggctttttaatggactataaaaacaataataacttcataattgctttttagttgactaaaaagcaccatcttttcttaaaagaaaaaagggaattatgtacaagttaattttacgttgggccatagtccttaaatgaaatagaagttttgtttaattttatgcttttcatttttcattttttttaaaaaatgaaaatacttcagttgcggcatttggaggaaattagagggtgcaatcc

SEQ ID NO: 17390 - DNA, 519 bp, Glycine max
  Intron number 4 from transcript Glyma05g34680.4 (locus Gly ma05g34680) derived from phytozome v7.0 (chr-ID Gm05; pos 38925645 to 38926163)
ttgtcagggagcttgagaagaagtttagtggcaaggtaggtaaagcttagcatatttttgacatctatatattgatatgttctggcatcattttggtagtttgaatacatttgatagtgttcatggtcctttactctaccattttgattggatttttacccgaaaactccaactgcaacttgagaaatatttcattataatatgtctcaacacttatcattagcaaatattttggtgtaacctcatgctaattaaataatgattaagctgcagactcacaatacgagattaattcacctctgtaatagtcctaagagagttatgtgcaatttacttaatatgtgtttagtatataatagtctggagtattcctttgggtcgttgtgtaactttattagcttctatgaagtgttttcttctaatttagactgcttcttgaacttattaatttcattttcaatcttctattcatttagtttctctcttattcaacaattttaatctaattaaacatgtagg

SEQ ID NO: 17391 - DNA, 923 bp, Glycine max
  Intron number 1 from transcript Glyma11g19660.2 (locus Gly ma11g19660) derived from phytozome v7.0 (chr-ID Gm11; pos 16425413 to 16426335 reverse strand)
gcaccgttcacatcctcgattttctcgggaatcaggtcagtctacgtctgccatctgtttgttgcgtaattcggcgtaattcgtcgcgattattgtgaatttgagctgttgttactcgaattggagctggctagattgaatttatggaacggaatgattcgtgtgattgagaacttgtgttcgttgattttctcttcaaatgtatgctagggattgtggatatcatttggtttgtgttgacactgtgagctttgagattccgtgtagctgctgtcgtgtgatttagaatctcgtaatttctgtgaatttgaactgttattaatctaattggagctggttagatcaattttttcaataaatttacagaactttttttccccctgaatttacagaacttaataatccgtgtgattgagaacttgtttttgtagatattctcttcaaatgtatggtagggattaaatttgagctgttattactctaattggagctggttagatcaaatttacggaacttaataatccgggtgattgagaacttattttggttgatattctcttcaaatatatgctaggtgttatggatataatttggtttatgtcgacactgctctttgatatttcacgtagctgcagttgtgttatttagaatctgacaatttctgtgaatttgaactgttattactcaaattggagctggctagatcaattttgcggagcgaaataattcatgaccgttcattgaaactctcttcaaatatgtatgctaggggttatggatgtatttggtttatgttgaaactgctttgaaattttttgtgtagctgctgttgtgtgatggtcaattgcttgtgtgcttgtgttgtttttaggagtcagtttctaattgagttaccgtgttataggttaaggaattctctgcac

SEQ ID NO: 17392 - DNA, 753 bp, Glycine max
  Intron number 1 from transcript Glyma07g01240.1 (locus Gly ma07g01240) derived from phytozome v7.0 (chr-ID Gm07; pos 771259 to 772011)
acctccccggcgtcgctcctcgcgattttcaaattgtacgttttccatttcttttctcttctctctctctctctcgattcgttcgttacttttcatctcttatctgaatttctacgttatatgcttcgttcgtttctcggtcacctttaatccgtcgcaacactgctcggatctagggttttagctatgatcttcgtcgaatcggtcttaatttcaccttgcactgtgcttttgaataaccgattttgtgttcctgaaaggtctatatcgttggatgattccttgattctgatgttgtttgattgacttagtttagaatgttatgtgatggaatcgttagttctgtggaatgataatctcataaacgtgttgcctgttccgaagacggaatctaagtagatctttttgtttagtttttgtgcctcactctactacactgttttcaaggccctttatcacttgtgatgagtgatgagacttggttatattttggtatgtgcacgtgaaaactgtatgtgtaatgtggctttttatcttcttttttttcataggaaatgaaaaatgtagtgtcaattggtaactgttgatttaagaaattcggttgtgattgggaaaattttatcatttcaatttgtttttgctgctgttatttggtttttaattgtgtgtgtgtttgaagaatgaagatattgagttattgtttcatgtgtggcaccagggtgaccccctctctgtcaaagtgaacaagttatc

SEQ ID NO: 17393 - DNA, 863 bp, Glycine max
  Intron number 4 from transcript Glyma10g02700.3 (locus Gly ma10g02700) derived from phytozome v7.0 (chr-ID Gm10; pos 1925787 to 1926649)
gaggttggtgtttgttaaaaccatcacctgaatactttacaatatacatttatttggttattggtactagtggctaaaagcatgcacttttccattctgccacatattagttgtaaatggtatttgctgcactttggtttgtgtaagataattgttgtgcaattgagggggtaaacactaggagatcttcaccaatgggcctcgagcacaccacactttagctcaaaaccttaagacatttcttaattatatggtgttcaactttctcatttctacccaatgtggaacttcacttcacacttgtactccaacaataatgttcttggcttaggattgacttgatatttatatgacaggcttgaactgaatccaagcttggaagaggagaaaactccagctctggcctctaaggcctactatatgtttgcattaaatgagtccaagatgaacatagctcaaacttaggattgttatacatacacacttgtgcacattgtcaatcaatgtatataacacgataactatacagaagctaacatgcttgcaaaataggggatcttagtggaattacacatgaatctcattcattcaaaactaattggcataggatttaaattttacattttcccagcaactaatgtttcagtaagttgactaatgaaatactagacatcatgttgacacctcgttattttatgttaacgcaactatagaacttttttttcctgggtggttgatagctactcatacatgatgaaaattgtcaattaaattgctaactcaatgattatataaattcatacaattgcaatctgatggttatttttccttctacagggttcaagtgttcctttggttgtcaa

SEQ ID NO: 17394 - DNA, 999 bp, Glycine max
  Intron number 3 from transcript Glyma08g08610.1 (locus Gly ma08g08610) derived from phytozome v7.0 (chr-ID Gm08; pos 6140117 to 6141115 reverse strand)
ttcaaatactttgcttatctataggtgaataactttgcacaatctgtttttgtcttgtaaattatacaagttttggtgtatttatgtttatgttgatcttttcagctttttgtatgttagtttagtctctttttttttattaattttaattgtagttttctttattcccattctgtagttgaattttctttaagttgacatctttctaaattaaccaagttcagttactgtcttgatttttttttttaattttgagctatttttaataatggtaatgtcgccacttcatatatattcacacattggcaatttaaaatagataatatgtaaaaaaagttcgatattattgctcagatgatagtagacttaatgttataatcaaactattagcttgagctacacaactcaggttatttcttgctatcagctttcactgtttacatttaatagaaattttctttttcttttctatatttctagcagagtagagggatcactttggggaatgggtgagaaggagactaaggaagattctgtgaatgaacgggagaataagacagaatgactgagaattagtaaggaggggggggggggggggatcgaaaagattgtgaagagtctgtaatggggaggctggtattgagaattgagagaaaattacgagggttggatggggggagtttcctggtgtctgggaccccattgtcattctgtttctattttcttttccatctctgtattccttgtttctcataaattcagaggattacctttcaattccttatgagcaattctccattttgcattattattatatacatattacagtccttaatgatctttcattggaagatttatttttaattttacagatttagggcaagaaattctatcttagaatgttagctatgaaattttcaatgtcacaaaaccaaagcttcgaagtttatgtttcagtcctttggataatttttaatttttattatttttctgtaggtg

SEQ ID NO: 17395 - DNA, 479 bp, Glycine max
  Intron number 1 from transcript Glyma09g04470.1 (locus Gly ma09g04470) derived from phytozome v7.0 (chr-ID Gm09; pos 3297567 to 3298045 reverse strand)
aaggtgcttattcactttctctctctaagattaattggtgatacaaaaaaaatgtaatttactttgttttttcaatgtttatgtgttgttatggatattacttgtcaatcaccaagtgtgtcttgtatggagttttttactctgaacatgttgtttgatgcagtgtttattgtaaatttggattcttgcagccatctatctatcttttcaagttgatgctttttggtatggttgaatactgaatagcatggtatgaagtgattgatgttgtttcttttgaactgcttatgactgatttgtttgttaattgtttgtttcaaacctttggaattggttctaaagggaagtttgagttgttatgaagatgtgtctgtctgtcctcttatttttcttctttctttttttgaatttgatttgtaggatttgtgatttgatttgatttgatttgcttgttgtgtttatttcatttcagtgacgaa

SEQ ID NO: 17396 - DNA, 458 bp, Glycine max
  Intron number 4 from transcript Glyma13g41890.1 (locus Gly ma13g41890) derived from phytozome v7.0 (chr-ID Gm13; pos 42065170 to 42065627)
gcaaattggatattctgcagtaaagaaagctgcaggtaactatcctcatactgaaagattgccacatgtattcttagtgactgctgtattttagttttaactttaggaccacaaatcaggggacttgttccgtttaaggatttttcactatccaatttgtttgatctagtgaagatgtcaaaatgactgggcgcaatactatgctgtatacttttgatttttctctcgatctgttttgaggttaatatggggtcttactttgttcttttctttttctctctttaataaatatttgtctgtactaaaaagctattgcatcatattgcacatgttagtaaatgtatcactatctcttaatttttggttttaatgggtgttttttgattcatgaaaaattgaatatgattctcatatgctatacaggtattaataaaactgatattacgtctttggaaagc

SEQ ID NO: 17397 - DNA, 790 bp, Glycine max
  Intron number 1 from transcript Glyma11g33030.1 (locus Gly ma11g33030) derived from phytozome v7.0 (chr-ID Gm11; pos 34754369 to 34755158 reverse strand)
ggatctgttgattacagcgatcttggagctttcaggtatgtacaaattttgtgtgtatatagttatataccaagtagaaatggtgtttttccttaaattttagaatacgatttaccacagtaaaaaataattagaagatataaagttggtaatttagttaaggaagaaataaaatgaagagaagttgcagatttaaattctttactaacaaaaactaataatattaacaactaatatttatttataaaaaaacaagaaaggagagaaaaaaagagaaatataagatccaataagtgattcgataaagaaattagaagaagaaaaagtagttgcaaaaaaaatgtggtagaaactttaaacatttttcgtctctattctgccaattgctgtaactaaatgttgcatcataaccatgaactgtattaatttacacattgaaacatttttggtctctatgctatacctgcttttttttaatgctaattaatgttattacatttagttcataatcatggaatatggagtattaattttctttatttacaaaacacagtaccataatacatgttattgttaatgtaaacttataatgttggtgaaaataaatagatggtagaaacactcatgcatgtataattggtttttgagctgggattgtgtgtaagataaatcttagtttgttggttgaactttaggcttaaatattgaaatttctaaaatgaaataacacaataacaacagtaaatttatattggtttattttgttttggatgttgcaggtacttggtgc

SEQ ID NO: 17398 - DNA, 611 bp, Glycine max
  Intron number 2 from transcript Glyma08g28840.1 (locus Gly ma08g28840) derived from phytozome v7.0 (chr-ID Gm08; pos 23176543 to 23177153 reverse strand)
gtagtgtctaaggctttaaaaatctttaaaaaagggtaattgggtttgtgtaattcaagtaagatcatgactattctaaaaaaattcttgttttgcatcataccaagtgctttgtttgcctttatgagtttttaaagaatatttgacaacaatgggagccatctccgcacgctaccttaggcacattcaagcgcttagccctgcatggttctatgctcatgcaagtgtgatcatcaacacagttctacatattactcattaatttcaaccattcatatttttagtttgaatattttatttttaaaaaaaaaaccatatacatgttttttttatatagtagatagtaaaaagctaagtaccagtgctttccttcctatttgtggaggtcttcttcaagctcagggctaatatcctggggaaatgagattcaactcttcatgcaaggttagaatctaagttatttaaggctttgatgaaatgatgtttggagttcataatatgagttcataatatgttagcttgaacttttttccttgtgcattggaactaatatcggttactcttctacttttttagaataagtggggaacaagaatcacatcgattgtaca

SEQ ID NO: 17399 - DNA, 582 bp, Glycine max
  Intron number 1 from transcript Glyma08g28840.1 (locus Gly ma08g28840) derived from phytozome v7.0 (chr-ID Gm08; pos 23177222 to 23177803 reverse strand)
tctggccaaaaggcacttgctcttgttaggactgtatgtttgcctacccattgctatccttttcattcagaatcttaggtttggggtattactggattctccacattcattagcactgtcatgatctgatattcgtcatcctgtgtattcaaaattaaacttagtttgccactaaagggttagtttggattaattagatttagttatttttttagtatctttaactgtaacttactttttagatatatcatattgctattatcattttatagattgagcacattcatttcactccaatacaaagagtgatttatctcttttttcttctggtttctggagttttctaactctccctcaattcctttactgattcttgatttcttataagttatcagattatggaggtgcaaatgaatgtggagaagttggtaatacaaggtatgaaatggaccatttattaaatactatgaattgattatagaaaaagtattgagaaaataatttaatgaacaaggggagggttcttttaattttgatcttgtgcattgtgaaacttgaaatcacaggtttataaactcccta

SEQ ID NO: 17400 - DNA, 938 bp, Glycine max
  Intron number 1 from transcript Glyma11g38090.1 (locus Gly ma11g38090) derived from phytozome v7.0 (chr-ID Gm11; pos 39043760 to 39044697)
tcggcaatacttgttactgcaacagcgttttgcaggtcttcatcactaatcctcttttactcattttaccgatttcgaattcgatcctattatttggaaatttccgattaattaattaatttatgtatggttaattttgtttttatggttctctctggtcatttcgatagttgattattacttgtgattttgtaaggaaaagatgttgccgtcaaagaaggccaatgcgtttaactttttttctgtcaataaatatataaagcttttatgtattttccacgtttttttatgaaaataagaaaatacggagaaactaattgaaagttgggagagaaacgtttgggcattgtcatacactgctacaaaatctctttcgctgtttaaattttcctccttgtgttattttttttttcatttgagtaagcaatttgctttcattgacccaaaaaatgacttgtcattttcttttggttattgcattaaggtatattctttacttttcttgtctttaagttgaatgaggtctgctcaataaatagcagaactaattgtcatcttatcggccttttgaaagagatggacagatgtcatggaatttgtcttaccttccagcgatgtaaatttaaatcctgatgaattatgtttgtacatcagaagtctgtcaggtagtgttatcaatagtggaaggccaaaattcggccatataagcacgccattgtggcttatggtgccgccatagcggtctccctatacaaatggcctatggcggttgacaaaaaatctgccatgacaccaccatttaacaacactgctgtcaagtatattaggttggaatttgaataacttctaaaagtttttatagtttttcactaaaaagttactcctttttctctctttatgcaggcactatacttctgtgttccatttcgagaacaatt

SEQ ID NO: 17401 - DNA, 432 bp, Glycine max
  Intron number 1 from transcript Glyma06g30010.1 (locus Gly ma06g30010) derived from phytozome v7.0 (chr-ID Gm06; pos 28767042 to 28767473 reverse strand)
tggcacaacgaaacattaaacatttggacgtgagatatttaatttaggcttaaatacattttcttttctataattttagtatttttcatgtaattcttttttcttttattgtttaaaaaatatatttgttttttttatctatatagtattttaaataatattttttagcttcaaaatacttttattttattattcaaggtattattaagtattttagaaatagaaatcgaaacaaacacaaacactaaaatgaaaaaaaaaattactgaaatgaaaatgaaaaaaaaaacacaaattgtagaaaataaaatatatttatgctatgctcttgttcatttttttatatgttctttgttcattcgctttcttatgcgtgtgttttttttttttggggggtgcaggcatttggttgggttcttagtttttgcggcg

SEQ ID NO: 17402 - DNA, 717 bp, Glycine max
  Intron number 2 from transcript Glyma08g10420.1 (locus Gly ma08g10420) derived from phytozome v7.0 (chr-ID Gm08; pos 7555411 to 7556127 reverse strand)
catctgcatttggaccatttttccaccttggacaggtaaatataatttttgtatcttgaattcatatttggtcatcatttctcccatatgtcatgctgttttccccttgtttctgataaatcatcacatttaactaatttgaaattgattactatttgttgaaaaaggtcaggaattttaggtgtcttgttgattttcagaaatgtgtaatgataaattgatatgttttgtttccaacttattgaataatggagaacaaattggatgcttggtataaccatgaaaatcatatgggaagaagagttcttttatatgtcaaggttgtgtcatgctgcatggtttctaatgtagatgaccagatgtactgagttttgatcaggttgtataagaaaacattttattttttataatccttccacagcaccagaacaagaaagaagcaataaattaaatccaaagtaaccacctgaactatgtagtatccaaatgagactactgcatgaatagagcaatcttaccaaattataaatggccaactttgcatgctcaagtgaatgggaacagctttaatcaccctttactgaattattgtattcattttcctgcgtaaaagtgaagatatatcaaatgcactctttgcattattgatttgcttattgattgttcaaattataaattgcagatacaacaagtcattcaacggttgtttccatttgg

SEQ ID NO: 17403 - DNA, 853 bp, Glycine max
  Intron number 3 from transcript Glyma11g05300.2 (locus Gly ma11g05300) derived from phytozome v7.0 (chr-ID Gm11; pos 3709910 to 3710762 reverse strand)
atagctctatcaggtaatgcgcgtgctctgcactttccagccaaataattggattctaaacatgtgtcttcactcttcacacatgatctgtgttccccagtgaatcccattattgggtttcaaagtaacgggtacattttatgaatttaaatttgatccactatctttcaactcccaatcatgtcttagtatgttatttaaaaaatataatcaaatctaagtatgtgaattaatcaacatgttgttaactagtttaaactctttaaataaatttttaggttcgaatattagttactaacaaaaacaaaatcagtaaatatttgtattgcttttattcttattaaatgcataattataaataaattttatacttagtactaacattggacagaaattaatcttttgaaaaaggtttcgtagaaaaattttgaatcctcttattaatctctcaacttttttttatatgagaggtattgaatattctttacatttttaagttattgatatttttatttaatatttatttataagatggtagaaagttttgtagaagaatagaacatcacttagtttagtattcttgaattgctttattaaacaagaatgcaaaatactgaataaatataacttagtgtaggattattttcctaatggatatatgaaatttcgttcttgaaaaaattcaaaaagagatatcatgggggatgaatgaaaaagaaaagtcaaggtaatcatagtttgatttctttttgataaatgattcacactacaggtgctcacactgttggattctcccattgcaacaaattcacgaacagagtatacaatttcaagagcaaaagtcgagtggacc

SEQ ID NO: 17404 - DNA, 165 bp, Glycine max
  Intron number 1 from transcript Glyma11g05300.2 (locus Gly ma11g05300) derived from phytozome v7.0 (chr-ID Gm11; pos 3711224 to 3711388 reverse strand)
attgcttcgtgcaggtaatcaatcaattgcatgcatttcattcattcaccatataaatgctaaaaagaaagtaaaagagaaaatccccccattaatcacagtatcttctagctgaacaaatcaaattctatttatgctttgtttgtaatattacacagggttgtg

SEQ ID NO: 17405 - DNA, 782 bp, Glycine max
  Intron number 4 from transcript Glyma07g01300.2 (locus Gly ma07g01300) derived from phytozome v7.0 (chr-ID Gm07; pos 823105 to 823886 reverse strand)
agaccaccactggcgagaatcttttccttgacagggtatacgcatctccatcacttttttctgttttctgttttctgttttcttgatttcattcatgaccctatgatccaaacaactgaaacaagggacttttgttcaagatccctcctctctctctctctctctccaaccaaacaatatgttcttgtaaggaaggagattttgatttgcaagggaaacttctttcagcggacctaattagatcataccctttgatttcctatggcatttgggtaaatcagggtggaagtatttttctaccttatacactcatacttcctttttgtttttgtacacacaactcaattctgttattactagtgtaataatttccatcctttgtaactcatgaatgaaaactccatagtctattgccatatccaaacttcccttcaaaatttcttatgtaagtgattgttgccacactgactagggtcttaaattattttgataaattgatgttcttttctagctttgtttgtcatttgaataaaactctttgaaagatcaaaggtgtatatatttttaattgatatattgaaagatgtatcgtacagagtcacaactttatttctgatgtttaaatatctaattttacattgttgaccttatatggcatagcctgcggtcatggttccacacatatatatacttgtgcagaaagatctgtttgcttctgtttttcctttttgatttgtataattgagtttattttattgtttacaaaatcttctaggtgtttg

SEQ ID NO: 17406 - DNA, 572 bp, Glycine max
  Intron number 1 from transcript Glyma08g47420.1 (locus Gly ma08g47420) derived from phytozome v7.0 (chr-ID Gm08; pos 46279110 to 46279681)
tgggtcctccaaacatcccataaagtttatcctaggttggtgcttcttgcacatgtctctgtagtctgtaaccttaattatagtgaaagtgttacacatttatagttatggttgcagatcttgttttctgacaattgtttggtttttttgagagatgggcacgtaatgaaaaaaataaaataaaatgggaacatactaactattaatgtttcatttcatattggagtatctagaaaattggatcacattcgctgatcaaattgaaaaatttattgctaaatgcttattacgtgaattatgacatcttctacaattgcaaaacaaaccaggtttttcattcaatagtttacgcatttcgattatgcctttttgtgcaatatttagactcagttctttaggtacttttgatactgttctccatttagaattggagtttcacctcgataatctgcgaaacctcgatattttaggaattgcatctaagtttttgtctgtataaatatgtgttttgttctcacttctcaccttgtccttttgtcctttttgttttaaggggaagacaatttgggtcc

SEQ ID NO: 17407 - DNA, 418 bp, Glycine max
  Intron number 1 from transcript Glyma05g37930.2 (locus Gly ma05g37930) derived from phytozome v7.0 (chr-ID Gm05; pos 41405449 to 41405866)
agccaccaagcagaactgcttcaggttgccaactagtaagtttcggattctcttaaaaagcagtattttcttatctgttgtaatttgacttcggattaaccttctgccagttgactttacaaacttgggatactccacatgtcataaacattcaacgttgtaccactgtttttctttcatgtttctagtaatttaccccacactttatttgcccccatgcaattttaaatttgagatcattgctactgaggttaggtaatctttattttattttcgtacaaattcagactatagaactaacttaccttatgcctttgtctttgttgttgttgtatattgattggtaatcatgggacacaatactaaaattggttgtttaatagttagctcactttcatagtgaaagaagaaaattggt

SEQ ID NO: 17408 - DNA, 483 bp, Glycine max
  Intron number 4 from transcript Glyma12g06130.1 (locus Gly ma12g06130) derived from phytozome v7.0 (chr-ID Gm12; pos 4179890 to 4180372 reverse strand)
ggacaaaatattcttcacaggtaaattaaatgactttttttcttcttaaaaaaaatgtgttttaggtgataagtgactccattttatttatcaaaattaatgatcgttaacattaattttcaaattgtaatttataaataaatattacaaaattaaattcttattaaaattaaatttaaataatttattttctcttactttaaaaataatgattttagtcttgatttttttttataataggtgaattttgcttctcagtctagtatcttaaacttcataatcaagagagataaaactcactaattattaaaaatacaagaatcaaaattatcatttttaaattacaggacttaaacctattttaactaacaacttaaaaacataaacttaaaacatactttagtccttactccttaattgtttcttaacagaacaaaatgttgtctcttccattgttgtaaaaactaatggcaggaagtgcac

SEQ ID NO: 17409 - DNA, 418 bp, Glycine max
  Intron number 2 from transcript Glyma12g04150.1 (locus Gly ma12g04150) derived from phytozome v7.0 (chr-ID Gm12; pos 2714330 to 2714747 reverse strand)
agcaaaacattgttcctggtattaaagtcgacaaggtaagccttttggattttggaatcaccatgtcattccctttctatgtagttaaatgccatttcagtttgtgtcatgcctgaaataataatgaaaagaataagcactagtgttgatgccaatatgatatgtactcatgtttaattgtactatcattcagatatttgttagagtgcccatatggaaagatgtctcatgcctcacataaacactaggtagttgtaacatactggagatgagcattttgtagtctataatagtgaaaattttgaagttaaactgaaaaagagaatttgaatatgtatggcagtgtatgtactaacacgtggtttatgtgccgagaacaacagggtttggtgccccttgcaggttccaacgacgagtc

SEQ ID NO: 17410 - DNA, 632 bp, Glycine max
  Intron number 3 from transcript Glyma11g19550.2 (locus Gly ma11g19550) derived from phytozome v7.0 (chr-ID Gm11; pos 16311830 to 16312461 reverse strand)
gagcctttctccctaaagatagtcctcttcgcaaggtaacctttcttttgaattttattatcgaaccgttttcttttgaagagcgttttagatctgtgctttgtgagttgtgcttttgcgttttgcgttggttttggaatttgtcggtgacgtggattttgtggcgtcatgtggctaattggatttggatttaggttgtgattagtgtgattaataattgccttgttattgaacgatgttgactttggactttttttcacttgcgtttggattttagttagaggaggtggacgtgttgtgattttgttctttttgatgaatttggcgttgtatttattttgtggttgcattccttattggcagatgttggttgtgtgcgattttcattttcgtttgggttgttaattaggtgttgtgaattttcatgagttactctttctggttcttccttcttcaggatcagttttgggttggatttttttcaattttgcaatcatttgtcgctatctaatttttctggttttgtattgggagcaagggttggttgggttggttgttgtttctttcttgtgatgagattgagctgagatgtgttgttttgtttgcaatgttttgttaggatccggcatact

SEQ ID NO: 17411 - DNA, 623 bp, Glycine max
  Intron number 2 from transcript Glyma07g07690.1 (locus Gly ma07g07690) derived from phytozome v7.0 (chr-ID Gm07; pos 6371677 to 6372299 reverse strand)
ctgatccgcgctataggtacttgctacttagctccaatctttactgtgaagtaacttgggatgttaggagttgtttggattgagaaattgttttctgtttttaattacaaaaatgccactttttcattgtttccggttttcctagtttgtactgaaaatagtgaaaacaaaatcttatacaaccctgtgaaaattggaaacaaaatgaaaacaatgtgacatttttgtaattgaaagaaaaaaacagaaaataaaaacaaaaggcattttctcacaccaaacatccccatacaaagtagtttccgatataacatcatcaacaataacaaccaagccccatcactaggtaggatttgcctcttggattaattgagatcactggtttctatcaagaactaaactttagatactatactaccactaaaagtgatgcctttcctactggcccatcatctattacctctggttccttttttcagttttgctaattttagtacataggaaatcttcattgcatccaaatttgagttactatttgctctatgatttaagttatgttttttgatttctccaatctatttttatttcttgtttgatttggaaatcaggggttgtataacaca

SEQ ID NO: 17412 - DNA, 632 bp, Glycine max
  Intron number 1 from transcript Glyma05g31630.2 (locus Gly ma05g31630) derived from phytozome v7.0 (chr-ID Gm05; pos 36750568 to 36751199 reverse strand)
tcggtccttccgtcttccactactataagaaacctgtgagtctccgaaatcgacaccgaccaccttagcatccccgaaaccttttctatttcctttcttcttctttttctttttttttgttttttgttttcgcgtaatgtgaatctgtaatgtctgtgaagatcgatgcgtttccgatcaggcaaacattaacggatttagcaaggtgtctgttttctaaaatttgtttgtctcctatacacatttttctctctctaaaagtttttttcttaaactcttgagagaatgaaaaaatatctctcacttgttttgaaaactgttccgatctcaagccagctgcattgttaggcttaccacttttgacttttgagtgattgttcgctttgactttcgtgtaggcttcatgattccaaaacaattgggatttttattattttgtttttaccagaacagtaggataaggggctagaggatttagaaaataatctttgaaacaaaagaatgagaagaaaatcatatagtcccttcatgtctctttttcatcattttgtttatttaagaaattatgccttgtaattgatgtgtgattcaaattttgaatgtgtgtgtagctgaatatcgtggaagggaag

SEQ ID NO: 17413 - DNA, 1022 bp, Glycine max
  Intron number 1 from transcript Glyma09g27660.2 (locus Gly ma09g27660) derived from phytozome v7.0 (chr-ID Gm09; pos 34532044 to 34533065 reverse strand)
cctcaccaatcctcttcggtttcttccacttcaaggtatatactaaaaaatggatctgttttcttctgcaatttcactttttttttatggatctgtttttgcttagtcgatgtctttttttttttttttcgggttttgtggatttgcaccttttggctttctgtttcaagaaattccatttttatttatttatcaaattaaccatttttttcaccacaaatcatgtctagcttgagcagaattgccttccccggagaatacacgtgatctgtaaataaaaataaaaaattccctttccttttttctttaaagtgatgatttttgtttgaacgatttttagcagaaatattgagaattctgtgcattgagaaattctcaaaacgaaagatagatttgatgtgctaggttgtttaattcagcatgatgtgtgcaagcaaagaacttttagattactatctatggatagtcataatgttagattccctattttctaattgtttttggcaaacaattatttacggcctgtttgacttcgttctccccatttggtagtaaaaactattttctaaaataatttcatactactcagcaatgaatttctcttctaaaatctattgagttttaaaaattattttcaaaacaagtgtttaaaaaacctaaaaacagaaacaattaggagatatttctctccatcctcttctatttcatagttctaactcaagggtgtgagtcatctggagttgtgctgcatatcgtgaggcagcttggtttgaatatttgttgtctttgtttcttgaaaactaaaggcagtttttgaaaatagaaatcaaacatgcccctatattttcttctagtggttttttcttgcatgtaatgacattcaatgtggttcttgctcccagtaggattaattttagagttttattttgttatgttttataatttgtgcttgatctgctgatacaactgatttaatccatgattcaggggtggttatactgtgcttataaacacttggaggc

SEQ ID NO: 17414 - DNA, 774 bp, Glycine max
  Intron number 2 from transcript Glyma05g32300.1 (locus Gly ma05g32300) derived from phytozome v7.0 (chr-ID Gm05; pos 37236715 to 37237488 reverse strand)
acattggcttaagaagttggagatcaccctgagcctgaggataatatgcagattagtagttttgttttgggtaaagtgacctttgggttcttatttatatttattttattttctccttctccttcatcttcatctttcttttctttattaagtaacaagggaaagtgataaactaatgtacatggcaggggttcttagtgagatattcattgtctttacgtttgatgatgatgttattttgtttcaagggatgtaataggtatgatctgttagatggatatggatttctccttattacttgaaaaggaggaagtcatggttgtttaatttagactctaatatttttatttttttttggagtgtgaatcaattaatatagacaatgaaatggtcaacagcttcatagaattttcagatacgtagtttaaatgttgttctgctgtatacacgacatcaagtgttttcattattcaatgttcaaacagtgctagtattagacatgcatgtgttgtatttcttctagttattattcaagaataaagggggtaaaatacagtgaaaaatcggtaatatttttcttttggagcaaataaaataggtgattaacatactgaaccagtattgattcatgaggtgttttacaaattaaattgaatcttatattataaagaaggatatttcgtttttagggttacttaatcagattagtgataaattaatattgaataaacagttgttttttttcgttggtagtacaaacaagttgtggctggc

SEQ ID NO: 17415 - DNA, 813 bp, Glycine max
  Intron number 1 from transcript Glyma05g32300.1 (locus Gly ma05g32300) derived from phytozome v7.0 (chr-ID Gm05; pos 37237625 to 37238437 reverse strand)
taggagagtgagtagtagtagttcattcagttactgttggtgcacaatgacaaggcacctttaattaggggaatgggttaaagacagagagaagcagggaaaacacttcaaatcagagcctacaaaaggttctacggcaaatggacaagtttttccagtaatggaggggtctaaaacaacggttcccagttccttagtcggccattaataaagggtgggtccaaacactcaccaaaccacaaaaaaagatgacataacataacccttcaatatctttcttttctccacgacaaatcccatttttaatttgcttttctctttgtacctcacgtactgttccccccctcattttaaatataaataaataaataaataaatttcattataataatcactccaccccataagacccgttccaaaaagctttctcctcccttttcaactttctgcttcttctaacactactctactccttgtagaaccatctgaattctccttttgactcaatatccctttatccccagacccagtttcagtttccactctttctcttcaccaaatcacccgccacatgaaccctccaacacgaccacaacttcacatctcatacacacaattttgtggcatatattagcccgtgtttcttgctctttccacatcaaaaagctaagctaggctctttcaaccacgtcttcccaaaagtgagttattacttacttagtgataataaaatattgcaacaacaacatggttttgcataggagacctctgattctagtaatcatctggttgttcttgtttctcttcatattg

SEQ ID NO: 17416 - DNA, 985 bp, Glycine max
  Intron number 1 from transcript Glyma10g08010.1 (locus Gly ma10g08010) derived from phytozome v7.0 (chr-ID Gm10; pos 6793972 to 6794956)
tctgcttgtagcatctcagacagatagtcaagattgtaagttctattatacttttttttatgtttttcttactttggtgtttgatgtatacttatcagtttctttcacatctcatgaaaagaagtaaggaatgttttccaatttttttggggttgctcttgtatatggtgagatttagctctgtaactttgtatttaggagtacttcacttttatgcaacagtacatcataaattacaccaaacatagaaaatagagaaattaaatttgtacaacaaggctgtgcaatttttttttacaaagtgctgaaagatgaaaaaaaaacagttagaaagggttgaaagaatttattgtaggaatagtataattcaagaaaatacagatatgcagttgaaattaggttatgttatgtctttaatcttcatctgatcataatgaaagtgaaaaactgtgtttatacctgtaaataagggaagtgtttacagttctatcatgaagatgctaaaacagaattttgattgctattaaaaaattgacagttgacctgttcatatcattgactaatgtgcaaactgcaaaactgtagtttttatactggaagcaccttttgatgctgctaataatgtttaccttattatctattaaaattaaaaacatgttgtacaaaaaaaaaaaaaagaaaaacatgagcatcatatcttaactcttgtagcagcttttccttcatagtgaactgactacatatattgctttctatagttttcacttttcatagtaatttgtagttctagactctagggacatatgcaatcactcagagaggagatagattaatgaacactaagaagtttatgtagttttgcaaattgagaattcaatttctttttgacattttttttacaacattgggtgggtcccaattgtttatgtaactaaattgtatggctgcagattctggcctaaattctcttacggaatcctggagt

SEQ ID NO: 17417 - DNA, 917 bp, Glycine max
  Intron number 3 from transcript Glyma13g23780.1 (locus Gly ma13g23780) derived from phytozome v7.0 (chr-ID Gm13; pos 27109607 to 27110523 reverse strand)
aagataacgctatcgattttcttaaccgttgccaggtatctgcctctaactctatttctatttctccttgttgatatgaattgtattttgaatttaacattttaaattgcgatgaaagaatctttttaattattgaaaatttcttcaaaataattgtggcaattcaattcaatctagagagatagaaaataatagattaaaaggcacaagcagttaagagtatcaactatcaagtatacatataaaaatagacagcaagcagtttagagtagtttcagatggttgagagtgtaattttcttctagttgcgggaatagtgtgtgaaatgcactttcaaaggagagtagagagaatgtttaatagagagttgagaacctcaccctccaacttatactatcagagtagatcagtgacataaaatttgagctggtgtttggtttattctttgtttttatttttctgttatgtttttgctaataattacaaatttacgatggaatttagtattcaattcctagaacaataaaaccttgatattagatagttgagcattgagcttgaaatatgtaattaatattgtttgtcatgccatgcatcctctcctattgtctgtccatttcattgcatgcttatgttggataatggtatacttctggatgaaaagttacaattacgtatgcatgtagtgtattactaagtgttgaccttttctttggtaacccagaaatattttggacatttacgatgtactgagtttttctgattgtgtgcgccaaacattgcctagctgatcctttatttatcaaattttataatcttttgatttaagactagatttcttggctgccctctttttttctcttcccatttccatcctctcataaatttcttgttctttgtatgtcaacaggatccga

SEQ ID NO: 17418 - DNA, 850 bp, Glycine max
  Intron number 1 from transcript Glyma06g47470.1 (locus Gly ma06g47470) derived from phytozome v7.0 (chr-ID Gm06; pos 49923970 to 49924819)
ttttgcttggagttggggttggttttgcaaatcaggtagttactctatgtttcatattttttttcttcatgtttctatagcatcacaagcatttcaaatattgtatatagcttaagattcgattggaaactagaaaataggcaacaaaaaggagaacttgaatttaggatataacttctttactgcaaagtgcatttagatcgttaaagataaaaagaataaccattgattatgattttttttgttaaactattctcatgctagtatagcttataggatcactgcatgatctatattacacatccataaagggaaaattggtaattctcatgctttctatgagattgttggactattctcatgctttctagtaatgtctattatgttgccaactggctccaaccatctcaaagatacatataatttcttggcaaatactaacaattgtacttaggacattggtttagaaaataaaaataataagcttttatagtaaaaaaaaatgcattattatattaaacacatattattcgttccttaattttttaagtaattagaatcataatgctccataacctttggacccttaacaacaaggatttgactcctccaaagtgagcaactcattttagagaataaagtaaataatattagtcatggatgagaaaattagctatcgattaggtgcacatgcacaacaaattatgatgttggaaatatcaaaattgtttttctcaactgaaattacattatttcttactttagaggggccaaatcccaataacaagacactaatttctttcaaattatgtacttgtttttgcaggcagttcctctgtatctttctgaa

SEQ ID NO: 17419 - DNA, 454 bp, Glycine max
  Intron number 1 from transcript Glyma13g42250.1 (locus Gly ma13g42250) derived from phytozome v7.0 (chr-ID Gm13; pos 42290943 to 42291396)
ccgaagagccggcatcatcaaagctcttaccaccggtaacgtttttcaatttccatttccatgcaccatcaaataaaattaaataaatactcttcttcgcatctacctattccttttctcttttccataattactaattaatgggtgaaaccagaaaaacacgttattcttataaatcactaatcttgacacacgttagcggtttctttctttttatcatttccgttgatgaaacctgccactaattactattcagttaaggcatttgggaaatattattgaatttgaatcattccagtcctttgcttcgcctttctctacctgggagcaattgagaaattcttttattctttttctattttgtttttaaatttctatatatgaactatgaagctttttggaattttttgtgtctcgtttgattaatttgtttggcttgttcgtgctgttgcag

SEQ ID NO: 17420 - DNA, 782 bp, Glycine max
  Intron number 1 from transcript Glyma08g41510.1 (locus Gly ma08g41510) derived from phytozome v7.0 (chr-ID Gm08; pos 41472934 to 41473715)
aaagggattgcgaagctcttccccattcaggcaacgtctattcgctttgttcattagttttctttgggaaaaattgcgacttcttttttgttaataggttttctgctttgttaattgatgttgcgaggttcgtgtgtagttttttattttatttttaattttggtaaagggaaatgataagtaacttgaaaccggttgttggaaaattttacgaaattagtttactagtagaatagaaagtttttggtacattgcaagggcatttttaaatttgaatatttttcttaaataatgtgctaaacaaaatatcatttttattacttattaataatgaagtaatgaaattaagtaccttgaagagaaataaaacaaaacggaaagtgttttctttttcaataatgaacatttttgttagatgtaaaaaaatagagataagacttttgatactaaggaggaaattatttaaatgaagagaatataatttctgtatctattaatttgatatagagggtgaagattcaaatttaaaaaagaaacaaatatctttaatttgatatggtatgccaaagaaaataagttttgaccatgctcttgtttaagaatgaacactcaaatttatttatttattttttgaagaaaaaacactcaaatgtaaataataattattattattactaggggaagacacgcctatctaatttttttaaataataaattaaaaaacagaagttaaatatatttagttaaaaagtgagaataaaaaaactaacaatatagaaata

SEQ ID NO: 17421 - DNA, 751 bp, Glycine max
  Intron number 2 from transcript Glyma08g17460.1 (locus Gly ma08g17460) derived from phytozome v7.0 (chr-ID Gm08; pos 12968875 to 12969625)
cacagctgccagaagaaacactaagcgacccaagtgtaaggctctctcagtctctctgatctctcgtggtttttcgacttttgagctcaattttcagtgacccatttgtcttttttgttgaagtttttggtttgtggtggaaatttcgtattttttatttttgggtttaattgagttcatgttaggaagaaaatggtttttttgggtttgttgagtttttctgtgttaggattaaggcttgataatgcctaggttcaggtgcccgtgttggagttctatttcattaagatatgacagtttgtaaagctaaaaatccactttttatttattatttaatttgaactttttagagttagtagtggtgttaaaaaagcttccgatgttcatgttgtctgtttgttgacctaaatggaggagttcaatgcagttggattgtgtgtgcttattttagattgtgattctctactgttttgaagtgaattgcatcaatttggacttttgattaattttattaaatgataaatttatcttatagtataatttaatttgactaattttaatggtgggattgtgtactgcgcaccctgtagatttgaaatgaactgcaggggatctcatttggctgatttgacaatgctttgtctcttttttttttttgggtgcccactgaatactgagctgacaagagttctctttgaaaatttaatgcctctcagattcaaagtttactcagcaagaacttccagcgtgt

SEQ ID NO: 17422 - DNA, 962 bp, Glycine max
  Intron number 1 from transcript Glyma09g34760.2 (locus Gly ma09g34760) derived from phytozome v7.0 (chr-ID Gm09; pos 41058847 to 41059808)
cgtagctgctgttcttgcgcgtgaacaagcctcaggtaactctcacctctcttcttcctctttgatgcttcattgcaaggcttggtgcatttctcattatagatcttcatttcgctgttacatttccgagacactgctcgttttattcttgttttgaatttcgcgtcttattctgcttctgaaggtggattgttcttctggttttgttcattgtttttctggattcgtagtgcttgggatttaattagaggtagagctatcgtattttccgatgttctctttcccttgcttatggttttcgtccatttggatggtttgagctgttattgttttggaagatgtaggactctgaaaactgctttgattttccgtacagtgtgataataattatactaagatatattaccgttggtgtgagattagcctctcgagttgtgtggctaatcttgctctctggaaagatgttagctgagaactgtatatgtatttagtttgttttatcggaaaatcttagtttactttagcaggggactcaaaccaacgacctatccctccctgctcctaatttaaccaccaagccaaccttatatctcccgtacatgtatttagttaactagaccatacgctgttttatggaaatgttgcaaaataacagttttgattgtatatgtccaatgatcctgtataaagacatgcattttttgttttaatgtttgataaatgttgtaaattctttttggtttacacttccaactagttttttaaggacattattgcattgtatttcttcgttagtattgaatgtggttatgtttagccaattcagtgactaatgtggttattgtatttgttgattgttagttatctgctattttacactatcttgtgcttatcctattaccttattacataatctaacctgttgtcgtggttgactttaatgtgtaaggtaagccaaaacc

SEQ ID NO: 17423 - DNA, 391 bp, Glycine max
  Intron number 4 from transcript Glyma11g13200.1 (locus Gly ma11g13200) derived from phytozome v7.0 (chr-ID Gm11; pos 9395729 to 9396119 reverse strand)
aagcaaaactctacaaaactagacccaacgaattggttagaattctcatctggtttcttctatttctgtccttttaacttgtatctagatattggctttttagacatgaaaccactgttagatgaattagtccatttgttttaagtctttcttcccattgctaattgaattcccttgggtttggtttggtttgtaagcccttttaatctctctacatgttccttcttccatctactgtacttttcacttatcgaatgatttgattcctcccgattgcagcatattccaggaaaagacattcaagaattgtcttgagaatttgaacttacaggtgtatactttctttgttacaacaggatatttcaataaatttattgggagactgtcatca

SEQ ID NO: 17424 - DNA, 457 bp, Glycine max
  Intron number 1 from transcript Glyma13g23210.1 (locus Gly ma13g23210) derived from phytozome v7.0 (chr-ID Gm13; pos 26658158 to 26658614)
aagttcgccatctttcgatctgggaaactaccttagtgagtcaaattttatgtcattttaaattatgctcctttggtcaagagtgtttaataatctttattgtttatgtgccaatttctttgtttatgtatgtttgatttattggttctatcttatattttcaaagattattcaactcttgcgttactaataaccttggtaggcatcattgcagcgatctatgttattaagacaaaatagtctcattttgttgatgagttaaggaccatcttcattataaatttagaatggttaagtaaagcacaatacaatttttttgcttaaggtttaaaggcaaacgccatttgagaagattcgggttcctgttgttattatttgtcttgtggaacaatgcttaatcctaggatacagtctcactgccacaactaacttgtttcttttgttattagggaggata

SEQ ID NO: 17425 - DNA, 974 bp, Glycine max
  Intron number 3 from transcript Glyma13g34570.2 (locus Gly ma13g34570) derived from phytozome v7.0 (chr-ID Gm13; pos 36114963 to 36115936)
tctttgcagccacacaaagaagaaaggtttggctgaatttttacctggtcttctgttacaaatttaaatttagtcatatgatgttatttgagacaaacacttgcacaatgcacacaccatgtatattattatgttttatgctatgacattgaaatggatatcaatttcttatttcctacatttttggtttatacaagtccacagaccttatatttttttgtaatctccaatataggctcatttttataagtgggagcttagatggttttgtttagatttagaaagtcaggtattgcctttgaattggtgcactcacctatagttaagaacacagaaccttgttaattggtggactagcttatagtgaataaggcactcaattttaagttggagtgaagttaatttccataatatttacagtattgcaaattttcttttgtgcattcagaaactaagggaagaaatttggaataaggaaaacttgagttagtatcacaggaatctccaatttattgaaagcatgtcttctagatcttgattatattattgggcctatccttaattaaaaatcagtttctcaaaccccttttctgtgcatattgtctggattagctgttcattaagggaattcatccccaattcttcacttctgaagagagttcagttttccctccctttggataagtctaagctagacactgtaaattggatttaattatcatgatttagttatcctctacatttatgtagagtaactattaagataattgtgctcttcagaagagaaataatagtgcacagggtaattgtttagtattattccttcagcttgtgcagttgagtgaattaattatgagttttgtatttgattgtgttattataaaatctatggttgcattggaacagataatatttgtttttctccatctgtgcatgcaggttcctgtatccagtatatccacttatttgtgttg

SEQ ID NO: 17426 - DNA, 609 bp, Glycine max
  Intron number 1 from transcript Glyma07g09090.3 (locus Gly ma07g09090) derived from phytozome v7.0 (chr-ID Gm07; pos 7571947 to 7572555 reverse strand)
tcatcgctccattatcggcaaacacccttggcaaggtaaacacagctgcatttggataaactacttaatgaagcacttatcaaataagtgcttaggttgtttctacaatcaaagagaaaataagattaaactgtttttatataggttataaactattttcaaaagttattctggatagcttattaaaataagatattttcataaactctcctaatcattaaaacaagtgttcatgccataagataagcctaaataaattgtaaatatgattttccaaacacatcttaaattgacaaatagtggcagattttgtctcttctgcttagtcaccacaagttaaaatcatggcttatattttattgcacattaagttataaaagctggaatgtctatgacatgcctatttattctgtgcaggtgagttcagtcaatgatatgtgttcctatccatcttttggtattcagttttcgtatgtaaatcttatatagggtttacatgcatgtttctgtttaagtacttaagtatttacgattgtcacttccttccttttcataacttaagtatatgctattgtagattgctggagggttgtgtgacaatctacttac

SEQ ID NO: 17427 - DNA, 643 bp, Glycine max
  Intron number 3 from transcript Glyma11g15230.2 (locus Gly ma11g15230) derived from phytozome v7.0 (chr-ID Gm11; pos 10920721 to 10921363 reverse strand)
gacatccaggccaagaaagttaacaccttgatcaggtgagcaactatttaatgactattcagttttgatagtaatggtttcataatgcattattgctgatgaaatttgatgggtggtagtgaattccgttttcagctagtgtgataaggtgttgttgatgttgtgaatttgatgttgtactatcctttctgaagaccatgttatgttgatacatgatgtcacatgtaattaatatgtagtcctgtctgtactctgtagcttcttttttttttgcctttaaatatacatcatggggtgttcctgttctctgttttgtttgttttgttgtttaatcactggtgtgtgaattggtattggtttggtacaatattcactctaatgagttaataatttagagtactatgtctaggggtgacaatctcgcttgtggaattttggatatatctgtatttttcaacttggattcctaggaaattagggaatcctatgaatgtttctattagagaatagagattgaatatttgtactgcctggaattggtttgagatgccgctttacagtgaagttgtagaaatatatatggtttagttcaatgaggtattttctgctgcaatttctaaatttgaattctgttgcaggcctg

SEQ ID NO: 17428 - DNA, 751 bp, Glycine max
  Intron number 1 from transcript Glyma11g09860.1 (locus Gly ma11g09860) derived from phytozome v7.0 (chr-ID Gm11; pos 7034535 to 7035285 reverse strand)
caactagcttcggtgcagaagcgacaaggattaaggtttgtgttctgttctgttctgttctgttttcattcctctaaaacccaccaacgaaagcatcaatcttttgctttgtttatcgttgaatgtctatggggtctgctagtacttgtgcttgtgcttgtcacagttgagcgagggtacgcacgctttaacgagtttgttatgagtctatgcaaaagctgaaatttttcttatgtttaagcgtttatgatgtacacccttctaattcgggaattgcataaagccccccactttttctttcgctgattccgctggctgttcatctttgaagattttgctttacctatagtgttcatcaacctttcccttttacttttctattgtgattagttcgatatactttttttttcctaccaattctggagcagatagggtcttaaaaaaggacatgaacacatagattcatgctaggagttttactatcaatcctttggggggagagaaagaatatggaataatataataatgtcatgcacataagttcttatgatgacaagttgtaatttgtaatatactagtccagtatttgagtaatgtaccttccactctctttttttacttttttgccattccattgtaaattttgttgtgttcatattgagttctccataaacaaaagcagatagaataactattgtactctgttacttgtgcaggtttctcaggttcattttgttacaccaaaccagtg

SEQ ID NO: 17429 - DNA, 816 bp, Glycine max
  Intron number 1 from transcript Glyma11g25780.1 (locus Gly ma11g25780) derived from phytozome v7.0 (chr-ID Gm11; pos 24561590 to 24562405)
cctccttcaagctcattaacttcatccgctctctggtaaatgttactgttctcttctatgcctttttctgaatgggcaaagttgcaaaattggattaggatcttgagaaaggctacctgtcttattaaaatttattagaaatcgtgtaattttgtgggtcttactccgccgtttaatgagttttcaataaattttagggagagaatgttactagcacagtagcactcttaggatcttatcctaaagagaatgacgcaaagcaatcatactagtactcactgactcactcttattttcttaaaatataacaaacatgacattgttttacttaccaaagagaatccaaattgttgttatgaatgtttcttgaggttgggatttttgggaatgatgaagtggggttaaggggaattgtgtattttggattttagatttgaaaattgcagtttgtctttttcatgattttggcatttgtcagtgttacttgttcctttcgttgtcaatttagggattgtttatgcagcagatttccgtcttttaatctgttactttggtttatgaaaaaaaaaatggaaaaggtaatgagcaaagtatgtaagttacacacactagctatatgtagacattttaacattgtcgtttctgtctttataattttgtttagttttgttgttcccttctggtaaataatccttcaacattattttgtacgtggactatttataaaatttcaattgtgtacttattttctcgtgcatcttgctaactggtgttttcttctgctattttttgttttttctaggtggcagagaacag

SEQ ID NO: 17430 - DNA, 604 bp, Glycine max
  Intron number 2 from transcript Glyma06g03490.1 (locus Gly ma06g03490) derived from phytozome v7.0 (chr-ID Gm06; pos 2435638 to 2436241 reverse strand)
cagtattattgtgtcaaagatagtttatattcttatatttttatagagatgtcatgtgtatacttatatattgttatgaagattattgttatatatgtttgattgctgttattgttgtttcttgctggagtctgattgtatttttatcataatgcaggatgaaggttctgagtctgcagtgaagtgtgatttatcaataatatatataatatatgctggatgcttggcttagaactactataaaatattttatttgctttttcgttttttctttccatatatatatatattcaaagcatcgatgccttgtatttctgtttctataaatgtaaagatgaaatgaaattgtcccaaagacgaaccagttaatagtaaaacatagtcatcggatattaaattttcttctcaagttatttatttttctcttgatctttcccgatcggcggaaagatataaatgatgtcggagtttgctgtctcagaagagatgacagggaaacgatggctaacaaaaataaaatgatgattgactgaatatatatatatatatatatatatattatatgaaagaatcactttaaacataaaagtgagaaggctatttc

SEQ ID NO: 17431 - DNA, 481 bp, Glycine max
  Intron number 2 from transcript Glyma09g32010.1 (locus Gly ma09g32010) derived from phytozome v7.0 (chr-ID Gm09; pos 38577387 to 38577867 reverse strand)
tgtgcatcctgcggtaaagttaccgggatacttgggtgagtaattttctttacttccctagttattagtgttttaccccgctcttctttgtatcattttattgatactgtgaggcttcgattgatctttcaaatttctttgtttatgctgtgaaataatatgtatcagcctgcattatgtatataactatatattgaataagagaatcaaaaatggattttcccatgtctcctgcttctcttgtccattattcacttgacatgcatgcaacaatgaagcaaacttaactgctacagtttttgttatactttgtctttttcaaagaaatgaattccatcatggcctttctcagttcctttaatttgattgtgaaatggaatattgaggtgtacaatacatttaaaccattttcaacttgtgtttgtgactaaaattttagtctatgttgatgaaattggtgcctcatgtttaatactggcag

SEQ ID NO: 17432 - DNA, 855 bp, Glycine max
  Intron number 2 from transcript Glyma09g05490.1 (locus Gly ma09g05490) derived from phytozome v7.0 (chr-ID Gm09; pos 4268093 to 4268947)
ttatcgtcccactattgttctccttgatcgtggaggtatctacctttctctttcttcgcttttgtcttcgttgactttgattcattcattgtgcttcatgcttcatgttttatttaatgtttcttttctctgttttttttatggtatgttttgagattagttatgttcgttgatacgttattctattatagaataggttcatcccaggattgattctcttcttttctttttcttcttcttttttttctcttattgctttttctatttctcttgaatttcttatattttttaaagtgaaatatgtagggtactatgacaatccgcaaaacaaggaagataaacaaaatcttgttatttcctcttttttggctgttagtcctcgtttctctataacctttgtgtttttcttttttccgtttggggaaatagcttaattcaagcgcttattgaataagaacttatcatgcaagtacttgtgtataattgaagaagaaataaggttaaactgttttcattcaagttgtaacatgtttgcataagctatcttggagaacttgttgaaataagctgaaattaacttatggacatatcataaggtatttttattcactcttctaaacggttacacaagtatttatgtcatagatataagttcaaataaacaataaataacctcttctacacgagttctttaaatgaatcctaaaggctacaaaaaggactagtcatagaagcatttttaatagtagcttcaaccattcctttctattataattctacaaatccaagttttgtgatgcttactgggaaagttatttgcacttgtagagtgttactttgccttgaaggtttggc

SEQ ID NO: 17433 - DNA, 884 bp, Glycine max
  Intron number 3 from transcript Glyma07g15700.1 (locus Gly ma07g15700) derived from phytozome v7.0 (chr-ID Gm07; pos 15429550 to 15430433 reverse strand)
gaagaaggtacctaaattgagttatattattctattttgaaactgtttttgtttttcattacattttcgtagaagaaatttcaattaaggaaaatgagtagtacaactaagaggaggaaaagaaattctctagttaccaacgattaagtgtttgacttttatttggcttaaagaagtcattgtctttttaaaggaattgtcctaatgtatttgctagaggtgtggtatgtggtgtgtactatgcacttcacagctaatggcatgactcctctgtttcttacttcccttgctgtttccgttgctctttgcagccttatgctccttgacttttgttgttgttgacttgttaattaggccttagacctaatgatgtttgtgtgctttgtctgggttgtatctctacgacttttgattattaacaatgaatgtctataatttttgggtgatttattttagcatttatacgtgtataatttatcttgtatgcaaaatcttcagtatagcagccatcctggctcctgctgtagcacttttgggttggccgctccatgtcactatccaagattctctgacacaattgtcagtctgatattgaggacttgggaaatgaaaatatacgaatactctgctcatttatgccttttccactatgttaattgttacaaggctattgctactggatagcaaaaaagttaaagaatgtcaccttcttattgactttggttaatccacttacagagtatatcttgttgtagttattactaatactaagactttatctctgagaactgttaaaatatatagcttgtttatagtacatgtgctttcttggatttgagtacttaaatcatgattttttttttggtttgaattgcagcctggtt

SEQ ID NO: 17434 - DNA, 730 bp, Glycine max
  Intron number 2 from transcript Glyma10g37870.3 (locus Gly ma10g37870) derived from phytozome v7.0 (chr-ID Gm10; pos 45762309 to 45763038 reverse strand)
cttggtttaggagacgtatgacattcttactgtctaagatctcttactgtatgagaacatgtccttaactgtttccaagttttagattgtcttttcatttggttactttcatatgaagtagtatgttgtgttggatttactttgtaaaatcattggaactatcgaagactgcatgttacttgatttaaattgattttggctgtgtgaaatgctgtgcatttctttcttttgttctcctgctggatcatgccttgctatgtttgatgtaggttggattgacatttattatgtttatgattttgaatacctcatggaaattttatgcaagagcaataaaaaagaaagatatagcccttgttcactgtactctagttgtcacttttcgatgctgtaacctccctcctctcccctccccttttcttccatttccctgcatcaactatatttgattgaattttgaacgggttcttgtgctgcatggtgatttgatttgaatgaaagctatgcagtagttatattggatataatatgatcaatgctttttgtgtgctccatcaattactgtgtttataatatcattacatgtgctatataaaataaaatatcattacaattctgtgtcaacctaagcttgccaagattttaataaatttttaaaattctgattcttcaaaatttatgtgtttgttgctttataatatttgctcatcttttgaaggctatcccaggc

SEQ ID NO: 17435 - DNA, 458 bp, Glycine max
  Intron number 1 from transcript Glyma11g21540.2 (locus Gly ma11g21540) derived from phytozome v7.0 (chr-ID Gm11; pos 18563710 to 18564167)
attttgtgaatctgcttaagaaacggtgagttttttctccttctctgctgatgtttgagtttaatgaaaggtgtattagggataatcatgtcacttgtgaggtttaggaactgatttttgttgttttctctagtctgggggagtgctgcgtgtttcatttttttgtagcagaggtaataggtatctttcacggagttttttttttatctataggaattgaatatggtaccaggggtttacaacattatacactcacacaccctgctcaaccaattgagctagacccccttgatatcttttacgaggataatcttactctaaccgaattggaccattatatgttgtgtttgtttgagtcattatttgttgttgtttttataatttctatttgtttatctatttatcttcttgttgtgatgctagtagaattgaagggtctcaagccacagcaaagcaga

SEQ ID NO: 17436 - DNA, 325 bp, Glycine max
  Intron number 1 from transcript Glyma09g33010.1 (locus Gly ma09g33010) derived from phytozome v7.0 (chr-ID Gm09; pos 39534744 to 39535068)
tcgtacataaaacacaagtggtggttgtttcagtgaaagtgcaaagagacactttttgtgttcttcaatttcgtgagctttttgccatcctccgtgtgtatgtttctagatgagttgtatataaagtacacacatgaggcaaagatatttttaactttgtccttagattttctgttttgattaattaacaataatacatgttacatgtttttttttatatatcttttgtgattttcttgtagtacaggacaaaacaacatgagaaaagtttggcttcttgtcatagtgatgttctaccatgtctttccttcaaaaggaatcagca

SEQ ID NO: 17437 - DNA, 547 bp, Glycine max
  Intron number 2 from transcript Glyma08g41960.1 (locus Gly ma08g41960) derived from phytozome v7.0 (chr-ID Gm08; pos 41842948 to 41843494 reverse strand)
tcctgttattcaagacggtgattatactctctgtaaacccttttagcccctttattatttctgcatttttttttcctgtgtcatgtagttaataggttggtggttttgaaattttgatctttccttgaagttcttaccttgtttagtccttattgatgttatttgaattgtgaggttaggatcgttcatttttgtcctgtaactattgtctttcctaattgctattcctttgttttaaaaggaggcagagggggttacaatttagttactccatgaaattagattttcagtttcttttttataaacacatgttgtggtttgatgcatcatgcatgtaactataacaatccttaatggtgttagtaataattgttttttgttgtgtcaaaattggaagtaggataatctgaaaggctgaatgcttacatccccaaatttgttttctttgctttttgcaacttcaggatggtctatattcaatactaatacactgattttaaaccaatgtgcagaatctcgtgcaataatcagatacttagctgagaag

SEQ ID NO: 17438 - DNA, 892 bp, Glycine max
  Intron number 1 from transcript Glyma09g23970.1 (locus Gly ma09g23970) derived from phytozome v7.0 (chr-ID Gm09; pos 29551865 to 29552756 reverse strand)
tcgtaagcattctatttcatagctctcataagtccaatgctcattcaattcttggacataagtcttccatataaaaaaaatcatgattctggggtataaaacaaatctttccagtttttttttcttaaaaaaattacattctcagagcatcgtaacccttaattagtaaatcaggtgaagcttgtgttaagagggttatacaatgttataatgctatataaattagaatttattaaaatgtatctattatgtgattcgatcatgaattattatatatgttaagattatgaatttaaatttcatgtaatatcaatataaatgtttttacataattaaccaataataagaaatgataaatttccatgcttagagtaatttctctgaaattatttacttttgtaataattattttaagactcatatcgatactcttttttaattggttgttgtattaaattgataatgtgtcaaaattaaaagagtttgtatagagtaaaaaaaaaagaagataaaaatacgatacataatttgactaacgtttaagggtttcagtgtaattttctaaatttcattatttcataaaatataattatacgagcctactttatgttgctcataatgtactttaatatatcaaagggtctaatcctcattatgtttgatttgttataaaattctagttatctacttgataatatctttatcttctttaacaaatgatacatgatttgaatcttgatcgatgttaattgaatatcaaataaatcttgttaataacaaaatagtcatattatgtacgtgtgatcaggacccactaaatttctctccttttcttcttccttttaccaccgcaccaacattatatttgcttgtttcctaattaatgcaggga

SEQ ID NO: 17439 - DNA, 780 bp, Glycine max
  Intron number 3 from transcript Glyma05g33620.2 (locus Gly ma05g33620) derived from phytozome v7.0 (chr-ID Gm05; pos 38235275 to 38236054)
tgctgagaaccctgcaaaatattttgccaaggtattccccttgccttgaattttgtgtaattgcttcttgtaatgccattatacttggatggagatcagaatgttttcattcaatgataactactcatcttgtaagaaacaagggtgatgggtgagaatcaagtgataagtgctgcaagataagatgattatgttagacttattgttcaaataattttcattgaaggatctgttagcaacattagcactgagttattgaaacaaatggattatatagttgaaaatgttagaaacttgataaagatgatcatttaatacgtatcttcatggagtacatacatgtaggctttcgcaacattagcactgagttcttgaaacaaatggattatatagttgaaaatgttagaaacttgatgaagatgatcatttaatacgtatcttcatggagtacatacatgtaggctttagcaggctcaggagcctctcaagggtaaaaatcactgcagagggtgcagtgtttgatactttgaggagaaggctgacattgattgaattaggcggcagggatcccttatagtgatttttatgctgcagaggatccttaccccatttagcatgacttattaatgtaaatatgcatcaagtaattcttctttctgtaatatcttgtgccaattttgtagtagttggttctgtaagcataaagtgaaccttttaaaatttctcataaatctgtgttttcaattcatctttggcaccgtgtaggtcttacgcaaggca

SEQ ID NO: 17440 - DNA, 1008 bp, Glycine max
  Intron number 3 from transcript Glyma06g25900.1 (locus Gly ma06g25900) derived from phytozome v7.0 (chr-ID Gm06; pos 23667175 to 23668182 reverse strand)
tcagggcagacacattcaagatttgttgttggaaggtatgcatgcgactctcactattcttatccagtgcttaaacttggatcatttacgataattattcgaacccaggagaatggcattctgttttatttgttctggacatgttactatatctaagaggtggtggaaaattatacatcgataaaatctaatggttagggatgaaggtaagaaactgtttttcccttagccacgttgctttaaacagtcctctagaaagtgagcagtaatcctctcaaggttaataaaagatttatattgtcaataggttcatgggaattgttggagtctaagtgtggagtgagaggaaaattgtcgtttactgtgagatgaagtttcatatcgagtaaaaatgaaaagttgaacagagagaagacctataaacatgagcgttaaggttttgagttaaggtgtaatatcatattcacttgtatgattacctatgactcattagtgtaaatcttcctggtatttatccctcaatattttataattttccatcaagaggaaccaaaataacaattacaaaattttgatgcagtttcttccgaaggagttgcacctaaattttatccaaatatttaagagatggaccaaaagtgaactttgatatgcataatacaagtaatgtacattattttttcaaaatataattagagtctacatatataattcttctccctgctattttatacatattatatcaattaattgattaatttgatgatggagatgagggctatatgcataacaagaacatgatatatttgagcaaataggtcgtgtcatgcctttaactcttttcctacattcattttttgagccattttttattgatcaacgttagttgttagtttttgttactttttgagctagatatgttagttttagagcgattatgtttctttgcctaacggactaaatgattcatcagtgttgggataatcatagccggtgcttttgttgctg

SEQ ID NO: 17441 - DNA, 690 bp, Glycine max
  Intron number 1 from transcript Glyma09g30010.1 (locus Gly ma09g30010) derived from phytozome v7.0 (chr-ID Gm09; pos 36881437 to 36882126 reverse strand)
ggccttgtgctcccagcactcgagagttcattacagtaattctattacccatttatttgattgttacaattttgtttttcttaaattctatacattggttcattatattttttgatcatataattattattattaatgattaattatatgatataaataatgtatatagtaaaaaaaaaatagtgtataagttggaataggtaagcaatccctcttcaagatttaactttcgggattgagtgttaaattcagattgaaattattggtattgatttattctgacaattattgttgaattcatcatccatgtcatttgttattggattacacttgttttataaattttacacggtatatgctcaattcttggcataaaggagatgtgttgtagatttcaaactaacactagtaatatgactaaaataatatatatatatatatatatatatatatatatatatatatatatatatatatatatatatatatataaaagtaaggaacaattcttttggtttaagttttggaattggctagacttcaacttaaattctaagaattattaaataaaattttaattttgattgaagaataaaataaaatgtttatttgttttatgcaagtttcatcctttgtctaaaagtctaattatttgaaggttacattttcataggaggttgggccttgagt

SEQ ID NO: 17442 - DNA, 633 bp, Glycine max
  Intron number 1 from transcript Glyma07g38650.1 (locus Gly ma07g38650) derived from phytozome v7.0 (chr-ID Gm07; pos 43368392 to 43369024)
ttgttgttgcttgtttaactctcccagttgacaaggttcctgctttattcaacttcacttctgggttcatctattcctttgtttttgtatatataagaaaaaatatttagctcttttagttcattttgttgaaacttgaaatggggtgggagcatttttgttcaattgattaatattctaggcacgcgcttttgatcactttctatctgcggcttgtttcatgaaatgaggtttgatgctaattgattgtctcattactcacatgaggtagggaaattttcaagttgtatttgcatactggaatttcaactaacggataatataagtagcaccttgctcaatttttgaaaaggatcatcattggaaaatgaaaattttgttttttggtttcaaattgtgaattactggaaaagaatagaagatagcatctagtatgagatagcgagcttgttttaaatataatgggaatcccctctcccttgttcatgcatctaagtcacaatgccacttctatagtattcttcattacaaacaccacttttgaattttcattcccaaccattctggttgcgtggagattttgaatcttttaccccctttttctgctctatagattctgaaggacttattgga

SEQ ID NO: 17443 - DNA, 944 bp, Glycine max
  Intron number 1 from transcript Glyma12g09190.1 (locus Gly ma12g09190) derived from phytozome v7.0 (chr-ID Gm12; pos 6970418 to 6971361)
gcgctccaaggacagaatcgcttacttctacgacggtgcgttttcctcttcaattctctctttaaaatcctaaatcgcgttccttccttctttcttttctgtttcctctgattcttatttcgcgtaattgaaccgttgaagttcgtcaatgctcttcgtttcgactcgattttctaattcgcagcttagttcctgactatcaaaaccctagctagctaaccctattcctatgcctgttgctgcgtttggttgcaagaaaattgtaaaataaaggaataaatttgcgatttgagctgttttggatttcagagaatttcattttgtgttcttttaagctttaacatagagtattatggattgttgcactttaaaaaagaaaattacttggctgtcactatgaagttttgttttacattttgttaatattcgtgctgttgggtaagaatatcagcatctctaatagcaggcgagttctgtgaaccgtgaagagatgttcaatcttgaatgctaattagtttttgagttctaggttttagattgtggtttacaaccgcaattgtggctgcaatatcaaggttttggtggcttccacaaccacattgccgcatttatttgcaatatcaaggattgcaggtaactgcaaccgtgttgtaaaaccttggctcttatcatggagttcccaaagatatttgttaagaaattatttaaatgtttaatacttttagaacttaaaaaacttttttttttcaatttccatttaatgttttttaaacccttaaccacaatttcatgttttttaaacccttaacagcctgcaatatcttaaacacaatctaatgttttttaaacccttaacagcctgcaatatttttacatatctgctaggctttgttttttgcatgttttctgcatattcaaatacttcaatcttcatattgcaggtg

SEQ ID NO: 17444 - DNA, 701 bp, Glycine max
  Intron number 3 from transcript Glyma12g18970.2 (locus Gly ma12g18970) derived from phytozome v7.0 (chr-ID Gm12; pos 19655446 to 19656146 reverse strand)
gctgaacatccccattctcataggtaaactatctggtgttctgtttttatggatgcttcctcaaaacagaatgtgatcttaaaccatggaaaaattatagtttatagatggaaatcaaaatataatggatcaataaagagaggatgtctggtcttagattcttaggtgttcatagaaatatttctccaaaaaatagtattcctactcggctactcctttgttaatttagaaaaggggggaaagtatggagacatggaagtaattgagactaaagacttgggtttagactttagattacttattttgtggaagttcctactgtgcacaattatggtgggatggtataggtaataaggttgtaaaaatggcatgatattatgttacttggccctgagaaacaaaatgtttactacttagattataataggtctattttaagatatatgacatctggatttctaagttattgctgctttttctgactaagtaatatataagctcatatgtctaacaatgtgaggtcattctacatttttactctaattgctgtcacactaatatgttcctacttctataagtgctaagtaatgtctgagaaatttgtatggtgtttggtgagatattaatcgtactatcagtcttcatctagtatctaccttcctgcagtgatcaaaccaaggcaaagataagtgattcactga

SEQ ID NO: 17445 - DNA, 670 bp, Glycine max
  Intron number 1 from transcript Glyma10g39880.1 (locus Gly ma10g39880) derived from phytozome v7.0 (chr-ID Gm10; pos 47458893 to 47459562)
attaagcgtaagtttatatttcttttgtttctcctatggaaaattatcgaaataaagagattttaatagaaagaatcaaggttttaaactgtgatcgcactcactgttttgttttgatctttgatgttacgagaaatattacagataaattaaatgtgtagttgatgcaactacaattttggtcgcgatgcagtcatcataaccttaaaatccttagcattatgttcgaaattgcaatcttgagaagaataaagaaaaaaaaaagtgatccatacagaaaaaaaaaatcttttcaccatagtatgtatgtatcttaaatattcacagcaaagcgccaaatcctttatccttagtgaattgctgcttatgtaggacatagatgtggtccatgcaaaaaagaatctcttttctttcccctttttccccaataaaacactatgtctagattgcgtaatagtgtgatacaaaagagataagatctcgtttgatgacagtaaagcatgaatatcaaaaagtgacttgaaataatcagcattattgtccaatgtgatctttgttcattaatttaccacttaagaaaactttaaaatgtgttgatggcgtgtggtttgtcaatatatgactcgttttgacaggtggaggaaatattggaactgaagtgattgtgatc

SEQ ID NO: 17446 - DNA, 837 bp, Glycine max
  Intron number 2 from transcript Glyma10g03150.1 (locus Gly ma10g03150) derived from phytozome v7.0 (chr-ID Gm10; pos 2266462 to 2267298 reverse strand)
gtcatcataaatcacctggagaaccaaaatcacaggtactgcttttgtgtttgtgtgtgtaaaggtttggtaggaaaatgcgggtatgaattgaaagaatgaaattaggcagattagcttgtaggcttaaccattgattaggttgtagtatggtagtactttaaaagacgagtaagaggacatattccacttgtcccacaagctagtgacattctgatttaatcatacatttatcctcatattcagggcattgtccaattccatattatttttaagatttagcattataggctcctttttcttggaggaccattatagatgcggtggaaacggaaagagtacgccatttgtattttaatttcttacccaaaattagttggatttcattcttgttagtcaagtcaaaaagaacaacataaaagacactaaaaaaattaggcatacctacaaaagcacataactttagtggcttaattatcagaaaagttctgaagcatgcaacataataacattaaattagatatatgttaggaccgatgcacgtgctcagtctggtatggaatttggaggtttcgagaggtgtgtgtgactgtgtacaagatgagcgagaaaaacacagtttagaattttaacaagaaaagggatcggtgaaacatgtaaaaaaagagaatacggtatctattcacatttggataatgaggtctttatacattattcattgaatgtatttcactacttcctatttacaatttaatttccaaatacctaatagtttcttcttttacttaaatgtgctctccagtactcaaaatctggctcaagatcttcgtatcaaag

SEQ ID NO: 17447 - DNA, 710 bp, Glycine max
  Intron number 1 from transcript Glyma10g33930.1 (locus Gly ma10g33930) derived from phytozome v7.0 (chr-ID Gm10; pos 42146626 to 42147335)
acattcccaattcataagagtaggcgattctgtaggtaaaagcctaatgagaaatgctcttatattattttggaggattatgtcttacttatgctttgatatatttatggtagatagaaacatagtaggatagttcaattccttccttccaaaagatctcaaatttgcttctcatggctataaaatatcacttctaaaactgttgtatgttttgaatcttcttacattatactctagcttcattaagcaggttatttaaaaaattaatttctttctagttttatgtatgtcatttgactgcttggaataccattctcttgataatcatatatcatatatttcacatccttttaaaaatgtgcattttatatttgataaatgatgacaacatacaggtacaggtacttccaacactatgtttatcttcataaaaaagtacatttgatattaacaatttaatttgggctagagcacatggatttagatcctttaaaatgtacaataacacactatatagaataaaggatctgtaatcgatcttattatcaattgtttaactgtctatttgttttctttgtcttcaatcattccaaaggttggtggaatgatgattgcttgtagttatatatatgtacaatacttgttattgctaaatttatcatatggcagttctcatgaattttgatatgttaacacagaattcaagttcg

SEQ ID NO: 17448 - DNA, 652 bp, Glycine max
  Intron number 1 from transcript Glyma13g01870.1 (locus Gly ma13g01870) derived from phytozome v7.0 (chr-ID Gm13; pos 1567494 to 1568145)
attgtgagcagctccgaaaagccttctcaggtttcactattcttcttattcttcaaatcacgttatttaagctttaatgatctactatcataatcataagtgtaaattaatcttaaacagattatttgataccatgctttttgttgttttctagtcatatggtggtttgatctgtgcatggttgttgagaatgtaacatgttgttgatttgttaagggaataagtgatcatttttggatcaaaagacagaaaatgatgatcatagattcataaatactaactaggcgtgttcaaaaccgaatcaaaccggtttgccaaaccgatccaaaaaacggaaaaaccgtttaaaccgcaaaaaccaaagtaaaatcgaagactttccatgcttaaagtgatatatatggtatttgctacccgatgattagtgagtttgaattatcagaactaattaattgaagatcaggttatattatatggttatgcttttccgagctgttttgaagatcatgcggtgtatatattgtgatcttgttttcagttgaggattgtgtcttgggttatacattttttgtgttttgacttttgatgaatttttaattaaccaaatataattgcaggttggggaactaacgaggagctgattgtatcgatc

SEQ ID NO: 17449 - DNA, 668 bp, Glycine max
  Intron number 2 from transcript Glyma13g01870.1 (locus Gly ma13g01870) derived from phytozome v7.0 (chr-ID Gm13; pos 1568222 to 1568889)
aggccttggacaaagaactcacgagtgattttgaggttagtacaaaaaagcgttttcccataaatacataattctatcaataaccctgtgttgtgtgccgaattcactggaatgtaccacatgctgggttccttggagatataaggtcctcctagtggtgaagagagaagggaaggggagaggtggtgggttcgaatcatcccgctaacaaaaaccagcaatactaacaactaaaatttgccaataaaaaaaaaaaaaaacatgttgggttctctttaaaggaaaggtggtatatgaggatgttttctttccatatatgagttgttcctagtatggcacttgtgttatgtatacctaaatgagcaccattcaagagattgtggtacacactggttttgtatgagttttggttaattaaaatttaaatacacagttctagttctagttaaaacctggctattaaggtcaagctcaagaaaatattaaactgattaactggggagcatgacatcactccaaaatgtttggtaatgaaaactgataataaaactatcctgtaggaataacatacatatcttttattgggtgtttgaaattgaaactgatgtgtgctttgaattttctcctcactagaggctggttcatctttggacacttgattctgctga

SEQ ID NO: 17450 - DNA, 970 bp, Glycine max
  Intron number 2 from transcript Glyma12g08720.1 (locus Gly ma12g08720) derived from phytozome v7.0 (chr-ID Gm12; pos 6458752 to 6459721)
ccgtgagtacttttatcatttgaaagaaactaagtactttttctttgacttaattattttataatgtagaaacatctcttcacttcaagcatgataaatcatattatgaacttcatttgggcagattgagtgttattattctagccatggaactttgtttttatagatattatataataatattgtttttgttatagttactgtaacttgataatatcattatcagtttgaatgaatacacacaaagttgaccctagccttatgatatcttcataatctttagattttggttgatatatgaacagatgttttatttgcttttcttgtattcacttattgtcttaaaattgcttatacaaccgccatttattccctataggaaatttccaaaatgatattgtttgcatagatgtgttttcattggccttggaattgaaattatccagtcacttatagttgttatcgtcagacgctaaggttgttgtgcatgtgaatggttcacctcctgattgaaatatttgtttgacatttctggctataaccacgtacacacttattcataagacaatactacctctgtccctatatataagacccttttaactttattgtttgtccccttttataagtccctcttctaaaagtctaatgcattaattatttttatcctataatactgttaattaattacagtattctctctccaaacatttgttacactttggtgagaagcaattaactagagagaaataaagggtaattttggaagaacaatataaataatagacaaatttaatgtgattaattaaattaatcacttttcttaaagggtgtgagttagttgaaagggtcttatatatagggattgaggtagtactatcatttactctttggcacaaaaatggtttattttttttgcaactttagtttttgagttctgaatacactaacttgtacctttttcttttat

SEQ ID NO: 17451 - DNA, 931 bp, Glycine max
  Intron number 1 from transcript Glyma10g05490.1 (locus Gly ma10g05490) derived from phytozome v7.0 (chr-ID Gm10; pos 4270136 to 4271066)
agtttcaatctcctccacagcctcgaacccaagaggtacgcctttacacgtaacatacaatcatcacaattttcacgccttctccagcgcttcggatccattttggaacgtttcttcgaagcagttaccgtccacgccaactgagaaacaacacaacagttttttttttgtcgactcggtttttattatgccgatcataaattcggaacacgataactgaaaatttctttagtcaataatagttcattttagaatctttgtaattggttggatgttgaaatgttgtggtggtagggttagctctgttggtttggctttcagagcgaaagctatgggctgtagaactgtacctgttcttaaagtatgttgttgtccttactgagtaagcgctcattggaggttgattccaggtagcgtgcgtatatggtataattataaccatgcatgggttatgtgtgtgtattcgccgtcggactgcaaattttttttttatcatcaaatgttagcgttaattattagtttttttttagcgggaaaaatcgaatttacgacctttccctctctctcttctcctttttgttagccgtgggactgcaatttgatttagagaaaattagagaagtactaagaacattatttttaagatactctttttaacatattaaaatttattgacaaaatcataagtgatattcgttaaataaaaagtgagacctacacaattttgtaattcacaacaaatttcaatcaataataacagagaaaagttcagagattgtgatgctaggcatttctctagaaattgtagtttacctgttgtgttgtgtgaaatggtttatttctggttttggaaatggtggtactatgttccattttttttctttctatctgacacaacaataattacacgtattgttttacagggattctt

SEQ ID NO: 17452 - DNA, 591 bp, Glycine max
  Intron number 1 from transcript Glyma10g42820.1 (locus Gly ma10g42820) derived from phytozome v7.0 (chr-ID Gm10; pos 49672473 to 49673063 reverse strand)
ggtgtctctttctgctgtacgtgatttcctttcggtttacttccccttcttcttttcgcaatcttcaatttgcctgttcgcgttttttgtgtttttgttttcctatcaaaatattgtctatgctttcatgagaaatatacatgcattaacataaacatcctctcaaaacatgtatgagttcatggagtggatgattaaggcggttaacttctgaatattgcttttttgttccttgttgcgtacatacagaaaaataaaatcctgtctctcttattcttctttttccttttctcttggaacttggaagggggaatggcttgattggatagatatgacatcttgattttgttaggtttttatcactcttttttttttttttttgtttaacccatatttttactgtatataagtgatttttttttttttttacataaaatatgtcttactcaaatttgagttagaattttgtgttccttttttttctacttgtaaggattttcgtgagatatatggttcatttgatgtttagtttgagtttgttgacttgatgcaacagtcacagttgggttggttggtaccaaaggtgaggca

SEQ ID NO: 17453 - DNA, 123 bp, Glycine max
  Intron number 1 from transcript Glyma09g07670.1 (locus Gly ma09g07670) derived from phytozome v7.0 (chr-ID Gm09; pos 6596106 to 6596228 reverse strand)
aagtccaagttcggtttctttctcctcctctctgtttatttttactgcaatttaatctctctctttgttctcttcttttaacttttctttctttctttaatttgattttgcgtgttgttagct

SEQ ID NO: 17454 - DNA, 738 bp, Glycine max
  Intron number 1 from transcript Glyma12g36500.1 (locus Gly ma12g36500) derived from phytozome v7.0 (chr-ID Gm12; pos 39548841 to 39549578 reverse strand)
ctcggaaggccgaggccggcgttctccgccgcagagtacgctccgtgtagaatttctaatttaatcatcagaatctgaaatttgagattgttataagtgcttctagcttagttctctttctaattatcgtgtcgatctcgttactttttcgtgcatttttgtcctcttagtttcgtttcttttccagatcaatcgtgatagatttgcattgttcccggtgataaaagtcttttttattttcaatttttcttccaatgttatgacctttggcagtgtattgttacattttgacttttggaatataggcttgttgactctcgcgttcttagttcttacaatgctcatagctaaataccgttcttaactgtgctcatagttttgattatttagctctttttcatcaatcgttacaaaattatttaattatgttgagtgctggatttattattattattatttgaacagtgttcagatacagtccatagtgttgttaatcagaattcgagttttacttgggtagtctatgttgacctttaatgccaaccacatttgatacacggattatcaaggtgaaacttcaattctgattggagaacagtaccaagcacataaggaattgtatctaagttttgtccttgttattactattatttgtgatttgtgatagtgctgtctcctttggctgtgttgttgatactttttgacttatggacctgtgattgtgttgaaggactggag

SEQ ID NO: 17455 - DNA, 1019 bp, Glycine max
  Intron number 1 from transcript Glyma09g25420.1 (locus Gly ma09g25420) derived from phytozome v7.0 (chr-ID Gm09; pos 31657139 to 31658157 reverse strand)
ccttgcatttctcgtcacaatacaaggaactcttggtaagtttctaaaaccaataaacttcttaattaaatattcatttacgggttccagcatattctatccatgcttgatttaattaatatatatatttctgatagaaagctgtaagaaaagagtgactattttttcaatatcgtgaatcaaacacgaatttgattttcatcccaacattgtacattcagccgtgcaaaaaaaacaaaaacaaaaagattgaatattcaaatgagatccttgtatacatagaaaaagagtgtcagtcattgaaaagccagaatataactcatatatatttttcgaagggggcgtaaatatatatatatatatatatatatatatatatatatatatatatatatatatatatatatatatatatatatatataattgttgaaaaggggattgcatgcagttttagtgttgttttctcatcagtagtagattggagatatccctcaataaactatcttgatatttaatgcaaatacttatattgtaaagattaccaacattaaattctagttttgactaaaagaattatcaatatatctaaaatcccttaaaaaaatcaatatatctaaaacattgtacctaagtttatcgtcaaaaaatgattaactacgaagacatttaattaaaatcgtgggtaaattttacatcgtacctgttacacatttctttcatttaaggaagttaaattgtagatccatatttcaaattactatatgatacgggaattttctgcaccaatctaacacgtacaaactcacgtgtttacatattatttgattgaaatgttaaattttaaaaaataaaaaagtaaatcttgacggaattcaaaagttttgcagtattatatagcttttgatatacatatatacaaattcttaacaacaagcatttccctttcaaaacatggttttagcatctctaatctctaatgcatacattgtaatgatgaaattcaggagagacattaga

SEQ ID NO: 17456 - DNA, 407 bp, Glycine max
  Intron number 1 from transcript Glyma11g08240.1 (locus Gly ma11g08240) derived from phytozome v7.0 (chr-ID Gm11; pos 5837835 to 5838241)
tataccatcactttctgcccccagccatccactaggtaatttcatttagtaattatttgtcgctttttcaatagctgacgtagtttttctttttttgaaaatgtttattaataattaattaactaatctgcggaaactcttagctgttaaaacgtgttttacaacagaggaatatgattgttttgaggaaaatgaataagttggggcgaatgtcaattaggggaccagtttttgggtgcggtatcaccatagacatggttgtcacgttttttgtttttcaatgtcgtgtttaaattttattgcaccgtccagattccgcatatagtgtcttcttatgttgtcaatgtttttaatttgggtttgaatttgattgcagttcgattaaatcggggaacgggaaataccca

SEQ ID NO: 17457 - DNA, 676 bp, Glycine max
  Intron number 2 from transcript Glyma05g32700.1 (locus Gly ma05g32700) derived from phytozome v7.0 (chr-ID Gm05; pos 37554751 to 37555426)
catatatagctgacagtttcagttcattggatcaggtttttgctgctacttttgctcattgatttagggaaaatagtcattattaatcttagcattacaaggaaaacttcctcaatcagacctgtagaaaaatttaagtttgtttgattatatgatttcatgacactacagtttgtgtaagatatttgttgattagttcaacgccactgtgtattaggaattttcttgaaggttttttaagtcaagtctagattatctatttatggccatactaatagtcattgaatatgttacacatcttacaaatataaatttatttatacctgctttagtttcagaagaaatatgaactttgaaggaacacggttctatatgaaaaagttggcatggcctgcgttcacacttataaaagctaattgtattgcttttaggtcaatttgataagaaaaaaactaattaactaactattggtgaactcagtggttgagctaggggttgaaaacaattatattaattttgaaaaatgtttatggggaccaacatttctcatagcagaaacaatgtacctccccttactgaactggattcacggttctgtgtggattcttaaaaatacttagctttagcacattatatttcaggttgtttctgctttaagagaagctggtctggaatc

SEQ ID NO: 17458 - DNA, 803 bp, Glycine max
  Intron number 1 from transcript Glyma11g06010.1 (locus Gly ma11g06010) derived from phytozome v7.0 (chr-ID Gm11; pos 4246290 to 4247092)
acttctccagctttgttcgacagctcaacacctatgtatgctttatttgttgccctttccttattcttcttctctcttacttgcatgatttggttgatttccatcgtttcatgttatttattttgttaagataacacatacattttaaaaatattatatacaaatgattttaacatggagttattctttccctaaatattatattttttttccagcaggtgttgtttttgtctttttctgtataattaggcaaatactaaatagaagtgccaaggaggaaaactttgtctgttagggataataaactgataaaaagatagatttgtttaatataataattatatttttcaagcaaacatgattattatttattatagaaactttatattctttttaaaacataattaccgtttatctattttatattaaactatactcataaaaaaatcatattaaactatgctatcttcataagaaaggaagaaaagaaacataagaaattgcgttctcaatcaaactttttaatttattcacgctatttttctaagacaacacttcttccaaagtcttagaatatgcctggctctccatttttttttttctttctaactaaattctaaaaattgattatctccttttaatcatattttattttttcacactaattttccgacagttcaattttttcgggcgaaaagtgaaagaaaaagaaaattcaatcatcaaattacgattattatcaataatagtaaaatcggtgtttttgtgaacatgcagggatttcgaaaaattgtgccagacaa

SEQ ID NO: 17459 - DNA, 878 bp, Glycine max
  Intron number 3 from transcript Glyma05g33820.1 (locus Gly ma05g33820) derived from phytozome v7.0 (chr-ID Gm05; pos 38358478 to 38359355)
accaggccaatcttattcgatatttccccacacaggttagttgttcacttcactgacatcttgattgatgttaaagacctgtgtccccaaccccaccatttattttaactttctttcaagtttcacacctgagttaaatggactatttgcctgttataactttgtagggttttgtttttgctttttaatgcaacttcgacaaaatgaaagcaagggaagagataaagaaaacaaaagagtgagcatgacagttatcagggctgctgagtgatatgtagtaacttagccattaaatatatcagggtaattatttcttgtgctgctcactgaaaatgcaaaccaattaatattttgttcatggattttgtgttctctgtcatctatggaccttagatgttcaaattaaagggaatatctgttaacttatttccctttcatcttcgtttgtttatgtaacctcaattaaattgaaatatatgttatctcagagccttgatttatgtcaatttcttatccaaaatcatttcatggcatgatgcaacatttccctgtgcatgcaatctcattcattgacatatgatcacgtccagtttgttcttggttacattaccctttgagcttgctttgtgcttttcctgtcaaattgttaatgcgtgtcaaatattattagctgggtcttggcacttacataaaataactgcccatgcatattggagagaatccatctgtttgtttttactgctttctgttcccatcaattcctggaatcatgtgtctccaaaatagttttctttttgtcttttattaaaataatgtttgagcaaacagttaatcggtctataggctttcaattttgcattcaaaggttacttcaaaag

SEQ ID NO: 17460 - DNA, 604 bp, Glycine max
  Intron number 1 from transcript Glyma12g29640.1 (locus Gly ma12g29640) derived from phytozome v7.0 (chr-ID Gm12; pos 33086594 to 33087197 reverse strand)
ctgttaaggagacttgcaaacttgatcgctcagaggtatccatgggagtatcatttttgtttttgctataaagttgctttctatttatagtgaaacgtcaagactaggttggcttgttttgatgtgagtggtcttgagtttattgttggtgaaaactgaattcttagtgttttgatcaccttattgtatccagaccttcacgaatttttgtgaagttttttaattttatttaatataattacaaaagaactcttgttaatttttaatgactgctacatgataaagggaagttgagtttatttttagacactatttttaccttttttcctgacatgacattgaatcagggatgaactttgaaatgttttggtgcaattttgttctccctagttgttgcttttgttctactttccttcacttgtaagttgtaaccataaatatagagattacagtctacatgtttttggtcttgaatttcttgtcttgtcagtgtttttaaacctatctgaatggtgtgatctgtattcaggcaaagtttgtctgctgtaacgaatatctttttttattatcattgcctttatttaaatattttcatcccttcagg

SEQ ID NO: 17461 - DNA, 581 bp, Glycine max
  Intron number 2 from transcript Glyma14g01590.1 (locus Gly ma14g01590) derived from phytozome v7.0 (chr-ID Gm14; pos 923363 to 923943 reverse strand)
aggtgagaaggagacgtgaccgcaagaaggaggtaagattctcccgtccctccttacttgctcttgaaagttgagttgctgaatcggattaatttggtacttcttctgccattgaggggatcaattgtagtggacgaatcttttatctgtttgtccactatattgaagtctatttattattttgattgttgtgagctgctaggcaagctttcattgtgtcatgagttgccattgtgtcatcttatgagcactgtgattggcaactccatgttgagattctataagaatccttgctttttatgaatgtttgaacagttgtggttgttataggtttctacttcctgcctatgatgaactgtgggatcatgtgatattattggctgagagtaaaagacttgggtcttgttttataattgcatgtatatggttttacttttttctgtgtgttctgtagttgtatatttgcagttataagtaaatgtgcttgcattgtcccatccttttctccttaatatttttttattagcctgagaaatttcttttatttttattgttgcagggattgagcagcagagcttctg

SEQ ID NO: 17462 - DNA, 505 bp, Glycine max
  Intron number 2 from transcript Glyma06g21570.1 (locus Gly ma06g21570) derived from phytozome v7.0 (chr-ID Gm06; pos 18133446 to 18133950 reverse strand)
tttctttctcctgtgtaagctctaaggtattatttgggcaacatctttctcctgttcctgctcaacataaattaacaaatgtcaacataaacttataaaagttgatgacccatcagtattattttttaatctaaattacagttttacctggataatttgggtaatataggttcgtaataaatgtcaacacaccgattagattagtgaagtaaaactctaattctgatcacagaataatacttttagtgtatttaaattttgtccatattccaatatattttctatttttttccaaattaaaaaattgttttgtgctattatcatgtttcttatcttttttttttgtatactcatttaccttgcttttactataagaaaaatagactaattcaaattattagtttctttccttcttcatatgagctaatacagtgatactgtagacttttttgtatgtgtgtatgttttttcttcttcttttaggttgctttagcattgattattc

SEQ ID NO: 17463 - DNA, 340 bp, Glycine max
  Intron number 1 from transcript Glyma07g37680.1 (locus Gly ma07g37680) derived from phytozome v7.0 (chr-ID Gm07; pos 42666786 to 42667125 reverse strand)
ttgatcctcgaactgttcaggttcattttcaccttatgcttctttccttagctattgcgataataaaaaataattttgagctatgatactatgctgtgcgttttatcttattattcggcggcagggttaattttgaaaatttgtttttcttgtcgttttattgttatttttcgtccaattctaatgctgcgttttgctttttttttttttttattcacttaatggcgagaaattcactgaattagacgacaatcttcattaggatctcttaattattattgttaatttgtggtttaacttaacagttattcaaggtgagtcctgttctatcggtttgctt

SEQ ID NO: 17464 - DNA, 899 bp, Glycine max
  Intron number 3 from transcript Glyma13g44490.1 (locus Gly ma13g44490) derived from phytozome v7.0 (chr-ID Gm13; pos 43906523 to 43907421)
aggtatcttactattataagatgattctattacacatgagctataaaatatatatgaattacaacagatcaatgaaggttgatgaaggctttgaagcatccacttgtatatttccatgaaagagaactcgtgtgaaggatttgagcggagtttcttgttgtacaatcattccaaatgatttgatattgattaaatgatggccagttatgatggaaattgaaaaatatctctaatttgactaaaagccaaagccggggtatctttaagatctttaattaaaacaggtaaaattgtgttaggagttaggtgagatggaagaggaagttagttaagacagttaggatattagttagttagtcaaggagtgaggtaaaaaatagaggaaggggattcattcatttgtgcttttgctctttgtgaaaggaggcatcctctatgaagaggaaatatttagacgagagatctctctcctttgttctgtaattcaataaaatctgtttcttttacccatttctattctagggtcgtaacacattgtctacaaggaaggatgtatagtgtgttttgtttaaactttaaattcatttttagcataattgattaaaaaatcatgtgttaaactgaagcaacaaatactagcttgagcttttgcatggtgtcaccatgattttgtggactagaactagaatctattgtcacttgttatccaaactcactaggaatgtactatatgcagatgcagatttcacctttttctttccctttaaagggacttttagttttcttctggagctgtttctttaacaaatttctgtattatctctggatctatgactgtgtgatcaataataattggtataacagatagatcgcatagctcattttgcatttaaggttgc

SEQ ID NO: 17465 - DNA, 925 bp, Glycine max
  Intron number 3 from transcript Glyma07g00570.2 (locus Gly ma07g00570) derived from phytozome v7.0 (chr-ID Gm07; pos 273034 to 273958 reverse strand)
tccagtccaattgctccctcaacgataaggttcttttcattttcctctttatattacatacatactcaattatccacgttgtttgattttcttcctttcaaaccccagccttttctattgcattcgtgcctttttcaactgtttagacttaagacatatgaagtttatccttgcttgcttcttttttctttccttttaattttctcttgataattgcatctaatttgcactcctaaaagccagcaagtcaatagaggagaaactctattttagatttgatgtgtagtgtctcacaccctggcaacatttgatatcctttgtaaatcctgttattcataaaagtaacagtttgcgtttgagataattttttatttataataattgactcattttactgactgaaaagggaaaatttgtagtttctttcctaccttcactatgctctatatggttattatatacatgccttcttcaacatttatataagacgcatgtagtgtgaaatagctttgatgtgctcatcatatgtcaacatgcagtgataaccacttagccataattttatttcaattagggtatgtttgggtaaacttctccacaagcacttctaggagaagaaaatatgaagaaaaaatgaaataagcttctccataagctaataagttaaaaattaagtttttgaagaagctaatatgagagatcttttgcaaattaacttatgcataagctactttagctttttggagaagcttatttcatatttttttttcttattttcttctcctataaatacttgtggagaaatttatccaaaaacgggactttgtcattttgtagtggtgaatcctgttattggatacgtgattaagcaatgttactttgttcttcaggaaattaagcaattgtgcacatatttggtggactt

SEQ ID NO: 17466 - DNA, 918 bp, Glycine max
  Intron number 1 from transcript Glyma09g41910.1 (locus Gly ma09g41910) derived from phytozome v7.0 (chr-ID Gm09; pos 46590787 to 46591704)
ccttggccggtgtcgctatcaagtacggtgttgaggtactttcatttttttttaaaaaaaatcatttttttaatttttattattagttattttatttgtataattttttattttttgtatcagcttgattttgattgttttgatgctactattagaatttgtgttgtggatggtttatgagtgtgtgtgcatgcatgtttgtttacccctctttaggaatttgatgatgaaagagtggtttgttagtcaaattcatgcaagaggcaatttggtcatgaaagggtagtgtgagtcaaattcatgcaagagataatttgatgatgaaagggtagtatatatggttcaaattcatgcaacttttttgtggcacatggtgtgggcgcaacctatgtctgattctgatgtgatacaagtacaacaaaacttagatacagtttttttaggtgtttctggtattgttttccaatcagaattgaagttttattggtaatgtatgctgacctttgattccaacctttgttgtgcggattagctggttggaacttcgattcagtttgaaaatagtaacgtatgtacctaagagactgaatctaagatttgtcggaagagatattaatagtggtgaaaactcaagttattttctgttttgaaatggttttgaaatttttcgttgcattgtctttatttccttgtcgcgttttttgcttttgtcattttcgagtgtttgctgaaccgcctaccactttatgttaatatcgttgtcggttttctctctccaacaccacttttgatatgagcattgtgctgaattcttgtttcttaagttttcttctttttttctatgtgatttgtgtaatggagtgtaatttcttcagctctttttgatttggaaaattgtaggtggcagacataagaaag

SEQ ID NO: 17467 - DNA, 857 bp, Glycine max
  Intron number 2 from transcript Glyma13g35170.2 (locus Gly ma13g35170) derived from phytozome v7.0 (chr-ID Gm13; pos 36657195 to 36658051 reverse strand)
ggtttcagatcactgaagcactgaaggcaaagcgggtgagttgagaataattcatcgtggttgctcataaaaaatttagtcgcttttagtgtatttcaaaatgagaggataattgtctcaaaggcgcgaaagcaaggccccagaagaagccagcgccttatgcgtgtcgtattcgtaaccgttaactaccttaaactcaagctgtctaactgcctgtttgtttttgttttaaaattccccaaccgcaaacatgtgtcagatagaaggaggattttttcccttcctacaaaccagtattgggaagtgaaattttcccttgataattgtgtgaacttccatgtgcgtttgttagaatgtaaataaaaaacctctaatttgctagcatgatgctattgttttttggttgatttgagaactatggtgattctattatgctaatggagataaaatggtcagaatattaagaaacaaaaccaattgtcaatattttttactcttagctggaagcaacttagtgttttacaaagttaaacatttaatatttttttttccataaatgttatgtttgagttgttactttatatggacaattaatgcaaaaaaatcaaataatttattttctattgctgacatgtttctttagcgaggcatgtatgcgttttgatggagtctaggacctaaagggtgcattttttcctttcacttaactatggactgtcctttcaatcaaagttttgtatttgcagagtgacatgatatgattattccttctcaatgaacatctaacataattacatatcttgtctttattgttcgctgcagtcagaacgagccgagttgatttctcaggtcaagtc

SEQ ID NO: 17468 - DNA, 899 bp, Glycine max
  Intron number 4 from transcript Glyma10g44070.1 (locus Gly ma10g44070) derived from phytozome v7.0 (chr-ID Gm10; pos 50563479 to 50564377)
tgcttgaaggattcttgaagctcgaggtttttcaattagttgctttcatgatattgttttttcatctgttctgtgctttcattctctgccgatctttttagataatgatttttgtactaaagtgtgcttaggaggggttttgtttagcatcccgaagtataggaatcaaggccttgtttgattgaacatttgccaggcacttttatgggaaatttttagttctgttcaagctagtaagcagttcccatactttatgacacagcttgtgaactagtctctttgcacttatgttctattttgcatgcagtgcttcagttgggttagctctaggccttgttgcaataggacctatgcaaaatgtttttgtagggtcttgaggtaggattcatttttattgtaagtagaaatgatgtagtgaaatttgagacttgagacttcatttttggagatttggaaaggaaactgttgattgtagttaagttgatgagataatgatatataggcagcctggattgaatgacctacatgctataacctgatttttggggtgattcataaacccttctttgattgagttgtgttgtgcatgtgcatgtgcacatatatgactacaaggataaattaatcttagaaagaaaaatcaagaagtcagatgtttgcttaaagtggtgtaggtagttggctactttctgttgatgatagtatactggggaaatctacatttgcattgtgcagtgctaaatattaaatgatatcaaacccttggtagaccatttcttgtgtaaagcatagttaatgcttattagaactgatgcaaatgtgtactgacttctgattaatcgtgtggtgaatattcttctgtagaatttatcccaagcaagagctagtggtaggagatt

SEQ ID NO: 17469 - DNA, 454 bp, Glycine max
  Intron number 2 from transcript Glyma12g09520.1 (locus Gly ma12g09520) derived from phytozome v7.0 (chr-ID Gm12; pos 7311981 to 7312434)
tgagtttgtttgccctctaaaagcttcccttgaaggtatatgatcctggcttgttaattactttgttctttgctattgtgctaactaaacaagcacgatcagttagtgtagtgagtaatatttagttcaaagctataaagaggagctgtaggatctgttattttattcctattgggtacatatgtatagtaggagactaggacaagatatactattttgaagcacccaagacactactttgtaacatttgaattagtaatatgtctaataagagttatgtaatatattttattcatgatggaaaaagaaaatatgtttttgttttgatttttctaacgtttgcacttagcatggcaggcagtttattttggaagaatttattcactgtatctgcatagtttctagcacaccttgacacattttctacattgcataacagagtttaggaagaaga

SEQ ID NO: 17470 - DNA, 685 bp, Glycine max
  Intron number 2 from transcript Glyma09g35850.1 (locus Gly ma09g35850) derived from phytozome v7.0 (chr-ID Gm09; pos 41736697 to 41737381)
acctgcgtcacgagaaagctctaattgttaaattggtaaatcaagcgctgcaacattttctttttaaatgaatagactgaatctgaatgaaagaccgaagaaatgtgaacttattacgtgtagaattaggatattgaatccgtaccgcggtgaaatccttttgcaattgtatttagcttaggtgttttagaatttttggtataaggttattcaattaattgatgggtggattcttagtgaaatttctgacatctcttaaagttacattcagtttattttgtgaaaaatagaagctcgtagcatatagtgcaatcaggagaacattataaattgtaaggatgaaaattacctgaaagttagtttttagcaactggatagcagatggttaatatatatacacttgcattttgcttgtatgtgtaatcaattgtacttatgctacaaaccggatgctttgatctgataaataattaagactatgcaaacaatttgaaggtaaaaattaaaaccatgctctcattttattatcatagaggatttcaattatcatagaggatttcatagattctgctgtagttaaagtttcttttgtttatttccaattaatgataatgaatgaaaggaatagagcttcttcgtctaacttgttgaagtaaccacgtttaggttgacattgttgacttca

SEQ ID NO: 17471 - DNA, 976 bp, Glycine max
  Intron number 1 from transcript Glyma05g36670.1 (locus Gly ma05g36670) derived from phytozome v7.0 (chr-ID Gm05; pos 40491365 to 40492340)
aacgacttgcactcacccagaagtacgaggaggtcattttctctaacacttttaactttcttttttcatacataacataagataatcaaattgaactttatatcccatagctaggtctgcaatttgttttttgttccgtgattctgtatctctttataattgggaaactactcttgtcttcagtatgattggttgtgctgaatgttttatcttttcatttgagagggatcatttttcagtgactcagtccttgaattcgaccattgtaaatgcttttttatggatatatttatgatcagatgattgacgtgatgcggttttcctacgattcaatacgttttggctgcctatccatttgtatcataacgagactatgtaccttacaatacacaagtgaacatcatggatacggatcacacgatttaactaagcgtttttttttcttttttaactaatctcgtaagaatagtgctagcaatgcactctttaacacactctttcttattgaataaaataattgaaaactacaaaatcataaaaaagaatcattaaataagatgtgagattcattgaattttatgatttttcaataaatctcaacaaataaaagagagtgcgtcagagagtgtgatcctaacatttctcatatcgtaaaagaaattgaaaactcatataagcttacattttgttttatggttaagtgattttatctatttctagtttaaaattatttttcattgtgtctaaatcttacatgattggaatctcaatttgatgacgttgctttgatttgatgaagttgaagcctaatggattatgtgtgttattagaggggacagtctcgttgcaatttaagtaataatagtgagcttggacttaaactgcaatgtgtgctgatgaatttggtgtgctattattgaataatgggagattcgtttggttttacttcttgcaggtgcttgttgctggaggtggc

SEQ ID NO: 17472 - DNA, 541 bp, Glycine max
  Intron number 1 from transcript Glyma06g20240.1 (locus Gly ma06g20240) derived from phytozome v7.0 (chr-ID Gm06; pos 16664569 to 16665109 reverse strand)
gcccctaagaagaaggtaccattccatattcaatctctaaccaatattttatttcgtaaatgtccggtcccgaaaattttacatttcagatctctactttgtggcgtcaaaacattgtgttagaaatcttaaattgagcagtaatatgatcaaaattgtgtctttatatgaaatagtaaattgaacactgatatgatcaaaatgatatatatatatatatatatatatatatatatatatatatatatatatttgttactacctttgtcctagtgggagaattttggagaatgttatctctccttcttttcttttttcatccttcttcaatccctgaatcaaagtttttggttaatgaaagggattcgaacctataatatcttcctcttgccttgtttcttcaaccttcaaccaccaagtagattttagaacttgttgcgtttatatatctgagaccaagtttcatgttgtggatttgattatagctttgtatggtactgtggtaggtgaacaagtacaacgaaaactggaaaaaggagtg

SEQ ID NO: 17473 - DNA, 659 bp, Glycine max
  Intron number 2 from transcript Glyma08g06310.2 (locus Gly ma08g06310) derived from phytozome v7.0 (chr-ID Gm08; pos 4473842 to 4474500)
agaagaaaccgaggagcaagttgaatctattgctggtacattttcttaactctttggctctgtcaattggaatattcctctaagttgcattgtttttttttttcaattattgataagaatgtaaatgaatttagcttttctcataagcagctaagattagtttatacatgagtcaaaatcagctttcttggagaagctaaatgagagagtttctacaaattaggttatacataagcttaatgagagaactaggacctaagccatggattcgtgttgtgcttaagatttactgggacataagtaacttctagacttgtagtgtgtttggataacttacaagaatcaattttatcccacacaatcatggcgatactatgaatgtaaaagtagaactaactatttgttgcagtaccttcacgccttcatcttgagaaattcaaattatttgattatcagcatgaagctaatccaaacacgctattgaaaggctttagtaaaacctgtccgaagtttgtttactttatgttttgaatccgaggctatttagtggaattttaaaatgtgatgtgtgattgatttcctttgtgcatttgggttgtgactcacatttggtgattgaatttaccttctattgattaaagaaacaaagacatacgaga

SEQ ID NO: 17474 - DNA, 775 bp, Glycine max
  Intron number 1 from transcript Glyma07g39830.1 (locus Gly ma07g39830) derived from phytozome v7.0 (chr-ID Gm07; pos 44193975 to 44194749)
ccacctccaaagacgctctcgtcaagctcttgaaggttttgcattttaattccccaattctcctcatctttttagccttttccaattgaagattttgttttctctttttttttgtcttgttgtttacttcctgtttggttgctgctgagtcgctaacgggaacaaaaggaaaatagagtcgcaatttctcttttcagctgatttgtgttcttaggaaagtatatttttattttatagctcaatgccttggtggcctttgcttccgccgtgtttattgcttcttatgtttgttctttgattgaaaagaacaatcagtagatttactatgtttgaggtgagagagatttttgttgatttggatgagaatctatttagttagggcaacttttgaatggttgcggaacttgtgtataggagaatctgtcaaactggacgtttaattatcttgtgcggtactatattatattaataagttgtctatattttggataatgataatactgataaaactaacttgccatttacacttcttctttcccatccaacattcatgtatgtgatttagaatggaatggaaggaaagaatttgaaatgggaaggaagaagtgtaaatgagggattgcaacattcatgtttatatgcattggatattgaaggggttgtttaccggagttggattactaggtttcacatggatctagtcttaggcttttaggttggtaattgctaatccacctcacccttcaatattttttcatatgcagcaagcaaccac

SEQ ID NO: 17475 - DNA, 479 bp, Glycine max
  Intron number 1 from transcript Glyma09g28430.1 (locus Gly ma09g28430) derived from phytozome v7.0 (chr-ID Gm09; pos 35403290 to 35403768)
aaaaaggttgtttggtgttatagagtaacctttgactagtccttctcttcagttctataaaatattgcaatgtgataatgttggaattggccaggtgcatagaaattagttaacatgaattgccagcattgttctgtgttacacttcttttttcttttgagaattgctagcattgttctcttgtggatactatttataaattataactgaagttttataaagcatctcctacttcatttgctttattcttgctgcatatttctcttaatttggtctttttaagttaagatgatggcttttttaatcaaacaatttattttggttttgatgggtttccttatcaattttacttcttatagaatatatgttgttgtagtctcttgcttagccttttgaattgcatttggtctgttgattgagttcctttctttttctctttaacagaatcctgagcagactcattttggatctgtattcaa

SEQ ID NO: 17476 - DNA, 709 bp, Glycine max
  Intron number 2 from transcript Glyma08g43110.1 (locus Gly ma08g43110) derived from phytozome v7.0 (chr-ID Gm08; pos 42985162 to 42985870)
gaaagattaggtcaattggaggtcaaaaggtattgttacttgctgtaacatttggaattggaaatttggaatgtttttcagcttcaccattaaaaaattatttgctttgatcaaccagataccaatttattgttgaattaggatggttttttgtataagaacttgtagaagggattgagacagcttgtaaaaatagcttttgatgtgtctccttgctgttttcttcaataagctctctaggacaacttataaaatagtttaatcctattttctcttcgattatagaaactaatagataagtgctttaatgataggcacttaggctctctttggataaaccttcccgtgagtatttatagaagaagaaaagtaaataagcaaaataaatcaaactcctttaattattaaaatcaacttatgcatttatgtatttagaaaagtttgacaagaaagtttctataaaagttgaagtgcataaagttgattctaacttgtagaagtctaactcaatttacctacttattttcttttcctatgagtgcttatggagcttcttcaataagcacttaagttatttacccaaattaacctagtaccaatgtcttttcttcattttttgagattttaaattgaattctattgattcatttctaatgatacttcttttaacaaatgacttccttgaaccaggtgatatctgggaggcgcc

SEQ ID NO: 17477 - DNA, 789 bp, Glycine max
  Intron number 1 from transcript Glyma13g11570.2 (locus Gly ma13g11570) derived from phytozome v7.0 (chr-ID Gm13; pos 14248075 to 14248863 reverse strand)
aaacacaacagtaatcctcaaattctctctctgtaagttccaaaacaacattctttttcttttattttcttcagtgtgtttaatgtttttctcctgtctcaacatccaacatgacgattccatgaaatggtagattctaaattagcatcatgctctgtggatatgtctttttttatgattcttttttattttcattttaccttgatcagaagtattatggaccattttcttatgttcataaagttttgtttttggcagttcttgttcatgaaatccaatgcttctaatttaatccagattgctcaatttgcaaaatggaccctttggcttcaaatttaaacagtcttctttgatcctgttttcgatgttctttctattagttaatttgattatggggacgcagactttctttcaatttttctttctttgtagctgtttttctcccctagtaaaatatgactactttttagtctgaaccatcaaattcaatggtcccttttgtgtttaataagattgtaatcctatttccttatccaaacagaaatttaaactactaaatgaagaatctaaagaaaaccagttgtttagtctggattgaagcctaccctatttgtacaatcaattcccttgtcttgtttcaattttggtaagagtaccctttgatgtttctgcaggtaaataagagtttccattgatgaagttgacatagcaatttgttcattctgctggtttcagattcaaagagaaaaaatcatcatccacttgcaaccaacacaatttggtatcaaa

SEQ ID NO: 17478 - DNA, 772 bp, Glycine max
  Intron number 1 from transcript Glyma07g33840.1 (locus Gly ma07g33840) derived from phytozome v7.0 (chr-ID Gm07; pos 38778677 to 38779448)
cgaggttacaccctctcttttttccgccctattttttcgacggtgttcgacgtaaattaatgtgtttttgagtttttgttggatttgtgatcttaatcttgtgtaaatggatgtgttaatagttatttttatcataacggggcgtgtgtcttgtgctgcttttgtttgattaatgaagcagggtcttaccggaacttgtgctaggataggataggataggataagttgtctagtgatgaagataaagtttcagaaatttcctaattttgttgctgagaatgatggaaagtggaaacaaaagcaggtgctgtctcttcgtgttaaaatattgaacggctaaggatggaaatgtgttattcccgtttgtgtgtaaatctttgtagttgaaaactaagagtgagttgctgaggcacagcaattttctgaagcagctcaatattgttaggaagataataaaaatttgaacttcacagcataatcaaaaagagaagaaaatgaatcactcttggtcttgcaagagctaaatggaaacgtgtaattatgcgttagacttctaagcatactgatacagtaggtatgttttaaaagttatgcatatcctatgttcaatagtaggttttgctttgcacctacacctaatatgtcaaaggtcagataaaccctcccagatgtactgctgcctcgtttttttgtatttgatgtcttcctttttttttgttagagccttttattttttctaaatgtgcttcatatgtgctgcaggtctgcaagc

SEQ ID NO: 17479 - DNA, 246 bp, Glycine max
  Intron number 1 from transcript Glyma06g29540.1 (locus Gly ma06g29540) derived from phytozome v7.0 (chr-ID Gm06; pos 27978121 to 27978366 reverse strand)
tcctatttgttccttcaaatcctcgtccacaccaggtagctaacttttttgttcacacctctttgattttgcagcacttttttttttttttttattaatgaagaaaaggaaagagcaaaattacaagcgtaaaaaactgtgccaaatgcatcagcatcggggcaacgttcgattttgcagcacttaactcgatgtgatttttcttttataggggcacttacagttaccggtaattcagttgtttcg

SEQ ID NO: 17480 - DNA, 843 bp, Glycine max
  Intron number 2 from transcript Glyma12g03360.2 (locus Gly ma12g03360) derived from phytozome v7.0 (chr-ID Gm12; pos 2219754 to 2220596 reverse strand)
aacagtacagattggaggaggaccttgccaggtaagttgtttgttttgactaggttaggacatttttagcttttctttaaccctttcattatggcttctatgtgttaaattggtgcatggtaactcattttcaatttactttctcatgatgataataatttcggatcttagatggacataattttttattttttgtttgtgtgatgaatcaattgccagttggcccttttgtatccgtgaactaatcatgccgtctgtctgtaagccattttatgaaacataaagcaatcatgctgtccgtctttgtatctgtgaactacatgctttactttttcttataatggtcttctcaattttcgaatgttgttttggtttgtcatttcaaatcctaattaaactgctgctaagtattcttttctttgctaacttcttacactggttggacgaaaatggaaatggaggggaggggaaattaggggaccccatatccctccctcccatttttgcctctactgtattgggggatttggaagggagggaaaatactaaaagtttgtgaattgtgttgactatattattctaaatttgaatacttgagcttaatggttttatttgttcattttaagggtataatagtaaattaattgtttttccctcccctccccctcctaactaaacaagggattccttcctcccaccttccattaaaatccatctcccctccctttaacattgaactaatcagaccatttatgttatagtgctgatatttctttctctttatatagtttaaaaatatttcatgacccttgtttttgtgattcctctgttttgggactagat

SEQ ID NO: 17481 - DNA, 700 bp, Glycine max
  Intron number 1 from transcript Glyma08g04880.2 (locus Gly ma08g04880) derived from phytozome v7.0 (chr-ID Gm08; pos 3470878 to 3471577)
gttccactacttttcgttctgctacttttggtaagttcatcgttaactaactagtgtattcacatcatgcatgtctacctagctaaaatctacatatatataaacaaaaccctaatcaaattgttctatacttgcttattaattatcaatcaacttctaaaattaaacgatggcatgtgaatgatttttaatattaaaaaattatctactcatcattctttagttttttctattttgatcagaagatataaaaaaaattcttttcactcttctttaaattctttaatatatcacttggtcccattgagacagggacatgcactagtacttatttctgtacaagttagtgttacggacgatcataatcaaaacttcttgtcattttcctatgatatgaacagaataatctatacttttcatattttcaaacagtaaaaagtaactaacacgctggaatcaacaataataaaccgaaagcatatatataatttctttatttcaaaagtacgtgatatattacacgaaagtggtggtcgagatattttcacttttcacttgacacacttggtgaaaatatctcaccaagtgatagataaagacaaataaaagagttttacttttgcatctatatataatatttttctagcaactcaagaattgtattaaaagttaaaaccgttgattattgttgtagcggttg

SEQ ID NO: 17482 - DNA, 977 bp, Glycine max
  Intron number 2 from transcript Glyma06g13420.1 (locus Gly ma06g13420) derived from phytozome v7.0 (chr-ID Gm06; pos 10565058 to 10566034 reverse strand)
atccatcattgagtaaattcttgcagctatgctgttaaaattttgatttgtcttcggctgagaaccatcataatccttttacttacccacgtttcttgtaattctattccatctagttccattacgggcattattctcccttgtttcaatttgtagatttagtaaattaatgacttaatatgcttgtaaggtttgctaatctttaatatacaatacaaaataaaccaatgacctaaaacttcaatttcaaattcactggattagtccttttagttgcacttaattactgatagttgattatgacaaatgataatctaatgaagttgtatttaaaaatatggctttgttgctcaatatcagaacttgcaattggagcatcgaagtattcaaatctgattcttctccatgtacacagtcaatgttaaaaatgcagtacttgcattttgccagcgatagtttctaaactctcttttatatcttccgctaaagataggtacacgcacccccctcttggatcaagagaacatttttaaatcataatgttgaatttgatgctcaagctgtggaaaacactaaaaccacaaattcatttttttttctgtactctttttatctaatatattttcggcaatgttattttgaaaacatgaaatgtcattgcaatgcattgaactttctcttcaaacattttgtttttcattccaaatgcaaagcatttagtttcattcagcacaagccaaggcgttaatgaccgaaaaagattacacaaaatacaggccagtaatatttactgttgcagtacatcatagacaaggggctttgtagacttcagctttatattttacatttctgtttgtagaaacctcctaagtcgtgatttgtcattctcatgagcaggatattaagtttcaaaactgacaaaataagtttttttttttctttcttcacagttactgttagtgaagtagaggccttgc

SEQ ID NO: 17483 - DNA, 971 bp, Glycine max
  Intron number 1 from transcript Glyma13g36140.2 (locus Gly ma13g36140) derived from phytozome v7.0 (chr-ID Gm13; pos 37474909 to 37475879)
actttggtgtctttagcaaagcttccacgaaacacgtaactaactggcttcagtttaattaagctttttttttctagtgtgtgaaatggcgagtacacgcttcatggctttccaagaacatgtttttgtttccttttttgtgtcaaccttctttgctgtctgtcagtgttttgatctgtcatcctatgtttcttcaaagtgtgatttgtgtatgaatgtggctgcttagctggatatatcttcttcatttttttctttctttttttgtatttttttttttaaattttgtgtatccttttttggttctaagaaaaaagcattgtgcgatgaatgaaaagaagagggaaaaaaaatggttctttgcatttggttacaccatgtgactcccatgcttaaataaatgtgttgagatttcatttgtgtgttggactatgttgcatcattctgatcttgctctcgcttttcctgttttctgggtccttgtaagattggataaatagaaaatttaataaagtttcgagatttatgcatttcagattggtatagaggagaggattaggattgtgttgcatttgctttggatattctggtgcctttctattttgggtatttgatgcatttcttgttctgcttgatttgtggttttggtgaattttagttttggatagacatgatgggtggtaactggtgaagtggttgatggtaagttgtgcttgattgattatttcaatgtactgatatcattgtccaatgtccagctttgatttttctacctgatattattttttatcttctgagtgttttatacttccgaagactttttcgatagtgacttagaaaattaagaggaaaagccttcaattggccggttcaagttcaatgttgtaaaccaagtaccacggaatgctctatatttgtctatacctggtggcacataatttgactatgttttgttgcatattgtggcaggt

SEQ ID NO: 17484 - DNA, 639 bp, Glycine max
  Intron number 2 from transcript Glyma13g36140.2 (locus Gly ma13g36140) derived from phytozome v7.0 (chr-ID Gm13; pos 37476220 to 37476858)
gtgtcagcatctggaataccagaatattcatacaagtatgtttgtcttatagtgaattaacttcatgtgctaccattcttcttgttctgatatgacccttctctatgttcttgcacatgtgctgagactatatgaataatgagtaataattagctgtatttttttttcttgtataaaatatgaaatggttggctctaaattaaacttaaatgcttcatagtttttgttctttgaagagaaactcactggagtaacggcgtgatttggttggagcatttaactattggatgatgaaagtttcttcatgaaactaaggaaaggaaattactaaaaggaaaaaaactaaggaaaggatgactttaaaccaccataacttcatgataccatgatactttataagataaatgtttgattatctctaggcatttgactcatcatgtctcatccttccatatgtttgaaattttgcaattttagtgactaatgcttatttctaaaagagaaatcaagtttacaatagtttgaaaacagaacatcttgtttcatgtcatttatctctttcttttttctttctttctgtttaatacttttttctgtgcttcagggatttgcaaaaggcaacatataattttacaacac

SEQ ID NO: 17485 - DNA, 605 bp, Glycine max
  Intron number 1 from transcript Glyma09g23760.1 (locus Gly ma09g23760) derived from phytozome v7.0 (chr-ID Gm09; pos 29443125 to 29443729 reverse strand)
ttttttgctccagagctggaagcaactgaaccccggtatggctatcagattcaaaatcttaactttcaatattttaaagtgtttttatattatttttttttaaaatttttcttcctttctttccttttctttttgggcttatatgtttaaacttttttctagcttgggtgttttgccgtgtttgttctgtaaaggttgtgtattcattaaagtaacaagctattataaataattgaatttccgagtgggtgcagcaaattcatatgttgtaaagtttatttttgatttggcagcaattctgaagtgttatttgtaacttgtaattaacactttatgcctttgatgatatgtgtgatatgctttgcgtcttgaaatggggtagcctcttttagtatttttgtaaccagaaaatggaaaaagactactatgttgatattggattaagatcatgttgtgtgttgtgtgttgcctgattgaaacggttcttttgtgaactgaacttgttttgattttcatggttttggttttgatgtaatgagtttgaccctttttaatggttgattgatttagtttgcttcgattgattaaagcctttcccattgctg

SEQ ID NO: 17486 - DNA, 970 bp, Glycine max
  Intron number 1 from transcript Glyma13g27210.1 (locus Gly ma13g27210) derived from phytozome v7.0 (chr-ID Gm13; pos 30378472 to 30379441 reverse strand)
acgaaggacactctgagatcacagtaacaagacaggttcactcgtctgttaatttcttagcttttgtttccaaattccaggtcttccattttaaggttatttttttagggattttgacttttgaattgaagagataatggaaggaaagaaaattttgacttttatttctagcagttatgtttctttttttttttttttttttagtgtacaatgggggcaatgcagtttgaacttacataggacctcaacaaactactataataccccactacttggcccaacttagtttgatagtttttgtagttttgtctctagatttcaagttcagttgtgtctggtgctttttaattctccatttgaaggttatttttaaaatatgtatgatcaattttgcagttttttgttgttcagatactgttttattgtttttgtttgataattagtgttataaatattttattatttgaaatgaaataaatcaggtttggtttttgattttatctttcagctttatttgcatctgatgcttcatgtttttggttttagggtactttaccactagtcatggactaagtttccatttttagtttttcttttttcaaggaagaattactactggcaatgttaaattttttttacaatgccttgaagtcatagattgttatccattaattagaacatactgacagtcctaacccattatggtcagcctagtggtctgtgtgtgaaggagttgagcagtatgcttgaggagtgtaaaagttacttggattgatttactgtctctacctttataaatttaaagtggttgtttttgttttaatcatgagttgagtgagtattacattttaaaataaaaattttgttattgatgattgattcactttgaaaggtctcattttgtttattatgttatgtattggggtacaatgcagattgtggtaggggggaggaacaagtatttgatcaa

SEQ ID NO: 17487 - DNA, 261 bp, Glycine max
  Intron number 1 from transcript Glyma08g45150.3 (locus Gly ma08g45150) derived from phytozome v7.0 (chr-ID Gm08; pos 44576473 to 44576733)
atccccaagagaaggttagttccaaaaaaacatcatttatcatttatcaacttttctcatagtaggaaaattcgaattcacgatccattcttttctatatttattgttaccctttagcattaagtcaacttatatttttgttagattttgagttatacaaattatgtttctattttaaataactttcgtgtgagcaagatctggttatttggactttaatttttatttcattgcattcttttattcagaaattggagtaca

SEQ ID NO: 17488 - DNA, 1012 bp, Glycine max
  Intron number 2 from transcript Glyma08g45150.3 (locus Gly ma08g45150) derived from phytozome v7.0 (chr-ID Gm08; pos 44576779 to 44577790)
aagatctcaacagcgtggacaaacaccaccatacggtaattcagtccaatcctacttgtgttcttctcaatatatttgatgtgattcgcaaatacatctctagattaatttatgttcttcttgttttagtgtatttgattacaaaatattgaaaccatgttactttatctaacaggtcacctagacttctgtttggcatttacaaatagatttggctcctttctccttatatattaacatgacaatacatgtcttaaatgaacaagattttttttttaagaaattaaatgaacaagatagaaaagcaaaactaatagacctttcaaataatagtgaacttataataattattattttgtgaccttttactcccgagaacatatttctatattagtaatattgatagcttctaaatcctttacaaaaaaaaacatagttgttacaacttacatatatgtaaatgaaaaatgtttttggtacaattaaagtaagataacctttgttgttctttttaatttgaaagaggtatttttgaaacgtgctgatacaaagaaagaggtagaggaaacggggaggatagtaaattgtaagggtttcttttaataacatattgttagtacgagtagtgtttgattaatcatcagtaaaatcggtgaatatttcgtatcataattataaaaaaaacttgtaagatttttaatcatgtgaaaaaggatcgagaaagattaataagaatactagaaaaaattaccaagtggaattttataataaataatatacattaaattttagtctttaacaagtttaattacttcgcgtgattcatataatttatctcatctatcagaataagatttttgttgctgttgtggataaaagaataaaaaaaatgattaaaatataaagataattatctataatgttaaatacaatatcaaatgtttatgttaaacaattcatgaatatgtgtgtcatccacagacgggaacaggatttatcaaagtagagaaaa

SEQ ID NO: 17489 - DNA, 714 bp, Glycine max
  Intron number 1 from transcript Glyma06g45100.1 (locus Gly ma06g45100) derived from phytozome v7.0 (chr-ID Gm06; pos 47901568 to 47902281)
ttcttgtgaattaattttcattcactttcagatttgtgagttcaagtacatttattgtgtttctctacttagatgttcttgtttttcttatgcttttgggtttttttagcctgaaagtttttctttttaaatcatgttgttcctttttctccttctactactagtcttttttttattacttttttttttttatatttattctggggttgttttgaatttagaaagtgaaggttagagagaagcttttcattgaatacaatatatatcttttgtgtgttgcggcgtgcaattggagatcacttgccttgatatttatttgatctaatgaagatctatttttagtgaaaagaagaagacagaatttttgggggtctagacccgtttgaaacatgcaaatgggacatggtctataatgttctggttttgtgttctagttaggttcagtttttaatgcgaagtttctggattaaattatttcaaagtcttcattttgatgctgtcaatgttgggacagatttttagtatattctattccttattcacatgttggggtgtattttttgttcatataataacttattttgctgagcctttttttccccttttacttgttacaatggctagatttttcaagaccctatattaattatttattgccacttgttttcttgtgtttcagctggtttcatcatctattcaaatagcttccagcat

SEQ ID NO: 17490 - DNA, 1018 bp, Glycine max
  Intron number 1 from transcript Glyma12g11690.2 (locus Gly ma12g11690) derived from phytozome v7.0 (chr-ID Gm12; pos 9774089 to 9775106 reverse strand)
aactcctccaactttctgcttctctgcactctcaggttctttttttttttttttacattattaatttttcttgggtgttctattgatcagccgtaggaagattaattctggcaatagtgtctattttaagattctattgtttgttgtcggttgatattcttacttgagagttttgattaacttacattcacaatcagccacatgtgtaagaatgcttgataagttttttttaggggggattgttatattattgcacttgatccattggctattattagtgaagatcattcaatgagtgttcatcatgtatgggattagccttgcaaatggatccacgcaatttaacttcatatccttatacttccaatgttctttgatatgctcatggaatactacttcccccactatcaagagttctgtttgatatagtgccttttttcttagccatcatccaaaaagattatagatcttgagatatagcttaaagccttaaaatattggatcttgctgcaaatcctttcaggtcagatccgatgcaatgttgtttcgggtaaaagggatgatttctagtgatgtgagcttccacatgtacttttccatgtttattgaaagaggggatcatggttatgtgctggagagactggaaaactagttcttaatgttttgaagcatggggaaggttatttctttgttaataaaaatgcaacaagatcaagaaaatcatcatttgttgggagaattctaattaatatcagatgctgacttggttattcattaaaagtttgtttggatgattcattttcttatagtgttagatgacatctatggagagtatagctcaaatggttatggtagatgagtatttcaacttgtgatgagacctccttgatagactgaaatgataagatattgaaatattttgcccttggaaatttaagaaagttttctatttcattaagtctacctgcccttggaaattgcagtggtggtggtgtagtggcatactcagaatcacaat

SEQ ID NO: 17491 - DNA, 1022 bp, Glycine max
  Intron number 1 from transcript Glyma12g04760.1 (locus Gly ma12g04760) derived from phytozome v7.0 (chr-ID Gm12; pos 3139324 to 3140345)
tggtctgatcctcctcccctcggcgccgattctgggtgtgagccaaaaagctttcttttttttcgctccattaccaattcgtttgtttttcttttcggcaaagtagaagatatttgtggtgagtgcggtgtggtggttgggttgggttgggcgttaaataaataatgcttttccggtttcggtcatatgttcgcatcaatgcatggttcctgctagtgatgcttttgtcctgttcctctgtctttttttggcggctatcttgtcttaatctctacatagcagattctttcatttgctttgcgtttttttttttctctccggtgattagttctgttgctcgatccatttgtttcactgcatgtgtgtggttagacacttaaactttttgtttttctgcggcaaattggtggattgtcttcgatatggtgtaatttactgttcaataaaaaaacaaaaaaacagggtatcaatcggattacagaaagagacactgttttctgcagatttagccaccgatttttttgatatattcgaggactttctagatttatctccttcactccctcttatcctctttttgtctcttctttcttcaggttcggacctttattattattattattattattattattattattattattattcgtttcttcggttcatctattatcttttggtttcctgaatccatttctttctacggttatcttatcttattggctaccatcttccctatcttcctcaactgggttctgcgtattgttttaagtttaggcttgtttcattttagtatttgattgctaattttatatttctgtattcatttgtttatttatttatttattactttgtttcattcacgattctagatgagctctaaggttagtgagggggttatttcctttatgttagatttaatccccttcccctttatcatgctaatgtataaatggttgttgccttttttgtcctccatatgtccagattttcttctgtgaatttgaactgaattgaattcg

SEQ ID NO: 17492 - DNA, 628 bp, Glycine max
  Intron number 2 from transcript Glyma12g04760.1 (locus Gly ma12g04760) derived from phytozome v7.0 (chr-ID Gm12; pos 3141143 to 3141770)
ggaaagatacttcttcaaccctttctttgcaggtaattagtgcttgttcagtaatgtttttggtgtgcttcttatattgtcctcttttgccatgtcagttcatcggccgagttaactccatgcctgtttttgcgatgtctgactttgcttttactgcctcaatgcaccttgcaattgagtcatttgaaacttgagattgtttaacagatattaacatttgtgtctgatggatatcggggcctctgagattagcagatgggacatacataatataactatgatacaaatacaactgaataacctttgatctgtgtccgatgttttactttccttcttaaaattattttgttcagttatgtattgttttttatgcatagctagctgtcaagaaaaggataccattaatgtccatttcttcatttaagtttggtccccccttgaccacatccaattagctaacagcaatacataccgagtgttgaaatttctccccagacaagatgtggaaaattgatagccaaaccaagtggaatttgaaaaatatccactgtttttcacaaattatagatcatccttcttaatattaacatgccaatcctgcaggccccagattacctttacgacaaac

SEQ ID NO: 17493 - DNA, 699 bp, Glycine max
  Intron number 2 from transcript Glyma08g30150.2 (locus Gly ma08g30150) derived from phytozome v7.0 (chr-ID Gm08; pos 25157248 to 25157946 reverse strand)
ctggtgctgatatattggttacttcatcataccaggtaaaatttgttctttgaagaattttttggttaatttttcccctttggttggattagtgttttaaactttagagaaatctgtttcttttttccgtttttttcttttatgttggcatgcaagaaactgcccttgagagttgatggtgaggtaatgcaaattaaaggtttatttccaaattctttgtgctctgtgatctatagtttctgttagaagttgctattaaagtttgatgaacaatcatctgagtacatgattggattgcttattcttgcttgctatgtaagctagtgctaggaatctactatttttatacacaatatgaataactgcgatggacctgataaaaatatgtaaatcaaaacgtctgtgagtgtagggaaatttgtgtttaaagaaatggtcctctgagttttataaatgaatatgaatgaactttagagattttggaatgaacaggagtgtttaccttctatgctgtgatgccaaagatgacattttattttagttctctataccaagggtgaaatcttaatgttggagtagaaaagttcaggacctttggcatatacacattattctcatgaaatgcttgcaaattgttttcttatagaaaattctataattataggctacacttcctggattttcatcgaagggtctatc

SEQ ID NO: 17494 - DNA, 737 bp, Glycine max
  Intron number 2 from transcript Glyma11g11600.1 (locus Gly ma11g11600) derived from phytozome v7.0 (chr-ID Gm11; pos 8281751 to 8282487 reverse strand)
ctagccttgtttttgctgctgttcccaccctatttgtaagttgtctatcacattctagcaggttgcatttgcttccttttggttctgtaaagtatattcatacattgagatttcattgtttaaatttctaattaagaagagttctggctgaacaaagtgtcaagtattcatacttgtatcaaataggtttaccaaggaggaatcgttagctgtttagtaagttaaacacctaaaaaggatttggaatctgcacataagacctcttcgactggaaagaatgctattgctaggctcaatcgtattccaatttagatacccctttatgtgacttatgttaaaaagatgtcctacatataatgtggattgatctttggttttaatgttttggtgtaagctcttcctccttctgtttgatttgattcagtgggaatttgacttggcttattcactatgcctagaacacttctttctgcaacaacattgtaattcccaagcccctgggttaaggaggagggttatgttaggccctcggcagccaacgtaaaacttgatgttatacttttcatggattagccgacctcacctagtgggataaggttttgttgttgttgttgttgttatgtttttatcactgtatgttttcatgtctaggcataccatatgtcatccccttgtttgtgttatttggataattgttaaacctaaacaatctctaaatactatgtcttccttaggca

SEQ ID NO: 17495 - DNA, 280 bp, Glycine max
  Intron number 1 from transcript Glyma11g11600.1 (locus Gly ma11g11600) derived from phytozome v7.0 (chr-ID Gm11; pos 8282469 to 8282748 reverse strand)
aagctttctttctcctcgctttcatcgcctccacggtatgatccctttggggctaattttttaggttttcgtctttctaaatcagaattcttataaagaaacagtgttacttcaactaaaactaacgttgttccaaatcttcttagttaatcgttacctcccccccccccccccccctcgaatttctactttcgatttgaattaaaattgttgctcacgagatgttttgattcacgtttctacagacgtcagtggcattcactagccttgtttttgctgc

SEQ ID NO: 17496 - DNA, 674 bp, Glycine max
  Intron number 3 from transcript Glyma12g02920.1 (locus Gly ma12g02920) derived from phytozome v7.0 (chr-ID Gm12; pos 1879401 to 1880074 reverse strand)
ggtgagtttgaggaaaatttaaatcttttggctccacaacattgttttcaccttttgtttttctttaattgaaattaatataacttcaggctttaatgtgggaaaatgtttttgcttatttactgattaattaatcagatatcatccttaatcttgatgtatgatctcaaggcaagttaaaataacctgttaagattcctcagccacttattttttaattttatttatcttccttcctttttaatgctttgatttgcttatgaaagctttctcggaaattattctaagaatctaaaggtttctttatctgttaagttggtgcttctaagggatactgattcacattcaaagtctgctcagaggcttttggacatctataataatctttcatgggttctagatgttatgtagaaaatgtgcatttttccctatgatgattgttcctacttcctacacttttaagtatctcttgtgcattactatattcttagaatgttatcagcaactcaagtgttgaaaaagttggtaaatttctaacttgtatgtgtgctctaaaaagtaacttgcttctaccactttgtgaattactttttctattactagaaaatactcaatttagatgctgcttccaatgttcaggtttcaaggaagaagtgtcaggaagtggaaatagt

SEQ ID NO: 17497 - DNA, 671 bp, Glycine max
  Intron number 1 from transcript Glyma08g28900.1 (locus Gly ma08g28900) derived from phytozome v7.0 (chr-ID Gm08; pos 23239323 to 23239993)
tttccacaattgcaggtaagacaaatcaattgctttcaatcatactcactcactagtgttttgaacttggtttgtttctgttttttcactttttacaccaaatgggtaactagttggttgatattgggcacttgcttgattcgttacctttttaaaagctccactcctcattggttttttctccttctttggagtaccttaatcaaagactcttagtgtgaaacgtgattattgttctgtattgtcatggtgtcatttgctattgtttaataattaagactttgcaaaactaatgtttttgtaactacccattacttgtatagttcacatgctgcaaactactaaacctagattggtgattgagaccccaattaaaaattataataataatttactaaggtttttcttttccaatttaacttatttctagtttttcattgttgtgtatatctctggatacatcaatcttaatagtaataacttaaaaataagtaataacaataaaaagattgcttgattgatgcatttcatatatgggtatggtattgccaataagatgttaattttaacttcattccattcttgtatgtgaaacttcatggtatttagattggatggtgttttttgcaatttcagcaggtacaccgacaaaagtgatatcttcagttttg

SEQ ID NO: 17498 - DNA, 603 bp, Glycine max
  Intron number 1 from transcript Glyma13g39260.1 (locus Gly ma13g39260) derived from phytozome v7.0 (chr-ID Gm13; pos 39918402 to 39919004 reverse strand)
cttcaccttgctattactgcttctcactgtttcaggtttgtcatctaatcttccactaacatgtcaacttctgcatgattccatggaaagtgaataaatttttagaattttagttatttgagttgttgtggagtaatcttattctgttcatgttttcttggcaaatggaatagaccattctgaattgcgatcagaatactattcctttttaattagcttcttggaatgaaagagagacctcaatgtgtgctcaaaggaatcaaatcgtccattagtttagctttcttgttttgtcaattgggtttgagtatctattctccaacctccatataaatataagcttttttgtttgtccaatatctaatctgaattatgggttagccagtgtttcacaattttcttcagagtttgactctctcagagctttctcttttatcttctattagagattgattgataattatggctcttgaacattggaaaattagagattttagatttgttgttatttattcttgtgtattctgatatatcaaactatgttgttgttgttgttgttgttcttcagatttgtttgtgcaaagccgtggccttaattttgga

SEQ ID NO: 17499 - DNA, 1031 bp, Glycine max
  Intron number 3 from transcript Glyma13g17370.1 (locus Gly ma13g17370) derived from phytozome v7.0 (chr-ID Gm13; pos 21135076 to 21136106 reverse strand)
ttcgaagcgcaagatatcatcacaatcaacctctggttagtctttttttttttcctgcaattaaaatttaagtattcaatttctgtcaagtttgagaatatggaccggctacatttgttttgaatcgttttattaaactattgattgctatttccacattgtattgctttttatgatctcaatagatagaaacaaataagtttacttgatggtggatggttagcatgggagacactagtctgatttctagctttgtttgaaagagaatctggatgtaatctgtagttttgtttattttcttatattgccttatgaaaaagtgagtattcgtgtgtttgaagtgtgatgcgaccttttcttttgatgaaataactattaaatatggatgcctttgtgtcgagttttaagattggagatattggatatgataatgacattaaccttttccatgggactctccagtctttagctaaaatggccaacaagtttgtggttagcagaggattgggaaaaaaaaatggaccccgacctgtgcagtgtttttctcttatttctgattctgactattctgaagatgtagataaatttaagattgtattatggttttgtgtacgagcttattggtttcttatattgatcttaataggtaattctagaaaggatttggttgtctctgaattcttggactgaccaaaataagcatttagtaaacccaaacccagaaatctggaagtctttctatcaatttagttactagattggagtgaggagagattatagtaccaagggttttataataattgacattctaagtatttgtcaaattggcaactatgtgggcaaatgtttgtgcaatccaaaatttttagaaattctgtgtacatttagtttgggaatactggtgaaattgttttattaaatttttactttcttatggctttgatttatgcttatctctgtttttattttaattattttgtgtttttttttaaatagtttcaacagcattcttttactaagttatacaaggg

SEQ ID NO: 17500 - DNA, 850 bp, Glycine max
  Intron number 1 from transcript Glyma12g28770.1 (locus Gly ma12g28770) derived from phytozome v7.0 (chr-ID Gm12; pos 32113089 to 32113938 reverse strand)
gaggtacaaggtcccaatagtagcaatgaaaggcctaaaaggaaaatccaaccatccaagcacttgaaagattatatgtgaagaggttctaaaatcggttattggaaggaatagttggcagcataggattggattaacagaatatgtcttatgcatgtttgttagaataatttcgttagtattagaataattttgttagtattgcgagtctattattccatgtctgcaccttgtcagttggtgtcgtttagtacctatgttagatatatattgaacctttgtcttgtatgaaaggcaacaggaaaattatcatactttcttcttctcatctttcttcattggaggcctcccttagtcctcgaattctaaggggttatccctgcattcctaacaatctgtcacgagataaggagattacaacatattcaaatggtaaagtggttagagaaaacatgtcaatttgagagtccttctgttaaggacatgacgtcctgactcttatgtcaagactgacatgtgtatcggagaacctcgtagtttgacacgtgtattctgtggaccctaaacattacaacaacaattaccccatagtaatatatttgttacaatacatagcccttttttactaatttgagagtgtagaaaataaaataaaattcctccgcatgatggatttatgtttaatttacctcaactcaaaatgaatgaatggaaatctagctctattatatttatgtaaagtcacatcaagaacatgtggattgcggactgggacattttagtcaaatatctatctatctctctcgaggttcgagctgcccccaccctcgtttctttctttctcgactgg

SEQ ID NO: 17501 - DNA, 894 bp, Glycine max
  Intron number 1 from transcript Glyma09g28190.1 (locus Gly ma09g28190) derived from phytozome v7.0 (chr-ID Gm09; pos 35195474 to 35196367 reverse strand)
gagagtctgcaaggtatgatgattctgttttttgtggaaagattgaaactttcggtgtctgctgcttgatttgggttcttgtggtccttttttaaagccttttgtgttcatttacatgttgggttgttgtgggttttgctgaaagatttgagcttggttttgtttatttgctgtgccattaagttttgtttttctttgattgaattcttttgtcctttttttcttctccatttaattggttggttctattgcactgcgatattccaaaatagttaacgtgaaggaaaaaaggaattttggttttgaatgcttttgcactatatggttatggacatgtttttagagaaatctcctttagagacgctttatgctattgtaaagaccattttggacaaactgatttcttctggtttaattgcaagaggtaggtgtgaacttttttttgaagagaagaggtaggtgtgaactgtgaacaaggcaatgaaagaggaatagtattattaacctcctgtcccagtttctaaactctatttaatgtttttattttcttgaaatctcatacttttttcctggataaatgaagggtttaattcaatgaatgccattttaaattccagcactttataattgttcatgaaataaatctgaacatattactgttgacaacaaccacatttcactttagtgactgttactgatcttttccctgtattagtatttgttccttagaacagaagttgcaacccaagatttgatttttttttcctaatgttttctttgttttttcataaaaataatgttttgactggtggttcgaatctgggagtgtgctgatttgcattttttactttctatgcagttttgcagctttgttataatcagttaacaggaagc

SEQ ID NO: 17502 - DNA, 885 bp, Glycine max
  Intron number 1 from transcript Glyma09g15650.2 (locus Gly ma09g15650) derived from phytozome v7.0 (chr-ID Gm09; pos 18494861 to 18495745 reverse strand)
cttatctcaaggttcgttcctttccctatgccatcgtaatttaattttttatttatttttcttttaagtaatatattgtgtgaatcaattagaaattatcgcttgtatcacttttaaatagatattgtaattcttaaaaaaagagtagatattgtaaaaaccaacaagtattcagtactgggtttggtccctttaatcaaggtctcggattggagccttgtgatggaaaaaaaatgtatttgagaggttattagcaaagcttttgtatgaaattaccattcataatttttgtatgaaattttacaagatagttgaaaagttattaagcagtgtctttagagcttggattatgtatgaagtttgttgttgtcctgtatatatttgtaatataaaattgtagtattgagcattggtttaatgtaaaagaatttaatttggatggattattgacatgtatgatatgtttgttaatttctataattaaactcatttaagaaaggcagtcatactttaaaaatcatatttgagatgatccttgattagttgacagagtaagaattttacactaactgcatgaaaattggaaattaaactcatttgtgaaagggagtcattcttagcagtaataattaatgaattcaattagagtacacttgtaatatatgaaattttatactgtcatccaatcatagattgtcatgtatgataggatttttgactttttgttttaaaaatcttatttaggggttatttcgaatttcaaattagttaacaatgtaaaaatctttattgtgacagtgtgtgaatattaaattctctctattcgcttttgttgtattacagtattagtaacattctctttttcctctcttcaatattcagaaa

SEQ ID NO: 17503 - DNA, 414 bp, Glycine max
  Intron number 2 from transcript Glyma06g44630.1 (locus Gly ma06g44630) derived from phytozome v7.0 (chr-ID Gm06; pos 47495339 to 47495752)
agattaaacttgcaagtgagtctaatcagtggggtacactaatttaaaaaaaaatacctatgaaatatgaagagaaaataaagttttaactgtatcagtaagtttaatttgtgtgtctatatttttatatatgtaagttttgttctgaatctggttaaaatgaagtttctgtatcttcttttttacctcctattgatcagccttgtatttgttgcaatgtaattgcctatagtgtttgatcctgtaacaaatgtctttcccatgggccaggagaccatgaaagtgaatgctcatttatcatttgattagattacaccctccatgctcatctggctttgttcccccaccccctattagttatagtacactacttgattatgctacttgcattgacagaaaaaagtggacttgttt

SEQ ID NO: 17504 - DNA, 999 bp, Glycine max
  Intron number 1 from transcript Glyma08g03940.2 (locus Gly ma08g03940) derived from phytozome v7.0 (chr-ID Gm08; pos 2797565 to 2798563 reverse strand)
atctcggtgtttcaggttttctatttctttctctcatcatttccatatgttctattctatttcatttttatgtcactgtagctcaccgatctaatgccgattgctactttgatttgtttcatcatttttttctttgagatttccgacgcctcttgattacattcatacatcgaagcaaaacattttaaattccttcacgatgacaatgataagttggtactcgaaatatatatatagattttattataatccttcagaattaaaaatatcgatggcttttgtttttaatgaagaggaatatgtgagattatatgtcctacgtttgatggttaattcttttttaaaagcgaattagaagttgcacgcctttaatttcgtcctctgtagcgttgttgtgaaaaaaaaaatggtggattttgtttttttgttataaatattggaaacgatgataaaacagcaacagcaagctaggcatatgctatattccaagtcaatgtcatgtgtaactgttgccgagaatcgcggctggaatttcgtacttctttgaagtcatgataccctgcaattcttcaggagatgaaacagacactgcttctgcattttggttcttttacttattcatttatttattattattgttattattgaatttgagtataatttttgtatgttatcaattaatttaaaattatcctaattattattttaaaataattattgtaaaaattaataatttttaattatatgtccaaattcataatcaaacgataatatatttgttttttacattttactttattataattgaattgattattattaggcaatagaaataagaaaattcacaaaagattttgcagaaccattctgaggcaagcaattcccatgatgctatgcatatgttcaatcccctctaattcccgtgaatattatatttataaaaaaattgtgaattttaaattgaagtgcctttgtgatgtgtcaggtggggtgacttca

SEQ ID NO: 17505 - DNA, 943 bp, Glycine max
  Intron number 2 from transcript Glyma08g05720.1 (locus Gly ma08g05720) derived from phytozome v7.0 (chr-ID Gm08; pos 4084996 to 4085938)
atacgccagctgaagttgtggcctaccgttactgggtaagtcactttgttagtccattgacttaaaggttgaagtcacattcttgttgtcatacttatgagggtgccaccagaacaaaagtatcatcgattacaaatagagatatacaaggtttgaggcattctgatgcagagatggtgtttcattttcataacttgaatcatgggatcgtagtctaatgagtgtaaagcatttgaccccactcatgtagtttttttctttaaactttcttatctgtgtgaaatgacagcaaatcatgattgttagtagaattttgcgttatcaaatgagaaatgctagcaacacattcttttgaaaactatttactattgactgaaatatattagaaattacaaaaaaattgtgggtttcacttcttatttgacgaatctgatttatgactttgtggttttgaaaaaaatttaaccaataattagtccgcttgaaggagtgttttaaagagtgtgttgttaacattcctcttattcaatatatcaatagtattctgaacagtgctgttaggctggaacttccactatcactcagcatatttgtgcttagaagttgaggttttataatggctaattggctacgactttggtcatatcatatatcatataaattgaaaaaagatgctgaagttgcagctgagatgcattaagtacttgcattttggacatatatgacatgcttgcaggacattaaacgatttataattataaaaattgcttgacatcttggtatgagatttgggaaactaacttcagagttagtgatgctgaatggattaggatgttgatgcatgaaatctaactttgagttacttaactgtaatatgtccttctttatattcctttctgacttatctcatatcgtagatttatccatgcttcacagaattaca

SEQ ID NO: 17506 - DNA, 755 bp, Glycine max
  Intron number 1 from transcript Glyma08g16730.1 (locus Gly ma08g16730) derived from phytozome v7.0 (chr-ID Gm08; pos 12273398 to 12274152 reverse strand)
agtagaagctagcaataaaagagttgcttatctctgtaagttgctgctgtgtgtgtactttgtaaggtgtatgttatttgacaagtttggttagataactgcagaataaattcatgttttataaggatatgcaaaagtcgaagtccaatagaagctaagttttcagaagattctacatgttgctaataatcattgagaaatcaaaacaaatgttgttcaaagctctcattgatgaattgactaatcagattcttggtttgattggaaatgttctcaatcccaagggtaaaatggtcttgtgttttatagatcattgaaaaatttagttttgggggggtaggaaattgttatattccagaccagtctttgcaggaatcatgaatgcttaattttatttgtataatactagaacgcattgtgtttttctcaattctttaaaatttattacatgcatcaaatggtaataattggtaatttctggttctttaacaactcacaaagaatcaaaactacttgatatctgaacttcattgcttctttcctttatactggtaagtcatcaggtaagtgctcttcatatagctcttaatttgtcacatctattaaattattgtgtgtttgcaaccaaaacaaattattttgtgtttactttctttgtatctgaaactactctgttgcaatgatatgctttctgaactttgatgtgaatgttctttatcaaatgctcatgtctttattgtcattaggtcggtttt

SEQ ID NO: 17507 - DNA, 695 bp, Glycine max
  Intron number 3 from transcript Glyma11g06290.3 (locus Gly ma11g06290) derived from phytozome v7.0 (chr-ID Gm11; pos 4466246 to 4466940)
atcaacaagctggacgagccatttttactcacttggtatggttctattttctatgtgtctcttgcttgactcaaatctgtgtgctttatgttctgcattgattcccttctgtacatacatcaacttttgttttctttttatggattttcatttgtccgcttgaaactgaagggaatctgtggtctctagctgcttaattgtggtagtaggtcttgttattatttcaaaattttggatgaacggagttggacaaaaagggtgtcatttttgttgtcacttactgttttaacttccacaaatattgctacattggttcacctttttgtcgcaatagcggttttaacttggcaaaagtcacattctcataattttgattttgatgacattctctatgttgacggtatatcccaagatttataaaaaagcgaagacacatttacctaaaggagccagaagagatgctctgttgtctactagatttccagtatagttgtcgtaatctattaatctttgtgtttttattttcttgctcttaaaattctcgccttgcttcaaaatacagggtaatagcataacaaccagattggattttttttgttcttgttaatgttatcttgttgtgagattttcttttgagaacatggtttaacattgttgtcataaaacaggaacggtattaaacaaaggaagaattc

SEQ ID NO: 17508 - DNA, 825 bp, Glycine max
  Intron number 1 from transcript Glyma08g07460.1 (locus Gly ma08g07460) derived from phytozome v7.0 (chr-ID Gm08; pos 5331329 to 5332153 reverse strand)
gaatttcactcacctgacaaaccacctgggttcaggttctacctcactctcttttccactttttcttgtaactcttaagagcctctccaactagaattacttataattaaaaggttcttaaacttaaaagaaccaattcttatgcagtttcattattggagcgatcttatataagaatagttgcttttatatatataaaaacacttgcttatataagtatcagtttctaacaattcttgagattataagctatgatgcattggtacaatacgcgtatccaatatgatacatatccaatgtagcaatacaatgacacaacaagccaatatgatacatatcccatgtagtgatacgattattttaaatatatatacatatgacatgagtaagatacataattttttttgtcaccattaaattggtgtgagtatctaccaattttactgatgattaatcttcgtcaaacaatctaactgaccacatatatatcttacatatctatcttattaagatatgcttctaagatacatatttagatattttttaaaaatcaaaaacatgatatatatatatatatatatatatatatatatatatatatatatatatatatatatatatatatataattgtaattctaaattcaaattaagaacatatttcaaatctaaatgtgctagctagattatggctggtgaggttaaagggagagaaatttgtgcttagtaagtactaaccattatggataagatattttgtatgctaaatttaacatgttttggtgttgaagagagacatcagcagagtactgtagaagaacctgga

SEQ ID NO: 17509 - DNA, 727 bp, Glycine max
  Intron number 1 from transcript Glyma10g36600.2 (locus Gly ma10g36600) derived from phytozome v7.0 (chr-ID Gm10; pos 44716972 to 44717698)
tctaactaaaatcgcctctacacacaaggattcaggtacatttttttcctgaattttcttaattaataaattgataattaatcaataaaaaatatatatttttaggttttgttgttgctgtttgtgttaatttccgaactggatttgattgtctctttatatggtgaatctgagttgttagatatttgaggggcttgctttttttttttttttttacttattgtaactatatttattatttatttttttaatttgtattagcttttgaatcttagctgacctctttggccttgagagaaattcaatatttctcctacaaattctcattatcactacaaattttcctttgctctgtttggcaggattctgtttcagatttatctgtgttctgatatttcattatttagaaaacaattttgattattttttagcggttttagagagaaaagaagcttaaagataaccaataaatttgaaaagtacatagattgaagctgcataggagggcaactagttgttgtggtaaatatctacaattttctcgagatgcatttggttgacatcttttgaacttgctttctgtcaaaagcaaagcttcttctgatacatgatttggtggatgattaattgttagtgatggattggttactaaggtaaaaaaaaaaaatatctggccatggtgaacagggaatggtgaattatgatattttaattcttgattggtagc

SEQ ID NO: 17510 - DNA, 809 bp, Glycine max
  Intron number 1 from transcript Glyma10g37110.1 (locus Gly ma10g37110) derived from phytozome v7.0 (chr-ID Gm10; pos 45159620 to 45160428 reverse strand)
gtgagtgaatttatgtatggaggctattttgttatgggggtgatgaattaggatgagattttaattagtaatttcatcttcttgttgtgaattggggtttgtgatccttttgaagaggttaaatggggtttgtttggttgattagtgagttgttgctttatcaactgccttggaatggggtgttttgagggggggaaatagggcaggcttgtctgtgtttgaatggaatggactgatgggacgcgaggtattgtggctgacttagtttaaattgctagcactactaggaggtaagtgctaataggatagaattttcaatggtaagatttctattcagcaccttgtgaaaatatcttggattgtttggtacagaatatcaaattgcatctatgttgcaatattggctgaagtaaccagatggaagatggctaaattggcgtttgtctagtgaaatttagcatgtgattaatgttgattgcttggacaataatgattgtgttcccgaaatcatctgtgtggcctgtacaatatttttaaaccatcaatctgggtcaaaatattaatagggaagcgagagatgcttctctaagaaactgaatgttgtaaaacatttctggattttgtatgaaaattttgctatatattgtactacatgatggcttagatcgctgccatttcttatttctccactccttcagttatcatctcatgtaaataattgtttgtctgtataatctttcttggggtttaccatgttactttttcattctgcaggcattgattgctttgaaaaagggtgctcaactact

SEQ ID NO: 17511 - DNA, 1002 bp, Glycine max
  Intron number 2 from transcript Glyma09g19770.1 (locus Gly ma09g19770) derived from phytozome v7.0 (chr-ID Gm09; pos 24576591 to 24577592 reverse strand)
tcaacaaccatctaaggtatgcattggagcgtataactagaaaaaaaggaatatataggctgtttttcttaggtgatctagcacatatgttttggcctatttttgtataaatataagaagcatatcaaaccgatcattatatgcgttctaacattgtaaagtattataccatgcattgtattgttggtattttaaattttctccatcatgtaaactggtttatacaaggagagagggcagcaatttgggcatgtccagttgaatgcctcttgaacacattcacacatgacaacacctaagttagctggtacctgttaagctgtttctgtatggtgaagattttctaccccttaaattagacatgtagtgaaactgctatttccctttgtagataatggattcaagccctaatttaaaagaaaatcagggaagggttgagagaaggaaagatatattcacattttgtactatattctgtatcttttcctgttttctttgactattgagtgtgcttagttaacatatgacatcttttattgtttctgtttacaaatacaaggaatttcagaatcaattgctgcactattatggttgatgaattttttttgccaagtactaaaattatgtgcaagcttgcatttattgctgaacaaatctttagtcttgcatgtattagagtgggttgcactcctatgatcagattgtattgatttttcatttctcaagctcaagggagtttttaactattagatgctataagattttttattgatgtgcaatatcgattgtattcttaagaaatgcagatggaaatttgtttagcatgtagtttacgactgacataattatgtctcccatgtgttactttacttcatataactgttatggggaaaactctgctgcttgtttgacatcaatataattattaatattgttgctttactgaggatggaaatgtgaatttcagaatcacataaaatttattacacgtcagaagcgtgc

SEQ ID NO: 17512 - DNA, 814 bp, Glycine max
  Intron number 1 from transcript Glyma08g47740.1 (locus Gly ma08g47740) derived from phytozome v7.0 (chr-ID Gm08; pos 46534151 to 46534964 reverse strand)
tctgccgacgattttgtttgtcccctttggatcaggttcgttcgtttgttcgatctctcggatcagatctggattccttttcattgctgcgtcttcgatctcctttctttctttctttttatgcattattgttattactattcgcaatctcttcggtggccaatgatttttattttatccttagatttcggatttgatttagctctgctgtatctctttggtttggatcttctggctgttttctgtgattccaatgacagagtttcattcaatgtgttttgattgtttcaagtttgacatgccacaaggtgagatttgagatgtgatgcgggataatgatgctatcctcctgttttttcagaattaagattgatctcagcagaagaagattcatgttggacttatttttggttttcgttgttgatcttatataattgtgtttcaattttgaggttatgatattactttatacatgattcatttcactcgttatattatatatataccgaccgtgctgactgcaaacattattaattgttttttaatgctgtctggcttatttgattaatgtatcaagtttctgactaactggcatcttctgaaaattattgtaaactgctgtattaaattataaatattaatgcaacaacaaacagatgataatgcttgaaaatatcctcttggaattcaagtgaccattatattgttgggaaactctaagcttttctggaaccgatgtgtgaattttttttcaagtgagctttatttgtacattgcagttcgtgcccttgttgttggtttgtagcttttgctg

SEQ ID NO: 17513 - DNA, 854 bp, Glycine max
  Intron number 2 from transcript Glyma11g05030.3 (locus Gly ma11g05030) derived from phytozome v7.0 (chr-ID Gm11; pos 3497145 to 3497998 reverse strand)
ttcaccatccacaacgaaactctcaacgtttggacgtaagcctttgcatttcatcacgtttcgcttcttttttttactgttctattcgccaatttgttgcaacttttgctctctctttctgggggtgaagtttctagtttgaaactcaattcacaggatgatgttatattagtaactctagaatttagggtcttcgtgtataatttacatccttgtttcaaatattattagattaaagaccctttcctgatgtatttgtgctcatcagttaggaaagggactatgactgtaatagcttagttcaattttgactgttttataagaaggaagcttatgcacatggctctcaccattcttagccttgtgaggagaaaggcagtttctgcaatcagaacccatgatcaacggtttacagaccataaataccaatcatgtgtcttttatattcaaataattatttgctcttcgttttgacacgggtatattatgtaaataaatctgtcgaaccttaaaaaaagttttacatcaaggttgtctataagtgaataatattcagttatctctgccttttctttatctgttttgtttttcttgtctgtcccctgtctctcaattgatggagttaaatgcttaaataatatgtctattgccttatagattttgattttatatttatgtttctcattctttgtctcttttgtaaggatataggccactagaatggcatatctgataattggatcaaagaaatacgctttttatttacttcctaattttcttgttctcaatcattaaatgacaaaatgttatttcttgaaggcatttgatcgggttcttcatatttctggcattga

SEQ ID NO: 17514 - DNA, 673 bp, Glycine max
  Intron number 1 from transcript Glyma09g27220.1 (locus Gly ma09g27220) derived from phytozome v7.0 (chr-ID Gm09; pos 33984055 to 33984727)
caactaggaactacaattcagcgagacaaaattatgtcttaaatctactcttttgaactgcgcatgaatatgttgctcccacgaattatatagttactatgtgtctttgttgtattgaatttgtatcgttgtagctattctggttcataacaaaaccagaataatgcaccacctcacccaccacctattcgacaaaaactctcaaccagcagaacccctaaaacgcaaacacaccctaataaccatctgtccaggaatattgaaaacgttattttccttcctctcaaccatttccaggaatattattattatgacatgataaataaattaaaccaatacgtatctttcttttattaaaagttaaaccaatatgtatgaaatgttacttcatacgtacatgaccattacaatttaattaaatactaaagttgtaaaaataaataaataaatactaataaaatgaaaacaagcagcacaagaaaaacaaataattggacataatagaaaaataaaacaagatttaagactttttatttttattgtcattgtcttcgtaacatttttttcttcttacaaatgaaaaaaaaatatcaaaaaccaaaatttggataaataacacattccatcactgactacagtccaatctaaaacctctccttccttctcctcctta

SEQ ID NO: 17515 - DNA, 393 bp, Glycine max
  Intron number 2 from transcript Glyma08g41560.2 (locus Gly ma08g41560) derived from phytozome v7.0 (chr-ID Gm08; pos 41522906 to 41523298 reverse strand)
gccggtttagctgggtttgactctcgaaattacaggtgaataattaaattttctgaaagaaaaaaaaatgagaaagacaatgtattggtttaaattgagttgtggccaaatttgattctaaattgagcatacttctgttgtagtacgtcaccttttatggtagtttacttaagaagtttgatgcataaaaagaacataggcatatgtataatcttctctaagtcattatattttcattccccaattattcttttgtttgtttctctacttcactaccatattcattttagattatgtgtaatcaatcatttatctagttacacatcgtttatttcttactttccctttaatatgttaggactgatcctgaattacttaaggacattgttggag

SEQ ID NO: 17516 - DNA, 619 bp, Glycine max
  Intron number 1 from transcript Glyma12g32100.1 (locus Gly ma12g32100) derived from phytozome v7.0 (chr-ID Gm12; pos 35685649 to 35686267)
aacgaccttctcactgtaagttgatatctgcaattccctctttcgatgccaaaattctattttgatcactgggccttgtagttctgttgctgtactttctgttttttcttccaattttatgccatcttagtgtcagattcatactctgttttgttttttaaaatagaaaaaaaaataagcattaagaggtgaccaatttttatccttgatttgtagtgggttacgaattggactcatcgtgttctgatattttaagccttaaaattcagttcatcgctgaatcgcaattgatactggaaaatttcctaaaggcggtgtcttgctttaactcagatcacagttaatccccagttagatttcaggttgttgttatgtttgtggcataatttttggtgtttggattttttctgatagtgattttggtgtttggattttttctgatagtgattttggtgtttttcttttgttttgtaactgttaatttgaccggggttaagtttagtacaatgttgttatcttataagatcaaagtgtaaggatagtttatttttctgttgtttttcttttttattagtttgaaattctttctcgcaggattcatttgttggtgaggctagta

SEQ ID NO: 17517 - DNA, 626 bp, Glycine max
  Intron number 3 from transcript Glyma07g40340.3 (locus Gly ma07g40340) derived from phytozome v7.0 (chr-ID Gm07; pos 44596045 to 44596670)
ccgtactctcagcagaggtaactacgaaccacatgtcatgtcttcactatgacttatgaatttctaaccccgtgtcccgcttgcttcatttttattgtacaacagattattcttcagcaaccatgttatccacaacttctcaattttaatttctaaatagtactagtaaaactataaatttacattcctcttattagcacatcaagttccatatatggccataagaagctcaccaaagtttctctcttctgaattctcatatgttaagacacaaacaaaaaaagacagaataacttgtgaaatggtactgtttatgcaataggattgtctttagataattgcctttctttattcacctttatagaacataaatttacagttatggtgaagggtacttggtggtccacagcacgtcaatctctaaagggcctcttgttaaattttgattccattaacagactgcagaagattgatccttttcatatgttcacattttctatagcaacggtacagaaagttgaagcgttagagtactaacttagtgaaacctttgttactaacattttttttattgatgtctaaacataaccccccccccccccccccccccctctcttcagatttac

SEQ ID NO: 17518 - DNA, 676 bp, Glycine max
  Intron number 1 from transcript Glyma08g22620.3 (locus Gly ma08g22620) derived from phytozome v7.0 (chr-ID Gm08; pos 17178818 to 17179493)
ttgcacatcggaagggagggctatcaaactctaaggttctttttttttcccttcctttttttatgcattctctctctctctctctttcattttttttaatctctgcgttttgattgaattcttaggattgctctgaatcggtttcgtcttcttcgtttttcttcaaaatcctcgtgacagatctaatctaatcagccttttgggggtgtttcagacattgcatgcatatggggtatgttttatgaatccaaccatagctggaaaaaaaaagttgactcctttttttcccttttaccttcaattagcttttacacttttatgggtatctgtgtttttccctatattgattgataatcatgtgctaggatgatgacccttgaaagttattcctttatctctcttgatttatacctttatctagaaaattgttgaaaaggttttaagataggttatgggttatatgtttttttggttgaatttatcaacctattaccataggatttttaattttctgaattaaagagactgggattgctgtgtctgtaaatcaatttgcattttgtggctattaaattgaagtgtatgaattatggtggctgttttagacaatcatatgattataatgtggtgcataaccgaaattaatgttattgtaacagagcagtggttgtgttgg

SEQ ID NO: 17519 - DNA, 647 bp, Glycine max
  Intron number 2 from transcript Glyma08g22620.3 (locus Gly ma08g22620) derived from phytozome v7.0 (chr-ID Gm08; pos 17179707 to 17180353)
aagcagcaccaaccccactgaatttgtaaatcacggtattcttcattgttttttctgtgcagatattttactaaatttgcatttcatggtttgacatggttcttttgtaattaaactgaaatgaaaaaaaaatggtatggctttgcatagtggtagctgaaagcatttgctgtctatttgtgggttaaacgaactctattttcaacaagacttatggtgtttgtttttgttcatggtgggtttatataatgataaattgatcacattaagctgatgtctctgtaatgtagttacttttacattgccctatttccttcatagggccttaccatttttggtgtactatggcaaaatatatctggtgcatgctgctgctcatttaagaaatgtggtttgagtggcatggtggtttgttttagtctgttttgaattatcaaatgatatgttctttaggtttgactagcactgtccatatacttttcttttgggctggacactcatctatgtaacactttagcctcttttcatactgttgatatgcttttaccctatgaatctttccaatcatatcttaatttacaagtgaatttatgaaaatatttttggttgcaggtgtaattctttggaatcagactcggcaacgttgg

SEQ ID NO: 17520 - DNA, 655 bp, Glycine max
  Intron number 3 from transcript Glyma08g22620.3 (locus Gly ma08g22620) derived from phytozome v7.0 (chr-ID Gm08; pos 17180375 to 17181029)
aaccaaacacaacaattacaagaacctaaattgaggtaacttacattgctggattaatttattagcagcttcctaattttttgtaattgtaatttttgtttgtgtttggtttcttgcaaatccatttttctataagtttttattacttcttcttcattgtgtgagtttcatatacaaattgatattgtgattgtggttatactgttatacatttgctcttggataataacattggaagcagtttgcttttccaccctgccacatgggaaaaaaaactcaatttattctataataaagctcatagctaaataattagtatgccggttgtagccttgaaagaagaaatgtgtgaatgactggagtaagttgaaatccatggtgtgtagctatgtcctagctgctacattataaggagtaccatgtcataaggagcttagtttatctttgaactgtaggcttcgtaagttctggcatgctaagttctttcatgttggtatggtgtatagcaaaactattcaaactgggcaataagatttccatacgtggccaatgaatttcttttctgtcaataattatgaatttgttctttttttcccctatcttgtcagaacttattgtctgtgccttgccaaaaatttttggctttgcagttgga

SEQ ID NO: 17521 - DNA, 747 bp, Glycine max
  Intron number 3 from transcript Glyma13g23300.1 (locus Gly ma13g23300) derived from phytozome v7.0 (chr-ID Gm13; pos 26720308 to 26721054 reverse strand)
cttggtggaggagttgtttcagaatattttgtcaggtaattcattatgctcggtaaagttaagattttgctctcacgctcatatcagttaaaatcttgcaagatcattgtaatcattacggatgagtggatgacatgctacttttgactagcacttgttattagcacacttacaatggttaatcctagacatttctattttgtgaaattcaattctgttgaattgtatatgtttattctttttgagtttaatagtcatgttattaataaatcagaaattatctttaatatcgcttttaatataattattataaaattcaattaacttattattgtatacaataatttgtgattagatgaaagtgtaaaagatctaatacacatgcattatctattcttggtttacttattcattttatctctatatatatacaatctttatgttttagtccttatactcaaaattactcatttttgttcctagacatacaatttttaatctattctagtccttacacatatctttttatcggttttagttcttcaatttaggatgacaaagagtcaaagactaaaaaaaatcaaaaagtatatatgtagagactaaaatgaataatttgaactaaaatgtaaaaatttagtaagtagaaggattttattcttgtcatctataaatgaattgatgtataaataatgttcaattgttttgacaatttgcaggacaaatacgattccaaggacaatttgg
